United States Patent Application Publication US 2014/0004565 A1 - sequence listing, part 63

SEQ ID NO: 1516668 - RNA, 19 nt, Artificial Sequence
  Description of Artificial Sequence: Synthetic oligonucleotide
ggaugcccuucaccaccgu

SEQ ID NO: 1516669 - RNA, 19 nt, Artificial Sequence
  Description of Artificial Sequence: Synthetic oligonucleotide
cgucggccucgaaggugac

SEQ ID NO: 1516670 - RNA, 19 nt, Artificial Sequence
  Description of Artificial Sequence: Synthetic oligonucleotide
cggcgggugcuggcggucc

SEQ ID NO: 1516671 - RNA, 19 nt, Artificial Sequence
  Description of Artificial Sequence: Synthetic oligonucleotide
ccggcgggugcuggcgguc

SEQ ID NO: 1516672 - RNA, 19 nt, Artificial Sequence
  Description of Artificial Sequence: Synthetic oligonucleotide
ccgcccauggcucccgcuu

SEQ ID NO: 1516673 - RNA, 19 nt, Artificial Sequence
  Description of Artificial Sequence: Synthetic oligonucleotide
cgguaacacuggaggauuu

SEQ ID NO: 1516674 - RNA, 19 nt, Artificial Sequence
  Description of Artificial Sequence: Synthetic oligonucleotide
ccaccgugauguucucguu

SEQ ID NO: 1516675 - RNA, 19 nt, Artificial Sequence
  Description of Artificial Sequence: Synthetic oligonucleotide
ccccgcagaguccgagcgu

SEQ ID NO: 1516676 - RNA, 19 nt, Artificial Sequence
  Description of Artificial Sequence: Synthetic oligonucleotide
cccggcgggugcuggcggu

SEQ ID NO: 1516677 - RNA, 19 nt, Artificial Sequence
  Description of Artificial Sequence: Synthetic oligonucleotide
cguucucgucggccucgaa

SEQ ID NO: 1516678 - RNA, 19 nt, Artificial Sequence
  Description of Artificial Sequence: Synthetic oligonucleotide
cccagcccggugcuuucuu

SEQ ID NO: 1516679 - RNA, 19 nt, Artificial Sequence
  Description of Artificial Sequence: Synthetic oligonucleotide
cgacccagcccggugcuuu

SEQ ID NO: 1516680 - RNA, 19 nt, Artificial Sequence
  Description of Artificial Sequence: Synthetic oligonucleotide
ucuacaaacaacuucuacc

SEQ ID NO: 1516681 - RNA, 19 nt, Artificial Sequence
  Description of Artificial Sequence: Synthetic oligonucleotide
ugaucaaauuuaaauaucc

SEQ ID NO: 1516682 - RNA, 19 nt, Artificial Sequence
  Description of Artificial Sequence: Synthetic oligonucleotide
cuugucucuauuuaaacgg

SEQ ID NO: 1516683 - RNA, 19 nt, Artificial Sequence
  Description of Artificial Sequence: Synthetic oligonucleotide
uuucgguuuauuuagaaga

SEQ ID NO: 1516684 - RNA, 19 nt, Artificial Sequence
  Description of Artificial Sequence: Synthetic oligonucleotide
uauuuaaacggucagguaa

SEQ ID NO: 1516685 - RNA, 19 nt, Artificial Sequence
  Description of Artificial Sequence: Synthetic oligonucleotide
auaacugacaguuacagaa

SEQ ID NO: 1516686 - RNA, 19 nt, Artificial Sequence
  Description of Artificial Sequence: Synthetic oligonucleotide
uaacagaugaaacugggug

SEQ ID NO: 1516687 - RNA, 19 nt, Artificial Sequence
  Description of Artificial Sequence: Synthetic oligonucleotide
aauauuuuccgucugugau

SEQ ID NO: 1516688 - RNA, 19 nt, Artificial Sequence
  Description of Artificial Sequence: Synthetic oligonucleotide
ucuuaaaugaguuuauuau

SEQ ID NO: 1516689 - RNA, 19 nt, Artificial Sequence
  Description of Artificial Sequence: Synthetic oligonucleotide
aaaaggucgaguaacaucu

SEQ ID NO: 1516690 - RNA, 19 nt, Artificial Sequence
  Description of Artificial Sequence: Synthetic oligonucleotide
uuuucgaugaccagcagga

SEQ ID NO: 1516691 - RNA, 19 nt, Artificial Sequence
  Description of Artificial Sequence: Synthetic oligonucleotide
aguuauuuugaucagccug

SEQ ID NO: 1516692 - RNA, 19 nt, Artificial Sequence
  Description of Artificial Sequence: Synthetic oligonucleotide
uuacagaauucuuaaauga

SEQ ID NO: 1516693 - RNA, 19 nt, Artificial Sequence
  Description of Artificial Sequence: Synthetic oligonucleotide
ucaacuaucugcaggagga

SEQ ID NO: 1516694 - RNA, 19 nt, Artificial Sequence
  Description of Artificial Sequence: Synthetic oligonucleotide
auuuugaucagccuguaca

SEQ ID NO: 1516695 - RNA, 19 nt, Artificial Sequence
  Description of Artificial Sequence: Synthetic oligonucleotide
uuugaauaauggaagcuug

SEQ ID NO: 1516696 - RNA, 19 nt, Artificial Sequence
  Description of Artificial Sequence: Synthetic oligonucleotide
auaacagggauuucuacag

SEQ ID NO: 1516697 - RNA, 19 nt, Artificial Sequence
  Description of Artificial Sequence: Synthetic oligonucleotide
agauauucggaucugguug

SEQ ID NO: 1516698 - RNA, 19 nt, Artificial Sequence
  Description of Artificial Sequence: Synthetic oligonucleotide
aucaauacgaccuuuucga

SEQ ID NO: 1516699 - RNA, 19 nt, Artificial Sequence
  Description of Artificial Sequence: Synthetic oligonucleotide
uuuuacgggaguuauuuug

SEQ ID NO: 1516700 - RNA, 19 nt, Artificial Sequence
  Description of Artificial Sequence: Synthetic oligonucleotide
aaggucgaguaacaucugc

SEQ ID NO: 1516701 - RNA, 19 nt, Artificial Sequence
  Description of Artificial Sequence: Synthetic oligonucleotide
uuaucugauaccguaaagc

SEQ ID NO: 1516702 - RNA, 19 nt, Artificial Sequence
  Description of Artificial Sequence: Synthetic oligonucleotide
aacacggucuuggugaagc

SEQ ID NO: 1516703 - RNA, 19 nt, Artificial Sequence
  Description of Artificial Sequence: Synthetic oligonucleotide
uccucaaggucccagauca

SEQ ID NO: 1516704 - RNA, 19 nt, Artificial Sequence
  Description of Artificial Sequence: Synthetic oligonucleotide
aguaacaucugccucgcuc

SEQ ID NO: 1516705 - RNA, 19 nt, Artificial Sequence
  Description of Artificial Sequence: Synthetic oligonucleotide
ucgaguaacaucugccucg

SEQ ID NO: 1516706 - RNA, 19 nt, Artificial Sequence
  Description of Artificial Sequence: Synthetic oligonucleotide
uuuugaucagccuguacag

SEQ ID NO: 1516707 - RNA, 19 nt, Artificial Sequence
  Description of Artificial Sequence: Synthetic oligonucleotide
aacagaugaaacugggugu

SEQ ID NO: 1516708 - RNA, 19 nt, Artificial Sequence
  Description of Artificial Sequence: Synthetic oligonucleotide
aguuacagaauucuuaaau

SEQ ID NO: 1516709 - RNA, 19 nt, Artificial Sequence
  Description of Artificial Sequence: Synthetic oligonucleotide
ucaucaaagccuuucacgu

SEQ ID NO: 1516710 - RNA, 19 nt, Artificial Sequence
  Description of Artificial Sequence: Synthetic oligonucleotide
uaaucuaauggcacaaacu

SEQ ID NO: 1516711 - RNA, 19 nt, Artificial Sequence
  Description of Artificial Sequence: Synthetic oligonucleotide
aauggcacaaacucaggga

SEQ ID NO: 1516712 - RNA, 19 nt, Artificial Sequence
  Description of Artificial Sequence: Synthetic oligonucleotide
uuucacgucguuaucuucc

SEQ ID NO: 1516713 - RNA, 19 nt, Artificial Sequence
  Description of Artificial Sequence: Synthetic oligonucleotide
aacagcacggaucugcugu

SEQ ID NO: 1516714 - RNA, 19 nt, Artificial Sequence
  Description of Artificial Sequence: Synthetic oligonucleotide
aguaaaagucaaccgggcg

SEQ ID NO: 1516715 - RNA, 19 nt, Artificial Sequence
  Description of Artificial Sequence: Synthetic oligonucleotide
guaaaagucaaccgggcgc

SEQ ID NO: 1516716 - RNA, 19 nt, Artificial Sequence
  Description of Artificial Sequence: Synthetic oligonucleotide
uaugguguuuucauauugc

SEQ ID NO: 1516717 - RNA, 19 nt, Artificial Sequence
  Description of Artificial Sequence: Synthetic oligonucleotide
ugguguuuucauauugccg

SEQ ID NO: 1516718 - RNA, 19 nt, Artificial Sequence
  Description of Artificial Sequence: Synthetic oligonucleotide
uaaacggucagguaacaga

SEQ ID NO: 1516719 - RNA, 19 nt, Artificial Sequence
  Description of Artificial Sequence: Synthetic oligonucleotide
gagaaugcguaccuucucg

SEQ ID NO: 1516720 - RNA, 19 nt, Artificial Sequence
  Description of Artificial Sequence: Synthetic oligonucleotide
uuuacgggaguuauuuuga

SEQ ID NO: 1516721 - RNA, 19 nt, Artificial Sequence
  Description of Artificial Sequence: Synthetic oligonucleotide
auauuuuccgucugugauc

SEQ ID NO: 1516722 - RNA, 19 nt, Artificial Sequence
  Description of Artificial Sequence: Synthetic oligonucleotide
caucaauacgaccuuuucg

SEQ ID NO: 1516723 - RNA, 19 nt, Artificial Sequence
  Description of Artificial Sequence: Synthetic oligonucleotide
uauuccucugaucaaauuu

SEQ ID NO: 1516724 - RNA, 19 nt, Artificial Sequence
  Description of Artificial Sequence: Synthetic oligonucleotide
accguaaagcaucaauacg

SEQ ID NO: 1516725 - RNA, 19 nt, Artificial Sequence
  Description of Artificial Sequence: Synthetic oligonucleotide
uauuuaacugguagcagaa

SEQ ID NO: 1516726 - RNA, 19 nt, Artificial Sequence
  Description of Artificial Sequence: Synthetic oligonucleotide
guugagugggaccagcagg

SEQ ID NO: 1516727 - RNA, 19 nt, Artificial Sequence
  Description of Artificial Sequence: Synthetic oligonucleotide
auaugguguuuucauauug

SEQ ID NO: 1516728 - RNA, 19 nt, Artificial Sequence
  Description of Artificial Sequence: Synthetic oligonucleotide
uggggauacaccauguacu

SEQ ID NO: 1516729 - RNA, 19 nt, Artificial Sequence
  Description of Artificial Sequence: Synthetic oligonucleotide
ugccguuugaauaauggaa

SEQ ID NO: 1516730 - RNA, 19 nt, Artificial Sequence
  Description of Artificial Sequence: Synthetic oligonucleotide
auuuaaacggucagguaac

SEQ ID NO: 1516731 - RNA, 19 nt, Artificial Sequence
  Description of Artificial Sequence: Synthetic oligonucleotide
agaggcuuacucugugucc

SEQ ID NO: 1516732 - RNA, 19 nt, Artificial Sequence
  Description of Artificial Sequence: Synthetic oligonucleotide
agcuugucucuauuuaaac

SEQ ID NO: 1516733 - RNA, 19 nt, Artificial Sequence
  Description of Artificial Sequence: Synthetic oligonucleotide
gucguuaucuuccacaguc

SEQ ID NO: 1516734 - RNA, 19 nt, Artificial Sequence
  Description of Artificial Sequence: Synthetic oligonucleotide
aagggcauuagcucuacaa

SEQ ID NO: 1516735 - RNA, 19 nt, Artificial Sequence
  Description of Artificial Sequence: Synthetic oligonucleotide
uugagcuccaguccaagca

SEQ ID NO: 1516736 - RNA, 19 nt, Artificial Sequence
  Description of Artificial Sequence: Synthetic oligonucleotide
guaacaucugccucgcucc

SEQ ID NO: 1516737 - RNA, 19 nt, Artificial Sequence
  Description of Artificial Sequence: Synthetic oligonucleotide
uuuuccgucugugaucacg

SEQ ID NO: 1516738 - RNA, 19 nt, Artificial Sequence
  Description of Artificial Sequence: Synthetic oligonucleotide
uaccguaaagcaucaauac

SEQ ID NO: 1516739 - RNA, 19 nt, Artificial Sequence
  Description of Artificial Sequence: Synthetic oligonucleotide
cuuucgguuuauuuagaag

SEQ ID NO: 1516740 - RNA, 19 nt, Artificial Sequence
  Description of Artificial Sequence: Synthetic oligonucleotide
agccaguaaaagucaaccg

SEQ ID NO: 1516741 - RNA, 19 nt, Artificial Sequence
  Description of Artificial Sequence: Synthetic oligonucleotide
aauauccucaaggucccag

SEQ ID NO: 1516742 - RNA, 19 nt, Artificial Sequence
  Description of Artificial Sequence: Synthetic oligonucleotide
aagucaaccgggcgcuuac

SEQ ID NO: 1516743 - RNA, 19 nt, Artificial Sequence
  Description of Artificial Sequence: Synthetic oligonucleotide
uugaauaauggaagcuugu

SEQ ID NO: 1516744 - RNA, 19 nt, Artificial Sequence
  Description of Artificial Sequence: Synthetic oligonucleotide
ugagauauucggaucuggu

SEQ ID NO: 1516745 - RNA, 19 nt, Artificial Sequence
  Description of Artificial Sequence: Synthetic oligonucleotide
ugagacgagggccuggcgc

SEQ ID NO: 1516746 - RNA, 19 nt, Artificial Sequence
  Description of Artificial Sequence: Synthetic oligonucleotide
uaacagggauuucuacagg

SEQ ID NO: 1516747 - RNA, 19 nt, Artificial Sequence
  Description of Artificial Sequence: Synthetic oligonucleotide
gucaacuaucugcaggagg

SEQ ID NO: 1516748 - RNA, 19 nt, Artificial Sequence
  Description of Artificial Sequence: Synthetic oligonucleotide
cugaucaaauuuaaauauc

SEQ ID NO: 1516749 - RNA, 19 nt, Artificial Sequence
  Description of Artificial Sequence: Synthetic oligonucleotide
gaugaacacggucuuggug

SEQ ID NO: 1516750 - RNA, 19 nt, Artificial Sequence
  Description of Artificial Sequence: Synthetic oligonucleotide
ucuccugacuucccaacag

SEQ ID NO: 1516751 - RNA, 19 nt, Artificial Sequence
  Description of Artificial Sequence: Synthetic oligonucleotide
caaaaggucgaguaacauc

SEQ ID NO: 1516752 - RNA, 19 nt, Artificial Sequence
  Description of Artificial Sequence: Synthetic oligonucleotide
uauuauuccucugaucaaa

SEQ ID NO: 1516753 - RNA, 19 nt, Artificial Sequence
  Description of Artificial Sequence: Synthetic oligonucleotide
uguggccauaacagcacgg

SEQ ID NO: 1516754 - RNA, 19 nt, Artificial Sequence
  Description of Artificial Sequence: Synthetic oligonucleotide
uuucauauugccguuugaa

SEQ ID NO: 1516755 - RNA, 19 nt, Artificial Sequence
  Description of Artificial Sequence: Synthetic oligonucleotide
uucggaucugguugugugg

SEQ ID NO: 1516756 - RNA, 19 nt, Artificial Sequence
  Description of Artificial Sequence: Synthetic oligonucleotide
uguuuuggagccaguaaau

SEQ ID NO: 1516757 - RNA, 19 nt, Artificial Sequence
  Description of Artificial Sequence: Synthetic oligonucleotide
uucauauugccguuugaau

SEQ ID NO: 1516758 - RNA, 19 nt, Artificial Sequence
  Description of Artificial Sequence: Synthetic oligonucleotide
gaucgaagagaugcgggcg

SEQ ID NO: 1516759 - RNA, 19 nt, Artificial Sequence
  Description of Artificial Sequence: Synthetic oligonucleotide
uuacaaucgagggcggcgg

SEQ ID NO: 1516760 - RNA, 19 nt, Artificial Sequence
  Description of Artificial Sequence: Synthetic oligonucleotide
uaaaagucaaccgggcgcu

SEQ ID NO: 1516761 - RNA, 19 nt, Artificial Sequence
  Description of Artificial Sequence: Synthetic oligonucleotide
cuuacaaucgagggcggcg

SEQ ID NO: 1516762 - RNA, 19 nt, Artificial Sequence
  Description of Artificial Sequence: Synthetic oligonucleotide
uuguuuuaucagcuugucu

SEQ ID NO: 1516763 - RNA, 19 nt, Artificial Sequence
  Description of Artificial Sequence: Synthetic oligonucleotide
uugucucuauuuaaacggu

SEQ ID NO: 1516764 - RNA, 19 nt, Artificial Sequence
  Description of Artificial Sequence: Synthetic oligonucleotide
aaagcaucaauacgaccuu

SEQ ID NO: 1516765 - RNA, 19 nt, Artificial Sequence
  Description of Artificial Sequence: Synthetic oligonucleotide
gaauaauggaagcuugucu

SEQ ID NO: 1516766 - RNA, 19 nt, Artificial Sequence
  Description of Artificial Sequence: Synthetic oligonucleotide
ucauaacagggauuucuac

SEQ ID NO: 1516767 - RNA, 19 nt, Artificial Sequence
  Description of Artificial Sequence: Synthetic oligonucleotide
aauucuuaaaugaguuuau

SEQ ID NO: 1516768 - RNA, 19 nt, Artificial Sequence
  Description of Artificial Sequence: Synthetic oligonucleotide
acgucguuaucuuccacag

SEQ ID NO: 1516769 - RNA, 19 nt, Artificial Sequence
  Description of Artificial Sequence: Synthetic oligonucleotide
aaacaacuucuaccugcuc

SEQ ID NO: 1516770 - RNA, 19 nt, Artificial Sequence
  Description of Artificial Sequence: Synthetic oligonucleotide
cauauugccguuugaauaa

SEQ ID NO: 1516771 - RNA, 19 nt, Artificial Sequence
  Description of Artificial Sequence: Synthetic oligonucleotide
aggucgaguaacaucugcc

SEQ ID NO: 1516772 - RNA, 19 nt, Artificial Sequence
  Description of Artificial Sequence: Synthetic oligonucleotide
acagaauucuuaaaugagu

SEQ ID NO: 1516773 - RNA, 19 nt, Artificial Sequence
  Description of Artificial Sequence: Synthetic oligonucleotide
cuuggugagaaugcguacc

SEQ ID NO: 1516774 - RNA, 19 nt, Artificial Sequence
  Description of Artificial Sequence: Synthetic oligonucleotide
uugcaagggcauuagcucu

SEQ ID NO: 1516775 - RNA, 19 nt, Artificial Sequence
  Description of Artificial Sequence: Synthetic oligonucleotide
cacaaacucagggaguugc

SEQ ID NO: 1516776 - RNA, 19 nt, Artificial Sequence
  Description of Artificial Sequence: Synthetic oligonucleotide
uuaaacggucagguaacag

SEQ ID NO: 1516777 - RNA, 19 nt, Artificial Sequence
  Description of Artificial Sequence: Synthetic oligonucleotide
ucguacagaggcuuacucu

SEQ ID NO: 1516778 - RNA, 19 nt, Artificial Sequence
  Description of Artificial Sequence: Synthetic oligonucleotide
uuggugagaaugcguaccu

SEQ ID NO: 1516779 - RNA, 19 nt, Artificial Sequence
  Description of Artificial Sequence: Synthetic oligonucleotide
uccgucugugaucacgccc

SEQ ID NO: 1516780 - RNA, 19 nt, Artificial Sequence
  Description of Artificial Sequence: Synthetic oligonucleotide
ucggcguucagggcgaagg

SEQ ID NO: 1516781 - RNA, 19 nt, Artificial Sequence
  Description of Artificial Sequence: Synthetic oligonucleotide
caccagucgguccaggagg

SEQ ID NO: 1516782 - RNA, 19 nt, Artificial Sequence
  Description of Artificial Sequence: Synthetic oligonucleotide
aauaaucuaauggcacaaa

SEQ ID NO: 1516783 - RNA, 19 nt, Artificial Sequence
  Description of Artificial Sequence: Synthetic oligonucleotide
gaggcuuacucuguguccc

SEQ ID NO: 1516784 - RNA, 19 nt, Artificial Sequence
  Description of Artificial Sequence: Synthetic oligonucleotide
uauugccguuugaauaaug

SEQ ID NO: 1516785 - RNA, 19 nt, Artificial Sequence
  Description of Artificial Sequence: Synthetic oligonucleotide
cagcgaucggcguucaggg

SEQ ID NO: 1516786 - RNA, 19 nt, Artificial Sequence
  Description of Artificial Sequence: Synthetic oligonucleotide
ugguacauagcuugagcuc

SEQ ID NO: 1516787 - RNA, 19 nt, Artificial Sequence
  Description of Artificial Sequence: Synthetic oligonucleotide
gguguuuucauauugccgu

SEQ ID NO: 1516788 - RNA, 19 nt, Artificial Sequence
  Description of Artificial Sequence: Synthetic oligonucleotide
ucagugccaaaguauuuaa

SEQ ID NO: 1516789 - RNA, 19 nt, Artificial Sequence
  Description of Artificial Sequence: Synthetic oligonucleotide
gagacgagggccuggcgcc

SEQ ID NO: 1516790 - RNA, 19 nt, Artificial Sequence
  Description of Artificial Sequence: Synthetic oligonucleotide
aaucgagggcggcgguggc

SEQ ID NO: 1516791 - RNA, 19 nt, Artificial Sequence
  Description of Artificial Sequence: Synthetic oligonucleotide
caaccgggcgcuuacaauc

SEQ ID NO: 1516792 - RNA, 19 nt, Artificial Sequence
  Description of Artificial Sequence: Synthetic oligonucleotide
cuucuaccugcucaguuug

SEQ ID NO: 1516793 - RNA, 19 nt, Artificial Sequence
  Description of Artificial Sequence: Synthetic oligonucleotide
cuacaggaauggaauaauc

SEQ ID NO: 1516794 - RNA, 19 nt, Artificial Sequence
  Description of Artificial Sequence: Synthetic oligonucleotide
gaauaaucuaauggcacaa

SEQ ID NO: 1516795 - RNA, 19 nt, Artificial Sequence
  Description of Artificial Sequence: Synthetic oligonucleotide
cugucggcggucauggaag

SEQ ID NO: 1516796 - RNA, 19 nt, Artificial Sequence
  Description of Artificial Sequence: Synthetic oligonucleotide
uucuccugacuucccaaca

SEQ ID NO: 1516797 - RNA, 19 nt, Artificial Sequence
  Description of Artificial Sequence: Synthetic oligonucleotide
uuuaucagcuugucucuau

SEQ ID NO: 1516798 - RNA, 19 nt, Artificial Sequence
  Description of Artificial Sequence: Synthetic oligonucleotide
gauaccguaaagcaucaau

SEQ ID NO: 1516799 - RNA, 19 nt, Artificial Sequence
  Description of Artificial Sequence: Synthetic oligonucleotide
ucaccacgaagccaguaaa

SEQ ID NO: 1516800 - RNA, 19 nt, Artificial Sequence
  Description of Artificial Sequence: Synthetic oligonucleotide
uucuaccugcucaguuugg

SEQ ID NO: 1516801 - RNA, 19 nt, Artificial Sequence
  Description of Artificial Sequence: Synthetic oligonucleotide
cugguugugugguuuauca

SEQ ID NO: 1516802 - RNA, 19 nt, Artificial Sequence
  Description of Artificial Sequence: Synthetic oligonucleotide
uuagcucuacaaacaacuu

SEQ ID NO: 1516803 - RNA, 19 nt, Artificial Sequence
  Description of Artificial Sequence: Synthetic oligonucleotide
gcgcuuacaaucgagggcg

SEQ ID NO: 1516804 - RNA, 19 nt, Artificial Sequence
  Description of Artificial Sequence: Synthetic oligonucleotide
agggcauuagcucuacaaa

SEQ ID NO: 1516805 - RNA, 19 nt, Artificial Sequence
  Description of Artificial Sequence: Synthetic oligonucleotide
gagacaaaaggucgaguaa

SEQ ID NO: 1516806 - RNA, 19 nt, Artificial Sequence
  Description of Artificial Sequence: Synthetic oligonucleotide
ggaauggaauaaucuaaug

SEQ ID NO: 1516807 - RNA, 19 nt, Artificial Sequence
  Description of Artificial Sequence: Synthetic oligonucleotide
gggucgcucaccuugcugg

SEQ ID NO: 1516808 - RNA, 19 nt, Artificial Sequence
  Description of Artificial Sequence: Synthetic oligonucleotide
uucuuucgguuuauuuaga

SEQ ID NO: 1516809 - RNA, 19 nt, Artificial Sequence
  Description of Artificial Sequence: Synthetic oligonucleotide
ugagaaugcguaccuucuc

SEQ ID NO: 1516810 - RNA, 19 nt, Artificial Sequence
  Description of Artificial Sequence: Synthetic oligonucleotide
ucguuaucuuccacagucu

SEQ ID NO: 1516811 - RNA, 19 nt, Artificial Sequence
  Description of Artificial Sequence: Synthetic oligonucleotide
aggcccgccaggucgagcg

SEQ ID NO: 1516812 - RNA, 19 nt, Artificial Sequence
  Description of Artificial Sequence: Synthetic oligonucleotide
uuccucugaucaaauuuaa

SEQ ID NO: 1516813 - RNA, 19 nt, Artificial Sequence
  Description of Artificial Sequence: Synthetic oligonucleotide
acgaucggcggguaccgcg

SEQ ID NO: 1516814 - RNA, 19 nt, Artificial Sequence
  Description of Artificial Sequence: Synthetic oligonucleotide
ucuuggugagaaugcguac

SEQ ID NO: 1516815 - RNA, 19 nt, Artificial Sequence
  Description of Artificial Sequence: Synthetic oligonucleotide
cuugagcuccaguccaagc

SEQ ID NO: 1516816 - RNA, 19 nt, Artificial Sequence
  Description of Artificial Sequence: Synthetic oligonucleotide
uuuaaacggucagguaaca

SEQ ID NO: 1516817 - RNA, 19 nt, Artificial Sequence
  Description of Artificial Sequence: Synthetic oligonucleotide
ugacuucccaacagcugug

SEQ ID NO: 1516818 - RNA, 19 nt, Artificial Sequence
  Description of Artificial Sequence: Synthetic oligonucleotide
uaauggaagcuugucuggu

SEQ ID NO: 1516819 - RNA, 19 nt, Artificial Sequence
  Description of Artificial Sequence: Synthetic oligonucleotide
guuauuuugaucagccugu

SEQ ID NO: 1516820 - RNA, 19 nt, Artificial Sequence
  Description of Artificial Sequence: Synthetic oligonucleotide
aaccgggcgcuuacaaucg

SEQ ID NO: 1516821 - RNA, 19 nt, Artificial Sequence
  Description of Artificial Sequence: Synthetic oligonucleotide
gccguuugaauaauggaag

SEQ ID NO: 1516822 - RNA, 19 nt, Artificial Sequence
  Description of Artificial Sequence: Synthetic oligonucleotide
gggcauuagcucuacaaac

SEQ ID NO: 1516823 - RNA, 19 nt, Artificial Sequence
  Description of Artificial Sequence: Synthetic oligonucleotide
auaccguaaagcaucaaua

SEQ ID NO: 1516824 - RNA, 19 nt, Artificial Sequence
  Description of Artificial Sequence: Synthetic oligonucleotide
uccucugaucaaauuuaaa

SEQ ID NO: 1516825 - RNA, 19 nt, Artificial Sequence
  Description of Artificial Sequence: Synthetic oligonucleotide
aggcccgagaugaacacgg

SEQ ID NO: 1516826 - RNA, 19 nt, Artificial Sequence
  Description of Artificial Sequence: Synthetic oligonucleotide
uacgggaguuauuuugauc

SEQ ID NO: 1516827 - RNA, 19 nt, Artificial Sequence
  Description of Artificial Sequence: Synthetic oligonucleotide
gaucaagggcuuucuccug

SEQ ID NO: 1516828 - RNA, 19 nt, Artificial Sequence
  Description of Artificial Sequence: Synthetic oligonucleotide
gcgaucggcguucagggcg

SEQ ID NO: 1516829 - RNA, 19 nt, Artificial Sequence
  Description of Artificial Sequence: Synthetic oligonucleotide
ggcgugaagggacaguccc

SEQ ID NO: 1516830 - RNA, 19 nt, Artificial Sequence
  Description of Artificial Sequence: Synthetic oligonucleotide
agcgaucggcguucagggc

SEQ ID NO: 1516831 - RNA, 19 nt, Artificial Sequence
  Description of Artificial Sequence: Synthetic oligonucleotide
auuucauaacagggauuuc

SEQ ID NO: 1516832 - RNA, 19 nt, Artificial Sequence
  Description of Artificial Sequence: Synthetic oligonucleotide
gacggggccgcgugcaccg

SEQ ID NO: 1516833 - RNA, 19 nt, Artificial Sequence
  Description of Artificial Sequence: Synthetic oligonucleotide
ggauacaccauguacuucu

SEQ ID NO: 1516834 - RNA, 19 nt, Artificial Sequence
  Description of Artificial Sequence: Synthetic oligonucleotide
ucuaccugcucaguuuggu

SEQ ID NO: 1516835 - RNA, 19 nt, Artificial Sequence
  Description of Artificial Sequence: Synthetic oligonucleotide
auggaagcuugucugguuu

SEQ ID NO: 1516836 - RNA, 19 nt, Artificial Sequence
  Description of Artificial Sequence: Synthetic oligonucleotide
aggaauggaauaaucuaau

SEQ ID NO: 1516837 - RNA, 19 nt, Artificial Sequence
  Description of Artificial Sequence: Synthetic oligonucleotide
aauccuugguacauagcuu

SEQ ID NO: 1516838 - RNA, 19 nt, Artificial Sequence
  Description of Artificial Sequence: Synthetic oligonucleotide
acagucagugccaaaguau

SEQ ID NO: 1516839 - RNA, 19 nt, Artificial Sequence
  Description of Artificial Sequence: Synthetic oligonucleotide
guguggccauaacagcacg

SEQ ID NO: 1516840 - RNA, 19 nt, Artificial Sequence
  Description of Artificial Sequence: Synthetic oligonucleotide
cucguacagaggcuuacuc

SEQ ID NO: 1516841 - RNA, 19 nt, Artificial Sequence
  Description of Artificial Sequence: Synthetic oligonucleotide
ugaaacuggguguggccau

SEQ ID NO: 1516842 - RNA, 19 nt, Artificial Sequence
  Description of Artificial Sequence: Synthetic oligonucleotide
ucguccacggacggggccg

SEQ ID NO: 1516843 - RNA, 19 nt, Artificial Sequence
  Description of Artificial Sequence: Synthetic oligonucleotide
gucgaguaacaucugccuc

SEQ ID NO: 1516844 - RNA, 19 nt, Artificial Sequence
  Description of Artificial Sequence: Synthetic oligonucleotide
caaucgagggcggcggugg

SEQ ID NO: 1516845 - RNA, 19 nt, Artificial Sequence
  Description of Artificial Sequence: Synthetic oligonucleotide
acaucugccucgcuccaga

SEQ ID NO: 1516846 - RNA, 19 nt, Artificial Sequence
  Description of Artificial Sequence: Synthetic oligonucleotide
cagugccaaaguauuuaac

SEQ ID NO: 1516847 - RNA, 19 nt, Artificial Sequence
  Description of Artificial Sequence: Synthetic oligonucleotide
uuacgggaguuauuuugau

SEQ ID NO: 1516848 - RNA, 19 nt, Artificial Sequence
  Description of Artificial Sequence: Synthetic oligonucleotide
uacgaccuuuucgaugacc

SEQ ID NO: 1516849 - RNA, 19 nt, Artificial Sequence
  Description of Artificial Sequence: Synthetic oligonucleotide
ggcgcuuacaaucgagggc

SEQ ID NO: 1516850 - RNA, 19 nt, Artificial Sequence
  Description of Artificial Sequence: Synthetic oligonucleotide
gggcgcuuacaaucgaggg

SEQ ID NO: 1516851 - RNA, 19 nt, Artificial Sequence
  Description of Artificial Sequence: Synthetic oligonucleotide
agucgcacacagcggcgcg

SEQ ID NO: 1516852 - RNA, 19 nt, Artificial Sequence
  Description of Artificial Sequence: Synthetic oligonucleotide
ucuggggauacaccaugua

SEQ ID NO: 1516853 - RNA, 19 nt, Artificial Sequence
  Description of Artificial Sequence: Synthetic oligonucleotide
ugaacacggucuuggugaa

SEQ ID NO: 1516854 - RNA, 19 nt, Artificial Sequence
  Description of Artificial Sequence: Synthetic oligonucleotide
augaccagcaggaaugcau

SEQ ID NO: 1516855 - RNA, 19 nt, Artificial Sequence
  Description of Artificial Sequence: Synthetic oligonucleotide
gcgccgaucgaagagaugc

SEQ ID NO: 1516856 - RNA, 19 nt, Artificial Sequence
  Description of Artificial Sequence: Synthetic oligonucleotide
uaacagcacggaucugcug

SEQ ID NO: 1516857 - RNA, 19 nt, Artificial Sequence
  Description of Artificial Sequence: Synthetic oligonucleotide
aaagacuugcaagggcauu

SEQ ID NO: 1516858 - RNA, 19 nt, Artificial Sequence
  Description of Artificial Sequence: Synthetic oligonucleotide
ucaaccgggcgcuuacaau

SEQ ID NO: 1516859 - RNA, 19 nt, Artificial Sequence
  Description of Artificial Sequence: Synthetic oligonucleotide
aaaggucgaguaacaucug

SEQ ID NO: 1516860 - RNA, 19 nt, Artificial Sequence
  Description of Artificial Sequence: Synthetic oligonucleotide
ccguuugaauaauggaagc

SEQ ID NO: 1516861 - RNA, 19 nt, Artificial Sequence
  Description of Artificial Sequence: Synthetic oligonucleotide
gugaucacgcccugggaga

SEQ ID NO: 1516862 - RNA, 19 nt, Artificial Sequence
  Description of Artificial Sequence: Synthetic oligonucleotide
gguugagugggaccagcag

SEQ ID NO: 1516863 - RNA, 19 nt, Artificial Sequence
  Description of Artificial Sequence: Synthetic oligonucleotide
aucuuggugagaaugcgua

SEQ ID NO: 1516864 - RNA, 19 nt, Artificial Sequence
  Description of Artificial Sequence: Synthetic oligonucleotide
guuugaauaauggaagcuu

SEQ ID NO: 1516865 - RNA, 19 nt, Artificial Sequence
  Description of Artificial Sequence: Synthetic oligonucleotide
agccaguaaauaugguguu

SEQ ID NO: 1516866 - RNA, 19 nt, Artificial Sequence
  Description of Artificial Sequence: Synthetic oligonucleotide
uguuuucauauugccguuu

SEQ ID NO: 1516867 - RNA, 19 nt, Artificial Sequence
  Description of Artificial Sequence: Synthetic oligonucleotide
ucgagcgagggccgggacu

SEQ ID NO: 1516868 - RNA, 19 nt, Artificial Sequence
  Description of Artificial Sequence: Synthetic oligonucleotide
gagauauucggaucugguu

SEQ ID NO: 1516869 - RNA, 19 nt, Artificial Sequence
  Description of Artificial Sequence: Synthetic oligonucleotide
aacggucagguaacagaug

SEQ ID NO: 1516870 - RNA, 19 nt, Artificial Sequence
  Description of Artificial Sequence: Synthetic oligonucleotide
ugucggcggucauggaagc

SEQ ID NO: 1516871 - RNA, 19 nt, Artificial Sequence
  Description of Artificial Sequence: Synthetic oligonucleotide
acgaccuccgggucgcuca

SEQ ID NO: 1516872 - RNA, 19 nt, Artificial Sequence
  Description of Artificial Sequence: Synthetic oligonucleotide
aucugauaccguaaagcau

SEQ ID NO: 1516873 - RNA, 19 nt, Artificial Sequence
  Description of Artificial Sequence: Synthetic oligonucleotide
ggcauuagcucuacaaaca

SEQ ID NO: 1516874 - RNA, 19 nt, Artificial Sequence
  Description of Artificial Sequence: Synthetic oligonucleotide
auacgaccuuuucgaugac

SEQ ID NO: 1516875 - RNA, 19 nt, Artificial Sequence
  Description of Artificial Sequence: Synthetic oligonucleotide
ggucuggggauacaccaug

SEQ ID NO: 1516876 - RNA, 19 nt, Artificial Sequence
  Description of Artificial Sequence: Synthetic oligonucleotide
cuauuuaaacggucaggua

SEQ ID NO: 1516877 - RNA, 19 nt, Artificial Sequence
  Description of Artificial Sequence: Synthetic oligonucleotide
gaugcgggcgcaggcggcg

SEQ ID NO: 1516878 - RNA, 19 nt, Artificial Sequence
  Description of Artificial Sequence: Synthetic oligonucleotide
cugggagacaaaaggucga

SEQ ID NO: 1516879 - RNA, 19 nt, Artificial Sequence
  Description of Artificial Sequence: Synthetic oligonucleotide
cguaccuucucguccacgg

SEQ ID NO: 1516880 - RNA, 19 nt, Artificial Sequence
  Description of Artificial Sequence: Synthetic oligonucleotide
aaagucaaccgggcgcuua

SEQ ID NO: 1516881 - RNA, 19 nt, Artificial Sequence
  Description of Artificial Sequence: Synthetic oligonucleotide
uccgggucgcucaccuugc

SEQ ID NO: 1516882 - RNA, 19 nt, Artificial Sequence
  Description of Artificial Sequence: Synthetic oligonucleotide
cacggucuuggugaagccc

SEQ ID NO: 1516883 - RNA, 19 nt, Artificial Sequence
  Description of Artificial Sequence: Synthetic oligonucleotide
ccgaucgaagagaugcggg

SEQ ID NO: 1516884 - RNA, 19 nt, Artificial Sequence
  Description of Artificial Sequence: Synthetic oligonucleotide
ucucguacagaggcuuacu

SEQ ID NO: 1516885 - RNA, 19 nt, Artificial Sequence
  Description of Artificial Sequence: Synthetic oligonucleotide
cugauaccguaaagcauca

SEQ ID NO: 1516886 - RNA, 19 nt, Artificial Sequence
  Description of Artificial Sequence: Synthetic oligonucleotide
auuuaacugguagcagaaa

SEQ ID NO: 1516887 - RNA, 19 nt, Artificial Sequence
  Description of Artificial Sequence: Synthetic oligonucleotide
gggaguuauuuugaucagc

SEQ ID NO: 1516888 - RNA, 19 nt, Artificial Sequence
  Description of Artificial Sequence: Synthetic oligonucleotide
gcaggaugcagucgcacac

SEQ ID NO: 1516889 - RNA, 19 nt, Artificial Sequence
  Description of Artificial Sequence: Synthetic oligonucleotide
ucgaagagaugcgggcgca

SEQ ID NO: 1516890 - RNA, 19 nt, Artificial Sequence
  Description of Artificial Sequence: Synthetic oligonucleotide
gggaguugcugagauauuc

SEQ ID NO: 1516891 - RNA, 19 nt, Artificial Sequence
  Description of Artificial Sequence: Synthetic oligonucleotide
guuuuggagccaguaaaua

SEQ ID NO: 1516892 - RNA, 19 nt, Artificial Sequence
  Description of Artificial Sequence: Synthetic oligonucleotide
ggccauaacagcacggauc

SEQ ID NO: 1516893 - RNA, 19 nt, Artificial Sequence
  Description of Artificial Sequence: Synthetic oligonucleotide
gcaucaauacgaccuuuuc

SEQ ID NO: 1516894 - RNA, 19 nt, Artificial Sequence
  Description of Artificial Sequence: Synthetic oligonucleotide
ccucugaucaaauuuaaau

SEQ ID NO: 1516895 - RNA, 19 nt, Artificial Sequence
  Description of Artificial Sequence: Synthetic oligonucleotide
aaacuggguguggccauaa

SEQ ID NO: 1516896 - RNA, 19 nt, Artificial Sequence
  Description of Artificial Sequence: Synthetic oligonucleotide
guggccauaacagcacgga

SEQ ID NO: 1516897 - RNA, 19 nt, Artificial Sequence
  Description of Artificial Sequence: Synthetic oligonucleotide
agccacgaucggcggguac

SEQ ID NO: 1516898 - RNA, 19 nt, Artificial Sequence
  Description of Artificial Sequence: Synthetic oligonucleotide
aggcucacgagagucucca

SEQ ID NO: 1516899 - RNA, 19 nt, Artificial Sequence
  Description of Artificial Sequence: Synthetic oligonucleotide
caggcucacgagagucucc

SEQ ID NO: 1516900 - RNA, 19 nt, Artificial Sequence
  Description of Artificial Sequence: Synthetic oligonucleotide
acgggcgucgccacgaccu

SEQ ID NO: 1516901 - RNA, 19 nt, Artificial Sequence
  Description of Artificial Sequence: Synthetic oligonucleotide
gguugugugguuuaucauu

SEQ ID NO: 1516902 - RNA, 19 nt, Artificial Sequence
  Description of Artificial Sequence: Synthetic oligonucleotide
ccagcgaucggcguucagg

SEQ ID NO: 1516903 - RNA, 19 nt, Artificial Sequence
  Description of Artificial Sequence: Synthetic oligonucleotide
cgaucgaagagaugcgggc

SEQ ID NO: 1516904 - RNA, 19 nt, Artificial Sequence
  Description of Artificial Sequence: Synthetic oligonucleotide
acaaucgagggcggcggug

SEQ ID NO: 1516905 - RNA, 19 nt, Artificial Sequence
  Description of Artificial Sequence: Synthetic oligonucleotide
auauucggaucugguugug

SEQ ID NO: 1516906 - RNA, 19 nt, Artificial Sequence
  Description of Artificial Sequence: Synthetic oligonucleotide
ucagggaguugcugagaua

SEQ ID NO: 1516907 - RNA, 19 nt, Artificial Sequence
  Description of Artificial Sequence: Synthetic oligonucleotide
uaccgcgccacgggcgucg

SEQ ID NO: 1516908 - RNA, 19 nt, Artificial Sequence
  Description of Artificial Sequence: Synthetic oligonucleotide
gugagacgagggccuggcg

SEQ ID NO: 1516909 - RNA, 19 nt, Artificial Sequence
  Description of Artificial Sequence: Synthetic oligonucleotide
gccgaucgaagagaugcgg

SEQ ID NO: 1516910 - RNA, 19 nt, Artificial Sequence
  Description of Artificial Sequence: Synthetic oligonucleotide
cagggcgaaggucugggga

SEQ ID NO: 1516911 - RNA, 19 nt, Artificial Sequence
  Description of Artificial Sequence: Synthetic oligonucleotide
uggcgccgaucgaagagau

SEQ ID NO: 1516912 - RNA, 19 nt, Artificial Sequence
  Description of Artificial Sequence: Synthetic oligonucleotide
cagggaguugcugagauau

SEQ ID NO: 1516913 - RNA, 19 nt, Artificial Sequence
  Description of Artificial Sequence: Synthetic oligonucleotide
gaucggcggguaccgcgcc

SEQ ID NO: 1516914 - RNA, 19 nt, Artificial Sequence
  Description of Artificial Sequence: Synthetic oligonucleotide
auauugccguuugaauaau

SEQ ID NO: 1516915 - RNA, 19 nt, Artificial Sequence
  Description of Artificial Sequence: Synthetic oligonucleotide
augcagucgcacacagcgg

SEQ ID NO: 1516916 - RNA, 19 nt, Artificial Sequence
  Description of Artificial Sequence: Synthetic oligonucleotide
gucgccacgaccuccgggu

SEQ ID NO: 1516917 - RNA, 19 nt, Artificial Sequence
  Description of Artificial Sequence: Synthetic oligonucleotide
caggcccgagaugaacacg

SEQ ID NO: 1516918 - RNA, 19 nt, Artificial Sequence
  Description of Artificial Sequence: Synthetic oligonucleotide
ugguaccagcgaucggcgu

SEQ ID NO: 1516919 - RNA, 19 nt, Artificial Sequence
  Description of Artificial Sequence: Synthetic oligonucleotide
gucucguacagaggcuuac

SEQ ID NO: 1516920 - RNA, 19 nt, Artificial Sequence
  Description of Artificial Sequence: Synthetic oligonucleotide
aucugccucgcuccagaau

SEQ ID NO: 1516921 - RNA, 19 nt, Artificial Sequence
  Description of Artificial Sequence: Synthetic oligonucleotide
gcaggguugagugggacca

SEQ ID NO: 1516922 - RNA, 19 nt, Artificial Sequence
  Description of Artificial Sequence: Synthetic oligonucleotide
gucaaccgggcgcuuacaa

SEQ ID NO: 1516923 - RNA, 19 nt, Artificial Sequence
  Description of Artificial Sequence: Synthetic oligonucleotide
ggucgaguaacaucugccu

SEQ ID NO: 1516924 - RNA, 19 nt, Artificial Sequence
  Description of Artificial Sequence: Synthetic oligonucleotide
gaacacggucuuggugaag

SEQ ID NO: 1516925 - RNA, 19 nt, Artificial Sequence
  Description of Artificial Sequence: Synthetic oligonucleotide
cagucgcacacagcggcgc

SEQ ID NO: 1516926 - RNA, 19 nt, Artificial Sequence
  Description of Artificial Sequence: Synthetic oligonucleotide
guaccagcgaucggcguuc

SEQ ID NO: 1516927 - RNA, 19 nt, Artificial Sequence
  Description of Artificial Sequence: Synthetic oligonucleotide
acagcacggaucugcuguu

SEQ ID NO: 1516928 - RNA, 19 nt, Artificial Sequence
  Description of Artificial Sequence: Synthetic oligonucleotide
aucacgcccugggagacaa

SEQ ID NO: 1516929 - RNA, 19 nt, Artificial Sequence
  Description of Artificial Sequence: Synthetic oligonucleotide
guaccuucucguccacgga

SEQ ID NO: 1516930 - RNA, 19 nt, Artificial Sequence
  Description of Artificial Sequence: Synthetic oligonucleotide
caccacgaagccaguaaaa

SEQ ID NO: 1516931 - RNA, 19 nt, Artificial Sequence
  Description of Artificial Sequence: Synthetic oligonucleotide
gcccugguaccagcgaucg

SEQ ID NO: 1516932 - RNA, 19 nt, Artificial Sequence
  Description of Artificial Sequence: Synthetic oligonucleotide
ggaagcuugucugguuuac

SEQ ID NO: 1516933 - RNA, 19 nt, Artificial Sequence
  Description of Artificial Sequence: Synthetic oligonucleotide
ugauaccguaaagcaucaa

SEQ ID NO: 1516934 - RNA, 19 nt, Artificial Sequence
  Description of Artificial Sequence: Synthetic oligonucleotide
ggcggcaggcccgagauga

SEQ ID NO: 1516935 - RNA, 19 nt, Artificial Sequence
  Description of Artificial Sequence: Synthetic oligonucleotide
ccuggcgccgaucgaagag

SEQ ID NO: 1516936 - RNA, 19 nt, Artificial Sequence
  Description of Artificial Sequence: Synthetic oligonucleotide
cagggauuucuacaggaau

SEQ ID NO: 1516937 - RNA, 19 nt, Artificial Sequence
  Description of Artificial Sequence: Synthetic oligonucleotide
aaaagucaaccgggcgcuu

SEQ ID NO: 1516938 - RNA, 19 nt, Artificial Sequence
  Description of Artificial Sequence: Synthetic oligonucleotide
agcaggcucacgagagucu

SEQ ID NO: 1516939 - RNA, 19 nt, Artificial Sequence
  Description of Artificial Sequence: Synthetic oligonucleotide
cccgagaugaacacggucu

SEQ ID NO: 1516940 - RNA, 19 nt, Artificial Sequence
  Description of Artificial Sequence: Synthetic oligonucleotide
gcggguaccgcgccacggg

SEQ ID NO: 1516941 - RNA, 19 nt, Artificial Sequence
  Description of Artificial Sequence: Synthetic oligonucleotide
gccacgaucggcggguacc

SEQ ID NO: 1516942 - RNA, 19 nt, Artificial Sequence
  Description of Artificial Sequence: Synthetic oligonucleotide
gccaaaguauuuaacuggu

SEQ ID NO: 1516943 - RNA, 19 nt, Artificial Sequence
  Description of Artificial Sequence: Synthetic oligonucleotide
acgcccugggagacaaaag

SEQ ID NO: 1516944 - RNA, 19 nt, Artificial Sequence
  Description of Artificial Sequence: Synthetic oligonucleotide
cgggcgcuuacaaucgagg

SEQ ID NO: 1516945 - RNA, 19 nt, Artificial Sequence
  Description of Artificial Sequence: Synthetic oligonucleotide
uggugagaaugcguaccuu

SEQ ID NO: 1516946 - RNA, 19 nt, Artificial Sequence
  Description of Artificial Sequence: Synthetic oligonucleotide
gcaggcccgagaugaacac

SEQ ID NO: 1516947 - RNA, 19 nt, Artificial Sequence
  Description of Artificial Sequence: Synthetic oligonucleotide
ggauuucuacaggaaugga

SEQ ID NO: 1516948 - RNA, 19 nt, Artificial Sequence
  Description of Artificial Sequence: Synthetic oligonucleotide
accgggcgcuuacaaucga

SEQ ID NO: 1516949 - RNA, 19 nt, Artificial Sequence
  Description of Artificial Sequence: Synthetic oligonucleotide
gccaacaccuggccgccgc

SEQ ID NO: 1516950 - RNA, 19 nt, Artificial Sequence
  Description of Artificial Sequence: Synthetic oligonucleotide
cgagagucuccaccagucg

SEQ ID NO: 1516951 - RNA, 19 nt, Artificial Sequence
  Description of Artificial Sequence: Synthetic oligonucleotide
accagcgaucggcguucag

SEQ ID NO: 1516952 - RNA, 19 nt, Artificial Sequence
  Description of Artificial Sequence: Synthetic oligonucleotide
agcuccaguccaagcaaaa

SEQ ID NO: 1516953 - RNA, 19 nt, Artificial Sequence
  Description of Artificial Sequence: Synthetic oligonucleotide
cuggcgccgaucgaagaga

SEQ ID NO: 1516954 - RNA, 19 nt, Artificial Sequence
  Description of Artificial Sequence: Synthetic oligonucleotide
ucgccacgaccuccggguc

SEQ ID NO: 1516955 - RNA, 19 nt, Artificial Sequence
  Description of Artificial Sequence: Synthetic oligonucleotide
gucgcacacagcggcgcgc

SEQ ID NO: 1516956 - RNA, 19 nt, Artificial Sequence
  Description of Artificial Sequence: Synthetic oligonucleotide
cacgggcgucgccacgacc

SEQ ID NO: 1516957 - RNA, 19 nt, Artificial Sequence
  Description of Artificial Sequence: Synthetic oligonucleotide
aucggcggguaccgcgcca

SEQ ID NO: 1516958 - RNA, 19 nt, Artificial Sequence
  Description of Artificial Sequence: Synthetic oligonucleotide
agucaaccgggcgcuuaca

SEQ ID NO: 1516959 - RNA, 19 nt, Artificial Sequence
  Description of Artificial Sequence: Synthetic oligonucleotide
cacgcccugggagacaaaa

SEQ ID NO: 1516960 - RNA, 19 nt, Artificial Sequence
  Description of Artificial Sequence: Synthetic oligonucleotide
ggguaccgcgccacgggcg

SEQ ID NO: 1516961 - RNA, 19 nt, Artificial Sequence
  Description of Artificial Sequence: Synthetic oligonucleotide
cacggacggggccgcgugc

SEQ ID NO: 1516962 - RNA, 19 nt, Artificial Sequence
  Description of Artificial Sequence: Synthetic oligonucleotide
ugcugucggcggucaugga

SEQ ID NO: 1516963 - RNA, 19 nt, Artificial Sequence
  Description of Artificial Sequence: Synthetic oligonucleotide
caggguugagugggaccag

SEQ ID NO: 1516964 - RNA, 19 nt, Artificial Sequence
  Description of Artificial Sequence: Synthetic oligonucleotide
ggggauacaccauguacuu

SEQ ID NO: 1516965 - RNA, 19 nt, Artificial Sequence
  Description of Artificial Sequence: Synthetic oligonucleotide
gcccgagaugaacacgguc

SEQ ID NO: 1516966 - RNA, 19 nt, Artificial Sequence
  Description of Artificial Sequence: Synthetic oligonucleotide
agcggcgugaagggacagu

SEQ ID NO: 1516967 - RNA, 19 nt, Artificial Sequence
  Description of Artificial Sequence: Synthetic oligonucleotide
ccgggcgcuuacaaucgag

SEQ ID NO: 1516968 - RNA, 19 nt, Artificial Sequence
  Description of Artificial Sequence: Synthetic oligonucleotide
ggcggguaccgcgccacgg

SEQ ID NO: 1516969 - RNA, 19 nt, Artificial Sequence
  Description of Artificial Sequence: Synthetic oligonucleotide
gggauacaccauguacuuc

SEQ ID NO: 1516970 - RNA, 19 nt, Artificial Sequence
  Description of Artificial Sequence: Synthetic oligonucleotide
acggacggggccgcgugca

SEQ ID NO: 1516971 - RNA, 19 nt, Artificial Sequence
  Description of Artificial Sequence: Synthetic oligonucleotide
gggacugagcgggcgcggg

SEQ ID NO: 1516972 - RNA, 19 nt, Artificial Sequence
  Description of Artificial Sequence: Synthetic oligonucleotide
gcggcgugaagggacaguc

SEQ ID NO: 1516973 - RNA, 19 nt, Artificial Sequence
  Description of Artificial Sequence: Synthetic oligonucleotide
gaucacgcccugggagaca

SEQ ID NO: 1516974 - RNA, 19 nt, Artificial Sequence
  Description of Artificial Sequence: Synthetic oligonucleotide
agucucguacagaggcuua

SEQ ID NO: 1516975 - RNA, 19 nt, Artificial Sequence
  Description of Artificial Sequence: Synthetic oligonucleotide
caagggcauuagcucuaca

SEQ ID NO: 1516976 - RNA, 19 nt, Artificial Sequence
  Description of Artificial Sequence: Synthetic oligonucleotide
ccacgaucggcggguaccg

SEQ ID NO: 1516977 - RNA, 19 nt, Artificial Sequence
  Description of Artificial Sequence: Synthetic oligonucleotide
gguaccagcgaucggcguu

SEQ ID NO: 1516978 - RNA, 19 nt, Artificial Sequence
  Description of Artificial Sequence: Synthetic oligonucleotide
agggccuggcgccgaucga

SEQ ID NO: 1516979 - RNA, 19 nt, Artificial Sequence
  Description of Artificial Sequence: Synthetic oligonucleotide
cacgaucggcggguaccgc

SEQ ID NO: 1516980 - RNA, 19 nt, Artificial Sequence
  Description of Artificial Sequence: Synthetic oligonucleotide
uaccagcgaucggcguuca

SEQ ID NO: 1516981 - RNA, 19 nt, Artificial Sequence
  Description of Artificial Sequence: Synthetic oligonucleotide
gccacgaccuccgggucgc

SEQ ID NO: 1516982 - RNA, 19 nt, Artificial Sequence
  Description of Artificial Sequence: Synthetic oligonucleotide
cgaucggcggguaccgcgc

SEQ ID NO: 1516983 - RNA, 19 nt, Artificial Sequence
  Description of Artificial Sequence: Synthetic oligonucleotide
cgccgaucgaagagaugcg

SEQ ID NO: 1516984 - RNA, 19 nt, Artificial Sequence
  Description of Artificial Sequence: Synthetic oligonucleotide
gucgguccaggagggguga

SEQ ID NO: 1516985 - RNA, 19 nt, Artificial Sequence
  Description of Artificial Sequence: Synthetic oligonucleotide
gcguaccuucucguccacg

SEQ ID NO: 1516986 - RNA, 19 nt, Artificial Sequence
  Description of Artificial Sequence: Synthetic oligonucleotide
ggcgaaggucuggggauac

SEQ ID NO: 1516987 - RNA, 19 nt, Artificial Sequence
  Description of Artificial Sequence: Synthetic oligonucleotide
ccgucugugaucacgcccu

SEQ ID NO: 1516988 - RNA, 19 nt, Artificial Sequence
  Description of Artificial Sequence: Synthetic oligonucleotide
gccgggacugagcgggcgc

SEQ ID NO: 1516989 - RNA, 19 nt, Artificial Sequence
  Description of Artificial Sequence: Synthetic oligonucleotide
ccaacaccuggccgccgcc

SEQ ID NO: 1516990 - RNA, 19 nt, Artificial Sequence
  Description of Artificial Sequence: Synthetic oligonucleotide
ggcggucauggaagccacg

SEQ ID NO: 1516991 - RNA, 19 nt, Artificial Sequence
  Description of Artificial Sequence: Synthetic oligonucleotide
cccgccaggucgagcgagg

SEQ ID NO: 1516992 - RNA, 19 nt, Artificial Sequence
  Description of Artificial Sequence: Synthetic oligonucleotide
ucacgcccugggagacaaa

SEQ ID NO: 1516993 - RNA, 19 nt, Artificial Sequence
  Description of Artificial Sequence: Synthetic oligonucleotide
cgcuuacaaucgagggcgg

SEQ ID NO: 1516994 - RNA, 19 nt, Artificial Sequence
  Description of Artificial Sequence: Synthetic oligonucleotide
caacaccuggccgccgcca

SEQ ID NO: 1516995 - RNA, 19 nt, Artificial Sequence
  Description of Artificial Sequence: Synthetic oligonucleotide
gguaccgcgccacgggcgu

SEQ ID NO: 1516996 - RNA, 19 nt, Artificial Sequence
  Description of Artificial Sequence: Synthetic oligonucleotide
ggccuggcgccgaucgaag

SEQ ID NO: 1516997 - RNA, 19 nt, Artificial Sequence
  Description of Artificial Sequence: Synthetic oligonucleotide
agggaguugcugagauauu

SEQ ID NO: 1516998 - RNA, 19 nt, Artificial Sequence
  Description of Artificial Sequence: Synthetic oligonucleotide
ggggccgcgugcaccgccg

SEQ ID NO: 1516999 - RNA, 19 nt, Artificial Sequence
  Description of Artificial Sequence: Synthetic oligonucleotide
cagcggcgugaagggacag

SEQ ID NO: 1517000 - RNA, 19 nt, Artificial Sequence
  Description of Artificial Sequence: Synthetic oligonucleotide
cguuugaauaauggaagcu

SEQ ID NO: 1517001 - RNA, 19 nt, Artificial Sequence
  Description of Artificial Sequence: Synthetic oligonucleotide
ggcucacgagagucuccac

SEQ ID NO: 1517002 - RNA, 19 nt, Artificial Sequence
  Description of Artificial Sequence: Synthetic oligonucleotide
aagccacgaucggcgggua

SEQ ID NO: 1517003 - RNA, 19 nt, Artificial Sequence
  Description of Artificial Sequence: Synthetic oligonucleotide
cagucucguacagaggcuu

SEQ ID NO: 1517004 - RNA, 19 nt, Artificial Sequence
  Description of Artificial Sequence: Synthetic oligonucleotide
gcgugcaccgccgccugcc

SEQ ID NO: 1517005 - RNA, 19 nt, Artificial Sequence
  Description of Artificial Sequence: Synthetic oligonucleotide
cagccgcgccgccuugcug

SEQ ID NO: 1517006 - RNA, 19 nt, Artificial Sequence
  Description of Artificial Sequence: Synthetic oligonucleotide
ccgggacugagcgggcgcg

SEQ ID NO: 1517007 - RNA, 19 nt, Artificial Sequence
  Description of Artificial Sequence: Synthetic oligonucleotide
cgccacgaccuccgggucg

SEQ ID NO: 1517008 - RNA, 19 nt, Artificial Sequence
  Description of Artificial Sequence: Synthetic oligonucleotide
caggcccgccaggucgagc

SEQ ID NO: 1517009 - RNA, 19 nt, Artificial Sequence
  Description of Artificial Sequence: Synthetic oligonucleotide
gggagacaaaaggucgagu

SEQ ID NO: 1517010 - RNA, 19 nt, Artificial Sequence
  Description of Artificial Sequence: Synthetic oligonucleotide
cacccgccgcagccgcgcc

SEQ ID NO: 1517011 - RNA, 19 nt, Artificial Sequence
  Description of Artificial Sequence: Synthetic oligonucleotide
gcagcggcgugaagggaca

SEQ ID NO: 1517012 - RNA, 19 nt, Artificial Sequence
  Description of Artificial Sequence: Synthetic oligonucleotide
ccacggacggggccgcgug

SEQ ID NO: 1517013 - RNA, 19 nt, Artificial Sequence
  Description of Artificial Sequence: Synthetic oligonucleotide
gcccgccaggucgagcgag

SEQ ID NO: 1517014 - RNA, 19 nt, Artificial Sequence
  Description of Artificial Sequence: Synthetic oligonucleotide
gccuggcgccgaucgaaga

SEQ ID NO: 1517015 - RNA, 19 nt, Artificial Sequence
  Description of Artificial Sequence: Synthetic oligonucleotide
ggcgccgaucgaagagaug

SEQ ID NO: 1517016 - RNA, 19 nt, Artificial Sequence
  Description of Artificial Sequence: Synthetic oligonucleotide
gccacgggcgucgccacga

SEQ ID NO: 1517017 - RNA, 19 nt, Artificial Sequence
  Description of Artificial Sequence: Synthetic oligonucleotide
cggguaccgcgccacgggc

SEQ ID NO: 1517018 - RNA, 19 nt, Artificial Sequence
  Description of Artificial Sequence: Synthetic oligonucleotide
ccgccaggucgagcgaggg

SEQ ID NO: 1517019 - RNA, 19 nt, Artificial Sequence
  Description of Artificial Sequence: Synthetic oligonucleotide
gcgucgccacgaccuccgg

SEQ ID NO: 1517020 - RNA, 19 nt, Artificial Sequence
  Description of Artificial Sequence: Synthetic oligonucleotide
cgccaucuuuguccccgcg

SEQ ID NO: 1517021 - RNA, 19 nt, Artificial Sequence
  Description of Artificial Sequence: Synthetic oligonucleotide
cgaucggcguucagggcga

SEQ ID NO: 1517022 - RNA, 19 nt, Artificial Sequence
  Description of Artificial Sequence: Synthetic oligonucleotide
cgggucgcucaccuugcug

SEQ ID NO: 1517023 - RNA, 19 nt, Artificial Sequence
  Description of Artificial Sequence: Synthetic oligonucleotide
ccgccugccagcgcugcac

SEQ ID NO: 1517024 - RNA, 19 nt, Artificial Sequence
  Description of Artificial Sequence: Synthetic oligonucleotide
gaucggcguucagggcgaa

SEQ ID NO: 1517025 - RNA, 19 nt, Artificial Sequence
  Description of Artificial Sequence: Synthetic oligonucleotide
gcgaaggucuggggauaca

SEQ ID NO: 1517026 - RNA, 19 nt, Artificial Sequence
  Description of Artificial Sequence: Synthetic oligonucleotide
guaccgcgccacgggcguc

SEQ ID NO: 1517027 - RNA, 19 nt, Artificial Sequence
  Description of Artificial Sequence: Synthetic oligonucleotide
gggccgcgugcaccgccgc

SEQ ID NO: 1517028 - RNA, 19 nt, Artificial Sequence
  Description of Artificial Sequence: Synthetic oligonucleotide
ccucaaggucccagaucaa

SEQ ID NO: 1517029 - RNA, 19 nt, Artificial Sequence
  Description of Artificial Sequence: Synthetic oligonucleotide
ccgagaugaacacggucuu

SEQ ID NO: 1517030 - RNA, 19 nt, Artificial Sequence
  Description of Artificial Sequence: Synthetic oligonucleotide
gcgccacgggcgucgccac

SEQ ID NO: 1517031 - RNA, 19 nt, Artificial Sequence
  Description of Artificial Sequence: Synthetic oligonucleotide
ccacgggcgucgccacgac

SEQ ID NO: 1517032 - RNA, 19 nt, Artificial Sequence
  Description of Artificial Sequence: Synthetic oligonucleotide
gcaggcccgccaggucgag

SEQ ID NO: 1517033 - RNA, 19 nt, Artificial Sequence
  Description of Artificial Sequence: Synthetic oligonucleotide
cgaccuccgggucgcucac

SEQ ID NO: 1517034 - RNA, 19 nt, Artificial Sequence
  Description of Artificial Sequence: Synthetic oligonucleotide
ggcccgccaggucgagcga

SEQ ID NO: 1517035 - RNA, 19 nt, Artificial Sequence
  Description of Artificial Sequence: Synthetic oligonucleotide
gccgcgccgccuugcuguc

SEQ ID NO: 1517036 - RNA, 19 nt, Artificial Sequence
  Description of Artificial Sequence: Synthetic oligonucleotide
cggggccgcgugcaccgcc

SEQ ID NO: 1517037 - RNA, 19 nt, Artificial Sequence
  Description of Artificial Sequence: Synthetic oligonucleotide
gcagccgcgccgccuugcu

SEQ ID NO: 1517038 - RNA, 19 nt, Artificial Sequence
  Description of Artificial Sequence: Synthetic oligonucleotide
cgccacgggcgucgccacg

SEQ ID NO: 1517039 - RNA, 19 nt, Artificial Sequence
  Description of Artificial Sequence: Synthetic oligonucleotide
ggcccgagaugaacacggu

SEQ ID NO: 1517040 - RNA, 19 nt, Artificial Sequence
  Description of Artificial Sequence: Synthetic oligonucleotide
cgcaggcccgccaggucga

SEQ ID NO: 1517041 - RNA, 19 nt, Artificial Sequence
  Description of Artificial Sequence: Synthetic oligonucleotide
cagcacggaucugcuguuu

SEQ ID NO: 1517042 - RNA, 19 nt, Artificial Sequence
  Description of Artificial Sequence: Synthetic oligonucleotide
cgucguuaucuuccacagu

SEQ ID NO: 1517043 - RNA, 19 nt, Artificial Sequence
  Description of Artificial Sequence: Synthetic oligonucleotide
cgggcgucgccacgaccuc

SEQ ID NO: 1517044 - RNA, 19 nt, Artificial Sequence
  Description of Artificial Sequence: Synthetic oligonucleotide
cggcggcgcagguagacau

SEQ ID NO: 1517045 - RNA, 19 nt, Artificial Sequence
  Description of Artificial Sequence: Synthetic oligonucleotide
ccuugcugucggcggucau

SEQ ID NO: 1517046 - RNA, 19 nt, Artificial Sequence
  Description of Artificial Sequence: Synthetic oligonucleotide
cggcgcagguagacaugcu

SEQ ID NO: 1517047 - RNA, 19 nt, Artificial Sequence
  Description of Artificial Sequence: Synthetic oligonucleotide
auugauacaguguugaggc

SEQ ID NO: 1517048 - RNA, 19 nt, Artificial Sequence
  Description of Artificial Sequence: Synthetic oligonucleotide
aagucaagaauacaaaagg

SEQ ID NO: 1517049 - RNA, 19 nt, Artificial Sequence
  Description of Artificial Sequence: Synthetic oligonucleotide
aagugauacacccaguagg

SEQ ID NO: 1517050 - RNA, 19 nt, Artificial Sequence
  Description of Artificial Sequence: Synthetic oligonucleotide
cauaaaacauuauugcugg

SEQ ID NO: 1517051 - RNA, 19 nt, Artificial Sequence
  Description of Artificial Sequence: Synthetic oligonucleotide
aaaggcgugaagcauuccc

SEQ ID NO: 1517052 - RNA, 19 nt, Artificial Sequence
  Description of Artificial Sequence: Synthetic oligonucleotide
uguagagagaaguaaaagc

SEQ ID NO: 1517053 - RNA, 19 nt, Artificial Sequence
  Description of Artificial Sequence: Synthetic oligonucleotide
aagaauacaaaaggggacg

SEQ ID NO: 1517054 - RNA, 19 nt, Artificial Sequence
  Description of Artificial Sequence: Synthetic oligonucleotide
aauaagggaaguuuggaaa

SEQ ID NO: 1517055 - RNA, 19 nt, Artificial Sequence
  Description of Artificial Sequence: Synthetic oligonucleotide
uaaguaaguguccaauggg

SEQ ID NO: 1517056 - RNA, 19 nt, Artificial Sequence
  Description of Artificial Sequence: Synthetic oligonucleotide
gaaguaauccuuccgacag

SEQ ID NO: 1517057 - RNA, 19 nt, Artificial Sequence
  Description of Artificial Sequence: Synthetic oligonucleotide
uaauccuuccgacaguagg

SEQ ID NO: 1517058 - RNA, 19 nt, Artificial Sequence
  Description of Artificial Sequence: Synthetic oligonucleotide
ucucauggaacccuucugg

SEQ ID NO: 1517059 - RNA, 19 nt, Artificial Sequence
  Description of Artificial Sequence: Synthetic oligonucleotide
cuaccauugacgaaaggcg

SEQ ID NO: 1517060 - RNA, 19 nt, Artificial Sequence
  Description of Artificial Sequence: Synthetic oligonucleotide
auauacuuuccccuuugcc

SEQ ID NO: 1517061 - RNA, 19 nt, Artificial Sequence
  Description of Artificial Sequence: Synthetic oligonucleotide
gaaguuacagaacaggguc

SEQ ID NO: 1517062 - RNA, 19 nt, Artificial Sequence
  Description of Artificial Sequence: Synthetic oligonucleotide
acauuauugcuggagaagc

SEQ ID NO: 1517063 - RNA, 19 nt, Artificial Sequence
  Description of Artificial Sequence: Synthetic oligonucleotide
uuacaguaguaacagcggg

SEQ ID NO: 1517064 - RNA, 19 nt, Artificial Sequence
  Description of Artificial Sequence: Synthetic oligonucleotide
gauguggcuacauaaaaca

SEQ ID NO: 1517065 - RNA, 19 nt, Artificial Sequence
  Description of Artificial Sequence: Synthetic oligonucleotide
aauccuuccgacaguaggc

SEQ ID NO: 1517066 - RNA, 19 nt, Artificial Sequence
  Description of Artificial Sequence: Synthetic oligonucleotide
aacaugucgaaguaauccu

SEQ ID NO: 1517067 - RNA, 19 nt, Artificial Sequence
  Description of Artificial Sequence: Synthetic oligonucleotide
ugccagaaaguucaugagg

SEQ ID NO: 1517068 - RNA, 19 nt, Artificial Sequence
  Description of Artificial Sequence: Synthetic oligonucleotide
aagaagcuaccauugacga

SEQ ID NO: 1517069 - RNA, 19 nt, Artificial Sequence
  Description of Artificial Sequence: Synthetic oligonucleotide
uugagcaauacgaagucga

SEQ ID NO: 1517070 - RNA, 19 nt, Artificial Sequence
  Description of Artificial Sequence: Synthetic oligonucleotide
uguuuacccaucccaaucc

SEQ ID NO: 1517071 - RNA, 19 nt, Artificial Sequence
  Description of Artificial Sequence: Synthetic oligonucleotide
acauaaaacauuauugcug

SEQ ID NO: 1517072 - RNA, 19 nt, Artificial Sequence
  Description of Artificial Sequence: Synthetic oligonucleotide
agaaguaaaagcaacuuga

SEQ ID NO: 1517073 - RNA, 19 nt, Artificial Sequence
  Description of Artificial Sequence: Synthetic oligonucleotide
aaaguccauaccaaagccg

SEQ ID NO: 1517074 - RNA, 19 nt, Artificial Sequence
  Description of Artificial Sequence: Synthetic oligonucleotide
uugacgaaaggcgugaagc

SEQ ID NO: 1517075 - RNA, 19 nt, Artificial Sequence
  Description of Artificial Sequence: Synthetic oligonucleotide
aacgagguggcuaaguaag

SEQ ID NO: 1517076 - RNA, 19 nt, Artificial Sequence
  Description of Artificial Sequence: Synthetic oligonucleotide
cuggcuugugcuaagaaac

SEQ ID NO: 1517077 - RNA, 19 nt, Artificial Sequence
  Description of Artificial Sequence: Synthetic oligonucleotide
uaguccuuuucacaguaag

SEQ ID NO: 1517078 - RNA, 19 nt, Artificial Sequence
  Description of Artificial Sequence: Synthetic oligonucleotide
ugucgaaguaauccuuccg

SEQ ID NO: 1517079 - RNA, 19 nt, Artificial Sequence
  Description of Artificial Sequence: Synthetic oligonucleotide
acaaagcaaaguccauacc

SEQ ID NO: 1517080 - RNA, 19 nt, Artificial Sequence
  Description of Artificial Sequence: Synthetic oligonucleotide
gaagugauacacccaguag

SEQ ID NO: 1517081 - RNA, 19 nt, Artificial Sequence
  Description of Artificial Sequence: Synthetic oligonucleotide
cacuacuuuauccaggaug

SEQ ID NO: 1517082 - RNA, 19 nt, Artificial Sequence
  Description of Artificial Sequence: Synthetic oligonucleotide
caguuuaaaacaguccugg

SEQ ID NO: 1517083 - RNA, 19 nt, Artificial Sequence
  Description of Artificial Sequence: Synthetic oligonucleotide
aacaggacacaggagguuc

SEQ ID NO: 1517084 - RNA, 19 nt, Artificial Sequence
  Description of Artificial Sequence: Synthetic oligonucleotide
guucaugaggagcagagac

SEQ ID NO: 1517085 - RNA, 19 nt, Artificial Sequence
  Description of Artificial Sequence: Synthetic oligonucleotide
uuaaaacaguccuggggag

SEQ ID NO: 1517086 - RNA, 19 nt, Artificial Sequence
  Description of Artificial Sequence: Synthetic oligonucleotide
aguaggaccgaguccagag

SEQ ID NO: 1517087 - RNA, 19 nt, Artificial Sequence
  Description of Artificial Sequence: Synthetic oligonucleotide
aauacgaagucgaaccuca

SEQ ID NO: 1517088 - RNA, 19 nt, Artificial Sequence
  Description of Artificial Sequence: Synthetic oligonucleotide
uguguugagggcugaaaug

SEQ ID NO: 1517089 - RNA, 19 nt, Artificial Sequence
  Description of Artificial Sequence: Synthetic oligonucleotide
agacccuuaugguucuucc

SEQ ID NO: 1517090 - RNA, 19 nt, Artificial Sequence
  Description of Artificial Sequence: Synthetic oligonucleotide
agcaacuugagcaauacga

SEQ ID NO: 1517091 - RNA, 19 nt, Artificial Sequence
  Description of Artificial Sequence: Synthetic oligonucleotide
agguucaaaauuccagguc

SEQ ID NO: 1517092 - RNA, 19 nt, Artificial Sequence
  Description of Artificial Sequence: Synthetic oligonucleotide
uucuuaaugaagagccugu

SEQ ID NO: 1517093 - RNA, 19 nt, Artificial Sequence
  Description of Artificial Sequence: Synthetic oligonucleotide
aggcaaaaggcacagacaa

SEQ ID NO: 1517094 - RNA, 19 nt, Artificial Sequence
  Description of Artificial Sequence: Synthetic oligonucleotide
uccggguggaacuucuugg

SEQ ID NO: 1517095 - RNA, 19 nt, Artificial Sequence
  Description of Artificial Sequence: Synthetic oligonucleotide
aagcaacuugagcaauacg

SEQ ID NO: 1517096 - RNA, 19 nt, Artificial Sequence
  Description of Artificial Sequence: Synthetic oligonucleotide
uuggggcgcaaacaugucg

SEQ ID NO: 1517097 - RNA, 19 nt, Artificial Sequence
  Description of Artificial Sequence: Synthetic oligonucleotide
gaaauguaguucuccagga

SEQ ID NO: 1517098 - RNA, 19 nt, Artificial Sequence
  Description of Artificial Sequence: Synthetic oligonucleotide
agaaaguucaugaggagca

SEQ ID NO: 1517099 - RNA, 19 nt, Artificial Sequence
  Description of Artificial Sequence: Synthetic oligonucleotide
gaagcuaccauugacgaaa

SEQ ID NO: 1517100 - RNA, 19 nt, Artificial Sequence
  Description of Artificial Sequence: Synthetic oligonucleotide
aaggggacguucuucaaau

SEQ ID NO: 1517101 - RNA, 19 nt, Artificial Sequence
  Description of Artificial Sequence: Synthetic oligonucleotide
auaagggaaguuuggaaau

SEQ ID NO: 1517102 - RNA, 19 nt, Artificial Sequence
  Description of Artificial Sequence: Synthetic oligonucleotide
caaucccucaguacaaagc

SEQ ID NO: 1517103 - RNA, 19 nt, Artificial Sequence
  Description of Artificial Sequence: Synthetic oligonucleotide
uuguuuacccaucccaauc

SEQ ID NO: 1517104 - RNA, 19 nt, Artificial Sequence
  Description of Artificial Sequence: Synthetic oligonucleotide
ugaagcauucccugcacac

SEQ ID NO: 1517105 - RNA, 19 nt, Artificial Sequence
  Description of Artificial Sequence: Synthetic oligonucleotide
ucagaccaguucuuaauga

SEQ ID NO: 1517106 - RNA, 19 nt, Artificial Sequence
  Description of Artificial Sequence: Synthetic oligonucleotide
uggaaauacagcaguuuaa

SEQ ID NO: 1517107 - RNA, 19 nt, Artificial Sequence
  Description of Artificial Sequence: Synthetic oligonucleotide
gauacaguguugaggcacg

SEQ ID NO: 1517108 - RNA, 19 nt, Artificial Sequence
  Description of Artificial Sequence: Synthetic oligonucleotide
aaaacaguccuggggagcu

SEQ ID NO: 1517109 - RNA, 19 nt, Artificial Sequence
  Description of Artificial Sequence: Synthetic oligonucleotide
cauuauugcuggagaagcc

SEQ ID NO: 1517110 - RNA, 19 nt, Artificial Sequence
  Description of Artificial Sequence: Synthetic oligonucleotide
augggagggaccuagcaga

SEQ ID NO: 1517111 - RNA, 19 nt, Artificial Sequence
  Description of Artificial Sequence: Synthetic oligonucleotide
uaccauugacgaaaggcgu

SEQ ID NO: 1517112 - RNA, 19 nt, Artificial Sequence
  Description of Artificial Sequence: Synthetic oligonucleotide
aguuccgugauccgaucuc

SEQ ID NO: 1517113 - RNA, 19 nt, Artificial Sequence
  Description of Artificial Sequence: Synthetic oligonucleotide
cagaaaguucaugaggagc

SEQ ID NO: 1517114 - RNA, 19 nt, Artificial Sequence
  Description of Artificial Sequence: Synthetic oligonucleotide
aaaggggacguucuucaaa

SEQ ID NO: 1517115 - RNA, 19 nt, Artificial Sequence
  Description of Artificial Sequence: Synthetic oligonucleotide
guucuuaaugaagagccug

SEQ ID NO: 1517116 - RNA, 19 nt, Artificial Sequence
  Description of Artificial Sequence: Synthetic oligonucleotide
acccuuaugguucuuccug

SEQ ID NO: 1517117 - RNA, 19 nt, Artificial Sequence
  Description of Artificial Sequence: Synthetic oligonucleotide
uccuuuucacaguaaggcu

SEQ ID NO: 1517118 - RNA, 19 nt, Artificial Sequence
  Description of Artificial Sequence: Synthetic oligonucleotide
agcacggagaagcaacgag

SEQ ID NO: 1517119 - RNA, 19 nt, Artificial Sequence
  Description of Artificial Sequence: Synthetic oligonucleotide
ugacgaaaggcgugaagca

SEQ ID NO: 1517120 - RNA, 19 nt, Artificial Sequence
  Description of Artificial Sequence: Synthetic oligonucleotide
agaaaucuaucaaaauuga

SEQ ID NO: 1517121 - RNA, 19 nt, Artificial Sequence
  Description of Artificial Sequence: Synthetic oligonucleotide
ugcucaaagaagcuaccau

SEQ ID NO: 1517122 - RNA, 19 nt, Artificial Sequence
  Description of Artificial Sequence: Synthetic oligonucleotide
cagcaguuuaaaacagucc

SEQ ID NO: 1517123 - RNA, 19 nt, Artificial Sequence
  Description of Artificial Sequence: Synthetic oligonucleotide
aagcagaccccaaauauau

SEQ ID NO: 1517124 - RNA, 19 nt, Artificial Sequence
  Description of Artificial Sequence: Synthetic oligonucleotide
uccgacaguaggcuuugcc

SEQ ID NO: 1517125 - RNA, 19 nt, Artificial Sequence
  Description of Artificial Sequence: Synthetic oligonucleotide
uggggcgcaaacaugucga

SEQ ID NO: 1517126 - RNA, 19 nt, Artificial Sequence
  Description of Artificial Sequence: Synthetic oligonucleotide
uugagggcugaaauguagu

SEQ ID NO: 1517127 - RNA, 19 nt, Artificial Sequence
  Description of Artificial Sequence: Synthetic oligonucleotide
uuuacccaucccaaucccu

SEQ ID NO: 1517128 - RNA, 19 nt, Artificial Sequence
  Description of Artificial Sequence: Synthetic oligonucleotide
agcaaaguccauaccaaag

SEQ ID NO: 1517129 - RNA, 19 nt, Artificial Sequence
  Description of Artificial Sequence: Synthetic oligonucleotide
aguaaggcuguccgucccg

SEQ ID NO: 1517130 - RNA, 19 nt, Artificial Sequence
  Description of Artificial Sequence: Synthetic oligonucleotide
uaaguguccaaugggcucu

SEQ ID NO: 1517131 - RNA, 19 nt, Artificial Sequence
  Description of Artificial Sequence: Synthetic oligonucleotide
ugagcacagaagaaguguu

SEQ ID NO: 1517132 - RNA, 19 nt, Artificial Sequence
  Description of Artificial Sequence: Synthetic oligonucleotide
gaagcaacgagguggcuaa

SEQ ID NO: 1517133 - RNA, 19 nt, Artificial Sequence
  Description of Artificial Sequence: Synthetic oligonucleotide
aggagcacggagaagcaac

SEQ ID NO: 1517134 - RNA, 19 nt, Artificial Sequence
  Description of Artificial Sequence: Synthetic oligonucleotide
gggaggaagugauacaccc

SEQ ID NO: 1517135 - RNA, 19 nt, Artificial Sequence
  Description of Artificial Sequence: Synthetic oligonucleotide
gaccaguucuuaaugaaga

SEQ ID NO: 1517136 - RNA, 19 nt, Artificial Sequence
  Description of Artificial Sequence: Synthetic oligonucleotide
aguccuuuucacaguaagg

SEQ ID NO: 1517137 - RNA, 19 nt, Artificial Sequence
  Description of Artificial Sequence: Synthetic oligonucleotide
acggugaacaaagucaaga

SEQ ID NO: 1517138 - RNA, 19 nt, Artificial Sequence
  Description of Artificial Sequence: Synthetic oligonucleotide
aaguuugagggaggaagug

SEQ ID NO: 1517139 - RNA, 19 nt, Artificial Sequence
  Description of Artificial Sequence: Synthetic oligonucleotide
gucacuacuuuauccagga

SEQ ID NO: 1517140 - RNA, 19 nt, Artificial Sequence
  Description of Artificial Sequence: Synthetic oligonucleotide
gagauggagauguggcuac

SEQ ID NO: 1517141 - RNA, 19 nt, Artificial Sequence
  Description of Artificial Sequence: Synthetic oligonucleotide
uccgcacugagcacagaag

SEQ ID NO: 1517142 - RNA, 19 nt, Artificial Sequence
  Description of Artificial Sequence: Synthetic oligonucleotide
agugauacacccaguagga

SEQ ID NO: 1517143 - RNA, 19 nt, Artificial Sequence
  Description of Artificial Sequence: Synthetic oligonucleotide
caaaaggggacguucuuca

SEQ ID NO: 1517144 - RNA, 19 nt, Artificial Sequence
  Description of Artificial Sequence: Synthetic oligonucleotide
gcagaccccaaauauauac

SEQ ID NO: 1517145 - RNA, 19 nt, Artificial Sequence
  Description of Artificial Sequence: Synthetic oligonucleotide
aaguaauccuuccgacagu

SEQ ID NO: 1517146 - RNA, 19 nt, Artificial Sequence
  Description of Artificial Sequence: Synthetic oligonucleotide
uacgaagucgaaccucagu

SEQ ID NO: 1517147 - RNA, 19 nt, Artificial Sequence
  Description of Artificial Sequence: Synthetic oligonucleotide
cugcccaucgugcucaaag

SEQ ID NO: 1517148 - RNA, 19 nt, Artificial Sequence
  Description of Artificial Sequence: Synthetic oligonucleotide
cucucggugaacccggggc

SEQ ID NO: 1517149 - RNA, 19 nt, Artificial Sequence
  Description of Artificial Sequence: Synthetic oligonucleotide
guaaguguccaaugggcuc

SEQ ID NO: 1517150 - RNA, 19 nt, Artificial Sequence
  Description of Artificial Sequence: Synthetic oligonucleotide
uuugccucccuugggaaca

SEQ ID NO: 1517151 - RNA, 19 nt, Artificial Sequence
  Description of Artificial Sequence: Synthetic oligonucleotide
guugagggcugaaauguag

SEQ ID NO: 1517152 - RNA, 19 nt, Artificial Sequence
  Description of Artificial Sequence: Synthetic oligonucleotide
auuguuuacccaucccaau

SEQ ID NO: 1517153 - RNA, 19 nt, Artificial Sequence
  Description of Artificial Sequence: Synthetic oligonucleotide
guccauaccaaagccgagg

SEQ ID NO: 1517154 - RNA, 19 nt, Artificial Sequence
  Description of Artificial Sequence: Synthetic oligonucleotide
agaccccaaauauauacuu

SEQ ID NO: 1517155 - RNA, 19 nt, Artificial Sequence
  Description of Artificial Sequence: Synthetic oligonucleotide
ucucggugaacccggggca

SEQ ID NO: 1517156 - RNA, 19 nt, Artificial Sequence
  Description of Artificial Sequence: Synthetic oligonucleotide
ugcagcggccaguaauggg

SEQ ID NO: 1517157 - RNA, 19 nt, Artificial Sequence
  Description of Artificial Sequence: Synthetic oligonucleotide
uguccgucccgcucgaaga

SEQ ID NO: 1517158 - RNA, 19 nt, Artificial Sequence
  Description of Artificial Sequence: Synthetic oligonucleotide
uucuggaccgaagaaggcu

SEQ ID NO: 1517159 - RNA, 19 nt, Artificial Sequence
  Description of Artificial Sequence: Synthetic oligonucleotide
uggcuugugcuaagaaaca

SEQ ID NO: 1517160 - RNA, 19 nt, Artificial Sequence
  Description of Artificial Sequence: Synthetic oligonucleotide
ugggcaauaagggaaguuu

SEQ ID NO: 1517161 - RNA, 19 nt, Artificial Sequence
  Description of Artificial Sequence: Synthetic oligonucleotide
guuuacccaucccaauccc

SEQ ID NO: 1517162 - RNA, 19 nt, Artificial Sequence
  Description of Artificial Sequence: Synthetic oligonucleotide
agaccaguucuuaaugaag

SEQ ID NO: 1517163 - RNA, 19 nt, Artificial Sequence
  Description of Artificial Sequence: Synthetic oligonucleotide
agugcugucacuacuuuau

SEQ ID NO: 1517164 - RNA, 19 nt, Artificial Sequence
  Description of Artificial Sequence: Synthetic oligonucleotide
gaagucgaaccucagugua

SEQ ID NO: 1517165 - RNA, 19 nt, Artificial Sequence
  Description of Artificial Sequence: Synthetic oligonucleotide
acuggcaggaccagugacg

SEQ ID NO: 1517166 - RNA, 19 nt, Artificial Sequence
  Description of Artificial Sequence: Synthetic oligonucleotide
ccagugacggugaacaaag

SEQ ID NO: 1517167 - RNA, 19 nt, Artificial Sequence
  Description of Artificial Sequence: Synthetic oligonucleotide
aaguguuccgggugccaug

SEQ ID NO: 1517168 - RNA, 19 nt, Artificial Sequence
  Description of Artificial Sequence: Synthetic oligonucleotide
acuuggggcgcaaacaugu

SEQ ID NO: 1517169 - RNA, 19 nt, Artificial Sequence
  Description of Artificial Sequence: Synthetic oligonucleotide
gaaggcggaaggagcacgg

SEQ ID NO: 1517170 - RNA, 19 nt, Artificial Sequence
  Description of Artificial Sequence: Synthetic oligonucleotide
agaaggcggaaggagcacg

SEQ ID NO: 1517171 - RNA, 19 nt, Artificial Sequence
  Description of Artificial Sequence: Synthetic oligonucleotide
ggcaauaagggaaguuugg

SEQ ID NO: 1517172 - RNA, 19 nt, Artificial Sequence
  Description of Artificial Sequence: Synthetic oligonucleotide
aguuugagggaggaaguga

SEQ ID NO: 1517173 - RNA, 19 nt, Artificial Sequence
  Description of Artificial Sequence: Synthetic oligonucleotide
aaggcgugaagcauucccu

SEQ ID NO: 1517174 - RNA, 19 nt, Artificial Sequence
  Description of Artificial Sequence: Synthetic oligonucleotide
cuggcaggaccagugacgg

SEQ ID NO: 1517175 - RNA, 19 nt, Artificial Sequence
  Description of Artificial Sequence: Synthetic oligonucleotide
gaugggcgcgggcacagcc

SEQ ID NO: 1517176 - RNA, 19 nt, Artificial Sequence
  Description of Artificial Sequence: Synthetic oligonucleotide
ucucucggugaacccgggg

SEQ ID NO: 1517177 - RNA, 19 nt, Artificial Sequence
  Description of Artificial Sequence: Synthetic oligonucleotide
agggaggaagugauacacc

SEQ ID NO: 1517178 - RNA, 19 nt, Artificial Sequence
  Description of Artificial Sequence: Synthetic oligonucleotide
ugguaguggaccucacagu

SEQ ID NO: 1517179 - RNA, 19 nt, Artificial Sequence
  Description of Artificial Sequence: Synthetic oligonucleotide
ucgaagaaguuccgugauc

SEQ ID NO: 1517180 - RNA, 19 nt, Artificial Sequence
  Description of Artificial Sequence: Synthetic oligonucleotide
ccgacaguaggcuuugccg

SEQ ID NO: 1517181 - RNA, 19 nt, Artificial Sequence
  Description of Artificial Sequence: Synthetic oligonucleotide
gagguucaaaauuccaggu

SEQ ID NO: 1517182 - RNA, 19 nt, Artificial Sequence
  Description of Artificial Sequence: Synthetic oligonucleotide
aaagccgaggccacuggca

SEQ ID NO: 1517183 - RNA, 19 nt, Artificial Sequence
  Description of Artificial Sequence: Synthetic oligonucleotide
caucccaaucccucaguac

SEQ ID NO: 1517184 - RNA, 19 nt, Artificial Sequence
  Description of Artificial Sequence: Synthetic oligonucleotide
uguuggccugggcaauaag

SEQ ID NO: 1517185 - RNA, 19 nt, Artificial Sequence
  Description of Artificial Sequence: Synthetic oligonucleotide
caaccagagcacagggagc

SEQ ID NO: 1517186 - RNA, 19 nt, Artificial Sequence
  Description of Artificial Sequence: Synthetic oligonucleotide
ugcccaucgugcucaaaga

SEQ ID NO: 1517187 - RNA, 19 nt, Artificial Sequence
  Description of Artificial Sequence: Synthetic oligonucleotide
aggcgugaagcauucccug

SEQ ID NO: 1517188 - RNA, 19 nt, Artificial Sequence
  Description of Artificial Sequence: Synthetic oligonucleotide
uccuuguugccagaaaguu

SEQ ID NO: 1517189 - RNA, 19 nt, Artificial Sequence
  Description of Artificial Sequence: Synthetic oligonucleotide
aguaauccuuccgacagua

SEQ ID NO: 1517190 - RNA, 19 nt, Artificial Sequence
  Description of Artificial Sequence: Synthetic oligonucleotide
caguguugaggcacgggug

SEQ ID NO: 1517191 - RNA, 19 nt, Artificial Sequence
  Description of Artificial Sequence: Synthetic oligonucleotide
cagcuuuccugagaaggcg

SEQ ID NO: 1517192 - RNA, 19 nt, Artificial Sequence
  Description of Artificial Sequence: Synthetic oligonucleotide
guuccgggugccauguccg

SEQ ID NO: 1517193 - RNA, 19 nt, Artificial Sequence
  Description of Artificial Sequence: Synthetic oligonucleotide
gugaacccggggcaggugc

SEQ ID NO: 1517194 - RNA, 19 nt, Artificial Sequence
  Description of Artificial Sequence: Synthetic oligonucleotide
ggagggaccuagcagaaga

SEQ ID NO: 1517195 - RNA, 19 nt, Artificial Sequence
  Description of Artificial Sequence: Synthetic oligonucleotide
agucgaaccucaguguaga

SEQ ID NO: 1517196 - RNA, 19 nt, Artificial Sequence
  Description of Artificial Sequence: Synthetic oligonucleotide
ucgaaccucaguguagaaa

SEQ ID NO: 1517197 - RNA, 19 nt, Artificial Sequence
  Description of Artificial Sequence: Synthetic oligonucleotide
uguugagggcugaaaugua

SEQ ID NO: 1517198 - RNA, 19 nt, Artificial Sequence
  Description of Artificial Sequence: Synthetic oligonucleotide
agccgccacacuuggggcg

SEQ ID NO: 1517199 - RNA, 19 nt, Artificial Sequence
  Description of Artificial Sequence: Synthetic oligonucleotide
uacuuuccccuuugccucc

SEQ ID NO: 1517200 - RNA, 19 nt, Artificial Sequence
  Description of Artificial Sequence: Synthetic oligonucleotide
ucccaaucccucaguacaa

SEQ ID NO: 1517201 - RNA, 19 nt, Artificial Sequence
  Description of Artificial Sequence: Synthetic oligonucleotide
gaccuagcagaagagcuuc

SEQ ID NO: 1517202 - RNA, 19 nt, Artificial Sequence
  Description of Artificial Sequence: Synthetic oligonucleotide
uaaugggcuucuggcaacc

SEQ ID NO: 1517203 - RNA, 19 nt, Artificial Sequence
  Description of Artificial Sequence: Synthetic oligonucleotide
agccucucucggugaaccc

SEQ ID NO: 1517204 - RNA, 19 nt, Artificial Sequence
  Description of Artificial Sequence: Synthetic oligonucleotide
cuuugccucccuugggaac

SEQ ID NO: 1517205 - RNA, 19 nt, Artificial Sequence
  Description of Artificial Sequence: Synthetic oligonucleotide
guggaugggagggaccuag

SEQ ID NO: 1517206 - RNA, 19 nt, Artificial Sequence
  Description of Artificial Sequence: Synthetic oligonucleotide
uccgugauccgaucucuuc

SEQ ID NO: 1517207 - RNA, 19 nt, Artificial Sequence
  Description of Artificial Sequence: Synthetic oligonucleotide
gucucaacuggcuugugcu

SEQ ID NO: 1517208 - RNA, 19 nt, Artificial Sequence
  Description of Artificial Sequence: Synthetic oligonucleotide
ugguaguccuuuucacagu

SEQ ID NO: 1517209 - RNA, 19 nt, Artificial Sequence
  Description of Artificial Sequence: Synthetic oligonucleotide
agaagcuaccauugacgaa

SEQ ID NO: 1517210 - RNA, 19 nt, Artificial Sequence
  Description of Artificial Sequence: Synthetic oligonucleotide
uaagggaaguuuggaaaua

SEQ ID NO: 1517211 - RNA, 19 nt, Artificial Sequence
  Description of Artificial Sequence: Synthetic oligonucleotide
gaugggcccguuacaguag

SEQ ID NO: 1517212 - RNA, 19 nt, Artificial Sequence
  Description of Artificial Sequence: Synthetic oligonucleotide
gaccgaagaaggcuccgca

SEQ ID NO: 1517213 - RNA, 19 nt, Artificial Sequence
  Description of Artificial Sequence: Synthetic oligonucleotide
uguugaggcacggguggcc

SEQ ID NO: 1517214 - RNA, 19 nt, Artificial Sequence
  Description of Artificial Sequence: Synthetic oligonucleotide
cgaagaaguuccgugaucc

SEQ ID NO: 1517215 - RNA, 19 nt, Artificial Sequence
  Description of Artificial Sequence: Synthetic oligonucleotide
gccagaaaguucaugagga

SEQ ID NO: 1517216 - RNA, 19 nt, Artificial Sequence
  Description of Artificial Sequence: Synthetic oligonucleotide
gguaguggaccucacagua

SEQ ID NO: 1517217 - RNA, 19 nt, Artificial Sequence
  Description of Artificial Sequence: Synthetic oligonucleotide
ucuuaaugaagagccuguu

SEQ ID NO: 1517218 - RNA, 19 nt, Artificial Sequence
  Description of Artificial Sequence: Synthetic oligonucleotide
agcuaccauugacgaaagg

SEQ ID NO: 1517219 - RNA, 19 nt, Artificial Sequence
  Description of Artificial Sequence: Synthetic oligonucleotide
gaagcagaccccaaauaua

SEQ ID NO: 1517220 - RNA, 19 nt, Artificial Sequence
  Description of Artificial Sequence: Synthetic oligonucleotide
accauugacgaaaggcgug

SEQ ID NO: 1517221 - RNA, 19 nt, Artificial Sequence
  Description of Artificial Sequence: Synthetic oligonucleotide
agaaguuccgugauccgau

SEQ ID NO: 1517222 - RNA, 19 nt, Artificial Sequence
  Description of Artificial Sequence: Synthetic oligonucleotide
cucauggaacccuucugga

SEQ ID NO: 1517223 - RNA, 19 nt, Artificial Sequence
  Description of Artificial Sequence: Synthetic oligonucleotide
guggcuaaguaagugucca

SEQ ID NO: 1517224 - RNA, 19 nt, Artificial Sequence
  Description of Artificial Sequence: Synthetic oligonucleotide
caguaaggcuguccguccc

SEQ ID NO: 1517225 - RNA, 19 nt, Artificial Sequence
  Description of Artificial Sequence: Synthetic oligonucleotide
uguccggucaagugcuguc

SEQ ID NO: 1517226 - RNA, 19 nt, Artificial Sequence
  Description of Artificial Sequence: Synthetic oligonucleotide
ucucaacuggcuugugcua

SEQ ID NO: 1517227 - RNA, 19 nt, Artificial Sequence
  Description of Artificial Sequence: Synthetic oligonucleotide
uggaccgaagaaggcuccg

SEQ ID NO: 1517228 - RNA, 19 nt, Artificial Sequence
  Description of Artificial Sequence: Synthetic oligonucleotide
ggucucaacuggcuugugc

SEQ ID NO: 1517229 - RNA, 19 nt, Artificial Sequence
  Description of Artificial Sequence: Synthetic oligonucleotide
aguggaccucacaguaugg

SEQ ID NO: 1517230 - RNA, 19 nt, Artificial Sequence
  Description of Artificial Sequence: Synthetic oligonucleotide
gaaguuccgugauccgauc

SEQ ID NO: 1517231 - RNA, 19 nt, Artificial Sequence
  Description of Artificial Sequence: Synthetic oligonucleotide
gaaguuugagggaggaagu

SEQ ID NO: 1517232 - RNA, 19 nt, Artificial Sequence
  Description of Artificial Sequence: Synthetic oligonucleotide
cccguuacaguaguaacag

SEQ ID NO: 1517233 - RNA, 19 nt, Artificial Sequence
  Description of Artificial Sequence: Synthetic oligonucleotide
guauggcugcccaucgugc

SEQ ID NO: 1517234 - RNA, 19 nt, Artificial Sequence
  Description of Artificial Sequence: Synthetic oligonucleotide
guggaccucacaguauggc

SEQ ID NO: 1517235 - RNA, 19 nt, Artificial Sequence
  Description of Artificial Sequence: Synthetic oligonucleotide
aggaccagugacggugaac

SEQ ID NO: 1517236 - RNA, 19 nt, Artificial Sequence
  Description of Artificial Sequence: Synthetic oligonucleotide
auacaguguugaggcacgg

SEQ ID NO: 1517237 - RNA, 19 nt, Artificial Sequence
  Description of Artificial Sequence: Synthetic oligonucleotide
agguccaaaagggcuggag

SEQ ID NO: 1517238 - RNA, 19 nt, Artificial Sequence
  Description of Artificial Sequence: Synthetic oligonucleotide
ugaacccggggcaggugcu

SEQ ID NO: 1517239 - RNA, 19 nt, Artificial Sequence
  Description of Artificial Sequence: Synthetic oligonucleotide
ggaccucacaguauggcug

SEQ ID NO: 1517240 - RNA, 19 nt, Artificial Sequence
  Description of Artificial Sequence: Synthetic oligonucleotide
gcagcggccaguaaugggc

SEQ ID NO: 1517241 - RNA, 19 nt, Artificial Sequence
  Description of Artificial Sequence: Synthetic oligonucleotide
guguugagggcugaaaugu

SEQ ID NO: 1517242 - RNA, 19 nt, Artificial Sequence
  Description of Artificial Sequence: Synthetic oligonucleotide
ugggagggaccuagcagaa

SEQ ID NO: 1517243 - RNA, 19 nt, Artificial Sequence
  Description of Artificial Sequence: Synthetic oligonucleotide
aaguguccaaugggcucuc

SEQ ID NO: 1517244 - RNA, 19 nt, Artificial Sequence
  Description of Artificial Sequence: Synthetic oligonucleotide
cccuuaugguucuuccugg

SEQ ID NO: 1517245 - RNA, 19 nt, Artificial Sequence
  Description of Artificial Sequence: Synthetic oligonucleotide
cuggcaguagggcuuguca

SEQ ID NO: 1517246 - RNA, 19 nt, Artificial Sequence
  Description of Artificial Sequence: Synthetic oligonucleotide
cuguccgucccgcucgaag

SEQ ID NO: 1517247 - RNA, 19 nt, Artificial Sequence
  Description of Artificial Sequence: Synthetic oligonucleotide
gcaguuuaaaacaguccug

SEQ ID NO: 1517248 - RNA, 19 nt, Artificial Sequence
  Description of Artificial Sequence: Synthetic oligonucleotide
ggcgcaaacaugucgaagu

SEQ ID NO: 1517249 - RNA, 19 nt, Artificial Sequence
  Description of Artificial Sequence: Synthetic oligonucleotide
ggagaagcaacgagguggc

SEQ ID NO: 1517250 - RNA, 19 nt, Artificial Sequence
  Description of Artificial Sequence: Synthetic oligonucleotide
guaggcuuugccguccuuc

SEQ ID NO: 1517251 - RNA, 19 nt, Artificial Sequence
  Description of Artificial Sequence: Synthetic oligonucleotide
ggaccgaguccagagaccc

SEQ ID NO: 1517252 - RNA, 19 nt, Artificial Sequence
  Description of Artificial Sequence: Synthetic oligonucleotide
ggaagcagaccccaaauau

SEQ ID NO: 1517253 - RNA, 19 nt, Artificial Sequence
  Description of Artificial Sequence: Synthetic oligonucleotide
agagcacagggagccucgc

SEQ ID NO: 1517254 - RNA, 19 nt, Artificial Sequence
  Description of Artificial Sequence: Synthetic oligonucleotide
gggcaauaagggaaguuug

SEQ ID NO: 1517255 - RNA, 19 nt, Artificial Sequence
  Description of Artificial Sequence: Synthetic oligonucleotide
guaauccuuccgacaguag

SEQ ID NO: 1517256 - RNA, 19 nt, Artificial Sequence
  Description of Artificial Sequence: Synthetic oligonucleotide
uucuggcaaccagagcaca

SEQ ID NO: 1517257 - RNA, 19 nt, Artificial Sequence
  Description of Artificial Sequence: Synthetic oligonucleotide
agaagccucucucggugaa

SEQ ID NO: 1517258 - RNA, 19 nt, Artificial Sequence
  Description of Artificial Sequence: Synthetic oligonucleotide
aaggagcacggagaagcaa

SEQ ID NO: 1517259 - RNA, 19 nt, Artificial Sequence
  Description of Artificial Sequence: Synthetic oligonucleotide
caacgagguggcuaaguaa

SEQ ID NO: 1517260 - RNA, 19 nt, Artificial Sequence
  Description of Artificial Sequence: Synthetic oligonucleotide
uggcuacauaaaacauuau

SEQ ID NO: 1517261 - RNA, 19 nt, Artificial Sequence
  Description of Artificial Sequence: Synthetic oligonucleotide
uggcuaaguaaguguccaa

SEQ ID NO: 1517262 - RNA, 19 nt, Artificial Sequence
  Description of Artificial Sequence: Synthetic oligonucleotide
uacacccaguaggaccgag

SEQ ID NO: 1517263 - RNA, 19 nt, Artificial Sequence
  Description of Artificial Sequence: Synthetic oligonucleotide
auguggcuacauaaaacau

SEQ ID NO: 1517264 - RNA, 19 nt, Artificial Sequence
  Description of Artificial Sequence: Synthetic oligonucleotide
augggcccguuacaguagu

SEQ ID NO: 1517265 - RNA, 19 nt, Artificial Sequence
  Description of Artificial Sequence: Synthetic oligonucleotide
ccgugauccgaucucuucc

SEQ ID NO: 1517266 - RNA, 19 nt, Artificial Sequence
  Description of Artificial Sequence: Synthetic oligonucleotide
ccaaucccucaguacaaag

SEQ ID NO: 1517267 - RNA, 19 nt, Artificial Sequence
  Description of Artificial Sequence: Synthetic oligonucleotide
ggcuacauaaaacauuauu

SEQ ID NO: 1517268 - RNA, 19 nt, Artificial Sequence
  Description of Artificial Sequence: Synthetic oligonucleotide
ggcgugaagcauucccugc

SEQ ID NO: 1517269 - RNA, 19 nt, Artificial Sequence
  Description of Artificial Sequence: Synthetic oligonucleotide
gcaauaagggaaguuugga

SEQ ID NO: 1517270 - RNA, 19 nt, Artificial Sequence
  Description of Artificial Sequence: Synthetic oligonucleotide
aucagaccccagcuuuccu

SEQ ID NO: 1517271 - RNA, 19 nt, Artificial Sequence
  Description of Artificial Sequence: Synthetic oligonucleotide
aguguccaaugggcucucc

SEQ ID NO: 1517272 - RNA, 19 nt, Artificial Sequence
  Description of Artificial Sequence: Synthetic oligonucleotide
agcaacgagguggcuaagu

SEQ ID NO: 1517273 - RNA, 19 nt, Artificial Sequence
  Description of Artificial Sequence: Synthetic oligonucleotide
cauucugcuccuugaaggu

SEQ ID NO: 1517274 - RNA, 19 nt, Artificial Sequence
  Description of Artificial Sequence: Synthetic oligonucleotide
gaaccucaguguagaaauc

SEQ ID NO: 1517275 - RNA, 19 nt, Artificial Sequence
  Description of Artificial Sequence: Synthetic oligonucleotide
gaaaggcgugaagcauucc

SEQ ID NO: 1517276 - RNA, 19 nt, Artificial Sequence
  Description of Artificial Sequence: Synthetic oligonucleotide
cuuccgacaguaggcuuug

SEQ ID NO: 1517277 - RNA, 19 nt, Artificial Sequence
  Description of Artificial Sequence: Synthetic oligonucleotide
guaaggcuguccgucccgc

SEQ ID NO: 1517278 - RNA, 19 nt, Artificial Sequence
  Description of Artificial Sequence: Synthetic oligonucleotide
ccucacgccauccccagag

SEQ ID NO: 1517279 - RNA, 19 nt, Artificial Sequence
  Description of Artificial Sequence: Synthetic oligonucleotide
cagccgccacacuuggggc

SEQ ID NO: 1517280 - RNA, 19 nt, Artificial Sequence
  Description of Artificial Sequence: Synthetic oligonucleotide
ccucucucggugaacccgg

SEQ ID NO: 1517281 - RNA, 19 nt, Artificial Sequence
  Description of Artificial Sequence: Synthetic oligonucleotide
ggcccguuacaguaguaac

SEQ ID NO: 1517282 - RNA, 19 nt, Artificial Sequence
  Description of Artificial Sequence: Synthetic oligonucleotide
cacacuuggggcgcaaaca

SEQ ID NO: 1517283 - RNA, 19 nt, Artificial Sequence
  Description of Artificial Sequence: Synthetic oligonucleotide
uccgucccgcucgaagaag

SEQ ID NO: 1517284 - RNA, 19 nt, Artificial Sequence
  Description of Artificial Sequence: Synthetic oligonucleotide
gugauacacccaguaggac

SEQ ID NO: 1517285 - RNA, 19 nt, Artificial Sequence
  Description of Artificial Sequence: Synthetic oligonucleotide
cucucucggugaacccggg

SEQ ID NO: 1517286 - RNA, 19 nt, Artificial Sequence
  Description of Artificial Sequence: Synthetic oligonucleotide
cauggcggugaugcagcgg

SEQ ID NO: 1517287 - RNA, 19 nt, Artificial Sequence
  Description of Artificial Sequence: Synthetic oligonucleotide
gagaaggcggaaggagcac

SEQ ID NO: 1517288 - RNA, 19 nt, Artificial Sequence
  Description of Artificial Sequence: Synthetic oligonucleotide
cccagagauggagaugugg

SEQ ID NO: 1517289 - RNA, 19 nt, Artificial Sequence
  Description of Artificial Sequence: Synthetic oligonucleotide
ggaugggcccguuacagua

SEQ ID NO: 1517290 - RNA, 19 nt, Artificial Sequence
  Description of Artificial Sequence: Synthetic oligonucleotide
auacgaagucgaaccucag

SEQ ID NO: 1517291 - RNA, 19 nt, Artificial Sequence
  Description of Artificial Sequence: Synthetic oligonucleotide
gggacguucuucaaaucuc

SEQ ID NO: 1517292 - RNA, 19 nt, Artificial Sequence
  Description of Artificial Sequence: Synthetic oligonucleotide
uggagacccucagaccagu

SEQ ID NO: 1517293 - RNA, 19 nt, Artificial Sequence
  Description of Artificial Sequence: Synthetic oligonucleotide
aaggcggaaggagcacgga

SEQ ID NO: 1517294 - RNA, 19 nt, Artificial Sequence
  Description of Artificial Sequence: Synthetic oligonucleotide
gacccuuaugguucuuccu

SEQ ID NO: 1517295 - RNA, 19 nt, Artificial Sequence
  Description of Artificial Sequence: Synthetic oligonucleotide
cuccgcacugagcacagaa

SEQ ID NO: 1517296 - RNA, 19 nt, Artificial Sequence
  Description of Artificial Sequence: Synthetic oligonucleotide
cucaacuggcuugugcuaa

SEQ ID NO: 1517297 - RNA, 19 nt, Artificial Sequence
  Description of Artificial Sequence: Synthetic oligonucleotide
acaggacacaggagguuca

SEQ ID NO: 1517298 - RNA, 19 nt, Artificial Sequence
  Description of Artificial Sequence: Synthetic oligonucleotide
aagcaacgagguggcuaag

SEQ ID NO: 1517299 - RNA, 19 nt, Artificial Sequence
  Description of Artificial Sequence: Synthetic oligonucleotide
ccggguggaacuucuuggc

SEQ ID NO: 1517300 - RNA, 19 nt, Artificial Sequence
  Description of Artificial Sequence: Synthetic oligonucleotide
gccucucucggugaacccg

SEQ ID NO: 1517301 - RNA, 19 nt, Artificial Sequence
  Description of Artificial Sequence: Synthetic oligonucleotide
cuccuuguugccagaaagu

SEQ ID NO: 1517302 - RNA, 19 nt, Artificial Sequence
  Description of Artificial Sequence: Synthetic oligonucleotide
uuccgugauccgaucucuu

SEQ ID NO: 1517303 - RNA, 19 nt, Artificial Sequence
  Description of Artificial Sequence: Synthetic oligonucleotide
cccaguaggaccgagucca

SEQ ID NO: 1517304 - RNA, 19 nt, Artificial Sequence
  Description of Artificial Sequence: Synthetic oligonucleotide
ggugccauguccggucaag

SEQ ID NO: 1517305 - RNA, 19 nt, Artificial Sequence
  Description of Artificial Sequence: Synthetic oligonucleotide
ggcacggguggccaucccc

SEQ ID NO: 1517306 - RNA, 19 nt, Artificial Sequence
  Description of Artificial Sequence: Synthetic oligonucleotide
ucgugguaguggaccucac

SEQ ID NO: 1517307 - RNA, 19 nt, Artificial Sequence
  Description of Artificial Sequence: Synthetic oligonucleotide
aggcacggguggccauccc

SEQ ID NO: 1517308 - RNA, 19 nt, Artificial Sequence
  Description of Artificial Sequence: Synthetic oligonucleotide
gacgaaaggcgugaagcau

SEQ ID NO: 1517309 - RNA, 19 nt, Artificial Sequence
  Description of Artificial Sequence: Synthetic oligonucleotide
augggcgcgggcacagccg

SEQ ID NO: 1517310 - RNA, 19 nt, Artificial Sequence
  Description of Artificial Sequence: Synthetic oligonucleotide
gaggcacggguggccaucc

SEQ ID NO: 1517311 - RNA, 19 nt, Artificial Sequence
  Description of Artificial Sequence: Synthetic oligonucleotide
ugaggcacggguggccauc

SEQ ID NO: 1517312 - RNA, 19 nt, Artificial Sequence
  Description of Artificial Sequence: Synthetic oligonucleotide
aggaagugauacacccagu

SEQ ID NO: 1517313 - RNA, 19 nt, Artificial Sequence
  Description of Artificial Sequence: Synthetic oligonucleotide
gcgugaagcauucccugca

SEQ ID NO: 1517314 - RNA, 19 nt, Artificial Sequence
  Description of Artificial Sequence: Synthetic oligonucleotide
gcuugugcuaagaaacaaa

SEQ ID NO: 1517315 - RNA, 19 nt, Artificial Sequence
  Description of Artificial Sequence: Synthetic oligonucleotide
gcaacgagguggcuaagua

SEQ ID NO: 1517316 - RNA, 19 nt, Artificial Sequence
  Description of Artificial Sequence: Synthetic oligonucleotide
gagcacggagaagcaacga

SEQ ID NO: 1517317 - RNA, 19 nt, Artificial Sequence
  Description of Artificial Sequence: Synthetic oligonucleotide
acgagguggcuaaguaagu

SEQ ID NO: 1517318 - RNA, 19 nt, Artificial Sequence
  Description of Artificial Sequence: Synthetic oligonucleotide
aggaaguuugagggaggaa

SEQ ID NO: 1517319 - RNA, 19 nt, Artificial Sequence
  Description of Artificial Sequence: Synthetic oligonucleotide
ccgcacugagcacagaaga

SEQ ID NO: 1517320 - RNA, 19 nt, Artificial Sequence
  Description of Artificial Sequence: Synthetic oligonucleotide
gcccguuacaguaguaaca

SEQ ID NO: 1517321 - RNA, 19 nt, Artificial Sequence
  Description of Artificial Sequence: Synthetic oligonucleotide
ccguuacaguaguaacagc

SEQ ID NO: 1517322 - RNA, 19 nt, Artificial Sequence
  Description of Artificial Sequence: Synthetic oligonucleotide
cucgaagaaguuccgugau

SEQ ID NO: 1517323 - RNA, 19 nt, Artificial Sequence
  Description of Artificial Sequence: Synthetic oligonucleotide
acacccaguaggaccgagu

SEQ ID NO: 1517324 - RNA, 19 nt, Artificial Sequence
  Description of Artificial Sequence: Synthetic oligonucleotide
gaaguguuccgggugccau

SEQ ID NO: 1517325 - RNA, 19 nt, Artificial Sequence
  Description of Artificial Sequence: Synthetic oligonucleotide
gucccgcucgaagaaguuc

SEQ ID NO: 1517326 - RNA, 19 nt, Artificial Sequence
  Description of Artificial Sequence: Synthetic oligonucleotide
gggcgcaaacaugucgaag

SEQ ID NO: 1517327 - RNA, 19 nt, Artificial Sequence
  Description of Artificial Sequence: Synthetic oligonucleotide
agugcuccggguggaacuu

SEQ ID NO: 1517328 - RNA, 19 nt, Artificial Sequence
  Description of Artificial Sequence: Synthetic oligonucleotide
cgaaaggcgugaagcauuc

SEQ ID NO: 1517329 - RNA, 19 nt, Artificial Sequence
  Description of Artificial Sequence: Synthetic oligonucleotide
cacggguggccauccccac

SEQ ID NO: 1517330 - RNA, 19 nt, Artificial Sequence
  Description of Artificial Sequence: Synthetic oligonucleotide
ggaccgaagaaggcuccgc

SEQ ID NO: 1517331 - RNA, 19 nt, Artificial Sequence
  Description of Artificial Sequence: Synthetic oligonucleotide
guuccgugauccgaucucu

SEQ ID NO: 1517332 - RNA, 19 nt, Artificial Sequence
  Description of Artificial Sequence: Synthetic oligonucleotide
guaguccuuuucacaguaa

SEQ ID NO: 1517333 - RNA, 19 nt, Artificial Sequence
  Description of Artificial Sequence: Synthetic oligonucleotide
gcggaaggagcacggagaa

SEQ ID NO: 1517334 - RNA, 19 nt, Artificial Sequence
  Description of Artificial Sequence: Synthetic oligonucleotide
ugggcccguuacaguagua

SEQ ID NO: 1517335 - RNA, 19 nt, Artificial Sequence
  Description of Artificial Sequence: Synthetic oligonucleotide
gucgaaccucaguguagaa

SEQ ID NO: 1517336 - RNA, 19 nt, Artificial Sequence
  Description of Artificial Sequence: Synthetic oligonucleotide
aguaggcuuugccguccuu

SEQ ID NO: 1517337 - RNA, 19 nt, Artificial Sequence
  Description of Artificial Sequence: Synthetic oligonucleotide
ggcuaaguaaguguccaau

SEQ ID NO: 1517338 - RNA, 19 nt, Artificial Sequence
  Description of Artificial Sequence: Synthetic oligonucleotide
cucgccgcucgugguagug

SEQ ID NO: 1517339 - RNA, 19 nt, Artificial Sequence
  Description of Artificial Sequence: Synthetic oligonucleotide
ccgcucgugguaguggacc

SEQ ID NO: 1517340 - RNA, 19 nt, Artificial Sequence
  Description of Artificial Sequence: Synthetic oligonucleotide
uuccgacaguaggcuuugc

SEQ ID NO: 1517341 - RNA, 19 nt, Artificial Sequence
  Description of Artificial Sequence: Synthetic oligonucleotide
cgagguggcuaaguaagug

SEQ ID NO: 1517342 - RNA, 19 nt, Artificial Sequence
  Description of Artificial Sequence: Synthetic oligonucleotide
cggugaacaaagucaagaa

SEQ ID NO: 1517343 - RNA, 19 nt, Artificial Sequence
  Description of Artificial Sequence: Synthetic oligonucleotide
agccucgccgcucguggua

SEQ ID NO: 1517344 - RNA, 19 nt, Artificial Sequence
  Description of Artificial Sequence: Synthetic oligonucleotide
agcagaccccaaauauaua

SEQ ID NO: 1517345 - RNA, 19 nt, Artificial Sequence
  Description of Artificial Sequence: Synthetic oligonucleotide
uggaacccuucuggaccga

SEQ ID NO: 1517346 - RNA, 19 nt, Artificial Sequence
  Description of Artificial Sequence: Synthetic oligonucleotide
ccucacaguauggcugccc

SEQ ID NO: 1517347 - RNA, 19 nt, Artificial Sequence
  Description of Artificial Sequence: Synthetic oligonucleotide
ccauugacgaaaggcguga

SEQ ID NO: 1517348 - RNA, 19 nt, Artificial Sequence
  Description of Artificial Sequence: Synthetic oligonucleotide
acccucagaccaguucuua

SEQ ID NO: 1517349 - RNA, 19 nt, Artificial Sequence
  Description of Artificial Sequence: Synthetic oligonucleotide
uggcuccugauggcuugcu

SEQ ID NO: 1517350 - RNA, 19 nt, Artificial Sequence
  Description of Artificial Sequence: Synthetic oligonucleotide
cauugacgaaaggcgugaa

SEQ ID NO: 1517351 - RNA, 19 nt, Artificial Sequence
  Description of Artificial Sequence: Synthetic oligonucleotide
guaguggaccucacaguau

SEQ ID NO: 1517352 - RNA, 19 nt, Artificial Sequence
  Description of Artificial Sequence: Synthetic oligonucleotide
ccauguccggucaagugcu

SEQ ID NO: 1517353 - RNA, 19 nt, Artificial Sequence
  Description of Artificial Sequence: Synthetic oligonucleotide
gcgcaaacaugucgaagua

SEQ ID NO: 1517354 - RNA, 19 nt, Artificial Sequence
  Description of Artificial Sequence: Synthetic oligonucleotide
ccgggugccauguccgguc

SEQ ID NO: 1517355 - RNA, 19 nt, Artificial Sequence
  Description of Artificial Sequence: Synthetic oligonucleotide
ggcuccgcacugagcacag

SEQ ID NO: 1517356 - RNA, 19 nt, Artificial Sequence
  Description of Artificial Sequence: Synthetic oligonucleotide
gcacggguggccaucccca

SEQ ID NO: 1517357 - RNA, 19 nt, Artificial Sequence
  Description of Artificial Sequence: Synthetic oligonucleotide
ggugaacccggggcaggug

SEQ ID NO: 1517358 - RNA, 19 nt, Artificial Sequence
  Description of Artificial Sequence: Synthetic oligonucleotide
gccgccacacuuggggcgc

SEQ ID NO: 1517359 - RNA, 19 nt, Artificial Sequence
  Description of Artificial Sequence: Synthetic oligonucleotide
cagcggccaguaaugggcu

SEQ ID NO: 1517360 - RNA, 19 nt, Artificial Sequence
  Description of Artificial Sequence: Synthetic oligonucleotide
gccucgccgcucgugguag

SEQ ID NO: 1517361 - RNA, 19 nt, Artificial Sequence
  Description of Artificial Sequence: Synthetic oligonucleotide
gccucccuugggaacagga

SEQ ID NO: 1517362 - RNA, 19 nt, Artificial Sequence
  Description of Artificial Sequence: Synthetic oligonucleotide
cgacaguaggcuuugccgu

SEQ ID NO: 1517363 - RNA, 19 nt, Artificial Sequence
  Description of Artificial Sequence: Synthetic oligonucleotide
cagugacggugaacaaagu

SEQ ID NO: 1517364 - RNA, 19 nt, Artificial Sequence
  Description of Artificial Sequence: Synthetic oligonucleotide
gcaggaccagugacgguga

SEQ ID NO: 1517365 - RNA, 19 nt, Artificial Sequence
  Description of Artificial Sequence: Synthetic oligonucleotide
ggggcgcaaacaugucgaa

SEQ ID NO: 1517366 - RNA, 19 nt, Artificial Sequence
  Description of Artificial Sequence: Synthetic oligonucleotide
gugccauguccggucaagu

SEQ ID NO: 1517367 - RNA, 19 nt, Artificial Sequence
  Description of Artificial Sequence: Synthetic oligonucleotide
gagaagcaacgagguggcu

SEQ ID NO: 1517368 - RNA, 19 nt, Artificial Sequence
  Description of Artificial Sequence: Synthetic oligonucleotide
agggagccucgccgcucgu

SEQ ID NO: 1517369 - RNA, 19 nt, Artificial Sequence
  Description of Artificial Sequence: Synthetic oligonucleotide
ggaccuagcagaagagcuu

SEQ ID NO: 1517370 - RNA, 19 nt, Artificial Sequence
  Description of Artificial Sequence: Synthetic oligonucleotide
ccuuccgacaguaggcuuu

SEQ ID NO: 1517371 - RNA, 19 nt, Artificial Sequence
  Description of Artificial Sequence: Synthetic oligonucleotide
ggaacccuucuggaccgaa

SEQ ID NO: 1517372 - RNA, 19 nt, Artificial Sequence
  Description of Artificial Sequence: Synthetic oligonucleotide
cgugguaguggaccucaca

SEQ ID NO: 1517373 - RNA, 19 nt, Artificial Sequence
  Description of Artificial Sequence: Synthetic oligonucleotide
caggaccagugacggugaa

SEQ ID NO: 1517374 - RNA, 19 nt, Artificial Sequence
  Description of Artificial Sequence: Synthetic oligonucleotide
gaccgaguccagagacccu

SEQ ID NO: 1517375 - RNA, 19 nt, Artificial Sequence
  Description of Artificial Sequence: Synthetic oligonucleotide
ccccagagauggagaugug

SEQ ID NO: 1517376 - RNA, 19 nt, Artificial Sequence
  Description of Artificial Sequence: Synthetic oligonucleotide
cauccccaccucacgccau

SEQ ID NO: 1517377 - RNA, 19 nt, Artificial Sequence
  Description of Artificial Sequence: Synthetic oligonucleotide
ggcuguccgucccgcucga

SEQ ID NO: 1517378 - RNA, 19 nt, Artificial Sequence
  Description of Artificial Sequence: Synthetic oligonucleotide
gccgcucgugguaguggac

SEQ ID NO: 1517379 - RNA, 19 nt, Artificial Sequence
  Description of Artificial Sequence: Synthetic oligonucleotide
gguggaugggagggaccua

SEQ ID NO: 1517380 - RNA, 19 nt, Artificial Sequence
  Description of Artificial Sequence: Synthetic oligonucleotide
gccacacuuggggcgcaaa

SEQ ID NO: 1517381 - RNA, 19 nt, Artificial Sequence
  Description of Artificial Sequence: Synthetic oligonucleotide
ccgaguccagagacccuua

SEQ ID NO: 1517382 - RNA, 19 nt, Artificial Sequence
  Description of Artificial Sequence: Synthetic oligonucleotide
ccugggcaauaagggaagu

SEQ ID NO: 1517383 - RNA, 19 nt, Artificial Sequence
  Description of Artificial Sequence: Synthetic oligonucleotide
ggagacccucagaccaguu

SEQ ID NO: 1517384 - RNA, 19 nt, Artificial Sequence
  Description of Artificial Sequence: Synthetic oligonucleotide
cgaguccagagacccuuau

SEQ ID NO: 1517385 - RNA, 19 nt, Artificial Sequence
  Description of Artificial Sequence: Synthetic oligonucleotide
gcuguccgucccgcucgaa

SEQ ID NO: 1517386 - RNA, 19 nt, Artificial Sequence
  Description of Artificial Sequence: Synthetic oligonucleotide
ccgcucgaagaaguuccgu

SEQ ID NO: 1517387 - RNA, 19 nt, Artificial Sequence
  Description of Artificial Sequence: Synthetic oligonucleotide
cggccaguaaugggcuucu

SEQ ID NO: 1517388 - RNA, 19 nt, Artificial Sequence
  Description of Artificial Sequence: Synthetic oligonucleotide
ccucgccgcucgugguagu

SEQ ID NO: 1517389 - RNA, 19 nt, Artificial Sequence
  Description of Artificial Sequence: Synthetic oligonucleotide
ccgccacacuuggggcgca

SEQ ID NO: 1517390 - RNA, 19 nt, Artificial Sequence
  Description of Artificial Sequence: Synthetic oligonucleotide
aaauugaccaucucggagc

SEQ ID NO: 1517391 - RNA, 19 nt, Artificial Sequence
  Description of Artificial Sequence: Synthetic oligonucleotide
aguagugaacaucugaucc

SEQ ID NO: 1517392 - RNA, 19 nt, Artificial Sequence
  Description of Artificial Sequence: Synthetic oligonucleotide
gaugcaagcauggaaaucg

SEQ ID NO: 1517393 - RNA, 19 nt, Artificial Sequence
  Description of Artificial Sequence: Synthetic oligonucleotide
aaagugacuaucccaauug

SEQ ID NO: 1517394 - RNA, 19 nt, Artificial Sequence
  Description of Artificial Sequence: Synthetic oligonucleotide
aucgccugguuuuagaugc

SEQ ID NO: 1517395 - RNA, 19 nt, Artificial Sequence
  Description of Artificial Sequence: Synthetic oligonucleotide
aauccuacaaucaccaagg

SEQ ID NO: 1517396 - RNA, 19 nt, Artificial Sequence
  Description of Artificial Sequence: Synthetic oligonucleotide
gauggagggguuuagauug

SEQ ID NO: 1517397 - RNA, 19 nt, Artificial Sequence
  Description of Artificial Sequence: Synthetic oligonucleotide
ccuacaaucaccaaggucc

SEQ ID NO: 1517398 - RNA, 19 nt, Artificial Sequence
  Description of Artificial Sequence: Synthetic oligonucleotide
uagacuuuccucaauauaa

SEQ ID NO: 1517399 - RNA, 19 nt, Artificial Sequence
  Description of Artificial Sequence: Synthetic oligonucleotide
uaaauugaccaucucggag

SEQ ID NO: 1517400 - RNA, 19 nt, Artificial Sequence
  Description of Artificial Sequence: Synthetic oligonucleotide
uguuucucggggaacaccg

SEQ ID NO: 1517401 - RNA, 19 nt, Artificial Sequence
  Description of Artificial Sequence: Synthetic oligonucleotide
uuuuagaugcuucaccaug

SEQ ID NO: 1517402 - RNA, 19 nt, Artificial Sequence
  Description of Artificial Sequence: Synthetic oligonucleotide
ucuccuacuuuuaugacug

SEQ ID NO: 1517403 - RNA, 19 nt, Artificial Sequence
  Description of Artificial Sequence: Synthetic oligonucleotide
ugagaggguaagcugaggg

SEQ ID NO: 1517404 - RNA, 19 nt, Artificial Sequence
  Description of Artificial Sequence: Synthetic oligonucleotide
agaaacugaaccucggcgg

SEQ ID NO: 1517405 - RNA, 19 nt, Artificial Sequence
  Description of Artificial Sequence: Synthetic oligonucleotide
gagaaacugaaccucggcg

SEQ ID NO: 1517406 - RNA, 19 nt, Artificial Sequence
  Description of Artificial Sequence: Synthetic oligonucleotide
uuuaaggcacaccaacucc

SEQ ID NO: 1517407 - RNA, 19 nt, Artificial Sequence
  Description of Artificial Sequence: Synthetic oligonucleotide
auggaaaucgccauuggcc

SEQ ID NO: 1517408 - RNA, 19 nt, Artificial Sequence
  Description of Artificial Sequence: Synthetic oligonucleotide
agggguuuagauuguaucg

SEQ ID NO: 1517409 - RNA, 19 nt, Artificial Sequence
  Description of Artificial Sequence: Synthetic oligonucleotide
uuucacaauaaaaucucca

SEQ ID NO: 1517410 - RNA, 19 nt, Artificial Sequence
  Description of Artificial Sequence: Synthetic oligonucleotide
gaaaucagcauugugcuug

SEQ ID NO: 1517411 - RNA, 19 nt, Artificial Sequence
  Description of Artificial Sequence: Synthetic oligonucleotide
uuggccacaagcaaaguga

SEQ ID NO: 1517412 - RNA, 19 nt, Artificial Sequence
  Description of Artificial Sequence: Synthetic oligonucleotide
agcgaauguccccaggucc

SEQ ID NO: 1517413 - RNA, 19 nt, Artificial Sequence
  Description of Artificial Sequence: Synthetic oligonucleotide
agaaugcaucuuuagcagc

SEQ ID NO: 1517414 - RNA, 19 nt, Artificial Sequence
  Description of Artificial Sequence: Synthetic oligonucleotide
ugcacuagggguaaauuga

SEQ ID NO: 1517415 - RNA, 19 nt, Artificial Sequence
  Description of Artificial Sequence: Synthetic oligonucleotide
aggaauguaagcuagggua

SEQ ID NO: 1517416 - RNA, 19 nt, Artificial Sequence
  Description of Artificial Sequence: Synthetic oligonucleotide
ucccaauuggcccagcucc

SEQ ID NO: 1517417 - RNA, 19 nt, Artificial Sequence
  Description of Artificial Sequence: Synthetic oligonucleotide
uuacuggcaacuuccagag

SEQ ID NO: 1517418 - RNA, 19 nt, Artificial Sequence
  Description of Artificial Sequence: Synthetic oligonucleotide
uuuucacaauaaaaucucc

SEQ ID NO: 1517419 - RNA, 19 nt, Artificial Sequence
  Description of Artificial Sequence: Synthetic oligonucleotide
cucgauggcaacccgaucg

SEQ ID NO: 1517420 - RNA, 19 nt, Artificial Sequence
  Description of Artificial Sequence: Synthetic oligonucleotide
acuagggguaaauugacca

SEQ ID NO: 1517421 - RNA, 19 nt, Artificial Sequence
  Description of Artificial Sequence: Synthetic oligonucleotide
aauguccccagguccgugc

SEQ ID NO: 1517422 - RNA, 19 nt, Artificial Sequence
  Description of Artificial Sequence: Synthetic oligonucleotide
gguaaauugaccaucucgg

SEQ ID NO: 1517423 - RNA, 19 nt, Artificial Sequence
  Description of Artificial Sequence: Synthetic oligonucleotide
aaacaucucauucuggcua

SEQ ID NO: 1517424 - RNA, 19 nt, Artificial Sequence
  Description of Artificial Sequence: Synthetic oligonucleotide
auagaugccggucuggaug

SEQ ID NO: 1517425 - RNA, 19 nt, Artificial Sequence
  Description of Artificial Sequence: Synthetic oligonucleotide
agagaaacugaaccucggc

SEQ ID NO: 1517426 - RNA, 19 nt, Artificial Sequence
  Description of Artificial Sequence: Synthetic oligonucleotide
uuuagaugcuucaccaugu

SEQ ID NO: 1517427 - RNA, 19 nt, Artificial Sequence
  Description of Artificial Sequence: Synthetic oligonucleotide
cuugaggaauguaagcuag

SEQ ID NO: 1517428 - RNA, 19 nt, Artificial Sequence
  Description of Artificial Sequence: Synthetic oligonucleotide
acuuuuaugacugucccug

SEQ ID NO: 1517429 - RNA, 19 nt, Artificial Sequence
  Description of Artificial Sequence: Synthetic oligonucleotide
gaaaucagcuccaacuucc

SEQ ID NO: 1517430 - RNA, 19 nt, Artificial Sequence
  Description of Artificial Sequence: Synthetic oligonucleotide
aucaagggcaucccauucc

SEQ ID NO: 1517431 - RNA, 19 nt, Artificial Sequence
  Description of Artificial Sequence: Synthetic oligonucleotide
uuuggccacaagcaaagug

SEQ ID NO: 1517432 - RNA, 19 nt, Artificial Sequence
  Description of Artificial Sequence: Synthetic oligonucleotide
agcccuuagaugcugagag

SEQ ID NO: 1517433 - RNA, 19 nt, Artificial Sequence
  Description of Artificial Sequence: Synthetic oligonucleotide
acauucaaggccuuugaug

SEQ ID NO: 1517434 - RNA, 19 nt, Artificial Sequence
  Description of Artificial Sequence: Synthetic oligonucleotide
caauccuacaaucaccaag

SEQ ID NO: 1517435 - RNA, 19 nt, Artificial Sequence
  Description of Artificial Sequence: Synthetic oligonucleotide
aggaaugcacauuaggggu

SEQ ID NO: 1517436 - RNA, 19 nt, Artificial Sequence
  Description of Artificial Sequence: Synthetic oligonucleotide
gauuggguaguucuccaag

SEQ ID NO: 1517437 - RNA, 19 nt, Artificial Sequence
  Description of Artificial Sequence: Synthetic oligonucleotide
ugacuaucccaauuggccc

SEQ ID NO: 1517438 - RNA, 19 nt, Artificial Sequence
  Description of Artificial Sequence: Synthetic oligonucleotide
accuauggguaacuaaagg

SEQ ID NO: 1517439 - RNA, 19 nt, Artificial Sequence
  Description of Artificial Sequence: Synthetic oligonucleotide
uaucuaaacacgcccuuga

SEQ ID NO: 1517440 - RNA, 19 nt, Artificial Sequence
  Description of Artificial Sequence: Synthetic oligonucleotide
gauauggagggugaaauca

SEQ ID NO: 1517441 - RNA, 19 nt, Artificial Sequence
  Description of Artificial Sequence: Synthetic oligonucleotide
ugcaguaucuaaacacgcc

SEQ ID NO: 1517442 - RNA, 19 nt, Artificial Sequence
  Description of Artificial Sequence: Synthetic oligonucleotide
cuggauggaggauucagcc

SEQ ID NO: 1517443 - RNA, 19 nt, Artificial Sequence
  Description of Artificial Sequence: Synthetic oligonucleotide
uuuagauuguaucggccaa

SEQ ID NO: 1517444 - RNA, 19 nt, Artificial Sequence
  Description of Artificial Sequence: Synthetic oligonucleotide
uuaugacugucccugcagc

SEQ ID NO: 1517445 - RNA, 19 nt, Artificial Sequence
  Description of Artificial Sequence: Synthetic oligonucleotide
uaacuuucagccccacucc

SEQ ID NO: 1517446 - RNA, 19 nt, Artificial Sequence
  Description of Artificial Sequence: Synthetic oligonucleotide
ugaucauaacuuucagccc

SEQ ID NO: 1517447 - RNA, 19 nt, Artificial Sequence
  Description of Artificial Sequence: Synthetic oligonucleotide
acauuagggguucugguca

SEQ ID NO: 1517448 - RNA, 19 nt, Artificial Sequence
  Description of Artificial Sequence: Synthetic oligonucleotide
agcccaauccuacaaucac

SEQ ID NO: 1517449 - RNA, 19 nt, Artificial Sequence
  Description of Artificial Sequence: Synthetic oligonucleotide
uugcaguaucuaaacacgc

SEQ ID NO: 1517450 - RNA, 19 nt, Artificial Sequence
  Description of Artificial Sequence: Synthetic oligonucleotide
guaagcugagggcacagag

SEQ ID NO: 1517451 - RNA, 19 nt, Artificial Sequence
  Description of Artificial Sequence: Synthetic oligonucleotide
agugacuaucccaauuggc

SEQ ID NO: 1517452 - RNA, 19 nt, Artificial Sequence
  Description of Artificial Sequence: Synthetic oligonucleotide
aagcgaauguccccagguc

SEQ ID NO: 1517453 - RNA, 19 nt, Artificial Sequence
  Description of Artificial Sequence: Synthetic oligonucleotide
agauauggagggugaaauc

SEQ ID NO: 1517454 - RNA, 19 nt, Artificial Sequence
  Description of Artificial Sequence: Synthetic oligonucleotide
uuacauucaaggccuuuga

SEQ ID NO: 1517455 - RNA, 19 nt, Artificial Sequence
  Description of Artificial Sequence: Synthetic oligonucleotide
uuuuaugacugucccugca

SEQ ID NO: 1517456 - RNA, 19 nt, Artificial Sequence
  Description of Artificial Sequence: Synthetic oligonucleotide
uguaagcuaggguaccuca

SEQ ID NO: 1517457 - RNA, 19 nt, Artificial Sequence
  Description of Artificial Sequence: Synthetic oligonucleotide
acaaucaccaaggucccac

SEQ ID NO: 1517458 - RNA, 19 nt, Artificial Sequence
  Description of Artificial Sequence: Synthetic oligonucleotide
gaaacugaaccucggcggc

SEQ ID NO: 1517459 - RNA, 19 nt, Artificial Sequence
  Description of Artificial Sequence: Synthetic oligonucleotide
gugacuaucccaauuggcc

SEQ ID NO: 1517460 - RNA, 19 nt, Artificial Sequence
  Description of Artificial Sequence: Synthetic oligonucleotide
guuuagauuguaucggcca

SEQ ID NO: 1517461 - RNA, 19 nt, Artificial Sequence
  Description of Artificial Sequence: Synthetic oligonucleotide
cuuuaaggcacaccaacuc

SEQ ID NO: 1517462 - RNA, 19 nt, Artificial Sequence
  Description of Artificial Sequence: Synthetic oligonucleotide
uaacuaaaggcuuuacauu

SEQ ID NO: 1517463 - RNA, 19 nt, Artificial Sequence
  Description of Artificial Sequence: Synthetic oligonucleotide
ccuauggguaacuaaaggc

SEQ ID NO: 1517464 - RNA, 19 nt, Artificial Sequence
  Description of Artificial Sequence: Synthetic oligonucleotide
gucuuuaaggcacaccaac

SEQ ID NO: 1517465 - RNA, 19 nt, Artificial Sequence
  Description of Artificial Sequence: Synthetic oligonucleotide
aucugauccgcagaucccc

SEQ ID NO: 1517466 - RNA, 19 nt, Artificial Sequence
  Description of Artificial Sequence: Synthetic oligonucleotide
guagaagcgacagagguuc

SEQ ID NO: 1517467 - RNA, 19 nt, Artificial Sequence
  Description of Artificial Sequence: Synthetic oligonucleotide
aauagugacuuccggcuuu

SEQ ID NO: 1517468 - RNA, 19 nt, Artificial Sequence
  Description of Artificial Sequence: Synthetic oligonucleotide
aaucagggccccuucuuca

SEQ ID NO: 1517469 - RNA, 19 nt, Artificial Sequence
  Description of Artificial Sequence: Synthetic oligonucleotide
gaggauucagccccugugc

SEQ ID NO: 1517470 - RNA, 19 nt, Artificial Sequence
  Description of Artificial Sequence: Synthetic oligonucleotide
ugucaggaagcuuguagca

SEQ ID NO: 1517471 - RNA, 19 nt, Artificial Sequence
  Description of Artificial Sequence: Synthetic oligonucleotide
uauggguaacuaaaggcuu

SEQ ID NO: 1517472 - RNA, 19 nt, Artificial Sequence
  Description of Artificial Sequence: Synthetic oligonucleotide
guagcagaaaucagcauug

SEQ ID NO: 1517473 - RNA, 19 nt, Artificial Sequence
  Description of Artificial Sequence: Synthetic oligonucleotide
cauggaaaucgccauuggc

SEQ ID NO: 1517474 - RNA, 19 nt, Artificial Sequence
  Description of Artificial Sequence: Synthetic oligonucleotide
ucuaaacacgcccuugaua

SEQ ID NO: 1517475 - RNA, 19 nt, Artificial Sequence
  Description of Artificial Sequence: Synthetic oligonucleotide
gugaguggcauagaugccg

SEQ ID NO: 1517476 - RNA, 19 nt, Artificial Sequence
  Description of Artificial Sequence: Synthetic oligonucleotide
gacuuuccucaauauaaac

SEQ ID NO: 1517477 - RNA, 19 nt, Artificial Sequence
  Description of Artificial Sequence: Synthetic oligonucleotide
gaaaucgccauuggccacg

SEQ ID NO: 1517478 - RNA, 19 nt, Artificial Sequence
  Description of Artificial Sequence: Synthetic oligonucleotide
aggugagugcccuuacuuc

SEQ ID NO: 1517479 - RNA, 19 nt, Artificial Sequence
  Description of Artificial Sequence: Synthetic oligonucleotide
aucgccauuggccacgugu

SEQ ID NO: 1517480 - RNA, 19 nt, Artificial Sequence
  Description of Artificial Sequence: Synthetic oligonucleotide
aggucccugaagcaucccc

SEQ ID NO: 1517481 - RNA, 19 nt, Artificial Sequence
  Description of Artificial Sequence: Synthetic oligonucleotide
auuaugaguuaauuauuuu

SEQ ID NO: 1517482 - RNA, 19 nt, Artificial Sequence
  Description of Artificial Sequence: Synthetic oligonucleotide
uugugcuuguagaagcgac

SEQ ID NO: 1517483 - RNA, 19 nt, Artificial Sequence
  Description of Artificial Sequence: Synthetic oligonucleotide
uuagaugcugagaggguaa

SEQ ID NO: 1517484 - RNA, 19 nt, Artificial Sequence
  Description of Artificial Sequence: Synthetic oligonucleotide
agugacuuccggcuuucuc

SEQ ID NO: 1517485 - RNA, 19 nt, Artificial Sequence
  Description of Artificial Sequence: Synthetic oligonucleotide
ucaagggcaucccauuccu

SEQ ID NO: 1517486 - RNA, 19 nt, Artificial Sequence
  Description of Artificial Sequence: Synthetic oligonucleotide
uuggagauauggaggguga

SEQ ID NO: 1517487 - RNA, 19 nt, Artificial Sequence
  Description of Artificial Sequence: Synthetic oligonucleotide
gguuuuagaugcuucacca

SEQ ID NO: 1517488 - RNA, 19 nt, Artificial Sequence
  Description of Artificial Sequence: Synthetic oligonucleotide
ggaacaccgggcucgaugg

SEQ ID NO: 1517489 - RNA, 19 nt, Artificial Sequence
  Description of Artificial Sequence: Synthetic oligonucleotide
gaagcgacagagguucccg

SEQ ID NO: 1517490 - RNA, 19 nt, Artificial Sequence
  Description of Artificial Sequence: Synthetic oligonucleotide
gugcacuagggguaaauug

SEQ ID NO: 1517491 - RNA, 19 nt, Artificial Sequence
  Description of Artificial Sequence: Synthetic oligonucleotide
gaaccuauggguaacuaaa

SEQ ID NO: 1517492 - RNA, 19 nt, Artificial Sequence
  Description of Artificial Sequence: Synthetic oligonucleotide
cuugagaagcucccauugc

SEQ ID NO: 1517493 - RNA, 19 nt, Artificial Sequence
  Description of Artificial Sequence: Synthetic oligonucleotide
uccuacaaucaccaagguc

SEQ ID NO: 1517494 - RNA, 19 nt, Artificial Sequence
  Description of Artificial Sequence: Synthetic oligonucleotide
uuggccaaccgagaggaag

SEQ ID NO: 1517495 - RNA, 19 nt, Artificial Sequence
  Description of Artificial Sequence: Synthetic oligonucleotide
aaccuauggguaacuaaag

SEQ ID NO: 1517496 - RNA, 19 nt, Artificial Sequence
  Description of Artificial Sequence: Synthetic oligonucleotide
aucucauucuggcuacaag

SEQ ID NO: 1517497 - RNA, 19 nt, Artificial Sequence
  Description of Artificial Sequence: Synthetic oligonucleotide
gcaguaucuaaacacgccc

SEQ ID NO: 1517498 - RNA, 19 nt, Artificial Sequence
  Description of Artificial Sequence: Synthetic oligonucleotide
uaagcuaggguaccucauc

SEQ ID NO: 1517499 - RNA, 19 nt, Artificial Sequence
  Description of Artificial Sequence: Synthetic oligonucleotide
ugucugcuggacucggcgg

SEQ ID NO: 1517500 - RNA, 19 nt, Artificial Sequence
  Description of Artificial Sequence: Synthetic oligonucleotide
cuacaaucaccaagguccc

SEQ ID NO: 1517501 - RNA, 19 nt, Artificial Sequence
  Description of Artificial Sequence: Synthetic oligonucleotide
uuagcuggagcugccaugu

SEQ ID NO: 1517502 - RNA, 19 nt, Artificial Sequence
  Description of Artificial Sequence: Synthetic oligonucleotide
cuauggguaacuaaaggcu

SEQ ID NO: 1517503 - RNA, 19 nt, Artificial Sequence
  Description of Artificial Sequence: Synthetic oligonucleotide
aaccgagaggaagacaggu

SEQ ID NO: 1517504 - RNA, 19 nt, Artificial Sequence
  Description of Artificial Sequence: Synthetic oligonucleotide
gaagcuuguagcagaaauc

SEQ ID NO: 1517505 - RNA, 19 nt, Artificial Sequence
  Description of Artificial Sequence: Synthetic oligonucleotide
uuguaucggccaaucuugc

SEQ ID NO: 1517506 - RNA, 19 nt, Artificial Sequence
  Description of Artificial Sequence: Synthetic oligonucleotide
agaggguaagcugagggca

SEQ ID NO: 1517507 - RNA, 19 nt, Artificial Sequence
  Description of Artificial Sequence: Synthetic oligonucleotide
uccgcagauccccacagaa

SEQ ID NO: 1517508 - RNA, 19 nt, Artificial Sequence
  Description of Artificial Sequence: Synthetic oligonucleotide
aacccgaucgccugguuuu

SEQ ID NO: 1517509 - RNA, 19 nt, Artificial Sequence
  Description of Artificial Sequence: Synthetic oligonucleotide
gauccgcagauccccacag

SEQ ID NO: 1517510 - RNA, 19 nt, Artificial Sequence
  Description of Artificial Sequence: Synthetic oligonucleotide
agaagcgacagagguuccc

SEQ ID NO: 1517511 - RNA, 19 nt, Artificial Sequence
  Description of Artificial Sequence: Synthetic oligonucleotide
cacauuagggguucugguc

SEQ ID NO: 1517512 - RNA, 19 nt, Artificial Sequence
  Description of Artificial Sequence: Synthetic oligonucleotide
ucggggaacaccgggcucg

SEQ ID NO: 1517513 - RNA, 19 nt, Artificial Sequence
  Description of Artificial Sequence: Synthetic oligonucleotide
aacaucugauccgcagauc

SEQ ID NO: 1517514 - RNA, 19 nt, Artificial Sequence
  Description of Artificial Sequence: Synthetic oligonucleotide
aucuccaauucggccaugc

SEQ ID NO: 1517515 - RNA, 19 nt, Artificial Sequence
  Description of Artificial Sequence: Synthetic oligonucleotide
ggugagugcccuuacuucc

SEQ ID NO: 1517516 - RNA, 19 nt, Artificial Sequence
  Description of Artificial Sequence: Synthetic oligonucleotide
uacuuuuaugacugucccu

SEQ ID NO: 1517517 - RNA, 19 nt, Artificial Sequence
  Description of Artificial Sequence: Synthetic oligonucleotide
ugcccuuacuuccacacuu

SEQ ID NO: 1517518 - RNA, 19 nt, Artificial Sequence
  Description of Artificial Sequence: Synthetic oligonucleotide
agcaaagugacuaucccaa

SEQ ID NO: 1517519 - RNA, 19 nt, Artificial Sequence
  Description of Artificial Sequence: Synthetic oligonucleotide
uucucggggaacaccgggc

SEQ ID NO: 1517520 - RNA, 19 nt, Artificial Sequence
  Description of Artificial Sequence: Synthetic oligonucleotide
ucgauggcaacccgaucgc

SEQ ID NO: 1517521 - RNA, 19 nt, Artificial Sequence
  Description of Artificial Sequence: Synthetic oligonucleotide
uuagaugcuucaccauguc

SEQ ID NO: 1517522 - RNA, 19 nt, Artificial Sequence
  Description of Artificial Sequence: Synthetic oligonucleotide
agcucccauugcuuuggcc

SEQ ID NO: 1517523 - RNA, 19 nt, Artificial Sequence
  Description of Artificial Sequence: Synthetic oligonucleotide
gacuaucccaauuggccca

SEQ ID NO: 1517524 - RNA, 19 nt, Artificial Sequence
  Description of Artificial Sequence: Synthetic oligonucleotide
aggccuuugaugcaagcau

SEQ ID NO: 1517525 - RNA, 19 nt, Artificial Sequence
  Description of Artificial Sequence: Synthetic oligonucleotide
cuuagcuggagcugccaug

SEQ ID NO: 1517526 - RNA, 19 nt, Artificial Sequence
  Description of Artificial Sequence: Synthetic oligonucleotide
agcuaggguaccucaucuc

SEQ ID NO: 1517527 - RNA, 19 nt, Artificial Sequence
  Description of Artificial Sequence: Synthetic oligonucleotide
uguaucggccaaucuugca

SEQ ID NO: 1517528 - RNA, 19 nt, Artificial Sequence
  Description of Artificial Sequence: Synthetic oligonucleotide
cacuagggguaaauugacc

SEQ ID NO: 1517529 - RNA, 19 nt, Artificial Sequence
  Description of Artificial Sequence: Synthetic oligonucleotide
uugccuucuugcuccgggg

SEQ ID NO: 1517530 - RNA, 19 nt, Artificial Sequence
  Description of Artificial Sequence: Synthetic oligonucleotide
aguaucuaaacacgcccuu

SEQ ID NO: 1517531 - RNA, 19 nt, Artificial Sequence
  Description of Artificial Sequence: Synthetic oligonucleotide
uguagcccuuagaugcuga

SEQ ID NO: 1517532 - RNA, 19 nt, Artificial Sequence
  Description of Artificial Sequence: Synthetic oligonucleotide
uaucccaauuggcccagcu

SEQ ID NO: 1517533 - RNA, 19 nt, Artificial Sequence
  Description of Artificial Sequence: Synthetic oligonucleotide
ugauccgcagauccccaca

SEQ ID NO: 1517534 - RNA, 19 nt, Artificial Sequence
  Description of Artificial Sequence: Synthetic oligonucleotide
acagagguucccgucaucu

SEQ ID NO: 1517535 - RNA, 19 nt, Artificial Sequence
  Description of Artificial Sequence: Synthetic oligonucleotide
ggucccaccagagugagug

SEQ ID NO: 1517536 - RNA, 19 nt, Artificial Sequence
  Description of Artificial Sequence: Synthetic oligonucleotide
cagaaaucagcauugugcu

SEQ ID NO: 1517537 - RNA, 19 nt, Artificial Sequence
  Description of Artificial Sequence: Synthetic oligonucleotide
ucuccagagggaaccuaug

SEQ ID NO: 1517538 - RNA, 19 nt, Artificial Sequence
  Description of Artificial Sequence: Synthetic oligonucleotide
ucuggcuacaaggucccug

SEQ ID NO: 1517539 - RNA, 19 nt, Artificial Sequence
  Description of Artificial Sequence: Synthetic oligonucleotide
ucggccaugcugccaguag

SEQ ID NO: 1517540 - RNA, 19 nt, Artificial Sequence
  Description of Artificial Sequence: Synthetic oligonucleotide
agagggaaccuauggguaa

SEQ ID NO: 1517541 - RNA, 19 nt, Artificial Sequence
  Description of Artificial Sequence: Synthetic oligonucleotide
agugaguggcauagaugcc

SEQ ID NO: 1517542 - RNA, 19 nt, Artificial Sequence
  Description of Artificial Sequence: Synthetic oligonucleotide
caguagugaacaucugauc

SEQ ID NO: 1517543 - RNA, 19 nt, Artificial Sequence
  Description of Artificial Sequence: Synthetic oligonucleotide
agauuguaucggccaaucu

SEQ ID NO: 1517544 - RNA, 19 nt, Artificial Sequence
  Description of Artificial Sequence: Synthetic oligonucleotide
uagggguaaauugaccauc

SEQ ID NO: 1517545 - RNA, 19 nt, Artificial Sequence
  Description of Artificial Sequence: Synthetic oligonucleotide
acaucauuugggccuggcu

SEQ ID NO: 1517546 - RNA, 19 nt, Artificial Sequence
  Description of Artificial Sequence: Synthetic oligonucleotide
guaucuaaacacgcccuug

SEQ ID NO: 1517547 - RNA, 19 nt, Artificial Sequence
  Description of Artificial Sequence: Synthetic oligonucleotide
gcuuauuaugaguuaauua

SEQ ID NO: 1517548 - RNA, 19 nt, Artificial Sequence
  Description of Artificial Sequence: Synthetic oligonucleotide
uccggcuuucuccccagca

SEQ ID NO: 1517549 - RNA, 19 nt, Artificial Sequence
  Description of Artificial Sequence: Synthetic oligonucleotide
ggguuuagauuguaucggc

SEQ ID NO: 1517550 - RNA, 19 nt, Artificial Sequence
  Description of Artificial Sequence: Synthetic oligonucleotide
uagauuguaucggccaauc

SEQ ID NO: 1517551 - RNA, 19 nt, Artificial Sequence
  Description of Artificial Sequence: Synthetic oligonucleotide
caaucaccaaggucccacc

SEQ ID NO: 1517552 - RNA, 19 nt, Artificial Sequence
  Description of Artificial Sequence: Synthetic oligonucleotide
auuggccacguguugcagu

SEQ ID NO: 1517553 - RNA, 19 nt, Artificial Sequence
  Description of Artificial Sequence: Synthetic oligonucleotide
auguaagcuaggguaccuc

SEQ ID NO: 1517554 - RNA, 19 nt, Artificial Sequence
  Description of Artificial Sequence: Synthetic oligonucleotide
ccaaggucccaccagagug

SEQ ID NO: 1517555 - RNA, 19 nt, Artificial Sequence
  Description of Artificial Sequence: Synthetic oligonucleotide
auucagccccugugcauuc

SEQ ID NO: 1517556 - RNA, 19 nt, Artificial Sequence
  Description of Artificial Sequence: Synthetic oligonucleotide
ggaauguaagcuaggguac

SEQ ID NO: 1517557 - RNA, 19 nt, Artificial Sequence
  Description of Artificial Sequence: Synthetic oligonucleotide
ucggagcccaauccuacaa

SEQ ID NO: 1517558 - RNA, 19 nt, Artificial Sequence
  Description of Artificial Sequence: Synthetic oligonucleotide
gaagcauccccacuucugu

SEQ ID NO: 1517559 - RNA, 19 nt, Artificial Sequence
  Description of Artificial Sequence: Synthetic oligonucleotide
uuagauuguaucggccaau

SEQ ID NO: 1517560 - RNA, 19 nt, Artificial Sequence
  Description of Artificial Sequence: Synthetic oligonucleotide
uccgugcaccaccagggac

SEQ ID NO: 1517561 - RNA, 19 nt, Artificial Sequence
  Description of Artificial Sequence: Synthetic oligonucleotide
ucuccaauucggccaugcu

SEQ ID NO: 1517562 - RNA, 19 nt, Artificial Sequence
  Description of Artificial Sequence: Synthetic oligonucleotide
caugcccaagcaccauugg

SEQ ID NO: 1517563 - RNA, 19 nt, Artificial Sequence
  Description of Artificial Sequence: Synthetic oligonucleotide
aucuguuucucggggaaca

SEQ ID NO: 1517564 - RNA, 19 nt, Artificial Sequence
  Description of Artificial Sequence: Synthetic oligonucleotide
guagcccuuagaugcugag

SEQ ID NO: 1517565 - RNA, 19 nt, Artificial Sequence
  Description of Artificial Sequence: Synthetic oligonucleotide
aagcgacagagguucccgu

SEQ ID NO: 1517566 - RNA, 19 nt, Artificial Sequence
  Description of Artificial Sequence: Synthetic oligonucleotide
cauuagggguucuggucac

SEQ ID NO: 1517567 - RNA, 19 nt, Artificial Sequence
  Description of Artificial Sequence: Synthetic oligonucleotide
ugaugcaagcauggaaauc

SEQ ID NO: 1517568 - RNA, 19 nt, Artificial Sequence
  Description of Artificial Sequence: Synthetic oligonucleotide
cacgcccuugauauccacc

SEQ ID NO: 1517569 - RNA, 19 nt, Artificial Sequence
  Description of Artificial Sequence: Synthetic oligonucleotide
cugguuuuagaugcuucac

SEQ ID NO: 1517570 - RNA, 19 nt, Artificial Sequence
  Description of Artificial Sequence: Synthetic oligonucleotide
aucuaaacacgcccuugau

SEQ ID NO: 1517571 - RNA, 19 nt, Artificial Sequence
  Description of Artificial Sequence: Synthetic oligonucleotide
gguuuagauuguaucggcc

SEQ ID NO: 1517572 - RNA, 19 nt, Artificial Sequence
  Description of Artificial Sequence: Synthetic oligonucleotide
gagauauggagggugaaau

SEQ ID NO: 1517573 - RNA, 19 nt, Artificial Sequence
  Description of Artificial Sequence: Synthetic oligonucleotide
uuggccacguguugcagua

SEQ ID NO: 1517574 - RNA, 19 nt, Artificial Sequence
  Description of Artificial Sequence: Synthetic oligonucleotide
aaacugaaccucggcggca

SEQ ID NO: 1517575 - RNA, 19 nt, Artificial Sequence
  Description of Artificial Sequence: Synthetic oligonucleotide
acuuccggcuuucucccca

SEQ ID NO: 1517576 - RNA, 19 nt, Artificial Sequence
  Description of Artificial Sequence: Synthetic oligonucleotide
uccaagcgaauguccccag

SEQ ID NO: 1517577 - RNA, 19 nt, Artificial Sequence
  Description of Artificial Sequence: Synthetic oligonucleotide
uggcaacccgaucgccugg

SEQ ID NO: 1517578 - RNA, 19 nt, Artificial Sequence
  Description of Artificial Sequence: Synthetic oligonucleotide
gaggaauguaagcuagggu

SEQ ID NO: 1517579 - RNA, 19 nt, Artificial Sequence
  Description of Artificial Sequence: Synthetic oligonucleotide
cucccucacagcugcgugc

SEQ ID NO: 1517580 - RNA, 19 nt, Artificial Sequence
  Description of Artificial Sequence: Synthetic oligonucleotide
accaaggucccaccagagu

SEQ ID NO: 1517581 - RNA, 19 nt, Artificial Sequence
  Description of Artificial Sequence: Synthetic oligonucleotide
ucggcggcaggcauagauc

SEQ ID NO: 1517582 - RNA, 19 nt, Artificial Sequence
  Description of Artificial Sequence: Synthetic oligonucleotide
agaaaucagcauugugcuu

SEQ ID NO: 1517583 - RNA, 19 nt, Artificial Sequence
  Description of Artificial Sequence: Synthetic oligonucleotide
gucuccuacuuuuaugacu

SEQ ID NO: 1517584 - RNA, 19 nt, Artificial Sequence
  Description of Artificial Sequence: Synthetic oligonucleotide
agaggugagugcccuuacu

SEQ ID NO: 1517585 - RNA, 19 nt, Artificial Sequence
  Description of Artificial Sequence: Synthetic oligonucleotide
ccagcacuugagaagcucc

SEQ ID NO: 1517586 - RNA, 19 nt, Artificial Sequence
  Description of Artificial Sequence: Synthetic oligonucleotide
uaaacacgcccuugauauc

SEQ ID NO: 1517587 - RNA, 19 nt, Artificial Sequence
  Description of Artificial Sequence: Synthetic oligonucleotide
agggguaaauugaccaucu

SEQ ID NO: 1517588 - RNA, 19 nt, Artificial Sequence
  Description of Artificial Sequence: Synthetic oligonucleotide
acacgcccuugauauccac

SEQ ID NO: 1517589 - RNA, 19 nt, Artificial Sequence
  Description of Artificial Sequence: Synthetic oligonucleotide
ucgccauuggccacguguu

SEQ ID NO: 1517590 - RNA, 19 nt, Artificial Sequence
  Description of Artificial Sequence: Synthetic oligonucleotide
ugccggucuggauggagga

SEQ ID NO: 1517591 - RNA, 19 nt, Artificial Sequence
  Description of Artificial Sequence: Synthetic oligonucleotide
cugccaguagugaacaucu

SEQ ID NO: 1517592 - RNA, 19 nt, Artificial Sequence
  Description of Artificial Sequence: Synthetic oligonucleotide
ugaaccucggcggcaggca

SEQ ID NO: 1517593 - RNA, 19 nt, Artificial Sequence
  Description of Artificial Sequence: Synthetic oligonucleotide
gaugccggucuggauggag

SEQ ID NO: 1517594 - RNA, 19 nt, Artificial Sequence
  Description of Artificial Sequence: Synthetic oligonucleotide
ccucaauauaaacaucuca

SEQ ID NO: 1517595 - RNA, 19 nt, Artificial Sequence
  Description of Artificial Sequence: Synthetic oligonucleotide
gacagguucucggccuuag

SEQ ID NO: 1517596 - RNA, 19 nt, Artificial Sequence
  Description of Artificial Sequence: Synthetic oligonucleotide
cuguuucucggggaacacc

SEQ ID NO: 1517597 - RNA, 19 nt, Artificial Sequence
  Description of Artificial Sequence: Synthetic oligonucleotide
auugaccaucucggagccc

SEQ ID NO: 1517598 - RNA, 19 nt, Artificial Sequence
  Description of Artificial Sequence: Synthetic oligonucleotide
agcuuguagcagaaaucag

SEQ ID NO: 1517599 - RNA, 19 nt, Artificial Sequence
  Description of Artificial Sequence: Synthetic oligonucleotide
acuaucccaauuggcccag

SEQ ID NO: 1517600 - RNA, 19 nt, Artificial Sequence
  Description of Artificial Sequence: Synthetic oligonucleotide
ggaagcuuguagcagaaau

SEQ ID NO: 1517601 - RNA, 19 nt, Artificial Sequence
  Description of Artificial Sequence: Synthetic oligonucleotide
gggaacaccgggcucgaug

SEQ ID NO: 1517602 - RNA, 19 nt, Artificial Sequence
  Description of Artificial Sequence: Synthetic oligonucleotide
gcauggaaaucgccauugg

SEQ ID NO: 1517603 - RNA, 19 nt, Artificial Sequence
  Description of Artificial Sequence: Synthetic oligonucleotide
guaccucaucucucucucc

SEQ ID NO: 1517604 - RNA, 19 nt, Artificial Sequence
  Description of Artificial Sequence: Synthetic oligonucleotide
uagcccuuagaugcugaga

SEQ ID NO: 1517605 - RNA, 19 nt, Artificial Sequence
  Description of Artificial Sequence: Synthetic oligonucleotide
uggguaacuaaaggcuuua

SEQ ID NO: 1517606 - RNA, 19 nt, Artificial Sequence
  Description of Artificial Sequence: Synthetic oligonucleotide
acguguugcaguaucuaaa

SEQ ID NO: 1517607 - RNA, 19 nt, Artificial Sequence
  Description of Artificial Sequence: Synthetic oligonucleotide
aucauaacuuucagcccca

SEQ ID NO: 1517608 - RNA, 19 nt, Artificial Sequence
  Description of Artificial Sequence: Synthetic oligonucleotide
guuucucggggaacaccgg

SEQ ID NO: 1517609 - RNA, 19 nt, Artificial Sequence
  Description of Artificial Sequence: Synthetic oligonucleotide
gaggguaagcugagggcac

SEQ ID NO: 1517610 - RNA, 19 nt, Artificial Sequence
  Description of Artificial Sequence: Synthetic oligonucleotide
acugaaccucggcggcagg

SEQ ID NO: 1517611 - RNA, 19 nt, Artificial Sequence
  Description of Artificial Sequence: Synthetic oligonucleotide
cacguguugcaguaucuaa

SEQ ID NO: 1517612 - RNA, 19 nt, Artificial Sequence
  Description of Artificial Sequence: Synthetic oligonucleotide
uucucggccuuagcuggag

SEQ ID NO: 1517613 - RNA, 19 nt, Artificial Sequence
  Description of Artificial Sequence: Synthetic oligonucleotide
cugaaccucggcggcaggc

SEQ ID NO: 1517614 - RNA, 19 nt, Artificial Sequence
  Description of Artificial Sequence: Synthetic oligonucleotide
aaaucgccauuggccacgu

SEQ ID NO: 1517615 - RNA, 19 nt, Artificial Sequence
  Description of Artificial Sequence: Synthetic oligonucleotide
uguugccuucuugcuccgg

SEQ ID NO: 1517616 - RNA, 19 nt, Artificial Sequence
  Description of Artificial Sequence: Synthetic oligonucleotide
caguaucuaaacacgcccu

SEQ ID NO: 1517617 - RNA, 19 nt, Artificial Sequence
  Description of Artificial Sequence: Synthetic oligonucleotide
gaggugagugcccuuacuu

SEQ ID NO: 1517618 - RNA, 19 nt, Artificial Sequence
  Description of Artificial Sequence: Synthetic oligonucleotide
cagcauugugcuuguagaa

SEQ ID NO: 1517619 - RNA, 19 nt, Artificial Sequence
  Description of Artificial Sequence: Synthetic oligonucleotide
cuuccggcuuucuccccag

SEQ ID NO: 1517620 - RNA, 19 nt, Artificial Sequence
  Description of Artificial Sequence: Synthetic oligonucleotide
gaacaccgggcucgauggc

SEQ ID NO: 1517621 - RNA, 19 nt, Artificial Sequence
  Description of Artificial Sequence: Synthetic oligonucleotide
aacacgcccuugauaucca

SEQ ID NO: 1517622 - RNA, 19 nt, Artificial Sequence
  Description of Artificial Sequence: Synthetic oligonucleotide
uacaaucaccaagguccca

SEQ ID NO: 1517623 - RNA, 19 nt, Artificial Sequence
  Description of Artificial Sequence: Synthetic oligonucleotide
ccugguuuuagaugcuuca

SEQ ID NO: 1517624 - RNA, 19 nt, Artificial Sequence
  Description of Artificial Sequence: Synthetic oligonucleotide
ggcucucugcuuauuauga

SEQ ID NO: 1517625 - RNA, 19 nt, Artificial Sequence
  Description of Artificial Sequence: Synthetic oligonucleotide
cacaucauuugggccuggc

SEQ ID NO: 1517626 - RNA, 19 nt, Artificial Sequence
  Description of Artificial Sequence: Synthetic oligonucleotide
gacuuccggcuuucucccc

SEQ ID NO: 1517627 - RNA, 19 nt, Artificial Sequence
  Description of Artificial Sequence: Synthetic oligonucleotide
gcccuuagaugcugagagg

SEQ ID NO: 1517628 - RNA, 19 nt, Artificial Sequence
  Description of Artificial Sequence: Synthetic oligonucleotide
aucggccaaucuugcagaa

SEQ ID NO: 1517629 - RNA, 19 nt, Artificial Sequence
  Description of Artificial Sequence: Synthetic oligonucleotide
auggguaacuaaaggcuuu

SEQ ID NO: 1517630 - RNA, 19 nt, Artificial Sequence
  Description of Artificial Sequence: Synthetic oligonucleotide
ggccuuugaugcaagcaug

SEQ ID NO: 1517631 - RNA, 19 nt, Artificial Sequence
  Description of Artificial Sequence: Synthetic oligonucleotide
cuccaagcgaaugucccca

SEQ ID NO: 1517632 - RNA, 19 nt, Artificial Sequence
  Description of Artificial Sequence: Synthetic oligonucleotide
gcuaggguaccucaucucu

SEQ ID NO: 1517633 - RNA, 19 nt, Artificial Sequence
  Description of Artificial Sequence: Synthetic oligonucleotide
cuggcucagggauugggua

SEQ ID NO: 1517634 - RNA, 19 nt, Artificial Sequence
  Description of Artificial Sequence: Synthetic oligonucleotide
gacagagguucccgucauc

SEQ ID NO: 1517635 - RNA, 19 nt, Artificial Sequence
  Description of Artificial Sequence: Synthetic oligonucleotide
ucgccugguuuuagaugcu

SEQ ID NO: 1517636 - RNA, 19 nt, Artificial Sequence
  Description of Artificial Sequence: Synthetic oligonucleotide
gcaggcauagauccccaca

SEQ ID NO: 1517637 - RNA, 19 nt, Artificial Sequence
  Description of Artificial Sequence: Synthetic oligonucleotide
aaucgccauuggccacgug

SEQ ID NO: 1517638 - RNA, 19 nt, Artificial Sequence
  Description of Artificial Sequence: Synthetic oligonucleotide
aacuccccuaaggcucucu

SEQ ID NO: 1517639 - RNA, 19 nt, Artificial Sequence
  Description of Artificial Sequence: Synthetic oligonucleotide
agugaacaucugauccgca

SEQ ID NO: 1517640 - RNA, 19 nt, Artificial Sequence
  Description of Artificial Sequence: Synthetic oligonucleotide
cuagggguaaauugaccau

SEQ ID NO: 1517641 - RNA, 19 nt, Artificial Sequence
  Description of Artificial Sequence: Synthetic oligonucleotide
uuccggcuuucuccccagc

SEQ ID NO: 1517642 - RNA, 19 nt, Artificial Sequence
  Description of Artificial Sequence: Synthetic oligonucleotide
ucccauugcuuuggccaca

SEQ ID NO: 1517643 - RNA, 19 nt, Artificial Sequence
  Description of Artificial Sequence: Synthetic oligonucleotide
uggcuacaaggucccugaa

SEQ ID NO: 1517644 - RNA, 19 nt, Artificial Sequence
  Description of Artificial Sequence: Synthetic oligonucleotide
auuagggguucuggucacu

SEQ ID NO: 1517645 - RNA, 19 nt, Artificial Sequence
  Description of Artificial Sequence: Synthetic oligonucleotide
agggaaccuauggguaacu

SEQ ID NO: 1517646 - RNA, 19 nt, Artificial Sequence
  Description of Artificial Sequence: Synthetic oligonucleotide
gugagugcccuuacuucca

SEQ ID NO: 1517647 - RNA, 19 nt, Artificial Sequence
  Description of Artificial Sequence: Synthetic oligonucleotide
cagagugaguggcauagau

SEQ ID NO: 1517648 - RNA, 19 nt, Artificial Sequence
  Description of Artificial Sequence: Synthetic oligonucleotide
gggugaaaucagcuccaac

SEQ ID NO: 1517649 - RNA, 19 nt, Artificial Sequence
  Description of Artificial Sequence: Synthetic oligonucleotide
gcacuagggguaaauugac

SEQ ID NO: 1517650 - RNA, 19 nt, Artificial Sequence
  Description of Artificial Sequence: Synthetic oligonucleotide
gcggcaggcauagaucccc

SEQ ID NO: 1517651 - RNA, 19 nt, Artificial Sequence
  Description of Artificial Sequence: Synthetic oligonucleotide
gcgacagagguucccguca

SEQ ID NO: 1517652 - RNA, 19 nt, Artificial Sequence
  Description of Artificial Sequence: Synthetic oligonucleotide
ggagauauggagggugaaa

SEQ ID NO: 1517653 - RNA, 19 nt, Artificial Sequence
  Description of Artificial Sequence: Synthetic oligonucleotide
cauguagcccuuagaugcu

SEQ ID NO: 1517654 - RNA, 19 nt, Artificial Sequence
  Description of Artificial Sequence: Synthetic oligonucleotide
caccagggacagguucucg

SEQ ID NO: 1517655 - RNA, 19 nt, Artificial Sequence
  Description of Artificial Sequence: Synthetic oligonucleotide
ccaagcgaauguccccagg

SEQ ID NO: 1517656 - RNA, 19 nt, Artificial Sequence
  Description of Artificial Sequence: Synthetic oligonucleotide
uggacucggcggcgaggug

SEQ ID NO: 1517657 - RNA, 19 nt, Artificial Sequence
  Description of Artificial Sequence: Synthetic oligonucleotide
cucagggauuggguaguuc

SEQ ID NO: 1517658 - RNA, 19 nt, Artificial Sequence
  Description of Artificial Sequence: Synthetic oligonucleotide
caucucggagcccaauccu

SEQ ID NO: 1517659 - RNA, 19 nt, Artificial Sequence
  Description of Artificial Sequence: Synthetic oligonucleotide
ggccacguguugcaguauc

SEQ ID NO: 1517660 - RNA, 19 nt, Artificial Sequence
  Description of Artificial Sequence: Synthetic oligonucleotide
aucucggagcccaauccua

SEQ ID NO: 1517661 - RNA, 19 nt, Artificial Sequence
  Description of Artificial Sequence: Synthetic oligonucleotide
cucggggaacaccgggcuc

SEQ ID NO: 1517662 - RNA, 19 nt, Artificial Sequence
  Description of Artificial Sequence: Synthetic oligonucleotide
caucucauucuggcuacaa

SEQ ID NO: 1517663 - RNA, 19 nt, Artificial Sequence
  Description of Artificial Sequence: Synthetic oligonucleotide
gggguaaauugaccaucuc

SEQ ID NO: 1517664 - RNA, 19 nt, Artificial Sequence
  Description of Artificial Sequence: Synthetic oligonucleotide
ggguaacuaaaggcuuuac

SEQ ID NO: 1517665 - RNA, 19 nt, Artificial Sequence
  Description of Artificial Sequence: Synthetic oligonucleotide
ccgugcaccaccagggaca

SEQ ID NO: 1517666 - RNA, 19 nt, Artificial Sequence
  Description of Artificial Sequence: Synthetic oligonucleotide
uucggccaugcugccagua

SEQ ID NO: 1517667 - RNA, 19 nt, Artificial Sequence
  Description of Artificial Sequence: Synthetic oligonucleotide
ggguaagcugagggcacag

SEQ ID NO: 1517668 - RNA, 19 nt, Artificial Sequence
  Description of Artificial Sequence: Synthetic oligonucleotide
uccccacuucugucuuuaa

SEQ ID NO: 1517669 - RNA, 19 nt, Artificial Sequence
  Description of Artificial Sequence: Synthetic oligonucleotide
cugaagcauccccacuucu

SEQ ID NO: 1517670 - RNA, 19 nt, Artificial Sequence
  Description of Artificial Sequence: Synthetic oligonucleotide
cucggcggcaggcauagau

SEQ ID NO: 1517671 - RNA, 19 nt, Artificial Sequence
  Description of Artificial Sequence: Synthetic oligonucleotide
cucaaucagggccccuucu

SEQ ID NO: 1517672 - RNA, 19 nt, Artificial Sequence
  Description of Artificial Sequence: Synthetic oligonucleotide
guaagcuaggguaccucau

SEQ ID NO: 1517673 - RNA, 19 nt, Artificial Sequence
  Description of Artificial Sequence: Synthetic oligonucleotide
gggugucugcuggacucgg

SEQ ID NO: 1517674 - RNA, 19 nt, Artificial Sequence
  Description of Artificial Sequence: Synthetic oligonucleotide
acaccgggcucgauggcaa

SEQ ID NO: 1517675 - RNA, 19 nt, Artificial Sequence
  Description of Artificial Sequence: Synthetic oligonucleotide
uucuggcuacaaggucccu

SEQ ID NO: 1517676 - RNA, 19 nt, Artificial Sequence
  Description of Artificial Sequence: Synthetic oligonucleotide
aaccucggcggcaggcaua

SEQ ID NO: 1517677 - RNA, 19 nt, Artificial Sequence
  Description of Artificial Sequence: Synthetic oligonucleotide
uccuagccauguagcccuu

SEQ ID NO: 1517678 - RNA, 19 nt, Artificial Sequence
  Description of Artificial Sequence: Synthetic oligonucleotide
cggggugucugcuggacuc

SEQ ID NO: 1517679 - RNA, 19 nt, Artificial Sequence
  Description of Artificial Sequence: Synthetic oligonucleotide
caccgggcucgauggcaac

SEQ ID NO: 1517680 - RNA, 19 nt, Artificial Sequence
  Description of Artificial Sequence: Synthetic oligonucleotide
cccacagaaugcaucuuua

SEQ ID NO: 1517681 - RNA, 19 nt, Artificial Sequence
  Description of Artificial Sequence: Synthetic oligonucleotide
guucucggccuuagcugga

SEQ ID NO: 1517682 - RNA, 19 nt, Artificial Sequence
  Description of Artificial Sequence: Synthetic oligonucleotide
gugcccuuacuuccacacu

SEQ ID NO: 1517683 - RNA, 19 nt, Artificial Sequence
  Description of Artificial Sequence: Synthetic oligonucleotide
cuggacucggcggcgaggu

SEQ ID NO: 1517684 - RNA, 19 nt, Artificial Sequence
  Description of Artificial Sequence: Synthetic oligonucleotide
ggccaaccgagaggaagac

SEQ ID NO: 1517685 - RNA, 19 nt, Artificial Sequence
  Description of Artificial Sequence: Synthetic oligonucleotide
caccagagugaguggcaua

SEQ ID NO: 1517686 - RNA, 19 nt, Artificial Sequence
  Description of Artificial Sequence: Synthetic oligonucleotide
ggcggcaggcauagauccc

SEQ ID NO: 1517687 - RNA, 19 nt, Artificial Sequence
  Description of Artificial Sequence: Synthetic oligonucleotide
gcucgauggcaacccgauc

SEQ ID NO: 1517688 - RNA, 19 nt, Artificial Sequence
  Description of Artificial Sequence: Synthetic oligonucleotide
caacccgaucgccugguuu

SEQ ID NO: 1517689 - RNA, 19 nt, Artificial Sequence
  Description of Artificial Sequence: Synthetic oligonucleotide
uggccacguguugcaguau

SEQ ID NO: 1517690 - RNA, 19 nt, Artificial Sequence
  Description of Artificial Sequence: Synthetic oligonucleotide
ugcgugcacuagggguaaa

SEQ ID NO: 1517691 - RNA, 19 nt, Artificial Sequence
  Description of Artificial Sequence: Synthetic oligonucleotide
gcaucccauuccuagccau

SEQ ID NO: 1517692 - RNA, 19 nt, Artificial Sequence
  Description of Artificial Sequence: Synthetic oligonucleotide
ccuuagaugcugagagggu

SEQ ID NO: 1517693 - RNA, 19 nt, Artificial Sequence
  Description of Artificial Sequence: Synthetic oligonucleotide
ccgaucgccugguuuuaga

SEQ ID NO: 1517694 - RNA, 19 nt, Artificial Sequence
  Description of Artificial Sequence: Synthetic oligonucleotide
gggaaccuauggguaacua

SEQ ID NO: 1517695 - RNA, 19 nt, Artificial Sequence
  Description of Artificial Sequence: Synthetic oligonucleotide
gccaaccgagaggaagaca

SEQ ID NO: 1517696 - RNA, 19 nt, Artificial Sequence
  Description of Artificial Sequence: Synthetic oligonucleotide
acccgaucgccugguuuua

SEQ ID NO: 1517697 - RNA, 19 nt, Artificial Sequence
  Description of Artificial Sequence: Synthetic oligonucleotide
ggagggguuuagauuguau

SEQ ID NO: 1517698 - RNA, 19 nt, Artificial Sequence
  Description of Artificial Sequence: Synthetic oligonucleotide
ccccugugcauucaauagu

SEQ ID NO: 1517699 - RNA, 19 nt, Artificial Sequence
  Description of Artificial Sequence: Synthetic oligonucleotide
ggcucagggauuggguagu

SEQ ID NO: 1517700 - RNA, 19 nt, Artificial Sequence
  Description of Artificial Sequence: Synthetic oligonucleotide
ccaacuccccuaaggcucu

SEQ ID NO: 1517701 - RNA, 19 nt, Artificial Sequence
  Description of Artificial Sequence: Synthetic oligonucleotide
cuucaugcccaagcaccau

SEQ ID NO: 1517702 - RNA, 19 nt, Artificial Sequence
  Description of Artificial Sequence: Synthetic oligonucleotide
cccgaucgccugguuuuag

SEQ ID NO: 1517703 - RNA, 19 nt, Artificial Sequence
  Description of Artificial Sequence: Synthetic oligonucleotide
cugcuggacucggcggcga

SEQ ID NO: 1517704 - RNA, 19 nt, Artificial Sequence
  Description of Artificial Sequence: Synthetic oligonucleotide
gccacguguugcaguaucu

SEQ ID NO: 1517705 - RNA, 19 nt, Artificial Sequence
  Description of Artificial Sequence: Synthetic oligonucleotide
ccacguguugcaguaucua

SEQ ID NO: 1517706 - RNA, 19 nt, Artificial Sequence
  Description of Artificial Sequence: Synthetic oligonucleotide
cagccccugugcauucaau

SEQ ID NO: 1517707 - RNA, 19 nt, Artificial Sequence
  Description of Artificial Sequence: Synthetic oligonucleotide
cgaucgccugguuuuagau

SEQ ID NO: 1517708 - RNA, 19 nt, Artificial Sequence
  Description of Artificial Sequence: Synthetic oligonucleotide
cccauugcuuuggccacaa

SEQ ID NO: 1517709 - RNA, 19 nt, Artificial Sequence
  Description of Artificial Sequence: Synthetic oligonucleotide
ggacagguucucggccuua

SEQ ID NO: 1517710 - RNA, 19 nt, Artificial Sequence
  Description of Artificial Sequence: Synthetic oligonucleotide
ccgcagauccccacagaau

SEQ ID NO: 1517711 - RNA, 19 nt, Artificial Sequence
  Description of Artificial Sequence: Synthetic oligonucleotide
gcgugcacuagggguaaau

SEQ ID NO: 1517712 - RNA, 19 nt, Artificial Sequence
  Description of Artificial Sequence: Synthetic oligonucleotide
ccuuggagauauggagggu

SEQ ID NO: 1517713 - RNA, 19 nt, Artificial Sequence
  Description of Artificial Sequence: Synthetic oligonucleotide
ccaccagagugaguggcau

SEQ ID NO: 1517714 - RNA, 19 nt, Artificial Sequence
  Description of Artificial Sequence: Synthetic oligonucleotide
cccaagcaccauuggcuuu

SEQ ID NO: 1517715 - RNA, 19 nt, Artificial Sequence
  Description of Artificial Sequence: Synthetic oligonucleotide
cgugcacuagggguaaauu

SEQ ID NO: 1517716 - RNA, 19 nt, Artificial Sequence
  Description of Artificial Sequence: Synthetic oligonucleotide
ccccuaaggcucucugcuu

SEQ ID NO: 1517717 - RNA, 19 nt, Artificial Sequence
  Description of Artificial Sequence: Synthetic oligonucleotide
gcaacccgaucgccugguu

SEQ ID NO: 1517718 - RNA, 19 nt, Artificial Sequence
  Description of Artificial Sequence: Synthetic oligonucleotide
cgacagagguucccgucau

SEQ ID NO: 1517719 - RNA, 19 nt, Artificial Sequence
  Description of Artificial Sequence: Synthetic oligonucleotide
gccggucuggauggaggau

SEQ ID NO: 1517720 - RNA, 19 nt, Artificial Sequence
  Description of Artificial Sequence: Synthetic oligonucleotide
cgaauguccccagguccgu

SEQ ID NO: 1517721 - RNA, 19 nt, Artificial Sequence
  Description of Artificial Sequence: Synthetic oligonucleotide
cggggaacaccgggcucga

SEQ ID NO: 1517722 - RNA, 19 nt, Artificial Sequence
  Description of Artificial Sequence: Synthetic oligonucleotide
ggggaacaccgggcucgau

SEQ ID NO: 1517723 - RNA, 19 nt, Artificial Sequence
  Description of Artificial Sequence: Synthetic oligonucleotide
ccucggcggcaggcauaga

SEQ ID NO: 1517724 - RNA, 19 nt, Artificial Sequence
  Description of Artificial Sequence: Synthetic oligonucleotide
aauagcuugagauaacuac

SEQ ID NO: 1517725 - RNA, 19 nt, Artificial Sequence
  Description of Artificial Sequence: Synthetic oligonucleotide
aacaccagguacuagaugc

SEQ ID NO: 1517726 - RNA, 19 nt, Artificial Sequence
  Description of Artificial Sequence: Synthetic oligonucleotide
uuuauauuauauaaaagcc

SEQ ID NO: 1517727 - RNA, 19 nt, Artificial Sequence
  Description of Artificial Sequence: Synthetic oligonucleotide
auaugcuuaauauagaaac

SEQ ID NO: 1517728 - RNA, 19 nt, Artificial Sequence
  Description of Artificial Sequence: Synthetic oligonucleotide
aaaacauaaauuaaccugc

SEQ ID NO: 1517729 - RNA, 19 nt, Artificial Sequence
  Description of Artificial Sequence: Synthetic oligonucleotide
aacaauacuuucuugagag

SEQ ID NO: 1517730 - RNA, 19 nt, Artificial Sequence
  Description of Artificial Sequence: Synthetic oligonucleotide
uuuaagaaaguguaaauug

SEQ ID NO: 1517731 - RNA, 19 nt, Artificial Sequence
  Description of Artificial Sequence: Synthetic oligonucleotide
aagcauuuaauaucuaaac

SEQ ID NO: 1517732 - RNA, 19 nt, Artificial Sequence
  Description of Artificial Sequence: Synthetic oligonucleotide
agguaaaauagcuuaaagc

SEQ ID NO: 1517733 - RNA, 19 nt, Artificial Sequence
  Description of Artificial Sequence: Synthetic oligonucleotide
auuacaguaauucuugagg

SEQ ID NO: 1517734 - RNA, 19 nt, Artificial Sequence
  Description of Artificial Sequence: Synthetic oligonucleotide
ugggauuuaaucaaguuag

SEQ ID NO: 1517735 - RNA, 19 nt, Artificial Sequence
  Description of Artificial Sequence: Synthetic oligonucleotide
aaguuuacaacuuaucaug

SEQ ID NO: 1517736 - RNA, 19 nt, Artificial Sequence
  Description of Artificial Sequence: Synthetic oligonucleotide
aucauggugaauuuuaaac

SEQ ID NO: 1517737 - RNA, 19 nt, Artificial Sequence
  Description of Artificial Sequence: Synthetic oligonucleotide
auguuaacccacuugaagc

SEQ ID NO: 1517738 - RNA, 19 nt, Artificial Sequence
  Description of Artificial Sequence: Synthetic oligonucleotide
caacuuaucaugaaaauag

SEQ ID NO: 1517739 - RNA, 19 nt, Artificial Sequence
  Description of Artificial Sequence: Synthetic oligonucleotide
ucuacuuuagugaagagaa

SEQ ID NO: 1517740 - RNA, 19 nt, Artificial Sequence
  Description of Artificial Sequence: Synthetic oligonucleotide
uguaaauugcauuucaucu

SEQ ID NO: 1517741 - RNA, 19 nt, Artificial Sequence
  Description of Artificial Sequence: Synthetic oligonucleotide
uuaucaugaaaauagcuug

SEQ ID NO: 1517742 - RNA, 19 nt, Artificial Sequence
  Description of Artificial Sequence: Synthetic oligonucleotide
gauguuucaaugcuggagg

SEQ ID NO: 1517743 - RNA, 19 nt, Artificial Sequence
  Description of Artificial Sequence: Synthetic oligonucleotide
uuaguagucacaaaauaug

SEQ ID NO: 1517744 - RNA, 19 nt, Artificial Sequence
  Description of Artificial Sequence: Synthetic oligonucleotide
uauguuuuaagaaagugua

SEQ ID NO: 1517745 - RNA, 19 nt, Artificial Sequence
  Description of Artificial Sequence: Synthetic oligonucleotide
gacaacuuaauacauuucc

SEQ ID NO: 1517746 - RNA, 19 nt, Artificial Sequence
  Description of Artificial Sequence: Synthetic oligonucleotide
agaagaacccaacaagggc

SEQ ID NO: 1517747 - RNA, 19 nt, Artificial Sequence
  Description of Artificial Sequence: Synthetic oligonucleotide
uuaacaaucagcagcaguc

SEQ ID NO: 1517748 - RNA, 19 nt, Artificial Sequence
  Description of Artificial Sequence: Synthetic oligonucleotide
aaaguuuacaacuuaucau

SEQ ID NO: 1517749 - RNA, 19 nt, Artificial Sequence
  Description of Artificial Sequence: Synthetic oligonucleotide
aaauuaaccugcuuaacaa

SEQ ID NO: 1517750 - RNA, 19 nt, Artificial Sequence
  Description of Artificial Sequence: Synthetic oligonucleotide
aaauaugcuuaauauagaa

SEQ ID NO: 1517751 - RNA, 19 nt, Artificial Sequence
  Description of Artificial Sequence: Synthetic oligonucleotide
gagauaacuacucuuauuc

SEQ ID NO: 1517752 - RNA, 19 nt, Artificial Sequence
  Description of Artificial Sequence: Synthetic oligonucleotide
uaucuaaacaaaucaaugu

SEQ ID NO: 1517753 - RNA, 19 nt, Artificial Sequence
  Description of Artificial Sequence: Synthetic oligonucleotide
ugaacuuccagaagaaccc

SEQ ID NO: 1517754 - RNA, 19 nt, Artificial Sequence
  Description of Artificial Sequence: Synthetic oligonucleotide
uggauuucaacaacgaaga

SEQ ID NO: 1517755 - RNA, 19 nt, Artificial Sequence
  Description of Artificial Sequence: Synthetic oligonucleotide
uuuuaggugauccacucug

SEQ ID NO: 1517756 - RNA, 19 nt, Artificial Sequence
  Description of Artificial Sequence: Synthetic oligonucleotide
cauuuauguuuuaagaaag

SEQ ID NO: 1517757 - RNA, 19 nt, Artificial Sequence
  Description of Artificial Sequence: Synthetic oligonucleotide
ugagaaauagcuucaguug

SEQ ID NO: 1517758 - RNA, 19 nt, Artificial Sequence
  Description of Artificial Sequence: Synthetic oligonucleotide
uaaauugcauuucaucuca

SEQ ID NO: 1517759 - RNA, 19 nt, Artificial Sequence
  Description of Artificial Sequence: Synthetic oligonucleotide
uuuacaacuucuacuuuag

SEQ ID NO: 1517760 - RNA, 19 nt, Artificial Sequence
  Description of Artificial Sequence: Synthetic oligonucleotide
uccagaagaacccaacaag

SEQ ID NO: 1517761 - RNA, 19 nt, Artificial Sequence
  Description of Artificial Sequence: Synthetic oligonucleotide
gauguuaacccacuugaag

SEQ ID NO: 1517762 - RNA, 19 nt, Artificial Sequence
  Description of Artificial Sequence: Synthetic oligonucleotide
uaugcuuaauauagaaacc

SEQ ID NO: 1517763 - RNA, 19 nt, Artificial Sequence
  Description of Artificial Sequence: Synthetic oligonucleotide
acuacucuuauucuuuaac

SEQ ID NO: 1517764 - RNA, 19 nt, Artificial Sequence
  Description of Artificial Sequence: Synthetic oligonucleotide
uauucuuuaacagauguuc

SEQ ID NO: 1517765 - RNA, 19 nt, Artificial Sequence
  Description of Artificial Sequence: Synthetic oligonucleotide
agaacuagaauuuaauuuu

SEQ ID NO: 1517766 - RNA, 19 nt, Artificial Sequence
  Description of Artificial Sequence: Synthetic oligonucleotide
agauguucaacauuacaag

SEQ ID NO: 1517767 - RNA, 19 nt, Artificial Sequence
  Description of Artificial Sequence: Synthetic oligonucleotide
uauaccuuuuaauauguac

SEQ ID NO: 1517768 - RNA, 19 nt, Artificial Sequence
  Description of Artificial Sequence: Synthetic oligonucleotide
gagaaauagcuucaguugc

SEQ ID NO: 1517769 - RNA, 19 nt, Artificial Sequence
  Description of Artificial Sequence: Synthetic oligonucleotide
uuuacaacuuaucaugaaa

SEQ ID NO: 1517770 - RNA, 19 nt, Artificial Sequence
  Description of Artificial Sequence: Synthetic oligonucleotide
aauugguaguaguagaaaa

SEQ ID NO: 1517771 - RNA, 19 nt, Artificial Sequence
  Description of Artificial Sequence: Synthetic oligonucleotide
uggauguuaacccacuuga

SEQ ID NO: 1517772 - RNA, 19 nt, Artificial Sequence
  Description of Artificial Sequence: Synthetic oligonucleotide
uaguuuuggauguuaaccc

SEQ ID NO: 1517773 - RNA, 19 nt, Artificial Sequence
  Description of Artificial Sequence: Synthetic oligonucleotide
uaguagucacaaaauaugc

SEQ ID NO: 1517774 - RNA, 19 nt, Artificial Sequence
  Description of Artificial Sequence: Synthetic oligonucleotide
uuacaguaauucuugagga

SEQ ID NO: 1517775 - RNA, 19 nt, Artificial Sequence
  Description of Artificial Sequence: Synthetic oligonucleotide
aguggauugggucacauga

SEQ ID NO: 1517776 - RNA, 19 nt, Artificial Sequence
  Description of Artificial Sequence: Synthetic oligonucleotide
aauauguacugucauuuaa

SEQ ID NO: 1517777 - RNA, 19 nt, Artificial Sequence
  Description of Artificial Sequence: Synthetic oligonucleotide
ucuuugaugggauuuaauc

SEQ ID NO: 1517778 - RNA, 19 nt, Artificial Sequence
  Description of Artificial Sequence: Synthetic oligonucleotide
cuaguuuuggauguuaacc

SEQ ID NO: 1517779 - RNA, 19 nt, Artificial Sequence
  Description of Artificial Sequence: Synthetic oligonucleotide
uuugaugggauuuaaucaa

SEQ ID NO: 1517780 - RNA, 19 nt, Artificial Sequence
  Description of Artificial Sequence: Synthetic oligonucleotide
ucuaaacaaaucaauguua

SEQ ID NO: 1517781 - RNA, 19 nt, Artificial Sequence
  Description of Artificial Sequence: Synthetic oligonucleotide
ucuucaaacaccagguacu

SEQ ID NO: 1517782 - RNA, 19 nt, Artificial Sequence
  Description of Artificial Sequence: Synthetic oligonucleotide
uuaauauuaguagucacaa

SEQ ID NO: 1517783 - RNA, 19 nt, Artificial Sequence
  Description of Artificial Sequence: Synthetic oligonucleotide
aacuuaucaugaaaauagc

SEQ ID NO: 1517784 - RNA, 19 nt, Artificial Sequence
  Description of Artificial Sequence: Synthetic oligonucleotide
uuuagugaagagaacuaga

SEQ ID NO: 1517785 - RNA, 19 nt, Artificial Sequence
  Description of Artificial Sequence: Synthetic oligonucleotide
ucaauucacaaacaauacu

SEQ ID NO: 1517786 - RNA, 19 nt, Artificial Sequence
  Description of Artificial Sequence: Synthetic oligonucleotide
uggagguaaguucagaggu

SEQ ID NO: 1517787 - RNA, 19 nt, Artificial Sequence
  Description of Artificial Sequence: Synthetic oligonucleotide
uaauucuugaggauguuuc

SEQ ID NO: 1517788 - RNA, 19 nt, Artificial Sequence
  Description of Artificial Sequence: Synthetic oligonucleotide
cugcuuaacaaucagcagc

SEQ ID NO: 1517789 - RNA, 19 nt, Artificial Sequence
  Description of Artificial Sequence: Synthetic oligonucleotide
acauaaauuaaccugcuua

SEQ ID NO: 1517790 - RNA, 19 nt, Artificial Sequence
  Description of Artificial Sequence: Synthetic oligonucleotide
cuuauuuugaggcagaucu

SEQ ID NO: 1517791 - RNA, 19 nt, Artificial Sequence
  Description of Artificial Sequence: Synthetic oligonucleotide
uguauaccuuuuaauaugu

SEQ ID NO: 1517792 - RNA, 19 nt, Artificial Sequence
  Description of Artificial Sequence: Synthetic oligonucleotide
agcaaauaaaacagcauac

SEQ ID NO: 1517793 - RNA, 19 nt, Artificial Sequence
  Description of Artificial Sequence: Synthetic oligonucleotide
aaacaauacuuucuugaga

SEQ ID NO: 1517794 - RNA, 19 nt, Artificial Sequence
  Description of Artificial Sequence: Synthetic oligonucleotide
auguauaccuuuuaauaug

SEQ ID NO: 1517795 - RNA, 19 nt, Artificial Sequence
  Description of Artificial Sequence: Synthetic oligonucleotide
ugacuuacaccucaauuca

SEQ ID NO: 1517796 - RNA, 19 nt, Artificial Sequence
  Description of Artificial Sequence: Synthetic oligonucleotide
agcauuuaauaucuaaaca

SEQ ID NO: 1517797 - RNA, 19 nt, Artificial Sequence
  Description of Artificial Sequence: Synthetic oligonucleotide
aacgaagaaacaaacgaug

SEQ ID NO: 1517798 - RNA, 19 nt, Artificial Sequence
  Description of Artificial Sequence: Synthetic oligonucleotide
aacaacgaagaaacaaacg

SEQ ID NO: 1517799 - RNA, 19 nt, Artificial Sequence
  Description of Artificial Sequence: Synthetic oligonucleotide
uaccuuuuaauauguacug

SEQ ID NO: 1517800 - RNA, 19 nt, Artificial Sequence
  Description of Artificial Sequence: Synthetic oligonucleotide
acuagaauuuaauuuucug

SEQ ID NO: 1517801 - RNA, 19 nt, Artificial Sequence
  Description of Artificial Sequence: Synthetic oligonucleotide
uauuaguagucacaaaaua

SEQ ID NO: 1517802 - RNA, 19 nt, Artificial Sequence
  Description of Artificial Sequence: Synthetic oligonucleotide
cugacuuacaccucaauuc

SEQ ID NO: 1517803 - RNA, 19 nt, Artificial Sequence
  Description of Artificial Sequence: Synthetic oligonucleotide
cuggacuagacuuagaaga

SEQ ID NO: 1517804 - RNA, 19 nt, Artificial Sequence
  Description of Artificial Sequence: Synthetic oligonucleotide
aaaauagcuugagauaacu

SEQ ID NO: 1517805 - RNA, 19 nt, Artificial Sequence
  Description of Artificial Sequence: Synthetic oligonucleotide
aacucuacuucugaacuuc

SEQ ID NO: 1517806 - RNA, 19 nt, Artificial Sequence
  Description of Artificial Sequence: Synthetic oligonucleotide
agaucuaucuccuucacuu

SEQ ID NO: 1517807 - RNA, 19 nt, Artificial Sequence
  Description of Artificial Sequence: Synthetic oligonucleotide
uuaaccugcuuaacaauca

SEQ ID NO: 1517808 - RNA, 19 nt, Artificial Sequence
  Description of Artificial Sequence: Synthetic oligonucleotide
ugaugcaacugccuuagca

SEQ ID NO: 1517809 - RNA, 19 nt, Artificial Sequence
  Description of Artificial Sequence: Synthetic oligonucleotide
uuaauauguacugucauuu

SEQ ID NO: 1517810 - RNA, 19 nt, Artificial Sequence
  Description of Artificial Sequence: Synthetic oligonucleotide
cuuagaagacaguaauggc

SEQ ID NO: 1517811 - RNA, 19 nt, Artificial Sequence
  Description of Artificial Sequence: Synthetic oligonucleotide
aguucaacuaguuuuggau

SEQ ID NO: 1517812 - RNA, 19 nt, Artificial Sequence
  Description of Artificial Sequence: Synthetic oligonucleotide
uaucaugaaaauagcuuga

SEQ ID NO: 1517813 - RNA, 19 nt, Artificial Sequence
  Description of Artificial Sequence: Synthetic oligonucleotide
acgaagaaacaaacgaugc

SEQ ID NO: 1517814 - RNA, 19 nt, Artificial Sequence
  Description of Artificial Sequence: Synthetic oligonucleotide
caacuuaauacauuuccac

SEQ ID NO: 1517815 - RNA, 19 nt, Artificial Sequence
  Description of Artificial Sequence: Synthetic oligonucleotide
ugacuauucauacuggauu

SEQ ID NO: 1517816 - RNA, 19 nt, Artificial Sequence
  Description of Artificial Sequence: Synthetic oligonucleotide
uacuuuagugaagagaacu

SEQ ID NO: 1517817 - RNA, 19 nt, Artificial Sequence
  Description of Artificial Sequence: Synthetic oligonucleotide
uucaacuaguuuuggaugu

SEQ ID NO: 1517818 - RNA, 19 nt, Artificial Sequence
  Description of Artificial Sequence: Synthetic oligonucleotide
cuugagagcucuuauuuug

SEQ ID NO: 1517819 - RNA, 19 nt, Artificial Sequence
  Description of Artificial Sequence: Synthetic oligonucleotide
acagccggugcccaaauac

SEQ ID NO: 1517820 - RNA, 19 nt, Artificial Sequence
  Description of Artificial Sequence: Synthetic oligonucleotide
auaucuaaacaaaucaaug

SEQ ID NO: 1517821 - RNA, 19 nt, Artificial Sequence
  Description of Artificial Sequence: Synthetic oligonucleotide
uauuuugaggcagaucugc

SEQ ID NO: 1517822 - RNA, 19 nt, Artificial Sequence
  Description of Artificial Sequence: Synthetic oligonucleotide
gauucuacagaacuacaca

SEQ ID NO: 1517823 - RNA, 19 nt, Artificial Sequence
  Description of Artificial Sequence: Synthetic oligonucleotide
uauaauguuuuguaucuua

SEQ ID NO: 1517824 - RNA, 19 nt, Artificial Sequence
  Description of Artificial Sequence: Synthetic oligonucleotide
aauuaaccugcuuaacaau

SEQ ID NO: 1517825 - RNA, 19 nt, Artificial Sequence
  Description of Artificial Sequence: Synthetic oligonucleotide
uguguuuuacacauucaaa

SEQ ID NO: 1517826 - RNA, 19 nt, Artificial Sequence
  Description of Artificial Sequence: Synthetic oligonucleotide
aagccaguguuuuauauua

SEQ ID NO: 1517827 - RNA, 19 nt, Artificial Sequence
  Description of Artificial Sequence: Synthetic oligonucleotide
cuuaauauagaaacccaca

SEQ ID NO: 1517828 - RNA, 19 nt, Artificial Sequence
  Description of Artificial Sequence: Synthetic oligonucleotide
cagaacuacacaucguacc

SEQ ID NO: 1517829 - RNA, 19 nt, Artificial Sequence
  Description of Artificial Sequence: Synthetic oligonucleotide
cuuugaugggauuuaauca

SEQ ID NO: 1517830 - RNA, 19 nt, Artificial Sequence
  Description of Artificial Sequence: Synthetic oligonucleotide
ucaucaaggagcacuagau

SEQ ID NO: 1517831 - RNA, 19 nt, Artificial Sequence
  Description of Artificial Sequence: Synthetic oligonucleotide
uguuaacccacuugaagcu

SEQ ID NO: 1517832 - RNA, 19 nt, Artificial Sequence
  Description of Artificial Sequence: Synthetic oligonucleotide
cucaauucacaaacaauac

SEQ ID NO: 1517833 - RNA, 19 nt, Artificial Sequence
  Description of Artificial Sequence: Synthetic oligonucleotide
agaugcagcaguaacuugg

SEQ ID NO: 1517834 - RNA, 19 nt, Artificial Sequence
  Description of Artificial Sequence: Synthetic oligonucleotide
agaacuacacaucguaccu

SEQ ID NO: 1517835 - RNA, 19 nt, Artificial Sequence
  Description of Artificial Sequence: Synthetic oligonucleotide
gaagcugagacugaagaac

SEQ ID NO: 1517836 - RNA, 19 nt, Artificial Sequence
  Description of Artificial Sequence: Synthetic oligonucleotide
cagaagaacccaacaaggg

SEQ ID NO: 1517837 - RNA, 19 nt, Artificial Sequence
  Description of Artificial Sequence: Synthetic oligonucleotide
aguaauggcaacucuacuu

SEQ ID NO: 1517838 - RNA, 19 nt, Artificial Sequence
  Description of Artificial Sequence: Synthetic oligonucleotide
gauuuaaucaaguuagaau

SEQ ID NO: 1517839 - RNA, 19 nt, Artificial Sequence
  Description of Artificial Sequence: Synthetic oligonucleotide
agacuuagaagacaguaau

SEQ ID NO: 1517840 - RNA, 19 nt, Artificial Sequence
  Description of Artificial Sequence: Synthetic oligonucleotide
gagagcucuuauuuugagg

SEQ ID NO: 1517841 - RNA, 19 nt, Artificial Sequence
  Description of Artificial Sequence: Synthetic oligonucleotide
uucaucaaggagcacuaga

SEQ ID NO: 1517842 - RNA, 19 nt, Artificial Sequence
  Description of Artificial Sequence: Synthetic oligonucleotide
gacuagacuuagaagacag

SEQ ID NO: 1517843 - RNA, 19 nt, Artificial Sequence
  Description of Artificial Sequence: Synthetic oligonucleotide
gaaucaguggauuggguca

SEQ ID NO: 1517844 - RNA, 19 nt, Artificial Sequence
  Description of Artificial Sequence: Synthetic oligonucleotide
agauucuacagaacuacac

SEQ ID NO: 1517845 - RNA, 19 nt, Artificial Sequence
  Description of Artificial Sequence: Synthetic oligonucleotide
uuuaauauguacugucauu

SEQ ID NO: 1517846 - RNA, 19 nt, Artificial Sequence
  Description of Artificial Sequence: Synthetic oligonucleotide
auucuacagaacuacacau

SEQ ID NO: 1517847 - RNA, 19 nt, Artificial Sequence
  Description of Artificial Sequence: Synthetic oligonucleotide
uugaugggauuuaaucaag

SEQ ID NO: 1517848 - RNA, 19 nt, Artificial Sequence
  Description of Artificial Sequence: Synthetic oligonucleotide
gaaacaaacgaugcugagc

SEQ ID NO: 1517849 - RNA, 19 nt, Artificial Sequence
  Description of Artificial Sequence: Synthetic oligonucleotide
gcagcagucaaaaucaugg

SEQ ID NO: 1517850 - RNA, 19 nt, Artificial Sequence
  Description of Artificial Sequence: Synthetic oligonucleotide
uucuugagagcucuuauuu

SEQ ID NO: 1517851 - RNA, 19 nt, Artificial Sequence
  Description of Artificial Sequence: Synthetic oligonucleotide
agacaguauuuucuucagc

SEQ ID NO: 1517852 - RNA, 19 nt, Artificial Sequence
  Description of Artificial Sequence: Synthetic oligonucleotide
uacuagaugcagcaguaac

SEQ ID NO: 1517853 - RNA, 19 nt, Artificial Sequence
  Description of Artificial Sequence: Synthetic oligonucleotide
agaagacaguauuuucuuc

SEQ ID NO: 1517854 - RNA, 19 nt, Artificial Sequence
  Description of Artificial Sequence: Synthetic oligonucleotide
guaaauugcauuucaucuc

SEQ ID NO: 1517855 - RNA, 19 nt, Artificial Sequence
  Description of Artificial Sequence: Synthetic oligonucleotide
auaccuuuuaauauguacu

SEQ ID NO: 1517856 - RNA, 19 nt, Artificial Sequence
  Description of Artificial Sequence: Synthetic oligonucleotide
ugcccaaauacacugacuu

SEQ ID NO: 1517857 - RNA, 19 nt, Artificial Sequence
  Description of Artificial Sequence: Synthetic oligonucleotide
aaucaguggauugggucac

SEQ ID NO: 1517858 - RNA, 19 nt, Artificial Sequence
  Description of Artificial Sequence: Synthetic oligonucleotide
aacuacacaucguaccuaa

SEQ ID NO: 1517859 - RNA, 19 nt, Artificial Sequence
  Description of Artificial Sequence: Synthetic oligonucleotide
acaguaauucuugaggaug

SEQ ID NO: 1517860 - RNA, 19 nt, Artificial Sequence
  Description of Artificial Sequence: Synthetic oligonucleotide
aucaauguuaauauuagua

SEQ ID NO: 1517861 - RNA, 19 nt, Artificial Sequence
  Description of Artificial Sequence: Synthetic oligonucleotide
auuaguagucacaaaauau

SEQ ID NO: 1517862 - RNA, 19 nt, Artificial Sequence
  Description of Artificial Sequence: Synthetic oligonucleotide
gagcacuagaucuucuacc

SEQ ID NO: 1517863 - RNA, 19 nt, Artificial Sequence
  Description of Artificial Sequence: Synthetic oligonucleotide
aagcaauacaaaaucugug

SEQ ID NO: 1517864 - RNA, 19 nt, Artificial Sequence
  Description of Artificial Sequence: Synthetic oligonucleotide
acaguaauggcaacucuac

SEQ ID NO: 1517865 - RNA, 19 nt, Artificial Sequence
  Description of Artificial Sequence: Synthetic oligonucleotide
agcacuagaucuucuaccu

SEQ ID NO: 1517866 - RNA, 19 nt, Artificial Sequence
  Description of Artificial Sequence: Synthetic oligonucleotide
uagacuuagaagacaguaa

SEQ ID NO: 1517867 - RNA, 19 nt, Artificial Sequence
  Description of Artificial Sequence: Synthetic oligonucleotide
accaaauugguaguaguag

SEQ ID NO: 1517868 - RNA, 19 nt, Artificial Sequence
  Description of Artificial Sequence: Synthetic oligonucleotide
acauucuuaaaaccuugug

SEQ ID NO: 1517869 - RNA, 19 nt, Artificial Sequence
  Description of Artificial Sequence: Synthetic oligonucleotide
aauaugcuuaauauagaaa

SEQ ID NO: 1517870 - RNA, 19 nt, Artificial Sequence
  Description of Artificial Sequence: Synthetic oligonucleotide
acugguaugcugucaaugu

SEQ ID NO: 1517871 - RNA, 19 nt, Artificial Sequence
  Description of Artificial Sequence: Synthetic oligonucleotide
ugaggauguuucaaugcug

SEQ ID NO: 1517872 - RNA, 19 nt, Artificial Sequence
  Description of Artificial Sequence: Synthetic oligonucleotide
gaagaacccaacaagggca

SEQ ID NO: 1517873 - RNA, 19 nt, Artificial Sequence
  Description of Artificial Sequence: Synthetic oligonucleotide
ucuuuaacagauguucaac

SEQ ID NO: 1517874 - RNA, 19 nt, Artificial Sequence
  Description of Artificial Sequence: Synthetic oligonucleotide
agaaaguguaaauugcauu

SEQ ID NO: 1517875 - RNA, 19 nt, Artificial Sequence
  Description of Artificial Sequence: Synthetic oligonucleotide
acauucaaauacugugguc

SEQ ID NO: 1517876 - RNA, 19 nt, Artificial Sequence
  Description of Artificial Sequence: Synthetic oligonucleotide
guaauggcaacucuacuuc

SEQ ID NO: 1517877 - RNA, 19 nt, Artificial Sequence
  Description of Artificial Sequence: Synthetic oligonucleotide
aaaauaacaggaaguacuu

SEQ ID NO: 1517878 - RNA, 19 nt, Artificial Sequence
  Description of Artificial Sequence: Synthetic oligonucleotide
cuggagguaaguucagagg

SEQ ID NO: 1517879 - RNA, 19 nt, Artificial Sequence
  Description of Artificial Sequence: Synthetic oligonucleotide
cuuuagugaagagaacuag

SEQ ID NO: 1517880 - RNA, 19 nt, Artificial Sequence
  Description of Artificial Sequence: Synthetic oligonucleotide
aaagccaguguuuuauauu

SEQ ID NO: 1517881 - RNA, 19 nt, Artificial Sequence
  Description of Artificial Sequence: Synthetic oligonucleotide
uggacuagacuuagaagac

SEQ ID NO: 1517882 - RNA, 19 nt, Artificial Sequence
  Description of Artificial Sequence: Synthetic oligonucleotide
uuuaggugauccacucugc

SEQ ID NO: 1517883 - RNA, 19 nt, Artificial Sequence
  Description of Artificial Sequence: Synthetic oligonucleotide
cuucagcaaauaaaacagc

SEQ ID NO: 1517884 - RNA, 19 nt, Artificial Sequence
  Description of Artificial Sequence: Synthetic oligonucleotide
gaaaguguaaauugcauuu

SEQ ID NO: 1517885 - RNA, 19 nt, Artificial Sequence
  Description of Artificial Sequence: Synthetic oligonucleotide
uaccuaauaugucauuaaa

SEQ ID NO: 1517886 - RNA, 19 nt, Artificial Sequence
  Description of Artificial Sequence: Synthetic oligonucleotide
aguuuuggauguuaaccca

SEQ ID NO: 1517887 - RNA, 19 nt, Artificial Sequence
  Description of Artificial Sequence: Synthetic oligonucleotide
agagaacuagaauuuaauu

SEQ ID NO: 1517888 - RNA, 19 nt, Artificial Sequence
  Description of Artificial Sequence: Synthetic oligonucleotide
agaauuuaauuuucugcaa

SEQ ID NO: 1517889 - RNA, 19 nt, Artificial Sequence
  Description of Artificial Sequence: Synthetic oligonucleotide
uugaagcugucucuggacu

SEQ ID NO: 1517890 - RNA, 19 nt, Artificial Sequence
  Description of Artificial Sequence: Synthetic oligonucleotide
uuaaucaaguuagaauaaa

SEQ ID NO: 1517891 - RNA, 19 nt, Artificial Sequence
  Description of Artificial Sequence: Synthetic oligonucleotide
agauaacuacucuuauucu

SEQ ID NO: 1517892 - RNA, 19 nt, Artificial Sequence
  Description of Artificial Sequence: Synthetic oligonucleotide
ucuaucuccuucacuugug

SEQ ID NO: 1517893 - RNA, 19 nt, Artificial Sequence
  Description of Artificial Sequence: Synthetic oligonucleotide
uagucacaaaauaugcuua

SEQ ID NO: 1517894 - RNA, 19 nt, Artificial Sequence
  Description of Artificial Sequence: Synthetic oligonucleotide
ugguaugcugucaauguau

SEQ ID NO: 1517895 - RNA, 19 nt, Artificial Sequence
  Description of Artificial Sequence: Synthetic oligonucleotide
ucugcugucuggaaucagu

SEQ ID NO: 1517896 - RNA, 19 nt, Artificial Sequence
  Description of Artificial Sequence: Synthetic oligonucleotide
ugaugggauuuaaucaagu

SEQ ID NO: 1517897 - RNA, 19 nt, Artificial Sequence
  Description of Artificial Sequence: Synthetic oligonucleotide
aauuuucugcaaaacugga

SEQ ID NO: 1517898 - RNA, 19 nt, Artificial Sequence
  Description of Artificial Sequence: Synthetic oligonucleotide
ugagagcucuuauuuugag

SEQ ID NO: 1517899 - RNA, 19 nt, Artificial Sequence
  Description of Artificial Sequence: Synthetic oligonucleotide
uggauugggucacaugacu

SEQ ID NO: 1517900 - RNA, 19 nt, Artificial Sequence
  Description of Artificial Sequence: Synthetic oligonucleotide
acccacuugaagcugucuc

SEQ ID NO: 1517901 - RNA, 19 nt, Artificial Sequence
  Description of Artificial Sequence: Synthetic oligonucleotide
cuacucuuauucuuuaaca

SEQ ID NO: 1517902 - RNA, 19 nt, Artificial Sequence
  Description of Artificial Sequence: Synthetic oligonucleotide
aagagaacuagaauuuaau

SEQ ID NO: 1517903 - RNA, 19 nt, Artificial Sequence
  Description of Artificial Sequence: Synthetic oligonucleotide
acagcauacugguaugcug

SEQ ID NO: 1517904 - RNA, 19 nt, Artificial Sequence
  Description of Artificial Sequence: Synthetic oligonucleotide
agaucugccaguucaacua

SEQ ID NO: 1517905 - RNA, 19 nt, Artificial Sequence
  Description of Artificial Sequence: Synthetic oligonucleotide
acuugggagacauuacagu

SEQ ID NO: 1517906 - RNA, 19 nt, Artificial Sequence
  Description of Artificial Sequence: Synthetic oligonucleotide
auuuugaggcagaucugcc

SEQ ID NO: 1517907 - RNA, 19 nt, Artificial Sequence
  Description of Artificial Sequence: Synthetic oligonucleotide
cauggugaauuuuaaacaa

SEQ ID NO: 1517908 - RNA, 19 nt, Artificial Sequence
  Description of Artificial Sequence: Synthetic oligonucleotide
caucguaccuaauauguca

SEQ ID NO: 1517909 - RNA, 19 nt, Artificial Sequence
  Description of Artificial Sequence: Synthetic oligonucleotide
aaauugguaguaguagaaa

SEQ ID NO: 1517910 - RNA, 19 nt, Artificial Sequence
  Description of Artificial Sequence: Synthetic oligonucleotide
uuaauacauuuccaccaaa

SEQ ID NO: 1517911 - RNA, 19 nt, Artificial Sequence
  Description of Artificial Sequence: Synthetic oligonucleotide
agguacuagaugcagcagu

SEQ ID NO: 1517912 - RNA, 19 nt, Artificial Sequence
  Description of Artificial Sequence: Synthetic oligonucleotide
aacuagaauuuaauuuucu

SEQ ID NO: 1517913 - RNA, 19 nt, Artificial Sequence
  Description of Artificial Sequence: Synthetic oligonucleotide
guaaaauaacaggaaguac

SEQ ID NO: 1517914 - RNA, 19 nt, Artificial Sequence
  Description of Artificial Sequence: Synthetic oligonucleotide
acugacuuacaccucaauu

SEQ ID NO: 1517915 - RNA, 19 nt, Artificial Sequence
  Description of Artificial Sequence: Synthetic oligonucleotide
auguucaacauuacaagca

SEQ ID NO: 1517916 - RNA, 19 nt, Artificial Sequence
  Description of Artificial Sequence: Synthetic oligonucleotide
gaugcagcaguaacuuggg

SEQ ID NO: 1517917 - RNA, 19 nt, Artificial Sequence
  Description of Artificial Sequence: Synthetic oligonucleotide
aucugugaaagccaguguu

SEQ ID NO: 1517918 - RNA, 19 nt, Artificial Sequence
  Description of Artificial Sequence: Synthetic oligonucleotide
uuaggugauccacucugcu

SEQ ID NO: 1517919 - RNA, 19 nt, Artificial Sequence
  Description of Artificial Sequence: Synthetic oligonucleotide
gaucugccaguucaacuag

SEQ ID NO: 1517920 - RNA, 19 nt, Artificial Sequence
  Description of Artificial Sequence: Synthetic oligonucleotide
acuuaucaugaaaauagcu

SEQ ID NO: 1517921 - RNA, 19 nt, Artificial Sequence
  Description of Artificial Sequence: Synthetic oligonucleotide
uugagauaacuacucuuau

SEQ ID NO: 1517922 - RNA, 19 nt, Artificial Sequence
  Description of Artificial Sequence: Synthetic oligonucleotide
cuugagauaacuacucuua

SEQ ID NO: 1517923 - RNA, 19 nt, Artificial Sequence
  Description of Artificial Sequence: Synthetic oligonucleotide
auagcuugagauaacuacu

SEQ ID NO: 1517924 - RNA, 19 nt, Artificial Sequence
  Description of Artificial Sequence: Synthetic oligonucleotide
aucaugaaaauagcuugag

SEQ ID NO: 1517925 - RNA, 19 nt, Artificial Sequence
  Description of Artificial Sequence: Synthetic oligonucleotide
cuaucuccuucacuugugg

SEQ ID NO: 1517926 - RNA, 19 nt, Artificial Sequence
  Description of Artificial Sequence: Synthetic oligonucleotide
acagaacuacacaucguac

SEQ ID NO: 1517927 - RNA, 19 nt, Artificial Sequence
  Description of Artificial Sequence: Synthetic oligonucleotide
auggugaauuuuaaacaac

SEQ ID NO: 1517928 - RNA, 19 nt, Artificial Sequence
  Description of Artificial Sequence: Synthetic oligonucleotide
ggagacauuacaguaauuc

SEQ ID NO: 1517929 - RNA, 19 nt, Artificial Sequence
  Description of Artificial Sequence: Synthetic oligonucleotide
ucaaauacugugguccccu

SEQ ID NO: 1517930 - RNA, 19 nt, Artificial Sequence
  Description of Artificial Sequence: Synthetic oligonucleotide
caaugcuggagguaaguuc

SEQ ID NO: 1517931 - RNA, 19 nt, Artificial Sequence
  Description of Artificial Sequence: Synthetic oligonucleotide
ucaaaaucauggugaauuu

SEQ ID NO: 1517932 - RNA, 19 nt, Artificial Sequence
  Description of Artificial Sequence: Synthetic oligonucleotide
cacuagaucuucuaccuca

SEQ ID NO: 1517933 - RNA, 19 nt, Artificial Sequence
  Description of Artificial Sequence: Synthetic oligonucleotide
uuucaaugcuggagguaag

SEQ ID NO: 1517934 - RNA, 19 nt, Artificial Sequence
  Description of Artificial Sequence: Synthetic oligonucleotide
guguuuuacacauucaaau

SEQ ID NO: 1517935 - RNA, 19 nt, Artificial Sequence
  Description of Artificial Sequence: Synthetic oligonucleotide
agucacaaaauaugcuuaa

SEQ ID NO: 1517936 - RNA, 19 nt, Artificial Sequence
  Description of Artificial Sequence: Synthetic oligonucleotide
ugagauaacuacucuuauu

SEQ ID NO: 1517937 - RNA, 19 nt, Artificial Sequence
  Description of Artificial Sequence: Synthetic oligonucleotide
cauucuuaaaaccuugugu

SEQ ID NO: 1517938 - RNA, 19 nt, Artificial Sequence
  Description of Artificial Sequence: Synthetic oligonucleotide
aauggcaacucuacuucug

SEQ ID NO: 1517939 - RNA, 19 nt, Artificial Sequence
  Description of Artificial Sequence: Synthetic oligonucleotide
agaaccuuccaaagcacuc

SEQ ID NO: 1517940 - RNA, 19 nt, Artificial Sequence
  Description of Artificial Sequence: Synthetic oligonucleotide
uguuaccugagaggaauug

SEQ ID NO: 1517941 - RNA, 19 nt, Artificial Sequence
  Description of Artificial Sequence: Synthetic oligonucleotide
gacuuagaagacaguaaug

SEQ ID NO: 1517942 - RNA, 19 nt, Artificial Sequence
  Description of Artificial Sequence: Synthetic oligonucleotide
uaccucacugccccuauac

SEQ ID NO: 1517943 - RNA, 19 nt, Artificial Sequence
  Description of Artificial Sequence: Synthetic oligonucleotide
ugugguccccuuuucuuug

SEQ ID NO: 1517944 - RNA, 19 nt, Artificial Sequence
  Description of Artificial Sequence: Synthetic oligonucleotide
uacugguaugcugucaaug

SEQ ID NO: 1517945 - RNA, 19 nt, Artificial Sequence
  Description of Artificial Sequence: Synthetic oligonucleotide
acaacuuaauacauuucca

SEQ ID NO: 1517946 - RNA, 19 nt, Artificial Sequence
  Description of Artificial Sequence: Synthetic oligonucleotide
uucuugaggauguuucaau

SEQ ID NO: 1517947 - RNA, 19 nt, Artificial Sequence
  Description of Artificial Sequence: Synthetic oligonucleotide
acaacuuaucaugaaaaua

SEQ ID NO: 1517948 - RNA, 19 nt, Artificial Sequence
  Description of Artificial Sequence: Synthetic oligonucleotide
uuucaacaacgaagaaaca

SEQ ID NO: 1517949 - RNA, 19 nt, Artificial Sequence
  Description of Artificial Sequence: Synthetic oligonucleotide
uccaccaaauugguaguag

SEQ ID NO: 1517950 - RNA, 19 nt, Artificial Sequence
  Description of Artificial Sequence: Synthetic oligonucleotide
gaggucucgacucuucauc

SEQ ID NO: 1517951 - RNA, 19 nt, Artificial Sequence
  Description of Artificial Sequence: Synthetic oligonucleotide
aacuacucuuauucuuuaa

SEQ ID NO: 1517952 - RNA, 19 nt, Artificial Sequence
  Description of Artificial Sequence: Synthetic oligonucleotide
acuauucauacuggauuuc

SEQ ID NO: 1517953 - RNA, 19 nt, Artificial Sequence
  Description of Artificial Sequence: Synthetic oligonucleotide
gauaacuacucuuauucuu

SEQ ID NO: 1517954 - RNA, 19 nt, Artificial Sequence
  Description of Artificial Sequence: Synthetic oligonucleotide
gguaaguucagaggucucg

SEQ ID NO: 1517955 - RNA, 19 nt, Artificial Sequence
  Description of Artificial Sequence: Synthetic oligonucleotide
uaacaaucagcagcaguca

SEQ ID NO: 1517956 - RNA, 19 nt, Artificial Sequence
  Description of Artificial Sequence: Synthetic oligonucleotide
uccccuuuucuuugauggg

SEQ ID NO: 1517957 - RNA, 19 nt, Artificial Sequence
  Description of Artificial Sequence: Synthetic oligonucleotide
uugggucacaugacuauuc

SEQ ID NO: 1517958 - RNA, 19 nt, Artificial Sequence
  Description of Artificial Sequence: Synthetic oligonucleotide
uuucuugagagcucuuauu

SEQ ID NO: 1517959 - RNA, 19 nt, Artificial Sequence
  Description of Artificial Sequence: Synthetic oligonucleotide
guuaccugagaggaauugc

SEQ ID NO: 1517960 - RNA, 19 nt, Artificial Sequence
  Description of Artificial Sequence: Synthetic oligonucleotide
gaagcugucucuggacuag

SEQ ID NO: 1517961 - RNA, 19 nt, Artificial Sequence
  Description of Artificial Sequence: Synthetic oligonucleotide
gaugcaacugccuuagcau

SEQ ID NO: 1517962 - RNA, 19 nt, Artificial Sequence
  Description of Artificial Sequence: Synthetic oligonucleotide
ugucaauguauaccuuuua

SEQ ID NO: 1517963 - RNA, 19 nt, Artificial Sequence
  Description of Artificial Sequence: Synthetic oligonucleotide
gaagagaacuagaauuuaa

SEQ ID NO: 1517964 - RNA, 19 nt, Artificial Sequence
  Description of Artificial Sequence: Synthetic oligonucleotide
guuucaaugcuggagguaa

SEQ ID NO: 1517965 - RNA, 19 nt, Artificial Sequence
  Description of Artificial Sequence: Synthetic oligonucleotide
acaugacuauucauacugg

SEQ ID NO: 1517966 - RNA, 19 nt, Artificial Sequence
  Description of Artificial Sequence: Synthetic oligonucleotide
ggauguuucaaugcuggag

SEQ ID NO: 1517967 - RNA, 19 nt, Artificial Sequence
  Description of Artificial Sequence: Synthetic oligonucleotide
auaacuacucuuauucuuu

SEQ ID NO: 1517968 - RNA, 19 nt, Artificial Sequence
  Description of Artificial Sequence: Synthetic oligonucleotide
guagucacaaaauaugcuu

SEQ ID NO: 1517969 - RNA, 19 nt, Artificial Sequence
  Description of Artificial Sequence: Synthetic oligonucleotide
uuacaccucaauucacaaa

SEQ ID NO: 1517970 - RNA, 19 nt, Artificial Sequence
  Description of Artificial Sequence: Synthetic oligonucleotide
gucaaaaucauggugaauu

SEQ ID NO: 1517971 - RNA, 19 nt, Artificial Sequence
  Description of Artificial Sequence: Synthetic oligonucleotide
cacaucguaccuaauaugu

SEQ ID NO: 1517972 - RNA, 19 nt, Artificial Sequence
  Description of Artificial Sequence: Synthetic oligonucleotide
agcuugagauaacuacucu

SEQ ID NO: 1517973 - RNA, 19 nt, Artificial Sequence
  Description of Artificial Sequence: Synthetic oligonucleotide
ggaaucaguggauuggguc

SEQ ID NO: 1517974 - RNA, 19 nt, Artificial Sequence
  Description of Artificial Sequence: Synthetic oligonucleotide
uaaguucagaggucucgac

SEQ ID NO: 1517975 - RNA, 19 nt, Artificial Sequence
  Description of Artificial Sequence: Synthetic oligonucleotide
cuuaauacauuuccaccaa

SEQ ID NO: 1517976 - RNA, 19 nt, Artificial Sequence
  Description of Artificial Sequence: Synthetic oligonucleotide
cuguuguuaccugagagga

SEQ ID NO: 1517977 - RNA, 19 nt, Artificial Sequence
  Description of Artificial Sequence: Synthetic oligonucleotide
agacaacuuaauacauuuc

SEQ ID NO: 1517978 - RNA, 19 nt, Artificial Sequence
  Description of Artificial Sequence: Synthetic oligonucleotide
aggucucgacucuucauca

SEQ ID NO: 1517979 - RNA, 19 nt, Artificial Sequence
  Description of Artificial Sequence: Synthetic oligonucleotide
agacaguaauggcaacucu

SEQ ID NO: 1517980 - RNA, 19 nt, Artificial Sequence
  Description of Artificial Sequence: Synthetic oligonucleotide
acuuacaccucaauucaca

SEQ ID NO: 1517981 - RNA, 19 nt, Artificial Sequence
  Description of Artificial Sequence: Synthetic oligonucleotide
auguacugucauuuaaauu

SEQ ID NO: 1517982 - RNA, 19 nt, Artificial Sequence
  Description of Artificial Sequence: Synthetic oligonucleotide
uucaaauacuguggucccc

SEQ ID NO: 1517983 - RNA, 19 nt, Artificial Sequence
  Description of Artificial Sequence: Synthetic oligonucleotide
cuagacuuagaagacagua

SEQ ID NO: 1517984 - RNA, 19 nt, Artificial Sequence
  Description of Artificial Sequence: Synthetic oligonucleotide
aacccaacaagggcaccuc

SEQ ID NO: 1517985 - RNA, 19 nt, Artificial Sequence
  Description of Artificial Sequence: Synthetic oligonucleotide
uagaugcagcaguaacuug

SEQ ID NO: 1517986 - RNA, 19 nt, Artificial Sequence
  Description of Artificial Sequence: Synthetic oligonucleotide
acaucguaccuaauauguc

SEQ ID NO: 1517987 - RNA, 19 nt, Artificial Sequence
  Description of Artificial Sequence: Synthetic oligonucleotide
aacuaguuuuggauguuaa

SEQ ID NO: 1517988 - RNA, 19 nt, Artificial Sequence
  Description of Artificial Sequence: Synthetic oligonucleotide
accuaauaugucauuaaaa

SEQ ID NO: 1517989 - RNA, 19 nt, Artificial Sequence
  Description of Artificial Sequence: Synthetic oligonucleotide
guuuuggauguuaacccac

SEQ ID NO: 1517990 - RNA, 19 nt, Artificial Sequence
  Description of Artificial Sequence: Synthetic oligonucleotide
cccacauuuauguuuuaag

SEQ ID NO: 1517991 - RNA, 19 nt, Artificial Sequence
  Description of Artificial Sequence: Synthetic oligonucleotide
agaaauagcuucaguugcu

SEQ ID NO: 1517992 - RNA, 19 nt, Artificial Sequence
  Description of Artificial Sequence: Synthetic oligonucleotide
uguuguuaccugagaggaa

SEQ ID NO: 1517993 - RNA, 19 nt, Artificial Sequence
  Description of Artificial Sequence: Synthetic oligonucleotide
uggaaucaguggauugggu

SEQ ID NO: 1517994 - RNA, 19 nt, Artificial Sequence
  Description of Artificial Sequence: Synthetic oligonucleotide
gacuauucauacuggauuu

SEQ ID NO: 1517995 - RNA, 19 nt, Artificial Sequence
  Description of Artificial Sequence: Synthetic oligonucleotide
caugguagacaacuuaaua

SEQ ID NO: 1517996 - RNA, 19 nt, Artificial Sequence
  Description of Artificial Sequence: Synthetic oligonucleotide
guaccuaauaugucauuaa

SEQ ID NO: 1517997 - RNA, 19 nt, Artificial Sequence
  Description of Artificial Sequence: Synthetic oligonucleotide
gcuuaauauagaaacccac

SEQ ID NO: 1517998 - RNA, 19 nt, Artificial Sequence
  Description of Artificial Sequence: Synthetic oligonucleotide
acgaugcugagccauguuu

SEQ ID NO: 1517999 - RNA, 19 nt, Artificial Sequence
  Description of Artificial Sequence: Synthetic oligonucleotide
caaacgaugcugagccaug

SEQ ID NO: 1518000 - RNA, 19 nt, Artificial Sequence
  Description of Artificial Sequence: Synthetic oligonucleotide
gacaguaauggcaacucua

SEQ ID NO: 1518001 - RNA, 19 nt, Artificial Sequence
  Description of Artificial Sequence: Synthetic oligonucleotide
accuuuuaauauguacugu

SEQ ID NO: 1518002 - RNA, 19 nt, Artificial Sequence
  Description of Artificial Sequence: Synthetic oligonucleotide
cuauucauacuggauuuca

SEQ ID NO: 1518003 - RNA, 19 nt, Artificial Sequence
  Description of Artificial Sequence: Synthetic oligonucleotide
cucuggacuagacuuagaa

SEQ ID NO: 1518004 - RNA, 19 nt, Artificial Sequence
  Description of Artificial Sequence: Synthetic oligonucleotide
ccuuguguuuuacacauuc

SEQ ID NO: 1518005 - RNA, 19 nt, Artificial Sequence
  Description of Artificial Sequence: Synthetic oligonucleotide
agcaugguagacaacuuaa

SEQ ID NO: 1518006 - RNA, 19 nt, Artificial Sequence
  Description of Artificial Sequence: Synthetic oligonucleotide
aaucagcagcagucaaaau

SEQ ID NO: 1518007 - RNA, 19 nt, Artificial Sequence
  Description of Artificial Sequence: Synthetic oligonucleotide
ugugaaagccaguguuuua

SEQ ID NO: 1518008 - RNA, 19 nt, Artificial Sequence
  Description of Artificial Sequence: Synthetic oligonucleotide
caacuucuacuuuagugaa

SEQ ID NO: 1518009 - RNA, 19 nt, Artificial Sequence
  Description of Artificial Sequence: Synthetic oligonucleotide
guuaacccacuugaagcug

SEQ ID NO: 1518010 - RNA, 19 nt, Artificial Sequence
  Description of Artificial Sequence: Synthetic oligonucleotide
gaagacaguaauggcaacu

SEQ ID NO: 1518011 - RNA, 19 nt, Artificial Sequence
  Description of Artificial Sequence: Synthetic oligonucleotide
acuuuagugaagagaacua

SEQ ID NO: 1518012 - RNA, 19 nt, Artificial Sequence
  Description of Artificial Sequence: Synthetic oligonucleotide
agaacccaacaagggcacc

SEQ ID NO: 1518013 - RNA, 19 nt, Artificial Sequence
  Description of Artificial Sequence: Synthetic oligonucleotide
auucuugaggauguuucaa

SEQ ID NO: 1518014 - RNA, 19 nt, Artificial Sequence
  Description of Artificial Sequence: Synthetic oligonucleotide
augcaacugccuuagcauu

SEQ ID NO: 1518015 - RNA, 19 nt, Artificial Sequence
  Description of Artificial Sequence: Synthetic oligonucleotide
gagcucuuauuuugaggca

SEQ ID NO: 1518016 - RNA, 19 nt, Artificial Sequence
  Description of Artificial Sequence: Synthetic oligonucleotide
gacuuacaccucaauucac

SEQ ID NO: 1518017 - RNA, 19 nt, Artificial Sequence
  Description of Artificial Sequence: Synthetic oligonucleotide
gagguaaguucagaggucu

SEQ ID NO: 1518018 - RNA, 19 nt, Artificial Sequence
  Description of Artificial Sequence: Synthetic oligonucleotide
caaucagcagcagucaaaa

SEQ ID NO: 1518019 - RNA, 19 nt, Artificial Sequence
  Description of Artificial Sequence: Synthetic oligonucleotide
ggauuuaaucaaguuagaa

SEQ ID NO: 1518020 - RNA, 19 nt, Artificial Sequence
  Description of Artificial Sequence: Synthetic oligonucleotide
caacgaagaaacaaacgau

SEQ ID NO: 1518021 - RNA, 19 nt, Artificial Sequence
  Description of Artificial Sequence: Synthetic oligonucleotide
accucaauucacaaacaau

SEQ ID NO: 1518022 - RNA, 19 nt, Artificial Sequence
  Description of Artificial Sequence: Synthetic oligonucleotide
gcauaucuucaccaccacc

SEQ ID NO: 1518023 - RNA, 19 nt, Artificial Sequence
  Description of Artificial Sequence: Synthetic oligonucleotide
guuguuaccugagaggaau

SEQ ID NO: 1518024 - RNA, 19 nt, Artificial Sequence
  Description of Artificial Sequence: Synthetic oligonucleotide
auguuuuaagaaaguguaa

SEQ ID NO: 1518025 - RNA, 19 nt, Artificial Sequence
  Description of Artificial Sequence: Synthetic oligonucleotide
ggugcccaaauacacugac

SEQ ID NO: 1518026 - RNA, 19 nt, Artificial Sequence
  Description of Artificial Sequence: Synthetic oligonucleotide
ccaaauugguaguaguaga

SEQ ID NO: 1518027 - RNA, 19 nt, Artificial Sequence
  Description of Artificial Sequence: Synthetic oligonucleotide
cacauucaaauacuguggu

SEQ ID NO: 1518028 - RNA, 19 nt, Artificial Sequence
  Description of Artificial Sequence: Synthetic oligonucleotide
caguucaacuaguuuugga

SEQ ID NO: 1518029 - RNA, 19 nt, Artificial Sequence
  Description of Artificial Sequence: Synthetic oligonucleotide
uggcaacucuacuucugaa

SEQ ID NO: 1518030 - RNA, 19 nt, Artificial Sequence
  Description of Artificial Sequence: Synthetic oligonucleotide
gcaacucuacuucugaacu

SEQ ID NO: 1518031 - RNA, 19 nt, Artificial Sequence
  Description of Artificial Sequence: Synthetic oligonucleotide
aggagcacuagaucuucua

SEQ ID NO: 1518032 - RNA, 19 nt, Artificial Sequence
  Description of Artificial Sequence: Synthetic oligonucleotide
cugagaggaauugcugcug

SEQ ID NO: 1518033 - RNA, 19 nt, Artificial Sequence
  Description of Artificial Sequence: Synthetic oligonucleotide
augcugagccauguuuauc

SEQ ID NO: 1518034 - RNA, 19 nt, Artificial Sequence
  Description of Artificial Sequence: Synthetic oligonucleotide
gaacuuccagaagaaccca

SEQ ID NO: 1518035 - RNA, 19 nt, Artificial Sequence
  Description of Artificial Sequence: Synthetic oligonucleotide
caccaaauugguaguagua

SEQ ID NO: 1518036 - RNA, 19 nt, Artificial Sequence
  Description of Artificial Sequence: Synthetic oligonucleotide
uuguuaccugagaggaauu

SEQ ID NO: 1518037 - RNA, 19 nt, Artificial Sequence
  Description of Artificial Sequence: Synthetic oligonucleotide
aucguaccuaauaugucau

SEQ ID NO: 1518038 - RNA, 19 nt, Artificial Sequence
  Description of Artificial Sequence: Synthetic oligonucleotide
acaaucagcagcagucaaa

SEQ ID NO: 1518039 - RNA, 19 nt, Artificial Sequence
  Description of Artificial Sequence: Synthetic oligonucleotide
caccucaauucacaaacaa

SEQ ID NO: 1518040 - RNA, 19 nt, Artificial Sequence
  Description of Artificial Sequence: Synthetic oligonucleotide
acuuucuugagagcucuua

SEQ ID NO: 1518041 - RNA, 19 nt, Artificial Sequence
  Description of Artificial Sequence: Synthetic oligonucleotide
ggucacaugacuauucaua

SEQ ID NO: 1518042 - RNA, 19 nt, Artificial Sequence
  Description of Artificial Sequence: Synthetic oligonucleotide
gccauguuuaucuggagcu

SEQ ID NO: 1518043 - RNA, 19 nt, Artificial Sequence
  Description of Artificial Sequence: Synthetic oligonucleotide
ugccccuauacuuccuuuu

SEQ ID NO: 1518044 - RNA, 19 nt, Artificial Sequence
  Description of Artificial Sequence: Synthetic oligonucleotide
gccaguucaacuaguuuug

SEQ ID NO: 1518045 - RNA, 19 nt, Artificial Sequence
  Description of Artificial Sequence: Synthetic oligonucleotide
acauuacaagcaacauucu

SEQ ID NO: 1518046 - RNA, 19 nt, Artificial Sequence
  Description of Artificial Sequence: Synthetic oligonucleotide
ugucuggaaucaguggauu

SEQ ID NO: 1518047 - RNA, 19 nt, Artificial Sequence
  Description of Artificial Sequence: Synthetic oligonucleotide
ccagguacuagaugcagca

SEQ ID NO: 1518048 - RNA, 19 nt, Artificial Sequence
  Description of Artificial Sequence: Synthetic oligonucleotide
ucaacuaguuuuggauguu

SEQ ID NO: 1518049 - RNA, 19 nt, Artificial Sequence
  Description of Artificial Sequence: Synthetic oligonucleotide
caguggauugggucacaug

SEQ ID NO: 1518050 - RNA, 19 nt, Artificial Sequence
  Description of Artificial Sequence: Synthetic oligonucleotide
acuagacuuagaagacagu

SEQ ID NO: 1518051 - RNA, 19 nt, Artificial Sequence
  Description of Artificial Sequence: Synthetic oligonucleotide
auugggucacaugacuauu

SEQ ID NO: 1518052 - RNA, 19 nt, Artificial Sequence
  Description of Artificial Sequence: Synthetic oligonucleotide
ugcugucaauguauaccuu

SEQ ID NO: 1518053 - RNA, 19 nt, Artificial Sequence
  Description of Artificial Sequence: Synthetic oligonucleotide
aacccacuugaagcugucu

SEQ ID NO: 1518054 - RNA, 19 nt, Artificial Sequence
  Description of Artificial Sequence: Synthetic oligonucleotide
ucguaccuaauaugucauu

SEQ ID NO: 1518055 - RNA, 19 nt, Artificial Sequence
  Description of Artificial Sequence: Synthetic oligonucleotide
guggauugggucacaugac

SEQ ID NO: 1518056 - RNA, 19 nt, Artificial Sequence
  Description of Artificial Sequence: Synthetic oligonucleotide
agguaaguucagaggucuc

SEQ ID NO: 1518057 - RNA, 19 nt, Artificial Sequence
  Description of Artificial Sequence: Synthetic oligonucleotide
acccaacaagggcaccuca

SEQ ID NO: 1518058 - RNA, 19 nt, Artificial Sequence
  Description of Artificial Sequence: Synthetic oligonucleotide
ucaguggauugggucacau

SEQ ID NO: 1518059 - RNA, 19 nt, Artificial Sequence
  Description of Artificial Sequence: Synthetic oligonucleotide
ccggugcccaaauacacug

SEQ ID NO: 1518060 - RNA, 19 nt, Artificial Sequence
  Description of Artificial Sequence: Synthetic oligonucleotide
uuuccacagccggugccca

SEQ ID NO: 1518061 - RNA, 19 nt, Artificial Sequence
  Description of Artificial Sequence: Synthetic oligonucleotide
cagcaguaacuugggagac

SEQ ID NO: 1518062 - RNA, 19 nt, Artificial Sequence
  Description of Artificial Sequence: Synthetic oligonucleotide
acccacauuuauguuuuaa

SEQ ID NO: 1518063 - RNA, 19 nt, Artificial Sequence
  Description of Artificial Sequence: Synthetic oligonucleotide
agucaaaaucauggugaau

SEQ ID NO: 1518064 - RNA, 19 nt, Artificial Sequence
  Description of Artificial Sequence: Synthetic oligonucleotide
acaccucaauucacaaaca

SEQ ID NO: 1518065 - RNA, 19 nt, Artificial Sequence
  Description of Artificial Sequence: Synthetic oligonucleotide
gaacccaacaagggcaccu

SEQ ID NO: 1518066 - RNA, 19 nt, Artificial Sequence
  Description of Artificial Sequence: Synthetic oligonucleotide
cuuucuugagagcucuuau

SEQ ID NO: 1518067 - RNA, 19 nt, Artificial Sequence
  Description of Artificial Sequence: Synthetic oligonucleotide
gaacuacacaucguaccua

SEQ ID NO: 1518068 - RNA, 19 nt, Artificial Sequence
  Description of Artificial Sequence: Synthetic oligonucleotide
gccccuauacuuccuuuug

SEQ ID NO: 1518069 - RNA, 19 nt, Artificial Sequence
  Description of Artificial Sequence: Synthetic oligonucleotide
uuccaccaaauugguagua

SEQ ID NO: 1518070 - RNA, 19 nt, Artificial Sequence
  Description of Artificial Sequence: Synthetic oligonucleotide
caaacaccagguacuagau

SEQ ID NO: 1518071 - RNA, 19 nt, Artificial Sequence
  Description of Artificial Sequence: Synthetic oligonucleotide
ccaaauacacugacuuaca

SEQ ID NO: 1518072 - RNA, 19 nt, Artificial Sequence
  Description of Artificial Sequence: Synthetic oligonucleotide
cauuuccaccaaauuggua

SEQ ID NO: 1518073 - RNA, 19 nt, Artificial Sequence
  Description of Artificial Sequence: Synthetic oligonucleotide
gguacuagaugcagcagua

SEQ ID NO: 1518074 - RNA, 19 nt, Artificial Sequence
  Description of Artificial Sequence: Synthetic oligonucleotide
aacccacauuuauguuuua

SEQ ID NO: 1518075 - RNA, 19 nt, Artificial Sequence
  Description of Artificial Sequence: Synthetic oligonucleotide
uucagaggucucgacucuu

SEQ ID NO: 1518076 - RNA, 19 nt, Artificial Sequence
  Description of Artificial Sequence: Synthetic oligonucleotide
gagaggaauugcugcugcu

SEQ ID NO: 1518077 - RNA, 19 nt, Artificial Sequence
  Description of Artificial Sequence: Synthetic oligonucleotide
ggacuagacuuagaagaca

SEQ ID NO: 1518078 - RNA, 19 nt, Artificial Sequence
  Description of Artificial Sequence: Synthetic oligonucleotide
guagacaacuuaauacauu

SEQ ID NO: 1518079 - RNA, 19 nt, Artificial Sequence
  Description of Artificial Sequence: Synthetic oligonucleotide
ggagguaaguucagagguc

SEQ ID NO: 1518080 - RNA, 19 nt, Artificial Sequence
  Description of Artificial Sequence: Synthetic oligonucleotide
guucagaggucucgacucu

SEQ ID NO: 1518081 - RNA, 19 nt, Artificial Sequence
  Description of Artificial Sequence: Synthetic oligonucleotide
ccaguguuuuauauuauau

SEQ ID NO: 1518082 - RNA, 19 nt, Artificial Sequence
  Description of Artificial Sequence: Synthetic oligonucleotide
gcaccucaaucucugagcu

SEQ ID NO: 1518083 - RNA, 19 nt, Artificial Sequence
  Description of Artificial Sequence: Synthetic oligonucleotide
guacuagaugcagcaguaa

SEQ ID NO: 1518084 - RNA, 19 nt, Artificial Sequence
  Description of Artificial Sequence: Synthetic oligonucleotide
guauaccuuuuaauaugua

SEQ ID NO: 1518085 - RNA, 19 nt, Artificial Sequence
  Description of Artificial Sequence: Synthetic oligonucleotide
gggauuuaaucaaguuaga

SEQ ID NO: 1518086 - RNA, 19 nt, Artificial Sequence
  Description of Artificial Sequence: Synthetic oligonucleotide
caacuaguuuuggauguua

SEQ ID NO: 1518087 - RNA, 19 nt, Artificial Sequence
  Description of Artificial Sequence: Synthetic oligonucleotide
gguaugcugucaauguaua

SEQ ID NO: 1518088 - RNA, 19 nt, Artificial Sequence
  Description of Artificial Sequence: Synthetic oligonucleotide
caguaauggcaacucuacu

SEQ ID NO: 1518089 - RNA, 19 nt, Artificial Sequence
  Description of Artificial Sequence: Synthetic oligonucleotide
agccaguguuuuauauuau

SEQ ID NO: 1518090 - RNA, 19 nt, Artificial Sequence
  Description of Artificial Sequence: Synthetic oligonucleotide
ggauugggucacaugacua

SEQ ID NO: 1518091 - RNA, 19 nt, Artificial Sequence
  Description of Artificial Sequence: Synthetic oligonucleotide
cagcuguuguuaccugaga

SEQ ID NO: 1518092 - RNA, 19 nt, Artificial Sequence
  Description of Artificial Sequence: Synthetic oligonucleotide
cugccuuagcauuuucuuu

SEQ ID NO: 1518093 - RNA, 19 nt, Artificial Sequence
  Description of Artificial Sequence: Synthetic oligonucleotide
ggauguuaacccacuugaa

SEQ ID NO: 1518094 - RNA, 19 nt, Artificial Sequence
  Description of Artificial Sequence: Synthetic oligonucleotide
aucaguggauugggucaca

SEQ ID NO: 1518095 - RNA, 19 nt, Artificial Sequence
  Description of Artificial Sequence: Synthetic oligonucleotide
acuacacaucguaccuaau

SEQ ID NO: 1518096 - RNA, 19 nt, Artificial Sequence
  Description of Artificial Sequence: Synthetic oligonucleotide
cuagaucuucuaccucacu

SEQ ID NO: 1518097 - RNA, 19 nt, Artificial Sequence
  Description of Artificial Sequence: Synthetic oligonucleotide
caacucuacuucugaacuu

SEQ ID NO: 1518098 - RNA, 19 nt, Artificial Sequence
  Description of Artificial Sequence: Synthetic oligonucleotide
ggucucgacucuucaucaa

SEQ ID NO: 1518099 - RNA, 19 nt, Artificial Sequence
  Description of Artificial Sequence: Synthetic oligonucleotide
cugugaaagccaguguuuu

SEQ ID NO: 1518100 - RNA, 19 nt, Artificial Sequence
  Description of Artificial Sequence: Synthetic oligonucleotide
cuccuucacuuguggagcu

SEQ ID NO: 1518101 - RNA, 19 nt, Artificial Sequence
  Description of Artificial Sequence: Synthetic oligonucleotide
cguaccuaauaugucauua

SEQ ID NO: 1518102 - RNA, 19 nt, Artificial Sequence
  Description of Artificial Sequence: Synthetic oligonucleotide
ccaccaaauugguaguagu

SEQ ID NO: 1518103 - RNA, 19 nt, Artificial Sequence
  Description of Artificial Sequence: Synthetic oligonucleotide
ccuauacuuccuuuugcau

SEQ ID NO: 1518104 - RNA, 19 nt, Artificial Sequence
  Description of Artificial Sequence: Synthetic oligonucleotide
gugcccaaauacacugacu

SEQ ID NO: 1518105 - RNA, 19 nt, Artificial Sequence
  Description of Artificial Sequence: Synthetic oligonucleotide
ccuuccaaagcacucuuuu

SEQ ID NO: 1518106 - RNA, 19 nt, Artificial Sequence
  Description of Artificial Sequence: Synthetic oligonucleotide
gggucacaugacuauucau

SEQ ID NO: 1518107 - RNA, 19 nt, Artificial Sequence
  Description of Artificial Sequence: Synthetic oligonucleotide
cacugacuuacaccucaau

SEQ ID NO: 1518108 - RNA, 19 nt, Artificial Sequence
  Description of Artificial Sequence: Synthetic oligonucleotide
gugauccacucugcugucu

SEQ ID NO: 1518109 - RNA, 19 nt, Artificial Sequence
  Description of Artificial Sequence: Synthetic oligonucleotide
ccucacugccccuauacuu

SEQ ID NO: 1518110 - RNA, 19 nt, Artificial Sequence
  Description of Artificial Sequence: Synthetic oligonucleotide
cacagccggugcccaaaua

SEQ ID NO: 1518111 - RNA, 19 nt, Artificial Sequence
  Description of Artificial Sequence: Synthetic oligonucleotide
cugccccuauacuuccuuu

SEQ ID NO: 1518112 - RNA, 19 nt, Artificial Sequence
  Description of Artificial Sequence: Synthetic oligonucleotide
cacugccccuauacuuccu

SEQ ID NO: 1518113 - RNA, 19 nt, Artificial Sequence
  Description of Artificial Sequence: Synthetic oligonucleotide
ccuuagcauuuucuuugcu

SEQ ID NO: 1518114 - RNA, 19 nt, Artificial Sequence
  Description of Artificial Sequence: Synthetic oligonucleotide
gccggugcccaaauacacu

SEQ ID NO: 1518115 - RNA, 19 nt, Artificial Sequence
  Description of Artificial Sequence: Synthetic oligonucleotide
cggugcccaaauacacuga

SEQ ID NO: 1518116 - RNA, 19 nt, Artificial Sequence
  Description of Artificial Sequence: Synthetic oligonucleotide
ccacagccggugcccaaau

SEQ ID NO: 1518117 - RNA, 19 nt, Artificial Sequence
  Description of Artificial Sequence: Synthetic oligonucleotide
uuugcuaucucaaucaucc

SEQ ID NO: 1518118 - RNA, 19 nt, Artificial Sequence
  Description of Artificial Sequence: Synthetic oligonucleotide
ugcaacgcaaguaugaugg

SEQ ID NO: 1518119 - RNA, 19 nt, Artificial Sequence
  Description of Artificial Sequence: Synthetic oligonucleotide
auuguuguaagucaagcag

SEQ ID NO: 1518120 - RNA, 19 nt, Artificial Sequence
  Description of Artificial Sequence: Synthetic oligonucleotide
ucuucaaucaucuucagua

SEQ ID NO: 1518121 - RNA, 19 nt, Artificial Sequence
  Description of Artificial Sequence: Synthetic oligonucleotide
uugaaauuaaguuccguag

SEQ ID NO: 1518122 - RNA, 19 nt, Artificial Sequence
  Description of Artificial Sequence: Synthetic oligonucleotide
gaugagggcaucuagaaac

SEQ ID NO: 1518123 - RNA, 19 nt, Artificial Sequence
  Description of Artificial Sequence: Synthetic oligonucleotide
uguuguacaaggugaagcg

SEQ ID NO: 1518124 - RNA, 19 nt, Artificial Sequence
  Description of Artificial Sequence: Synthetic oligonucleotide
agaaagaucaccugucuuc

SEQ ID NO: 1518125 - RNA, 19 nt, Artificial Sequence
  Description of Artificial Sequence: Synthetic oligonucleotide
aacgcagugaucuuggccu

SEQ ID NO: 1518126 - RNA, 19 nt, Artificial Sequence
  Description of Artificial Sequence: Synthetic oligonucleotide
gaacuugaaauuaaguucc

SEQ ID NO: 1518127 - RNA, 19 nt, Artificial Sequence
  Description of Artificial Sequence: Synthetic oligonucleotide
aagcuauuuaugugcaacg

SEQ ID NO: 1518128 - RNA, 19 nt, Artificial Sequence
  Description of Artificial Sequence: Synthetic oligonucleotide
auuguuuccaacauaggac

SEQ ID NO: 1518129 - RNA, 19 nt, Artificial Sequence
  Description of Artificial Sequence: Synthetic oligonucleotide
uuuaguuacugugagauuc

SEQ ID NO: 1518130 - RNA, 19 nt, Artificial Sequence
  Description of Artificial Sequence: Synthetic oligonucleotide
gcaucuagaaaccagaugc

SEQ ID NO: 1518131 - RNA, 19 nt, Artificial Sequence
  Description of Artificial Sequence: Synthetic oligonucleotide
ugaaauuaaguuccguaga

SEQ ID NO: 1518132 - RNA, 19 nt, Artificial Sequence
  Description of Artificial Sequence: Synthetic oligonucleotide
ugauucuucagccuggggu

SEQ ID NO: 1518133 - RNA, 19 nt, Artificial Sequence
  Description of Artificial Sequence: Synthetic oligonucleotide
uucaaaucuguacacgucu

SEQ ID NO: 1518134 - RNA, 19 nt, Artificial Sequence
  Description of Artificial Sequence: Synthetic oligonucleotide
ucuaaaucugaugagggca

SEQ ID NO: 1518135 - RNA, 19 nt, Artificial Sequence
  Description of Artificial Sequence: Synthetic oligonucleotide
gaaauuaaguuccguagac

SEQ ID NO: 1518136 - RNA, 19 nt, Artificial Sequence
  Description of Artificial Sequence: Synthetic oligonucleotide
uugacuggcgaucugaggu

SEQ ID NO: 1518137 - RNA, 19 nt, Artificial Sequence
  Description of Artificial Sequence: Synthetic oligonucleotide
uacugugagauucaaagau

SEQ ID NO: 1518138 - RNA, 19 nt, Artificial Sequence
  Description of Artificial Sequence: Synthetic oligonucleotide
cuggaagcuauuuaugugc

SEQ ID NO: 1518139 - RNA, 19 nt, Artificial Sequence
  Description of Artificial Sequence: Synthetic oligonucleotide
ugagauucaaagauucgcu

SEQ ID NO: 1518140 - RNA, 19 nt, Artificial Sequence
  Description of Artificial Sequence: Synthetic oligonucleotide
uuuaccaagucguugcugu

SEQ ID NO: 1518141 - RNA, 19 nt, Artificial Sequence
  Description of Artificial Sequence: Synthetic oligonucleotide
ucauuugaugguaaagacu

SEQ ID NO: 1518142 - RNA, 19 nt, Artificial Sequence
  Description of Artificial Sequence: Synthetic oligonucleotide
aagaucaccugucuucuug

SEQ ID NO: 1518143 - RNA, 19 nt, Artificial Sequence
  Description of Artificial Sequence: Synthetic oligonucleotide
aguaugauggcaaacgcag

SEQ ID NO: 1518144 - RNA, 19 nt, Artificial Sequence
  Description of Artificial Sequence: Synthetic oligonucleotide
auuugagggcgccaguccc

SEQ ID NO: 1518145 - RNA, 19 nt, Artificial Sequence
  Description of Artificial Sequence: Synthetic oligonucleotide
agcaucauauacuuccauc

SEQ ID NO: 1518146 - RNA, 19 nt, Artificial Sequence
  Description of Artificial Sequence: Synthetic oligonucleotide
ucuuauucagaauucccac

SEQ ID NO: 1518147 - RNA, 19 nt, Artificial Sequence
  Description of Artificial Sequence: Synthetic oligonucleotide
aauagcgucuucagcaaac

SEQ ID NO: 1518148 - RNA, 19 nt, Artificial Sequence
  Description of Artificial Sequence: Synthetic oligonucleotide
uucaguaugucuucugaug

SEQ ID NO: 1518149 - RNA, 19 nt, Artificial Sequence
  Description of Artificial Sequence: Synthetic oligonucleotide
ucuucaaaucuguacacgu

SEQ ID NO: 1518150 - RNA, 19 nt, Artificial Sequence
  Description of Artificial Sequence: Synthetic oligonucleotide
ucauccuuuucucacugag

SEQ ID NO: 1518151 - RNA, 19 nt, Artificial Sequence
  Description of Artificial Sequence: Synthetic oligonucleotide
ucuagaaaccagaugcuuc

SEQ ID NO: 1518152 - RNA, 19 nt, Artificial Sequence
  Description of Artificial Sequence: Synthetic oligonucleotide
aguguugcauuugagggcg

SEQ ID NO: 1518153 - RNA, 19 nt, Artificial Sequence
  Description of Artificial Sequence: Synthetic oligonucleotide
ugaccuuucugaaagcuuc

SEQ ID NO: 1518154 - RNA, 19 nt, Artificial Sequence
  Description of Artificial Sequence: Synthetic oligonucleotide
agucaagcaggugaaauuc

SEQ ID NO: 1518155 - RNA, 19 nt, Artificial Sequence
  Description of Artificial Sequence: Synthetic oligonucleotide
gagaauuggaccagcacag

SEQ ID NO: 1518156 - RNA, 19 nt, Artificial Sequence
  Description of Artificial Sequence: Synthetic oligonucleotide
guagccaugagcucuccgg

SEQ ID NO: 1518157 - RNA, 19 nt, Artificial Sequence
  Description of Artificial Sequence: Synthetic oligonucleotide
ugucuguucucuucaauca

SEQ ID NO: 1518158 - RNA, 19 nt, Artificial Sequence
  Description of Artificial Sequence: Synthetic oligonucleotide
agaggucuuauucagaauu

SEQ ID NO: 1518159 - RNA, 19 nt, Artificial Sequence
  Description of Artificial Sequence: Synthetic oligonucleotide
uguaagucaagcaggugaa

SEQ ID NO: 1518160 - RNA, 19 nt, Artificial Sequence
  Description of Artificial Sequence: Synthetic oligonucleotide
uuuccaacauaggacagcc

SEQ ID NO: 1518161 - RNA, 19 nt, Artificial Sequence
  Description of Artificial Sequence: Synthetic oligonucleotide
aaaccagaugcuucgggcu

SEQ ID NO: 1518162 - RNA, 19 nt, Artificial Sequence
  Description of Artificial Sequence: Synthetic oligonucleotide
agcauuucuaugacgaagg

SEQ ID NO: 1518163 - RNA, 19 nt, Artificial Sequence
  Description of Artificial Sequence: Synthetic oligonucleotide
agcuauuuaugugcaacgc

SEQ ID NO: 1518164 - RNA, 19 nt, Artificial Sequence
  Description of Artificial Sequence: Synthetic oligonucleotide
auccgcugauucuucagcc

SEQ ID NO: 1518165 - RNA, 19 nt, Artificial Sequence
  Description of Artificial Sequence: Synthetic oligonucleotide
ucauagaacuugaaauuaa

SEQ ID NO: 1518166 - RNA, 19 nt, Artificial Sequence
  Description of Artificial Sequence: Synthetic oligonucleotide
auuaaguuccguagacugc

SEQ ID NO: 1518167 - RNA, 19 nt, Artificial Sequence
  Description of Artificial Sequence: Synthetic oligonucleotide
agcucuaaaucugaugagg

SEQ ID NO: 1518168 - RNA, 19 nt, Artificial Sequence
  Description of Artificial Sequence: Synthetic oligonucleotide
caugucucuacucuggcug

SEQ ID NO: 1518169 - RNA, 19 nt, Artificial Sequence
  Description of Artificial Sequence: Synthetic oligonucleotide
gaagcuauuuaugugcaac

SEQ ID NO: 1518170 - RNA, 19 nt, Artificial Sequence
  Description of Artificial Sequence: Synthetic oligonucleotide
uuucuaugacgaaggaaca

SEQ ID NO: 1518171 - RNA, 19 nt, Artificial Sequence
  Description of Artificial Sequence: Synthetic oligonucleotide
acucagaaagaucaccugu

SEQ ID NO: 1518172 - RNA, 19 nt, Artificial Sequence
  Description of Artificial Sequence: Synthetic oligonucleotide
aaauuaaguuccguagacu

SEQ ID NO: 1518173 - RNA, 19 nt, Artificial Sequence
  Description of Artificial Sequence: Synthetic oligonucleotide
auuuaugugcaacgcaagu

SEQ ID NO: 1518174 - RNA, 19 nt, Artificial Sequence
  Description of Artificial Sequence: Synthetic oligonucleotide
agaaaccagaugcuucggg

SEQ ID NO: 1518175 - RNA, 19 nt, Artificial Sequence
  Description of Artificial Sequence: Synthetic oligonucleotide
ugcuuggugcuuccaaagg

SEQ ID NO: 1518176 - RNA, 19 nt, Artificial Sequence
  Description of Artificial Sequence: Synthetic oligonucleotide
cugugagauucaaagauuc

SEQ ID NO: 1518177 - RNA, 19 nt, Artificial Sequence
  Description of Artificial Sequence: Synthetic oligonucleotide
caaguaugauggcaaacgc

SEQ ID NO: 1518178 - RNA, 19 nt, Artificial Sequence
  Description of Artificial Sequence: Synthetic oligonucleotide
aggacagccugucuguuuc

SEQ ID NO: 1518179 - RNA, 19 nt, Artificial Sequence
  Description of Artificial Sequence: Synthetic oligonucleotide
gaaagucuuggccugguuc

SEQ ID NO: 1518180 - RNA, 19 nt, Artificial Sequence
  Description of Artificial Sequence: Synthetic oligonucleotide
aggucuuauucagaauucc

SEQ ID NO: 1518181 - RNA, 19 nt, Artificial Sequence
  Description of Artificial Sequence: Synthetic oligonucleotide
ucuaugacgaaggaacagu

SEQ ID NO: 1518182 - RNA, 19 nt, Artificial Sequence
  Description of Artificial Sequence: Synthetic oligonucleotide
aauucccacaaagugucug

SEQ ID NO: 1518183 - RNA, 19 nt, Artificial Sequence
  Description of Artificial Sequence: Synthetic oligonucleotide
gugagauucaaagauucgc

SEQ ID NO: 1518184 - RNA, 19 nt, Artificial Sequence
  Description of Artificial Sequence: Synthetic oligonucleotide
uuugacuggcgaucugagg

SEQ ID NO: 1518185 - RNA, 19 nt, Artificial Sequence
  Description of Artificial Sequence: Synthetic oligonucleotide
gaguguugcauuugagggc

SEQ ID NO: 1518186 - RNA, 19 nt, Artificial Sequence
  Description of Artificial Sequence: Synthetic oligonucleotide
cucuaaaucugaugagggc

SEQ ID NO: 1518187 - RNA, 19 nt, Artificial Sequence
  Description of Artificial Sequence: Synthetic oligonucleotide
ggcaucgcugaccagagcg

SEQ ID NO: 1518188 - RNA, 19 nt, Artificial Sequence
  Description of Artificial Sequence: Synthetic oligonucleotide
agagcguucacacccuuug

SEQ ID NO: 1518189 - RNA, 19 nt, Artificial Sequence
  Description of Artificial Sequence: Synthetic oligonucleotide
ucguugcuguuguacaagg

SEQ ID NO: 1518190 - RNA, 19 nt, Artificial Sequence
  Description of Artificial Sequence: Synthetic oligonucleotide
uucauagaacuugaaauua

SEQ ID NO: 1518191 - RNA, 19 nt, Artificial Sequence
  Description of Artificial Sequence: Synthetic oligonucleotide
cccuuuaucacuuucugag

SEQ ID NO: 1518192 - RNA, 19 nt, Artificial Sequence
  Description of Artificial Sequence: Synthetic oligonucleotide
uggaagcuauuuaugugca

SEQ ID NO: 1518193 - RNA, 19 nt, Artificial Sequence
  Description of Artificial Sequence: Synthetic oligonucleotide
cuaugacgaaggaacagug

SEQ ID NO: 1518194 - RNA, 19 nt, Artificial Sequence
  Description of Artificial Sequence: Synthetic oligonucleotide
uaugacgaaggaacagugu

SEQ ID NO: 1518195 - RNA, 19 nt, Artificial Sequence
  Description of Artificial Sequence: Synthetic oligonucleotide
ugucuucaaaucuguacac

SEQ ID NO: 1518196 - RNA, 19 nt, Artificial Sequence
  Description of Artificial Sequence: Synthetic oligonucleotide
ucaaucuggaagcuauuua

SEQ ID NO: 1518197 - RNA, 19 nt, Artificial Sequence
  Description of Artificial Sequence: Synthetic oligonucleotide
gcaaguaugauggcaaacg

SEQ ID NO: 1518198 - RNA, 19 nt, Artificial Sequence
  Description of Artificial Sequence: Synthetic oligonucleotide
acagugucaggucaaucug

SEQ ID NO: 1518199 - RNA, 19 nt, Artificial Sequence
  Description of Artificial Sequence: Synthetic oligonucleotide
aaggggacggacagagugc

SEQ ID NO: 1518200 - RNA, 19 nt, Artificial Sequence
  Description of Artificial Sequence: Synthetic oligonucleotide
ucccugaaagucuuggccu

SEQ ID NO: 1518201 - RNA, 19 nt, Artificial Sequence
  Description of Artificial Sequence: Synthetic oligonucleotide
uucuaugacgaaggaacag

SEQ ID NO: 1518202 - RNA, 19 nt, Artificial Sequence
  Description of Artificial Sequence: Synthetic oligonucleotide
ucaaugcaagaauccaacu

SEQ ID NO: 1518203 - RNA, 19 nt, Artificial Sequence
  Description of Artificial Sequence: Synthetic oligonucleotide
cuugaaauuaaguuccgua

SEQ ID NO: 1518204 - RNA, 19 nt, Artificial Sequence
  Description of Artificial Sequence: Synthetic oligonucleotide
gaccgcuucugcuuggugc

SEQ ID NO: 1518205 - RNA, 19 nt, Artificial Sequence
  Description of Artificial Sequence: Synthetic oligonucleotide
uuuaugugcaacgcaagua

SEQ ID NO: 1518206 - RNA, 19 nt, Artificial Sequence
  Description of Artificial Sequence: Synthetic oligonucleotide
ugcuaucucaaucauccuu

SEQ ID NO: 1518207 - RNA, 19 nt, Artificial Sequence
  Description of Artificial Sequence: Synthetic oligonucleotide
ccaacuuuguucauucucc

SEQ ID NO: 1518208 - RNA, 19 nt, Artificial Sequence
  Description of Artificial Sequence: Synthetic oligonucleotide
aaguaugauggcaaacgca

SEQ ID NO: 1518209 - RNA, 19 nt, Artificial Sequence
  Description of Artificial Sequence: Synthetic oligonucleotide
gauccgcugauucuucagc

SEQ ID NO: 1518210 - RNA, 19 nt, Artificial Sequence
  Description of Artificial Sequence: Synthetic oligonucleotide
aacuugaaauuaaguuccg

SEQ ID NO: 1518211 - RNA, 19 nt, Artificial Sequence
  Description of Artificial Sequence: Synthetic oligonucleotide
uuaucacuuucugagcucu

SEQ ID NO: 1518212 - RNA, 19 nt, Artificial Sequence
  Description of Artificial Sequence: Synthetic oligonucleotide
ucaucuugcaagucauccu

SEQ ID NO: 1518213 - RNA, 19 nt, Artificial Sequence
  Description of Artificial Sequence: Synthetic oligonucleotide
ugaaagcuucugaugggcu

SEQ ID NO: 1518214 - RNA, 19 nt, Artificial Sequence
  Description of Artificial Sequence: Synthetic oligonucleotide
gguagagggagucaucuug

SEQ ID NO: 1518215 - RNA, 19 nt, Artificial Sequence
  Description of Artificial Sequence: Synthetic oligonucleotide
aaaucugaugagggcaucu

SEQ ID NO: 1518216 - RNA, 19 nt, Artificial Sequence
  Description of Artificial Sequence: Synthetic oligonucleotide
acucuguugcaccucuguc

SEQ ID NO: 1518217 - RNA, 19 nt, Artificial Sequence
  Description of Artificial Sequence: Synthetic oligonucleotide
cuccaugucucuacucugg

SEQ ID NO: 1518218 - RNA, 19 nt, Artificial Sequence
  Description of Artificial Sequence: Synthetic oligonucleotide
cauguugaacaacucagca

SEQ ID NO: 1518219 - RNA, 19 nt, Artificial Sequence
  Description of Artificial Sequence: Synthetic oligonucleotide
uguccagcccggaagacuc

SEQ ID NO: 1518220 - RNA, 19 nt, Artificial Sequence
  Description of Artificial Sequence: Synthetic oligonucleotide
uggagaauuggaccagcac

SEQ ID NO: 1518221 - RNA, 19 nt, Artificial Sequence
  Description of Artificial Sequence: Synthetic oligonucleotide
aacgcaaguaugauggcaa

SEQ ID NO: 1518222 - RNA, 19 nt, Artificial Sequence
  Description of Artificial Sequence: Synthetic oligonucleotide
caucauauacuuccaucug

SEQ ID NO: 1518223 - RNA, 19 nt, Artificial Sequence
  Description of Artificial Sequence: Synthetic oligonucleotide
cuucaaaucuguacacguc

SEQ ID NO: 1518224 - RNA, 19 nt, Artificial Sequence
  Description of Artificial Sequence: Synthetic oligonucleotide
ucaauagcgucuucagcaa

SEQ ID NO: 1518225 - RNA, 19 nt, Artificial Sequence
  Description of Artificial Sequence: Synthetic oligonucleotide
gagcucuaaaucugaugag

SEQ ID NO: 1518226 - RNA, 19 nt, Artificial Sequence
  Description of Artificial Sequence: Synthetic oligonucleotide
aguaugucuucugauguga

SEQ ID NO: 1518227 - RNA, 19 nt, Artificial Sequence
  Description of Artificial Sequence: Synthetic oligonucleotide
cuuauucagaauucccaca

SEQ ID NO: 1518228 - RNA, 19 nt, Artificial Sequence
  Description of Artificial Sequence: Synthetic oligonucleotide
cuuugacuggcgaucugag

SEQ ID NO: 1518229 - RNA, 19 nt, Artificial Sequence
  Description of Artificial Sequence: Synthetic oligonucleotide
uagccaugagcucuccggc

SEQ ID NO: 1518230 - RNA, 19 nt, Artificial Sequence
  Description of Artificial Sequence: Synthetic oligonucleotide
uccaugucucuacucuggc

SEQ ID NO: 1518231 - RNA, 19 nt, Artificial Sequence
  Description of Artificial Sequence: Synthetic oligonucleotide
agaauuggaccagcacagc

SEQ ID NO: 1518232 - RNA, 19 nt, Artificial Sequence
  Description of Artificial Sequence: Synthetic oligonucleotide
ucgcugccaacuuuguuca

SEQ ID NO: 1518233 - RNA, 19 nt, Artificial Sequence
  Description of Artificial Sequence: Synthetic oligonucleotide
ucuuccgcuuugacuggcg

SEQ ID NO: 1518234 - RNA, 19 nt, Artificial Sequence
  Description of Artificial Sequence: Synthetic oligonucleotide
ugagcucuccggcucacac

SEQ ID NO: 1518235 - RNA, 19 nt, Artificial Sequence
  Description of Artificial Sequence: Synthetic oligonucleotide
uagcgucuucagcaaacag

SEQ ID NO: 1518236 - RNA, 19 nt, Artificial Sequence
  Description of Artificial Sequence: Synthetic oligonucleotide
ucaaaucuguacacgucuu

SEQ ID NO: 1518237 - RNA, 19 nt, Artificial Sequence
  Description of Artificial Sequence: Synthetic oligonucleotide
gucuuauucagaauuccca

SEQ ID NO: 1518238 - RNA, 19 nt, Artificial Sequence
  Description of Artificial Sequence: Synthetic oligonucleotide
guuccguagacugccauug

SEQ ID NO: 1518239 - RNA, 19 nt, Artificial Sequence
  Description of Artificial Sequence: Synthetic oligonucleotide
cauuugagggcgccagucc

SEQ ID NO: 1518240 - RNA, 19 nt, Artificial Sequence
  Description of Artificial Sequence: Synthetic oligonucleotide
cagcuuuaguuacugugag

SEQ ID NO: 1518241 - RNA, 19 nt, Artificial Sequence
  Description of Artificial Sequence: Synthetic oligonucleotide
uguacaaggugaagcgcau

SEQ ID NO: 1518242 - RNA, 19 nt, Artificial Sequence
  Description of Artificial Sequence: Synthetic oligonucleotide
ugcaaagaguguugcauuu

SEQ ID NO: 1518243 - RNA, 19 nt, Artificial Sequence
  Description of Artificial Sequence: Synthetic oligonucleotide
gaggcuccuguucaauagc

SEQ ID NO: 1518244 - RNA, 19 nt, Artificial Sequence
  Description of Artificial Sequence: Synthetic oligonucleotide
aauuggaccagcacagcuu

SEQ ID NO: 1518245 - RNA, 19 nt, Artificial Sequence
  Description of Artificial Sequence: Synthetic oligonucleotide
uguugcaccucugucucca

SEQ ID NO: 1518246 - RNA, 19 nt, Artificial Sequence
  Description of Artificial Sequence: Synthetic oligonucleotide
agauucgcugccaacuuug

SEQ ID NO: 1518247 - RNA, 19 nt, Artificial Sequence
  Description of Artificial Sequence: Synthetic oligonucleotide
uacucuggcuguccagccc

SEQ ID NO: 1518248 - RNA, 19 nt, Artificial Sequence
  Description of Artificial Sequence: Synthetic oligonucleotide
gaucugaggucuggggcgg

SEQ ID NO: 1518249 - RNA, 19 nt, Artificial Sequence
  Description of Artificial Sequence: Synthetic oligonucleotide
agccucauggcuuuugcua

SEQ ID NO: 1518250 - RNA, 19 nt, Artificial Sequence
  Description of Artificial Sequence: Synthetic oligonucleotide
aaccagaugcuucgggcuu

SEQ ID NO: 1518251 - RNA, 19 nt, Artificial Sequence
  Description of Artificial Sequence: Synthetic oligonucleotide
acccuuuguaucaaugaug

SEQ ID NO: 1518252 - RNA, 19 nt, Artificial Sequence
  Description of Artificial Sequence: Synthetic oligonucleotide
cuuccaucugcccagaggu

SEQ ID NO: 1518253 - RNA, 19 nt, Artificial Sequence
  Description of Artificial Sequence: Synthetic oligonucleotide
ucgacucuccucauuugau

SEQ ID NO: 1518254 - RNA, 19 nt, Artificial Sequence
  Description of Artificial Sequence: Synthetic oligonucleotide
gaggucuuauucagaauuc

SEQ ID NO: 1518255 - RNA, 19 nt, Artificial Sequence
  Description of Artificial Sequence: Synthetic oligonucleotide
cugguucucuggaggaggc

SEQ ID NO: 1518256 - RNA, 19 nt, Artificial Sequence
  Description of Artificial Sequence: Synthetic oligonucleotide
aaguuccguagacugccau

SEQ ID NO: 1518257 - RNA, 19 nt, Artificial Sequence
  Description of Artificial Sequence: Synthetic oligonucleotide
cuucauagaacuugaaauu

SEQ ID NO: 1518258 - RNA, 19 nt, Artificial Sequence
  Description of Artificial Sequence: Synthetic oligonucleotide
ugugcaacgcaaguaugau

SEQ ID NO: 1518259 - RNA, 19 nt, Artificial Sequence
  Description of Artificial Sequence: Synthetic oligonucleotide
uguugcauuugagggcgcc

SEQ ID NO: 1518260 - RNA, 19 nt, Artificial Sequence
  Description of Artificial Sequence: Synthetic oligonucleotide
ugaccagagcguucacacc

SEQ ID NO: 1518261 - RNA, 19 nt, Artificial Sequence
  Description of Artificial Sequence: Synthetic oligonucleotide
uaaguuccguagacugcca

SEQ ID NO: 1518262 - RNA, 19 nt, Artificial Sequence
  Description of Artificial Sequence: Synthetic oligonucleotide
cacugaguuucaagucucc

SEQ ID NO: 1518263 - RNA, 19 nt, Artificial Sequence
  Description of Artificial Sequence: Synthetic oligonucleotide
gugcaacgcaaguaugaug

SEQ ID NO: 1518264 - RNA, 19 nt, Artificial Sequence
  Description of Artificial Sequence: Synthetic oligonucleotide
acuugaaauuaaguuccgu

SEQ ID NO: 1518265 - RNA, 19 nt, Artificial Sequence
  Description of Artificial Sequence: Synthetic oligonucleotide
ucuggggcggaggcaaggg

SEQ ID NO: 1518266 - RNA, 19 nt, Artificial Sequence
  Description of Artificial Sequence: Synthetic oligonucleotide
uagagggagucaucuugca

SEQ ID NO: 1518267 - RNA, 19 nt, Artificial Sequence
  Description of Artificial Sequence: Synthetic oligonucleotide
agcaaacaguggcugcaug

SEQ ID NO: 1518268 - RNA, 19 nt, Artificial Sequence
  Description of Artificial Sequence: Synthetic oligonucleotide
augugcaacgcaaguauga

SEQ ID NO: 1518269 - RNA, 19 nt, Artificial Sequence
  Description of Artificial Sequence: Synthetic oligonucleotide
aggucaaucuggaagcuau

SEQ ID NO: 1518270 - RNA, 19 nt, Artificial Sequence
  Description of Artificial Sequence: Synthetic oligonucleotide
uccgcuuugacuggcgauc

SEQ ID NO: 1518271 - RNA, 19 nt, Artificial Sequence
  Description of Artificial Sequence: Synthetic oligonucleotide
agacugccauuguuguaag

SEQ ID NO: 1518272 - RNA, 19 nt, Artificial Sequence
  Description of Artificial Sequence: Synthetic oligonucleotide
gaaagaucaccugucuucu

SEQ ID NO: 1518273 - RNA, 19 nt, Artificial Sequence
  Description of Artificial Sequence: Synthetic oligonucleotide
cuucccugccgucugccag

SEQ ID NO: 1518274 - RNA, 19 nt, Artificial Sequence
  Description of Artificial Sequence: Synthetic oligonucleotide
augucucuacucuggcugu

SEQ ID NO: 1518275 - RNA, 19 nt, Artificial Sequence
  Description of Artificial Sequence: Synthetic oligonucleotide
gcaaacgcagugaucuugg

SEQ ID NO: 1518276 - RNA, 19 nt, Artificial Sequence
  Description of Artificial Sequence: Synthetic oligonucleotide
gucguugcuguuguacaag

SEQ ID NO: 1518277 - RNA, 19 nt, Artificial Sequence
  Description of Artificial Sequence: Synthetic oligonucleotide
agcguucacacccuuugua

SEQ ID NO: 1518278 - RNA, 19 nt, Artificial Sequence
  Description of Artificial Sequence: Synthetic oligonucleotide
ccugggguuuaccaagucg

SEQ ID NO: 1518279 - RNA, 19 nt, Artificial Sequence
  Description of Artificial Sequence: Synthetic oligonucleotide
guuuaccaagucguugcug

SEQ ID NO: 1518280 - RNA, 19 nt, Artificial Sequence
  Description of Artificial Sequence: Synthetic oligonucleotide
ccuucauagaacuugaaau

SEQ ID NO: 1518281 - RNA, 19 nt, Artificial Sequence
  Description of Artificial Sequence: Synthetic oligonucleotide
caaacgcagugaucuuggc

SEQ ID NO: 1518282 - RNA, 19 nt, Artificial Sequence
  Description of Artificial Sequence: Synthetic oligonucleotide
caacucagcaucauauacu

SEQ ID NO: 1518283 - RNA, 19 nt, Artificial Sequence
  Description of Artificial Sequence: Synthetic oligonucleotide
ccauuguuguaagucaagc

SEQ ID NO: 1518284 - RNA, 19 nt, Artificial Sequence
  Description of Artificial Sequence: Synthetic oligonucleotide
ugucgucaggcuccccaca

SEQ ID NO: 1518285 - RNA, 19 nt, Artificial Sequence
  Description of Artificial Sequence: Synthetic oligonucleotide
auagcgucuucagcaaaca

SEQ ID NO: 1518286 - RNA, 19 nt, Artificial Sequence
  Description of Artificial Sequence: Synthetic oligonucleotide
ugucuccaugucucuacuc

SEQ ID NO: 1518287 - RNA, 19 nt, Artificial Sequence
  Description of Artificial Sequence: Synthetic oligonucleotide
gcgaucugaggucuggggc

SEQ ID NO: 1518288 - RNA, 19 nt, Artificial Sequence
  Description of Artificial Sequence: Synthetic oligonucleotide
aguuccguagacugccauu

SEQ ID NO: 1518289 - RNA, 19 nt, Artificial Sequence
  Description of Artificial Sequence: Synthetic oligonucleotide
uugaacaacucagcaucau

SEQ ID NO: 1518290 - RNA, 19 nt, Artificial Sequence
  Description of Artificial Sequence: Synthetic oligonucleotide
uuccguagacugccauugu

SEQ ID NO: 1518291 - RNA, 19 nt, Artificial Sequence
  Description of Artificial Sequence: Synthetic oligonucleotide
auuccggguccuagggcgc

SEQ ID NO: 1518292 - RNA, 19 nt, Artificial Sequence
  Description of Artificial Sequence: Synthetic oligonucleotide
aggcuccccacaguacagc

SEQ ID NO: 1518293 - RNA, 19 nt, Artificial Sequence
  Description of Artificial Sequence: Synthetic oligonucleotide
gcuuuaguuacugugagau

SEQ ID NO: 1518294 - RNA, 19 nt, Artificial Sequence
  Description of Artificial Sequence: Synthetic oligonucleotide
ggcgccagucccaaaauug

SEQ ID NO: 1518295 - RNA, 19 nt, Artificial Sequence
  Description of Artificial Sequence: Synthetic oligonucleotide
cuaaaucugaugagggcau

SEQ ID NO: 1518296 - RNA, 19 nt, Artificial Sequence
  Description of Artificial Sequence: Synthetic oligonucleotide
cgaucugaggucuggggcg

SEQ ID NO: 1518297 - RNA, 19 nt, Artificial Sequence
  Description of Artificial Sequence: Synthetic oligonucleotide
aggauccgcugauucuuca

SEQ ID NO: 1518298 - RNA, 19 nt, Artificial Sequence
  Description of Artificial Sequence: Synthetic oligonucleotide
ggggauuccggguccuagg

SEQ ID NO: 1518299 - RNA, 19 nt, Artificial Sequence
  Description of Artificial Sequence: Synthetic oligonucleotide
uuccgcuuugacuggcgau

SEQ ID NO: 1518300 - RNA, 19 nt, Artificial Sequence
  Description of Artificial Sequence: Synthetic oligonucleotide
uggcgaucugaggucuggg

SEQ ID NO: 1518301 - RNA, 19 nt, Artificial Sequence
  Description of Artificial Sequence: Synthetic oligonucleotide
ugggguuuaccaagucguu

SEQ ID NO: 1518302 - RNA, 19 nt, Artificial Sequence
  Description of Artificial Sequence: Synthetic oligonucleotide
ccuugcacucuguugcacc

SEQ ID NO: 1518303 - RNA, 19 nt, Artificial Sequence
  Description of Artificial Sequence: Synthetic oligonucleotide
cugcaacagugucagguca

SEQ ID NO: 1518304 - RNA, 19 nt, Artificial Sequence
  Description of Artificial Sequence: Synthetic oligonucleotide
cauaggacagccugucugu

SEQ ID NO: 1518305 - RNA, 19 nt, Artificial Sequence
  Description of Artificial Sequence: Synthetic oligonucleotide
ugccaacuuuguucauucu

SEQ ID NO: 1518306 - RNA, 19 nt, Artificial Sequence
  Description of Artificial Sequence: Synthetic oligonucleotide
agcgcauguugccuggauu

SEQ ID NO: 1518307 - RNA, 19 nt, Artificial Sequence
  Description of Artificial Sequence: Synthetic oligonucleotide
ggcaaacgcagugaucuug

SEQ ID NO: 1518308 - RNA, 19 nt, Artificial Sequence
  Description of Artificial Sequence: Synthetic oligonucleotide
caacgcaaguaugauggca

SEQ ID NO: 1518309 - RNA, 19 nt, Artificial Sequence
  Description of Artificial Sequence: Synthetic oligonucleotide
uaguuacugugagauucaa

SEQ ID NO: 1518310 - RNA, 19 nt, Artificial Sequence
  Description of Artificial Sequence: Synthetic oligonucleotide
uucacacccuuuguaucaa

SEQ ID NO: 1518311 - RNA, 19 nt, Artificial Sequence
  Description of Artificial Sequence: Synthetic oligonucleotide
cugucgucaggcuccccac

SEQ ID NO: 1518312 - RNA, 19 nt, Artificial Sequence
  Description of Artificial Sequence: Synthetic oligonucleotide
gcgcauguugccuggauuc

SEQ ID NO: 1518313 - RNA, 19 nt, Artificial Sequence
  Description of Artificial Sequence: Synthetic oligonucleotide
uaucacuuucugagcucua

SEQ ID NO: 1518314 - RNA, 19 nt, Artificial Sequence
  Description of Artificial Sequence: Synthetic oligonucleotide
uuaccaagucguugcuguu

SEQ ID NO: 1518315 - RNA, 19 nt, Artificial Sequence
  Description of Artificial Sequence: Synthetic oligonucleotide
acgaaggaacagugucugu

SEQ ID NO: 1518316 - RNA, 19 nt, Artificial Sequence
  Description of Artificial Sequence: Synthetic oligonucleotide
cugguggaaaacaucuagu

SEQ ID NO: 1518317 - RNA, 19 nt, Artificial Sequence
  Description of Artificial Sequence: Synthetic oligonucleotide
gucccaaaauuguuuccaa

SEQ ID NO: 1518318 - RNA, 19 nt, Artificial Sequence
  Description of Artificial Sequence: Synthetic oligonucleotide
caucuagaaaccagaugcu

SEQ ID NO: 1518319 - RNA, 19 nt, Artificial Sequence
  Description of Artificial Sequence: Synthetic oligonucleotide
acgcaaguaugauggcaaa

SEQ ID NO: 1518320 - RNA, 19 nt, Artificial Sequence
  Description of Artificial Sequence: Synthetic oligonucleotide
cccuuuguaucaaugaugu

SEQ ID NO: 1518321 - RNA, 19 nt, Artificial Sequence
  Description of Artificial Sequence: Synthetic oligonucleotide
auucgcugccaacuuuguu

SEQ ID NO: 1518322 - RNA, 19 nt, Artificial Sequence
  Description of Artificial Sequence: Synthetic oligonucleotide
cuguugcaccucugucucc

SEQ ID NO: 1518323 - RNA, 19 nt, Artificial Sequence
  Description of Artificial Sequence: Synthetic oligonucleotide
gggguuuaccaagucguug

SEQ ID NO: 1518324 - RNA, 19 nt, Artificial Sequence
  Description of Artificial Sequence: Synthetic oligonucleotide
caaucauccuuuucucacu

SEQ ID NO: 1518325 - RNA, 19 nt, Artificial Sequence
  Description of Artificial Sequence: Synthetic oligonucleotide
caagggcaucauacucagc

SEQ ID NO: 1518326 - RNA, 19 nt, Artificial Sequence
  Description of Artificial Sequence: Synthetic oligonucleotide
uucgggcuugccggucucg

SEQ ID NO: 1518327 - RNA, 19 nt, Artificial Sequence
  Description of Artificial Sequence: Synthetic oligonucleotide
uccagcccggaagacucca

SEQ ID NO: 1518328 - RNA, 19 nt, Artificial Sequence
  Description of Artificial Sequence: Synthetic oligonucleotide
agucuuggccugguucucu

SEQ ID NO: 1518329 - RNA, 19 nt, Artificial Sequence
  Description of Artificial Sequence: Synthetic oligonucleotide
uggcaucgcugaccagagc

SEQ ID NO: 1518330 - RNA, 19 nt, Artificial Sequence
  Description of Artificial Sequence: Synthetic oligonucleotide
gcuuucugccugucgucag

SEQ ID NO: 1518331 - RNA, 19 nt, Artificial Sequence
  Description of Artificial Sequence: Synthetic oligonucleotide
guugcauuugagggcgcca

SEQ ID NO: 1518332 - RNA, 19 nt, Artificial Sequence
  Description of Artificial Sequence: Synthetic oligonucleotide
gccauuguuguaagucaag

SEQ ID NO: 1518333 - RNA, 19 nt, Artificial Sequence
  Description of Artificial Sequence: Synthetic oligonucleotide
cuguacacgucuucaggcu

SEQ ID NO: 1518334 - RNA, 19 nt, Artificial Sequence
  Description of Artificial Sequence: Synthetic oligonucleotide
cucucaagggcaucauacu

SEQ ID NO: 1518335 - RNA, 19 nt, Artificial Sequence
  Description of Artificial Sequence: Synthetic oligonucleotide
cauccuuuucucacugagu

SEQ ID NO: 1518336 - RNA, 19 nt, Artificial Sequence
  Description of Artificial Sequence: Synthetic oligonucleotide
gucucgacucuccucauuu

SEQ ID NO: 1518337 - RNA, 19 nt, Artificial Sequence
  Description of Artificial Sequence: Synthetic oligonucleotide
acaaggugaagcgcauguu

SEQ ID NO: 1518338 - RNA, 19 nt, Artificial Sequence
  Description of Artificial Sequence: Synthetic oligonucleotide
gcaacgcaaguaugauggc

SEQ ID NO: 1518339 - RNA, 19 nt, Artificial Sequence
  Description of Artificial Sequence: Synthetic oligonucleotide
caauagcgucuucagcaaa

SEQ ID NO: 1518340 - RNA, 19 nt, Artificial Sequence
  Description of Artificial Sequence: Synthetic oligonucleotide
cuuccgcuuugacuggcga

SEQ ID NO: 1518341 - RNA, 19 nt, Artificial Sequence
  Description of Artificial Sequence: Synthetic oligonucleotide
agggcgccagucccaaaau

SEQ ID NO: 1518342 - RNA, 19 nt, Artificial Sequence
  Description of Artificial Sequence: Synthetic oligonucleotide
augggcucucaagggcauc

SEQ ID NO: 1518343 - RNA, 19 nt, Artificial Sequence
  Description of Artificial Sequence: Synthetic oligonucleotide
ucgggcuugccggucucga

SEQ ID NO: 1518344 - RNA, 19 nt, Artificial Sequence
  Description of Artificial Sequence: Synthetic oligonucleotide
cacccuuuguaucaaugau

SEQ ID NO: 1518345 - RNA, 19 nt, Artificial Sequence
  Description of Artificial Sequence: Synthetic oligonucleotide
ggacggacagagugcccag

SEQ ID NO: 1518346 - RNA, 19 nt, Artificial Sequence
  Description of Artificial Sequence: Synthetic oligonucleotide
gggacggacagagugccca

SEQ ID NO: 1518347 - RNA, 19 nt, Artificial Sequence
  Description of Artificial Sequence: Synthetic oligonucleotide
guaagucaagcaggugaaa

SEQ ID NO: 1518348 - RNA, 19 nt, Artificial Sequence
  Description of Artificial Sequence: Synthetic oligonucleotide
ggucaccuuucuuuuggaa

SEQ ID NO: 1518349 - RNA, 19 nt, Artificial Sequence
  Description of Artificial Sequence: Synthetic oligonucleotide
agcuucccauuggagaauu

SEQ ID NO: 1518350 - RNA, 19 nt, Artificial Sequence
  Description of Artificial Sequence: Synthetic oligonucleotide
uggcaaacgcagugaucuu

SEQ ID NO: 1518351 - RNA, 19 nt, Artificial Sequence
  Description of Artificial Sequence: Synthetic oligonucleotide
gccaugagcucuccggcuc

SEQ ID NO: 1518352 - RNA, 19 nt, Artificial Sequence
  Description of Artificial Sequence: Synthetic oligonucleotide
ccugaaagucuuggccugg

SEQ ID NO: 1518353 - RNA, 19 nt, Artificial Sequence
  Description of Artificial Sequence: Synthetic oligonucleotide
cguucacacccuuuguauc

SEQ ID NO: 1518354 - RNA, 19 nt, Artificial Sequence
  Description of Artificial Sequence: Synthetic oligonucleotide
cuccggcucacacgcggac

SEQ ID NO: 1518355 - RNA, 19 nt, Artificial Sequence
  Description of Artificial Sequence: Synthetic oligonucleotide
auaggacagccugucuguu

SEQ ID NO: 1518356 - RNA, 19 nt, Artificial Sequence
  Description of Artificial Sequence: Synthetic oligonucleotide
ggcuugccggucucgacuc

SEQ ID NO: 1518357 - RNA, 19 nt, Artificial Sequence
  Description of Artificial Sequence: Synthetic oligonucleotide
cugcaaagaguguugcauu

SEQ ID NO: 1518358 - RNA, 19 nt, Artificial Sequence
  Description of Artificial Sequence: Synthetic oligonucleotide
ggcuguccagcccggaaga

SEQ ID NO: 1518359 - RNA, 19 nt, Artificial Sequence
  Description of Artificial Sequence: Synthetic oligonucleotide
accagagcguucacacccu

SEQ ID NO: 1518360 - RNA, 19 nt, Artificial Sequence
  Description of Artificial Sequence: Synthetic oligonucleotide
cuuuaguuacugugagauu

SEQ ID NO: 1518361 - RNA, 19 nt, Artificial Sequence
  Description of Artificial Sequence: Synthetic oligonucleotide
caugagcucuccggcucac

SEQ ID NO: 1518362 - RNA, 19 nt, Artificial Sequence
  Description of Artificial Sequence: Synthetic oligonucleotide
guaugauggcaaacgcagu

SEQ ID NO: 1518363 - RNA, 19 nt, Artificial Sequence
  Description of Artificial Sequence: Synthetic oligonucleotide
gacuggcgaucugaggucu

SEQ ID NO: 1518364 - RNA, 19 nt, Artificial Sequence
  Description of Artificial Sequence: Synthetic oligonucleotide
ccggucucgacucuccuca

SEQ ID NO: 1518365 - RNA, 19 nt, Artificial Sequence
  Description of Artificial Sequence: Synthetic oligonucleotide
cagaaagaucaccugucuu

SEQ ID NO: 1518366 - RNA, 19 nt, Artificial Sequence
  Description of Artificial Sequence: Synthetic oligonucleotide
gauucgcugccaacuuugu

SEQ ID NO: 1518367 - RNA, 19 nt, Artificial Sequence
  Description of Artificial Sequence: Synthetic oligonucleotide
ggaggcaaggggacggaca

SEQ ID NO: 1518368 - RNA, 19 nt, Artificial Sequence
  Description of Artificial Sequence: Synthetic oligonucleotide
gaagcgcauguugccugga

SEQ ID NO: 1518369 - RNA, 19 nt, Artificial Sequence
  Description of Artificial Sequence: Synthetic oligonucleotide
uuccggguccuagggcgcu

SEQ ID NO: 1518370 - RNA, 19 nt, Artificial Sequence
  Description of Artificial Sequence: Synthetic oligonucleotide
ugccugucgucaggcuccc

SEQ ID NO: 1518371 - RNA, 19 nt, Artificial Sequence
  Description of Artificial Sequence: Synthetic oligonucleotide
acuggcgaucugaggucug

SEQ ID NO: 1518372 - RNA, 19 nt, Artificial Sequence
  Description of Artificial Sequence: Synthetic oligonucleotide
auacucagccugggacaga

SEQ ID NO: 1518373 - RNA, 19 nt, Artificial Sequence
  Description of Artificial Sequence: Synthetic oligonucleotide
gcguucacacccuuuguau

SEQ ID NO: 1518374 - RNA, 19 nt, Artificial Sequence
  Description of Artificial Sequence: Synthetic oligonucleotide
ccucauggcuuuugcuauc

SEQ ID NO: 1518375 - RNA, 19 nt, Artificial Sequence
  Description of Artificial Sequence: Synthetic oligonucleotide
gccucauggcuuuugcuau

SEQ ID NO: 1518376 - RNA, 19 nt, Artificial Sequence
  Description of Artificial Sequence: Synthetic oligonucleotide
ggaccgcuucugcuuggug

SEQ ID NO: 1518377 - RNA, 19 nt, Artificial Sequence
  Description of Artificial Sequence: Synthetic oligonucleotide
cagcuugguguugaugaua

SEQ ID NO: 1518378 - RNA, 19 nt, Artificial Sequence
  Description of Artificial Sequence: Synthetic oligonucleotide
guguugcauuugagggcgc

SEQ ID NO: 1518379 - RNA, 19 nt, Artificial Sequence
  Description of Artificial Sequence: Synthetic oligonucleotide
cugucuccaugucucuacu

SEQ ID NO: 1518380 - RNA, 19 nt, Artificial Sequence
  Description of Artificial Sequence: Synthetic oligonucleotide
cgcaaguaugauggcaaac

SEQ ID NO: 1518381 - RNA, 19 nt, Artificial Sequence
  Description of Artificial Sequence: Synthetic oligonucleotide
cagaggucuuauucagaau

SEQ ID NO: 1518382 - RNA, 19 nt, Artificial Sequence
  Description of Artificial Sequence: Synthetic oligonucleotide
caggucaaucuggaagcua

SEQ ID NO: 1518383 - RNA, 19 nt, Artificial Sequence
  Description of Artificial Sequence: Synthetic oligonucleotide
gggcuugccggucucgacu

SEQ ID NO: 1518384 - RNA, 19 nt, Artificial Sequence
  Description of Artificial Sequence: Synthetic oligonucleotide
cagccucauggcuuuugcu

SEQ ID NO: 1518385 - RNA, 19 nt, Artificial Sequence
  Description of Artificial Sequence: Synthetic oligonucleotide
cguagacugccauuguugu

SEQ ID NO: 1518386 - RNA, 19 nt, Artificial Sequence
  Description of Artificial Sequence: Synthetic oligonucleotide
ggcucucaagggcaucaua

SEQ ID NO: 1518387 - RNA, 19 nt, Artificial Sequence
  Description of Artificial Sequence: Synthetic oligonucleotide
ccagcccggaagacuccag

SEQ ID NO: 1518388 - RNA, 19 nt, Artificial Sequence
  Description of Artificial Sequence: Synthetic oligonucleotide
gccagucccaaaauuguuu

SEQ ID NO: 1518389 - RNA, 19 nt, Artificial Sequence
  Description of Artificial Sequence: Synthetic oligonucleotide
gcuguccagcccggaagac

SEQ ID NO: 1518390 - RNA, 19 nt, Artificial Sequence
  Description of Artificial Sequence: Synthetic oligonucleotide
cagagcguucacacccuuu

SEQ ID NO: 1518391 - RNA, 19 nt, Artificial Sequence
  Description of Artificial Sequence: Synthetic oligonucleotide
ggucuggggcggaggcaag

SEQ ID NO: 1518392 - RNA, 19 nt, Artificial Sequence
  Description of Artificial Sequence: Synthetic oligonucleotide
gcugccaacuuuguucauu

SEQ ID NO: 1518393 - RNA, 19 nt, Artificial Sequence
  Description of Artificial Sequence: Synthetic oligonucleotide
caucgcugaccagagcguu

SEQ ID NO: 1518394 - RNA, 19 nt, Artificial Sequence
  Description of Artificial Sequence: Synthetic oligonucleotide
gcucuccggcucacacgcg

SEQ ID NO: 1518395 - RNA, 19 nt, Artificial Sequence
  Description of Artificial Sequence: Synthetic oligonucleotide
ggggacggacagagugccc

SEQ ID NO: 1518396 - RNA, 19 nt, Artificial Sequence
  Description of Artificial Sequence: Synthetic oligonucleotide
uccggguccuagggcgcuu

SEQ ID NO: 1518397 - RNA, 19 nt, Artificial Sequence
  Description of Artificial Sequence: Synthetic oligonucleotide
cagcaaacaguggcugcau

SEQ ID NO: 1518398 - RNA, 19 nt, Artificial Sequence
  Description of Artificial Sequence: Synthetic oligonucleotide
ggucucgacucuccucauu

SEQ ID NO: 1518399 - RNA, 19 nt, Artificial Sequence
  Description of Artificial Sequence: Synthetic oligonucleotide
ccaggauccgcugauucuu

SEQ ID NO: 1518400 - RNA, 19 nt, Artificial Sequence
  Description of Artificial Sequence: Synthetic oligonucleotide
cagugaucuuggccuucau

SEQ ID NO: 1518401 - RNA, 19 nt, Artificial Sequence
  Description of Artificial Sequence: Synthetic oligonucleotide
gggcgccagucccaaaauu

SEQ ID NO: 1518402 - RNA, 19 nt, Artificial Sequence
  Description of Artificial Sequence: Synthetic oligonucleotide
gccgucugccagggucacc

SEQ ID NO: 1518403 - RNA, 19 nt, Artificial Sequence
  Description of Artificial Sequence: Synthetic oligonucleotide
ccaagucguugcuguugua

SEQ ID NO: 1518404 - RNA, 19 nt, Artificial Sequence
  Description of Artificial Sequence: Synthetic oligonucleotide
cggaggcaaggggacggac

SEQ ID NO: 1518405 - RNA, 19 nt, Artificial Sequence
  Description of Artificial Sequence: Synthetic oligonucleotide
gcuugccggucucgacucu

SEQ ID NO: 1518406 - RNA, 19 nt, Artificial Sequence
  Description of Artificial Sequence: Synthetic oligonucleotide
gggaccgcuucugcuuggu

SEQ ID NO: 1518407 - RNA, 19 nt, Artificial Sequence
  Description of Artificial Sequence: Synthetic oligonucleotide
ccgcuuugacuggcgaucu

SEQ ID NO: 1518408 - RNA, 19 nt, Artificial Sequence
  Description of Artificial Sequence: Synthetic oligonucleotide
gggcucucaagggcaucau

SEQ ID NO: 1518409 - RNA, 19 nt, Artificial Sequence
  Description of Artificial Sequence: Synthetic oligonucleotide
cggucucgacucuccucau

SEQ ID NO: 1518410 - RNA, 19 nt, Artificial Sequence
  Description of Artificial Sequence: Synthetic oligonucleotide
ccggguccuagggcgcuuu

SEQ ID NO: 1518411 - RNA, 19 nt, Artificial Sequence
  Description of Artificial Sequence: Synthetic oligonucleotide
cggguccuagggcgcuuuu

SEQ ID NO: 1518412 - RNA, 19 nt, Artificial Sequence
  Description of Artificial Sequence: Synthetic oligonucleotide
aaauacaucccuccgaggc

SEQ ID NO: 1518413 - RNA, 19 nt, Artificial Sequence
  Description of Artificial Sequence: Synthetic oligonucleotide
uuuggaucuauuauaagcc

SEQ ID NO: 1518414 - RNA, 19 nt, Artificial Sequence
  Description of Artificial Sequence: Synthetic oligonucleotide
aauaucuguaaaucugugg

SEQ ID NO: 1518415 - RNA, 19 nt, Artificial Sequence
  Description of Artificial Sequence: Synthetic oligonucleotide
uuauaagccagcauggccc

SEQ ID NO: 1518416 - RNA, 19 nt, Artificial Sequence
  Description of Artificial Sequence: Synthetic oligonucleotide
auuauaagccagcauggcc

SEQ ID NO: 1518417 - RNA, 19 nt, Artificial Sequence
  Description of Artificial Sequence: Synthetic oligonucleotide
uggauuaucauccacagua

SEQ ID NO: 1518418 - RNA, 19 nt, Artificial Sequence
  Description of Artificial Sequence: Synthetic oligonucleotide
acucacucuaccuucaacc

SEQ ID NO: 1518419 - RNA, 19 nt, Artificial Sequence
  Description of Artificial Sequence: Synthetic oligonucleotide
aagagacauauucuuggcc

SEQ ID NO: 1518420 - RNA, 19 nt, Artificial Sequence
  Description of Artificial Sequence: Synthetic oligonucleotide
aauacaucccuccgaggcc

SEQ ID NO: 1518421 - RNA, 19 nt, Artificial Sequence
  Description of Artificial Sequence: Synthetic oligonucleotide
uuuguugccauucuuccag

SEQ ID NO: 1518422 - RNA, 19 nt, Artificial Sequence
  Description of Artificial Sequence: Synthetic oligonucleotide
guuuggaucuauuauaagc

SEQ ID NO: 1518423 - RNA, 19 nt, Artificial Sequence
  Description of Artificial Sequence: Synthetic oligonucleotide
aauguugcacgcuacggag

SEQ ID NO: 1518424 - RNA, 19 nt, Artificial Sequence
  Description of Artificial Sequence: Synthetic oligonucleotide
ugaacaguaacauguauac

SEQ ID NO: 1518425 - RNA, 19 nt, Artificial Sequence
  Description of Artificial Sequence: Synthetic oligonucleotide
ugagcgacacaaaacaucc

SEQ ID NO: 1518426 - RNA, 19 nt, Artificial Sequence
  Description of Artificial Sequence: Synthetic oligonucleotide
agugaugagggucagagca

SEQ ID NO: 1518427 - RNA, 19 nt, Artificial Sequence
  Description of Artificial Sequence: Synthetic oligonucleotide
aacauguauacccaugagu

SEQ ID NO: 1518428 - RNA, 19 nt, Artificial Sequence
  Description of Artificial Sequence: Synthetic oligonucleotide
cuauuauaagccagcaugg

SEQ ID NO: 1518429 - RNA, 19 nt, Artificial Sequence
  Description of Artificial Sequence: Synthetic oligonucleotide
aguuggacaagguagaagu

SEQ ID NO: 1518430 - RNA, 19 nt, Artificial Sequence
  Description of Artificial Sequence: Synthetic oligonucleotide
auguauacccaugaguucc

SEQ ID NO: 1518431 - RNA, 19 nt, Artificial Sequence
  Description of Artificial Sequence: Synthetic oligonucleotide
aaaguuuggaucuauuaua

SEQ ID NO: 1518432 - RNA, 19 nt, Artificial Sequence
  Description of Artificial Sequence: Synthetic oligonucleotide
ucugagccucuucagaugg

SEQ ID NO: 1518433 - RNA, 19 nt, Artificial Sequence
  Description of Artificial Sequence: Synthetic oligonucleotide
uguuggauuaucauccaca

SEQ ID NO: 1518434 - RNA, 19 nt, Artificial Sequence
  Description of Artificial Sequence: Synthetic oligonucleotide
aaaauguugcacgcuacgg

SEQ ID NO: 1518435 - RNA, 19 nt, Artificial Sequence
  Description of Artificial Sequence: Synthetic oligonucleotide
aacucgucuucuuuugccg

SEQ ID NO: 1518436 - RNA, 19 nt, Artificial Sequence
  Description of Artificial Sequence: Synthetic oligonucleotide
gaguacaucauguuuccag

SEQ ID NO: 1518437 - RNA, 19 nt, Artificial Sequence
  Description of Artificial Sequence: Synthetic oligonucleotide
agagacauauucuuggccu

SEQ ID NO: 1518438 - RNA, 19 nt, Artificial Sequence
  Description of Artificial Sequence: Synthetic oligonucleotide
agauugcaaaguuuggauc

SEQ ID NO: 1518439 - RNA, 19 nt, Artificial Sequence
  Description of Artificial Sequence: Synthetic oligonucleotide
aaauguugcacgcuacgga

SEQ ID NO: 1518440 - RNA, 19 nt, Artificial Sequence
  Description of Artificial Sequence: Synthetic oligonucleotide
aguagacaguuguagcagc

SEQ ID NO: 1518441 - RNA, 19 nt, Artificial Sequence
  Description of Artificial Sequence: Synthetic oligonucleotide
aaaacuacagggcucugau

SEQ ID NO: 1518442 - RNA, 19 nt, Artificial Sequence
  Description of Artificial Sequence: Synthetic oligonucleotide
uauuccugaauuugcuccg

SEQ ID NO: 1518443 - RNA, 19 nt, Artificial Sequence
  Description of Artificial Sequence: Synthetic oligonucleotide
aacccuuggaugauggggc

SEQ ID NO: 1518444 - RNA, 19 nt, Artificial Sequence
  Description of Artificial Sequence: Synthetic oligonucleotide
aaguccccgcauuacacac

SEQ ID NO: 1518445 - RNA, 19 nt, Artificial Sequence
  Description of Artificial Sequence: Synthetic oligonucleotide
uggaucuauuauaagccag

SEQ ID NO: 1518446 - RNA, 19 nt, Artificial Sequence
  Description of Artificial Sequence: Synthetic oligonucleotide
cacacaagcacaugaagag

SEQ ID NO: 1518447 - RNA, 19 nt, Artificial Sequence
  Description of Artificial Sequence: Synthetic oligonucleotide
guugaaauacaucccuccg

SEQ ID NO: 1518448 - RNA, 19 nt, Artificial Sequence
  Description of Artificial Sequence: Synthetic oligonucleotide
aaaaguccccgcauuacac

SEQ ID NO: 1518449 - RNA, 19 nt, Artificial Sequence
  Description of Artificial Sequence: Synthetic oligonucleotide
aaucguuaauaucuguaaa

SEQ ID NO: 1518450 - RNA, 19 nt, Artificial Sequence
  Description of Artificial Sequence: Synthetic oligonucleotide
acggagcacagccaggucc

SEQ ID NO: 1518451 - RNA, 19 nt, Artificial Sequence
  Description of Artificial Sequence: Synthetic oligonucleotide
caugaguuccgaugaaugg

SEQ ID NO: 1518452 - RNA, 19 nt, Artificial Sequence
  Description of Artificial Sequence: Synthetic oligonucleotide
uugaaauacaucccuccga

SEQ ID NO: 1518453 - RNA, 19 nt, Artificial Sequence
  Description of Artificial Sequence: Synthetic oligonucleotide
caaucuuggguccaaguag

SEQ ID NO: 1518454 - RNA, 19 nt, Artificial Sequence
  Description of Artificial Sequence: Synthetic oligonucleotide
cacucuaccuucaaccgcg

SEQ ID NO: 1518455 - RNA, 19 nt, Artificial Sequence
  Description of Artificial Sequence: Synthetic oligonucleotide
auuagcuggauggacuccc

SEQ ID NO: 1518456 - RNA, 19 nt, Artificial Sequence
  Description of Artificial Sequence: Synthetic oligonucleotide
agaagaggagauugcaaag

SEQ ID NO: 1518457 - RNA, 19 nt, Artificial Sequence
  Description of Artificial Sequence: Synthetic oligonucleotide
ucguaucucugucugguag

SEQ ID NO: 1518458 - RNA, 19 nt, Artificial Sequence
  Description of Artificial Sequence: Synthetic oligonucleotide
aaguagguaguucuuuuau

SEQ ID NO: 1518459 - RNA, 19 nt, Artificial Sequence
  Description of Artificial Sequence: Synthetic oligonucleotide
aucguuaauaucuguaaau

SEQ ID NO: 1518460 - RNA, 19 nt, Artificial Sequence
  Description of Artificial Sequence: Synthetic oligonucleotide
agcgacacaaaacauccug

SEQ ID NO: 1518461 - RNA, 19 nt, Artificial Sequence
  Description of Artificial Sequence: Synthetic oligonucleotide
uguauacccaugaguuccg

SEQ ID NO: 1518462 - RNA, 19 nt, Artificial Sequence
  Description of Artificial Sequence: Synthetic oligonucleotide
aauuugcuccgguaaccag

SEQ ID NO: 1518463 - RNA, 19 nt, Artificial Sequence
  Description of Artificial Sequence: Synthetic oligonucleotide
uaacauguauacccaugag

SEQ ID NO: 1518464 - RNA, 19 nt, Artificial Sequence
  Description of Artificial Sequence: Synthetic oligonucleotide
auacccaugaguuccgaug

SEQ ID NO: 1518465 - RNA, 19 nt, Artificial Sequence
  Description of Artificial Sequence: Synthetic oligonucleotide
caaaauguugcacgcuacg

SEQ ID NO: 1518466 - RNA, 19 nt, Artificial Sequence
  Description of Artificial Sequence: Synthetic oligonucleotide
uuuucggauguucccacug

SEQ ID NO: 1518467 - RNA, 19 nt, Artificial Sequence
  Description of Artificial Sequence: Synthetic oligonucleotide
uuaggggaacccuuggaug

SEQ ID NO: 1518468 - RNA, 19 nt, Artificial Sequence
  Description of Artificial Sequence: Synthetic oligonucleotide
cacgcuacggagcacagcc

SEQ ID NO: 1518469 - RNA, 19 nt, Artificial Sequence
  Description of Artificial Sequence: Synthetic oligonucleotide
gcucugauuagcuggaugg

SEQ ID NO: 1518470 - RNA, 19 nt, Artificial Sequence
  Description of Artificial Sequence: Synthetic oligonucleotide
gaaucguuaauaucuguaa

SEQ ID NO: 1518471 - RNA, 19 nt, Artificial Sequence
  Description of Artificial Sequence: Synthetic oligonucleotide
acaaguauucaccggguca

SEQ ID NO: 1518472 - RNA, 19 nt, Artificial Sequence
  Description of Artificial Sequence: Synthetic oligonucleotide
ugcuccgguaaccaggacc

SEQ ID NO: 1518473 - RNA, 19 nt, Artificial Sequence
  Description of Artificial Sequence: Synthetic oligonucleotide
auggacuuggugaauggcc

SEQ ID NO: 1518474 - RNA, 19 nt, Artificial Sequence
  Description of Artificial Sequence: Synthetic oligonucleotide
uuucgaacccuauuccuga

SEQ ID NO: 1518475 - RNA, 19 nt, Artificial Sequence
  Description of Artificial Sequence: Synthetic oligonucleotide
guuggcguaguauacccag

SEQ ID NO: 1518476 - RNA, 19 nt, Artificial Sequence
  Description of Artificial Sequence: Synthetic oligonucleotide
aacccuauuccugaauuug

SEQ ID NO: 1518477 - RNA, 19 nt, Artificial Sequence
  Description of Artificial Sequence: Synthetic oligonucleotide
guaacauguauacccauga

SEQ ID NO: 1518478 - RNA, 19 nt, Artificial Sequence
  Description of Artificial Sequence: Synthetic oligonucleotide
agucgauccuggaugagcc

SEQ ID NO: 1518479 - RNA, 19 nt, Artificial Sequence
  Description of Artificial Sequence: Synthetic oligonucleotide
uauucaccgggucaccuca

SEQ ID NO: 1518480 - RNA, 19 nt, Artificial Sequence
  Description of Artificial Sequence: Synthetic oligonucleotide
uacccaugaguuccgauga

SEQ ID NO: 1518481 - RNA, 19 nt, Artificial Sequence
  Description of Artificial Sequence: Synthetic oligonucleotide
ucguuaauaucuguaaauc

SEQ ID NO: 1518482 - RNA, 19 nt, Artificial Sequence
  Description of Artificial Sequence: Synthetic oligonucleotide
uguugcacgcuacggagca

SEQ ID NO: 1518483 - RNA, 19 nt, Artificial Sequence
  Description of Artificial Sequence: Synthetic oligonucleotide
ugaacgcuucagcaaaaug

SEQ ID NO: 1518484 - RNA, 19 nt, Artificial Sequence
  Description of Artificial Sequence: Synthetic oligonucleotide
guuccuacaggccaggauc

SEQ ID NO: 1518485 - RNA, 19 nt, Artificial Sequence
  Description of Artificial Sequence: Synthetic oligonucleotide
gacaagguagaaguguccc

SEQ ID NO: 1518486 - RNA, 19 nt, Artificial Sequence
  Description of Artificial Sequence: Synthetic oligonucleotide
aaaguccccgcauuacaca

SEQ ID NO: 1518487 - RNA, 19 nt, Artificial Sequence
  Description of Artificial Sequence: Synthetic oligonucleotide
ugaauuugcuccgguaacc

SEQ ID NO: 1518488 - RNA, 19 nt, Artificial Sequence
  Description of Artificial Sequence: Synthetic oligonucleotide
uauuauaagccagcauggc

SEQ ID NO: 1518489 - RNA, 19 nt, Artificial Sequence
  Description of Artificial Sequence: Synthetic oligonucleotide
uggcguaguauacccagcc

SEQ ID NO: 1518490 - RNA, 19 nt, Artificial Sequence
  Description of Artificial Sequence: Synthetic oligonucleotide
acauguauacccaugaguu

SEQ ID NO: 1518491 - RNA, 19 nt, Artificial Sequence
  Description of Artificial Sequence: Synthetic oligonucleotide
uggauggacuccccagucg

SEQ ID NO: 1518492 - RNA, 19 nt, Artificial Sequence
  Description of Artificial Sequence: Synthetic oligonucleotide
ucuuucgugaggguccagg

SEQ ID NO: 1518493 - RNA, 19 nt, Artificial Sequence
  Description of Artificial Sequence: Synthetic oligonucleotide
agggucauugcuucuaccu

SEQ ID NO: 1518494 - RNA, 19 nt, Artificial Sequence
  Description of Artificial Sequence: Synthetic oligonucleotide
auuugcuccgguaaccagg

SEQ ID NO: 1518495 - RNA, 19 nt, Artificial Sequence
  Description of Artificial Sequence: Synthetic oligonucleotide
aguuuggaucuauuauaag

SEQ ID NO: 1518496 - RNA, 19 nt, Artificial Sequence
  Description of Artificial Sequence: Synthetic oligonucleotide
gaugauggggcuagcagug

SEQ ID NO: 1518497 - RNA, 19 nt, Artificial Sequence
  Description of Artificial Sequence: Synthetic oligonucleotide
accaucguaucucugucug

SEQ ID NO: 1518498 - RNA, 19 nt, Artificial Sequence
  Description of Artificial Sequence: Synthetic oligonucleotide
ugaguuccgaugaauggau

SEQ ID NO: 1518499 - RNA, 19 nt, Artificial Sequence
  Description of Artificial Sequence: Synthetic oligonucleotide
uggcaaaucuccugcaacu

SEQ ID NO: 1518500 - RNA, 19 nt, Artificial Sequence
  Description of Artificial Sequence: Synthetic oligonucleotide
ugguuggcguaguauaccc

SEQ ID NO: 1518501 - RNA, 19 nt, Artificial Sequence
  Description of Artificial Sequence: Synthetic oligonucleotide
uccgaugaauggaugagua

SEQ ID NO: 1518502 - RNA, 19 nt, Artificial Sequence
  Description of Artificial Sequence: Synthetic oligonucleotide
agcacaugaagagacauau

SEQ ID NO: 1518503 - RNA, 19 nt, Artificial Sequence
  Description of Artificial Sequence: Synthetic oligonucleotide
guaaccaggaccacucucc

SEQ ID NO: 1518504 - RNA, 19 nt, Artificial Sequence
  Description of Artificial Sequence: Synthetic oligonucleotide
ugauuagcuggauggacuc

SEQ ID NO: 1518505 - RNA, 19 nt, Artificial Sequence
  Description of Artificial Sequence: Synthetic oligonucleotide
uuuguuggauuaucaucca

SEQ ID NO: 1518506 - RNA, 19 nt, Artificial Sequence
  Description of Artificial Sequence: Synthetic oligonucleotide
cucgcugagauccccacag

SEQ ID NO: 1518507 - RNA, 19 nt, Artificial Sequence
  Description of Artificial Sequence: Synthetic oligonucleotide
uuugccgguuuucggaugu

SEQ ID NO: 1518508 - RNA, 19 nt, Artificial Sequence
  Description of Artificial Sequence: Synthetic oligonucleotide
aaguauucaccgggucacc

SEQ ID NO: 1518509 - RNA, 19 nt, Artificial Sequence
  Description of Artificial Sequence: Synthetic oligonucleotide
aaggauuuggcgguuucga

SEQ ID NO: 1518510 - RNA, 19 nt, Artificial Sequence
  Description of Artificial Sequence: Synthetic oligonucleotide
auuuggcgguuucgaaccc

SEQ ID NO: 1518511 - RNA, 19 nt, Artificial Sequence
  Description of Artificial Sequence: Synthetic oligonucleotide
agcaaaauguugcacgcua

SEQ ID NO: 1518512 - RNA, 19 nt, Artificial Sequence
  Description of Artificial Sequence: Synthetic oligonucleotide
uuccuacaggccaggauca

SEQ ID NO: 1518513 - RNA, 19 nt, Artificial Sequence
  Description of Artificial Sequence: Synthetic oligonucleotide
uauaagccagcauggccca

SEQ ID NO: 1518514 - RNA, 19 nt, Artificial Sequence
  Description of Artificial Sequence: Synthetic oligonucleotide
cacgacgacacgagcaggg

SEQ ID NO: 1518515 - RNA, 19 nt, Artificial Sequence
  Description of Artificial Sequence: Synthetic oligonucleotide
accacgacgacacgagcag

SEQ ID NO: 1518516 - RNA, 19 nt, Artificial Sequence
  Description of Artificial Sequence: Synthetic oligonucleotide
ucugauuagcuggauggac

SEQ ID NO: 1518517 - RNA, 19 nt, Artificial Sequence
  Description of Artificial Sequence: Synthetic oligonucleotide
gaaugcgggauacugccuc

SEQ ID NO: 1518518 - RNA, 19 nt, Artificial Sequence
  Description of Artificial Sequence: Synthetic oligonucleotide
aguaacauguauacccaug

SEQ ID NO: 1518519 - RNA, 19 nt, Artificial Sequence
  Description of Artificial Sequence: Synthetic oligonucleotide
caaguauucaccgggucac

SEQ ID NO: 1518520 - RNA, 19 nt, Artificial Sequence
  Description of Artificial Sequence: Synthetic oligonucleotide
acccuauuccugaauuugc

SEQ ID NO: 1518521 - RNA, 19 nt, Artificial Sequence
  Description of Artificial Sequence: Synthetic oligonucleotide
aaguuucccugaggaaucg

SEQ ID NO: 1518522 - RNA, 19 nt, Artificial Sequence
  Description of Artificial Sequence: Synthetic oligonucleotide
caaguuucccugaggaauc

SEQ ID NO: 1518523 - RNA, 19 nt, Artificial Sequence
  Description of Artificial Sequence: Synthetic oligonucleotide
cugcauuugaugugacccc

SEQ ID NO: 1518524 - RNA, 19 nt, Artificial Sequence
  Description of Artificial Sequence: Synthetic oligonucleotide
caaggugaacaguaacaug

SEQ ID NO: 1518525 - RNA, 19 nt, Artificial Sequence
  Description of Artificial Sequence: Synthetic oligonucleotide
uacaaguauucaccggguc

SEQ ID NO: 1518526 - RNA, 19 nt, Artificial Sequence
  Description of Artificial Sequence: Synthetic oligonucleotide
acuacagggcucugauuag

SEQ ID NO: 1518527 - RNA, 19 nt, Artificial Sequence
  Description of Artificial Sequence: Synthetic oligonucleotide
uuguuggauuaucauccac

SEQ ID NO: 1518528 - RNA, 19 nt, Artificial Sequence
  Description of Artificial Sequence: Synthetic oligonucleotide
gguagagcaaaaguccccg

SEQ ID NO: 1518529 - RNA, 19 nt, Artificial Sequence
  Description of Artificial Sequence: Synthetic oligonucleotide
aaugcgggauacugccuca

SEQ ID NO: 1518530 - RNA, 19 nt, Artificial Sequence
  Description of Artificial Sequence: Synthetic oligonucleotide
cauguauacccaugaguuc

SEQ ID NO: 1518531 - RNA, 19 nt, Artificial Sequence
  Description of Artificial Sequence: Synthetic oligonucleotide
aacggcagcaguuguugaa

SEQ ID NO: 1518532 - RNA, 19 nt, Artificial Sequence
  Description of Artificial Sequence: Synthetic oligonucleotide
guuucgaacccuauuccug

SEQ ID NO: 1518533 - RNA, 19 nt, Artificial Sequence
  Description of Artificial Sequence: Synthetic oligonucleotide
uguucccauccauauggca

SEQ ID NO: 1518534 - RNA, 19 nt, Artificial Sequence
  Description of Artificial Sequence: Synthetic oligonucleotide
gcgacugcacaguagacag

SEQ ID NO: 1518535 - RNA, 19 nt, Artificial Sequence
  Description of Artificial Sequence: Synthetic oligonucleotide
agaccacgacgacacgagc

SEQ ID NO: 1518536 - RNA, 19 nt, Artificial Sequence
  Description of Artificial Sequence: Synthetic oligonucleotide
gaucuauuauaagccagca

SEQ ID NO: 1518537 - RNA, 19 nt, Artificial Sequence
  Description of Artificial Sequence: Synthetic oligonucleotide
uagguaguucuuuuauuua

SEQ ID NO: 1518538 - RNA, 19 nt, Artificial Sequence
  Description of Artificial Sequence: Synthetic oligonucleotide
agagcaaaaguccccgcau

SEQ ID NO: 1518539 - RNA, 19 nt, Artificial Sequence
  Description of Artificial Sequence: Synthetic oligonucleotide
aguagguaguucuuuuauu

SEQ ID NO: 1518540 - RNA, 19 nt, Artificial Sequence
  Description of Artificial Sequence: Synthetic oligonucleotide
uuggauuaucauccacagu

SEQ ID NO: 1518541 - RNA, 19 nt, Artificial Sequence
  Description of Artificial Sequence: Synthetic oligonucleotide
gaguuggacaagguagaag

SEQ ID NO: 1518542 - RNA, 19 nt, Artificial Sequence
  Description of Artificial Sequence: Synthetic oligonucleotide
ugaugagggucagagcaug

SEQ ID NO: 1518543 - RNA, 19 nt, Artificial Sequence
  Description of Artificial Sequence: Synthetic oligonucleotide
ggggcuagcagugaugagg

SEQ ID NO: 1518544 - RNA, 19 nt, Artificial Sequence
  Description of Artificial Sequence: Synthetic oligonucleotide
gaggaaucguuaauaucug

SEQ ID NO: 1518545 - RNA, 19 nt, Artificial Sequence
  Description of Artificial Sequence: Synthetic oligonucleotide
gaggcgacggugcagcuca

SEQ ID NO: 1518546 - RNA, 19 nt, Artificial Sequence
  Description of Artificial Sequence: Synthetic oligonucleotide
ucgucagucucuuguuccc

SEQ ID NO: 1518547 - RNA, 19 nt, Artificial Sequence
  Description of Artificial Sequence: Synthetic oligonucleotide
aucuauuauaagccagcau

SEQ ID NO: 1518548 - RNA, 19 nt, Artificial Sequence
  Description of Artificial Sequence: Synthetic oligonucleotide
gagaccacgacgacacgag

SEQ ID NO: 1518549 - RNA, 19 nt, Artificial Sequence
  Description of Artificial Sequence: Synthetic oligonucleotide
gagauugcaaaguuuggau

SEQ ID NO: 1518550 - RNA, 19 nt, Artificial Sequence
  Description of Artificial Sequence: Synthetic oligonucleotide
agguagaagugucccaggu

SEQ ID NO: 1518551 - RNA, 19 nt, Artificial Sequence
  Description of Artificial Sequence: Synthetic oligonucleotide
uuguccauucucgucaguc

SEQ ID NO: 1518552 - RNA, 19 nt, Artificial Sequence
  Description of Artificial Sequence: Synthetic oligonucleotide
uccgugucguccaggccgg

SEQ ID NO: 1518553 - RNA, 19 nt, Artificial Sequence
  Description of Artificial Sequence: Synthetic oligonucleotide
uggugcuaccaucguaucu

SEQ ID NO: 1518554 - RNA, 19 nt, Artificial Sequence
  Description of Artificial Sequence: Synthetic oligonucleotide
aggaaucguuaauaucugu

SEQ ID NO: 1518555 - RNA, 19 nt, Artificial Sequence
  Description of Artificial Sequence: Synthetic oligonucleotide
aagagaccacgacgacacg

SEQ ID NO: 1518556 - RNA, 19 nt, Artificial Sequence
  Description of Artificial Sequence: Synthetic oligonucleotide
uuagcuggauggacucccc

SEQ ID NO: 1518557 - RNA, 19 nt, Artificial Sequence
  Description of Artificial Sequence: Synthetic oligonucleotide
ggaucuauuauaagccagc

SEQ ID NO: 1518558 - RNA, 19 nt, Artificial Sequence
  Description of Artificial Sequence: Synthetic oligonucleotide
uuggcguaguauacccagc

SEQ ID NO: 1518559 - RNA, 19 nt, Artificial Sequence
  Description of Artificial Sequence: Synthetic oligonucleotide
ggcugagcgacacaaaaca

SEQ ID NO: 1518560 - RNA, 19 nt, Artificial Sequence
  Description of Artificial Sequence: Synthetic oligonucleotide
guaaaucugugggacucag

SEQ ID NO: 1518561 - RNA, 19 nt, Artificial Sequence
  Description of Artificial Sequence: Synthetic oligonucleotide
ggauuuggcgguuucgaac

SEQ ID NO: 1518562 - RNA, 19 nt, Artificial Sequence
  Description of Artificial Sequence: Synthetic oligonucleotide
gaauuugcuccgguaacca

SEQ ID NO: 1518563 - RNA, 19 nt, Artificial Sequence
  Description of Artificial Sequence: Synthetic oligonucleotide
ucggauguucccacugggu

SEQ ID NO: 1518564 - RNA, 19 nt, Artificial Sequence
  Description of Artificial Sequence: Synthetic oligonucleotide
guagguaguucuuuuauuu

SEQ ID NO: 1518565 - RNA, 19 nt, Artificial Sequence
  Description of Artificial Sequence: Synthetic oligonucleotide
ccaucuuucgugagggucc

SEQ ID NO: 1518566 - RNA, 19 nt, Artificial Sequence
  Description of Artificial Sequence: Synthetic oligonucleotide
uuguugcauggacuuggug

SEQ ID NO: 1518567 - RNA, 19 nt, Artificial Sequence
  Description of Artificial Sequence: Synthetic oligonucleotide
auguugcacgcuacggagc

SEQ ID NO: 1518568 - RNA, 19 nt, Artificial Sequence
  Description of Artificial Sequence: Synthetic oligonucleotide
caaaguuuggaucuauuau

SEQ ID NO: 1518569 - RNA, 19 nt, Artificial Sequence
  Description of Artificial Sequence: Synthetic oligonucleotide
uggaugaguacaucauguu

SEQ ID NO: 1518570 - RNA, 19 nt, Artificial Sequence
  Description of Artificial Sequence: Synthetic oligonucleotide
guaguauacccagccgucc

SEQ ID NO: 1518571 - RNA, 19 nt, Artificial Sequence
  Description of Artificial Sequence: Synthetic oligonucleotide
agcaaaaguccccgcauua

SEQ ID NO: 1518572 - RNA, 19 nt, Artificial Sequence
  Description of Artificial Sequence: Synthetic oligonucleotide
ggacucagaagagaccacg

SEQ ID NO: 1518573 - RNA, 19 nt, Artificial Sequence
  Description of Artificial Sequence: Synthetic oligonucleotide
cuguccgugucguccaggc

SEQ ID NO: 1518574 - RNA, 19 nt, Artificial Sequence
  Description of Artificial Sequence: Synthetic oligonucleotide
cuaccaucguaucucuguc

SEQ ID NO: 1518575 - RNA, 19 nt, Artificial Sequence
  Description of Artificial Sequence: Synthetic oligonucleotide
caaaaguccccgcauuaca

SEQ ID NO: 1518576 - RNA, 19 nt, Artificial Sequence
  Description of Artificial Sequence: Synthetic oligonucleotide
gauuagcuggauggacucc

SEQ ID NO: 1518577 - RNA, 19 nt, Artificial Sequence
  Description of Artificial Sequence: Synthetic oligonucleotide
agagaccacgacgacacga

SEQ ID NO: 1518578 - RNA, 19 nt, Artificial Sequence
  Description of Artificial Sequence: Synthetic oligonucleotide
uuccgaugaauggaugagu

SEQ ID NO: 1518579 - RNA, 19 nt, Artificial Sequence
  Description of Artificial Sequence: Synthetic oligonucleotide
ucgcugagauccccacagg

SEQ ID NO: 1518580 - RNA, 19 nt, Artificial Sequence
  Description of Artificial Sequence: Synthetic oligonucleotide
uuggcuuuguuggauuauc

SEQ ID NO: 1518581 - RNA, 19 nt, Artificial Sequence
  Description of Artificial Sequence: Synthetic oligonucleotide
uauacccaugaguuccgau

SEQ ID NO: 1518582 - RNA, 19 nt, Artificial Sequence
  Description of Artificial Sequence: Synthetic oligonucleotide
gaagaggagauugcaaagu

SEQ ID NO: 1518583 - RNA, 19 nt, Artificial Sequence
  Description of Artificial Sequence: Synthetic oligonucleotide
guagagcaaaaguccccgc

SEQ ID NO: 1518584 - RNA, 19 nt, Artificial Sequence
  Description of Artificial Sequence: Synthetic oligonucleotide
auacaucccuccgaggccu

SEQ ID NO: 1518585 - RNA, 19 nt, Artificial Sequence
  Description of Artificial Sequence: Synthetic oligonucleotide
ggugcuaccaucguaucuc

SEQ ID NO: 1518586 - RNA, 19 nt, Artificial Sequence
  Description of Artificial Sequence: Synthetic oligonucleotide
ugugaccccucguggggag

SEQ ID NO: 1518587 - RNA, 19 nt, Artificial Sequence
  Description of Artificial Sequence: Synthetic oligonucleotide
aaacauccugcaggaguug

SEQ ID NO: 1518588 - RNA, 19 nt, Artificial Sequence
  Description of Artificial Sequence: Synthetic oligonucleotide
ccaugaguuccgaugaaug

SEQ ID NO: 1518589 - RNA, 19 nt, Artificial Sequence
  Description of Artificial Sequence: Synthetic oligonucleotide
auggacuccccagucgauc

SEQ ID NO: 1518590 - RNA, 19 nt, Artificial Sequence
  Description of Artificial Sequence: Synthetic oligonucleotide
aucuccugcaacucgucuu

SEQ ID NO: 1518591 - RNA, 19 nt, Artificial Sequence
  Description of Artificial Sequence: Synthetic oligonucleotide
cagucgauccuggaugagc

SEQ ID NO: 1518592 - RNA, 19 nt, Artificial Sequence
  Description of Artificial Sequence: Synthetic oligonucleotide
cuuuguugccauucuucca

SEQ ID NO: 1518593 - RNA, 19 nt, Artificial Sequence
  Description of Artificial Sequence: Synthetic oligonucleotide
agcaguuguugaaauacau

SEQ ID NO: 1518594 - RNA, 19 nt, Artificial Sequence
  Description of Artificial Sequence: Synthetic oligonucleotide
ucucgcugagauccccaca

SEQ ID NO: 1518595 - RNA, 19 nt, Artificial Sequence
  Description of Artificial Sequence: Synthetic oligonucleotide
guuggacaagguagaagug

SEQ ID NO: 1518596 - RNA, 19 nt, Artificial Sequence
  Description of Artificial Sequence: Synthetic oligonucleotide
ugcacgcuacggagcacag

SEQ ID NO: 1518597 - RNA, 19 nt, Artificial Sequence
  Description of Artificial Sequence: Synthetic oligonucleotide
gaccacgacgacacgagca

SEQ ID NO: 1518598 - RNA, 19 nt, Artificial Sequence
  Description of Artificial Sequence: Synthetic oligonucleotide
uccaggccggcguagcgga

SEQ ID NO: 1518599 - RNA, 19 nt, Artificial Sequence
  Description of Artificial Sequence: Synthetic oligonucleotide
ggcguaguauacccagccg

SEQ ID NO: 1518600 - RNA, 19 nt, Artificial Sequence
  Description of Artificial Sequence: Synthetic oligonucleotide
gaccacucucccugugaag

SEQ ID NO: 1518601 - RNA, 19 nt, Artificial Sequence
  Description of Artificial Sequence: Synthetic oligonucleotide
auacaaguauucaccgggu

SEQ ID NO: 1518602 - RNA, 19 nt, Artificial Sequence
  Description of Artificial Sequence: Synthetic oligonucleotide
ucgauccuggaugagccuc

SEQ ID NO: 1518603 - RNA, 19 nt, Artificial Sequence
  Description of Artificial Sequence: Synthetic oligonucleotide
cugauuagcuggauggacu

SEQ ID NO: 1518604 - RNA, 19 nt, Artificial Sequence
  Description of Artificial Sequence: Synthetic oligonucleotide
gcgguuucgaacccuauuc

SEQ ID NO: 1518605 - RNA, 19 nt, Artificial Sequence
  Description of Artificial Sequence: Synthetic oligonucleotide
ugcuaccaucguaucucug

SEQ ID NO: 1518606 - RNA, 19 nt, Artificial Sequence
  Description of Artificial Sequence: Synthetic oligonucleotide
ucgaacccuauuccugaau

SEQ ID NO: 1518607 - RNA, 19 nt, Artificial Sequence
  Description of Artificial Sequence: Synthetic oligonucleotide
ggugguucucuccucccag

SEQ ID NO: 1518608 - RNA, 19 nt, Artificial Sequence
  Description of Artificial Sequence: Synthetic oligonucleotide
accccucguggggagaggc

SEQ ID NO: 1518609 - RNA, 19 nt, Artificial Sequence
  Description of Artificial Sequence: Synthetic oligonucleotide
uccccagucgauccuggau

SEQ ID NO: 1518610 - RNA, 19 nt, Artificial Sequence
  Description of Artificial Sequence: Synthetic oligonucleotide
guauucaccgggucaccuc

SEQ ID NO: 1518611 - RNA, 19 nt, Artificial Sequence
  Description of Artificial Sequence: Synthetic oligonucleotide
guuaggggaacccuuggau

SEQ ID NO: 1518612 - RNA, 19 nt, Artificial Sequence
  Description of Artificial Sequence: Synthetic oligonucleotide
gugguuggcguaguauacc

SEQ ID NO: 1518613 - RNA, 19 nt, Artificial Sequence
  Description of Artificial Sequence: Synthetic oligonucleotide
gguggagauacaaguauuc

SEQ ID NO: 1518614 - RNA, 19 nt, Artificial Sequence
  Description of Artificial Sequence: Synthetic oligonucleotide
ucccugaggaaucguuaau

SEQ ID NO: 1518615 - RNA, 19 nt, Artificial Sequence
  Description of Artificial Sequence: Synthetic oligonucleotide
gacauauucuuggccuuga

SEQ ID NO: 1518616 - RNA, 19 nt, Artificial Sequence
  Description of Artificial Sequence: Synthetic oligonucleotide
cugucucuucgcucugagc

SEQ ID NO: 1518617 - RNA, 19 nt, Artificial Sequence
  Description of Artificial Sequence: Synthetic oligonucleotide
ucguggggagaggcgacgg

SEQ ID NO: 1518618 - RNA, 19 nt, Artificial Sequence
  Description of Artificial Sequence: Synthetic oligonucleotide
uaguuggcuuuguuggauu

SEQ ID NO: 1518619 - RNA, 19 nt, Artificial Sequence
  Description of Artificial Sequence: Synthetic oligonucleotide
gguuuucggauguucccac

SEQ ID NO: 1518620 - RNA, 19 nt, Artificial Sequence
  Description of Artificial Sequence: Synthetic oligonucleotide
uuuggcgguuucgaacccu

SEQ ID NO: 1518621 - RNA, 19 nt, Artificial Sequence
  Description of Artificial Sequence: Synthetic oligonucleotide
uggccaaggugaacaguaa

SEQ ID NO: 1518622 - RNA, 19 nt, Artificial Sequence
  Description of Artificial Sequence: Synthetic oligonucleotide
gugguucucuccucccagc

SEQ ID NO: 1518623 - RNA, 19 nt, Artificial Sequence
  Description of Artificial Sequence: Synthetic oligonucleotide
guauacccagccguccuug

SEQ ID NO: 1518624 - RNA, 19 nt, Artificial Sequence
  Description of Artificial Sequence: Synthetic oligonucleotide
aguauacccagccguccuu

SEQ ID NO: 1518625 - RNA, 19 nt, Artificial Sequence
  Description of Artificial Sequence: Synthetic oligonucleotide
uucgaacccuauuccugaa

SEQ ID NO: 1518626 - RNA, 19 nt, Artificial Sequence
  Description of Artificial Sequence: Synthetic oligonucleotide
ggcgguggugcuaccaucg

SEQ ID NO: 1518627 - RNA, 19 nt, Artificial Sequence
  Description of Artificial Sequence: Synthetic oligonucleotide
ggaacccuuggaugauggg

SEQ ID NO: 1518628 - RNA, 19 nt, Artificial Sequence
  Description of Artificial Sequence: Synthetic oligonucleotide
caaaacuacagggcucuga

SEQ ID NO: 1518629 - RNA, 19 nt, Artificial Sequence
  Description of Artificial Sequence: Synthetic oligonucleotide
acgacgacacgagcagggg

SEQ ID NO: 1518630 - RNA, 19 nt, Artificial Sequence
  Description of Artificial Sequence: Synthetic oligonucleotide
ggaaucguuaauaucugua

SEQ ID NO: 1518631 - RNA, 19 nt, Artificial Sequence
  Description of Artificial Sequence: Synthetic oligonucleotide
aagcacaugaagagacaua

SEQ ID NO: 1518632 - RNA, 19 nt, Artificial Sequence
  Description of Artificial Sequence: Synthetic oligonucleotide
gaguuccgaugaauggaug

SEQ ID NO: 1518633 - RNA, 19 nt, Artificial Sequence
  Description of Artificial Sequence: Synthetic oligonucleotide
caggcaacggcagcaguug

SEQ ID NO: 1518634 - RNA, 19 nt, Artificial Sequence
  Description of Artificial Sequence: Synthetic oligonucleotide
ugaccccucguggggagag

SEQ ID NO: 1518635 - RNA, 19 nt, Artificial Sequence
  Description of Artificial Sequence: Synthetic oligonucleotide
auacccagccguccuuggu

SEQ ID NO: 1518636 - RNA, 19 nt, Artificial Sequence
  Description of Artificial Sequence: Synthetic oligonucleotide
cucucgcugagauccccac

SEQ ID NO: 1518637 - RNA, 19 nt, Artificial Sequence
  Description of Artificial Sequence: Synthetic oligonucleotide
uaccuucaaccgcgccgcg

SEQ ID NO: 1518638 - RNA, 19 nt, Artificial Sequence
  Description of Artificial Sequence: Synthetic oligonucleotide
aggguuaggggaacccuug

SEQ ID NO: 1518639 - RNA, 19 nt, Artificial Sequence
  Description of Artificial Sequence: Synthetic oligonucleotide
ggccuugaacgcuucagca

SEQ ID NO: 1518640 - RNA, 19 nt, Artificial Sequence
  Description of Artificial Sequence: Synthetic oligonucleotide
acacgagcaggggcugagc

SEQ ID NO: 1518641 - RNA, 19 nt, Artificial Sequence
  Description of Artificial Sequence: Synthetic oligonucleotide
gcgacacaaaacauccugc

SEQ ID NO: 1518642 - RNA, 19 nt, Artificial Sequence
  Description of Artificial Sequence: Synthetic oligonucleotide
ggguuaggggaacccuugg

SEQ ID NO: 1518643 - RNA, 19 nt, Artificial Sequence
  Description of Artificial Sequence: Synthetic oligonucleotide
acucuaccuucaaccgcgc

SEQ ID NO: 1518644 - RNA, 19 nt, Artificial Sequence
  Description of Artificial Sequence: Synthetic oligonucleotide
gcgacggugcagcucauug

SEQ ID NO: 1518645 - RNA, 19 nt, Artificial Sequence
  Description of Artificial Sequence: Synthetic oligonucleotide
aagccagcauggcccagua

SEQ ID NO: 1518646 - RNA, 19 nt, Artificial Sequence
  Description of Artificial Sequence: Synthetic oligonucleotide
uggggcuagcagugaugag

SEQ ID NO: 1518647 - RNA, 19 nt, Artificial Sequence
  Description of Artificial Sequence: Synthetic oligonucleotide
gcuaccaucguaucucugu

SEQ ID NO: 1518648 - RNA, 19 nt, Artificial Sequence
  Description of Artificial Sequence: Synthetic oligonucleotide
gcaguuguugaaauacauc

SEQ ID NO: 1518649 - RNA, 19 nt, Artificial Sequence
  Description of Artificial Sequence: Synthetic oligonucleotide
cuugaacgcuucagcaaaa

SEQ ID NO: 1518650 - RNA, 19 nt, Artificial Sequence
  Description of Artificial Sequence: Synthetic oligonucleotide
acuguccgugucguccagg

SEQ ID NO: 1518651 - RNA, 19 nt, Artificial Sequence
  Description of Artificial Sequence: Synthetic oligonucleotide
augcgggauacugccucac

SEQ ID NO: 1518652 - RNA, 19 nt, Artificial Sequence
  Description of Artificial Sequence: Synthetic oligonucleotide
ugccaaucuuggguccaag

SEQ ID NO: 1518653 - RNA, 19 nt, Artificial Sequence
  Description of Artificial Sequence: Synthetic oligonucleotide
uacugccucacuggcucug

SEQ ID NO: 1518654 - RNA, 19 nt, Artificial Sequence
  Description of Artificial Sequence: Synthetic oligonucleotide
guccaggccggcguagcgg

SEQ ID NO: 1518655 - RNA, 19 nt, Artificial Sequence
  Description of Artificial Sequence: Synthetic oligonucleotide
ccgguuuucggauguuccc

SEQ ID NO: 1518656 - RNA, 19 nt, Artificial Sequence
  Description of Artificial Sequence: Synthetic oligonucleotide
ggacaagguagaagugucc

SEQ ID NO: 1518657 - RNA, 19 nt, Artificial Sequence
  Description of Artificial Sequence: Synthetic oligonucleotide
guccccgcauuacacacaa

SEQ ID NO: 1518658 - RNA, 19 nt, Artificial Sequence
  Description of Artificial Sequence: Synthetic oligonucleotide
cauucucgucagucucuug

SEQ ID NO: 1518659 - RNA, 19 nt, Artificial Sequence
  Description of Artificial Sequence: Synthetic oligonucleotide
ccaggaucacaugugcacc

SEQ ID NO: 1518660 - RNA, 19 nt, Artificial Sequence
  Description of Artificial Sequence: Synthetic oligonucleotide
gguuaggggaacccuugga

SEQ ID NO: 1518661 - RNA, 19 nt, Artificial Sequence
  Description of Artificial Sequence: Synthetic oligonucleotide
gcuccgguaaccaggacca

SEQ ID NO: 1518662 - RNA, 19 nt, Artificial Sequence
  Description of Artificial Sequence: Synthetic oligonucleotide
gcaaaauguugcacgcuac

SEQ ID NO: 1518663 - RNA, 19 nt, Artificial Sequence
  Description of Artificial Sequence: Synthetic oligonucleotide
ccccagucgauccuggaug

SEQ ID NO: 1518664 - RNA, 19 nt, Artificial Sequence
  Description of Artificial Sequence: Synthetic oligonucleotide
ccgguaaccaggaccacuc

SEQ ID NO: 1518665 - RNA, 19 nt, Artificial Sequence
  Description of Artificial Sequence: Synthetic oligonucleotide
aucguaucucugucuggua

SEQ ID NO: 1518666 - RNA, 19 nt, Artificial Sequence
  Description of Artificial Sequence: Synthetic oligonucleotide
aggcaacggcagcaguugu

SEQ ID NO: 1518667 - RNA, 19 nt, Artificial Sequence
  Description of Artificial Sequence: Synthetic oligonucleotide
gcggagagcugccauggug

SEQ ID NO: 1518668 - RNA, 19 nt, Artificial Sequence
  Description of Artificial Sequence: Synthetic oligonucleotide
ccaucguaucucugucugg

SEQ ID NO: 1518669 - RNA, 19 nt, Artificial Sequence
  Description of Artificial Sequence: Synthetic oligonucleotide
gccaugguggagauacaag

SEQ ID NO: 1518670 - RNA, 19 nt, Artificial Sequence
  Description of Artificial Sequence: Synthetic oligonucleotide
ggggcugagcgacacaaaa

SEQ ID NO: 1518671 - RNA, 19 nt, Artificial Sequence
  Description of Artificial Sequence: Synthetic oligonucleotide
ggaugaguacaucauguuu

SEQ ID NO: 1518672 - RNA, 19 nt, Artificial Sequence
  Description of Artificial Sequence: Synthetic oligonucleotide
ccuugaacgcuucagcaaa

SEQ ID NO: 1518673 - RNA, 19 nt, Artificial Sequence
  Description of Artificial Sequence: Synthetic oligonucleotide
caucguaucucugucuggu

SEQ ID NO: 1518674 - RNA, 19 nt, Artificial Sequence
  Description of Artificial Sequence: Synthetic oligonucleotide
uggcgguggugcuaccauc

SEQ ID NO: 1518675 - RNA, 19 nt, Artificial Sequence
  Description of Artificial Sequence: Synthetic oligonucleotide
cguaguauacccagccguc

SEQ ID NO: 1518676 - RNA, 19 nt, Artificial Sequence
  Description of Artificial Sequence: Synthetic oligonucleotide
ugccgguuuucggauguuc

SEQ ID NO: 1518677 - RNA, 19 nt, Artificial Sequence
  Description of Artificial Sequence: Synthetic oligonucleotide
cacaguaaaugccaaucuu

SEQ ID NO: 1518678 - RNA, 19 nt, Artificial Sequence
  Description of Artificial Sequence: Synthetic oligonucleotide
gauccccacagggcccggg

SEQ ID NO: 1518679 - RNA, 19 nt, Artificial Sequence
  Description of Artificial Sequence: Synthetic oligonucleotide
gccgguuuucggauguucc

SEQ ID NO: 1518680 - RNA, 19 nt, Artificial Sequence
  Description of Artificial Sequence: Synthetic oligonucleotide
guggugcuaccaucguauc

SEQ ID NO: 1518681 - RNA, 19 nt, Artificial Sequence
  Description of Artificial Sequence: Synthetic oligonucleotide
guagacaguuguagcagcu

SEQ ID NO: 1518682 - RNA, 19 nt, Artificial Sequence
  Description of Artificial Sequence: Synthetic oligonucleotide
ugucguccaggccggcgua

SEQ ID NO: 1518683 - RNA, 19 nt, Artificial Sequence
  Description of Artificial Sequence: Synthetic oligonucleotide
ccaugguggagauacaagu

SEQ ID NO: 1518684 - RNA, 19 nt, Artificial Sequence
  Description of Artificial Sequence: Synthetic oligonucleotide
gcguaguauacccagccgu

SEQ ID NO: 1518685 - RNA, 19 nt, Artificial Sequence
  Description of Artificial Sequence: Synthetic oligonucleotide
augugaccccucgugggga

SEQ ID NO: 1518686 - RNA, 19 nt, Artificial Sequence
  Description of Artificial Sequence: Synthetic oligonucleotide
ggcgacugcacaguagaca

SEQ ID NO: 1518687 - RNA, 19 nt, Artificial Sequence
  Description of Artificial Sequence: Synthetic oligonucleotide
ggcaaaucuccugcaacuc

SEQ ID NO: 1518688 - RNA, 19 nt, Artificial Sequence
  Description of Artificial Sequence: Synthetic oligonucleotide
gccaucuuucgugaggguc

SEQ ID NO: 1518689 - RNA, 19 nt, Artificial Sequence
  Description of Artificial Sequence: Synthetic oligonucleotide
cuucgcucugagccucuuc

SEQ ID NO: 1518690 - RNA, 19 nt, Artificial Sequence
  Description of Artificial Sequence: Synthetic oligonucleotide
cuuuugccgguuuucggau

SEQ ID NO: 1518691 - RNA, 19 nt, Artificial Sequence
  Description of Artificial Sequence: Synthetic oligonucleotide
auaagccagcauggcccag

SEQ ID NO: 1518692 - RNA, 19 nt, Artificial Sequence
  Description of Artificial Sequence: Synthetic oligonucleotide
cccuccgaggccuuccagc

SEQ ID NO: 1518693 - RNA, 19 nt, Artificial Sequence
  Description of Artificial Sequence: Synthetic oligonucleotide
cgguuucgaacccuauucc

SEQ ID NO: 1518694 - RNA, 19 nt, Artificial Sequence
  Description of Artificial Sequence: Synthetic oligonucleotide
acccaugaguuccgaugaa

SEQ ID NO: 1518695 - RNA, 19 nt, Artificial Sequence
  Description of Artificial Sequence: Synthetic oligonucleotide
caccucagcaacucacucu

SEQ ID NO: 1518696 - RNA, 19 nt, Artificial Sequence
  Description of Artificial Sequence: Synthetic oligonucleotide
uccuacaggccaggaucac

SEQ ID NO: 1518697 - RNA, 19 nt, Artificial Sequence
  Description of Artificial Sequence: Synthetic oligonucleotide
cuuccaggaaugcgggaua

SEQ ID NO: 1518698 - RNA, 19 nt, Artificial Sequence
  Description of Artificial Sequence: Synthetic oligonucleotide
caccgggucaccucagcaa

SEQ ID NO: 1518699 - RNA, 19 nt, Artificial Sequence
  Description of Artificial Sequence: Synthetic oligonucleotide
aggggcgacugcacaguag

SEQ ID NO: 1518700 - RNA, 19 nt, Artificial Sequence
  Description of Artificial Sequence: Synthetic oligonucleotide
gccuugaacgcuucagcaa

SEQ ID NO: 1518701 - RNA, 19 nt, Artificial Sequence
  Description of Artificial Sequence: Synthetic oligonucleotide
uggcgguuucgaacccuau

SEQ ID NO: 1518702 - RNA, 19 nt, Artificial Sequence
  Description of Artificial Sequence: Synthetic oligonucleotide
gguggugcuaccaucguau

SEQ ID NO: 1518703 - RNA, 19 nt, Artificial Sequence
  Description of Artificial Sequence: Synthetic oligonucleotide
auucaccgggucaccucag

SEQ ID NO: 1518704 - RNA, 19 nt, Artificial Sequence
  Description of Artificial Sequence: Synthetic oligonucleotide
cugugggacucagaagaga

SEQ ID NO: 1518705 - RNA, 19 nt, Artificial Sequence
  Description of Artificial Sequence: Synthetic oligonucleotide
gcuacggagcacagccagg

SEQ ID NO: 1518706 - RNA, 19 nt, Artificial Sequence
  Description of Artificial Sequence: Synthetic oligonucleotide
caacggcagcaguuguuga

SEQ ID NO: 1518707 - RNA, 19 nt, Artificial Sequence
  Description of Artificial Sequence: Synthetic oligonucleotide
agccucucgcugagauccc

SEQ ID NO: 1518708 - RNA, 19 nt, Artificial Sequence
  Description of Artificial Sequence: Synthetic oligonucleotide
auggcccaguagucacucu

SEQ ID NO: 1518709 - RNA, 19 nt, Artificial Sequence
  Description of Artificial Sequence: Synthetic oligonucleotide
cgacggugcagcucauugg

SEQ ID NO: 1518710 - RNA, 19 nt, Artificial Sequence
  Description of Artificial Sequence: Synthetic oligonucleotide
caucuuucgugagggucca

SEQ ID NO: 1518711 - RNA, 19 nt, Artificial Sequence
  Description of Artificial Sequence: Synthetic oligonucleotide
ggaccacucucccugugaa

SEQ ID NO: 1518712 - RNA, 19 nt, Artificial Sequence
  Description of Artificial Sequence: Synthetic oligonucleotide
uugcuccgguaaccaggac

SEQ ID NO: 1518713 - RNA, 19 nt, Artificial Sequence
  Description of Artificial Sequence: Synthetic oligonucleotide
uugcauggacuuggugaau

SEQ ID NO: 1518714 - RNA, 19 nt, Artificial Sequence
  Description of Artificial Sequence: Synthetic oligonucleotide
guauacccaugaguuccga

SEQ ID NO: 1518715 - RNA, 19 nt, Artificial Sequence
  Description of Artificial Sequence: Synthetic oligonucleotide
guagucacucugagaugga

SEQ ID NO: 1518716 - RNA, 19 nt, Artificial Sequence
  Description of Artificial Sequence: Synthetic oligonucleotide
cgcuacggagcacagccag

SEQ ID NO: 1518717 - RNA, 19 nt, Artificial Sequence
  Description of Artificial Sequence: Synthetic oligonucleotide
cuacggagcacagccaggu

SEQ ID NO: 1518718 - RNA, 19 nt, Artificial Sequence
  Description of Artificial Sequence: Synthetic oligonucleotide
caguaacauguauacccau

SEQ ID NO: 1518719 - RNA, 19 nt, Artificial Sequence
  Description of Artificial Sequence: Synthetic oligonucleotide
gaccccucguggggagagg

SEQ ID NO: 1518720 - RNA, 19 nt, Artificial Sequence
  Description of Artificial Sequence: Synthetic oligonucleotide
gaugagccucucgcugaga

SEQ ID NO: 1518721 - RNA, 19 nt, Artificial Sequence
  Description of Artificial Sequence: Synthetic oligonucleotide
gugcuaccaucguaucucu

SEQ ID NO: 1518722 - RNA, 19 nt, Artificial Sequence
  Description of Artificial Sequence: Synthetic oligonucleotide
aggggaacccuuggaugau

SEQ ID NO: 1518723 - RNA, 19 nt, Artificial Sequence
  Description of Artificial Sequence: Synthetic oligonucleotide
cagcucaggggcgacugca

SEQ ID NO: 1518724 - RNA, 19 nt, Artificial Sequence
  Description of Artificial Sequence: Synthetic oligonucleotide
cuccgaggccuuccagcuc

SEQ ID NO: 1518725 - RNA, 19 nt, Artificial Sequence
  Description of Artificial Sequence: Synthetic oligonucleotide
ccugaggaaucguuaauau

SEQ ID NO: 1518726 - RNA, 19 nt, Artificial Sequence
  Description of Artificial Sequence: Synthetic oligonucleotide
cugcaacucgucuucuuuu

SEQ ID NO: 1518727 - RNA, 19 nt, Artificial Sequence
  Description of Artificial Sequence: Synthetic oligonucleotide
aucuuucgugaggguccag

SEQ ID NO: 1518728 - RNA, 19 nt, Artificial Sequence
  Description of Artificial Sequence: Synthetic oligonucleotide
ggaguuggacaagguagaa

SEQ ID NO: 1518729 - RNA, 19 nt, Artificial Sequence
  Description of Artificial Sequence: Synthetic oligonucleotide
cccagucgauccuggauga

SEQ ID NO: 1518730 - RNA, 19 nt, Artificial Sequence
  Description of Artificial Sequence: Synthetic oligonucleotide
gucgauccuggaugagccu

SEQ ID NO: 1518731 - RNA, 19 nt, Artificial Sequence
  Description of Artificial Sequence: Synthetic oligonucleotide
agauccccacagggcccgg

SEQ ID NO: 1518732 - RNA, 19 nt, Artificial Sequence
  Description of Artificial Sequence: Synthetic oligonucleotide
ggcccaguagucacucuga

SEQ ID NO: 1518733 - RNA, 19 nt, Artificial Sequence
  Description of Artificial Sequence: Synthetic oligonucleotide
cggcguagcggagagcugc

SEQ ID NO: 1518734 - RNA, 19 nt, Artificial Sequence
  Description of Artificial Sequence: Synthetic oligonucleotide
gggacucagaagagaccac

SEQ ID NO: 1518735 - RNA, 19 nt, Artificial Sequence
  Description of Artificial Sequence: Synthetic oligonucleotide
cuccccagucgauccugga

SEQ ID NO: 1518736 - RNA, 19 nt, Artificial Sequence
  Description of Artificial Sequence: Synthetic oligonucleotide
ggccaggaucacaugugca

SEQ ID NO: 1518737 - RNA, 19 nt, Artificial Sequence
  Description of Artificial Sequence: Synthetic oligonucleotide
acgcuacggagcacagcca

SEQ ID NO: 1518738 - RNA, 19 nt, Artificial Sequence
  Description of Artificial Sequence: Synthetic oligonucleotide
ccaaggugaacaguaacau

SEQ ID NO: 1518739 - RNA, 19 nt, Artificial Sequence
  Description of Artificial Sequence: Synthetic oligonucleotide
ggcguagcggagagcugcc

SEQ ID NO: 1518740 - RNA, 19 nt, Artificial Sequence
  Description of Artificial Sequence: Synthetic oligonucleotide
ccacgacgacacgagcagg

SEQ ID NO: 1518741 - RNA, 19 nt, Artificial Sequence
  Description of Artificial Sequence: Synthetic oligonucleotide
ccucguggggagaggcgac

SEQ ID NO: 1518742 - RNA, 19 nt, Artificial Sequence
  Description of Artificial Sequence: Synthetic oligonucleotide
gccggcguagcggagagcu

SEQ ID NO: 1518743 - RNA, 19 nt, Artificial Sequence
  Description of Artificial Sequence: Synthetic oligonucleotide
cuccgguaaccaggaccac

SEQ ID NO: 1518744 - RNA, 19 nt, Artificial Sequence
  Description of Artificial Sequence: Synthetic oligonucleotide
ggcggcugaggucaaguuu

SEQ ID NO: 1518745 - RNA, 19 nt, Artificial Sequence
  Description of Artificial Sequence: Synthetic oligonucleotide
uugccgguuuucggauguu

SEQ ID NO: 1518746 - RNA, 19 nt, Artificial Sequence
  Description of Artificial Sequence: Synthetic oligonucleotide
gcacgcuacggagcacagc

SEQ ID NO: 1518747 - RNA, 19 nt, Artificial Sequence
  Description of Artificial Sequence: Synthetic oligonucleotide
cuuguccauucucgucagu

SEQ ID NO: 1518748 - RNA, 19 nt, Artificial Sequence
  Description of Artificial Sequence: Synthetic oligonucleotide
ggcgguuucgaacccuauu

SEQ ID NO: 1518749 - RNA, 19 nt, Artificial Sequence
  Description of Artificial Sequence: Synthetic oligonucleotide
gcugagcgacacaaaacau

SEQ ID NO: 1518750 - RNA, 19 nt, Artificial Sequence
  Description of Artificial Sequence: Synthetic oligonucleotide
ccagucgauccuggaugag

SEQ ID NO: 1518751 - RNA, 19 nt, Artificial Sequence
  Description of Artificial Sequence: Synthetic oligonucleotide
caggggcgacugcacagua

SEQ ID NO: 1518752 - RNA, 19 nt, Artificial Sequence
  Description of Artificial Sequence: Synthetic oligonucleotide
cguaucucugucugguagu

SEQ ID NO: 1518753 - RNA, 19 nt, Artificial Sequence
  Description of Artificial Sequence: Synthetic oligonucleotide
gguggucuccaggccaucu

SEQ ID NO: 1518754 - RNA, 19 nt, Artificial Sequence
  Description of Artificial Sequence: Synthetic oligonucleotide
ggaaugcgggauacugccu

SEQ ID NO: 1518755 - RNA, 19 nt, Artificial Sequence
  Description of Artificial Sequence: Synthetic oligonucleotide
gugaccccucguggggaga

SEQ ID NO: 1518756 - RNA, 19 nt, Artificial Sequence
  Description of Artificial Sequence: Synthetic oligonucleotide
cucuucgcucugagccucu

SEQ ID NO: 1518757 - RNA, 19 nt, Artificial Sequence
  Description of Artificial Sequence: Synthetic oligonucleotide
cgaacccuauuccugaauu

SEQ ID NO: 1518758 - RNA, 19 nt, Artificial Sequence
  Description of Artificial Sequence: Synthetic oligonucleotide
ggcaggcaacggcagcagu

SEQ ID NO: 1518759 - RNA, 19 nt, Artificial Sequence
  Description of Artificial Sequence: Synthetic oligonucleotide
ccucagugugguuggcgua

SEQ ID NO: 1518760 - RNA, 19 nt, Artificial Sequence
  Description of Artificial Sequence: Synthetic oligonucleotide
ggacuccccagucgauccu

SEQ ID NO: 1518761 - RNA, 19 nt, Artificial Sequence
  Description of Artificial Sequence: Synthetic oligonucleotide
ccaggccggcguagcggag

SEQ ID NO: 1518762 - RNA, 19 nt, Artificial Sequence
  Description of Artificial Sequence: Synthetic oligonucleotide
ccggcguagcggagagcug

SEQ ID NO: 1518763 - RNA, 19 nt, Artificial Sequence
  Description of Artificial Sequence: Synthetic oligonucleotide
ccgaggccuuccagcucag

SEQ ID NO: 1518764 - RNA, 19 nt, Artificial Sequence
  Description of Artificial Sequence: Synthetic oligonucleotide
ggcaacggcagcaguuguu

SEQ ID NO: 1518765 - RNA, 19 nt, Artificial Sequence
  Description of Artificial Sequence: Synthetic oligonucleotide
gcaaaggauuuggcgguuu

SEQ ID NO: 1518766 - RNA, 19 nt, Artificial Sequence
  Description of Artificial Sequence: Synthetic oligonucleotide
gcgguggugcuaccaucgu

SEQ ID NO: 1518767 - RNA, 19 nt, Artificial Sequence
  Description of Artificial Sequence: Synthetic oligonucleotide
ggcaaaggauuuggcgguu

SEQ ID NO: 1518768 - RNA, 19 nt, Artificial Sequence
  Description of Artificial Sequence: Synthetic oligonucleotide
ccguccuuggugguucucu

SEQ ID NO: 1518769 - RNA, 19 nt, Artificial Sequence
  Description of Artificial Sequence: Synthetic oligonucleotide
ggccggcguagcggagagc

SEQ ID NO: 1518770 - RNA, 19 nt, Artificial Sequence
  Description of Artificial Sequence: Synthetic oligonucleotide
gccguccuuggugguucuc

SEQ ID NO: 1518771 - RNA, 19 nt, Artificial Sequence
  Description of Artificial Sequence: Synthetic oligonucleotide
cccgggcugucucuucgcu

SEQ ID NO: 1518772 - RNA, 19 nt, Artificial Sequence
  Description of Artificial Sequence: Synthetic oligonucleotide
ccgugucguccaggccggc

SEQ ID NO: 1518773 - RNA, 19 nt, Artificial Sequence
  Description of Artificial Sequence: Synthetic oligonucleotide
ggcgacggugcagcucauu

SEQ ID NO: 1518774 - RNA, 19 nt, Artificial Sequence
  Description of Artificial Sequence: Synthetic oligonucleotide
aagcaugugauuuauaacc

SEQ ID NO: 1518775 - RNA, 19 nt, Artificial Sequence
  Description of Artificial Sequence: Synthetic oligonucleotide
ucauagacuaauaugaucc

SEQ ID NO: 1518776 - RNA, 19 nt, Artificial Sequence
  Description of Artificial Sequence: Synthetic oligonucleotide
aguuuaauaaaagauauac

SEQ ID NO: 1518777 - RNA, 19 nt, Artificial Sequence
  Description of Artificial Sequence: Synthetic oligonucleotide
uguagaaagaccacgaugc

SEQ ID NO: 1518778 - RNA, 19 nt, Artificial Sequence
  Description of Artificial Sequence: Synthetic oligonucleotide
uuaaaaucccuucaaacag

SEQ ID NO: 1518779 - RNA, 19 nt, Artificial Sequence
  Description of Artificial Sequence: Synthetic oligonucleotide
uaugcuauuggauaacucg

SEQ ID NO: 1518780 - RNA, 19 nt, Artificial Sequence
  Description of Artificial Sequence: Synthetic oligonucleotide
auacuuaucaaucaucuuc

SEQ ID NO: 1518781 - RNA, 19 nt, Artificial Sequence
  Description of Artificial Sequence: Synthetic oligonucleotide
uuuauaacccaccuuaccc

SEQ ID NO: 1518782 - RNA, 19 nt, Artificial Sequence
  Description of Artificial Sequence: Synthetic oligonucleotide
acaacgaggaaauacaguc

SEQ ID NO: 1518783 - RNA, 19 nt, Artificial Sequence
  Description of Artificial Sequence: Synthetic oligonucleotide
uaaauaaagaagaagccgu

SEQ ID NO: 1518784 - RNA, 19 nt, Artificial Sequence
  Description of Artificial Sequence: Synthetic oligonucleotide
agauauaccaaagauagag

SEQ ID NO: 1518785 - RNA, 19 nt, Artificial Sequence
  Description of Artificial Sequence: Synthetic oligonucleotide
uuuaccuugacuaaacaaa

SEQ ID NO: 1518786 - RNA, 19 nt, Artificial Sequence
  Description of Artificial Sequence: Synthetic oligonucleotide
aggaaauacaguccgaggg

SEQ ID NO: 1518787 - RNA, 19 nt, Artificial Sequence
  Description of Artificial Sequence: Synthetic oligonucleotide
aaucuaauuuucuucccuc

SEQ ID NO: 1518788 - RNA, 19 nt, Artificial Sequence
  Description of Artificial Sequence: Synthetic oligonucleotide
aacccaagaaaacuugaac

SEQ ID NO: 1518789 - RNA, 19 nt, Artificial Sequence
  Description of Artificial Sequence: Synthetic oligonucleotide
aaugucgucgacgaguuuc

SEQ ID NO: 1518790 - RNA, 19 nt, Artificial Sequence
  Description of Artificial Sequence: Synthetic oligonucleotide
uaaaaucccuucaaacagg

SEQ ID NO: 1518791 - RNA, 19 nt, Artificial Sequence
  Description of Artificial Sequence: Synthetic oligonucleotide
uacuuauuuaccuugacua

SEQ ID NO: 1518792 - RNA, 19 nt, Artificial Sequence
  Description of Artificial Sequence: Synthetic oligonucleotide
agauagaguucacaaauuc

SEQ ID NO: 1518793 - RNA, 19 nt, Artificial Sequence
  Description of Artificial Sequence: Synthetic oligonucleotide
ucauuacaaagauacagga

SEQ ID NO: 1518794 - RNA, 19 nt, Artificial Sequence
  Description of Artificial Sequence: Synthetic oligonucleotide
uaguguauagcugacuugg

SEQ ID NO: 1518795 - RNA, 19 nt, Artificial Sequence
  Description of Artificial Sequence: Synthetic oligonucleotide
ugacuaaacaaaacagugc

SEQ ID NO: 1518796 - RNA, 19 nt, Artificial Sequence
  Description of Artificial Sequence: Synthetic oligonucleotide
gguuacaaagugcagaagg

SEQ ID NO: 1518797 - RNA, 19 nt, Artificial Sequence
  Description of Artificial Sequence: Synthetic oligonucleotide
uacuuaucaaucaucuuca

SEQ ID NO: 1518798 - RNA, 19 nt, Artificial Sequence
  Description of Artificial Sequence: Synthetic oligonucleotide
uaaaguacucaggagacag

SEQ ID NO: 1518799 - RNA, 19 nt, Artificial Sequence
  Description of Artificial Sequence: Synthetic oligonucleotide
uguagagagaguaugcuau

SEQ ID NO: 1518800 - RNA, 19 nt, Artificial Sequence
  Description of Artificial Sequence: Synthetic oligonucleotide
uuccgaagcauacuuauca

SEQ ID NO: 1518801 - RNA, 19 nt, Artificial Sequence
  Description of Artificial Sequence: Synthetic oligonucleotide
uuaguguagaaagaccacg

SEQ ID NO: 1518802 - RNA, 19 nt, Artificial Sequence
  Description of Artificial Sequence: Synthetic oligonucleotide
aacuugaacacagucuagg

SEQ ID NO: 1518803 - RNA, 19 nt, Artificial Sequence
  Description of Artificial Sequence: Synthetic oligonucleotide
uacauacuuauuuaccuug

SEQ ID NO: 1518804 - RNA, 19 nt, Artificial Sequence
  Description of Artificial Sequence: Synthetic oligonucleotide
ugugauuuauaacccaccu

SEQ ID NO: 1518805 - RNA, 19 nt, Artificial Sequence
  Description of Artificial Sequence: Synthetic oligonucleotide
ucauuaguguagaaagacc

SEQ ID NO: 1518806 - RNA, 19 nt, Artificial Sequence
  Description of Artificial Sequence: Synthetic oligonucleotide
uuaaaaucucuuauauagu

SEQ ID NO: 1518807 - RNA, 19 nt, Artificial Sequence
  Description of Artificial Sequence: Synthetic oligonucleotide
uauuggauaacucgcuucu

SEQ ID NO: 1518808 - RNA, 19 nt, Artificial Sequence
  Description of Artificial Sequence: Synthetic oligonucleotide
aaacggaacucgaagcacc

SEQ ID NO: 1518809 - RNA, 19 nt, Artificial Sequence
  Description of Artificial Sequence: Synthetic oligonucleotide
uuauuuaccuugacuaaac

SEQ ID NO: 1518810 - RNA, 19 nt, Artificial Sequence
  Description of Artificial Sequence: Synthetic oligonucleotide
aguaaaauguaacucuuaa

SEQ ID NO: 1518811 - RNA, 19 nt, Artificial Sequence
  Description of Artificial Sequence: Synthetic oligonucleotide
ugaaacggaacucgaagca

SEQ ID NO: 1518812 - RNA, 19 nt, Artificial Sequence
  Description of Artificial Sequence: Synthetic oligonucleotide
acccaagaaaacuugaaca

SEQ ID NO: 1518813 - RNA, 19 nt, Artificial Sequence
  Description of Artificial Sequence: Synthetic oligonucleotide
aacucgaagcaccgggccc

SEQ ID NO: 1518814 - RNA, 19 nt, Artificial Sequence
  Description of Artificial Sequence: Synthetic oligonucleotide
aagaccacgaugcuucuca

SEQ ID NO: 1518815 - RNA, 19 nt, Artificial Sequence
  Description of Artificial Sequence: Synthetic oligonucleotide
uuccuuaucagaaccaaaa

SEQ ID NO: 1518816 - RNA, 19 nt, Artificial Sequence
  Description of Artificial Sequence: Synthetic oligonucleotide
acgaguuucagaaauaucu

SEQ ID NO: 1518817 - RNA, 19 nt, Artificial Sequence
  Description of Artificial Sequence: Synthetic oligonucleotide
ugaagcgcuccaaugaggc

SEQ ID NO: 1518818 - RNA, 19 nt, Artificial Sequence
  Description of Artificial Sequence: Synthetic oligonucleotide
aacgugucgucggugaagc

SEQ ID NO: 1518819 - RNA, 19 nt, Artificial Sequence
  Description of Artificial Sequence: Synthetic oligonucleotide
uucauuaguguagaaagac

SEQ ID NO: 1518820 - RNA, 19 nt, Artificial Sequence
  Description of Artificial Sequence: Synthetic oligonucleotide
uagacuaauaugauccccu

SEQ ID NO: 1518821 - RNA, 19 nt, Artificial Sequence
  Description of Artificial Sequence: Synthetic oligonucleotide
aauaaagaagaagccguug

SEQ ID NO: 1518822 - RNA, 19 nt, Artificial Sequence
  Description of Artificial Sequence: Synthetic oligonucleotide
cauuaguguagaaagacca

SEQ ID NO: 1518823 - RNA, 19 nt, Artificial Sequence
  Description of Artificial Sequence: Synthetic oligonucleotide
uuauaacccaccuuaccca

SEQ ID NO: 1518824 - RNA, 19 nt, Artificial Sequence
  Description of Artificial Sequence: Synthetic oligonucleotide
cuugauuuuaaaagucaac

SEQ ID NO: 1518825 - RNA, 19 nt, Artificial Sequence
  Description of Artificial Sequence: Synthetic oligonucleotide
auaccaaagauagaguuca

SEQ ID NO: 1518826 - RNA, 19 nt, Artificial Sequence
  Description of Artificial Sequence: Synthetic oligonucleotide
uauuugcacuucauuagug

SEQ ID NO: 1518827 - RNA, 19 nt, Artificial Sequence
  Description of Artificial Sequence: Synthetic oligonucleotide
agcaugugauuuauaaccc

SEQ ID NO: 1518828 - RNA, 19 nt, Artificial Sequence
  Description of Artificial Sequence: Synthetic oligonucleotide
gaagcauacuuaucaauca

SEQ ID NO: 1518829 - RNA, 19 nt, Artificial Sequence
  Description of Artificial Sequence: Synthetic oligonucleotide
cacagucuaggcuucauag

SEQ ID NO: 1518830 - RNA, 19 nt, Artificial Sequence
  Description of Artificial Sequence: Synthetic oligonucleotide
cauuuaaaguacucaggag

SEQ ID NO: 1518831 - RNA, 19 nt, Artificial Sequence
  Description of Artificial Sequence: Synthetic oligonucleotide
gaggaaauacaguccgagg

SEQ ID NO: 1518832 - RNA, 19 nt, Artificial Sequence
  Description of Artificial Sequence: Synthetic oligonucleotide
caugugauuuauaacccac

SEQ ID NO: 1518833 - RNA, 19 nt, Artificial Sequence
  Description of Artificial Sequence: Synthetic oligonucleotide
aguguaggcacauuacaca

SEQ ID NO: 1518834 - RNA, 19 nt, Artificial Sequence
  Description of Artificial Sequence: Synthetic oligonucleotide
ucgucgacgaguuucagaa

SEQ ID NO: 1518835 - RNA, 19 nt, Artificial Sequence
  Description of Artificial Sequence: Synthetic oligonucleotide
augcuauuggauaacucgc

SEQ ID NO: 1518836 - RNA, 19 nt, Artificial Sequence
  Description of Artificial Sequence: Synthetic oligonucleotide
caagucaucgaaugucucc

SEQ ID NO: 1518837 - RNA, 19 nt, Artificial Sequence
  Description of Artificial Sequence: Synthetic oligonucleotide
gauaacucgcuucucaaaa

SEQ ID NO: 1518838 - RNA, 19 nt, Artificial Sequence
  Description of Artificial Sequence: Synthetic oligonucleotide
uggaacaacgaggaaauac

SEQ ID NO: 1518839 - RNA, 19 nt, Artificial Sequence
  Description of Artificial Sequence: Synthetic oligonucleotide
gaagcaugugauuuauaac

SEQ ID NO: 1518840 - RNA, 19 nt, Artificial Sequence
  Description of Artificial Sequence: Synthetic oligonucleotide
acaugauugcagugcacac

SEQ ID NO: 1518841 - RNA, 19 nt, Artificial Sequence
  Description of Artificial Sequence: Synthetic oligonucleotide
aauacaguccgaggggaag

SEQ ID NO: 1518842 - RNA, 19 nt, Artificial Sequence
  Description of Artificial Sequence: Synthetic oligonucleotide
cacaccagaagaaccacgc

SEQ ID NO: 1518843 - RNA, 19 nt, Artificial Sequence
  Description of Artificial Sequence: Synthetic oligonucleotide
uuaguguauagcugacuug

SEQ ID NO: 1518844 - RNA, 19 nt, Artificial Sequence
  Description of Artificial Sequence: Synthetic oligonucleotide
acagucuaggcuucauagg

SEQ ID NO: 1518845 - RNA, 19 nt, Artificial Sequence
  Description of Artificial Sequence: Synthetic oligonucleotide
cauagacuaauaugauccc

SEQ ID NO: 1518846 - RNA, 19 nt, Artificial Sequence
  Description of Artificial Sequence: Synthetic oligonucleotide
ggaaauacaguccgagggg

SEQ ID NO: 1518847 - RNA, 19 nt, Artificial Sequence
  Description of Artificial Sequence: Synthetic oligonucleotide
aaaguacucaggagacagc

SEQ ID NO: 1518848 - RNA, 19 nt, Artificial Sequence
  Description of Artificial Sequence: Synthetic oligonucleotide
auuuuggcaagucaucgaa

SEQ ID NO: 1518849 - RNA, 19 nt, Artificial Sequence
  Description of Artificial Sequence: Synthetic oligonucleotide
ugagguaaugcuguuaaau

SEQ ID NO: 1518850 - RNA, 19 nt, Artificial Sequence
  Description of Artificial Sequence: Synthetic oligonucleotide
guguagaaagaccacgaug

SEQ ID NO: 1518851 - RNA, 19 nt, Artificial Sequence
  Description of Artificial Sequence: Synthetic oligonucleotide
gagaguaugcuauuggaua

SEQ ID NO: 1518852 - RNA, 19 nt, Artificial Sequence
  Description of Artificial Sequence: Synthetic oligonucleotide
ucucuuauauaguuucaaa

SEQ ID NO: 1518853 - RNA, 19 nt, Artificial Sequence
  Description of Artificial Sequence: Synthetic oligonucleotide
ugggagaaguccaucauua

SEQ ID NO: 1518854 - RNA, 19 nt, Artificial Sequence
  Description of Artificial Sequence: Synthetic oligonucleotide
gauugcagugcacacagaa

SEQ ID NO: 1518855 - RNA, 19 nt, Artificial Sequence
  Description of Artificial Sequence: Synthetic oligonucleotide
agaguaugcuauuggauaa

SEQ ID NO: 1518856 - RNA, 19 nt, Artificial Sequence
  Description of Artificial Sequence: Synthetic oligonucleotide
ugcuguuaaaucucuccug

SEQ ID NO: 1518857 - RNA, 19 nt, Artificial Sequence
  Description of Artificial Sequence: Synthetic oligonucleotide
augugauuuauaacccacc

SEQ ID NO: 1518858 - RNA, 19 nt, Artificial Sequence
  Description of Artificial Sequence: Synthetic oligonucleotide
ucuuccgaagcauacuuau

SEQ ID NO: 1518859 - RNA, 19 nt, Artificial Sequence
  Description of Artificial Sequence: Synthetic oligonucleotide
aaugggagaaguccaucau

SEQ ID NO: 1518860 - RNA, 19 nt, Artificial Sequence
  Description of Artificial Sequence: Synthetic oligonucleotide
cacagaaugguccccgccg

SEQ ID NO: 1518861 - RNA, 19 nt, Artificial Sequence
  Description of Artificial Sequence: Synthetic oligonucleotide
uaucaaucaucuucaucca

SEQ ID NO: 1518862 - RNA, 19 nt, Artificial Sequence
  Description of Artificial Sequence: Synthetic oligonucleotide
ucuguaauaggcugaggua

SEQ ID NO: 1518863 - RNA, 19 nt, Artificial Sequence
  Description of Artificial Sequence: Synthetic oligonucleotide
acaaagauacaggaugucu

SEQ ID NO: 1518864 - RNA, 19 nt, Artificial Sequence
  Description of Artificial Sequence: Synthetic oligonucleotide
gaacaacgaggaaauacag

SEQ ID NO: 1518865 - RNA, 19 nt, Artificial Sequence
  Description of Artificial Sequence: Synthetic oligonucleotide
ugcuauuggauaacucgcu

SEQ ID NO: 1518866 - RNA, 19 nt, Artificial Sequence
  Description of Artificial Sequence: Synthetic oligonucleotide
uucccucuuagcucuacag

SEQ ID NO: 1518867 - RNA, 19 nt, Artificial Sequence
  Description of Artificial Sequence: Synthetic oligonucleotide
gauuuguguaggauagcag

SEQ ID NO: 1518868 - RNA, 19 nt, Artificial Sequence
  Description of Artificial Sequence: Synthetic oligonucleotide
aguuauucaaauacauacu

SEQ ID NO: 1518869 - RNA, 19 nt, Artificial Sequence
  Description of Artificial Sequence: Synthetic oligonucleotide
ucacaccacaauacucagg

SEQ ID NO: 1518870 - RNA, 19 nt, Artificial Sequence
  Description of Artificial Sequence: Synthetic oligonucleotide
aagcgcuccaaugaggcug

SEQ ID NO: 1518871 - RNA, 19 nt, Artificial Sequence
  Description of Artificial Sequence: Synthetic oligonucleotide
agugcagaaggaaauuguc

SEQ ID NO: 1518872 - RNA, 19 nt, Artificial Sequence
  Description of Artificial Sequence: Synthetic oligonucleotide
gagagaguaugcuauugga

SEQ ID NO: 1518873 - RNA, 19 nt, Artificial Sequence
  Description of Artificial Sequence: Synthetic oligonucleotide
cuauuggauaacucgcuuc

SEQ ID NO: 1518874 - RNA, 19 nt, Artificial Sequence
  Description of Artificial Sequence: Synthetic oligonucleotide
caguguaggcacauuacac

SEQ ID NO: 1518875 - RNA, 19 nt, Artificial Sequence
  Description of Artificial Sequence: Synthetic oligonucleotide
agcauacuuaucaaucauc

SEQ ID NO: 1518876 - RNA, 19 nt, Artificial Sequence
  Description of Artificial Sequence: Synthetic oligonucleotide
aaccgcaucccaguuaucu

SEQ ID NO: 1518877 - RNA, 19 nt, Artificial Sequence
  Description of Artificial Sequence: Synthetic oligonucleotide
agaaccgcaucccaguuau

SEQ ID NO: 1518878 - RNA, 19 nt, Artificial Sequence
  Description of Artificial Sequence: Synthetic oligonucleotide
ugucuaggcaaaugcauau

SEQ ID NO: 1518879 - RNA, 19 nt, Artificial Sequence
  Description of Artificial Sequence: Synthetic oligonucleotide
cuaauaugauccccuuggc

SEQ ID NO: 1518880 - RNA, 19 nt, Artificial Sequence
  Description of Artificial Sequence: Synthetic oligonucleotide
cucguaugcacucugucuc

SEQ ID NO: 1518881 - RNA, 19 nt, Artificial Sequence
  Description of Artificial Sequence: Synthetic oligonucleotide
uucucacaccacaauacuc

SEQ ID NO: 1518882 - RNA, 19 nt, Artificial Sequence
  Description of Artificial Sequence: Synthetic oligonucleotide
auacaggaugucuaggcaa

SEQ ID NO: 1518883 - RNA, 19 nt, Artificial Sequence
  Description of Artificial Sequence: Synthetic oligonucleotide
cucgcuucucaaaauauca

SEQ ID NO: 1518884 - RNA, 19 nt, Artificial Sequence
  Description of Artificial Sequence: Synthetic oligonucleotide
aagccguugucaugucuuc

SEQ ID NO: 1518885 - RNA, 19 nt, Artificial Sequence
  Description of Artificial Sequence: Synthetic oligonucleotide
gaaaacuugaacacagucu

SEQ ID NO: 1518886 - RNA, 19 nt, Artificial Sequence
  Description of Artificial Sequence: Synthetic oligonucleotide
acuuggguuacaaagugca

SEQ ID NO: 1518887 - RNA, 19 nt, Artificial Sequence
  Description of Artificial Sequence: Synthetic oligonucleotide
auacaguccgaggggaagc

SEQ ID NO: 1518888 - RNA, 19 nt, Artificial Sequence
  Description of Artificial Sequence: Synthetic oligonucleotide
uccauuuuggcaagucauc

SEQ ID NO: 1518889 - RNA, 19 nt, Artificial Sequence
  Description of Artificial Sequence: Synthetic oligonucleotide
ucguaguguagacauuuaa

SEQ ID NO: 1518890 - RNA, 19 nt, Artificial Sequence
  Description of Artificial Sequence: Synthetic oligonucleotide
uccgaggggaagcauguga

SEQ ID NO: 1518891 - RNA, 19 nt, Artificial Sequence
  Description of Artificial Sequence: Synthetic oligonucleotide
ucccagaucugcaaucuaa

SEQ ID NO: 1518892 - RNA, 19 nt, Artificial Sequence
  Description of Artificial Sequence: Synthetic oligonucleotide
aacggaacucgaagcaccg

SEQ ID NO: 1518893 - RNA, 19 nt, Artificial Sequence
  Description of Artificial Sequence: Synthetic oligonucleotide
aacaacgaggaaauacagu

SEQ ID NO: 1518894 - RNA, 19 nt, Artificial Sequence
  Description of Artificial Sequence: Synthetic oligonucleotide
ugcuucucacaccacaaua

SEQ ID NO: 1518895 - RNA, 19 nt, Artificial Sequence
  Description of Artificial Sequence: Synthetic oligonucleotide
gauuuauaacccaccuuac

SEQ ID NO: 1518896 - RNA, 19 nt, Artificial Sequence
  Description of Artificial Sequence: Synthetic oligonucleotide
acaaguuaguguauagcug

SEQ ID NO: 1518897 - RNA, 19 nt, Artificial Sequence
  Description of Artificial Sequence: Synthetic oligonucleotide
aaacaggauuuguguagga

SEQ ID NO: 1518898 - RNA, 19 nt, Artificial Sequence
  Description of Artificial Sequence: Synthetic oligonucleotide
ucucugaaacggaacucga

SEQ ID NO: 1518899 - RNA, 19 nt, Artificial Sequence
  Description of Artificial Sequence: Synthetic oligonucleotide
aaauaaagaagaagccguu

SEQ ID NO: 1518900 - RNA, 19 nt, Artificial Sequence
  Description of Artificial Sequence: Synthetic oligonucleotide
uagagagaguaugcuauug

SEQ ID NO: 1518901 - RNA, 19 nt, Artificial Sequence
  Description of Artificial Sequence: Synthetic oligonucleotide
acaccacaauacucagggc

SEQ ID NO: 1518902 - RNA, 19 nt, Artificial Sequence
  Description of Artificial Sequence: Synthetic oligonucleotide
uuaaaguacucaggagaca

SEQ ID NO: 1518903 - RNA, 19 nt, Artificial Sequence
  Description of Artificial Sequence: Synthetic oligonucleotide
auguggucuaggaggaggc

SEQ ID NO: 1518904 - RNA, 19 nt, Artificial Sequence
  Description of Artificial Sequence: Synthetic oligonucleotide
ucggacauguggucuagga

SEQ ID NO: 1518905 - RNA, 19 nt, Artificial Sequence
  Description of Artificial Sequence: Synthetic oligonucleotide
ucccucuuagcucuacagu

SEQ ID NO: 1518906 - RNA, 19 nt, Artificial Sequence
  Description of Artificial Sequence: Synthetic oligonucleotide
uggauaacucgcuucucaa

SEQ ID NO: 1518907 - RNA, 19 nt, Artificial Sequence
  Description of Artificial Sequence: Synthetic oligonucleotide
cccaagaaaacuugaacac

SEQ ID NO: 1518908 - RNA, 19 nt, Artificial Sequence
  Description of Artificial Sequence: Synthetic oligonucleotide
ucuccaaagcagccaguca

SEQ ID NO: 1518909 - RNA, 19 nt, Artificial Sequence
  Description of Artificial Sequence: Synthetic oligonucleotide
aacaggauuuguguaggau

SEQ ID NO: 1518910 - RNA, 19 nt, Artificial Sequence
  Description of Artificial Sequence: Synthetic oligonucleotide
caauacucagggcacacca

SEQ ID NO: 1518911 - RNA, 19 nt, Artificial Sequence
  Description of Artificial Sequence: Synthetic oligonucleotide
gaaacggaacucgaagcac

SEQ ID NO: 1518912 - RNA, 19 nt, Artificial Sequence
  Description of Artificial Sequence: Synthetic oligonucleotide
cagucuaggcuucauagga

SEQ ID NO: 1518913 - RNA, 19 nt, Artificial Sequence
  Description of Artificial Sequence: Synthetic oligonucleotide
auaacucgcuucucaaaau

SEQ ID NO: 1518914 - RNA, 19 nt, Artificial Sequence
  Description of Artificial Sequence: Synthetic oligonucleotide
aaggaaauugucacaugau

SEQ ID NO: 1518915 - RNA, 19 nt, Artificial Sequence
  Description of Artificial Sequence: Synthetic oligonucleotide
uuguguaggauagcagugu

SEQ ID NO: 1518916 - RNA, 19 nt, Artificial Sequence
  Description of Artificial Sequence: Synthetic oligonucleotide
uaggcuucauaggaauaag

SEQ ID NO: 1518917 - RNA, 19 nt, Artificial Sequence
  Description of Artificial Sequence: Synthetic oligonucleotide
ucuuagcucuacagucuug

SEQ ID NO: 1518918 - RNA, 19 nt, Artificial Sequence
  Description of Artificial Sequence: Synthetic oligonucleotide
gaagaaccacgccucccag

SEQ ID NO: 1518919 - RNA, 19 nt, Artificial Sequence
  Description of Artificial Sequence: Synthetic oligonucleotide
aguguagaaagaccacgau

SEQ ID NO: 1518920 - RNA, 19 nt, Artificial Sequence
  Description of Artificial Sequence: Synthetic oligonucleotide
cccaggauugcauauuugc

SEQ ID NO: 1518921 - RNA, 19 nt, Artificial Sequence
  Description of Artificial Sequence: Synthetic oligonucleotide
aguaugcuauuggauaacu

SEQ ID NO: 1518922 - RNA, 19 nt, Artificial Sequence
  Description of Artificial Sequence: Synthetic oligonucleotide
ucguaugcacucugucucc

SEQ ID NO: 1518923 - RNA, 19 nt, Artificial Sequence
  Description of Artificial Sequence: Synthetic oligonucleotide
acucgcuucucaaaauauc

SEQ ID NO: 1518924 - RNA, 19 nt, Artificial Sequence
  Description of Artificial Sequence: Synthetic oligonucleotide
uuucccaucggagcgucug

SEQ ID NO: 1518925 - RNA, 19 nt, Artificial Sequence
  Description of Artificial Sequence: Synthetic oligonucleotide
aagaagccguugucauguc

SEQ ID NO: 1518926 - RNA, 19 nt, Artificial Sequence
  Description of Artificial Sequence: Synthetic oligonucleotide
ugggaucucaggcucuggu

SEQ ID NO: 1518927 - RNA, 19 nt, Artificial Sequence
  Description of Artificial Sequence: Synthetic oligonucleotide
acagcaucggacauguggu

SEQ ID NO: 1518928 - RNA, 19 nt, Artificial Sequence
  Description of Artificial Sequence: Synthetic oligonucleotide
ucccaguguaggcacauua

SEQ ID NO: 1518929 - RNA, 19 nt, Artificial Sequence
  Description of Artificial Sequence: Synthetic oligonucleotide
ggugaagcgcuccaaugag

SEQ ID NO: 1518930 - RNA, 19 nt, Artificial Sequence
  Description of Artificial Sequence: Synthetic oligonucleotide
ucuaggcuucauaggaaua

SEQ ID NO: 1518931 - RNA, 19 nt, Artificial Sequence
  Description of Artificial Sequence: Synthetic oligonucleotide
auuuacaaguuaguguaua

SEQ ID NO: 1518932 - RNA, 19 nt, Artificial Sequence
  Description of Artificial Sequence: Synthetic oligonucleotide
ggaacaacgaggaaauaca

SEQ ID NO: 1518933 - RNA, 19 nt, Artificial Sequence
  Description of Artificial Sequence: Synthetic oligonucleotide
ucugccucguaguguagac

SEQ ID NO: 1518934 - RNA, 19 nt, Artificial Sequence
  Description of Artificial Sequence: Synthetic oligonucleotide
guuaaaucucuccugcccu

SEQ ID NO: 1518935 - RNA, 19 nt, Artificial Sequence
  Description of Artificial Sequence: Synthetic oligonucleotide
cagucaacagcaucggaca

SEQ ID NO: 1518936 - RNA, 19 nt, Artificial Sequence
  Description of Artificial Sequence: Synthetic oligonucleotide
gacuuggguuacaaagugc

SEQ ID NO: 1518937 - RNA, 19 nt, Artificial Sequence
  Description of Artificial Sequence: Synthetic oligonucleotide
aggauuuguguaggauagc

SEQ ID NO: 1518938 - RNA, 19 nt, Artificial Sequence
  Description of Artificial Sequence: Synthetic oligonucleotide
cacgaugcuucucacacca

SEQ ID NO: 1518939 - RNA, 19 nt, Artificial Sequence
  Description of Artificial Sequence: Synthetic oligonucleotide
uaaaucucuccugcccugc

SEQ ID NO: 1518940 - RNA, 19 nt, Artificial Sequence
  Description of Artificial Sequence: Synthetic oligonucleotide
ccagucaacagcaucggac

SEQ ID NO: 1518941 - RNA, 19 nt, Artificial Sequence
  Description of Artificial Sequence: Synthetic oligonucleotide
aucccaguuaucugcugug

SEQ ID NO: 1518942 - RNA, 19 nt, Artificial Sequence
  Description of Artificial Sequence: Synthetic oligonucleotide
aaccacgccucccagugua

SEQ ID NO: 1518943 - RNA, 19 nt, Artificial Sequence
  Description of Artificial Sequence: Synthetic oligonucleotide
caucggagcgucugccucg

SEQ ID NO: 1518944 - RNA, 19 nt, Artificial Sequence
  Description of Artificial Sequence: Synthetic oligonucleotide
aagauauaccaaagauaga

SEQ ID NO: 1518945 - RNA, 19 nt, Artificial Sequence
  Description of Artificial Sequence: Synthetic oligonucleotide
cuguaauaggcugagguaa

SEQ ID NO: 1518946 - RNA, 19 nt, Artificial Sequence
  Description of Artificial Sequence: Synthetic oligonucleotide
guagacauuuaaaguacuc

SEQ ID NO: 1518947 - RNA, 19 nt, Artificial Sequence
  Description of Artificial Sequence: Synthetic oligonucleotide
guuaguguauagcugacuu

SEQ ID NO: 1518948 - RNA, 19 nt, Artificial Sequence
  Description of Artificial Sequence: Synthetic oligonucleotide
gguaaugcuguuaaaucuc

SEQ ID NO: 1518949 - RNA, 19 nt, Artificial Sequence
  Description of Artificial Sequence: Synthetic oligonucleotide
auuggauaacucgcuucuc

SEQ ID NO: 1518950 - RNA, 19 nt, Artificial Sequence
  Description of Artificial Sequence: Synthetic oligonucleotide
cucgcagaacgugucgucg

SEQ ID NO: 1518951 - RNA, 19 nt, Artificial Sequence
  Description of Artificial Sequence: Synthetic oligonucleotide
guguaggauagcagugugg

SEQ ID NO: 1518952 - RNA, 19 nt, Artificial Sequence
  Description of Artificial Sequence: Synthetic oligonucleotide
cuuagcucuacagucuuga

SEQ ID NO: 1518953 - RNA, 19 nt, Artificial Sequence
  Description of Artificial Sequence: Synthetic oligonucleotide
aucucuuauauaguuucaa

SEQ ID NO: 1518954 - RNA, 19 nt, Artificial Sequence
  Description of Artificial Sequence: Synthetic oligonucleotide
gacauguggucuaggagga

SEQ ID NO: 1518955 - RNA, 19 nt, Artificial Sequence
  Description of Artificial Sequence: Synthetic oligonucleotide
uauagcugacuuggguuac

SEQ ID NO: 1518956 - RNA, 19 nt, Artificial Sequence
  Description of Artificial Sequence: Synthetic oligonucleotide
cagucuugauuuuaaaagu

SEQ ID NO: 1518957 - RNA, 19 nt, Artificial Sequence
  Description of Artificial Sequence: Synthetic oligonucleotide
gaacgugucgucggugaag

SEQ ID NO: 1518958 - RNA, 19 nt, Artificial Sequence
  Description of Artificial Sequence: Synthetic oligonucleotide
ggaauaagcuucaccauca

SEQ ID NO: 1518959 - RNA, 19 nt, Artificial Sequence
  Description of Artificial Sequence: Synthetic oligonucleotide
ccauuuuggcaagucaucg

SEQ ID NO: 1518960 - RNA, 19 nt, Artificial Sequence
  Description of Artificial Sequence: Synthetic oligonucleotide
agagaguaugcuauuggau

SEQ ID NO: 1518961 - RNA, 19 nt, Artificial Sequence
  Description of Artificial Sequence: Synthetic oligonucleotide
cgaagcauacuuaucaauc

SEQ ID NO: 1518962 - RNA, 19 nt, Artificial Sequence
  Description of Artificial Sequence: Synthetic oligonucleotide
accaucaaugggagaaguc

SEQ ID NO: 1518963 - RNA, 19 nt, Artificial Sequence
  Description of Artificial Sequence: Synthetic oligonucleotide
agaagccguugucaugucu

SEQ ID NO: 1518964 - RNA, 19 nt, Artificial Sequence
  Description of Artificial Sequence: Synthetic oligonucleotide
cauuuuggcaagucaucga

SEQ ID NO: 1518965 - RNA, 19 nt, Artificial Sequence
  Description of Artificial Sequence: Synthetic oligonucleotide
cacaugauugcagugcaca

SEQ ID NO: 1518966 - RNA, 19 nt, Artificial Sequence
  Description of Artificial Sequence: Synthetic oligonucleotide
cucccauucuucacaccag

SEQ ID NO: 1518967 - RNA, 19 nt, Artificial Sequence
  Description of Artificial Sequence: Synthetic oligonucleotide
accgcaucccaguuaucug

SEQ ID NO: 1518968 - RNA, 19 nt, Artificial Sequence
  Description of Artificial Sequence: Synthetic oligonucleotide
ucgacgaguuucagaaaua

SEQ ID NO: 1518969 - RNA, 19 nt, Artificial Sequence
  Description of Artificial Sequence: Synthetic oligonucleotide
aguuaguguauagcugacu

SEQ ID NO: 1518970 - RNA, 19 nt, Artificial Sequence
  Description of Artificial Sequence: Synthetic oligonucleotide
agcaccgggcccucuuuuc

SEQ ID NO: 1518971 - RNA, 19 nt, Artificial Sequence
  Description of Artificial Sequence: Synthetic oligonucleotide
cuuccgaagcauacuuauc

SEQ ID NO: 1518972 - RNA, 19 nt, Artificial Sequence
  Description of Artificial Sequence: Synthetic oligonucleotide
ggauuuguguaggauagca

SEQ ID NO: 1518973 - RNA, 19 nt, Artificial Sequence
  Description of Artificial Sequence: Synthetic oligonucleotide
gaguaugcuauuggauaac

SEQ ID NO: 1518974 - RNA, 19 nt, Artificial Sequence
  Description of Artificial Sequence: Synthetic oligonucleotide
cagugcacacagaaugguc

SEQ ID NO: 1518975 - RNA, 19 nt, Artificial Sequence
  Description of Artificial Sequence: Synthetic oligonucleotide
cacuggaacaacgaggaaa

SEQ ID NO: 1518976 - RNA, 19 nt, Artificial Sequence
  Description of Artificial Sequence: Synthetic oligonucleotide
ucaaugggagaaguccauc

SEQ ID NO: 1518977 - RNA, 19 nt, Artificial Sequence
  Description of Artificial Sequence: Synthetic oligonucleotide
uucccaucggagcgucugc

SEQ ID NO: 1518978 - RNA, 19 nt, Artificial Sequence
  Description of Artificial Sequence: Synthetic oligonucleotide
cuaggcuucauaggaauaa

SEQ ID NO: 1518979 - RNA, 19 nt, Artificial Sequence
  Description of Artificial Sequence: Synthetic oligonucleotide
agcaucggacauguggucu

SEQ ID NO: 1518980 - RNA, 19 nt, Artificial Sequence
  Description of Artificial Sequence: Synthetic oligonucleotide
ucccaguuaucugcugugc

SEQ ID NO: 1518981 - RNA, 19 nt, Artificial Sequence
  Description of Artificial Sequence: Synthetic oligonucleotide
ucuuuucccaucggagcgu

SEQ ID NO: 1518982 - RNA, 19 nt, Artificial Sequence
  Description of Artificial Sequence: Synthetic oligonucleotide
uaccaaagauagaguucac

SEQ ID NO: 1518983 - RNA, 19 nt, Artificial Sequence
  Description of Artificial Sequence: Synthetic oligonucleotide
gacgaguuucagaaauauc

SEQ ID NO: 1518984 - RNA, 19 nt, Artificial Sequence
  Description of Artificial Sequence: Synthetic oligonucleotide
caaucuaauuuucuucccu

SEQ ID NO: 1518985 - RNA, 19 nt, Artificial Sequence
  Description of Artificial Sequence: Synthetic oligonucleotide
uuagcucuacagucuugau

SEQ ID NO: 1518986 - RNA, 19 nt, Artificial Sequence
  Description of Artificial Sequence: Synthetic oligonucleotide
gucgacgaguuucagaaau

SEQ ID NO: 1518987 - RNA, 19 nt, Artificial Sequence
  Description of Artificial Sequence: Synthetic oligonucleotide
cugacuuggguuacaaagu

SEQ ID NO: 1518988 - RNA, 19 nt, Artificial Sequence
  Description of Artificial Sequence: Synthetic oligonucleotide
cauuacaaagauacaggau

SEQ ID NO: 1518989 - RNA, 19 nt, Artificial Sequence
  Description of Artificial Sequence: Synthetic oligonucleotide
cacacagaaugguccccgc

SEQ ID NO: 1518990 - RNA, 19 nt, Artificial Sequence
  Description of Artificial Sequence: Synthetic oligonucleotide
cagaucugcaaucuaauuu

SEQ ID NO: 1518991 - RNA, 19 nt, Artificial Sequence
  Description of Artificial Sequence: Synthetic oligonucleotide
cacgccucccaguguaggc

SEQ ID NO: 1518992 - RNA, 19 nt, Artificial Sequence
  Description of Artificial Sequence: Synthetic oligonucleotide
cacaauacucagggcacac

SEQ ID NO: 1518993 - RNA, 19 nt, Artificial Sequence
  Description of Artificial Sequence: Synthetic oligonucleotide
cagaacgugucgucgguga

SEQ ID NO: 1518994 - RNA, 19 nt, Artificial Sequence
  Description of Artificial Sequence: Synthetic oligonucleotide
uacaguccgaggggaagca

SEQ ID NO: 1518995 - RNA, 19 nt, Artificial Sequence
  Description of Artificial Sequence: Synthetic oligonucleotide
uagugaugucauagacuaa

SEQ ID NO: 1518996 - RNA, 19 nt, Artificial Sequence
  Description of Artificial Sequence: Synthetic oligonucleotide
gucuaggcaaaugcauaug

SEQ ID NO: 1518997 - RNA, 19 nt, Artificial Sequence
  Description of Artificial Sequence: Synthetic oligonucleotide
agaaugucgucgacgaguu

SEQ ID NO: 1518998 - RNA, 19 nt, Artificial Sequence
  Description of Artificial Sequence: Synthetic oligonucleotide
agcgcuccaaugaggcugg

SEQ ID NO: 1518999 - RNA, 19 nt, Artificial Sequence
  Description of Artificial Sequence: Synthetic oligonucleotide
uguggucuaggaggaggca

SEQ ID NO: 1519000 - RNA, 19 nt, Artificial Sequence
  Description of Artificial Sequence: Synthetic oligonucleotide
augucuaggcaaaugcaua

SEQ ID NO: 1519001 - RNA, 19 nt, Artificial Sequence
  Description of Artificial Sequence: Synthetic oligonucleotide
gcauacuuaucaaucaucu

SEQ ID NO: 1519002 - RNA, 19 nt, Artificial Sequence
  Description of Artificial Sequence: Synthetic oligonucleotide
gaccacgaugcuucucaca

SEQ ID NO: 1519003 - RNA, 19 nt, Artificial Sequence
  Description of Artificial Sequence: Synthetic oligonucleotide
ccgcaucccaguuaucugc

SEQ ID NO: 1519004 - RNA, 19 nt, Artificial Sequence
  Description of Artificial Sequence: Synthetic oligonucleotide
gcagaaggaaauugucaca

SEQ ID NO: 1519005 - RNA, 19 nt, Artificial Sequence
  Description of Artificial Sequence: Synthetic oligonucleotide
uuacccaggauugcauauu

SEQ ID NO: 1519006 - RNA, 19 nt, Artificial Sequence
  Description of Artificial Sequence: Synthetic oligonucleotide
gucgucgacgaguuucaga

SEQ ID NO: 1519007 - RNA, 19 nt, Artificial Sequence
  Description of Artificial Sequence: Synthetic oligonucleotide
gacuugcaggccucgcaga

SEQ ID NO: 1519008 - RNA, 19 nt, Artificial Sequence
  Description of Artificial Sequence: Synthetic oligonucleotide
agaacgugucgucggugaa

SEQ ID NO: 1519009 - RNA, 19 nt, Artificial Sequence
  Description of Artificial Sequence: Synthetic oligonucleotide
acagaaccgcaucccaguu

SEQ ID NO: 1519010 - RNA, 19 nt, Artificial Sequence
  Description of Artificial Sequence: Synthetic oligonucleotide
aguccgaggggaagcaugu

SEQ ID NO: 1519011 - RNA, 19 nt, Artificial Sequence
  Description of Artificial Sequence: Synthetic oligonucleotide
ucccaucggagcgucugcc

SEQ ID NO: 1519012 - RNA, 19 nt, Artificial Sequence
  Description of Artificial Sequence: Synthetic oligonucleotide
guaaugcuguuaaaucucu

SEQ ID NO: 1519013 - RNA, 19 nt, Artificial Sequence
  Description of Artificial Sequence: Synthetic oligonucleotide
cagaaugucgucgacgagu

SEQ ID NO: 1519014 - RNA, 19 nt, Artificial Sequence
  Description of Artificial Sequence: Synthetic oligonucleotide
gcacacagaaugguccccg

SEQ ID NO: 1519015 - RNA, 19 nt, Artificial Sequence
  Description of Artificial Sequence: Synthetic oligonucleotide
cuucucacaccacaauacu

SEQ ID NO: 1519016 - RNA, 19 nt, Artificial Sequence
  Description of Artificial Sequence: Synthetic oligonucleotide
aaaucccuucaaacaggau

SEQ ID NO: 1519017 - RNA, 19 nt, Artificial Sequence
  Description of Artificial Sequence: Synthetic oligonucleotide
gucuaggcuucauaggaau

SEQ ID NO: 1519018 - RNA, 19 nt, Artificial Sequence
  Description of Artificial Sequence: Synthetic oligonucleotide
agucuaggcuucauaggaa

SEQ ID NO: 1519019 - RNA, 19 nt, Artificial Sequence
  Description of Artificial Sequence: Synthetic oligonucleotide
acgugucgucggugaagcg

SEQ ID NO: 1519020 - RNA, 19 nt, Artificial Sequence
  Description of Artificial Sequence: Synthetic oligonucleotide
aagcaccgggcccucuuuu

SEQ ID NO: 1519021 - RNA, 19 nt, Artificial Sequence
  Description of Artificial Sequence: Synthetic oligonucleotide
uagcugacuuggguuacaa

SEQ ID NO: 1519022 - RNA, 19 nt, Artificial Sequence
  Description of Artificial Sequence: Synthetic oligonucleotide
cccaguguaggcacauuac

SEQ ID NO: 1519023 - RNA, 19 nt, Artificial Sequence
  Description of Artificial Sequence: Synthetic oligonucleotide
aucggacauguggucuagg

SEQ ID NO: 1519024 - RNA, 19 nt, Artificial Sequence
  Description of Artificial Sequence: Synthetic oligonucleotide
augucgucgacgaguuuca

SEQ ID NO: 1519025 - RNA, 19 nt, Artificial Sequence
  Description of Artificial Sequence: Synthetic oligonucleotide
cuuuucccaucggagcguc

SEQ ID NO: 1519026 - RNA, 19 nt, Artificial Sequence
  Description of Artificial Sequence: Synthetic oligonucleotide
ucuucccucuuagcucuac

SEQ ID NO: 1519027 - RNA, 19 nt, Artificial Sequence
  Description of Artificial Sequence: Synthetic oligonucleotide
ugucgucgacgaguuucag

SEQ ID NO: 1519028 - RNA, 19 nt, Artificial Sequence
  Description of Artificial Sequence: Synthetic oligonucleotide
ggauaacucgcuucucaaa

SEQ ID NO: 1519029 - RNA, 19 nt, Artificial Sequence
  Description of Artificial Sequence: Synthetic oligonucleotide
caguuaucugcugugcaaa

SEQ ID NO: 1519030 - RNA, 19 nt, Artificial Sequence
  Description of Artificial Sequence: Synthetic oligonucleotide
cagcaucggacaugugguc

SEQ ID NO: 1519031 - RNA, 19 nt, Artificial Sequence
  Description of Artificial Sequence: Synthetic oligonucleotide
gaagccguugucaugucuu

SEQ ID NO: 1519032 - RNA, 19 nt, Artificial Sequence
  Description of Artificial Sequence: Synthetic oligonucleotide
auagcugacuuggguuaca

SEQ ID NO: 1519033 - RNA, 19 nt, Artificial Sequence
  Description of Artificial Sequence: Synthetic oligonucleotide
caucccaguuaucugcugu

SEQ ID NO: 1519034 - RNA, 19 nt, Artificial Sequence
  Description of Artificial Sequence: Synthetic oligonucleotide
aggccucgcagaacguguc

SEQ ID NO: 1519035 - RNA, 19 nt, Artificial Sequence
  Description of Artificial Sequence: Synthetic oligonucleotide
caucuuccgaagcauacuu

SEQ ID NO: 1519036 - RNA, 19 nt, Artificial Sequence
  Description of Artificial Sequence: Synthetic oligonucleotide
cuucccucuuagcucuaca

SEQ ID NO: 1519037 - RNA, 19 nt, Artificial Sequence
  Description of Artificial Sequence: Synthetic oligonucleotide
acgaugcuucucacaccac

SEQ ID NO: 1519038 - RNA, 19 nt, Artificial Sequence
  Description of Artificial Sequence: Synthetic oligonucleotide
acaaaacagugcaguuuaa

SEQ ID NO: 1519039 - RNA, 19 nt, Artificial Sequence
  Description of Artificial Sequence: Synthetic oligonucleotide
ggcucguaugcacucuguc

SEQ ID NO: 1519040 - RNA, 19 nt, Artificial Sequence
  Description of Artificial Sequence: Synthetic oligonucleotide
acgaggaaauacaguccga

SEQ ID NO: 1519041 - RNA, 19 nt, Artificial Sequence
  Description of Artificial Sequence: Synthetic oligonucleotide
agccguugucaugucuucu

SEQ ID NO: 1519042 - RNA, 19 nt, Artificial Sequence
  Description of Artificial Sequence: Synthetic oligonucleotide
gucgucggugaagcgcucc

SEQ ID NO: 1519043 - RNA, 19 nt, Artificial Sequence
  Description of Artificial Sequence: Synthetic oligonucleotide
gaagcgcuccaaugaggcu

SEQ ID NO: 1519044 - RNA, 19 nt, Artificial Sequence
  Description of Artificial Sequence: Synthetic oligonucleotide
caccuuacccaggauugca

SEQ ID NO: 1519045 - RNA, 19 nt, Artificial Sequence
  Description of Artificial Sequence: Synthetic oligonucleotide
cagaaugguccccgccguc

SEQ ID NO: 1519046 - RNA, 19 nt, Artificial Sequence
  Description of Artificial Sequence: Synthetic oligonucleotide
gcucguaugcacucugucu

SEQ ID NO: 1519047 - RNA, 19 nt, Artificial Sequence
  Description of Artificial Sequence: Synthetic oligonucleotide
aucuuccgaagcauacuua

SEQ ID NO: 1519048 - RNA, 19 nt, Artificial Sequence
  Description of Artificial Sequence: Synthetic oligonucleotide
cucguaguguagacauuua

SEQ ID NO: 1519049 - RNA, 19 nt, Artificial Sequence
  Description of Artificial Sequence: Synthetic oligonucleotide
accuuacccaggauugcau

SEQ ID NO: 1519050 - RNA, 19 nt, Artificial Sequence
  Description of Artificial Sequence: Synthetic oligonucleotide
ccaguuaucugcugugcaa

SEQ ID NO: 1519051 - RNA, 19 nt, Artificial Sequence
  Description of Artificial Sequence: Synthetic oligonucleotide
cggacauguggucuaggag

SEQ ID NO: 1519052 - RNA, 19 nt, Artificial Sequence
  Description of Artificial Sequence: Synthetic oligonucleotide
augauccccuuggcacuuc

SEQ ID NO: 1519053 - RNA, 19 nt, Artificial Sequence
  Description of Artificial Sequence: Synthetic oligonucleotide
gugucgucggugaagcgcu

SEQ ID NO: 1519054 - RNA, 19 nt, Artificial Sequence
  Description of Artificial Sequence: Synthetic oligonucleotide
cagcacacccuucuucucu

SEQ ID NO: 1519055 - RNA, 19 nt, Artificial Sequence
  Description of Artificial Sequence: Synthetic oligonucleotide
aucggagcgucugccucgu

SEQ ID NO: 1519056 - RNA, 19 nt, Artificial Sequence
  Description of Artificial Sequence: Synthetic oligonucleotide
cagaaccgcaucccaguua

SEQ ID NO: 1519057 - RNA, 19 nt, Artificial Sequence
  Description of Artificial Sequence: Synthetic oligonucleotide
ggcccucuuuucccaucgg

SEQ ID NO: 1519058 - RNA, 19 nt, Artificial Sequence
  Description of Artificial Sequence: Synthetic oligonucleotide
ccaucggagcgucugccuc

SEQ ID NO: 1519059 - RNA, 19 nt, Artificial Sequence
  Description of Artificial Sequence: Synthetic oligonucleotide
cggagcgucugccucguag

SEQ ID NO: 1519060 - RNA, 19 nt, Artificial Sequence
  Description of Artificial Sequence: Synthetic oligonucleotide
gcuauuggauaacucgcuu

SEQ ID NO: 1519061 - RNA, 19 nt, Artificial Sequence
  Description of Artificial Sequence: Synthetic oligonucleotide
gcagaacgugucgucggug

SEQ ID NO: 1519062 - RNA, 19 nt, Artificial Sequence
  Description of Artificial Sequence: Synthetic oligonucleotide
gcaucggacauguggucua

SEQ ID NO: 1519063 - RNA, 19 nt, Artificial Sequence
  Description of Artificial Sequence: Synthetic oligonucleotide
cgaugcuucucacaccaca

SEQ ID NO: 1519064 - RNA, 19 nt, Artificial Sequence
  Description of Artificial Sequence: Synthetic oligonucleotide
gaaccacgccucccagugu

SEQ ID NO: 1519065 - RNA, 19 nt, Artificial Sequence
  Description of Artificial Sequence: Synthetic oligonucleotide
ccucgcagaacgugucguc

SEQ ID NO: 1519066 - RNA, 19 nt, Artificial Sequence
  Description of Artificial Sequence: Synthetic oligonucleotide
ccucuuagcucuacagucu

SEQ ID NO: 1519067 - RNA, 19 nt, Artificial Sequence
  Description of Artificial Sequence: Synthetic oligonucleotide
ccaccuuacccaggauugc

SEQ ID NO: 1519068 - RNA, 19 nt, Artificial Sequence
  Description of Artificial Sequence: Synthetic oligonucleotide
gaagcaccgggcccucuuu

SEQ ID NO: 1519069 - RNA, 19 nt, Artificial Sequence
  Description of Artificial Sequence: Synthetic oligonucleotide
caccaucaaugggagaagu

SEQ ID NO: 1519070 - RNA, 19 nt, Artificial Sequence
  Description of Artificial Sequence: Synthetic oligonucleotide
guccgaggggaagcaugug

SEQ ID NO: 1519071 - RNA, 19 nt, Artificial Sequence
  Description of Artificial Sequence: Synthetic oligonucleotide
cccauucuucacaccagaa

SEQ ID NO: 1519072 - RNA, 19 nt, Artificial Sequence
  Description of Artificial Sequence: Synthetic oligonucleotide
ccuuacccaggauugcaua

SEQ ID NO: 1519073 - RNA, 19 nt, Artificial Sequence
  Description of Artificial Sequence: Synthetic oligonucleotide
gaaccgcaucccaguuauc

SEQ ID NO: 1519074 - RNA, 19 nt, Artificial Sequence
  Description of Artificial Sequence: Synthetic oligonucleotide
ccgaagcauacuuaucaau

SEQ ID NO: 1519075 - RNA, 19 nt, Artificial Sequence
  Description of Artificial Sequence: Synthetic oligonucleotide
ggggaagcaugugauuuau

SEQ ID NO: 1519076 - RNA, 19 nt, Artificial Sequence
  Description of Artificial Sequence: Synthetic oligonucleotide
cuggaacaacgaggaaaua

SEQ ID NO: 1519077 - RNA, 19 nt, Artificial Sequence
  Description of Artificial Sequence: Synthetic oligonucleotide
ccacaauacucagggcaca

SEQ ID NO: 1519078 - RNA, 19 nt, Artificial Sequence
  Description of Artificial Sequence: Synthetic oligonucleotide
cgccucccaguguaggcac

SEQ ID NO: 1519079 - RNA, 19 nt, Artificial Sequence
  Description of Artificial Sequence: Synthetic oligonucleotide
ccucguaguguagacauuu

SEQ ID NO: 1519080 - RNA, 19 nt, Artificial Sequence
  Description of Artificial Sequence: Synthetic oligonucleotide
ccgaggggaagcaugugau

SEQ ID NO: 1519081 - RNA, 19 nt, Artificial Sequence
  Description of Artificial Sequence: Synthetic oligonucleotide
ucggagcgucugccucgua

SEQ ID NO: 1519082 - RNA, 19 nt, Artificial Sequence
  Description of Artificial Sequence: Synthetic oligonucleotide
cgucugccucguaguguag

SEQ ID NO: 1519083 - RNA, 19 nt, Artificial Sequence
  Description of Artificial Sequence: Synthetic oligonucleotide
cguaugcacucugucucca

SEQ ID NO: 1519084 - RNA, 19 nt, Artificial Sequence
  Description of Artificial Sequence: Synthetic oligonucleotide
cugcuucgcaguccagcuu

SEQ ID NO: 1519085 - RNA, 19 nt, Artificial Sequence
  Description of Artificial Sequence: Synthetic oligonucleotide
cgacgaguuucagaaauau

SEQ ID NO: 1519086 - RNA, 19 nt, Artificial Sequence
  Description of Artificial Sequence: Synthetic oligonucleotide
cgcaucccaguuaucugcu

SEQ ID NO: 1519087 - RNA, 19 nt, Artificial Sequence
  Description of Artificial Sequence: Synthetic oligonucleotide
cccaucggagcgucugccu

SEQ ID NO: 1519088 - RNA, 19 nt, Artificial Sequence
  Description of Artificial Sequence: Synthetic oligonucleotide
cgucgacgaguuucagaaa

SEQ ID NO: 1519089 - RNA, 19 nt, Artificial Sequence
  Description of Artificial Sequence: Synthetic oligonucleotide
ccguugucaugucuucuuu

SEQ ID NO: 1519090 - RNA, 19 nt, Artificial Sequence
  Description of Artificial Sequence: Synthetic oligonucleotide
cuucgcaguccagcuuguu

SEQ ID NO: 1519091 - RNA, 19 nt, Artificial Sequence
  Description of Artificial Sequence: Synthetic oligonucleotide
gcuucgcaguccagcuugu

SEQ ID NO: 1519092 - RNA, 19 nt, Artificial Sequence
  Description of Artificial Sequence: Synthetic oligonucleotide
cgaggggaagcaugugauu

SEQ ID NO: 1519093 - RNA, 19 nt, Artificial Sequence
  Description of Artificial Sequence: Synthetic oligonucleotide
gccucguaguguagacauu

SEQ ID NO: 1519094 - RNA, 19 nt, Artificial Sequence
  Description of Artificial Sequence: Synthetic oligonucleotide
cgaagcaccgggcccucuu

SEQ ID NO: 1519095 - RNA, 19 nt, Artificial Sequence
  Description of Artificial Sequence: Synthetic oligonucleotide
ccgggcccucuuuucccau

SEQ ID NO: 1519096 - RNA, 19 nt, Artificial Sequence
  Description of Artificial Sequence: Synthetic oligonucleotide
gcgcuccaaugaggcuggu

SEQ ID NO: 1519097 - RNA, 19 nt, Artificial Sequence
  Description of Artificial Sequence: Synthetic oligonucleotide
aaugaagugcugguaaucc

SEQ ID NO: 1519098 - RNA, 19 nt, Artificial Sequence
  Description of Artificial Sequence: Synthetic oligonucleotide
aaaagaaccaucuucgcau

SEQ ID NO: 1519099 - RNA, 19 nt, Artificial Sequence
  Description of Artificial Sequence: Synthetic oligonucleotide
uaaacuguuggaaugccag

SEQ ID NO: 1519100 - RNA, 19 nt, Artificial Sequence
  Description of Artificial Sequence: Synthetic oligonucleotide
aaaugacaggccaagggcc

SEQ ID NO: 1519101 - RNA, 19 nt, Artificial Sequence
  Description of Artificial Sequence: Synthetic oligonucleotide
ugguaaagcguacaaaggc

SEQ ID NO: 1519102 - RNA, 19 nt, Artificial Sequence
  Description of Artificial Sequence: Synthetic oligonucleotide
ucuguaaacuguuggaaug

SEQ ID NO: 1519103 - RNA, 19 nt, Artificial Sequence
  Description of Artificial Sequence: Synthetic oligonucleotide
agugcugguaauccgcucc

SEQ ID NO: 1519104 - RNA, 19 nt, Artificial Sequence
  Description of Artificial Sequence: Synthetic oligonucleotide
caagucuccuccuaggugg

SEQ ID NO: 1519105 - RNA, 19 nt, Artificial Sequence
  Description of Artificial Sequence: Synthetic oligonucleotide
cuaagauuccaacugcugc

SEQ ID NO: 1519106 - RNA, 19 nt, Artificial Sequence
  Description of Artificial Sequence: Synthetic oligonucleotide
uaccaaagaaugaugcuug

SEQ ID NO: 1519107 - RNA, 19 nt, Artificial Sequence
  Description of Artificial Sequence: Synthetic oligonucleotide
guaucugaaagucacccag

SEQ ID NO: 1519108 - RNA, 19 nt, Artificial Sequence
  Description of Artificial Sequence: Synthetic oligonucleotide
aucguugucacccuacgag

SEQ ID NO: 1519109 - RNA, 19 nt, Artificial Sequence
  Description of Artificial Sequence: Synthetic oligonucleotide
cauaggguaagcaggaaac

SEQ ID NO: 1519110 - RNA, 19 nt, Artificial Sequence
  Description of Artificial Sequence: Synthetic oligonucleotide
ugucuagggguucugagga

SEQ ID NO: 1519111 - RNA, 19 nt, Artificial Sequence
  Description of Artificial Sequence: Synthetic oligonucleotide
cagacuaagauuccaacug

SEQ ID NO: 1519112 - RNA, 19 nt, Artificial Sequence
  Description of Artificial Sequence: Synthetic oligonucleotide
aagucacccagaugacugc

SEQ ID NO: 1519113 - RNA, 19 nt, Artificial Sequence
  Description of Artificial Sequence: Synthetic oligonucleotide
agguaccaaagaaugaugc

SEQ ID NO: 1519114 - RNA, 19 nt, Artificial Sequence
  Description of Artificial Sequence: Synthetic oligonucleotide
accaagaugacuuucuuua

SEQ ID NO: 1519115 - RNA, 19 nt, Artificial Sequence
  Description of Artificial Sequence: Synthetic oligonucleotide
acucugaacagggugaagg

SEQ ID NO: 1519116 - RNA, 19 nt, Artificial Sequence
  Description of Artificial Sequence: Synthetic oligonucleotide
aaagaaccaucuucgcaug

SEQ ID NO: 1519117 - RNA, 19 nt, Artificial Sequence
  Description of Artificial Sequence: Synthetic oligonucleotide
ucuucgcaugcucacgagg

SEQ ID NO: 1519118 - RNA, 19 nt, Artificial Sequence
  Description of Artificial Sequence: Synthetic oligonucleotide
cguacaaaggcaaacagcc

SEQ ID NO: 1519119 - RNA, 19 nt, Artificial Sequence
  Description of Artificial Sequence: Synthetic oligonucleotide
ucguugucacccuacgagg

SEQ ID NO: 1519120 - RNA, 19 nt, Artificial Sequence
  Description of Artificial Sequence: Synthetic oligonucleotide
agcaggaaacagccaaggc

SEQ ID NO: 1519121 - RNA, 19 nt, Artificial Sequence
  Description of Artificial Sequence: Synthetic oligonucleotide
ucguaucugaaagucaccc

SEQ ID NO: 1519122 - RNA, 19 nt, Artificial Sequence
  Description of Artificial Sequence: Synthetic oligonucleotide
aaugccgagccagaucgcg

SEQ ID NO: 1519123 - RNA, 19 nt, Artificial Sequence
  Description of Artificial Sequence: Synthetic oligonucleotide
ucgccggggacaauggugg

SEQ ID NO: 1519124 - RNA, 19 nt, Artificial Sequence
  Description of Artificial Sequence: Synthetic oligonucleotide
ucuaccucccuguuugcag

SEQ ID NO: 1519125 - RNA, 19 nt, Artificial Sequence
  Description of Artificial Sequence: Synthetic oligonucleotide
aacaacaagcucuguugga

SEQ ID NO: 1519126 - RNA, 19 nt, Artificial Sequence
  Description of Artificial Sequence: Synthetic oligonucleotide
agcguacaaaggcaaacag

SEQ ID NO: 1519127 - RNA, 19 nt, Artificial Sequence
  Description of Artificial Sequence: Synthetic oligonucleotide
gugugcaugacccuggcac

SEQ ID NO: 1519128 - RNA, 19 nt, Artificial Sequence
  Description of Artificial Sequence: Synthetic oligonucleotide
accagcgucuugucggucc

SEQ ID NO: 1519129 - RNA, 19 nt, Artificial Sequence
  Description of Artificial Sequence: Synthetic oligonucleotide
aaaggcaaacagccggaca

SEQ ID NO: 1519130 - RNA, 19 nt, Artificial Sequence
  Description of Artificial Sequence: Synthetic oligonucleotide
ucccgcacuagguuguacg

SEQ ID NO: 1519131 - RNA, 19 nt, Artificial Sequence
  Description of Artificial Sequence: Synthetic oligonucleotide
uguuggaaugccagagaug

SEQ ID NO: 1519132 - RNA, 19 nt, Artificial Sequence
  Description of Artificial Sequence: Synthetic oligonucleotide
uuguggugcagacuaagau

SEQ ID NO: 1519133 - RNA, 19 nt, Artificial Sequence
  Description of Artificial Sequence: Synthetic oligonucleotide
uuucuguaaacuguuggaa

SEQ ID NO: 1519134 - RNA, 19 nt, Artificial Sequence
  Description of Artificial Sequence: Synthetic oligonucleotide
aucugugcacugcugaaug

SEQ ID NO: 1519135 - RNA, 19 nt, Artificial Sequence
  Description of Artificial Sequence: Synthetic oligonucleotide
ugagggcaaacuuggaccu

SEQ ID NO: 1519136 - RNA, 19 nt, Artificial Sequence
  Description of Artificial Sequence: Synthetic oligonucleotide
agugcagucuucuucccca

SEQ ID NO: 1519137 - RNA, 19 nt, Artificial Sequence
  Description of Artificial Sequence: Synthetic oligonucleotide
ugcagacuaagauuccaac

SEQ ID NO: 1519138 - RNA, 19 nt, Artificial Sequence
  Description of Artificial Sequence: Synthetic oligonucleotide
acugcaacucccaacaaca

SEQ ID NO: 1519139 - RNA, 19 nt, Artificial Sequence
  Description of Artificial Sequence: Synthetic oligonucleotide
gaggagaaaggaaaagaac

SEQ ID NO: 1519140 - RNA, 19 nt, Artificial Sequence
  Description of Artificial Sequence: Synthetic oligonucleotide
aucaucugugcacugcuga

SEQ ID NO: 1519141 - RNA, 19 nt, Artificial Sequence
  Description of Artificial Sequence: Synthetic oligonucleotide
cuagguuguacgccgcgcg

SEQ ID NO: 1519142 - RNA, 19 nt, Artificial Sequence
  Description of Artificial Sequence: Synthetic oligonucleotide
gugguaaagcguacaaagg

SEQ ID NO: 1519143 - RNA, 19 nt, Artificial Sequence
  Description of Artificial Sequence: Synthetic oligonucleotide
ggguuacacacacuggugg

SEQ ID NO: 1519144 - RNA, 19 nt, Artificial Sequence
  Description of Artificial Sequence: Synthetic oligonucleotide
uugucgaucuucguggcca

SEQ ID NO: 1519145 - RNA, 19 nt, Artificial Sequence
  Description of Artificial Sequence: Synthetic oligonucleotide
aaagagcgaggagaaagga

SEQ ID NO: 1519146 - RNA, 19 nt, Artificial Sequence
  Description of Artificial Sequence: Synthetic oligonucleotide
caugucuagggguucugag

SEQ ID NO: 1519147 - RNA, 19 nt, Artificial Sequence
  Description of Artificial Sequence: Synthetic oligonucleotide
ugaaagucacccagaugac

SEQ ID NO: 1519148 - RNA, 19 nt, Artificial Sequence
  Description of Artificial Sequence: Synthetic oligonucleotide
ugaucgccggggacaaugg

SEQ ID NO: 1519149 - RNA, 19 nt, Artificial Sequence
  Description of Artificial Sequence: Synthetic oligonucleotide
aaacagccggacaucaucu

SEQ ID NO: 1519150 - RNA, 19 nt, Artificial Sequence
  Description of Artificial Sequence: Synthetic oligonucleotide
ugaaugaagugcugguaau

SEQ ID NO: 1519151 - RNA, 19 nt, Artificial Sequence
  Description of Artificial Sequence: Synthetic oligonucleotide
caaacagccggacaucauc

SEQ ID NO: 1519152 - RNA, 19 nt, Artificial Sequence
  Description of Artificial Sequence: Synthetic oligonucleotide
uccuccccaauccacguga

SEQ ID NO: 1519153 - RNA, 19 nt, Artificial Sequence
  Description of Artificial Sequence: Synthetic oligonucleotide
acuagguuguacgccgcgc

SEQ ID NO: 1519154 - RNA, 19 nt, Artificial Sequence
  Description of Artificial Sequence: Synthetic oligonucleotide
ccaaaaugaaaagagcgag

SEQ ID NO: 1519155 - RNA, 19 nt, Artificial Sequence
  Description of Artificial Sequence: Synthetic oligonucleotide
acugccgagccgucguccc

SEQ ID NO: 1519156 - RNA, 19 nt, Artificial Sequence
  Description of Artificial Sequence: Synthetic oligonucleotide
uggcaagucuccuccuagg

SEQ ID NO: 1519157 - RNA, 19 nt, Artificial Sequence
  Description of Artificial Sequence: Synthetic oligonucleotide
aaugacaggccaagggcca

SEQ ID NO: 1519158 - RNA, 19 nt, Artificial Sequence
  Description of Artificial Sequence: Synthetic oligonucleotide
aauccacgugaugagggca

SEQ ID NO: 1519159 - RNA, 19 nt, Artificial Sequence
  Description of Artificial Sequence: Synthetic oligonucleotide
caaaauucugcaccaccuc

SEQ ID NO: 1519160 - RNA, 19 nt, Artificial Sequence
  Description of Artificial Sequence: Synthetic oligonucleotide
acuugagguggcaagucuc

SEQ ID NO: 1519161 - RNA, 19 nt, Artificial Sequence
  Description of Artificial Sequence: Synthetic oligonucleotide
ugagcuuaagaggggugag

SEQ ID NO: 1519162 - RNA, 19 nt, Artificial Sequence
  Description of Artificial Sequence: Synthetic oligonucleotide
uugucgguccccgucuugg

SEQ ID NO: 1519163 - RNA, 19 nt, Artificial Sequence
  Description of Artificial Sequence: Synthetic oligonucleotide
uucgcaugcucacgaggag

SEQ ID NO: 1519164 - RNA, 19 nt, Artificial Sequence
  Description of Artificial Sequence: Synthetic oligonucleotide
agggaaaugacaggccaag

SEQ ID NO: 1519165 - RNA, 19 nt, Artificial Sequence
  Description of Artificial Sequence: Synthetic oligonucleotide
guuggaguggagcccgcgg

SEQ ID NO: 1519166 - RNA, 19 nt, Artificial Sequence
  Description of Artificial Sequence: Synthetic oligonucleotide
ggcaagggaaaugacaggc

SEQ ID NO: 1519167 - RNA, 19 nt, Artificial Sequence
  Description of Artificial Sequence: Synthetic oligonucleotide
caauccacgugaugagggc

SEQ ID NO: 1519168 - RNA, 19 nt, Artificial Sequence
  Description of Artificial Sequence: Synthetic oligonucleotide
cagguaccaaagaaugaug

SEQ ID NO: 1519169 - RNA, 19 nt, Artificial Sequence
  Description of Artificial Sequence: Synthetic oligonucleotide
acuaagauuccaacugcug

SEQ ID NO: 1519170 - RNA, 19 nt, Artificial Sequence
  Description of Artificial Sequence: Synthetic oligonucleotide
acuguuggaaugccagaga

SEQ ID NO: 1519171 - RNA, 19 nt, Artificial Sequence
  Description of Artificial Sequence: Synthetic oligonucleotide
aucguaucugaaagucacc

SEQ ID NO: 1519172 - RNA, 19 nt, Artificial Sequence
  Description of Artificial Sequence: Synthetic oligonucleotide
guuacucugucugagcauc

SEQ ID NO: 1519173 - RNA, 19 nt, Artificial Sequence
  Description of Artificial Sequence: Synthetic oligonucleotide
uccuuccgaucgcugauca

SEQ ID NO: 1519174 - RNA, 19 nt, Artificial Sequence
  Description of Artificial Sequence: Synthetic oligonucleotide
guacaaaggcaaacagccg

SEQ ID NO: 1519175 - RNA, 19 nt, Artificial Sequence
  Description of Artificial Sequence: Synthetic oligonucleotide
ccaauccacgugaugaggg

SEQ ID NO: 1519176 - RNA, 19 nt, Artificial Sequence
  Description of Artificial Sequence: Synthetic oligonucleotide
gaaugaagugcugguaauc

SEQ ID NO: 1519177 - RNA, 19 nt, Artificial Sequence
  Description of Artificial Sequence: Synthetic oligonucleotide
cauggcggccggcauaggg

SEQ ID NO: 1519178 - RNA, 19 nt, Artificial Sequence
  Description of Artificial Sequence: Synthetic oligonucleotide
gagcccgcggcuaaugccg

SEQ ID NO: 1519179 - RNA, 19 nt, Artificial Sequence
  Description of Artificial Sequence: Synthetic oligonucleotide
uggaccuuuugcucauggc

SEQ ID NO: 1519180 - RNA, 19 nt, Artificial Sequence
  Description of Artificial Sequence: Synthetic oligonucleotide
guugucacccuacgaggcc

SEQ ID NO: 1519181 - RNA, 19 nt, Artificial Sequence
  Description of Artificial Sequence: Synthetic oligonucleotide
uuguacgccgcgcgacacg

SEQ ID NO: 1519182 - RNA, 19 nt, Artificial Sequence
  Description of Artificial Sequence: Synthetic oligonucleotide
ggaccuuuugcucauggca

SEQ ID NO: 1519183 - RNA, 19 nt, Artificial Sequence
  Description of Artificial Sequence: Synthetic oligonucleotide
gaugacugccgagccgucg

SEQ ID NO: 1519184 - RNA, 19 nt, Artificial Sequence
  Description of Artificial Sequence: Synthetic oligonucleotide
acaagcucuguuggagugg

SEQ ID NO: 1519185 - RNA, 19 nt, Artificial Sequence
  Description of Artificial Sequence: Synthetic oligonucleotide
cugaacucccacucugaac

SEQ ID NO: 1519186 - RNA, 19 nt, Artificial Sequence
  Description of Artificial Sequence: Synthetic oligonucleotide
auggcugccgcgaggacac

SEQ ID NO: 1519187 - RNA, 19 nt, Artificial Sequence
  Description of Artificial Sequence: Synthetic oligonucleotide
guggcaagucuccuccuag

SEQ ID NO: 1519188 - RNA, 19 nt, Artificial Sequence
  Description of Artificial Sequence: Synthetic oligonucleotide
uuccgaucgcugaucacaa

SEQ ID NO: 1519189 - RNA, 19 nt, Artificial Sequence
  Description of Artificial Sequence: Synthetic oligonucleotide
agcgaggagaaaggaaaag

SEQ ID NO: 1519190 - RNA, 19 nt, Artificial Sequence
  Description of Artificial Sequence: Synthetic oligonucleotide
uugucacccuacgaggccc

SEQ ID NO: 1519191 - RNA, 19 nt, Artificial Sequence
  Description of Artificial Sequence: Synthetic oligonucleotide
ugguaauccgcucccugau

SEQ ID NO: 1519192 - RNA, 19 nt, Artificial Sequence
  Description of Artificial Sequence: Synthetic oligonucleotide
augguggcgccaucguauc

SEQ ID NO: 1519193 - RNA, 19 nt, Artificial Sequence
  Description of Artificial Sequence: Synthetic oligonucleotide
uguacgccgcgcgacacgc

SEQ ID NO: 1519194 - RNA, 19 nt, Artificial Sequence
  Description of Artificial Sequence: Synthetic oligonucleotide
guacacagcuccuggcaug

SEQ ID NO: 1519195 - RNA, 19 nt, Artificial Sequence
  Description of Artificial Sequence: Synthetic oligonucleotide
uggugcagacuaagauucc

SEQ ID NO: 1519196 - RNA, 19 nt, Artificial Sequence
  Description of Artificial Sequence: Synthetic oligonucleotide
auaggguaagcaggaaaca

SEQ ID NO: 1519197 - RNA, 19 nt, Artificial Sequence
  Description of Artificial Sequence: Synthetic oligonucleotide
gguaaagcguacaaaggca

SEQ ID NO: 1519198 - RNA, 19 nt, Artificial Sequence
  Description of Artificial Sequence: Synthetic oligonucleotide
aagagcgaggagaaaggaa

SEQ ID NO: 1519199 - RNA, 19 nt, Artificial Sequence
  Description of Artificial Sequence: Synthetic oligonucleotide
gcaggggaccuuuccaucg

SEQ ID NO: 1519200 - RNA, 19 nt, Artificial Sequence
  Description of Artificial Sequence: Synthetic oligonucleotide
cuuccgaucgcugaucaca

SEQ ID NO: 1519201 - RNA, 19 nt, Artificial Sequence
  Description of Artificial Sequence: Synthetic oligonucleotide
caucgccggugguaaagcg

SEQ ID NO: 1519202 - RNA, 19 nt, Artificial Sequence
  Description of Artificial Sequence: Synthetic oligonucleotide
agcccaguccagugcaguc

SEQ ID NO: 1519203 - RNA, 19 nt, Artificial Sequence
  Description of Artificial Sequence: Synthetic oligonucleotide
cuugucgaucuucguggcc

SEQ ID NO: 1519204 - RNA, 19 nt, Artificial Sequence
  Description of Artificial Sequence: Synthetic oligonucleotide
ucgcaugcucacgaggagc

SEQ ID NO: 1519205 - RNA, 19 nt, Artificial Sequence
  Description of Artificial Sequence: Synthetic oligonucleotide
ucgccggugguaaagcgua

SEQ ID NO: 1519206 - RNA, 19 nt, Artificial Sequence
  Description of Artificial Sequence: Synthetic oligonucleotide
uaauccgcucccugaucgc

SEQ ID NO: 1519207 - RNA, 19 nt, Artificial Sequence
  Description of Artificial Sequence: Synthetic oligonucleotide
augacugccgagccgucgu

SEQ ID NO: 1519208 - RNA, 19 nt, Artificial Sequence
  Description of Artificial Sequence: Synthetic oligonucleotide
uugcaggggaccuuuccau

SEQ ID NO: 1519209 - RNA, 19 nt, Artificial Sequence
  Description of Artificial Sequence: Synthetic oligonucleotide
gcgccaucguaucugaaag

SEQ ID NO: 1519210 - RNA, 19 nt, Artificial Sequence
  Description of Artificial Sequence: Synthetic oligonucleotide
gcucuguuggaguggagcc

SEQ ID NO: 1519211 - RNA, 19 nt, Artificial Sequence
  Description of Artificial Sequence: Synthetic oligonucleotide
agguuguacgccgcgcgac

SEQ ID NO: 1519212 - RNA, 19 nt, Artificial Sequence
  Description of Artificial Sequence: Synthetic oligonucleotide
acugccggagccagugagc

SEQ ID NO: 1519213 - RNA, 19 nt, Artificial Sequence
  Description of Artificial Sequence: Synthetic oligonucleotide
uggagcccgcggcuaaugc

SEQ ID NO: 1519214 - RNA, 19 nt, Artificial Sequence
  Description of Artificial Sequence: Synthetic oligonucleotide
cugccggagccagugagcg

SEQ ID NO: 1519215 - RNA, 19 nt, Artificial Sequence
  Description of Artificial Sequence: Synthetic oligonucleotide
gaaugaugcuuggugagcu

SEQ ID NO: 1519216 - RNA, 19 nt, Artificial Sequence
  Description of Artificial Sequence: Synthetic oligonucleotide
cacuagguuguacgccgcg

SEQ ID NO: 1519217 - RNA, 19 nt, Artificial Sequence
  Description of Artificial Sequence: Synthetic oligonucleotide
gcugcgaggguugagccgg

SEQ ID NO: 1519218 - RNA, 19 nt, Artificial Sequence
  Description of Artificial Sequence: Synthetic oligonucleotide
cugaucgccggggacaaug

SEQ ID NO: 1519219 - RNA, 19 nt, Artificial Sequence
  Description of Artificial Sequence: Synthetic oligonucleotide
cuacgaggcccugaguuug

SEQ ID NO: 1519220 - RNA, 19 nt, Artificial Sequence
  Description of Artificial Sequence: Synthetic oligonucleotide
uacgccgcgcgacacgccu

SEQ ID NO: 1519221 - RNA, 19 nt, Artificial Sequence
  Description of Artificial Sequence: Synthetic oligonucleotide
acgugaugagggcaaacuu

SEQ ID NO: 1519222 - RNA, 19 nt, Artificial Sequence
  Description of Artificial Sequence: Synthetic oligonucleotide
uggugagcuuaagaggggu

SEQ ID NO: 1519223 - RNA, 19 nt, Artificial Sequence
  Description of Artificial Sequence: Synthetic oligonucleotide
gcuuaagaggggugagggg

SEQ ID NO: 1519224 - RNA, 19 nt, Artificial Sequence
  Description of Artificial Sequence: Synthetic oligonucleotide
uaaugccgagccagaucgc

SEQ ID NO: 1519225 - RNA, 19 nt, Artificial Sequence
  Description of Artificial Sequence: Synthetic oligonucleotide
gccggcauaggguaagcag

SEQ ID NO: 1519226 - RNA, 19 nt, Artificial Sequence
  Description of Artificial Sequence: Synthetic oligonucleotide
acugacaagcugcgagggu

SEQ ID NO: 1519227 - RNA, 19 nt, Artificial Sequence
  Description of Artificial Sequence: Synthetic oligonucleotide
cugguaauccgcucccuga

SEQ ID NO: 1519228 - RNA, 19 nt, Artificial Sequence
  Description of Artificial Sequence: Synthetic oligonucleotide
cacugccggagccagugag

SEQ ID NO: 1519229 - RNA, 19 nt, Artificial Sequence
  Description of Artificial Sequence: Synthetic oligonucleotide
auggugugcaugacccugg

SEQ ID NO: 1519230 - RNA, 19 nt, Artificial Sequence
  Description of Artificial Sequence: Synthetic oligonucleotide
ucgucccgcacuagguugu

SEQ ID NO: 1519231 - RNA, 19 nt, Artificial Sequence
  Description of Artificial Sequence: Synthetic oligonucleotide
cucuguuggaguggagccc

SEQ ID NO: 1519232 - RNA, 19 nt, Artificial Sequence
  Description of Artificial Sequence: Synthetic oligonucleotide
gugagcuuaagagggguga

SEQ ID NO: 1519233 - RNA, 19 nt, Artificial Sequence
  Description of Artificial Sequence: Synthetic oligonucleotide
ggaaugccagagauggucc

SEQ ID NO: 1519234 - RNA, 19 nt, Artificial Sequence
  Description of Artificial Sequence: Synthetic oligonucleotide
ggguuacucugucugagca

SEQ ID NO: 1519235 - RNA, 19 nt, Artificial Sequence
  Description of Artificial Sequence: Synthetic oligonucleotide
agcgucuugucgguccccg

SEQ ID NO: 1519236 - RNA, 19 nt, Artificial Sequence
  Description of Artificial Sequence: Synthetic oligonucleotide
ucaccagcgucuugucggu

SEQ ID NO: 1519237 - RNA, 19 nt, Artificial Sequence
  Description of Artificial Sequence: Synthetic oligonucleotide
cuuuugcucauggcaucgc

SEQ ID NO: 1519238 - RNA, 19 nt, Artificial Sequence
  Description of Artificial Sequence: Synthetic oligonucleotide
cagugagcgcuccacugac

SEQ ID NO: 1519239 - RNA, 19 nt, Artificial Sequence
  Description of Artificial Sequence: Synthetic oligonucleotide
cucccuguuugcaggggac

SEQ ID NO: 1519240 - RNA, 19 nt, Artificial Sequence
  Description of Artificial Sequence: Synthetic oligonucleotide
aucugauggugugcaugac

SEQ ID NO: 1519241 - RNA, 19 nt, Artificial Sequence
  Description of Artificial Sequence: Synthetic oligonucleotide
gcaagucuccuccuaggug

SEQ ID NO: 1519242 - RNA, 19 nt, Artificial Sequence
  Description of Artificial Sequence: Synthetic oligonucleotide
cgcacuagguuguacgccg

SEQ ID NO: 1519243 - RNA, 19 nt, Artificial Sequence
  Description of Artificial Sequence: Synthetic oligonucleotide
gucuagggguucugaggag

SEQ ID NO: 1519244 - RNA, 19 nt, Artificial Sequence
  Description of Artificial Sequence: Synthetic oligonucleotide
aucgccggggacaauggug

SEQ ID NO: 1519245 - RNA, 19 nt, Artificial Sequence
  Description of Artificial Sequence: Synthetic oligonucleotide
gugagcgcuccacugacaa

SEQ ID NO: 1519246 - RNA, 19 nt, Artificial Sequence
  Description of Artificial Sequence: Synthetic oligonucleotide
gcguacaaaggcaaacagc

SEQ ID NO: 1519247 - RNA, 19 nt, Artificial Sequence
  Description of Artificial Sequence: Synthetic oligonucleotide
ucccuguuugcaggggacc

SEQ ID NO: 1519248 - RNA, 19 nt, Artificial Sequence
  Description of Artificial Sequence: Synthetic oligonucleotide
guaccaaagaaugaugcuu

SEQ ID NO: 1519249 - RNA, 19 nt, Artificial Sequence
  Description of Artificial Sequence: Synthetic oligonucleotide
gcggcuaaugccgagccag

SEQ ID NO: 1519250 - RNA, 19 nt, Artificial Sequence
  Description of Artificial Sequence: Synthetic oligonucleotide
ccgaucgcugaucacaaac

SEQ ID NO: 1519251 - RNA, 19 nt, Artificial Sequence
  Description of Artificial Sequence: Synthetic oligonucleotide
ugucacccuacgaggcccu

SEQ ID NO: 1519252 - RNA, 19 nt, Artificial Sequence
  Description of Artificial Sequence: Synthetic oligonucleotide
ugacugcaacucccaacaa

SEQ ID NO: 1519253 - RNA, 19 nt, Artificial Sequence
  Description of Artificial Sequence: Synthetic oligonucleotide
agcaagugagggccagggu

SEQ ID NO: 1519254 - RNA, 19 nt, Artificial Sequence
  Description of Artificial Sequence: Synthetic oligonucleotide
ugucgguccccgucuuggc

SEQ ID NO: 1519255 - RNA, 19 nt, Artificial Sequence
  Description of Artificial Sequence: Synthetic oligonucleotide
ugcagucuucuuccccaaa

SEQ ID NO: 1519256 - RNA, 19 nt, Artificial Sequence
  Description of Artificial Sequence: Synthetic oligonucleotide
augaugcuuggugagcuua

SEQ ID NO: 1519257 - RNA, 19 nt, Artificial Sequence
  Description of Artificial Sequence: Synthetic oligonucleotide
ggggaugacugcaacuccc

SEQ ID NO: 1519258 - RNA, 19 nt, Artificial Sequence
  Description of Artificial Sequence: Synthetic oligonucleotide
gaucuucguggccauggcu

SEQ ID NO: 1519259 - RNA, 19 nt, Artificial Sequence
  Description of Artificial Sequence: Synthetic oligonucleotide
gguaccaaagaaugaugcu

SEQ ID NO: 1519260 - RNA, 19 nt, Artificial Sequence
  Description of Artificial Sequence: Synthetic oligonucleotide
auggcaucgccggugguaa

SEQ ID NO: 1519261 - RNA, 19 nt, Artificial Sequence
  Description of Artificial Sequence: Synthetic oligonucleotide
ugucgaucuucguggccau

SEQ ID NO: 1519262 - RNA, 19 nt, Artificial Sequence
  Description of Artificial Sequence: Synthetic oligonucleotide
gcgaggagaaaggaaaaga

SEQ ID NO: 1519263 - RNA, 19 nt, Artificial Sequence
  Description of Artificial Sequence: Synthetic oligonucleotide
gcuaaugccgagccagauc

SEQ ID NO: 1519264 - RNA, 19 nt, Artificial Sequence
  Description of Artificial Sequence: Synthetic oligonucleotide
ccaucguugucacccuacg

SEQ ID NO: 1519265 - RNA, 19 nt, Artificial Sequence
  Description of Artificial Sequence: Synthetic oligonucleotide
ugcucacgaggagccaagc

SEQ ID NO: 1519266 - RNA, 19 nt, Artificial Sequence
  Description of Artificial Sequence: Synthetic oligonucleotide
cguugucacccuacgaggc

SEQ ID NO: 1519267 - RNA, 19 nt, Artificial Sequence
  Description of Artificial Sequence: Synthetic oligonucleotide
gcgacacgccuccuugucg

SEQ ID NO: 1519268 - RNA, 19 nt, Artificial Sequence
  Description of Artificial Sequence: Synthetic oligonucleotide
cauguggcaugugugagcu

SEQ ID NO: 1519269 - RNA, 19 nt, Artificial Sequence
  Description of Artificial Sequence: Synthetic oligonucleotide
caucguugucacccuacga

SEQ ID NO: 1519270 - RNA, 19 nt, Artificial Sequence
  Description of Artificial Sequence: Synthetic oligonucleotide
caagcugggaugguaccca

SEQ ID NO: 1519271 - RNA, 19 nt, Artificial Sequence
  Description of Artificial Sequence: Synthetic oligonucleotide
ugguggcgccaucguaucu

SEQ ID NO: 1519272 - RNA, 19 nt, Artificial Sequence
  Description of Artificial Sequence: Synthetic oligonucleotide
gguggcgccaucguaucug

SEQ ID NO: 1519273 - RNA, 19 nt, Artificial Sequence
  Description of Artificial Sequence: Synthetic oligonucleotide
aucgccggugguaaagcgu

SEQ ID NO: 1519274 - RNA, 19 nt, Artificial Sequence
  Description of Artificial Sequence: Synthetic oligonucleotide
uugagccggcguugagagc

SEQ ID NO: 1519275 - RNA, 19 nt, Artificial Sequence
  Description of Artificial Sequence: Synthetic oligonucleotide
acacgccuccuugucgauc

SEQ ID NO: 1519276 - RNA, 19 nt, Artificial Sequence
  Description of Artificial Sequence: Synthetic oligonucleotide
acaagcugcgaggguugag

SEQ ID NO: 1519277 - RNA, 19 nt, Artificial Sequence
  Description of Artificial Sequence: Synthetic oligonucleotide
auccgcucccugaucgccg

SEQ ID NO: 1519278 - RNA, 19 nt, Artificial Sequence
  Description of Artificial Sequence: Synthetic oligonucleotide
cuggugccucucauggcuc

SEQ ID NO: 1519279 - RNA, 19 nt, Artificial Sequence
  Description of Artificial Sequence: Synthetic oligonucleotide
cgucuuggcucucugcagg

SEQ ID NO: 1519280 - RNA, 19 nt, Artificial Sequence
  Description of Artificial Sequence: Synthetic oligonucleotide
gccgucgucccgcacuagg

SEQ ID NO: 1519281 - RNA, 19 nt, Artificial Sequence
  Description of Artificial Sequence: Synthetic oligonucleotide
ggugcagacuaagauucca

SEQ ID NO: 1519282 - RNA, 19 nt, Artificial Sequence
  Description of Artificial Sequence: Synthetic oligonucleotide
uaggcaccugggaucugau

SEQ ID NO: 1519283 - RNA, 19 nt, Artificial Sequence
  Description of Artificial Sequence: Synthetic oligonucleotide
gcaaaauucugcaccaccu

SEQ ID NO: 1519284 - RNA, 19 nt, Artificial Sequence
  Description of Artificial Sequence: Synthetic oligonucleotide
gugccgugaggccuguguc

SEQ ID NO: 1519285 - RNA, 19 nt, Artificial Sequence
  Description of Artificial Sequence: Synthetic oligonucleotide
uccccgucuuggcucucug

SEQ ID NO: 1519286 - RNA, 19 nt, Artificial Sequence
  Description of Artificial Sequence: Synthetic oligonucleotide
gggguuacacacacuggug

SEQ ID NO: 1519287 - RNA, 19 nt, Artificial Sequence
  Description of Artificial Sequence: Synthetic oligonucleotide
uggcggccggcauagggua

SEQ ID NO: 1519288 - RNA, 19 nt, Artificial Sequence
  Description of Artificial Sequence: Synthetic oligonucleotide
gagcgaggagaaaggaaaa

SEQ ID NO: 1519289 - RNA, 19 nt, Artificial Sequence
  Description of Artificial Sequence: Synthetic oligonucleotide
guuguacgccgcgcgacac

SEQ ID NO: 1519290 - RNA, 19 nt, Artificial Sequence
  Description of Artificial Sequence: Synthetic oligonucleotide
gcaagcugggaugguaccc

SEQ ID NO: 1519291 - RNA, 19 nt, Artificial Sequence
  Description of Artificial Sequence: Synthetic oligonucleotide
caacucccaacaacaagcu

SEQ ID NO: 1519292 - RNA, 19 nt, Artificial Sequence
  Description of Artificial Sequence: Synthetic oligonucleotide
ugcgaggguugagccggcg

SEQ ID NO: 1519293 - RNA, 19 nt, Artificial Sequence
  Description of Artificial Sequence: Synthetic oligonucleotide
augcucacgaggagccaag

SEQ ID NO: 1519294 - RNA, 19 nt, Artificial Sequence
  Description of Artificial Sequence: Synthetic oligonucleotide
ucacccuacgaggcccuga

SEQ ID NO: 1519295 - RNA, 19 nt, Artificial Sequence
  Description of Artificial Sequence: Synthetic oligonucleotide
ggugagcuuaagaggggug

SEQ ID NO: 1519296 - RNA, 19 nt, Artificial Sequence
  Description of Artificial Sequence: Synthetic oligonucleotide
agcugggaugguacccagg

SEQ ID NO: 1519297 - RNA, 19 nt, Artificial Sequence
  Description of Artificial Sequence: Synthetic oligonucleotide
ugccagagaugguccucac

SEQ ID NO: 1519298 - RNA, 19 nt, Artificial Sequence
  Description of Artificial Sequence: Synthetic oligonucleotide
gccucagcuuucuuuaaaa

SEQ ID NO: 1519299 - RNA, 19 nt, Artificial Sequence
  Description of Artificial Sequence: Synthetic oligonucleotide
ggcaucgccggugguaaag

SEQ ID NO: 1519300 - RNA, 19 nt, Artificial Sequence
  Description of Artificial Sequence: Synthetic oligonucleotide
gguaauccgcucccugauc

SEQ ID NO: 1519301 - RNA, 19 nt, Artificial Sequence
  Description of Artificial Sequence: Synthetic oligonucleotide
caacaagcucuguuggagu

SEQ ID NO: 1519302 - RNA, 19 nt, Artificial Sequence
  Description of Artificial Sequence: Synthetic oligonucleotide
ggcgccaucguaucugaaa

SEQ ID NO: 1519303 - RNA, 19 nt, Artificial Sequence
  Description of Artificial Sequence: Synthetic oligonucleotide
cccgcacuagguuguacgc

SEQ ID NO: 1519304 - RNA, 19 nt, Artificial Sequence
  Description of Artificial Sequence: Synthetic oligonucleotide
cacacacugguggcgccgc

SEQ ID NO: 1519305 - RNA, 19 nt, Artificial Sequence
  Description of Artificial Sequence: Synthetic oligonucleotide
ugacugccgagccgucguc

SEQ ID NO: 1519306 - RNA, 19 nt, Artificial Sequence
  Description of Artificial Sequence: Synthetic oligonucleotide
uccgaucgcugaucacaaa

SEQ ID NO: 1519307 - RNA, 19 nt, Artificial Sequence
  Description of Artificial Sequence: Synthetic oligonucleotide
cugugcacugcugaaugaa

SEQ ID NO: 1519308 - RNA, 19 nt, Artificial Sequence
  Description of Artificial Sequence: Synthetic oligonucleotide
gugcagacuaagauuccaa

SEQ ID NO: 1519309 - RNA, 19 nt, Artificial Sequence
  Description of Artificial Sequence: Synthetic oligonucleotide
cugccgcgaggacacugcc

SEQ ID NO: 1519310 - RNA, 19 nt, Artificial Sequence
  Description of Artificial Sequence: Synthetic oligonucleotide
cucccugaucgccggggac

SEQ ID NO: 1519311 - RNA, 19 nt, Artificial Sequence
  Description of Artificial Sequence: Synthetic oligonucleotide
cugcaacucccaacaacaa

SEQ ID NO: 1519312 - RNA, 19 nt, Artificial Sequence
  Description of Artificial Sequence: Synthetic oligonucleotide
ugcugguaauccgcucccu

SEQ ID NO: 1519313 - RNA, 19 nt, Artificial Sequence
  Description of Artificial Sequence: Synthetic oligonucleotide
gggaugguacccaggccag

SEQ ID NO: 1519314 - RNA, 19 nt, Artificial Sequence
  Description of Artificial Sequence: Synthetic oligonucleotide
gcuggugccucucauggcu

SEQ ID NO: 1519315 - RNA, 19 nt, Artificial Sequence
  Description of Artificial Sequence: Synthetic oligonucleotide
ugccggagccagugagcgc

SEQ ID NO: 1519316 - RNA, 19 nt, Artificial Sequence
  Description of Artificial Sequence: Synthetic oligonucleotide
cugccgagccgucgucccg

SEQ ID NO: 1519317 - RNA, 19 nt, Artificial Sequence
  Description of Artificial Sequence: Synthetic oligonucleotide
caugcucacgaggagccaa

SEQ ID NO: 1519318 - RNA, 19 nt, Artificial Sequence
  Description of Artificial Sequence: Synthetic oligonucleotide
ccaucguaucugaaaguca

SEQ ID NO: 1519319 - RNA, 19 nt, Artificial Sequence
  Description of Artificial Sequence: Synthetic oligonucleotide
accugggaucugauggugu

SEQ ID NO: 1519320 - RNA, 19 nt, Artificial Sequence
  Description of Artificial Sequence: Synthetic oligonucleotide
guggcgccaucguaucuga

SEQ ID NO: 1519321 - RNA, 19 nt, Artificial Sequence
  Description of Artificial Sequence: Synthetic oligonucleotide
gguugagccggcguugaga

SEQ ID NO: 1519322 - RNA, 19 nt, Artificial Sequence
  Description of Artificial Sequence: Synthetic oligonucleotide
gguuguacgccgcgcgaca

SEQ ID NO: 1519323 - RNA, 19 nt, Artificial Sequence
  Description of Artificial Sequence: Synthetic oligonucleotide
gacaagcugcgaggguuga

SEQ ID NO: 1519324 - RNA, 19 nt, Artificial Sequence
  Description of Artificial Sequence: Synthetic oligonucleotide
ggacaucaucugugcacug

SEQ ID NO: 1519325 - RNA, 19 nt, Artificial Sequence
  Description of Artificial Sequence: Synthetic oligonucleotide
agaugacugccgagccguc

SEQ ID NO: 1519326 - RNA, 19 nt, Artificial Sequence
  Description of Artificial Sequence: Synthetic oligonucleotide
cacgugaugagggcaaacu

SEQ ID NO: 1519327 - RNA, 19 nt, Artificial Sequence
  Description of Artificial Sequence: Synthetic oligonucleotide
ugcaugacccuggcaccaa

SEQ ID NO: 1519328 - RNA, 19 nt, Artificial Sequence
  Description of Artificial Sequence: Synthetic oligonucleotide
ccggggacaaugguggcgc

SEQ ID NO: 1519329 - RNA, 19 nt, Artificial Sequence
  Description of Artificial Sequence: Synthetic oligonucleotide
gaguggagcccgcggcuaa

SEQ ID NO: 1519330 - RNA, 19 nt, Artificial Sequence
  Description of Artificial Sequence: Synthetic oligonucleotide
gcgaggacacugccggagc

SEQ ID NO: 1519331 - RNA, 19 nt, Artificial Sequence
  Description of Artificial Sequence: Synthetic oligonucleotide
agugagcgcuccacugaca

SEQ ID NO: 1519332 - RNA, 19 nt, Artificial Sequence
  Description of Artificial Sequence: Synthetic oligonucleotide
ccuagguggagcaggcaga

SEQ ID NO: 1519333 - RNA, 19 nt, Artificial Sequence
  Description of Artificial Sequence: Synthetic oligonucleotide
aggggaccuuuccaucguu

SEQ ID NO: 1519334 - RNA, 19 nt, Artificial Sequence
  Description of Artificial Sequence: Synthetic oligonucleotide
ggggaccuuuccaucguug

SEQ ID NO: 1519335 - RNA, 19 nt, Artificial Sequence
  Description of Artificial Sequence: Synthetic oligonucleotide
gccggggacaaugguggcg

SEQ ID NO: 1519336 - RNA, 19 nt, Artificial Sequence
  Description of Artificial Sequence: Synthetic oligonucleotide
cugacaagcugcgaggguu

SEQ ID NO: 1519337 - RNA, 19 nt, Artificial Sequence
  Description of Artificial Sequence: Synthetic oligonucleotide
gggaccuuuccaucguugu

SEQ ID NO: 1519338 - RNA, 19 nt, Artificial Sequence
  Description of Artificial Sequence: Synthetic oligonucleotide
gcuggugacuugagguggc

SEQ ID NO: 1519339 - RNA, 19 nt, Artificial Sequence
  Description of Artificial Sequence: Synthetic oligonucleotide
ggcaagucuccuccuaggu

SEQ ID NO: 1519340 - RNA, 19 nt, Artificial Sequence
  Description of Artificial Sequence: Synthetic oligonucleotide
caccaagaugacuuucuuu

SEQ ID NO: 1519341 - RNA, 19 nt, Artificial Sequence
  Description of Artificial Sequence: Synthetic oligonucleotide
gaucgccggggacaauggu

SEQ ID NO: 1519342 - RNA, 19 nt, Artificial Sequence
  Description of Artificial Sequence: Synthetic oligonucleotide
ggcccugaguuugacccug

SEQ ID NO: 1519343 - RNA, 19 nt, Artificial Sequence
  Description of Artificial Sequence: Synthetic oligonucleotide
gcaucgccggugguaaagc

SEQ ID NO: 1519344 - RNA, 19 nt, Artificial Sequence
  Description of Artificial Sequence: Synthetic oligonucleotide
uggcgccaucguaucugaa

SEQ ID NO: 1519345 - RNA, 19 nt, Artificial Sequence
  Description of Artificial Sequence: Synthetic oligonucleotide
acccuacgaggcccugagu

SEQ ID NO: 1519346 - RNA, 19 nt, Artificial Sequence
  Description of Artificial Sequence: Synthetic oligonucleotide
guuugacccugaacuccca

SEQ ID NO: 1519347 - RNA, 19 nt, Artificial Sequence
  Description of Artificial Sequence: Synthetic oligonucleotide
guggagcccgcggcuaaug

SEQ ID NO: 1519348 - RNA, 19 nt, Artificial Sequence
  Description of Artificial Sequence: Synthetic oligonucleotide
cguaucugaaagucaccca

SEQ ID NO: 1519349 - RNA, 19 nt, Artificial Sequence
  Description of Artificial Sequence: Synthetic oligonucleotide
ggcaccaagaugacuuucu

SEQ ID NO: 1519350 - RNA, 19 nt, Artificial Sequence
  Description of Artificial Sequence: Synthetic oligonucleotide
gcugccgcgaggacacugc

SEQ ID NO: 1519351 - RNA, 19 nt, Artificial Sequence
  Description of Artificial Sequence: Synthetic oligonucleotide
ggugccgugaggccugugu

SEQ ID NO: 1519352 - RNA, 19 nt, Artificial Sequence
  Description of Artificial Sequence: Synthetic oligonucleotide
cugcgaggguugagccggc

SEQ ID NO: 1519353 - RNA, 19 nt, Artificial Sequence
  Description of Artificial Sequence: Synthetic oligonucleotide
ggccaggguggcucagacc

SEQ ID NO: 1519354 - RNA, 19 nt, Artificial Sequence
  Description of Artificial Sequence: Synthetic oligonucleotide
gguuacucugucugagcau

SEQ ID NO: 1519355 - RNA, 19 nt, Artificial Sequence
  Description of Artificial Sequence: Synthetic oligonucleotide
ccgcggcuaaugccgagcc

SEQ ID NO: 1519356 - RNA, 19 nt, Artificial Sequence
  Description of Artificial Sequence: Synthetic oligonucleotide
ccgcacuagguuguacgcc

SEQ ID NO: 1519357 - RNA, 19 nt, Artificial Sequence
  Description of Artificial Sequence: Synthetic oligonucleotide
gguggggcugggguuacuc

SEQ ID NO: 1519358 - RNA, 19 nt, Artificial Sequence
  Description of Artificial Sequence: Synthetic oligonucleotide
uggcaucgccggugguaaa

SEQ ID NO: 1519359 - RNA, 19 nt, Artificial Sequence
  Description of Artificial Sequence: Synthetic oligonucleotide
ggguugagccggcguugag

SEQ ID NO: 1519360 - RNA, 19 nt, Artificial Sequence
  Description of Artificial Sequence: Synthetic oligonucleotide
aguggagcccgcggcuaau

SEQ ID NO: 1519361 - RNA, 19 nt, Artificial Sequence
  Description of Artificial Sequence: Synthetic oligonucleotide
gcacuagguuguacgccgc

SEQ ID NO: 1519362 - RNA, 19 nt, Artificial Sequence
  Description of Artificial Sequence: Synthetic oligonucleotide
cuagguggagcaggcagau

SEQ ID NO: 1519363 - RNA, 19 nt, Artificial Sequence
  Description of Artificial Sequence: Synthetic oligonucleotide
cagcgucuugucggucccc

SEQ ID NO: 1519364 - RNA, 19 nt, Artificial Sequence
  Description of Artificial Sequence: Synthetic oligonucleotide
cuggugacuugagguggca

SEQ ID NO: 1519365 - RNA, 19 nt, Artificial Sequence
  Description of Artificial Sequence: Synthetic oligonucleotide
ccuuccgaucgcugaucac

SEQ ID NO: 1519366 - RNA, 19 nt, Artificial Sequence
  Description of Artificial Sequence: Synthetic oligonucleotide
ggggcagguaccaaagaau

SEQ ID NO: 1519367 - RNA, 19 nt, Artificial Sequence
  Description of Artificial Sequence: Synthetic oligonucleotide
agccggcguugagagcgag

SEQ ID NO: 1519368 - RNA, 19 nt, Artificial Sequence
  Description of Artificial Sequence: Synthetic oligonucleotide
gccuuccaggugccgugag

SEQ ID NO: 1519369 - RNA, 19 nt, Artificial Sequence
  Description of Artificial Sequence: Synthetic oligonucleotide
cgucuugucgguccccguc

SEQ ID NO: 1519370 - RNA, 19 nt, Artificial Sequence
  Description of Artificial Sequence: Synthetic oligonucleotide
gcggccggcauaggguaag

SEQ ID NO: 1519371 - RNA, 19 nt, Artificial Sequence
  Description of Artificial Sequence: Synthetic oligonucleotide
gccggagccagugagcgcu

SEQ ID NO: 1519372 - RNA, 19 nt, Artificial Sequence
  Description of Artificial Sequence: Synthetic oligonucleotide
gucccgcacuagguuguac

SEQ ID NO: 1519373 - RNA, 19 nt, Artificial Sequence
  Description of Artificial Sequence: Synthetic oligonucleotide
gucacccuacgaggcccug

SEQ ID NO: 1519374 - RNA, 19 nt, Artificial Sequence
  Description of Artificial Sequence: Synthetic oligonucleotide
ggcugccgcgaggacacug

SEQ ID NO: 1519375 - RNA, 19 nt, Artificial Sequence
  Description of Artificial Sequence: Synthetic oligonucleotide
cgacacgccuccuugucga

SEQ ID NO: 1519376 - RNA, 19 nt, Artificial Sequence
  Description of Artificial Sequence: Synthetic oligonucleotide
gccggugguaaagcguaca

SEQ ID NO: 1519377 - RNA, 19 nt, Artificial Sequence
  Description of Artificial Sequence: Synthetic oligonucleotide
ggggacaaugguggcgcca

SEQ ID NO: 1519378 - RNA, 19 nt, Artificial Sequence
  Description of Artificial Sequence: Synthetic oligonucleotide
caggggaccuuuccaucgu

SEQ ID NO: 1519379 - RNA, 19 nt, Artificial Sequence
  Description of Artificial Sequence: Synthetic oligonucleotide
ccggugguaaagcguacaa

SEQ ID NO: 1519380 - RNA, 19 nt, Artificial Sequence
  Description of Artificial Sequence: Synthetic oligonucleotide
guacgccgcgcgacacgcc

SEQ ID NO: 1519381 - RNA, 19 nt, Artificial Sequence
  Description of Artificial Sequence: Synthetic oligonucleotide
cgcgaggacacugccggag

SEQ ID NO: 1519382 - RNA, 19 nt, Artificial Sequence
  Description of Artificial Sequence: Synthetic oligonucleotide
cgaucgcugaucacaaacu

SEQ ID NO: 1519383 - RNA, 19 nt, Artificial Sequence
  Description of Artificial Sequence: Synthetic oligonucleotide
cgcgcgacacgccuccuug

SEQ ID NO: 1519384 - RNA, 19 nt, Artificial Sequence
  Description of Artificial Sequence: Synthetic oligonucleotide
cccaacaacaagcucuguu

SEQ ID NO: 1519385 - RNA, 19 nt, Artificial Sequence
  Description of Artificial Sequence: Synthetic oligonucleotide
cccgcggcuaaugccgagc

SEQ ID NO: 1519386 - RNA, 19 nt, Artificial Sequence
  Description of Artificial Sequence: Synthetic oligonucleotide
ccacgugaugagggcaaac

SEQ ID NO: 1519387 - RNA, 19 nt, Artificial Sequence
  Description of Artificial Sequence: Synthetic oligonucleotide
agccgucgucccgcacuag

SEQ ID NO: 1519388 - RNA, 19 nt, Artificial Sequence
  Description of Artificial Sequence: Synthetic oligonucleotide
cccuacgaggcccugaguu

SEQ ID NO: 1519389 - RNA, 19 nt, Artificial Sequence
  Description of Artificial Sequence: Synthetic oligonucleotide
gggacaaugguggcgccau

SEQ ID NO: 1519390 - RNA, 19 nt, Artificial Sequence
  Description of Artificial Sequence: Synthetic oligonucleotide
agcccgcggcuaaugccga

SEQ ID NO: 1519391 - RNA, 19 nt, Artificial Sequence
  Description of Artificial Sequence: Synthetic oligonucleotide
gagccggcguugagagcga

SEQ ID NO: 1519392 - RNA, 19 nt, Artificial Sequence
  Description of Artificial Sequence: Synthetic oligonucleotide
ccaugucuagggguucuga

SEQ ID NO: 1519393 - RNA, 19 nt, Artificial Sequence
  Description of Artificial Sequence: Synthetic oligonucleotide
cgcgacacgccuccuuguc

SEQ ID NO: 1519394 - RNA, 19 nt, Artificial Sequence
  Description of Artificial Sequence: Synthetic oligonucleotide
gagggcaaacuuggaccuu

SEQ ID NO: 1519395 - RNA, 19 nt, Artificial Sequence
  Description of Artificial Sequence: Synthetic oligonucleotide
ccggcguugagagcgaggu

SEQ ID NO: 1519396 - RNA, 19 nt, Artificial Sequence
  Description of Artificial Sequence: Synthetic oligonucleotide
gcccgcggcuaaugccgag

SEQ ID NO: 1519397 - RNA, 19 nt, Artificial Sequence
  Description of Artificial Sequence: Synthetic oligonucleotide
ccuacgaggcccugaguuu

SEQ ID NO: 1519398 - RNA, 19 nt, Artificial Sequence
  Description of Artificial Sequence: Synthetic oligonucleotide
ggcuaaugccgagccagau

SEQ ID NO: 1519399 - RNA, 19 nt, Artificial Sequence
  Description of Artificial Sequence: Synthetic oligonucleotide
gcgaggguugagccggcgu

SEQ ID NO: 1519400 - RNA, 19 nt, Artificial Sequence
  Description of Artificial Sequence: Synthetic oligonucleotide
ccacucugaacagggugaa

SEQ ID NO: 1519401 - RNA, 19 nt, Artificial Sequence
  Description of Artificial Sequence: Synthetic oligonucleotide
cgccgcgcgacacgccucc

SEQ ID NO: 1519402 - RNA, 19 nt, Artificial Sequence
  Description of Artificial Sequence: Synthetic oligonucleotide
uggcugccgcgaggacacu

SEQ ID NO: 1519403 - RNA, 19 nt, Artificial Sequence
  Description of Artificial Sequence: Synthetic oligonucleotide
cggggacaaugguggcgcc

SEQ ID NO: 1519404 - RNA, 19 nt, Artificial Sequence
  Description of Artificial Sequence: Synthetic oligonucleotide
gcaaacagccggacaucau

SEQ ID NO: 1519405 - RNA, 19 nt, Artificial Sequence
  Description of Artificial Sequence: Synthetic oligonucleotide
ccgucgucccgcacuaggu

SEQ ID NO: 1519406 - RNA, 19 nt, Artificial Sequence
  Description of Artificial Sequence: Synthetic oligonucleotide
cacucacauccuccccaau

SEQ ID NO: 1519407 - RNA, 19 nt, Artificial Sequence
  Description of Artificial Sequence: Synthetic oligonucleotide
guccccgucuuggcucucu

SEQ ID NO: 1519408 - RNA, 19 nt, Artificial Sequence
  Description of Artificial Sequence: Synthetic oligonucleotide
cgccggggacaaugguggc

SEQ ID NO: 1519409 - RNA, 19 nt, Artificial Sequence
  Description of Artificial Sequence: Synthetic oligonucleotide
ccggagccagugagcgcuc

SEQ ID NO: 1519410 - RNA, 19 nt, Artificial Sequence
  Description of Artificial Sequence: Synthetic oligonucleotide
gcgcgacacgccuccuugu

SEQ ID NO: 1519411 - RNA, 19 nt, Artificial Sequence
  Description of Artificial Sequence: Synthetic oligonucleotide
cgccaucguaucugaaagu

SEQ ID NO: 1519412 - RNA, 19 nt, Artificial Sequence
  Description of Artificial Sequence: Synthetic oligonucleotide
ggcggccggcauaggguaa

SEQ ID NO: 1519413 - RNA, 19 nt, Artificial Sequence
  Description of Artificial Sequence: Synthetic oligonucleotide
gcgucuugucgguccccgu

SEQ ID NO: 1519414 - RNA, 19 nt, Artificial Sequence
  Description of Artificial Sequence: Synthetic oligonucleotide
cgcggcuaaugccgagcca

SEQ ID NO: 1519415 - RNA, 19 nt, Artificial Sequence
  Description of Artificial Sequence: Synthetic oligonucleotide
cggccggcauaggguaagc

SEQ ID NO: 1519416 - RNA, 19 nt, Artificial Sequence
  Description of Artificial Sequence: Synthetic oligonucleotide
gggcaaacuuggaccuuuu

SEQ ID NO: 1519417 - RNA, 19 nt, Artificial Sequence
  Description of Artificial Sequence: Synthetic oligonucleotide
gguccccgucuuggcucuc

SEQ ID NO: 1519418 - RNA, 19 nt, Artificial Sequence
  Description of Artificial Sequence: Synthetic oligonucleotide
cgucgucccgcacuagguu

SEQ ID NO: 1519419 - RNA, 19 nt, Artificial Sequence
  Description of Artificial Sequence: Synthetic oligonucleotide
cgucccgcacuagguugua

SEQ ID NO: 1519420 - RNA, 19 nt, Artificial Sequence
  Description of Artificial Sequence: Synthetic oligonucleotide
ccgcgcgacacgccuccuu

SEQ ID NO: 1519421 - RNA, 19 nt, Artificial Sequence
  Description of Artificial Sequence: Synthetic oligonucleotide
gccgcgcgacacgccuccu

SEQ ID NO: 1519422 - RNA, 19 nt, Artificial Sequence
  Description of Artificial Sequence: Synthetic oligonucleotide
ccugaucgccggggacaau

SEQ ID NO: 1519423 - RNA, 19 nt, Artificial Sequence
  Description of Artificial Sequence: Synthetic oligonucleotide
aauguuucaacuugcaagg

SEQ ID NO: 1519424 - RNA, 19 nt, Artificial Sequence
  Description of Artificial Sequence: Synthetic oligonucleotide
ucugauaugcuucucaugg

SEQ ID NO: 1519425 - RNA, 19 nt, Artificial Sequence
  Description of Artificial Sequence: Synthetic oligonucleotide
ugcuuaagcaaucuaaugg

SEQ ID NO: 1519426 - RNA, 19 nt, Artificial Sequence
  Description of Artificial Sequence: Synthetic oligonucleotide
aaucuaauggcggucaccc

SEQ ID NO: 1519427 - RNA, 19 nt, Artificial Sequence
  Description of Artificial Sequence: Synthetic oligonucleotide
aaguguuuuaucuuuuguc

SEQ ID NO: 1519428 - RNA, 19 nt, Artificial Sequence
  Description of Artificial Sequence: Synthetic oligonucleotide
ucuuaaagaauucauauuu

SEQ ID NO: 1519429 - RNA, 19 nt, Artificial Sequence
  Description of Artificial Sequence: Synthetic oligonucleotide
ugugaugaaaccauggcug

SEQ ID NO: 1519430 - RNA, 19 nt, Artificial Sequence
  Description of Artificial Sequence: Synthetic oligonucleotide
ucuucuucggcacagagca

SEQ ID NO: 1519431 - RNA, 19 nt, Artificial Sequence
  Description of Artificial Sequence: Synthetic oligonucleotide
uugucuaugacucugcucu

SEQ ID NO: 1519432 - RNA, 19 nt, Artificial Sequence
  Description of Artificial Sequence: Synthetic oligonucleotide
aagaaauaacauuggguuc

SEQ ID NO: 1519433 - RNA, 19 nt, Artificial Sequence
  Description of Artificial Sequence: Synthetic oligonucleotide
acuucuaacgcccugcugg

SEQ ID NO: 1519434 - RNA, 19 nt, Artificial Sequence
  Description of Artificial Sequence: Synthetic oligonucleotide
uuaagcaaucuaauggcgg

SEQ ID NO: 1519435 - RNA, 19 nt, Artificial Sequence
  Description of Artificial Sequence: Synthetic oligonucleotide
uuuguuaggcuuaaagcag

SEQ ID NO: 1519436 - RNA, 19 nt, Artificial Sequence
  Description of Artificial Sequence: Synthetic oligonucleotide
uuaggcuuaaagcagaauc

SEQ ID NO: 1519437 - RNA, 19 nt, Artificial Sequence
  Description of Artificial Sequence: Synthetic oligonucleotide
aaaacugcaaaugccgucg

SEQ ID NO: 1519438 - RNA, 19 nt, Artificial Sequence
  Description of Artificial Sequence: Synthetic oligonucleotide
gaaaccauggcugggaucg

SEQ ID NO: 1519439 - RNA, 19 nt, Artificial Sequence
  Description of Artificial Sequence: Synthetic oligonucleotide
uggauuucaggauaggugc

SEQ ID NO: 1519440 - RNA, 19 nt, Artificial Sequence
  Description of Artificial Sequence: Synthetic oligonucleotide
aguacaaaaguucuggggu

SEQ ID NO: 1519441 - RNA, 19 nt, Artificial Sequence
  Description of Artificial Sequence: Synthetic oligonucleotide
agcgaauucucugauaugc

SEQ ID NO: 1519442 - RNA, 19 nt, Artificial Sequence
  Description of Artificial Sequence: Synthetic oligonucleotide
aagaauucauauuuggcau

SEQ ID NO: 1519443 - RNA, 19 nt, Artificial Sequence
  Description of Artificial Sequence: Synthetic oligonucleotide
auuacuagugcugaauucg

SEQ ID NO: 1519444 - RNA, 19 nt, Artificial Sequence
  Description of Artificial Sequence: Synthetic oligonucleotide
ugagacagcacuucaauca

SEQ ID NO: 1519445 - RNA, 19 nt, Artificial Sequence
  Description of Artificial Sequence: Synthetic oligonucleotide
ugagcuuaaaacaucugca

SEQ ID NO: 1519446 - RNA, 19 nt, Artificial Sequence
  Description of Artificial Sequence: Synthetic oligonucleotide
ucauugacaguacaaaagu

SEQ ID NO: 1519447 - RNA, 19 nt, Artificial Sequence
  Description of Artificial Sequence: Synthetic oligonucleotide
auauaauucugguacagcu

SEQ ID NO: 1519448 - RNA, 19 nt, Artificial Sequence
  Description of Artificial Sequence: Synthetic oligonucleotide
gacacguaaacauuacuag

SEQ ID NO: 1519449 - RNA, 19 nt, Artificial Sequence
  Description of Artificial Sequence: Synthetic oligonucleotide
uaaagagccauccuaguac

SEQ ID NO: 1519450 - RNA, 19 nt, Artificial Sequence
  Description of Artificial Sequence: Synthetic oligonucleotide
acguaaacauuacuagugc

SEQ ID NO: 1519451 - RNA, 19 nt, Artificial Sequence
  Description of Artificial Sequence: Synthetic oligonucleotide
gacaguacaaaaguucugg

SEQ ID NO: 1519452 - RNA, 19 nt, Artificial Sequence
  Description of Artificial Sequence: Synthetic oligonucleotide
uaggcuuaaagcagaaucc

SEQ ID NO: 1519453 - RNA, 19 nt, Artificial Sequence
  Description of Artificial Sequence: Synthetic oligonucleotide
ugcuuuguuaggcuuaaag

SEQ ID NO: 1519454 - RNA, 19 nt, Artificial Sequence
  Description of Artificial Sequence: Synthetic oligonucleotide
uucgaugugccuuuaguag

SEQ ID NO: 1519455 - RNA, 19 nt, Artificial Sequence
  Description of Artificial Sequence: Synthetic oligonucleotide
ucuaauggcggucacccag

SEQ ID NO: 1519456 - RNA, 19 nt, Artificial Sequence
  Description of Artificial Sequence: Synthetic oligonucleotide
uuccaagcauguaagaagc

SEQ ID NO: 1519457 - RNA, 19 nt, Artificial Sequence
  Description of Artificial Sequence: Synthetic oligonucleotide
uuucaacuugcaaggaagg

SEQ ID NO: 1519458 - RNA, 19 nt, Artificial Sequence
  Description of Artificial Sequence: Synthetic oligonucleotide
cuuuguuaggcuuaaagca

SEQ ID NO: 1519459 - RNA, 19 nt, Artificial Sequence
  Description of Artificial Sequence: Synthetic oligonucleotide
aaaagaguccagcuguugu

SEQ ID NO: 1519460 - RNA, 19 nt, Artificial Sequence
  Description of Artificial Sequence: Synthetic oligonucleotide
aagcagaauccauaggcag

SEQ ID NO: 1519461 - RNA, 19 nt, Artificial Sequence
  Description of Artificial Sequence: Synthetic oligonucleotide
cucauugacaguacaaaag

SEQ ID NO: 1519462 - RNA, 19 nt, Artificial Sequence
  Description of Artificial Sequence: Synthetic oligonucleotide
aaugccgucgguuccuuuc

SEQ ID NO: 1519463 - RNA, 19 nt, Artificial Sequence
  Description of Artificial Sequence: Synthetic oligonucleotide
uuaagauagaguuuauuuu

SEQ ID NO: 1519464 - RNA, 19 nt, Artificial Sequence
  Description of Artificial Sequence: Synthetic oligonucleotide
gaucugugaauuuugugug

SEQ ID NO: 1519465 - RNA, 19 nt, Artificial Sequence
  Description of Artificial Sequence: Synthetic oligonucleotide
cuggcaaacaucucgggcg

SEQ ID NO: 1519466 - RNA, 19 nt, Artificial Sequence
  Description of Artificial Sequence: Synthetic oligonucleotide
uaugggugcauauaauucu

SEQ ID NO: 1519467 - RNA, 19 nt, Artificial Sequence
  Description of Artificial Sequence: Synthetic oligonucleotide
ucacuguagacuuuuaauc

SEQ ID NO: 1519468 - RNA, 19 nt, Artificial Sequence
  Description of Artificial Sequence: Synthetic oligonucleotide
aaguccauugcuaccagcg

SEQ ID NO: 1519469 - RNA, 19 nt, Artificial Sequence
  Description of Artificial Sequence: Synthetic oligonucleotide
cacguaaacauuacuagug

SEQ ID NO: 1519470 - RNA, 19 nt, Artificial Sequence
  Description of Artificial Sequence: Synthetic oligonucleotide
agaaauaacauuggguucu

SEQ ID NO: 1519471 - RNA, 19 nt, Artificial Sequence
  Description of Artificial Sequence: Synthetic oligonucleotide
gagcuuaaaacaucugcag

SEQ ID NO: 1519472 - RNA, 19 nt, Artificial Sequence
  Description of Artificial Sequence: Synthetic oligonucleotide
ugacacguaaacauuacua

SEQ ID NO: 1519473 - RNA, 19 nt, Artificial Sequence
  Description of Artificial Sequence: Synthetic oligonucleotide
aaagagccauccuaguaca

SEQ ID NO: 1519474 - RNA, 19 nt, Artificial Sequence
  Description of Artificial Sequence: Synthetic oligonucleotide
auugcuaccagcgaauucu

SEQ ID NO: 1519475 - RNA, 19 nt, Artificial Sequence
  Description of Artificial Sequence: Synthetic oligonucleotide
ucacuggguacuucuaacg

SEQ ID NO: 1519476 - RNA, 19 nt, Artificial Sequence
  Description of Artificial Sequence: Synthetic oligonucleotide
caguacaaaaguucugggg

SEQ ID NO: 1519477 - RNA, 19 nt, Artificial Sequence
  Description of Artificial Sequence: Synthetic oligonucleotide
ugagucacauacaguuugg

SEQ ID NO: 1519478 - RNA, 19 nt, Artificial Sequence
  Description of Artificial Sequence: Synthetic oligonucleotide
uguaagaagccauggauuu

SEQ ID NO: 1519479 - RNA, 19 nt, Artificial Sequence
  Description of Artificial Sequence: Synthetic oligonucleotide
uccuuaaacauucuucuuu

SEQ ID NO: 1519480 - RNA, 19 nt, Artificial Sequence
  Description of Artificial Sequence: Synthetic oligonucleotide
acaguacaaaaguucuggg

SEQ ID NO: 1519481 - RNA, 19 nt, Artificial Sequence
  Description of Artificial Sequence: Synthetic oligonucleotide
ucccguaccaagaaaacuc

SEQ ID NO: 1519482 - RNA, 19 nt, Artificial Sequence
  Description of Artificial Sequence: Synthetic oligonucleotide
uuuggcuaaagagccaucc

SEQ ID NO: 1519483 - RNA, 19 nt, Artificial Sequence
  Description of Artificial Sequence: Synthetic oligonucleotide
uaagcaaucuaauggcggu

SEQ ID NO: 1519484 - RNA, 19 nt, Artificial Sequence
  Description of Artificial Sequence: Synthetic oligonucleotide
ucucgaaauuuugugauga

SEQ ID NO: 1519485 - RNA, 19 nt, Artificial Sequence
  Description of Artificial Sequence: Synthetic oligonucleotide
uccuaguacaguaauguuu

SEQ ID NO: 1519486 - RNA, 19 nt, Artificial Sequence
  Description of Artificial Sequence: Synthetic oligonucleotide
agcugaauaagaucuguga

SEQ ID NO: 1519487 - RNA, 19 nt, Artificial Sequence
  Description of Artificial Sequence: Synthetic oligonucleotide
uccccaggcguaaacaucc

SEQ ID NO: 1519488 - RNA, 19 nt, Artificial Sequence
  Description of Artificial Sequence: Synthetic oligonucleotide
acuagugcugaauucgcug

SEQ ID NO: 1519489 - RNA, 19 nt, Artificial Sequence
  Description of Artificial Sequence: Synthetic oligonucleotide
cuuucuacaccugugugag

SEQ ID NO: 1519490 - RNA, 19 nt, Artificial Sequence
  Description of Artificial Sequence: Synthetic oligonucleotide
uagugguucuucaggauca

SEQ ID NO: 1519491 - RNA, 19 nt, Artificial Sequence
  Description of Artificial Sequence: Synthetic oligonucleotide
uuuugccugccacugacac

SEQ ID NO: 1519492 - RNA, 19 nt, Artificial Sequence
  Description of Artificial Sequence: Synthetic oligonucleotide
augauuuacuuucaggcuu

SEQ ID NO: 1519493 - RNA, 19 nt, Artificial Sequence
  Description of Artificial Sequence: Synthetic oligonucleotide
cucaacagccacugaaagg

SEQ ID NO: 1519494 - RNA, 19 nt, Artificial Sequence
  Description of Artificial Sequence: Synthetic oligonucleotide
acucugacugucccguacc

SEQ ID NO: 1519495 - RNA, 19 nt, Artificial Sequence
  Description of Artificial Sequence: Synthetic oligonucleotide
cuggguacuucuaacgccc

SEQ ID NO: 1519496 - RNA, 19 nt, Artificial Sequence
  Description of Artificial Sequence: Synthetic oligonucleotide
cuguagacuuuuaaucacc

SEQ ID NO: 1519497 - RNA, 19 nt, Artificial Sequence
  Description of Artificial Sequence: Synthetic oligonucleotide
ugagcuucaucucucgaaa

SEQ ID NO: 1519498 - RNA, 19 nt, Artificial Sequence
  Description of Artificial Sequence: Synthetic oligonucleotide
uuguuaggcuuaaagcaga

SEQ ID NO: 1519499 - RNA, 19 nt, Artificial Sequence
  Description of Artificial Sequence: Synthetic oligonucleotide
ucuaacgcccugcuggucu

SEQ ID NO: 1519500 - RNA, 19 nt, Artificial Sequence
  Description of Artificial Sequence: Synthetic oligonucleotide
uucuuucuacaccugugug

SEQ ID NO: 1519501 - RNA, 19 nt, Artificial Sequence
  Description of Artificial Sequence: Synthetic oligonucleotide
uucuacaccugugugagac

SEQ ID NO: 1519502 - RNA, 19 nt, Artificial Sequence
  Description of Artificial Sequence: Synthetic oligonucleotide
gcuuuguuaggcuuaaagc

SEQ ID NO: 1519503 - RNA, 19 nt, Artificial Sequence
  Description of Artificial Sequence: Synthetic oligonucleotide
aucugugaauuuugugugg

SEQ ID NO: 1519504 - RNA, 19 nt, Artificial Sequence
  Description of Artificial Sequence: Synthetic oligonucleotide
ucgaccuugguaugggugc

SEQ ID NO: 1519505 - RNA, 19 nt, Artificial Sequence
  Description of Artificial Sequence: Synthetic oligonucleotide
acacguaaacauuacuagu

SEQ ID NO: 1519506 - RNA, 19 nt, Artificial Sequence
  Description of Artificial Sequence: Synthetic oligonucleotide
auuuuguguggccuucauc

SEQ ID NO: 1519507 - RNA, 19 nt, Artificial Sequence
  Description of Artificial Sequence: Synthetic oligonucleotide
ucgauggauagccauguuc

SEQ ID NO: 1519508 - RNA, 19 nt, Artificial Sequence
  Description of Artificial Sequence: Synthetic oligonucleotide
uggauaugcucugugagcu

SEQ ID NO: 1519509 - RNA, 19 nt, Artificial Sequence
  Description of Artificial Sequence: Synthetic oligonucleotide
uggcaaacaucucgggcgg

SEQ ID NO: 1519510 - RNA, 19 nt, Artificial Sequence
  Description of Artificial Sequence: Synthetic oligonucleotide
ugggugcauauaauucugg

SEQ ID NO: 1519511 - RNA, 19 nt, Artificial Sequence
  Description of Artificial Sequence: Synthetic oligonucleotide
caucucucgaaauuuugug

SEQ ID NO: 1519512 - RNA, 19 nt, Artificial Sequence
  Description of Artificial Sequence: Synthetic oligonucleotide
gauaugcucugugagcugc

SEQ ID NO: 1519513 - RNA, 19 nt, Artificial Sequence
  Description of Artificial Sequence: Synthetic oligonucleotide
ucgaugugccuuuaguaga

SEQ ID NO: 1519514 - RNA, 19 nt, Artificial Sequence
  Description of Artificial Sequence: Synthetic oligonucleotide
caccgguaugauuugaaag

SEQ ID NO: 1519515 - RNA, 19 nt, Artificial Sequence
  Description of Artificial Sequence: Synthetic oligonucleotide
ugcauauaauucugguaca

SEQ ID NO: 1519516 - RNA, 19 nt, Artificial Sequence
  Description of Artificial Sequence: Synthetic oligonucleotide
uuucgaugugccuuuagua

SEQ ID NO: 1519517 - RNA, 19 nt, Artificial Sequence
  Description of Artificial Sequence: Synthetic oligonucleotide
ugauuugaaaguguuuuau

SEQ ID NO: 1519518 - RNA, 19 nt, Artificial Sequence
  Description of Artificial Sequence: Synthetic oligonucleotide
aacauuacuagugcugaau

SEQ ID NO: 1519519 - RNA, 19 nt, Artificial Sequence
  Description of Artificial Sequence: Synthetic oligonucleotide
uucgaccuugguaugggug

SEQ ID NO: 1519520 - RNA, 19 nt, Artificial Sequence
  Description of Artificial Sequence: Synthetic oligonucleotide
ugcaggauuuguguagggg

SEQ ID NO: 1519521 - RNA, 19 nt, Artificial Sequence
  Description of Artificial Sequence: Synthetic oligonucleotide
cugacugucccguaccaag

SEQ ID NO: 1519522 - RNA, 19 nt, Artificial Sequence
  Description of Artificial Sequence: Synthetic oligonucleotide
ugcaaaugccgucgguucc

SEQ ID NO: 1519523 - RNA, 19 nt, Artificial Sequence
  Description of Artificial Sequence: Synthetic oligonucleotide
cuuuuaaucaccuguuucu

SEQ ID NO: 1519524 - RNA, 19 nt, Artificial Sequence
  Description of Artificial Sequence: Synthetic oligonucleotide
cugggaucgauggauagcc

SEQ ID NO: 1519525 - RNA, 19 nt, Artificial Sequence
  Description of Artificial Sequence: Synthetic oligonucleotide
ugauuuacuuucaggcuua

SEQ ID NO: 1519526 - RNA, 19 nt, Artificial Sequence
  Description of Artificial Sequence: Synthetic oligonucleotide
auuuguguaggggagucug

SEQ ID NO: 1519527 - RNA, 19 nt, Artificial Sequence
  Description of Artificial Sequence: Synthetic oligonucleotide
cauuacuagugcugaauuc

SEQ ID NO: 1519528 - RNA, 19 nt, Artificial Sequence
  Description of Artificial Sequence: Synthetic oligonucleotide
uuugccugccacugacacg

SEQ ID NO: 1519529 - RNA, 19 nt, Artificial Sequence
  Description of Artificial Sequence: Synthetic oligonucleotide
ccuaguacaguaauguuuc

SEQ ID NO: 1519530 - RNA, 19 nt, Artificial Sequence
  Description of Artificial Sequence: Synthetic oligonucleotide
uuucaggcuuauuuguuau

SEQ ID NO: 1519531 - RNA, 19 nt, Artificial Sequence
  Description of Artificial Sequence: Synthetic oligonucleotide
aauggcggucacccagcac

SEQ ID NO: 1519532 - RNA, 19 nt, Artificial Sequence
  Description of Artificial Sequence: Synthetic oligonucleotide
aagcaaucuaauggcgguc

SEQ ID NO: 1519533 - RNA, 19 nt, Artificial Sequence
  Description of Artificial Sequence: Synthetic oligonucleotide
uggcuaaagagccauccua

SEQ ID NO: 1519534 - RNA, 19 nt, Artificial Sequence
  Description of Artificial Sequence: Synthetic oligonucleotide
acauuacuagugcugaauu

SEQ ID NO: 1519535 - RNA, 19 nt, Artificial Sequence
  Description of Artificial Sequence: Synthetic oligonucleotide
aauuuuguguggccuucau

SEQ ID NO: 1519536 - RNA, 19 nt, Artificial Sequence
  Description of Artificial Sequence: Synthetic oligonucleotide
uucaggauaggugcuugag

SEQ ID NO: 1519537 - RNA, 19 nt, Artificial Sequence
  Description of Artificial Sequence: Synthetic oligonucleotide
agggcuaccgugauucccc

SEQ ID NO: 1519538 - RNA, 19 nt, Artificial Sequence
  Description of Artificial Sequence: Synthetic oligonucleotide
accgugauuccccaggcgu

SEQ ID NO: 1519539 - RNA, 19 nt, Artificial Sequence
  Description of Artificial Sequence: Synthetic oligonucleotide
uuuucaccaugauuuacuu

SEQ ID NO: 1519540 - RNA, 19 nt, Artificial Sequence
  Description of Artificial Sequence: Synthetic oligonucleotide
ugaugaaaccauggcuggg

SEQ ID NO: 1519541 - RNA, 19 nt, Artificial Sequence
  Description of Artificial Sequence: Synthetic oligonucleotide
aaacauuacuagugcugaa

SEQ ID NO: 1519542 - RNA, 19 nt, Artificial Sequence
  Description of Artificial Sequence: Synthetic oligonucleotide
uggguucuuaaagaauuca

SEQ ID NO: 1519543 - RNA, 19 nt, Artificial Sequence
  Description of Artificial Sequence: Synthetic oligonucleotide
acugacacguaaacauuac

SEQ ID NO: 1519544 - RNA, 19 nt, Artificial Sequence
  Description of Artificial Sequence: Synthetic oligonucleotide
cugcaugccgugcuuaagc

SEQ ID NO: 1519545 - RNA, 19 nt, Artificial Sequence
  Description of Artificial Sequence: Synthetic oligonucleotide
ugcuugagcuuaaaacauc

SEQ ID NO: 1519546 - RNA, 19 nt, Artificial Sequence
  Description of Artificial Sequence: Synthetic oligonucleotide
gaugaaaccauggcuggga

SEQ ID NO: 1519547 - RNA, 19 nt, Artificial Sequence
  Description of Artificial Sequence: Synthetic oligonucleotide
gaauucauauuuggcauaa

SEQ ID NO: 1519548 - RNA, 19 nt, Artificial Sequence
  Description of Artificial Sequence: Synthetic oligonucleotide
acaaaaguucugggguuac

SEQ ID NO: 1519549 - RNA, 19 nt, Artificial Sequence
  Description of Artificial Sequence: Synthetic oligonucleotide
uuuguguggccuucaucca

SEQ ID NO: 1519550 - RNA, 19 nt, Artificial Sequence
  Description of Artificial Sequence: Synthetic oligonucleotide
uccauugcuaccagcgaau

SEQ ID NO: 1519551 - RNA, 19 nt, Artificial Sequence
  Description of Artificial Sequence: Synthetic oligonucleotide
ugcucugcucuucuucggc

SEQ ID NO: 1519552 - RNA, 19 nt, Artificial Sequence
  Description of Artificial Sequence: Synthetic oligonucleotide
cauacaguuuggcuaaaga

SEQ ID NO: 1519553 - RNA, 19 nt, Artificial Sequence
  Description of Artificial Sequence: Synthetic oligonucleotide
guaugggugcauauaauuc

SEQ ID NO: 1519554 - RNA, 19 nt, Artificial Sequence
  Description of Artificial Sequence: Synthetic oligonucleotide
ugcaugccgugcuuaagca

SEQ ID NO: 1519555 - RNA, 19 nt, Artificial Sequence
  Description of Artificial Sequence: Synthetic oligonucleotide
uacuagugcugaauucgcu

SEQ ID NO: 1519556 - RNA, 19 nt, Artificial Sequence
  Description of Artificial Sequence: Synthetic oligonucleotide
uguuaggcuuaaagcagaa

SEQ ID NO: 1519557 - RNA, 19 nt, Artificial Sequence
  Description of Artificial Sequence: Synthetic oligonucleotide
gauggauagccauguucac

SEQ ID NO: 1519558 - RNA, 19 nt, Artificial Sequence
  Description of Artificial Sequence: Synthetic oligonucleotide
uguaggggagucugucacc

SEQ ID NO: 1519559 - RNA, 19 nt, Artificial Sequence
  Description of Artificial Sequence: Synthetic oligonucleotide
cuugagcuuaaaacaucug

SEQ ID NO: 1519560 - RNA, 19 nt, Artificial Sequence
  Description of Artificial Sequence: Synthetic oligonucleotide
cuacaccugugugagacag

SEQ ID NO: 1519561 - RNA, 19 nt, Artificial Sequence
  Description of Artificial Sequence: Synthetic oligonucleotide
uucggcacagagcauucuc

SEQ ID NO: 1519562 - RNA, 19 nt, Artificial Sequence
  Description of Artificial Sequence: Synthetic oligonucleotide
uaccgugauuccccaggcg

SEQ ID NO: 1519563 - RNA, 19 nt, Artificial Sequence
  Description of Artificial Sequence: Synthetic oligonucleotide
cagagcauucucagguccc

SEQ ID NO: 1519564 - RNA, 19 nt, Artificial Sequence
  Description of Artificial Sequence: Synthetic oligonucleotide
gcuaccgugauuccccagg

SEQ ID NO: 1519565 - RNA, 19 nt, Artificial Sequence
  Description of Artificial Sequence: Synthetic oligonucleotide
uguggaacaucucgccauc

SEQ ID NO: 1519566 - RNA, 19 nt, Artificial Sequence
  Description of Artificial Sequence: Synthetic oligonucleotide
uuuguccaugacucauuga

SEQ ID NO: 1519567 - RNA, 19 nt, Artificial Sequence
  Description of Artificial Sequence: Synthetic oligonucleotide
caugacucauugacaguac

SEQ ID NO: 1519568 - RNA, 19 nt, Artificial Sequence
  Description of Artificial Sequence: Synthetic oligonucleotide
ugaauuuuguguggccuuc

SEQ ID NO: 1519569 - RNA, 19 nt, Artificial Sequence
  Description of Artificial Sequence: Synthetic oligonucleotide
acuucgaccuugguauggg

SEQ ID NO: 1519570 - RNA, 19 nt, Artificial Sequence
  Description of Artificial Sequence: Synthetic oligonucleotide
gucacuggguacuucuaac

SEQ ID NO: 1519571 - RNA, 19 nt, Artificial Sequence
  Description of Artificial Sequence: Synthetic oligonucleotide
ucucauggguggauaugcu

SEQ ID NO: 1519572 - RNA, 19 nt, Artificial Sequence
  Description of Artificial Sequence: Synthetic oligonucleotide
agagcauucucaggucccg

SEQ ID NO: 1519573 - RNA, 19 nt, Artificial Sequence
  Description of Artificial Sequence: Synthetic oligonucleotide
uacuucuaacgcccugcug

SEQ ID NO: 1519574 - RNA, 19 nt, Artificial Sequence
  Description of Artificial Sequence: Synthetic oligonucleotide
gcuaccagcgaauucucug

SEQ ID NO: 1519575 - RNA, 19 nt, Artificial Sequence
  Description of Artificial Sequence: Synthetic oligonucleotide
gaaggacacccuuguugag

SEQ ID NO: 1519576 - RNA, 19 nt, Artificial Sequence
  Description of Artificial Sequence: Synthetic oligonucleotide
gaacucuaccagcugaaua

SEQ ID NO: 1519577 - RNA, 19 nt, Artificial Sequence
  Description of Artificial Sequence: Synthetic oligonucleotide
aacugcaaaugccgucggu

SEQ ID NO: 1519578 - RNA, 19 nt, Artificial Sequence
  Description of Artificial Sequence: Synthetic oligonucleotide
agauagaguuuauuuucuu

SEQ ID NO: 1519579 - RNA, 19 nt, Artificial Sequence
  Description of Artificial Sequence: Synthetic oligonucleotide
caggauaggugcuugagcu

SEQ ID NO: 1519580 - RNA, 19 nt, Artificial Sequence
  Description of Artificial Sequence: Synthetic oligonucleotide
agcuggcaaacaucucggg

SEQ ID NO: 1519581 - RNA, 19 nt, Artificial Sequence
  Description of Artificial Sequence: Synthetic oligonucleotide
aggcuuaaagcagaaucca

SEQ ID NO: 1519582 - RNA, 19 nt, Artificial Sequence
  Description of Artificial Sequence: Synthetic oligonucleotide
ggcuaaagagccauccuag

SEQ ID NO: 1519583 - RNA, 19 nt, Artificial Sequence
  Description of Artificial Sequence: Synthetic oligonucleotide
caggcguaaacauccuuuc

SEQ ID NO: 1519584 - RNA, 19 nt, Artificial Sequence
  Description of Artificial Sequence: Synthetic oligonucleotide
cacuucaaucaccagcuca

SEQ ID NO: 1519585 - RNA, 19 nt, Artificial Sequence
  Description of Artificial Sequence: Synthetic oligonucleotide
auuccccaggcguaaacau

SEQ ID NO: 1519586 - RNA, 19 nt, Artificial Sequence
  Description of Artificial Sequence: Synthetic oligonucleotide
uccaccgguaugauuugaa

SEQ ID NO: 1519587 - RNA, 19 nt, Artificial Sequence
  Description of Artificial Sequence: Synthetic oligonucleotide
aaacaucucgggcggugau

SEQ ID NO: 1519588 - RNA, 19 nt, Artificial Sequence
  Description of Artificial Sequence: Synthetic oligonucleotide
agcucauggucuucuauua

SEQ ID NO: 1519589 - RNA, 19 nt, Artificial Sequence
  Description of Artificial Sequence: Synthetic oligonucleotide
caaucuaauggcggucacc

SEQ ID NO: 1519590 - RNA, 19 nt, Artificial Sequence
  Description of Artificial Sequence: Synthetic oligonucleotide
caugauuuacuuucaggcu

SEQ ID NO: 1519591 - RNA, 19 nt, Artificial Sequence
  Description of Artificial Sequence: Synthetic oligonucleotide
gcugaauaagaucugugaa

SEQ ID NO: 1519592 - RNA, 19 nt, Artificial Sequence
  Description of Artificial Sequence: Synthetic oligonucleotide
cuaccagcgaauucucuga

SEQ ID NO: 1519593 - RNA, 19 nt, Artificial Sequence
  Description of Artificial Sequence: Synthetic oligonucleotide
uacaaaaguucugggguua

SEQ ID NO: 1519594 - RNA, 19 nt, Artificial Sequence
  Description of Artificial Sequence: Synthetic oligonucleotide
ucuucggcacagagcauuc

SEQ ID NO: 1519595 - RNA, 19 nt, Artificial Sequence
  Description of Artificial Sequence: Synthetic oligonucleotide
gagucacauacaguuuggc

SEQ ID NO: 1519596 - RNA, 19 nt, Artificial Sequence
  Description of Artificial Sequence: Synthetic oligonucleotide
aguccauugcuaccagcga

SEQ ID NO: 1519597 - RNA, 19 nt, Artificial Sequence
  Description of Artificial Sequence: Synthetic oligonucleotide
cuaccgugauuccccaggc

SEQ ID NO: 1519598 - RNA, 19 nt, Artificial Sequence
  Description of Artificial Sequence: Synthetic oligonucleotide
uggaacaucucgccaucau

SEQ ID NO: 1519599 - RNA, 19 nt, Artificial Sequence
  Description of Artificial Sequence: Synthetic oligonucleotide
gcauauaauucugguacag

SEQ ID NO: 1519600 - RNA, 19 nt, Artificial Sequence
  Description of Artificial Sequence: Synthetic oligonucleotide
gguacuucuaacgcccugc

SEQ ID NO: 1519601 - RNA, 19 nt, Artificial Sequence
  Description of Artificial Sequence: Synthetic oligonucleotide
ucuacaccugugugagaca

SEQ ID NO: 1519602 - RNA, 19 nt, Artificial Sequence
  Description of Artificial Sequence: Synthetic oligonucleotide
cuaaagagccauccuagua

SEQ ID NO: 1519603 - RNA, 19 nt, Artificial Sequence
  Description of Artificial Sequence: Synthetic oligonucleotide
augggugcauauaauucug

SEQ ID NO: 1519604 - RNA, 19 nt, Artificial Sequence
  Description of Artificial Sequence: Synthetic oligonucleotide
uuccccaggcguaaacauc

SEQ ID NO: 1519605 - RNA, 19 nt, Artificial Sequence
  Description of Artificial Sequence: Synthetic oligonucleotide
gagccauccuaguacagua

SEQ ID NO: 1519606 - RNA, 19 nt, Artificial Sequence
  Description of Artificial Sequence: Synthetic oligonucleotide
uaauggcggucacccagca

SEQ ID NO: 1519607 - RNA, 19 nt, Artificial Sequence
  Description of Artificial Sequence: Synthetic oligonucleotide
uaugcucugugagcugcag

SEQ ID NO: 1519608 - RNA, 19 nt, Artificial Sequence
  Description of Artificial Sequence: Synthetic oligonucleotide
acauacaguuuggcuaaag

SEQ ID NO: 1519609 - RNA, 19 nt, Artificial Sequence
  Description of Artificial Sequence: Synthetic oligonucleotide
uagugcugaauucgcugaa

SEQ ID NO: 1519610 - RNA, 19 nt, Artificial Sequence
  Description of Artificial Sequence: Synthetic oligonucleotide
aggcguaaacauccuuucu

SEQ ID NO: 1519611 - RNA, 19 nt, Artificial Sequence
  Description of Artificial Sequence: Synthetic oligonucleotide
uagggcuaccgugauuccc

SEQ ID NO: 1519612 - RNA, 19 nt, Artificial Sequence
  Description of Artificial Sequence: Synthetic oligonucleotide
ugccacugacacguaaaca

SEQ ID NO: 1519613 - RNA, 19 nt, Artificial Sequence
  Description of Artificial Sequence: Synthetic oligonucleotide
cacuucgaccuugguaugg

SEQ ID NO: 1519614 - RNA, 19 nt, Artificial Sequence
  Description of Artificial Sequence: Synthetic oligonucleotide
cugccacugacacguaaac

SEQ ID NO: 1519615 - RNA, 19 nt, Artificial Sequence
  Description of Artificial Sequence: Synthetic oligonucleotide
cuaugacucugcucuucug

SEQ ID NO: 1519616 - RNA, 19 nt, Artificial Sequence
  Description of Artificial Sequence: Synthetic oligonucleotide
ugcuaccagcgaauucucu

SEQ ID NO: 1519617 - RNA, 19 nt, Artificial Sequence
  Description of Artificial Sequence: Synthetic oligonucleotide
caggcuuauuuguuaucuc

SEQ ID NO: 1519618 - RNA, 19 nt, Artificial Sequence
  Description of Artificial Sequence: Synthetic oligonucleotide
gcguaaacauccuuucuuc

SEQ ID NO: 1519619 - RNA, 19 nt, Artificial Sequence
  Description of Artificial Sequence: Synthetic oligonucleotide
gugugagacagguacucaa

SEQ ID NO: 1519620 - RNA, 19 nt, Artificial Sequence
  Description of Artificial Sequence: Synthetic oligonucleotide
ucgguuccuuucgaugugc

SEQ ID NO: 1519621 - RNA, 19 nt, Artificial Sequence
  Description of Artificial Sequence: Synthetic oligonucleotide
cauguucucuggaaagaaa

SEQ ID NO: 1519622 - RNA, 19 nt, Artificial Sequence
  Description of Artificial Sequence: Synthetic oligonucleotide
gcggucacccagcacaucc

SEQ ID NO: 1519623 - RNA, 19 nt, Artificial Sequence
  Description of Artificial Sequence: Synthetic oligonucleotide
ugggaucgauggauagcca

SEQ ID NO: 1519624 - RNA, 19 nt, Artificial Sequence
  Description of Artificial Sequence: Synthetic oligonucleotide
uugcuaccagcgaauucuc

SEQ ID NO: 1519625 - RNA, 19 nt, Artificial Sequence
  Description of Artificial Sequence: Synthetic oligonucleotide
ggugcauauaauucuggua

SEQ ID NO: 1519626 - RNA, 19 nt, Artificial Sequence
  Description of Artificial Sequence: Synthetic oligonucleotide
uaccagcgaauucucugau

SEQ ID NO: 1519627 - RNA, 19 nt, Artificial Sequence
  Description of Artificial Sequence: Synthetic oligonucleotide
gccacuucgaccuugguau

SEQ ID NO: 1519628 - RNA, 19 nt, Artificial Sequence
  Description of Artificial Sequence: Synthetic oligonucleotide
cccguaccaagaaaacucc

SEQ ID NO: 1519629 - RNA, 19 nt, Artificial Sequence
  Description of Artificial Sequence: Synthetic oligonucleotide
guuacucugacugucccgu

SEQ ID NO: 1519630 - RNA, 19 nt, Artificial Sequence
  Description of Artificial Sequence: Synthetic oligonucleotide
uccaagcgaguccuuccuc

SEQ ID NO: 1519631 - RNA, 19 nt, Artificial Sequence
  Description of Artificial Sequence: Synthetic oligonucleotide
acugucccguaccaagaaa

SEQ ID NO: 1519632 - RNA, 19 nt, Artificial Sequence
  Description of Artificial Sequence: Synthetic oligonucleotide
uccggugggguugucuaug

SEQ ID NO: 1519633 - RNA, 19 nt, Artificial Sequence
  Description of Artificial Sequence: Synthetic oligonucleotide
guaggggagucugucacca

SEQ ID NO: 1519634 - RNA, 19 nt, Artificial Sequence
  Description of Artificial Sequence: Synthetic oligonucleotide
gaucgauggauagccaugu

SEQ ID NO: 1519635 - RNA, 19 nt, Artificial Sequence
  Description of Artificial Sequence: Synthetic oligonucleotide
cguaaacauccuuucuucc

SEQ ID NO: 1519636 - RNA, 19 nt, Artificial Sequence
  Description of Artificial Sequence: Synthetic oligonucleotide
caagcauguaagaagccau

SEQ ID NO: 1519637 - RNA, 19 nt, Artificial Sequence
  Description of Artificial Sequence: Synthetic oligonucleotide
gaauuuuguguggccuuca

SEQ ID NO: 1519638 - RNA, 19 nt, Artificial Sequence
  Description of Artificial Sequence: Synthetic oligonucleotide
uuucuacaccugugugaga

SEQ ID NO: 1519639 - RNA, 19 nt, Artificial Sequence
  Description of Artificial Sequence: Synthetic oligonucleotide
uggguacuucuaacgcccu

SEQ ID NO: 1519640 - RNA, 19 nt, Artificial Sequence
  Description of Artificial Sequence: Synthetic oligonucleotide
gucgguuccuuucgaugug

SEQ ID NO: 1519641 - RNA, 19 nt, Artificial Sequence
  Description of Artificial Sequence: Synthetic oligonucleotide
cuuucgaugugccuuuagu

SEQ ID NO: 1519642 - RNA, 19 nt, Artificial Sequence
  Description of Artificial Sequence: Synthetic oligonucleotide
cgauggauagccauguuca

SEQ ID NO: 1519643 - RNA, 19 nt, Artificial Sequence
  Description of Artificial Sequence: Synthetic oligonucleotide
ucgggcggugaugucacug

SEQ ID NO: 1519644 - RNA, 19 nt, Artificial Sequence
  Description of Artificial Sequence: Synthetic oligonucleotide
ggcccuccugcuuuguuag

SEQ ID NO: 1519645 - RNA, 19 nt, Artificial Sequence
  Description of Artificial Sequence: Synthetic oligonucleotide
aaauaacauuggguucuua

SEQ ID NO: 1519646 - RNA, 19 nt, Artificial Sequence
  Description of Artificial Sequence: Synthetic oligonucleotide
cagcgaauucucugauaug

SEQ ID NO: 1519647 - RNA, 19 nt, Artificial Sequence
  Description of Artificial Sequence: Synthetic oligonucleotide
aucuaauggcggucaccca

SEQ ID NO: 1519648 - RNA, 19 nt, Artificial Sequence
  Description of Artificial Sequence: Synthetic oligonucleotide
gacugucccguaccaagaa

SEQ ID NO: 1519649 - RNA, 19 nt, Artificial Sequence
  Description of Artificial Sequence: Synthetic oligonucleotide
ggaucgauggauagccaug

SEQ ID NO: 1519650 - RNA, 19 nt, Artificial Sequence
  Description of Artificial Sequence: Synthetic oligonucleotide
ugggguugucuaugacucu

SEQ ID NO: 1519651 - RNA, 19 nt, Artificial Sequence
  Description of Artificial Sequence: Synthetic oligonucleotide
cuaguacaguaauguuuca

SEQ ID NO: 1519652 - RNA, 19 nt, Artificial Sequence
  Description of Artificial Sequence: Synthetic oligonucleotide
caugccgugcuuaagcaau

SEQ ID NO: 1519653 - RNA, 19 nt, Artificial Sequence
  Description of Artificial Sequence: Synthetic oligonucleotide
auguuucaacuugcaagga

SEQ ID NO: 1519654 - RNA, 19 nt, Artificial Sequence
  Description of Artificial Sequence: Synthetic oligonucleotide
aggauaggugcuugagcuu

SEQ ID NO: 1519655 - RNA, 19 nt, Artificial Sequence
  Description of Artificial Sequence: Synthetic oligonucleotide
ggcugggaucgauggauag

SEQ ID NO: 1519656 - RNA, 19 nt, Artificial Sequence
  Description of Artificial Sequence: Synthetic oligonucleotide
gguguggaacaucucgcca

SEQ ID NO: 1519657 - RNA, 19 nt, Artificial Sequence
  Description of Artificial Sequence: Synthetic oligonucleotide
ccauccuaguacaguaaug

SEQ ID NO: 1519658 - RNA, 19 nt, Artificial Sequence
  Description of Artificial Sequence: Synthetic oligonucleotide
caaggaaggacacccuugu

SEQ ID NO: 1519659 - RNA, 19 nt, Artificial Sequence
  Description of Artificial Sequence: Synthetic oligonucleotide
gggcaguagggcuaccgug

SEQ ID NO: 1519660 - RNA, 19 nt, Artificial Sequence
  Description of Artificial Sequence: Synthetic oligonucleotide
guagggcuaccgugauucc

SEQ ID NO: 1519661 - RNA, 19 nt, Artificial Sequence
  Description of Artificial Sequence: Synthetic oligonucleotide
agugcugaauucgcugaaa

SEQ ID NO: 1519662 - RNA, 19 nt, Artificial Sequence
  Description of Artificial Sequence: Synthetic oligonucleotide
cacgugagacagcacuuca

SEQ ID NO: 1519663 - RNA, 19 nt, Artificial Sequence
  Description of Artificial Sequence: Synthetic oligonucleotide
guacaaaaguucugggguu

SEQ ID NO: 1519664 - RNA, 19 nt, Artificial Sequence
  Description of Artificial Sequence: Synthetic oligonucleotide
gcaaggaaggacacccuug

SEQ ID NO: 1519665 - RNA, 19 nt, Artificial Sequence
  Description of Artificial Sequence: Synthetic oligonucleotide
aaaugccgucgguuccuuu

SEQ ID NO: 1519666 - RNA, 19 nt, Artificial Sequence
  Description of Artificial Sequence: Synthetic oligonucleotide
guguggaacaucucgccau

SEQ ID NO: 1519667 - RNA, 19 nt, Artificial Sequence
  Description of Artificial Sequence: Synthetic oligonucleotide
ugccgugcuuaagcaaucu

SEQ ID NO: 1519668 - RNA, 19 nt, Artificial Sequence
  Description of Artificial Sequence: Synthetic oligonucleotide
agcugcaugccgugcuuaa

SEQ ID NO: 1519669 - RNA, 19 nt, Artificial Sequence
  Description of Artificial Sequence: Synthetic oligonucleotide
uggcugggaucgauggaua

SEQ ID NO: 1519670 - RNA, 19 nt, Artificial Sequence
  Description of Artificial Sequence: Synthetic oligonucleotide
augccgugcuuaagcaauc

SEQ ID NO: 1519671 - RNA, 19 nt, Artificial Sequence
  Description of Artificial Sequence: Synthetic oligonucleotide
ggugaugucacuggguacu

SEQ ID NO: 1519672 - RNA, 19 nt, Artificial Sequence
  Description of Artificial Sequence: Synthetic oligonucleotide
accagcgaauucucugaua

SEQ ID NO: 1519673 - RNA, 19 nt, Artificial Sequence
  Description of Artificial Sequence: Synthetic oligonucleotide
uuccaccgguaugauuuga

SEQ ID NO: 1519674 - RNA, 19 nt, Artificial Sequence
  Description of Artificial Sequence: Synthetic oligonucleotide
cuuccggugggguugucua

SEQ ID NO: 1519675 - RNA, 19 nt, Artificial Sequence
  Description of Artificial Sequence: Synthetic oligonucleotide
agcugcaaaagaacaccau

SEQ ID NO: 1519676 - RNA, 19 nt, Artificial Sequence
  Description of Artificial Sequence: Synthetic oligonucleotide
ccgguaugauuugaaagug

SEQ ID NO: 1519677 - RNA, 19 nt, Artificial Sequence
  Description of Artificial Sequence: Synthetic oligonucleotide
ggguggauaugcucuguga

SEQ ID NO: 1519678 - RNA, 19 nt, Artificial Sequence
  Description of Artificial Sequence: Synthetic oligonucleotide
gguaugauuugaaaguguu

SEQ ID NO: 1519679 - RNA, 19 nt, Artificial Sequence
  Description of Artificial Sequence: Synthetic oligonucleotide
uggcggucacccagcacau

SEQ ID NO: 1519680 - RNA, 19 nt, Artificial Sequence
  Description of Artificial Sequence: Synthetic oligonucleotide
uuacucugacugucccgua

SEQ ID NO: 1519681 - RNA, 19 nt, Artificial Sequence
  Description of Artificial Sequence: Synthetic oligonucleotide
cugacacguaaacauuacu

SEQ ID NO: 1519682 - RNA, 19 nt, Artificial Sequence
  Description of Artificial Sequence: Synthetic oligonucleotide
gucugucaccauuggucuc

SEQ ID NO: 1519683 - RNA, 19 nt, Artificial Sequence
  Description of Artificial Sequence: Synthetic oligonucleotide
ggauaggugcuugagcuua

SEQ ID NO: 1519684 - RNA, 19 nt, Artificial Sequence
  Description of Artificial Sequence: Synthetic oligonucleotide
gggcggugaugucacuggg

SEQ ID NO: 1519685 - RNA, 19 nt, Artificial Sequence
  Description of Artificial Sequence: Synthetic oligonucleotide
caaacaucucgggcgguga

SEQ ID NO: 1519686 - RNA, 19 nt, Artificial Sequence
  Description of Artificial Sequence: Synthetic oligonucleotide
ccgugcuuaagcaaucuaa

SEQ ID NO: 1519687 - RNA, 19 nt, Artificial Sequence
  Description of Artificial Sequence: Synthetic oligonucleotide
gcugggaucgauggauagc

SEQ ID NO: 1519688 - RNA, 19 nt, Artificial Sequence
  Description of Artificial Sequence: Synthetic oligonucleotide
gauaggugcuugagcuuaa

SEQ ID NO: 1519689 - RNA, 19 nt, Artificial Sequence
  Description of Artificial Sequence: Synthetic oligonucleotide
ggucccggggcccuccugc

SEQ ID NO: 1519690 - RNA, 19 nt, Artificial Sequence
  Description of Artificial Sequence: Synthetic oligonucleotide
gcuugagcuuaaaacaucu

SEQ ID NO: 1519691 - RNA, 19 nt, Artificial Sequence
  Description of Artificial Sequence: Synthetic oligonucleotide
uuccggugggguugucuau

SEQ ID NO: 1519692 - RNA, 19 nt, Artificial Sequence
  Description of Artificial Sequence: Synthetic oligonucleotide
ccaagcauguaagaagcca

SEQ ID NO: 1519693 - RNA, 19 nt, Artificial Sequence
  Description of Artificial Sequence: Synthetic oligonucleotide
aucgauggauagccauguu

SEQ ID NO: 1519694 - RNA, 19 nt, Artificial Sequence
  Description of Artificial Sequence: Synthetic oligonucleotide
guacuucuaacgcccugcu

SEQ ID NO: 1519695 - RNA, 19 nt, Artificial Sequence
  Description of Artificial Sequence: Synthetic oligonucleotide
gcaaacaucucgggcggug

SEQ ID NO: 1519696 - RNA, 19 nt, Artificial Sequence
  Description of Artificial Sequence: Synthetic oligonucleotide
guacagcugcaugccgugc

SEQ ID NO: 1519697 - RNA, 19 nt, Artificial Sequence
  Description of Artificial Sequence: Synthetic oligonucleotide
caagcgaguccuuccucaa

SEQ ID NO: 1519698 - RNA, 19 nt, Artificial Sequence
  Description of Artificial Sequence: Synthetic oligonucleotide
gauuuguguaggggagucu

SEQ ID NO: 1519699 - RNA, 19 nt, Artificial Sequence
  Description of Artificial Sequence: Synthetic oligonucleotide
cauagugguucuucaggau

SEQ ID NO: 1519700 - RNA, 19 nt, Artificial Sequence
  Description of Artificial Sequence: Synthetic oligonucleotide
gcaaucuaauggcggucac

SEQ ID NO: 1519701 - RNA, 19 nt, Artificial Sequence
  Description of Artificial Sequence: Synthetic oligonucleotide
auaugcucugugagcugca

SEQ ID NO: 1519702 - RNA, 19 nt, Artificial Sequence
  Description of Artificial Sequence: Synthetic oligonucleotide
cuucuaacgcccugcuggu

SEQ ID NO: 1519703 - RNA, 19 nt, Artificial Sequence
  Description of Artificial Sequence: Synthetic oligonucleotide
ggguacuucuaacgcccug

SEQ ID NO: 1519704 - RNA, 19 nt, Artificial Sequence
  Description of Artificial Sequence: Synthetic oligonucleotide
gaugugccuuuaguagaaa

SEQ ID NO: 1519705 - RNA, 19 nt, Artificial Sequence
  Description of Artificial Sequence: Synthetic oligonucleotide
gggugcauauaauucuggu

SEQ ID NO: 1519706 - RNA, 19 nt, Artificial Sequence
  Description of Artificial Sequence: Synthetic oligonucleotide
ccaagcgaguccuuccuca

SEQ ID NO: 1519707 - RNA, 19 nt, Artificial Sequence
  Description of Artificial Sequence: Synthetic oligonucleotide
gcggugaugucacugggua

SEQ ID NO: 1519708 - RNA, 19 nt, Artificial Sequence
  Description of Artificial Sequence: Synthetic oligonucleotide
acgugagacagcacuucaa

SEQ ID NO: 1519709 - RNA, 19 nt, Artificial Sequence
  Description of Artificial Sequence: Synthetic oligonucleotide
ggguugucuaugacucugc

SEQ ID NO: 1519710 - RNA, 19 nt, Artificial Sequence
  Description of Artificial Sequence: Synthetic oligonucleotide
ggcaguuggugcuccaugu

SEQ ID NO: 1519711 - RNA, 19 nt, Artificial Sequence
  Description of Artificial Sequence: Synthetic oligonucleotide
uucuaacgcccugcugguc

SEQ ID NO: 1519712 - RNA, 19 nt, Artificial Sequence
  Description of Artificial Sequence: Synthetic oligonucleotide
acgcccugcuggucucauc

SEQ ID NO: 1519713 - RNA, 19 nt, Artificial Sequence
  Description of Artificial Sequence: Synthetic oligonucleotide
gucccguaccaagaaaacu

SEQ ID NO: 1519714 - RNA, 19 nt, Artificial Sequence
  Description of Artificial Sequence: Synthetic oligonucleotide
ccagcgaauucucugauau

SEQ ID NO: 1519715 - RNA, 19 nt, Artificial Sequence
  Description of Artificial Sequence: Synthetic oligonucleotide
auaggugcuugagcuuaaa

SEQ ID NO: 1519716 - RNA, 19 nt, Artificial Sequence
  Description of Artificial Sequence: Synthetic oligonucleotide
gcuaaagagccauccuagu

SEQ ID NO: 1519717 - RNA, 19 nt, Artificial Sequence
  Description of Artificial Sequence: Synthetic oligonucleotide
cagccacugaaagggcuuc

SEQ ID NO: 1519718 - RNA, 19 nt, Artificial Sequence
  Description of Artificial Sequence: Synthetic oligonucleotide
agccauccuaguacaguaa

SEQ ID NO: 1519719 - RNA, 19 nt, Artificial Sequence
  Description of Artificial Sequence: Synthetic oligonucleotide
ccuuucgaugugccuuuag

SEQ ID NO: 1519720 - RNA, 19 nt, Artificial Sequence
  Description of Artificial Sequence: Synthetic oligonucleotide
guggaacaucucgccauca

SEQ ID NO: 1519721 - RNA, 19 nt, Artificial Sequence
  Description of Artificial Sequence: Synthetic oligonucleotide
ccggauaaucagcugcuga

SEQ ID NO: 1519722 - RNA, 19 nt, Artificial Sequence
  Description of Artificial Sequence: Synthetic oligonucleotide
gggaucgauggauagccau

SEQ ID NO: 1519723 - RNA, 19 nt, Artificial Sequence
  Description of Artificial Sequence: Synthetic oligonucleotide
gguugucuaugacucugcu

SEQ ID NO: 1519724 - RNA, 19 nt, Artificial Sequence
  Description of Artificial Sequence: Synthetic oligonucleotide
aacgcccugcuggucucau

SEQ ID NO: 1519725 - RNA, 19 nt, Artificial Sequence
  Description of Artificial Sequence: Synthetic oligonucleotide
cgggcggugaugucacugg

SEQ ID NO: 1519726 - RNA, 19 nt, Artificial Sequence
  Description of Artificial Sequence: Synthetic oligonucleotide
ggguucuuaaagaauucau

SEQ ID NO: 1519727 - RNA, 19 nt, Artificial Sequence
  Description of Artificial Sequence: Synthetic oligonucleotide
gcugcaugccgugcuuaag

SEQ ID NO: 1519728 - RNA, 19 nt, Artificial Sequence
  Description of Artificial Sequence: Synthetic oligonucleotide
cuccaagcgaguccuuccu

SEQ ID NO: 1519729 - RNA, 19 nt, Artificial Sequence
  Description of Artificial Sequence: Synthetic oligonucleotide
ggcuaccgugauuccccag

SEQ ID NO: 1519730 - RNA, 19 nt, Artificial Sequence
  Description of Artificial Sequence: Synthetic oligonucleotide
ccccugccggauaaucagc

SEQ ID NO: 1519731 - RNA, 19 nt, Artificial Sequence
  Description of Artificial Sequence: Synthetic oligonucleotide
gccauccuaguacaguaau

SEQ ID NO: 1519732 - RNA, 19 nt, Artificial Sequence
  Description of Artificial Sequence: Synthetic oligonucleotide
uccuuucgaugugccuuua

SEQ ID NO: 1519733 - RNA, 19 nt, Artificial Sequence
  Description of Artificial Sequence: Synthetic oligonucleotide
cuucgaccuugguaugggu

SEQ ID NO: 1519734 - RNA, 19 nt, Artificial Sequence
  Description of Artificial Sequence: Synthetic oligonucleotide
ggauuucaggauaggugcu

SEQ ID NO: 1519735 - RNA, 19 nt, Artificial Sequence
  Description of Artificial Sequence: Synthetic oligonucleotide
ccguaccaagaaaacucca

SEQ ID NO: 1519736 - RNA, 19 nt, Artificial Sequence
  Description of Artificial Sequence: Synthetic oligonucleotide
ccacuucgaccuugguaug

SEQ ID NO: 1519737 - RNA, 19 nt, Artificial Sequence
  Description of Artificial Sequence: Synthetic oligonucleotide
ggacacccuuguugagcug

SEQ ID NO: 1519738 - RNA, 19 nt, Artificial Sequence
  Description of Artificial Sequence: Synthetic oligonucleotide
gccggauaaucagcugcug

SEQ ID NO: 1519739 - RNA, 19 nt, Artificial Sequence
  Description of Artificial Sequence: Synthetic oligonucleotide
ggcuuaaagcagaauccau

SEQ ID NO: 1519740 - RNA, 19 nt, Artificial Sequence
  Description of Artificial Sequence: Synthetic oligonucleotide
ccccacgugagacagcacu

SEQ ID NO: 1519741 - RNA, 19 nt, Artificial Sequence
  Description of Artificial Sequence: Synthetic oligonucleotide
cgucgguuccuuucgaugu

SEQ ID NO: 1519742 - RNA, 19 nt, Artificial Sequence
  Description of Artificial Sequence: Synthetic oligonucleotide
gccgugcuuaagcaaucua

SEQ ID NO: 1519743 - RNA, 19 nt, Artificial Sequence
  Description of Artificial Sequence: Synthetic oligonucleotide
gggcuaccgugauucccca

SEQ ID NO: 1519744 - RNA, 19 nt, Artificial Sequence
  Description of Artificial Sequence: Synthetic oligonucleotide
cgguaugauuugaaagugu

SEQ ID NO: 1519745 - RNA, 19 nt, Artificial Sequence
  Description of Artificial Sequence: Synthetic oligonucleotide
cuucggcacagagcauucu

SEQ ID NO: 1519746 - RNA, 19 nt, Artificial Sequence
  Description of Artificial Sequence: Synthetic oligonucleotide
ccgugauuccccaggcgua

SEQ ID NO: 1519747 - RNA, 19 nt, Artificial Sequence
  Description of Artificial Sequence: Synthetic oligonucleotide
gcaguagggcuaccgugau

SEQ ID NO: 1519748 - RNA, 19 nt, Artificial Sequence
  Description of Artificial Sequence: Synthetic oligonucleotide
ccacugacacguaaacauu

SEQ ID NO: 1519749 - RNA, 19 nt, Artificial Sequence
  Description of Artificial Sequence: Synthetic oligonucleotide
ggcggugaugucacugggu

SEQ ID NO: 1519750 - RNA, 19 nt, Artificial Sequence
  Description of Artificial Sequence: Synthetic oligonucleotide
cacaggccccugccggaua

SEQ ID NO: 1519751 - RNA, 19 nt, Artificial Sequence
  Description of Artificial Sequence: Synthetic oligonucleotide
gucccggggcccuccugcu

SEQ ID NO: 1519752 - RNA, 19 nt, Artificial Sequence
  Description of Artificial Sequence: Synthetic oligonucleotide
cgugauuccccaggcguaa

SEQ ID NO: 1519753 - RNA, 19 nt, Artificial Sequence
  Description of Artificial Sequence: Synthetic oligonucleotide
cacccuuguugagcuggua

SEQ ID NO: 1519754 - RNA, 19 nt, Artificial Sequence
  Description of Artificial Sequence: Synthetic oligonucleotide
gccgucgguuccuuucgau

SEQ ID NO: 1519755 - RNA, 19 nt, Artificial Sequence
  Description of Artificial Sequence: Synthetic oligonucleotide
ccggggcccuccugcuuug

SEQ ID NO: 1519756 - RNA, 19 nt, Artificial Sequence
  Description of Artificial Sequence: Synthetic oligonucleotide
caaaugccgucgguuccuu

SEQ ID NO: 1519757 - RNA, 19 nt, Artificial Sequence
  Description of Artificial Sequence: Synthetic oligonucleotide
ggcggucacccagcacauc

SEQ ID NO: 1519758 - RNA, 19 nt, Artificial Sequence
  Description of Artificial Sequence: Synthetic oligonucleotide
cgaccuugguaugggugca

SEQ ID NO: 1519759 - RNA, 19 nt, Artificial Sequence
  Description of Artificial Sequence: Synthetic oligonucleotide
gcccugcuggucucauccu

SEQ ID NO: 1519760 - RNA, 19 nt, Artificial Sequence
  Description of Artificial Sequence: Synthetic oligonucleotide
cucgggcggugaugucacu

SEQ ID NO: 1519761 - RNA, 19 nt, Artificial Sequence
  Description of Artificial Sequence: Synthetic oligonucleotide
cccaggcguaaacauccuu

SEQ ID NO: 1519762 - RNA, 19 nt, Artificial Sequence
  Description of Artificial Sequence: Synthetic oligonucleotide
ccccaggcguaaacauccu

SEQ ID NO: 1519763 - RNA, 19 nt, Artificial Sequence
  Description of Artificial Sequence: Synthetic oligonucleotide
gggcuuccggugggguugu

SEQ ID NO: 1519764 - RNA, 19 nt, Artificial Sequence
  Description of Artificial Sequence: Synthetic oligonucleotide
ggcuuccggugggguuguc

SEQ ID NO: 1519765 - RNA, 19 nt, Artificial Sequence
  Description of Artificial Sequence: Synthetic oligonucleotide
aacucaaucauuucuaacg

SEQ ID NO: 1519766 - RNA, 19 nt, Artificial Sequence
  Description of Artificial Sequence: Synthetic oligonucleotide
uuuuaugucacaaagugag

SEQ ID NO: 1519767 - RNA, 19 nt, Artificial Sequence
  Description of Artificial Sequence: Synthetic oligonucleotide
aagucuauccauuuaaaac

SEQ ID NO: 1519768 - RNA, 19 nt, Artificial Sequence
  Description of Artificial Sequence: Synthetic oligonucleotide
aauaaugcuaguuucagcu

SEQ ID NO: 1519769 - RNA, 19 nt, Artificial Sequence
  Description of Artificial Sequence: Synthetic oligonucleotide
aaacgcaaaagguucaagg

SEQ ID NO: 1519770 - RNA, 19 nt, Artificial Sequence
  Description of Artificial Sequence: Synthetic oligonucleotide
uucaguaagguucaccucg

SEQ ID NO: 1519771 - RNA, 19 nt, Artificial Sequence
  Description of Artificial Sequence: Synthetic oligonucleotide
aaagaguaaaugucccucc

SEQ ID NO: 1519772 - RNA, 19 nt, Artificial Sequence
  Description of Artificial Sequence: Synthetic oligonucleotide
agaagcgugacauuguggc

SEQ ID NO: 1519773 - RNA, 19 nt, Artificial Sequence
  Description of Artificial Sequence: Synthetic oligonucleotide
aagaguauacaccuuauca

SEQ ID NO: 1519774 - RNA, 19 nt, Artificial Sequence
  Description of Artificial Sequence: Synthetic oligonucleotide
ucaucuacaaagauaagca

SEQ ID NO: 1519775 - RNA, 19 nt, Artificial Sequence
  Description of Artificial Sequence: Synthetic oligonucleotide
aaauaaugcuaguuucagc

SEQ ID NO: 1519776 - RNA, 19 nt, Artificial Sequence
  Description of Artificial Sequence: Synthetic oligonucleotide
ucaacuaacacgaucucag

SEQ ID NO: 1519777 - RNA, 19 nt, Artificial Sequence
  Description of Artificial Sequence: Synthetic oligonucleotide
aucaucuacaaagauaagc

SEQ ID NO: 1519778 - RNA, 19 nt, Artificial Sequence
  Description of Artificial Sequence: Synthetic oligonucleotide
uaaaacgucuccuuucugg

SEQ ID NO: 1519779 - RNA, 19 nt, Artificial Sequence
  Description of Artificial Sequence: Synthetic oligonucleotide
auacuuaacacauaaggca

SEQ ID NO: 1519780 - RNA, 19 nt, Artificial Sequence
  Description of Artificial Sequence: Synthetic oligonucleotide
aagucaaguauuucccagc

SEQ ID NO: 1519781 - RNA, 19 nt, Artificial Sequence
  Description of Artificial Sequence: Synthetic oligonucleotide
ucagcuauaauacauuuau

SEQ ID NO: 1519782 - RNA, 19 nt, Artificial Sequence
  Description of Artificial Sequence: Synthetic oligonucleotide
agucuauccauuuaaaaca

SEQ ID NO: 1519783 - RNA, 19 nt, Artificial Sequence
  Description of Artificial Sequence: Synthetic oligonucleotide
acucaaucauuucuaacgc

SEQ ID NO: 1519784 - RNA, 19 nt, Artificial Sequence
  Description of Artificial Sequence: Synthetic oligonucleotide
aaagucaaguauuucccag

SEQ ID NO: 1519785 - RNA, 19 nt, Artificial Sequence
  Description of Artificial Sequence: Synthetic oligonucleotide
aaaguggggaaucuucagg

SEQ ID NO: 1519786 - RNA, 19 nt, Artificial Sequence
  Description of Artificial Sequence: Synthetic oligonucleotide
ucacaauagccaaaguggg

SEQ ID NO: 1519787 - RNA, 19 nt, Artificial Sequence
  Description of Artificial Sequence: Synthetic oligonucleotide
  modified_base (5)..(5): a, c, u, g, unknown or other
uuuunuuuucuucuucucu

SEQ ID NO: 1519788 - RNA, 19 nt, Artificial Sequence
  Description of Artificial Sequence: Synthetic oligonucleotide
gaucgagcagcauaaaugc

SEQ ID NO: 1519789 - RNA, 19 nt, Artificial Sequence
  Description of Artificial Sequence: Synthetic oligonucleotide
auaaccacagcucuagaag

SEQ ID NO: 1519790 - RNA, 19 nt, Artificial Sequence
  Description of Artificial Sequence: Synthetic oligonucleotide
cagaauugcacuuauuuug

SEQ ID NO: 1519791 - RNA, 19 nt, Artificial Sequence
  Description of Artificial Sequence: Synthetic oligonucleotide
ugcuuuagaccucaagcgg

SEQ ID NO: 1519792 - RNA, 19 nt, Artificial Sequence
  Description of Artificial Sequence: Synthetic oligonucleotide
ugugaaacuauaguuaaga

SEQ ID NO: 1519793 - RNA, 19 nt, Artificial Sequence
  Description of Artificial Sequence: Synthetic oligonucleotide
uccaauguuggaaagagua

SEQ ID NO: 1519794 - RNA, 19 nt, Artificial Sequence
  Description of Artificial Sequence: Synthetic oligonucleotide
aacgcaaaagguucaagga

SEQ ID NO: 1519795 - RNA, 19 nt, Artificial Sequence
  Description of Artificial Sequence: Synthetic oligonucleotide
uuuaaaacgucuccuuucu

SEQ ID NO: 1519796 - RNA, 19 nt, Artificial Sequence
  Description of Artificial Sequence: Synthetic oligonucleotide
uuuggaaaccuguuauggg

SEQ ID NO: 1519797 - RNA, 19 nt, Artificial Sequence
  Description of Artificial Sequence: Synthetic oligonucleotide
uuuauagauaauacuuaac

SEQ ID NO: 1519798 - RNA, 19 nt, Artificial Sequence
  Description of Artificial Sequence: Synthetic oligonucleotide
agaguuugauuccucgagc

SEQ ID NO: 1519799 - RNA, 19 nt, Artificial Sequence
  Description of Artificial Sequence: Synthetic oligonucleotide
gaggauuggaaacuggagc

SEQ ID NO: 1519800 - RNA, 19 nt, Artificial Sequence
  Description of Artificial Sequence: Synthetic oligonucleotide
aaucaucacaccaucguuc

SEQ ID NO: 1519801 - RNA, 19 nt, Artificial Sequence
  Description of Artificial Sequence: Synthetic oligonucleotide
accuguaacagccuuacug

SEQ ID NO: 1519802 - RNA, 19 nt, Artificial Sequence
  Description of Artificial Sequence: Synthetic oligonucleotide
ucauuucuaacgcaagugu

SEQ ID NO: 1519803 - RNA, 19 nt, Artificial Sequence
  Description of Artificial Sequence: Synthetic oligonucleotide
aaaagguucaaggaugccu

SEQ ID NO: 1519804 - RNA, 19 nt, Artificial Sequence
  Description of Artificial Sequence: Synthetic oligonucleotide
uuagagaagcgugacauug

SEQ ID NO: 1519805 - RNA, 19 nt, Artificial Sequence
  Description of Artificial Sequence: Synthetic oligonucleotide
ugauugugaaacuauaguu

SEQ ID NO: 1519806 - RNA, 19 nt, Artificial Sequence
  Description of Artificial Sequence: Synthetic oligonucleotide
aacuaacacgaucucagca

SEQ ID NO: 1519807 - RNA, 19 nt, Artificial Sequence
  Description of Artificial Sequence: Synthetic oligonucleotide
  modified_base (4)..(4): a, c, u, g, unknown or other
uuunuuuucuucuucucuu

SEQ ID NO: 1519808 - RNA, 19 nt, Artificial Sequence
  Description of Artificial Sequence: Synthetic oligonucleotide
agugugauaccccagggca

SEQ ID NO: 1519809 - RNA, 19 nt, Artificial Sequence
  Description of Artificial Sequence: Synthetic oligonucleotide
gugcuuuagaccucaagcg

SEQ ID NO: 1519810 - RNA, 19 nt, Artificial Sequence
  Description of Artificial Sequence: Synthetic oligonucleotide
aacacauaaggcaagagua

SEQ ID NO: 1519811 - RNA, 19 nt, Artificial Sequence
  Description of Artificial Sequence: Synthetic oligonucleotide
uuuaagaagaagggcauga

SEQ ID NO: 1519812 - RNA, 19 nt, Artificial Sequence
  Description of Artificial Sequence: Synthetic oligonucleotide
acuauuauuucagaucgag

SEQ ID NO: 1519813 - RNA, 19 nt, Artificial Sequence
  Description of Artificial Sequence: Synthetic oligonucleotide
ugccaaagcauaaccacag

SEQ ID NO: 1519814 - RNA, 19 nt, Artificial Sequence
  Description of Artificial Sequence: Synthetic oligonucleotide
uagaagucuauccauuuaa

SEQ ID NO: 1519815 - RNA, 19 nt, Artificial Sequence
  Description of Artificial Sequence: Synthetic oligonucleotide
aacgucuccuuucugguca

SEQ ID NO: 1519816 - RNA, 19 nt, Artificial Sequence
  Description of Artificial Sequence: Synthetic oligonucleotide
uaggauuuccacagguuag

SEQ ID NO: 1519817 - RNA, 19 nt, Artificial Sequence
  Description of Artificial Sequence: Synthetic oligonucleotide
gauccaauguuggaaagag

SEQ ID NO: 1519818 - RNA, 19 nt, Artificial Sequence
  Description of Artificial Sequence: Synthetic oligonucleotide
agauaagcagaauugcacu

SEQ ID NO: 1519819 - RNA, 19 nt, Artificial Sequence
  Description of Artificial Sequence: Synthetic oligonucleotide
agaucggugguacugagcu

SEQ ID NO: 1519820 - RNA, 19 nt, Artificial Sequence
  Description of Artificial Sequence: Synthetic oligonucleotide
uaugauauuuuaugucaca

SEQ ID NO: 1519821 - RNA, 19 nt, Artificial Sequence
  Description of Artificial Sequence: Synthetic oligonucleotide
aaagauaagcagaauugca

SEQ ID NO: 1519822 - RNA, 19 nt, Artificial Sequence
  Description of Artificial Sequence: Synthetic oligonucleotide
aauugauccaauguuggaa

SEQ ID NO: 1519823 - RNA, 19 nt, Artificial Sequence
  Description of Artificial Sequence: Synthetic oligonucleotide
uaucugugcuuuaaaacgu

SEQ ID NO: 1519824 - RNA, 19 nt, Artificial Sequence
  Description of Artificial Sequence: Synthetic oligonucleotide
ucaagcgggaacucaauca

SEQ ID NO: 1519825 - RNA, 19 nt, Artificial Sequence
  Description of Artificial Sequence: Synthetic oligonucleotide
agaguauacaccuuaucau

SEQ ID NO: 1519826 - RNA, 19 nt, Artificial Sequence
  Description of Artificial Sequence: Synthetic oligonucleotide
uguuucaacuaacacgauc

SEQ ID NO: 1519827 - RNA, 19 nt, Artificial Sequence
  Description of Artificial Sequence: Synthetic oligonucleotide
auacuggaggcuuugauau

SEQ ID NO: 1519828 - RNA, 19 nt, Artificial Sequence
  Description of Artificial Sequence: Synthetic oligonucleotide
gaguauacaccuuaucauc

SEQ ID NO: 1519829 - RNA, 19 nt, Artificial Sequence
  Description of Artificial Sequence: Synthetic oligonucleotide
uggagcaaucccaaagaag

SEQ ID NO: 1519830 - RNA, 19 nt, Artificial Sequence
  Description of Artificial Sequence: Synthetic oligonucleotide
aagcgugacauuguggcuc

SEQ ID NO: 1519831 - RNA, 19 nt, Artificial Sequence
  Description of Artificial Sequence: Synthetic oligonucleotide
caaagauaagcagaauugc

SEQ ID NO: 1519832 - RNA, 19 nt, Artificial Sequence
  Description of Artificial Sequence: Synthetic oligonucleotide
ccaucguucauuuucagcc

SEQ ID NO: 1519833 - RNA, 19 nt, Artificial Sequence
  Description of Artificial Sequence: Synthetic oligonucleotide
ggagcaaucccaaagaagc

SEQ ID NO: 1519834 - RNA, 19 nt, Artificial Sequence
  Description of Artificial Sequence: Synthetic oligonucleotide
caaagcauaaccacagcuc

SEQ ID NO: 1519835 - RNA, 19 nt, Artificial Sequence
  Description of Artificial Sequence: Synthetic oligonucleotide
uuucccagcaaauugccaa

SEQ ID NO: 1519836 - RNA, 19 nt, Artificial Sequence
  Description of Artificial Sequence: Synthetic oligonucleotide
aauguugugagaagccuug

SEQ ID NO: 1519837 - RNA, 19 nt, Artificial Sequence
  Description of Artificial Sequence: Synthetic oligonucleotide
cuauuauuucagaucgagc

SEQ ID NO: 1519838 - RNA, 19 nt, Artificial Sequence
  Description of Artificial Sequence: Synthetic oligonucleotide
agcagaauugcacuuauuu

SEQ ID NO: 1519839 - RNA, 19 nt, Artificial Sequence
  Description of Artificial Sequence: Synthetic oligonucleotide
guaagguucaccucgucac

SEQ ID NO: 1519840 - RNA, 19 nt, Artificial Sequence
  Description of Artificial Sequence: Synthetic oligonucleotide
ucuaacgcaaguguaacaa

SEQ ID NO: 1519841 - RNA, 19 nt, Artificial Sequence
  Description of Artificial Sequence: Synthetic oligonucleotide
aagggccgguaauugcucc

SEQ ID NO: 1519842 - RNA, 19 nt, Artificial Sequence
  Description of Artificial Sequence: Synthetic oligonucleotide
ucaaaucggggaagggccg

SEQ ID NO: 1519843 - RNA, 19 nt, Artificial Sequence
  Description of Artificial Sequence: Synthetic oligonucleotide
guaacaagaacacgugcug

SEQ ID NO: 1519844 - RNA, 19 nt, Artificial Sequence
  Description of Artificial Sequence: Synthetic oligonucleotide
uucaccucgucacaauagc

SEQ ID NO: 1519845 - RNA, 19 nt, Artificial Sequence
  Description of Artificial Sequence: Synthetic oligonucleotide
ucuucuucucuucuucucu

SEQ ID NO: 1519846 - RNA, 19 nt, Artificial Sequence
  Description of Artificial Sequence: Synthetic oligonucleotide
ugugagaagccuuguaggu

SEQ ID NO: 1519847 - RNA, 19 nt, Artificial Sequence
  Description of Artificial Sequence: Synthetic oligonucleotide
auugauccaauguuggaaa

SEQ ID NO: 1519848 - RNA, 19 nt, Artificial Sequence
  Description of Artificial Sequence: Synthetic oligonucleotide
guaauugcucccaaggccc

SEQ ID NO: 1519849 - RNA, 19 nt, Artificial Sequence
  Description of Artificial Sequence: Synthetic oligonucleotide
acguuggggacaauuaacc

SEQ ID NO: 1519850 - RNA, 19 nt, Artificial Sequence
  Description of Artificial Sequence: Synthetic oligonucleotide
uucaguuccauggcgaucu

SEQ ID NO: 1519851 - RNA, 19 nt, Artificial Sequence
  Description of Artificial Sequence: Synthetic oligonucleotide
aagaguaaaugucccucca

SEQ ID NO: 1519852 - RNA, 19 nt, Artificial Sequence
  Description of Artificial Sequence: Synthetic oligonucleotide
agaucgagcagcauaaaug

SEQ ID NO: 1519853 - RNA, 19 nt, Artificial Sequence
  Description of Artificial Sequence: Synthetic oligonucleotide
uuaaccccagcucaguauc

SEQ ID NO: 1519854 - RNA, 19 nt, Artificial Sequence
  Description of Artificial Sequence: Synthetic oligonucleotide
uuugccugugaauacugga

SEQ ID NO: 1519855 - RNA, 19 nt, Artificial Sequence
  Description of Artificial Sequence: Synthetic oligonucleotide
cuuucuggucaaaucgggg

SEQ ID NO: 1519856 - RNA, 19 nt, Artificial Sequence
  Description of Artificial Sequence: Synthetic oligonucleotide
aguaagguucaccucguca

SEQ ID NO: 1519857 - RNA, 19 nt, Artificial Sequence
  Description of Artificial Sequence: Synthetic oligonucleotide
uuacugauugugaaacuau

SEQ ID NO: 1519858 - RNA, 19 nt, Artificial Sequence
  Description of Artificial Sequence: Synthetic oligonucleotide
acaauagccaaagugggga

SEQ ID NO: 1519859 - RNA, 19 nt, Artificial Sequence
  Description of Artificial Sequence: Synthetic oligonucleotide
aagcuuaaccaguucagua

SEQ ID NO: 1519860 - RNA, 19 nt, Artificial Sequence
  Description of Artificial Sequence: Synthetic oligonucleotide
uugugaaacuauaguuaag

SEQ ID NO: 1519861 - RNA, 19 nt, Artificial Sequence
  Description of Artificial Sequence: Synthetic oligonucleotide
aguaagaucggugguacug

SEQ ID NO: 1519862 - RNA, 19 nt, Artificial Sequence
  Description of Artificial Sequence: Synthetic oligonucleotide
gauugugaaacuauaguua

SEQ ID NO: 1519863 - RNA, 19 nt, Artificial Sequence
  Description of Artificial Sequence: Synthetic oligonucleotide
cacaauagccaaagugggg

SEQ ID NO: 1519864 - RNA, 19 nt, Artificial Sequence
  Description of Artificial Sequence: Synthetic oligonucleotide
uuuaugucacaaagugagu

SEQ ID NO: 1519865 - RNA, 19 nt, Artificial Sequence
  Description of Artificial Sequence: Synthetic oligonucleotide
uauugagaagucacccugu

SEQ ID NO: 1519866 - RNA, 19 nt, Artificial Sequence
  Description of Artificial Sequence: Synthetic oligonucleotide
acugauugugaaacuauag

SEQ ID NO: 1519867 - RNA, 19 nt, Artificial Sequence
  Description of Artificial Sequence: Synthetic oligonucleotide
uugauccaauguuggaaag

SEQ ID NO: 1519868 - RNA, 19 nt, Artificial Sequence
  Description of Artificial Sequence: Synthetic oligonucleotide
uuucagcuauaauacauuu

SEQ ID NO: 1519869 - RNA, 19 nt, Artificial Sequence
  Description of Artificial Sequence: Synthetic oligonucleotide
agcuuaaccaguucaguaa

SEQ ID NO: 1519870 - RNA, 19 nt, Artificial Sequence
  Description of Artificial Sequence: Synthetic oligonucleotide
accuacacagugugauacc

SEQ ID NO: 1519871 - RNA, 19 nt, Artificial Sequence
  Description of Artificial Sequence: Synthetic oligonucleotide
gucaaaucggggaagggcc

SEQ ID NO: 1519872 - RNA, 19 nt, Artificial Sequence
  Description of Artificial Sequence: Synthetic oligonucleotide
ucugugcuuuaaaacgucu

SEQ ID NO: 1519873 - RNA, 19 nt, Artificial Sequence
  Description of Artificial Sequence: Synthetic oligonucleotide
uuaaaacgucuccuuucug

SEQ ID NO: 1519874 - RNA, 19 nt, Artificial Sequence
  Description of Artificial Sequence: Synthetic oligonucleotide
ucuucucuucuucucuucu

SEQ ID NO: 1519875 - RNA, 19 nt, Artificial Sequence
  Description of Artificial Sequence: Synthetic oligonucleotide
gugaaacuauaguuaagac

SEQ ID NO: 1519876 - RNA, 19 nt, Artificial Sequence
  Description of Artificial Sequence: Synthetic oligonucleotide
guuucaacuaacacgaucu

SEQ ID NO: 1519877 - RNA, 19 nt, Artificial Sequence
  Description of Artificial Sequence: Synthetic oligonucleotide
auagguuccaccaauugau

SEQ ID NO: 1519878 - RNA, 19 nt, Artificial Sequence
  Description of Artificial Sequence: Synthetic oligonucleotide
uggaaacgcaaaagguuca

SEQ ID NO: 1519879 - RNA, 19 nt, Artificial Sequence
  Description of Artificial Sequence: Synthetic oligonucleotide
ucuagaagucuauccauuu

SEQ ID NO: 1519880 - RNA, 19 nt, Artificial Sequence
  Description of Artificial Sequence: Synthetic oligonucleotide
gcuauaauacauuuauaga

SEQ ID NO: 1519881 - RNA, 19 nt, Artificial Sequence
  Description of Artificial Sequence: Synthetic oligonucleotide
cauucuucacguuggggac

SEQ ID NO: 1519882 - RNA, 19 nt, Artificial Sequence
  Description of Artificial Sequence: Synthetic oligonucleotide
uuucuaacgcaaguguaac

SEQ ID NO: 1519883 - RNA, 19 nt, Artificial Sequence
  Description of Artificial Sequence: Synthetic oligonucleotide
cagcucuagaagucuaucc

SEQ ID NO: 1519884 - RNA, 19 nt, Artificial Sequence
  Description of Artificial Sequence: Synthetic oligonucleotide
aagaucggugguacugagc

SEQ ID NO: 1519885 - RNA, 19 nt, Artificial Sequence
  Description of Artificial Sequence: Synthetic oligonucleotide
acacagagcgaaccugaac

SEQ ID NO: 1519886 - RNA, 19 nt, Artificial Sequence
  Description of Artificial Sequence: Synthetic oligonucleotide
auaauacuuaacacauaag

SEQ ID NO: 1519887 - RNA, 19 nt, Artificial Sequence
  Description of Artificial Sequence: Synthetic oligonucleotide
cuaacgcaaguguaacaag

SEQ ID NO: 1519888 - RNA, 19 nt, Artificial Sequence
  Description of Artificial Sequence: Synthetic oligonucleotide
uuuaccuguaacagccuua

SEQ ID NO: 1519889 - RNA, 19 nt, Artificial Sequence
  Description of Artificial Sequence: Synthetic oligonucleotide
uuucuucuucucuucuucu

SEQ ID NO: 1519890 - RNA, 19 nt, Artificial Sequence
  Description of Artificial Sequence: Synthetic oligonucleotide
uaagaucggugguacugag

SEQ ID NO: 1519891 - RNA, 19 nt, Artificial Sequence
  Description of Artificial Sequence: Synthetic oligonucleotide
uucagcuauaauacauuua

SEQ ID NO: 1519892 - RNA, 19 nt, Artificial Sequence
  Description of Artificial Sequence: Synthetic oligonucleotide
uucacguuggggacaauua

SEQ ID NO: 1519893 - RNA, 19 nt, Artificial Sequence
  Description of Artificial Sequence: Synthetic oligonucleotide
ugauuccucgagccaaagc

SEQ ID NO: 1519894 - RNA, 19 nt, Artificial Sequence
  Description of Artificial Sequence: Synthetic oligonucleotide
aguuucagcuauaauacau

SEQ ID NO: 1519895 - RNA, 19 nt, Artificial Sequence
  Description of Artificial Sequence: Synthetic oligonucleotide
uucuggucaaaucggggaa

SEQ ID NO: 1519896 - RNA, 19 nt, Artificial Sequence
  Description of Artificial Sequence: Synthetic oligonucleotide
aaccacagcucuagaaguc

SEQ ID NO: 1519897 - RNA, 19 nt, Artificial Sequence
  Description of Artificial Sequence: Synthetic oligonucleotide
uacugauugugaaacuaua

SEQ ID NO: 1519898 - RNA, 19 nt, Artificial Sequence
  Description of Artificial Sequence: Synthetic oligonucleotide
auaguuaagaccagauuau

SEQ ID NO: 1519899 - RNA, 19 nt, Artificial Sequence
  Description of Artificial Sequence: Synthetic oligonucleotide
gaccuacacagugugauac

SEQ ID NO: 1519900 - RNA, 19 nt, Artificial Sequence
  Description of Artificial Sequence: Synthetic oligonucleotide
uuaccuguaacagccuuac

SEQ ID NO: 1519901 - RNA, 19 nt, Artificial Sequence
  Description of Artificial Sequence: Synthetic oligonucleotide
gagaagucacccugugacc

SEQ ID NO: 1519902 - RNA, 19 nt, Artificial Sequence
  Description of Artificial Sequence: Synthetic oligonucleotide
aguaaaugucccuccagua

SEQ ID NO: 1519903 - RNA, 19 nt, Artificial Sequence
  Description of Artificial Sequence: Synthetic oligonucleotide
caaaguggggaaucuucag

SEQ ID NO: 1519904 - RNA, 19 nt, Artificial Sequence
  Description of Artificial Sequence: Synthetic oligonucleotide
ucacguuggggacaauuaa

SEQ ID NO: 1519905 - RNA, 19 nt, Artificial Sequence
  Description of Artificial Sequence: Synthetic oligonucleotide
uucuaacgcaaguguaaca

SEQ ID NO: 1519906 - RNA, 19 nt, Artificial Sequence
  Description of Artificial Sequence: Synthetic oligonucleotide
auuaaccccagcucaguau

SEQ ID NO: 1519907 - RNA, 19 nt, Artificial Sequence
  Description of Artificial Sequence: Synthetic oligonucleotide
agaauugcacuuauuuugu

SEQ ID NO: 1519908 - RNA, 19 nt, Artificial Sequence
  Description of Artificial Sequence: Synthetic oligonucleotide
uaguuucagcuauaauaca

SEQ ID NO: 1519909 - RNA, 19 nt, Artificial Sequence
  Description of Artificial Sequence: Synthetic oligonucleotide
ccuguuaugggcucugucc

SEQ ID NO: 1519910 - RNA, 19 nt, Artificial Sequence
  Description of Artificial Sequence: Synthetic oligonucleotide
acgcaaaagguucaaggau

SEQ ID NO: 1519911 - RNA, 19 nt, Artificial Sequence
  Description of Artificial Sequence: Synthetic oligonucleotide
ugcuaucccaauguuguga

SEQ ID NO: 1519912 - RNA, 19 nt, Artificial Sequence
  Description of Artificial Sequence: Synthetic oligonucleotide
ugacauuguggcuccguca

SEQ ID NO: 1519913 - RNA, 19 nt, Artificial Sequence
  Description of Artificial Sequence: Synthetic oligonucleotide
gaguuugaaaagucaagua

SEQ ID NO: 1519914 - RNA, 19 nt, Artificial Sequence
  Description of Artificial Sequence: Synthetic oligonucleotide
ggcauugaggauuggaaac

SEQ ID NO: 1519915 - RNA, 19 nt, Artificial Sequence
  Description of Artificial Sequence: Synthetic oligonucleotide
cacguuggggacaauuaac

SEQ ID NO: 1519916 - RNA, 19 nt, Artificial Sequence
  Description of Artificial Sequence: Synthetic oligonucleotide
agaagucacccugugaccu

SEQ ID NO: 1519917 - RNA, 19 nt, Artificial Sequence
  Description of Artificial Sequence: Synthetic oligonucleotide
gacauuguggcuccgucaa

SEQ ID NO: 1519918 - RNA, 19 nt, Artificial Sequence
  Description of Artificial Sequence: Synthetic oligonucleotide
guuguugccuguuucaacu

SEQ ID NO: 1519919 - RNA, 19 nt, Artificial Sequence
  Description of Artificial Sequence: Synthetic oligonucleotide
gauuauaauuuccccuuua

SEQ ID NO: 1519920 - RNA, 19 nt, Artificial Sequence
  Description of Artificial Sequence: Synthetic oligonucleotide
guaggauuuccacagguua

SEQ ID NO: 1519921 - RNA, 19 nt, Artificial Sequence
  Description of Artificial Sequence: Synthetic oligonucleotide
ugucuuugccugugaauac

SEQ ID NO: 1519922 - RNA, 19 nt, Artificial Sequence
  Description of Artificial Sequence: Synthetic oligonucleotide
uccgucaaugacccuguga

SEQ ID NO: 1519923 - RNA, 19 nt, Artificial Sequence
  Description of Artificial Sequence: Synthetic oligonucleotide
ucacgcacucuuuggaaac

SEQ ID NO: 1519924 - RNA, 19 nt, Artificial Sequence
  Description of Artificial Sequence: Synthetic oligonucleotide
uguugccuguuucaacuaa

SEQ ID NO: 1519925 - RNA, 19 nt, Artificial Sequence
  Description of Artificial Sequence: Synthetic oligonucleotide
agccaagagccuaccaugc

SEQ ID NO: 1519926 - RNA, 19 nt, Artificial Sequence
  Description of Artificial Sequence: Synthetic oligonucleotide
ccuccaguaagaucggugg

SEQ ID NO: 1519927 - RNA, 19 nt, Artificial Sequence
  Description of Artificial Sequence: Synthetic oligonucleotide
auuucuaacgcaaguguaa

SEQ ID NO: 1519928 - RNA, 19 nt, Artificial Sequence
  Description of Artificial Sequence: Synthetic oligonucleotide
uuccucgagccaaagcaac

SEQ ID NO: 1519929 - RNA, 19 nt, Artificial Sequence
  Description of Artificial Sequence: Synthetic oligonucleotide
ugcuuuaaaacgucuccuu

SEQ ID NO: 1519930 - RNA, 19 nt, Artificial Sequence
  Description of Artificial Sequence: Synthetic oligonucleotide
caacuaacacgaucucagc

SEQ ID NO: 1519931 - RNA, 19 nt, Artificial Sequence
  Description of Artificial Sequence: Synthetic oligonucleotide
caacagaucucuaagcaua

SEQ ID NO: 1519932 - RNA, 19 nt, Artificial Sequence
  Description of Artificial Sequence: Synthetic oligonucleotide
agggccgguaauugcuccc

SEQ ID NO: 1519933 - RNA, 19 nt, Artificial Sequence
  Description of Artificial Sequence: Synthetic oligonucleotide
gacauggucuugaccauug

SEQ ID NO: 1519934 - RNA, 19 nt, Artificial Sequence
  Description of Artificial Sequence: Synthetic oligonucleotide
cagccaagagccuaccaug

SEQ ID NO: 1519935 - RNA, 19 nt, Artificial Sequence
  Description of Artificial Sequence: Synthetic oligonucleotide
aucggugguacugagcuga

SEQ ID NO: 1519936 - RNA, 19 nt, Artificial Sequence
  Description of Artificial Sequence: Synthetic oligonucleotide
uguuaugggcucuguccug

SEQ ID NO: 1519937 - RNA, 19 nt, Artificial Sequence
  Description of Artificial Sequence: Synthetic oligonucleotide
uucuucuucucuucuucuc

SEQ ID NO: 1519938 - RNA, 19 nt, Artificial Sequence
  Description of Artificial Sequence: Synthetic oligonucleotide
auuuaccuguaacagccuu

SEQ ID NO: 1519939 - RNA, 19 nt, Artificial Sequence
  Description of Artificial Sequence: Synthetic oligonucleotide
aacgcaaguguaacaagaa

SEQ ID NO: 1519940 - RNA, 19 nt, Artificial Sequence
  Description of Artificial Sequence: Synthetic oligonucleotide
accuguuaugggcucuguc

SEQ ID NO: 1519941 - RNA, 19 nt, Artificial Sequence
  Description of Artificial Sequence: Synthetic oligonucleotide
auuguggcuccgucaauga

SEQ ID NO: 1519942 - RNA, 19 nt, Artificial Sequence
  Description of Artificial Sequence: Synthetic oligonucleotide
ugugaccuacacaguguga

SEQ ID NO: 1519943 - RNA, 19 nt, Artificial Sequence
  Description of Artificial Sequence: Synthetic oligonucleotide
uccucgagccaaagcaaca

SEQ ID NO: 1519944 - RNA, 19 nt, Artificial Sequence
  Description of Artificial Sequence: Synthetic oligonucleotide
caagaacacgugcuggcac

SEQ ID NO: 1519945 - RNA, 19 nt, Artificial Sequence
  Description of Artificial Sequence: Synthetic oligonucleotide
cauaaccacagcucuagaa

SEQ ID NO: 1519946 - RNA, 19 nt, Artificial Sequence
  Description of Artificial Sequence: Synthetic oligonucleotide
gcuaucccaauguugugag

SEQ ID NO: 1519947 - RNA, 19 nt, Artificial Sequence
  Description of Artificial Sequence: Synthetic oligonucleotide
gaguaaaugucccuccagu

SEQ ID NO: 1519948 - RNA, 19 nt, Artificial Sequence
  Description of Artificial Sequence: Synthetic oligonucleotide
cauuguggcuccgucaaug

SEQ ID NO: 1519949 - RNA, 19 nt, Artificial Sequence
  Description of Artificial Sequence: Synthetic oligonucleotide
agugguaaauacugugcuu

SEQ ID NO: 1519950 - RNA, 19 nt, Artificial Sequence
  Description of Artificial Sequence: Synthetic oligonucleotide
ugaccagaagaacccaguu

SEQ ID NO: 1519951 - RNA, 19 nt, Artificial Sequence
  Description of Artificial Sequence: Synthetic oligonucleotide
cuuuaagaagaagggcaug

SEQ ID NO: 1519952 - RNA, 19 nt, Artificial Sequence
  Description of Artificial Sequence: Synthetic oligonucleotide
auaaugcuaguuucagcua

SEQ ID NO: 1519953 - RNA, 19 nt, Artificial Sequence
  Description of Artificial Sequence: Synthetic oligonucleotide
ugugaauacuggaggcuuu

SEQ ID NO: 1519954 - RNA, 19 nt, Artificial Sequence
  Description of Artificial Sequence: Synthetic oligonucleotide
aaaugucccuccaguaaga

SEQ ID NO: 1519955 - RNA, 19 nt, Artificial Sequence
  Description of Artificial Sequence: Synthetic oligonucleotide
aacagaucucuaagcauaa

SEQ ID NO: 1519956 - RNA, 19 nt, Artificial Sequence
  Description of Artificial Sequence: Synthetic oligonucleotide
uauccauugcuaucccaau

SEQ ID NO: 1519957 - RNA, 19 nt, Artificial Sequence
  Description of Artificial Sequence: Synthetic oligonucleotide
acgcacucuuuggaaacgc

SEQ ID NO: 1519958 - RNA, 19 nt, Artificial Sequence
  Description of Artificial Sequence: Synthetic oligonucleotide
cugugaucggcugaccagc

SEQ ID NO: 1519959 - RNA, 19 nt, Artificial Sequence
  Description of Artificial Sequence: Synthetic oligonucleotide
cauugaggauuggaaacug

SEQ ID NO: 1519960 - RNA, 19 nt, Artificial Sequence
  Description of Artificial Sequence: Synthetic oligonucleotide
auaucacuggcuuggcaua

SEQ ID NO: 1519961 - RNA, 19 nt, Artificial Sequence
  Description of Artificial Sequence: Synthetic oligonucleotide
accucgucacaauagccaa

SEQ ID NO: 1519962 - RNA, 19 nt, Artificial Sequence
  Description of Artificial Sequence: Synthetic oligonucleotide
ggucaaaucggggaagggc

SEQ ID NO: 1519963 - RNA, 19 nt, Artificial Sequence
  Description of Artificial Sequence: Synthetic oligonucleotide
uccaguaagaucgguggua

SEQ ID NO: 1519964 - RNA, 19 nt, Artificial Sequence
  Description of Artificial Sequence: Synthetic oligonucleotide
gccagugguaaauacugug

SEQ ID NO: 1519965 - RNA, 19 nt, Artificial Sequence
  Description of Artificial Sequence: Synthetic oligonucleotide
guggcuccgucaaugaccc

SEQ ID NO: 1519966 - RNA, 19 nt, Artificial Sequence
  Description of Artificial Sequence: Synthetic oligonucleotide
ggacaauuaaccccagcuc

SEQ ID NO: 1519967 - RNA, 19 nt, Artificial Sequence
  Description of Artificial Sequence: Synthetic oligonucleotide
cuuuagaccucaagcggga

SEQ ID NO: 1519968 - RNA, 19 nt, Artificial Sequence
  Description of Artificial Sequence: Synthetic oligonucleotide
gauaagcagaauugcacuu

SEQ ID NO: 1519969 - RNA, 19 nt, Artificial Sequence
  Description of Artificial Sequence: Synthetic oligonucleotide
cuuacugauugugaaacua

SEQ ID NO: 1519970 - RNA, 19 nt, Artificial Sequence
  Description of Artificial Sequence: Synthetic oligonucleotide
cugugcuuuagaccucaag

SEQ ID NO: 1519971 - RNA, 19 nt, Artificial Sequence
  Description of Artificial Sequence: Synthetic oligonucleotide
caauugauccaauguugga

SEQ ID NO: 1519972 - RNA, 19 nt, Artificial Sequence
  Description of Artificial Sequence: Synthetic oligonucleotide
ugauaccccagggcaauca

SEQ ID NO: 1519973 - RNA, 19 nt, Artificial Sequence
  Description of Artificial Sequence: Synthetic oligonucleotide
acagagcgaaccugaacau

SEQ ID NO: 1519974 - RNA, 19 nt, Artificial Sequence
  Description of Artificial Sequence: Synthetic oligonucleotide
ugugauaccccagggcaau

SEQ ID NO: 1519975 - RNA, 19 nt, Artificial Sequence
  Description of Artificial Sequence: Synthetic oligonucleotide
auaagcagaauugcacuua

SEQ ID NO: 1519976 - RNA, 19 nt, Artificial Sequence
  Description of Artificial Sequence: Synthetic oligonucleotide
agguuagagaagcgugaca

SEQ ID NO: 1519977 - RNA, 19 nt, Artificial Sequence
  Description of Artificial Sequence: Synthetic oligonucleotide
cucaagcgggaacucaauc

SEQ ID NO: 1519978 - RNA, 19 nt, Artificial Sequence
  Description of Artificial Sequence: Synthetic oligonucleotide
uugcuaucccaauguugug

SEQ ID NO: 1519979 - RNA, 19 nt, Artificial Sequence
  Description of Artificial Sequence: Synthetic oligonucleotide
aaugacccugugaucggcu

SEQ ID NO: 1519980 - RNA, 19 nt, Artificial Sequence
  Description of Artificial Sequence: Synthetic oligonucleotide
aggauuuccacagguuaga

SEQ ID NO: 1519981 - RNA, 19 nt, Artificial Sequence
  Description of Artificial Sequence: Synthetic oligonucleotide
aagguucaccucgucacaa

SEQ ID NO: 1519982 - RNA, 19 nt, Artificial Sequence
  Description of Artificial Sequence: Synthetic oligonucleotide
ugcuaguuucagcuauaau

SEQ ID NO: 1519983 - RNA, 19 nt, Artificial Sequence
  Description of Artificial Sequence: Synthetic oligonucleotide
cagggcaaucaucacacca

SEQ ID NO: 1519984 - RNA, 19 nt, Artificial Sequence
  Description of Artificial Sequence: Synthetic oligonucleotide
gcaaaagguucaaggaugc

SEQ ID NO: 1519985 - RNA, 19 nt, Artificial Sequence
  Description of Artificial Sequence: Synthetic oligonucleotide
augacccugugaucggcug

SEQ ID NO: 1519986 - RNA, 19 nt, Artificial Sequence
  Description of Artificial Sequence: Synthetic oligonucleotide
agagccuaccaugccagug

SEQ ID NO: 1519987 - RNA, 19 nt, Artificial Sequence
  Description of Artificial Sequence: Synthetic oligonucleotide
gggacaauuaaccccagcu

SEQ ID NO: 1519988 - RNA, 19 nt, Artificial Sequence
  Description of Artificial Sequence: Synthetic oligonucleotide
cauauugagaagucacccu

SEQ ID NO: 1519989 - RNA, 19 nt, Artificial Sequence
  Description of Artificial Sequence: Synthetic oligonucleotide
agccuuacugauugugaaa

SEQ ID NO: 1519990 - RNA, 19 nt, Artificial Sequence
  Description of Artificial Sequence: Synthetic oligonucleotide
uugauuccucgagccaaag

SEQ ID NO: 1519991 - RNA, 19 nt, Artificial Sequence
  Description of Artificial Sequence: Synthetic oligonucleotide
aagagccuaccaugccagu

SEQ ID NO: 1519992 - RNA, 19 nt, Artificial Sequence
  Description of Artificial Sequence: Synthetic oligonucleotide
guaagaucggugguacuga

SEQ ID NO: 1519993 - RNA, 19 nt, Artificial Sequence
  Description of Artificial Sequence: Synthetic oligonucleotide
gugaauacuggaggcuuug

SEQ ID NO: 1519994 - RNA, 19 nt, Artificial Sequence
  Description of Artificial Sequence: Synthetic oligonucleotide
acacauaaggcaagaguau

SEQ ID NO: 1519995 - RNA, 19 nt, Artificial Sequence
  Description of Artificial Sequence: Synthetic oligonucleotide
caaaagguucaaggaugcc

SEQ ID NO: 1519996 - RNA, 19 nt, Artificial Sequence
  Description of Artificial Sequence: Synthetic oligonucleotide
agaagucuauccauuuaaa

SEQ ID NO: 1519997 - RNA, 19 nt, Artificial Sequence
  Description of Artificial Sequence: Synthetic oligonucleotide
gaucggugguacugagcug

SEQ ID NO: 1519998 - RNA, 19 nt, Artificial Sequence
  Description of Artificial Sequence: Synthetic oligonucleotide
guugccuguuucaacuaac

SEQ ID NO: 1519999 - RNA, 19 nt, Artificial Sequence
  Description of Artificial Sequence: Synthetic oligonucleotide
acaccaucguucauuuuca

SEQ ID NO: 1520000 - RNA, 19 nt, Artificial Sequence
  Description of Artificial Sequence: Synthetic oligonucleotide
caaaucggggaagggccgg

SEQ ID NO: 1520001 - RNA, 19 nt, Artificial Sequence
  Description of Artificial Sequence: Synthetic oligonucleotide
cagguuagagaagcgugac

SEQ ID NO: 1520002 - RNA, 19 nt, Artificial Sequence
  Description of Artificial Sequence: Synthetic oligonucleotide
cagguaggauuuccacagg

SEQ ID NO: 1520003 - RNA, 19 nt, Artificial Sequence
  Description of Artificial Sequence: Synthetic oligonucleotide
agcauaaaugcuggguuuu

SEQ ID NO: 1520004 - RNA, 19 nt, Artificial Sequence
  Description of Artificial Sequence: Synthetic oligonucleotide
agggcaaucaucacaccau

SEQ ID NO: 1520005 - RNA, 19 nt, Artificial Sequence
  Description of Artificial Sequence: Synthetic oligonucleotide
ugaccuacacagugugaua

SEQ ID NO: 1520006 - RNA, 19 nt, Artificial Sequence
  Description of Artificial Sequence: Synthetic oligonucleotide
cacgcacucuuuggaaacg

SEQ ID NO: 1520007 - RNA, 19 nt, Artificial Sequence
  Description of Artificial Sequence: Synthetic oligonucleotide
guauacaccuuaucaucua

SEQ ID NO: 1520008 - RNA, 19 nt, Artificial Sequence
  Description of Artificial Sequence: Synthetic oligonucleotide
ucgucacaauagccaaagu

SEQ ID NO: 1520009 - RNA, 19 nt, Artificial Sequence
  Description of Artificial Sequence: Synthetic oligonucleotide
cuagaagucuauccauuua

SEQ ID NO: 1520010 - RNA, 19 nt, Artificial Sequence
  Description of Artificial Sequence: Synthetic oligonucleotide
gaagcuuaaccaguucagu

SEQ ID NO: 1520011 - RNA, 19 nt, Artificial Sequence
  Description of Artificial Sequence: Synthetic oligonucleotide
cugagcugaccagaagaac

SEQ ID NO: 1520012 - RNA, 19 nt, Artificial Sequence
  Description of Artificial Sequence: Synthetic oligonucleotide
uuguugccuguuucaacua

SEQ ID NO: 1520013 - RNA, 19 nt, Artificial Sequence
  Description of Artificial Sequence: Synthetic oligonucleotide
uggggacaauuaaccccag

SEQ ID NO: 1520014 - RNA, 19 nt, Artificial Sequence
  Description of Artificial Sequence: Synthetic oligonucleotide
ggagaguuugauuccucga

SEQ ID NO: 1520015 - RNA, 19 nt, Artificial Sequence
  Description of Artificial Sequence: Synthetic oligonucleotide
cucacgcacucuuuggaaa

SEQ ID NO: 1520016 - RNA, 19 nt, Artificial Sequence
  Description of Artificial Sequence: Synthetic oligonucleotide
guggcaauaucacuggcuu

SEQ ID NO: 1520017 - RNA, 19 nt, Artificial Sequence
  Description of Artificial Sequence: Synthetic oligonucleotide
gguuagagaagcgugacau

SEQ ID NO: 1520018 - RNA, 19 nt, Artificial Sequence
  Description of Artificial Sequence: Synthetic oligonucleotide
caccaucguucauuuucag

SEQ ID NO: 1520019 - RNA, 19 nt, Artificial Sequence
  Description of Artificial Sequence: Synthetic oligonucleotide
agccuaccaugccaguggu

SEQ ID NO: 1520020 - RNA, 19 nt, Artificial Sequence
  Description of Artificial Sequence: Synthetic oligonucleotide
aaaucggggaagggccggu

SEQ ID NO: 1520021 - RNA, 19 nt, Artificial Sequence
  Description of Artificial Sequence: Synthetic oligonucleotide
cagugguaaauacugugcu

SEQ ID NO: 1520022 - RNA, 19 nt, Artificial Sequence
  Description of Artificial Sequence: Synthetic oligonucleotide
cacuucagguggcaauauc

SEQ ID NO: 1520023 - RNA, 19 nt, Artificial Sequence
  Description of Artificial Sequence: Synthetic oligonucleotide
cagccuuacugauugugaa

SEQ ID NO: 1520024 - RNA, 19 nt, Artificial Sequence
  Description of Artificial Sequence: Synthetic oligonucleotide
ccugugaucggcugaccag

SEQ ID NO: 1520025 - RNA, 19 nt, Artificial Sequence
  Description of Artificial Sequence: Synthetic oligonucleotide
ggauuuccacagguuagag

SEQ ID NO: 1520026 - RNA, 19 nt, Artificial Sequence
  Description of Artificial Sequence: Synthetic oligonucleotide
auuccucgagccaaagcaa

SEQ ID NO: 1520027 - RNA, 19 nt, Artificial Sequence
  Description of Artificial Sequence: Synthetic oligonucleotide
cuguuaugggcucuguccu

SEQ ID NO: 1520028 - RNA, 19 nt, Artificial Sequence
  Description of Artificial Sequence: Synthetic oligonucleotide
agauaauacuuaacacaua

SEQ ID NO: 1520029 - RNA, 19 nt, Artificial Sequence
  Description of Artificial Sequence: Synthetic oligonucleotide
uaccuguaacagccuuacu

SEQ ID NO: 1520030 - RNA, 19 nt, Artificial Sequence
  Description of Artificial Sequence: Synthetic oligonucleotide
auacugugcuuuagaccuc

SEQ ID NO: 1520031 - RNA, 19 nt, Artificial Sequence
  Description of Artificial Sequence: Synthetic oligonucleotide
acgaucucagcaccauauu

SEQ ID NO: 1520032 - RNA, 19 nt, Artificial Sequence
  Description of Artificial Sequence: Synthetic oligonucleotide
gaagcgugacauuguggcu

SEQ ID NO: 1520033 - RNA, 19 nt, Artificial Sequence
  Description of Artificial Sequence: Synthetic oligonucleotide
aagcauaaccacagcucua

SEQ ID NO: 1520034 - RNA, 19 nt, Artificial Sequence
  Description of Artificial Sequence: Synthetic oligonucleotide
agcucaguauccauugcua

SEQ ID NO: 1520035 - RNA, 19 nt, Artificial Sequence
  Description of Artificial Sequence: Synthetic oligonucleotide
agcgaaccugaacauucuu

SEQ ID NO: 1520036 - RNA, 19 nt, Artificial Sequence
  Description of Artificial Sequence: Synthetic oligonucleotide
caauagccaaaguggggaa

SEQ ID NO: 1520037 - RNA, 19 nt, Artificial Sequence
  Description of Artificial Sequence: Synthetic oligonucleotide
ggaaagaguaaaugucccu

SEQ ID NO: 1520038 - RNA, 19 nt, Artificial Sequence
  Description of Artificial Sequence: Synthetic oligonucleotide
aucgagcagcauaaaugcu

SEQ ID NO: 1520039 - RNA, 19 nt, Artificial Sequence
  Description of Artificial Sequence: Synthetic oligonucleotide
augcuaguuucagcuauaa

SEQ ID NO: 1520040 - RNA, 19 nt, Artificial Sequence
  Description of Artificial Sequence: Synthetic oligonucleotide
ccaguaagaucggugguac

SEQ ID NO: 1520041 - RNA, 19 nt, Artificial Sequence
  Description of Artificial Sequence: Synthetic oligonucleotide
agguucaccucgucacaau

SEQ ID NO: 1520042 - RNA, 19 nt, Artificial Sequence
  Description of Artificial Sequence: Synthetic oligonucleotide
gugaccuacacagugugau

SEQ ID NO: 1520043 - RNA, 19 nt, Artificial Sequence
  Description of Artificial Sequence: Synthetic oligonucleotide
aaccuguuaugggcucugu

SEQ ID NO: 1520044 - RNA, 19 nt, Artificial Sequence
  Description of Artificial Sequence: Synthetic oligonucleotide
uuaugggcucuguccuguc

SEQ ID NO: 1520045 - RNA, 19 nt, Artificial Sequence
  Description of Artificial Sequence: Synthetic oligonucleotide
ucggugguacugagcugac

SEQ ID NO: 1520046 - RNA, 19 nt, Artificial Sequence
  Description of Artificial Sequence: Synthetic oligonucleotide
gaucggcugaccagcucac

SEQ ID NO: 1520047 - RNA, 19 nt, Artificial Sequence
  Description of Artificial Sequence: Synthetic oligonucleotide
ucagaucgagcagcauaaa

SEQ ID NO: 1520048 - RNA, 19 nt, Artificial Sequence
  Description of Artificial Sequence: Synthetic oligonucleotide
gaagucacccugugaccua

SEQ ID NO: 1520049 - RNA, 19 nt, Artificial Sequence
  Description of Artificial Sequence: Synthetic oligonucleotide
gccaaaguggggaaucuuc

SEQ ID NO: 1520050 - RNA, 19 nt, Artificial Sequence
  Description of Artificial Sequence: Synthetic oligonucleotide
uggcuuggcauagguucca

SEQ ID NO: 1520051 - RNA, 19 nt, Artificial Sequence
  Description of Artificial Sequence: Synthetic oligonucleotide
gccaaagcauaaccacagc

SEQ ID NO: 1520052 - RNA, 19 nt, Artificial Sequence
  Description of Artificial Sequence: Synthetic oligonucleotide
gaccucaagcgggaacuca

SEQ ID NO: 1520053 - RNA, 19 nt, Artificial Sequence
  Description of Artificial Sequence: Synthetic oligonucleotide
accucaagcgggaacucaa

SEQ ID NO: 1520054 - RNA, 19 nt, Artificial Sequence
  Description of Artificial Sequence: Synthetic oligonucleotide
gggcaaucaucacaccauc

SEQ ID NO: 1520055 - RNA, 19 nt, Artificial Sequence
  Description of Artificial Sequence: Synthetic oligonucleotide
cccuccaguaagaucggug

SEQ ID NO: 1520056 - RNA, 19 nt, Artificial Sequence
  Description of Artificial Sequence: Synthetic oligonucleotide
acauuguggcuccgucaau

SEQ ID NO: 1520057 - RNA, 19 nt, Artificial Sequence
  Description of Artificial Sequence: Synthetic oligonucleotide
auugcucccaaggccccga

SEQ ID NO: 1520058 - RNA, 19 nt, Artificial Sequence
  Description of Artificial Sequence: Synthetic oligonucleotide
gccgguaauugcucccaag

SEQ ID NO: 1520059 - RNA, 19 nt, Artificial Sequence
  Description of Artificial Sequence: Synthetic oligonucleotide
gauaccccagggcaaucau

SEQ ID NO: 1520060 - RNA, 19 nt, Artificial Sequence
  Description of Artificial Sequence: Synthetic oligonucleotide
cuaucccaauguugugaga

SEQ ID NO: 1520061 - RNA, 19 nt, Artificial Sequence
  Description of Artificial Sequence: Synthetic oligonucleotide
gcagaauugcacuuauuuu

SEQ ID NO: 1520062 - RNA, 19 nt, Artificial Sequence
  Description of Artificial Sequence: Synthetic oligonucleotide
guuaugggcucuguccugu

SEQ ID NO: 1520063 - RNA, 19 nt, Artificial Sequence
  Description of Artificial Sequence: Synthetic oligonucleotide
acagaucucuaagcauaaa

SEQ ID NO: 1520064 - RNA, 19 nt, Artificial Sequence
  Description of Artificial Sequence: Synthetic oligonucleotide
agguucaaggaugccuuuu

SEQ ID NO: 1520065 - RNA, 19 nt, Artificial Sequence
  Description of Artificial Sequence: Synthetic oligonucleotide
aagcagaauugcacuuauu

SEQ ID NO: 1520066 - RNA, 19 nt, Artificial Sequence
  Description of Artificial Sequence: Synthetic oligonucleotide
agacauggucuugaccauu

SEQ ID NO: 1520067 - RNA, 19 nt, Artificial Sequence
  Description of Artificial Sequence: Synthetic oligonucleotide
gguucaccucgucacaaua

SEQ ID NO: 1520068 - RNA, 19 nt, Artificial Sequence
  Description of Artificial Sequence: Synthetic oligonucleotide
caguaagguucaccucguc

SEQ ID NO: 1520069 - RNA, 19 nt, Artificial Sequence
  Description of Artificial Sequence: Synthetic oligonucleotide
cagaucgagcagcauaaau

SEQ ID NO: 1520070 - RNA, 19 nt, Artificial Sequence
  Description of Artificial Sequence: Synthetic oligonucleotide
guuagagaagcgugacauu

SEQ ID NO: 1520071 - RNA, 19 nt, Artificial Sequence
  Description of Artificial Sequence: Synthetic oligonucleotide
gcuuuaaaacgucuccuuu

SEQ ID NO: 1520072 - RNA, 19 nt, Artificial Sequence
  Description of Artificial Sequence: Synthetic oligonucleotide
aaucggggaagggccggua

SEQ ID NO: 1520073 - RNA, 19 nt, Artificial Sequence
  Description of Artificial Sequence: Synthetic oligonucleotide
cauuuaccuguaacagccu

SEQ ID NO: 1520074 - RNA, 19 nt, Artificial Sequence
  Description of Artificial Sequence: Synthetic oligonucleotide
cuguaacagccuuacugau

SEQ ID NO: 1520075 - RNA, 19 nt, Artificial Sequence
  Description of Artificial Sequence: Synthetic oligonucleotide
acgucuccuuucuggucaa

SEQ ID NO: 1520076 - RNA, 19 nt, Artificial Sequence
  Description of Artificial Sequence: Synthetic oligonucleotide
gcaccauauugagaaguca

SEQ ID NO: 1520077 - RNA, 19 nt, Artificial Sequence
  Description of Artificial Sequence: Synthetic oligonucleotide
gugugauaccccagggcaa

SEQ ID NO: 1520078 - RNA, 19 nt, Artificial Sequence
  Description of Artificial Sequence: Synthetic oligonucleotide
aaggccccgauggccacuu

SEQ ID NO: 1520079 - RNA, 19 nt, Artificial Sequence
  Description of Artificial Sequence: Synthetic oligonucleotide
gcacucuuuggaaacgcaa

SEQ ID NO: 1520080 - RNA, 19 nt, Artificial Sequence
  Description of Artificial Sequence: Synthetic oligonucleotide
caauuaaccccagcucagu

SEQ ID NO: 1520081 - RNA, 19 nt, Artificial Sequence
  Description of Artificial Sequence: Synthetic oligonucleotide
cuccaguaagaucgguggu

SEQ ID NO: 1520082 - RNA, 19 nt, Artificial Sequence
  Description of Artificial Sequence: Synthetic oligonucleotide
gcucaguauccauugcuau

SEQ ID NO: 1520083 - RNA, 19 nt, Artificial Sequence
  Description of Artificial Sequence: Synthetic oligonucleotide
gccccgauggccacuucag

SEQ ID NO: 1520084 - RNA, 19 nt, Artificial Sequence
  Description of Artificial Sequence: Synthetic oligonucleotide
cuccgucaaugacccugug

SEQ ID NO: 1520085 - RNA, 19 nt, Artificial Sequence
  Description of Artificial Sequence: Synthetic oligonucleotide
ggccccgauggccacuuca

SEQ ID NO: 1520086 - RNA, 19 nt, Artificial Sequence
  Description of Artificial Sequence: Synthetic oligonucleotide
cagaggcauugaggauugg

SEQ ID NO: 1520087 - RNA, 19 nt, Artificial Sequence
  Description of Artificial Sequence: Synthetic oligonucleotide
ccccgauggccacuucagg

SEQ ID NO: 1520088 - RNA, 19 nt, Artificial Sequence
  Description of Artificial Sequence: Synthetic oligonucleotide
caguaagaucggugguacu

SEQ ID NO: 1520089 - RNA, 19 nt, Artificial Sequence
  Description of Artificial Sequence: Synthetic oligonucleotide
gccacuucagguggcaaua

SEQ ID NO: 1520090 - RNA, 19 nt, Artificial Sequence
  Description of Artificial Sequence: Synthetic oligonucleotide
cccgauggccacuucaggu

SEQ ID NO: 1520091 - RNA, 19 nt, Artificial Sequence
  Description of Artificial Sequence: Synthetic oligonucleotide
uggcuccgucaaugacccu

SEQ ID NO: 1520092 - RNA, 19 nt, Artificial Sequence
  Description of Artificial Sequence: Synthetic oligonucleotide
cuguuucaacuaacacgau

SEQ ID NO: 1520093 - RNA, 19 nt, Artificial Sequence
  Description of Artificial Sequence: Synthetic oligonucleotide
ggccacuucagguggcaau

SEQ ID NO: 1520094 - RNA, 19 nt, Artificial Sequence
  Description of Artificial Sequence: Synthetic oligonucleotide
gggccgguaauugcuccca

SEQ ID NO: 1520095 - RNA, 19 nt, Artificial Sequence
  Description of Artificial Sequence: Synthetic oligonucleotide
ccucgucacaauagccaaa

SEQ ID NO: 1520096 - RNA, 19 nt, Artificial Sequence
  Description of Artificial Sequence: Synthetic oligonucleotide
cagagcgaaccugaacauu

SEQ ID NO: 1520097 - RNA, 19 nt, Artificial Sequence
  Description of Artificial Sequence: Synthetic oligonucleotide
ggccgguaauugcucccaa

SEQ ID NO: 1520098 - RNA, 19 nt, Artificial Sequence
  Description of Artificial Sequence: Synthetic oligonucleotide
gcuccgucaaugacccugu

SEQ ID NO: 1520099 - RNA, 19 nt, Artificial Sequence
  Description of Artificial Sequence: Synthetic oligonucleotide
gcgugacauuguggcuccg

SEQ ID NO: 1520100 - RNA, 19 nt, Artificial Sequence
  Description of Artificial Sequence: Synthetic oligonucleotide
ccucaagcgggaacucaau

SEQ ID NO: 1520101 - RNA, 19 nt, Artificial Sequence
  Description of Artificial Sequence: Synthetic oligonucleotide
ccacuucagguggcaauau

SEQ ID NO: 1520102 - RNA, 19 nt, Artificial Sequence
  Description of Artificial Sequence: Synthetic oligonucleotide
aaaucuuuaaucccagcac

SEQ ID NO: 1520103 - RNA, 19 nt, Artificial Sequence
  Description of Artificial Sequence: Synthetic oligonucleotide
gaaguauucagcuguacgg

SEQ ID NO: 1520104 - RNA, 19 nt, Artificial Sequence
  Description of Artificial Sequence: Synthetic oligonucleotide
aaaacuagagcucauccgu

SEQ ID NO: 1520105 - RNA, 19 nt, Artificial Sequence
  Description of Artificial Sequence: Synthetic oligonucleotide
aauaauagguuugggaguc

SEQ ID NO: 1520106 - RNA, 19 nt, Artificial Sequence
  Description of Artificial Sequence: Synthetic oligonucleotide
uauaguugggaugaggugg

SEQ ID NO: 1520107 - RNA, 19 nt, Artificial Sequence
  Description of Artificial Sequence: Synthetic oligonucleotide
auggucauugcacacauac

SEQ ID NO: 1520108 - RNA, 19 nt, Artificial Sequence
  Description of Artificial Sequence: Synthetic oligonucleotide
ggaauaauagguuugggag

SEQ ID NO: 1520109 - RNA, 19 nt, Artificial Sequence
  Description of Artificial Sequence: Synthetic oligonucleotide
aguccagcuaauuaggcgg

SEQ ID NO: 1520110 - RNA, 19 nt, Artificial Sequence
  Description of Artificial Sequence: Synthetic oligonucleotide
agacacaugaucugaggcc

SEQ ID NO: 1520111 - RNA, 19 nt, Artificial Sequence
  Description of Artificial Sequence: Synthetic oligonucleotide
aaguauucagcuguacggc

SEQ ID NO: 1520112 - RNA, 19 nt, Artificial Sequence
  Description of Artificial Sequence: Synthetic oligonucleotide
aagguguacgccaacgucc

SEQ ID NO: 1520113 - RNA, 19 nt, Artificial Sequence
  Description of Artificial Sequence: Synthetic oligonucleotide
uacgccaacguccaguggg

SEQ ID NO: 1520114 - RNA, 19 nt, Artificial Sequence
  Description of Artificial Sequence: Synthetic oligonucleotide
ucugugagaagccgcagcg

SEQ ID NO: 1520115 - RNA, 19 nt, Artificial Sequence
  Description of Artificial Sequence: Synthetic oligonucleotide
accauagggacccggaagc

SEQ ID NO: 1520116 - RNA, 19 nt, Artificial Sequence
  Description of Artificial Sequence: Synthetic oligonucleotide
uggaauaauagguuuggga

SEQ ID NO: 1520117 - RNA, 19 nt, Artificial Sequence
  Description of Artificial Sequence: Synthetic oligonucleotide
aacuagagcucauccgugg

SEQ ID NO: 1520118 - RNA, 19 nt, Artificial Sequence
  Description of Artificial Sequence: Synthetic oligonucleotide
auugcacacauacauggag

SEQ ID NO: 1520119 - RNA, 19 nt, Artificial Sequence
  Description of Artificial Sequence: Synthetic oligonucleotide
uagggaaguauucagcugu

SEQ ID NO: 1520120 - RNA, 19 nt, Artificial Sequence
  Description of Artificial Sequence: Synthetic oligonucleotide
ucauguacccgaaacgaug

SEQ ID NO: 1520121 - RNA, 19 nt, Artificial Sequence
  Description of Artificial Sequence: Synthetic oligonucleotide
aacgauggucauugcacac

SEQ ID NO: 1520122 - RNA, 19 nt, Artificial Sequence
  Description of Artificial Sequence: Synthetic oligonucleotide
cuuaaagcguacgucaucc

SEQ ID NO: 1520123 - RNA, 19 nt, Artificial Sequence
  Description of Artificial Sequence: Synthetic oligonucleotide
uagcauucguugcagaggc

SEQ ID NO: 1520124 - RNA, 19 nt, Artificial Sequence
  Description of Artificial Sequence: Synthetic oligonucleotide
auagguuugggagucgagc

SEQ ID NO: 1520125 - RNA, 19 nt, Artificial Sequence
  Description of Artificial Sequence: Synthetic oligonucleotide
aaucagguggaugaaguug

SEQ ID NO: 1520126 - RNA, 19 nt, Artificial Sequence
  Description of Artificial Sequence: Synthetic oligonucleotide
guggcuaacagcuuucgag

SEQ ID NO: 1520127 - RNA, 19 nt, Artificial Sequence
  Description of Artificial Sequence: Synthetic oligonucleotide
aguauucagcuguacggcg

SEQ ID NO: 1520128 - RNA, 19 nt, Artificial Sequence
  Description of Artificial Sequence: Synthetic oligonucleotide
uccucagucuucaaggaca

SEQ ID NO: 1520129 - RNA, 19 nt, Artificial Sequence
  Description of Artificial Sequence: Synthetic oligonucleotide
aaaaucagguggaugaagu

SEQ ID NO: 1520130 - RNA, 19 nt, Artificial Sequence
  Description of Artificial Sequence: Synthetic oligonucleotide
ucagucuucaaggacacca

SEQ ID NO: 1520131 - RNA, 19 nt, Artificial Sequence
  Description of Artificial Sequence: Synthetic oligonucleotide
cauguacccgaaacgaugg

SEQ ID NO: 1520132 - RNA, 19 nt, Artificial Sequence
  Description of Artificial Sequence: Synthetic oligonucleotide
gaaacgauggucauugcac

SEQ ID NO: 1520133 - RNA, 19 nt, Artificial Sequence
  Description of Artificial Sequence: Synthetic oligonucleotide
uugggagucgagcauuggg

SEQ ID NO: 1520134 - RNA, 19 nt, Artificial Sequence
  Description of Artificial Sequence: Synthetic oligonucleotide
acagcuuucgagccccugc

SEQ ID NO: 1520135 - RNA, 19 nt, Artificial Sequence
  Description of Artificial Sequence: Synthetic oligonucleotide
ucagcauucgagcccggcg

SEQ ID NO: 1520136 - RNA, 19 nt, Artificial Sequence
  Description of Artificial Sequence: Synthetic oligonucleotide
guuggaauaauagguuugg

SEQ ID NO: 1520137 - RNA, 19 nt, Artificial Sequence
  Description of Artificial Sequence: Synthetic oligonucleotide
ugcauaguggguuggggag

SEQ ID NO: 1520138 - RNA, 19 nt, Artificial Sequence
  Description of Artificial Sequence: Synthetic oligonucleotide
uugguagggaaguauucag

SEQ ID NO: 1520139 - RNA, 19 nt, Artificial Sequence
  Description of Artificial Sequence: Synthetic oligonucleotide
caggaagggucuuugagag

SEQ ID NO: 1520140 - RNA, 19 nt, Artificial Sequence
  Description of Artificial Sequence: Synthetic oligonucleotide
gaaguuggucuuuuccucc

SEQ ID NO: 1520141 - RNA, 19 nt, Artificial Sequence
  Description of Artificial Sequence: Synthetic oligonucleotide
ucuuuaggggccgagacac

SEQ ID NO: 1520142 - RNA, 19 nt, Artificial Sequence
  Description of Artificial Sequence: Synthetic oligonucleotide
agcaucuaccaccugagca

SEQ ID NO: 1520143 - RNA, 19 nt, Artificial Sequence
  Description of Artificial Sequence: Synthetic oligonucleotide
aaguauaguugggaugagg

SEQ ID NO: 1520144 - RNA, 19 nt, Artificial Sequence
  Description of Artificial Sequence: Synthetic oligonucleotide
ggaaguauucagcuguacg

SEQ ID NO: 1520145 - RNA, 19 nt, Artificial Sequence
  Description of Artificial Sequence: Synthetic oligonucleotide
uggcuaacagcuuucgagc

SEQ ID NO: 1520146 - RNA, 19 nt, Artificial Sequence
  Description of Artificial Sequence: Synthetic oligonucleotide
agccaguccagcuaauuag

SEQ ID NO: 1520147 - RNA, 19 nt, Artificial Sequence
  Description of Artificial Sequence: Synthetic oligonucleotide
aauuaggcggccacuauca

SEQ ID NO: 1520148 - RNA, 19 nt, Artificial Sequence
  Description of Artificial Sequence: Synthetic oligonucleotide
guacuggucauuugggugc

SEQ ID NO: 1520149 - RNA, 19 nt, Artificial Sequence
  Description of Artificial Sequence: Synthetic oligonucleotide
caaaucuuuaaucccagca

SEQ ID NO: 1520150 - RNA, 19 nt, Artificial Sequence
  Description of Artificial Sequence: Synthetic oligonucleotide
aguauaguugggaugaggu

SEQ ID NO: 1520151 - RNA, 19 nt, Artificial Sequence
  Description of Artificial Sequence: Synthetic oligonucleotide
acuagugcuuccaaaauca

SEQ ID NO: 1520152 - RNA, 19 nt, Artificial Sequence
  Description of Artificial Sequence: Synthetic oligonucleotide
uguacggcgauaguagccc

SEQ ID NO: 1520153 - RNA, 19 nt, Artificial Sequence
  Description of Artificial Sequence: Synthetic oligonucleotide
auucauguacccgaaacga

SEQ ID NO: 1520154 - RNA, 19 nt, Artificial Sequence
  Description of Artificial Sequence: Synthetic oligonucleotide
ucuuugagagccaguccag

SEQ ID NO: 1520155 - RNA, 19 nt, Artificial Sequence
  Description of Artificial Sequence: Synthetic oligonucleotide
uagguuugggagucgagca

SEQ ID NO: 1520156 - RNA, 19 nt, Artificial Sequence
  Description of Artificial Sequence: Synthetic oligonucleotide
aaagcguacgucauccuca

SEQ ID NO: 1520157 - RNA, 19 nt, Artificial Sequence
  Description of Artificial Sequence: Synthetic oligonucleotide
ugugagaagccgcagcguc

SEQ ID NO: 1520158 - RNA, 19 nt, Artificial Sequence
  Description of Artificial Sequence: Synthetic oligonucleotide
uuguccuuaaagcguacgu

SEQ ID NO: 1520159 - RNA, 19 nt, Artificial Sequence
  Description of Artificial Sequence: Synthetic oligonucleotide
uaauuaggcggccacuauc

SEQ ID NO: 1520160 - RNA, 19 nt, Artificial Sequence
  Description of Artificial Sequence: Synthetic oligonucleotide
ggaugagguggguagaagg

SEQ ID NO: 1520161 - RNA, 19 nt, Artificial Sequence
  Description of Artificial Sequence: Synthetic oligonucleotide
ggugcaaaucuuuaauccc

SEQ ID NO: 1520162 - RNA, 19 nt, Artificial Sequence
  Description of Artificial Sequence: Synthetic oligonucleotide
uguacgccaacguccagug

SEQ ID NO: 1520163 - RNA, 19 nt, Artificial Sequence
  Description of Artificial Sequence: Synthetic oligonucleotide
gaccauagggacccggaag

SEQ ID NO: 1520164 - RNA, 19 nt, Artificial Sequence
  Description of Artificial Sequence: Synthetic oligonucleotide
auaguagcccuguggagug

SEQ ID NO: 1520165 - RNA, 19 nt, Artificial Sequence
  Description of Artificial Sequence: Synthetic oligonucleotide
caguccagcuaauuaggcg

SEQ ID NO: 1520166 - RNA, 19 nt, Artificial Sequence
  Description of Artificial Sequence: Synthetic oligonucleotide
aaagggccaaguauaguug

SEQ ID NO: 1520167 - RNA, 19 nt, Artificial Sequence
  Description of Artificial Sequence: Synthetic oligonucleotide
gccaagguagaucaggucc

SEQ ID NO: 1520168 - RNA, 19 nt, Artificial Sequence
  Description of Artificial Sequence: Synthetic oligonucleotide
uugggugcuggucaaacau

SEQ ID NO: 1520169 - RNA, 19 nt, Artificial Sequence
  Description of Artificial Sequence: Synthetic oligonucleotide
uucagcuguacggcgauag

SEQ ID NO: 1520170 - RNA, 19 nt, Artificial Sequence
  Description of Artificial Sequence: Synthetic oligonucleotide
uuggaauaauagguuuggg

SEQ ID NO: 1520171 - RNA, 19 nt, Artificial Sequence
  Description of Artificial Sequence: Synthetic oligonucleotide
ucuugguagggaaguauuc

SEQ ID NO: 1520172 - RNA, 19 nt, Artificial Sequence
  Description of Artificial Sequence: Synthetic oligonucleotide
ucaagguguacgccaacgu

SEQ ID NO: 1520173 - RNA, 19 nt, Artificial Sequence
  Description of Artificial Sequence: Synthetic oligonucleotide
guccuuaaagcguacguca

SEQ ID NO: 1520174 - RNA, 19 nt, Artificial Sequence
  Description of Artificial Sequence: Synthetic oligonucleotide
uaggggccgagacacauga

SEQ ID NO: 1520175 - RNA, 19 nt, Artificial Sequence
  Description of Artificial Sequence: Synthetic oligonucleotide
auuugggugcuggucaaac

SEQ ID NO: 1520176 - RNA, 19 nt, Artificial Sequence
  Description of Artificial Sequence: Synthetic oligonucleotide
caucaucuguuccagccgc

SEQ ID NO: 1520177 - RNA, 19 nt, Artificial Sequence
  Description of Artificial Sequence: Synthetic oligonucleotide
cuaacagcuuucgagcccc

SEQ ID NO: 1520178 - RNA, 19 nt, Artificial Sequence
  Description of Artificial Sequence: Synthetic oligonucleotide
agaucaggucccaugagag

SEQ ID NO: 1520179 - RNA, 19 nt, Artificial Sequence
  Description of Artificial Sequence: Synthetic oligonucleotide
uucuuuaggggccgagaca

SEQ ID NO: 1520180 - RNA, 19 nt, Artificial Sequence
  Description of Artificial Sequence: Synthetic oligonucleotide
guauaguugggaugaggug

SEQ ID NO: 1520181 - RNA, 19 nt, Artificial Sequence
  Description of Artificial Sequence: Synthetic oligonucleotide
gaguggaccauagggaccc

SEQ ID NO: 1520182 - RNA, 19 nt, Artificial Sequence
  Description of Artificial Sequence: Synthetic oligonucleotide
aaguuggucuuuuccuccu

SEQ ID NO: 1520183 - RNA, 19 nt, Artificial Sequence
  Description of Artificial Sequence: Synthetic oligonucleotide
cauucguugcagaggcugg

SEQ ID NO: 1520184 - RNA, 19 nt, Artificial Sequence
  Description of Artificial Sequence: Synthetic oligonucleotide
uccagugggaguacccagc

SEQ ID NO: 1520185 - RNA, 19 nt, Artificial Sequence
  Description of Artificial Sequence: Synthetic oligonucleotide
gccacuaucaucaucccag

SEQ ID NO: 1520186 - RNA, 19 nt, Artificial Sequence
  Description of Artificial Sequence: Synthetic oligonucleotide
agaggcaguggaucuaugu

SEQ ID NO: 1520187 - RNA, 19 nt, Artificial Sequence
  Description of Artificial Sequence: Synthetic oligonucleotide
agguagaucaggucccaug

SEQ ID NO: 1520188 - RNA, 19 nt, Artificial Sequence
  Description of Artificial Sequence: Synthetic oligonucleotide
uucauguacccgaaacgau

SEQ ID NO: 1520189 - RNA, 19 nt, Artificial Sequence
  Description of Artificial Sequence: Synthetic oligonucleotide
aacguccagugggaguacc

SEQ ID NO: 1520190 - RNA, 19 nt, Artificial Sequence
  Description of Artificial Sequence: Synthetic oligonucleotide
gguagguggggccaggaag

SEQ ID NO: 1520191 - RNA, 19 nt, Artificial Sequence
  Description of Artificial Sequence: Synthetic oligonucleotide
aaacuagagcucauccgug

SEQ ID NO: 1520192 - RNA, 19 nt, Artificial Sequence
  Description of Artificial Sequence: Synthetic oligonucleotide
caaaaucagguggaugaag

SEQ ID NO: 1520193 - RNA, 19 nt, Artificial Sequence
  Description of Artificial Sequence: Synthetic oligonucleotide
agugaucccgcaccagaag

SEQ ID NO: 1520194 - RNA, 19 nt, Artificial Sequence
  Description of Artificial Sequence: Synthetic oligonucleotide
uguccuuaaagcguacguc

SEQ ID NO: 1520195 - RNA, 19 nt, Artificial Sequence
  Description of Artificial Sequence: Synthetic oligonucleotide
cucaagguguacgccaacg

SEQ ID NO: 1520196 - RNA, 19 nt, Artificial Sequence
  Description of Artificial Sequence: Synthetic oligonucleotide
cuagugcuuccaaaaucag

SEQ ID NO: 1520197 - RNA, 19 nt, Artificial Sequence
  Description of Artificial Sequence: Synthetic oligonucleotide
guggugcaaaucuuuaauc

SEQ ID NO: 1520198 - RNA, 19 nt, Artificial Sequence
  Description of Artificial Sequence: Synthetic oligonucleotide
cacuagugcuuccaaaauc

SEQ ID NO: 1520199 - RNA, 19 nt, Artificial Sequence
  Description of Artificial Sequence: Synthetic oligonucleotide
aagguagaguggaccauag

SEQ ID NO: 1520200 - RNA, 19 nt, Artificial Sequence
  Description of Artificial Sequence: Synthetic oligonucleotide
ggcgauaguagcccugugg

SEQ ID NO: 1520201 - RNA, 19 nt, Artificial Sequence
  Description of Artificial Sequence: Synthetic oligonucleotide
uucccagauggaguagugg

SEQ ID NO: 1520202 - RNA, 19 nt, Artificial Sequence
  Description of Artificial Sequence: Synthetic oligonucleotide
agcuguacggcgauaguag

SEQ ID NO: 1520203 - RNA, 19 nt, Artificial Sequence
  Description of Artificial Sequence: Synthetic oligonucleotide
cuuucgagccccugccagg

SEQ ID NO: 1520204 - RNA, 19 nt, Artificial Sequence
  Description of Artificial Sequence: Synthetic oligonucleotide
agcucagcauucgagcccg

SEQ ID NO: 1520205 - RNA, 19 nt, Artificial Sequence
  Description of Artificial Sequence: Synthetic oligonucleotide
uaauagguuugggagucga

SEQ ID NO: 1520206 - RNA, 19 nt, Artificial Sequence
  Description of Artificial Sequence: Synthetic oligonucleotide
agcccuguggagugauccc

SEQ ID NO: 1520207 - RNA, 19 nt, Artificial Sequence
  Description of Artificial Sequence: Synthetic oligonucleotide
gauaguagcccuguggagu

SEQ ID NO: 1520208 - RNA, 19 nt, Artificial Sequence
  Description of Artificial Sequence: Synthetic oligonucleotide
uccuuaaagcguacgucau

SEQ ID NO: 1520209 - RNA, 19 nt, Artificial Sequence
  Description of Artificial Sequence: Synthetic oligonucleotide
guuguccuuaaagcguacg

SEQ ID NO: 1520210 - RNA, 19 nt, Artificial Sequence
  Description of Artificial Sequence: Synthetic oligonucleotide
aucaaagggccaaguauag

SEQ ID NO: 1520211 - RNA, 19 nt, Artificial Sequence
  Description of Artificial Sequence: Synthetic oligonucleotide
uugagagccaguccagcua

SEQ ID NO: 1520212 - RNA, 19 nt, Artificial Sequence
  Description of Artificial Sequence: Synthetic oligonucleotide
cagcauucgagcccggcgc

SEQ ID NO: 1520213 - RNA, 19 nt, Artificial Sequence
  Description of Artificial Sequence: Synthetic oligonucleotide
caagguguacgccaacguc

SEQ ID NO: 1520214 - RNA, 19 nt, Artificial Sequence
  Description of Artificial Sequence: Synthetic oligonucleotide
uggaccauagggacccgga

SEQ ID NO: 1520215 - RNA, 19 nt, Artificial Sequence
  Description of Artificial Sequence: Synthetic oligonucleotide
ucguugcagaggcugggug

SEQ ID NO: 1520216 - RNA, 19 nt, Artificial Sequence
  Description of Artificial Sequence: Synthetic oligonucleotide
gguagaucaggucccauga

SEQ ID NO: 1520217 - RNA, 19 nt, Artificial Sequence
  Description of Artificial Sequence: Synthetic oligonucleotide
uagcccuguggagugaucc

SEQ ID NO: 1520218 - RNA, 19 nt, Artificial Sequence
  Description of Artificial Sequence: Synthetic oligonucleotide
caugagagcuucuggguca

SEQ ID NO: 1520219 - RNA, 19 nt, Artificial Sequence
  Description of Artificial Sequence: Synthetic oligonucleotide
uguacccgaaacgaugguc

SEQ ID NO: 1520220 - RNA, 19 nt, Artificial Sequence
  Description of Artificial Sequence: Synthetic oligonucleotide
uccacagguagcauucguu

SEQ ID NO: 1520221 - RNA, 19 nt, Artificial Sequence
  Description of Artificial Sequence: Synthetic oligonucleotide
ugugccuuguacuggucau

SEQ ID NO: 1520222 - RNA, 19 nt, Artificial Sequence
  Description of Artificial Sequence: Synthetic oligonucleotide
ugagaagccgcagcgucug

SEQ ID NO: 1520223 - RNA, 19 nt, Artificial Sequence
  Description of Artificial Sequence: Synthetic oligonucleotide
uuaaagcguacgucauccu

SEQ ID NO: 1520224 - RNA, 19 nt, Artificial Sequence
  Description of Artificial Sequence: Synthetic oligonucleotide
agguagaguggaccauagg

SEQ ID NO: 1520225 - RNA, 19 nt, Artificial Sequence
  Description of Artificial Sequence: Synthetic oligonucleotide
uuaggcggccacuaucauc

SEQ ID NO: 1520226 - RNA, 19 nt, Artificial Sequence
  Description of Artificial Sequence: Synthetic oligonucleotide
guacgucauccucaaacac

SEQ ID NO: 1520227 - RNA, 19 nt, Artificial Sequence
  Description of Artificial Sequence: Synthetic oligonucleotide
gcguacgucauccucaaac

SEQ ID NO: 1520228 - RNA, 19 nt, Artificial Sequence
  Description of Artificial Sequence: Synthetic oligonucleotide
cuauguccacugcugcuag

SEQ ID NO: 1520229 - RNA, 19 nt, Artificial Sequence
  Description of Artificial Sequence: Synthetic oligonucleotide
gcuagccagggguaggugg

SEQ ID NO: 1520230 - RNA, 19 nt, Artificial Sequence
  Description of Artificial Sequence: Synthetic oligonucleotide
uuuaggggccgagacacau

SEQ ID NO: 1520231 - RNA, 19 nt, Artificial Sequence
  Description of Artificial Sequence: Synthetic oligonucleotide
auaauagguuugggagucg

SEQ ID NO: 1520232 - RNA, 19 nt, Artificial Sequence
  Description of Artificial Sequence: Synthetic oligonucleotide
uuggaggucccgaggccag

SEQ ID NO: 1520233 - RNA, 19 nt, Artificial Sequence
  Description of Artificial Sequence: Synthetic oligonucleotide
uuugggagucgagcauugg

SEQ ID NO: 1520234 - RNA, 19 nt, Artificial Sequence
  Description of Artificial Sequence: Synthetic oligonucleotide
aagcguacgucauccucaa

SEQ ID NO: 1520235 - RNA, 19 nt, Artificial Sequence
  Description of Artificial Sequence: Synthetic oligonucleotide
guacccgaaacgaugguca

SEQ ID NO: 1520236 - RNA, 19 nt, Artificial Sequence
  Description of Artificial Sequence: Synthetic oligonucleotide
auucguugcagaggcuggg

SEQ ID NO: 1520237 - RNA, 19 nt, Artificial Sequence
  Description of Artificial Sequence: Synthetic oligonucleotide
uuaggggccgagacacaug

SEQ ID NO: 1520238 - RNA, 19 nt, Artificial Sequence
  Description of Artificial Sequence: Synthetic oligonucleotide
uuucgagccccugccaggc

SEQ ID NO: 1520239 - RNA, 19 nt, Artificial Sequence
  Description of Artificial Sequence: Synthetic oligonucleotide
cauuggggccaccacuggc

SEQ ID NO: 1520240 - RNA, 19 nt, Artificial Sequence
  Description of Artificial Sequence: Synthetic oligonucleotide
uggaguaguggcugaggaa

SEQ ID NO: 1520241 - RNA, 19 nt, Artificial Sequence
  Description of Artificial Sequence: Synthetic oligonucleotide
ucauuugggugcuggucaa

SEQ ID NO: 1520242 - RNA, 19 nt, Artificial Sequence
  Description of Artificial Sequence: Synthetic oligonucleotide
ccaagguagaucagguccc

SEQ ID NO: 1520243 - RNA, 19 nt, Artificial Sequence
  Description of Artificial Sequence: Synthetic oligonucleotide
gccaaguauaguugggaug

SEQ ID NO: 1520244 - RNA, 19 nt, Artificial Sequence
  Description of Artificial Sequence: Synthetic oligonucleotide
ggucauugcacacauacau

SEQ ID NO: 1520245 - RNA, 19 nt, Artificial Sequence
  Description of Artificial Sequence: Synthetic oligonucleotide
aucucccaaagagagcuca

SEQ ID NO: 1520246 - RNA, 19 nt, Artificial Sequence
  Description of Artificial Sequence: Synthetic oligonucleotide
ccugacaaccaccucuucc

SEQ ID NO: 1520247 - RNA, 19 nt, Artificial Sequence
  Description of Artificial Sequence: Synthetic oligonucleotide
uacggcgauaguagcccug

SEQ ID NO: 1520248 - RNA, 19 nt, Artificial Sequence
  Description of Artificial Sequence: Synthetic oligonucleotide
ucaaagggccaaguauagu

SEQ ID NO: 1520249 - RNA, 19 nt, Artificial Sequence
  Description of Artificial Sequence: Synthetic oligonucleotide
ugaucccgcaccagaaguu

SEQ ID NO: 1520250 - RNA, 19 nt, Artificial Sequence
  Description of Artificial Sequence: Synthetic oligonucleotide
ccggaaguuguccuuaaag

SEQ ID NO: 1520251 - RNA, 19 nt, Artificial Sequence
  Description of Artificial Sequence: Synthetic oligonucleotide
guugcagaggcuggguggc

SEQ ID NO: 1520252 - RNA, 19 nt, Artificial Sequence
  Description of Artificial Sequence: Synthetic oligonucleotide
ucccgaggccagaagugug

SEQ ID NO: 1520253 - RNA, 19 nt, Artificial Sequence
  Description of Artificial Sequence: Synthetic oligonucleotide
cuucccagauggaguagug

SEQ ID NO: 1520254 - RNA, 19 nt, Artificial Sequence
  Description of Artificial Sequence: Synthetic oligonucleotide
cauagggacccggaagcag

SEQ ID NO: 1520255 - RNA, 19 nt, Artificial Sequence
  Description of Artificial Sequence: Synthetic oligonucleotide
ucagcuguacggcgauagu

SEQ ID NO: 1520256 - RNA, 19 nt, Artificial Sequence
  Description of Artificial Sequence: Synthetic oligonucleotide
guccagugggaguacccag

SEQ ID NO: 1520257 - RNA, 19 nt, Artificial Sequence
  Description of Artificial Sequence: Synthetic oligonucleotide
gaaguuggaauaauagguu

SEQ ID NO: 1520258 - RNA, 19 nt, Artificial Sequence
  Description of Artificial Sequence: Synthetic oligonucleotide
cugcauaguggguugggga

SEQ ID NO: 1520259 - RNA, 19 nt, Artificial Sequence
  Description of Artificial Sequence: Synthetic oligonucleotide
cauccguggggugaggaug

SEQ ID NO: 1520260 - RNA, 19 nt, Artificial Sequence
  Description of Artificial Sequence: Synthetic oligonucleotide
gcgauaguagcccugugga

SEQ ID NO: 1520261 - RNA, 19 nt, Artificial Sequence
  Description of Artificial Sequence: Synthetic oligonucleotide
cagcuaauuaggcggccac

SEQ ID NO: 1520262 - RNA, 19 nt, Artificial Sequence
  Description of Artificial Sequence: Synthetic oligonucleotide
uggaggcuauguccacugc

SEQ ID NO: 1520263 - RNA, 19 nt, Artificial Sequence
  Description of Artificial Sequence: Synthetic oligonucleotide
gcuaacagcuuucgagccc

SEQ ID NO: 1520264 - RNA, 19 nt, Artificial Sequence
  Description of Artificial Sequence: Synthetic oligonucleotide
uggguggcuaacagcuuuc

SEQ ID NO: 1520265 - RNA, 19 nt, Artificial Sequence
  Description of Artificial Sequence: Synthetic oligonucleotide
acguccagugggaguaccc

SEQ ID NO: 1520266 - RNA, 19 nt, Artificial Sequence
  Description of Artificial Sequence: Synthetic oligonucleotide
acgauggucauugcacaca

SEQ ID NO: 1520267 - RNA, 19 nt, Artificial Sequence
  Description of Artificial Sequence: Synthetic oligonucleotide
gaagguagaguggaccaua

SEQ ID NO: 1520268 - RNA, 19 nt, Artificial Sequence
  Description of Artificial Sequence: Synthetic oligonucleotide
auccacuagugcuuccaaa

SEQ ID NO: 1520269 - RNA, 19 nt, Artificial Sequence
  Description of Artificial Sequence: Synthetic oligonucleotide
cauucgagcccggcgcugg

SEQ ID NO: 1520270 - RNA, 19 nt, Artificial Sequence
  Description of Artificial Sequence: Synthetic oligonucleotide
gcuuucgagccccugccag

SEQ ID NO: 1520271 - RNA, 19 nt, Artificial Sequence
  Description of Artificial Sequence: Synthetic oligonucleotide
guauucagcuguacggcga

SEQ ID NO: 1520272 - RNA, 19 nt, Artificial Sequence
  Description of Artificial Sequence: Synthetic oligonucleotide
gucaucaaagggccaagua

SEQ ID NO: 1520273 - RNA, 19 nt, Artificial Sequence
  Description of Artificial Sequence: Synthetic oligonucleotide
caccucacccuugccaucc

SEQ ID NO: 1520274 - RNA, 19 nt, Artificial Sequence
  Description of Artificial Sequence: Synthetic oligonucleotide
caucaaaucccaucuugcu

SEQ ID NO: 1520275 - RNA, 19 nt, Artificial Sequence
  Description of Artificial Sequence: Synthetic oligonucleotide
gcauucguugcagaggcug

SEQ ID NO: 1520276 - RNA, 19 nt, Artificial Sequence
  Description of Artificial Sequence: Synthetic oligonucleotide
agguuugggagucgagcau

SEQ ID NO: 1520277 - RNA, 19 nt, Artificial Sequence
  Description of Artificial Sequence: Synthetic oligonucleotide
agggcucaccugcuuccgg

SEQ ID NO: 1520278 - RNA, 19 nt, Artificial Sequence
  Description of Artificial Sequence: Synthetic oligonucleotide
guuugggagucgagcauug

SEQ ID NO: 1520279 - RNA, 19 nt, Artificial Sequence
  Description of Artificial Sequence: Synthetic oligonucleotide
aacagcuuucgagccccug

SEQ ID NO: 1520280 - RNA, 19 nt, Artificial Sequence
  Description of Artificial Sequence: Synthetic oligonucleotide
gccaguccagcuaauuagg

SEQ ID NO: 1520281 - RNA, 19 nt, Artificial Sequence
  Description of Artificial Sequence: Synthetic oligonucleotide
ccaucaucuguuccagccg

SEQ ID NO: 1520282 - RNA, 19 nt, Artificial Sequence
  Description of Artificial Sequence: Synthetic oligonucleotide
gugugccuuguacugguca

SEQ ID NO: 1520283 - RNA, 19 nt, Artificial Sequence
  Description of Artificial Sequence: Synthetic oligonucleotide
agcauucgagcccggcgcu

SEQ ID NO: 1520284 - RNA, 19 nt, Artificial Sequence
  Description of Artificial Sequence: Synthetic oligonucleotide
ucgagccccugccaggcuc

SEQ ID NO: 1520285 - RNA, 19 nt, Artificial Sequence
  Description of Artificial Sequence: Synthetic oligonucleotide
uccagcuaauuaggcggcc

SEQ ID NO: 1520286 - RNA, 19 nt, Artificial Sequence
  Description of Artificial Sequence: Synthetic oligonucleotide
gaaggcuuggaggucccga

SEQ ID NO: 1520287 - RNA, 19 nt, Artificial Sequence
  Description of Artificial Sequence: Synthetic oligonucleotide
aguggguuggggaggcaag

SEQ ID NO: 1520288 - RNA, 19 nt, Artificial Sequence
  Description of Artificial Sequence: Synthetic oligonucleotide
ggagugaucccgcaccaga

SEQ ID NO: 1520289 - RNA, 19 nt, Artificial Sequence
  Description of Artificial Sequence: Synthetic oligonucleotide
gcuguacggcgauaguagc

SEQ ID NO: 1520290 - RNA, 19 nt, Artificial Sequence
  Description of Artificial Sequence: Synthetic oligonucleotide
agcagccuggcaggcauag

SEQ ID NO: 1520291 - RNA, 19 nt, Artificial Sequence
  Description of Artificial Sequence: Synthetic oligonucleotide
ccaguccagcuaauuaggc

SEQ ID NO: 1520292 - RNA, 19 nt, Artificial Sequence
  Description of Artificial Sequence: Synthetic oligonucleotide
agcuaauuaggcggccacu

SEQ ID NO: 1520293 - RNA, 19 nt, Artificial Sequence
  Description of Artificial Sequence: Synthetic oligonucleotide
uggucgggcuucacugcca

SEQ ID NO: 1520294 - RNA, 19 nt, Artificial Sequence
  Description of Artificial Sequence: Synthetic oligonucleotide
ccaggcucaagguguacgc

SEQ ID NO: 1520295 - RNA, 19 nt, Artificial Sequence
  Description of Artificial Sequence: Synthetic oligonucleotide
gagaagccgcagcgucugg

SEQ ID NO: 1520296 - RNA, 19 nt, Artificial Sequence
  Description of Artificial Sequence: Synthetic oligonucleotide
auguacccgaaacgauggu

SEQ ID NO: 1520297 - RNA, 19 nt, Artificial Sequence
  Description of Artificial Sequence: Synthetic oligonucleotide
auucgagcccggcgcuggg

SEQ ID NO: 1520298 - RNA, 19 nt, Artificial Sequence
  Description of Artificial Sequence: Synthetic oligonucleotide
aaucuccugcauagugggu

SEQ ID NO: 1520299 - RNA, 19 nt, Artificial Sequence
  Description of Artificial Sequence: Synthetic oligonucleotide
caaguauaguugggaugag

SEQ ID NO: 1520300 - RNA, 19 nt, Artificial Sequence
  Description of Artificial Sequence: Synthetic oligonucleotide
auuaggcggccacuaucau

SEQ ID NO: 1520301 - RNA, 19 nt, Artificial Sequence
  Description of Artificial Sequence: Synthetic oligonucleotide
agguagcauucguugcaga

SEQ ID NO: 1520302 - RNA, 19 nt, Artificial Sequence
  Description of Artificial Sequence: Synthetic oligonucleotide
gggucugcgcgccaggcug

SEQ ID NO: 1520303 - RNA, 19 nt, Artificial Sequence
  Description of Artificial Sequence: Synthetic oligonucleotide
uggagugaucccgcaccag

SEQ ID NO: 1520304 - RNA, 19 nt, Artificial Sequence
  Description of Artificial Sequence: Synthetic oligonucleotide
uggaugaaguuggucuuuu

SEQ ID NO: 1520305 - RNA, 19 nt, Artificial Sequence
  Description of Artificial Sequence: Synthetic oligonucleotide
uacccgaaacgauggucau

SEQ ID NO: 1520306 - RNA, 19 nt, Artificial Sequence
  Description of Artificial Sequence: Synthetic oligonucleotide
guacgccaacguccagugg

SEQ ID NO: 1520307 - RNA, 19 nt, Artificial Sequence
  Description of Artificial Sequence: Synthetic oligonucleotide
cuguggagugaucccgcac

SEQ ID NO: 1520308 - RNA, 19 nt, Artificial Sequence
  Description of Artificial Sequence: Synthetic oligonucleotide
gugaucccgcaccagaagu

SEQ ID NO: 1520309 - RNA, 19 nt, Artificial Sequence
  Description of Artificial Sequence: Synthetic oligonucleotide
cguugcagaggcugggugg

SEQ ID NO: 1520310 - RNA, 19 nt, Artificial Sequence
  Description of Artificial Sequence: Synthetic oligonucleotide
agguguacgccaacgucca

SEQ ID NO: 1520311 - RNA, 19 nt, Artificial Sequence
  Description of Artificial Sequence: Synthetic oligonucleotide
acugagccauucagaaucu

SEQ ID NO: 1520312 - RNA, 19 nt, Artificial Sequence
  Description of Artificial Sequence: Synthetic oligonucleotide
uacuggucauuugggugcu

SEQ ID NO: 1520313 - RNA, 19 nt, Artificial Sequence
  Description of Artificial Sequence: Synthetic oligonucleotide
cgagacacaugaucugagg

SEQ ID NO: 1520314 - RNA, 19 nt, Artificial Sequence
  Description of Artificial Sequence: Synthetic oligonucleotide
agaccaggcaggcccucca

SEQ ID NO: 1520315 - RNA, 19 nt, Artificial Sequence
  Description of Artificial Sequence: Synthetic oligonucleotide
uucgagcccggcgcugggg

SEQ ID NO: 1520316 - RNA, 19 nt, Artificial Sequence
  Description of Artificial Sequence: Synthetic oligonucleotide
cacccuugccauccacagc

SEQ ID NO: 1520317 - RNA, 19 nt, Artificial Sequence
  Description of Artificial Sequence: Synthetic oligonucleotide
cugcgcgccaggcugauaa

SEQ ID NO: 1520318 - RNA, 19 nt, Artificial Sequence
  Description of Artificial Sequence: Synthetic oligonucleotide
guggaccauagggacccgg

SEQ ID NO: 1520319 - RNA, 19 nt, Artificial Sequence
  Description of Artificial Sequence: Synthetic oligonucleotide
agaaggcuuggaggucccg

SEQ ID NO: 1520320 - RNA, 19 nt, Artificial Sequence
  Description of Artificial Sequence: Synthetic oligonucleotide
cucagcauucgagcccggc

SEQ ID NO: 1520321 - RNA, 19 nt, Artificial Sequence
  Description of Artificial Sequence: Synthetic oligonucleotide
agaagccgcagcgucuggu

SEQ ID NO: 1520322 - RNA, 19 nt, Artificial Sequence
  Description of Artificial Sequence: Synthetic oligonucleotide
ccaugagagcuucuggguc

SEQ ID NO: 1520323 - RNA, 19 nt, Artificial Sequence
  Description of Artificial Sequence: Synthetic oligonucleotide
gagugaucccgcaccagaa

SEQ ID NO: 1520324 - RNA, 19 nt, Artificial Sequence
  Description of Artificial Sequence: Synthetic oligonucleotide
acggcgauaguagcccugu

SEQ ID NO: 1520325 - RNA, 19 nt, Artificial Sequence
  Description of Artificial Sequence: Synthetic oligonucleotide
ccagugggaguacccagcc

SEQ ID NO: 1520326 - RNA, 19 nt, Artificial Sequence
  Description of Artificial Sequence: Synthetic oligonucleotide
gcuggcgguucuugguagg

SEQ ID NO: 1520327 - RNA, 19 nt, Artificial Sequence
  Description of Artificial Sequence: Synthetic oligonucleotide
ccgagacacaugaucugag

SEQ ID NO: 1520328 - RNA, 19 nt, Artificial Sequence
  Description of Artificial Sequence: Synthetic oligonucleotide
aguugggaugaggugggua

SEQ ID NO: 1520329 - RNA, 19 nt, Artificial Sequence
  Description of Artificial Sequence: Synthetic oligonucleotide
cuccugcauaguggguugg

SEQ ID NO: 1520330 - RNA, 19 nt, Artificial Sequence
  Description of Artificial Sequence: Synthetic oligonucleotide
cgcagcgucugguuguugg

SEQ ID NO: 1520331 - RNA, 19 nt, Artificial Sequence
  Description of Artificial Sequence: Synthetic oligonucleotide
agugugccuuguacugguc

SEQ ID NO: 1520332 - RNA, 19 nt, Artificial Sequence
  Description of Artificial Sequence: Synthetic oligonucleotide
cacaugaucugaggccauc

SEQ ID NO: 1520333 - RNA, 19 nt, Artificial Sequence
  Description of Artificial Sequence: Synthetic oligonucleotide
cagguggaugaaguugguc

SEQ ID NO: 1520334 - RNA, 19 nt, Artificial Sequence
  Description of Artificial Sequence: Synthetic oligonucleotide
aguagcccuguggagugau

SEQ ID NO: 1520335 - RNA, 19 nt, Artificial Sequence
  Description of Artificial Sequence: Synthetic oligonucleotide
ggccgagacacaugaucug

SEQ ID NO: 1520336 - RNA, 19 nt, Artificial Sequence
  Description of Artificial Sequence: Synthetic oligonucleotide
ugcuagccagggguaggug

SEQ ID NO: 1520337 - RNA, 19 nt, Artificial Sequence
  Description of Artificial Sequence: Synthetic oligonucleotide
ccuuaaagcguacgucauc

SEQ ID NO: 1520338 - RNA, 19 nt, Artificial Sequence
  Description of Artificial Sequence: Synthetic oligonucleotide
ccugcauaguggguugggg

SEQ ID NO: 1520339 - RNA, 19 nt, Artificial Sequence
  Description of Artificial Sequence: Synthetic oligonucleotide
ggguggcuaacagcuuucg

SEQ ID NO: 1520340 - RNA, 19 nt, Artificial Sequence
  Description of Artificial Sequence: Synthetic oligonucleotide
gcacacauacauggagacc

SEQ ID NO: 1520341 - RNA, 19 nt, Artificial Sequence
  Description of Artificial Sequence: Synthetic oligonucleotide
agccuggcaggcauaggca

SEQ ID NO: 1520342 - RNA, 19 nt, Artificial Sequence
  Description of Artificial Sequence: Synthetic oligonucleotide
ggaggaugucucuguguca

SEQ ID NO: 1520343 - RNA, 19 nt, Artificial Sequence
  Description of Artificial Sequence: Synthetic oligonucleotide
uucgagccccugccaggcu

SEQ ID NO: 1520344 - RNA, 19 nt, Artificial Sequence
  Description of Artificial Sequence: Synthetic oligonucleotide
cguacgucauccucaaaca

SEQ ID NO: 1520345 - RNA, 19 nt, Artificial Sequence
  Description of Artificial Sequence: Synthetic oligonucleotide
gggcccauccacuagugcu

SEQ ID NO: 1520346 - RNA, 19 nt, Artificial Sequence
  Description of Artificial Sequence: Synthetic oligonucleotide
aggccccugacaaccaccu

SEQ ID NO: 1520347 - RNA, 19 nt, Artificial Sequence
  Description of Artificial Sequence: Synthetic oligonucleotide
caguggaucuaugugaguu

SEQ ID NO: 1520348 - RNA, 19 nt, Artificial Sequence
  Description of Artificial Sequence: Synthetic oligonucleotide
gguggcuaacagcuuucga

SEQ ID NO: 1520349 - RNA, 19 nt, Artificial Sequence
  Description of Artificial Sequence: Synthetic oligonucleotide
gggaugagguggguagaag

SEQ ID NO: 1520350 - RNA, 19 nt, Artificial Sequence
  Description of Artificial Sequence: Synthetic oligonucleotide
gaggccagaagugugccuu

SEQ ID NO: 1520351 - RNA, 19 nt, Artificial Sequence
  Description of Artificial Sequence: Synthetic oligonucleotide
ggcucaccugcuuccggcc

SEQ ID NO: 1520352 - RNA, 19 nt, Artificial Sequence
  Description of Artificial Sequence: Synthetic oligonucleotide
gcuaauuaggcggccacua

SEQ ID NO: 1520353 - RNA, 19 nt, Artificial Sequence
  Description of Artificial Sequence: Synthetic oligonucleotide
cuuuaggggccgagacaca

SEQ ID NO: 1520354 - RNA, 19 nt, Artificial Sequence
  Description of Artificial Sequence: Synthetic oligonucleotide
cugugucacugagccauuc

SEQ ID NO: 1520355 - RNA, 19 nt, Artificial Sequence
  Description of Artificial Sequence: Synthetic oligonucleotide
caagguagaucagguccca

SEQ ID NO: 1520356 - RNA, 19 nt, Artificial Sequence
  Description of Artificial Sequence: Synthetic oligonucleotide
ccuggucgggcuucacugc

SEQ ID NO: 1520357 - RNA, 19 nt, Artificial Sequence
  Description of Artificial Sequence: Synthetic oligonucleotide
ugcgcgccaggcugauaac

SEQ ID NO: 1520358 - RNA, 19 nt, Artificial Sequence
  Description of Artificial Sequence: Synthetic oligonucleotide
ggccacuaucaucauccca

SEQ ID NO: 1520359 - RNA, 19 nt, Artificial Sequence
  Description of Artificial Sequence: Synthetic oligonucleotide
gcgucugguuguuggugag

SEQ ID NO: 1520360 - RNA, 19 nt, Artificial Sequence
  Description of Artificial Sequence: Synthetic oligonucleotide
cagcuguacggcgauagua

SEQ ID NO: 1520361 - RNA, 19 nt, Artificial Sequence
  Description of Artificial Sequence: Synthetic oligonucleotide
cacauucauguacccgaaa

SEQ ID NO: 1520362 - RNA, 19 nt, Artificial Sequence
  Description of Artificial Sequence: Synthetic oligonucleotide
uaguagcccuguggaguga

SEQ ID NO: 1520363 - RNA, 19 nt, Artificial Sequence
  Description of Artificial Sequence: Synthetic oligonucleotide
cuaauuaggcggccacuau

SEQ ID NO: 1520364 - RNA, 19 nt, Artificial Sequence
  Description of Artificial Sequence: Synthetic oligonucleotide
ggucgggcuucacugccac

SEQ ID NO: 1520365 - RNA, 19 nt, Artificial Sequence
  Description of Artificial Sequence: Synthetic oligonucleotide
ugagagcuucugggucacc

SEQ ID NO: 1520366 - RNA, 19 nt, Artificial Sequence
  Description of Artificial Sequence: Synthetic oligonucleotide
cgaaacgauggucauugca

SEQ ID NO: 1520367 - RNA, 19 nt, Artificial Sequence
  Description of Artificial Sequence: Synthetic oligonucleotide
ggccaagguagaucagguc

SEQ ID NO: 1520368 - RNA, 19 nt, Artificial Sequence
  Description of Artificial Sequence: Synthetic oligonucleotide
gccgagacacaugaucuga

SEQ ID NO: 1520369 - RNA, 19 nt, Artificial Sequence
  Description of Artificial Sequence: Synthetic oligonucleotide
guguacgccaacguccagu

SEQ ID NO: 1520370 - RNA, 19 nt, Artificial Sequence
  Description of Artificial Sequence: Synthetic oligonucleotide
gccccugacaaccaccucu

SEQ ID NO: 1520371 - RNA, 19 nt, Artificial Sequence
  Description of Artificial Sequence: Synthetic oligonucleotide
ccugcuuccggccaaggua

SEQ ID NO: 1520372 - RNA, 19 nt, Artificial Sequence
  Description of Artificial Sequence: Synthetic oligonucleotide
gaagccgcagcgucugguu

SEQ ID NO: 1520373 - RNA, 19 nt, Artificial Sequence
  Description of Artificial Sequence: Synthetic oligonucleotide
gcuauguccacugcugcua

SEQ ID NO: 1520374 - RNA, 19 nt, Artificial Sequence
  Description of Artificial Sequence: Synthetic oligonucleotide
acgccaacguccaguggga

SEQ ID NO: 1520375 - RNA, 19 nt, Artificial Sequence
  Description of Artificial Sequence: Synthetic oligonucleotide
agggaaguauucagcugua

SEQ ID NO: 1520376 - RNA, 19 nt, Artificial Sequence
  Description of Artificial Sequence: Synthetic oligonucleotide
gcccaccucacccuugcca

SEQ ID NO: 1520377 - RNA, 19 nt, Artificial Sequence
  Description of Artificial Sequence: Synthetic oligonucleotide
gguguacgccaacguccag

SEQ ID NO: 1520378 - RNA, 19 nt, Artificial Sequence
  Description of Artificial Sequence: Synthetic oligonucleotide
ggaccauagggacccggaa

SEQ ID NO: 1520379 - RNA, 19 nt, Artificial Sequence
  Description of Artificial Sequence: Synthetic oligonucleotide
uggaggucccgaggccaga

SEQ ID NO: 1520380 - RNA, 19 nt, Artificial Sequence
  Description of Artificial Sequence: Synthetic oligonucleotide
ggcuucuuuaggggccgag

SEQ ID NO: 1520381 - RNA, 19 nt, Artificial Sequence
  Description of Artificial Sequence: Synthetic oligonucleotide
gggccgagacacaugaucu

SEQ ID NO: 1520382 - RNA, 19 nt, Artificial Sequence
  Description of Artificial Sequence: Synthetic oligonucleotide
gauggucauugcacacaua

SEQ ID NO: 1520383 - RNA, 19 nt, Artificial Sequence
  Description of Artificial Sequence: Synthetic oligonucleotide
agcauucguugcagaggcu

SEQ ID NO: 1520384 - RNA, 19 nt, Artificial Sequence
  Description of Artificial Sequence: Synthetic oligonucleotide
caacguccagugggaguac

SEQ ID NO: 1520385 - RNA, 19 nt, Artificial Sequence
  Description of Artificial Sequence: Synthetic oligonucleotide
ccaacguccagugggagua

SEQ ID NO: 1520386 - RNA, 19 nt, Artificial Sequence
  Description of Artificial Sequence: Synthetic oligonucleotide
cagugggaguacccagcca

SEQ ID NO: 1520387 - RNA, 19 nt, Artificial Sequence
  Description of Artificial Sequence: Synthetic oligonucleotide
ccucaaacaccacaacccu

SEQ ID NO: 1520388 - RNA, 19 nt, Artificial Sequence
  Description of Artificial Sequence: Synthetic oligonucleotide
acccgaaacgauggucauu

SEQ ID NO: 1520389 - RNA, 19 nt, Artificial Sequence
  Description of Artificial Sequence: Synthetic oligonucleotide
auaguggguuggggaggca

SEQ ID NO: 1520390 - RNA, 19 nt, Artificial Sequence
  Description of Artificial Sequence: Synthetic oligonucleotide
guacggcgauaguagcccu

SEQ ID NO: 1520391 - RNA, 19 nt, Artificial Sequence
  Description of Artificial Sequence: Synthetic oligonucleotide
gcucaagguguacgccaac

SEQ ID NO: 1520392 - RNA, 19 nt, Artificial Sequence
  Description of Artificial Sequence: Synthetic oligonucleotide
ccgaaacgauggucauugc

SEQ ID NO: 1520393 - RNA, 19 nt, Artificial Sequence
  Description of Artificial Sequence: Synthetic oligonucleotide
cugcugcuagccaggggua

SEQ ID NO: 1520394 - RNA, 19 nt, Artificial Sequence
  Description of Artificial Sequence: Synthetic oligonucleotide
gucccgaggccagaagugu

SEQ ID NO: 1520395 - RNA, 19 nt, Artificial Sequence
  Description of Artificial Sequence: Synthetic oligonucleotide
uccguggggugaggaugga

SEQ ID NO: 1520396 - RNA, 19 nt, Artificial Sequence
  Description of Artificial Sequence: Synthetic oligonucleotide
gcucaccugcuuccggcca

SEQ ID NO: 1520397 - RNA, 19 nt, Artificial Sequence
  Description of Artificial Sequence: Synthetic oligonucleotide
auucagcuguacggcgaua

SEQ ID NO: 1520398 - RNA, 19 nt, Artificial Sequence
  Description of Artificial Sequence: Synthetic oligonucleotide
cccauccacuagugcuucc

SEQ ID NO: 1520399 - RNA, 19 nt, Artificial Sequence
  Description of Artificial Sequence: Synthetic oligonucleotide
gguucuugguagggaagua

SEQ ID NO: 1520400 - RNA, 19 nt, Artificial Sequence
  Description of Artificial Sequence: Synthetic oligonucleotide
cauuugggugcuggucaaa

SEQ ID NO: 1520401 - RNA, 19 nt, Artificial Sequence
  Description of Artificial Sequence: Synthetic oligonucleotide
guagcccuguggagugauc

SEQ ID NO: 1520402 - RNA, 19 nt, Artificial Sequence
  Description of Artificial Sequence: Synthetic oligonucleotide
ccacauucauguacccgaa

SEQ ID NO: 1520403 - RNA, 19 nt, Artificial Sequence
  Description of Artificial Sequence: Synthetic oligonucleotide
cugccaggcucaaggugua

SEQ ID NO: 1520404 - RNA, 19 nt, Artificial Sequence
  Description of Artificial Sequence: Synthetic oligonucleotide
cccaugagagcuucugggu

SEQ ID NO: 1520405 - RNA, 19 nt, Artificial Sequence
  Description of Artificial Sequence: Synthetic oligonucleotide
ccagcuaauuaggcggcca

SEQ ID NO: 1520406 - RNA, 19 nt, Artificial Sequence
  Description of Artificial Sequence: Synthetic oligonucleotide
gguuugggagucgagcauu

SEQ ID NO: 1520407 - RNA, 19 nt, Artificial Sequence
  Description of Artificial Sequence: Synthetic oligonucleotide
gccaacguccagugggagu

SEQ ID NO: 1520408 - RNA, 19 nt, Artificial Sequence
  Description of Artificial Sequence: Synthetic oligonucleotide
ccuguggagugaucccgca

SEQ ID NO: 1520409 - RNA, 19 nt, Artificial Sequence
  Description of Artificial Sequence: Synthetic oligonucleotide
gcgccaggcugauaacaaa

SEQ ID NO: 1520410 - RNA, 19 nt, Artificial Sequence
  Description of Artificial Sequence: Synthetic oligonucleotide
gggcuguuuccucagucuu

SEQ ID NO: 1520411 - RNA, 19 nt, Artificial Sequence
  Description of Artificial Sequence: Synthetic oligonucleotide
ccucacccuugccauccac

SEQ ID NO: 1520412 - RNA, 19 nt, Artificial Sequence
  Description of Artificial Sequence: Synthetic oligonucleotide
gcauucgagcccggcgcug

SEQ ID NO: 1520413 - RNA, 19 nt, Artificial Sequence
  Description of Artificial Sequence: Synthetic oligonucleotide
cugugagaagccgcagcgu

SEQ ID NO: 1520414 - RNA, 19 nt, Artificial Sequence
  Description of Artificial Sequence: Synthetic oligonucleotide
ggcgcuggcgguucuuggu

SEQ ID NO: 1520415 - RNA, 19 nt, Artificial Sequence
  Description of Artificial Sequence: Synthetic oligonucleotide
ccuggcaggcauaggcaaa

SEQ ID NO: 1520416 - RNA, 19 nt, Artificial Sequence
  Description of Artificial Sequence: Synthetic oligonucleotide
gagcccggcgcuggggucu

SEQ ID NO: 1520417 - RNA, 19 nt, Artificial Sequence
  Description of Artificial Sequence: Synthetic oligonucleotide
ggaagguagaguggaccau

SEQ ID NO: 1520418 - RNA, 19 nt, Artificial Sequence
  Description of Artificial Sequence: Synthetic oligonucleotide
cagccgccuccggaaguug

SEQ ID NO: 1520419 - RNA, 19 nt, Artificial Sequence
  Description of Artificial Sequence: Synthetic oligonucleotide
gcgcgccaggcugauaaca

SEQ ID NO: 1520420 - RNA, 19 nt, Artificial Sequence
  Description of Artificial Sequence: Synthetic oligonucleotide
cguccacagguagcauucg

SEQ ID NO: 1520421 - RNA, 19 nt, Artificial Sequence
  Description of Artificial Sequence: Synthetic oligonucleotide
ggaggucccgaggccagaa

SEQ ID NO: 1520422 - RNA, 19 nt, Artificial Sequence
  Description of Artificial Sequence: Synthetic oligonucleotide
ucugcgcgccaggcugaua

SEQ ID NO: 1520423 - RNA, 19 nt, Artificial Sequence
  Description of Artificial Sequence: Synthetic oligonucleotide
gcgcuggcgguucuuggua

SEQ ID NO: 1520424 - RNA, 19 nt, Artificial Sequence
  Description of Artificial Sequence: Synthetic oligonucleotide
ccacuagugcuuccaaaau

SEQ ID NO: 1520425 - RNA, 19 nt, Artificial Sequence
  Description of Artificial Sequence: Synthetic oligonucleotide
gcagaggcaguggaucuau

SEQ ID NO: 1520426 - RNA, 19 nt, Artificial Sequence
  Description of Artificial Sequence: Synthetic oligonucleotide
ccguggggugaggauggag

SEQ ID NO: 1520427 - RNA, 19 nt, Artificial Sequence
  Description of Artificial Sequence: Synthetic oligonucleotide
ggucugcgcgccaggcuga

SEQ ID NO: 1520428 - RNA, 19 nt, Artificial Sequence
  Description of Artificial Sequence: Synthetic oligonucleotide
agccccuggucgggcuuca

SEQ ID NO: 1520429 - RNA, 19 nt, Artificial Sequence
  Description of Artificial Sequence: Synthetic oligonucleotide
cgcgccaggcugauaacaa

SEQ ID NO: 1520430 - RNA, 19 nt, Artificial Sequence
  Description of Artificial Sequence: Synthetic oligonucleotide
aggggccgagacacaugau

SEQ ID NO: 1520431 - RNA, 19 nt, Artificial Sequence
  Description of Artificial Sequence: Synthetic oligonucleotide
cccugacaaccaccucuuc

SEQ ID NO: 1520432 - RNA, 19 nt, Artificial Sequence
  Description of Artificial Sequence: Synthetic oligonucleotide
gagagccaguccagcuaau

SEQ ID NO: 1520433 - RNA, 19 nt, Artificial Sequence
  Description of Artificial Sequence: Synthetic oligonucleotide
gccgccuccggaaguuguc

SEQ ID NO: 1520434 - RNA, 19 nt, Artificial Sequence
  Description of Artificial Sequence: Synthetic oligonucleotide
cgauggucauugcacacau

SEQ ID NO: 1520435 - RNA, 19 nt, Artificial Sequence
  Description of Artificial Sequence: Synthetic oligonucleotide
ggcccauccacuagugcuu

SEQ ID NO: 1520436 - RNA, 19 nt, Artificial Sequence
  Description of Artificial Sequence: Synthetic oligonucleotide
ggggucugcgcgccaggcu

SEQ ID NO: 1520437 - RNA, 19 nt, Artificial Sequence
  Description of Artificial Sequence: Synthetic oligonucleotide
ccuccggaaguuguccuua

SEQ ID NO: 1520438 - RNA, 19 nt, Artificial Sequence
  Description of Artificial Sequence: Synthetic oligonucleotide
cgccaacguccagugggag

SEQ ID NO: 1520439 - RNA, 19 nt, Artificial Sequence
  Description of Artificial Sequence: Synthetic oligonucleotide
caacccuggccaggccccu

SEQ ID NO: 1520440 - RNA, 19 nt, Artificial Sequence
  Description of Artificial Sequence: Synthetic oligonucleotide
gucugcgcgccaggcugau

SEQ ID NO: 1520441 - RNA, 19 nt, Artificial Sequence
  Description of Artificial Sequence: Synthetic oligonucleotide
ccgcagcgucugguuguug

SEQ ID NO: 1520442 - RNA, 19 nt, Artificial Sequence
  Description of Artificial Sequence: Synthetic oligonucleotide
cgccuccggaaguuguccu

SEQ ID NO: 1520443 - RNA, 19 nt, Artificial Sequence
  Description of Artificial Sequence: Synthetic oligonucleotide
gccccuggucgggcuucac

SEQ ID NO: 1520444 - RNA, 19 nt, Artificial Sequence
  Description of Artificial Sequence: Synthetic oligonucleotide
ccucagggcucaccugcuu

SEQ ID NO: 1520445 - RNA, 19 nt, Artificial Sequence
  Description of Artificial Sequence: Synthetic oligonucleotide
cgcuggggucugcgcgcca

SEQ ID NO: 1520446 - RNA, 19 nt, Artificial Sequence
  Description of Artificial Sequence: Synthetic oligonucleotide
uuaucaauccaauagagcc

SEQ ID NO: 1520447 - RNA, 19 nt, Artificial Sequence
  Description of Artificial Sequence: Synthetic oligonucleotide
aauaucuccacguacccac

SEQ ID NO: 1520448 - RNA, 19 nt, Artificial Sequence
  Description of Artificial Sequence: Synthetic oligonucleotide
aguauaugguuccagacac

SEQ ID NO: 1520449 - RNA, 19 nt, Artificial Sequence
  Description of Artificial Sequence: Synthetic oligonucleotide
uguguauuuacauuucccg

SEQ ID NO: 1520450 - RNA, 19 nt, Artificial Sequence
  Description of Artificial Sequence: Synthetic oligonucleotide
aggaacguaacccaggggc

SEQ ID NO: 1520451 - RNA, 19 nt, Artificial Sequence
  Description of Artificial Sequence: Synthetic oligonucleotide
auagucguuugucauagcc

SEQ ID NO: 1520452 - RNA, 19 nt, Artificial Sequence
  Description of Artificial Sequence: Synthetic oligonucleotide
uuuuacgaggcaaauaugu

SEQ ID NO: 1520453 - RNA, 19 nt, Artificial Sequence
  Description of Artificial Sequence: Synthetic oligonucleotide
agauauuagagucuucuag

SEQ ID NO: 1520454 - RNA, 19 nt, Artificial Sequence
  Description of Artificial Sequence: Synthetic oligonucleotide
ugagacucuaagcauacag

SEQ ID NO: 1520455 - RNA, 19 nt, Artificial Sequence
  Description of Artificial Sequence: Synthetic oligonucleotide
uggauaacaguccaguuca

SEQ ID NO: 1520456 - RNA, 19 nt, Artificial Sequence
  Description of Artificial Sequence: Synthetic oligonucleotide
aacaauuacuccaauaacu

SEQ ID NO: 1520457 - RNA, 19 nt, Artificial Sequence
  Description of Artificial Sequence: Synthetic oligonucleotide
acaaauaucuccacguacc

SEQ ID NO: 1520458 - RNA, 19 nt, Artificial Sequence
  Description of Artificial Sequence: Synthetic oligonucleotide
gauuuauccuggcaguugg

SEQ ID NO: 1520459 - RNA, 19 nt, Artificial Sequence
  Description of Artificial Sequence: Synthetic oligonucleotide
agcacuauccuguuggcac

SEQ ID NO: 1520460 - RNA, 19 nt, Artificial Sequence
  Description of Artificial Sequence: Synthetic oligonucleotide
uucaguaaacccaucacac

SEQ ID NO: 1520461 - RNA, 19 nt, Artificial Sequence
  Description of Artificial Sequence: Synthetic oligonucleotide
ugggccgugaaccacauag

SEQ ID NO: 1520462 - RNA, 19 nt, Artificial Sequence
  Description of Artificial Sequence: Synthetic oligonucleotide
gaaccaacuguguuggugg

SEQ ID NO: 1520463 - RNA, 19 nt, Artificial Sequence
  Description of Artificial Sequence: Synthetic oligonucleotide
acaaguacuggcuucgggg

SEQ ID NO: 1520464 - RNA, 19 nt, Artificial Sequence
  Description of Artificial Sequence: Synthetic oligonucleotide
auuagagucuucuagcacu

SEQ ID NO: 1520465 - RNA, 19 nt, Artificial Sequence
  Description of Artificial Sequence: Synthetic oligonucleotide
uucucgaccagucauguca

SEQ ID NO: 1520466 - RNA, 19 nt, Artificial Sequence
  Description of Artificial Sequence: Synthetic oligonucleotide
gaucaauuaaacaaagcac

SEQ ID NO: 1520467 - RNA, 19 nt, Artificial Sequence
  Description of Artificial Sequence: Synthetic oligonucleotide
aaguauaugguuccagaca

SEQ ID NO: 1520468 - RNA, 19 nt, Artificial Sequence
  Description of Artificial Sequence: Synthetic oligonucleotide
caguaaacccaucacaccg

SEQ ID NO: 1520469 - RNA, 19 nt, Artificial Sequence
  Description of Artificial Sequence: Synthetic oligonucleotide
cugcuuaucaauccaauag

SEQ ID NO: 1520470 - RNA, 19 nt, Artificial Sequence
  Description of Artificial Sequence: Synthetic oligonucleotide
agaacuaggugcauggggc

SEQ ID NO: 1520471 - RNA, 19 nt, Artificial Sequence
  Description of Artificial Sequence: Synthetic oligonucleotide
acucuaagcauacaggaca

SEQ ID NO: 1520472 - RNA, 19 nt, Artificial Sequence
  Description of Artificial Sequence: Synthetic oligonucleotide
ucauucuccggcuaggagc

SEQ ID NO: 1520473 - RNA, 19 nt, Artificial Sequence
  Description of Artificial Sequence: Synthetic oligonucleotide
uuacgaggcaaauauguga

SEQ ID NO: 1520474 - RNA, 19 nt, Artificial Sequence
  Description of Artificial Sequence: Synthetic oligonucleotide
uaauguuaacuguacaguc

SEQ ID NO: 1520475 - RNA, 19 nt, Artificial Sequence
  Description of Artificial Sequence: Synthetic oligonucleotide
uuuacgaggcaaauaugug

SEQ ID NO: 1520476 - RNA, 19 nt, Artificial Sequence
  Description of Artificial Sequence: Synthetic oligonucleotide
agcagaacuaggugcaugg

SEQ ID NO: 1520477 - RNA, 19 nt, Artificial Sequence
  Description of Artificial Sequence: Synthetic oligonucleotide
uguacagucugccucacuc

SEQ ID NO: 1520478 - RNA, 19 nt, Artificial Sequence
  Description of Artificial Sequence: Synthetic oligonucleotide
auucaguaaacccaucaca

SEQ ID NO: 1520479 - RNA, 19 nt, Artificial Sequence
  Description of Artificial Sequence: Synthetic oligonucleotide
auuguggucgcauuucuug

SEQ ID NO: 1520480 - RNA, 19 nt, Artificial Sequence
  Description of Artificial Sequence: Synthetic oligonucleotide
ugaaguauaugguuccaga

SEQ ID NO: 1520481 - RNA, 19 nt, Artificial Sequence
  Description of Artificial Sequence: Synthetic oligonucleotide
ucuauacucgugcagguuc

SEQ ID NO: 1520482 - RNA, 19 nt, Artificial Sequence
  Description of Artificial Sequence: Synthetic oligonucleotide
gaaguauaugguuccagac

SEQ ID NO: 1520483 - RNA, 19 nt, Artificial Sequence
  Description of Artificial Sequence: Synthetic oligonucleotide
  modified_base (2)..(2): a, c, u, g, unknown or other
unuccaucucccuucauac

SEQ ID NO: 1520484 - RNA, 19 nt, Artificial Sequence
  Description of Artificial Sequence: Synthetic oligonucleotide
cauacgaggacacagcauc

SEQ ID NO: 1520485 - RNA, 19 nt, Artificial Sequence
  Description of Artificial Sequence: Synthetic oligonucleotide
agacucuaagcauacagga

SEQ ID NO: 1520486 - RNA, 19 nt, Artificial Sequence
  Description of Artificial Sequence: Synthetic oligonucleotide
auguuaacuguacagucug

SEQ ID NO: 1520487 - RNA, 19 nt, Artificial Sequence
  Description of Artificial Sequence: Synthetic oligonucleotide
uuuacugcauggaugucac

SEQ ID NO: 1520488 - RNA, 19 nt, Artificial Sequence
  Description of Artificial Sequence: Synthetic oligonucleotide
  modified_base (10)..(10): a, c, u, g, unknown or other
ucauagccunuccaucucc

SEQ ID NO: 1520489 - RNA, 19 nt, Artificial Sequence
  Description of Artificial Sequence: Synthetic oligonucleotide
uccaucucccuucauacga

SEQ ID NO: 1520490 - RNA, 19 nt, Artificial Sequence
  Description of Artificial Sequence: Synthetic oligonucleotide
ucaguuggauaacagucca

SEQ ID NO: 1520491 - RNA, 19 nt, Artificial Sequence
  Description of Artificial Sequence: Synthetic oligonucleotide
aauguuaacuguacagucu

SEQ ID NO: 1520492 - RNA, 19 nt, Artificial Sequence
  Description of Artificial Sequence: Synthetic oligonucleotide
auaauguuaacuguacagu

SEQ ID NO: 1520493 - RNA, 19 nt, Artificial Sequence
  Description of Artificial Sequence: Synthetic oligonucleotide
uacuccaauaacugaacca

SEQ ID NO: 1520494 - RNA, 19 nt, Artificial Sequence
  Description of Artificial Sequence: Synthetic oligonucleotide
uaguucaagucacuggugu

SEQ ID NO: 1520495 - RNA, 19 nt, Artificial Sequence
  Description of Artificial Sequence: Synthetic oligonucleotide
uucauacgaggacacagca

SEQ ID NO: 1520496 - RNA, 19 nt, Artificial Sequence
  Description of Artificial Sequence: Synthetic oligonucleotide
aggugcauggggcaagagc

SEQ ID NO: 1520497 - RNA, 19 nt, Artificial Sequence
  Description of Artificial Sequence: Synthetic oligonucleotide
caaauaugugaacagccac

SEQ ID NO: 1520498 - RNA, 19 nt, Artificial Sequence
  Description of Artificial Sequence: Synthetic oligonucleotide
gagacucuaagcauacagg

SEQ ID NO: 1520499 - RNA, 19 nt, Artificial Sequence
  Description of Artificial Sequence: Synthetic oligonucleotide
ucugauuuauccuggcagu

SEQ ID NO: 1520500 - RNA, 19 nt, Artificial Sequence
  Description of Artificial Sequence: Synthetic oligonucleotide
uacgaggcaaauaugugaa

SEQ ID NO: 1520501 - RNA, 19 nt, Artificial Sequence
  Description of Artificial Sequence: Synthetic oligonucleotide
acaagugaacugcugagga

SEQ ID NO: 1520502 - RNA, 19 nt, Artificial Sequence
  Description of Artificial Sequence: Synthetic oligonucleotide
uauuagagucuucuagcac

SEQ ID NO: 1520503 - RNA, 19 nt, Artificial Sequence
  Description of Artificial Sequence: Synthetic oligonucleotide
caaauaugguaacaauuac

SEQ ID NO: 1520504 - RNA, 19 nt, Artificial Sequence
  Description of Artificial Sequence: Synthetic oligonucleotide
cagaugaaguauaugguuc

SEQ ID NO: 1520505 - RNA, 19 nt, Artificial Sequence
  Description of Artificial Sequence: Synthetic oligonucleotide
auacacugcccacuggcac

SEQ ID NO: 1520506 - RNA, 19 nt, Artificial Sequence
  Description of Artificial Sequence: Synthetic oligonucleotide
ucaguaaacccaucacacc

SEQ ID NO: 1520507 - RNA, 19 nt, Artificial Sequence
  Description of Artificial Sequence: Synthetic oligonucleotide
cugaucaauuaaacaaagc

SEQ ID NO: 1520508 - RNA, 19 nt, Artificial Sequence
  Description of Artificial Sequence: Synthetic oligonucleotide
agcaucuuguaguaccauc

SEQ ID NO: 1520509 - RNA, 19 nt, Artificial Sequence
  Description of Artificial Sequence: Synthetic oligonucleotide
cacacuggaacugagacuc

SEQ ID NO: 1520510 - RNA, 19 nt, Artificial Sequence
  Description of Artificial Sequence: Synthetic oligonucleotide
gaugucacucagcugagca

SEQ ID NO: 1520511 - RNA, 19 nt, Artificial Sequence
  Description of Artificial Sequence: Synthetic oligonucleotide
aggcaaauaugugaacagc

SEQ ID NO: 1520512 - RNA, 19 nt, Artificial Sequence
  Description of Artificial Sequence: Synthetic oligonucleotide
uguuggagguucuccacag

SEQ ID NO: 1520513 - RNA, 19 nt, Artificial Sequence
  Description of Artificial Sequence: Synthetic oligonucleotide
aucaauccaauagagccag

SEQ ID NO: 1520514 - RNA, 19 nt, Artificial Sequence
  Description of Artificial Sequence: Synthetic oligonucleotide
ugguggauagagguggugg

SEQ ID NO: 1520515 - RNA, 19 nt, Artificial Sequence
  Description of Artificial Sequence: Synthetic oligonucleotide
agugccgguagcuguaagg

SEQ ID NO: 1520516 - RNA, 19 nt, Artificial Sequence
  Description of Artificial Sequence: Synthetic oligonucleotide
caguucaucagauuuguca

SEQ ID NO: 1520517 - RNA, 19 nt, Artificial Sequence
  Description of Artificial Sequence: Synthetic oligonucleotide
aauccaauagagccaguuu

SEQ ID NO: 1520518 - RNA, 19 nt, Artificial Sequence
  Description of Artificial Sequence: Synthetic oligonucleotide
acauagucguuugucauag

SEQ ID NO: 1520519 - RNA, 19 nt, Artificial Sequence
  Description of Artificial Sequence: Synthetic oligonucleotide
acugaucaauuaaacaaag

SEQ ID NO: 1520520 - RNA, 19 nt, Artificial Sequence
  Description of Artificial Sequence: Synthetic oligonucleotide
uguguugguggcuuguggu

SEQ ID NO: 1520521 - RNA, 19 nt, Artificial Sequence
  Description of Artificial Sequence: Synthetic oligonucleotide
cagaacuaggugcaugggg

SEQ ID NO: 1520522 - RNA, 19 nt, Artificial Sequence
  Description of Artificial Sequence: Synthetic oligonucleotide
uccccggugaaacaaguga

SEQ ID NO: 1520523 - RNA, 19 nt, Artificial Sequence
  Description of Artificial Sequence: Synthetic oligonucleotide
cugucuauacucgugcagg

SEQ ID NO: 1520524 - RNA, 19 nt, Artificial Sequence
  Description of Artificial Sequence: Synthetic oligonucleotide
aguaaacccaucacaccgc

SEQ ID NO: 1520525 - RNA, 19 nt, Artificial Sequence
  Description of Artificial Sequence: Synthetic oligonucleotide
gcugcaagauauuagaguc

SEQ ID NO: 1520526 - RNA, 19 nt, Artificial Sequence
  Description of Artificial Sequence: Synthetic oligonucleotide
uugggugaggaacguaacc

SEQ ID NO: 1520527 - RNA, 19 nt, Artificial Sequence
  Description of Artificial Sequence: Synthetic oligonucleotide
cucuaagcauacaggacag

SEQ ID NO: 1520528 - RNA, 19 nt, Artificial Sequence
  Description of Artificial Sequence: Synthetic oligonucleotide
auccaauagagccaguuuu

SEQ ID NO: 1520529 - RNA, 19 nt, Artificial Sequence
  Description of Artificial Sequence: Synthetic oligonucleotide
uccaauagagccaguuuuc

SEQ ID NO: 1520530 - RNA, 19 nt, Artificial Sequence
  Description of Artificial Sequence: Synthetic oligonucleotide
uuuacauuucccgguggag

SEQ ID NO: 1520531 - RNA, 19 nt, Artificial Sequence
  Description of Artificial Sequence: Synthetic oligonucleotide
cauucaguaaacccaucac

SEQ ID NO: 1520532 - RNA, 19 nt, Artificial Sequence
  Description of Artificial Sequence: Synthetic oligonucleotide
  modified_base (6)..(6): a, c, u, g, unknown or other
agccunuccaucucccuuc

SEQ ID NO: 1520533 - RNA, 19 nt, Artificial Sequence
  Description of Artificial Sequence: Synthetic oligonucleotide
aagauauuagagucuucua

SEQ ID NO: 1520534 - RNA, 19 nt, Artificial Sequence
  Description of Artificial Sequence: Synthetic oligonucleotide
aguaacuccucucugugua

SEQ ID NO: 1520535 - RNA, 19 nt, Artificial Sequence
  Description of Artificial Sequence: Synthetic oligonucleotide
  modified_base (19)..(19): a, c, u, g, unknown or other
agucguuugucauagccun

SEQ ID NO: 1520536 - RNA, 19 nt, Artificial Sequence
  Description of Artificial Sequence: Synthetic oligonucleotide
uguuaacuguacagucugc

SEQ ID NO: 1520537 - RNA, 19 nt, Artificial Sequence
  Description of Artificial Sequence: Synthetic oligonucleotide
gagaacauguuggagguuc

SEQ ID NO: 1520538 - RNA, 19 nt, Artificial Sequence
  Description of Artificial Sequence: Synthetic oligonucleotide
aguuggauaacaguccagu

SEQ ID NO: 1520539 - RNA, 19 nt, Artificial Sequence
  Description of Artificial Sequence: Synthetic oligonucleotide
  modified_base (9)..(9): a, c, u, g, unknown or other
cauagccunuccaucuccc

SEQ ID NO: 1520540 - RNA, 19 nt, Artificial Sequence
  Description of Artificial Sequence: Synthetic oligonucleotide
accauugcaucgcagggca

SEQ ID NO: 1520541 - RNA, 19 nt, Artificial Sequence
  Description of Artificial Sequence: Synthetic oligonucleotide
accaucgauacacugccca

SEQ ID NO: 1520542 - RNA, 19 nt, Artificial Sequence
  Description of Artificial Sequence: Synthetic oligonucleotide
  modified_base (13)..(13): a, c, u, g, unknown or other
uugucauagccunuccauc

SEQ ID NO: 1520543 - RNA, 19 nt, Artificial Sequence
  Description of Artificial Sequence: Synthetic oligonucleotide
uccucucuguguauggaga

SEQ ID NO: 1520544 - RNA, 19 nt, Artificial Sequence
  Description of Artificial Sequence: Synthetic oligonucleotide
ucuccuuuuacgaggcaaa

SEQ ID NO: 1520545 - RNA, 19 nt, Artificial Sequence
  Description of Artificial Sequence: Synthetic oligonucleotide
uacugcauggaugucacuc

SEQ ID NO: 1520546 - RNA, 19 nt, Artificial Sequence
  Description of Artificial Sequence: Synthetic oligonucleotide
uucucgucugauuuauccu

SEQ ID NO: 1520547 - RNA, 19 nt, Artificial Sequence
  Description of Artificial Sequence: Synthetic oligonucleotide
cuuuuacgaggcaaauaug

SEQ ID NO: 1520548 - RNA, 19 nt, Artificial Sequence
  Description of Artificial Sequence: Synthetic oligonucleotide
caauuaaacaaagcacuuc

SEQ ID NO: 1520549 - RNA, 19 nt, Artificial Sequence
  Description of Artificial Sequence: Synthetic oligonucleotide
ggaacugaucaauuaaaca

SEQ ID NO: 1520550 - RNA, 19 nt, Artificial Sequence
  Description of Artificial Sequence: Synthetic oligonucleotide
ucuccggcuaggagcauag

SEQ ID NO: 1520551 - RNA, 19 nt, Artificial Sequence
  Description of Artificial Sequence: Synthetic oligonucleotide
uuagagucuucuagcacua

SEQ ID NO: 1520552 - RNA, 19 nt, Artificial Sequence
  Description of Artificial Sequence: Synthetic oligonucleotide
cagggcaccaucgauacac

SEQ ID NO: 1520553 - RNA, 19 nt, Artificial Sequence
  Description of Artificial Sequence: Synthetic oligonucleotide
agcggaacugaucaauuaa

SEQ ID NO: 1520554 - RNA, 19 nt, Artificial Sequence
  Description of Artificial Sequence: Synthetic oligonucleotide
aaccagauguguauuuaca

SEQ ID NO: 1520555 - RNA, 19 nt, Artificial Sequence
  Description of Artificial Sequence: Synthetic oligonucleotide
gaggucauucuccggcuag

SEQ ID NO: 1520556 - RNA, 19 nt, Artificial Sequence
  Description of Artificial Sequence: Synthetic oligonucleotide
cagacgucagugcugcagg

SEQ ID NO: 1520557 - RNA, 19 nt, Artificial Sequence
  Description of Artificial Sequence: Synthetic oligonucleotide
aauguccccggugaaacaa

SEQ ID NO: 1520558 - RNA, 19 nt, Artificial Sequence
  Description of Artificial Sequence: Synthetic oligonucleotide
uguugguggcuuguggugc

SEQ ID NO: 1520559 - RNA, 19 nt, Artificial Sequence
  Description of Artificial Sequence: Synthetic oligonucleotide
ugcaagauauuagagucuu

SEQ ID NO: 1520560 - RNA, 19 nt, Artificial Sequence
  Description of Artificial Sequence: Synthetic oligonucleotide
ugucuauacucgugcaggu

SEQ ID NO: 1520561 - RNA, 19 nt, Artificial Sequence
  Description of Artificial Sequence: Synthetic oligonucleotide
uccggcuaggagcauaguc

SEQ ID NO: 1520562 - RNA, 19 nt, Artificial Sequence
  Description of Artificial Sequence: Synthetic oligonucleotide
cauaguucaagucacuggu

SEQ ID NO: 1520563 - RNA, 19 nt, Artificial Sequence
  Description of Artificial Sequence: Synthetic oligonucleotide
cuggaacugagacucuaag

SEQ ID NO: 1520564 - RNA, 19 nt, Artificial Sequence
  Description of Artificial Sequence: Synthetic oligonucleotide
auacgaggacacagcaucc

SEQ ID NO: 1520565 - RNA, 19 nt, Artificial Sequence
  Description of Artificial Sequence: Synthetic oligonucleotide
agcuuucauaguucuccuc

SEQ ID NO: 1520566 - RNA, 19 nt, Artificial Sequence
  Description of Artificial Sequence: Synthetic oligonucleotide
augaaguauaugguuccag

SEQ ID NO: 1520567 - RNA, 19 nt, Artificial Sequence
  Description of Artificial Sequence: Synthetic oligonucleotide
ugggaguaacuccucucug

SEQ ID NO: 1520568 - RNA, 19 nt, Artificial Sequence
  Description of Artificial Sequence: Synthetic oligonucleotide
acgaggcaaauaugugaac

SEQ ID NO: 1520569 - RNA, 19 nt, Artificial Sequence
  Description of Artificial Sequence: Synthetic oligonucleotide
gaggaacguaacccagggg

SEQ ID NO: 1520570 - RNA, 19 nt, Artificial Sequence
  Description of Artificial Sequence: Synthetic oligonucleotide
ucgauacacugcccacugg

SEQ ID NO: 1520571 - RNA, 19 nt, Artificial Sequence
  Description of Artificial Sequence: Synthetic oligonucleotide
ugcagggugucgugggcgg

SEQ ID NO: 1520572 - RNA, 19 nt, Artificial Sequence
  Description of Artificial Sequence: Synthetic oligonucleotide
ucgugggcggggcaaagug

SEQ ID NO: 1520573 - RNA, 19 nt, Artificial Sequence
  Description of Artificial Sequence: Synthetic oligonucleotide
aacugagacucuaagcaua

SEQ ID NO: 1520574 - RNA, 19 nt, Artificial Sequence
  Description of Artificial Sequence: Synthetic oligonucleotide
  modified_base (7)..(7): a, c, u, g, unknown or other
uagccunuccaucucccuu

SEQ ID NO: 1520575 - RNA, 19 nt, Artificial Sequence
  Description of Artificial Sequence: Synthetic oligonucleotide
ucauacgaggacacagcau

SEQ ID NO: 1520576 - RNA, 19 nt, Artificial Sequence
  Description of Artificial Sequence: Synthetic oligonucleotide
acagacgucagugcugcag

SEQ ID NO: 1520577 - RNA, 19 nt, Artificial Sequence
  Description of Artificial Sequence: Synthetic oligonucleotide
gacucuaagcauacaggac

SEQ ID NO: 1520578 - RNA, 19 nt, Artificial Sequence
  Description of Artificial Sequence: Synthetic oligonucleotide
aagcagaacuaggugcaug

SEQ ID NO: 1520579 - RNA, 19 nt, Artificial Sequence
  Description of Artificial Sequence: Synthetic oligonucleotide
gauaacaguccaguucauc

SEQ ID NO: 1520580 - RNA, 19 nt, Artificial Sequence
  Description of Artificial Sequence: Synthetic oligonucleotide
cauucuccggcuaggagca

SEQ ID NO: 1520581 - RNA, 19 nt, Artificial Sequence
  Description of Artificial Sequence: Synthetic oligonucleotide
auguuggagguucuccaca

SEQ ID NO: 1520582 - RNA, 19 nt, Artificial Sequence
  Description of Artificial Sequence: Synthetic oligonucleotide
cuguguugguggcuugugg

SEQ ID NO: 1520583 - RNA, 19 nt, Artificial Sequence
  Description of Artificial Sequence: Synthetic oligonucleotide
gcuaggagcauagucacug

SEQ ID NO: 1520584 - RNA, 19 nt, Artificial Sequence
  Description of Artificial Sequence: Synthetic oligonucleotide
gugaacagccaccauuauc

SEQ ID NO: 1520585 - RNA, 19 nt, Artificial Sequence
  Description of Artificial Sequence: Synthetic oligonucleotide
cuccaauaacugaaccaac

SEQ ID NO: 1520586 - RNA, 19 nt, Artificial Sequence
  Description of Artificial Sequence: Synthetic oligonucleotide
guggucgcauuucuugugc

SEQ ID NO: 1520587 - RNA, 19 nt, Artificial Sequence
  Description of Artificial Sequence: Synthetic oligonucleotide
ggugcauggggcaagagca

SEQ ID NO: 1520588 - RNA, 19 nt, Artificial Sequence
  Description of Artificial Sequence: Synthetic oligonucleotide
caucagauuugucacugca

SEQ ID NO: 1520589 - RNA, 19 nt, Artificial Sequence
  Description of Artificial Sequence: Synthetic oligonucleotide
cuugggugaggaacguaac

SEQ ID NO: 1520590 - RNA, 19 nt, Artificial Sequence
  Description of Artificial Sequence: Synthetic oligonucleotide
cuccucucuguguauggag

SEQ ID NO: 1520591 - RNA, 19 nt, Artificial Sequence
  Description of Artificial Sequence: Synthetic oligonucleotide
auacucgugcagguucagc

SEQ ID NO: 1520592 - RNA, 19 nt, Artificial Sequence
  Description of Artificial Sequence: Synthetic oligonucleotide
ucucgaccagucaugucaa

SEQ ID NO: 1520593 - RNA, 19 nt, Artificial Sequence
  Description of Artificial Sequence: Synthetic oligonucleotide
ugcugucuauacucgugca

SEQ ID NO: 1520594 - RNA, 19 nt, Artificial Sequence
  Description of Artificial Sequence: Synthetic oligonucleotide
cagauuugucacugcaguc

SEQ ID NO: 1520595 - RNA, 19 nt, Artificial Sequence
  Description of Artificial Sequence: Synthetic oligonucleotide
gucauucuccggcuaggag

SEQ ID NO: 1520596 - RNA, 19 nt, Artificial Sequence
  Description of Artificial Sequence: Synthetic oligonucleotide
gugaggaacguaacccagg

SEQ ID NO: 1520597 - RNA, 19 nt, Artificial Sequence
  Description of Artificial Sequence: Synthetic oligonucleotide
  modified_base (8)..(8): a, c, u, g, unknown or other
auagccunuccaucucccu

SEQ ID NO: 1520598 - RNA, 19 nt, Artificial Sequence
  Description of Artificial Sequence: Synthetic oligonucleotide
auaucuccacguacccacc

SEQ ID NO: 1520599 - RNA, 19 nt, Artificial Sequence
  Description of Artificial Sequence: Synthetic oligonucleotide
uaacuccucucuguguaug

SEQ ID NO: 1520600 - RNA, 19 nt, Artificial Sequence
  Description of Artificial Sequence: Synthetic oligonucleotide
gagcaauucgagccuggac

SEQ ID NO: 1520601 - RNA, 19 nt, Artificial Sequence
  Description of Artificial Sequence: Synthetic oligonucleotide
ucgucugauuuauccuggc

SEQ ID NO: 1520602 - RNA, 19 nt, Artificial Sequence
  Description of Artificial Sequence: Synthetic oligonucleotide
uguccccggugaaacaagu

SEQ ID NO: 1520603 - RNA, 19 nt, Artificial Sequence
  Description of Artificial Sequence: Synthetic oligonucleotide
aggagcauagucacuguca

SEQ ID NO: 1520604 - RNA, 19 nt, Artificial Sequence
  Description of Artificial Sequence: Synthetic oligonucleotide
  modified_base (17)..(17): a, c, u, g, unknown or other
ucguuugucauagccunuc

SEQ ID NO: 1520605 - RNA, 19 nt, Artificial Sequence
  Description of Artificial Sequence: Synthetic oligonucleotide
cuauacucgugcagguuca

SEQ ID NO: 1520606 - RNA, 19 nt, Artificial Sequence
  Description of Artificial Sequence: Synthetic oligonucleotide
ugcaucgcagggcaccauc

SEQ ID NO: 1520607 - RNA, 19 nt, Artificial Sequence
  Description of Artificial Sequence: Synthetic oligonucleotide
aggggcacagaagcugggc

SEQ ID NO: 1520608 - RNA, 19 nt, Artificial Sequence
  Description of Artificial Sequence: Synthetic oligonucleotide
gcaguuggcaucaccauug

SEQ ID NO: 1520609 - RNA, 19 nt, Artificial Sequence
  Description of Artificial Sequence: Synthetic oligonucleotide
caguuggauaacaguccag

SEQ ID NO: 1520610 - RNA, 19 nt, Artificial Sequence
  Description of Artificial Sequence: Synthetic oligonucleotide
  modified_base (3)..(3): a, c, u, g, unknown or other
cunuccaucucccuucaua

SEQ ID NO: 1520611 - RNA, 19 nt, Artificial Sequence
  Description of Artificial Sequence: Synthetic oligonucleotide
aacuguguugguggcuugu

SEQ ID NO: 1520612 - RNA, 19 nt, Artificial Sequence
  Description of Artificial Sequence: Synthetic oligonucleotide
ugagcaauucgagccugga

SEQ ID NO: 1520613 - RNA, 19 nt, Artificial Sequence
  Description of Artificial Sequence: Synthetic oligonucleotide
gaacguaacccaggggcac

SEQ ID NO: 1520614 - RNA, 19 nt, Artificial Sequence
  Description of Artificial Sequence: Synthetic oligonucleotide
cugaggagaacauguugga

SEQ ID NO: 1520615 - RNA, 19 nt, Artificial Sequence
  Description of Artificial Sequence: Synthetic oligonucleotide
acuaggugcauggggcaag

SEQ ID NO: 1520616 - RNA, 19 nt, Artificial Sequence
  Description of Artificial Sequence: Synthetic oligonucleotide
uauacucgugcagguucag

SEQ ID NO: 1520617 - RNA, 19 nt, Artificial Sequence
  Description of Artificial Sequence: Synthetic oligonucleotide
accgccaggccacagggau

SEQ ID NO: 1520618 - RNA, 19 nt, Artificial Sequence
  Description of Artificial Sequence: Synthetic oligonucleotide
aacguaacccaggggcaca

SEQ ID NO: 1520619 - RNA, 19 nt, Artificial Sequence
  Description of Artificial Sequence: Synthetic oligonucleotide
agggugcugucuauacucg

SEQ ID NO: 1520620 - RNA, 19 nt, Artificial Sequence
  Description of Artificial Sequence: Synthetic oligonucleotide
gaacugagacucuaagcau

SEQ ID NO: 1520621 - RNA, 19 nt, Artificial Sequence
  Description of Artificial Sequence: Synthetic oligonucleotide
gccgugaaccacauagucg

SEQ ID NO: 1520622 - RNA, 19 nt, Artificial Sequence
  Description of Artificial Sequence: Synthetic oligonucleotide
guaacccaggggcacagaa

SEQ ID NO: 1520623 - RNA, 19 nt, Artificial Sequence
  Description of Artificial Sequence: Synthetic oligonucleotide
ggcaccaucgauacacugc

SEQ ID NO: 1520624 - RNA, 19 nt, Artificial Sequence
  Description of Artificial Sequence: Synthetic oligonucleotide
caucaccauugcaucgcag

SEQ ID NO: 1520625 - RNA, 19 nt, Artificial Sequence
  Description of Artificial Sequence: Synthetic oligonucleotide
uccuuuuacgaggcaaaua

SEQ ID NO: 1520626 - RNA, 19 nt, Artificial Sequence
  Description of Artificial Sequence: Synthetic oligonucleotide
uggucgcauuucuugugcu

SEQ ID NO: 1520627 - RNA, 19 nt, Artificial Sequence
  Description of Artificial Sequence: Synthetic oligonucleotide
cauagucguuugucauagc

SEQ ID NO: 1520628 - RNA, 19 nt, Artificial Sequence
  Description of Artificial Sequence: Synthetic oligonucleotide
gcuuucauaguucuccucu

SEQ ID NO: 1520629 - RNA, 19 nt, Artificial Sequence
  Description of Artificial Sequence: Synthetic oligonucleotide
  modified_base (11)..(11): a, c, u, g, unknown or other
gucauagccunuccaucuc

SEQ ID NO: 1520630 - RNA, 19 nt, Artificial Sequence
  Description of Artificial Sequence: Synthetic oligonucleotide
ucuaagcauacaggacagu

SEQ ID NO: 1520631 - RNA, 19 nt, Artificial Sequence
  Description of Artificial Sequence: Synthetic oligonucleotide
ggugaggaacguaacccag

SEQ ID NO: 1520632 - RNA, 19 nt, Artificial Sequence
  Description of Artificial Sequence: Synthetic oligonucleotide
ucgaccagucaugucaauu

SEQ ID NO: 1520633 - RNA, 19 nt, Artificial Sequence
  Description of Artificial Sequence: Synthetic oligonucleotide
aucgcagggcaccaucgau

SEQ ID NO: 1520634 - RNA, 19 nt, Artificial Sequence
  Description of Artificial Sequence: Synthetic oligonucleotide
gugggcggggcaaagugcc

SEQ ID NO: 1520635 - RNA, 19 nt, Artificial Sequence
  Description of Artificial Sequence: Synthetic oligonucleotide
guuguucucgucugauuua

SEQ ID NO: 1520636 - RNA, 19 nt, Artificial Sequence
  Description of Artificial Sequence: Synthetic oligonucleotide
ggaccuucguucuuccuuc

SEQ ID NO: 1520637 - RNA, 19 nt, Artificial Sequence
  Description of Artificial Sequence: Synthetic oligonucleotide
uggcacagcggaacugauc

SEQ ID NO: 1520638 - RNA, 19 nt, Artificial Sequence
  Description of Artificial Sequence: Synthetic oligonucleotide
ucaauccaauagagccagu

SEQ ID NO: 1520639 - RNA, 19 nt, Artificial Sequence
  Description of Artificial Sequence: Synthetic oligonucleotide
auugcaucgcagggcacca

SEQ ID NO: 1520640 - RNA, 19 nt, Artificial Sequence
  Description of Artificial Sequence: Synthetic oligonucleotide
gcugacaaguacuggcuuc

SEQ ID NO: 1520641 - RNA, 19 nt, Artificial Sequence
  Description of Artificial Sequence: Synthetic oligonucleotide
cacugguguagcccuuggc

SEQ ID NO: 1520642 - RNA, 19 nt, Artificial Sequence
  Description of Artificial Sequence: Synthetic oligonucleotide
ccuuuuacgaggcaaauau

SEQ ID NO: 1520643 - RNA, 19 nt, Artificial Sequence
  Description of Artificial Sequence: Synthetic oligonucleotide
gugggaguaacuccucucu

SEQ ID NO: 1520644 - RNA, 19 nt, Artificial Sequence
  Description of Artificial Sequence: Synthetic oligonucleotide
acuguguugguggcuugug

SEQ ID NO: 1520645 - RNA, 19 nt, Artificial Sequence
  Description of Artificial Sequence: Synthetic oligonucleotide
cacauagucguuugucaua

SEQ ID NO: 1520646 - RNA, 19 nt, Artificial Sequence
  Description of Artificial Sequence: Synthetic oligonucleotide
auucgagccuggaccuucg

SEQ ID NO: 1520647 - RNA, 19 nt, Artificial Sequence
  Description of Artificial Sequence: Synthetic oligonucleotide
agaacauguuggagguucu

SEQ ID NO: 1520648 - RNA, 19 nt, Artificial Sequence
  Description of Artificial Sequence: Synthetic oligonucleotide
gccacagggauacagucaa

SEQ ID NO: 1520649 - RNA, 19 nt, Artificial Sequence
  Description of Artificial Sequence: Synthetic oligonucleotide
ucgagccuggaccuucguu

SEQ ID NO: 1520650 - RNA, 19 nt, Artificial Sequence
  Description of Artificial Sequence: Synthetic oligonucleotide
ggccgugaaccacauaguc

SEQ ID NO: 1520651 - RNA, 19 nt, Artificial Sequence
  Description of Artificial Sequence: Synthetic oligonucleotide
gcacuauccuguuggcacc

SEQ ID NO: 1520652 - RNA, 19 nt, Artificial Sequence
  Description of Artificial Sequence: Synthetic oligonucleotide
agcauacaggacaguugag

SEQ ID NO: 1520653 - RNA, 19 nt, Artificial Sequence
  Description of Artificial Sequence: Synthetic oligonucleotide
caccaucgauacacugccc

SEQ ID NO: 1520654 - RNA, 19 nt, Artificial Sequence
  Description of Artificial Sequence: Synthetic oligonucleotide
gaguaacuccucucugugu

SEQ ID NO: 1520655 - RNA, 19 nt, Artificial Sequence
  Description of Artificial Sequence: Synthetic oligonucleotide
agggugucgugggcggggc

SEQ ID NO: 1520656 - RNA, 19 nt, Artificial Sequence
  Description of Artificial Sequence: Synthetic oligonucleotide
uuacugcauggaugucacu

SEQ ID NO: 1520657 - RNA, 19 nt, Artificial Sequence
  Description of Artificial Sequence: Synthetic oligonucleotide
uggcuucggggugugggug

SEQ ID NO: 1520658 - RNA, 19 nt, Artificial Sequence
  Description of Artificial Sequence: Synthetic oligonucleotide
  modified_base (16)..(16): a, c, u, g, unknown or other
cguuugucauagccunucc

SEQ ID NO: 1520659 - RNA, 19 nt, Artificial Sequence
  Description of Artificial Sequence: Synthetic oligonucleotide
cuucucgaccagucauguc

SEQ ID NO: 1520660 - RNA, 19 nt, Artificial Sequence
  Description of Artificial Sequence: Synthetic oligonucleotide
cgagccuggaccuucguuc

SEQ ID NO: 1520661 - RNA, 19 nt, Artificial Sequence
  Description of Artificial Sequence: Synthetic oligonucleotide
guauaugguuccagacaca

SEQ ID NO: 1520662 - RNA, 19 nt, Artificial Sequence
  Description of Artificial Sequence: Synthetic oligonucleotide
cugcaagauauuagagucu

SEQ ID NO: 1520663 - RNA, 19 nt, Artificial Sequence
  Description of Artificial Sequence: Synthetic oligonucleotide
gcaucgcagggcaccaucg

SEQ ID NO: 1520664 - RNA, 19 nt, Artificial Sequence
  Description of Artificial Sequence: Synthetic oligonucleotide
ugucgugggcggggcaaag

SEQ ID NO: 1520665 - RNA, 19 nt, Artificial Sequence
  Description of Artificial Sequence: Synthetic oligonucleotide
cccggugaaacaagugaac

SEQ ID NO: 1520666 - RNA, 19 nt, Artificial Sequence
  Description of Artificial Sequence: Synthetic oligonucleotide
gcugcuuaucaauccaaua

SEQ ID NO: 1520667 - RNA, 19 nt, Artificial Sequence
  Description of Artificial Sequence: Synthetic oligonucleotide
auguccccggugaaacaag

SEQ ID NO: 1520668 - RNA, 19 nt, Artificial Sequence
  Description of Artificial Sequence: Synthetic oligonucleotide
uucgagccuggaccuucgu

SEQ ID NO: 1520669 - RNA, 19 nt, Artificial Sequence
  Description of Artificial Sequence: Synthetic oligonucleotide
accaacuguguugguggcu

SEQ ID NO: 1520670 - RNA, 19 nt, Artificial Sequence
  Description of Artificial Sequence: Synthetic oligonucleotide
ggaacguaacccaggggca

SEQ ID NO: 1520671 - RNA, 19 nt, Artificial Sequence
  Description of Artificial Sequence: Synthetic oligonucleotide
ccaucgauacacugcccac

SEQ ID NO: 1520672 - RNA, 19 nt, Artificial Sequence
  Description of Artificial Sequence: Synthetic oligonucleotide
gcaucuuguaguaccaucu

SEQ ID NO: 1520673 - RNA, 19 nt, Artificial Sequence
  Description of Artificial Sequence: Synthetic oligonucleotide
cagggugucgugggcgggg

SEQ ID NO: 1520674 - RNA, 19 nt, Artificial Sequence
  Description of Artificial Sequence: Synthetic oligonucleotide
gaaccacauagucguuugu

SEQ ID NO: 1520675 - RNA, 19 nt, Artificial Sequence
  Description of Artificial Sequence: Synthetic oligonucleotide
gaccagucaugucaauuuu

SEQ ID NO: 1520676 - RNA, 19 nt, Artificial Sequence
  Description of Artificial Sequence: Synthetic oligonucleotide
cggugguggauagaggugg

SEQ ID NO: 1520677 - RNA, 19 nt, Artificial Sequence
  Description of Artificial Sequence: Synthetic oligonucleotide
gcuugggugaggaacguaa

SEQ ID NO: 1520678 - RNA, 19 nt, Artificial Sequence
  Description of Artificial Sequence: Synthetic oligonucleotide
gugguggauagagguggug

SEQ ID NO: 1520679 - RNA, 19 nt, Artificial Sequence
  Description of Artificial Sequence: Synthetic oligonucleotide
guccccggugaaacaagug

SEQ ID NO: 1520680 - RNA, 19 nt, Artificial Sequence
  Description of Artificial Sequence: Synthetic oligonucleotide
gcauacaggacaguugagu

SEQ ID NO: 1520681 - RNA, 19 nt, Artificial Sequence
  Description of Artificial Sequence: Synthetic oligonucleotide
ggagggcggugguggauag

SEQ ID NO: 1520682 - RNA, 19 nt, Artificial Sequence
  Description of Artificial Sequence: Synthetic oligonucleotide
caucgcagggcaccaucga

SEQ ID NO: 1520683 - RNA, 19 nt, Artificial Sequence
  Description of Artificial Sequence: Synthetic oligonucleotide
cagcaaaucugucuacuuu

SEQ ID NO: 1520684 - RNA, 19 nt, Artificial Sequence
  Description of Artificial Sequence: Synthetic oligonucleotide
cuguuggcaccugagagau

SEQ ID NO: 1520685 - RNA, 19 nt, Artificial Sequence
  Description of Artificial Sequence: Synthetic oligonucleotide
cgcagggcaccaucgauac

SEQ ID NO: 1520686 - RNA, 19 nt, Artificial Sequence
  Description of Artificial Sequence: Synthetic oligonucleotide
caauccaauagagccaguu

SEQ ID NO: 1520687 - RNA, 19 nt, Artificial Sequence
  Description of Artificial Sequence: Synthetic oligonucleotide
cggcuaggagcauagucac

SEQ ID NO: 1520688 - RNA, 19 nt, Artificial Sequence
  Description of Artificial Sequence: Synthetic oligonucleotide
ccgguggaggcagucagag

SEQ ID NO: 1520689 - RNA, 19 nt, Artificial Sequence
  Description of Artificial Sequence: Synthetic oligonucleotide
cuaggugcauggggcaaga

SEQ ID NO: 1520690 - RNA, 19 nt, Artificial Sequence
  Description of Artificial Sequence: Synthetic oligonucleotide
cagcuuucauaguucuccu

SEQ ID NO: 1520691 - RNA, 19 nt, Artificial Sequence
  Description of Artificial Sequence: Synthetic oligonucleotide
caagggugcugucuauacu

SEQ ID NO: 1520692 - RNA, 19 nt, Artificial Sequence
  Description of Artificial Sequence: Synthetic oligonucleotide
caucgauacacugcccacu

SEQ ID NO: 1520693 - RNA, 19 nt, Artificial Sequence
  Description of Artificial Sequence: Synthetic oligonucleotide
ggagggccccuccucagga

SEQ ID NO: 1520694 - RNA, 19 nt, Artificial Sequence
  Description of Artificial Sequence: Synthetic oligonucleotide
gucgcauuucuugugcuuu

SEQ ID NO: 1520695 - RNA, 19 nt, Artificial Sequence
  Description of Artificial Sequence: Synthetic oligonucleotide
ggcuguugccacugagguc

SEQ ID NO: 1520696 - RNA, 19 nt, Artificial Sequence
  Description of Artificial Sequence: Synthetic oligonucleotide
ggggcaagagcaucuugua

SEQ ID NO: 1520697 - RNA, 19 nt, Artificial Sequence
  Description of Artificial Sequence: Synthetic oligonucleotide
gcucuucaguuggauaaca

SEQ ID NO: 1520698 - RNA, 19 nt, Artificial Sequence
  Description of Artificial Sequence: Synthetic oligonucleotide
cacagcggaacugaucaau

SEQ ID NO: 1520699 - RNA, 19 nt, Artificial Sequence
  Description of Artificial Sequence: Synthetic oligonucleotide
  modified_base (5)..(5): a, c, u, g, unknown or other
gccunuccaucucccuuca

SEQ ID NO: 1520700 - RNA, 19 nt, Artificial Sequence
  Description of Artificial Sequence: Synthetic oligonucleotide
cacuggaacugagacucua

SEQ ID NO: 1520701 - RNA, 19 nt, Artificial Sequence
  Description of Artificial Sequence: Synthetic oligonucleotide
gcggugguggauagaggug

SEQ ID NO: 1520702 - RNA, 19 nt, Artificial Sequence
  Description of Artificial Sequence: Synthetic oligonucleotide
aucacaccgccaggccaca

SEQ ID NO: 1520703 - RNA, 19 nt, Artificial Sequence
  Description of Artificial Sequence: Synthetic oligonucleotide
cugauuuauccuggcaguu

SEQ ID NO: 1520704 - RNA, 19 nt, Artificial Sequence
  Description of Artificial Sequence: Synthetic oligonucleotide
uugcaucgcagggcaccau

SEQ ID NO: 1520705 - RNA, 19 nt, Artificial Sequence
  Description of Artificial Sequence: Synthetic oligonucleotide
ccauuauccugggcacaag

SEQ ID NO: 1520706 - RNA, 19 nt, Artificial Sequence
  Description of Artificial Sequence: Synthetic oligonucleotide
ggugucgugggcggggcaa

SEQ ID NO: 1520707 - RNA, 19 nt, Artificial Sequence
  Description of Artificial Sequence: Synthetic oligonucleotide
ccacauagucguuugucau

SEQ ID NO: 1520708 - RNA, 19 nt, Artificial Sequence
  Description of Artificial Sequence: Synthetic oligonucleotide
guccacauuguggucgcau

SEQ ID NO: 1520709 - RNA, 19 nt, Artificial Sequence
  Description of Artificial Sequence: Synthetic oligonucleotide
ccauugcaucgcagggcac

SEQ ID NO: 1520710 - RNA, 19 nt, Artificial Sequence
  Description of Artificial Sequence: Synthetic oligonucleotide
gucuauacucgugcagguu

SEQ ID NO: 1520711 - RNA, 19 nt, Artificial Sequence
  Description of Artificial Sequence: Synthetic oligonucleotide
cgucugauuuauccuggca

SEQ ID NO: 1520712 - RNA, 19 nt, Artificial Sequence
  Description of Artificial Sequence: Synthetic oligonucleotide
ccggugaaacaagugaacu

SEQ ID NO: 1520713 - RNA, 19 nt, Artificial Sequence
  Description of Artificial Sequence: Synthetic oligonucleotide
  modified_base (18)..(18): a, c, u, g, unknown or other
gucguuugucauagccunu

SEQ ID NO: 1520714 - RNA, 19 nt, Artificial Sequence
  Description of Artificial Sequence: Synthetic oligonucleotide
cacuauccuguuggcaccu

SEQ ID NO: 1520715 - RNA, 19 nt, Artificial Sequence
  Description of Artificial Sequence: Synthetic oligonucleotide
gagggcggugguggauaga

SEQ ID NO: 1520716 - RNA, 19 nt, Artificial Sequence
  Description of Artificial Sequence: Synthetic oligonucleotide
gguagcuguaaggccugua

SEQ ID NO: 1520717 - RNA, 19 nt, Artificial Sequence
  Description of Artificial Sequence: Synthetic oligonucleotide
cgaccagucaugucaauuu

SEQ ID NO: 1520718 - RNA, 19 nt, Artificial Sequence
  Description of Artificial Sequence: Synthetic oligonucleotide
auucuccggcuaggagcau

SEQ ID NO: 1520719 - RNA, 19 nt, Artificial Sequence
  Description of Artificial Sequence: Synthetic oligonucleotide
gugcauggggcaagagcau

SEQ ID NO: 1520720 - RNA, 19 nt, Artificial Sequence
  Description of Artificial Sequence: Synthetic oligonucleotide
gucgugggcggggcaaagu

SEQ ID NO: 1520721 - RNA, 19 nt, Artificial Sequence
  Description of Artificial Sequence: Synthetic oligonucleotide
ggugguggauagagguggu

SEQ ID NO: 1520722 - RNA, 19 nt, Artificial Sequence
  Description of Artificial Sequence: Synthetic oligonucleotide
cucgaccagucaugucaau

SEQ ID NO: 1520723 - RNA, 19 nt, Artificial Sequence
  Description of Artificial Sequence: Synthetic oligonucleotide
gggccgugaaccacauagu

SEQ ID NO: 1520724 - RNA, 19 nt, Artificial Sequence
  Description of Artificial Sequence: Synthetic oligonucleotide
ggauaacaguccaguucau

SEQ ID NO: 1520725 - RNA, 19 nt, Artificial Sequence
  Description of Artificial Sequence: Synthetic oligonucleotide
ggcuaggagcauagucacu

SEQ ID NO: 1520726 - RNA, 19 nt, Artificial Sequence
  Description of Artificial Sequence: Synthetic oligonucleotide
cugggccgugaaccacaua

SEQ ID NO: 1520727 - RNA, 19 nt, Artificial Sequence
  Description of Artificial Sequence: Synthetic oligonucleotide
cuccggcuaggagcauagu

SEQ ID NO: 1520728 - RNA, 19 nt, Artificial Sequence
  Description of Artificial Sequence: Synthetic oligonucleotide
  modified_base (4)..(4): a, c, u, g, unknown or other
ccunuccaucucccuucau

SEQ ID NO: 1520729 - RNA, 19 nt, Artificial Sequence
  Description of Artificial Sequence: Synthetic oligonucleotide
gcggggcaaagugccggua

SEQ ID NO: 1520730 - RNA, 19 nt, Artificial Sequence
  Description of Artificial Sequence: Synthetic oligonucleotide
  modified_base (1)..(1): a, c, u, g, unknown or other
nuccaucucccuucauacg

SEQ ID NO: 1520731 - RNA, 19 nt, Artificial Sequence
  Description of Artificial Sequence: Synthetic oligonucleotide
uguaauucaauucaauagg

SEQ ID NO: 1520732 - RNA, 19 nt, Artificial Sequence
  Description of Artificial Sequence: Synthetic oligonucleotide
aaagaguuaaauuucacca

SEQ ID NO: 1520733 - RNA, 19 nt, Artificial Sequence
  Description of Artificial Sequence: Synthetic oligonucleotide
aagaauauagcucuuuuag

SEQ ID NO: 1520734 - RNA, 19 nt, Artificial Sequence
  Description of Artificial Sequence: Synthetic oligonucleotide
aaaguuucaaccuaaguga

SEQ ID NO: 1520735 - RNA, 19 nt, Artificial Sequence
  Description of Artificial Sequence: Synthetic oligonucleotide
aauuucaccacccacagga

SEQ ID NO: 1520736 - RNA, 19 nt, Artificial Sequence
  Description of Artificial Sequence: Synthetic oligonucleotide
acacucuucauucaaaacc

SEQ ID NO: 1520737 - RNA, 19 nt, Artificial Sequence
  Description of Artificial Sequence: Synthetic oligonucleotide
aauagguuaaguuuuggca

SEQ ID NO: 1520738 - RNA, 19 nt, Artificial Sequence
  Description of Artificial Sequence: Synthetic oligonucleotide
aaaaccuuaaggauguccc

SEQ ID NO: 1520739 - RNA, 19 nt, Artificial Sequence
  Description of Artificial Sequence: Synthetic oligonucleotide
aaacuugacagacagggag

SEQ ID NO: 1520740 - RNA, 19 nt, Artificial Sequence
  Description of Artificial Sequence: Synthetic oligonucleotide
auuaugaaaucaaacaccc

SEQ ID NO: 1520741 - RNA, 19 nt, Artificial Sequence
  Description of Artificial Sequence: Synthetic oligonucleotide
uuuuaguccauucaucucc

SEQ ID NO: 1520742 - RNA, 19 nt, Artificial Sequence
  Description of Artificial Sequence: Synthetic oligonucleotide
aauucaauagguuaaguuu

SEQ ID NO: 1520743 - RNA, 19 nt, Artificial Sequence
  Description of Artificial Sequence: Synthetic oligonucleotide
agaguuaaauuucaccacc

SEQ ID NO: 1520744 - RNA, 19 nt, Artificial Sequence
  Description of Artificial Sequence: Synthetic oligonucleotide
aagaguuaaauuucaccac

SEQ ID NO: 1520745 - RNA, 19 nt, Artificial Sequence
  Description of Artificial Sequence: Synthetic oligonucleotide
caaaguccaaccuugacgg

SEQ ID NO: 1520746 - RNA, 19 nt, Artificial Sequence
  Description of Artificial Sequence: Synthetic oligonucleotide
cauuaugaaaucaaacacc

SEQ ID NO: 1520747 - RNA, 19 nt, Artificial Sequence
  Description of Artificial Sequence: Synthetic oligonucleotide
cugaucuuuaaauauauac

SEQ ID NO: 1520748 - RNA, 19 nt, Artificial Sequence
  Description of Artificial Sequence: Synthetic oligonucleotide
acaaaguccaaccuugacg

SEQ ID NO: 1520749 - RNA, 19 nt, Artificial Sequence
  Description of Artificial Sequence: Synthetic oligonucleotide
gaaaggaugagaaaaggag

SEQ ID NO: 1520750 - RNA, 19 nt, Artificial Sequence
  Description of Artificial Sequence: Synthetic oligonucleotide
uucaaccuaagugagaggg

SEQ ID NO: 1520751 - RNA, 19 nt, Artificial Sequence
  Description of Artificial Sequence: Synthetic oligonucleotide
ucagcaguagcuuugaagu

SEQ ID NO: 1520752 - RNA, 19 nt, Artificial Sequence
  Description of Artificial Sequence: Synthetic oligonucleotide
caugauauacaccaauucc

SEQ ID NO: 1520753 - RNA, 19 nt, Artificial Sequence
  Description of Artificial Sequence: Synthetic oligonucleotide
gaauauagcucuuuuaguc

SEQ ID NO: 1520754 - RNA, 19 nt, Artificial Sequence
  Description of Artificial Sequence: Synthetic oligonucleotide
acacacaaaacuuaguuca

SEQ ID NO: 1520755 - RNA, 19 nt, Artificial Sequence
  Description of Artificial Sequence: Synthetic oligonucleotide
uaguauuggcaucagcugg

SEQ ID NO: 1520756 - RNA, 19 nt, Artificial Sequence
  Description of Artificial Sequence: Synthetic oligonucleotide
caaaacuuaguucagcaag

SEQ ID NO: 1520757 - RNA, 19 nt, Artificial Sequence
  Description of Artificial Sequence: Synthetic oligonucleotide
aacacugaucuuuaaauau

SEQ ID NO: 1520758 - RNA, 19 nt, Artificial Sequence
  Description of Artificial Sequence: Synthetic oligonucleotide
aauaucugcugguuccugg

SEQ ID NO: 1520759 - RNA, 19 nt, Artificial Sequence
  Description of Artificial Sequence: Synthetic oligonucleotide
aaaccuuaaggaugucccc

SEQ ID NO: 1520760 - RNA, 19 nt, Artificial Sequence
  Description of Artificial Sequence: Synthetic oligonucleotide
cauagagaaaguaccagcc

SEQ ID NO: 1520761 - RNA, 19 nt, Artificial Sequence
  Description of Artificial Sequence: Synthetic oligonucleotide
caaagaguuaaauuucacc

SEQ ID NO: 1520762 - RNA, 19 nt, Artificial Sequence
  Description of Artificial Sequence: Synthetic oligonucleotide
uucaaaaccuuaaggaugu

SEQ ID NO: 1520763 - RNA, 19 nt, Artificial Sequence
  Description of Artificial Sequence: Synthetic oligonucleotide
ucugcgaaagcccagcuca

SEQ ID NO: 1520764 - RNA, 19 nt, Artificial Sequence
  Description of Artificial Sequence: Synthetic oligonucleotide
ucugaguuauccaugacau

SEQ ID NO: 1520765 - RNA, 19 nt, Artificial Sequence
  Description of Artificial Sequence: Synthetic oligonucleotide
ugugugaagaauauagcuc

SEQ ID NO: 1520766 - RNA, 19 nt, Artificial Sequence
  Description of Artificial Sequence: Synthetic oligonucleotide
cuauacguggccucaaacg

SEQ ID NO: 1520767 - RNA, 19 nt, Artificial Sequence
  Description of Artificial Sequence: Synthetic oligonucleotide
uucuauguaguucuuggga

SEQ ID NO: 1520768 - RNA, 19 nt, Artificial Sequence
  Description of Artificial Sequence: Synthetic oligonucleotide
auugagcucugccuuauac

SEQ ID NO: 1520769 - RNA, 19 nt, Artificial Sequence
  Description of Artificial Sequence: Synthetic oligonucleotide
aaacuuaguucagcaaggc

SEQ ID NO: 1520770 - RNA, 19 nt, Artificial Sequence
  Description of Artificial Sequence: Synthetic oligonucleotide
gaaaguaccagcccacuug

SEQ ID NO: 1520771 - RNA, 19 nt, Artificial Sequence
  Description of Artificial Sequence: Synthetic oligonucleotide
ucucggagcaccuugaagu

SEQ ID NO: 1520772 - RNA, 19 nt, Artificial Sequence
  Description of Artificial Sequence: Synthetic oligonucleotide
uauacguggccucaaacgu

SEQ ID NO: 1520773 - RNA, 19 nt, Artificial Sequence
  Description of Artificial Sequence: Synthetic oligonucleotide
auugcggggaaacaugccg

SEQ ID NO: 1520774 - RNA, 19 nt, Artificial Sequence
  Description of Artificial Sequence: Synthetic oligonucleotide
ugugacaggcagcaugugg

SEQ ID NO: 1520775 - RNA, 19 nt, Artificial Sequence
  Description of Artificial Sequence: Synthetic oligonucleotide
aggagcagcagugagauuc

SEQ ID NO: 1520776 - RNA, 19 nt, Artificial Sequence
  Description of Artificial Sequence: Synthetic oligonucleotide
caccaguucauucaaagag

SEQ ID NO: 1520777 - RNA, 19 nt, Artificial Sequence
  Description of Artificial Sequence: Synthetic oligonucleotide
cuggacaucauuuccaaac

SEQ ID NO: 1520778 - RNA, 19 nt, Artificial Sequence
  Description of Artificial Sequence: Synthetic oligonucleotide
guuucaaccuaagugagag

SEQ ID NO: 1520779 - RNA, 19 nt, Artificial Sequence
  Description of Artificial Sequence: Synthetic oligonucleotide
ucugcacucccucacaagc

SEQ ID NO: 1520780 - RNA, 19 nt, Artificial Sequence
  Description of Artificial Sequence: Synthetic oligonucleotide
ugugugugaagaauauagc

SEQ ID NO: 1520781 - RNA, 19 nt, Artificial Sequence
  Description of Artificial Sequence: Synthetic oligonucleotide
auucacgggccccaggugc

SEQ ID NO: 1520782 - RNA, 19 nt, Artificial Sequence
  Description of Artificial Sequence: Synthetic oligonucleotide
ucuucauucaaaaccuuaa

SEQ ID NO: 1520783 - RNA, 19 nt, Artificial Sequence
  Description of Artificial Sequence: Synthetic oligonucleotide
auucaaagaguuaaauuuc

SEQ ID NO: 1520784 - RNA, 19 nt, Artificial Sequence
  Description of Artificial Sequence: Synthetic oligonucleotide
auagguuaaguuuuggcau

SEQ ID NO: 1520785 - RNA, 19 nt, Artificial Sequence
  Description of Artificial Sequence: Synthetic oligonucleotide
ucaugauauacaccaauuc

SEQ ID NO: 1520786 - RNA, 19 nt, Artificial Sequence
  Description of Artificial Sequence: Synthetic oligonucleotide
aaacaugccggucugccca

SEQ ID NO: 1520787 - RNA, 19 nt, Artificial Sequence
  Description of Artificial Sequence: Synthetic oligonucleotide
ucuuuuaguauuggcauca

SEQ ID NO: 1520788 - RNA, 19 nt, Artificial Sequence
  Description of Artificial Sequence: Synthetic oligonucleotide
ucuauguaguucuugggaa

SEQ ID NO: 1520789 - RNA, 19 nt, Artificial Sequence
  Description of Artificial Sequence: Synthetic oligonucleotide
uaauugcggggaaacaugc

SEQ ID NO: 1520790 - RNA, 19 nt, Artificial Sequence
  Description of Artificial Sequence: Synthetic oligonucleotide
aagugcuggacaucauuuc

SEQ ID NO: 1520791 - RNA, 19 nt, Artificial Sequence
  Description of Artificial Sequence: Synthetic oligonucleotide
acuauacguggccucaaac

SEQ ID NO: 1520792 - RNA, 19 nt, Artificial Sequence
  Description of Artificial Sequence: Synthetic oligonucleotide
caauagguuaaguuuuggc

SEQ ID NO: 1520793 - RNA, 19 nt, Artificial Sequence
  Description of Artificial Sequence: Synthetic oligonucleotide
uaaauaaucucuucugcuu

SEQ ID NO: 1520794 - RNA, 19 nt, Artificial Sequence
  Description of Artificial Sequence: Synthetic oligonucleotide
uauacaccaauuccaaaau

SEQ ID NO: 1520795 - RNA, 19 nt, Artificial Sequence
  Description of Artificial Sequence: Synthetic oligonucleotide
aacgucaugcacugaagga

SEQ ID NO: 1520796 - RNA, 19 nt, Artificial Sequence
  Description of Artificial Sequence: Synthetic oligonucleotide
guuaaauuucaccacccac

SEQ ID NO: 1520797 - RNA, 19 nt, Artificial Sequence
  Description of Artificial Sequence: Synthetic oligonucleotide
agaauauagcucuuuuagu

SEQ ID NO: 1520798 - RNA, 19 nt, Artificial Sequence
  Description of Artificial Sequence: Synthetic oligonucleotide
uggggugacguaauugcgg

SEQ ID NO: 1520799 - RNA, 19 nt, Artificial Sequence
  Description of Artificial Sequence: Synthetic oligonucleotide
aguuuuggcauuaugaaau

SEQ ID NO: 1520800 - RNA, 19 nt, Artificial Sequence
  Description of Artificial Sequence: Synthetic oligonucleotide
aucugaguuauccaugaca

SEQ ID NO: 1520801 - RNA, 19 nt, Artificial Sequence
  Description of Artificial Sequence: Synthetic oligonucleotide
uucaauagguuaaguuuug

SEQ ID NO: 1520802 - RNA, 19 nt, Artificial Sequence
  Description of Artificial Sequence: Synthetic oligonucleotide
aggaaguacuucccggccc

SEQ ID NO: 1520803 - RNA, 19 nt, Artificial Sequence
  Description of Artificial Sequence: Synthetic oligonucleotide
uggcauuaugaaaucaaac

SEQ ID NO: 1520804 - RNA, 19 nt, Artificial Sequence
  Description of Artificial Sequence: Synthetic oligonucleotide
uuuuaguauuggcaucagc

SEQ ID NO: 1520805 - RNA, 19 nt, Artificial Sequence
  Description of Artificial Sequence: Synthetic oligonucleotide
ggcauuaugaaaucaaaca

SEQ ID NO: 1520806 - RNA, 19 nt, Artificial Sequence
  Description of Artificial Sequence: Synthetic oligonucleotide
aucuccacagacauuuugc

SEQ ID NO: 1520807 - RNA, 19 nt, Artificial Sequence
  Description of Artificial Sequence: Synthetic oligonucleotide
auauagcucuuuuagucca

SEQ ID NO: 1520808 - RNA, 19 nt, Artificial Sequence
  Description of Artificial Sequence: Synthetic oligonucleotide
uuaugaaaucaaacacccc

SEQ ID NO: 1520809 - RNA, 19 nt, Artificial Sequence
  Description of Artificial Sequence: Synthetic oligonucleotide
aagucauauuuggcgaugg

SEQ ID NO: 1520810 - RNA, 19 nt, Artificial Sequence
  Description of Artificial Sequence: Synthetic oligonucleotide
aacuuaguucagcaaggcu

SEQ ID NO: 1520811 - RNA, 19 nt, Artificial Sequence
  Description of Artificial Sequence: Synthetic oligonucleotide
gcauuaugaaaucaaacac

SEQ ID NO: 1520812 - RNA, 19 nt, Artificial Sequence
  Description of Artificial Sequence: Synthetic oligonucleotide
uucaauucaauagguuaag

SEQ ID NO: 1520813 - RNA, 19 nt, Artificial Sequence
  Description of Artificial Sequence: Synthetic oligonucleotide
uuucaccacccacaggaag

SEQ ID NO: 1520814 - RNA, 19 nt, Artificial Sequence
  Description of Artificial Sequence: Synthetic oligonucleotide
uucaccacccacaggaagu

SEQ ID NO: 1520815 - RNA, 19 nt, Artificial Sequence
  Description of Artificial Sequence: Synthetic oligonucleotide
ugcuaagcauuucuucugc

SEQ ID NO: 1520816 - RNA, 19 nt, Artificial Sequence
  Description of Artificial Sequence: Synthetic oligonucleotide
uuuaguccauucaucucca

SEQ ID NO: 1520817 - RNA, 19 nt, Artificial Sequence
  Description of Artificial Sequence: Synthetic oligonucleotide
gucagcaguagcuuugaag

SEQ ID NO: 1520818 - RNA, 19 nt, Artificial Sequence
  Description of Artificial Sequence: Synthetic oligonucleotide
auacguuggcugcuguggc

SEQ ID NO: 1520819 - RNA, 19 nt, Artificial Sequence
  Description of Artificial Sequence: Synthetic oligonucleotide
aaguuucaaccuaagugag

SEQ ID NO: 1520820 - RNA, 19 nt, Artificial Sequence
  Description of Artificial Sequence: Synthetic oligonucleotide
ugacucggggaccagaggu

SEQ ID NO: 1520821 - RNA, 19 nt, Artificial Sequence
  Description of Artificial Sequence: Synthetic oligonucleotide
acugacguggaucuguggu

SEQ ID NO: 1520822 - RNA, 19 nt, Artificial Sequence
  Description of Artificial Sequence: Synthetic oligonucleotide
ucuuagacguuccgguuca

SEQ ID NO: 1520823 - RNA, 19 nt, Artificial Sequence
  Description of Artificial Sequence: Synthetic oligonucleotide
acggaugugguuucauuuc

SEQ ID NO: 1520824 - RNA, 19 nt, Artificial Sequence
  Description of Artificial Sequence: Synthetic oligonucleotide
ucaccaguaggacccagcc

SEQ ID NO: 1520825 - RNA, 19 nt, Artificial Sequence
  Description of Artificial Sequence: Synthetic oligonucleotide
ucucuucugcuucuuagac

SEQ ID NO: 1520826 - RNA, 19 nt, Artificial Sequence
  Description of Artificial Sequence: Synthetic oligonucleotide
ucaauagguuaaguuuugg

SEQ ID NO: 1520827 - RNA, 19 nt, Artificial Sequence
  Description of Artificial Sequence: Synthetic oligonucleotide
aaggaugagaaaaggagau

SEQ ID NO: 1520828 - RNA, 19 nt, Artificial Sequence
  Description of Artificial Sequence: Synthetic oligonucleotide
uggacaucauuuccaaacu

SEQ ID NO: 1520829 - RNA, 19 nt, Artificial Sequence
  Description of Artificial Sequence: Synthetic oligonucleotide
uugcggggaaacaugccgg

SEQ ID NO: 1520830 - RNA, 19 nt, Artificial Sequence
  Description of Artificial Sequence: Synthetic oligonucleotide
aaaccacggaugugguuuc

SEQ ID NO: 1520831 - RNA, 19 nt, Artificial Sequence
  Description of Artificial Sequence: Synthetic oligonucleotide
aaaaccaggagaacaccug

SEQ ID NO: 1520832 - RNA, 19 nt, Artificial Sequence
  Description of Artificial Sequence: Synthetic oligonucleotide
cugacggggagacaguggg

SEQ ID NO: 1520833 - RNA, 19 nt, Artificial Sequence
  Description of Artificial Sequence: Synthetic oligonucleotide
aaaguccaaccuugacggg

SEQ ID NO: 1520834 - RNA, 19 nt, Artificial Sequence
  Description of Artificial Sequence: Synthetic oligonucleotide
gacguuccgguucacuggg

SEQ ID NO: 1520835 - RNA, 19 nt, Artificial Sequence
  Description of Artificial Sequence: Synthetic oligonucleotide
uccauucaucuccacagac

SEQ ID NO: 1520836 - RNA, 19 nt, Artificial Sequence
  Description of Artificial Sequence: Synthetic oligonucleotide
aguuaaauuucaccaccca

SEQ ID NO: 1520837 - RNA, 19 nt, Artificial Sequence
  Description of Artificial Sequence: Synthetic oligonucleotide
uucuuagacguuccgguuc

SEQ ID NO: 1520838 - RNA, 19 nt, Artificial Sequence
  Description of Artificial Sequence: Synthetic oligonucleotide
cauacguuggcugcugugg

SEQ ID NO: 1520839 - RNA, 19 nt, Artificial Sequence
  Description of Artificial Sequence: Synthetic oligonucleotide
agacguuccgguucacugg

SEQ ID NO: 1520840 - RNA, 19 nt, Artificial Sequence
  Description of Artificial Sequence: Synthetic oligonucleotide
ggcagaagcccauucacgg

SEQ ID NO: 1520841 - RNA, 19 nt, Artificial Sequence
  Description of Artificial Sequence: Synthetic oligonucleotide
caggagaacaccugacggg

SEQ ID NO: 1520842 - RNA, 19 nt, Artificial Sequence
  Description of Artificial Sequence: Synthetic oligonucleotide
ucagcaaggcuucaugaua

SEQ ID NO: 1520843 - RNA, 19 nt, Artificial Sequence
  Description of Artificial Sequence: Synthetic oligonucleotide
accaguugggaucugaguu

SEQ ID NO: 1520844 - RNA, 19 nt, Artificial Sequence
  Description of Artificial Sequence: Synthetic oligonucleotide
gaguuaaauuucaccaccc

SEQ ID NO: 1520845 - RNA, 19 nt, Artificial Sequence
  Description of Artificial Sequence: Synthetic oligonucleotide
gaugaagucuccucugcga

SEQ ID NO: 1520846 - RNA, 19 nt, Artificial Sequence
  Description of Artificial Sequence: Synthetic oligonucleotide
aacaaucaaauggcccagg

SEQ ID NO: 1520847 - RNA, 19 nt, Artificial Sequence
  Description of Artificial Sequence: Synthetic oligonucleotide
cacaaaacuuaguucagca

SEQ ID NO: 1520848 - RNA, 19 nt, Artificial Sequence
  Description of Artificial Sequence: Synthetic oligonucleotide
aagucuccucugcgaaagc

SEQ ID NO: 1520849 - RNA, 19 nt, Artificial Sequence
  Description of Artificial Sequence: Synthetic oligonucleotide
guuugcuaagcauuucuuc

SEQ ID NO: 1520850 - RNA, 19 nt, Artificial Sequence
  Description of Artificial Sequence: Synthetic oligonucleotide
gagaacaccugacggggag

SEQ ID NO: 1520851 - RNA, 19 nt, Artificial Sequence
  Description of Artificial Sequence: Synthetic oligonucleotide
ucuaugucccgcaggaaua

SEQ ID NO: 1520852 - RNA, 19 nt, Artificial Sequence
  Description of Artificial Sequence: Synthetic oligonucleotide
uacaaaguccaaccuugac

SEQ ID NO: 1520853 - RNA, 19 nt, Artificial Sequence
  Description of Artificial Sequence: Synthetic oligonucleotide
cuggacauacguuggcugc

SEQ ID NO: 1520854 - RNA, 19 nt, Artificial Sequence
  Description of Artificial Sequence: Synthetic oligonucleotide
ggugcaauucuugugaaug

SEQ ID NO: 1520855 - RNA, 19 nt, Artificial Sequence
  Description of Artificial Sequence: Synthetic oligonucleotide
aaauggcccagguguaacu

SEQ ID NO: 1520856 - RNA, 19 nt, Artificial Sequence
  Description of Artificial Sequence: Synthetic oligonucleotide
gugugaagaauauagcucu

SEQ ID NO: 1520857 - RNA, 19 nt, Artificial Sequence
  Description of Artificial Sequence: Synthetic oligonucleotide
ugggaucugaguuauccau

SEQ ID NO: 1520858 - RNA, 19 nt, Artificial Sequence
  Description of Artificial Sequence: Synthetic oligonucleotide
auucaauagguuaaguuuu

SEQ ID NO: 1520859 - RNA, 19 nt, Artificial Sequence
  Description of Artificial Sequence: Synthetic oligonucleotide
cagcucaccgucuuccugg

SEQ ID NO: 1520860 - RNA, 19 nt, Artificial Sequence
  Description of Artificial Sequence: Synthetic oligonucleotide
acaaucaaauggcccaggu

SEQ ID NO: 1520861 - RNA, 19 nt, Artificial Sequence
  Description of Artificial Sequence: Synthetic oligonucleotide
auaccaguucugaucacac

SEQ ID NO: 1520862 - RNA, 19 nt, Artificial Sequence
  Description of Artificial Sequence: Synthetic oligonucleotide
aaguccaaccuugacggga

SEQ ID NO: 1520863 - RNA, 19 nt, Artificial Sequence
  Description of Artificial Sequence: Synthetic oligonucleotide
ccuacaaaguccaaccuug

SEQ ID NO: 1520864 - RNA, 19 nt, Artificial Sequence
  Description of Artificial Sequence: Synthetic oligonucleotide
ugacguggaucugugguag

SEQ ID NO: 1520865 - RNA, 19 nt, Artificial Sequence
  Description of Artificial Sequence: Synthetic oligonucleotide
agacagugggaggaggcgc

SEQ ID NO: 1520866 - RNA, 19 nt, Artificial Sequence
  Description of Artificial Sequence: Synthetic oligonucleotide
uaagugagagggucaccag

SEQ ID NO: 1520867 - RNA, 19 nt, Artificial Sequence
  Description of Artificial Sequence: Synthetic oligonucleotide
cuuuuaguccauucaucuc

SEQ ID NO: 1520868 - RNA, 19 nt, Artificial Sequence
  Description of Artificial Sequence: Synthetic oligonucleotide
gguguaacucauuauuuca

SEQ ID NO: 1520869 - RNA, 19 nt, Artificial Sequence
  Description of Artificial Sequence: Synthetic oligonucleotide
uguuugcuaagcauuucuu

SEQ ID NO: 1520870 - RNA, 19 nt, Artificial Sequence
  Description of Artificial Sequence: Synthetic oligonucleotide
guaauugcggggaaacaug

SEQ ID NO: 1520871 - RNA, 19 nt, Artificial Sequence
  Description of Artificial Sequence: Synthetic oligonucleotide
ucaaccuaagugagagggu

SEQ ID NO: 1520872 - RNA, 19 nt, Artificial Sequence
  Description of Artificial Sequence: Synthetic oligonucleotide
ucaauucaauagguuaagu

SEQ ID NO: 1520873 - RNA, 19 nt, Artificial Sequence
  Description of Artificial Sequence: Synthetic oligonucleotide
cucggauuaggaaggcccc

SEQ ID NO: 1520874 - RNA, 19 nt, Artificial Sequence
  Description of Artificial Sequence: Synthetic oligonucleotide
aacuugacagacagggaga

SEQ ID NO: 1520875 - RNA, 19 nt, Artificial Sequence
  Description of Artificial Sequence: Synthetic oligonucleotide
uucagcaaggcuucaugau

SEQ ID NO: 1520876 - RNA, 19 nt, Artificial Sequence
  Description of Artificial Sequence: Synthetic oligonucleotide
ucccgcaggaauaucugcu

SEQ ID NO: 1520877 - RNA, 19 nt, Artificial Sequence
  Description of Artificial Sequence: Synthetic oligonucleotide
gugugugaagaauauagcu

SEQ ID NO: 1520878 - RNA, 19 nt, Artificial Sequence
  Description of Artificial Sequence: Synthetic oligonucleotide
auuaggaaggccccaucau

SEQ ID NO: 1520879 - RNA, 19 nt, Artificial Sequence
  Description of Artificial Sequence: Synthetic oligonucleotide
caaucaaauggcccaggug

SEQ ID NO: 1520880 - RNA, 19 nt, Artificial Sequence
  Description of Artificial Sequence: Synthetic oligonucleotide
gacguaauugcggggaaac

SEQ ID NO: 1520881 - RNA, 19 nt, Artificial Sequence
  Description of Artificial Sequence: Synthetic oligonucleotide
ugucccgcaggaauaucug

SEQ ID NO: 1520882 - RNA, 19 nt, Artificial Sequence
  Description of Artificial Sequence: Synthetic oligonucleotide
gaagucauauuuggcgaug

SEQ ID NO: 1520883 - RNA, 19 nt, Artificial Sequence
  Description of Artificial Sequence: Synthetic oligonucleotide
gguuucuuuuaguauuggc

SEQ ID NO: 1520884 - RNA, 19 nt, Artificial Sequence
  Description of Artificial Sequence: Synthetic oligonucleotide
uugacgggaugcuccaggc

SEQ ID NO: 1520885 - RNA, 19 nt, Artificial Sequence
  Description of Artificial Sequence: Synthetic oligonucleotide
guaggacccagccagaugu

SEQ ID NO: 1520886 - RNA, 19 nt, Artificial Sequence
  Description of Artificial Sequence: Synthetic oligonucleotide
auaucugcugguuccugga

SEQ ID NO: 1520887 - RNA, 19 nt, Artificial Sequence
  Description of Artificial Sequence: Synthetic oligonucleotide
cuugaagugcuggacauca

SEQ ID NO: 1520888 - RNA, 19 nt, Artificial Sequence
  Description of Artificial Sequence: Synthetic oligonucleotide
cuggggugacguaauugcg

SEQ ID NO: 1520889 - RNA, 19 nt, Artificial Sequence
  Description of Artificial Sequence: Synthetic oligonucleotide
aaacuguaauucaauucaa

SEQ ID NO: 1520890 - RNA, 19 nt, Artificial Sequence
  Description of Artificial Sequence: Synthetic oligonucleotide
ugccuuauaccaguucuga

SEQ ID NO: 1520891 - RNA, 19 nt, Artificial Sequence
  Description of Artificial Sequence: Synthetic oligonucleotide
cuaagugagagggucacca

SEQ ID NO: 1520892 - RNA, 19 nt, Artificial Sequence
  Description of Artificial Sequence: Synthetic oligonucleotide
ugugguaguccaccaguuc

SEQ ID NO: 1520893 - RNA, 19 nt, Artificial Sequence
  Description of Artificial Sequence: Synthetic oligonucleotide
agcucugccuuauaccagu

SEQ ID NO: 1520894 - RNA, 19 nt, Artificial Sequence
  Description of Artificial Sequence: Synthetic oligonucleotide
aguacuucccggccccguc

SEQ ID NO: 1520895 - RNA, 19 nt, Artificial Sequence
  Description of Artificial Sequence: Synthetic oligonucleotide
caaacaccccuucccaccc

SEQ ID NO: 1520896 - RNA, 19 nt, Artificial Sequence
  Description of Artificial Sequence: Synthetic oligonucleotide
ugguuucuuuuaguauugg

SEQ ID NO: 1520897 - RNA, 19 nt, Artificial Sequence
  Description of Artificial Sequence: Synthetic oligonucleotide
guaguucuugggaaugaag

SEQ ID NO: 1520898 - RNA, 19 nt, Artificial Sequence
  Description of Artificial Sequence: Synthetic oligonucleotide
ggggugacguaauugcggg

SEQ ID NO: 1520899 - RNA, 19 nt, Artificial Sequence
  Description of Artificial Sequence: Synthetic oligonucleotide
gagagggucaccaguagga

SEQ ID NO: 1520900 - RNA, 19 nt, Artificial Sequence
  Description of Artificial Sequence: Synthetic oligonucleotide
uagguuaaguuuuggcauu

SEQ ID NO: 1520901 - RNA, 19 nt, Artificial Sequence
  Description of Artificial Sequence: Synthetic oligonucleotide
aguaccagcccacuugguu

SEQ ID NO: 1520902 - RNA, 19 nt, Artificial Sequence
  Description of Artificial Sequence: Synthetic oligonucleotide
caaccuaagugagaggguc

SEQ ID NO: 1520903 - RNA, 19 nt, Artificial Sequence
  Description of Artificial Sequence: Synthetic oligonucleotide
gaucacacucuucauucaa

SEQ ID NO: 1520904 - RNA, 19 nt, Artificial Sequence
  Description of Artificial Sequence: Synthetic oligonucleotide
caucagcagggaaagagga

SEQ ID NO: 1520905 - RNA, 19 nt, Artificial Sequence
  Description of Artificial Sequence: Synthetic oligonucleotide
gaaagcccagcucaccguc

SEQ ID NO: 1520906 - RNA, 19 nt, Artificial Sequence
  Description of Artificial Sequence: Synthetic oligonucleotide
caucagcugggacuauacg

SEQ ID NO: 1520907 - RNA, 19 nt, Artificial Sequence
  Description of Artificial Sequence: Synthetic oligonucleotide
agauaggaggggaacagga

SEQ ID NO: 1520908 - RNA, 19 nt, Artificial Sequence
  Description of Artificial Sequence: Synthetic oligonucleotide
aacagugccuggacauacg

SEQ ID NO: 1520909 - RNA, 19 nt, Artificial Sequence
  Description of Artificial Sequence: Synthetic oligonucleotide
ggaugaagucuccucugcg

SEQ ID NO: 1520910 - RNA, 19 nt, Artificial Sequence
  Description of Artificial Sequence: Synthetic oligonucleotide
agagggucaccaguaggac

SEQ ID NO: 1520911 - RNA, 19 nt, Artificial Sequence
  Description of Artificial Sequence: Synthetic oligonucleotide
uucugcacucccucacaag

SEQ ID NO: 1520912 - RNA, 19 nt, Artificial Sequence
  Description of Artificial Sequence: Synthetic oligonucleotide
ccaggagaacaccugacgg

SEQ ID NO: 1520913 - RNA, 19 nt, Artificial Sequence
  Description of Artificial Sequence: Synthetic oligonucleotide
caauucuugugaauggucu

SEQ ID NO: 1520914 - RNA, 19 nt, Artificial Sequence
  Description of Artificial Sequence: Synthetic oligonucleotide
gaugcuccaggcuugggcu

SEQ ID NO: 1520915 - RNA, 19 nt, Artificial Sequence
  Description of Artificial Sequence: Synthetic oligonucleotide
agguggguggcgugccucc

SEQ ID NO: 1520916 - RNA, 19 nt, Artificial Sequence
  Description of Artificial Sequence: Synthetic oligonucleotide
aguaggacccagccagaug

SEQ ID NO: 1520917 - RNA, 19 nt, Artificial Sequence
  Description of Artificial Sequence: Synthetic oligonucleotide
guaauucaauucaauaggu

SEQ ID NO: 1520918 - RNA, 19 nt, Artificial Sequence
  Description of Artificial Sequence: Synthetic oligonucleotide
augugggugcaauucuugu

SEQ ID NO: 1520919 - RNA, 19 nt, Artificial Sequence
  Description of Artificial Sequence: Synthetic oligonucleotide
acauacguuggcugcugug

SEQ ID NO: 1520920 - RNA, 19 nt, Artificial Sequence
  Description of Artificial Sequence: Synthetic oligonucleotide
acuuuucacuuucuuuaaa

SEQ ID NO: 1520921 - RNA, 19 nt, Artificial Sequence
  Description of Artificial Sequence: Synthetic oligonucleotide
cacucuucauucaaaaccu

SEQ ID NO: 1520922 - RNA, 19 nt, Artificial Sequence
  Description of Artificial Sequence: Synthetic oligonucleotide
ucucaacuuuucacuuucu

SEQ ID NO: 1520923 - RNA, 19 nt, Artificial Sequence
  Description of Artificial Sequence: Synthetic oligonucleotide
auacaccaauuccaaaaua

SEQ ID NO: 1520924 - RNA, 19 nt, Artificial Sequence
  Description of Artificial Sequence: Synthetic oligonucleotide
uucugccuuggcucugggg

SEQ ID NO: 1520925 - RNA, 19 nt, Artificial Sequence
  Description of Artificial Sequence: Synthetic oligonucleotide
ugugaagaauauagcucuu

SEQ ID NO: 1520926 - RNA, 19 nt, Artificial Sequence
  Description of Artificial Sequence: Synthetic oligonucleotide
uauagcucuuuuaguccau

SEQ ID NO: 1520927 - RNA, 19 nt, Artificial Sequence
  Description of Artificial Sequence: Synthetic oligonucleotide
ugguaguccaccaguucau

SEQ ID NO: 1520928 - RNA, 19 nt, Artificial Sequence
  Description of Artificial Sequence: Synthetic oligonucleotide
ugccggucugcccauggca

SEQ ID NO: 1520929 - RNA, 19 nt, Artificial Sequence
  Description of Artificial Sequence: Synthetic oligonucleotide
uguaguucuugggaaugaa

SEQ ID NO: 1520930 - RNA, 19 nt, Artificial Sequence
  Description of Artificial Sequence: Synthetic oligonucleotide
cucggagcaccuugaagug

SEQ ID NO: 1520931 - RNA, 19 nt, Artificial Sequence
  Description of Artificial Sequence: Synthetic oligonucleotide
uauuggcaucagcugggac

SEQ ID NO: 1520932 - RNA, 19 nt, Artificial Sequence
  Description of Artificial Sequence: Synthetic oligonucleotide
uggucucaacuuuucacuu

SEQ ID NO: 1520933 - RNA, 19 nt, Artificial Sequence
  Description of Artificial Sequence: Synthetic oligonucleotide
auacguggccucaaacguc

SEQ ID NO: 1520934 - RNA, 19 nt, Artificial Sequence
  Description of Artificial Sequence: Synthetic oligonucleotide
cugccuuauaccaguucug

SEQ ID NO: 1520935 - RNA, 19 nt, Artificial Sequence
  Description of Artificial Sequence: Synthetic oligonucleotide
ggaaguacuucccggcccc

SEQ ID NO: 1520936 - RNA, 19 nt, Artificial Sequence
  Description of Artificial Sequence: Synthetic oligonucleotide
ugccuggacauacguuggc

SEQ ID NO: 1520937 - RNA, 19 nt, Artificial Sequence
  Description of Artificial Sequence: Synthetic oligonucleotide
cugaguuauccaugacaug

SEQ ID NO: 1520938 - RNA, 19 nt, Artificial Sequence
  Description of Artificial Sequence: Synthetic oligonucleotide
ggagauaggaggggaacag

SEQ ID NO: 1520939 - RNA, 19 nt, Artificial Sequence
  Description of Artificial Sequence: Synthetic oligonucleotide
aaccuaagugagaggguca

SEQ ID NO: 1520940 - RNA, 19 nt, Artificial Sequence
  Description of Artificial Sequence: Synthetic oligonucleotide
augccggucugcccauggc

SEQ ID NO: 1520941 - RNA, 19 nt, Artificial Sequence
  Description of Artificial Sequence: Synthetic oligonucleotide
gguuccuggacacugacgu

SEQ ID NO: 1520942 - RNA, 19 nt, Artificial Sequence
  Description of Artificial Sequence: Synthetic oligonucleotide
agcugggacuauacguggc

SEQ ID NO: 1520943 - RNA, 19 nt, Artificial Sequence
  Description of Artificial Sequence: Synthetic oligonucleotide
acguggaucugugguaguc

SEQ ID NO: 1520944 - RNA, 19 nt, Artificial Sequence
  Description of Artificial Sequence: Synthetic oligonucleotide
gaucugugguaguccacca

SEQ ID NO: 1520945 - RNA, 19 nt, Artificial Sequence
  Description of Artificial Sequence: Synthetic oligonucleotide
ugggcuggaggcagaugcc

SEQ ID NO: 1520946 - RNA, 19 nt, Artificial Sequence
  Description of Artificial Sequence: Synthetic oligonucleotide
cuuuuaguauuggcaucag

SEQ ID NO: 1520947 - RNA, 19 nt, Artificial Sequence
  Description of Artificial Sequence: Synthetic oligonucleotide
ucgcucucucggauuagga

SEQ ID NO: 1520948 - RNA, 19 nt, Artificial Sequence
  Description of Artificial Sequence: Synthetic oligonucleotide
uuagacguuccgguucacu

SEQ ID NO: 1520949 - RNA, 19 nt, Artificial Sequence
  Description of Artificial Sequence: Synthetic oligonucleotide
gaacaccugacggggagac

SEQ ID NO: 1520950 - RNA, 19 nt, Artificial Sequence
  Description of Artificial Sequence: Synthetic oligonucleotide
ggaucugugguaguccacc

SEQ ID NO: 1520951 - RNA, 19 nt, Artificial Sequence
  Description of Artificial Sequence: Synthetic oligonucleotide
uccccaggggcacucucgc

SEQ ID NO: 1520952 - RNA, 19 nt, Artificial Sequence
  Description of Artificial Sequence: Synthetic oligonucleotide
ugggacuauacguggccuc

SEQ ID NO: 1520953 - RNA, 19 nt, Artificial Sequence
  Description of Artificial Sequence: Synthetic oligonucleotide
agcucaccgucuuccuggg

SEQ ID NO: 1520954 - RNA, 19 nt, Artificial Sequence
  Description of Artificial Sequence: Synthetic oligonucleotide
uccucugcgaaagcccagc

SEQ ID NO: 1520955 - RNA, 19 nt, Artificial Sequence
  Description of Artificial Sequence: Synthetic oligonucleotide
ggaaacaugccggucugcc

SEQ ID NO: 1520956 - RNA, 19 nt, Artificial Sequence
  Description of Artificial Sequence: Synthetic oligonucleotide
cucccucacaagcugugac

SEQ ID NO: 1520957 - RNA, 19 nt, Artificial Sequence
  Description of Artificial Sequence: Synthetic oligonucleotide
gaguuauccaugacaugga

SEQ ID NO: 1520958 - RNA, 19 nt, Artificial Sequence
  Description of Artificial Sequence: Synthetic oligonucleotide
caugccggucugcccaugg

SEQ ID NO: 1520959 - RNA, 19 nt, Artificial Sequence
  Description of Artificial Sequence: Synthetic oligonucleotide
acggggagacagugggagg

SEQ ID NO: 1520960 - RNA, 19 nt, Artificial Sequence
  Description of Artificial Sequence: Synthetic oligonucleotide
acuugacagacagggagaa

SEQ ID NO: 1520961 - RNA, 19 nt, Artificial Sequence
  Description of Artificial Sequence: Synthetic oligonucleotide
uggacauacguuggcugcu

SEQ ID NO: 1520962 - RNA, 19 nt, Artificial Sequence
  Description of Artificial Sequence: Synthetic oligonucleotide
gcacugaaggacaggaaag

SEQ ID NO: 1520963 - RNA, 19 nt, Artificial Sequence
  Description of Artificial Sequence: Synthetic oligonucleotide
cauuuccaaacuugacaga

SEQ ID NO: 1520964 - RNA, 19 nt, Artificial Sequence
  Description of Artificial Sequence: Synthetic oligonucleotide
ugggugcaauucuugugaa

SEQ ID NO: 1520965 - RNA, 19 nt, Artificial Sequence
  Description of Artificial Sequence: Synthetic oligonucleotide
caaauggcccagguguaac

SEQ ID NO: 1520966 - RNA, 19 nt, Artificial Sequence
  Description of Artificial Sequence: Synthetic oligonucleotide
cugcuucuuagacguuccg

SEQ ID NO: 1520967 - RNA, 19 nt, Artificial Sequence
  Description of Artificial Sequence: Synthetic oligonucleotide
aguuucaaccuaagugaga

SEQ ID NO: 1520968 - RNA, 19 nt, Artificial Sequence
  Description of Artificial Sequence: Synthetic oligonucleotide
gucccgcaggaauaucugc

SEQ ID NO: 1520969 - RNA, 19 nt, Artificial Sequence
  Description of Artificial Sequence: Synthetic oligonucleotide
ugcggggaaacaugccggu

SEQ ID NO: 1520970 - RNA, 19 nt, Artificial Sequence
  Description of Artificial Sequence: Synthetic oligonucleotide
gugacucggggaccagagg

SEQ ID NO: 1520971 - RNA, 19 nt, Artificial Sequence
  Description of Artificial Sequence: Synthetic oligonucleotide
ucggagcaccuugaagugc

SEQ ID NO: 1520972 - RNA, 19 nt, Artificial Sequence
  Description of Artificial Sequence: Synthetic oligonucleotide
uuaguccauucaucuccac

SEQ ID NO: 1520973 - RNA, 19 nt, Artificial Sequence
  Description of Artificial Sequence: Synthetic oligonucleotide
cucgcucucucggauuagg

SEQ ID NO: 1520974 - RNA, 19 nt, Artificial Sequence
  Description of Artificial Sequence: Synthetic oligonucleotide
aggacccagccagauguuc

SEQ ID NO: 1520975 - RNA, 19 nt, Artificial Sequence
  Description of Artificial Sequence: Synthetic oligonucleotide
cagcaguagcuuugaaguc

SEQ ID NO: 1520976 - RNA, 19 nt, Artificial Sequence
  Description of Artificial Sequence: Synthetic oligonucleotide
gcuaagcauuucuucugcc

SEQ ID NO: 1520977 - RNA, 19 nt, Artificial Sequence
  Description of Artificial Sequence: Synthetic oligonucleotide
gagcucugccuuauaccag

SEQ ID NO: 1520978 - RNA, 19 nt, Artificial Sequence
  Description of Artificial Sequence: Synthetic oligonucleotide
aguccccaggggcacucuc

SEQ ID NO: 1520979 - RNA, 19 nt, Artificial Sequence
  Description of Artificial Sequence: Synthetic oligonucleotide
gaaguacuucccggccccg

SEQ ID NO: 1520980 - RNA, 19 nt, Artificial Sequence
  Description of Artificial Sequence: Synthetic oligonucleotide
gugccuggacauacguugg

SEQ ID NO: 1520981 - RNA, 19 nt, Artificial Sequence
  Description of Artificial Sequence: Synthetic oligonucleotide
caccuugaagugcuggaca

SEQ ID NO: 1520982 - RNA, 19 nt, Artificial Sequence
  Description of Artificial Sequence: Synthetic oligonucleotide
uggccucaaacgucaugca

SEQ ID NO: 1520983 - RNA, 19 nt, Artificial Sequence
  Description of Artificial Sequence: Synthetic oligonucleotide
cacugacguggaucugugg

SEQ ID NO: 1520984 - RNA, 19 nt, Artificial Sequence
  Description of Artificial Sequence: Synthetic oligonucleotide
gcugggacuauacguggcc

SEQ ID NO: 1520985 - RNA, 19 nt, Artificial Sequence
  Description of Artificial Sequence: Synthetic oligonucleotide
uuaguucagcaaggcuuca

SEQ ID NO: 1520986 - RNA, 19 nt, Artificial Sequence
  Description of Artificial Sequence: Synthetic oligonucleotide
cccacuugguuucuuuuag

SEQ ID NO: 1520987 - RNA, 19 nt, Artificial Sequence
  Description of Artificial Sequence: Synthetic oligonucleotide
gacucggggaccagaggug

SEQ ID NO: 1520988 - RNA, 19 nt, Artificial Sequence
  Description of Artificial Sequence: Synthetic oligonucleotide
ucggauuaggaaggcccca

SEQ ID NO: 1520989 - RNA, 19 nt, Artificial Sequence
  Description of Artificial Sequence: Synthetic oligonucleotide
ccagauguucugcacuccc

SEQ ID NO: 1520990 - RNA, 19 nt, Artificial Sequence
  Description of Artificial Sequence: Synthetic oligonucleotide
cacucccucacaagcugug

SEQ ID NO: 1520991 - RNA, 19 nt, Artificial Sequence
  Description of Artificial Sequence: Synthetic oligonucleotide
gacuauacguggccucaaa

SEQ ID NO: 1520992 - RNA, 19 nt, Artificial Sequence
  Description of Artificial Sequence: Synthetic oligonucleotide
ugacguaauugcggggaaa

SEQ ID NO: 1520993 - RNA, 19 nt, Artificial Sequence
  Description of Artificial Sequence: Synthetic oligonucleotide
gaagugcuggacaucauuu

SEQ ID NO: 1520994 - RNA, 19 nt, Artificial Sequence
  Description of Artificial Sequence: Synthetic oligonucleotide
gacgggaugcuccaggcuu

SEQ ID NO: 1520995 - RNA, 19 nt, Artificial Sequence
  Description of Artificial Sequence: Synthetic oligonucleotide
gcaucucuggcagaagccc

SEQ ID NO: 1520996 - RNA, 19 nt, Artificial Sequence
  Description of Artificial Sequence: Synthetic oligonucleotide
cucucggauuaggaaggcc

SEQ ID NO: 1520997 - RNA, 19 nt, Artificial Sequence
  Description of Artificial Sequence: Synthetic oligonucleotide
gcagcagugagauucugua

SEQ ID NO: 1520998 - RNA, 19 nt, Artificial Sequence
  Description of Artificial Sequence: Synthetic oligonucleotide
gcuucuuagacguuccggu

SEQ ID NO: 1520999 - RNA, 19 nt, Artificial Sequence
  Description of Artificial Sequence: Synthetic oligonucleotide
ccuggacauacguuggcug

SEQ ID NO: 1521000 - RNA, 19 nt, Artificial Sequence
  Description of Artificial Sequence: Synthetic oligonucleotide
guggcgugccuccuucccc

SEQ ID NO: 1521001 - RNA, 19 nt, Artificial Sequence
  Description of Artificial Sequence: Synthetic oligonucleotide
cauuuugcauagagaaagu

SEQ ID NO: 1521002 - RNA, 19 nt, Artificial Sequence
  Description of Artificial Sequence: Synthetic oligonucleotide
ggucaaagucaaacagugc

SEQ ID NO: 1521003 - RNA, 19 nt, Artificial Sequence
  Description of Artificial Sequence: Synthetic oligonucleotide
aaguacuucccggccccgu

SEQ ID NO: 1521004 - RNA, 19 nt, Artificial Sequence
  Description of Artificial Sequence: Synthetic oligonucleotide
cucggggaccagagguggg

SEQ ID NO: 1521005 - RNA, 19 nt, Artificial Sequence
  Description of Artificial Sequence: Synthetic oligonucleotide
ggccucaaacgucaugcac

SEQ ID NO: 1521006 - RNA, 19 nt, Artificial Sequence
  Description of Artificial Sequence: Synthetic oligonucleotide
acguaauugcggggaaaca

SEQ ID NO: 1521007 - RNA, 19 nt, Artificial Sequence
  Description of Artificial Sequence: Synthetic oligonucleotide
cugcgaaagcccagcucac

SEQ ID NO: 1521008 - RNA, 19 nt, Artificial Sequence
  Description of Artificial Sequence: Synthetic oligonucleotide
accugacggggagacagug

SEQ ID NO: 1521009 - RNA, 19 nt, Artificial Sequence
  Description of Artificial Sequence: Synthetic oligonucleotide
gcaauucuugugaaugguc

SEQ ID NO: 1521010 - RNA, 19 nt, Artificial Sequence
  Description of Artificial Sequence: Synthetic oligonucleotide
agaacaccugacggggaga

SEQ ID NO: 1521011 - RNA, 19 nt, Artificial Sequence
  Description of Artificial Sequence: Synthetic oligonucleotide
gucugcccauggcaggccc

SEQ ID NO: 1521012 - RNA, 19 nt, Artificial Sequence
  Description of Artificial Sequence: Synthetic oligonucleotide
aggaugagaaaaggagaua

SEQ ID NO: 1521013 - RNA, 19 nt, Artificial Sequence
  Description of Artificial Sequence: Synthetic oligonucleotide
ucaccacccacaggaagua

SEQ ID NO: 1521014 - RNA, 19 nt, Artificial Sequence
  Description of Artificial Sequence: Synthetic oligonucleotide
acacugacguggaucugug

SEQ ID NO: 1521015 - RNA, 19 nt, Artificial Sequence
  Description of Artificial Sequence: Synthetic oligonucleotide
agcccacuugguuucuuuu

SEQ ID NO: 1521016 - RNA, 19 nt, Artificial Sequence
  Description of Artificial Sequence: Synthetic oligonucleotide
aguccaaccuugacgggau

SEQ ID NO: 1521017 - RNA, 19 nt, Artificial Sequence
  Description of Artificial Sequence: Synthetic oligonucleotide
ucggggaccagaggugggu

SEQ ID NO: 1521018 - RNA, 19 nt, Artificial Sequence
  Description of Artificial Sequence: Synthetic oligonucleotide
cugacguggaucuguggua

SEQ ID NO: 1521019 - RNA, 19 nt, Artificial Sequence
  Description of Artificial Sequence: Synthetic oligonucleotide
agguuaaguuuuggcauua

SEQ ID NO: 1521020 - RNA, 19 nt, Artificial Sequence
  Description of Artificial Sequence: Synthetic oligonucleotide
augcccucaggcaucucug

SEQ ID NO: 1521021 - RNA, 19 nt, Artificial Sequence
  Description of Artificial Sequence: Synthetic oligonucleotide
cagguguaacucauuauuu

SEQ ID NO: 1521022 - RNA, 19 nt, Artificial Sequence
  Description of Artificial Sequence: Synthetic oligonucleotide
aacaccugacggggagaca

SEQ ID NO: 1521023 - RNA, 19 nt, Artificial Sequence
  Description of Artificial Sequence: Synthetic oligonucleotide
cccucacaagcugugacag

SEQ ID NO: 1521024 - RNA, 19 nt, Artificial Sequence
  Description of Artificial Sequence: Synthetic oligonucleotide
ccugacggggagacagugg

SEQ ID NO: 1521025 - RNA, 19 nt, Artificial Sequence
  Description of Artificial Sequence: Synthetic oligonucleotide
gguggcgugccuccuuccc

SEQ ID NO: 1521026 - RNA, 19 nt, Artificial Sequence
  Description of Artificial Sequence: Synthetic oligonucleotide
gcucuuuuaguccauucau

SEQ ID NO: 1521027 - RNA, 19 nt, Artificial Sequence
  Description of Artificial Sequence: Synthetic oligonucleotide
aaguaccagcccacuuggu

SEQ ID NO: 1521028 - RNA, 19 nt, Artificial Sequence
  Description of Artificial Sequence: Synthetic oligonucleotide
cacggaugugguuucauuu

SEQ ID NO: 1521029 - RNA, 19 nt, Artificial Sequence
  Description of Artificial Sequence: Synthetic oligonucleotide
aaccacggaugugguuuca

SEQ ID NO: 1521030 - RNA, 19 nt, Artificial Sequence
  Description of Artificial Sequence: Synthetic oligonucleotide
cagcagugagauucuguaa

SEQ ID NO: 1521031 - RNA, 19 nt, Artificial Sequence
  Description of Artificial Sequence: Synthetic oligonucleotide
gugacguaauugcggggaa

SEQ ID NO: 1521032 - RNA, 19 nt, Artificial Sequence
  Description of Artificial Sequence: Synthetic oligonucleotide
auuucaccacccacaggaa

SEQ ID NO: 1521033 - RNA, 19 nt, Artificial Sequence
  Description of Artificial Sequence: Synthetic oligonucleotide
ggauuaggaaggccccauc

SEQ ID NO: 1521034 - RNA, 19 nt, Artificial Sequence
  Description of Artificial Sequence: Synthetic oligonucleotide
guauuggcaucagcuggga

SEQ ID NO: 1521035 - RNA, 19 nt, Artificial Sequence
  Description of Artificial Sequence: Synthetic oligonucleotide
aguugggaucugaguuauc

SEQ ID NO: 1521036 - RNA, 19 nt, Artificial Sequence
  Description of Artificial Sequence: Synthetic oligonucleotide
uaggacccagccagauguu

SEQ ID NO: 1521037 - RNA, 19 nt, Artificial Sequence
  Description of Artificial Sequence: Synthetic oligonucleotide
gggcacucucgcucucucg

SEQ ID NO: 1521038 - RNA, 19 nt, Artificial Sequence
  Description of Artificial Sequence: Synthetic oligonucleotide
gacauacguuggcugcugu

SEQ ID NO: 1521039 - RNA, 19 nt, Artificial Sequence
  Description of Artificial Sequence: Synthetic oligonucleotide
cccgcaggaauaucugcug

SEQ ID NO: 1521040 - RNA, 19 nt, Artificial Sequence
  Description of Artificial Sequence: Synthetic oligonucleotide
gcucaucgucagcaguagc

SEQ ID NO: 1521041 - RNA, 19 nt, Artificial Sequence
  Description of Artificial Sequence: Synthetic oligonucleotide
cucucgcucucucggauua

SEQ ID NO: 1521042 - RNA, 19 nt, Artificial Sequence
  Description of Artificial Sequence: Synthetic oligonucleotide
caccaguaggacccagcca

SEQ ID NO: 1521043 - RNA, 19 nt, Artificial Sequence
  Description of Artificial Sequence: Synthetic oligonucleotide
gagguggguggcgugccuc

SEQ ID NO: 1521044 - RNA, 19 nt, Artificial Sequence
  Description of Artificial Sequence: Synthetic oligonucleotide
gggacuauacguggccuca

SEQ ID NO: 1521045 - RNA, 19 nt, Artificial Sequence
  Description of Artificial Sequence: Synthetic oligonucleotide
ggacauacguuggcugcug

SEQ ID NO: 1521046 - RNA, 19 nt, Artificial Sequence
  Description of Artificial Sequence: Synthetic oligonucleotide
gccucaaacgucaugcacu

SEQ ID NO: 1521047 - RNA, 19 nt, Artificial Sequence
  Description of Artificial Sequence: Synthetic oligonucleotide
gccggucugcccauggcag

SEQ ID NO: 1521048 - RNA, 19 nt, Artificial Sequence
  Description of Artificial Sequence: Synthetic oligonucleotide
cuucuuagacguuccgguu

SEQ ID NO: 1521049 - RNA, 19 nt, Artificial Sequence
  Description of Artificial Sequence: Synthetic oligonucleotide
cuuagacguuccgguucac

SEQ ID NO: 1521050 - RNA, 19 nt, Artificial Sequence
  Description of Artificial Sequence: Synthetic oligonucleotide
ccagguguaacucauuauu

SEQ ID NO: 1521051 - RNA, 19 nt, Artificial Sequence
  Description of Artificial Sequence: Synthetic oligonucleotide
uggccgccccuugugugug

SEQ ID NO: 1521052 - RNA, 19 nt, Artificial Sequence
  Description of Artificial Sequence: Synthetic oligonucleotide
accacggaugugguuucau

SEQ ID NO: 1521053 - RNA, 19 nt, Artificial Sequence
  Description of Artificial Sequence: Synthetic oligonucleotide
gcccagguguaacucauua

SEQ ID NO: 1521054 - RNA, 19 nt, Artificial Sequence
  Description of Artificial Sequence: Synthetic oligonucleotide
acguuccgguucacugggg

SEQ ID NO: 1521055 - RNA, 19 nt, Artificial Sequence
  Description of Artificial Sequence: Synthetic oligonucleotide
ccaguugggaucugaguua

SEQ ID NO: 1521056 - RNA, 19 nt, Artificial Sequence
  Description of Artificial Sequence: Synthetic oligonucleotide
cccuugugugugaagaaua

SEQ ID NO: 1521057 - RNA, 19 nt, Artificial Sequence
  Description of Artificial Sequence: Synthetic oligonucleotide
ccggucugcccauggcagg

SEQ ID NO: 1521058 - RNA, 19 nt, Artificial Sequence
  Description of Artificial Sequence: Synthetic oligonucleotide
caggcuugggcuggaggca

SEQ ID NO: 1521059 - RNA, 19 nt, Artificial Sequence
  Description of Artificial Sequence: Synthetic oligonucleotide
ccuaagugagagggucacc

SEQ ID NO: 1521060 - RNA, 19 nt, Artificial Sequence
  Description of Artificial Sequence: Synthetic oligonucleotide
ccaaaguuucaaccuaagu

SEQ ID NO: 1521061 - RNA, 19 nt, Artificial Sequence
  Description of Artificial Sequence: Synthetic oligonucleotide
ugccuuggcucuggggauu

SEQ ID NO: 1521062 - RNA, 19 nt, Artificial Sequence
  Description of Artificial Sequence: Synthetic oligonucleotide
aggggcacucucgcucucu

SEQ ID NO: 1521063 - RNA, 19 nt, Artificial Sequence
  Description of Artificial Sequence: Synthetic oligonucleotide
caccacccacaggaaguac

SEQ ID NO: 1521064 - RNA, 19 nt, Artificial Sequence
  Description of Artificial Sequence: Synthetic oligonucleotide
cucaggcaucucuggcaga

SEQ ID NO: 1521065 - RNA, 19 nt, Artificial Sequence
  Description of Artificial Sequence: Synthetic oligonucleotide
gggaaacaugccggucugc

SEQ ID NO: 1521066 - RNA, 19 nt, Artificial Sequence
  Description of Artificial Sequence: Synthetic oligonucleotide
caucgucagcaguagcuuu

SEQ ID NO: 1521067 - RNA, 19 nt, Artificial Sequence
  Description of Artificial Sequence: Synthetic oligonucleotide
ccuggccgccccuugugug

SEQ ID NO: 1521068 - RNA, 19 nt, Artificial Sequence
  Description of Artificial Sequence: Synthetic oligonucleotide
cugugguaguccaccaguu

SEQ ID NO: 1521069 - RNA, 19 nt, Artificial Sequence
  Description of Artificial Sequence: Synthetic oligonucleotide
gcccacuugguuucuuuua

SEQ ID NO: 1521070 - RNA, 19 nt, Artificial Sequence
  Description of Artificial Sequence: Synthetic oligonucleotide
acgggccccaggugcccug

SEQ ID NO: 1521071 - RNA, 19 nt, Artificial Sequence
  Description of Artificial Sequence: Synthetic oligonucleotide
gaccagagguggguggcgu

SEQ ID NO: 1521072 - RNA, 19 nt, Artificial Sequence
  Description of Artificial Sequence: Synthetic oligonucleotide
guuggcugcuguggcaccu

SEQ ID NO: 1521073 - RNA, 19 nt, Artificial Sequence
  Description of Artificial Sequence: Synthetic oligonucleotide
caggugcccuggccgcccc

SEQ ID NO: 1521074 - RNA, 19 nt, Artificial Sequence
  Description of Artificial Sequence: Synthetic oligonucleotide
cuaugucccgcaggaauau

SEQ ID NO: 1521075 - RNA, 19 nt, Artificial Sequence
  Description of Artificial Sequence: Synthetic oligonucleotide
ggaugugguuucauuucua

SEQ ID NO: 1521076 - RNA, 19 nt, Artificial Sequence
  Description of Artificial Sequence: Synthetic oligonucleotide
cucaaacgucaugcacuga

SEQ ID NO: 1521077 - RNA, 19 nt, Artificial Sequence
  Description of Artificial Sequence: Synthetic oligonucleotide
cagugacucggggaccaga

SEQ ID NO: 1521078 - RNA, 19 nt, Artificial Sequence
  Description of Artificial Sequence: Synthetic oligonucleotide
cauugagcucugccuuaua

SEQ ID NO: 1521079 - RNA, 19 nt, Artificial Sequence
  Description of Artificial Sequence: Synthetic oligonucleotide
gcacucucgcucucucgga

SEQ ID NO: 1521080 - RNA, 19 nt, Artificial Sequence
  Description of Artificial Sequence: Synthetic oligonucleotide
ggggcacucucgcucucuc

SEQ ID NO: 1521081 - RNA, 19 nt, Artificial Sequence
  Description of Artificial Sequence: Synthetic oligonucleotide
ggucugcccauggcaggcc

SEQ ID NO: 1521082 - RNA, 19 nt, Artificial Sequence
  Description of Artificial Sequence: Synthetic oligonucleotide
cuggccgccccuugugugu

SEQ ID NO: 1521083 - RNA, 19 nt, Artificial Sequence
  Description of Artificial Sequence: Synthetic oligonucleotide
cugccuuggcucuggggau

SEQ ID NO: 1521084 - RNA, 19 nt, Artificial Sequence
  Description of Artificial Sequence: Synthetic oligonucleotide
cacucucgcucucucggau

SEQ ID NO: 1521085 - RNA, 19 nt, Artificial Sequence
  Description of Artificial Sequence: Synthetic oligonucleotide
ggacacugacguggaucug

SEQ ID NO: 1521086 - RNA, 19 nt, Artificial Sequence
  Description of Artificial Sequence: Synthetic oligonucleotide
cguggccucaaacgucaug

SEQ ID NO: 1521087 - RNA, 19 nt, Artificial Sequence
  Description of Artificial Sequence: Synthetic oligonucleotide
caggggcacucucgcucuc

SEQ ID NO: 1521088 - RNA, 19 nt, Artificial Sequence
  Description of Artificial Sequence: Synthetic oligonucleotide
cguaauugcggggaaacau

SEQ ID NO: 1521089 - RNA, 19 nt, Artificial Sequence
  Description of Artificial Sequence: Synthetic oligonucleotide
gcaguagcuuugaagucau

SEQ ID NO: 1521090 - RNA, 19 nt, Artificial Sequence
  Description of Artificial Sequence: Synthetic oligonucleotide
gcccuggccgccccuugug

SEQ ID NO: 1521091 - RNA, 19 nt, Artificial Sequence
  Description of Artificial Sequence: Synthetic oligonucleotide
gggugcaauucuugugaau

SEQ ID NO: 1521092 - RNA, 19 nt, Artificial Sequence
  Description of Artificial Sequence: Synthetic oligonucleotide
cgcucucucggauuaggaa

SEQ ID NO: 1521093 - RNA, 19 nt, Artificial Sequence
  Description of Artificial Sequence: Synthetic oligonucleotide
ggacuauacguggccucaa

SEQ ID NO: 1521094 - RNA, 19 nt, Artificial Sequence
  Description of Artificial Sequence: Synthetic oligonucleotide
cccuacaaaguccaaccuu

SEQ ID NO: 1521095 - RNA, 19 nt, Artificial Sequence
  Description of Artificial Sequence: Synthetic oligonucleotide
gguuaaguuuuggcauuau

SEQ ID NO: 1521096 - RNA, 19 nt, Artificial Sequence
  Description of Artificial Sequence: Synthetic oligonucleotide
gccuggacauacguuggcu

SEQ ID NO: 1521097 - RNA, 19 nt, Artificial Sequence
  Description of Artificial Sequence: Synthetic oligonucleotide
caguaggacccagccagau

SEQ ID NO: 1521098 - RNA, 19 nt, Artificial Sequence
  Description of Artificial Sequence: Synthetic oligonucleotide
caccugacggggagacagu

SEQ ID NO: 1521099 - RNA, 19 nt, Artificial Sequence
  Description of Artificial Sequence: Synthetic oligonucleotide
cagcccacuugguuucuuu

SEQ ID NO: 1521100 - RNA, 19 nt, Artificial Sequence
  Description of Artificial Sequence: Synthetic oligonucleotide
gcggggaaacaugccgguc

SEQ ID NO: 1521101 - RNA, 19 nt, Artificial Sequence
  Description of Artificial Sequence: Synthetic oligonucleotide
cggaugugguuucauuucu

SEQ ID NO: 1521102 - RNA, 19 nt, Artificial Sequence
  Description of Artificial Sequence: Synthetic oligonucleotide
cccagguguaacucauuau

SEQ ID NO: 1521103 - RNA, 19 nt, Artificial Sequence
  Description of Artificial Sequence: Synthetic oligonucleotide
ccaaccuugacgggaugcu

SEQ ID NO: 1521104 - RNA, 19 nt, Artificial Sequence
  Description of Artificial Sequence: Synthetic oligonucleotide
gguaguccaccaguucauu

SEQ ID NO: 1521105 - RNA, 19 nt, Artificial Sequence
  Description of Artificial Sequence: Synthetic oligonucleotide
acguggccucaaacgucau

SEQ ID NO: 1521106 - RNA, 19 nt, Artificial Sequence
  Description of Artificial Sequence: Synthetic oligonucleotide
cgugccuccuuccccuaca

SEQ ID NO: 1521107 - RNA, 19 nt, Artificial Sequence
  Description of Artificial Sequence: Synthetic oligonucleotide
cccaggugcccuggccgcc

SEQ ID NO: 1521108 - RNA, 19 nt, Artificial Sequence
  Description of Artificial Sequence: Synthetic oligonucleotide
ccgccccuugugugugaag

SEQ ID NO: 1521109 - RNA, 19 nt, Artificial Sequence
  Description of Artificial Sequence: Synthetic oligonucleotide
ccgguucacuggggugacg

SEQ ID NO: 1521110 - RNA, 19 nt, Artificial Sequence
  Description of Artificial Sequence: Synthetic oligonucleotide
guggguggcgugccuccuu

SEQ ID NO: 1521111 - RNA, 19 nt, Artificial Sequence
  Description of Artificial Sequence: Synthetic oligonucleotide
cguuccgguucacuggggu

SEQ ID NO: 1521112 - RNA, 19 nt, Artificial Sequence
  Description of Artificial Sequence: Synthetic oligonucleotide
gccccaucaugccucuguu

SEQ ID NO: 1521113 - RNA, 19 nt, Artificial Sequence
  Description of Artificial Sequence: Synthetic oligonucleotide
ccucugcgaaagcccagcu

SEQ ID NO: 1521114 - RNA, 19 nt, Artificial Sequence
  Description of Artificial Sequence: Synthetic oligonucleotide
ggccgccccuuguguguga

SEQ ID NO: 1521115 - RNA, 19 nt, Artificial Sequence
  Description of Artificial Sequence: Synthetic oligonucleotide
ggcgugccuccuuccccua

SEQ ID NO: 1521116 - RNA, 19 nt, Artificial Sequence
  Description of Artificial Sequence: Synthetic oligonucleotide
gccgccccuugugugugaa

SEQ ID NO: 1521117 - RNA, 19 nt, Artificial Sequence
  Description of Artificial Sequence: Synthetic oligonucleotide
cacgggccccaggugcccu

SEQ ID NO: 1521118 - RNA, 19 nt, Artificial Sequence
  Description of Artificial Sequence: Synthetic oligonucleotide
ccccaucaugccucuguuu

SEQ ID NO: 1521119 - RNA, 19 nt, Artificial Sequence
  Description of Artificial Sequence: Synthetic oligonucleotide
cggauuaggaaggccccau

SEQ ID NO: 1521120 - RNA, 19 nt, Artificial Sequence
  Description of Artificial Sequence: Synthetic oligonucleotide
ccagcccacuugguuucuu

SEQ ID NO: 1521121 - RNA, 19 nt, Artificial Sequence
  Description of Artificial Sequence: Synthetic oligonucleotide
cggccccgucucggagcac

SEQ ID NO: 1521122 - RNA, 19 nt, Artificial Sequence
  Description of Artificial Sequence: Synthetic oligonucleotide
aacaucguaaaacaaaugc

SEQ ID NO: 1521123 - RNA, 19 nt, Artificial Sequence
  Description of Artificial Sequence: Synthetic oligonucleotide
uuguauaucgauaacaggc

SEQ ID NO: 1521124 - RNA, 19 nt, Artificial Sequence
  Description of Artificial Sequence: Synthetic oligonucleotide
gaagucauaauauaggcug

SEQ ID NO: 1521125 - RNA, 19 nt, Artificial Sequence
  Description of Artificial Sequence: Synthetic oligonucleotide
aaguacagaaggcugaaac

SEQ ID NO: 1521126 - RNA, 19 nt, Artificial Sequence
  Description of Artificial Sequence: Synthetic oligonucleotide
aaaugcuaguuuuagauga

SEQ ID NO: 1521127 - RNA, 19 nt, Artificial Sequence
  Description of Artificial Sequence: Synthetic oligonucleotide
cugaucaauaucuauauag

SEQ ID NO: 1521128 - RNA, 19 nt, Artificial Sequence
  Description of Artificial Sequence: Synthetic oligonucleotide
cucaaaacuugauagaggg

SEQ ID NO: 1521129 - RNA, 19 nt, Artificial Sequence
  Description of Artificial Sequence: Synthetic oligonucleotide
ugaaaauucagagagggcc

SEQ ID NO: 1521130 - RNA, 19 nt, Artificial Sequence
  Description of Artificial Sequence: Synthetic oligonucleotide
gauagaggguuguauaucg

SEQ ID NO: 1521131 - RNA, 19 nt, Artificial Sequence
  Description of Artificial Sequence: Synthetic oligonucleotide
gaggaauuguaccugaagg

SEQ ID NO: 1521132 - RNA, 19 nt, Artificial Sequence
  Description of Artificial Sequence: Synthetic oligonucleotide
uuuuccgugugcauuaggg

SEQ ID NO: 1521133 - RNA, 19 nt, Artificial Sequence
  Description of Artificial Sequence: Synthetic oligonucleotide
ucaacaucuaaaucaaaag

SEQ ID NO: 1521134 - RNA, 19 nt, Artificial Sequence
  Description of Artificial Sequence: Synthetic oligonucleotide
gaaacaagaagcgaagagg

SEQ ID NO: 1521135 - RNA, 19 nt, Artificial Sequence
  Description of Artificial Sequence: Synthetic oligonucleotide
uauaucgauaacaggcugg

SEQ ID NO: 1521136 - RNA, 19 nt, Artificial Sequence
  Description of Artificial Sequence: Synthetic oligonucleotide
aauuauauguccucuguaa

SEQ ID NO: 1521137 - RNA, 19 nt, Artificial Sequence
  Description of Artificial Sequence: Synthetic oligonucleotide
aacaucuaaaucaaaagcu

SEQ ID NO: 1521138 - RNA, 19 nt, Artificial Sequence
  Description of Artificial Sequence: Synthetic oligonucleotide
ucuaaauaaagguugacuu

SEQ ID NO: 1521139 - RNA, 19 nt, Artificial Sequence
  Description of Artificial Sequence: Synthetic oligonucleotide
auaguaauccacuauagau

SEQ ID NO: 1521140 - RNA, 19 nt, Artificial Sequence
  Description of Artificial Sequence: Synthetic oligonucleotide
  modified_base (14)..(14): a, c, u, g, unknown or other
uaggcuacaagugnuagag

SEQ ID NO: 1521141 - RNA, 19 nt, Artificial Sequence
  Description of Artificial Sequence: Synthetic oligonucleotide
auuauauguccucuguaac

SEQ ID NO: 1521142 - RNA, 19 nt, Artificial Sequence
  Description of Artificial Sequence: Synthetic oligonucleotide
cagacucaaaacuugauag

SEQ ID NO: 1521143 - RNA, 19 nt, Artificial Sequence
  Description of Artificial Sequence: Synthetic oligonucleotide
auuuguauuuuccgugugc

SEQ ID NO: 1521144 - RNA, 19 nt, Artificial Sequence
  Description of Artificial Sequence: Synthetic oligonucleotide
uggauauuuguauuuuccg

SEQ ID NO: 1521145 - RNA, 19 nt, Artificial Sequence
  Description of Artificial Sequence: Synthetic oligonucleotide
uccacuauagauacugaag

SEQ ID NO: 1521146 - RNA, 19 nt, Artificial Sequence
  Description of Artificial Sequence: Synthetic oligonucleotide
ucauaauauaggcugucag

SEQ ID NO: 1521147 - RNA, 19 nt, Artificial Sequence
  Description of Artificial Sequence: Synthetic oligonucleotide
ugaucaauaucuauauaga

SEQ ID NO: 1521148 - RNA, 19 nt, Artificial Sequence
  Description of Artificial Sequence: Synthetic oligonucleotide
  modified_base (2)..(2): a, c, u, g, unknown or other
gnuagaguguaauugucug

SEQ ID NO: 1521149 - RNA, 19 nt, Artificial Sequence
  Description of Artificial Sequence: Synthetic oligonucleotide
  modified_base (6)..(6): a, c, u, g, unknown or other
aagugnuagaguguaauug

SEQ ID NO: 1521150 - RNA, 19 nt, Artificial Sequence
  Description of Artificial Sequence: Synthetic oligonucleotide
uccccgaaagcacugaagg

SEQ ID NO: 1521151 - RNA, 19 nt, Artificial Sequence
  Description of Artificial Sequence: Synthetic oligonucleotide
acugagaagguuaaccucc

SEQ ID NO: 1521152 - RNA, 19 nt, Artificial Sequence
  Description of Artificial Sequence: Synthetic oligonucleotide
caucguaaaacaaaugcug

SEQ ID NO: 1521153 - RNA, 19 nt, Artificial Sequence
  Description of Artificial Sequence: Synthetic oligonucleotide
uaguuuuagaugaaguccu

SEQ ID NO: 1521154 - RNA, 19 nt, Artificial Sequence
  Description of Artificial Sequence: Synthetic oligonucleotide
uaauccacuauagauacug

SEQ ID NO: 1521155 - RNA, 19 nt, Artificial Sequence
  Description of Artificial Sequence: Synthetic oligonucleotide
agaaacacggugcugcagg

SEQ ID NO: 1521156 - RNA, 19 nt, Artificial Sequence
  Description of Artificial Sequence: Synthetic oligonucleotide
uguaauugucuguaauucc

SEQ ID NO: 1521157 - RNA, 19 nt, Artificial Sequence
  Description of Artificial Sequence: Synthetic oligonucleotide
ugugcauuagggcugaaaa

SEQ ID NO: 1521158 - RNA, 19 nt, Artificial Sequence
  Description of Artificial Sequence: Synthetic oligonucleotide
cugacaaccaaguacuccc

SEQ ID NO: 1521159 - RNA, 19 nt, Artificial Sequence
  Description of Artificial Sequence: Synthetic oligonucleotide
auaauauaggcugucagug

SEQ ID NO: 1521160 - RNA, 19 nt, Artificial Sequence
  Description of Artificial Sequence: Synthetic oligonucleotide
gaaaacaaggcauaggcua

SEQ ID NO: 1521161 - RNA, 19 nt, Artificial Sequence
  Description of Artificial Sequence: Synthetic oligonucleotide
uuauauguccucuguaaca

SEQ ID NO: 1521162 - RNA, 19 nt, Artificial Sequence
  Description of Artificial Sequence: Synthetic oligonucleotide
aauccgaaaguguaugggu

SEQ ID NO: 1521163 - RNA, 19 nt, Artificial Sequence
  Description of Artificial Sequence: Synthetic oligonucleotide
  modified_base (5)..(5): a, c, u, g, unknown or other
agugnuagaguguaauugu

SEQ ID NO: 1521164 - RNA, 19 nt, Artificial Sequence
  Description of Artificial Sequence: Synthetic oligonucleotide
gaugcaaacccuccuaggc

SEQ ID NO: 1521165 - RNA, 19 nt, Artificial Sequence
  Description of Artificial Sequence: Synthetic oligonucleotide
uuagaugaaguccuugaaa

SEQ ID NO: 1521166 - RNA, 19 nt, Artificial Sequence
  Description of Artificial Sequence: Synthetic oligonucleotide
aauauaggcugucaguguu

SEQ ID NO: 1521167 - RNA, 19 nt, Artificial Sequence
  Description of Artificial Sequence: Synthetic oligonucleotide
  modified_base (3)..(3): a, c, u, g, unknown or other
ugnuagaguguaauugucu

SEQ ID NO: 1521168 - RNA, 19 nt, Artificial Sequence
  Description of Artificial Sequence: Synthetic oligonucleotide
gaagcgaagaggcuugaag

SEQ ID NO: 1521169 - RNA, 19 nt, Artificial Sequence
  Description of Artificial Sequence: Synthetic oligonucleotide
guuguauaucgauaacagg

SEQ ID NO: 1521170 - RNA, 19 nt, Artificial Sequence
  Description of Artificial Sequence: Synthetic oligonucleotide
cugugugucaauccgaaag

SEQ ID NO: 1521171 - RNA, 19 nt, Artificial Sequence
  Description of Artificial Sequence: Synthetic oligonucleotide
uccucugucgaauucagac

SEQ ID NO: 1521172 - RNA, 19 nt, Artificial Sequence
  Description of Artificial Sequence: Synthetic oligonucleotide
uaagcugcgaccucaauau

SEQ ID NO: 1521173 - RNA, 19 nt, Artificial Sequence
  Description of Artificial Sequence: Synthetic oligonucleotide
uaguaauccacuauagaua

SEQ ID NO: 1521174 - RNA, 19 nt, Artificial Sequence
  Description of Artificial Sequence: Synthetic oligonucleotide
agagagggccuucaaggcc

SEQ ID NO: 1521175 - RNA, 19 nt, Artificial Sequence
  Description of Artificial Sequence: Synthetic oligonucleotide
uguggaugacucuuccugg

SEQ ID NO: 1521176 - RNA, 19 nt, Artificial Sequence
  Description of Artificial Sequence: Synthetic oligonucleotide
aucaacacaaaacuggguu

SEQ ID NO: 1521177 - RNA, 19 nt, Artificial Sequence
  Description of Artificial Sequence: Synthetic oligonucleotide
ucaauccgaaaguguaugg

SEQ ID NO: 1521178 - RNA, 19 nt, Artificial Sequence
  Description of Artificial Sequence: Synthetic oligonucleotide
uucccuuugauaaccuugc

SEQ ID NO: 1521179 - RNA, 19 nt, Artificial Sequence
  Description of Artificial Sequence: Synthetic oligonucleotide
ugucgcaccaaguacagaa

SEQ ID NO: 1521180 - RNA, 19 nt, Artificial Sequence
  Description of Artificial Sequence: Synthetic oligonucleotide
ugugugucaauccgaaagu

SEQ ID NO: 1521181 - RNA, 19 nt, Artificial Sequence
  Description of Artificial Sequence: Synthetic oligonucleotide
ucgcaccaaguacagaagg

SEQ ID NO: 1521182 - RNA, 19 nt, Artificial Sequence
  Description of Artificial Sequence: Synthetic oligonucleotide
agaaguucccuuugauaac

SEQ ID NO: 1521183 - RNA, 19 nt, Artificial Sequence
  Description of Artificial Sequence: Synthetic oligonucleotide
uuccgauguucuuugagcc

SEQ ID NO: 1521184 - RNA, 19 nt, Artificial Sequence
  Description of Artificial Sequence: Synthetic oligonucleotide
uucugaucaauaucuauau

SEQ ID NO: 1521185 - RNA, 19 nt, Artificial Sequence
  Description of Artificial Sequence: Synthetic oligonucleotide
agaagggucacuauccccg

SEQ ID NO: 1521186 - RNA, 19 nt, Artificial Sequence
  Description of Artificial Sequence: Synthetic oligonucleotide
gaucaauaucuauauagaa

SEQ ID NO: 1521187 - RNA, 19 nt, Artificial Sequence
  Description of Artificial Sequence: Synthetic oligonucleotide
uuuagaugaaguccuugaa

SEQ ID NO: 1521188 - RNA, 19 nt, Artificial Sequence
  Description of Artificial Sequence: Synthetic oligonucleotide
cuugaagaaggccgaaggg

SEQ ID NO: 1521189 - RNA, 19 nt, Artificial Sequence
  Description of Artificial Sequence: Synthetic oligonucleotide
aguacagaaggcugaaaca

SEQ ID NO: 1521190 - RNA, 19 nt, Artificial Sequence
  Description of Artificial Sequence: Synthetic oligonucleotide
ucuauauagaaaucagcuu

SEQ ID NO: 1521191 - RNA, 19 nt, Artificial Sequence
  Description of Artificial Sequence: Synthetic oligonucleotide
cuuugagccaauuauaugu

SEQ ID NO: 1521192 - RNA, 19 nt, Artificial Sequence
  Description of Artificial Sequence: Synthetic oligonucleotide
cuaggcuauuucuuugacg

SEQ ID NO: 1521193 - RNA, 19 nt, Artificial Sequence
  Description of Artificial Sequence: Synthetic oligonucleotide
agaggaauuguaccugaag

SEQ ID NO: 1521194 - RNA, 19 nt, Artificial Sequence
  Description of Artificial Sequence: Synthetic oligonucleotide
cucagaaacacggugcugc

SEQ ID NO: 1521195 - RNA, 19 nt, Artificial Sequence
  Description of Artificial Sequence: Synthetic oligonucleotide
aaaguguauggguuucggu

SEQ ID NO: 1521196 - RNA, 19 nt, Artificial Sequence
  Description of Artificial Sequence: Synthetic oligonucleotide
aaucauagccaaugucgca

SEQ ID NO: 1521197 - RNA, 19 nt, Artificial Sequence
  Description of Artificial Sequence: Synthetic oligonucleotide
cacucagaggaauuguacc

SEQ ID NO: 1521198 - RNA, 19 nt, Artificial Sequence
  Description of Artificial Sequence: Synthetic oligonucleotide
uuugagccaauuauauguc

SEQ ID NO: 1521199 - RNA, 19 nt, Artificial Sequence
  Description of Artificial Sequence: Synthetic oligonucleotide
uggaugcaaacccuccuag

SEQ ID NO: 1521200 - RNA, 19 nt, Artificial Sequence
  Description of Artificial Sequence: Synthetic oligonucleotide
guugacuuucccaugauca

SEQ ID NO: 1521201 - RNA, 19 nt, Artificial Sequence
  Description of Artificial Sequence: Synthetic oligonucleotide
acucagaggaauuguaccu

SEQ ID NO: 1521202 - RNA, 19 nt, Artificial Sequence
  Description of Artificial Sequence: Synthetic oligonucleotide
uuagggcugaaaauucaga

SEQ ID NO: 1521203 - RNA, 19 nt, Artificial Sequence
  Description of Artificial Sequence: Synthetic oligonucleotide
ucguaaaacaaaugcugac

SEQ ID NO: 1521204 - RNA, 19 nt, Artificial Sequence
  Description of Artificial Sequence: Synthetic oligonucleotide
aguguaauugucuguaauu

SEQ ID NO: 1521205 - RNA, 19 nt, Artificial Sequence
  Description of Artificial Sequence: Synthetic oligonucleotide
gcuuuuauugccuccuugg

SEQ ID NO: 1521206 - RNA, 19 nt, Artificial Sequence
  Description of Artificial Sequence: Synthetic oligonucleotide
uuacagggcuuuuauugcc

SEQ ID NO: 1521207 - RNA, 19 nt, Artificial Sequence
  Description of Artificial Sequence: Synthetic oligonucleotide
uuccgugugcauuagggcu

SEQ ID NO: 1521208 - RNA, 19 nt, Artificial Sequence
  Description of Artificial Sequence: Synthetic oligonucleotide
gucgaauucagacucaaaa

SEQ ID NO: 1521209 - RNA, 19 nt, Artificial Sequence
  Description of Artificial Sequence: Synthetic oligonucleotide
aaagcgauucuguguguca

SEQ ID NO: 1521210 - RNA, 19 nt, Artificial Sequence
  Description of Artificial Sequence: Synthetic oligonucleotide
aacugcaugucuccuuucu

SEQ ID NO: 1521211 - RNA, 19 nt, Artificial Sequence
  Description of Artificial Sequence: Synthetic oligonucleotide
agcugcgaccucaauaucc

SEQ ID NO: 1521212 - RNA, 19 nt, Artificial Sequence
  Description of Artificial Sequence: Synthetic oligonucleotide
gaugacucuuccuggcucc

SEQ ID NO: 1521213 - RNA, 19 nt, Artificial Sequence
  Description of Artificial Sequence: Synthetic oligonucleotide
uagccaaugucgcaccaag

SEQ ID NO: 1521214 - RNA, 19 nt, Artificial Sequence
  Description of Artificial Sequence: Synthetic oligonucleotide
gucacuauccccgaaagca

SEQ ID NO: 1521215 - RNA, 19 nt, Artificial Sequence
  Description of Artificial Sequence: Synthetic oligonucleotide
gaauuguaccugaagguac

SEQ ID NO: 1521216 - RNA, 19 nt, Artificial Sequence
  Description of Artificial Sequence: Synthetic oligonucleotide
uugauagaggguuguauau

SEQ ID NO: 1521217 - RNA, 19 nt, Artificial Sequence
  Description of Artificial Sequence: Synthetic oligonucleotide
uaauauaggcugucagugu

SEQ ID NO: 1521218 - RNA, 19 nt, Artificial Sequence
  Description of Artificial Sequence: Synthetic oligonucleotide
uucccucugauagagaagu

SEQ ID NO: 1521219 - RNA, 19 nt, Artificial Sequence
  Description of Artificial Sequence: Synthetic oligonucleotide
ugagagcagggcauaagcu

SEQ ID NO: 1521220 - RNA, 19 nt, Artificial Sequence
  Description of Artificial Sequence: Synthetic oligonucleotide
ucccaaaauucaccauugg

SEQ ID NO: 1521221 - RNA, 19 nt, Artificial Sequence
  Description of Artificial Sequence: Synthetic oligonucleotide
uuuccgugugcauuagggc

SEQ ID NO: 1521222 - RNA, 19 nt, Artificial Sequence
  Description of Artificial Sequence: Synthetic oligonucleotide
ccacuauagauacugaagc

SEQ ID NO: 1521223 - RNA, 19 nt, Artificial Sequence
  Description of Artificial Sequence: Synthetic oligonucleotide
  modified_base (11)..(11): a, c, u, g, unknown or other
uauccagggancguggcug

SEQ ID NO: 1521224 - RNA, 19 nt, Artificial Sequence
  Description of Artificial Sequence: Synthetic oligonucleotide
uuccaugaaacaucguaaa

SEQ ID NO: 1521225 - RNA, 19 nt, Artificial Sequence
  Description of Artificial Sequence: Synthetic oligonucleotide
gaggguuguauaucgauaa

SEQ ID NO: 1521226 - RNA, 19 nt, Artificial Sequence
  Description of Artificial Sequence: Synthetic oligonucleotide
acuauagauacugaagcau

SEQ ID NO: 1521227 - RNA, 19 nt, Artificial Sequence
  Description of Artificial Sequence: Synthetic oligonucleotide
ucaaaacuugauagagggu

SEQ ID NO: 1521228 - RNA, 19 nt, Artificial Sequence
  Description of Artificial Sequence: Synthetic oligonucleotide
aguguuacagggcuuuuau

SEQ ID NO: 1521229 - RNA, 19 nt, Artificial Sequence
  Description of Artificial Sequence: Synthetic oligonucleotide
aggacugagaaaacguggg

SEQ ID NO: 1521230 - RNA, 19 nt, Artificial Sequence
  Description of Artificial Sequence: Synthetic oligonucleotide
ucagaggaauuguaccuga

SEQ ID NO: 1521231 - RNA, 19 nt, Artificial Sequence
  Description of Artificial Sequence: Synthetic oligonucleotide
ugggauucccucagaaaca

SEQ ID NO: 1521232 - RNA, 19 nt, Artificial Sequence
  Description of Artificial Sequence: Synthetic oligonucleotide
acaucguaaaacaaaugcu

SEQ ID NO: 1521233 - RNA, 19 nt, Artificial Sequence
  Description of Artificial Sequence: Synthetic oligonucleotide
uccaugaaacaucguaaaa

SEQ ID NO: 1521234 - RNA, 19 nt, Artificial Sequence
  Description of Artificial Sequence: Synthetic oligonucleotide
guuuccgauguucuuugag

SEQ ID NO: 1521235 - RNA, 19 nt, Artificial Sequence
  Description of Artificial Sequence: Synthetic oligonucleotide
aaagccacugagaagguua

SEQ ID NO: 1521236 - RNA, 19 nt, Artificial Sequence
  Description of Artificial Sequence: Synthetic oligonucleotide
aggagaaagcgauucugug

SEQ ID NO: 1521237 - RNA, 19 nt, Artificial Sequence
  Description of Artificial Sequence: Synthetic oligonucleotide
aaacaucguaaaacaaaug

SEQ ID NO: 1521238 - RNA, 19 nt, Artificial Sequence
  Description of Artificial Sequence: Synthetic oligonucleotide
ugugacagucacuuggaua

SEQ ID NO: 1521239 - RNA, 19 nt, Artificial Sequence
  Description of Artificial Sequence: Synthetic oligonucleotide
aaugucgcaccaaguacag

SEQ ID NO: 1521240 - RNA, 19 nt, Artificial Sequence
  Description of Artificial Sequence: Synthetic oligonucleotide
  modified_base (18)..(18): a, c, u, g, unknown or other
accucaauauccaggganc

SEQ ID NO: 1521241 - RNA, 19 nt, Artificial Sequence
  Description of Artificial Sequence: Synthetic oligonucleotide
accauuggguuuccgaugu

SEQ ID NO: 1521242 - RNA, 19 nt, Artificial Sequence
  Description of Artificial Sequence: Synthetic oligonucleotide
cugaaaauucagagagggc

SEQ ID NO: 1521243 - RNA, 19 nt, Artificial Sequence
  Description of Artificial Sequence: Synthetic oligonucleotide
aaucagcuuccaugaaaca

SEQ ID NO: 1521244 - RNA, 19 nt, Artificial Sequence
  Description of Artificial Sequence: Synthetic oligonucleotide
aggguuguauaucgauaac

SEQ ID NO: 1521245 - RNA, 19 nt, Artificial Sequence
  Description of Artificial Sequence: Synthetic oligonucleotide
uccgugugcauuagggcug

SEQ ID NO: 1521246 - RNA, 19 nt, Artificial Sequence
  Description of Artificial Sequence: Synthetic oligonucleotide
cagguacaaagcauccucc

SEQ ID NO: 1521247 - RNA, 19 nt, Artificial Sequence
  Description of Artificial Sequence: Synthetic oligonucleotide
uucugugugucaauccgaa

SEQ ID NO: 1521248 - RNA, 19 nt, Artificial Sequence
  Description of Artificial Sequence: Synthetic oligonucleotide
agucauaauauaggcuguc

SEQ ID NO: 1521249 - RNA, 19 nt, Artificial Sequence
  Description of Artificial Sequence: Synthetic oligonucleotide
guguaauugucuguaauuc

SEQ ID NO: 1521250 - RNA, 19 nt, Artificial Sequence
  Description of Artificial Sequence: Synthetic oligonucleotide
aaacuugauagaggguugu

SEQ ID NO: 1521251 - RNA, 19 nt, Artificial Sequence
  Description of Artificial Sequence: Synthetic oligonucleotide
cucugaaguuucuuacagc

SEQ ID NO: 1521252 - RNA, 19 nt, Artificial Sequence
  Description of Artificial Sequence: Synthetic oligonucleotide
auuagggcugaaaauucag

SEQ ID NO: 1521253 - RNA, 19 nt, Artificial Sequence
  Description of Artificial Sequence: Synthetic oligonucleotide
aggacuccccacugaaaac

SEQ ID NO: 1521254 - RNA, 19 nt, Artificial Sequence
  Description of Artificial Sequence: Synthetic oligonucleotide
aggcuauuucuuugacggc

SEQ ID NO: 1521255 - RNA, 19 nt, Artificial Sequence
  Description of Artificial Sequence: Synthetic oligonucleotide
caaugucgcaccaaguaca

SEQ ID NO: 1521256 - RNA, 19 nt, Artificial Sequence
  Description of Artificial Sequence: Synthetic oligonucleotide
aucguaaaacaaaugcuga

SEQ ID NO: 1521257 - RNA, 19 nt, Artificial Sequence
  Description of Artificial Sequence: Synthetic oligonucleotide
agaagucauaauauaggcu

SEQ ID NO: 1521258 - RNA, 19 nt, Artificial Sequence
  Description of Artificial Sequence: Synthetic oligonucleotide
ugucaauccgaaaguguau

SEQ ID NO: 1521259 - RNA, 19 nt, Artificial Sequence
  Description of Artificial Sequence: Synthetic oligonucleotide
auuuuccgugugcauuagg

SEQ ID NO: 1521260 - RNA, 19 nt, Artificial Sequence
  Description of Artificial Sequence: Synthetic oligonucleotide
gaaaacgugggugcugaug

SEQ ID NO: 1521261 - RNA, 19 nt, Artificial Sequence
  Description of Artificial Sequence: Synthetic oligonucleotide
uagaggguuguauaucgau

SEQ ID NO: 1521262 - RNA, 19 nt, Artificial Sequence
  Description of Artificial Sequence: Synthetic oligonucleotide
ugacggcugagccaccuca

SEQ ID NO: 1521263 - RNA, 19 nt, Artificial Sequence
  Description of Artificial Sequence: Synthetic oligonucleotide
uucagacucaaaacuugau

SEQ ID NO: 1521264 - RNA, 19 nt, Artificial Sequence
  Description of Artificial Sequence: Synthetic oligonucleotide
uauuucuuugacggcugag

SEQ ID NO: 1521265 - RNA, 19 nt, Artificial Sequence
  Description of Artificial Sequence: Synthetic oligonucleotide
ucugaucaauaucuauaua

SEQ ID NO: 1521266 - RNA, 19 nt, Artificial Sequence
  Description of Artificial Sequence: Synthetic oligonucleotide
ugcaaacccuccuaggcua

SEQ ID NO: 1521267 - RNA, 19 nt, Artificial Sequence
  Description of Artificial Sequence: Synthetic oligonucleotide
uauccugaguggaugcaaa

SEQ ID NO: 1521268 - RNA, 19 nt, Artificial Sequence
  Description of Artificial Sequence: Synthetic oligonucleotide
augcaaacccuccuaggcu

SEQ ID NO: 1521269 - RNA, 19 nt, Artificial Sequence
  Description of Artificial Sequence: Synthetic oligonucleotide
uggcucccaaaauucacca

SEQ ID NO: 1521270 - RNA, 19 nt, Artificial Sequence
  Description of Artificial Sequence: Synthetic oligonucleotide
aagucauaauauaggcugu

SEQ ID NO: 1521271 - RNA, 19 nt, Artificial Sequence
  Description of Artificial Sequence: Synthetic oligonucleotide
cccaaaauucaccauuggg

SEQ ID NO: 1521272 - RNA, 19 nt, Artificial Sequence
  Description of Artificial Sequence: Synthetic oligonucleotide
cuugguucauaguaaucca

SEQ ID NO: 1521273 - RNA, 19 nt, Artificial Sequence
  Description of Artificial Sequence: Synthetic oligonucleotide
  modified_base (15)..(15): a, c, u, g, unknown or other
auaggcuacaagugnuaga

SEQ ID NO: 1521274 - RNA, 19 nt, Artificial Sequence
  Description of Artificial Sequence: Synthetic oligonucleotide
  modified_base (8)..(8): a, c, u, g, unknown or other
acaagugnuagaguguaau

SEQ ID NO: 1521275 - RNA, 19 nt, Artificial Sequence
  Description of Artificial Sequence: Synthetic oligonucleotide
cuugauagaggguuguaua

SEQ ID NO: 1521276 - RNA, 19 nt, Artificial Sequence
  Description of Artificial Sequence: Synthetic oligonucleotide
ucaccuugguguuguagcu

SEQ ID NO: 1521277 - RNA, 19 nt, Artificial Sequence
  Description of Artificial Sequence: Synthetic oligonucleotide
ucugucgaauucagacuca

SEQ ID NO: 1521278 - RNA, 19 nt, Artificial Sequence
  Description of Artificial Sequence: Synthetic oligonucleotide
gucaauccgaaaguguaug

SEQ ID NO: 1521279 - RNA, 19 nt, Artificial Sequence
  Description of Artificial Sequence: Synthetic oligonucleotide
uccgccuuaggacucccca

SEQ ID NO: 1521280 - RNA, 19 nt, Artificial Sequence
  Description of Artificial Sequence: Synthetic oligonucleotide
cacuauagauacugaagca

SEQ ID NO: 1521281 - RNA, 19 nt, Artificial Sequence
  Description of Artificial Sequence: Synthetic oligonucleotide
ugacaaccaaguacuccca

SEQ ID NO: 1521282 - RNA, 19 nt, Artificial Sequence
  Description of Artificial Sequence: Synthetic oligonucleotide
caucuucccucugauagag

SEQ ID NO: 1521283 - RNA, 19 nt, Artificial Sequence
  Description of Artificial Sequence: Synthetic oligonucleotide
ccugaguggaugcaaaccc

SEQ ID NO: 1521284 - RNA, 19 nt, Artificial Sequence
  Description of Artificial Sequence: Synthetic oligonucleotide
agcgaagaggcuugaagaa

SEQ ID NO: 1521285 - RNA, 19 nt, Artificial Sequence
  Description of Artificial Sequence: Synthetic oligonucleotide
cauaauauaggcugucagu

SEQ ID NO: 1521286 - RNA, 19 nt, Artificial Sequence
  Description of Artificial Sequence: Synthetic oligonucleotide
ugauagaggguuguauauc

SEQ ID NO: 1521287 - RNA, 19 nt, Artificial Sequence
  Description of Artificial Sequence: Synthetic oligonucleotide
ccaugaaacaucguaaaac

SEQ ID NO: 1521288 - RNA, 19 nt, Artificial Sequence
  Description of Artificial Sequence: Synthetic oligonucleotide
acagaaggcugaaacaaga

SEQ ID NO: 1521289 - RNA, 19 nt, Artificial Sequence
  Description of Artificial Sequence: Synthetic oligonucleotide
gagccaauuauauguccuc

SEQ ID NO: 1521290 - RNA, 19 nt, Artificial Sequence
  Description of Artificial Sequence: Synthetic oligonucleotide
gagaagguuaaccuccaua

SEQ ID NO: 1521291 - RNA, 19 nt, Artificial Sequence
  Description of Artificial Sequence: Synthetic oligonucleotide
  modified_base (2)..(2): a, c, u, g, unknown or other
ancguggcugccaggacug

SEQ ID NO: 1521292 - RNA, 19 nt, Artificial Sequence
  Description of Artificial Sequence: Synthetic oligonucleotide
cagaagggucacuaucccc

SEQ ID NO: 1521293 - RNA, 19 nt, Artificial Sequence
  Description of Artificial Sequence: Synthetic oligonucleotide
caguaaagccacugagaag

SEQ ID NO: 1521294 - RNA, 19 nt, Artificial Sequence
  Description of Artificial Sequence: Synthetic oligonucleotide
uccgauguucuuugagcca

SEQ ID NO: 1521295 - RNA, 19 nt, Artificial Sequence
  Description of Artificial Sequence: Synthetic oligonucleotide
ugagaaaacgugggugcug

SEQ ID NO: 1521296 - RNA, 19 nt, Artificial Sequence
  Description of Artificial Sequence: Synthetic oligonucleotide
aacaagaagcgaagaggcu

SEQ ID NO: 1521297 - RNA, 19 nt, Artificial Sequence
  Description of Artificial Sequence: Synthetic oligonucleotide
cuccauaagggccaugcca

SEQ ID NO: 1521298 - RNA, 19 nt, Artificial Sequence
  Description of Artificial Sequence: Synthetic oligonucleotide
guaauugucuguaauuccu

SEQ ID NO: 1521299 - RNA, 19 nt, Artificial Sequence
  Description of Artificial Sequence: Synthetic oligonucleotide
gagaaaacgugggugcuga

SEQ ID NO: 1521300 - RNA, 19 nt, Artificial Sequence
  Description of Artificial Sequence: Synthetic oligonucleotide
aggcugguauuuucuguag

SEQ ID NO: 1521301 - RNA, 19 nt, Artificial Sequence
  Description of Artificial Sequence: Synthetic oligonucleotide
uccgaaaguguauggguuu

SEQ ID NO: 1521302 - RNA, 19 nt, Artificial Sequence
  Description of Artificial Sequence: Synthetic oligonucleotide
aaugcuaguuuuagaugaa

SEQ ID NO: 1521303 - RNA, 19 nt, Artificial Sequence
  Description of Artificial Sequence: Synthetic oligonucleotide
cugaaggagccaucuuccc

SEQ ID NO: 1521304 - RNA, 19 nt, Artificial Sequence
  Description of Artificial Sequence: Synthetic oligonucleotide
gaaagcgauucuguguguc

SEQ ID NO: 1521305 - RNA, 19 nt, Artificial Sequence
  Description of Artificial Sequence: Synthetic oligonucleotide
uccuugguucauaguaauc

SEQ ID NO: 1521306 - RNA, 19 nt, Artificial Sequence
  Description of Artificial Sequence: Synthetic oligonucleotide
acuugauagaggguuguau

SEQ ID NO: 1521307 - RNA, 19 nt, Artificial Sequence
  Description of Artificial Sequence: Synthetic oligonucleotide
  modified_base (10)..(10): a, c, u, g, unknown or other
cuacaagugnuagagugua

SEQ ID NO: 1521308 - RNA, 19 nt, Artificial Sequence
  Description of Artificial Sequence: Synthetic oligonucleotide
  modified_base (9)..(9): a, c, u, g, unknown or other
uacaagugnuagaguguaa

SEQ ID NO: 1521309 - RNA, 19 nt, Artificial Sequence
  Description of Artificial Sequence: Synthetic oligonucleotide
gcuccauucauacagagau

SEQ ID NO: 1521310 - RNA, 19 nt, Artificial Sequence
  Description of Artificial Sequence: Synthetic oligonucleotide
gcugaaacaagaagcgaag

SEQ ID NO: 1521311 - RNA, 19 nt, Artificial Sequence
  Description of Artificial Sequence: Synthetic oligonucleotide
uuucggugagcugggaccu

SEQ ID NO: 1521312 - RNA, 19 nt, Artificial Sequence
  Description of Artificial Sequence: Synthetic oligonucleotide
gguacaguaaagccacuga

SEQ ID NO: 1521313 - RNA, 19 nt, Artificial Sequence
  Description of Artificial Sequence: Synthetic oligonucleotide
  modified_base (4)..(4): a, c, u, g, unknown or other
gugnuagaguguaauuguc

SEQ ID NO: 1521314 - RNA, 19 nt, Artificial Sequence
  Description of Artificial Sequence: Synthetic oligonucleotide
agccagaacugcaugucuc

SEQ ID NO: 1521315 - RNA, 19 nt, Artificial Sequence
  Description of Artificial Sequence: Synthetic oligonucleotide
ccaaaauucaccauugggu

SEQ ID NO: 1521316 - RNA, 19 nt, Artificial Sequence
  Description of Artificial Sequence: Synthetic oligonucleotide
guguauggguuucggugag

SEQ ID NO: 1521317 - RNA, 19 nt, Artificial Sequence
  Description of Artificial Sequence: Synthetic oligonucleotide
cucuguaacacauucugau

SEQ ID NO: 1521318 - RNA, 19 nt, Artificial Sequence
  Description of Artificial Sequence: Synthetic oligonucleotide
aagcgauucugugugucaa

SEQ ID NO: 1521319 - RNA, 19 nt, Artificial Sequence
  Description of Artificial Sequence: Synthetic oligonucleotide
gcagguacaaagcauccuc

SEQ ID NO: 1521320 - RNA, 19 nt, Artificial Sequence
  Description of Artificial Sequence: Synthetic oligonucleotide
aaaaccuugugcacacauu

SEQ ID NO: 1521321 - RNA, 19 nt, Artificial Sequence
  Description of Artificial Sequence: Synthetic oligonucleotide
agaguguaauugucuguaa

SEQ ID NO: 1521322 - RNA, 19 nt, Artificial Sequence
  Description of Artificial Sequence: Synthetic oligonucleotide
agccaauuauauguccucu

SEQ ID NO: 1521323 - RNA, 19 nt, Artificial Sequence
  Description of Artificial Sequence: Synthetic oligonucleotide
caccauuggguuuccgaug

SEQ ID NO: 1521324 - RNA, 19 nt, Artificial Sequence
  Description of Artificial Sequence: Synthetic oligonucleotide
ggauauuuguauuuuccgu

SEQ ID NO: 1521325 - RNA, 19 nt, Artificial Sequence
  Description of Artificial Sequence: Synthetic oligonucleotide
uauccccgaaagcacugaa

SEQ ID NO: 1521326 - RNA, 19 nt, Artificial Sequence
  Description of Artificial Sequence: Synthetic oligonucleotide
  modified_base (7)..(7): a, c, u, g, unknown or other
cagggancguggcugccag

SEQ ID NO: 1521327 - RNA, 19 nt, Artificial Sequence
  Description of Artificial Sequence: Synthetic oligonucleotide
caaaugcugacaaccaagu

SEQ ID NO: 1521328 - RNA, 19 nt, Artificial Sequence
  Description of Artificial Sequence: Synthetic oligonucleotide
agaaagcgauucugugugu

SEQ ID NO: 1521329 - RNA, 19 nt, Artificial Sequence
  Description of Artificial Sequence: Synthetic oligonucleotide
aaacacggugcugcaggug

SEQ ID NO: 1521330 - RNA, 19 nt, Artificial Sequence
  Description of Artificial Sequence: Synthetic oligonucleotide
cuuggaaaugcuaguuuua

SEQ ID NO: 1521331 - RNA, 19 nt, Artificial Sequence
  Description of Artificial Sequence: Synthetic oligonucleotide
ccgaaagcacugaaggagc

SEQ ID NO: 1521332 - RNA, 19 nt, Artificial Sequence
  Description of Artificial Sequence: Synthetic oligonucleotide
  modified_base (3)..(3): a, c, u, g, unknown or other
gancguggcugccaggacu

SEQ ID NO: 1521333 - RNA, 19 nt, Artificial Sequence
  Description of Artificial Sequence: Synthetic oligonucleotide
uuugacggcugagccaccu

SEQ ID NO: 1521334 - RNA, 19 nt, Artificial Sequence
  Description of Artificial Sequence: Synthetic oligonucleotide
gccaauuauauguccucug

SEQ ID NO: 1521335 - RNA, 19 nt, Artificial Sequence
  Description of Artificial Sequence: Synthetic oligonucleotide
acgugggugcugaugacag

SEQ ID NO: 1521336 - RNA, 19 nt, Artificial Sequence
  Description of Artificial Sequence: Synthetic oligonucleotide
ccaaugucgcaccaaguac

SEQ ID NO: 1521337 - RNA, 19 nt, Artificial Sequence
  Description of Artificial Sequence: Synthetic oligonucleotide
gaguguaauugucuguaau

SEQ ID NO: 1521338 - RNA, 19 nt, Artificial Sequence
  Description of Artificial Sequence: Synthetic oligonucleotide
gcauccuccgccuuaggac

SEQ ID NO: 1521339 - RNA, 19 nt, Artificial Sequence
  Description of Artificial Sequence: Synthetic oligonucleotide
ggguuguauaucgauaaca

SEQ ID NO: 1521340 - RNA, 19 nt, Artificial Sequence
  Description of Artificial Sequence: Synthetic oligonucleotide
caaaacuggguuucauuua

SEQ ID NO: 1521341 - RNA, 19 nt, Artificial Sequence
  Description of Artificial Sequence: Synthetic oligonucleotide
agucacuuggauauuugua

SEQ ID NO: 1521342 - RNA, 19 nt, Artificial Sequence
  Description of Artificial Sequence: Synthetic oligonucleotide
acagucacuuggauauuug

SEQ ID NO: 1521343 - RNA, 19 nt, Artificial Sequence
  Description of Artificial Sequence: Synthetic oligonucleotide
auagauacugaagcaucuu

SEQ ID NO: 1521344 - RNA, 19 nt, Artificial Sequence
  Description of Artificial Sequence: Synthetic oligonucleotide
gaagggucacuauccccga

SEQ ID NO: 1521345 - RNA, 19 nt, Artificial Sequence
  Description of Artificial Sequence: Synthetic oligonucleotide
gcugacaaccaaguacucc

SEQ ID NO: 1521346 - RNA, 19 nt, Artificial Sequence
  Description of Artificial Sequence: Synthetic oligonucleotide
ggguuuccgauguucuuug

SEQ ID NO: 1521347 - RNA, 19 nt, Artificial Sequence
  Description of Artificial Sequence: Synthetic oligonucleotide
ugcugacaaccaaguacuc

SEQ ID NO: 1521348 - RNA, 19 nt, Artificial Sequence
  Description of Artificial Sequence: Synthetic oligonucleotide
gucgcaccaaguacagaag

SEQ ID NO: 1521349 - RNA, 19 nt, Artificial Sequence
  Description of Artificial Sequence: Synthetic oligonucleotide
ggagaaagcgauucugugu

SEQ ID NO: 1521350 - RNA, 19 nt, Artificial Sequence
  Description of Artificial Sequence: Synthetic oligonucleotide
ggcugaaacaagaagcgaa

SEQ ID NO: 1521351 - RNA, 19 nt, Artificial Sequence
  Description of Artificial Sequence: Synthetic oligonucleotide
gguucauaguaauccacua

SEQ ID NO: 1521352 - RNA, 19 nt, Artificial Sequence
  Description of Artificial Sequence: Synthetic oligonucleotide
agaggguuguauaucgaua

SEQ ID NO: 1521353 - RNA, 19 nt, Artificial Sequence
  Description of Artificial Sequence: Synthetic oligonucleotide
agcaagcuuugcuguguga

SEQ ID NO: 1521354 - RNA, 19 nt, Artificial Sequence
  Description of Artificial Sequence: Synthetic oligonucleotide
aaacccuccuaggcuauuu

SEQ ID NO: 1521355 - RNA, 19 nt, Artificial Sequence
  Description of Artificial Sequence: Synthetic oligonucleotide
ggucacuauccccgaaagc

SEQ ID NO: 1521356 - RNA, 19 nt, Artificial Sequence
  Description of Artificial Sequence: Synthetic oligonucleotide
cugagaagguuaaccucca

SEQ ID NO: 1521357 - RNA, 19 nt, Artificial Sequence
  Description of Artificial Sequence: Synthetic oligonucleotide
accucaugacugggauucc

SEQ ID NO: 1521358 - RNA, 19 nt, Artificial Sequence
  Description of Artificial Sequence: Synthetic oligonucleotide
ugucaguguuacagggcuu

SEQ ID NO: 1521359 - RNA, 19 nt, Artificial Sequence
  Description of Artificial Sequence: Synthetic oligonucleotide
cuugguguuguagcuucuc

SEQ ID NO: 1521360 - RNA, 19 nt, Artificial Sequence
  Description of Artificial Sequence: Synthetic oligonucleotide
auagaggguuguauaucga

SEQ ID NO: 1521361 - RNA, 19 nt, Artificial Sequence
  Description of Artificial Sequence: Synthetic oligonucleotide
  modified_base (17)..(17): a, c, u, g, unknown or other
ccucaauauccagggancg

SEQ ID NO: 1521362 - RNA, 19 nt, Artificial Sequence
  Description of Artificial Sequence: Synthetic oligonucleotide
auccgaaaguguauggguu

SEQ ID NO: 1521363 - RNA, 19 nt, Artificial Sequence
  Description of Artificial Sequence: Synthetic oligonucleotide
  modified_base (6)..(6): a, c, u, g, unknown or other
agggancguggcugccagg

SEQ ID NO: 1521364 - RNA, 19 nt, Artificial Sequence
  Description of Artificial Sequence: Synthetic oligonucleotide
caggcugguauuuucugua

SEQ ID NO: 1521365 - RNA, 19 nt, Artificial Sequence
  Description of Artificial Sequence: Synthetic oligonucleotide
gguuucggugagcugggac

SEQ ID NO: 1521366 - RNA, 19 nt, Artificial Sequence
  Description of Artificial Sequence: Synthetic oligonucleotide
  modified_base (7)..(7): a, c, u, g, unknown or other
caagugnuagaguguaauu

SEQ ID NO: 1521367 - RNA, 19 nt, Artificial Sequence
  Description of Artificial Sequence: Synthetic oligonucleotide
agcgauucugugugucaau

SEQ ID NO: 1521368 - RNA, 19 nt, Artificial Sequence
  Description of Artificial Sequence: Synthetic oligonucleotide
gcgaagaggcuugaagaag

SEQ ID NO: 1521369 - RNA, 19 nt, Artificial Sequence
  Description of Artificial Sequence: Synthetic oligonucleotide
gaaacacggugcugcaggu

SEQ ID NO: 1521370 - RNA, 19 nt, Artificial Sequence
  Description of Artificial Sequence: Synthetic oligonucleotide
cagcaagcuuugcugugug

SEQ ID NO: 1521371 - RNA, 19 nt, Artificial Sequence
  Description of Artificial Sequence: Synthetic oligonucleotide
gaccugugacagucacuug

SEQ ID NO: 1521372 - RNA, 19 nt, Artificial Sequence
  Description of Artificial Sequence: Synthetic oligonucleotide
gaaggccgaagggagucca

SEQ ID NO: 1521373 - RNA, 19 nt, Artificial Sequence
  Description of Artificial Sequence: Synthetic oligonucleotide
guggaugcaaacccuccua

SEQ ID NO: 1521374 - RNA, 19 nt, Artificial Sequence
  Description of Artificial Sequence: Synthetic oligonucleotide
cugcgaccucaauauccag

SEQ ID NO: 1521375 - RNA, 19 nt, Artificial Sequence
  Description of Artificial Sequence: Synthetic oligonucleotide
ggccacaacaguauccuga

SEQ ID NO: 1521376 - RNA, 19 nt, Artificial Sequence
  Description of Artificial Sequence: Synthetic oligonucleotide
cauccuccgccuuaggacu

SEQ ID NO: 1521377 - RNA, 19 nt, Artificial Sequence
  Description of Artificial Sequence: Synthetic oligonucleotide
gggauucccucagaaacac

SEQ ID NO: 1521378 - RNA, 19 nt, Artificial Sequence
  Description of Artificial Sequence: Synthetic oligonucleotide
aggccacaacaguauccug

SEQ ID NO: 1521379 - RNA, 19 nt, Artificial Sequence
  Description of Artificial Sequence: Synthetic oligonucleotide
ggacuccccacugaaaaca

SEQ ID NO: 1521380 - RNA, 19 nt, Artificial Sequence
  Description of Artificial Sequence: Synthetic oligonucleotide
agggccuucaaggccacaa

SEQ ID NO: 1521381 - RNA, 19 nt, Artificial Sequence
  Description of Artificial Sequence: Synthetic oligonucleotide
auagccaaugucgcaccaa

SEQ ID NO: 1521382 - RNA, 19 nt, Artificial Sequence
  Description of Artificial Sequence: Synthetic oligonucleotide
ggccuucaaggccacaaca

SEQ ID NO: 1521383 - RNA, 19 nt, Artificial Sequence
  Description of Artificial Sequence: Synthetic oligonucleotide
cgauucugugugucaaucc

SEQ ID NO: 1521384 - RNA, 19 nt, Artificial Sequence
  Description of Artificial Sequence: Synthetic oligonucleotide
cgcaccaaguacagaaggc

SEQ ID NO: 1521385 - RNA, 19 nt, Artificial Sequence
  Description of Artificial Sequence: Synthetic oligonucleotide
cauagccaaugucgcacca

SEQ ID NO: 1521386 - RNA, 19 nt, Artificial Sequence
  Description of Artificial Sequence: Synthetic oligonucleotide
ggcauaagcugcgaccuca

SEQ ID NO: 1521387 - RNA, 19 nt, Artificial Sequence
  Description of Artificial Sequence: Synthetic oligonucleotide
ggcuugaagaaggccgaag

SEQ ID NO: 1521388 - RNA, 19 nt, Artificial Sequence
  Description of Artificial Sequence: Synthetic oligonucleotide
cccacugaaaacaaggcau

SEQ ID NO: 1521389 - RNA, 19 nt, Artificial Sequence
  Description of Artificial Sequence: Synthetic oligonucleotide
auauaggcugucaguguua

SEQ ID NO: 1521390 - RNA, 19 nt, Artificial Sequence
  Description of Artificial Sequence: Synthetic oligonucleotide
gcuuugcugugugaaggag

SEQ ID NO: 1521391 - RNA, 19 nt, Artificial Sequence
  Description of Artificial Sequence: Synthetic oligonucleotide
agaaaacgugggugcugau

SEQ ID NO: 1521392 - RNA, 19 nt, Artificial Sequence
  Description of Artificial Sequence: Synthetic oligonucleotide
guagcuucucacugccugu

SEQ ID NO: 1521393 - RNA, 19 nt, Artificial Sequence
  Description of Artificial Sequence: Synthetic oligonucleotide
  modified_base (9)..(9): a, c, u, g, unknown or other
uccagggancguggcugcc

SEQ ID NO: 1521394 - RNA, 19 nt, Artificial Sequence
  Description of Artificial Sequence: Synthetic oligonucleotide
ccuaggcuauuucuuugac

SEQ ID NO: 1521395 - RNA, 19 nt, Artificial Sequence
  Description of Artificial Sequence: Synthetic oligonucleotide
uucacaugauuggcaucau

SEQ ID NO: 1521396 - RNA, 19 nt, Artificial Sequence
  Description of Artificial Sequence: Synthetic oligonucleotide
uaucgauaacaggcuggua

SEQ ID NO: 1521397 - RNA, 19 nt, Artificial Sequence
  Description of Artificial Sequence: Synthetic oligonucleotide
ucccucugauagagaaguu

SEQ ID NO: 1521398 - RNA, 19 nt, Artificial Sequence
  Description of Artificial Sequence: Synthetic oligonucleotide
uccuccgccuuaggacucc

SEQ ID NO: 1521399 - RNA, 19 nt, Artificial Sequence
  Description of Artificial Sequence: Synthetic oligonucleotide
cagaggaauuguaccugaa

SEQ ID NO: 1521400 - RNA, 19 nt, Artificial Sequence
  Description of Artificial Sequence: Synthetic oligonucleotide
gcugcgaccucaauaucca

SEQ ID NO: 1521401 - RNA, 19 nt, Artificial Sequence
  Description of Artificial Sequence: Synthetic oligonucleotide
auccuccgccuuaggacuc

SEQ ID NO: 1521402 - RNA, 19 nt, Artificial Sequence
  Description of Artificial Sequence: Synthetic oligonucleotide
cuccauucauacagagaua

SEQ ID NO: 1521403 - RNA, 19 nt, Artificial Sequence
  Description of Artificial Sequence: Synthetic oligonucleotide
ucaguguuacagggcuuuu

SEQ ID NO: 1521404 - RNA, 19 nt, Artificial Sequence
  Description of Artificial Sequence: Synthetic oligonucleotide
ccaauuauauguccucugu

SEQ ID NO: 1521405 - RNA, 19 nt, Artificial Sequence
  Description of Artificial Sequence: Synthetic oligonucleotide
cuccgccuuaggacucccc

SEQ ID NO: 1521406 - RNA, 19 nt, Artificial Sequence
  Description of Artificial Sequence: Synthetic oligonucleotide
gccuuaggacuccccacug

SEQ ID NO: 1521407 - RNA, 19 nt, Artificial Sequence
  Description of Artificial Sequence: Synthetic oligonucleotide
agccaaugucgcaccaagu

SEQ ID NO: 1521408 - RNA, 19 nt, Artificial Sequence
  Description of Artificial Sequence: Synthetic oligonucleotide
gcgauucugugugucaauc

SEQ ID NO: 1521409 - RNA, 19 nt, Artificial Sequence
  Description of Artificial Sequence: Synthetic oligonucleotide
  modified_base (4)..(4): a, c, u, g, unknown or other
ggancguggcugccaggac

SEQ ID NO: 1521410 - RNA, 19 nt, Artificial Sequence
  Description of Artificial Sequence: Synthetic oligonucleotide
  modified_base (13)..(13): a, c, u, g, unknown or other
aggcuacaagugnuagagu

SEQ ID NO: 1521411 - RNA, 19 nt, Artificial Sequence
  Description of Artificial Sequence: Synthetic oligonucleotide
cuccuugguucauaguaau

SEQ ID NO: 1521412 - RNA, 19 nt, Artificial Sequence
  Description of Artificial Sequence: Synthetic oligonucleotide
guagcccaggagagaaguc

SEQ ID NO: 1521413 - RNA, 19 nt, Artificial Sequence
  Description of Artificial Sequence: Synthetic oligonucleotide
  modified_base (11)..(11): a, c, u, g, unknown or other
gcuacaagugnuagagugu

SEQ ID NO: 1521414 - RNA, 19 nt, Artificial Sequence
  Description of Artificial Sequence: Synthetic oligonucleotide
ccucaugacugggauuccc

SEQ ID NO: 1521415 - RNA, 19 nt, Artificial Sequence
  Description of Artificial Sequence: Synthetic oligonucleotide
ggaccugugacagucacuu

SEQ ID NO: 1521416 - RNA, 19 nt, Artificial Sequence
  Description of Artificial Sequence: Synthetic oligonucleotide
aaccuccauaagggccaug

SEQ ID NO: 1521417 - RNA, 19 nt, Artificial Sequence
  Description of Artificial Sequence: Synthetic oligonucleotide
cuauccccgaaagcacuga

SEQ ID NO: 1521418 - RNA, 19 nt, Artificial Sequence
  Description of Artificial Sequence: Synthetic oligonucleotide
uaaccuccauaagggccau

SEQ ID NO: 1521419 - RNA, 19 nt, Artificial Sequence
  Description of Artificial Sequence: Synthetic oligonucleotide
cagcuguugucuccacaga

SEQ ID NO: 1521420 - RNA, 19 nt, Artificial Sequence
  Description of Artificial Sequence: Synthetic oligonucleotide
gauguucuuugagccaauu

SEQ ID NO: 1521421 - RNA, 19 nt, Artificial Sequence
  Description of Artificial Sequence: Synthetic oligonucleotide
augucgcaccaaguacaga

SEQ ID NO: 1521422 - RNA, 19 nt, Artificial Sequence
  Description of Artificial Sequence: Synthetic oligonucleotide
ccacugaaaacaaggcaua

SEQ ID NO: 1521423 - RNA, 19 nt, Artificial Sequence
  Description of Artificial Sequence: Synthetic oligonucleotide
caaguacagaaggcugaaa

SEQ ID NO: 1521424 - RNA, 19 nt, Artificial Sequence
  Description of Artificial Sequence: Synthetic oligonucleotide
acacggugcugcaggugug

SEQ ID NO: 1521425 - RNA, 19 nt, Artificial Sequence
  Description of Artificial Sequence: Synthetic oligonucleotide
ccgaaaguguauggguuuc

SEQ ID NO: 1521426 - RNA, 19 nt, Artificial Sequence
  Description of Artificial Sequence: Synthetic oligonucleotide
cugagaaaacgugggugcu

SEQ ID NO: 1521427 - RNA, 19 nt, Artificial Sequence
  Description of Artificial Sequence: Synthetic oligonucleotide
guguuacagggcuuuuauu

SEQ ID NO: 1521428 - RNA, 19 nt, Artificial Sequence
  Description of Artificial Sequence: Synthetic oligonucleotide
gccaggacugagaaaacgu

SEQ ID NO: 1521429 - RNA, 19 nt, Artificial Sequence
  Description of Artificial Sequence: Synthetic oligonucleotide
cagccagaacugcaugucu

SEQ ID NO: 1521430 - RNA, 19 nt, Artificial Sequence
  Description of Artificial Sequence: Synthetic oligonucleotide
ccgccuuaggacuccccac

SEQ ID NO: 1521431 - RNA, 19 nt, Artificial Sequence
  Description of Artificial Sequence: Synthetic oligonucleotide
aggcuugaagaaggccgaa

SEQ ID NO: 1521432 - RNA, 19 nt, Artificial Sequence
  Description of Artificial Sequence: Synthetic oligonucleotide
ccgauguucuuugagccaa

SEQ ID NO: 1521433 - RNA, 19 nt, Artificial Sequence
  Description of Artificial Sequence: Synthetic oligonucleotide
agcuuccaugaaacaucgu

SEQ ID NO: 1521434 - RNA, 19 nt, Artificial Sequence
  Description of Artificial Sequence: Synthetic oligonucleotide
ccccgaaagcacugaagga

SEQ ID NO: 1521435 - RNA, 19 nt, Artificial Sequence
  Description of Artificial Sequence: Synthetic oligonucleotide
ccuuaggacuccccacuga

SEQ ID NO: 1521436 - RNA, 19 nt, Artificial Sequence
  Description of Artificial Sequence: Synthetic oligonucleotide
gggcauaagcugcgaccuc

SEQ ID NO: 1521437 - RNA, 19 nt, Artificial Sequence
  Description of Artificial Sequence: Synthetic oligonucleotide
ccgaagggaguccauggcu

SEQ ID NO: 1521438 - RNA, 19 nt, Artificial Sequence
  Description of Artificial Sequence: Synthetic oligonucleotide
gacggcugagccaccucau

SEQ ID NO: 1521439 - RNA, 19 nt, Artificial Sequence
  Description of Artificial Sequence: Synthetic oligonucleotide
gcauaagcugcgaccucaa

SEQ ID NO: 1521440 - RNA, 19 nt, Artificial Sequence
  Description of Artificial Sequence: Synthetic oligonucleotide
ccuccuaggcuauuucuuu

SEQ ID NO: 1521441 - RNA, 19 nt, Artificial Sequence
  Description of Artificial Sequence: Synthetic oligonucleotide
  modified_base (8)..(8): a, c, u, g, unknown or other
ccagggancguggcugcca

SEQ ID NO: 1521442 - RNA, 19 nt, Artificial Sequence
  Description of Artificial Sequence: Synthetic oligonucleotide
ccaucucacucagaggaau

SEQ ID NO: 1521443 - RNA, 19 nt, Artificial Sequence
  Description of Artificial Sequence: Synthetic oligonucleotide
gggaccugugacagucacu

SEQ ID NO: 1521444 - RNA, 19 nt, Artificial Sequence
  Description of Artificial Sequence: Synthetic oligonucleotide
ccuccgccuuaggacuccc

SEQ ID NO: 1521445 - RNA, 19 nt, Artificial Sequence
  Description of Artificial Sequence: Synthetic oligonucleotide
ccuugguguuguagcuucu

SEQ ID NO: 1521446 - RNA, 19 nt, Artificial Sequence
  Description of Artificial Sequence: Synthetic oligonucleotide
ggguuucggugagcuggga

SEQ ID NO: 1521447 - RNA, 19 nt, Artificial Sequence
  Description of Artificial Sequence: Synthetic oligonucleotide
gcaaacccuccuaggcuau

SEQ ID NO: 1521448 - RNA, 19 nt, Artificial Sequence
  Description of Artificial Sequence: Synthetic oligonucleotide
cgauaacaggcugguauuu

SEQ ID NO: 1521449 - RNA, 19 nt, Artificial Sequence
  Description of Artificial Sequence: Synthetic oligonucleotide
cgauguucuuugagccaau

SEQ ID NO: 1521450 - RNA, 19 nt, Artificial Sequence
  Description of Artificial Sequence: Synthetic oligonucleotide
ccauuggguuuccgauguu

SEQ ID NO: 1521451 - RNA, 19 nt, Artificial Sequence
  Description of Artificial Sequence: Synthetic oligonucleotide
cgugugcauuagggcugaa

SEQ ID NO: 1521452 - RNA, 19 nt, Artificial Sequence
  Description of Artificial Sequence: Synthetic oligonucleotide
  modified_base (1)..(1): a, c, u, g, unknown or other
nuagaguguaauugucugu

SEQ ID NO: 1521453 - RNA, 19 nt, Artificial Sequence
  Description of Artificial Sequence: Synthetic oligonucleotide
aauggauagauauucuagg

SEQ ID NO: 1521454 - RNA, 19 nt, Artificial Sequence
  Description of Artificial Sequence: Synthetic oligonucleotide
augaaugcgaaccagcacc

SEQ ID NO: 1521455 - RNA, 19 nt, Artificial Sequence
  Description of Artificial Sequence: Synthetic oligonucleotide
auuaaauaggucucugggc

SEQ ID NO: 1521456 - RNA, 19 nt, Artificial Sequence
  Description of Artificial Sequence: Synthetic oligonucleotide
aauuagguaacaucauuag

SEQ ID NO: 1521457 - RNA, 19 nt, Artificial Sequence
  Description of Artificial Sequence: Synthetic oligonucleotide
auaaaggcgguuuguacgc

SEQ ID NO: 1521458 - RNA, 19 nt, Artificial Sequence
  Description of Artificial Sequence: Synthetic oligonucleotide
ucuagauucaggauuggga

SEQ ID NO: 1521459 - RNA, 19 nt, Artificial Sequence
  Description of Artificial Sequence: Synthetic oligonucleotide
uguacgcuuaaucuguucc

SEQ ID NO: 1521460 - RNA, 19 nt, Artificial Sequence
  Description of Artificial Sequence: Synthetic oligonucleotide
uccauaagaacgagcacgg

SEQ ID NO: 1521461 - RNA, 19 nt, Artificial Sequence
  Description of Artificial Sequence: Synthetic oligonucleotide
ucuucgaugaaugcgaacc

SEQ ID NO: 1521462 - RNA, 19 nt, Artificial Sequence
  Description of Artificial Sequence: Synthetic oligonucleotide
uucaggauugggaagagcu

SEQ ID NO: 1521463 - RNA, 19 nt, Artificial Sequence
  Description of Artificial Sequence: Synthetic oligonucleotide
ugagucgaguuucuuaagg

SEQ ID NO: 1521464 - RNA, 19 nt, Artificial Sequence
  Description of Artificial Sequence: Synthetic oligonucleotide
uugaccaaaacgcugggca

SEQ ID NO: 1521465 - RNA, 19 nt, Artificial Sequence
  Description of Artificial Sequence: Synthetic oligonucleotide
aauaucuucccugaguggu

SEQ ID NO: 1521466 - RNA, 19 nt, Artificial Sequence
  Description of Artificial Sequence: Synthetic oligonucleotide
aaugcgaaccagcaccauc

SEQ ID NO: 1521467 - RNA, 19 nt, Artificial Sequence
  Description of Artificial Sequence: Synthetic oligonucleotide
ucucuuaucaguucuggga

SEQ ID NO: 1521468 - RNA, 19 nt, Artificial Sequence
  Description of Artificial Sequence: Synthetic oligonucleotide
ugaccuuugaacccuagac

SEQ ID NO: 1521469 - RNA, 19 nt, Artificial Sequence
  Description of Artificial Sequence: Synthetic oligonucleotide
gucguuaguauaaaggcgg

SEQ ID NO: 1521470 - RNA, 19 nt, Artificial Sequence
  Description of Artificial Sequence: Synthetic oligonucleotide
uggugaaagggacagcaag

SEQ ID NO: 1521471 - RNA, 19 nt, Artificial Sequence
  Description of Artificial Sequence: Synthetic oligonucleotide
gagacuacaucaaugcucc

SEQ ID NO: 1521472 - RNA, 19 nt, Artificial Sequence
  Description of Artificial Sequence: Synthetic oligonucleotide
caccaaauaaauuagguaa

SEQ ID NO: 1521473 - RNA, 19 nt, Artificial Sequence
  Description of Artificial Sequence: Synthetic oligonucleotide
gacaacucuagauucagga

SEQ ID NO: 1521474 - RNA, 19 nt, Artificial Sequence
  Description of Artificial Sequence: Synthetic oligonucleotide
acgagcacggcucccaugc

SEQ ID NO: 1521475 - RNA, 19 nt, Artificial Sequence
  Description of Artificial Sequence: Synthetic oligonucleotide
accccuucgacuuucgacg

SEQ ID NO: 1521476 - RNA, 19 nt, Artificial Sequence
  Description of Artificial Sequence: Synthetic oligonucleotide
acuuucgacgcccucuccc

SEQ ID NO: 1521477 - RNA, 19 nt, Artificial Sequence
  Description of Artificial Sequence: Synthetic oligonucleotide
agcuaagugaccaacagug

SEQ ID NO: 1521478 - RNA, 19 nt, Artificial Sequence
  Description of Artificial Sequence: Synthetic oligonucleotide
aacaucagaguuugaagau

SEQ ID NO: 1521479 - RNA, 19 nt, Artificial Sequence
  Description of Artificial Sequence: Synthetic oligonucleotide
auaagaacgagcacggcuc

SEQ ID NO: 1521480 - RNA, 19 nt, Artificial Sequence
  Description of Artificial Sequence: Synthetic oligonucleotide
uccuucaacacccugcuuc

SEQ ID NO: 1521481 - RNA, 19 nt, Artificial Sequence
  Description of Artificial Sequence: Synthetic oligonucleotide
uagagaguuuucuucagga

SEQ ID NO: 1521482 - RNA, 19 nt, Artificial Sequence
  Description of Artificial Sequence: Synthetic oligonucleotide
acuacaucaaugcuccucu

SEQ ID NO: 1521483 - RNA, 19 nt, Artificial Sequence
  Description of Artificial Sequence: Synthetic oligonucleotide
uugaaucuaaaggacaacu

SEQ ID NO: 1521484 - RNA, 19 nt, Artificial Sequence
  Description of Artificial Sequence: Synthetic oligonucleotide
ugugagucgaguuucuuaa

SEQ ID NO: 1521485 - RNA, 19 nt, Artificial Sequence
  Description of Artificial Sequence: Synthetic oligonucleotide
ucgagagacuacaucaaug

SEQ ID NO: 1521486 - RNA, 19 nt, Artificial Sequence
  Description of Artificial Sequence: Synthetic oligonucleotide
aaauuagguaacaucauua

SEQ ID NO: 1521487 - RNA, 19 nt, Artificial Sequence
  Description of Artificial Sequence: Synthetic oligonucleotide
uccucuucgaugaaugcga

SEQ ID NO: 1521488 - RNA, 19 nt, Artificial Sequence
  Description of Artificial Sequence: Synthetic oligonucleotide
agaagccaucucaagaugc

SEQ ID NO: 1521489 - RNA, 19 nt, Artificial Sequence
  Description of Artificial Sequence: Synthetic oligonucleotide
aguccguacccuaagaagg

SEQ ID NO: 1521490 - RNA, 19 nt, Artificial Sequence
  Description of Artificial Sequence: Synthetic oligonucleotide
ucuaacccaggaaauggug

SEQ ID NO: 1521491 - RNA, 19 nt, Artificial Sequence
  Description of Artificial Sequence: Synthetic oligonucleotide
gaucuagggucacaaacug

SEQ ID NO: 1521492 - RNA, 19 nt, Artificial Sequence
  Description of Artificial Sequence: Synthetic oligonucleotide
uuuaguguccccgcucucg

SEQ ID NO: 1521493 - RNA, 19 nt, Artificial Sequence
  Description of Artificial Sequence: Synthetic oligonucleotide
uucgccaucggccuggccu

SEQ ID NO: 1521494 - RNA, 19 nt, Artificial Sequence
  Description of Artificial Sequence: Synthetic oligonucleotide
uucucuuaucaguucuggg

SEQ ID NO: 1521495 - RNA, 19 nt, Artificial Sequence
  Description of Artificial Sequence: Synthetic oligonucleotide
ucuaaaggacaacucuaga

SEQ ID NO: 1521496 - RNA, 19 nt, Artificial Sequence
  Description of Artificial Sequence: Synthetic oligonucleotide
uccgcucuaacccaggaaa

SEQ ID NO: 1521497 - RNA, 19 nt, Artificial Sequence
  Description of Artificial Sequence: Synthetic oligonucleotide
augcgaaccagcaccaucc

SEQ ID NO: 1521498 - RNA, 19 nt, Artificial Sequence
  Description of Artificial Sequence: Synthetic oligonucleotide
auggauagauauucuagga

SEQ ID NO: 1521499 - RNA, 19 nt, Artificial Sequence
  Description of Artificial Sequence: Synthetic oligonucleotide
aaacucuggguucgagagg

SEQ ID NO: 1521500 - RNA, 19 nt, Artificial Sequence
  Description of Artificial Sequence: Synthetic oligonucleotide
aagacccuugcccauaaau

SEQ ID NO: 1521501 - RNA, 19 nt, Artificial Sequence
  Description of Artificial Sequence: Synthetic oligonucleotide
acuuggucguaccucuccc

SEQ ID NO: 1521502 - RNA, 19 nt, Artificial Sequence
  Description of Artificial Sequence: Synthetic oligonucleotide
uagauauucuaggaauucc

SEQ ID NO: 1521503 - RNA, 19 nt, Artificial Sequence
  Description of Artificial Sequence: Synthetic oligonucleotide
uacaucaaugcuccucuug

SEQ ID NO: 1521504 - RNA, 19 nt, Artificial Sequence
  Description of Artificial Sequence: Synthetic oligonucleotide
uauuugagugcuaguccag

SEQ ID NO: 1521505 - RNA, 19 nt, Artificial Sequence
  Description of Artificial Sequence: Synthetic oligonucleotide
uguagagaguuuucuucag

SEQ ID NO: 1521506 - RNA, 19 nt, Artificial Sequence
  Description of Artificial Sequence: Synthetic oligonucleotide
ucuuuaguguccccgcucu

SEQ ID NO: 1521507 - RNA, 19 nt, Artificial Sequence
  Description of Artificial Sequence: Synthetic oligonucleotide
agucguuaguauaaaggcg

SEQ ID NO: 1521508 - RNA, 19 nt, Artificial Sequence
  Description of Artificial Sequence: Synthetic oligonucleotide
ggagucguuaguauaaagg

SEQ ID NO: 1521509 - RNA, 19 nt, Artificial Sequence
  Description of Artificial Sequence: Synthetic oligonucleotide
guagagaguuuucuucagg

SEQ ID NO: 1521510 - RNA, 19 nt, Artificial Sequence
  Description of Artificial Sequence: Synthetic oligonucleotide
ucaguguguccccacgucc

SEQ ID NO: 1521511 - RNA, 19 nt, Artificial Sequence
  Description of Artificial Sequence: Synthetic oligonucleotide
guauuugagugcuagucca

SEQ ID NO: 1521512 - RNA, 19 nt, Artificial Sequence
  Description of Artificial Sequence: Synthetic oligonucleotide
agcacgaugauuguaccag

SEQ ID NO: 1521513 - RNA, 19 nt, Artificial Sequence
  Description of Artificial Sequence: Synthetic oligonucleotide
acggcucccaugcagcagc

SEQ ID NO: 1521514 - RNA, 19 nt, Artificial Sequence
  Description of Artificial Sequence: Synthetic oligonucleotide
cuagauucaggauugggaa

SEQ ID NO: 1521515 - RNA, 19 nt, Artificial Sequence
  Description of Artificial Sequence: Synthetic oligonucleotide
ugaaugcgaaccagcacca

SEQ ID NO: 1521516 - RNA, 19 nt, Artificial Sequence
  Description of Artificial Sequence: Synthetic oligonucleotide
auccuuacuuggucguacc

SEQ ID NO: 1521517 - RNA, 19 nt, Artificial Sequence
  Description of Artificial Sequence: Synthetic oligonucleotide
aacacucuccccucagugu

SEQ ID NO: 1521518 - RNA, 19 nt, Artificial Sequence
  Description of Artificial Sequence: Synthetic oligonucleotide
ggaacaucagaguuugaag

SEQ ID NO: 1521519 - RNA, 19 nt, Artificial Sequence
  Description of Artificial Sequence: Synthetic oligonucleotide
aaucuaaaggacaacucua

SEQ ID NO: 1521520 - RNA, 19 nt, Artificial Sequence
  Description of Artificial Sequence: Synthetic oligonucleotide
ugaucugugagucgaguuu

SEQ ID NO: 1521521 - RNA, 19 nt, Artificial Sequence
  Description of Artificial Sequence: Synthetic oligonucleotide
gugaaagggacagcaaggg

SEQ ID NO: 1521522 - RNA, 19 nt, Artificial Sequence
  Description of Artificial Sequence: Synthetic oligonucleotide
uucugggaacaucagaguu

SEQ ID NO: 1521523 - RNA, 19 nt, Artificial Sequence
  Description of Artificial Sequence: Synthetic oligonucleotide
cauaaauaucuucccugag

SEQ ID NO: 1521524 - RNA, 19 nt, Artificial Sequence
  Description of Artificial Sequence: Synthetic oligonucleotide
gaugauuguaccaggcuuc

SEQ ID NO: 1521525 - RNA, 19 nt, Artificial Sequence
  Description of Artificial Sequence: Synthetic oligonucleotide
gguuuguacgcuuaaucug

SEQ ID NO: 1521526 - RNA, 19 nt, Artificial Sequence
  Description of Artificial Sequence: Synthetic oligonucleotide
gaugaaugcgaaccagcac

SEQ ID NO: 1521527 - RNA, 19 nt, Artificial Sequence
  Description of Artificial Sequence: Synthetic oligonucleotide
aucuaaaggacaacucuag

SEQ ID NO: 1521528 - RNA, 19 nt, Artificial Sequence
  Description of Artificial Sequence: Synthetic oligonucleotide
ugcccauaaauaucuuccc

SEQ ID NO: 1521529 - RNA, 19 nt, Artificial Sequence
  Description of Artificial Sequence: Synthetic oligonucleotide
cuuaaggaaaucagaggca

SEQ ID NO: 1521530 - RNA, 19 nt, Artificial Sequence
  Description of Artificial Sequence: Synthetic oligonucleotide
gaaagugucccuagcugag

SEQ ID NO: 1521531 - RNA, 19 nt, Artificial Sequence
  Description of Artificial Sequence: Synthetic oligonucleotide
uggagucguuaguauaaag

SEQ ID NO: 1521532 - RNA, 19 nt, Artificial Sequence
  Description of Artificial Sequence: Synthetic oligonucleotide
ugcuuaccgagcuuggggu

SEQ ID NO: 1521533 - RNA, 19 nt, Artificial Sequence
  Description of Artificial Sequence: Synthetic oligonucleotide
uucgaugaaugcgaaccag

SEQ ID NO: 1521534 - RNA, 19 nt, Artificial Sequence
  Description of Artificial Sequence: Synthetic oligonucleotide
caguccguacccuaagaag

SEQ ID NO: 1521535 - RNA, 19 nt, Artificial Sequence
  Description of Artificial Sequence: Synthetic oligonucleotide
cugcuuaccgagcuugggg

SEQ ID NO: 1521536 - RNA, 19 nt, Artificial Sequence
  Description of Artificial Sequence: Synthetic oligonucleotide
acccuaagaaggcugccag

SEQ ID NO: 1521537 - RNA, 19 nt, Artificial Sequence
  Description of Artificial Sequence: Synthetic oligonucleotide
aguggucggucgccgaccc

SEQ ID NO: 1521538 - RNA, 19 nt, Artificial Sequence
  Description of Artificial Sequence: Synthetic oligonucleotide
gagucgaguuucuuaagga

SEQ ID NO: 1521539 - RNA, 19 nt, Artificial Sequence
  Description of Artificial Sequence: Synthetic oligonucleotide
gucaccccguauuugagug

SEQ ID NO: 1521540 - RNA, 19 nt, Artificial Sequence
  Description of Artificial Sequence: Synthetic oligonucleotide
aaccauuaaauaggucucu

SEQ ID NO: 1521541 - RNA, 19 nt, Artificial Sequence
  Description of Artificial Sequence: Synthetic oligonucleotide
cacgaugauuguaccaggc

SEQ ID NO: 1521542 - RNA, 19 nt, Artificial Sequence
  Description of Artificial Sequence: Synthetic oligonucleotide
agcaccaaauaaauuaggu

SEQ ID NO: 1521543 - RNA, 19 nt, Artificial Sequence
  Description of Artificial Sequence: Synthetic oligonucleotide
caccauccuuacuuggucg

SEQ ID NO: 1521544 - RNA, 19 nt, Artificial Sequence
  Description of Artificial Sequence: Synthetic oligonucleotide
uuugaaucuaaaggacaac

SEQ ID NO: 1521545 - RNA, 19 nt, Artificial Sequence
  Description of Artificial Sequence: Synthetic oligonucleotide
ucuuaucaguucugggaac

SEQ ID NO: 1521546 - RNA, 19 nt, Artificial Sequence
  Description of Artificial Sequence: Synthetic oligonucleotide
cuccccaacuccuugcaag

SEQ ID NO: 1521547 - RNA, 19 nt, Artificial Sequence
  Description of Artificial Sequence: Synthetic oligonucleotide
agugcuaguccagccaggg

SEQ ID NO: 1521548 - RNA, 19 nt, Artificial Sequence
  Description of Artificial Sequence: Synthetic oligonucleotide
cuacucuugccagaaagug

SEQ ID NO: 1521549 - RNA, 19 nt, Artificial Sequence
  Description of Artificial Sequence: Synthetic oligonucleotide
ggugaaagggacagcaagg

SEQ ID NO: 1521550 - RNA, 19 nt, Artificial Sequence
  Description of Artificial Sequence: Synthetic oligonucleotide
aucgucaccccguauuuga

SEQ ID NO: 1521551 - RNA, 19 nt, Artificial Sequence
  Description of Artificial Sequence: Synthetic oligonucleotide
acaacucuagauucaggau

SEQ ID NO: 1521552 - RNA, 19 nt, Artificial Sequence
  Description of Artificial Sequence: Synthetic oligonucleotide
gauggagucguuaguauaa

SEQ ID NO: 1521553 - RNA, 19 nt, Artificial Sequence
  Description of Artificial Sequence: Synthetic oligonucleotide
cuuucgacgcccucucccc

SEQ ID NO: 1521554 - RNA, 19 nt, Artificial Sequence
  Description of Artificial Sequence: Synthetic oligonucleotide
cuccucuucgaugaaugcg

SEQ ID NO: 1521555 - RNA, 19 nt, Artificial Sequence
  Description of Artificial Sequence: Synthetic oligonucleotide
cucucuuuaguguccccgc

SEQ ID NO: 1521556 - RNA, 19 nt, Artificial Sequence
  Description of Artificial Sequence: Synthetic oligonucleotide
agccagggugucuccaggc

SEQ ID NO: 1521557 - RNA, 19 nt, Artificial Sequence
  Description of Artificial Sequence: Synthetic oligonucleotide
uccaucgucaccccguauu

SEQ ID NO: 1521558 - RNA, 19 nt, Artificial Sequence
  Description of Artificial Sequence: Synthetic oligonucleotide
uuaguguccccgcucucga

SEQ ID NO: 1521559 - RNA, 19 nt, Artificial Sequence
  Description of Artificial Sequence: Synthetic oligonucleotide
acaaacugaggaaagcuaa

SEQ ID NO: 1521560 - RNA, 19 nt, Artificial Sequence
  Description of Artificial Sequence: Synthetic oligonucleotide
aaacgcugggcaagauggc

SEQ ID NO: 1521561 - RNA, 19 nt, Artificial Sequence
  Description of Artificial Sequence: Synthetic oligonucleotide
ucgagcgacaccucagacu

SEQ ID NO: 1521562 - RNA, 19 nt, Artificial Sequence
  Description of Artificial Sequence: Synthetic oligonucleotide
ucaggauugggaagagcuc

SEQ ID NO: 1521563 - RNA, 19 nt, Artificial Sequence
  Description of Artificial Sequence: Synthetic oligonucleotide
ggacagacugaucugugag

SEQ ID NO: 1521564 - RNA, 19 nt, Artificial Sequence
  Description of Artificial Sequence: Synthetic oligonucleotide
gagaggugcgggucagugg

SEQ ID NO: 1521565 - RNA, 19 nt, Artificial Sequence
  Description of Artificial Sequence: Synthetic oligonucleotide
caaaacgcugggcaagaug

SEQ ID NO: 1521566 - RNA, 19 nt, Artificial Sequence
  Description of Artificial Sequence: Synthetic oligonucleotide
acgaugauuguaccaggcu

SEQ ID NO: 1521567 - RNA, 19 nt, Artificial Sequence
  Description of Artificial Sequence: Synthetic oligonucleotide
ucguuaguauaaaggcggu

SEQ ID NO: 1521568 - RNA, 19 nt, Artificial Sequence
  Description of Artificial Sequence: Synthetic oligonucleotide
acgcccucuccccaacucc

SEQ ID NO: 1521569 - RNA, 19 nt, Artificial Sequence
  Description of Artificial Sequence: Synthetic oligonucleotide
uggacagacugaucuguga

SEQ ID NO: 1521570 - RNA, 19 nt, Artificial Sequence
  Description of Artificial Sequence: Synthetic oligonucleotide
uggggucacaguccguacc

SEQ ID NO: 1521571 - RNA, 19 nt, Artificial Sequence
  Description of Artificial Sequence: Synthetic oligonucleotide
ucuagagggagaagccauc

SEQ ID NO: 1521572 - RNA, 19 nt, Artificial Sequence
  Description of Artificial Sequence: Synthetic oligonucleotide
uccccaacuccuugcaagc

SEQ ID NO: 1521573 - RNA, 19 nt, Artificial Sequence
  Description of Artificial Sequence: Synthetic oligonucleotide
cuaagaaggcugccaggcc

SEQ ID NO: 1521574 - RNA, 19 nt, Artificial Sequence
  Description of Artificial Sequence: Synthetic oligonucleotide
gaucugugagucgaguuuc

SEQ ID NO: 1521575 - RNA, 19 nt, Artificial Sequence
  Description of Artificial Sequence: Synthetic oligonucleotide
gaagauggagucguuagua

SEQ ID NO: 1521576 - RNA, 19 nt, Artificial Sequence
  Description of Artificial Sequence: Synthetic oligonucleotide
ugcucgagcgacaccucag

SEQ ID NO: 1521577 - RNA, 19 nt, Artificial Sequence
  Description of Artificial Sequence: Synthetic oligonucleotide
aggacaacucuagauucag

SEQ ID NO: 1521578 - RNA, 19 nt, Artificial Sequence
  Description of Artificial Sequence: Synthetic oligonucleotide
agugaccaacagugagggc

SEQ ID NO: 1521579 - RNA, 19 nt, Artificial Sequence
  Description of Artificial Sequence: Synthetic oligonucleotide
ugcugcuuaccgagcuugg

SEQ ID NO: 1521580 - RNA, 19 nt, Artificial Sequence
  Description of Artificial Sequence: Synthetic oligonucleotide
gacuacaucaaugcuccuc

SEQ ID NO: 1521581 - RNA, 19 nt, Artificial Sequence
  Description of Artificial Sequence: Synthetic oligonucleotide
ucucuuuaguguccccgcu

SEQ ID NO: 1521582 - RNA, 19 nt, Artificial Sequence
  Description of Artificial Sequence: Synthetic oligonucleotide
agacugaucugugagucga

SEQ ID NO: 1521583 - RNA, 19 nt, Artificial Sequence
  Description of Artificial Sequence: Synthetic oligonucleotide
cuaaaggacaacucuagau

SEQ ID NO: 1521584 - RNA, 19 nt, Artificial Sequence
  Description of Artificial Sequence: Synthetic oligonucleotide
ugagggccgaaccccagga

SEQ ID NO: 1521585 - RNA, 19 nt, Artificial Sequence
  Description of Artificial Sequence: Synthetic oligonucleotide
ucugaccuuugaacccuag

SEQ ID NO: 1521586 - RNA, 19 nt, Artificial Sequence
  Description of Artificial Sequence: Synthetic oligonucleotide
ugaccaaaacgcugggcaa

SEQ ID NO: 1521587 - RNA, 19 nt, Artificial Sequence
  Description of Artificial Sequence: Synthetic oligonucleotide
ucuccccucaguguguccc

SEQ ID NO: 1521588 - RNA, 19 nt, Artificial Sequence
  Description of Artificial Sequence: Synthetic oligonucleotide
uuuccccugggugaggugu

SEQ ID NO: 1521589 - RNA, 19 nt, Artificial Sequence
  Description of Artificial Sequence: Synthetic oligonucleotide
cagacugaucugugagucg

SEQ ID NO: 1521590 - RNA, 19 nt, Artificial Sequence
  Description of Artificial Sequence: Synthetic oligonucleotide
ugucccuagcugaggaagu

SEQ ID NO: 1521591 - RNA, 19 nt, Artificial Sequence
  Description of Artificial Sequence: Synthetic oligonucleotide
gaagcucugcucgagcgac

SEQ ID NO: 1521592 - RNA, 19 nt, Artificial Sequence
  Description of Artificial Sequence: Synthetic oligonucleotide
aguauaaaggcgguuugua

SEQ ID NO: 1521593 - RNA, 19 nt, Artificial Sequence
  Description of Artificial Sequence: Synthetic oligonucleotide
agucuugaccaaaacgcug

SEQ ID NO: 1521594 - RNA, 19 nt, Artificial Sequence
  Description of Artificial Sequence: Synthetic oligonucleotide
acaguccguacccuaagaa

SEQ ID NO: 1521595 - RNA, 19 nt, Artificial Sequence
  Description of Artificial Sequence: Synthetic oligonucleotide
cauaagaacgagcacggcu

SEQ ID NO: 1521596 - RNA, 19 nt, Artificial Sequence
  Description of Artificial Sequence: Synthetic oligonucleotide
ucgacuuucgacgcccucu

SEQ ID NO: 1521597 - RNA, 19 nt, Artificial Sequence
  Description of Artificial Sequence: Synthetic oligonucleotide
accauuaaauaggucucug

SEQ ID NO: 1521598 - RNA, 19 nt, Artificial Sequence
  Description of Artificial Sequence: Synthetic oligonucleotide
agaugccaagaucuagggu

SEQ ID NO: 1521599 - RNA, 19 nt, Artificial Sequence
  Description of Artificial Sequence: Synthetic oligonucleotide
gauucaggauugggaagag

SEQ ID NO: 1521600 - RNA, 19 nt, Artificial Sequence
  Description of Artificial Sequence: Synthetic oligonucleotide
gaaccagcaccauccuuac

SEQ ID NO: 1521601 - RNA, 19 nt, Artificial Sequence
  Description of Artificial Sequence: Synthetic oligonucleotide
cauccccuacucuugccag

SEQ ID NO: 1521602 - RNA, 19 nt, Artificial Sequence
  Description of Artificial Sequence: Synthetic oligonucleotide
ugcaagccugaucucugac

SEQ ID NO: 1521603 - RNA, 19 nt, Artificial Sequence
  Description of Artificial Sequence: Synthetic oligonucleotide
ugaguggucggucgccgac

SEQ ID NO: 1521604 - RNA, 19 nt, Artificial Sequence
  Description of Artificial Sequence: Synthetic oligonucleotide
cuuaucaguucugggaaca

SEQ ID NO: 1521605 - RNA, 19 nt, Artificial Sequence
  Description of Artificial Sequence: Synthetic oligonucleotide
gacaccucagacuccucuc

SEQ ID NO: 1521606 - RNA, 19 nt, Artificial Sequence
  Description of Artificial Sequence: Synthetic oligonucleotide
cuuacuuggucguaccucu

SEQ ID NO: 1521607 - RNA, 19 nt, Artificial Sequence
  Description of Artificial Sequence: Synthetic oligonucleotide
aaaggcgguuuguacgcuu

SEQ ID NO: 1521608 - RNA, 19 nt, Artificial Sequence
  Description of Artificial Sequence: Synthetic oligonucleotide
gugucccuagcugaggaag

SEQ ID NO: 1521609 - RNA, 19 nt, Artificial Sequence
  Description of Artificial Sequence: Synthetic oligonucleotide
caucggccuggccugaacc

SEQ ID NO: 1521610 - RNA, 19 nt, Artificial Sequence
  Description of Artificial Sequence: Synthetic oligonucleotide
uuuguacgcuuaaucuguu

SEQ ID NO: 1521611 - RNA, 19 nt, Artificial Sequence
  Description of Artificial Sequence: Synthetic oligonucleotide
uacccuaagaaggcugcca

SEQ ID NO: 1521612 - RNA, 19 nt, Artificial Sequence
  Description of Artificial Sequence: Synthetic oligonucleotide
auaucuucccugagugguc

SEQ ID NO: 1521613 - RNA, 19 nt, Artificial Sequence
  Description of Artificial Sequence: Synthetic oligonucleotide
agggcuucgccaucggccu

SEQ ID NO: 1521614 - RNA, 19 nt, Artificial Sequence
  Description of Artificial Sequence: Synthetic oligonucleotide
gaggugugagggcuucgcc

SEQ ID NO: 1521615 - RNA, 19 nt, Artificial Sequence
  Description of Artificial Sequence: Synthetic oligonucleotide
ugaggaagucuugaccaaa

SEQ ID NO: 1521616 - RNA, 19 nt, Artificial Sequence
  Description of Artificial Sequence: Synthetic oligonucleotide
cguauuugagugcuagucc

SEQ ID NO: 1521617 - RNA, 19 nt, Artificial Sequence
  Description of Artificial Sequence: Synthetic oligonucleotide
gagcacgaugauuguacca

SEQ ID NO: 1521618 - RNA, 19 nt, Artificial Sequence
  Description of Artificial Sequence: Synthetic oligonucleotide
ugcauccuaggggagcuga

SEQ ID NO: 1521619 - RNA, 19 nt, Artificial Sequence
  Description of Artificial Sequence: Synthetic oligonucleotide
uuguacgcuuaaucuguuc

SEQ ID NO: 1521620 - RNA, 19 nt, Artificial Sequence
  Description of Artificial Sequence: Synthetic oligonucleotide
gagacccgcacccuccuca

SEQ ID NO: 1521621 - RNA, 19 nt, Artificial Sequence
  Description of Artificial Sequence: Synthetic oligonucleotide
cauccuuacuuggucguac

SEQ ID NO: 1521622 - RNA, 19 nt, Artificial Sequence
  Description of Artificial Sequence: Synthetic oligonucleotide
ucaccccguauuugagugc

SEQ ID NO: 1521623 - RNA, 19 nt, Artificial Sequence
  Description of Artificial Sequence: Synthetic oligonucleotide
uuucgacgcccucucccca

SEQ ID NO: 1521624 - RNA, 19 nt, Artificial Sequence
  Description of Artificial Sequence: Synthetic oligonucleotide
ggaauggauagauauucua

SEQ ID NO: 1521625 - RNA, 19 nt, Artificial Sequence
  Description of Artificial Sequence: Synthetic oligonucleotide
cucuuuaguguccccgcuc

SEQ ID NO: 1521626 - RNA, 19 nt, Artificial Sequence
  Description of Artificial Sequence: Synthetic oligonucleotide
agggccgaaccccaggaau

SEQ ID NO: 1521627 - RNA, 19 nt, Artificial Sequence
  Description of Artificial Sequence: Synthetic oligonucleotide
ucaacacccugcuucucuu

SEQ ID NO: 1521628 - RNA, 19 nt, Artificial Sequence
  Description of Artificial Sequence: Synthetic oligonucleotide
acccgcacccuccucaggu

SEQ ID NO: 1521629 - RNA, 19 nt, Artificial Sequence
  Description of Artificial Sequence: Synthetic oligonucleotide
caagccugaucucugaccu

SEQ ID NO: 1521630 - RNA, 19 nt, Artificial Sequence
  Description of Artificial Sequence: Synthetic oligonucleotide
gcaagccugaucucugacc

SEQ ID NO: 1521631 - RNA, 19 nt, Artificial Sequence
  Description of Artificial Sequence: Synthetic oligonucleotide
cccuacucuugccagaaag

SEQ ID NO: 1521632 - RNA, 19 nt, Artificial Sequence
  Description of Artificial Sequence: Synthetic oligonucleotide
ucgccaucggccuggccug

SEQ ID NO: 1521633 - RNA, 19 nt, Artificial Sequence
  Description of Artificial Sequence: Synthetic oligonucleotide
aggcccgaggacugcucgc

SEQ ID NO: 1521634 - RNA, 19 nt, Artificial Sequence
  Description of Artificial Sequence: Synthetic oligonucleotide
gagagacuacaucaaugcu

SEQ ID NO: 1521635 - RNA, 19 nt, Artificial Sequence
  Description of Artificial Sequence: Synthetic oligonucleotide
cucuucgaugaaugcgaac

SEQ ID NO: 1521636 - RNA, 19 nt, Artificial Sequence
  Description of Artificial Sequence: Synthetic oligonucleotide
gcuuugaaucuaaaggaca

SEQ ID NO: 1521637 - RNA, 19 nt, Artificial Sequence
  Description of Artificial Sequence: Synthetic oligonucleotide
aucggccuggccugaaccu

SEQ ID NO: 1521638 - RNA, 19 nt, Artificial Sequence
  Description of Artificial Sequence: Synthetic oligonucleotide
caacugauggggagcacga

SEQ ID NO: 1521639 - RNA, 19 nt, Artificial Sequence
  Description of Artificial Sequence: Synthetic oligonucleotide
agcgacaccucagacuccu

SEQ ID NO: 1521640 - RNA, 19 nt, Artificial Sequence
  Description of Artificial Sequence: Synthetic oligonucleotide
gaucccgcaaacucugggu

SEQ ID NO: 1521641 - RNA, 19 nt, Artificial Sequence
  Description of Artificial Sequence: Synthetic oligonucleotide
gcaccaaauaaauuaggua

SEQ ID NO: 1521642 - RNA, 19 nt, Artificial Sequence
  Description of Artificial Sequence: Synthetic oligonucleotide
guccguacccuaagaaggc

SEQ ID NO: 1521643 - RNA, 19 nt, Artificial Sequence
  Description of Artificial Sequence: Synthetic oligonucleotide
gaggcuuggaagcucugcu

SEQ ID NO: 1521644 - RNA, 19 nt, Artificial Sequence
  Description of Artificial Sequence: Synthetic oligonucleotide
uucgagaggugcgggucag

SEQ ID NO: 1521645 - RNA, 19 nt, Artificial Sequence
  Description of Artificial Sequence: Synthetic oligonucleotide
gcacgaugauuguaccagg

SEQ ID NO: 1521646 - RNA, 19 nt, Artificial Sequence
  Description of Artificial Sequence: Synthetic oligonucleotide
cucccauccccuacucuug

SEQ ID NO: 1521647 - RNA, 19 nt, Artificial Sequence
  Description of Artificial Sequence: Synthetic oligonucleotide
gggagcacgaugauuguac

SEQ ID NO: 1521648 - RNA, 19 nt, Artificial Sequence
  Description of Artificial Sequence: Synthetic oligonucleotide
ucgccgaccccuucgacuu

SEQ ID NO: 1521649 - RNA, 19 nt, Artificial Sequence
  Description of Artificial Sequence: Synthetic oligonucleotide
uggucggucgccgaccccu

SEQ ID NO: 1521650 - RNA, 19 nt, Artificial Sequence
  Description of Artificial Sequence: Synthetic oligonucleotide
ccuccucagaauccaaacc

SEQ ID NO: 1521651 - RNA, 19 nt, Artificial Sequence
  Description of Artificial Sequence: Synthetic oligonucleotide
agacccuugcccauaaaua

SEQ ID NO: 1521652 - RNA, 19 nt, Artificial Sequence
  Description of Artificial Sequence: Synthetic oligonucleotide
gaagagcucugcucccauc

SEQ ID NO: 1521653 - RNA, 19 nt, Artificial Sequence
  Description of Artificial Sequence: Synthetic oligonucleotide
ccaacugauggggagcacg

SEQ ID NO: 1521654 - RNA, 19 nt, Artificial Sequence
  Description of Artificial Sequence: Synthetic oligonucleotide
ggcuccaacugauggggag

SEQ ID NO: 1521655 - RNA, 19 nt, Artificial Sequence
  Description of Artificial Sequence: Synthetic oligonucleotide
gcgguuuguacgcuuaauc

SEQ ID NO: 1521656 - RNA, 19 nt, Artificial Sequence
  Description of Artificial Sequence: Synthetic oligonucleotide
gaaaggggucgucugcugu

SEQ ID NO: 1521657 - RNA, 19 nt, Artificial Sequence
  Description of Artificial Sequence: Synthetic oligonucleotide
gccaucucaagaugccaag

SEQ ID NO: 1521658 - RNA, 19 nt, Artificial Sequence
  Description of Artificial Sequence: Synthetic oligonucleotide
cuaggaauuccuucucacu

SEQ ID NO: 1521659 - RNA, 19 nt, Artificial Sequence
  Description of Artificial Sequence: Synthetic oligonucleotide
aaggaggcuuugaaucuaa

SEQ ID NO: 1521660 - RNA, 19 nt, Artificial Sequence
  Description of Artificial Sequence: Synthetic oligonucleotide
cucgagcgacaccucagac

SEQ ID NO: 1521661 - RNA, 19 nt, Artificial Sequence
  Description of Artificial Sequence: Synthetic oligonucleotide
uuggggucacaguccguac

SEQ ID NO: 1521662 - RNA, 19 nt, Artificial Sequence
  Description of Artificial Sequence: Synthetic oligonucleotide
agacccgcacccuccucag

SEQ ID NO: 1521663 - RNA, 19 nt, Artificial Sequence
  Description of Artificial Sequence: Synthetic oligonucleotide
agacacccucaucaacacu

SEQ ID NO: 1521664 - RNA, 19 nt, Artificial Sequence
  Description of Artificial Sequence: Synthetic oligonucleotide
accaaaacgcugggcaaga

SEQ ID NO: 1521665 - RNA, 19 nt, Artificial Sequence
  Description of Artificial Sequence: Synthetic oligonucleotide
cgagcgacaccucagacuc

SEQ ID NO: 1521666 - RNA, 19 nt, Artificial Sequence
  Description of Artificial Sequence: Synthetic oligonucleotide
gaggaagucuugaccaaaa

SEQ ID NO: 1521667 - RNA, 19 nt, Artificial Sequence
  Description of Artificial Sequence: Synthetic oligonucleotide
ucccuagcugaggaagucu

SEQ ID NO: 1521668 - RNA, 19 nt, Artificial Sequence
  Description of Artificial Sequence: Synthetic oligonucleotide
ucuccccaacuccuugcaa

SEQ ID NO: 1521669 - RNA, 19 nt, Artificial Sequence
  Description of Artificial Sequence: Synthetic oligonucleotide
uccguacccuaagaaggcu

SEQ ID NO: 1521670 - RNA, 19 nt, Artificial Sequence
  Description of Artificial Sequence: Synthetic oligonucleotide
uaaaggcgguuuguacgcu

SEQ ID NO: 1521671 - RNA, 19 nt, Artificial Sequence
  Description of Artificial Sequence: Synthetic oligonucleotide
aggggucgucugcuguccg

SEQ ID NO: 1521672 - RNA, 19 nt, Artificial Sequence
  Description of Artificial Sequence: Synthetic oligonucleotide
guucgagaggugcggguca

SEQ ID NO: 1521673 - RNA, 19 nt, Artificial Sequence
  Description of Artificial Sequence: Synthetic oligonucleotide
ugauggggagcacgaugau

SEQ ID NO: 1521674 - RNA, 19 nt, Artificial Sequence
  Description of Artificial Sequence: Synthetic oligonucleotide
uucgacuuucgacgcccuc

SEQ ID NO: 1521675 - RNA, 19 nt, Artificial Sequence
  Description of Artificial Sequence: Synthetic oligonucleotide
acucuccccucaguguguc

SEQ ID NO: 1521676 - RNA, 19 nt, Artificial Sequence
  Description of Artificial Sequence: Synthetic oligonucleotide
aacuccuugcaagccugau

SEQ ID NO: 1521677 - RNA, 19 nt, Artificial Sequence
  Description of Artificial Sequence: Synthetic oligonucleotide
ccguauuugagugcuaguc

SEQ ID NO: 1521678 - RNA, 19 nt, Artificial Sequence
  Description of Artificial Sequence: Synthetic oligonucleotide
uccccuacucuugccagaa

SEQ ID NO: 1521679 - RNA, 19 nt, Artificial Sequence
  Description of Artificial Sequence: Synthetic oligonucleotide
cuuaccgagcuugggguca

SEQ ID NO: 1521680 - RNA, 19 nt, Artificial Sequence
  Description of Artificial Sequence: Synthetic oligonucleotide
ucugcucgagcgacaccuc

SEQ ID NO: 1521681 - RNA, 19 nt, Artificial Sequence
  Description of Artificial Sequence: Synthetic oligonucleotide
cguacccuaagaaggcugc

SEQ ID NO: 1521682 - RNA, 19 nt, Artificial Sequence
  Description of Artificial Sequence: Synthetic oligonucleotide
auccccuacucuugccaga

SEQ ID NO: 1521683 - RNA, 19 nt, Artificial Sequence
  Description of Artificial Sequence: Synthetic oligonucleotide
agccugaucucugaccuuu

SEQ ID NO: 1521684 - RNA, 19 nt, Artificial Sequence
  Description of Artificial Sequence: Synthetic oligonucleotide
ccugacucuugacuccucc

SEQ ID NO: 1521685 - RNA, 19 nt, Artificial Sequence
  Description of Artificial Sequence: Synthetic oligonucleotide
uucgacgcccucuccccaa

SEQ ID NO: 1521686 - RNA, 19 nt, Artificial Sequence
  Description of Artificial Sequence: Synthetic oligonucleotide
gaguggucggucgccgacc

SEQ ID NO: 1521687 - RNA, 19 nt, Artificial Sequence
  Description of Artificial Sequence: Synthetic oligonucleotide
aagccugaucucugaccuu

SEQ ID NO: 1521688 - RNA, 19 nt, Artificial Sequence
  Description of Artificial Sequence: Synthetic oligonucleotide
cuuuaguguccccgcucuc

SEQ ID NO: 1521689 - RNA, 19 nt, Artificial Sequence
  Description of Artificial Sequence: Synthetic oligonucleotide
guacccuaagaaggcugcc

SEQ ID NO: 1521690 - RNA, 19 nt, Artificial Sequence
  Description of Artificial Sequence: Synthetic oligonucleotide
ugcgggucaguggcacagg

SEQ ID NO: 1521691 - RNA, 19 nt, Artificial Sequence
  Description of Artificial Sequence: Synthetic oligonucleotide
aaggcgguuuguacgcuua

SEQ ID NO: 1521692 - RNA, 19 nt, Artificial Sequence
  Description of Artificial Sequence: Synthetic oligonucleotide
ccgguuacauuucuccuuc

SEQ ID NO: 1521693 - RNA, 19 nt, Artificial Sequence
  Description of Artificial Sequence: Synthetic oligonucleotide
ccuagacacccucaucaac

SEQ ID NO: 1521694 - RNA, 19 nt, Artificial Sequence
  Description of Artificial Sequence: Synthetic oligonucleotide
ccuucgacuuucgacgccc

SEQ ID NO: 1521695 - RNA, 19 nt, Artificial Sequence
  Description of Artificial Sequence: Synthetic oligonucleotide
caggauggggauguagaga

SEQ ID NO: 1521696 - RNA, 19 nt, Artificial Sequence
  Description of Artificial Sequence: Synthetic oligonucleotide
caucgucaccccguauuug

SEQ ID NO: 1521697 - RNA, 19 nt, Artificial Sequence
  Description of Artificial Sequence: Synthetic oligonucleotide
cucuaacccaggaaauggu

SEQ ID NO: 1521698 - RNA, 19 nt, Artificial Sequence
  Description of Artificial Sequence: Synthetic oligonucleotide
auggagucguuaguauaaa

SEQ ID NO: 1521699 - RNA, 19 nt, Artificial Sequence
  Description of Artificial Sequence: Synthetic oligonucleotide
cucugcucgagcgacaccu

SEQ ID NO: 1521700 - RNA, 19 nt, Artificial Sequence
  Description of Artificial Sequence: Synthetic oligonucleotide
ucgucugcuguccgcucua

SEQ ID NO: 1521701 - RNA, 19 nt, Artificial Sequence
  Description of Artificial Sequence: Synthetic oligonucleotide
ggccgaaccccaggaaugg

SEQ ID NO: 1521702 - RNA, 19 nt, Artificial Sequence
  Description of Artificial Sequence: Synthetic oligonucleotide
cacaguccguacccuaaga

SEQ ID NO: 1521703 - RNA, 19 nt, Artificial Sequence
  Description of Artificial Sequence: Synthetic oligonucleotide
caggccgguuacauuucuc

SEQ ID NO: 1521704 - RNA, 19 nt, Artificial Sequence
  Description of Artificial Sequence: Synthetic oligonucleotide
gcucucgagagacuacauc

SEQ ID NO: 1521705 - RNA, 19 nt, Artificial Sequence
  Description of Artificial Sequence: Synthetic oligonucleotide
gcugcuuaccgagcuuggg

SEQ ID NO: 1521706 - RNA, 19 nt, Artificial Sequence
  Description of Artificial Sequence: Synthetic oligonucleotide
uuaccgagcuuggggucac

SEQ ID NO: 1521707 - RNA, 19 nt, Artificial Sequence
  Description of Artificial Sequence: Synthetic oligonucleotide
gucguaccucucccucucc

SEQ ID NO: 1521708 - RNA, 19 nt, Artificial Sequence
  Description of Artificial Sequence: Synthetic oligonucleotide
cccgcaaacucuggguucg

SEQ ID NO: 1521709 - RNA, 19 nt, Artificial Sequence
  Description of Artificial Sequence: Synthetic oligonucleotide
ggcuuccauaagaacgagc

SEQ ID NO: 1521710 - RNA, 19 nt, Artificial Sequence
  Description of Artificial Sequence: Synthetic oligonucleotide
gcuccaacugauggggagc

SEQ ID NO: 1521711 - RNA, 19 nt, Artificial Sequence
  Description of Artificial Sequence: Synthetic oligonucleotide
ggucguaccucucccucuc

SEQ ID NO: 1521712 - RNA, 19 nt, Artificial Sequence
  Description of Artificial Sequence: Synthetic oligonucleotide
ggaagcucugcucgagcga

SEQ ID NO: 1521713 - RNA, 19 nt, Artificial Sequence
  Description of Artificial Sequence: Synthetic oligonucleotide
ugcucgcugcugcauccua

SEQ ID NO: 1521714 - RNA, 19 nt, Artificial Sequence
  Description of Artificial Sequence: Synthetic oligonucleotide
ccuuacuuggucguaccuc

SEQ ID NO: 1521715 - RNA, 19 nt, Artificial Sequence
  Description of Artificial Sequence: Synthetic oligonucleotide
ccguacccuaagaaggcug

SEQ ID NO: 1521716 - RNA, 19 nt, Artificial Sequence
  Description of Artificial Sequence: Synthetic oligonucleotide
ccuagcugaggaagucuug

SEQ ID NO: 1521717 - RNA, 19 nt, Artificial Sequence
  Description of Artificial Sequence: Synthetic oligonucleotide
cgaugaaugcgaaccagca

SEQ ID NO: 1521718 - RNA, 19 nt, Artificial Sequence
  Description of Artificial Sequence: Synthetic oligonucleotide
gguggagacccgcacccuc

SEQ ID NO: 1521719 - RNA, 19 nt, Artificial Sequence
  Description of Artificial Sequence: Synthetic oligonucleotide
ggucaguggcacaggcccg

SEQ ID NO: 1521720 - RNA, 19 nt, Artificial Sequence
  Description of Artificial Sequence: Synthetic oligonucleotide
auggugaaagggacagcaa

SEQ ID NO: 1521721 - RNA, 19 nt, Artificial Sequence
  Description of Artificial Sequence: Synthetic oligonucleotide
gucgccgaccccuucgacu

SEQ ID NO: 1521722 - RNA, 19 nt, Artificial Sequence
  Description of Artificial Sequence: Synthetic oligonucleotide
cuggccugaaccugacucu

SEQ ID NO: 1521723 - RNA, 19 nt, Artificial Sequence
  Description of Artificial Sequence: Synthetic oligonucleotide
aggcgguuuguacgcuuaa

SEQ ID NO: 1521724 - RNA, 19 nt, Artificial Sequence
  Description of Artificial Sequence: Synthetic oligonucleotide
cugcucgagcgacaccuca

SEQ ID NO: 1521725 - RNA, 19 nt, Artificial Sequence
  Description of Artificial Sequence: Synthetic oligonucleotide
gggccgaaccccaggaaug

SEQ ID NO: 1521726 - RNA, 19 nt, Artificial Sequence
  Description of Artificial Sequence: Synthetic oligonucleotide
ccccguauuugagugcuag

SEQ ID NO: 1521727 - RNA, 19 nt, Artificial Sequence
  Description of Artificial Sequence: Synthetic oligonucleotide
ccucaucaacacucucccc

SEQ ID NO: 1521728 - RNA, 19 nt, Artificial Sequence
  Description of Artificial Sequence: Synthetic oligonucleotide
cuuggucguaccucucccu

SEQ ID NO: 1521729 - RNA, 19 nt, Artificial Sequence
  Description of Artificial Sequence: Synthetic oligonucleotide
gcuuaccgagcuugggguc

SEQ ID NO: 1521730 - RNA, 19 nt, Artificial Sequence
  Description of Artificial Sequence: Synthetic oligonucleotide
guccgcucuaacccaggaa

SEQ ID NO: 1521731 - RNA, 19 nt, Artificial Sequence
  Description of Artificial Sequence: Synthetic oligonucleotide
cccucaguguguccccacg

SEQ ID NO: 1521732 - RNA, 19 nt, Artificial Sequence
  Description of Artificial Sequence: Synthetic oligonucleotide
cacggcucccaugcagcag

SEQ ID NO: 1521733 - RNA, 19 nt, Artificial Sequence
  Description of Artificial Sequence: Synthetic oligonucleotide
caacuccuugcaagccuga

SEQ ID NO: 1521734 - RNA, 19 nt, Artificial Sequence
  Description of Artificial Sequence: Synthetic oligonucleotide
cucgagagacuacaucaau

SEQ ID NO: 1521735 - RNA, 19 nt, Artificial Sequence
  Description of Artificial Sequence: Synthetic oligonucleotide
caaugcuccucuugcugcu

SEQ ID NO: 1521736 - RNA, 19 nt, Artificial Sequence
  Description of Artificial Sequence: Synthetic oligonucleotide
ccccuucgacuuucgacgc

SEQ ID NO: 1521737 - RNA, 19 nt, Artificial Sequence
  Description of Artificial Sequence: Synthetic oligonucleotide
gcuguccgcucuaacccag

SEQ ID NO: 1521738 - RNA, 19 nt, Artificial Sequence
  Description of Artificial Sequence: Synthetic oligonucleotide
cccuugcccauaaauaucu

SEQ ID NO: 1521739 - RNA, 19 nt, Artificial Sequence
  Description of Artificial Sequence: Synthetic oligonucleotide
ccaagaucuagggucacaa

SEQ ID NO: 1521740 - RNA, 19 nt, Artificial Sequence
  Description of Artificial Sequence: Synthetic oligonucleotide
gagcgacaccucagacucc

SEQ ID NO: 1521741 - RNA, 19 nt, Artificial Sequence
  Description of Artificial Sequence: Synthetic oligonucleotide
ccugaguggucggucgccg

SEQ ID NO: 1521742 - RNA, 19 nt, Artificial Sequence
  Description of Artificial Sequence: Synthetic oligonucleotide
accugacucuugacuccuc

SEQ ID NO: 1521743 - RNA, 19 nt, Artificial Sequence
  Description of Artificial Sequence: Synthetic oligonucleotide
ggggucgucugcuguccgc

SEQ ID NO: 1521744 - RNA, 19 nt, Artificial Sequence
  Description of Artificial Sequence: Synthetic oligonucleotide
cugaguggucggucgccga

SEQ ID NO: 1521745 - RNA, 19 nt, Artificial Sequence
  Description of Artificial Sequence: Synthetic oligonucleotide
gcucgagcgacaccucaga

SEQ ID NO: 1521746 - RNA, 19 nt, Artificial Sequence
  Description of Artificial Sequence: Synthetic oligonucleotide
gucgucugcuguccgcucu

SEQ ID NO: 1521747 - RNA, 19 nt, Artificial Sequence
  Description of Artificial Sequence: Synthetic oligonucleotide
ccagaaagugucccuagcu

SEQ ID NO: 1521748 - RNA, 19 nt, Artificial Sequence
  Description of Artificial Sequence: Synthetic oligonucleotide
cgguuuguacgcuuaaucu

SEQ ID NO: 1521749 - RNA, 19 nt, Artificial Sequence
  Description of Artificial Sequence: Synthetic oligonucleotide
ccauaagaacgagcacggc

SEQ ID NO: 1521750 - RNA, 19 nt, Artificial Sequence
  Description of Artificial Sequence: Synthetic oligonucleotide
cuuccugaucccgcaaacu

SEQ ID NO: 1521751 - RNA, 19 nt, Artificial Sequence
  Description of Artificial Sequence: Synthetic oligonucleotide
ccauccccuacucuugcca

SEQ ID NO: 1521752 - RNA, 19 nt, Artificial Sequence
  Description of Artificial Sequence: Synthetic oligonucleotide
ucgagaggugcgggucagu

SEQ ID NO: 1521753 - RNA, 19 nt, Artificial Sequence
  Description of Artificial Sequence: Synthetic oligonucleotide
cuucgccaucggccuggcc

SEQ ID NO: 1521754 - RNA, 19 nt, Artificial Sequence
  Description of Artificial Sequence: Synthetic oligonucleotide
gcauccuaggggagcugag

SEQ ID NO: 1521755 - RNA, 19 nt, Artificial Sequence
  Description of Artificial Sequence: Synthetic oligonucleotide
caacacccugcuucucuua

SEQ ID NO: 1521756 - RNA, 19 nt, Artificial Sequence
  Description of Artificial Sequence: Synthetic oligonucleotide
uccccacgucccgcagccg

SEQ ID NO: 1521757 - RNA, 19 nt, Artificial Sequence
  Description of Artificial Sequence: Synthetic oligonucleotide
cccauccccuacucuugcc

SEQ ID NO: 1521758 - RNA, 19 nt, Artificial Sequence
  Description of Artificial Sequence: Synthetic oligonucleotide
guggucggucgccgacccc

SEQ ID NO: 1521759 - RNA, 19 nt, Artificial Sequence
  Description of Artificial Sequence: Synthetic oligonucleotide
ggccgguuacauuucuccu

SEQ ID NO: 1521760 - RNA, 19 nt, Artificial Sequence
  Description of Artificial Sequence: Synthetic oligonucleotide
cgcucuaacccaggaaaug

SEQ ID NO: 1521761 - RNA, 19 nt, Artificial Sequence
  Description of Artificial Sequence: Synthetic oligonucleotide
gaggugcgggucaguggca

SEQ ID NO: 1521762 - RNA, 19 nt, Artificial Sequence
  Description of Artificial Sequence: Synthetic oligonucleotide
cccuucgacuuucgacgcc

SEQ ID NO: 1521763 - RNA, 19 nt, Artificial Sequence
  Description of Artificial Sequence: Synthetic oligonucleotide
acucuggguucgagaggug

SEQ ID NO: 1521764 - RNA, 19 nt, Artificial Sequence
  Description of Artificial Sequence: Synthetic oligonucleotide
cuucgacuuucgacgcccu

SEQ ID NO: 1521765 - RNA, 19 nt, Artificial Sequence
  Description of Artificial Sequence: Synthetic oligonucleotide
cgguuacauuucuccuucc

SEQ ID NO: 1521766 - RNA, 19 nt, Artificial Sequence
  Description of Artificial Sequence: Synthetic oligonucleotide
ggucgucugcuguccgcuc

SEQ ID NO: 1521767 - RNA, 19 nt, Artificial Sequence
  Description of Artificial Sequence: Synthetic oligonucleotide
gggaaaggggucgucugcu

SEQ ID NO: 1521768 - RNA, 19 nt, Artificial Sequence
  Description of Artificial Sequence: Synthetic oligonucleotide
gcucugcucgagcgacacc

SEQ ID NO: 1521769 - RNA, 19 nt, Artificial Sequence
  Description of Artificial Sequence: Synthetic oligonucleotide
gccaagaucuagggucaca

SEQ ID NO: 1521770 - RNA, 19 nt, Artificial Sequence
  Description of Artificial Sequence: Synthetic oligonucleotide
gcacggcucccaugcagca

SEQ ID NO: 1521771 - RNA, 19 nt, Artificial Sequence
  Description of Artificial Sequence: Synthetic oligonucleotide
gaaugcgaaccagcaccau

SEQ ID NO: 1521772 - RNA, 19 nt, Artificial Sequence
  Description of Artificial Sequence: Synthetic oligonucleotide
gucggucgccgaccccuuc

SEQ ID NO: 1521773 - RNA, 19 nt, Artificial Sequence
  Description of Artificial Sequence: Synthetic oligonucleotide
uaccgagcuuggggucaca

SEQ ID NO: 1521774 - RNA, 19 nt, Artificial Sequence
  Description of Artificial Sequence: Synthetic oligonucleotide
caagacccuugcccauaaa

SEQ ID NO: 1521775 - RNA, 19 nt, Artificial Sequence
  Description of Artificial Sequence: Synthetic oligonucleotide
ggucgccgaccccuucgac

SEQ ID NO: 1521776 - RNA, 19 nt, Artificial Sequence
  Description of Artificial Sequence: Synthetic oligonucleotide
cccugaguggucggucgcc

SEQ ID NO: 1521777 - RNA, 19 nt, Artificial Sequence
  Description of Artificial Sequence: Synthetic oligonucleotide
cgaugauuguaccaggcuu

SEQ ID NO: 1521778 - RNA, 19 nt, Artificial Sequence
  Description of Artificial Sequence: Synthetic oligonucleotide
cccuagacacccucaucaa

SEQ ID NO: 1521779 - RNA, 19 nt, Artificial Sequence
  Description of Artificial Sequence: Synthetic oligonucleotide
cgaaccccaggaauggaua

SEQ ID NO: 1521780 - RNA, 19 nt, Artificial Sequence
  Description of Artificial Sequence: Synthetic oligonucleotide
ggagacccgcacccuccuc

SEQ ID NO: 1521781 - RNA, 19 nt, Artificial Sequence
  Description of Artificial Sequence: Synthetic oligonucleotide
ccaucggccuggccugaac

SEQ ID NO: 1521782 - RNA, 19 nt, Artificial Sequence
  Description of Artificial Sequence: Synthetic oligonucleotide
cgcaaacucuggguucgag

SEQ ID NO: 1521783 - RNA, 19 nt, Artificial Sequence
  Description of Artificial Sequence: Synthetic oligonucleotide
ggggagcacgaugauugua

SEQ ID NO: 1521784 - RNA, 19 nt, Artificial Sequence
  Description of Artificial Sequence: Synthetic oligonucleotide
ccgcucucgagagacuaca

SEQ ID NO: 1521785 - RNA, 19 nt, Artificial Sequence
  Description of Artificial Sequence: Synthetic oligonucleotide
ggcucccaugcagcagccc

SEQ ID NO: 1521786 - RNA, 19 nt, Artificial Sequence
  Description of Artificial Sequence: Synthetic oligonucleotide
gccgaccccuucgacuuuc

SEQ ID NO: 1521787 - RNA, 19 nt, Artificial Sequence
  Description of Artificial Sequence: Synthetic oligonucleotide
gcugccaggccgguuacau

SEQ ID NO: 1521788 - RNA, 19 nt, Artificial Sequence
  Description of Artificial Sequence: Synthetic oligonucleotide
gccaggccgguuacauuuc

SEQ ID NO: 1521789 - RNA, 19 nt, Artificial Sequence
  Description of Artificial Sequence: Synthetic oligonucleotide
ccgaaccccaggaauggau

SEQ ID NO: 1521790 - RNA, 19 nt, Artificial Sequence
  Description of Artificial Sequence: Synthetic oligonucleotide
cccuagcugaggaagucuu

SEQ ID NO: 1521791 - RNA, 19 nt, Artificial Sequence
  Description of Artificial Sequence: Synthetic oligonucleotide
gccgaaccccaggaaugga

SEQ ID NO: 1521792 - RNA, 19 nt, Artificial Sequence
  Description of Artificial Sequence: Synthetic oligonucleotide
cccguauuugagugcuagu

SEQ ID NO: 1521793 - RNA, 19 nt, Artificial Sequence
  Description of Artificial Sequence: Synthetic oligonucleotide
ggcgguuuguacgcuuaau

SEQ ID NO: 1521794 - RNA, 19 nt, Artificial Sequence
  Description of Artificial Sequence: Synthetic oligonucleotide
ccaucgucaccccguauuu

SEQ ID NO: 1521795 - RNA, 19 nt, Artificial Sequence
  Description of Artificial Sequence: Synthetic oligonucleotide
ggcccgaggacugcucgcu

SEQ ID NO: 1521796 - RNA, 19 nt, Artificial Sequence
  Description of Artificial Sequence: Synthetic oligonucleotide
cugccaggccgguuacauu

SEQ ID NO: 1521797 - RNA, 19 nt, Artificial Sequence
  Description of Artificial Sequence: Synthetic oligonucleotide
ccgcucuaacccaggaaau

SEQ ID NO: 1521798 - RNA, 19 nt, Artificial Sequence
  Description of Artificial Sequence: Synthetic oligonucleotide
gcgaaccagcaccauccuu

SEQ ID NO: 1521799 - RNA, 19 nt, Artificial Sequence
  Description of Artificial Sequence: Synthetic oligonucleotide
cgucaccccguauuugagu

SEQ ID NO: 1521800 - RNA, 19 nt, Artificial Sequence
  Description of Artificial Sequence: Synthetic oligonucleotide
ccauccuuacuuggucgua

SEQ ID NO: 1521801 - RNA, 19 nt, Artificial Sequence
  Description of Artificial Sequence: Synthetic oligonucleotide
ccgagcuuggggucacagu

SEQ ID NO: 1521802 - RNA, 19 nt, Artificial Sequence
  Description of Artificial Sequence: Synthetic oligonucleotide
ccgaggacugcucgcugcu

SEQ ID NO: 1521803 - RNA, 19 nt, Artificial Sequence
  Description of Artificial Sequence: Synthetic oligonucleotide
ggacugcucgcugcugcau

SEQ ID NO: 1521804 - RNA, 19 nt, Artificial Sequence
  Description of Artificial Sequence: Synthetic oligonucleotide
cguaccucucccucuccau

SEQ ID NO: 1521805 - RNA, 19 nt, Artificial Sequence
  Description of Artificial Sequence: Synthetic oligonucleotide
cguuaguauaaaggcgguu

SEQ ID NO: 1521806 - RNA, 19 nt, Artificial Sequence
  Description of Artificial Sequence: Synthetic oligonucleotide
ccaaaacgcugggcaagau

SEQ ID NO: 1521807 - RNA, 19 nt, Artificial Sequence
  Description of Artificial Sequence: Synthetic oligonucleotide
gccaucggccuggccugaa

SEQ ID NO: 1521808 - RNA, 19 nt, Artificial Sequence
  Description of Artificial Sequence: Synthetic oligonucleotide
ccgcaaacucuggguucga

SEQ ID NO: 1521809 - RNA, 19 nt, Artificial Sequence
  Description of Artificial Sequence: Synthetic oligonucleotide
cgucugcuguccgcucuaa

SEQ ID NO: 1521810 - RNA, 19 nt, Artificial Sequence
  Description of Artificial Sequence: Synthetic oligonucleotide
ggucggucgccgaccccuu

SEQ ID NO: 1521811 - RNA, 19 nt, Artificial Sequence
  Description of Artificial Sequence: Synthetic oligonucleotide
cgacgcccucuccccaacu

SEQ ID NO: 1521812 - RNA, 19 nt, Artificial Sequence
  Description of Artificial Sequence: Synthetic oligonucleotide
cgccaucggccuggccuga

SEQ ID NO: 1521813 - RNA, 19 nt, Artificial Sequence
  Description of Artificial Sequence: Synthetic oligonucleotide
cgccgaccccuucgacuuu

SEQ ID NO: 1521814 - RNA, 19 nt, Artificial Sequence
  Description of Artificial Sequence: Synthetic oligonucleotide
aaaucguaguacuuagucc

SEQ ID NO: 1521815 - RNA, 19 nt, Artificial Sequence
  Description of Artificial Sequence: Synthetic oligonucleotide
aaacccuucauccaaauug

SEQ ID NO: 1521816 - RNA, 19 nt, Artificial Sequence
  Description of Artificial Sequence: Synthetic oligonucleotide
gagaauaucccauaauccg

SEQ ID NO: 1521817 - RNA, 19 nt, Artificial Sequence
  Description of Artificial Sequence: Synthetic oligonucleotide
aaucguaguacuuagucca

SEQ ID NO: 1521818 - RNA, 19 nt, Artificial Sequence
  Description of Artificial Sequence: Synthetic oligonucleotide
agugcuuuugcucagagug

SEQ ID NO: 1521819 - RNA, 19 nt, Artificial Sequence
  Description of Artificial Sequence: Synthetic oligonucleotide
uguuguuugagaaaguuuc

SEQ ID NO: 1521820 - RNA, 19 nt, Artificial Sequence
  Description of Artificial Sequence: Synthetic oligonucleotide
gaagcauuggucccgaagg

SEQ ID NO: 1521821 - RNA, 19 nt, Artificial Sequence
  Description of Artificial Sequence: Synthetic oligonucleotide
aacgacuucauuuuggaaa

SEQ ID NO: 1521822 - RNA, 19 nt, Artificial Sequence
  Description of Artificial Sequence: Synthetic oligonucleotide
auucaucacggcuacaaac

SEQ ID NO: 1521823 - RNA, 19 nt, Artificial Sequence
  Description of Artificial Sequence: Synthetic oligonucleotide
auuauaagccggcagaaca

SEQ ID NO: 1521824 - RNA, 19 nt, Artificial Sequence
  Description of Artificial Sequence: Synthetic oligonucleotide
aaaguuuccaacgacuuca

SEQ ID NO: 1521825 - RNA, 19 nt, Artificial Sequence
  Description of Artificial Sequence: Synthetic oligonucleotide
auuaguccuuauuagaucu

SEQ ID NO: 1521826 - RNA, 19 nt, Artificial Sequence
  Description of Artificial Sequence: Synthetic oligonucleotide
uucaucacggcuacaaacc

SEQ ID NO: 1521827 - RNA, 19 nt, Artificial Sequence
  Description of Artificial Sequence: Synthetic oligonucleotide
uccaaauugaaguuuucgc

SEQ ID NO: 1521828 - RNA, 19 nt, Artificial Sequence
  Description of Artificial Sequence: Synthetic oligonucleotide
gaaaucguaguacuuaguc

SEQ ID NO: 1521829 - RNA, 19 nt, Artificial Sequence
  Description of Artificial Sequence: Synthetic oligonucleotide
ucaagucucgggaaagagg

SEQ ID NO: 1521830 - RNA, 19 nt, Artificial Sequence
  Description of Artificial Sequence: Synthetic oligonucleotide
auuuuggaaaucguaguac

SEQ ID NO: 1521831 - RNA, 19 nt, Artificial Sequence
  Description of Artificial Sequence: Synthetic oligonucleotide
ucaccuuagagaauauccc

SEQ ID NO: 1521832 - RNA, 19 nt, Artificial Sequence
  Description of Artificial Sequence: Synthetic oligonucleotide
uacuuaguccaguauacgc

SEQ ID NO: 1521833 - RNA, 19 nt, Artificial Sequence
  Description of Artificial Sequence: Synthetic oligonucleotide
auuagaucuucguagauuu

SEQ ID NO: 1521834 - RNA, 19 nt, Artificial Sequence
  Description of Artificial Sequence: Synthetic oligonucleotide
gaucccaaagcauuauaag

SEQ ID NO: 1521835 - RNA, 19 nt, Artificial Sequence
  Description of Artificial Sequence: Synthetic oligonucleotide
uccaacgacuucauuuugg

SEQ ID NO: 1521836 - RNA, 19 nt, Artificial Sequence
  Description of Artificial Sequence: Synthetic oligonucleotide
uacgcagaugucuugguag

SEQ ID NO: 1521837 - RNA, 19 nt, Artificial Sequence
  Description of Artificial Sequence: Synthetic oligonucleotide
gaaggagaugcguagcucc

SEQ ID NO: 1521838 - RNA, 19 nt, Artificial Sequence
  Description of Artificial Sequence: Synthetic oligonucleotide
gguucuucaguuuaacagg

SEQ ID NO: 1521839 - RNA, 19 nt, Artificial Sequence
  Description of Artificial Sequence: Synthetic oligonucleotide
aguacuuaguccaguauac

SEQ ID NO: 1521840 - RNA, 19 nt, Artificial Sequence
  Description of Artificial Sequence: Synthetic oligonucleotide
ucuaugcuuacuucucagg

SEQ ID NO: 1521841 - RNA, 19 nt, Artificial Sequence
  Description of Artificial Sequence: Synthetic oligonucleotide
auaucccauaauccgauag

SEQ ID NO: 1521842 - RNA, 19 nt, Artificial Sequence
  Description of Artificial Sequence: Synthetic oligonucleotide
gaugguagcgccagggucg

SEQ ID NO: 1521843 - RNA, 19 nt, Artificial Sequence
  Description of Artificial Sequence: Synthetic oligonucleotide
aagcauuauaagccggcag

SEQ ID NO: 1521844 - RNA, 19 nt, Artificial Sequence
  Description of Artificial Sequence: Synthetic oligonucleotide
uggaaaucguaguacuuag

SEQ ID NO: 1521845 - RNA, 19 nt, Artificial Sequence
  Description of Artificial Sequence: Synthetic oligonucleotide
aaguagcucaucccggaag

SEQ ID NO: 1521846 - RNA, 19 nt, Artificial Sequence
  Description of Artificial Sequence: Synthetic oligonucleotide
agaacauccauccgaauaa

SEQ ID NO: 1521847 - RNA, 19 nt, Artificial Sequence
  Description of Artificial Sequence: Synthetic oligonucleotide
uagaaagcuucucuggcca

SEQ ID NO: 1521848 - RNA, 19 nt, Artificial Sequence
  Description of Artificial Sequence: Synthetic oligonucleotide
gaucuucguagauuucugg

SEQ ID NO: 1521849 - RNA, 19 nt, Artificial Sequence
  Description of Artificial Sequence: Synthetic oligonucleotide
agcauuauaagccggcaga

SEQ ID NO: 1521850 - RNA, 19 nt, Artificial Sequence
  Description of Artificial Sequence: Synthetic oligonucleotide
cuuaguccaguauacgcag

SEQ ID NO: 1521851 - RNA, 19 nt, Artificial Sequence
  Description of Artificial Sequence: Synthetic oligonucleotide
uuugcucagagugucagug

SEQ ID NO: 1521852 - RNA, 19 nt, Artificial Sequence
  Description of Artificial Sequence: Synthetic oligonucleotide
ucuacuuccuaaguuguug

SEQ ID NO: 1521853 - RNA, 19 nt, Artificial Sequence
  Description of Artificial Sequence: Synthetic oligonucleotide
caaagcauuauaagccggc

SEQ ID NO: 1521854 - RNA, 19 nt, Artificial Sequence
  Description of Artificial Sequence: Synthetic oligonucleotide
ugauucucugugcaaggcc

SEQ ID NO: 1521855 - RNA, 19 nt, Artificial Sequence
  Description of Artificial Sequence: Synthetic oligonucleotide
uccgauagggucuucuggc

SEQ ID NO: 1521856 - RNA, 19 nt, Artificial Sequence
  Description of Artificial Sequence: Synthetic oligonucleotide
uugaaguuuucgcugcucu

SEQ ID NO: 1521857 - RNA, 19 nt, Artificial Sequence
  Description of Artificial Sequence: Synthetic oligonucleotide
agaugguagcgccaggguc

SEQ ID NO: 1521858 - RNA, 19 nt, Artificial Sequence
  Description of Artificial Sequence: Synthetic oligonucleotide
uucuaugcuuacuucucag

SEQ ID NO: 1521859 - RNA, 19 nt, Artificial Sequence
  Description of Artificial Sequence: Synthetic oligonucleotide
aacagggcggcuuuucaca

SEQ ID NO: 1521860 - RNA, 19 nt, Artificial Sequence
  Description of Artificial Sequence: Synthetic oligonucleotide
ucaccugaauuucucuugc

SEQ ID NO: 1521861 - RNA, 19 nt, Artificial Sequence
  Description of Artificial Sequence: Synthetic oligonucleotide
uuggcgagaacuccccggg

SEQ ID NO: 1521862 - RNA, 19 nt, Artificial Sequence
  Description of Artificial Sequence: Synthetic oligonucleotide
aacuucacuagccggagua

SEQ ID NO: 1521863 - RNA, 19 nt, Artificial Sequence
  Description of Artificial Sequence: Synthetic oligonucleotide
ugucccuccaagugaaucc

SEQ ID NO: 1521864 - RNA, 19 nt, Artificial Sequence
  Description of Artificial Sequence: Synthetic oligonucleotide
caucucugcaggaucaccc

SEQ ID NO: 1521865 - RNA, 19 nt, Artificial Sequence
  Description of Artificial Sequence: Synthetic oligonucleotide
cuuauuagaucuucguaga

SEQ ID NO: 1521866 - RNA, 19 nt, Artificial Sequence
  Description of Artificial Sequence: Synthetic oligonucleotide
uuagagaauaucccauaau

SEQ ID NO: 1521867 - RNA, 19 nt, Artificial Sequence
  Description of Artificial Sequence: Synthetic oligonucleotide
aauccgauagggucuucug

SEQ ID NO: 1521868 - RNA, 19 nt, Artificial Sequence
  Description of Artificial Sequence: Synthetic oligonucleotide
agcaccugauucucugugc

SEQ ID NO: 1521869 - RNA, 19 nt, Artificial Sequence
  Description of Artificial Sequence: Synthetic oligonucleotide
ggaaagaggaucccaaagc

SEQ ID NO: 1521870 - RNA, 19 nt, Artificial Sequence
  Description of Artificial Sequence: Synthetic oligonucleotide
ugagaaguugccucucccc

SEQ ID NO: 1521871 - RNA, 19 nt, Artificial Sequence
  Description of Artificial Sequence: Synthetic oligonucleotide
caagucucgggaaagagga

SEQ ID NO: 1521872 - RNA, 19 nt, Artificial Sequence
  Description of Artificial Sequence: Synthetic oligonucleotide
gguaccagaacuucacuag

SEQ ID NO: 1521873 - RNA, 19 nt, Artificial Sequence
  Description of Artificial Sequence: Synthetic oligonucleotide
auagaugguagcgccaggg

SEQ ID NO: 1521874 - RNA, 19 nt, Artificial Sequence
  Description of Artificial Sequence: Synthetic oligonucleotide
uuauaagccggcagaacau

SEQ ID NO: 1521875 - RNA, 19 nt, Artificial Sequence
  Description of Artificial Sequence: Synthetic oligonucleotide
guagaaagcuucucuggcc

SEQ ID NO: 1521876 - RNA, 19 nt, Artificial Sequence
  Description of Artificial Sequence: Synthetic oligonucleotide
ggcuacaaacccuucaucc

SEQ ID NO: 1521877 - RNA, 19 nt, Artificial Sequence
  Description of Artificial Sequence: Synthetic oligonucleotide
aauugaaguuuucgcugcu

SEQ ID NO: 1521878 - RNA, 19 nt, Artificial Sequence
  Description of Artificial Sequence: Synthetic oligonucleotide
auccgauagggucuucugg

SEQ ID NO: 1521879 - RNA, 19 nt, Artificial Sequence
  Description of Artificial Sequence: Synthetic oligonucleotide
uccuuauuagaucuucgua

SEQ ID NO: 1521880 - RNA, 19 nt, Artificial Sequence
  Description of Artificial Sequence: Synthetic oligonucleotide
cagagaauauuugggaggc

SEQ ID NO: 1521881 - RNA, 19 nt, Artificial Sequence
  Description of Artificial Sequence: Synthetic oligonucleotide
uccagaaguagcucauccc

SEQ ID NO: 1521882 - RNA, 19 nt, Artificial Sequence
  Description of Artificial Sequence: Synthetic oligonucleotide
aaguuuucgcugcucucug

SEQ ID NO: 1521883 - RNA, 19 nt, Artificial Sequence
  Description of Artificial Sequence: Synthetic oligonucleotide
agcaccuugacuucuuggu

SEQ ID NO: 1521884 - RNA, 19 nt, Artificial Sequence
  Description of Artificial Sequence: Synthetic oligonucleotide
gcugcaacgaucuuucagc

SEQ ID NO: 1521885 - RNA, 19 nt, Artificial Sequence
  Description of Artificial Sequence: Synthetic oligonucleotide
cauuaguccuuauuagauc

SEQ ID NO: 1521886 - RNA, 19 nt, Artificial Sequence
  Description of Artificial Sequence: Synthetic oligonucleotide
aggaucacccugucccucc

SEQ ID NO: 1521887 - RNA, 19 nt, Artificial Sequence
  Description of Artificial Sequence: Synthetic oligonucleotide
guauacgcagaugucuugg

SEQ ID NO: 1521888 - RNA, 19 nt, Artificial Sequence
  Description of Artificial Sequence: Synthetic oligonucleotide
aaagcauuauaagccggca

SEQ ID NO: 1521889 - RNA, 19 nt, Artificial Sequence
  Description of Artificial Sequence: Synthetic oligonucleotide
auaagccggcagaacaucc

SEQ ID NO: 1521890 - RNA, 19 nt, Artificial Sequence
  Description of Artificial Sequence: Synthetic oligonucleotide
ugaagcuuggcgagaacuc

SEQ ID NO: 1521891 - RNA, 19 nt, Artificial Sequence
  Description of Artificial Sequence: Synthetic oligonucleotide
ucagugcuuuugcucagag

SEQ ID NO: 1521892 - RNA, 19 nt, Artificial Sequence
  Description of Artificial Sequence: Synthetic oligonucleotide
uuauuagaucuucguagau

SEQ ID NO: 1521893 - RNA, 19 nt, Artificial Sequence
  Description of Artificial Sequence: Synthetic oligonucleotide
gaaaguuuccaacgacuuc

SEQ ID NO: 1521894 - RNA, 19 nt, Artificial Sequence
  Description of Artificial Sequence: Synthetic oligonucleotide
gaaggaaccucucaauucu

SEQ ID NO: 1521895 - RNA, 19 nt, Artificial Sequence
  Description of Artificial Sequence: Synthetic oligonucleotide
cuucguagauuucuggguc

SEQ ID NO: 1521896 - RNA, 19 nt, Artificial Sequence
  Description of Artificial Sequence: Synthetic oligonucleotide
agauccugugguucagccg

SEQ ID NO: 1521897 - RNA, 19 nt, Artificial Sequence
  Description of Artificial Sequence: Synthetic oligonucleotide
cucaauucucucccaggcg

SEQ ID NO: 1521898 - RNA, 19 nt, Artificial Sequence
  Description of Artificial Sequence: Synthetic oligonucleotide
uuuggaaaucguaguacuu

SEQ ID NO: 1521899 - RNA, 19 nt, Artificial Sequence
  Description of Artificial Sequence: Synthetic oligonucleotide
uucacuagccggaguaggu

SEQ ID NO: 1521900 - RNA, 19 nt, Artificial Sequence
  Description of Artificial Sequence: Synthetic oligonucleotide
uccccuuucccgaggagcc

SEQ ID NO: 1521901 - RNA, 19 nt, Artificial Sequence
  Description of Artificial Sequence: Synthetic oligonucleotide
agaaagcuucucuggccac

SEQ ID NO: 1521902 - RNA, 19 nt, Artificial Sequence
  Description of Artificial Sequence: Synthetic oligonucleotide
uagguucuucaguuuaaca

SEQ ID NO: 1521903 - RNA, 19 nt, Artificial Sequence
  Description of Artificial Sequence: Synthetic oligonucleotide
aguauacgcagaugucuug

SEQ ID NO: 1521904 - RNA, 19 nt, Artificial Sequence
  Description of Artificial Sequence: Synthetic oligonucleotide
uuggaaaucguaguacuua

SEQ ID NO: 1521905 - RNA, 19 nt, Artificial Sequence
  Description of Artificial Sequence: Synthetic oligonucleotide
agggucgauggcauaaggc

SEQ ID NO: 1521906 - RNA, 19 nt, Artificial Sequence
  Description of Artificial Sequence: Synthetic oligonucleotide
uguacccauuucccaggcg

SEQ ID NO: 1521907 - RNA, 19 nt, Artificial Sequence
  Description of Artificial Sequence: Synthetic oligonucleotide
cagagugucaguggcagcc

SEQ ID NO: 1521908 - RNA, 19 nt, Artificial Sequence
  Description of Artificial Sequence: Synthetic oligonucleotide
gaagcuuggcgagaacucc

SEQ ID NO: 1521909 - RNA, 19 nt, Artificial Sequence
  Description of Artificial Sequence: Synthetic oligonucleotide
acuuaguccaguauacgca

SEQ ID NO: 1521910 - RNA, 19 nt, Artificial Sequence
  Description of Artificial Sequence: Synthetic oligonucleotide
cagcuguuguuugagaaag

SEQ ID NO: 1521911 - RNA, 19 nt, Artificial Sequence
  Description of Artificial Sequence: Synthetic oligonucleotide
uuccccuucaguucauaga

SEQ ID NO: 1521912 - RNA, 19 nt, Artificial Sequence
  Description of Artificial Sequence: Synthetic oligonucleotide
guaccagaacuucacuagc

SEQ ID NO: 1521913 - RNA, 19 nt, Artificial Sequence
  Description of Artificial Sequence: Synthetic oligonucleotide
uguuucacugucaccugaa

SEQ ID NO: 1521914 - RNA, 19 nt, Artificial Sequence
  Description of Artificial Sequence: Synthetic oligonucleotide
uucguagauuucugggucu

SEQ ID NO: 1521915 - RNA, 19 nt, Artificial Sequence
  Description of Artificial Sequence: Synthetic oligonucleotide
gaucagauccugugguuca

SEQ ID NO: 1521916 - RNA, 19 nt, Artificial Sequence
  Description of Artificial Sequence: Synthetic oligonucleotide
uaagccggcagaacaucca

SEQ ID NO: 1521917 - RNA, 19 nt, Artificial Sequence
  Description of Artificial Sequence: Synthetic oligonucleotide
guuuccaacgacuucauuu

SEQ ID NO: 1521918 - RNA, 19 nt, Artificial Sequence
  Description of Artificial Sequence: Synthetic oligonucleotide
ugguaccagaacuucacua

SEQ ID NO: 1521919 - RNA, 19 nt, Artificial Sequence
  Description of Artificial Sequence: Synthetic oligonucleotide
augcguagcuccccggagg

SEQ ID NO: 1521920 - RNA, 19 nt, Artificial Sequence
  Description of Artificial Sequence: Synthetic oligonucleotide
gcuauaggggucuacccag

SEQ ID NO: 1521921 - RNA, 19 nt, Artificial Sequence
  Description of Artificial Sequence: Synthetic oligonucleotide
ucgggaaagaggaucccaa

SEQ ID NO: 1521922 - RNA, 19 nt, Artificial Sequence
  Description of Artificial Sequence: Synthetic oligonucleotide
ucccauaauccgauagggu

SEQ ID NO: 1521923 - RNA, 19 nt, Artificial Sequence
  Description of Artificial Sequence: Synthetic oligonucleotide
gaugcguagcuccccggag

SEQ ID NO: 1521924 - RNA, 19 nt, Artificial Sequence
  Description of Artificial Sequence: Synthetic oligonucleotide
aguccuuauuagaucuucg

SEQ ID NO: 1521925 - RNA, 19 nt, Artificial Sequence
  Description of Artificial Sequence: Synthetic oligonucleotide
uccaguauacgcagauguc

SEQ ID NO: 1521926 - RNA, 19 nt, Artificial Sequence
  Description of Artificial Sequence: Synthetic oligonucleotide
guacuuaguccaguauacg

SEQ ID NO: 1521927 - RNA, 19 nt, Artificial Sequence
  Description of Artificial Sequence: Synthetic oligonucleotide
accugauucucugugcaag

SEQ ID NO: 1521928 - RNA, 19 nt, Artificial Sequence
  Description of Artificial Sequence: Synthetic oligonucleotide
cccaaagcauuauaagccg

SEQ ID NO: 1521929 - RNA, 19 nt, Artificial Sequence
  Description of Artificial Sequence: Synthetic oligonucleotide
cagauccugugguucagcc

SEQ ID NO: 1521930 - RNA, 19 nt, Artificial Sequence
  Description of Artificial Sequence: Synthetic oligonucleotide
ccauguccugaucagaucc

SEQ ID NO: 1521931 - RNA, 19 nt, Artificial Sequence
  Description of Artificial Sequence: Synthetic oligonucleotide
uuccaacgacuucauuuug

SEQ ID NO: 1521932 - RNA, 19 nt, Artificial Sequence
  Description of Artificial Sequence: Synthetic oligonucleotide
uauacgcagaugucuuggu

SEQ ID NO: 1521933 - RNA, 19 nt, Artificial Sequence
  Description of Artificial Sequence: Synthetic oligonucleotide
uuaguccaguauacgcaga

SEQ ID NO: 1521934 - RNA, 19 nt, Artificial Sequence
  Description of Artificial Sequence: Synthetic oligonucleotide
cuccagagaauauuuggga

SEQ ID NO: 1521935 - RNA, 19 nt, Artificial Sequence
  Description of Artificial Sequence: Synthetic oligonucleotide
cuucauuuuggaaaucgua

SEQ ID NO: 1521936 - RNA, 19 nt, Artificial Sequence
  Description of Artificial Sequence: Synthetic oligonucleotide
cccauaauccgauaggguc

SEQ ID NO: 1521937 - RNA, 19 nt, Artificial Sequence
  Description of Artificial Sequence: Synthetic oligonucleotide
uacaaacccuucauccaaa

SEQ ID NO: 1521938 - RNA, 19 nt, Artificial Sequence
  Description of Artificial Sequence: Synthetic oligonucleotide
cuucacuagccggaguagg

SEQ ID NO: 1521939 - RNA, 19 nt, Artificial Sequence
  Description of Artificial Sequence: Synthetic oligonucleotide
ugaggagauucaucacggc

SEQ ID NO: 1521940 - RNA, 19 nt, Artificial Sequence
  Description of Artificial Sequence: Synthetic oligonucleotide
ugaaguuuucgcugcucuc

SEQ ID NO: 1521941 - RNA, 19 nt, Artificial Sequence
  Description of Artificial Sequence: Synthetic oligonucleotide
agaacuucacuagccggag

SEQ ID NO: 1521942 - RNA, 19 nt, Artificial Sequence
  Description of Artificial Sequence: Synthetic oligonucleotide
uuagaucuucguagauuuc

SEQ ID NO: 1521943 - RNA, 19 nt, Artificial Sequence
  Description of Artificial Sequence: Synthetic oligonucleotide
uagaugguagcgccagggu

SEQ ID NO: 1521944 - RNA, 19 nt, Artificial Sequence
  Description of Artificial Sequence: Synthetic oligonucleotide
ugucaccugaauuucucuu

SEQ ID NO: 1521945 - RNA, 19 nt, Artificial Sequence
  Description of Artificial Sequence: Synthetic oligonucleotide
gaaagcuucucuggccacc

SEQ ID NO: 1521946 - RNA, 19 nt, Artificial Sequence
  Description of Artificial Sequence: Synthetic oligonucleotide
uguccugaucagauccugu

SEQ ID NO: 1521947 - RNA, 19 nt, Artificial Sequence
  Description of Artificial Sequence: Synthetic oligonucleotide
caccuuagagaauauccca

SEQ ID NO: 1521948 - RNA, 19 nt, Artificial Sequence
  Description of Artificial Sequence: Synthetic oligonucleotide
ggaagcauuggucccgaag

SEQ ID NO: 1521949 - RNA, 19 nt, Artificial Sequence
  Description of Artificial Sequence: Synthetic oligonucleotide
cagauuguucccaagggua

SEQ ID NO: 1521950 - RNA, 19 nt, Artificial Sequence
  Description of Artificial Sequence: Synthetic oligonucleotide
ggugucacagucuuuuauc

SEQ ID NO: 1521951 - RNA, 19 nt, Artificial Sequence
  Description of Artificial Sequence: Synthetic oligonucleotide
uaauccgauagggucuucu

SEQ ID NO: 1521952 - RNA, 19 nt, Artificial Sequence
  Description of Artificial Sequence: Synthetic oligonucleotide
ucaucccggaagcauuggu

SEQ ID NO: 1521953 - RNA, 19 nt, Artificial Sequence
  Description of Artificial Sequence: Synthetic oligonucleotide
ugcuuuugcucagaguguc

SEQ ID NO: 1521954 - RNA, 19 nt, Artificial Sequence
  Description of Artificial Sequence: Synthetic oligonucleotide
caucccggaagcauugguc

SEQ ID NO: 1521955 - RNA, 19 nt, Artificial Sequence
  Description of Artificial Sequence: Synthetic oligonucleotide
auggucaccuuagagaaua

SEQ ID NO: 1521956 - RNA, 19 nt, Artificial Sequence
  Description of Artificial Sequence: Synthetic oligonucleotide
uaguccuuauuagaucuuc

SEQ ID NO: 1521957 - RNA, 19 nt, Artificial Sequence
  Description of Artificial Sequence: Synthetic oligonucleotide
acggcuacaaacccuucau

SEQ ID NO: 1521958 - RNA, 19 nt, Artificial Sequence
  Description of Artificial Sequence: Synthetic oligonucleotide
aguuuaacagggcggcuuu

SEQ ID NO: 1521959 - RNA, 19 nt, Artificial Sequence
  Description of Artificial Sequence: Synthetic oligonucleotide
ucuaggaugaugggccggu

SEQ ID NO: 1521960 - RNA, 19 nt, Artificial Sequence
  Description of Artificial Sequence: Synthetic oligonucleotide
uauaagccggcagaacauc

SEQ ID NO: 1521961 - RNA, 19 nt, Artificial Sequence
  Description of Artificial Sequence: Synthetic oligonucleotide
ugcguagcuccccggaggu

SEQ ID NO: 1521962 - RNA, 19 nt, Artificial Sequence
  Description of Artificial Sequence: Synthetic oligonucleotide
cugggucugguuucaaguc

SEQ ID NO: 1521963 - RNA, 19 nt, Artificial Sequence
  Description of Artificial Sequence: Synthetic oligonucleotide
aguagcuccagagaauauu

SEQ ID NO: 1521964 - RNA, 19 nt, Artificial Sequence
  Description of Artificial Sequence: Synthetic oligonucleotide
cagaacauccauccgaaua

SEQ ID NO: 1521965 - RNA, 19 nt, Artificial Sequence
  Description of Artificial Sequence: Synthetic oligonucleotide
ugguuucaagucucgggaa

SEQ ID NO: 1521966 - RNA, 19 nt, Artificial Sequence
  Description of Artificial Sequence: Synthetic oligonucleotide
ccaaagcauuauaagccgg

SEQ ID NO: 1521967 - RNA, 19 nt, Artificial Sequence
  Description of Artificial Sequence: Synthetic oligonucleotide
gucucgggaaagaggaucc

SEQ ID NO: 1521968 - RNA, 19 nt, Artificial Sequence
  Description of Artificial Sequence: Synthetic oligonucleotide
gagaugcguagcuccccgg

SEQ ID NO: 1521969 - RNA, 19 nt, Artificial Sequence
  Description of Artificial Sequence: Synthetic oligonucleotide
gccggcagaacauccaucc

SEQ ID NO: 1521970 - RNA, 19 nt, Artificial Sequence
  Description of Artificial Sequence: Synthetic oligonucleotide
cauuauaagccggcagaac

SEQ ID NO: 1521971 - RNA, 19 nt, Artificial Sequence
  Description of Artificial Sequence: Synthetic oligonucleotide
agaucuucguagauuucug

SEQ ID NO: 1521972 - RNA, 19 nt, Artificial Sequence
  Description of Artificial Sequence: Synthetic oligonucleotide
uccgaauaaugccgucacu

SEQ ID NO: 1521973 - RNA, 19 nt, Artificial Sequence
  Description of Artificial Sequence: Synthetic oligonucleotide
gauucaucacggcuacaaa

SEQ ID NO: 1521974 - RNA, 19 nt, Artificial Sequence
  Description of Artificial Sequence: Synthetic oligonucleotide
agaugcguagcuccccgga

SEQ ID NO: 1521975 - RNA, 19 nt, Artificial Sequence
  Description of Artificial Sequence: Synthetic oligonucleotide
agcuuggcgagaacucccc

SEQ ID NO: 1521976 - RNA, 19 nt, Artificial Sequence
  Description of Artificial Sequence: Synthetic oligonucleotide
cauagaugguagcgccagg

SEQ ID NO: 1521977 - RNA, 19 nt, Artificial Sequence
  Description of Artificial Sequence: Synthetic oligonucleotide
gaaguuuucgcugcucucu

SEQ ID NO: 1521978 - RNA, 19 nt, Artificial Sequence
  Description of Artificial Sequence: Synthetic oligonucleotide
ccaagugaauccucagugc

SEQ ID NO: 1521979 - RNA, 19 nt, Artificial Sequence
  Description of Artificial Sequence: Synthetic oligonucleotide
cacuagccggaguagguuc

SEQ ID NO: 1521980 - RNA, 19 nt, Artificial Sequence
  Description of Artificial Sequence: Synthetic oligonucleotide
ucguagauuucugggucug

SEQ ID NO: 1521981 - RNA, 19 nt, Artificial Sequence
  Description of Artificial Sequence: Synthetic oligonucleotide
ggucaguagcuccagagaa

SEQ ID NO: 1521982 - RNA, 19 nt, Artificial Sequence
  Description of Artificial Sequence: Synthetic oligonucleotide
acuucacuagccggaguag

SEQ ID NO: 1521983 - RNA, 19 nt, Artificial Sequence
  Description of Artificial Sequence: Synthetic oligonucleotide
accaccuuaagcaccuuga

SEQ ID NO: 1521984 - RNA, 19 nt, Artificial Sequence
  Description of Artificial Sequence: Synthetic oligonucleotide
aggagccucccuucaccac

SEQ ID NO: 1521985 - RNA, 19 nt, Artificial Sequence
  Description of Artificial Sequence: Synthetic oligonucleotide
guacccauuucccaggcgu

SEQ ID NO: 1521986 - RNA, 19 nt, Artificial Sequence
  Description of Artificial Sequence: Synthetic oligonucleotide
cacccugucccuccaagug

SEQ ID NO: 1521987 - RNA, 19 nt, Artificial Sequence
  Description of Artificial Sequence: Synthetic oligonucleotide
uuucccaggcguagauggu

SEQ ID NO: 1521988 - RNA, 19 nt, Artificial Sequence
  Description of Artificial Sequence: Synthetic oligonucleotide
agggcggcuuuucacaaaa

SEQ ID NO: 1521989 - RNA, 19 nt, Artificial Sequence
  Description of Artificial Sequence: Synthetic oligonucleotide
gguuggauccaucucugca

SEQ ID NO: 1521990 - RNA, 19 nt, Artificial Sequence
  Description of Artificial Sequence: Synthetic oligonucleotide
uggcgagaacuccccgggg

SEQ ID NO: 1521991 - RNA, 19 nt, Artificial Sequence
  Description of Artificial Sequence: Synthetic oligonucleotide
ugccgucacucuucccugg

SEQ ID NO: 1521992 - RNA, 19 nt, Artificial Sequence
  Description of Artificial Sequence: Synthetic oligonucleotide
gauggugucacagucuuuu

SEQ ID NO: 1521993 - RNA, 19 nt, Artificial Sequence
  Description of Artificial Sequence: Synthetic oligonucleotide
caagugaauccucagugcu

SEQ ID NO: 1521994 - RNA, 19 nt, Artificial Sequence
  Description of Artificial Sequence: Synthetic oligonucleotide
ggagccucccuucaccacc

SEQ ID NO: 1521995 - RNA, 19 nt, Artificial Sequence
  Description of Artificial Sequence: Synthetic oligonucleotide
ucacccugucccuccaagu

SEQ ID NO: 1521996 - RNA, 19 nt, Artificial Sequence
  Description of Artificial Sequence: Synthetic oligonucleotide
agccggaguagguucuuca

SEQ ID NO: 1521997 - RNA, 19 nt, Artificial Sequence
  Description of Artificial Sequence: Synthetic oligonucleotide
aguuuucgcugcucucugu

SEQ ID NO: 1521998 - RNA, 19 nt, Artificial Sequence
  Description of Artificial Sequence: Synthetic oligonucleotide
gaugaugggccggugucuc

SEQ ID NO: 1521999 - RNA, 19 nt, Artificial Sequence
  Description of Artificial Sequence: Synthetic oligonucleotide
auacgcagaugucuuggua

SEQ ID NO: 1522000 - RNA, 19 nt, Artificial Sequence
  Description of Artificial Sequence: Synthetic oligonucleotide
ggucuaggaugaugggccg

SEQ ID NO: 1522001 - RNA, 19 nt, Artificial Sequence
  Description of Artificial Sequence: Synthetic oligonucleotide
cuguacccauuucccaggc

SEQ ID NO: 1522002 - RNA, 19 nt, Artificial Sequence
  Description of Artificial Sequence: Synthetic oligonucleotide
augccgucacucuucccug

SEQ ID NO: 1522003 - RNA, 19 nt, Artificial Sequence
  Description of Artificial Sequence: Synthetic oligonucleotide
gucacucuucccuggagaa

SEQ ID NO: 1522004 - RNA, 19 nt, Artificial Sequence
  Description of Artificial Sequence: Synthetic oligonucleotide
ugguucagccgucgucccc

SEQ ID NO: 1522005 - RNA, 19 nt, Artificial Sequence
  Description of Artificial Sequence: Synthetic oligonucleotide
aacuccccgggguugccau

SEQ ID NO: 1522006 - RNA, 19 nt, Artificial Sequence
  Description of Artificial Sequence: Synthetic oligonucleotide
aagugaauccucagugcuu

SEQ ID NO: 1522007 - RNA, 19 nt, Artificial Sequence
  Description of Artificial Sequence: Synthetic oligonucleotide
ugcucucuguacccauuuc

SEQ ID NO: 1522008 - RNA, 19 nt, Artificial Sequence
  Description of Artificial Sequence: Synthetic oligonucleotide
ggcuauaggggucuaccca

SEQ ID NO: 1522009 - RNA, 19 nt, Artificial Sequence
  Description of Artificial Sequence: Synthetic oligonucleotide
ucaguuuaacagggcggcu

SEQ ID NO: 1522010 - RNA, 19 nt, Artificial Sequence
  Description of Artificial Sequence: Synthetic oligonucleotide
uacccauuucccaggcgua

SEQ ID NO: 1522011 - RNA, 19 nt, Artificial Sequence
  Description of Artificial Sequence: Synthetic oligonucleotide
agccgucguccccuuuccc

SEQ ID NO: 1522012 - RNA, 19 nt, Artificial Sequence
  Description of Artificial Sequence: Synthetic oligonucleotide
ccaaauugaaguuuucgcu

SEQ ID NO: 1522013 - RNA, 19 nt, Artificial Sequence
  Description of Artificial Sequence: Synthetic oligonucleotide
ccgaauaaugccgucacuc

SEQ ID NO: 1522014 - RNA, 19 nt, Artificial Sequence
  Description of Artificial Sequence: Synthetic oligonucleotide
aggaucccaaagcauuaua

SEQ ID NO: 1522015 - RNA, 19 nt, Artificial Sequence
  Description of Artificial Sequence: Synthetic oligonucleotide
agcgccagggucgauggca

SEQ ID NO: 1522016 - RNA, 19 nt, Artificial Sequence
  Description of Artificial Sequence: Synthetic oligonucleotide
guuuucgcugcucucugua

SEQ ID NO: 1522017 - RNA, 19 nt, Artificial Sequence
  Description of Artificial Sequence: Synthetic oligonucleotide
cauccgaauaaugccguca

SEQ ID NO: 1522018 - RNA, 19 nt, Artificial Sequence
  Description of Artificial Sequence: Synthetic oligonucleotide
aggaaccucucaauucucu

SEQ ID NO: 1522019 - RNA, 19 nt, Artificial Sequence
  Description of Artificial Sequence: Synthetic oligonucleotide
gccgucguccccuuucccg

SEQ ID NO: 1522020 - RNA, 19 nt, Artificial Sequence
  Description of Artificial Sequence: Synthetic oligonucleotide
acccauuucccaggcguag

SEQ ID NO: 1522021 - RNA, 19 nt, Artificial Sequence
  Description of Artificial Sequence: Synthetic oligonucleotide
uucccaggcguagaugguc

SEQ ID NO: 1522022 - RNA, 19 nt, Artificial Sequence
  Description of Artificial Sequence: Synthetic oligonucleotide
ugcaacgaucuuucagcuu

SEQ ID NO: 1522023 - RNA, 19 nt, Artificial Sequence
  Description of Artificial Sequence: Synthetic oligonucleotide
acagggcggcuuuucacaa

SEQ ID NO: 1522024 - RNA, 19 nt, Artificial Sequence
  Description of Artificial Sequence: Synthetic oligonucleotide
ugggccggugucucuucag

SEQ ID NO: 1522025 - RNA, 19 nt, Artificial Sequence
  Description of Artificial Sequence: Synthetic oligonucleotide
cauuucuacuuccuaaguu

SEQ ID NO: 1522026 - RNA, 19 nt, Artificial Sequence
  Description of Artificial Sequence: Synthetic oligonucleotide
ggaucccaaagcauuauaa

SEQ ID NO: 1522027 - RNA, 19 nt, Artificial Sequence
  Description of Artificial Sequence: Synthetic oligonucleotide
uugggaggcaaugcugcuc

SEQ ID NO: 1522028 - RNA, 19 nt, Artificial Sequence
  Description of Artificial Sequence: Synthetic oligonucleotide
cauuucccaggcguagaug

SEQ ID NO: 1522029 - RNA, 19 nt, Artificial Sequence
  Description of Artificial Sequence: Synthetic oligonucleotide
agaacuccccgggguugcc

SEQ ID NO: 1522030 - RNA, 19 nt, Artificial Sequence
  Description of Artificial Sequence: Synthetic oligonucleotide
gguuucaagucucgggaaa

SEQ ID NO: 1522031 - RNA, 19 nt, Artificial Sequence
  Description of Artificial Sequence: Synthetic oligonucleotide
cacggcuacaaacccuuca

SEQ ID NO: 1522032 - RNA, 19 nt, Artificial Sequence
  Description of Artificial Sequence: Synthetic oligonucleotide
ggggcuauaggggucuacc

SEQ ID NO: 1522033 - RNA, 19 nt, Artificial Sequence
  Description of Artificial Sequence: Synthetic oligonucleotide
guugccauuaguccuuauu

SEQ ID NO: 1522034 - RNA, 19 nt, Artificial Sequence
  Description of Artificial Sequence: Synthetic oligonucleotide
gugaagcuuggcgagaacu

SEQ ID NO: 1522035 - RNA, 19 nt, Artificial Sequence
  Description of Artificial Sequence: Synthetic oligonucleotide
ucacuagccggaguagguu

SEQ ID NO: 1522036 - RNA, 19 nt, Artificial Sequence
  Description of Artificial Sequence: Synthetic oligonucleotide
acuagccggaguagguucu

SEQ ID NO: 1522037 - RNA, 19 nt, Artificial Sequence
  Description of Artificial Sequence: Synthetic oligonucleotide
accucucaauucucuccca

SEQ ID NO: 1522038 - RNA, 19 nt, Artificial Sequence
  Description of Artificial Sequence: Synthetic oligonucleotide
cuauaggggucuacccaga

SEQ ID NO: 1522039 - RNA, 19 nt, Artificial Sequence
  Description of Artificial Sequence: Synthetic oligonucleotide
agaggaucccaaagcauua

SEQ ID NO: 1522040 - RNA, 19 nt, Artificial Sequence
  Description of Artificial Sequence: Synthetic oligonucleotide
agagaauauuugggaggca

SEQ ID NO: 1522041 - RNA, 19 nt, Artificial Sequence
  Description of Artificial Sequence: Synthetic oligonucleotide
acccggauggucaccuuag

SEQ ID NO: 1522042 - RNA, 19 nt, Artificial Sequence
  Description of Artificial Sequence: Synthetic oligonucleotide
caguacaggucagggguug

SEQ ID NO: 1522043 - RNA, 19 nt, Artificial Sequence
  Description of Artificial Sequence: Synthetic oligonucleotide
cugauggggcuauaggggu

SEQ ID NO: 1522044 - RNA, 19 nt, Artificial Sequence
  Description of Artificial Sequence: Synthetic oligonucleotide
ggaucagcugggucuagga

SEQ ID NO: 1522045 - RNA, 19 nt, Artificial Sequence
  Description of Artificial Sequence: Synthetic oligonucleotide
ccaacgacuucauuuugga

SEQ ID NO: 1522046 - RNA, 19 nt, Artificial Sequence
  Description of Artificial Sequence: Synthetic oligonucleotide
gcaacucugugaagcuugg

SEQ ID NO: 1522047 - RNA, 19 nt, Artificial Sequence
  Description of Artificial Sequence: Synthetic oligonucleotide
gauggggcuauaggggucu

SEQ ID NO: 1522048 - RNA, 19 nt, Artificial Sequence
  Description of Artificial Sequence: Synthetic oligonucleotide
gaugggccggugucucuuc

SEQ ID NO: 1522049 - RNA, 19 nt, Artificial Sequence
  Description of Artificial Sequence: Synthetic oligonucleotide
auaauccgauagggucuuc

SEQ ID NO: 1522050 - RNA, 19 nt, Artificial Sequence
  Description of Artificial Sequence: Synthetic oligonucleotide
ucacggcuacaaacccuuc

SEQ ID NO: 1522051 - RNA, 19 nt, Artificial Sequence
  Description of Artificial Sequence: Synthetic oligonucleotide
agccggcagaacauccauc

SEQ ID NO: 1522052 - RNA, 19 nt, Artificial Sequence
  Description of Artificial Sequence: Synthetic oligonucleotide
ugcugagaaguugccucuc

SEQ ID NO: 1522053 - RNA, 19 nt, Artificial Sequence
  Description of Artificial Sequence: Synthetic oligonucleotide
gcuuggcgagaacuccccg

SEQ ID NO: 1522054 - RNA, 19 nt, Artificial Sequence
  Description of Artificial Sequence: Synthetic oligonucleotide
gcaccuugacuucuugguc

SEQ ID NO: 1522055 - RNA, 19 nt, Artificial Sequence
  Description of Artificial Sequence: Synthetic oligonucleotide
ugaugggccggugucucuu

SEQ ID NO: 1522056 - RNA, 19 nt, Artificial Sequence
  Description of Artificial Sequence: Synthetic oligonucleotide
ccgcugaggauuccagucc

SEQ ID NO: 1522057 - RNA, 19 nt, Artificial Sequence
  Description of Artificial Sequence: Synthetic oligonucleotide
augggccggugucucuuca

SEQ ID NO: 1522058 - RNA, 19 nt, Artificial Sequence
  Description of Artificial Sequence: Synthetic oligonucleotide
uccccgggguugccauuag

SEQ ID NO: 1522059 - RNA, 19 nt, Artificial Sequence
  Description of Artificial Sequence: Synthetic oligonucleotide
caguauacgcagaugucuu

SEQ ID NO: 1522060 - RNA, 19 nt, Artificial Sequence
  Description of Artificial Sequence: Synthetic oligonucleotide
caucacggcuacaaacccu

SEQ ID NO: 1522061 - RNA, 19 nt, Artificial Sequence
  Description of Artificial Sequence: Synthetic oligonucleotide
ccauaauccgauagggucu

SEQ ID NO: 1522062 - RNA, 19 nt, Artificial Sequence
  Description of Artificial Sequence: Synthetic oligonucleotide
ccaccuuaagcaccuugac

SEQ ID NO: 1522063 - RNA, 19 nt, Artificial Sequence
  Description of Artificial Sequence: Synthetic oligonucleotide
acgaagugguccagauugu

SEQ ID NO: 1522064 - RNA, 19 nt, Artificial Sequence
  Description of Artificial Sequence: Synthetic oligonucleotide
cauguccugaucagauccu

SEQ ID NO: 1522065 - RNA, 19 nt, Artificial Sequence
  Description of Artificial Sequence: Synthetic oligonucleotide
gcauuauaagccggcagaa

SEQ ID NO: 1522066 - RNA, 19 nt, Artificial Sequence
  Description of Artificial Sequence: Synthetic oligonucleotide
gaacuucacuagccggagu

SEQ ID NO: 1522067 - RNA, 19 nt, Artificial Sequence
  Description of Artificial Sequence: Synthetic oligonucleotide
cuaggaugaugggccggug

SEQ ID NO: 1522068 - RNA, 19 nt, Artificial Sequence
  Description of Artificial Sequence: Synthetic oligonucleotide
uagcgccagggucgauggc

SEQ ID NO: 1522069 - RNA, 19 nt, Artificial Sequence
  Description of Artificial Sequence: Synthetic oligonucleotide
cugucaccugaauuucucu

SEQ ID NO: 1522070 - RNA, 19 nt, Artificial Sequence
  Description of Artificial Sequence: Synthetic oligonucleotide
uggggcuauaggggucuac

SEQ ID NO: 1522071 - RNA, 19 nt, Artificial Sequence
  Description of Artificial Sequence: Synthetic oligonucleotide
guagcuccccggaggugcc

SEQ ID NO: 1522072 - RNA, 19 nt, Artificial Sequence
  Description of Artificial Sequence: Synthetic oligonucleotide
gaacauccauccgaauaau

SEQ ID NO: 1522073 - RNA, 19 nt, Artificial Sequence
  Description of Artificial Sequence: Synthetic oligonucleotide
augguagcgccagggucga

SEQ ID NO: 1522074 - RNA, 19 nt, Artificial Sequence
  Description of Artificial Sequence: Synthetic oligonucleotide
caccugauucucugugcaa

SEQ ID NO: 1522075 - RNA, 19 nt, Artificial Sequence
  Description of Artificial Sequence: Synthetic oligonucleotide
aggcugcaacgaucuuuca

SEQ ID NO: 1522076 - RNA, 19 nt, Artificial Sequence
  Description of Artificial Sequence: Synthetic oligonucleotide
gagauucaucacggcuaca

SEQ ID NO: 1522077 - RNA, 19 nt, Artificial Sequence
  Description of Artificial Sequence: Synthetic oligonucleotide
ccugaucagauccuguggu

SEQ ID NO: 1522078 - RNA, 19 nt, Artificial Sequence
  Description of Artificial Sequence: Synthetic oligonucleotide
uagccggaguagguucuuc

SEQ ID NO: 1522079 - RNA, 19 nt, Artificial Sequence
  Description of Artificial Sequence: Synthetic oligonucleotide
ccaguauacgcagaugucu

SEQ ID NO: 1522080 - RNA, 19 nt, Artificial Sequence
  Description of Artificial Sequence: Synthetic oligonucleotide
gaacuccccgggguugcca

SEQ ID NO: 1522081 - RNA, 19 nt, Artificial Sequence
  Description of Artificial Sequence: Synthetic oligonucleotide
gaggaucccaaagcauuau

SEQ ID NO: 1522082 - RNA, 19 nt, Artificial Sequence
  Description of Artificial Sequence: Synthetic oligonucleotide
uccccggaggugccauuuu

SEQ ID NO: 1522083 - RNA, 19 nt, Artificial Sequence
  Description of Artificial Sequence: Synthetic oligonucleotide
caacgaucuuucagcuucu

SEQ ID NO: 1522084 - RNA, 19 nt, Artificial Sequence
  Description of Artificial Sequence: Synthetic oligonucleotide
gauggucaccuuagagaau

SEQ ID NO: 1522085 - RNA, 19 nt, Artificial Sequence
  Description of Artificial Sequence: Synthetic oligonucleotide
cauaauccgauagggucuu

SEQ ID NO: 1522086 - RNA, 19 nt, Artificial Sequence
  Description of Artificial Sequence: Synthetic oligonucleotide
ggaaaucguaguacuuagu

SEQ ID NO: 1522087 - RNA, 19 nt, Artificial Sequence
  Description of Artificial Sequence: Synthetic oligonucleotide
cacccggauggucaccuua

SEQ ID NO: 1522088 - RNA, 19 nt, Artificial Sequence
  Description of Artificial Sequence: Synthetic oligonucleotide
caccugaauuucucuugcu

SEQ ID NO: 1522089 - RNA, 19 nt, Artificial Sequence
  Description of Artificial Sequence: Synthetic oligonucleotide
ucuuccugauggggcuaua

SEQ ID NO: 1522090 - RNA, 19 nt, Artificial Sequence
  Description of Artificial Sequence: Synthetic oligonucleotide
cccaacaucagcaccugau

SEQ ID NO: 1522091 - RNA, 19 nt, Artificial Sequence
  Description of Artificial Sequence: Synthetic oligonucleotide
ccaggcguccugcccuucc

SEQ ID NO: 1522092 - RNA, 19 nt, Artificial Sequence
  Description of Artificial Sequence: Synthetic oligonucleotide
ucccaggcguccugcccuu

SEQ ID NO: 1522093 - RNA, 19 nt, Artificial Sequence
  Description of Artificial Sequence: Synthetic oligonucleotide
cgaauaaugccgucacucu

SEQ ID NO: 1522094 - RNA, 19 nt, Artificial Sequence
  Description of Artificial Sequence: Synthetic oligonucleotide
gguucagccgucguccccu

SEQ ID NO: 1522095 - RNA, 19 nt, Artificial Sequence
  Description of Artificial Sequence: Synthetic oligonucleotide
gccagggucgauggcauaa

SEQ ID NO: 1522096 - RNA, 19 nt, Artificial Sequence
  Description of Artificial Sequence: Synthetic oligonucleotide
ccgucacucuucccuggag

SEQ ID NO: 1522097 - RNA, 19 nt, Artificial Sequence
  Description of Artificial Sequence: Synthetic oligonucleotide
ggaguagguucuucaguuu

SEQ ID NO: 1522098 - RNA, 19 nt, Artificial Sequence
  Description of Artificial Sequence: Synthetic oligonucleotide
ccauuucuacuuccuaagu

SEQ ID NO: 1522099 - RNA, 19 nt, Artificial Sequence
  Description of Artificial Sequence: Synthetic oligonucleotide
cgucacucuucccuggaga

SEQ ID NO: 1522100 - RNA, 19 nt, Artificial Sequence
  Description of Artificial Sequence: Synthetic oligonucleotide
ggauccaucucugcaggau

SEQ ID NO: 1522101 - RNA, 19 nt, Artificial Sequence
  Description of Artificial Sequence: Synthetic oligonucleotide
cagggcggcuuuucacaaa

SEQ ID NO: 1522102 - RNA, 19 nt, Artificial Sequence
  Description of Artificial Sequence: Synthetic oligonucleotide
ggucgauggcauaaggcuu

SEQ ID NO: 1522103 - RNA, 19 nt, Artificial Sequence
  Description of Artificial Sequence: Synthetic oligonucleotide
gccgucacucuucccugga

SEQ ID NO: 1522104 - RNA, 19 nt, Artificial Sequence
  Description of Artificial Sequence: Synthetic oligonucleotide
ccgucguccccuuucccga

SEQ ID NO: 1522105 - RNA, 19 nt, Artificial Sequence
  Description of Artificial Sequence: Synthetic oligonucleotide
ggucccgaaggaaccucuc

SEQ ID NO: 1522106 - RNA, 19 nt, Artificial Sequence
  Description of Artificial Sequence: Synthetic oligonucleotide
ggaugaugggccggugucu

SEQ ID NO: 1522107 - RNA, 19 nt, Artificial Sequence
  Description of Artificial Sequence: Synthetic oligonucleotide
cggcuacaaacccuucauc

SEQ ID NO: 1522108 - RNA, 19 nt, Artificial Sequence
  Description of Artificial Sequence: Synthetic oligonucleotide
cgagaacuccccgggguug

SEQ ID NO: 1522109 - RNA, 19 nt, Artificial Sequence
  Description of Artificial Sequence: Synthetic oligonucleotide
guuuaacagggcggcuuuu

SEQ ID NO: 1522110 - RNA, 19 nt, Artificial Sequence
  Description of Artificial Sequence: Synthetic oligonucleotide
cgggguugccauuaguccu

SEQ ID NO: 1522111 - RNA, 19 nt, Artificial Sequence
  Description of Artificial Sequence: Synthetic oligonucleotide
cgucguccccuuucccgag

SEQ ID NO: 1522112 - RNA, 19 nt, Artificial Sequence
  Description of Artificial Sequence: Synthetic oligonucleotide
ccgauagggucuucuggcu

SEQ ID NO: 1522113 - RNA, 19 nt, Artificial Sequence
  Description of Artificial Sequence: Synthetic oligonucleotide
cccauuucccaggcguaga

SEQ ID NO: 1522114 - RNA, 19 nt, Artificial Sequence
  Description of Artificial Sequence: Synthetic oligonucleotide
cccgaaggaaccucucaau

SEQ ID NO: 1522115 - RNA, 19 nt, Artificial Sequence
  Description of Artificial Sequence: Synthetic oligonucleotide
gcgagaacuccccgggguu

SEQ ID NO: 1522116 - RNA, 19 nt, Artificial Sequence
  Description of Artificial Sequence: Synthetic oligonucleotide
cccggauggucaccuuaga

SEQ ID NO: 1522117 - RNA, 19 nt, Artificial Sequence
  Description of Artificial Sequence: Synthetic oligonucleotide
cgacuucauuuuggaaauc

SEQ ID NO: 1522118 - RNA, 19 nt, Artificial Sequence
  Description of Artificial Sequence: Synthetic oligonucleotide
gguugccauuaguccuuau

SEQ ID NO: 1522119 - RNA, 19 nt, Artificial Sequence
  Description of Artificial Sequence: Synthetic oligonucleotide
cuagccggaguagguucuu

SEQ ID NO: 1522120 - RNA, 19 nt, Artificial Sequence
  Description of Artificial Sequence: Synthetic oligonucleotide
gcugcucucuguacccauu

SEQ ID NO: 1522121 - RNA, 19 nt, Artificial Sequence
  Description of Artificial Sequence: Synthetic oligonucleotide
cagagccuccagguuucuu

SEQ ID NO: 1522122 - RNA, 19 nt, Artificial Sequence
  Description of Artificial Sequence: Synthetic oligonucleotide
gcgccagggucgauggcau

SEQ ID NO: 1522123 - RNA, 19 nt, Artificial Sequence
  Description of Artificial Sequence: Synthetic oligonucleotide
aaauauauaaaacagagcc

SEQ ID NO: 1522124 - RNA, 19 nt, Artificial Sequence
  Description of Artificial Sequence: Synthetic oligonucleotide
aaucuaagagcacagaugc

SEQ ID NO: 1522125 - RNA, 19 nt, Artificial Sequence
  Description of Artificial Sequence: Synthetic oligonucleotide
aacagugcaaucuaagagc

SEQ ID NO: 1522126 - RNA, 19 nt, Artificial Sequence
  Description of Artificial Sequence: Synthetic oligonucleotide
auaucuacaccauucaggc

SEQ ID NO: 1522127 - RNA, 19 nt, Artificial Sequence
  Description of Artificial Sequence: Synthetic oligonucleotide
gaaucaacccaauagaggc

SEQ ID NO: 1522128 - RNA, 19 nt, Artificial Sequence
  Description of Artificial Sequence: Synthetic oligonucleotide
cuugcuuugagcaacacag

SEQ ID NO: 1522129 - RNA, 19 nt, Artificial Sequence
  Description of Artificial Sequence: Synthetic oligonucleotide
accaaauuaacaucugagc

SEQ ID NO: 1522130 - RNA, 19 nt, Artificial Sequence
  Description of Artificial Sequence: Synthetic oligonucleotide
ucauuuaugacauccgucc

SEQ ID NO: 1522131 - RNA, 19 nt, Artificial Sequence
  Description of Artificial Sequence: Synthetic oligonucleotide
ucaucuuccaaaauggucu

SEQ ID NO: 1522132 - RNA, 19 nt, Artificial Sequence
  Description of Artificial Sequence: Synthetic oligonucleotide
acuggaagccgacugaucc

SEQ ID NO: 1522133 - RNA, 19 nt, Artificial Sequence
  Description of Artificial Sequence: Synthetic oligonucleotide
agugugaugccauuuggcc

SEQ ID NO: 1522134 - RNA, 19 nt, Artificial Sequence
  Description of Artificial Sequence: Synthetic oligonucleotide
aauuguggcaauucuaagu

SEQ ID NO: 1522135 - RNA, 19 nt, Artificial Sequence
  Description of Artificial Sequence: Synthetic oligonucleotide
aaaauggucuuccgauugc

SEQ ID NO: 1522136 - RNA, 19 nt, Artificial Sequence
  Description of Artificial Sequence: Synthetic oligonucleotide
ucuuaucuugcuuugagca

SEQ ID NO: 1522137 - RNA, 19 nt, Artificial Sequence
  Description of Artificial Sequence: Synthetic oligonucleotide
agggugauggacaagaccc

SEQ ID NO: 1522138 - RNA, 19 nt, Artificial Sequence
  Description of Artificial Sequence: Synthetic oligonucleotide
uguucaugccacaucaucc

SEQ ID NO: 1522139 - RNA, 19 nt, Artificial Sequence
  Description of Artificial Sequence: Synthetic oligonucleotide
uaaauuguggcaauucuaa

SEQ ID NO: 1522140 - RNA, 19 nt, Artificial Sequence
  Description of Artificial Sequence: Synthetic oligonucleotide
aaauuaacaucugagccug

SEQ ID NO: 1522141 - RNA, 19 nt, Artificial Sequence
  Description of Artificial Sequence: Synthetic oligonucleotide
aaggaggaugaccagugcg

SEQ ID NO: 1522142 - RNA, 19 nt, Artificial Sequence
  Description of Artificial Sequence: Synthetic oligonucleotide
ucuaagagcacagaugcag

SEQ ID NO: 1522143 - RNA, 19 nt, Artificial Sequence
  Description of Artificial Sequence: Synthetic oligonucleotide
aagagaagguucucacagc

SEQ ID NO: 1522144 - RNA, 19 nt, Artificial Sequence
  Description of Artificial Sequence: Synthetic oligonucleotide
ugaggauugaucugugggg

SEQ ID NO: 1522145 - RNA, 19 nt, Artificial Sequence
  Description of Artificial Sequence: Synthetic oligonucleotide
uuggaaucaacccaauaga

SEQ ID NO: 1522146 - RNA, 19 nt, Artificial Sequence
  Description of Artificial Sequence: Synthetic oligonucleotide
gugaucucaggccugaugg

SEQ ID NO: 1522147 - RNA, 19 nt, Artificial Sequence
  Description of Artificial Sequence: Synthetic oligonucleotide
ugaauuuuggggagugagg

SEQ ID NO: 1522148 - RNA, 19 nt, Artificial Sequence
  Description of Artificial Sequence: Synthetic oligonucleotide
aaagugcgaagagagaauc

SEQ ID NO: 1522149 - RNA, 19 nt, Artificial Sequence
  Description of Artificial Sequence: Synthetic oligonucleotide
caaugcuggagauagagug

SEQ ID NO: 1522150 - RNA, 19 nt, Artificial Sequence
  Description of Artificial Sequence: Synthetic oligonucleotide
acaucugagccugugaggc

SEQ ID NO: 1522151 - RNA, 19 nt, Artificial Sequence
  Description of Artificial Sequence: Synthetic oligonucleotide
agugcgaagagagaauccc

SEQ ID NO: 1522152 - RNA, 19 nt, Artificial Sequence
  Description of Artificial Sequence: Synthetic oligonucleotide
aaauuguggcaauucuaag

SEQ ID NO: 1522153 - RNA, 19 nt, Artificial Sequence
  Description of Artificial Sequence: Synthetic oligonucleotide
agcaacacaguguucacag

SEQ ID NO: 1522154 - RNA, 19 nt, Artificial Sequence
  Description of Artificial Sequence: Synthetic oligonucleotide
uggaguuuggaaucaaccc

SEQ ID NO: 1522155 - RNA, 19 nt, Artificial Sequence
  Description of Artificial Sequence: Synthetic oligonucleotide
uuacccgugugauaaauug

SEQ ID NO: 1522156 - RNA, 19 nt, Artificial Sequence
  Description of Artificial Sequence: Synthetic oligonucleotide
uaaaacagagccuggggca

SEQ ID NO: 1522157 - RNA, 19 nt, Artificial Sequence
  Description of Artificial Sequence: Synthetic oligonucleotide
aagagagacugccacuguc

SEQ ID NO: 1522158 - RNA, 19 nt, Artificial Sequence
  Description of Artificial Sequence: Synthetic oligonucleotide
uuuaugcuguugauguucc

SEQ ID NO: 1522159 - RNA, 19 nt, Artificial Sequence
  Description of Artificial Sequence: Synthetic oligonucleotide
agucauccaacacaccacg

SEQ ID NO: 1522160 - RNA, 19 nt, Artificial Sequence
  Description of Artificial Sequence: Synthetic oligonucleotide
aaugucucugggucuggac

SEQ ID NO: 1522161 - RNA, 19 nt, Artificial Sequence
  Description of Artificial Sequence: Synthetic oligonucleotide
aggaugaccagugcgaugg

SEQ ID NO: 1522162 - RNA, 19 nt, Artificial Sequence
  Description of Artificial Sequence: Synthetic oligonucleotide
guugauguuccucagccgc

SEQ ID NO: 1522163 - RNA, 19 nt, Artificial Sequence
  Description of Artificial Sequence: Synthetic oligonucleotide
uggaguucaucuucugugg

SEQ ID NO: 1522164 - RNA, 19 nt, Artificial Sequence
  Description of Artificial Sequence: Synthetic oligonucleotide
ggaauaucuagugugaugc

SEQ ID NO: 1522165 - RNA, 19 nt, Artificial Sequence
  Description of Artificial Sequence: Synthetic oligonucleotide
acaagagguuuucagccac

SEQ ID NO: 1522166 - RNA, 19 nt, Artificial Sequence
  Description of Artificial Sequence: Synthetic oligonucleotide
auugacaucaaugcuggag

SEQ ID NO: 1522167 - RNA, 19 nt, Artificial Sequence
  Description of Artificial Sequence: Synthetic oligonucleotide
agaagguucucacagcugu

SEQ ID NO: 1522168 - RNA, 19 nt, Artificial Sequence
  Description of Artificial Sequence: Synthetic oligonucleotide
ccaaauuaacaucugagcc

SEQ ID NO: 1522169 - RNA, 19 nt, Artificial Sequence
  Description of Artificial Sequence: Synthetic oligonucleotide
aauaucuagugugaugcca

SEQ ID NO: 1522170 - RNA, 19 nt, Artificial Sequence
  Description of Artificial Sequence: Synthetic oligonucleotide
caaucuaagagcacagaug

SEQ ID NO: 1522171 - RNA, 19 nt, Artificial Sequence
  Description of Artificial Sequence: Synthetic oligonucleotide
auagaguggaguuuggaau

SEQ ID NO: 1522172 - RNA, 19 nt, Artificial Sequence
  Description of Artificial Sequence: Synthetic oligonucleotide
uccaaaauggucuuccgau

SEQ ID NO: 1522173 - RNA, 19 nt, Artificial Sequence
  Description of Artificial Sequence: Synthetic oligonucleotide
ugcgaagagagaaucccag

SEQ ID NO: 1522174 - RNA, 19 nt, Artificial Sequence
  Description of Artificial Sequence: Synthetic oligonucleotide
cucugaacuggaaaagugc

SEQ ID NO: 1522175 - RNA, 19 nt, Artificial Sequence
  Description of Artificial Sequence: Synthetic oligonucleotide
ugugaugccauuuggccac

SEQ ID NO: 1522176 - RNA, 19 nt, Artificial Sequence
  Description of Artificial Sequence: Synthetic oligonucleotide
uucauuuaugacauccguc

SEQ ID NO: 1522177 - RNA, 19 nt, Artificial Sequence
  Description of Artificial Sequence: Synthetic oligonucleotide
uaugacauccguccaaaau

SEQ ID NO: 1522178 - RNA, 19 nt, Artificial Sequence
  Description of Artificial Sequence: Synthetic oligonucleotide
ugacauccguccaaaauac

SEQ ID NO: 1522179 - RNA, 19 nt, Artificial Sequence
  Description of Artificial Sequence: Synthetic oligonucleotide
aacaggacaauguccucug

SEQ ID NO: 1522180 - RNA, 19 nt, Artificial Sequence
  Description of Artificial Sequence: Synthetic oligonucleotide
aucaaugcuggagauagag

SEQ ID NO: 1522181 - RNA, 19 nt, Artificial Sequence
  Description of Artificial Sequence: Synthetic oligonucleotide
ucagucaccagcgaguaga

SEQ ID NO: 1522182 - RNA, 19 nt, Artificial Sequence
  Description of Artificial Sequence: Synthetic oligonucleotide
uccaacacaccacggaaca

SEQ ID NO: 1522183 - RNA, 19 nt, Artificial Sequence
  Description of Artificial Sequence: Synthetic oligonucleotide
gauggccccaaagacaagg

SEQ ID NO: 1522184 - RNA, 19 nt, Artificial Sequence
  Description of Artificial Sequence: Synthetic oligonucleotide
caaaauggucuuccgauug

SEQ ID NO: 1522185 - RNA, 19 nt, Artificial Sequence
  Description of Artificial Sequence: Synthetic oligonucleotide
uuaacaucugagccuguga

SEQ ID NO: 1522186 - RNA, 19 nt, Artificial Sequence
  Description of Artificial Sequence: Synthetic oligonucleotide
augacauccguccaaaaua

SEQ ID NO: 1522187 - RNA, 19 nt, Artificial Sequence
  Description of Artificial Sequence: Synthetic oligonucleotide
aaucaacccaauagaggcg

SEQ ID NO: 1522188 - RNA, 19 nt, Artificial Sequence
  Description of Artificial Sequence: Synthetic oligonucleotide
ucucacaccaguucacccc

SEQ ID NO: 1522189 - RNA, 19 nt, Artificial Sequence
  Description of Artificial Sequence: Synthetic oligonucleotide
agcuguucaugccacauca

SEQ ID NO: 1522190 - RNA, 19 nt, Artificial Sequence
  Description of Artificial Sequence: Synthetic oligonucleotide
guagauaucuacaccauuc

SEQ ID NO: 1522191 - RNA, 19 nt, Artificial Sequence
  Description of Artificial Sequence: Synthetic oligonucleotide
aauucagucuugagcacag

SEQ ID NO: 1522192 - RNA, 19 nt, Artificial Sequence
  Description of Artificial Sequence: Synthetic oligonucleotide
aucaacccaauagaggcgg

SEQ ID NO: 1522193 - RNA, 19 nt, Artificial Sequence
  Description of Artificial Sequence: Synthetic oligonucleotide
uagugugaugccauuuggc

SEQ ID NO: 1522194 - RNA, 19 nt, Artificial Sequence
  Description of Artificial Sequence: Synthetic oligonucleotide
aagugcgaagagagaaucc

SEQ ID NO: 1522195 - RNA, 19 nt, Artificial Sequence
  Description of Artificial Sequence: Synthetic oligonucleotide
gauagaguggaguuuggaa

SEQ ID NO: 1522196 - RNA, 19 nt, Artificial Sequence
  Description of Artificial Sequence: Synthetic oligonucleotide
cuagugugaugccauuugg

SEQ ID NO: 1522197 - RNA, 19 nt, Artificial Sequence
  Description of Artificial Sequence: Synthetic oligonucleotide
ugaacuggaaaagugcgaa

SEQ ID NO: 1522198 - RNA, 19 nt, Artificial Sequence
  Description of Artificial Sequence: Synthetic oligonucleotide
ugagcuugauccccggccc

SEQ ID NO: 1522199 - RNA, 19 nt, Artificial Sequence
  Description of Artificial Sequence: Synthetic oligonucleotide
uguggcaauucuaaguauu

SEQ ID NO: 1522200 - RNA, 19 nt, Artificial Sequence
  Description of Artificial Sequence: Synthetic oligonucleotide
uuccaaaauggucuuccga

SEQ ID NO: 1522201 - RNA, 19 nt, Artificial Sequence
  Description of Artificial Sequence: Synthetic oligonucleotide
auacuuuguccucauagau

SEQ ID NO: 1522202 - RNA, 19 nt, Artificial Sequence
  Description of Artificial Sequence: Synthetic oligonucleotide
ggacaagagguuuucagcc

SEQ ID NO: 1522203 - RNA, 19 nt, Artificial Sequence
  Description of Artificial Sequence: Synthetic oligonucleotide
ucggcaaauauggaguuca

SEQ ID NO: 1522204 - RNA, 19 nt, Artificial Sequence
  Description of Artificial Sequence: Synthetic oligonucleotide
cucauagauggccaaggag

SEQ ID NO: 1522205 - RNA, 19 nt, Artificial Sequence
  Description of Artificial Sequence: Synthetic oligonucleotide
acaggugccacuucuguga

SEQ ID NO: 1522206 - RNA, 19 nt, Artificial Sequence
  Description of Artificial Sequence: Synthetic oligonucleotide
uagaguggaguuuggaauc

SEQ ID NO: 1522207 - RNA, 19 nt, Artificial Sequence
  Description of Artificial Sequence: Synthetic oligonucleotide
ugauaaauuguggcaauuc

SEQ ID NO: 1522208 - RNA, 19 nt, Artificial Sequence
  Description of Artificial Sequence: Synthetic oligonucleotide
guggauguucccugggugg

SEQ ID NO: 1522209 - RNA, 19 nt, Artificial Sequence
  Description of Artificial Sequence: Synthetic oligonucleotide
gugaauuuuggggagugag

SEQ ID NO: 1522210 - RNA, 19 nt, Artificial Sequence
  Description of Artificial Sequence: Synthetic oligonucleotide
cucuuaucuugcuuugagc

SEQ ID NO: 1522211 - RNA, 19 nt, Artificial Sequence
  Description of Artificial Sequence: Synthetic oligonucleotide
gacagggagguguagaaaa

SEQ ID NO: 1522212 - RNA, 19 nt, Artificial Sequence
  Description of Artificial Sequence: Synthetic oligonucleotide
uucagccaccaaauuaaca

SEQ ID NO: 1522213 - RNA, 19 nt, Artificial Sequence
  Description of Artificial Sequence: Synthetic oligonucleotide
ugauccccggcccagcuug

SEQ ID NO: 1522214 - RNA, 19 nt, Artificial Sequence
  Description of Artificial Sequence: Synthetic oligonucleotide
aaguauucuuccaagucau

SEQ ID NO: 1522215 - RNA, 19 nt, Artificial Sequence
  Description of Artificial Sequence: Synthetic oligonucleotide
guaggaguagccguccugg

SEQ ID NO: 1522216 - RNA, 19 nt, Artificial Sequence
  Description of Artificial Sequence: Synthetic oligonucleotide
gaaagagaagguucucaca

SEQ ID NO: 1522217 - RNA, 19 nt, Artificial Sequence
  Description of Artificial Sequence: Synthetic oligonucleotide
gaggauugaucuguggggc

SEQ ID NO: 1522218 - RNA, 19 nt, Artificial Sequence
  Description of Artificial Sequence: Synthetic oligonucleotide
aauuuuggggagugaggau

SEQ ID NO: 1522219 - RNA, 19 nt, Artificial Sequence
  Description of Artificial Sequence: Synthetic oligonucleotide
ucaaugcuggagauagagu

SEQ ID NO: 1522220 - RNA, 19 nt, Artificial Sequence
  Description of Artificial Sequence: Synthetic oligonucleotide
uuuaugacauccguccaaa

SEQ ID NO: 1522221 - RNA, 19 nt, Artificial Sequence
  Description of Artificial Sequence: Synthetic oligonucleotide
uggguggucaguacaggug

SEQ ID NO: 1522222 - RNA, 19 nt, Artificial Sequence
  Description of Artificial Sequence: Synthetic oligonucleotide
ugaugguggauguucccug

SEQ ID NO: 1522223 - RNA, 19 nt, Artificial Sequence
  Description of Artificial Sequence: Synthetic oligonucleotide
auccguccaaaauacuuug

SEQ ID NO: 1522224 - RNA, 19 nt, Artificial Sequence
  Description of Artificial Sequence: Synthetic oligonucleotide
uauccaagagagacugcca

SEQ ID NO: 1522225 - RNA, 19 nt, Artificial Sequence
  Description of Artificial Sequence: Synthetic oligonucleotide
aggcgauuggcacugaaaa

SEQ ID NO: 1522226 - RNA, 19 nt, Artificial Sequence
  Description of Artificial Sequence: Synthetic oligonucleotide
caaauuaacaucugagccu

SEQ ID NO: 1522227 - RNA, 19 nt, Artificial Sequence
  Description of Artificial Sequence: Synthetic oligonucleotide
uauuggcagccaccguugg

SEQ ID NO: 1522228 - RNA, 19 nt, Artificial Sequence
  Description of Artificial Sequence: Synthetic oligonucleotide
gaacuggaaaagugcgaag

SEQ ID NO: 1522229 - RNA, 19 nt, Artificial Sequence
  Description of Artificial Sequence: Synthetic oligonucleotide
cugagcuugauccccggcc

SEQ ID NO: 1522230 - RNA, 19 nt, Artificial Sequence
  Description of Artificial Sequence: Synthetic oligonucleotide
cuuccaaaauggucuuccg

SEQ ID NO: 1522231 - RNA, 19 nt, Artificial Sequence
  Description of Artificial Sequence: Synthetic oligonucleotide
aggauugaucuguggggcg

SEQ ID NO: 1522232 - RNA, 19 nt, Artificial Sequence
  Description of Artificial Sequence: Synthetic oligonucleotide
uucgcauauccuuggccag

SEQ ID NO: 1522233 - RNA, 19 nt, Artificial Sequence
  Description of Artificial Sequence: Synthetic oligonucleotide
ugauccuccuugugcuucg

SEQ ID NO: 1522234 - RNA, 19 nt, Artificial Sequence
  Description of Artificial Sequence: Synthetic oligonucleotide
acugagcuugauccccggc

SEQ ID NO: 1522235 - RNA, 19 nt, Artificial Sequence
  Description of Artificial Sequence: Synthetic oligonucleotide
ucuacaccauucaggcccc

SEQ ID NO: 1522236 - RNA, 19 nt, Artificial Sequence
  Description of Artificial Sequence: Synthetic oligonucleotide
agugaucucaggccugaug

SEQ ID NO: 1522237 - RNA, 19 nt, Artificial Sequence
  Description of Artificial Sequence: Synthetic oligonucleotide
cugaccaucugucgugagg

SEQ ID NO: 1522238 - RNA, 19 nt, Artificial Sequence
  Description of Artificial Sequence: Synthetic oligonucleotide
auucaggccccuuucuuga

SEQ ID NO: 1522239 - RNA, 19 nt, Artificial Sequence
  Description of Artificial Sequence: Synthetic oligonucleotide
auuaacaucugagccugug

SEQ ID NO: 1522240 - RNA, 19 nt, Artificial Sequence
  Description of Artificial Sequence: Synthetic oligonucleotide
ucuuaguuacccgugugau

SEQ ID NO: 1522241 - RNA, 19 nt, Artificial Sequence
  Description of Artificial Sequence: Synthetic oligonucleotide
cugucaucuuaguuacccg

SEQ ID NO: 1522242 - RNA, 19 nt, Artificial Sequence
  Description of Artificial Sequence: Synthetic oligonucleotide
ugaccagugcgauggggag

SEQ ID NO: 1522243 - RNA, 19 nt, Artificial Sequence
  Description of Artificial Sequence: Synthetic oligonucleotide
ugccccuggacaauaaaua

SEQ ID NO: 1522244 - RNA, 19 nt, Artificial Sequence
  Description of Artificial Sequence: Synthetic oligonucleotide
uacaggugccacuucugug

SEQ ID NO: 1522245 - RNA, 19 nt, Artificial Sequence
  Description of Artificial Sequence: Synthetic oligonucleotide
agcuucgcauauccuuggc

SEQ ID NO: 1522246 - RNA, 19 nt, Artificial Sequence
  Description of Artificial Sequence: Synthetic oligonucleotide
ggcuucauuuaugacaucc

SEQ ID NO: 1522247 - RNA, 19 nt, Artificial Sequence
  Description of Artificial Sequence: Synthetic oligonucleotide
accagugcgauggggaggg

SEQ ID NO: 1522248 - RNA, 19 nt, Artificial Sequence
  Description of Artificial Sequence: Synthetic oligonucleotide
guucucucacaccaguuca

SEQ ID NO: 1522249 - RNA, 19 nt, Artificial Sequence
  Description of Artificial Sequence: Synthetic oligonucleotide
uacccgugugauaaauugu

SEQ ID NO: 1522250 - RNA, 19 nt, Artificial Sequence
  Description of Artificial Sequence: Synthetic oligonucleotide
gaccccuucucuuggaaca

SEQ ID NO: 1522251 - RNA, 19 nt, Artificial Sequence
  Description of Artificial Sequence: Synthetic oligonucleotide
aaguguccuuccuuccuga

SEQ ID NO: 1522252 - RNA, 19 nt, Artificial Sequence
  Description of Artificial Sequence: Synthetic oligonucleotide
gagccugugaggcgauugg

SEQ ID NO: 1522253 - RNA, 19 nt, Artificial Sequence
  Description of Artificial Sequence: Synthetic oligonucleotide
acagugcaaucuaagagca

SEQ ID NO: 1522254 - RNA, 19 nt, Artificial Sequence
  Description of Artificial Sequence: Synthetic oligonucleotide
ugcuucggcagcccuucgg

SEQ ID NO: 1522255 - RNA, 19 nt, Artificial Sequence
  Description of Artificial Sequence: Synthetic oligonucleotide
uacacuggguugucaaagu

SEQ ID NO: 1522256 - RNA, 19 nt, Artificial Sequence
  Description of Artificial Sequence: Synthetic oligonucleotide
gggacaagagguuuucagc

SEQ ID NO: 1522257 - RNA, 19 nt, Artificial Sequence
  Description of Artificial Sequence: Synthetic oligonucleotide
gaauucagucuugagcaca

SEQ ID NO: 1522258 - RNA, 19 nt, Artificial Sequence
  Description of Artificial Sequence: Synthetic oligonucleotide
ggaucccggaaagagaagg

SEQ ID NO: 1522259 - RNA, 19 nt, Artificial Sequence
  Description of Artificial Sequence: Synthetic oligonucleotide
acccaauagaggcggccac

SEQ ID NO: 1522260 - RNA, 19 nt, Artificial Sequence
  Description of Artificial Sequence: Synthetic oligonucleotide
cuucugugaggcagcuucg

SEQ ID NO: 1522261 - RNA, 19 nt, Artificial Sequence
  Description of Artificial Sequence: Synthetic oligonucleotide
uccaagagagacugccacu

SEQ ID NO: 1522262 - RNA, 19 nt, Artificial Sequence
  Description of Artificial Sequence: Synthetic oligonucleotide
ugugaggcagcuucgcaua

SEQ ID NO: 1522263 - RNA, 19 nt, Artificial Sequence
  Description of Artificial Sequence: Synthetic oligonucleotide
cuggaaguacuggaagccg

SEQ ID NO: 1522264 - RNA, 19 nt, Artificial Sequence
  Description of Artificial Sequence: Synthetic oligonucleotide
aacccaauagaggcggcca

SEQ ID NO: 1522265 - RNA, 19 nt, Artificial Sequence
  Description of Artificial Sequence: Synthetic oligonucleotide
caccaguucaccccucuag

SEQ ID NO: 1522266 - RNA, 19 nt, Artificial Sequence
  Description of Artificial Sequence: Synthetic oligonucleotide
augccauuuggccacugga

SEQ ID NO: 1522267 - RNA, 19 nt, Artificial Sequence
  Description of Artificial Sequence: Synthetic oligonucleotide
auuuuggggagugaggauu

SEQ ID NO: 1522268 - RNA, 19 nt, Artificial Sequence
  Description of Artificial Sequence: Synthetic oligonucleotide
auauggaguucaucuucug

SEQ ID NO: 1522269 - RNA, 19 nt, Artificial Sequence
  Description of Artificial Sequence: Synthetic oligonucleotide
ucacagcuguucaugccac

SEQ ID NO: 1522270 - RNA, 19 nt, Artificial Sequence
  Description of Artificial Sequence: Synthetic oligonucleotide
ugguacacuggguugucaa

SEQ ID NO: 1522271 - RNA, 19 nt, Artificial Sequence
  Description of Artificial Sequence: Synthetic oligonucleotide
gauugaucuguggggcggg

SEQ ID NO: 1522272 - RNA, 19 nt, Artificial Sequence
  Description of Artificial Sequence: Synthetic oligonucleotide
ggggacaagagguuuucag

SEQ ID NO: 1522273 - RNA, 19 nt, Artificial Sequence
  Description of Artificial Sequence: Synthetic oligonucleotide
ggaacagugcaaucuaaga

SEQ ID NO: 1522274 - RNA, 19 nt, Artificial Sequence
  Description of Artificial Sequence: Synthetic oligonucleotide
ucugucgugagggguagga

SEQ ID NO: 1522275 - RNA, 19 nt, Artificial Sequence
  Description of Artificial Sequence: Synthetic oligonucleotide
accacggaacagugcaauc

SEQ ID NO: 1522276 - RNA, 19 nt, Artificial Sequence
  Description of Artificial Sequence: Synthetic oligonucleotide
cuaagagcacagaugcaga

SEQ ID NO: 1522277 - RNA, 19 nt, Artificial Sequence
  Description of Artificial Sequence: Synthetic oligonucleotide
cuugaucuuggcagguguc

SEQ ID NO: 1522278 - RNA, 19 nt, Artificial Sequence
  Description of Artificial Sequence: Synthetic oligonucleotide
caagagguuuucagccacc

SEQ ID NO: 1522279 - RNA, 19 nt, Artificial Sequence
  Description of Artificial Sequence: Synthetic oligonucleotide
acccgugugauaaauugug

SEQ ID NO: 1522280 - RNA, 19 nt, Artificial Sequence
  Description of Artificial Sequence: Synthetic oligonucleotide
ugagcaacacaguguucac

SEQ ID NO: 1522281 - RNA, 19 nt, Artificial Sequence
  Description of Artificial Sequence: Synthetic oligonucleotide
gugugaugccauuuggcca

SEQ ID NO: 1522282 - RNA, 19 nt, Artificial Sequence
  Description of Artificial Sequence: Synthetic oligonucleotide
uugcuuugagcaacacagu

SEQ ID NO: 1522283 - RNA, 19 nt, Artificial Sequence
  Description of Artificial Sequence: Synthetic oligonucleotide
cauagauggccaaggagaa

SEQ ID NO: 1522284 - RNA, 19 nt, Artificial Sequence
  Description of Artificial Sequence: Synthetic oligonucleotide
caucuuaguuacccgugug

SEQ ID NO: 1522285 - RNA, 19 nt, Artificial Sequence
  Description of Artificial Sequence: Synthetic oligonucleotide
uccguccaaaauacuuugu

SEQ ID NO: 1522286 - RNA, 19 nt, Artificial Sequence
  Description of Artificial Sequence: Synthetic oligonucleotide
gggaauaucuagugugaug

SEQ ID NO: 1522287 - RNA, 19 nt, Artificial Sequence
  Description of Artificial Sequence: Synthetic oligonucleotide
ucaggccugaugguggaug

SEQ ID NO: 1522288 - RNA, 19 nt, Artificial Sequence
  Description of Artificial Sequence: Synthetic oligonucleotide
ggguggucaguacaggugc

SEQ ID NO: 1522289 - RNA, 19 nt, Artificial Sequence
  Description of Artificial Sequence: Synthetic oligonucleotide
gagauagaguggaguuugg

SEQ ID NO: 1522290 - RNA, 19 nt, Artificial Sequence
  Description of Artificial Sequence: Synthetic oligonucleotide
ugagccugugaggcgauug

SEQ ID NO: 1522291 - RNA, 19 nt, Artificial Sequence
  Description of Artificial Sequence: Synthetic oligonucleotide
auaucuagugugaugccau

SEQ ID NO: 1522292 - RNA, 19 nt, Artificial Sequence
  Description of Artificial Sequence: Synthetic oligonucleotide
ugcaaucuaagagcacaga

SEQ ID NO: 1522293 - RNA, 19 nt, Artificial Sequence
  Description of Artificial Sequence: Synthetic oligonucleotide
ccgugugauaaauuguggc

SEQ ID NO: 1522294 - RNA, 19 nt, Artificial Sequence
  Description of Artificial Sequence: Synthetic oligonucleotide
agacaaggaggaugaccag

SEQ ID NO: 1522295 - RNA, 19 nt, Artificial Sequence
  Description of Artificial Sequence: Synthetic oligonucleotide
uuugagcaacacaguguuc

SEQ ID NO: 1522296 - RNA, 19 nt, Artificial Sequence
  Description of Artificial Sequence: Synthetic oligonucleotide
guccucagucaccagcgag

SEQ ID NO: 1522297 - RNA, 19 nt, Artificial Sequence
  Description of Artificial Sequence: Synthetic oligonucleotide
cguccaaaauacuuugucc

SEQ ID NO: 1522298 - RNA, 19 nt, Artificial Sequence
  Description of Artificial Sequence: Synthetic oligonucleotide
agccgacugauccuccuug

SEQ ID NO: 1522299 - RNA, 19 nt, Artificial Sequence
  Description of Artificial Sequence: Synthetic oligonucleotide
aggcugaccaucugucgug

SEQ ID NO: 1522300 - RNA, 19 nt, Artificial Sequence
  Description of Artificial Sequence: Synthetic oligonucleotide
ccagcgaguagauaucuac

SEQ ID NO: 1522301 - RNA, 19 nt, Artificial Sequence
  Description of Artificial Sequence: Synthetic oligonucleotide
ucaacccaauagaggcggc

SEQ ID NO: 1522302 - RNA, 19 nt, Artificial Sequence
  Description of Artificial Sequence: Synthetic oligonucleotide
aguguccuuccuuccugag

SEQ ID NO: 1522303 - RNA, 19 nt, Artificial Sequence
  Description of Artificial Sequence: Synthetic oligonucleotide
cugagaguggcggcggacg

SEQ ID NO: 1522304 - RNA, 19 nt, Artificial Sequence
  Description of Artificial Sequence: Synthetic oligonucleotide
auugaucuguggggcgggc

SEQ ID NO: 1522305 - RNA, 19 nt, Artificial Sequence
  Description of Artificial Sequence: Synthetic oligonucleotide
gccacugucaucuuaguua

SEQ ID NO: 1522306 - RNA, 19 nt, Artificial Sequence
  Description of Artificial Sequence: Synthetic oligonucleotide
aggauggccccaaagacaa

SEQ ID NO: 1522307 - RNA, 19 nt, Artificial Sequence
  Description of Artificial Sequence: Synthetic oligonucleotide
uucacagaggcagcaggac

SEQ ID NO: 1522308 - RNA, 19 nt, Artificial Sequence
  Description of Artificial Sequence: Synthetic oligonucleotide
cagcuucgcauauccuugg

SEQ ID NO: 1522309 - RNA, 19 nt, Artificial Sequence
  Description of Artificial Sequence: Synthetic oligonucleotide
ggcugugugauguugugga

SEQ ID NO: 1522310 - RNA, 19 nt, Artificial Sequence
  Description of Artificial Sequence: Synthetic oligonucleotide
caucugagccugugaggcg

SEQ ID NO: 1522311 - RNA, 19 nt, Artificial Sequence
  Description of Artificial Sequence: Synthetic oligonucleotide
gaggaugaccagugcgaug

SEQ ID NO: 1522312 - RNA, 19 nt, Artificial Sequence
  Description of Artificial Sequence: Synthetic oligonucleotide
acauccguccaaaauacuu

SEQ ID NO: 1522313 - RNA, 19 nt, Artificial Sequence
  Description of Artificial Sequence: Synthetic oligonucleotide
cuuuucugccccuggacaa

SEQ ID NO: 1522314 - RNA, 19 nt, Artificial Sequence
  Description of Artificial Sequence: Synthetic oligonucleotide
guauuggcagccaccguug

SEQ ID NO: 1522315 - RNA, 19 nt, Artificial Sequence
  Description of Artificial Sequence: Synthetic oligonucleotide
gcgaguagauaucuacacc

SEQ ID NO: 1522316 - RNA, 19 nt, Artificial Sequence
  Description of Artificial Sequence: Synthetic oligonucleotide
aagccaugcacagggucca

SEQ ID NO: 1522317 - RNA, 19 nt, Artificial Sequence
  Description of Artificial Sequence: Synthetic oligonucleotide
ggauugaucuguggggcgg

SEQ ID NO: 1522318 - RNA, 19 nt, Artificial Sequence
  Description of Artificial Sequence: Synthetic oligonucleotide
caaggaggaugaccagugc

SEQ ID NO: 1522319 - RNA, 19 nt, Artificial Sequence
  Description of Artificial Sequence: Synthetic oligonucleotide
uuaugacauccguccaaaa

SEQ ID NO: 1522320 - RNA, 19 nt, Artificial Sequence
  Description of Artificial Sequence: Synthetic oligonucleotide
agauagaguggaguuugga

SEQ ID NO: 1522321 - RNA, 19 nt, Artificial Sequence
  Description of Artificial Sequence: Synthetic oligonucleotide
aggaggaugaccagugcga

SEQ ID NO: 1522322 - RNA, 19 nt, Artificial Sequence
  Description of Artificial Sequence: Synthetic oligonucleotide
cauccaacacaccacggaa

SEQ ID NO: 1522323 - RNA, 19 nt, Artificial Sequence
  Description of Artificial Sequence: Synthetic oligonucleotide
cuuugagcaacacaguguu

SEQ ID NO: 1522324 - RNA, 19 nt, Artificial Sequence
  Description of Artificial Sequence: Synthetic oligonucleotide
aggugaauuuuggggagug

SEQ ID NO: 1522325 - RNA, 19 nt, Artificial Sequence
  Description of Artificial Sequence: Synthetic oligonucleotide
gagaagguucucacagcug

SEQ ID NO: 1522326 - RNA, 19 nt, Artificial Sequence
  Description of Artificial Sequence: Synthetic oligonucleotide
caggcacaggugaauuuug

SEQ ID NO: 1522327 - RNA, 19 nt, Artificial Sequence
  Description of Artificial Sequence: Synthetic oligonucleotide
ucugccccuggacaauaaa

SEQ ID NO: 1522328 - RNA, 19 nt, Artificial Sequence
  Description of Artificial Sequence: Synthetic oligonucleotide
gaccagugcgauggggagg

SEQ ID NO: 1522329 - RNA, 19 nt, Artificial Sequence
  Description of Artificial Sequence: Synthetic oligonucleotide
caggaccaguccuggacag

SEQ ID NO: 1522330 - RNA, 19 nt, Artificial Sequence
  Description of Artificial Sequence: Synthetic oligonucleotide
auguuguggaacaggacaa

SEQ ID NO: 1522331 - RNA, 19 nt, Artificial Sequence
  Description of Artificial Sequence: Synthetic oligonucleotide
uaggaguagccguccuggc

SEQ ID NO: 1522332 - RNA, 19 nt, Artificial Sequence
  Description of Artificial Sequence: Synthetic oligonucleotide
cuucauuuaugacauccgu

SEQ ID NO: 1522333 - RNA, 19 nt, Artificial Sequence
  Description of Artificial Sequence: Synthetic oligonucleotide
ugugcuucggcagcccuuc

SEQ ID NO: 1522334 - RNA, 19 nt, Artificial Sequence
  Description of Artificial Sequence: Synthetic oligonucleotide
agaguggaguuuggaauca

SEQ ID NO: 1522335 - RNA, 19 nt, Artificial Sequence
  Description of Artificial Sequence: Synthetic oligonucleotide
acggaucccggaaagagaa

SEQ ID NO: 1522336 - RNA, 19 nt, Artificial Sequence
  Description of Artificial Sequence: Synthetic oligonucleotide
agugcgauggggaggguga

SEQ ID NO: 1522337 - RNA, 19 nt, Artificial Sequence
  Description of Artificial Sequence: Synthetic oligonucleotide
aguuuaugcuguugauguu

SEQ ID NO: 1522338 - RNA, 19 nt, Artificial Sequence
  Description of Artificial Sequence: Synthetic oligonucleotide
ccuggcuucggcaaauaug

SEQ ID NO: 1522339 - RNA, 19 nt, Artificial Sequence
  Description of Artificial Sequence: Synthetic oligonucleotide
uuaugcuguugauguuccu

SEQ ID NO: 1522340 - RNA, 19 nt, Artificial Sequence
  Description of Artificial Sequence: Synthetic oligonucleotide
gaacaggacaauguccucu

SEQ ID NO: 1522341 - RNA, 19 nt, Artificial Sequence
  Description of Artificial Sequence: Synthetic oligonucleotide
ugcccgacucugaacugga

SEQ ID NO: 1522342 - RNA, 19 nt, Artificial Sequence
  Description of Artificial Sequence: Synthetic oligonucleotide
ggacggaucccggaaagag

SEQ ID NO: 1522343 - RNA, 19 nt, Artificial Sequence
  Description of Artificial Sequence: Synthetic oligonucleotide
aguuacccgugugauaaau

SEQ ID NO: 1522344 - RNA, 19 nt, Artificial Sequence
  Description of Artificial Sequence: Synthetic oligonucleotide
caacccaauagaggcggcc

SEQ ID NO: 1522345 - RNA, 19 nt, Artificial Sequence
  Description of Artificial Sequence: Synthetic oligonucleotide
ugaggcgauuggcacugaa

SEQ ID NO: 1522346 - RNA, 19 nt, Artificial Sequence
  Description of Artificial Sequence: Synthetic oligonucleotide
gcuucgcauauccuuggcc

SEQ ID NO: 1522347 - RNA, 19 nt, Artificial Sequence
  Description of Artificial Sequence: Synthetic oligonucleotide
auguccucuggggacaaga

SEQ ID NO: 1522348 - RNA, 19 nt, Artificial Sequence
  Description of Artificial Sequence: Synthetic oligonucleotide
gugcccgacucugaacugg

SEQ ID NO: 1522349 - RNA, 19 nt, Artificial Sequence
  Description of Artificial Sequence: Synthetic oligonucleotide
accaucugucgugaggggu

SEQ ID NO: 1522350 - RNA, 19 nt, Artificial Sequence
  Description of Artificial Sequence: Synthetic oligonucleotide
cccgugugauaaauugugg

SEQ ID NO: 1522351 - RNA, 19 nt, Artificial Sequence
  Description of Artificial Sequence: Synthetic oligonucleotide
uagccguccuggcuucggc

SEQ ID NO: 1522352 - RNA, 19 nt, Artificial Sequence
  Description of Artificial Sequence: Synthetic oligonucleotide
gagggguaggaguagccgu

SEQ ID NO: 1522353 - RNA, 19 nt, Artificial Sequence
  Description of Artificial Sequence: Synthetic oligonucleotide
ggggagugaggauugaucu

SEQ ID NO: 1522354 - RNA, 19 nt, Artificial Sequence
  Description of Artificial Sequence: Synthetic oligonucleotide
ggguccaccacaaugucuc

SEQ ID NO: 1522355 - RNA, 19 nt, Artificial Sequence
  Description of Artificial Sequence: Synthetic oligonucleotide
gguaggaguagccguccug

SEQ ID NO: 1522356 - RNA, 19 nt, Artificial Sequence
  Description of Artificial Sequence: Synthetic oligonucleotide
cuuaguuacccgugugaua

SEQ ID NO: 1522357 - RNA, 19 nt, Artificial Sequence
  Description of Artificial Sequence: Synthetic oligonucleotide
caccccucuaggcugugug

SEQ ID NO: 1522358 - RNA, 19 nt, Artificial Sequence
  Description of Artificial Sequence: Synthetic oligonucleotide
ccaagagagacugccacug

SEQ ID NO: 1522359 - RNA, 19 nt, Artificial Sequence
  Description of Artificial Sequence: Synthetic oligonucleotide
gacggaucccggaaagaga

SEQ ID NO: 1522360 - RNA, 19 nt, Artificial Sequence
  Description of Artificial Sequence: Synthetic oligonucleotide
uggcuucggcaaauaugga

SEQ ID NO: 1522361 - RNA, 19 nt, Artificial Sequence
  Description of Artificial Sequence: Synthetic oligonucleotide
caugccaucagggcaggca

SEQ ID NO: 1522362 - RNA, 19 nt, Artificial Sequence
  Description of Artificial Sequence: Synthetic oligonucleotide
ccaguucaccccucuaggc

SEQ ID NO: 1522363 - RNA, 19 nt, Artificial Sequence
  Description of Artificial Sequence: Synthetic oligonucleotide
cagugcaaucuaagagcac

SEQ ID NO: 1522364 - RNA, 19 nt, Artificial Sequence
  Description of Artificial Sequence: Synthetic oligonucleotide
cagccuuuucugccccugg

SEQ ID NO: 1522365 - RNA, 19 nt, Artificial Sequence
  Description of Artificial Sequence: Synthetic oligonucleotide
uucggcuccugcagugauc

SEQ ID NO: 1522366 - RNA, 19 nt, Artificial Sequence
  Description of Artificial Sequence: Synthetic oligonucleotide
cgugugauaaauuguggca

SEQ ID NO: 1522367 - RNA, 19 nt, Artificial Sequence
  Description of Artificial Sequence: Synthetic oligonucleotide
caaauauggaguucaucuu

SEQ ID NO: 1522368 - RNA, 19 nt, Artificial Sequence
  Description of Artificial Sequence: Synthetic oligonucleotide
ucgcauauccuuggccagu

SEQ ID NO: 1522369 - RNA, 19 nt, Artificial Sequence
  Description of Artificial Sequence: Synthetic oligonucleotide
ccacugggaauaucuagug

SEQ ID NO: 1522370 - RNA, 19 nt, Artificial Sequence
  Description of Artificial Sequence: Synthetic oligonucleotide
ucgugagggguaggaguag

SEQ ID NO: 1522371 - RNA, 19 nt, Artificial Sequence
  Description of Artificial Sequence: Synthetic oligonucleotide
augggugcccgacucugaa

SEQ ID NO: 1522372 - RNA, 19 nt, Artificial Sequence
  Description of Artificial Sequence: Synthetic oligonucleotide
gcaaucuaagagcacagau

SEQ ID NO: 1522373 - RNA, 19 nt, Artificial Sequence
  Description of Artificial Sequence: Synthetic oligonucleotide
caucugucgugagggguag

SEQ ID NO: 1522374 - RNA, 19 nt, Artificial Sequence
  Description of Artificial Sequence: Synthetic oligonucleotide
ccguccaaaauacuuuguc

SEQ ID NO: 1522375 - RNA, 19 nt, Artificial Sequence
  Description of Artificial Sequence: Synthetic oligonucleotide
uucugccccuggacaauaa

SEQ ID NO: 1522376 - RNA, 19 nt, Artificial Sequence
  Description of Artificial Sequence: Synthetic oligonucleotide
cucagucaccagcgaguag

SEQ ID NO: 1522377 - RNA, 19 nt, Artificial Sequence
  Description of Artificial Sequence: Synthetic oligonucleotide
agcuugauccccggcccag

SEQ ID NO: 1522378 - RNA, 19 nt, Artificial Sequence
  Description of Artificial Sequence: Synthetic oligonucleotide
gacaucaaugcuggagaua

SEQ ID NO: 1522379 - RNA, 19 nt, Artificial Sequence
  Description of Artificial Sequence: Synthetic oligonucleotide
uggcagccaccguugggga

SEQ ID NO: 1522380 - RNA, 19 nt, Artificial Sequence
  Description of Artificial Sequence: Synthetic oligonucleotide
ucugguacacuggguuguc

SEQ ID NO: 1522381 - RNA, 19 nt, Artificial Sequence
  Description of Artificial Sequence: Synthetic oligonucleotide
ggcaauucuaaguauucuu

SEQ ID NO: 1522382 - RNA, 19 nt, Artificial Sequence
  Description of Artificial Sequence: Synthetic oligonucleotide
gaggcgauuggcacugaaa

SEQ ID NO: 1522383 - RNA, 19 nt, Artificial Sequence
  Description of Artificial Sequence: Synthetic oligonucleotide
aucuaagagcacagaugca

SEQ ID NO: 1522384 - RNA, 19 nt, Artificial Sequence
  Description of Artificial Sequence: Synthetic oligonucleotide
agaggcggccacugggaau

SEQ ID NO: 1522385 - RNA, 19 nt, Artificial Sequence
  Description of Artificial Sequence: Synthetic oligonucleotide
gguauuggcagccaccguu

SEQ ID NO: 1522386 - RNA, 19 nt, Artificial Sequence
  Description of Artificial Sequence: Synthetic oligonucleotide
agguauuggcagccaccgu

SEQ ID NO: 1522387 - RNA, 19 nt, Artificial Sequence
  Description of Artificial Sequence: Synthetic oligonucleotide
cauccguccaaaauacuuu

SEQ ID NO: 1522388 - RNA, 19 nt, Artificial Sequence
  Description of Artificial Sequence: Synthetic oligonucleotide
aucccggaaagagaagguu

SEQ ID NO: 1522389 - RNA, 19 nt, Artificial Sequence
  Description of Artificial Sequence: Synthetic oligonucleotide
cacggaacagugcaaucua

SEQ ID NO: 1522390 - RNA, 19 nt, Artificial Sequence
  Description of Artificial Sequence: Synthetic oligonucleotide
auguucccuggguggucag

SEQ ID NO: 1522391 - RNA, 19 nt, Artificial Sequence
  Description of Artificial Sequence: Synthetic oligonucleotide
agaguggcggcggacggau

SEQ ID NO: 1522392 - RNA, 19 nt, Artificial Sequence
  Description of Artificial Sequence: Synthetic oligonucleotide
uuucugccccuggacaaua

SEQ ID NO: 1522393 - RNA, 19 nt, Artificial Sequence
  Description of Artificial Sequence: Synthetic oligonucleotide
gccacugagcuugaucccc

SEQ ID NO: 1522394 - RNA, 19 nt, Artificial Sequence
  Description of Artificial Sequence: Synthetic oligonucleotide
acaacaggauggccccaaa

SEQ ID NO: 1522395 - RNA, 19 nt, Artificial Sequence
  Description of Artificial Sequence: Synthetic oligonucleotide
gugcgaagagagaauccca

SEQ ID NO: 1522396 - RNA, 19 nt, Artificial Sequence
  Description of Artificial Sequence: Synthetic oligonucleotide
gagagacugccacugucau

SEQ ID NO: 1522397 - RNA, 19 nt, Artificial Sequence
  Description of Artificial Sequence: Synthetic oligonucleotide
ccacugagcuugauccccg

SEQ ID NO: 1522398 - RNA, 19 nt, Artificial Sequence
  Description of Artificial Sequence: Synthetic oligonucleotide
uucaggccccuuucuugau

SEQ ID NO: 1522399 - RNA, 19 nt, Artificial Sequence
  Description of Artificial Sequence: Synthetic oligonucleotide
gcuucggcaaauauggagu

SEQ ID NO: 1522400 - RNA, 19 nt, Artificial Sequence
  Description of Artificial Sequence: Synthetic oligonucleotide
ggaccccuucucuuggaac

SEQ ID NO: 1522401 - RNA, 19 nt, Artificial Sequence
  Description of Artificial Sequence: Synthetic oligonucleotide
ccgacucugaacuggaaaa

SEQ ID NO: 1522402 - RNA, 19 nt, Artificial Sequence
  Description of Artificial Sequence: Synthetic oligonucleotide
gaagccgacugauccuccu

SEQ ID NO: 1522403 - RNA, 19 nt, Artificial Sequence
  Description of Artificial Sequence: Synthetic oligonucleotide
uugauccccggcccagcuu

SEQ ID NO: 1522404 - RNA, 19 nt, Artificial Sequence
  Description of Artificial Sequence: Synthetic oligonucleotide
aguuuggaaucaacccaau

SEQ ID NO: 1522405 - RNA, 19 nt, Artificial Sequence
  Description of Artificial Sequence: Synthetic oligonucleotide
cagugcgauggggagggug

SEQ ID NO: 1522406 - RNA, 19 nt, Artificial Sequence
  Description of Artificial Sequence: Synthetic oligonucleotide
aguagccguccuggcuucg

SEQ ID NO: 1522407 - RNA, 19 nt, Artificial Sequence
  Description of Artificial Sequence: Synthetic oligonucleotide
caguucaccccucuaggcu

SEQ ID NO: 1522408 - RNA, 19 nt, Artificial Sequence
  Description of Artificial Sequence: Synthetic oligonucleotide
cuuggccaguagcaugcca

SEQ ID NO: 1522409 - RNA, 19 nt, Artificial Sequence
  Description of Artificial Sequence: Synthetic oligonucleotide
gcggacggaucccggaaag

SEQ ID NO: 1522410 - RNA, 19 nt, Artificial Sequence
  Description of Artificial Sequence: Synthetic oligonucleotide
uguucccuggguggucagu

SEQ ID NO: 1522411 - RNA, 19 nt, Artificial Sequence
  Description of Artificial Sequence: Synthetic oligonucleotide
cccuggguggucaguacag

SEQ ID NO: 1522412 - RNA, 19 nt, Artificial Sequence
  Description of Artificial Sequence: Synthetic oligonucleotide
cagguauccaagagagacu

SEQ ID NO: 1522413 - RNA, 19 nt, Artificial Sequence
  Description of Artificial Sequence: Synthetic oligonucleotide
cugcagugaucucaggccu

SEQ ID NO: 1522414 - RNA, 19 nt, Artificial Sequence
  Description of Artificial Sequence: Synthetic oligonucleotide
cucacaccaguucaccccu

SEQ ID NO: 1522415 - RNA, 19 nt, Artificial Sequence
  Description of Artificial Sequence: Synthetic oligonucleotide
uggcggcggacggaucccg

SEQ ID NO: 1522416 - RNA, 19 nt, Artificial Sequence
  Description of Artificial Sequence: Synthetic oligonucleotide
caucaaugcuggagauaga

SEQ ID NO: 1522417 - RNA, 19 nt, Artificial Sequence
  Description of Artificial Sequence: Synthetic oligonucleotide
ggccacugagcuugauccc

SEQ ID NO: 1522418 - RNA, 19 nt, Artificial Sequence
  Description of Artificial Sequence: Synthetic oligonucleotide
cugugaggcagcuucgcau

SEQ ID NO: 1522419 - RNA, 19 nt, Artificial Sequence
  Description of Artificial Sequence: Synthetic oligonucleotide
agagcacaugggugcccga

SEQ ID NO: 1522420 - RNA, 19 nt, Artificial Sequence
  Description of Artificial Sequence: Synthetic oligonucleotide
cuggguggucaguacaggu

SEQ ID NO: 1522421 - RNA, 19 nt, Artificial Sequence
  Description of Artificial Sequence: Synthetic oligonucleotide
gggugauggacaagacccc

SEQ ID NO: 1522422 - RNA, 19 nt, Artificial Sequence
  Description of Artificial Sequence: Synthetic oligonucleotide
acggaacagugcaaucuaa

SEQ ID NO: 1522423 - RNA, 19 nt, Artificial Sequence
  Description of Artificial Sequence: Synthetic oligonucleotide
caggcugaccaucugucgu

SEQ ID NO: 1522424 - RNA, 19 nt, Artificial Sequence
  Description of Artificial Sequence: Synthetic oligonucleotide
ccaauagaggcggccacug

SEQ ID NO: 1522425 - RNA, 19 nt, Artificial Sequence
  Description of Artificial Sequence: Synthetic oligonucleotide
aucugucgugagggguagg

SEQ ID NO: 1522426 - RNA, 19 nt, Artificial Sequence
  Description of Artificial Sequence: Synthetic oligonucleotide
auccccggcccagcuuggc

SEQ ID NO: 1522427 - RNA, 19 nt, Artificial Sequence
  Description of Artificial Sequence: Synthetic oligonucleotide
ggugcccgacucugaacug

SEQ ID NO: 1522428 - RNA, 19 nt, Artificial Sequence
  Description of Artificial Sequence: Synthetic oligonucleotide
gguauccaagagagacugc

SEQ ID NO: 1522429 - RNA, 19 nt, Artificial Sequence
  Description of Artificial Sequence: Synthetic oligonucleotide
gucaguacaggugccacuu

SEQ ID NO: 1522430 - RNA, 19 nt, Artificial Sequence
  Description of Artificial Sequence: Synthetic oligonucleotide
ccaccacaaugucucuggg

SEQ ID NO: 1522431 - RNA, 19 nt, Artificial Sequence
  Description of Artificial Sequence: Synthetic oligonucleotide
cuucggcaaauauggaguu

SEQ ID NO: 1522432 - RNA, 19 nt, Artificial Sequence
  Description of Artificial Sequence: Synthetic oligonucleotide
gugcuucggcagcccuucg

SEQ ID NO: 1522433 - RNA, 19 nt, Artificial Sequence
  Description of Artificial Sequence: Synthetic oligonucleotide
cuguggccgcuccucguuc

SEQ ID NO: 1522434 - RNA, 19 nt, Artificial Sequence
  Description of Artificial Sequence: Synthetic oligonucleotide
uacaccauucaggccccuu

SEQ ID NO: 1522435 - RNA, 19 nt, Artificial Sequence
  Description of Artificial Sequence: Synthetic oligonucleotide
cacagcuguucaugccaca

SEQ ID NO: 1522436 - RNA, 19 nt, Artificial Sequence
  Description of Artificial Sequence: Synthetic oligonucleotide
cuggaagccgacugauccu

SEQ ID NO: 1522437 - RNA, 19 nt, Artificial Sequence
  Description of Artificial Sequence: Synthetic oligonucleotide
ggugaauuuuggggaguga

SEQ ID NO: 1522438 - RNA, 19 nt, Artificial Sequence
  Description of Artificial Sequence: Synthetic oligonucleotide
gggguaggaguagccgucc

SEQ ID NO: 1522439 - RNA, 19 nt, Artificial Sequence
  Description of Artificial Sequence: Synthetic oligonucleotide
gacauccguccaaaauacu

SEQ ID NO: 1522440 - RNA, 19 nt, Artificial Sequence
  Description of Artificial Sequence: Synthetic oligonucleotide
cgacucugaacuggaaaag

SEQ ID NO: 1522441 - RNA, 19 nt, Artificial Sequence
  Description of Artificial Sequence: Synthetic oligonucleotide
cagccaccguuggggaggg

SEQ ID NO: 1522442 - RNA, 19 nt, Artificial Sequence
  Description of Artificial Sequence: Synthetic oligonucleotide
ggagggugauggacaagac

SEQ ID NO: 1522443 - RNA, 19 nt, Artificial Sequence
  Description of Artificial Sequence: Synthetic oligonucleotide
ucaccccucuaggcugugu

SEQ ID NO: 1522444 - RNA, 19 nt, Artificial Sequence
  Description of Artificial Sequence: Synthetic oligonucleotide
guacuggaagccgacugau

SEQ ID NO: 1522445 - RNA, 19 nt, Artificial Sequence
  Description of Artificial Sequence: Synthetic oligonucleotide
uucaccccucuaggcugug

SEQ ID NO: 1522446 - RNA, 19 nt, Artificial Sequence
  Description of Artificial Sequence: Synthetic oligonucleotide
gccccuggacaauaaauau

SEQ ID NO: 1522447 - RNA, 19 nt, Artificial Sequence
  Description of Artificial Sequence: Synthetic oligonucleotide
cuugauccccggcccagcu

SEQ ID NO: 1522448 - RNA, 19 nt, Artificial Sequence
  Description of Artificial Sequence: Synthetic oligonucleotide
caagagagacugccacugu

SEQ ID NO: 1522449 - RNA, 19 nt, Artificial Sequence
  Description of Artificial Sequence: Synthetic oligonucleotide
gcugugugauguuguggaa

SEQ ID NO: 1522450 - RNA, 19 nt, Artificial Sequence
  Description of Artificial Sequence: Synthetic oligonucleotide
cgcuccucguuccuucugc

SEQ ID NO: 1522451 - RNA, 19 nt, Artificial Sequence
  Description of Artificial Sequence: Synthetic oligonucleotide
ccaccguuggggagggcug

SEQ ID NO: 1522452 - RNA, 19 nt, Artificial Sequence
  Description of Artificial Sequence: Synthetic oligonucleotide
ggcgauuggcacugaaaau

SEQ ID NO: 1522453 - RNA, 19 nt, Artificial Sequence
  Description of Artificial Sequence: Synthetic oligonucleotide
gcagugaucucaggccuga

SEQ ID NO: 1522454 - RNA, 19 nt, Artificial Sequence
  Description of Artificial Sequence: Synthetic oligonucleotide
cccuucggcuccugcagug

SEQ ID NO: 1522455 - RNA, 19 nt, Artificial Sequence
  Description of Artificial Sequence: Synthetic oligonucleotide
guuacccgugugauaaauu

SEQ ID NO: 1522456 - RNA, 19 nt, Artificial Sequence
  Description of Artificial Sequence: Synthetic oligonucleotide
ggucaguacaggugccacu

SEQ ID NO: 1522457 - RNA, 19 nt, Artificial Sequence
  Description of Artificial Sequence: Synthetic oligonucleotide
guggcggcggacggauccc

SEQ ID NO: 1522458 - RNA, 19 nt, Artificial Sequence
  Description of Artificial Sequence: Synthetic oligonucleotide
accagcgaguagauaucua

SEQ ID NO: 1522459 - RNA, 19 nt, Artificial Sequence
  Description of Artificial Sequence: Synthetic oligonucleotide
ccaucugucgugaggggua

SEQ ID NO: 1522460 - RNA, 19 nt, Artificial Sequence
  Description of Artificial Sequence: Synthetic oligonucleotide
ggcucuuaucuugcuuuga

SEQ ID NO: 1522461 - RNA, 19 nt, Artificial Sequence
  Description of Artificial Sequence: Synthetic oligonucleotide
cacaccaguucaccccucu

SEQ ID NO: 1522462 - RNA, 19 nt, Artificial Sequence
  Description of Artificial Sequence: Synthetic oligonucleotide
agucaccagcgaguagaua

SEQ ID NO: 1522463 - RNA, 19 nt, Artificial Sequence
  Description of Artificial Sequence: Synthetic oligonucleotide
gcggccacugggaauaucu

SEQ ID NO: 1522464 - RNA, 19 nt, Artificial Sequence
  Description of Artificial Sequence: Synthetic oligonucleotide
cgugagggguaggaguagc

SEQ ID NO: 1522465 - RNA, 19 nt, Artificial Sequence
  Description of Artificial Sequence: Synthetic oligonucleotide
ggggugggccagcugcuuc

SEQ ID NO: 1522466 - RNA, 19 nt, Artificial Sequence
  Description of Artificial Sequence: Synthetic oligonucleotide
ggagaaggggugggccagc

SEQ ID NO: 1522467 - RNA, 19 nt, Artificial Sequence
  Description of Artificial Sequence: Synthetic oligonucleotide
caccagcgaguagauaucu

SEQ ID NO: 1522468 - RNA, 19 nt, Artificial Sequence
  Description of Artificial Sequence: Synthetic oligonucleotide
gagaaggggugggccagcu

SEQ ID NO: 1522469 - RNA, 19 nt, Artificial Sequence
  Description of Artificial Sequence: Synthetic oligonucleotide
gugccacuucugugaggca

SEQ ID NO: 1522470 - RNA, 19 nt, Artificial Sequence
  Description of Artificial Sequence: Synthetic oligonucleotide
ggcggacggaucccggaaa

SEQ ID NO: 1522471 - RNA, 19 nt, Artificial Sequence
  Description of Artificial Sequence: Synthetic oligonucleotide
gcuugauccccggcccagc

SEQ ID NO: 1522472 - RNA, 19 nt, Artificial Sequence
  Description of Artificial Sequence: Synthetic oligonucleotide
caccacggaacagugcaau

SEQ ID NO: 1522473 - RNA, 19 nt, Artificial Sequence
  Description of Artificial Sequence: Synthetic oligonucleotide
ggauggccccaaagacaag

SEQ ID NO: 1522474 - RNA, 19 nt, Artificial Sequence
  Description of Artificial Sequence: Synthetic oligonucleotide
cuucggcuccugcagugau

SEQ ID NO: 1522475 - RNA, 19 nt, Artificial Sequence
  Description of Artificial Sequence: Synthetic oligonucleotide
ccugagaguggcggcggac

SEQ ID NO: 1522476 - RNA, 19 nt, Artificial Sequence
  Description of Artificial Sequence: Synthetic oligonucleotide
ccaaaauggucuuccgauu

SEQ ID NO: 1522477 - RNA, 19 nt, Artificial Sequence
  Description of Artificial Sequence: Synthetic oligonucleotide
ggaggaugaccagugcgau

SEQ ID NO: 1522478 - RNA, 19 nt, Artificial Sequence
  Description of Artificial Sequence: Synthetic oligonucleotide
ggcgggcaggcacagguau

SEQ ID NO: 1522479 - RNA, 19 nt, Artificial Sequence
  Description of Artificial Sequence: Synthetic oligonucleotide
cggaucccggaaagagaag

SEQ ID NO: 1522480 - RNA, 19 nt, Artificial Sequence
  Description of Artificial Sequence: Synthetic oligonucleotide
ggucuggaccccuucucuu

SEQ ID NO: 1522481 - RNA, 19 nt, Artificial Sequence
  Description of Artificial Sequence: Synthetic oligonucleotide
agccaccguuggggagggc

SEQ ID NO: 1522482 - RNA, 19 nt, Artificial Sequence
  Description of Artificial Sequence: Synthetic oligonucleotide
cucuggggacaagagguuu

SEQ ID NO: 1522483 - RNA, 19 nt, Artificial Sequence
  Description of Artificial Sequence: Synthetic oligonucleotide
ccacaaugucucugggucu

SEQ ID NO: 1522484 - RNA, 19 nt, Artificial Sequence
  Description of Artificial Sequence: Synthetic oligonucleotide
ccccauugacaucaaugcu

SEQ ID NO: 1522485 - RNA, 19 nt, Artificial Sequence
  Description of Artificial Sequence: Synthetic oligonucleotide
uggccgcuccucguuccuu

SEQ ID NO: 1522486 - RNA, 19 nt, Artificial Sequence
  Description of Artificial Sequence: Synthetic oligonucleotide
gccgacugauccuccuugu

SEQ ID NO: 1522487 - RNA, 19 nt, Artificial Sequence
  Description of Artificial Sequence: Synthetic oligonucleotide
gaguggcggcggacggauc

SEQ ID NO: 1522488 - RNA, 19 nt, Artificial Sequence
  Description of Artificial Sequence: Synthetic oligonucleotide
accguuggggagggcuguu

SEQ ID NO: 1522489 - RNA, 19 nt, Artificial Sequence
  Description of Artificial Sequence: Synthetic oligonucleotide
guggccgcuccucguuccu

SEQ ID NO: 1522490 - RNA, 19 nt, Artificial Sequence
  Description of Artificial Sequence: Synthetic oligonucleotide
ggguaggaguagccguccu

SEQ ID NO: 1522491 - RNA, 19 nt, Artificial Sequence
  Description of Artificial Sequence: Synthetic oligonucleotide
gcccagcuuggcucuuauc

SEQ ID NO: 1522492 - RNA, 19 nt, Artificial Sequence
  Description of Artificial Sequence: Synthetic oligonucleotide
caccguuggggagggcugu

SEQ ID NO: 1522493 - RNA, 19 nt, Artificial Sequence
  Description of Artificial Sequence: Synthetic oligonucleotide
ccguuggggagggcuguuc

SEQ ID NO: 1522494 - RNA, 19 nt, Artificial Sequence
  Description of Artificial Sequence: Synthetic oligonucleotide
aggcggccacugggaauau

SEQ ID NO: 1522495 - RNA, 19 nt, Artificial Sequence
  Description of Artificial Sequence: Synthetic oligonucleotide
cccaauagaggcggccacu

SEQ ID NO: 1522496 - RNA, 19 nt, Artificial Sequence
  Description of Artificial Sequence: Synthetic oligonucleotide
ggcccagcuuggcucuuau

SEQ ID NO: 1522497 - RNA, 19 nt, Artificial Sequence
  Description of Artificial Sequence: Synthetic oligonucleotide
cgcauauccuuggccagua

SEQ ID NO: 1522498 - RNA, 19 nt, Artificial Sequence
  Description of Artificial Sequence: Synthetic oligonucleotide
cucaggccugaugguggau

SEQ ID NO: 1522499 - RNA, 19 nt, Artificial Sequence
  Description of Artificial Sequence: Synthetic oligonucleotide
gggcgggcaggcacaggua

SEQ ID NO: 1522500 - RNA, 19 nt, Artificial Sequence
  Description of Artificial Sequence: Synthetic oligonucleotide
cugagccugugaggcgauu

SEQ ID NO: 1522501 - RNA, 19 nt, Artificial Sequence
  Description of Artificial Sequence: Synthetic oligonucleotide
cggcaaauauggaguucau

SEQ ID NO: 1522502 - RNA, 19 nt, Artificial Sequence
  Description of Artificial Sequence: Synthetic oligonucleotide
cguccuggcuucggcaaau

SEQ ID NO: 1522503 - RNA, 19 nt, Artificial Sequence
  Description of Artificial Sequence: Synthetic oligonucleotide
ccggcccagcuuggcucuu

SEQ ID NO: 1522504 - RNA, 19 nt, Artificial Sequence
  Description of Artificial Sequence: Synthetic oligonucleotide
aauuauaugacauggcuuc

SEQ ID NO: 1522505 - RNA, 19 nt, Artificial Sequence
  Description of Artificial Sequence: Synthetic oligonucleotide
aacaauuaaguuuacauug

SEQ ID NO: 1522506 - RNA, 19 nt, Artificial Sequence
  Description of Artificial Sequence: Synthetic oligonucleotide
uucaauaucuuucucaagg

SEQ ID NO: 1522507 - RNA, 19 nt, Artificial Sequence
  Description of Artificial Sequence: Synthetic oligonucleotide
ugaaguagaaucuacacag

SEQ ID NO: 1522508 - RNA, 19 nt, Artificial Sequence
  Description of Artificial Sequence: Synthetic oligonucleotide
cuaaaagaaauauuuaggg

SEQ ID NO: 1522509 - RNA, 19 nt, Artificial Sequence
  Description of Artificial Sequence: Synthetic oligonucleotide
aaaacuaaaguucauaaau

SEQ ID NO: 1522510 - RNA, 19 nt, Artificial Sequence
  Description of Artificial Sequence: Synthetic oligonucleotide
aaaaguauacaaaauuagc

SEQ ID NO: 1522511 - RNA, 19 nt, Artificial Sequence
  Description of Artificial Sequence: Synthetic oligonucleotide
uguaucauaauauaauacc

SEQ ID NO: 1522512 - RNA, 19 nt, Artificial Sequence
  Description of Artificial Sequence: Synthetic oligonucleotide
uaauauaauacccuuuucc

SEQ ID NO: 1522513 - RNA, 19 nt, Artificial Sequence
  Description of Artificial Sequence: Synthetic oligonucleotide
aauauaauacccuuuuccu

SEQ ID NO: 1522514 - RNA, 19 nt, Artificial Sequence
  Description of Artificial Sequence: Synthetic oligonucleotide
agcuaggaaacucacaucc

SEQ ID NO: 1522515 - RNA, 19 nt, Artificial Sequence
  Description of Artificial Sequence: Synthetic oligonucleotide
uucauauccagaauaacag

SEQ ID NO: 1522516 - RNA, 19 nt, Artificial Sequence
  Description of Artificial Sequence: Synthetic oligonucleotide
aacuaaaguucauaaauug

SEQ ID NO: 1522517 - RNA, 19 nt, Artificial Sequence
  Description of Artificial Sequence: Synthetic oligonucleotide
auauauauaauuucagucu

SEQ ID NO: 1522518 - RNA, 19 nt, Artificial Sequence
  Description of Artificial Sequence: Synthetic oligonucleotide
gaugaguuuaccuaauaag

SEQ ID NO: 1522519 - RNA, 19 nt, Artificial Sequence
  Description of Artificial Sequence: Synthetic oligonucleotide
aaauuguuaacaaaucuag

SEQ ID NO: 1522520 - RNA, 19 nt, Artificial Sequence
  Description of Artificial Sequence: Synthetic oligonucleotide
ucuacaaucuauaauaaua

SEQ ID NO: 1522521 - RNA, 19 nt, Artificial Sequence
  Description of Artificial Sequence: Synthetic oligonucleotide
aagagaaacaugcuugauc

SEQ ID NO: 1522522 - RNA, 19 nt, Artificial Sequence
  Description of Artificial Sequence: Synthetic oligonucleotide
aaguucauaaauuguuaac

SEQ ID NO: 1522523 - RNA, 19 nt, Artificial Sequence
  Description of Artificial Sequence: Synthetic oligonucleotide
ucauaaauuguuaacaaau

SEQ ID NO: 1522524 - RNA, 19 nt, Artificial Sequence
  Description of Artificial Sequence: Synthetic oligonucleotide
ucagauacaaaauuauaug

SEQ ID NO: 1522525 - RNA, 19 nt, Artificial Sequence
  Description of Artificial Sequence: Synthetic oligonucleotide
aauacagguagccuuaaga

SEQ ID NO: 1522526 - RNA, 19 nt, Artificial Sequence
  Description of Artificial Sequence: Synthetic oligonucleotide
auuguuaacaaaucuagga

SEQ ID NO: 1522527 - RNA, 19 nt, Artificial Sequence
  Description of Artificial Sequence: Synthetic oligonucleotide
uguuaacaaaucuaggagc

SEQ ID NO: 1522528 - RNA, 19 nt, Artificial Sequence
  Description of Artificial Sequence: Synthetic oligonucleotide
uauaauacccuuuuccuga

SEQ ID NO: 1522529 - RNA, 19 nt, Artificial Sequence
  Description of Artificial Sequence: Synthetic oligonucleotide
uugcugacugauuaaaucg

SEQ ID NO: 1522530 - RNA, 19 nt, Artificial Sequence
  Description of Artificial Sequence: Synthetic oligonucleotide
agagaaacaugcuugauca

SEQ ID NO: 1522531 - RNA, 19 nt, Artificial Sequence
  Description of Artificial Sequence: Synthetic oligonucleotide
cuuggaauguaaaugaaac

SEQ ID NO: 1522532 - RNA, 19 nt, Artificial Sequence
  Description of Artificial Sequence: Synthetic oligonucleotide
uauaucaccagcuuucaug

SEQ ID NO: 1522533 - RNA, 19 nt, Artificial Sequence
  Description of Artificial Sequence: Synthetic oligonucleotide
aaggucaucuaucugacca

SEQ ID NO: 1522534 - RNA, 19 nt, Artificial Sequence
  Description of Artificial Sequence: Synthetic oligonucleotide
aaauuagcuuaauuacaac

SEQ ID NO: 1522535 - RNA, 19 nt, Artificial Sequence
  Description of Artificial Sequence: Synthetic oligonucleotide
gaaauaucacaugagaccc

SEQ ID NO: 1522536 - RNA, 19 nt, Artificial Sequence
  Description of Artificial Sequence: Synthetic oligonucleotide
auaaauuguuaacaaaucu

SEQ ID NO: 1522537 - RNA, 19 nt, Artificial Sequence
  Description of Artificial Sequence: Synthetic oligonucleotide
ucugcauuuauacugagua

SEQ ID NO: 1522538 - RNA, 19 nt, Artificial Sequence
  Description of Artificial Sequence: Synthetic oligonucleotide
acuaaaagaaauauuuagg

SEQ ID NO: 1522539 - RNA, 19 nt, Artificial Sequence
  Description of Artificial Sequence: Synthetic oligonucleotide
gacugauuaaaucggaugc

SEQ ID NO: 1522540 - RNA, 19 nt, Artificial Sequence
  Description of Artificial Sequence: Synthetic oligonucleotide
agccuuaagagaaacaugc

SEQ ID NO: 1522541 - RNA, 19 nt, Artificial Sequence
  Description of Artificial Sequence: Synthetic oligonucleotide
ugauuuauggaacuauaca

SEQ ID NO: 1522542 - RNA, 19 nt, Artificial Sequence
  Description of Artificial Sequence: Synthetic oligonucleotide
aaauauuuaggguauccaa

SEQ ID NO: 1522543 - RNA, 19 nt, Artificial Sequence
  Description of Artificial Sequence: Synthetic oligonucleotide
aaaaguaucaagucuucau

SEQ ID NO: 1522544 - RNA, 19 nt, Artificial Sequence
  Description of Artificial Sequence: Synthetic oligonucleotide
uaaaagaaauauuuagggu

SEQ ID NO: 1522545 - RNA, 19 nt, Artificial Sequence
  Description of Artificial Sequence: Synthetic oligonucleotide
uuuccaaaccuucugguug

SEQ ID NO: 1522546 - RNA, 19 nt, Artificial Sequence
  Description of Artificial Sequence: Synthetic oligonucleotide
ucuuaaaaguauauauaca

SEQ ID NO: 1522547 - RNA, 19 nt, Artificial Sequence
  Description of Artificial Sequence: Synthetic oligonucleotide
uauggaacuauacaucaga

SEQ ID NO: 1522548 - RNA, 19 nt, Artificial Sequence
  Description of Artificial Sequence: Synthetic oligonucleotide
ucuaggagcaauaauuuaa

SEQ ID NO: 1522549 - RNA, 19 nt, Artificial Sequence
  Description of Artificial Sequence: Synthetic oligonucleotide
uaagcaucugcauuuauac

SEQ ID NO: 1522550 - RNA, 19 nt, Artificial Sequence
  Description of Artificial Sequence: Synthetic oligonucleotide
aauaacagccuuuuauuau

SEQ ID NO: 1522551 - RNA, 19 nt, Artificial Sequence
  Description of Artificial Sequence: Synthetic oligonucleotide
acaaugaacaauuaaguuu

SEQ ID NO: 1522552 - RNA, 19 nt, Artificial Sequence
  Description of Artificial Sequence: Synthetic oligonucleotide
cuggaauuaaacaaugaac

SEQ ID NO: 1522553 - RNA, 19 nt, Artificial Sequence
  Description of Artificial Sequence: Synthetic oligonucleotide
aauaaguuuuacaugagaa

SEQ ID NO: 1522554 - RNA, 19 nt, Artificial Sequence
  Description of Artificial Sequence: Synthetic oligonucleotide
cuuacaagaaaacaguuca

SEQ ID NO: 1522555 - RNA, 19 nt, Artificial Sequence
  Description of Artificial Sequence: Synthetic oligonucleotide
auacagguagccuuaagag

SEQ ID NO: 1522556 - RNA, 19 nt, Artificial Sequence
  Description of Artificial Sequence: Synthetic oligonucleotide
aaaauaagucauaaguuga

SEQ ID NO: 1522557 - RNA, 19 nt, Artificial Sequence
  Description of Artificial Sequence: Synthetic oligonucleotide
aauuacaacaucaacuuau

SEQ ID NO: 1522558 - RNA, 19 nt, Artificial Sequence
  Description of Artificial Sequence: Synthetic oligonucleotide
aagcuuggaauguaaauga

SEQ ID NO: 1522559 - RNA, 19 nt, Artificial Sequence
  Description of Artificial Sequence: Synthetic oligonucleotide
uacaugagaaauaucacau

SEQ ID NO: 1522560 - RNA, 19 nt, Artificial Sequence
  Description of Artificial Sequence: Synthetic oligonucleotide
uaucaaaggucuuaaaguc

SEQ ID NO: 1522561 - RNA, 19 nt, Artificial Sequence
  Description of Artificial Sequence: Synthetic oligonucleotide
uagcuuaauuacaacauca

SEQ ID NO: 1522562 - RNA, 19 nt, Artificial Sequence
  Description of Artificial Sequence: Synthetic oligonucleotide
uuugcuuuuggaaaaguau

SEQ ID NO: 1522563 - RNA, 19 nt, Artificial Sequence
  Description of Artificial Sequence: Synthetic oligonucleotide
acucacauccacaaaaggc

SEQ ID NO: 1522564 - RNA, 19 nt, Artificial Sequence
  Description of Artificial Sequence: Synthetic oligonucleotide
aaaucuaggagcaauaauu

SEQ ID NO: 1522565 - RNA, 19 nt, Artificial Sequence
  Description of Artificial Sequence: Synthetic oligonucleotide
guaucaagucuucauaucc

SEQ ID NO: 1522566 - RNA, 19 nt, Artificial Sequence
  Description of Artificial Sequence: Synthetic oligonucleotide
uuggaaaaguaucaagucu

SEQ ID NO: 1522567 - RNA, 19 nt, Artificial Sequence
  Description of Artificial Sequence: Synthetic oligonucleotide
uauccaacuauauuugcca

SEQ ID NO: 1522568 - RNA, 19 nt, Artificial Sequence
  Description of Artificial Sequence: Synthetic oligonucleotide
agaucuuugagccuuacaa

SEQ ID NO: 1522569 - RNA, 19 nt, Artificial Sequence
  Description of Artificial Sequence: Synthetic oligonucleotide
uuuacaugagaaauaucac

SEQ ID NO: 1522570 - RNA, 19 nt, Artificial Sequence
  Description of Artificial Sequence: Synthetic oligonucleotide
uaauaaguuuuacaugaga

SEQ ID NO: 1522571 - RNA, 19 nt, Artificial Sequence
  Description of Artificial Sequence: Synthetic oligonucleotide
aaaauuagcuuaauuacaa

SEQ ID NO: 1522572 - RNA, 19 nt, Artificial Sequence
  Description of Artificial Sequence: Synthetic oligonucleotide
uguaaaugaaacuuauuuu

SEQ ID NO: 1522573 - RNA, 19 nt, Artificial Sequence
  Description of Artificial Sequence: Synthetic oligonucleotide
guaucauaauauaauaccc

SEQ ID NO: 1522574 - RNA, 19 nt, Artificial Sequence
  Description of Artificial Sequence: Synthetic oligonucleotide
ucaauuuuacagacaaaac

SEQ ID NO: 1522575 - RNA, 19 nt, Artificial Sequence
  Description of Artificial Sequence: Synthetic oligonucleotide
ugagaccccaaauaaaugu

SEQ ID NO: 1522576 - RNA, 19 nt, Artificial Sequence
  Description of Artificial Sequence: Synthetic oligonucleotide
ugcauuuauacugaguaca

SEQ ID NO: 1522577 - RNA, 19 nt, Artificial Sequence
  Description of Artificial Sequence: Synthetic oligonucleotide
aaauaagucauaaguugag

SEQ ID NO: 1522578 - RNA, 19 nt, Artificial Sequence
  Description of Artificial Sequence: Synthetic oligonucleotide
aaaguaucaagucuucaua

SEQ ID NO: 1522579 - RNA, 19 nt, Artificial Sequence
  Description of Artificial Sequence: Synthetic oligonucleotide
uuaccuaauaaguuuuaca

SEQ ID NO: 1522580 - RNA, 19 nt, Artificial Sequence
  Description of Artificial Sequence: Synthetic oligonucleotide
uauacugaguacaucacua

SEQ ID NO: 1522581 - RNA, 19 nt, Artificial Sequence
  Description of Artificial Sequence: Synthetic oligonucleotide
uuuggaaaaguaucaaguc

SEQ ID NO: 1522582 - RNA, 19 nt, Artificial Sequence
  Description of Artificial Sequence: Synthetic oligonucleotide
auauuuaggguauccaacu

SEQ ID NO: 1522583 - RNA, 19 nt, Artificial Sequence
  Description of Artificial Sequence: Synthetic oligonucleotide
uacacaggcaucuugcuga

SEQ ID NO: 1522584 - RNA, 19 nt, Artificial Sequence
  Description of Artificial Sequence: Synthetic oligonucleotide
acaauuaaguuuacauugc

SEQ ID NO: 1522585 - RNA, 19 nt, Artificial Sequence
  Description of Artificial Sequence: Synthetic oligonucleotide
uugauuuauggaacuauac

SEQ ID NO: 1522586 - RNA, 19 nt, Artificial Sequence
  Description of Artificial Sequence: Synthetic oligonucleotide
auauaauacccuuuuccug

SEQ ID NO: 1522587 - RNA, 19 nt, Artificial Sequence
  Description of Artificial Sequence: Synthetic oligonucleotide
auuuauggaacuauacauc

SEQ ID NO: 1522588 - RNA, 19 nt, Artificial Sequence
  Description of Artificial Sequence: Synthetic oligonucleotide
gaaacucacauccacaaaa

SEQ ID NO: 1522589 - RNA, 19 nt, Artificial Sequence
  Description of Artificial Sequence: Synthetic oligonucleotide
accagcuuucaugagagcc

SEQ ID NO: 1522590 - RNA, 19 nt, Artificial Sequence
  Description of Artificial Sequence: Synthetic oligonucleotide
cauaaauuguuaacaaauc

SEQ ID NO: 1522591 - RNA, 19 nt, Artificial Sequence
  Description of Artificial Sequence: Synthetic oligonucleotide
gaucuuugagccuuacaag

SEQ ID NO: 1522592 - RNA, 19 nt, Artificial Sequence
  Description of Artificial Sequence: Synthetic oligonucleotide
uuaagagaaacaugcuuga

SEQ ID NO: 1522593 - RNA, 19 nt, Artificial Sequence
  Description of Artificial Sequence: Synthetic oligonucleotide
auaugacauggcuucauuc

SEQ ID NO: 1522594 - RNA, 19 nt, Artificial Sequence
  Description of Artificial Sequence: Synthetic oligonucleotide
ugacugauuaaaucggaug

SEQ ID NO: 1522595 - RNA, 19 nt, Artificial Sequence
  Description of Artificial Sequence: Synthetic oligonucleotide
caaaauuauaugacauggc

SEQ ID NO: 1522596 - RNA, 19 nt, Artificial Sequence
  Description of Artificial Sequence: Synthetic oligonucleotide
uggaaaaguaucaagucuu

SEQ ID NO: 1522597 - RNA, 19 nt, Artificial Sequence
  Description of Artificial Sequence: Synthetic oligonucleotide
auacccuuuuccugaaagc

SEQ ID NO: 1522598 - RNA, 19 nt, Artificial Sequence
  Description of Artificial Sequence: Synthetic oligonucleotide
uauuuugauuuauggaacu

SEQ ID NO: 1522599 - RNA, 19 nt, Artificial Sequence
  Description of Artificial Sequence: Synthetic oligonucleotide
aucuuugagccuuacaaga

SEQ ID NO: 1522600 - RNA, 19 nt, Artificial Sequence
  Description of Artificial Sequence: Synthetic oligonucleotide
acugauuaaaucggaugcc

SEQ ID NO: 1522601 - RNA, 19 nt, Artificial Sequence
  Description of Artificial Sequence: Synthetic oligonucleotide
ucaugagagccuuaauugc

SEQ ID NO: 1522602 - RNA, 19 nt, Artificial Sequence
  Description of Artificial Sequence: Synthetic oligonucleotide
aaugaaacccuguaucaua

SEQ ID NO: 1522603 - RNA, 19 nt, Artificial Sequence
  Description of Artificial Sequence: Synthetic oligonucleotide
uggaauguaaaugaaacuu

SEQ ID NO: 1522604 - RNA, 19 nt, Artificial Sequence
  Description of Artificial Sequence: Synthetic oligonucleotide
uuauacugaguacaucacu

SEQ ID NO: 1522605 - RNA, 19 nt, Artificial Sequence
  Description of Artificial Sequence: Synthetic oligonucleotide
uucauuaguuuuagcuagg

SEQ ID NO: 1522606 - RNA, 19 nt, Artificial Sequence
  Description of Artificial Sequence: Synthetic oligonucleotide
uuagcuuaauuacaacauc

SEQ ID NO: 1522607 - RNA, 19 nt, Artificial Sequence
  Description of Artificial Sequence: Synthetic oligonucleotide
aucagaaaacuagacuggc

SEQ ID NO: 1522608 - RNA, 19 nt, Artificial Sequence
  Description of Artificial Sequence: Synthetic oligonucleotide
gagccuuacaagaaaacag

SEQ ID NO: 1522609 - RNA, 19 nt, Artificial Sequence
  Description of Artificial Sequence: Synthetic oligonucleotide
ucauauccagaauaacagc

SEQ ID NO: 1522610 - RNA, 19 nt, Artificial Sequence
  Description of Artificial Sequence: Synthetic oligonucleotide
uuucagucuaagaugaguu

SEQ ID NO: 1522611 - RNA, 19 nt, Artificial Sequence
  Description of Artificial Sequence: Synthetic oligonucleotide
uauccugacuccuuguuga

SEQ ID NO: 1522612 - RNA, 19 nt, Artificial Sequence
  Description of Artificial Sequence: Synthetic oligonucleotide
ggaacuauacaucagaucu

SEQ ID NO: 1522613 - RNA, 19 nt, Artificial Sequence
  Description of Artificial Sequence: Synthetic oligonucleotide
uuugauuuauggaacuaua

SEQ ID NO: 1522614 - RNA, 19 nt, Artificial Sequence
  Description of Artificial Sequence: Synthetic oligonucleotide
aaauaucacaugagacccc

SEQ ID NO: 1522615 - RNA, 19 nt, Artificial Sequence
  Description of Artificial Sequence: Synthetic oligonucleotide
gcuucauucaaacacacac

SEQ ID NO: 1522616 - RNA, 19 nt, Artificial Sequence
  Description of Artificial Sequence: Synthetic oligonucleotide
uacaucagaucuucaaaca

SEQ ID NO: 1522617 - RNA, 19 nt, Artificial Sequence
  Description of Artificial Sequence: Synthetic oligonucleotide
agaauaacagccuuuuauu

SEQ ID NO: 1522618 - RNA, 19 nt, Artificial Sequence
  Description of Artificial Sequence: Synthetic oligonucleotide
ucaauaucuuucucaaggu

SEQ ID NO: 1522619 - RNA, 19 nt, Artificial Sequence
  Description of Artificial Sequence: Synthetic oligonucleotide
acuaucuuccccuuugccu

SEQ ID NO: 1522620 - RNA, 19 nt, Artificial Sequence
  Description of Artificial Sequence: Synthetic oligonucleotide
ugcuaauuuguuuauuaaa

SEQ ID NO: 1522621 - RNA, 19 nt, Artificial Sequence
  Description of Artificial Sequence: Synthetic oligonucleotide
uuauggaacuauacaucag

SEQ ID NO: 1522622 - RNA, 19 nt, Artificial Sequence
  Description of Artificial Sequence: Synthetic oligonucleotide
aauaagucauaaguugagu

SEQ ID NO: 1522623 - RNA, 19 nt, Artificial Sequence
  Description of Artificial Sequence: Synthetic oligonucleotide
auaagucauaaguugaguu

SEQ ID NO: 1522624 - RNA, 19 nt, Artificial Sequence
  Description of Artificial Sequence: Synthetic oligonucleotide
acaaucuauaauaauaaaa

SEQ ID NO: 1522625 - RNA, 19 nt, Artificial Sequence
  Description of Artificial Sequence: Synthetic oligonucleotide
uuugagccuuacaagaaaa

SEQ ID NO: 1522626 - RNA, 19 nt, Artificial Sequence
  Description of Artificial Sequence: Synthetic oligonucleotide
gagcaauaauuuaagauuc

SEQ ID NO: 1522627 - RNA, 19 nt, Artificial Sequence
  Description of Artificial Sequence: Synthetic oligonucleotide
uaagucauaaguugaguuu

SEQ ID NO: 1522628 - RNA, 19 nt, Artificial Sequence
  Description of Artificial Sequence: Synthetic oligonucleotide
aguucauuaguuuuagcua

SEQ ID NO: 1522629 - RNA, 19 nt, Artificial Sequence
  Description of Artificial Sequence: Synthetic oligonucleotide
augaguuuaccuaauaagu

SEQ ID NO: 1522630 - RNA, 19 nt, Artificial Sequence
  Description of Artificial Sequence: Synthetic oligonucleotide
cuauaucgcugucauaagc

SEQ ID NO: 1522631 - RNA, 19 nt, Artificial Sequence
  Description of Artificial Sequence: Synthetic oligonucleotide
auauaauuucagucuaaga

SEQ ID NO: 1522632 - RNA, 19 nt, Artificial Sequence
  Description of Artificial Sequence: Synthetic oligonucleotide
uuuuagcuaggaaacucac

SEQ ID NO: 1522633 - RNA, 19 nt, Artificial Sequence
  Description of Artificial Sequence: Synthetic oligonucleotide
uuggaauguaaaugaaacu

SEQ ID NO: 1522634 - RNA, 19 nt, Artificial Sequence
  Description of Artificial Sequence: Synthetic oligonucleotide
uuuaggguauccaacuaua

SEQ ID NO: 1522635 - RNA, 19 nt, Artificial Sequence
  Description of Artificial Sequence: Synthetic oligonucleotide
uuuagcuaggaaacucaca

SEQ ID NO: 1522636 - RNA, 19 nt, Artificial Sequence
  Description of Artificial Sequence: Synthetic oligonucleotide
ccuaauaaguuuuacauga

SEQ ID NO: 1522637 - RNA, 19 nt, Artificial Sequence
  Description of Artificial Sequence: Synthetic oligonucleotide
cucaaggucaucuaucuga

SEQ ID NO: 1522638 - RNA, 19 nt, Artificial Sequence
  Description of Artificial Sequence: Synthetic oligonucleotide
uucucaaggucaucuaucu

SEQ ID NO: 1522639 - RNA, 19 nt, Artificial Sequence
  Description of Artificial Sequence: Synthetic oligonucleotide
aaacucacauccacaaaag

SEQ ID NO: 1522640 - RNA, 19 nt, Artificial Sequence
  Description of Artificial Sequence: Synthetic oligonucleotide
cuaauaaguuuuacaugag

SEQ ID NO: 1522641 - RNA, 19 nt, Artificial Sequence
  Description of Artificial Sequence: Synthetic oligonucleotide
ugagccuuacaagaaaaca

SEQ ID NO: 1522642 - RNA, 19 nt, Artificial Sequence
  Description of Artificial Sequence: Synthetic oligonucleotide
aaauacagguagccuuaag

SEQ ID NO: 1522643 - RNA, 19 nt, Artificial Sequence
  Description of Artificial Sequence: Synthetic oligonucleotide
aaauuauaugacauggcuu

SEQ ID NO: 1522644 - RNA, 19 nt, Artificial Sequence
  Description of Artificial Sequence: Synthetic oligonucleotide
guuaacaaaucuaggagca

SEQ ID NO: 1522645 - RNA, 19 nt, Artificial Sequence
  Description of Artificial Sequence: Synthetic oligonucleotide
uuaaguuuacauugcuaaa

SEQ ID NO: 1522646 - RNA, 19 nt, Artificial Sequence
  Description of Artificial Sequence: Synthetic oligonucleotide
ucauaauauaauacccuuu

SEQ ID NO: 1522647 - RNA, 19 nt, Artificial Sequence
  Description of Artificial Sequence: Synthetic oligonucleotide
ucugaccagcuucacuccg

SEQ ID NO: 1522648 - RNA, 19 nt, Artificial Sequence
  Description of Artificial Sequence: Synthetic oligonucleotide
aaauauccugacuccuugu

SEQ ID NO: 1522649 - RNA, 19 nt, Artificial Sequence
  Description of Artificial Sequence: Synthetic oligonucleotide
auuagcuuaauuacaacau

SEQ ID NO: 1522650 - RNA, 19 nt, Artificial Sequence
  Description of Artificial Sequence: Synthetic oligonucleotide
ugucagauacaaaauuaua

SEQ ID NO: 1522651 - RNA, 19 nt, Artificial Sequence
  Description of Artificial Sequence: Synthetic oligonucleotide
ucacaugagaccccaaaua

SEQ ID NO: 1522652 - RNA, 19 nt, Artificial Sequence
  Description of Artificial Sequence: Synthetic oligonucleotide
auuacaacaucaacuuauc

SEQ ID NO: 1522653 - RNA, 19 nt, Artificial Sequence
  Description of Artificial Sequence: Synthetic oligonucleotide
uugaguuuguugcccaaac

SEQ ID NO: 1522654 - RNA, 19 nt, Artificial Sequence
  Description of Artificial Sequence: Synthetic oligonucleotide
aauauccugacuccuuguu

SEQ ID NO: 1522655 - RNA, 19 nt, Artificial Sequence
  Description of Artificial Sequence: Synthetic oligonucleotide
uugaucaaucuuuucuuaa

SEQ ID NO: 1522656 - RNA, 19 nt, Artificial Sequence
  Description of Artificial Sequence: Synthetic oligonucleotide
ucuauaucgcugucauaag

SEQ ID NO: 1522657 - RNA, 19 nt, Artificial Sequence
  Description of Artificial Sequence: Synthetic oligonucleotide
aaaccuucugguuguuugu

SEQ ID NO: 1522658 - RNA, 19 nt, Artificial Sequence
  Description of Artificial Sequence: Synthetic oligonucleotide
auuuaggguauccaacuau

SEQ ID NO: 1522659 - RNA, 19 nt, Artificial Sequence
  Description of Artificial Sequence: Synthetic oligonucleotide
ucagaaaacuagacuggcu

SEQ ID NO: 1522660 - RNA, 19 nt, Artificial Sequence
  Description of Artificial Sequence: Synthetic oligonucleotide
aagaaauauuuaggguauc

SEQ ID NO: 1522661 - RNA, 19 nt, Artificial Sequence
  Description of Artificial Sequence: Synthetic oligonucleotide
uuuaccuaauaaguuuuac

SEQ ID NO: 1522662 - RNA, 19 nt, Artificial Sequence
  Description of Artificial Sequence: Synthetic oligonucleotide
auaacagccuuuuauuauu

SEQ ID NO: 1522663 - RNA, 19 nt, Artificial Sequence
  Description of Artificial Sequence: Synthetic oligonucleotide
aucaaaugaaacccuguau

SEQ ID NO: 1522664 - RNA, 19 nt, Artificial Sequence
  Description of Artificial Sequence: Synthetic oligonucleotide
aagucauaaguugaguuuu

SEQ ID NO: 1522665 - RNA, 19 nt, Artificial Sequence
  Description of Artificial Sequence: Synthetic oligonucleotide
acuaaaguucauaaauugu

SEQ ID NO: 1522666 - RNA, 19 nt, Artificial Sequence
  Description of Artificial Sequence: Synthetic oligonucleotide
acaugagaaauaucacaug

SEQ ID NO: 1522667 - RNA, 19 nt, Artificial Sequence
  Description of Artificial Sequence: Synthetic oligonucleotide
acugaguacaucacuaucu

SEQ ID NO: 1522668 - RNA, 19 nt, Artificial Sequence
  Description of Artificial Sequence: Synthetic oligonucleotide
agucuaagaugaguuuacc

SEQ ID NO: 1522669 - RNA, 19 nt, Artificial Sequence
  Description of Artificial Sequence: Synthetic oligonucleotide
aauugcucuugcccucauc

SEQ ID NO: 1522670 - RNA, 19 nt, Artificial Sequence
  Description of Artificial Sequence: Synthetic oligonucleotide
uugcccaaacauuuuaaaa

SEQ ID NO: 1522671 - RNA, 19 nt, Artificial Sequence
  Description of Artificial Sequence: Synthetic oligonucleotide
aacccuguaucauaauaua

SEQ ID NO: 1522672 - RNA, 19 nt, Artificial Sequence
  Description of Artificial Sequence: Synthetic oligonucleotide
auauccugacuccuuguug

SEQ ID NO: 1522673 - RNA, 19 nt, Artificial Sequence
  Description of Artificial Sequence: Synthetic oligonucleotide
aaucuaggagcaauaauuu

SEQ ID NO: 1522674 - RNA, 19 nt, Artificial Sequence
  Description of Artificial Sequence: Synthetic oligonucleotide
ucaagucuucauauccaga

SEQ ID NO: 1522675 - RNA, 19 nt, Artificial Sequence
  Description of Artificial Sequence: Synthetic oligonucleotide
gcaugggccuucuauaucg

SEQ ID NO: 1522676 - RNA, 19 nt, Artificial Sequence
  Description of Artificial Sequence: Synthetic oligonucleotide
aaaugaaacccuguaucau

SEQ ID NO: 1522677 - RNA, 19 nt, Artificial Sequence
  Description of Artificial Sequence: Synthetic oligonucleotide
cuaagaugaguuuaccuaa

SEQ ID NO: 1522678 - RNA, 19 nt, Artificial Sequence
  Description of Artificial Sequence: Synthetic oligonucleotide
guauccaacuauauuugcc

SEQ ID NO: 1522679 - RNA, 19 nt, Artificial Sequence
  Description of Artificial Sequence: Synthetic oligonucleotide
uuuauaucaccagcuuuca

SEQ ID NO: 1522680 - RNA, 19 nt, Artificial Sequence
  Description of Artificial Sequence: Synthetic oligonucleotide
uggcaagaugcuaauuugu

SEQ ID NO: 1522681 - RNA, 19 nt, Artificial Sequence
  Description of Artificial Sequence: Synthetic oligonucleotide
ugggccuucuauaucgcug

SEQ ID NO: 1522682 - RNA, 19 nt, Artificial Sequence
  Description of Artificial Sequence: Synthetic oligonucleotide
gaaacaugcuugaucaauc

SEQ ID NO: 1522683 - RNA, 19 nt, Artificial Sequence
  Description of Artificial Sequence: Synthetic oligonucleotide
aauuaaguuuacauugcua

SEQ ID NO: 1522684 - RNA, 19 nt, Artificial Sequence
  Description of Artificial Sequence: Synthetic oligonucleotide
acagguagccuuaagagaa

SEQ ID NO: 1522685 - RNA, 19 nt, Artificial Sequence
  Description of Artificial Sequence: Synthetic oligonucleotide
uacugaguacaucacuauc

SEQ ID NO: 1522686 - RNA, 19 nt, Artificial Sequence
  Description of Artificial Sequence: Synthetic oligonucleotide
uuacaagaaaacaguucau

SEQ ID NO: 1522687 - RNA, 19 nt, Artificial Sequence
  Description of Artificial Sequence: Synthetic oligonucleotide
guggcaagaugcuaauuug

SEQ ID NO: 1522688 - RNA, 19 nt, Artificial Sequence
  Description of Artificial Sequence: Synthetic oligonucleotide
aaucggaugccaccuuaca

SEQ ID NO: 1522689 - RNA, 19 nt, Artificial Sequence
  Description of Artificial Sequence: Synthetic oligonucleotide
uaauuacaacaucaacuua

SEQ ID NO: 1522690 - RNA, 19 nt, Artificial Sequence
  Description of Artificial Sequence: Synthetic oligonucleotide
uacccuuuuccugaaagcu

SEQ ID NO: 1522691 - RNA, 19 nt, Artificial Sequence
  Description of Artificial Sequence: Synthetic oligonucleotide
auuucagucuaagaugagu

SEQ ID NO: 1522692 - RNA, 19 nt, Artificial Sequence
  Description of Artificial Sequence: Synthetic oligonucleotide
uggaacuauacaucagauc

SEQ ID NO: 1522693 - RNA, 19 nt, Artificial Sequence
  Description of Artificial Sequence: Synthetic oligonucleotide
uugagccuuacaagaaaac

SEQ ID NO: 1522694 - RNA, 19 nt, Artificial Sequence
  Description of Artificial Sequence: Synthetic oligonucleotide
aacuuaucaaaggucuuaa

SEQ ID NO: 1522695 - RNA, 19 nt, Artificial Sequence
  Description of Artificial Sequence: Synthetic oligonucleotide
ucagucuaagaugaguuua

SEQ ID NO: 1522696 - RNA, 19 nt, Artificial Sequence
  Description of Artificial Sequence: Synthetic oligonucleotide
augagaaauaucacaugag

SEQ ID NO: 1522697 - RNA, 19 nt, Artificial Sequence
  Description of Artificial Sequence: Synthetic oligonucleotide
uauuuaggguauccaacua

SEQ ID NO: 1522698 - RNA, 19 nt, Artificial Sequence
  Description of Artificial Sequence: Synthetic oligonucleotide
uuaggguauccaacuauau

SEQ ID NO: 1522699 - RNA, 19 nt, Artificial Sequence
  Description of Artificial Sequence: Synthetic oligonucleotide
guugcugugcagaaggcug

SEQ ID NO: 1522700 - RNA, 19 nt, Artificial Sequence
  Description of Artificial Sequence: Synthetic oligonucleotide
uaagaugaguuuaccuaau

SEQ ID NO: 1522701 - RNA, 19 nt, Artificial Sequence
  Description of Artificial Sequence: Synthetic oligonucleotide
uaaaucggaugccaccuua

SEQ ID NO: 1522702 - RNA, 19 nt, Artificial Sequence
  Description of Artificial Sequence: Synthetic oligonucleotide
cuucauucaaacacacaca

SEQ ID NO: 1522703 - RNA, 19 nt, Artificial Sequence
  Description of Artificial Sequence: Synthetic oligonucleotide
aguagaaucuacacaggca

SEQ ID NO: 1522704 - RNA, 19 nt, Artificial Sequence
  Description of Artificial Sequence: Synthetic oligonucleotide
uauaugacauggcuucauu

SEQ ID NO: 1522705 - RNA, 19 nt, Artificial Sequence
  Description of Artificial Sequence: Synthetic oligonucleotide
guagaaucuacacaggcau

SEQ ID NO: 1522706 - RNA, 19 nt, Artificial Sequence
  Description of Artificial Sequence: Synthetic oligonucleotide
cagucuaagaugaguuuac

SEQ ID NO: 1522707 - RNA, 19 nt, Artificial Sequence
  Description of Artificial Sequence: Synthetic oligonucleotide
aaggcauccucaaacaaua

SEQ ID NO: 1522708 - RNA, 19 nt, Artificial Sequence
  Description of Artificial Sequence: Synthetic oligonucleotide
aagaugaguuuaccuaaua

SEQ ID NO: 1522709 - RNA, 19 nt, Artificial Sequence
  Description of Artificial Sequence: Synthetic oligonucleotide
ugugcagaaggcugaacau

SEQ ID NO: 1522710 - RNA, 19 nt, Artificial Sequence
  Description of Artificial Sequence: Synthetic oligonucleotide
cuuugggcuagacuccgcc

SEQ ID NO: 1522711 - RNA, 19 nt, Artificial Sequence
  Description of Artificial Sequence: Synthetic oligonucleotide
ucaucuaucugaccagcuu

SEQ ID NO: 1522712 - RNA, 19 nt, Artificial Sequence
  Description of Artificial Sequence: Synthetic oligonucleotide
aucacaugagaccccaaau

SEQ ID NO: 1522713 - RNA, 19 nt, Artificial Sequence
  Description of Artificial Sequence: Synthetic oligonucleotide
ucauuaguuuuagcuagga

SEQ ID NO: 1522714 - RNA, 19 nt, Artificial Sequence
  Description of Artificial Sequence: Synthetic oligonucleotide
gaccccaaauaaaugucag

SEQ ID NO: 1522715 - RNA, 19 nt, Artificial Sequence
  Description of Artificial Sequence: Synthetic oligonucleotide
aauguaaaugaaacuuauu

SEQ ID NO: 1522716 - RNA, 19 nt, Artificial Sequence
  Description of Artificial Sequence: Synthetic oligonucleotide
aaacaguucauuaguuuua

SEQ ID NO: 1522717 - RNA, 19 nt, Artificial Sequence
  Description of Artificial Sequence: Synthetic oligonucleotide
agagccuuaauugcucuug

SEQ ID NO: 1522718 - RNA, 19 nt, Artificial Sequence
  Description of Artificial Sequence: Synthetic oligonucleotide
agaagcaggaguagcaaca

SEQ ID NO: 1522719 - RNA, 19 nt, Artificial Sequence
  Description of Artificial Sequence: Synthetic oligonucleotide
ucuacacaggcaucuugcu

SEQ ID NO: 1522720 - RNA, 19 nt, Artificial Sequence
  Description of Artificial Sequence: Synthetic oligonucleotide
aguagcggcagcggcgucc

SEQ ID NO: 1522721 - RNA, 19 nt, Artificial Sequence
  Description of Artificial Sequence: Synthetic oligonucleotide
ugaacaucuucugguggag

SEQ ID NO: 1522722 - RNA, 19 nt, Artificial Sequence
  Description of Artificial Sequence: Synthetic oligonucleotide
gaguuuguugcccaaacau

SEQ ID NO: 1522723 - RNA, 19 nt, Artificial Sequence
  Description of Artificial Sequence: Synthetic oligonucleotide
ucacacucuuuucaauauc

SEQ ID NO: 1522724 - RNA, 19 nt, Artificial Sequence
  Description of Artificial Sequence: Synthetic oligonucleotide
uugcccucaucucaaguuc

SEQ ID NO: 1522725 - RNA, 19 nt, Artificial Sequence
  Description of Artificial Sequence: Synthetic oligonucleotide
gucccaaaaucucauucac

SEQ ID NO: 1522726 - RNA, 19 nt, Artificial Sequence
  Description of Artificial Sequence: Synthetic oligonucleotide
cagucccaaaaucucauuc

SEQ ID NO: 1522727 - RNA, 19 nt, Artificial Sequence
  Description of Artificial Sequence: Synthetic oligonucleotide
uuguugcccaaacauuuua

SEQ ID NO: 1522728 - RNA, 19 nt, Artificial Sequence
  Description of Artificial Sequence: Synthetic oligonucleotide
gagccuuaauugcucuugc

SEQ ID NO: 1522729 - RNA, 19 nt, Artificial Sequence
  Description of Artificial Sequence: Synthetic oligonucleotide
ggagcaauaauuuaagauu

SEQ ID NO: 1522730 - RNA, 19 nt, Artificial Sequence
  Description of Artificial Sequence: Synthetic oligonucleotide
uuaauugcucuugcccuca

SEQ ID NO: 1522731 - RNA, 19 nt, Artificial Sequence
  Description of Artificial Sequence: Synthetic oligonucleotide
gaguuuaccuaauaaguuu

SEQ ID NO: 1522732 - RNA, 19 nt, Artificial Sequence
  Description of Artificial Sequence: Synthetic oligonucleotide
cacaugagaccccaaauaa

SEQ ID NO: 1522733 - RNA, 19 nt, Artificial Sequence
  Description of Artificial Sequence: Synthetic oligonucleotide
agguagccuuaagagaaac

SEQ ID NO: 1522734 - RNA, 19 nt, Artificial Sequence
  Description of Artificial Sequence: Synthetic oligonucleotide
uucagucuaagaugaguuu

SEQ ID NO: 1522735 - RNA, 19 nt, Artificial Sequence
  Description of Artificial Sequence: Synthetic oligonucleotide
gucagauacaaaauuauau

SEQ ID NO: 1522736 - RNA, 19 nt, Artificial Sequence
  Description of Artificial Sequence: Synthetic oligonucleotide
uccuuugggcuagacuccg

SEQ ID NO: 1522737 - RNA, 19 nt, Artificial Sequence
  Description of Artificial Sequence: Synthetic oligonucleotide
aguuuaccuaauaaguuuu

SEQ ID NO: 1522738 - RNA, 19 nt, Artificial Sequence
  Description of Artificial Sequence: Synthetic oligonucleotide
uuugggcuagacuccgcca

SEQ ID NO: 1522739 - RNA, 19 nt, Artificial Sequence
  Description of Artificial Sequence: Synthetic oligonucleotide
augagagccuuaauugcuc

SEQ ID NO: 1522740 - RNA, 19 nt, Artificial Sequence
  Description of Artificial Sequence: Synthetic oligonucleotide
uccagaauaacagccuuuu

SEQ ID NO: 1522741 - RNA, 19 nt, Artificial Sequence
  Description of Artificial Sequence: Synthetic oligonucleotide
cuacacaggcaucuugcug

SEQ ID NO: 1522742 - RNA, 19 nt, Artificial Sequence
  Description of Artificial Sequence: Synthetic oligonucleotide
uuauaucaccagcuuucau

SEQ ID NO: 1522743 - RNA, 19 nt, Artificial Sequence
  Description of Artificial Sequence: Synthetic oligonucleotide
ucuugcccucaucucaagu

SEQ ID NO: 1522744 - RNA, 19 nt, Artificial Sequence
  Description of Artificial Sequence: Synthetic oligonucleotide
acauaucuuaaaaguauau

SEQ ID NO: 1522745 - RNA, 19 nt, Artificial Sequence
  Description of Artificial Sequence: Synthetic oligonucleotide
augucagauacaaaauuau

SEQ ID NO: 1522746 - RNA, 19 nt, Artificial Sequence
  Description of Artificial Sequence: Synthetic oligonucleotide
caugagaccccaaauaaau

SEQ ID NO: 1522747 - RNA, 19 nt, Artificial Sequence
  Description of Artificial Sequence: Synthetic oligonucleotide
acaaaucuaggagcaauaa

SEQ ID NO: 1522748 - RNA, 19 nt, Artificial Sequence
  Description of Artificial Sequence: Synthetic oligonucleotide
ugccuuguuuugauuucca

SEQ ID NO: 1522749 - RNA, 19 nt, Artificial Sequence
  Description of Artificial Sequence: Synthetic oligonucleotide
uuuugaguuuguugcccaa

SEQ ID NO: 1522750 - RNA, 19 nt, Artificial Sequence
  Description of Artificial Sequence: Synthetic oligonucleotide
uugcaugggccuucuauau

SEQ ID NO: 1522751 - RNA, 19 nt, Artificial Sequence
  Description of Artificial Sequence: Synthetic oligonucleotide
cacuaucuuccccuuugcc

SEQ ID NO: 1522752 - RNA, 19 nt, Artificial Sequence
  Description of Artificial Sequence: Synthetic oligonucleotide
cagaauaacagccuuuuau

SEQ ID NO: 1522753 - RNA, 19 nt, Artificial Sequence
  Description of Artificial Sequence: Synthetic oligonucleotide
gaacagucaggguggccgc

SEQ ID NO: 1522754 - RNA, 19 nt, Artificial Sequence
  Description of Artificial Sequence: Synthetic oligonucleotide
ugcccucaucucaaguucu

SEQ ID NO: 1522755 - RNA, 19 nt, Artificial Sequence
  Description of Artificial Sequence: Synthetic oligonucleotide
aaaauacagguagccuuaa

SEQ ID NO: 1522756 - RNA, 19 nt, Artificial Sequence
  Description of Artificial Sequence: Synthetic oligonucleotide
ugaccagcuucacuccgga

SEQ ID NO: 1522757 - RNA, 19 nt, Artificial Sequence
  Description of Artificial Sequence: Synthetic oligonucleotide
auuauaugacauggcuuca

SEQ ID NO: 1522758 - RNA, 19 nt, Artificial Sequence
  Description of Artificial Sequence: Synthetic oligonucleotide
uuugaguuuguugcccaaa

SEQ ID NO: 1522759 - RNA, 19 nt, Artificial Sequence
  Description of Artificial Sequence: Synthetic oligonucleotide
uccugaaagcuuggaaugu

SEQ ID NO: 1522760 - RNA, 19 nt, Artificial Sequence
  Description of Artificial Sequence: Synthetic oligonucleotide
acuuaucaaaggucuuaaa

SEQ ID NO: 1522761 - RNA, 19 nt, Artificial Sequence
  Description of Artificial Sequence: Synthetic oligonucleotide
uuaaaucggaugccaccuu

SEQ ID NO: 1522762 - RNA, 19 nt, Artificial Sequence
  Description of Artificial Sequence: Synthetic oligonucleotide
ggacuguucuuucugggac

SEQ ID NO: 1522763 - RNA, 19 nt, Artificial Sequence
  Description of Artificial Sequence: Synthetic oligonucleotide
auaauacccuuuuccugaa

SEQ ID NO: 1522764 - RNA, 19 nt, Artificial Sequence
  Description of Artificial Sequence: Synthetic oligonucleotide
caucugcauuuauacugag

SEQ ID NO: 1522765 - RNA, 19 nt, Artificial Sequence
  Description of Artificial Sequence: Synthetic oligonucleotide
cuugaucaaucuuuucuua

SEQ ID NO: 1522766 - RNA, 19 nt, Artificial Sequence
  Description of Artificial Sequence: Synthetic oligonucleotide
agaccccaaauaaauguca

SEQ ID NO: 1522767 - RNA, 19 nt, Artificial Sequence
  Description of Artificial Sequence: Synthetic oligonucleotide
ugcaugggccuucuauauc

SEQ ID NO: 1522768 - RNA, 19 nt, Artificial Sequence
  Description of Artificial Sequence: Synthetic oligonucleotide
gucuaagaugaguuuaccu

SEQ ID NO: 1522769 - RNA, 19 nt, Artificial Sequence
  Description of Artificial Sequence: Synthetic oligonucleotide
caaggucaucuaucugacc

SEQ ID NO: 1522770 - RNA, 19 nt, Artificial Sequence
  Description of Artificial Sequence: Synthetic oligonucleotide
uaagagaaacaugcuugau

SEQ ID NO: 1522771 - RNA, 19 nt, Artificial Sequence
  Description of Artificial Sequence: Synthetic oligonucleotide
augaaacccuguaucauaa

SEQ ID NO: 1522772 - RNA, 19 nt, Artificial Sequence
  Description of Artificial Sequence: Synthetic oligonucleotide
cuuugagccuuacaagaaa

SEQ ID NO: 1522773 - RNA, 19 nt, Artificial Sequence
  Description of Artificial Sequence: Synthetic oligonucleotide
augagaccccaaauaaaug

SEQ ID NO: 1522774 - RNA, 19 nt, Artificial Sequence
  Description of Artificial Sequence: Synthetic oligonucleotide
ugggacuucuggagcagaa

SEQ ID NO: 1522775 - RNA, 19 nt, Artificial Sequence
  Description of Artificial Sequence: Synthetic oligonucleotide
aguugcugugcagaaggcu

SEQ ID NO: 1522776 - RNA, 19 nt, Artificial Sequence
  Description of Artificial Sequence: Synthetic oligonucleotide
caugagagccuuaauugcu

SEQ ID NO: 1522777 - RNA, 19 nt, Artificial Sequence
  Description of Artificial Sequence: Synthetic oligonucleotide
caugggccuucuauaucgc

SEQ ID NO: 1522778 - RNA, 19 nt, Artificial Sequence
  Description of Artificial Sequence: Synthetic oligonucleotide
ggguauccaacuauauuug

SEQ ID NO: 1522779 - RNA, 19 nt, Artificial Sequence
  Description of Artificial Sequence: Synthetic oligonucleotide
cugaaagcuuggaauguaa

SEQ ID NO: 1522780 - RNA, 19 nt, Artificial Sequence
  Description of Artificial Sequence: Synthetic oligonucleotide
uaauacccuuuuccugaaa

SEQ ID NO: 1522781 - RNA, 19 nt, Artificial Sequence
  Description of Artificial Sequence: Synthetic oligonucleotide
ggcugaacaucuucuggug

SEQ ID NO: 1522782 - RNA, 19 nt, Artificial Sequence
  Description of Artificial Sequence: Synthetic oligonucleotide
caguugcugugcagaaggc

SEQ ID NO: 1522783 - RNA, 19 nt, Artificial Sequence
  Description of Artificial Sequence: Synthetic oligonucleotide
cagaaaacuagacuggcuu

SEQ ID NO: 1522784 - RNA, 19 nt, Artificial Sequence
  Description of Artificial Sequence: Synthetic oligonucleotide
gcaucuugcugacugauua

SEQ ID NO: 1522785 - RNA, 19 nt, Artificial Sequence
  Description of Artificial Sequence: Synthetic oligonucleotide
acuccggacuguucuuucu

SEQ ID NO: 1522786 - RNA, 19 nt, Artificial Sequence
  Description of Artificial Sequence: Synthetic oligonucleotide
uugggcuccuuugggcuag

SEQ ID NO: 1522787 - RNA, 19 nt, Artificial Sequence
  Description of Artificial Sequence: Synthetic oligonucleotide
acaugagaccccaaauaaa

SEQ ID NO: 1522788 - RNA, 19 nt, Artificial Sequence
  Description of Artificial Sequence: Synthetic oligonucleotide
uuugggcuccuuugggcua

SEQ ID NO: 1522789 - RNA, 19 nt, Artificial Sequence
  Description of Artificial Sequence: Synthetic oligonucleotide
ccuguaucauaauauaaua

SEQ ID NO: 1522790 - RNA, 19 nt, Artificial Sequence
  Description of Artificial Sequence: Synthetic oligonucleotide
ugggcuagacuccgccagu

SEQ ID NO: 1522791 - RNA, 19 nt, Artificial Sequence
  Description of Artificial Sequence: Synthetic oligonucleotide
cauccucaaacaauacaua

SEQ ID NO: 1522792 - RNA, 19 nt, Artificial Sequence
  Description of Artificial Sequence: Synthetic oligonucleotide
augggccuucuauaucgcu

SEQ ID NO: 1522793 - RNA, 19 nt, Artificial Sequence
  Description of Artificial Sequence: Synthetic oligonucleotide
ccaacuauauuugccauga

SEQ ID NO: 1522794 - RNA, 19 nt, Artificial Sequence
  Description of Artificial Sequence: Synthetic oligonucleotide
uucagaucuuugagccuua

SEQ ID NO: 1522795 - RNA, 19 nt, Artificial Sequence
  Description of Artificial Sequence: Synthetic oligonucleotide
ccaccuuacagccaucauc

SEQ ID NO: 1522796 - RNA, 19 nt, Artificial Sequence
  Description of Artificial Sequence: Synthetic oligonucleotide
cuaucuuccccuuugccuu

SEQ ID NO: 1522797 - RNA, 19 nt, Artificial Sequence
  Description of Artificial Sequence: Synthetic oligonucleotide
aaccuucugguuguuuguu

SEQ ID NO: 1522798 - RNA, 19 nt, Artificial Sequence
  Description of Artificial Sequence: Synthetic oligonucleotide
cagggaugaaguagaaucu

SEQ ID NO: 1522799 - RNA, 19 nt, Artificial Sequence
  Description of Artificial Sequence: Synthetic oligonucleotide
cuucacuccggacuguucu

SEQ ID NO: 1522800 - RNA, 19 nt, Artificial Sequence
  Description of Artificial Sequence: Synthetic oligonucleotide
agggaugaaguagaaucua

SEQ ID NO: 1522801 - RNA, 19 nt, Artificial Sequence
  Description of Artificial Sequence: Synthetic oligonucleotide
gggaugaaguagaaucuac

SEQ ID NO: 1522802 - RNA, 19 nt, Artificial Sequence
  Description of Artificial Sequence: Synthetic oligonucleotide
uccugacuccuuguugacu

SEQ ID NO: 1522803 - RNA, 19 nt, Artificial Sequence
  Description of Artificial Sequence: Synthetic oligonucleotide
ucagaucuuugagccuuac

SEQ ID NO: 1522804 - RNA, 19 nt, Artificial Sequence
  Description of Artificial Sequence: Synthetic oligonucleotide
cauugcaugggccuucuau

SEQ ID NO: 1522805 - RNA, 19 nt, Artificial Sequence
  Description of Artificial Sequence: Synthetic oligonucleotide
uucacuccggacuguucuu

SEQ ID NO: 1522806 - RNA, 19 nt, Artificial Sequence
  Description of Artificial Sequence: Synthetic oligonucleotide
caaaucuaggagcaauaau

SEQ ID NO: 1522807 - RNA, 19 nt, Artificial Sequence
  Description of Artificial Sequence: Synthetic oligonucleotide
uaauugcucuugcccucau

SEQ ID NO: 1522808 - RNA, 19 nt, Artificial Sequence
  Description of Artificial Sequence: Synthetic oligonucleotide
caucuugcugacugauuaa

SEQ ID NO: 1522809 - RNA, 19 nt, Artificial Sequence
  Description of Artificial Sequence: Synthetic oligonucleotide
agcuuggaauguaaaugaa

SEQ ID NO: 1522810 - RNA, 19 nt, Artificial Sequence
  Description of Artificial Sequence: Synthetic oligonucleotide
ugacuccuuguugacuuuu

SEQ ID NO: 1522811 - RNA, 19 nt, Artificial Sequence
  Description of Artificial Sequence: Synthetic oligonucleotide
gcaucugcauuuauacuga

SEQ ID NO: 1522812 - RNA, 19 nt, Artificial Sequence
  Description of Artificial Sequence: Synthetic oligonucleotide
gcggcguccucauugcaug

SEQ ID NO: 1522813 - RNA, 19 nt, Artificial Sequence
  Description of Artificial Sequence: Synthetic oligonucleotide
ccuuaauugcucuugcccu

SEQ ID NO: 1522814 - RNA, 19 nt, Artificial Sequence
  Description of Artificial Sequence: Synthetic oligonucleotide
cugacugauuaaaucggau

SEQ ID NO: 1522815 - RNA, 19 nt, Artificial Sequence
  Description of Artificial Sequence: Synthetic oligonucleotide
gaccagcuucacuccggac

SEQ ID NO: 1522816 - RNA, 19 nt, Artificial Sequence
  Description of Artificial Sequence: Synthetic oligonucleotide
gaacuauacaucagaucuu

SEQ ID NO: 1522817 - RNA, 19 nt, Artificial Sequence
  Description of Artificial Sequence: Synthetic oligonucleotide
gcuuuuggaaaaguaucaa

SEQ ID NO: 1522818 - RNA, 19 nt, Artificial Sequence
  Description of Artificial Sequence: Synthetic oligonucleotide
uccucauugcaugggccuu

SEQ ID NO: 1522819 - RNA, 19 nt, Artificial Sequence
  Description of Artificial Sequence: Synthetic oligonucleotide
auccagaauaacagccuuu

SEQ ID NO: 1522820 - RNA, 19 nt, Artificial Sequence
  Description of Artificial Sequence: Synthetic oligonucleotide
ggcuagacuccgccagucc

SEQ ID NO: 1522821 - RNA, 19 nt, Artificial Sequence
  Description of Artificial Sequence: Synthetic oligonucleotide
cucucucagggaugaagua

SEQ ID NO: 1522822 - RNA, 19 nt, Artificial Sequence
  Description of Artificial Sequence: Synthetic oligonucleotide
ggcguccucauugcauggg

SEQ ID NO: 1522823 - RNA, 19 nt, Artificial Sequence
  Description of Artificial Sequence: Synthetic oligonucleotide
ugcugugcagaaggcugaa

SEQ ID NO: 1522824 - RNA, 19 nt, Artificial Sequence
  Description of Artificial Sequence: Synthetic oligonucleotide
cccuguaucauaauauaau

SEQ ID NO: 1522825 - RNA, 19 nt, Artificial Sequence
  Description of Artificial Sequence: Synthetic oligonucleotide
caggcaucuugcugacuga

SEQ ID NO: 1522826 - RNA, 19 nt, Artificial Sequence
  Description of Artificial Sequence: Synthetic oligonucleotide
agcggcguccucauugcau

SEQ ID NO: 1522827 - RNA, 19 nt, Artificial Sequence
  Description of Artificial Sequence: Synthetic oligonucleotide
ucauugcaugggccuucua

SEQ ID NO: 1522828 - RNA, 19 nt, Artificial Sequence
  Description of Artificial Sequence: Synthetic oligonucleotide
cguccucauugcaugggcc

SEQ ID NO: 1522829 - RNA, 19 nt, Artificial Sequence
  Description of Artificial Sequence: Synthetic oligonucleotide
gcuaggaaacucacaucca

SEQ ID NO: 1522830 - RNA, 19 nt, Artificial Sequence
  Description of Artificial Sequence: Synthetic oligonucleotide
cagguagccuuaagagaaa

SEQ ID NO: 1522831 - RNA, 19 nt, Artificial Sequence
  Description of Artificial Sequence: Synthetic oligonucleotide
gggccuucuauaucgcugu

SEQ ID NO: 1522832 - RNA, 19 nt, Artificial Sequence
  Description of Artificial Sequence: Synthetic oligonucleotide
cgcugucauaagcaucugc

SEQ ID NO: 1522833 - RNA, 19 nt, Artificial Sequence
  Description of Artificial Sequence: Synthetic oligonucleotide
gucaucuaucugaccagcu

SEQ ID NO: 1522834 - RNA, 19 nt, Artificial Sequence
  Description of Artificial Sequence: Synthetic oligonucleotide
caacuauauuugccaugaa

SEQ ID NO: 1522835 - RNA, 19 nt, Artificial Sequence
  Description of Artificial Sequence: Synthetic oligonucleotide
auaucacaugagaccccaa

SEQ ID NO: 1522836 - RNA, 19 nt, Artificial Sequence
  Description of Artificial Sequence: Synthetic oligonucleotide
gccuuuuauuauuuugauu

SEQ ID NO: 1522837 - RNA, 19 nt, Artificial Sequence
  Description of Artificial Sequence: Synthetic oligonucleotide
gaaucuacacaggcaucuu

SEQ ID NO: 1522838 - RNA, 19 nt, Artificial Sequence
  Description of Artificial Sequence: Synthetic oligonucleotide
ccuuugggcuagacuccgc

SEQ ID NO: 1522839 - RNA, 19 nt, Artificial Sequence
  Description of Artificial Sequence: Synthetic oligonucleotide
cugggacuucuggagcaga

SEQ ID NO: 1522840 - RNA, 19 nt, Artificial Sequence
  Description of Artificial Sequence: Synthetic oligonucleotide
ccucauugcaugggccuuc

SEQ ID NO: 1522841 - RNA, 19 nt, Artificial Sequence
  Description of Artificial Sequence: Synthetic oligonucleotide
cucagggaugaaguagaau

SEQ ID NO: 1522842 - RNA, 19 nt, Artificial Sequence
  Description of Artificial Sequence: Synthetic oligonucleotide
cggacuguucuuucuggga

SEQ ID NO: 1522843 - RNA, 19 nt, Artificial Sequence
  Description of Artificial Sequence: Synthetic oligonucleotide
ggccuucuauaucgcuguc

SEQ ID NO: 1522844 - RNA, 19 nt, Artificial Sequence
  Description of Artificial Sequence: Synthetic oligonucleotide
gggcuagacuccgccaguc

SEQ ID NO: 1522845 - RNA, 19 nt, Artificial Sequence
  Description of Artificial Sequence: Synthetic oligonucleotide
agacuccgccagucccaaa

SEQ ID NO: 1522846 - RNA, 19 nt, Artificial Sequence
  Description of Artificial Sequence: Synthetic oligonucleotide
gcugugcagaaggcugaac

SEQ ID NO: 1522847 - RNA, 19 nt, Artificial Sequence
  Description of Artificial Sequence: Synthetic oligonucleotide
gccuuaagagaaacaugcu

SEQ ID NO: 1522848 - RNA, 19 nt, Artificial Sequence
  Description of Artificial Sequence: Synthetic oligonucleotide
guagcggcagcggcguccu

SEQ ID NO: 1522849 - RNA, 19 nt, Artificial Sequence
  Description of Artificial Sequence: Synthetic oligonucleotide
gguggccgcuuugggcucc

SEQ ID NO: 1522850 - RNA, 19 nt, Artificial Sequence
  Description of Artificial Sequence: Synthetic oligonucleotide
cucauugcaugggccuucu

SEQ ID NO: 1522851 - RNA, 19 nt, Artificial Sequence
  Description of Artificial Sequence: Synthetic oligonucleotide
cggcguccucauugcaugg

SEQ ID NO: 1522852 - RNA, 19 nt, Artificial Sequence
  Description of Artificial Sequence: Synthetic oligonucleotide
ugggcuccuuugggcuaga

SEQ ID NO: 1522853 - RNA, 19 nt, Artificial Sequence
  Description of Artificial Sequence: Synthetic oligonucleotide
caguagcggcagcggcguc

SEQ ID NO: 1522854 - RNA, 19 nt, Artificial Sequence
  Description of Artificial Sequence: Synthetic oligonucleotide
cauccacaaaaggcauccu

SEQ ID NO: 1522855 - RNA, 19 nt, Artificial Sequence
  Description of Artificial Sequence: Synthetic oligonucleotide
gcaguagcggcagcggcgu

SEQ ID NO: 1522856 - RNA, 19 nt, Artificial Sequence
  Description of Artificial Sequence: Synthetic oligonucleotide
ccccuuugccuuguuuuga

SEQ ID NO: 1522857 - RNA, 19 nt, Artificial Sequence
  Description of Artificial Sequence: Synthetic oligonucleotide
uagcggcagcggcguccuc

SEQ ID NO: 1522858 - RNA, 19 nt, Artificial Sequence
  Description of Artificial Sequence: Synthetic oligonucleotide
gcccucaucucaaguucua

SEQ ID NO: 1522859 - RNA, 19 nt, Artificial Sequence
  Description of Artificial Sequence: Synthetic oligonucleotide
ccagucccaaaaucucauu

SEQ ID NO: 1522860 - RNA, 19 nt, Artificial Sequence
  Description of Artificial Sequence: Synthetic oligonucleotide
uuuaauaauguuguaaacc

SEQ ID NO: 1522861 - RNA, 19 nt, Artificial Sequence
  Description of Artificial Sequence: Synthetic oligonucleotide
aauguuguaaaccucggca

SEQ ID NO: 1522862 - RNA, 19 nt, Artificial Sequence
  Description of Artificial Sequence: Synthetic oligonucleotide
uauuuuguagccuagcucu

SEQ ID NO: 1522863 - RNA, 19 nt, Artificial Sequence
  Description of Artificial Sequence: Synthetic oligonucleotide
cauggcaguauuuaaaagg

SEQ ID NO: 1522864 - RNA, 19 nt, Artificial Sequence
  Description of Artificial Sequence: Synthetic oligonucleotide
agaauaucauaccagcacg

SEQ ID NO: 1522865 - RNA, 19 nt, Artificial Sequence
  Description of Artificial Sequence: Synthetic oligonucleotide
uguagaauaucauaccagc

SEQ ID NO: 1522866 - RNA, 19 nt, Artificial Sequence
  Description of Artificial Sequence: Synthetic oligonucleotide
ugcagagucaacucgaucc

SEQ ID NO: 1522867 - RNA, 19 nt, Artificial Sequence
  Description of Artificial Sequence: Synthetic oligonucleotide
gacagaaucuugcaguugg

SEQ ID NO: 1522868 - RNA, 19 nt, Artificial Sequence
  Description of Artificial Sequence: Synthetic oligonucleotide
aguuaauguagccaguguc

SEQ ID NO: 1522869 - RNA, 19 nt, Artificial Sequence
  Description of Artificial Sequence: Synthetic oligonucleotide
uauacagcgaaguuugcag

SEQ ID NO: 1522870 - RNA, 19 nt, Artificial Sequence
  Description of Artificial Sequence: Synthetic oligonucleotide
aauaucauaccagcacggc

SEQ ID NO: 1522871 - RNA, 19 nt, Artificial Sequence
  Description of Artificial Sequence: Synthetic oligonucleotide
caugauacguccauggggc

SEQ ID NO: 1522872 - RNA, 19 nt, Artificial Sequence
  Description of Artificial Sequence: Synthetic oligonucleotide
cuggguacaccuuauaagg

SEQ ID NO: 1522873 - RNA, 19 nt, Artificial Sequence
  Description of Artificial Sequence: Synthetic oligonucleotide
uuuaagcaagaucccaggg

SEQ ID NO: 1522874 - RNA, 19 nt, Artificial Sequence
  Description of Artificial Sequence: Synthetic oligonucleotide
acccuuagaacggagaucc

SEQ ID NO: 1522875 - RNA, 19 nt, Artificial Sequence
  Description of Artificial Sequence: Synthetic oligonucleotide
aguauuuaaaaggggaggg

SEQ ID NO: 1522876 - RNA, 19 nt, Artificial Sequence
  Description of Artificial Sequence: Synthetic oligonucleotide
uuaagcaagaucccagggc

SEQ ID NO: 1522877 - RNA, 19 nt, Artificial Sequence
  Description of Artificial Sequence: Synthetic oligonucleotide
agaacggagauccacuagg

SEQ ID NO: 1522878 - RNA, 19 nt, Artificial Sequence
  Description of Artificial Sequence: Synthetic oligonucleotide
ucagacagaaucuugcagu

SEQ ID NO: 1522879 - RNA, 19 nt, Artificial Sequence
  Description of Artificial Sequence: Synthetic oligonucleotide
acuaaugugugccaugucu

SEQ ID NO: 1522880 - RNA, 19 nt, Artificial Sequence
  Description of Artificial Sequence: Synthetic oligonucleotide
aggguaucacaccagcugc

SEQ ID NO: 1522881 - RNA, 19 nt, Artificial Sequence
  Description of Artificial Sequence: Synthetic oligonucleotide
ugagauaugccccauuauc

SEQ ID NO: 1522882 - RNA, 19 nt, Artificial Sequence
  Description of Artificial Sequence: Synthetic oligonucleotide
auuauuuaagcaagauccc

SEQ ID NO: 1522883 - RNA, 19 nt, Artificial Sequence
  Description of Artificial Sequence: Synthetic oligonucleotide
caccauaauaccuuuggcc

SEQ ID NO: 1522884 - RNA, 19 nt, Artificial Sequence
  Description of Artificial Sequence: Synthetic oligonucleotide
aauaccuuuggccuggaua

SEQ ID NO: 1522885 - RNA, 19 nt, Artificial Sequence
  Description of Artificial Sequence: Synthetic oligonucleotide
acggagauccacuaggauc

SEQ ID NO: 1522886 - RNA, 19 nt, Artificial Sequence
  Description of Artificial Sequence: Synthetic oligonucleotide
aggcaaucagcuccaaucc

SEQ ID NO: 1522887 - RNA, 19 nt, Artificial Sequence
  Description of Artificial Sequence: Synthetic oligonucleotide
ucagcuucgggugaaagag

SEQ ID NO: 1522888 - RNA, 19 nt, Artificial Sequence
  Description of Artificial Sequence: Synthetic oligonucleotide
ugccccauuaucaucagca

SEQ ID NO: 1522889 - RNA, 19 nt, Artificial Sequence
  Description of Artificial Sequence: Synthetic oligonucleotide
acguccauggggcucaacc

SEQ ID NO: 1522890 - RNA, 19 nt, Artificial Sequence
  Description of Artificial Sequence: Synthetic oligonucleotide
auagauguagcagagauuu

SEQ ID NO: 1522891 - RNA, 19 nt, Artificial Sequence
  Description of Artificial Sequence: Synthetic oligonucleotide
ucucaugagaggaccacag

SEQ ID NO: 1522892 - RNA, 19 nt, Artificial Sequence
  Description of Artificial Sequence: Synthetic oligonucleotide
auaaugaaucucuuugcca

SEQ ID NO: 1522893 - RNA, 19 nt, Artificial Sequence
  Description of Artificial Sequence: Synthetic oligonucleotide
aauccuuugccgauuguuc

SEQ ID NO: 1522894 - RNA, 19 nt, Artificial Sequence
  Description of Artificial Sequence: Synthetic oligonucleotide
caaucuuucgcagacgugc

SEQ ID NO: 1522895 - RNA, 19 nt, Artificial Sequence
  Description of Artificial Sequence: Synthetic oligonucleotide
uuugaauucuguagucaug

SEQ ID NO: 1522896 - RNA, 19 nt, Artificial Sequence
  Description of Artificial Sequence: Synthetic oligonucleotide
gaauaucauaccagcacgg

SEQ ID NO: 1522897 - RNA, 19 nt, Artificial Sequence
  Description of Artificial Sequence: Synthetic oligonucleotide
uauggauaaagugugcaac

SEQ ID NO: 1522898 - RNA, 19 nt, Artificial Sequence
  Description of Artificial Sequence: Synthetic oligonucleotide
caugagucaaaugaccucc

SEQ ID NO: 1522899 - RNA, 19 nt, Artificial Sequence
  Description of Artificial Sequence: Synthetic oligonucleotide
auaccuuuggccuggauau

SEQ ID NO: 1522900 - RNA, 19 nt, Artificial Sequence
  Description of Artificial Sequence: Synthetic oligonucleotide
acuauuuuguagccuagcu

SEQ ID NO: 1522901 - RNA, 19 nt, Artificial Sequence
  Description of Artificial Sequence: Synthetic oligonucleotide
aauucuguagucauggcuu

SEQ ID NO: 1522902 - RNA, 19 nt, Artificial Sequence
  Description of Artificial Sequence: Synthetic oligonucleotide
ugugccaacaucuucucau

SEQ ID NO: 1522903 - RNA, 19 nt, Artificial Sequence
  Description of Artificial Sequence: Synthetic oligonucleotide
gaaucuugcaguuggccac

SEQ ID NO: 1522904 - RNA, 19 nt, Artificial Sequence
  Description of Artificial Sequence: Synthetic oligonucleotide
auacagcgaaguuugcagg

SEQ ID NO: 1522905 - RNA, 19 nt, Artificial Sequence
  Description of Artificial Sequence: Synthetic oligonucleotide
gaggguaucacaccagcug

SEQ ID NO: 1522906 - RNA, 19 nt, Artificial Sequence
  Description of Artificial Sequence: Synthetic oligonucleotide
agcaaaacucuccacgucu

SEQ ID NO: 1522907 - RNA, 19 nt, Artificial Sequence
  Description of Artificial Sequence: Synthetic oligonucleotide
ucuauggauaaagugugca

SEQ ID NO: 1522908 - RNA, 19 nt, Artificial Sequence
  Description of Artificial Sequence: Synthetic oligonucleotide
acgugcguaguccagguuc

SEQ ID NO: 1522909 - RNA, 19 nt, Artificial Sequence
  Description of Artificial Sequence: Synthetic oligonucleotide
cacgggaugucaaugcugg

SEQ ID NO: 1522910 - RNA, 19 nt, Artificial Sequence
  Description of Artificial Sequence: Synthetic oligonucleotide
uagaacaggcuucuaguac

SEQ ID NO: 1522911 - RNA, 19 nt, Artificial Sequence
  Description of Artificial Sequence: Synthetic oligonucleotide
agaugauaggccugcaaug

SEQ ID NO: 1522912 - RNA, 19 nt, Artificial Sequence
  Description of Artificial Sequence: Synthetic oligonucleotide
cuaaugugugccaugucug

SEQ ID NO: 1522913 - RNA, 19 nt, Artificial Sequence
  Description of Artificial Sequence: Synthetic oligonucleotide
caaugcacgcuucugacac

SEQ ID NO: 1522914 - RNA, 19 nt, Artificial Sequence
  Description of Artificial Sequence: Synthetic oligonucleotide
cacgucuucgcgaagaguc

SEQ ID NO: 1522915 - RNA, 19 nt, Artificial Sequence
  Description of Artificial Sequence: Synthetic oligonucleotide
ucgcgaagaguccucacag

SEQ ID NO: 1522916 - RNA, 19 nt, Artificial Sequence
  Description of Artificial Sequence: Synthetic oligonucleotide
aucaagugauuaucagaac

SEQ ID NO: 1522917 - RNA, 19 nt, Artificial Sequence
  Description of Artificial Sequence: Synthetic oligonucleotide
accugugacuauuuuguag

SEQ ID NO: 1522918 - RNA, 19 nt, Artificial Sequence
  Description of Artificial Sequence: Synthetic oligonucleotide
aaugaaucucuuugccagu

SEQ ID NO: 1522919 - RNA, 19 nt, Artificial Sequence
  Description of Artificial Sequence: Synthetic oligonucleotide
aagccaugagucaaaugac

SEQ ID NO: 1522920 - RNA, 19 nt, Artificial Sequence
  Description of Artificial Sequence: Synthetic oligonucleotide
aguauauacagcgaaguuu

SEQ ID NO: 1522921 - RNA, 19 nt, Artificial Sequence
  Description of Artificial Sequence: Synthetic oligonucleotide
gaucccucuauggauaaag

SEQ ID NO: 1522922 - RNA, 19 nt, Artificial Sequence
  Description of Artificial Sequence: Synthetic oligonucleotide
ugauuaucagaaccaccug

SEQ ID NO: 1522923 - RNA, 19 nt, Artificial Sequence
  Description of Artificial Sequence: Synthetic oligonucleotide
ugguagauuuugaauucug

SEQ ID NO: 1522924 - RNA, 19 nt, Artificial Sequence
  Description of Artificial Sequence: Synthetic oligonucleotide
cauaauaccuuuggccugg

SEQ ID NO: 1522925 - RNA, 19 nt, Artificial Sequence
  Description of Artificial Sequence: Synthetic oligonucleotide
auaguuaauguagccagug

SEQ ID NO: 1522926 - RNA, 19 nt, Artificial Sequence
  Description of Artificial Sequence: Synthetic oligonucleotide
ucccucuauggauaaagug

SEQ ID NO: 1522927 - RNA, 19 nt, Artificial Sequence
  Description of Artificial Sequence: Synthetic oligonucleotide
caucaaugaacucgguccc

SEQ ID NO: 1522928 - RNA, 19 nt, Artificial Sequence
  Description of Artificial Sequence: Synthetic oligonucleotide
agcaaucuuucgcagacgu

SEQ ID NO: 1522929 - RNA, 19 nt, Artificial Sequence
  Description of Artificial Sequence: Synthetic oligonucleotide
uaaugugugccaugucugc

SEQ ID NO: 1522930 - RNA, 19 nt, Artificial Sequence
  Description of Artificial Sequence: Synthetic oligonucleotide
cugucagacaucaggcagg

SEQ ID NO: 1522931 - RNA, 19 nt, Artificial Sequence
  Description of Artificial Sequence: Synthetic oligonucleotide
uucgggugaaagaggcugg

SEQ ID NO: 1522932 - RNA, 19 nt, Artificial Sequence
  Description of Artificial Sequence: Synthetic oligonucleotide
uggguacaccuuauaaggc

SEQ ID NO: 1522933 - RNA, 19 nt, Artificial Sequence
  Description of Artificial Sequence: Synthetic oligonucleotide
acauggcaguauuuaaaag

SEQ ID NO: 1522934 - RNA, 19 nt, Artificial Sequence
  Description of Artificial Sequence: Synthetic oligonucleotide
uaaaccucggcaucacugu

SEQ ID NO: 1522935 - RNA, 19 nt, Artificial Sequence
  Description of Artificial Sequence: Synthetic oligonucleotide
agcucugcuggcaaaauuc

SEQ ID NO: 1522936 - RNA, 19 nt, Artificial Sequence
  Description of Artificial Sequence: Synthetic oligonucleotide
aaucuuucgcagacgugcg

SEQ ID NO: 1522937 - RNA, 19 nt, Artificial Sequence
  Description of Artificial Sequence: Synthetic oligonucleotide
gagauaugccccauuauca

SEQ ID NO: 1522938 - RNA, 19 nt, Artificial Sequence
  Description of Artificial Sequence: Synthetic oligonucleotide
agcuucgggugaaagaggc

SEQ ID NO: 1522939 - RNA, 19 nt, Artificial Sequence
  Description of Artificial Sequence: Synthetic oligonucleotide
auaggccugcaaugcacgc

SEQ ID NO: 1522940 - RNA, 19 nt, Artificial Sequence
  Description of Artificial Sequence: Synthetic oligonucleotide
ccugugacuauuuuguagc

SEQ ID NO: 1522941 - RNA, 19 nt, Artificial Sequence
  Description of Artificial Sequence: Synthetic oligonucleotide
agccaugagucaaaugacc

SEQ ID NO: 1522942 - RNA, 19 nt, Artificial Sequence
  Description of Artificial Sequence: Synthetic oligonucleotide
acuaggaucaagugauuau

SEQ ID NO: 1522943 - RNA, 19 nt, Artificial Sequence
  Description of Artificial Sequence: Synthetic oligonucleotide
ugacuauuuuguagccuag

SEQ ID NO: 1522944 - RNA, 19 nt, Artificial Sequence
  Description of Artificial Sequence: Synthetic oligonucleotide
gaggauccagaugauaggc

SEQ ID NO: 1522945 - RNA, 19 nt, Artificial Sequence
  Description of Artificial Sequence: Synthetic oligonucleotide
uagaacggagauccacuag

SEQ ID NO: 1522946 - RNA, 19 nt, Artificial Sequence
  Description of Artificial Sequence: Synthetic oligonucleotide
gauaggccugcaaugcacg

SEQ ID NO: 1522947 - RNA, 19 nt, Artificial Sequence
  Description of Artificial Sequence: Synthetic oligonucleotide
auccacuaggaucaaguga

SEQ ID NO: 1522948 - RNA, 19 nt, Artificial Sequence
  Description of Artificial Sequence: Synthetic oligonucleotide
uauauacagcgaaguuugc

SEQ ID NO: 1522949 - RNA, 19 nt, Artificial Sequence
  Description of Artificial Sequence: Synthetic oligonucleotide
ucuucucaugagaggacca

SEQ ID NO: 1522950 - RNA, 19 nt, Artificial Sequence
  Description of Artificial Sequence: Synthetic oligonucleotide
ucaacucgaucccucuaug

SEQ ID NO: 1522951 - RNA, 19 nt, Artificial Sequence
  Description of Artificial Sequence: Synthetic oligonucleotide
ugcaaugcacgcuucugac

SEQ ID NO: 1522952 - RNA, 19 nt, Artificial Sequence
  Description of Artificial Sequence: Synthetic oligonucleotide
agguuccgagaguagcagc

SEQ ID NO: 1522953 - RNA, 19 nt, Artificial Sequence
  Description of Artificial Sequence: Synthetic oligonucleotide
uugcaggcgauagaacagg

SEQ ID NO: 1522954 - RNA, 19 nt, Artificial Sequence
  Description of Artificial Sequence: Synthetic oligonucleotide
gauaugccccauuaucauc

SEQ ID NO: 1522955 - RNA, 19 nt, Artificial Sequence
  Description of Artificial Sequence: Synthetic oligonucleotide
cuaggaucaagugauuauc

SEQ ID NO: 1522956 - RNA, 19 nt, Artificial Sequence
  Description of Artificial Sequence: Synthetic oligonucleotide
gcuggcaaaauucucugag

SEQ ID NO: 1522957 - RNA, 19 nt, Artificial Sequence
  Description of Artificial Sequence: Synthetic oligonucleotide
aaguuugcaggggagccug

SEQ ID NO: 1522958 - RNA, 19 nt, Artificial Sequence
  Description of Artificial Sequence: Synthetic oligonucleotide
caaccagggcaguauauac

SEQ ID NO: 1522959 - RNA, 19 nt, Artificial Sequence
  Description of Artificial Sequence: Synthetic oligonucleotide
uccaauccuuugccgauug

SEQ ID NO: 1522960 - RNA, 19 nt, Artificial Sequence
  Description of Artificial Sequence: Synthetic oligonucleotide
auggggcucaaccagggca

SEQ ID NO: 1522961 - RNA, 19 nt, Artificial Sequence
  Description of Artificial Sequence: Synthetic oligonucleotide
agauaugccccauuaucau

SEQ ID NO: 1522962 - RNA, 19 nt, Artificial Sequence
  Description of Artificial Sequence: Synthetic oligonucleotide
gacauugacgccccagcac

SEQ ID NO: 1522963 - RNA, 19 nt, Artificial Sequence
  Description of Artificial Sequence: Synthetic oligonucleotide
uaucccucagaguauuuau

SEQ ID NO: 1522964 - RNA, 19 nt, Artificial Sequence
  Description of Artificial Sequence: Synthetic oligonucleotide
gagucaaaugaccuccauc

SEQ ID NO: 1522965 - RNA, 19 nt, Artificial Sequence
  Description of Artificial Sequence: Synthetic oligonucleotide
auucuguagucauggcuug

SEQ ID NO: 1522966 - RNA, 19 nt, Artificial Sequence
  Description of Artificial Sequence: Synthetic oligonucleotide
accaucgguacccuuagaa

SEQ ID NO: 1522967 - RNA, 19 nt, Artificial Sequence
  Description of Artificial Sequence: Synthetic oligonucleotide
agauccacuaggaucaagu

SEQ ID NO: 1522968 - RNA, 19 nt, Artificial Sequence
  Description of Artificial Sequence: Synthetic oligonucleotide
uuagaacggagauccacua

SEQ ID NO: 1522969 - RNA, 19 nt, Artificial Sequence
  Description of Artificial Sequence: Synthetic oligonucleotide
aucgguacccuuagaacgg

SEQ ID NO: 1522970 - RNA, 19 nt, Artificial Sequence
  Description of Artificial Sequence: Synthetic oligonucleotide
agcacucugguacuucuca

SEQ ID NO: 1522971 - RNA, 19 nt, Artificial Sequence
  Description of Artificial Sequence: Synthetic oligonucleotide
aggauccagaugauaggcc

SEQ ID NO: 1522972 - RNA, 19 nt, Artificial Sequence
  Description of Artificial Sequence: Synthetic oligonucleotide
aaaaguccacgggauguca

SEQ ID NO: 1522973 - RNA, 19 nt, Artificial Sequence
  Description of Artificial Sequence: Synthetic oligonucleotide
cucuauggauaaagugugc

SEQ ID NO: 1522974 - RNA, 19 nt, Artificial Sequence
  Description of Artificial Sequence: Synthetic oligonucleotide
guugcaggcgauagaacag

SEQ ID NO: 1522975 - RNA, 19 nt, Artificial Sequence
  Description of Artificial Sequence: Synthetic oligonucleotide
aguaccuucucagcccuuc

SEQ ID NO: 1522976 - RNA, 19 nt, Artificial Sequence
  Description of Artificial Sequence: Synthetic oligonucleotide
gugacuauuuuguagccua

SEQ ID NO: 1522977 - RNA, 19 nt, Artificial Sequence
  Description of Artificial Sequence: Synthetic oligonucleotide
ccaugauacguccaugggg

SEQ ID NO: 1522978 - RNA, 19 nt, Artificial Sequence
  Description of Artificial Sequence: Synthetic oligonucleotide
gacuauuuuguagccuagc

SEQ ID NO: 1522979 - RNA, 19 nt, Artificial Sequence
  Description of Artificial Sequence: Synthetic oligonucleotide
acugcgcacacccuuucug

SEQ ID NO: 1522980 - RNA, 19 nt, Artificial Sequence
  Description of Artificial Sequence: Synthetic oligonucleotide
aacggagauccacuaggau

SEQ ID NO: 1522981 - RNA, 19 nt, Artificial Sequence
  Description of Artificial Sequence: Synthetic oligonucleotide
guagccagugucuggguac

SEQ ID NO: 1522982 - RNA, 19 nt, Artificial Sequence
  Description of Artificial Sequence: Synthetic oligonucleotide
uguaaaccucggcaucacu

SEQ ID NO: 1522983 - RNA, 19 nt, Artificial Sequence
  Description of Artificial Sequence: Synthetic oligonucleotide
cucaugagaggaccacagg

SEQ ID NO: 1522984 - RNA, 19 nt, Artificial Sequence
  Description of Artificial Sequence: Synthetic oligonucleotide
acccuggaucugcagaguc

SEQ ID NO: 1522985 - RNA, 19 nt, Artificial Sequence
  Description of Artificial Sequence: Synthetic oligonucleotide
ggaucaagugauuaucaga

SEQ ID NO: 1522986 - RNA, 19 nt, Artificial Sequence
  Description of Artificial Sequence: Synthetic oligonucleotide
ugcaggcgauagaacaggc

SEQ ID NO: 1522987 - RNA, 19 nt, Artificial Sequence
  Description of Artificial Sequence: Synthetic oligonucleotide
ccgaggauccagaugauag

SEQ ID NO: 1522988 - RNA, 19 nt, Artificial Sequence
  Description of Artificial Sequence: Synthetic oligonucleotide
ccucuauggauaaagugug

SEQ ID NO: 1522989 - RNA, 19 nt, Artificial Sequence
  Description of Artificial Sequence: Synthetic oligonucleotide
uccacgucuucgcgaagag

SEQ ID NO: 1522990 - RNA, 19 nt, Artificial Sequence
  Description of Artificial Sequence: Synthetic oligonucleotide
acucgaucccucuauggau

SEQ ID NO: 1522991 - RNA, 19 nt, Artificial Sequence
  Description of Artificial Sequence: Synthetic oligonucleotide
ugucagacaucaggcaggc

SEQ ID NO: 1522992 - RNA, 19 nt, Artificial Sequence
  Description of Artificial Sequence: Synthetic oligonucleotide
uccacgggaugucaaugcu

SEQ ID NO: 1522993 - RNA, 19 nt, Artificial Sequence
  Description of Artificial Sequence: Synthetic oligonucleotide
uugccgauuguucucuuuu

SEQ ID NO: 1522994 - RNA, 19 nt, Artificial Sequence
  Description of Artificial Sequence: Synthetic oligonucleotide
acagaaucuugcaguuggc

SEQ ID NO: 1522995 - RNA, 19 nt, Artificial Sequence
  Description of Artificial Sequence: Synthetic oligonucleotide
agagucaacucgaucccuc

SEQ ID NO: 1522996 - RNA, 19 nt, Artificial Sequence
  Description of Artificial Sequence: Synthetic oligonucleotide
aaugcacgcuucugacaca

SEQ ID NO: 1522997 - RNA, 19 nt, Artificial Sequence
  Description of Artificial Sequence: Synthetic oligonucleotide
cccaccauaauaccuuugg

SEQ ID NO: 1522998 - RNA, 19 nt, Artificial Sequence
  Description of Artificial Sequence: Synthetic oligonucleotide
cuugcuucagggccacagc

SEQ ID NO: 1522999 - RNA, 19 nt, Artificial Sequence
  Description of Artificial Sequence: Synthetic oligonucleotide
augccccauuaucaucagc

SEQ ID NO: 1523000 - RNA, 19 nt, Artificial Sequence
  Description of Artificial Sequence: Synthetic oligonucleotide
cuuucgcagacgugcguag

SEQ ID NO: 1523001 - RNA, 19 nt, Artificial Sequence
  Description of Artificial Sequence: Synthetic oligonucleotide
cagcccacuaaugugugcc

SEQ ID NO: 1523002 - RNA, 19 nt, Artificial Sequence
  Description of Artificial Sequence: Synthetic oligonucleotide
gauacguccauggggcuca

SEQ ID NO: 1523003 - RNA, 19 nt, Artificial Sequence
  Description of Artificial Sequence: Synthetic oligonucleotide
ugaacucggucccaccaua

SEQ ID NO: 1523004 - RNA, 19 nt, Artificial Sequence
  Description of Artificial Sequence: Synthetic oligonucleotide
cauugacgccccagcaccg

SEQ ID NO: 1523005 - RNA, 19 nt, Artificial Sequence
  Description of Artificial Sequence: Synthetic oligonucleotide
gucaaaugaccuccaucug

SEQ ID NO: 1523006 - RNA, 19 nt, Artificial Sequence
  Description of Artificial Sequence: Synthetic oligonucleotide
gauaaagugugcaacuuuu

SEQ ID NO: 1523007 - RNA, 19 nt, Artificial Sequence
  Description of Artificial Sequence: Synthetic oligonucleotide
uucucaugagaggaccaca

SEQ ID NO: 1523008 - RNA, 19 nt, Artificial Sequence
  Description of Artificial Sequence: Synthetic oligonucleotide
agcaagaucccagggccuc

SEQ ID NO: 1523009 - RNA, 19 nt, Artificial Sequence
  Description of Artificial Sequence: Synthetic oligonucleotide
guccacgggaugucaaugc

SEQ ID NO: 1523010 - RNA, 19 nt, Artificial Sequence
  Description of Artificial Sequence: Synthetic oligonucleotide
uucgcagacgugcguaguc

SEQ ID NO: 1523011 - RNA, 19 nt, Artificial Sequence
  Description of Artificial Sequence: Synthetic oligonucleotide
augagauaugccccauuau

SEQ ID NO: 1523012 - RNA, 19 nt, Artificial Sequence
  Description of Artificial Sequence: Synthetic oligonucleotide
gucaugaagccaugaguca

SEQ ID NO: 1523013 - RNA, 19 nt, Artificial Sequence
  Description of Artificial Sequence: Synthetic oligonucleotide
uaugccccauuaucaucag

SEQ ID NO: 1523014 - RNA, 19 nt, Artificial Sequence
  Description of Artificial Sequence: Synthetic oligonucleotide
gcaguuggccaccaccugg

SEQ ID NO: 1523015 - RNA, 19 nt, Artificial Sequence
  Description of Artificial Sequence: Synthetic oligonucleotide
gaucagcuucgggugaaag

SEQ ID NO: 1523016 - RNA, 19 nt, Artificial Sequence
  Description of Artificial Sequence: Synthetic oligonucleotide
caaugaacucggucccacc

SEQ ID NO: 1523017 - RNA, 19 nt, Artificial Sequence
  Description of Artificial Sequence: Synthetic oligonucleotide
cuuagaacggagauccacu

SEQ ID NO: 1523018 - RNA, 19 nt, Artificial Sequence
  Description of Artificial Sequence: Synthetic oligonucleotide
uuguugcaggcgauagaac

SEQ ID NO: 1523019 - RNA, 19 nt, Artificial Sequence
  Description of Artificial Sequence: Synthetic oligonucleotide
gauccagaugauaggccug

SEQ ID NO: 1523020 - RNA, 19 nt, Artificial Sequence
  Description of Artificial Sequence: Synthetic oligonucleotide
ugcaguuggccaccaccug

SEQ ID NO: 1523021 - RNA, 19 nt, Artificial Sequence
  Description of Artificial Sequence: Synthetic oligonucleotide
ucggucccaccauaauacc

SEQ ID NO: 1523022 - RNA, 19 nt, Artificial Sequence
  Description of Artificial Sequence: Synthetic oligonucleotide
caccuuauaaggcauagau

SEQ ID NO: 1523023 - RNA, 19 nt, Artificial Sequence
  Description of Artificial Sequence: Synthetic oligonucleotide
acucggucccaccauaaua

SEQ ID NO: 1523024 - RNA, 19 nt, Artificial Sequence
  Description of Artificial Sequence: Synthetic oligonucleotide
ggucuaagcccaugauacg

SEQ ID NO: 1523025 - RNA, 19 nt, Artificial Sequence
  Description of Artificial Sequence: Synthetic oligonucleotide
ggagccugaauaaggcugg

SEQ ID NO: 1523026 - RNA, 19 nt, Artificial Sequence
  Description of Artificial Sequence: Synthetic oligonucleotide
gccugaauaaggcuggaca

SEQ ID NO: 1523027 - RNA, 19 nt, Artificial Sequence
  Description of Artificial Sequence: Synthetic oligonucleotide
ucagcccuuccaccaucgg

SEQ ID NO: 1523028 - RNA, 19 nt, Artificial Sequence
  Description of Artificial Sequence: Synthetic oligonucleotide
acgucuucgcgaagagucc

SEQ ID NO: 1523029 - RNA, 19 nt, Artificial Sequence
  Description of Artificial Sequence: Synthetic oligonucleotide
cacucugguacuucucauc

SEQ ID NO: 1523030 - RNA, 19 nt, Artificial Sequence
  Description of Artificial Sequence: Synthetic oligonucleotide
uccuuugccgauuguucuc

SEQ ID NO: 1523031 - RNA, 19 nt, Artificial Sequence
  Description of Artificial Sequence: Synthetic oligonucleotide
uuugcaggggagccugaau

SEQ ID NO: 1523032 - RNA, 19 nt, Artificial Sequence
  Description of Artificial Sequence: Synthetic oligonucleotide
ucuuucgcagacgugcgua

SEQ ID NO: 1523033 - RNA, 19 nt, Artificial Sequence
  Description of Artificial Sequence: Synthetic oligonucleotide
gugaaagaggcuggcauuc

SEQ ID NO: 1523034 - RNA, 19 nt, Artificial Sequence
  Description of Artificial Sequence: Synthetic oligonucleotide
ggguacaccuuauaaggca

SEQ ID NO: 1523035 - RNA, 19 nt, Artificial Sequence
  Description of Artificial Sequence: Synthetic oligonucleotide
cagcuucgggugaaagagg

SEQ ID NO: 1523036 - RNA, 19 nt, Artificial Sequence
  Description of Artificial Sequence: Synthetic oligonucleotide
cuucucaugagaggaccac

SEQ ID NO: 1523037 - RNA, 19 nt, Artificial Sequence
  Description of Artificial Sequence: Synthetic oligonucleotide
ucuucgcgaagaguccuca

SEQ ID NO: 1523038 - RNA, 19 nt, Artificial Sequence
  Description of Artificial Sequence: Synthetic oligonucleotide
agacgugcguaguccaggu

SEQ ID NO: 1523039 - RNA, 19 nt, Artificial Sequence
  Description of Artificial Sequence: Synthetic oligonucleotide
ucgcagacgugcguagucc

SEQ ID NO: 1523040 - RNA, 19 nt, Artificial Sequence
  Description of Artificial Sequence: Synthetic oligonucleotide
ggcaguauauacagcgaag

SEQ ID NO: 1523041 - RNA, 19 nt, Artificial Sequence
  Description of Artificial Sequence: Synthetic oligonucleotide
acucuccacgucuucgcga

SEQ ID NO: 1523042 - RNA, 19 nt, Artificial Sequence
  Description of Artificial Sequence: Synthetic oligonucleotide
cagcucauaaugaaucucu

SEQ ID NO: 1523043 - RNA, 19 nt, Artificial Sequence
  Description of Artificial Sequence: Synthetic oligonucleotide
gcagagucaacucgauccc

SEQ ID NO: 1523044 - RNA, 19 nt, Artificial Sequence
  Description of Artificial Sequence: Synthetic oligonucleotide
acacugcgcacacccuuuc

SEQ ID NO: 1523045 - RNA, 19 nt, Artificial Sequence
  Description of Artificial Sequence: Synthetic oligonucleotide
agccucucaggguuuugug

SEQ ID NO: 1523046 - RNA, 19 nt, Artificial Sequence
  Description of Artificial Sequence: Synthetic oligonucleotide
agccugaauaaggcuggac

SEQ ID NO: 1523047 - RNA, 19 nt, Artificial Sequence
  Description of Artificial Sequence: Synthetic oligonucleotide
gaacggagauccacuagga

SEQ ID NO: 1523048 - RNA, 19 nt, Artificial Sequence
  Description of Artificial Sequence: Synthetic oligonucleotide
ugaaagaggcuggcauucu

SEQ ID NO: 1523049 - RNA, 19 nt, Artificial Sequence
  Description of Artificial Sequence: Synthetic oligonucleotide
ucgaucccucuauggauaa

SEQ ID NO: 1523050 - RNA, 19 nt, Artificial Sequence
  Description of Artificial Sequence: Synthetic oligonucleotide
aguccacgggaugucaaug

SEQ ID NO: 1523051 - RNA, 19 nt, Artificial Sequence
  Description of Artificial Sequence: Synthetic oligonucleotide
ugauacguccauggggcuc

SEQ ID NO: 1523052 - RNA, 19 nt, Artificial Sequence
  Description of Artificial Sequence: Synthetic oligonucleotide
cucugcuggcaaaauucuc

SEQ ID NO: 1523053 - RNA, 19 nt, Artificial Sequence
  Description of Artificial Sequence: Synthetic oligonucleotide
ucucaucaccugucaauuu

SEQ ID NO: 1523054 - RNA, 19 nt, Artificial Sequence
  Description of Artificial Sequence: Synthetic oligonucleotide
gcgaagaguccucacagca

SEQ ID NO: 1523055 - RNA, 19 nt, Artificial Sequence
  Description of Artificial Sequence: Synthetic oligonucleotide
guaucacaccagcugccac

SEQ ID NO: 1523056 - RNA, 19 nt, Artificial Sequence
  Description of Artificial Sequence: Synthetic oligonucleotide
gacgaucagcuucggguga

SEQ ID NO: 1523057 - RNA, 19 nt, Artificial Sequence
  Description of Artificial Sequence: Synthetic oligonucleotide
aaccaccugugacuauuuu

SEQ ID NO: 1523058 - RNA, 19 nt, Artificial Sequence
  Description of Artificial Sequence: Synthetic oligonucleotide
acgggaugucaaugcuggg

SEQ ID NO: 1523059 - RNA, 19 nt, Artificial Sequence
  Description of Artificial Sequence: Synthetic oligonucleotide
auaucccucagaguauuua

SEQ ID NO: 1523060 - RNA, 19 nt, Artificial Sequence
  Description of Artificial Sequence: Synthetic oligonucleotide
aucuuucgcagacgugcgu

SEQ ID NO: 1523061 - RNA, 19 nt, Artificial Sequence
  Description of Artificial Sequence: Synthetic oligonucleotide
aggccugcaaugcacgcuu

SEQ ID NO: 1523062 - RNA, 19 nt, Artificial Sequence
  Description of Artificial Sequence: Synthetic oligonucleotide
accuuauaaggcauagauu

SEQ ID NO: 1523063 - RNA, 19 nt, Artificial Sequence
  Description of Artificial Sequence: Synthetic oligonucleotide
cuggacauugacgccccag

SEQ ID NO: 1523064 - RNA, 19 nt, Artificial Sequence
  Description of Artificial Sequence: Synthetic oligonucleotide
ggauccagaugauaggccu

SEQ ID NO: 1523065 - RNA, 19 nt, Artificial Sequence
  Description of Artificial Sequence: Synthetic oligonucleotide
gacgccccagcaccgagga

SEQ ID NO: 1523066 - RNA, 19 nt, Artificial Sequence
  Description of Artificial Sequence: Synthetic oligonucleotide
gguggucaccacauggcag

SEQ ID NO: 1523067 - RNA, 19 nt, Artificial Sequence
  Description of Artificial Sequence: Synthetic oligonucleotide
uagauguagcagagauuuu

SEQ ID NO: 1523068 - RNA, 19 nt, Artificial Sequence
  Description of Artificial Sequence: Synthetic oligonucleotide
cagaugauaggccugcaau

SEQ ID NO: 1523069 - RNA, 19 nt, Artificial Sequence
  Description of Artificial Sequence: Synthetic oligonucleotide
ugcguaguccagguuccga

SEQ ID NO: 1523070 - RNA, 19 nt, Artificial Sequence
  Description of Artificial Sequence: Synthetic oligonucleotide
aucaaugaacucgguccca

SEQ ID NO: 1523071 - RNA, 19 nt, Artificial Sequence
  Description of Artificial Sequence: Synthetic oligonucleotide
gguugugguggucaccaca

SEQ ID NO: 1523072 - RNA, 19 nt, Artificial Sequence
  Description of Artificial Sequence: Synthetic oligonucleotide
guacccuuagaacggagau

SEQ ID NO: 1523073 - RNA, 19 nt, Artificial Sequence
  Description of Artificial Sequence: Synthetic oligonucleotide
cucgaucccucuauggaua

SEQ ID NO: 1523074 - RNA, 19 nt, Artificial Sequence
  Description of Artificial Sequence: Synthetic oligonucleotide
ccaccauaauaccuuuggc

SEQ ID NO: 1523075 - RNA, 19 nt, Artificial Sequence
  Description of Artificial Sequence: Synthetic oligonucleotide
uuucgcagacgugcguagu

SEQ ID NO: 1523076 - RNA, 19 nt, Artificial Sequence
  Description of Artificial Sequence: Synthetic oligonucleotide
guauuuaaaaggggagggu

SEQ ID NO: 1523077 - RNA, 19 nt, Artificial Sequence
  Description of Artificial Sequence: Synthetic oligonucleotide
agcccuuccaccaucggua

SEQ ID NO: 1523078 - RNA, 19 nt, Artificial Sequence
  Description of Artificial Sequence: Synthetic oligonucleotide
ugcgcacacccuuucugua

SEQ ID NO: 1523079 - RNA, 19 nt, Artificial Sequence
  Description of Artificial Sequence: Synthetic oligonucleotide
uaauaccuuuggccuggau

SEQ ID NO: 1523080 - RNA, 19 nt, Artificial Sequence
  Description of Artificial Sequence: Synthetic oligonucleotide
cuucgcgaagaguccucac

SEQ ID NO: 1523081 - RNA, 19 nt, Artificial Sequence
  Description of Artificial Sequence: Synthetic oligonucleotide
agcccacuaaugugugcca

SEQ ID NO: 1523082 - RNA, 19 nt, Artificial Sequence
  Description of Artificial Sequence: Synthetic oligonucleotide
ucuccacgucuucgcgaag

SEQ ID NO: 1523083 - RNA, 19 nt, Artificial Sequence
  Description of Artificial Sequence: Synthetic oligonucleotide
cccaugauacguccauggg

SEQ ID NO: 1523084 - RNA, 19 nt, Artificial Sequence
  Description of Artificial Sequence: Synthetic oligonucleotide
guaagccugggaacacagc

SEQ ID NO: 1523085 - RNA, 19 nt, Artificial Sequence
  Description of Artificial Sequence: Synthetic oligonucleotide
cgaggauccagaugauagg

SEQ ID NO: 1523086 - RNA, 19 nt, Artificial Sequence
  Description of Artificial Sequence: Synthetic oligonucleotide
acaccuuauaaggcauaga

SEQ ID NO: 1523087 - RNA, 19 nt, Artificial Sequence
  Description of Artificial Sequence: Synthetic oligonucleotide
agucaacucgaucccucua

SEQ ID NO: 1523088 - RNA, 19 nt, Artificial Sequence
  Description of Artificial Sequence: Synthetic oligonucleotide
ccaugagucaaaugaccuc

SEQ ID NO: 1523089 - RNA, 19 nt, Artificial Sequence
  Description of Artificial Sequence: Synthetic oligonucleotide
cucuccacgucuucgcgaa

SEQ ID NO: 1523090 - RNA, 19 nt, Artificial Sequence
  Description of Artificial Sequence: Synthetic oligonucleotide
cugcagagucaacucgauc

SEQ ID NO: 1523091 - RNA, 19 nt, Artificial Sequence
  Description of Artificial Sequence: Synthetic oligonucleotide
gggcaguauauacagcgaa

SEQ ID NO: 1523092 - RNA, 19 nt, Artificial Sequence
  Description of Artificial Sequence: Synthetic oligonucleotide
aucccucuauggauaaagu

SEQ ID NO: 1523093 - RNA, 19 nt, Artificial Sequence
  Description of Artificial Sequence: Synthetic oligonucleotide
gucaccugggcagguauuc

SEQ ID NO: 1523094 - RNA, 19 nt, Artificial Sequence
  Description of Artificial Sequence: Synthetic oligonucleotide
gagucaacucgaucccucu

SEQ ID NO: 1523095 - RNA, 19 nt, Artificial Sequence
  Description of Artificial Sequence: Synthetic oligonucleotide
ucaccugggcagguauucu

SEQ ID NO: 1523096 - RNA, 19 nt, Artificial Sequence
  Description of Artificial Sequence: Synthetic oligonucleotide
agggcaguauauacagcga

SEQ ID NO: 1523097 - RNA, 19 nt, Artificial Sequence
  Description of Artificial Sequence: Synthetic oligonucleotide
ucgguacccuuagaacgga

SEQ ID NO: 1523098 - RNA, 19 nt, Artificial Sequence
  Description of Artificial Sequence: Synthetic oligonucleotide
ggcaaucagcuccaaucca

SEQ ID NO: 1523099 - RNA, 19 nt, Artificial Sequence
  Description of Artificial Sequence: Synthetic oligonucleotide
augagucaaaugaccucca

SEQ ID NO: 1523100 - RNA, 19 nt, Artificial Sequence
  Description of Artificial Sequence: Synthetic oligonucleotide
caggcgauagaacaggcuu

SEQ ID NO: 1523101 - RNA, 19 nt, Artificial Sequence
  Description of Artificial Sequence: Synthetic oligonucleotide
ggacauugacgccccagca

SEQ ID NO: 1523102 - RNA, 19 nt, Artificial Sequence
  Description of Artificial Sequence: Synthetic oligonucleotide
cacuaaugugugccauguc

SEQ ID NO: 1523103 - RNA, 19 nt, Artificial Sequence
  Description of Artificial Sequence: Synthetic oligonucleotide
cccuuucuguagaauauca

SEQ ID NO: 1523104 - RNA, 19 nt, Artificial Sequence
  Description of Artificial Sequence: Synthetic oligonucleotide
gcgcacacccuuucuguag

SEQ ID NO: 1523105 - RNA, 19 nt, Artificial Sequence
  Description of Artificial Sequence: Synthetic oligonucleotide
gucccugcgacgaucagcu

SEQ ID NO: 1523106 - RNA, 19 nt, Artificial Sequence
  Description of Artificial Sequence: Synthetic oligonucleotide
gguacccuuagaacggaga

SEQ ID NO: 1523107 - RNA, 19 nt, Artificial Sequence
  Description of Artificial Sequence: Synthetic oligonucleotide
cacuaggaucaagugauua

SEQ ID NO: 1523108 - RNA, 19 nt, Artificial Sequence
  Description of Artificial Sequence: Synthetic oligonucleotide
cuggucccugcgacgauca

SEQ ID NO: 1523109 - RNA, 19 nt, Artificial Sequence
  Description of Artificial Sequence: Synthetic oligonucleotide
agcucauaaugaaucucuu

SEQ ID NO: 1523110 - RNA, 19 nt, Artificial Sequence
  Description of Artificial Sequence: Synthetic oligonucleotide
gcaaugcacgcuucugaca

SEQ ID NO: 1523111 - RNA, 19 nt, Artificial Sequence
  Description of Artificial Sequence: Synthetic oligonucleotide
gaacucggucccaccauaa

SEQ ID NO: 1523112 - RNA, 19 nt, Artificial Sequence
  Description of Artificial Sequence: Synthetic oligonucleotide
auugacgccccagcaccga

SEQ ID NO: 1523113 - RNA, 19 nt, Artificial Sequence
  Description of Artificial Sequence: Synthetic oligonucleotide
accagcccacuaaugugug

SEQ ID NO: 1523114 - RNA, 19 nt, Artificial Sequence
  Description of Artificial Sequence: Synthetic oligonucleotide
cgugcguaguccagguucc

SEQ ID NO: 1523115 - RNA, 19 nt, Artificial Sequence
  Description of Artificial Sequence: Synthetic oligonucleotide
ugcacgcuucugacacagu

SEQ ID NO: 1523116 - RNA, 19 nt, Artificial Sequence
  Description of Artificial Sequence: Synthetic oligonucleotide
gguaucacaccagcugcca

SEQ ID NO: 1523117 - RNA, 19 nt, Artificial Sequence
  Description of Artificial Sequence: Synthetic oligonucleotide
gcgaaguuugcaggggagc

SEQ ID NO: 1523118 - RNA, 19 nt, Artificial Sequence
  Description of Artificial Sequence: Synthetic oligonucleotide
cacgcuucugacacagugu

SEQ ID NO: 1523119 - RNA, 19 nt, Artificial Sequence
  Description of Artificial Sequence: Synthetic oligonucleotide
caaaauucucugaggcaau

SEQ ID NO: 1523120 - RNA, 19 nt, Artificial Sequence
  Description of Artificial Sequence: Synthetic oligonucleotide
cacccuuucuguagaauau

SEQ ID NO: 1523121 - RNA, 19 nt, Artificial Sequence
  Description of Artificial Sequence: Synthetic oligonucleotide
cuccacgucuucgcgaaga

SEQ ID NO: 1523122 - RNA, 19 nt, Artificial Sequence
  Description of Artificial Sequence: Synthetic oligonucleotide
cccugcgacgaucagcuuc

SEQ ID NO: 1523123 - RNA, 19 nt, Artificial Sequence
  Description of Artificial Sequence: Synthetic oligonucleotide
ccacgggaugucaaugcug

SEQ ID NO: 1523124 - RNA, 19 nt, Artificial Sequence
  Description of Artificial Sequence: Synthetic oligonucleotide
gccgcaaugcacuccgguc

SEQ ID NO: 1523125 - RNA, 19 nt, Artificial Sequence
  Description of Artificial Sequence: Synthetic oligonucleotide
gggugaaagaggcuggcau

SEQ ID NO: 1523126 - RNA, 19 nt, Artificial Sequence
  Description of Artificial Sequence: Synthetic oligonucleotide
auaauaccuuuggccugga

SEQ ID NO: 1523127 - RNA, 19 nt, Artificial Sequence
  Description of Artificial Sequence: Synthetic oligonucleotide
gugcguaguccagguuccg

SEQ ID NO: 1523128 - RNA, 19 nt, Artificial Sequence
  Description of Artificial Sequence: Synthetic oligonucleotide
cuguaagccugggaacaca

SEQ ID NO: 1523129 - RNA, 19 nt, Artificial Sequence
  Description of Artificial Sequence: Synthetic oligonucleotide
ccagcucauaaugaaucuc

SEQ ID NO: 1523130 - RNA, 19 nt, Artificial Sequence
  Description of Artificial Sequence: Synthetic oligonucleotide
acgaucagcuucgggugaa

SEQ ID NO: 1523131 - RNA, 19 nt, Artificial Sequence
  Description of Artificial Sequence: Synthetic oligonucleotide
guggguugugguggucacc

SEQ ID NO: 1523132 - RNA, 19 nt, Artificial Sequence
  Description of Artificial Sequence: Synthetic oligonucleotide
ggcagguauucuuguugca

SEQ ID NO: 1523133 - RNA, 19 nt, Artificial Sequence
  Description of Artificial Sequence: Synthetic oligonucleotide
cuagcucuuugagggccuc

SEQ ID NO: 1523134 - RNA, 19 nt, Artificial Sequence
  Description of Artificial Sequence: Synthetic oligonucleotide
gccaugagucaaaugaccu

SEQ ID NO: 1523135 - RNA, 19 nt, Artificial Sequence
  Description of Artificial Sequence: Synthetic oligonucleotide
uaguaccuucucagcccuu

SEQ ID NO: 1523136 - RNA, 19 nt, Artificial Sequence
  Description of Artificial Sequence: Synthetic oligonucleotide
cugcgcacacccuuucugu

SEQ ID NO: 1523137 - RNA, 19 nt, Artificial Sequence
  Description of Artificial Sequence: Synthetic oligonucleotide
caauccuuugccgauuguu

SEQ ID NO: 1523138 - RNA, 19 nt, Artificial Sequence
  Description of Artificial Sequence: Synthetic oligonucleotide
guacaccuuauaaggcaua

SEQ ID NO: 1523139 - RNA, 19 nt, Artificial Sequence
  Description of Artificial Sequence: Synthetic oligonucleotide
gguacaccuuauaaggcau

SEQ ID NO: 1523140 - RNA, 19 nt, Artificial Sequence
  Description of Artificial Sequence: Synthetic oligonucleotide
gucuucgcgaagaguccuc

SEQ ID NO: 1523141 - RNA, 19 nt, Artificial Sequence
  Description of Artificial Sequence: Synthetic oligonucleotide
caccugugacuauuuugua

SEQ ID NO: 1523142 - RNA, 19 nt, Artificial Sequence
  Description of Artificial Sequence: Synthetic oligonucleotide
agggcugugccaacaucuu

SEQ ID NO: 1523143 - RNA, 19 nt, Artificial Sequence
  Description of Artificial Sequence: Synthetic oligonucleotide
cauuaucaucagcaaucuu

SEQ ID NO: 1523144 - RNA, 19 nt, Artificial Sequence
  Description of Artificial Sequence: Synthetic oligonucleotide
ggucccaccauaauaccuu

SEQ ID NO: 1523145 - RNA, 19 nt, Artificial Sequence
  Description of Artificial Sequence: Synthetic oligonucleotide
ccagaugauaggccugcaa

SEQ ID NO: 1523146 - RNA, 19 nt, Artificial Sequence
  Description of Artificial Sequence: Synthetic oligonucleotide
uacguccauggggcucaac

SEQ ID NO: 1523147 - RNA, 19 nt, Artificial Sequence
  Description of Artificial Sequence: Synthetic oligonucleotide
ggauaucccucagaguauu

SEQ ID NO: 1523148 - RNA, 19 nt, Artificial Sequence
  Description of Artificial Sequence: Synthetic oligonucleotide
caccaucgguacccuuaga

SEQ ID NO: 1523149 - RNA, 19 nt, Artificial Sequence
  Description of Artificial Sequence: Synthetic oligonucleotide
gacgugcguaguccagguu

SEQ ID NO: 1523150 - RNA, 19 nt, Artificial Sequence
  Description of Artificial Sequence: Synthetic oligonucleotide
ggccgcaaugcacuccggu

SEQ ID NO: 1523151 - RNA, 19 nt, Artificial Sequence
  Description of Artificial Sequence: Synthetic oligonucleotide
cagccucucaggguuuugu

SEQ ID NO: 1523152 - RNA, 19 nt, Artificial Sequence
  Description of Artificial Sequence: Synthetic oligonucleotide
cagcucugcuggcaaaauu

SEQ ID NO: 1523153 - RNA, 19 nt, Artificial Sequence
  Description of Artificial Sequence: Synthetic oligonucleotide
ggcucaaccagggcaguau

SEQ ID NO: 1523154 - RNA, 19 nt, Artificial Sequence
  Description of Artificial Sequence: Synthetic oligonucleotide
gccugcaaugcacgcuucu

SEQ ID NO: 1523155 - RNA, 19 nt, Artificial Sequence
  Description of Artificial Sequence: Synthetic oligonucleotide
gcaggcgauagaacaggcu

SEQ ID NO: 1523156 - RNA, 19 nt, Artificial Sequence
  Description of Artificial Sequence: Synthetic oligonucleotide
cuuugccgauuguucucuu

SEQ ID NO: 1523157 - RNA, 19 nt, Artificial Sequence
  Description of Artificial Sequence: Synthetic oligonucleotide
cgcagacgugcguagucca

SEQ ID NO: 1523158 - RNA, 19 nt, Artificial Sequence
  Description of Artificial Sequence: Synthetic oligonucleotide
ccuuugccgauuguucucu

SEQ ID NO: 1523159 - RNA, 19 nt, Artificial Sequence
  Description of Artificial Sequence: Synthetic oligonucleotide
auacguccauggggcucaa

SEQ ID NO: 1523160 - RNA, 19 nt, Artificial Sequence
  Description of Artificial Sequence: Synthetic oligonucleotide
cagcuccaauccaauccuu

SEQ ID NO: 1523161 - RNA, 19 nt, Artificial Sequence
  Description of Artificial Sequence: Synthetic oligonucleotide
cuuccaccaucgguacccu

SEQ ID NO: 1523162 - RNA, 19 nt, Artificial Sequence
  Description of Artificial Sequence: Synthetic oligonucleotide
gggccgcaaugcacuccgg

SEQ ID NO: 1523163 - RNA, 19 nt, Artificial Sequence
  Description of Artificial Sequence: Synthetic oligonucleotide
cccuuagaacggagaucca

SEQ ID NO: 1523164 - RNA, 19 nt, Artificial Sequence
  Description of Artificial Sequence: Synthetic oligonucleotide
cggucccaccauaauaccu

SEQ ID NO: 1523165 - RNA, 19 nt, Artificial Sequence
  Description of Artificial Sequence: Synthetic oligonucleotide
caccgaggauccagaugau

SEQ ID NO: 1523166 - RNA, 19 nt, Artificial Sequence
  Description of Artificial Sequence: Synthetic oligonucleotide
gcuucgggugaaagaggcu

SEQ ID NO: 1523167 - RNA, 19 nt, Artificial Sequence
  Description of Artificial Sequence: Synthetic oligonucleotide
ggucaccacauggcaguau

SEQ ID NO: 1523168 - RNA, 19 nt, Artificial Sequence
  Description of Artificial Sequence: Synthetic oligonucleotide
gcccacuaaugugugccau

SEQ ID NO: 1523169 - RNA, 19 nt, Artificial Sequence
  Description of Artificial Sequence: Synthetic oligonucleotide
gcgauagaacaggcuucua

SEQ ID NO: 1523170 - RNA, 19 nt, Artificial Sequence
  Description of Artificial Sequence: Synthetic oligonucleotide
gccaugagauaugccccau

SEQ ID NO: 1523171 - RNA, 19 nt, Artificial Sequence
  Description of Artificial Sequence: Synthetic oligonucleotide
ccagcacggcagccucuca

SEQ ID NO: 1523172 - RNA, 19 nt, Artificial Sequence
  Description of Artificial Sequence: Synthetic oligonucleotide
cgucuucgcgaagaguccu

SEQ ID NO: 1523173 - RNA, 19 nt, Artificial Sequence
  Description of Artificial Sequence: Synthetic oligonucleotide
ccacuaggaucaagugauu

SEQ ID NO: 1523174 - RNA, 19 nt, Artificial Sequence
  Description of Artificial Sequence: Synthetic oligonucleotide
ccacgucuucgcgaagagu

SEQ ID NO: 1523175 - RNA, 19 nt, Artificial Sequence
  Description of Artificial Sequence: Synthetic oligonucleotide
cgaucccucuauggauaaa

SEQ ID NO: 1523176 - RNA, 19 nt, Artificial Sequence
  Description of Artificial Sequence: Synthetic oligonucleotide
cgaucagcuucgggugaaa

SEQ ID NO: 1523177 - RNA, 19 nt, Artificial Sequence
  Description of Artificial Sequence: Synthetic oligonucleotide
aaugacaaaauauacagcu

SEQ ID NO: 1523178 - RNA, 19 nt, Artificial Sequence
  Description of Artificial Sequence: Synthetic oligonucleotide
uauaauaucaggauguuga

SEQ ID NO: 1523179 - RNA, 19 nt, Artificial Sequence
  Description of Artificial Sequence: Synthetic oligonucleotide
ucaaacauagcaaaucggg

SEQ ID NO: 1523180 - RNA, 19 nt, Artificial Sequence
  Description of Artificial Sequence: Synthetic oligonucleotide
uuuuaagaucucuagaucc

SEQ ID NO: 1523181 - RNA, 19 nt, Artificial Sequence
  Description of Artificial Sequence: Synthetic oligonucleotide
aauguaagaaagaaguaac

SEQ ID NO: 1523182 - RNA, 19 nt, Artificial Sequence
  Description of Artificial Sequence: Synthetic oligonucleotide
aauaccaucaaucugucua

SEQ ID NO: 1523183 - RNA, 19 nt, Artificial Sequence
  Description of Artificial Sequence: Synthetic oligonucleotide
uguggaauuacacuguagc

SEQ ID NO: 1523184 - RNA, 19 nt, Artificial Sequence
  Description of Artificial Sequence: Synthetic oligonucleotide
aagaaucagaaccacagca

SEQ ID NO: 1523185 - RNA, 19 nt, Artificial Sequence
  Description of Artificial Sequence: Synthetic oligonucleotide
uuuaagaucucuagauccg

SEQ ID NO: 1523186 - RNA, 19 nt, Artificial Sequence
  Description of Artificial Sequence: Synthetic oligonucleotide
ucaagaauccacucaaugc

SEQ ID NO: 1523187 - RNA, 19 nt, Artificial Sequence
  Description of Artificial Sequence: Synthetic oligonucleotide
uacagcuguacaucgaucg

SEQ ID NO: 1523188 - RNA, 19 nt, Artificial Sequence
  Description of Artificial Sequence: Synthetic oligonucleotide
agaccaagaagggagaucc

SEQ ID NO: 1523189 - RNA, 19 nt, Artificial Sequence
  Description of Artificial Sequence: Synthetic oligonucleotide
aaacacacacgucacgcac

SEQ ID NO: 1523190 - RNA, 19 nt, Artificial Sequence
  Description of Artificial Sequence: Synthetic oligonucleotide
aaaaugugagcauucauuu

SEQ ID NO: 1523191 - RNA, 19 nt, Artificial Sequence
  Description of Artificial Sequence: Synthetic oligonucleotide
agaauugggucucuuacgg

SEQ ID NO: 1523192 - RNA, 19 nt, Artificial Sequence
  Description of Artificial Sequence: Synthetic oligonucleotide
auagcuguccuguauaaag

SEQ ID NO: 1523193 - RNA, 19 nt, Artificial Sequence
  Description of Artificial Sequence: Synthetic oligonucleotide
aauuuauguugauuguuca

SEQ ID NO: 1523194 - RNA, 19 nt, Artificial Sequence
  Description of Artificial Sequence: Synthetic oligonucleotide
aguaacgauuuguacuucc

SEQ ID NO: 1523195 - RNA, 19 nt, Artificial Sequence
  Description of Artificial Sequence: Synthetic oligonucleotide
aucaaucugucuaugaggc

SEQ ID NO: 1523196 - RNA, 19 nt, Artificial Sequence
  Description of Artificial Sequence: Synthetic oligonucleotide
uucaacuggaaauugacuc

SEQ ID NO: 1523197 - RNA, 19 nt, Artificial Sequence
  Description of Artificial Sequence: Synthetic oligonucleotide
agucgaauauaauaucagg

SEQ ID NO: 1523198 - RNA, 19 nt, Artificial Sequence
  Description of Artificial Sequence: Synthetic oligonucleotide
ucgggguucauucugaaug

SEQ ID NO: 1523199 - RNA, 19 nt, Artificial Sequence
  Description of Artificial Sequence: Synthetic oligonucleotide
uguucaauucuuccaaacc

SEQ ID NO: 1523200 - RNA, 19 nt, Artificial Sequence
  Description of Artificial Sequence: Synthetic oligonucleotide
ucguuuaugagcuucggca

SEQ ID NO: 1523201 - RNA, 19 nt, Artificial Sequence
  Description of Artificial Sequence: Synthetic oligonucleotide
aacucaacaccaaagaugu

SEQ ID NO: 1523202 - RNA, 19 nt, Artificial Sequence
  Description of Artificial Sequence: Synthetic oligonucleotide
auguugauuguucaacugg

SEQ ID NO: 1523203 - RNA, 19 nt, Artificial Sequence
  Description of Artificial Sequence: Synthetic oligonucleotide
uucaugucguuuaugagcu

SEQ ID NO: 1523204 - RNA, 19 nt, Artificial Sequence
  Description of Artificial Sequence: Synthetic oligonucleotide
agauccaaaagcuggaucu

SEQ ID NO: 1523205 - RNA, 19 nt, Artificial Sequence
  Description of Artificial Sequence: Synthetic oligonucleotide
cauguaaucaaaacgcgug

SEQ ID NO: 1523206 - RNA, 19 nt, Artificial Sequence
  Description of Artificial Sequence: Synthetic oligonucleotide
uaugaggcaaaccagcagu

SEQ ID NO: 1523207 - RNA, 19 nt, Artificial Sequence
  Description of Artificial Sequence: Synthetic oligonucleotide
ggaaauugacuccagaucc

SEQ ID NO: 1523208 - RNA, 19 nt, Artificial Sequence
  Description of Artificial Sequence: Synthetic oligonucleotide
uucggcauuugccacauag

SEQ ID NO: 1523209 - RNA, 19 nt, Artificial Sequence
  Description of Artificial Sequence: Synthetic oligonucleotide
aucaaugaauguaagaaag

SEQ ID NO: 1523210 - RNA, 19 nt, Artificial Sequence
  Description of Artificial Sequence: Synthetic oligonucleotide
uccaguaacgauuuguacu

SEQ ID NO: 1523211 - RNA, 19 nt, Artificial Sequence
  Description of Artificial Sequence: Synthetic oligonucleotide
caugauacgagaaaauuca

SEQ ID NO: 1523212 - RNA, 19 nt, Artificial Sequence
  Description of Artificial Sequence: Synthetic oligonucleotide
caaaccuggucaaacauag

SEQ ID NO: 1523213 - RNA, 19 nt, Artificial Sequence
  Description of Artificial Sequence: Synthetic oligonucleotide
gacagcacguuuuauaaac

SEQ ID NO: 1523214 - RNA, 19 nt, Artificial Sequence
  Description of Artificial Sequence: Synthetic oligonucleotide
agcuggaucugucauggcc

SEQ ID NO: 1523215 - RNA, 19 nt, Artificial Sequence
  Description of Artificial Sequence: Synthetic oligonucleotide
agauccaauaccaucaauc

SEQ ID NO: 1523216 - RNA, 19 nt, Artificial Sequence
  Description of Artificial Sequence: Synthetic oligonucleotide
uucaauucuuccaaaccug

SEQ ID NO: 1523217 - RNA, 19 nt, Artificial Sequence
  Description of Artificial Sequence: Synthetic oligonucleotide
uaggauugaaacuugcaac

SEQ ID NO: 1523218 - RNA, 19 nt, Artificial Sequence
  Description of Artificial Sequence: Synthetic oligonucleotide
ugauuguucaacuggaaau

SEQ ID NO: 1523219 - RNA, 19 nt, Artificial Sequence
  Description of Artificial Sequence: Synthetic oligonucleotide
uuauagaaagucaggaaua

SEQ ID NO: 1523220 - RNA, 19 nt, Artificial Sequence
  Description of Artificial Sequence: Synthetic oligonucleotide
uagucgaauauaauaucag

SEQ ID NO: 1523221 - RNA, 19 nt, Artificial Sequence
  Description of Artificial Sequence: Synthetic oligonucleotide
uuuauguugauuguucaac

SEQ ID NO: 1523222 - RNA, 19 nt, Artificial Sequence
  Description of Artificial Sequence: Synthetic oligonucleotide
ucgaauauaauaucaggau

SEQ ID NO: 1523223 - RNA, 19 nt, Artificial Sequence
  Description of Artificial Sequence: Synthetic oligonucleotide
ucauuuugcaugcuuagau

SEQ ID NO: 1523224 - RNA, 19 nt, Artificial Sequence
  Description of Artificial Sequence: Synthetic oligonucleotide
ugguagucgaauauaauau

SEQ ID NO: 1523225 - RNA, 19 nt, Artificial Sequence
  Description of Artificial Sequence: Synthetic oligonucleotide
uguucaacuggaaauugac

SEQ ID NO: 1523226 - RNA, 19 nt, Artificial Sequence
  Description of Artificial Sequence: Synthetic oligonucleotide
ucaaugaauguaagaaaga

SEQ ID NO: 1523227 - RNA, 19 nt, Artificial Sequence
  Description of Artificial Sequence: Synthetic oligonucleotide
aauccacucaaugccauuc

SEQ ID NO: 1523228 - RNA, 19 nt, Artificial Sequence
  Description of Artificial Sequence: Synthetic oligonucleotide
ucgacaacuucacacaccu

SEQ ID NO: 1523229 - RNA, 19 nt, Artificial Sequence
  Description of Artificial Sequence: Synthetic oligonucleotide
acuguagcggcuuccuugc

SEQ ID NO: 1523230 - RNA, 19 nt, Artificial Sequence
  Description of Artificial Sequence: Synthetic oligonucleotide
gagaauugggucucuuacg

SEQ ID NO: 1523231 - RNA, 19 nt, Artificial Sequence
  Description of Artificial Sequence: Synthetic oligonucleotide
aaaagcuggaucugucaug

SEQ ID NO: 1523232 - RNA, 19 nt, Artificial Sequence
  Description of Artificial Sequence: Synthetic oligonucleotide
uccaaucaacagaagacca

SEQ ID NO: 1523233 - RNA, 19 nt, Artificial Sequence
  Description of Artificial Sequence: Synthetic oligonucleotide
cugaacaucuuguuaacug

SEQ ID NO: 1523234 - RNA, 19 nt, Artificial Sequence
  Description of Artificial Sequence: Synthetic oligonucleotide
uuauguugauuguucaacu

SEQ ID NO: 1523235 - RNA, 19 nt, Artificial Sequence
  Description of Artificial Sequence: Synthetic oligonucleotide
ggauguugaauuuauguug

SEQ ID NO: 1523236 - RNA, 19 nt, Artificial Sequence
  Description of Artificial Sequence: Synthetic oligonucleotide
gcauuugccacauagauga

SEQ ID NO: 1523237 - RNA, 19 nt, Artificial Sequence
  Description of Artificial Sequence: Synthetic oligonucleotide
ugacuuccaaucaacagaa

SEQ ID NO: 1523238 - RNA, 19 nt, Artificial Sequence
  Description of Artificial Sequence: Synthetic oligonucleotide
aggcucuucucguauaugg

SEQ ID NO: 1523239 - RNA, 19 nt, Artificial Sequence
  Description of Artificial Sequence: Synthetic oligonucleotide
ugagcuucggcauuugcca

SEQ ID NO: 1523240 - RNA, 19 nt, Artificial Sequence
  Description of Artificial Sequence: Synthetic oligonucleotide
ucguauauggacagcacgu

SEQ ID NO: 1523241 - RNA, 19 nt, Artificial Sequence
  Description of Artificial Sequence: Synthetic oligonucleotide
uuguuaacuguacuugugu

SEQ ID NO: 1523242 - RNA, 19 nt, Artificial Sequence
  Description of Artificial Sequence: Synthetic oligonucleotide
aacgauuuguacuucccaa

SEQ ID NO: 1523243 - RNA, 19 nt, Artificial Sequence
  Description of Artificial Sequence: Synthetic oligonucleotide
guggaauuacacuguagcg

SEQ ID NO: 1523244 - RNA, 19 nt, Artificial Sequence
  Description of Artificial Sequence: Synthetic oligonucleotide
ugucuaugaggcaaaccag

SEQ ID NO: 1523245 - RNA, 19 nt, Artificial Sequence
  Description of Artificial Sequence: Synthetic oligonucleotide
uguacaucgaucggcagcc

SEQ ID NO: 1523246 - RNA, 19 nt, Artificial Sequence
  Description of Artificial Sequence: Synthetic oligonucleotide
aauugggucucuuacgguu

SEQ ID NO: 1523247 - RNA, 19 nt, Artificial Sequence
  Description of Artificial Sequence: Synthetic oligonucleotide
uuagauucuacuucuucaa

SEQ ID NO: 1523248 - RNA, 19 nt, Artificial Sequence
  Description of Artificial Sequence: Synthetic oligonucleotide
caugcuuagauucuacuuc

SEQ ID NO: 1523249 - RNA, 19 nt, Artificial Sequence
  Description of Artificial Sequence: Synthetic oligonucleotide
acgauuuguacuucccaac

SEQ ID NO: 1523250 - RNA, 19 nt, Artificial Sequence
  Description of Artificial Sequence: Synthetic oligonucleotide
ucuucucguauauggacag

SEQ ID NO: 1523251 - RNA, 19 nt, Artificial Sequence
  Description of Artificial Sequence: Synthetic oligonucleotide
uccucagaagacaucaaac

SEQ ID NO: 1523252 - RNA, 19 nt, Artificial Sequence
  Description of Artificial Sequence: Synthetic oligonucleotide
ucaaaacgcgugcugucgg

SEQ ID NO: 1523253 - RNA, 19 nt, Artificial Sequence
  Description of Artificial Sequence: Synthetic oligonucleotide
uuuguacuucccaacuggc

SEQ ID NO: 1523254 - RNA, 19 nt, Artificial Sequence
  Description of Artificial Sequence: Synthetic oligonucleotide
uguaggcugaacaucuugu

SEQ ID NO: 1523255 - RNA, 19 nt, Artificial Sequence
  Description of Artificial Sequence: Synthetic oligonucleotide
uugauuguucaacuggaaa

SEQ ID NO: 1523256 - RNA, 19 nt, Artificial Sequence
  Description of Artificial Sequence: Synthetic oligonucleotide
ugauacgagaaaauucauc

SEQ ID NO: 1523257 - RNA, 19 nt, Artificial Sequence
  Description of Artificial Sequence: Synthetic oligonucleotide
cucgcuuccagccauggcc

SEQ ID NO: 1523258 - RNA, 19 nt, Artificial Sequence
  Description of Artificial Sequence: Synthetic oligonucleotide
cucguauauggacagcacg

SEQ ID NO: 1523259 - RNA, 19 nt, Artificial Sequence
  Description of Artificial Sequence: Synthetic oligonucleotide
uacgguuucauuccaguaa

SEQ ID NO: 1523260 - RNA, 19 nt, Artificial Sequence
  Description of Artificial Sequence: Synthetic oligonucleotide
aacauagcaaaucgggguu

SEQ ID NO: 1523261 - RNA, 19 nt, Artificial Sequence
  Description of Artificial Sequence: Synthetic oligonucleotide
gaauuuauguugauuguuc

SEQ ID NO: 1523262 - RNA, 19 nt, Artificial Sequence
  Description of Artificial Sequence: Synthetic oligonucleotide
acgagaaaauucaucuugc

SEQ ID NO: 1523263 - RNA, 19 nt, Artificial Sequence
  Description of Artificial Sequence: Synthetic oligonucleotide
ggaauuacacuguagcggc

SEQ ID NO: 1523264 - RNA, 19 nt, Artificial Sequence
  Description of Artificial Sequence: Synthetic oligonucleotide
agaguuucagccuccauau

SEQ ID NO: 1523265 - RNA, 19 nt, Artificial Sequence
  Description of Artificial Sequence: Synthetic oligonucleotide
gauuuguacuucccaacug

SEQ ID NO: 1523266 - RNA, 19 nt, Artificial Sequence
  Description of Artificial Sequence: Synthetic oligonucleotide
uauauggacagcacguuuu

SEQ ID NO: 1523267 - RNA, 19 nt, Artificial Sequence
  Description of Artificial Sequence: Synthetic oligonucleotide
gaagccaucgacaacuuca

SEQ ID NO: 1523268 - RNA, 19 nt, Artificial Sequence
  Description of Artificial Sequence: Synthetic oligonucleotide
gauugaaacuugcaacuga

SEQ ID NO: 1523269 - RNA, 19 nt, Artificial Sequence
  Description of Artificial Sequence: Synthetic oligonucleotide
uaacgauuuguacuuccca

SEQ ID NO: 1523270 - RNA, 19 nt, Artificial Sequence
  Description of Artificial Sequence: Synthetic oligonucleotide
ugcaacugauuucugguaa

SEQ ID NO: 1523271 - RNA, 19 nt, Artificial Sequence
  Description of Artificial Sequence: Synthetic oligonucleotide
augagcuucggcauuugcc

SEQ ID NO: 1523272 - RNA, 19 nt, Artificial Sequence
  Description of Artificial Sequence: Synthetic oligonucleotide
uggacagcacguuuuauaa

SEQ ID NO: 1523273 - RNA, 19 nt, Artificial Sequence
  Description of Artificial Sequence: Synthetic oligonucleotide
uucugguagucgaauauaa

SEQ ID NO: 1523274 - RNA, 19 nt, Artificial Sequence
  Description of Artificial Sequence: Synthetic oligonucleotide
aagaagggagaucccgcag

SEQ ID NO: 1523275 - RNA, 19 nt, Artificial Sequence
  Description of Artificial Sequence: Synthetic oligonucleotide
augaucaaugaauguaaga

SEQ ID NO: 1523276 - RNA, 19 nt, Artificial Sequence
  Description of Artificial Sequence: Synthetic oligonucleotide
guaaucaaaacgcgugcug

SEQ ID NO: 1523277 - RNA, 19 nt, Artificial Sequence
  Description of Artificial Sequence: Synthetic oligonucleotide
gaaguaacagcuccauaca

SEQ ID NO: 1523278 - RNA, 19 nt, Artificial Sequence
  Description of Artificial Sequence: Synthetic oligonucleotide
acacgucacgcacugcagc

SEQ ID NO: 1523279 - RNA, 19 nt, Artificial Sequence
  Description of Artificial Sequence: Synthetic oligonucleotide
gucgaauauaauaucagga

SEQ ID NO: 1523280 - RNA, 19 nt, Artificial Sequence
  Description of Artificial Sequence: Synthetic oligonucleotide
uucucguauauggacagca

SEQ ID NO: 1523281 - RNA, 19 nt, Artificial Sequence
  Description of Artificial Sequence: Synthetic oligonucleotide
uaguaggauugaaacuugc

SEQ ID NO: 1523282 - RNA, 19 nt, Artificial Sequence
  Description of Artificial Sequence: Synthetic oligonucleotide
ucgcuuccagccauggccg

SEQ ID NO: 1523283 - RNA, 19 nt, Artificial Sequence
  Description of Artificial Sequence: Synthetic oligonucleotide
aagaccaagaagggagauc

SEQ ID NO: 1523284 - RNA, 19 nt, Artificial Sequence
  Description of Artificial Sequence: Synthetic oligonucleotide
aagaucucuagauccggaa

SEQ ID NO: 1523285 - RNA, 19 nt, Artificial Sequence
  Description of Artificial Sequence: Synthetic oligonucleotide
gauccaauaccaucaaucu

SEQ ID NO: 1523286 - RNA, 19 nt, Artificial Sequence
  Description of Artificial Sequence: Synthetic oligonucleotide
cucuagauccggaagugac

SEQ ID NO: 1523287 - RNA, 19 nt, Artificial Sequence
  Description of Artificial Sequence: Synthetic oligonucleotide
ugggagaccguccgcgucg

SEQ ID NO: 1523288 - RNA, 19 nt, Artificial Sequence
  Description of Artificial Sequence: Synthetic oligonucleotide
ucuuacgguuucauuccag

SEQ ID NO: 1523289 - RNA, 19 nt, Artificial Sequence
  Description of Artificial Sequence: Synthetic oligonucleotide
gucaaacauagcaaaucgg

SEQ ID NO: 1523290 - RNA, 19 nt, Artificial Sequence
  Description of Artificial Sequence: Synthetic oligonucleotide
aagauguguucaauucuuc

SEQ ID NO: 1523291 - RNA, 19 nt, Artificial Sequence
  Description of Artificial Sequence: Synthetic oligonucleotide
uguaaucaaaacgcgugcu

SEQ ID NO: 1523292 - RNA, 19 nt, Artificial Sequence
  Description of Artificial Sequence: Synthetic oligonucleotide
guaggauugaaacuugcaa

SEQ ID NO: 1523293 - RNA, 19 nt, Artificial Sequence
  Description of Artificial Sequence: Synthetic oligonucleotide
guagucgaauauaauauca

SEQ ID NO: 1523294 - RNA, 19 nt, Artificial Sequence
  Description of Artificial Sequence: Synthetic oligonucleotide
aauauaauaucaggauguu

SEQ ID NO: 1523295 - RNA, 19 nt, Artificial Sequence
  Description of Artificial Sequence: Synthetic oligonucleotide
auagaaagucaggaauagg

SEQ ID NO: 1523296 - RNA, 19 nt, Artificial Sequence
  Description of Artificial Sequence: Synthetic oligonucleotide
aucaaaacgcgugcugucg

SEQ ID NO: 1523297 - RNA, 19 nt, Artificial Sequence
  Description of Artificial Sequence: Synthetic oligonucleotide
auuuauguugauuguucaa

SEQ ID NO: 1523298 - RNA, 19 nt, Artificial Sequence
  Description of Artificial Sequence: Synthetic oligonucleotide
caacuggcacagaucaugg

SEQ ID NO: 1523299 - RNA, 19 nt, Artificial Sequence
  Description of Artificial Sequence: Synthetic oligonucleotide
aaaugugagcauucauuuu

SEQ ID NO: 1523300 - RNA, 19 nt, Artificial Sequence
  Description of Artificial Sequence: Synthetic oligonucleotide
uuuagaagguugagacgca

SEQ ID NO: 1523301 - RNA, 19 nt, Artificial Sequence
  Description of Artificial Sequence: Synthetic oligonucleotide
aagccaucgacaacuucac

SEQ ID NO: 1523302 - RNA, 19 nt, Artificial Sequence
  Description of Artificial Sequence: Synthetic oligonucleotide
cuguacaucgaucggcagc

SEQ ID NO: 1523303 - RNA, 19 nt, Artificial Sequence
  Description of Artificial Sequence: Synthetic oligonucleotide
auauaauaucaggauguug

SEQ ID NO: 1523304 - RNA, 19 nt, Artificial Sequence
  Description of Artificial Sequence: Synthetic oligonucleotide
acagcuguacaucgaucgg

SEQ ID NO: 1523305 - RNA, 19 nt, Artificial Sequence
  Description of Artificial Sequence: Synthetic oligonucleotide
ugucauggccaugauacga

SEQ ID NO: 1523306 - RNA, 19 nt, Artificial Sequence
  Description of Artificial Sequence: Synthetic oligonucleotide
aacgcgugcugucggugac

SEQ ID NO: 1523307 - RNA, 19 nt, Artificial Sequence
  Description of Artificial Sequence: Synthetic oligonucleotide
aggaauaggauggauggga

SEQ ID NO: 1523308 - RNA, 19 nt, Artificial Sequence
  Description of Artificial Sequence: Synthetic oligonucleotide
ggugaccucagauaugggc

SEQ ID NO: 1523309 - RNA, 19 nt, Artificial Sequence
  Description of Artificial Sequence: Synthetic oligonucleotide
gguuuagaagguugagacg

SEQ ID NO: 1523310 - RNA, 19 nt, Artificial Sequence
  Description of Artificial Sequence: Synthetic oligonucleotide
uuccaaaccuggucaaaca

SEQ ID NO: 1523311 - RNA, 19 nt, Artificial Sequence
  Description of Artificial Sequence: Synthetic oligonucleotide
caaaucgggguucauucug

SEQ ID NO: 1523312 - RNA, 19 nt, Artificial Sequence
  Description of Artificial Sequence: Synthetic oligonucleotide
uaugagcuucggcauuugc

SEQ ID NO: 1523313 - RNA, 19 nt, Artificial Sequence
  Description of Artificial Sequence: Synthetic oligonucleotide
gggaaaguuccucagaaga

SEQ ID NO: 1523314 - RNA, 19 nt, Artificial Sequence
  Description of Artificial Sequence: Synthetic oligonucleotide
uggcuuucaaggcucuucu

SEQ ID NO: 1523315 - RNA, 19 nt, Artificial Sequence
  Description of Artificial Sequence: Synthetic oligonucleotide
agcccucuuauagaaaguc

SEQ ID NO: 1523316 - RNA, 19 nt, Artificial Sequence
  Description of Artificial Sequence: Synthetic oligonucleotide
ucuuugcccaccgaaugcc

SEQ ID NO: 1523317 - RNA, 19 nt, Artificial Sequence
  Description of Artificial Sequence: Synthetic oligonucleotide
cugguagucgaauauaaua

SEQ ID NO: 1523318 - RNA, 19 nt, Artificial Sequence
  Description of Artificial Sequence: Synthetic oligonucleotide
guagcggcuuccuugcugc

SEQ ID NO: 1523319 - RNA, 19 nt, Artificial Sequence
  Description of Artificial Sequence: Synthetic oligonucleotide
gucuaugaggcaaaccagc

SEQ ID NO: 1523320 - RNA, 19 nt, Artificial Sequence
  Description of Artificial Sequence: Synthetic oligonucleotide
aaaccuggucaaacauagc

SEQ ID NO: 1523321 - RNA, 19 nt, Artificial Sequence
  Description of Artificial Sequence: Synthetic oligonucleotide
gucaggaauaggauggaug

SEQ ID NO: 1523322 - RNA, 19 nt, Artificial Sequence
  Description of Artificial Sequence: Synthetic oligonucleotide
auaccaucaaucugucuau

SEQ ID NO: 1523323 - RNA, 19 nt, Artificial Sequence
  Description of Artificial Sequence: Synthetic oligonucleotide
cucuuauagaaagucagga

SEQ ID NO: 1523324 - RNA, 19 nt, Artificial Sequence
  Description of Artificial Sequence: Synthetic oligonucleotide
agcacguuuuauaaaccuc

SEQ ID NO: 1523325 - RNA, 19 nt, Artificial Sequence
  Description of Artificial Sequence: Synthetic oligonucleotide
ucucguauauggacagcac

SEQ ID NO: 1523326 - RNA, 19 nt, Artificial Sequence
  Description of Artificial Sequence: Synthetic oligonucleotide
ucugguagucgaauauaau

SEQ ID NO: 1523327 - RNA, 19 nt, Artificial Sequence
  Description of Artificial Sequence: Synthetic oligonucleotide
aaacgcgugcugucgguga

SEQ ID NO: 1523328 - RNA, 19 nt, Artificial Sequence
  Description of Artificial Sequence: Synthetic oligonucleotide
agagguccaaaggagcauc

SEQ ID NO: 1523329 - RNA, 19 nt, Artificial Sequence
  Description of Artificial Sequence: Synthetic oligonucleotide
gaaacacacacgucacgca

SEQ ID NO: 1523330 - RNA, 19 nt, Artificial Sequence
  Description of Artificial Sequence: Synthetic oligonucleotide
cucuuugcccaccgaaugc

SEQ ID NO: 1523331 - RNA, 19 nt, Artificial Sequence
  Description of Artificial Sequence: Synthetic oligonucleotide
guugagacgcaguucguga

SEQ ID NO: 1523332 - RNA, 19 nt, Artificial Sequence
  Description of Artificial Sequence: Synthetic oligonucleotide
uccauacauaggacggcug

SEQ ID NO: 1523333 - RNA, 19 nt, Artificial Sequence
  Description of Artificial Sequence: Synthetic oligonucleotide
ucggcauuugccacauaga

SEQ ID NO: 1523334 - RNA, 19 nt, Artificial Sequence
  Description of Artificial Sequence: Synthetic oligonucleotide
aauuacacuguagcggcuu

SEQ ID NO: 1523335 - RNA, 19 nt, Artificial Sequence
  Description of Artificial Sequence: Synthetic oligonucleotide
aagcuggaucugucauggc

SEQ ID NO: 1523336 - RNA, 19 nt, Artificial Sequence
  Description of Artificial Sequence: Synthetic oligonucleotide
ggaaacacacacgucacgc

SEQ ID NO: 1523337 - RNA, 19 nt, Artificial Sequence
  Description of Artificial Sequence: Synthetic oligonucleotide
gccaucgacaacuucacac

SEQ ID NO: 1523338 - RNA, 19 nt, Artificial Sequence
  Description of Artificial Sequence: Synthetic oligonucleotide
guaacgauuuguacuuccc

SEQ ID NO: 1523339 - RNA, 19 nt, Artificial Sequence
  Description of Artificial Sequence: Synthetic oligonucleotide
ucugucuaugaggcaaacc

SEQ ID NO: 1523340 - RNA, 19 nt, Artificial Sequence
  Description of Artificial Sequence: Synthetic oligonucleotide
gucguuuaugagcuucggc

SEQ ID NO: 1523341 - RNA, 19 nt, Artificial Sequence
  Description of Artificial Sequence: Synthetic oligonucleotide
ugucguuuaugagcuucgg

SEQ ID NO: 1523342 - RNA, 19 nt, Artificial Sequence
  Description of Artificial Sequence: Synthetic oligonucleotide
uccugggagaccguccgcg

SEQ ID NO: 1523343 - RNA, 19 nt, Artificial Sequence
  Description of Artificial Sequence: Synthetic oligonucleotide
ucccgcagcagaaaauauc

SEQ ID NO: 1523344 - RNA, 19 nt, Artificial Sequence
  Description of Artificial Sequence: Synthetic oligonucleotide
ucaaucugucuaugaggca

SEQ ID NO: 1523345 - RNA, 19 nt, Artificial Sequence
  Description of Artificial Sequence: Synthetic oligonucleotide
aaaacgcgugcugucggug

SEQ ID NO: 1523346 - RNA, 19 nt, Artificial Sequence
  Description of Artificial Sequence: Synthetic oligonucleotide
acauagcaaaucgggguuc

SEQ ID NO: 1523347 - RNA, 19 nt, Artificial Sequence
  Description of Artificial Sequence: Synthetic oligonucleotide
gcacguuuuauaaaccucc

SEQ ID NO: 1523348 - RNA, 19 nt, Artificial Sequence
  Description of Artificial Sequence: Synthetic oligonucleotide
uccuguauaaagcccucuu

SEQ ID NO: 1523349 - RNA, 19 nt, Artificial Sequence
  Description of Artificial Sequence: Synthetic oligonucleotide
gguagucgaauauaauauc

SEQ ID NO: 1523350 - RNA, 19 nt, Artificial Sequence
  Description of Artificial Sequence: Synthetic oligonucleotide
gacggcuggcuuucaaggc

SEQ ID NO: 1523351 - RNA, 19 nt, Artificial Sequence
  Description of Artificial Sequence: Synthetic oligonucleotide
aggacggcuggcuuucaag

SEQ ID NO: 1523352 - RNA, 19 nt, Artificial Sequence
  Description of Artificial Sequence: Synthetic oligonucleotide
caucgacaacuucacacac

SEQ ID NO: 1523353 - RNA, 19 nt, Artificial Sequence
  Description of Artificial Sequence: Synthetic oligonucleotide
cgaauauaauaucaggaug

SEQ ID NO: 1523354 - RNA, 19 nt, Artificial Sequence
  Description of Artificial Sequence: Synthetic oligonucleotide
auggacagcacguuuuaua

SEQ ID NO: 1523355 - RNA, 19 nt, Artificial Sequence
  Description of Artificial Sequence: Synthetic oligonucleotide
aaaucgggguucauucuga

SEQ ID NO: 1523356 - RNA, 19 nt, Artificial Sequence
  Description of Artificial Sequence: Synthetic oligonucleotide
uuuaugagcuucggcauuu

SEQ ID NO: 1523357 - RNA, 19 nt, Artificial Sequence
  Description of Artificial Sequence: Synthetic oligonucleotide
ggacggcuggcuuucaagg

SEQ ID NO: 1523358 - RNA, 19 nt, Artificial Sequence
  Description of Artificial Sequence: Synthetic oligonucleotide
cauacauaggacggcuggc

SEQ ID NO: 1523359 - RNA, 19 nt, Artificial Sequence
  Description of Artificial Sequence: Synthetic oligonucleotide
uaaagcccucuuauagaaa

SEQ ID NO: 1523360 - RNA, 19 nt, Artificial Sequence
  Description of Artificial Sequence: Synthetic oligonucleotide
agaccguccgcgucgcccg

SEQ ID NO: 1523361 - RNA, 19 nt, Artificial Sequence
  Description of Artificial Sequence: Synthetic oligonucleotide
uugcaugcuuagauucuac

SEQ ID NO: 1523362 - RNA, 19 nt, Artificial Sequence
  Description of Artificial Sequence: Synthetic oligonucleotide
guaaagaaucagaaccaca

SEQ ID NO: 1523363 - RNA, 19 nt, Artificial Sequence
  Description of Artificial Sequence: Synthetic oligonucleotide
aguaggauugaaacuugca

SEQ ID NO: 1523364 - RNA, 19 nt, Artificial Sequence
  Description of Artificial Sequence: Synthetic oligonucleotide
cuguaggcugaacaucuug

SEQ ID NO: 1523365 - RNA, 19 nt, Artificial Sequence
  Description of Artificial Sequence: Synthetic oligonucleotide
ccucuuauagaaagucagg

SEQ ID NO: 1523366 - RNA, 19 nt, Artificial Sequence
  Description of Artificial Sequence: Synthetic oligonucleotide
cuugcaacugauuucuggu

SEQ ID NO: 1523367 - RNA, 19 nt, Artificial Sequence
  Description of Artificial Sequence: Synthetic oligonucleotide
uuucugguagucgaauaua

SEQ ID NO: 1523368 - RNA, 19 nt, Artificial Sequence
  Description of Artificial Sequence: Synthetic oligonucleotide
ccauacauaggacggcugg

SEQ ID NO: 1523369 - RNA, 19 nt, Artificial Sequence
  Description of Artificial Sequence: Synthetic oligonucleotide
augucguuuaugagcuucg

SEQ ID NO: 1523370 - RNA, 19 nt, Artificial Sequence
  Description of Artificial Sequence: Synthetic oligonucleotide
aucucuagauccggaagug

SEQ ID NO: 1523371 - RNA, 19 nt, Artificial Sequence
  Description of Artificial Sequence: Synthetic oligonucleotide
aaucgggguucauucugaa

SEQ ID NO: 1523372 - RNA, 19 nt, Artificial Sequence
  Description of Artificial Sequence: Synthetic oligonucleotide
auacauaggacggcuggcu

SEQ ID NO: 1523373 - RNA, 19 nt, Artificial Sequence
  Description of Artificial Sequence: Synthetic oligonucleotide
cccaccgaaugccagaagg

SEQ ID NO: 1523374 - RNA, 19 nt, Artificial Sequence
  Description of Artificial Sequence: Synthetic oligonucleotide
caaucugucuaugaggcaa

SEQ ID NO: 1523375 - RNA, 19 nt, Artificial Sequence
  Description of Artificial Sequence: Synthetic oligonucleotide
cagcaguuggggaaaguuc

SEQ ID NO: 1523376 - RNA, 19 nt, Artificial Sequence
  Description of Artificial Sequence: Synthetic oligonucleotide
auaggauggaugggaaaca

SEQ ID NO: 1523377 - RNA, 19 nt, Artificial Sequence
  Description of Artificial Sequence: Synthetic oligonucleotide
uucuuccaaaccuggucaa

SEQ ID NO: 1523378 - RNA, 19 nt, Artificial Sequence
  Description of Artificial Sequence: Synthetic oligonucleotide
ugaggcaaaccagcaguug

SEQ ID NO: 1523379 - RNA, 19 nt, Artificial Sequence
  Description of Artificial Sequence: Synthetic oligonucleotide
cagaucauggggugaaaga

SEQ ID NO: 1523380 - RNA, 19 nt, Artificial Sequence
  Description of Artificial Sequence: Synthetic oligonucleotide
aucauggggugaaagaaau

SEQ ID NO: 1523381 - RNA, 19 nt, Artificial Sequence
  Description of Artificial Sequence: Synthetic oligonucleotide
uugcaacugauuucuggua

SEQ ID NO: 1523382 - RNA, 19 nt, Artificial Sequence
  Description of Artificial Sequence: Synthetic oligonucleotide
agucagaguuucagccucc

SEQ ID NO: 1523383 - RNA, 19 nt, Artificial Sequence
  Description of Artificial Sequence: Synthetic oligonucleotide
cagcuguacaucgaucggc

SEQ ID NO: 1523384 - RNA, 19 nt, Artificial Sequence
  Description of Artificial Sequence: Synthetic oligonucleotide
acguuuuauaaaccuccau

SEQ ID NO: 1523385 - RNA, 19 nt, Artificial Sequence
  Description of Artificial Sequence: Synthetic oligonucleotide
aaaaccagucagaguuuca

SEQ ID NO: 1523386 - RNA, 19 nt, Artificial Sequence
  Description of Artificial Sequence: Synthetic oligonucleotide
uguccuguauaaagcccuc

SEQ ID NO: 1523387 - RNA, 19 nt, Artificial Sequence
  Description of Artificial Sequence: Synthetic oligonucleotide
aguucgugagcuaaauaaa

SEQ ID NO: 1523388 - RNA, 19 nt, Artificial Sequence
  Description of Artificial Sequence: Synthetic oligonucleotide
ucgaucggcagccgccuca

SEQ ID NO: 1523389 - RNA, 19 nt, Artificial Sequence
  Description of Artificial Sequence: Synthetic oligonucleotide
ucucuagauccggaaguga

SEQ ID NO: 1523390 - RNA, 19 nt, Artificial Sequence
  Description of Artificial Sequence: Synthetic oligonucleotide
uacauaggacggcuggcuu

SEQ ID NO: 1523391 - RNA, 19 nt, Artificial Sequence
  Description of Artificial Sequence: Synthetic oligonucleotide
guucgugagcuaaauaaaa

SEQ ID NO: 1523392 - RNA, 19 nt, Artificial Sequence
  Description of Artificial Sequence: Synthetic oligonucleotide
uauagcuguccuguauaaa

SEQ ID NO: 1523393 - RNA, 19 nt, Artificial Sequence
  Description of Artificial Sequence: Synthetic oligonucleotide
uuucaaggcucuucucgua

SEQ ID NO: 1523394 - RNA, 19 nt, Artificial Sequence
  Description of Artificial Sequence: Synthetic oligonucleotide
aucugucuaugaggcaaac

SEQ ID NO: 1523395 - RNA, 19 nt, Artificial Sequence
  Description of Artificial Sequence: Synthetic oligonucleotide
gcucuucucguauauggac

SEQ ID NO: 1523396 - RNA, 19 nt, Artificial Sequence
  Description of Artificial Sequence: Synthetic oligonucleotide
guuucauuccaguaacgau

SEQ ID NO: 1523397 - RNA, 19 nt, Artificial Sequence
  Description of Artificial Sequence: Synthetic oligonucleotide
ugugugcucuucccuugcu

SEQ ID NO: 1523398 - RNA, 19 nt, Artificial Sequence
  Description of Artificial Sequence: Synthetic oligonucleotide
gagaucccgcagcagaaaa

SEQ ID NO: 1523399 - RNA, 19 nt, Artificial Sequence
  Description of Artificial Sequence: Synthetic oligonucleotide
uuccuuucugguagucgaa

SEQ ID NO: 1523400 - RNA, 19 nt, Artificial Sequence
  Description of Artificial Sequence: Synthetic oligonucleotide
cacguuuuauaaaccucca

SEQ ID NO: 1523401 - RNA, 19 nt, Artificial Sequence
  Description of Artificial Sequence: Synthetic oligonucleotide
cacacgucacgcacugcag

SEQ ID NO: 1523402 - RNA, 19 nt, Artificial Sequence
  Description of Artificial Sequence: Synthetic oligonucleotide
gguuucauuccaguaacga

SEQ ID NO: 1523403 - RNA, 19 nt, Artificial Sequence
  Description of Artificial Sequence: Synthetic oligonucleotide
cuccagccgcucaggaugg

SEQ ID NO: 1523404 - RNA, 19 nt, Artificial Sequence
  Description of Artificial Sequence: Synthetic oligonucleotide
ucaaggcucuucucguaua

SEQ ID NO: 1523405 - RNA, 19 nt, Artificial Sequence
  Description of Artificial Sequence: Synthetic oligonucleotide
gaucccgcagcagaaaaua

SEQ ID NO: 1523406 - RNA, 19 nt, Artificial Sequence
  Description of Artificial Sequence: Synthetic oligonucleotide
cuauagcuguccuguauaa

SEQ ID NO: 1523407 - RNA, 19 nt, Artificial Sequence
  Description of Artificial Sequence: Synthetic oligonucleotide
ggauugaaacuugcaacug

SEQ ID NO: 1523408 - RNA, 19 nt, Artificial Sequence
  Description of Artificial Sequence: Synthetic oligonucleotide
gagcuucggcauuugccac

SEQ ID NO: 1523409 - RNA, 19 nt, Artificial Sequence
  Description of Artificial Sequence: Synthetic oligonucleotide
gcucuuugcccaccgaaug

SEQ ID NO: 1523410 - RNA, 19 nt, Artificial Sequence
  Description of Artificial Sequence: Synthetic oligonucleotide
uaccaucaaucugucuaug

SEQ ID NO: 1523411 - RNA, 19 nt, Artificial Sequence
  Description of Artificial Sequence: Synthetic oligonucleotide
ggcauuugccacauagaug

SEQ ID NO: 1523412 - RNA, 19 nt, Artificial Sequence
  Description of Artificial Sequence: Synthetic oligonucleotide
ggugguuuagaagguugag

SEQ ID NO: 1523413 - RNA, 19 nt, Artificial Sequence
  Description of Artificial Sequence: Synthetic oligonucleotide
uaacuguacuugugugcuc

SEQ ID NO: 1523414 - RNA, 19 nt, Artificial Sequence
  Description of Artificial Sequence: Synthetic oligonucleotide
ucuuccaaaccuggucaaa

SEQ ID NO: 1523415 - RNA, 19 nt, Artificial Sequence
  Description of Artificial Sequence: Synthetic oligonucleotide
caccgaaugccagaagguc

SEQ ID NO: 1523416 - RNA, 19 nt, Artificial Sequence
  Description of Artificial Sequence: Synthetic oligonucleotide
ugcuuagauucuacuucuu

SEQ ID NO: 1523417 - RNA, 19 nt, Artificial Sequence
  Description of Artificial Sequence: Synthetic oligonucleotide
cgagaaaauucaucuugcc

SEQ ID NO: 1523418 - RNA, 19 nt, Artificial Sequence
  Description of Artificial Sequence: Synthetic oligonucleotide
caucuuguuaacuguacuu

SEQ ID NO: 1523419 - RNA, 19 nt, Artificial Sequence
  Description of Artificial Sequence: Synthetic oligonucleotide
uauggacagcacguuuuau

SEQ ID NO: 1523420 - RNA, 19 nt, Artificial Sequence
  Description of Artificial Sequence: Synthetic oligonucleotide
uagcaaaucgggguucauu

SEQ ID NO: 1523421 - RNA, 19 nt, Artificial Sequence
  Description of Artificial Sequence: Synthetic oligonucleotide
agaauccacucaaugccau

SEQ ID NO: 1523422 - RNA, 19 nt, Artificial Sequence
  Description of Artificial Sequence: Synthetic oligonucleotide
gguugagacgcaguucgug

SEQ ID NO: 1523423 - RNA, 19 nt, Artificial Sequence
  Description of Artificial Sequence: Synthetic oligonucleotide
augauacgagaaaauucau

SEQ ID NO: 1523424 - RNA, 19 nt, Artificial Sequence
  Description of Artificial Sequence: Synthetic oligonucleotide
gcuauagcuguccuguaua

SEQ ID NO: 1523425 - RNA, 19 nt, Artificial Sequence
  Description of Artificial Sequence: Synthetic oligonucleotide
cagcacguuuuauaaaccu

SEQ ID NO: 1523426 - RNA, 19 nt, Artificial Sequence
  Description of Artificial Sequence: Synthetic oligonucleotide
aucgggguucauucugaau

SEQ ID NO: 1523427 - RNA, 19 nt, Artificial Sequence
  Description of Artificial Sequence: Synthetic oligonucleotide
aucgaucggcagccgccuc

SEQ ID NO: 1523428 - RNA, 19 nt, Artificial Sequence
  Description of Artificial Sequence: Synthetic oligonucleotide
gcuguccuguauaaagccc

SEQ ID NO: 1523429 - RNA, 19 nt, Artificial Sequence
  Description of Artificial Sequence: Synthetic oligonucleotide
ccaucgacaacuucacaca

SEQ ID NO: 1523430 - RNA, 19 nt, Artificial Sequence
  Description of Artificial Sequence: Synthetic oligonucleotide
cugucggugaccucagaua

SEQ ID NO: 1523431 - RNA, 19 nt, Artificial Sequence
  Description of Artificial Sequence: Synthetic oligonucleotide
cauuuugcaugcuuagauu

SEQ ID NO: 1523432 - RNA, 19 nt, Artificial Sequence
  Description of Artificial Sequence: Synthetic oligonucleotide
gucgcuggcgggcggcggg

SEQ ID NO: 1523433 - RNA, 19 nt, Artificial Sequence
  Description of Artificial Sequence: Synthetic oligonucleotide
gaccaagaagggagauccc

SEQ ID NO: 1523434 - RNA, 19 nt, Artificial Sequence
  Description of Artificial Sequence: Synthetic oligonucleotide
cuuugcccaccgaaugcca

SEQ ID NO: 1523435 - RNA, 19 nt, Artificial Sequence
  Description of Artificial Sequence: Synthetic oligonucleotide
cuuccgggcucgcuuccag

SEQ ID NO: 1523436 - RNA, 19 nt, Artificial Sequence
  Description of Artificial Sequence: Synthetic oligonucleotide
gagguccaaaggagcauca

SEQ ID NO: 1523437 - RNA, 19 nt, Artificial Sequence
  Description of Artificial Sequence: Synthetic oligonucleotide
guucaacuggaaauugacu

SEQ ID NO: 1523438 - RNA, 19 nt, Artificial Sequence
  Description of Artificial Sequence: Synthetic oligonucleotide
guauauggacagcacguuu

SEQ ID NO: 1523439 - RNA, 19 nt, Artificial Sequence
  Description of Artificial Sequence: Synthetic oligonucleotide
gggugaaagaaaugacaaa

SEQ ID NO: 1523440 - RNA, 19 nt, Artificial Sequence
  Description of Artificial Sequence: Synthetic oligonucleotide
cucuuacgguuucauucca

SEQ ID NO: 1523441 - RNA, 19 nt, Artificial Sequence
  Description of Artificial Sequence: Synthetic oligonucleotide
gccauggccgcugucgccg

SEQ ID NO: 1523442 - RNA, 19 nt, Artificial Sequence
  Description of Artificial Sequence: Synthetic oligonucleotide
auugggucucuuacgguuu

SEQ ID NO: 1523443 - RNA, 19 nt, Artificial Sequence
  Description of Artificial Sequence: Synthetic oligonucleotide
acgcgugcugucggugacc

SEQ ID NO: 1523444 - RNA, 19 nt, Artificial Sequence
  Description of Artificial Sequence: Synthetic oligonucleotide
caguuggggaaaguuccuc

SEQ ID NO: 1523445 - RNA, 19 nt, Artificial Sequence
  Description of Artificial Sequence: Synthetic oligonucleotide
gcagcuauagcuguccugu

SEQ ID NO: 1523446 - RNA, 19 nt, Artificial Sequence
  Description of Artificial Sequence: Synthetic oligonucleotide
ugcccaccgaaugccagaa

SEQ ID NO: 1523447 - RNA, 19 nt, Artificial Sequence
  Description of Artificial Sequence: Synthetic oligonucleotide
cucuuccgggcucgcuucc

SEQ ID NO: 1523448 - RNA, 19 nt, Artificial Sequence
  Description of Artificial Sequence: Synthetic oligonucleotide
aaccagcauuggucuuccu

SEQ ID NO: 1523449 - RNA, 19 nt, Artificial Sequence
  Description of Artificial Sequence: Synthetic oligonucleotide
agccgccucagcgcgcugg

SEQ ID NO: 1523450 - RNA, 19 nt, Artificial Sequence
  Description of Artificial Sequence: Synthetic oligonucleotide
ggaauaggauggaugggaa

SEQ ID NO: 1523451 - RNA, 19 nt, Artificial Sequence
  Description of Artificial Sequence: Synthetic oligonucleotide
cugggagaccguccgcguc

SEQ ID NO: 1523452 - RNA, 19 nt, Artificial Sequence
  Description of Artificial Sequence: Synthetic oligonucleotide
ggguucauucugaaugauc

SEQ ID NO: 1523453 - RNA, 19 nt, Artificial Sequence
  Description of Artificial Sequence: Synthetic oligonucleotide
caguaacgauuuguacuuc

SEQ ID NO: 1523454 - RNA, 19 nt, Artificial Sequence
  Description of Artificial Sequence: Synthetic oligonucleotide
gucggugaccucagauaug

SEQ ID NO: 1523455 - RNA, 19 nt, Artificial Sequence
  Description of Artificial Sequence: Synthetic oligonucleotide
gcuccauacauaggacggc

SEQ ID NO: 1523456 - RNA, 19 nt, Artificial Sequence
  Description of Artificial Sequence: Synthetic oligonucleotide
gaagaccaagaagggagau

SEQ ID NO: 1523457 - RNA, 19 nt, Artificial Sequence
  Description of Artificial Sequence: Synthetic oligonucleotide
cccgcagcagaaaauaucu

SEQ ID NO: 1523458 - RNA, 19 nt, Artificial Sequence
  Description of Artificial Sequence: Synthetic oligonucleotide
cacgucacgcacugcagcu

SEQ ID NO: 1523459 - RNA, 19 nt, Artificial Sequence
  Description of Artificial Sequence: Synthetic oligonucleotide
ggacagcacguuuuauaaa

SEQ ID NO: 1523460 - RNA, 19 nt, Artificial Sequence
  Description of Artificial Sequence: Synthetic oligonucleotide
ccauguaaucaaaacgcgu

SEQ ID NO: 1523461 - RNA, 19 nt, Artificial Sequence
  Description of Artificial Sequence: Synthetic oligonucleotide
gaauccacucaaugccauu

SEQ ID NO: 1523462 - RNA, 19 nt, Artificial Sequence
  Description of Artificial Sequence: Synthetic oligonucleotide
cagcauuggucuuccugaa

SEQ ID NO: 1523463 - RNA, 19 nt, Artificial Sequence
  Description of Artificial Sequence: Synthetic oligonucleotide
gucagaguuucagccucca

SEQ ID NO: 1523464 - RNA, 19 nt, Artificial Sequence
  Description of Artificial Sequence: Synthetic oligonucleotide
gcaugcuuagauucuacuu

SEQ ID NO: 1523465 - RNA, 19 nt, Artificial Sequence
  Description of Artificial Sequence: Synthetic oligonucleotide
cauggccgcugucgccgcg

SEQ ID NO: 1523466 - RNA, 19 nt, Artificial Sequence
  Description of Artificial Sequence: Synthetic oligonucleotide
acucaacaccaaagaugug

SEQ ID NO: 1523467 - RNA, 19 nt, Artificial Sequence
  Description of Artificial Sequence: Synthetic oligonucleotide
gggagccggcucuuccggg

SEQ ID NO: 1523468 - RNA, 19 nt, Artificial Sequence
  Description of Artificial Sequence: Synthetic oligonucleotide
agcgcgcugguguccuccu

SEQ ID NO: 1523469 - RNA, 19 nt, Artificial Sequence
  Description of Artificial Sequence: Synthetic oligonucleotide
cgguuucauuccaguaacg

SEQ ID NO: 1523470 - RNA, 19 nt, Artificial Sequence
  Description of Artificial Sequence: Synthetic oligonucleotide
cuccauacauaggacggcu

SEQ ID NO: 1523471 - RNA, 19 nt, Artificial Sequence
  Description of Artificial Sequence: Synthetic oligonucleotide
ccaaaccuggucaaacaua

SEQ ID NO: 1523472 - RNA, 19 nt, Artificial Sequence
  Description of Artificial Sequence: Synthetic oligonucleotide
ggcucuucucguauaugga

SEQ ID NO: 1523473 - RNA, 19 nt, Artificial Sequence
  Description of Artificial Sequence: Synthetic oligonucleotide
ccuguauaaagcccucuua

SEQ ID NO: 1523474 - RNA, 19 nt, Artificial Sequence
  Description of Artificial Sequence: Synthetic oligonucleotide
caaaacgcgugcugucggu

SEQ ID NO: 1523475 - RNA, 19 nt, Artificial Sequence
  Description of Artificial Sequence: Synthetic oligonucleotide
agucgcuggcgggcggcgg

SEQ ID NO: 1523476 - RNA, 19 nt, Artificial Sequence
  Description of Artificial Sequence: Synthetic oligonucleotide
gcccucuuauagaaaguca

SEQ ID NO: 1523477 - RNA, 19 nt, Artificial Sequence
  Description of Artificial Sequence: Synthetic oligonucleotide
ggcucgcuuccagccaugg

SEQ ID NO: 1523478 - RNA, 19 nt, Artificial Sequence
  Description of Artificial Sequence: Synthetic oligonucleotide
cacacacgucacgcacugc

SEQ ID NO: 1523479 - RNA, 19 nt, Artificial Sequence
  Description of Artificial Sequence: Synthetic oligonucleotide
gcgucgcccgcucuuugcc

SEQ ID NO: 1523480 - RNA, 19 nt, Artificial Sequence
  Description of Artificial Sequence: Synthetic oligonucleotide
agguugagacgcaguucgu

SEQ ID NO: 1523481 - RNA, 19 nt, Artificial Sequence
  Description of Artificial Sequence: Synthetic oligonucleotide
gcaguucgugagcuaaaua

SEQ ID NO: 1523482 - RNA, 19 nt, Artificial Sequence
  Description of Artificial Sequence: Synthetic oligonucleotide
ggcacagaucaugggguga

SEQ ID NO: 1523483 - RNA, 19 nt, Artificial Sequence
  Description of Artificial Sequence: Synthetic oligonucleotide
gcucgcuuccagccauggc

SEQ ID NO: 1523484 - RNA, 19 nt, Artificial Sequence
  Description of Artificial Sequence: Synthetic oligonucleotide
ccagccgcucaggauggcg

SEQ ID NO: 1523485 - RNA, 19 nt, Artificial Sequence
  Description of Artificial Sequence: Synthetic oligonucleotide
gaccguccgcgucgcccgc

SEQ ID NO: 1523486 - RNA, 19 nt, Artificial Sequence
  Description of Artificial Sequence: Synthetic oligonucleotide
ccuuucugguagucgaaua

SEQ ID NO: 1523487 - RNA, 19 nt, Artificial Sequence
  Description of Artificial Sequence: Synthetic oligonucleotide
cagucgcuggcgggcggcg

SEQ ID NO: 1523488 - RNA, 19 nt, Artificial Sequence
  Description of Artificial Sequence: Synthetic oligonucleotide
auaggacggcuggcuuuca

SEQ ID NO: 1523489 - RNA, 19 nt, Artificial Sequence
  Description of Artificial Sequence: Synthetic oligonucleotide
ccgcagcagaaaauaucuc

SEQ ID NO: 1523490 - RNA, 19 nt, Artificial Sequence
  Description of Artificial Sequence: Synthetic oligonucleotide
gcugaacaucuuguuaacu

SEQ ID NO: 1523491 - RNA, 19 nt, Artificial Sequence
  Description of Artificial Sequence: Synthetic oligonucleotide
acgucacgcacugcagcuu

SEQ ID NO: 1523492 - RNA, 19 nt, Artificial Sequence
  Description of Artificial Sequence: Synthetic oligonucleotide
ccagucagaguuucagccu

SEQ ID NO: 1523493 - RNA, 19 nt, Artificial Sequence
  Description of Artificial Sequence: Synthetic oligonucleotide
cgauuuguacuucccaacu

SEQ ID NO: 1523494 - RNA, 19 nt, Artificial Sequence
  Description of Artificial Sequence: Synthetic oligonucleotide
acgcaguucgugagcuaaa

SEQ ID NO: 1523495 - RNA, 19 nt, Artificial Sequence
  Description of Artificial Sequence: Synthetic oligonucleotide
gccggcucuuccgggcucg

SEQ ID NO: 1523496 - RNA, 19 nt, Artificial Sequence
  Description of Artificial Sequence: Synthetic oligonucleotide
ggagaucccgcagcagaaa

SEQ ID NO: 1523497 - RNA, 19 nt, Artificial Sequence
  Description of Artificial Sequence: Synthetic oligonucleotide
gccucagcgcgcugguguc

SEQ ID NO: 1523498 - RNA, 19 nt, Artificial Sequence
  Description of Artificial Sequence: Synthetic oligonucleotide
cguuuaugagcuucggcau

SEQ ID NO: 1523499 - RNA, 19 nt, Artificial Sequence
  Description of Artificial Sequence: Synthetic oligonucleotide
gcccaccgaaugccagaag

SEQ ID NO: 1523500 - RNA, 19 nt, Artificial Sequence
  Description of Artificial Sequence: Synthetic oligonucleotide
ccaccgaaugccagaaggu

SEQ ID NO: 1523501 - RNA, 19 nt, Artificial Sequence
  Description of Artificial Sequence: Synthetic oligonucleotide
caucgaucggcagccgccu

SEQ ID NO: 1523502 - RNA, 19 nt, Artificial Sequence
  Description of Artificial Sequence: Synthetic oligonucleotide
caccaaagauguguucaau

SEQ ID NO: 1523503 - RNA, 19 nt, Artificial Sequence
  Description of Artificial Sequence: Synthetic oligonucleotide
gggagaccguccgcgucgc

SEQ ID NO: 1523504 - RNA, 19 nt, Artificial Sequence
  Description of Artificial Sequence: Synthetic oligonucleotide
gaccucagauaugggcuuu

SEQ ID NO: 1523505 - RNA, 19 nt, Artificial Sequence
  Description of Artificial Sequence: Synthetic oligonucleotide
cgucgcccgcucuuugccc

SEQ ID NO: 1523506 - RNA, 19 nt, Artificial Sequence
  Description of Artificial Sequence: Synthetic oligonucleotide
cggugaccucagauauggg

SEQ ID NO: 1523507 - RNA, 19 nt, Artificial Sequence
  Description of Artificial Sequence: Synthetic oligonucleotide
ccgcucuuugcccaccgaa

SEQ ID NO: 1523508 - RNA, 19 nt, Artificial Sequence
  Description of Artificial Sequence: Synthetic oligonucleotide
cucagcgcgcugguguccu

SEQ ID NO: 1523509 - RNA, 19 nt, Artificial Sequence
  Description of Artificial Sequence: Synthetic oligonucleotide
ggagaccguccgcgucgcc

SEQ ID NO: 1523510 - RNA, 19 nt, Artificial Sequence
  Description of Artificial Sequence: Synthetic oligonucleotide
accguccgcgucgcccgcu

SEQ ID NO: 1523511 - RNA, 19 nt, Artificial Sequence
  Description of Artificial Sequence: Synthetic oligonucleotide
gggguucauucugaaugau

SEQ ID NO: 1523512 - RNA, 19 nt, Artificial Sequence
  Description of Artificial Sequence: Synthetic oligonucleotide
gcggcggggagccggcucu

SEQ ID NO: 1523513 - RNA, 19 nt, Artificial Sequence
  Description of Artificial Sequence: Synthetic oligonucleotide
cuucggcauuugccacaua

SEQ ID NO: 1523514 - RNA, 19 nt, Artificial Sequence
  Description of Artificial Sequence: Synthetic oligonucleotide
cagccgccucagcgcgcug

SEQ ID NO: 1523515 - RNA, 19 nt, Artificial Sequence
  Description of Artificial Sequence: Synthetic oligonucleotide
ccugggagaccguccgcgu

SEQ ID NO: 1523516 - RNA, 19 nt, Artificial Sequence
  Description of Artificial Sequence: Synthetic oligonucleotide
ccgcgucgcccgcucuuug

SEQ ID NO: 1523517 - RNA, 19 nt, Artificial Sequence
  Description of Artificial Sequence: Synthetic oligonucleotide
cguauauggacagcacguu

SEQ ID NO: 1523518 - RNA, 19 nt, Artificial Sequence
  Description of Artificial Sequence: Synthetic oligonucleotide
gcgcgcugguguccuccuc

SEQ ID NO: 1523519 - RNA, 19 nt, Artificial Sequence
  Description of Artificial Sequence: Synthetic oligonucleotide
cccgcucuuugcccaccga

SEQ ID NO: 1523520 - RNA, 19 nt, Artificial Sequence
  Description of Artificial Sequence: Synthetic oligonucleotide
ggcggggagccggcucuuc

SEQ ID NO: 1523521 - RNA, 19 nt, Artificial Sequence
  Description of Artificial Sequence: Synthetic oligonucleotide
cccaacuggcacagaucau

SEQ ID NO: 1523522 - RNA, 19 nt, Artificial Sequence
  Description of Artificial Sequence: Synthetic oligonucleotide
ccggcucuuccgggcucgc

SEQ ID NO: 1523523 - RNA, 19 nt, Artificial Sequence
  Description of Artificial Sequence: Synthetic oligonucleotide
cgcaguucgugagcuaaau

SEQ ID NO: 1523524 - RNA, 19 nt, Artificial Sequence
  Description of Artificial Sequence: Synthetic oligonucleotide
ugcauuaucgauuagaaag

SEQ ID NO: 1523525 - RNA, 19 nt, Artificial Sequence
  Description of Artificial Sequence: Synthetic oligonucleotide
agaacuauacaguauaccc

SEQ ID NO: 1523526 - RNA, 19 nt, Artificial Sequence
  Description of Artificial Sequence: Synthetic oligonucleotide
uuuaaugucuauaauuugg

SEQ ID NO: 1523527 - RNA, 19 nt, Artificial Sequence
  Description of Artificial Sequence: Synthetic oligonucleotide
auauuuuagauuuucaauc

SEQ ID NO: 1523528 - RNA, 19 nt, Artificial Sequence
  Description of Artificial Sequence: Synthetic oligonucleotide
uguguuagaugcauuaucg

SEQ ID NO: 1523529 - RNA, 19 nt, Artificial Sequence
  Description of Artificial Sequence: Synthetic oligonucleotide
uuugaaaauguacaaguag

SEQ ID NO: 1523530 - RNA, 19 nt, Artificial Sequence
  Description of Artificial Sequence: Synthetic oligonucleotide
aaucccuccauccacacuc

SEQ ID NO: 1523531 - RNA, 19 nt, Artificial Sequence
  Description of Artificial Sequence: Synthetic oligonucleotide
uaucacauaaauauaauau

SEQ ID NO: 1523532 - RNA, 19 nt, Artificial Sequence
  Description of Artificial Sequence: Synthetic oligonucleotide
uacaucuuuucuaucagcg

SEQ ID NO: 1523533 - RNA, 19 nt, Artificial Sequence
  Description of Artificial Sequence: Synthetic oligonucleotide
uuuacaagaacuauacagu

SEQ ID NO: 1523534 - RNA, 19 nt, Artificial Sequence
  Description of Artificial Sequence: Synthetic oligonucleotide
agauuuucgagauaucuuc

SEQ ID NO: 1523535 - RNA, 19 nt, Artificial Sequence
  Description of Artificial Sequence: Synthetic oligonucleotide
uugaaaauguacaaguaga

SEQ ID NO: 1523536 - RNA, 19 nt, Artificial Sequence
  Description of Artificial Sequence: Synthetic oligonucleotide
gauagaaaggcugcgaugg

SEQ ID NO: 1523537 - RNA, 19 nt, Artificial Sequence
  Description of Artificial Sequence: Synthetic oligonucleotide
ucgauuagaaagcauaaca

SEQ ID NO: 1523538 - RNA, 19 nt, Artificial Sequence
  Description of Artificial Sequence: Synthetic oligonucleotide
aaaucaucccaccuuguuc

SEQ ID NO: 1523539 - RNA, 19 nt, Artificial Sequence
  Description of Artificial Sequence: Synthetic oligonucleotide
acacuacuguguuagaugc

SEQ ID NO: 1523540 - RNA, 19 nt, Artificial Sequence
  Description of Artificial Sequence: Synthetic oligonucleotide
auaauuuggucuuuaucac

SEQ ID NO: 1523541 - RNA, 19 nt, Artificial Sequence
  Description of Artificial Sequence: Synthetic oligonucleotide
aauacuccagcauauuuca

SEQ ID NO: 1523542 - RNA, 19 nt, Artificial Sequence
  Description of Artificial Sequence: Synthetic oligonucleotide
aaaaccaacgcaucguuga

SEQ ID NO: 1523543 - RNA, 19 nt, Artificial Sequence
  Description of Artificial Sequence: Synthetic oligonucleotide
auacaguauacccggaagc

SEQ ID NO: 1523544 - RNA, 19 nt, Artificial Sequence
  Description of Artificial Sequence: Synthetic oligonucleotide
aaaaugaacugcuuucuga

SEQ ID NO: 1523545 - RNA, 19 nt, Artificial Sequence
  Description of Artificial Sequence: Synthetic oligonucleotide
uauuuauaagcuuuccuca

SEQ ID NO: 1523546 - RNA, 19 nt, Artificial Sequence
  Description of Artificial Sequence: Synthetic oligonucleotide
aaagacucacaucuuuggg

SEQ ID NO: 1523547 - RNA, 19 nt, Artificial Sequence
  Description of Artificial Sequence: Synthetic oligonucleotide
uaucagaaccguuuggagg

SEQ ID NO: 1523548 - RNA, 19 nt, Artificial Sequence
  Description of Artificial Sequence: Synthetic oligonucleotide
uuauuugcaaaauugcuau

SEQ ID NO: 1523549 - RNA, 19 nt, Artificial Sequence
  Description of Artificial Sequence: Synthetic oligonucleotide
aaagugacagccauauugg

SEQ ID NO: 1523550 - RNA, 19 nt, Artificial Sequence
  Description of Artificial Sequence: Synthetic oligonucleotide
aaacacacuacuguguuag

SEQ ID NO: 1523551 - RNA, 19 nt, Artificial Sequence
  Description of Artificial Sequence: Synthetic oligonucleotide
uauacaguauacccggaag

SEQ ID NO: 1523552 - RNA, 19 nt, Artificial Sequence
  Description of Artificial Sequence: Synthetic oligonucleotide
uucaaugugaccagauaag

SEQ ID NO: 1523553 - RNA, 19 nt, Artificial Sequence
  Description of Artificial Sequence: Synthetic oligonucleotide
uuauaagcuuuccucauca

SEQ ID NO: 1523554 - RNA, 19 nt, Artificial Sequence
  Description of Artificial Sequence: Synthetic oligonucleotide
uacaaguagacuucaaugu

SEQ ID NO: 1523555 - RNA, 19 nt, Artificial Sequence
  Description of Artificial Sequence: Synthetic oligonucleotide
uuaucgauuagaaagcaua

SEQ ID NO: 1523556 - RNA, 19 nt, Artificial Sequence
  Description of Artificial Sequence: Synthetic oligonucleotide
ugaaaauguacaaguagac

SEQ ID NO: 1523557 - RNA, 19 nt, Artificial Sequence
  Description of Artificial Sequence: Synthetic oligonucleotide
gagauaucuucuuuguuag

SEQ ID NO: 1523558 - RNA, 19 nt, Artificial Sequence
  Description of Artificial Sequence: Synthetic oligonucleotide
ugaaaagcccaacagauuu

SEQ ID NO: 1523559 - RNA, 19 nt, Artificial Sequence
  Description of Artificial Sequence: Synthetic oligonucleotide
uuaaugucuauaauuuggu

SEQ ID NO: 1523560 - RNA, 19 nt, Artificial Sequence
  Description of Artificial Sequence: Synthetic oligonucleotide
aaauguacaaguagacuuc

SEQ ID NO: 1523561 - RNA, 19 nt, Artificial Sequence
  Description of Artificial Sequence: Synthetic oligonucleotide
aguuaguccauuaaaagug

SEQ ID NO: 1523562 - RNA, 19 nt, Artificial Sequence
  Description of Artificial Sequence: Synthetic oligonucleotide
agcccaaagacucacaucu

SEQ ID NO: 1523563 - RNA, 19 nt, Artificial Sequence
  Description of Artificial Sequence: Synthetic oligonucleotide
cucuuuguauuuaucaaag

SEQ ID NO: 1523564 - RNA, 19 nt, Artificial Sequence
  Description of Artificial Sequence: Synthetic oligonucleotide
gaaaacucaggcuuacagc

SEQ ID NO: 1523565 - RNA, 19 nt, Artificial Sequence
  Description of Artificial Sequence: Synthetic oligonucleotide
aaaagcccaacagauuugg

SEQ ID NO: 1523566 - RNA, 19 nt, Artificial Sequence
  Description of Artificial Sequence: Synthetic oligonucleotide
guacaaguagacuucaaug

SEQ ID NO: 1523567 - RNA, 19 nt, Artificial Sequence
  Description of Artificial Sequence: Synthetic oligonucleotide
ucaaugugaccagauaagg

SEQ ID NO: 1523568 - RNA, 19 nt, Artificial Sequence
  Description of Artificial Sequence: Synthetic oligonucleotide
caucguugaaaacaugucc

SEQ ID NO: 1523569 - RNA, 19 nt, Artificial Sequence
  Description of Artificial Sequence: Synthetic oligonucleotide
guuaggagcuugcaggugg

SEQ ID NO: 1523570 - RNA, 19 nt, Artificial Sequence
  Description of Artificial Sequence: Synthetic oligonucleotide
gugguuaccaaaugcaugc

SEQ ID NO: 1523571 - RNA, 19 nt, Artificial Sequence
  Description of Artificial Sequence: Synthetic oligonucleotide
ucaguuacgcucccgacca

SEQ ID NO: 1523572 - RNA, 19 nt, Artificial Sequence
  Description of Artificial Sequence: Synthetic oligonucleotide
uguguccuagauagaaagg

SEQ ID NO: 1523573 - RNA, 19 nt, Artificial Sequence
  Description of Artificial Sequence: Synthetic oligonucleotide
uuucgagauaucuucuuug

SEQ ID NO: 1523574 - RNA, 19 nt, Artificial Sequence
  Description of Artificial Sequence: Synthetic oligonucleotide
uuagaaagcauaacauguc

SEQ ID NO: 1523575 - RNA, 19 nt, Artificial Sequence
  Description of Artificial Sequence: Synthetic oligonucleotide
auugacucuaugcuuaaga

SEQ ID NO: 1523576 - RNA, 19 nt, Artificial Sequence
  Description of Artificial Sequence: Synthetic oligonucleotide
ugagauuuucgagauaucu

SEQ ID NO: 1523577 - RNA, 19 nt, Artificial Sequence
  Description of Artificial Sequence: Synthetic oligonucleotide
aaaucaauaggcaaagaua

SEQ ID NO: 1523578 - RNA, 19 nt, Artificial Sequence
  Description of Artificial Sequence: Synthetic oligonucleotide
uggucuuuaucacauaaau

SEQ ID NO: 1523579 - RNA, 19 nt, Artificial Sequence
  Description of Artificial Sequence: Synthetic oligonucleotide
aaguagacuucaaugugac

SEQ ID NO: 1523580 - RNA, 19 nt, Artificial Sequence
  Description of Artificial Sequence: Synthetic oligonucleotide
caaagacucacaucuuugg

SEQ ID NO: 1523581 - RNA, 19 nt, Artificial Sequence
  Description of Artificial Sequence: Synthetic oligonucleotide
ucuuuaaugaaaagcccaa

SEQ ID NO: 1523582 - RNA, 19 nt, Artificial Sequence
  Description of Artificial Sequence: Synthetic oligonucleotide
ucuaucagcgucuuccgca

SEQ ID NO: 1523583 - RNA, 19 nt, Artificial Sequence
  Description of Artificial Sequence: Synthetic oligonucleotide
acaaguagacuucaaugug

SEQ ID NO: 1523584 - RNA, 19 nt, Artificial Sequence
  Description of Artificial Sequence: Synthetic oligonucleotide
acaagaacuauacaguaua

SEQ ID NO: 1523585 - RNA, 19 nt, Artificial Sequence
  Description of Artificial Sequence: Synthetic oligonucleotide
uuagaugcauuaucgauua

SEQ ID NO: 1523586 - RNA, 19 nt, Artificial Sequence
  Description of Artificial Sequence: Synthetic oligonucleotide
uguacaaguagacuucaau

SEQ ID NO: 1523587 - RNA, 19 nt, Artificial Sequence
  Description of Artificial Sequence: Synthetic oligonucleotide
uagugaucaaggcauagaa

SEQ ID NO: 1523588 - RNA, 19 nt, Artificial Sequence
  Description of Artificial Sequence: Synthetic oligonucleotide
aaggaagaaccaguuguac

SEQ ID NO: 1523589 - RNA, 19 nt, Artificial Sequence
  Description of Artificial Sequence: Synthetic oligonucleotide
uuuacaguguguccuagau

SEQ ID NO: 1523590 - RNA, 19 nt, Artificial Sequence
  Description of Artificial Sequence: Synthetic oligonucleotide
uucauugacucuaugcuua

SEQ ID NO: 1523591 - RNA, 19 nt, Artificial Sequence
  Description of Artificial Sequence: Synthetic oligonucleotide
uccuagauagaaaggcugc

SEQ ID NO: 1523592 - RNA, 19 nt, Artificial Sequence
  Description of Artificial Sequence: Synthetic oligonucleotide
guguguccuagauagaaag

SEQ ID NO: 1523593 - RNA, 19 nt, Artificial Sequence
  Description of Artificial Sequence: Synthetic oligonucleotide
uaucgauuagaaagcauaa

SEQ ID NO: 1523594 - RNA, 19 nt, Artificial Sequence
  Description of Artificial Sequence: Synthetic oligonucleotide
ucuacuaccugguucgggu

SEQ ID NO: 1523595 - RNA, 19 nt, Artificial Sequence
  Description of Artificial Sequence: Synthetic oligonucleotide
ugcccaauccuaauguggc

SEQ ID NO: 1523596 - RNA, 19 nt, Artificial Sequence
  Description of Artificial Sequence: Synthetic oligonucleotide
uuucucacaaaugauuuaa

SEQ ID NO: 1523597 - RNA, 19 nt, Artificial Sequence
  Description of Artificial Sequence: Synthetic oligonucleotide
acguuaauugacucaaaca

SEQ ID NO: 1523598 - RNA, 19 nt, Artificial Sequence
  Description of Artificial Sequence: Synthetic oligonucleotide
aucugauuaggaguuaguc

SEQ ID NO: 1523599 - RNA, 19 nt, Artificial Sequence
  Description of Artificial Sequence: Synthetic oligonucleotide
agguaagaaaaccaacgca

SEQ ID NO: 1523600 - RNA, 19 nt, Artificial Sequence
  Description of Artificial Sequence: Synthetic oligonucleotide
gacauggccucuuuaauga

SEQ ID NO: 1523601 - RNA, 19 nt, Artificial Sequence
  Description of Artificial Sequence: Synthetic oligonucleotide
aaaggcccuaagccgguac

SEQ ID NO: 1523602 - RNA, 19 nt, Artificial Sequence
  Description of Artificial Sequence: Synthetic oligonucleotide
aagccgguacaccccauac

SEQ ID NO: 1523603 - RNA, 19 nt, Artificial Sequence
  Description of Artificial Sequence: Synthetic oligonucleotide
uuuauaagcuuuccucauc

SEQ ID NO: 1523604 - RNA, 19 nt, Artificial Sequence
  Description of Artificial Sequence: Synthetic oligonucleotide
ggaguuaguccauuaaaag

SEQ ID NO: 1523605 - RNA, 19 nt, Artificial Sequence
  Description of Artificial Sequence: Synthetic oligonucleotide
aagaaaaccaacgcaucgu

SEQ ID NO: 1523606 - RNA, 19 nt, Artificial Sequence
  Description of Artificial Sequence: Synthetic oligonucleotide
auuaucagaaccguuugga

SEQ ID NO: 1523607 - RNA, 19 nt, Artificial Sequence
  Description of Artificial Sequence: Synthetic oligonucleotide
augucuauaauuuggucuu

SEQ ID NO: 1523608 - RNA, 19 nt, Artificial Sequence
  Description of Artificial Sequence: Synthetic oligonucleotide
uagaauggcucaagggcag

SEQ ID NO: 1523609 - RNA, 19 nt, Artificial Sequence
  Description of Artificial Sequence: Synthetic oligonucleotide
cucuuuaaugaaaagccca

SEQ ID NO: 1523610 - RNA, 19 nt, Artificial Sequence
  Description of Artificial Sequence: Synthetic oligonucleotide
aguguuugguccaagucuc

SEQ ID NO: 1523611 - RNA, 19 nt, Artificial Sequence
  Description of Artificial Sequence: Synthetic oligonucleotide
cguuaauugacucaaacac

SEQ ID NO: 1523612 - RNA, 19 nt, Artificial Sequence
  Description of Artificial Sequence: Synthetic oligonucleotide
uuacugagcuccaugcgcu

SEQ ID NO: 1523613 - RNA, 19 nt, Artificial Sequence
  Description of Artificial Sequence: Synthetic oligonucleotide
uagauagaaaggcugcgau

SEQ ID NO: 1523614 - RNA, 19 nt, Artificial Sequence
  Description of Artificial Sequence: Synthetic oligonucleotide
aauguacaaguagacuuca

SEQ ID NO: 1523615 - RNA, 19 nt, Artificial Sequence
  Description of Artificial Sequence: Synthetic oligonucleotide
uuggguuuuacaagaacua

SEQ ID NO: 1523616 - RNA, 19 nt, Artificial Sequence
  Description of Artificial Sequence: Synthetic oligonucleotide
auccuaauguggccuagcg

SEQ ID NO: 1523617 - RNA, 19 nt, Artificial Sequence
  Description of Artificial Sequence: Synthetic oligonucleotide
uucgagauaucuucuuugu

SEQ ID NO: 1523618 - RNA, 19 nt, Artificial Sequence
  Description of Artificial Sequence: Synthetic oligonucleotide
ugucuuaaugugguuacca

SEQ ID NO: 1523619 - RNA, 19 nt, Artificial Sequence
  Description of Artificial Sequence: Synthetic oligonucleotide
uagcguagugaucaaggca

SEQ ID NO: 1523620 - RNA, 19 nt, Artificial Sequence
  Description of Artificial Sequence: Synthetic oligonucleotide
uguugagucuuuucauuga

SEQ ID NO: 1523621 - RNA, 19 nt, Artificial Sequence
  Description of Artificial Sequence: Synthetic oligonucleotide
aucgauuagaaagcauaac

SEQ ID NO: 1523622 - RNA, 19 nt, Artificial Sequence
  Description of Artificial Sequence: Synthetic oligonucleotide
aagcccaacagauuuggua

SEQ ID NO: 1523623 - RNA, 19 nt, Artificial Sequence
  Description of Artificial Sequence: Synthetic oligonucleotide
uccgcaucuagaauggcuc

SEQ ID NO: 1523624 - RNA, 19 nt, Artificial Sequence
  Description of Artificial Sequence: Synthetic oligonucleotide
uacccggaagcucuuacug

SEQ ID NO: 1523625 - RNA, 19 nt, Artificial Sequence
  Description of Artificial Sequence: Synthetic oligonucleotide
cucaagggcaggaaaacuc

SEQ ID NO: 1523626 - RNA, 19 nt, Artificial Sequence
  Description of Artificial Sequence: Synthetic oligonucleotide
gacgguguccucucuuugg

SEQ ID NO: 1523627 - RNA, 19 nt, Artificial Sequence
  Description of Artificial Sequence: Synthetic oligonucleotide
agauagaaaggcugcgaug

SEQ ID NO: 1523628 - RNA, 19 nt, Artificial Sequence
  Description of Artificial Sequence: Synthetic oligonucleotide
gaguuaguccauuaaaagu

SEQ ID NO: 1523629 - RNA, 19 nt, Artificial Sequence
  Description of Artificial Sequence: Synthetic oligonucleotide
guguccuagauagaaaggc

SEQ ID NO: 1523630 - RNA, 19 nt, Artificial Sequence
  Description of Artificial Sequence: Synthetic oligonucleotide
uucgggugguuagacaugg

SEQ ID NO: 1523631 - RNA, 19 nt, Artificial Sequence
  Description of Artificial Sequence: Synthetic oligonucleotide
cacguuaauugacucaaac

SEQ ID NO: 1523632 - RNA, 19 nt, Artificial Sequence
  Description of Artificial Sequence: Synthetic oligonucleotide
cuagaauggcucaagggca

SEQ ID NO: 1523633 - RNA, 19 nt, Artificial Sequence
  Description of Artificial Sequence: Synthetic oligonucleotide
cuagcguagugaucaaggc

SEQ ID NO: 1523634 - RNA, 19 nt, Artificial Sequence
  Description of Artificial Sequence: Synthetic oligonucleotide
uaaugucuauaauuugguc

SEQ ID NO: 1523635 - RNA, 19 nt, Artificial Sequence
  Description of Artificial Sequence: Synthetic oligonucleotide
caucuagaauggcucaagg

SEQ ID NO: 1523636 - RNA, 19 nt, Artificial Sequence
  Description of Artificial Sequence: Synthetic oligonucleotide
uggccuagcguagugauca

SEQ ID NO: 1523637 - RNA, 19 nt, Artificial Sequence
  Description of Artificial Sequence: Synthetic oligonucleotide
uuucagaacugaagaacuc

SEQ ID NO: 1523638 - RNA, 19 nt, Artificial Sequence
  Description of Artificial Sequence: Synthetic oligonucleotide
agaugcauuaucgauuaga

SEQ ID NO: 1523639 - RNA, 19 nt, Artificial Sequence
  Description of Artificial Sequence: Synthetic oligonucleotide
caggcagacugcuagcugc

SEQ ID NO: 1523640 - RNA, 19 nt, Artificial Sequence
  Description of Artificial Sequence: Synthetic oligonucleotide
agauuugguauuaaauaca

SEQ ID NO: 1523641 - RNA, 19 nt, Artificial Sequence
  Description of Artificial Sequence: Synthetic oligonucleotide
uccuucuacuaccugguuc

SEQ ID NO: 1523642 - RNA, 19 nt, Artificial Sequence
  Description of Artificial Sequence: Synthetic oligonucleotide
uacaguauacccggaagcu

SEQ ID NO: 1523643 - RNA, 19 nt, Artificial Sequence
  Description of Artificial Sequence: Synthetic oligonucleotide
cagcaaaaguacuggggcg

SEQ ID NO: 1523644 - RNA, 19 nt, Artificial Sequence
  Description of Artificial Sequence: Synthetic oligonucleotide
gccucuuuaaugaaaagcc

SEQ ID NO: 1523645 - RNA, 19 nt, Artificial Sequence
  Description of Artificial Sequence: Synthetic oligonucleotide
cucaguuacgcucccgacc

SEQ ID NO: 1523646 - RNA, 19 nt, Artificial Sequence
  Description of Artificial Sequence: Synthetic oligonucleotide
uguauuuaucaaaggcaua

SEQ ID NO: 1523647 - RNA, 19 nt, Artificial Sequence
  Description of Artificial Sequence: Synthetic oligonucleotide
uccacguuaauugacucaa

SEQ ID NO: 1523648 - RNA, 19 nt, Artificial Sequence
  Description of Artificial Sequence: Synthetic oligonucleotide
auaggcaaagauacaucac

SEQ ID NO: 1523649 - RNA, 19 nt, Artificial Sequence
  Description of Artificial Sequence: Synthetic oligonucleotide
uauacccggaagcucuuac

SEQ ID NO: 1523650 - RNA, 19 nt, Artificial Sequence
  Description of Artificial Sequence: Synthetic oligonucleotide
agaagaugcuuccaagcau

SEQ ID NO: 1523651 - RNA, 19 nt, Artificial Sequence
  Description of Artificial Sequence: Synthetic oligonucleotide
acacucacauauucaaggu

SEQ ID NO: 1523652 - RNA, 19 nt, Artificial Sequence
  Description of Artificial Sequence: Synthetic oligonucleotide
uaucuucagauaucuucca

SEQ ID NO: 1523653 - RNA, 19 nt, Artificial Sequence
  Description of Artificial Sequence: Synthetic oligonucleotide
cacaaaugauuuaagggaa

SEQ ID NO: 1523654 - RNA, 19 nt, Artificial Sequence
  Description of Artificial Sequence: Synthetic oligonucleotide
agcgucuuccgcauuuucc

SEQ ID NO: 1523655 - RNA, 19 nt, Artificial Sequence
  Description of Artificial Sequence: Synthetic oligonucleotide
acaaucccuccauccacac

SEQ ID NO: 1523656 - RNA, 19 nt, Artificial Sequence
  Description of Artificial Sequence: Synthetic oligonucleotide
uccgcaaauacuccagcau

SEQ ID NO: 1523657 - RNA, 19 nt, Artificial Sequence
  Description of Artificial Sequence: Synthetic oligonucleotide
ugugcccaauccuaaugug

SEQ ID NO: 1523658 - RNA, 19 nt, Artificial Sequence
  Description of Artificial Sequence: Synthetic oligonucleotide
acucaguuacgcucccgac

SEQ ID NO: 1523659 - RNA, 19 nt, Artificial Sequence
  Description of Artificial Sequence: Synthetic oligonucleotide
accaacgcaucguugaaaa

SEQ ID NO: 1523660 - RNA, 19 nt, Artificial Sequence
  Description of Artificial Sequence: Synthetic oligonucleotide
gaacucugcuuugucacag

SEQ ID NO: 1523661 - RNA, 19 nt, Artificial Sequence
  Description of Artificial Sequence: Synthetic oligonucleotide
ccuagcguagugaucaagg

SEQ ID NO: 1523662 - RNA, 19 nt, Artificial Sequence
  Description of Artificial Sequence: Synthetic oligonucleotide
aguguccacguuaauugac

SEQ ID NO: 1523663 - RNA, 19 nt, Artificial Sequence
  Description of Artificial Sequence: Synthetic oligonucleotide
uuccgcaaauacuccagca

SEQ ID NO: 1523664 - RNA, 19 nt, Artificial Sequence
  Description of Artificial Sequence: Synthetic oligonucleotide
agcguagugaucaaggcau

SEQ ID NO: 1523665 - RNA, 19 nt, Artificial Sequence
  Description of Artificial Sequence: Synthetic oligonucleotide
uccuaauguggccuagcgu

SEQ ID NO: 1523666 - RNA, 19 nt, Artificial Sequence
  Description of Artificial Sequence: Synthetic oligonucleotide
uccggaacacugagaaggc

SEQ ID NO: 1523667 - RNA, 19 nt, Artificial Sequence
  Description of Artificial Sequence: Synthetic oligonucleotide
gaaaaccaacgcaucguug

SEQ ID NO: 1523668 - RNA, 19 nt, Artificial Sequence
  Description of Artificial Sequence: Synthetic oligonucleotide
acaguauacccggaagcuc

SEQ ID NO: 1523669 - RNA, 19 nt, Artificial Sequence
  Description of Artificial Sequence: Synthetic oligonucleotide
gaaaagcccaacagauuug

SEQ ID NO: 1523670 - RNA, 19 nt, Artificial Sequence
  Description of Artificial Sequence: Synthetic oligonucleotide
uuucugugcccaauccuaa

SEQ ID NO: 1523671 - RNA, 19 nt, Artificial Sequence
  Description of Artificial Sequence: Synthetic oligonucleotide
aaaccaacgcaucguugaa

SEQ ID NO: 1523672 - RNA, 19 nt, Artificial Sequence
  Description of Artificial Sequence: Synthetic oligonucleotide
ucguugaaaacauguccaa

SEQ ID NO: 1523673 - RNA, 19 nt, Artificial Sequence
  Description of Artificial Sequence: Synthetic oligonucleotide
augucuuaaugugguuacc

SEQ ID NO: 1523674 - RNA, 19 nt, Artificial Sequence
  Description of Artificial Sequence: Synthetic oligonucleotide
guccuagauagaaaggcug

SEQ ID NO: 1523675 - RNA, 19 nt, Artificial Sequence
  Description of Artificial Sequence: Synthetic oligonucleotide
acuacuguguuagaugcau

SEQ ID NO: 1523676 - RNA, 19 nt, Artificial Sequence
  Description of Artificial Sequence: Synthetic oligonucleotide
ucacauauucaaggucucc

SEQ ID NO: 1523677 - RNA, 19 nt, Artificial Sequence
  Description of Artificial Sequence: Synthetic oligonucleotide
aucaaccacaugucaucag

SEQ ID NO: 1523678 - RNA, 19 nt, Artificial Sequence
  Description of Artificial Sequence: Synthetic oligonucleotide
uagcugcuuaucuucagau

SEQ ID NO: 1523679 - RNA, 19 nt, Artificial Sequence
  Description of Artificial Sequence: Synthetic oligonucleotide
gcauuaucgauuagaaagc

SEQ ID NO: 1523680 - RNA, 19 nt, Artificial Sequence
  Description of Artificial Sequence: Synthetic oligonucleotide
uuacaguguguccuagaua

SEQ ID NO: 1523681 - RNA, 19 nt, Artificial Sequence
  Description of Artificial Sequence: Synthetic oligonucleotide
auuaggaguuaguccauua

SEQ ID NO: 1523682 - RNA, 19 nt, Artificial Sequence
  Description of Artificial Sequence: Synthetic oligonucleotide
agcaaaaguacuggggcgu

SEQ ID NO: 1523683 - RNA, 19 nt, Artificial Sequence
  Description of Artificial Sequence: Synthetic oligonucleotide
uugcaaaauugcuauucuu

SEQ ID NO: 1523684 - RNA, 19 nt, Artificial Sequence
  Description of Artificial Sequence: Synthetic oligonucleotide
uguggccuagcguagugau

SEQ ID NO: 1523685 - RNA, 19 nt, Artificial Sequence
  Description of Artificial Sequence: Synthetic oligonucleotide
uguccacguuaauugacuc

SEQ ID NO: 1523686 - RNA, 19 nt, Artificial Sequence
  Description of Artificial Sequence: Synthetic oligonucleotide
gcgucuuccgcauuuuccg

SEQ ID NO: 1523687 - RNA, 19 nt, Artificial Sequence
  Description of Artificial Sequence: Synthetic oligonucleotide
gaaccaguuguacugcucu

SEQ ID NO: 1523688 - RNA, 19 nt, Artificial Sequence
  Description of Artificial Sequence: Synthetic oligonucleotide
ccucuuuaaugaaaagccc

SEQ ID NO: 1523689 - RNA, 19 nt, Artificial Sequence
  Description of Artificial Sequence: Synthetic oligonucleotide
ucuuuguuaggagcuugca

SEQ ID NO: 1523690 - RNA, 19 nt, Artificial Sequence
  Description of Artificial Sequence: Synthetic oligonucleotide
uggguuuuacaagaacuau

SEQ ID NO: 1523691 - RNA, 19 nt, Artificial Sequence
  Description of Artificial Sequence: Synthetic oligonucleotide
auauuucaggcagacugcu

SEQ ID NO: 1523692 - RNA, 19 nt, Artificial Sequence
  Description of Artificial Sequence: Synthetic oligonucleotide
gccauauuggaacagcauc

SEQ ID NO: 1523693 - RNA, 19 nt, Artificial Sequence
  Description of Artificial Sequence: Synthetic oligonucleotide
aguuacgcucccgaccagg

SEQ ID NO: 1523694 - RNA, 19 nt, Artificial Sequence
  Description of Artificial Sequence: Synthetic oligonucleotide
cucuaugcuuaagacaauc

SEQ ID NO: 1523695 - RNA, 19 nt, Artificial Sequence
  Description of Artificial Sequence: Synthetic oligonucleotide
ggccucuuuaaugaaaagc

SEQ ID NO: 1523696 - RNA, 19 nt, Artificial Sequence
  Description of Artificial Sequence: Synthetic oligonucleotide
aacaugucuuaaugugguu

SEQ ID NO: 1523697 - RNA, 19 nt, Artificial Sequence
  Description of Artificial Sequence: Synthetic oligonucleotide
uuaggagcuugcagguggu

SEQ ID NO: 1523698 - RNA, 19 nt, Artificial Sequence
  Description of Artificial Sequence: Synthetic oligonucleotide
ugauuaggaguuaguccau

SEQ ID NO: 1523699 - RNA, 19 nt, Artificial Sequence
  Description of Artificial Sequence: Synthetic oligonucleotide
acaugucuuaaugugguua

SEQ ID NO: 1523700 - RNA, 19 nt, Artificial Sequence
  Description of Artificial Sequence: Synthetic oligonucleotide
guuaccaaaugcaugcucu

SEQ ID NO: 1523701 - RNA, 19 nt, Artificial Sequence
  Description of Artificial Sequence: Synthetic oligonucleotide
agccgcugagauuuucgag

SEQ ID NO: 1523702 - RNA, 19 nt, Artificial Sequence
  Description of Artificial Sequence: Synthetic oligonucleotide
ucauugacucuaugcuuaa

SEQ ID NO: 1523703 - RNA, 19 nt, Artificial Sequence
  Description of Artificial Sequence: Synthetic oligonucleotide
uguuugguccaagucuccu

SEQ ID NO: 1523704 - RNA, 19 nt, Artificial Sequence
  Description of Artificial Sequence: Synthetic oligonucleotide
ucgagauaucuucuuuguu

SEQ ID NO: 1523705 - RNA, 19 nt, Artificial Sequence
  Description of Artificial Sequence: Synthetic oligonucleotide
guguuagaugcauuaucga

SEQ ID NO: 1523706 - RNA, 19 nt, Artificial Sequence
  Description of Artificial Sequence: Synthetic oligonucleotide
uagaugcauuaucgauuag

SEQ ID NO: 1523707 - RNA, 19 nt, Artificial Sequence
  Description of Artificial Sequence: Synthetic oligonucleotide
uggccucuuuaaugaaaag

SEQ ID NO: 1523708 - RNA, 19 nt, Artificial Sequence
  Description of Artificial Sequence: Synthetic oligonucleotide
ggugguuagacauggccuc

SEQ ID NO: 1523709 - RNA, 19 nt, Artificial Sequence
  Description of Artificial Sequence: Synthetic oligonucleotide
agaaccaguuguacugcuc

SEQ ID NO: 1523710 - RNA, 19 nt, Artificial Sequence
  Description of Artificial Sequence: Synthetic oligonucleotide
uuaccaaaugcaugcucuu

SEQ ID NO: 1523711 - RNA, 19 nt, Artificial Sequence
  Description of Artificial Sequence: Synthetic oligonucleotide
accccauacaucaucacau

SEQ ID NO: 1523712 - RNA, 19 nt, Artificial Sequence
  Description of Artificial Sequence: Synthetic oligonucleotide
auacccggaagcucuuacu

SEQ ID NO: 1523713 - RNA, 19 nt, Artificial Sequence
  Description of Artificial Sequence: Synthetic oligonucleotide
ucaucccaccuuguucagg

SEQ ID NO: 1523714 - RNA, 19 nt, Artificial Sequence
  Description of Artificial Sequence: Synthetic oligonucleotide
gacagccauauuggaacag

SEQ ID NO: 1523715 - RNA, 19 nt, Artificial Sequence
  Description of Artificial Sequence: Synthetic oligonucleotide
cauuaucgauuagaaagca

SEQ ID NO: 1523716 - RNA, 19 nt, Artificial Sequence
  Description of Artificial Sequence: Synthetic oligonucleotide
ucuuccgcauuuuccgcaa

SEQ ID NO: 1523717 - RNA, 19 nt, Artificial Sequence
  Description of Artificial Sequence: Synthetic oligonucleotide
auagaaaggcugcgaugga

SEQ ID NO: 1523718 - RNA, 19 nt, Artificial Sequence
  Description of Artificial Sequence: Synthetic oligonucleotide
gguaagaaaaccaacgcau

SEQ ID NO: 1523719 - RNA, 19 nt, Artificial Sequence
  Description of Artificial Sequence: Synthetic oligonucleotide
aagaugcuuccaagcauca

SEQ ID NO: 1523720 - RNA, 19 nt, Artificial Sequence
  Description of Artificial Sequence: Synthetic oligonucleotide
caggacacuuuuccggaac

SEQ ID NO: 1523721 - RNA, 19 nt, Artificial Sequence
  Description of Artificial Sequence: Synthetic oligonucleotide
uuccgcauuuuccgcaaau

SEQ ID NO: 1523722 - RNA, 19 nt, Artificial Sequence
  Description of Artificial Sequence: Synthetic oligonucleotide
gugaccagauaaggaaaag

SEQ ID NO: 1523723 - RNA, 19 nt, Artificial Sequence
  Description of Artificial Sequence: Synthetic oligonucleotide
auuaucgauuagaaagcau

SEQ ID NO: 1523724 - RNA, 19 nt, Artificial Sequence
  Description of Artificial Sequence: Synthetic oligonucleotide
cuauacaguauacccggaa

SEQ ID NO: 1523725 - RNA, 19 nt, Artificial Sequence
  Description of Artificial Sequence: Synthetic oligonucleotide
cuagauagaaaggcugcga

SEQ ID NO: 1523726 - RNA, 19 nt, Artificial Sequence
  Description of Artificial Sequence: Synthetic oligonucleotide
acgguguccucucuuuggu

SEQ ID NO: 1523727 - RNA, 19 nt, Artificial Sequence
  Description of Artificial Sequence: Synthetic oligonucleotide
cuacuaccugguucgggug

SEQ ID NO: 1523728 - RNA, 19 nt, Artificial Sequence
  Description of Artificial Sequence: Synthetic oligonucleotide
aucagcgucuuccgcauuu

SEQ ID NO: 1523729 - RNA, 19 nt, Artificial Sequence
  Description of Artificial Sequence: Synthetic oligonucleotide
cuagcugcuuaucuucaga

SEQ ID NO: 1523730 - RNA, 19 nt, Artificial Sequence
  Description of Artificial Sequence: Synthetic oligonucleotide
uacuggggcgugcaaggaa

SEQ ID NO: 1523731 - RNA, 19 nt, Artificial Sequence
  Description of Artificial Sequence: Synthetic oligonucleotide
guagugaucaaggcauaga

SEQ ID NO: 1523732 - RNA, 19 nt, Artificial Sequence
  Description of Artificial Sequence: Synthetic oligonucleotide
aaccaguuguacugcucuu

SEQ ID NO: 1523733 - RNA, 19 nt, Artificial Sequence
  Description of Artificial Sequence: Synthetic oligonucleotide
aucaucccaccuuguucag

SEQ ID NO: 1523734 - RNA, 19 nt, Artificial Sequence
  Description of Artificial Sequence: Synthetic oligonucleotide
uaagccgguacaccccaua

SEQ ID NO: 1523735 - RNA, 19 nt, Artificial Sequence
  Description of Artificial Sequence: Synthetic oligonucleotide
acccggaagcucuuacuga

SEQ ID NO: 1523736 - RNA, 19 nt, Artificial Sequence
  Description of Artificial Sequence: Synthetic oligonucleotide
aaccaacgcaucguugaaa

SEQ ID NO: 1523737 - RNA, 19 nt, Artificial Sequence
  Description of Artificial Sequence: Synthetic oligonucleotide
cuaacacauuaaaauuucu

SEQ ID NO: 1523738 - RNA, 19 nt, Artificial Sequence
  Description of Artificial Sequence: Synthetic oligonucleotide
caguauacccggaagcucu

SEQ ID NO: 1523739 - RNA, 19 nt, Artificial Sequence
  Description of Artificial Sequence: Synthetic oligonucleotide
auggccucuuuaaugaaaa

SEQ ID NO: 1523740 - RNA, 19 nt, Artificial Sequence
  Description of Artificial Sequence: Synthetic oligonucleotide
cacuuuuccggaacacuga

SEQ ID NO: 1523741 - RNA, 19 nt, Artificial Sequence
  Description of Artificial Sequence: Synthetic oligonucleotide
uuacgcucccgaccaggcu

SEQ ID NO: 1523742 - RNA, 19 nt, Artificial Sequence
  Description of Artificial Sequence: Synthetic oligonucleotide
gguuaccaaaugcaugcuc

SEQ ID NO: 1523743 - RNA, 19 nt, Artificial Sequence
  Description of Artificial Sequence: Synthetic oligonucleotide
ucaggacacuuuuccggaa

SEQ ID NO: 1523744 - RNA, 19 nt, Artificial Sequence
  Description of Artificial Sequence: Synthetic oligonucleotide
caugcgcucagccgcugag

SEQ ID NO: 1523745 - RNA, 19 nt, Artificial Sequence
  Description of Artificial Sequence: Synthetic oligonucleotide
caccccauacaucaucaca

SEQ ID NO: 1523746 - RNA, 19 nt, Artificial Sequence
  Description of Artificial Sequence: Synthetic oligonucleotide
gucuuccgcauuuuccgca

SEQ ID NO: 1523747 - RNA, 19 nt, Artificial Sequence
  Description of Artificial Sequence: Synthetic oligonucleotide
guuacgcucccgaccaggc

SEQ ID NO: 1523748 - RNA, 19 nt, Artificial Sequence
  Description of Artificial Sequence: Synthetic oligonucleotide
aggcccuaagccgguacac

SEQ ID NO: 1523749 - RNA, 19 nt, Artificial Sequence
  Description of Artificial Sequence: Synthetic oligonucleotide
uucugugcccaauccuaau

SEQ ID NO: 1523750 - RNA, 19 nt, Artificial Sequence
  Description of Artificial Sequence: Synthetic oligonucleotide
gcaucugauuaggaguuag

SEQ ID NO: 1523751 - RNA, 19 nt, Artificial Sequence
  Description of Artificial Sequence: Synthetic oligonucleotide
cuuuuccggaacacugaga

SEQ ID NO: 1523752 - RNA, 19 nt, Artificial Sequence
  Description of Artificial Sequence: Synthetic oligonucleotide
agccgguacaccccauaca

SEQ ID NO: 1523753 - RNA, 19 nt, Artificial Sequence
  Description of Artificial Sequence: Synthetic oligonucleotide
acggggacgguguccucuc

SEQ ID NO: 1523754 - RNA, 19 nt, Artificial Sequence
  Description of Artificial Sequence: Synthetic oligonucleotide
cacucaguuacgcucccga

SEQ ID NO: 1523755 - RNA, 19 nt, Artificial Sequence
  Description of Artificial Sequence: Synthetic oligonucleotide
gcuuccaagcaucacaccu

SEQ ID NO: 1523756 - RNA, 19 nt, Artificial Sequence
  Description of Artificial Sequence: Synthetic oligonucleotide
uccgcauuuuccgcaaaua

SEQ ID NO: 1523757 - RNA, 19 nt, Artificial Sequence
  Description of Artificial Sequence: Synthetic oligonucleotide
gaaccguuuggagguaaga

SEQ ID NO: 1523758 - RNA, 19 nt, Artificial Sequence
  Description of Artificial Sequence: Synthetic oligonucleotide
agaaccguuuggagguaag

SEQ ID NO: 1523759 - RNA, 19 nt, Artificial Sequence
  Description of Artificial Sequence: Synthetic oligonucleotide
uuuccgcaucuagaauggc

SEQ ID NO: 1523760 - RNA, 19 nt, Artificial Sequence
  Description of Artificial Sequence: Synthetic oligonucleotide
gcccuaagccgguacaccc

SEQ ID NO: 1523761 - RNA, 19 nt, Artificial Sequence
  Description of Artificial Sequence: Synthetic oligonucleotide
caucaaccacaugucauca

SEQ ID NO: 1523762 - RNA, 19 nt, Artificial Sequence
  Description of Artificial Sequence: Synthetic oligonucleotide
caauccuaauguggccuag

SEQ ID NO: 1523763 - RNA, 19 nt, Artificial Sequence
  Description of Artificial Sequence: Synthetic oligonucleotide
ugguuaccaaaugcaugcu

SEQ ID NO: 1523764 - RNA, 19 nt, Artificial Sequence
  Description of Artificial Sequence: Synthetic oligonucleotide
cauugacucuaugcuuaag

SEQ ID NO: 1523765 - RNA, 19 nt, Artificial Sequence
  Description of Artificial Sequence: Synthetic oligonucleotide
ccgcauuuuccgcaaauac

SEQ ID NO: 1523766 - RNA, 19 nt, Artificial Sequence
  Description of Artificial Sequence: Synthetic oligonucleotide
auacuccagcauauuucag

SEQ ID NO: 1523767 - RNA, 19 nt, Artificial Sequence
  Description of Artificial Sequence: Synthetic oligonucleotide
cacaugucaucagugucca

SEQ ID NO: 1523768 - RNA, 19 nt, Artificial Sequence
  Description of Artificial Sequence: Synthetic oligonucleotide
caguguccacguuaauuga

SEQ ID NO: 1523769 - RNA, 19 nt, Artificial Sequence
  Description of Artificial Sequence: Synthetic oligonucleotide
cuucuacuaccugguucgg

SEQ ID NO: 1523770 - RNA, 19 nt, Artificial Sequence
  Description of Artificial Sequence: Synthetic oligonucleotide
cauccuucuacuaccuggu

SEQ ID NO: 1523771 - RNA, 19 nt, Artificial Sequence
  Description of Artificial Sequence: Synthetic oligonucleotide
acucacaucuuuggguuuu

SEQ ID NO: 1523772 - RNA, 19 nt, Artificial Sequence
  Description of Artificial Sequence: Synthetic oligonucleotide
gcaucuagaauggcucaag

SEQ ID NO: 1523773 - RNA, 19 nt, Artificial Sequence
  Description of Artificial Sequence: Synthetic oligonucleotide
augaaaagcccaacagauu

SEQ ID NO: 1523774 - RNA, 19 nt, Artificial Sequence
  Description of Artificial Sequence: Synthetic oligonucleotide
agacugcuagcugcuuauc

SEQ ID NO: 1523775 - RNA, 19 nt, Artificial Sequence
  Description of Artificial Sequence: Synthetic oligonucleotide
ucgggugguuagacauggc

SEQ ID NO: 1523776 - RNA, 19 nt, Artificial Sequence
  Description of Artificial Sequence: Synthetic oligonucleotide
acuauacaguauacccgga

SEQ ID NO: 1523777 - RNA, 19 nt, Artificial Sequence
  Description of Artificial Sequence: Synthetic oligonucleotide
gguucgggugguuagacau

SEQ ID NO: 1523778 - RNA, 19 nt, Artificial Sequence
  Description of Artificial Sequence: Synthetic oligonucleotide
ugucuauaauuuggucuuu

SEQ ID NO: 1523779 - RNA, 19 nt, Artificial Sequence
  Description of Artificial Sequence: Synthetic oligonucleotide
uccaccggccacucaguua

SEQ ID NO: 1523780 - RNA, 19 nt, Artificial Sequence
  Description of Artificial Sequence: Synthetic oligonucleotide
ccuuucucguccaccggcc

SEQ ID NO: 1523781 - RNA, 19 nt, Artificial Sequence
  Description of Artificial Sequence: Synthetic oligonucleotide
agccauauuggaacagcau

SEQ ID NO: 1523782 - RNA, 19 nt, Artificial Sequence
  Description of Artificial Sequence: Synthetic oligonucleotide
acgcucccgaccaggcugc

SEQ ID NO: 1523783 - RNA, 19 nt, Artificial Sequence
  Description of Artificial Sequence: Synthetic oligonucleotide
guucgggugguuagacaug

SEQ ID NO: 1523784 - RNA, 19 nt, Artificial Sequence
  Description of Artificial Sequence: Synthetic oligonucleotide
uuacagcggcuuuccuuuc

SEQ ID NO: 1523785 - RNA, 19 nt, Artificial Sequence
  Description of Artificial Sequence: Synthetic oligonucleotide
cgguacaccccauacauca

SEQ ID NO: 1523786 - RNA, 19 nt, Artificial Sequence
  Description of Artificial Sequence: Synthetic oligonucleotide
ccauuaaaagugacagcca

SEQ ID NO: 1523787 - RNA, 19 nt, Artificial Sequence
  Description of Artificial Sequence: Synthetic oligonucleotide
cugugcccaauccuaaugu

SEQ ID NO: 1523788 - RNA, 19 nt, Artificial Sequence
  Description of Artificial Sequence: Synthetic oligonucleotide
gcaucguugaaaacauguc

SEQ ID NO: 1523789 - RNA, 19 nt, Artificial Sequence
  Description of Artificial Sequence: Synthetic oligonucleotide
ggguuuuacaagaacuaua

SEQ ID NO: 1523790 - RNA, 19 nt, Artificial Sequence
  Description of Artificial Sequence: Synthetic oligonucleotide
cacuacuguguuagaugca

SEQ ID NO: 1523791 - RNA, 19 nt, Artificial Sequence
  Description of Artificial Sequence: Synthetic oligonucleotide
guguuugguccaagucucc

SEQ ID NO: 1523792 - RNA, 19 nt, Artificial Sequence
  Description of Artificial Sequence: Synthetic oligonucleotide
auguggccuagcguaguga

SEQ ID NO: 1523793 - RNA, 19 nt, Artificial Sequence
  Description of Artificial Sequence: Synthetic oligonucleotide
ggccacucaguuacgcucc

SEQ ID NO: 1523794 - RNA, 19 nt, Artificial Sequence
  Description of Artificial Sequence: Synthetic oligonucleotide
gcgugcaaggaagaaccag

SEQ ID NO: 1523795 - RNA, 19 nt, Artificial Sequence
  Description of Artificial Sequence: Synthetic oligonucleotide
caucugauuaggaguuagu

SEQ ID NO: 1523796 - RNA, 19 nt, Artificial Sequence
  Description of Artificial Sequence: Synthetic oligonucleotide
ugcaucugauuaggaguua

SEQ ID NO: 1523797 - RNA, 19 nt, Artificial Sequence
  Description of Artificial Sequence: Synthetic oligonucleotide
cuuucucguccaccggcca

SEQ ID NO: 1523798 - RNA, 19 nt, Artificial Sequence
  Description of Artificial Sequence: Synthetic oligonucleotide
gcccaauccuaauguggcc

SEQ ID NO: 1523799 - RNA, 19 nt, Artificial Sequence
  Description of Artificial Sequence: Synthetic oligonucleotide
ggacgguguccucucuuug

SEQ ID NO: 1523800 - RNA, 19 nt, Artificial Sequence
  Description of Artificial Sequence: Synthetic oligonucleotide
cuuccaagcaucacaccuu

SEQ ID NO: 1523801 - RNA, 19 nt, Artificial Sequence
  Description of Artificial Sequence: Synthetic oligonucleotide
guguccacguuaauugacu

SEQ ID NO: 1523802 - RNA, 19 nt, Artificial Sequence
  Description of Artificial Sequence: Synthetic oligonucleotide
ucucgacggggacgguguc

SEQ ID NO: 1523803 - RNA, 19 nt, Artificial Sequence
  Description of Artificial Sequence: Synthetic oligonucleotide
caaaucaucccaccuuguu

SEQ ID NO: 1523804 - RNA, 19 nt, Artificial Sequence
  Description of Artificial Sequence: Synthetic oligonucleotide
ugguuagacauggccucuu

SEQ ID NO: 1523805 - RNA, 19 nt, Artificial Sequence
  Description of Artificial Sequence: Synthetic oligonucleotide
auccuucuacuaccugguu

SEQ ID NO: 1523806 - RNA, 19 nt, Artificial Sequence
  Description of Artificial Sequence: Synthetic oligonucleotide
uggggcgugcaaggaagaa

SEQ ID NO: 1523807 - RNA, 19 nt, Artificial Sequence
  Description of Artificial Sequence: Synthetic oligonucleotide
auguacaaguagacuucaa

SEQ ID NO: 1523808 - RNA, 19 nt, Artificial Sequence
  Description of Artificial Sequence: Synthetic oligonucleotide
ggacacuuuuccggaacac

SEQ ID NO: 1523809 - RNA, 19 nt, Artificial Sequence
  Description of Artificial Sequence: Synthetic oligonucleotide
cuaucagcgucuuccgcau

SEQ ID NO: 1523810 - RNA, 19 nt, Artificial Sequence
  Description of Artificial Sequence: Synthetic oligonucleotide
gcggcuuuccuuucucguc

SEQ ID NO: 1523811 - RNA, 19 nt, Artificial Sequence
  Description of Artificial Sequence: Synthetic oligonucleotide
ucagaaccguuuggaggua

SEQ ID NO: 1523812 - RNA, 19 nt, Artificial Sequence
  Description of Artificial Sequence: Synthetic oligonucleotide
gccgguacaccccauacau

SEQ ID NO: 1523813 - RNA, 19 nt, Artificial Sequence
  Description of Artificial Sequence: Synthetic oligonucleotide
cucucgacggggacggugu

SEQ ID NO: 1523814 - RNA, 19 nt, Artificial Sequence
  Description of Artificial Sequence: Synthetic oligonucleotide
ggggcgugcaaggaagaac

SEQ ID NO: 1523815 - RNA, 19 nt, Artificial Sequence
  Description of Artificial Sequence: Synthetic oligonucleotide
ggcauagaagaugcuucca

SEQ ID NO: 1523816 - RNA, 19 nt, Artificial Sequence
  Description of Artificial Sequence: Synthetic oligonucleotide
ccggaagcucuuacugagc

SEQ ID NO: 1523817 - RNA, 19 nt, Artificial Sequence
  Description of Artificial Sequence: Synthetic oligonucleotide
ccaacgcaucguugaaaac

SEQ ID NO: 1523818 - RNA, 19 nt, Artificial Sequence
  Description of Artificial Sequence: Synthetic oligonucleotide
caguuacgcucccgaccag

SEQ ID NO: 1523819 - RNA, 19 nt, Artificial Sequence
  Description of Artificial Sequence: Synthetic oligonucleotide
cguagugaucaaggcauag

SEQ ID NO: 1523820 - RNA, 19 nt, Artificial Sequence
  Description of Artificial Sequence: Synthetic oligonucleotide
gggugguuagacauggccu

SEQ ID NO: 1523821 - RNA, 19 nt, Artificial Sequence
  Description of Artificial Sequence: Synthetic oligonucleotide
cucagccgcugagauuuuc

SEQ ID NO: 1523822 - RNA, 19 nt, Artificial Sequence
  Description of Artificial Sequence: Synthetic oligonucleotide
gucacaguguuugguccaa

SEQ ID NO: 1523823 - RNA, 19 nt, Artificial Sequence
  Description of Artificial Sequence: Synthetic oligonucleotide
aguauacccggaagcucuu

SEQ ID NO: 1523824 - RNA, 19 nt, Artificial Sequence
  Description of Artificial Sequence: Synthetic oligonucleotide
cuggggcgugcaaggaaga

SEQ ID NO: 1523825 - RNA, 19 nt, Artificial Sequence
  Description of Artificial Sequence: Synthetic oligonucleotide
caccggccacucaguuacg

SEQ ID NO: 1523826 - RNA, 19 nt, Artificial Sequence
  Description of Artificial Sequence: Synthetic oligonucleotide
caaaugcaugcucuugcuu

SEQ ID NO: 1523827 - RNA, 19 nt, Artificial Sequence
  Description of Artificial Sequence: Synthetic oligonucleotide
gacggggacgguguccucu

SEQ ID NO: 1523828 - RNA, 19 nt, Artificial Sequence
  Description of Artificial Sequence: Synthetic oligonucleotide
gccuagcguagugaucaag

SEQ ID NO: 1523829 - RNA, 19 nt, Artificial Sequence
  Description of Artificial Sequence: Synthetic oligonucleotide
ccgcaaauacuccagcaua

SEQ ID NO: 1523830 - RNA, 19 nt, Artificial Sequence
  Description of Artificial Sequence: Synthetic oligonucleotide
guacuggggcgugcaagga

SEQ ID NO: 1523831 - RNA, 19 nt, Artificial Sequence
  Description of Artificial Sequence: Synthetic oligonucleotide
ccuaagccgguacacccca

SEQ ID NO: 1523832 - RNA, 19 nt, Artificial Sequence
  Description of Artificial Sequence: Synthetic oligonucleotide
guacugcucuuuguauuua

SEQ ID NO: 1523833 - RNA, 19 nt, Artificial Sequence
  Description of Artificial Sequence: Synthetic oligonucleotide
guggccuagcguagugauc

SEQ ID NO: 1523834 - RNA, 19 nt, Artificial Sequence
  Description of Artificial Sequence: Synthetic oligonucleotide
cgcauuuuccgcaaauacu

SEQ ID NO: 1523835 - RNA, 19 nt, Artificial Sequence
  Description of Artificial Sequence: Synthetic oligonucleotide
gccacucaguuacgcuccc

SEQ ID NO: 1523836 - RNA, 19 nt, Artificial Sequence
  Description of Artificial Sequence: Synthetic oligonucleotide
gcucucgacggggacggug

SEQ ID NO: 1523837 - RNA, 19 nt, Artificial Sequence
  Description of Artificial Sequence: Synthetic oligonucleotide
gugguuagacauggccucu

SEQ ID NO: 1523838 - RNA, 19 nt, Artificial Sequence
  Description of Artificial Sequence: Synthetic oligonucleotide
cuuccgcauuuuccgcaaa

SEQ ID NO: 1523839 - RNA, 19 nt, Artificial Sequence
  Description of Artificial Sequence: Synthetic oligonucleotide
guauacccggaagcucuua

SEQ ID NO: 1523840 - RNA, 19 nt, Artificial Sequence
  Description of Artificial Sequence: Synthetic oligonucleotide
ccgguacaccccauacauc

SEQ ID NO: 1523841 - RNA, 19 nt, Artificial Sequence
  Description of Artificial Sequence: Synthetic oligonucleotide
ccgcaucuagaauggcuca

SEQ ID NO: 1523842 - RNA, 19 nt, Artificial Sequence
  Description of Artificial Sequence: Synthetic oligonucleotide
ccaauccuaauguggccua

SEQ ID NO: 1523843 - RNA, 19 nt, Artificial Sequence
  Description of Artificial Sequence: Synthetic oligonucleotide
caaucccuccauccacacu

SEQ ID NO: 1523844 - RNA, 19 nt, Artificial Sequence
  Description of Artificial Sequence: Synthetic oligonucleotide
ccacucaguuacgcucccg

SEQ ID NO: 1523845 - RNA, 19 nt, Artificial Sequence
  Description of Artificial Sequence: Synthetic oligonucleotide
cccaauccuaauguggccu

SEQ ID NO: 1523846 - RNA, 19 nt, Artificial Sequence
  Description of Artificial Sequence: Synthetic oligonucleotide
ggcgugcaaggaagaacca

SEQ ID NO: 1523847 - RNA, 19 nt, Artificial Sequence
  Description of Artificial Sequence: Synthetic oligonucleotide
cgcaaauacuccagcauau

SEQ ID NO: 1523848 - RNA, 19 nt, Artificial Sequence
  Description of Artificial Sequence: Synthetic oligonucleotide
cguugaaaacauguccaaa

SEQ ID NO: 1523849 - RNA, 19 nt, Artificial Sequence
  Description of Artificial Sequence: Synthetic oligonucleotide
gaacacugagaaggcuguu

SEQ ID NO: 1523850 - RNA, 19 nt, Artificial Sequence
  Description of Artificial Sequence: Synthetic oligonucleotide
caccuuguucaggacacuu

SEQ ID NO: 1523851 - RNA, 19 nt, Artificial Sequence
  Description of Artificial Sequence: Synthetic oligonucleotide
ccaaaucaucccaccuugu

SEQ ID NO: 1523852 - RNA, 19 nt, Artificial Sequence
  Description of Artificial Sequence: Synthetic oligonucleotide
ccacguuaauugacucaaa

SEQ ID NO: 1523853 - RNA, 19 nt, Artificial Sequence
  Description of Artificial Sequence: Synthetic oligonucleotide
caaaggcccuaagccggua

SEQ ID NO: 1523854 - RNA, 19 nt, Artificial Sequence
  Description of Artificial Sequence: Synthetic oligonucleotide
ccgcugagauuuucgagau

SEQ ID NO: 1523855 - RNA, 19 nt, Artificial Sequence
  Description of Artificial Sequence: Synthetic oligonucleotide
caucaguguccacguuaau

SEQ ID NO: 1523856 - RNA, 19 nt, Artificial Sequence
  Description of Artificial Sequence: Synthetic oligonucleotide
gguacaccccauacaucau

SEQ ID NO: 1523857 - RNA, 19 nt, Artificial Sequence
  Description of Artificial Sequence: Synthetic oligonucleotide
ggccuagcguagugaucaa

SEQ ID NO: 1523858 - RNA, 19 nt, Artificial Sequence
  Description of Artificial Sequence: Synthetic oligonucleotide
ggcuuacagcggcuuuccu

SEQ ID NO: 1523859 - RNA, 19 nt, Artificial Sequence
  Description of Artificial Sequence: Synthetic oligonucleotide
ccaaaggcccuaagccggu

SEQ ID NO: 1523860 - RNA, 19 nt, Artificial Sequence
  Description of Artificial Sequence: Synthetic oligonucleotide
gcguagugaucaaggcaua

SEQ ID NO: 1523861 - RNA, 19 nt, Artificial Sequence
  Description of Artificial Sequence: Synthetic oligonucleotide
ggggacgguguccucucuu

SEQ ID NO: 1523862 - RNA, 19 nt, Artificial Sequence
  Description of Artificial Sequence: Synthetic oligonucleotide
guccucucuuugguuucau

SEQ ID NO: 1523863 - RNA, 19 nt, Artificial Sequence
  Description of Artificial Sequence: Synthetic oligonucleotide
ccggccacucaguuacgcu

SEQ ID NO: 1523864 - RNA, 19 nt, Artificial Sequence
  Description of Artificial Sequence: Synthetic oligonucleotide
gcccaaagacucacaucuu

SEQ ID NO: 1523865 - RNA, 19 nt, Artificial Sequence
  Description of Artificial Sequence: Synthetic oligonucleotide
gcgcucagccgcugagauu

SEQ ID NO: 1523866 - RNA, 19 nt, Artificial Sequence
  Description of Artificial Sequence: Synthetic oligonucleotide
cgacggggacgguguccuc

SEQ ID NO: 1523867 - RNA, 19 nt, Artificial Sequence
  Description of Artificial Sequence: Synthetic oligonucleotide
gcucagccgcugagauuuu

SEQ ID NO: 1523868 - RNA, 19 nt, Artificial Sequence
  Description of Artificial Sequence: Synthetic oligonucleotide
cggggacgguguccucucu

SEQ ID NO: 1523869 - RNA, 19 nt, Artificial Sequence
  Description of Artificial Sequence: Synthetic oligonucleotide
  modified_base (16)..(16): a, c, u, g, unknown or other
aaguaguauauguaunuug

SEQ ID NO: 1523870 - RNA, 19 nt, Artificial Sequence
  Description of Artificial Sequence: Synthetic oligonucleotide
aguacauaugguuuucugc

SEQ ID NO: 1523871 - RNA, 19 nt, Artificial Sequence
  Description of Artificial Sequence: Synthetic oligonucleotide
aaguaucucgcuuaacugg

SEQ ID NO: 1523872 - RNA, 19 nt, Artificial Sequence
  Description of Artificial Sequence: Synthetic oligonucleotide
aaaaggacaccucccaaac

SEQ ID NO: 1523873 - RNA, 19 nt, Artificial Sequence
  Description of Artificial Sequence: Synthetic oligonucleotide
uuaaguaucucgcuuaacu

SEQ ID NO: 1523874 - RNA, 19 nt, Artificial Sequence
  Description of Artificial Sequence: Synthetic oligonucleotide
aauaaaaggacaccuccca

SEQ ID NO: 1523875 - RNA, 19 nt, Artificial Sequence
  Description of Artificial Sequence: Synthetic oligonucleotide
acuugauagccauugaguc

SEQ ID NO: 1523876 - RNA, 19 nt, Artificial Sequence
  Description of Artificial Sequence: Synthetic oligonucleotide
aaugauggcauccucggca

SEQ ID NO: 1523877 - RNA, 19 nt, Artificial Sequence
  Description of Artificial Sequence: Synthetic oligonucleotide
agauguuuccgaaugagcc

SEQ ID NO: 1523878 - RNA, 19 nt, Artificial Sequence
  Description of Artificial Sequence: Synthetic oligonucleotide
ugccguaccaguuaaaacc

SEQ ID NO: 1523879 - RNA, 19 nt, Artificial Sequence
  Description of Artificial Sequence: Synthetic oligonucleotide
  modified_base (13)..(13): a, c, u, g, unknown or other
uaguauauguaunuuggga

SEQ ID NO: 1523880 - RNA, 19 nt, Artificial Sequence
  Description of Artificial Sequence: Synthetic oligonucleotide
ucaaauaaguacauauggu

SEQ ID NO: 1523881 - RNA, 19 nt, Artificial Sequence
  Description of Artificial Sequence: Synthetic oligonucleotide
  modified_base (10)..(10): a, c, u, g, unknown or other
uauauguaunuugggaugc

SEQ ID NO: 1523882 - RNA, 19 nt, Artificial Sequence
  Description of Artificial Sequence: Synthetic oligonucleotide
ucugcugccguuaaguuca

SEQ ID NO: 1523883 - RNA, 19 nt, Artificial Sequence
  Description of Artificial Sequence: Synthetic oligonucleotide
  modified_base (14)..(14): a, c, u, g, unknown or other
guaguauauguaunuuggg

SEQ ID NO: 1523884 - RNA, 19 nt, Artificial Sequence
  Description of Artificial Sequence: Synthetic oligonucleotide
  modified_base (15)..(15): a, c, u, g, unknown or other
aguaguauauguaunuugg

SEQ ID NO: 1523885 - RNA, 19 nt, Artificial Sequence
  Description of Artificial Sequence: Synthetic oligonucleotide
aggccaacaaaucuugccc

SEQ ID NO: 1523886 - RNA, 19 nt, Artificial Sequence
  Description of Artificial Sequence: Synthetic oligonucleotide
aagauggacacuugcuuuc

SEQ ID NO: 1523887 - RNA, 19 nt, Artificial Sequence
  Description of Artificial Sequence: Synthetic oligonucleotide
uuccgaaugagccuuucgg

SEQ ID NO: 1523888 - RNA, 19 nt, Artificial Sequence
  Description of Artificial Sequence: Synthetic oligonucleotide
aagauaacgguaucugcug

SEQ ID NO: 1523889 - RNA, 19 nt, Artificial Sequence
  Description of Artificial Sequence: Synthetic oligonucleotide
acugucgacaaagauaacg

SEQ ID NO: 1523890 - RNA, 19 nt, Artificial Sequence
  Description of Artificial Sequence: Synthetic oligonucleotide
aaagauaacgguaucugcu

SEQ ID NO: 1523891 - RNA, 19 nt, Artificial Sequence
  Description of Artificial Sequence: Synthetic oligonucleotide
aaggacugguaacuguugg

SEQ ID NO: 1523892 - RNA, 19 nt, Artificial Sequence
  Description of Artificial Sequence: Synthetic oligonucleotide
auuaaagucacugucgaca

SEQ ID NO: 1523893 - RNA, 19 nt, Artificial Sequence
  Description of Artificial Sequence: Synthetic oligonucleotide
cugucgacaaagauaacgg

SEQ ID NO: 1523894 - RNA, 19 nt, Artificial Sequence
  Description of Artificial Sequence: Synthetic oligonucleotide
cuuuagaguaaucuuuacc

SEQ ID NO: 1523895 - RNA, 19 nt, Artificial Sequence
  Description of Artificial Sequence: Synthetic oligonucleotide
aauuuuggaggcugccuuc

SEQ ID NO: 1523896 - RNA, 19 nt, Artificial Sequence
  Description of Artificial Sequence: Synthetic oligonucleotide
gacuuuaacagacuuguuc

SEQ ID NO: 1523897 - RNA, 19 nt, Artificial Sequence
  Description of Artificial Sequence: Synthetic oligonucleotide
aauucggugagcucuggca

SEQ ID NO: 1523898 - RNA, 19 nt, Artificial Sequence
  Description of Artificial Sequence: Synthetic oligonucleotide
uaaguaucucgcuuaacug

SEQ ID NO: 1523899 - RNA, 19 nt, Artificial Sequence
  Description of Artificial Sequence: Synthetic oligonucleotide
aacuguuggauucccacca

SEQ ID NO: 1523900 - RNA, 19 nt, Artificial Sequence
  Description of Artificial Sequence: Synthetic oligonucleotide
uacuugauagccauugagu

SEQ ID NO: 1523901 - RNA, 19 nt, Artificial Sequence
  Description of Artificial Sequence: Synthetic oligonucleotide
ugaucgugcuuccagagcu

SEQ ID NO: 1523902 - RNA, 19 nt, Artificial Sequence
  Description of Artificial Sequence: Synthetic oligonucleotide
uuuguagcguguccaaugc

SEQ ID NO: 1523903 - RNA, 19 nt, Artificial Sequence
  Description of Artificial Sequence: Synthetic oligonucleotide
ugguaagcugcaauuuugg

SEQ ID NO: 1523904 - RNA, 19 nt, Artificial Sequence
  Description of Artificial Sequence: Synthetic oligonucleotide
ucgacaaagauaacgguau

SEQ ID NO: 1523905 - RNA, 19 nt, Artificial Sequence
  Description of Artificial Sequence: Synthetic oligonucleotide
  modified_base (4)..(4): a, c, u, g, unknown or other
uaunuugggaugccucuug

SEQ ID NO: 1523906 - RNA, 19 nt, Artificial Sequence
  Description of Artificial Sequence: Synthetic oligonucleotide
uccaugaccauguugguaa

SEQ ID NO: 1523907 - RNA, 19 nt, Artificial Sequence
  Description of Artificial Sequence: Synthetic oligonucleotide
auuggagcgaucacggugc

SEQ ID NO: 1523908 - RNA, 19 nt, Artificial Sequence
  Description of Artificial Sequence: Synthetic oligonucleotide
aguucaugcccacuccacc

SEQ ID NO: 1523909 - RNA, 19 nt, Artificial Sequence
  Description of Artificial Sequence: Synthetic oligonucleotide
aacccuuuguagcgugucc

SEQ ID NO: 1523910 - RNA, 19 nt, Artificial Sequence
  Description of Artificial Sequence: Synthetic oligonucleotide
aggaaaguaguauauguau

SEQ ID NO: 1523911 - RNA, 19 nt, Artificial Sequence
  Description of Artificial Sequence: Synthetic oligonucleotide
  modified_base (3)..(3): a, c, u, g, unknown or other
aunuugggaugccucuugc

SEQ ID NO: 1523912 - RNA, 19 nt, Artificial Sequence
  Description of Artificial Sequence: Synthetic oligonucleotide
  modified_base (11)..(11): a, c, u, g, unknown or other
guauauguaunuugggaug

SEQ ID NO: 1523913 - RNA, 19 nt, Artificial Sequence
  Description of Artificial Sequence: Synthetic oligonucleotide
uuaaguucaugcccacucc

SEQ ID NO: 1523914 - RNA, 19 nt, Artificial Sequence
  Description of Artificial Sequence: Synthetic oligonucleotide
ucgcuuaacuggaagucgg

SEQ ID NO: 1523915 - RNA, 19 nt, Artificial Sequence
  Description of Artificial Sequence: Synthetic oligonucleotide
  modified_base (6)..(6): a, c, u, g, unknown or other
uguaunuugggaugccucu

SEQ ID NO: 1523916 - RNA, 19 nt, Artificial Sequence
  Description of Artificial Sequence: Synthetic oligonucleotide
gacauuggagcgaucacgg

SEQ ID NO: 1523917 - RNA, 19 nt, Artificial Sequence
  Description of Artificial Sequence: Synthetic oligonucleotide
cucggcaucagccuguggg

SEQ ID NO: 1523918 - RNA, 19 nt, Artificial Sequence
  Description of Artificial Sequence: Synthetic oligonucleotide
caaagauaacgguaucugc

SEQ ID NO: 1523919 - RNA, 19 nt, Artificial Sequence
  Description of Artificial Sequence: Synthetic oligonucleotide
uguagcguguccaaugcgu

SEQ ID NO: 1523920 - RNA, 19 nt, Artificial Sequence
  Description of Artificial Sequence: Synthetic oligonucleotide
uagaguaaucuuuaccuuc

SEQ ID NO: 1523921 - RNA, 19 nt, Artificial Sequence
  Description of Artificial Sequence: Synthetic oligonucleotide
aucuacacaaugaacaaug

SEQ ID NO: 1523922 - RNA, 19 nt, Artificial Sequence
  Description of Artificial Sequence: Synthetic oligonucleotide
uauccaagccgaauuuaag

SEQ ID NO: 1523923 - RNA, 19 nt, Artificial Sequence
  Description of Artificial Sequence: Synthetic oligonucleotide
ugaauauucaccagcuguu

SEQ ID NO: 1523924 - RNA, 19 nt, Artificial Sequence
  Description of Artificial Sequence: Synthetic oligonucleotide
ucuuuaccuucaaauaagu

SEQ ID NO: 1523925 - RNA, 19 nt, Artificial Sequence
  Description of Artificial Sequence: Synthetic oligonucleotide
ucaucuagcucaccagaag

SEQ ID NO: 1523926 - RNA, 19 nt, Artificial Sequence
  Description of Artificial Sequence: Synthetic oligonucleotide
cuugcagacagauguuucc

SEQ ID NO: 1523927 - RNA, 19 nt, Artificial Sequence
  Description of Artificial Sequence: Synthetic oligonucleotide
guacuugauagccauugag

SEQ ID NO: 1523928 - RNA, 19 nt, Artificial Sequence
  Description of Artificial Sequence: Synthetic oligonucleotide
ugccguuaaguucaugccc

SEQ ID NO: 1523929 - RNA, 19 nt, Artificial Sequence
  Description of Artificial Sequence: Synthetic oligonucleotide
acaaagauaacgguaucug

SEQ ID NO: 1523930 - RNA, 19 nt, Artificial Sequence
  Description of Artificial Sequence: Synthetic oligonucleotide
guuaaguucaugcccacuc

SEQ ID NO: 1523931 - RNA, 19 nt, Artificial Sequence
  Description of Artificial Sequence: Synthetic oligonucleotide
ucuagcagagcuuucugaa

SEQ ID NO: 1523932 - RNA, 19 nt, Artificial Sequence
  Description of Artificial Sequence: Synthetic oligonucleotide
ucccaggucuacuucaucc

SEQ ID NO: 1523933 - RNA, 19 nt, Artificial Sequence
  Description of Artificial Sequence: Synthetic oligonucleotide
uuuccgaaugagccuuucg

SEQ ID NO: 1523934 - RNA, 19 nt, Artificial Sequence
  Description of Artificial Sequence: Synthetic oligonucleotide
guaaucuuuaccuucaaau

SEQ ID NO: 1523935 - RNA, 19 nt, Artificial Sequence
  Description of Artificial Sequence: Synthetic oligonucleotide
gacuuguuuucucuagcag

SEQ ID NO: 1523936 - RNA, 19 nt, Artificial Sequence
  Description of Artificial Sequence: Synthetic oligonucleotide
uccuccauuagucucuuuc

SEQ ID NO: 1523937 - RNA, 19 nt, Artificial Sequence
  Description of Artificial Sequence: Synthetic oligonucleotide
gccgaauuuaaguaucucg

SEQ ID NO: 1523938 - RNA, 19 nt, Artificial Sequence
  Description of Artificial Sequence: Synthetic oligonucleotide
uaucucgcuuaacuggaag

SEQ ID NO: 1523939 - RNA, 19 nt, Artificial Sequence
  Description of Artificial Sequence: Synthetic oligonucleotide
acaaucaaggccaacaaau

SEQ ID NO: 1523940 - RNA, 19 nt, Artificial Sequence
  Description of Artificial Sequence: Synthetic oligonucleotide
cuuuguagcguguccaaug

SEQ ID NO: 1523941 - RNA, 19 nt, Artificial Sequence
  Description of Artificial Sequence: Synthetic oligonucleotide
  modified_base (9)..(9): a, c, u, g, unknown or other
auauguaunuugggaugcc

SEQ ID NO: 1523942 - RNA, 19 nt, Artificial Sequence
  Description of Artificial Sequence: Synthetic oligonucleotide
  modified_base (7)..(7): a, c, u, g, unknown or other
auguaunuugggaugccuc

SEQ ID NO: 1523943 - RNA, 19 nt, Artificial Sequence
  Description of Artificial Sequence: Synthetic oligonucleotide
uaaguucaugcccacucca

SEQ ID NO: 1523944 - RNA, 19 nt, Artificial Sequence
  Description of Artificial Sequence: Synthetic oligonucleotide
aguuuauccaagccgaauu

SEQ ID NO: 1523945 - RNA, 19 nt, Artificial Sequence
  Description of Artificial Sequence: Synthetic oligonucleotide
ugacuuguuuucucuagca

SEQ ID NO: 1523946 - RNA, 19 nt, Artificial Sequence
  Description of Artificial Sequence: Synthetic oligonucleotide
ugucucgugacucuuuauc

SEQ ID NO: 1523947 - RNA, 19 nt, Artificial Sequence
  Description of Artificial Sequence: Synthetic oligonucleotide
ucgugacucuuuaucauca

SEQ ID NO: 1523948 - RNA, 19 nt, Artificial Sequence
  Description of Artificial Sequence: Synthetic oligonucleotide
caugacuuguuuucucuag

SEQ ID NO: 1523949 - RNA, 19 nt, Artificial Sequence
  Description of Artificial Sequence: Synthetic oligonucleotide
auccaagccgaauuuaagu

SEQ ID NO: 1523950 - RNA, 19 nt, Artificial Sequence
  Description of Artificial Sequence: Synthetic oligonucleotide
uggaagucggccucagcgg

SEQ ID NO: 1523951 - RNA, 19 nt, Artificial Sequence
  Description of Artificial Sequence: Synthetic oligonucleotide
caucuuaaugccagacagg

SEQ ID NO: 1523952 - RNA, 19 nt, Artificial Sequence
  Description of Artificial Sequence: Synthetic oligonucleotide
ucugaauauucaccagcug

SEQ ID NO: 1523953 - RNA, 19 nt, Artificial Sequence
  Description of Artificial Sequence: Synthetic oligonucleotide
ucugccaaucagccgaaug

SEQ ID NO: 1523954 - RNA, 19 nt, Artificial Sequence
  Description of Artificial Sequence: Synthetic oligonucleotide
agaagucucgucuucucca

SEQ ID NO: 1523955 - RNA, 19 nt, Artificial Sequence
  Description of Artificial Sequence: Synthetic oligonucleotide
uuuauuucggagggaccgg

SEQ ID NO: 1523956 - RNA, 19 nt, Artificial Sequence
  Description of Artificial Sequence: Synthetic oligonucleotide
uucugaggauuaaagucac

SEQ ID NO: 1523957 - RNA, 19 nt, Artificial Sequence
  Description of Artificial Sequence: Synthetic oligonucleotide
uugauagccauugagucua

SEQ ID NO: 1523958 - RNA, 19 nt, Artificial Sequence
  Description of Artificial Sequence: Synthetic oligonucleotide
ccgaauuuaaguaucucgc

SEQ ID NO: 1523959 - RNA, 19 nt, Artificial Sequence
  Description of Artificial Sequence: Synthetic oligonucleotide
uccaagccgaauuuaagua

SEQ ID NO: 1523960 - RNA, 19 nt, Artificial Sequence
  Description of Artificial Sequence: Synthetic oligonucleotide
gacgucaccgcuaacguac

SEQ ID NO: 1523961 - RNA, 19 nt, Artificial Sequence
  Description of Artificial Sequence: Synthetic oligonucleotide
cauuggagcgaucacggug

SEQ ID NO: 1523962 - RNA, 19 nt, Artificial Sequence
  Description of Artificial Sequence: Synthetic oligonucleotide
aggcaaagcaucagggacc

SEQ ID NO: 1523963 - RNA, 19 nt, Artificial Sequence
  Description of Artificial Sequence: Synthetic oligonucleotide
agcggccagaaucaucuac

SEQ ID NO: 1523964 - RNA, 19 nt, Artificial Sequence
  Description of Artificial Sequence: Synthetic oligonucleotide
uaacguacuugauagccau

SEQ ID NO: 1523965 - RNA, 19 nt, Artificial Sequence
  Description of Artificial Sequence: Synthetic oligonucleotide
uugcagacagauguuuccg

SEQ ID NO: 1523966 - RNA, 19 nt, Artificial Sequence
  Description of Artificial Sequence: Synthetic oligonucleotide
ucguucugaggauuaaagu

SEQ ID NO: 1523967 - RNA, 19 nt, Artificial Sequence
  Description of Artificial Sequence: Synthetic oligonucleotide
uuaaugccagacaggacau

SEQ ID NO: 1523968 - RNA, 19 nt, Artificial Sequence
  Description of Artificial Sequence: Synthetic oligonucleotide
aaguucaugcccacuccac

SEQ ID NO: 1523969 - RNA, 19 nt, Artificial Sequence
  Description of Artificial Sequence: Synthetic oligonucleotide
caagccgaauuuaaguauc

SEQ ID NO: 1523970 - RNA, 19 nt, Artificial Sequence
  Description of Artificial Sequence: Synthetic oligonucleotide
uuguagcguguccaaugcg

SEQ ID NO: 1523971 - RNA, 19 nt, Artificial Sequence
  Description of Artificial Sequence: Synthetic oligonucleotide
ccaucuuaaugccagacag

SEQ ID NO: 1523972 - RNA, 19 nt, Artificial Sequence
  Description of Artificial Sequence: Synthetic oligonucleotide
uaucucugccaaucagccg

SEQ ID NO: 1523973 - RNA, 19 nt, Artificial Sequence
  Description of Artificial Sequence: Synthetic oligonucleotide
  modified_base (17)..(17): a, c, u, g, unknown or other
aaaguaguauauguaunuu

SEQ ID NO: 1523974 - RNA, 19 nt, Artificial Sequence
  Description of Artificial Sequence: Synthetic oligonucleotide
auaacgguaucugcugccg

SEQ ID NO: 1523975 - RNA, 19 nt, Artificial Sequence
  Description of Artificial Sequence: Synthetic oligonucleotide
uccgaaugagccuuucggu

SEQ ID NO: 1523976 - RNA, 19 nt, Artificial Sequence
  Description of Artificial Sequence: Synthetic oligonucleotide
gcugccguuaaguucaugc

SEQ ID NO: 1523977 - RNA, 19 nt, Artificial Sequence
  Description of Artificial Sequence: Synthetic oligonucleotide
auuuaaguaucucgcuuaa

SEQ ID NO: 1523978 - RNA, 19 nt, Artificial Sequence
  Description of Artificial Sequence: Synthetic oligonucleotide
gaaugagccuuucggugcc

SEQ ID NO: 1523979 - RNA, 19 nt, Artificial Sequence
  Description of Artificial Sequence: Synthetic oligonucleotide
gucguucugaggauuaaag

SEQ ID NO: 1523980 - RNA, 19 nt, Artificial Sequence
  Description of Artificial Sequence: Synthetic oligonucleotide
ucaccgcuaacguacuuga

SEQ ID NO: 1523981 - RNA, 19 nt, Artificial Sequence
  Description of Artificial Sequence: Synthetic oligonucleotide
ggugacgucaccgcuaacg

SEQ ID NO: 1523982 - RNA, 19 nt, Artificial Sequence
  Description of Artificial Sequence: Synthetic oligonucleotide
cuaggaaaguaguauaugu

SEQ ID NO: 1523983 - RNA, 19 nt, Artificial Sequence
  Description of Artificial Sequence: Synthetic oligonucleotide
guuggauucccaccaggcc

SEQ ID NO: 1523984 - RNA, 19 nt, Artificial Sequence
  Description of Artificial Sequence: Synthetic oligonucleotide
gcuaacguacuugauagcc

SEQ ID NO: 1523985 - RNA, 19 nt, Artificial Sequence
  Description of Artificial Sequence: Synthetic oligonucleotide
aucucgcuuaacuggaagu

SEQ ID NO: 1523986 - RNA, 19 nt, Artificial Sequence
  Description of Artificial Sequence: Synthetic oligonucleotide
guggaagauggacacuugc

SEQ ID NO: 1523987 - RNA, 19 nt, Artificial Sequence
  Description of Artificial Sequence: Synthetic oligonucleotide
acguacuugauagccauug

SEQ ID NO: 1523988 - RNA, 19 nt, Artificial Sequence
  Description of Artificial Sequence: Synthetic oligonucleotide
  modified_base (2)..(2): a, c, u, g, unknown or other
unuugggaugccucuugca

SEQ ID NO: 1523989 - RNA, 19 nt, Artificial Sequence
  Description of Artificial Sequence: Synthetic oligonucleotide
auaaaaggacaccucccaa

SEQ ID NO: 1523990 - RNA, 19 nt, Artificial Sequence
  Description of Artificial Sequence: Synthetic oligonucleotide
aagucucgucuucuccauc

SEQ ID NO: 1523991 - RNA, 19 nt, Artificial Sequence
  Description of Artificial Sequence: Synthetic oligonucleotide
  modified_base (8)..(8): a, c, u, g, unknown or other
uauguaunuugggaugccu

SEQ ID NO: 1523992 - RNA, 19 nt, Artificial Sequence
  Description of Artificial Sequence: Synthetic oligonucleotide
cugccguuaaguucaugcc

SEQ ID NO: 1523993 - RNA, 19 nt, Artificial Sequence
  Description of Artificial Sequence: Synthetic oligonucleotide
cucgcuuaacuggaagucg

SEQ ID NO: 1523994 - RNA, 19 nt, Artificial Sequence
  Description of Artificial Sequence: Synthetic oligonucleotide
cugagaauaagccaccucu

SEQ ID NO: 1523995 - RNA, 19 nt, Artificial Sequence
  Description of Artificial Sequence: Synthetic oligonucleotide
cuugguucugcugaucgug

SEQ ID NO: 1523996 - RNA, 19 nt, Artificial Sequence
  Description of Artificial Sequence: Synthetic oligonucleotide
ucagccgaaugacuuuaac

SEQ ID NO: 1523997 - RNA, 19 nt, Artificial Sequence
  Description of Artificial Sequence: Synthetic oligonucleotide
uuucggagggaccggcccc

SEQ ID NO: 1523998 - RNA, 19 nt, Artificial Sequence
  Description of Artificial Sequence: Synthetic oligonucleotide
gucucgugacucuuuauca

SEQ ID NO: 1523999 - RNA, 19 nt, Artificial Sequence
  Description of Artificial Sequence: Synthetic oligonucleotide
acaguaucucugccaauca

SEQ ID NO: 1524000 - RNA, 19 nt, Artificial Sequence
  Description of Artificial Sequence: Synthetic oligonucleotide
uuauuucggagggaccggc

SEQ ID NO: 1524001 - RNA, 19 nt, Artificial Sequence
  Description of Artificial Sequence: Synthetic oligonucleotide
gaauuuaaguaucucgcuu

SEQ ID NO: 1524002 - RNA, 19 nt, Artificial Sequence
  Description of Artificial Sequence: Synthetic oligonucleotide
aguaucucgcuuaacugga

SEQ ID NO: 1524003 - RNA, 19 nt, Artificial Sequence
  Description of Artificial Sequence: Synthetic oligonucleotide
ggcuccuagggugaaaugg

SEQ ID NO: 1524004 - RNA, 19 nt, Artificial Sequence
  Description of Artificial Sequence: Synthetic oligonucleotide
ucucgcuuaacuggaaguc

SEQ ID NO: 1524005 - RNA, 19 nt, Artificial Sequence
  Description of Artificial Sequence: Synthetic oligonucleotide
accgcuaacguacuugaua

SEQ ID NO: 1524006 - RNA, 19 nt, Artificial Sequence
  Description of Artificial Sequence: Synthetic oligonucleotide
aacgguaucugcugccguu

SEQ ID NO: 1524007 - RNA, 19 nt, Artificial Sequence
  Description of Artificial Sequence: Synthetic oligonucleotide
ccgcuaacguacuugauag

SEQ ID NO: 1524008 - RNA, 19 nt, Artificial Sequence
  Description of Artificial Sequence: Synthetic oligonucleotide
cucgugacucuuuaucauc

SEQ ID NO: 1524009 - RNA, 19 nt, Artificial Sequence
  Description of Artificial Sequence: Synthetic oligonucleotide
cuaacguacuugauagcca

SEQ ID NO: 1524010 - RNA, 19 nt, Artificial Sequence
  Description of Artificial Sequence: Synthetic oligonucleotide
uaccuucaaauaaguacau

SEQ ID NO: 1524011 - RNA, 19 nt, Artificial Sequence
  Description of Artificial Sequence: Synthetic oligonucleotide
gcgaucacggugcugagcc

SEQ ID NO: 1524012 - RNA, 19 nt, Artificial Sequence
  Description of Artificial Sequence: Synthetic oligonucleotide
ucccagccagcucauauau

SEQ ID NO: 1524013 - RNA, 19 nt, Artificial Sequence
  Description of Artificial Sequence: Synthetic oligonucleotide
cuccuagggugaaauggcc

SEQ ID NO: 1524014 - RNA, 19 nt, Artificial Sequence
  Description of Artificial Sequence: Synthetic oligonucleotide
ugggauaaggacgcugcug

SEQ ID NO: 1524015 - RNA, 19 nt, Artificial Sequence
  Description of Artificial Sequence: Synthetic oligonucleotide
cuguuggauucccaccagg

SEQ ID NO: 1524016 - RNA, 19 nt, Artificial Sequence
  Description of Artificial Sequence: Synthetic oligonucleotide
cuguacacgauuucuucca

SEQ ID NO: 1524017 - RNA, 19 nt, Artificial Sequence
  Description of Artificial Sequence: Synthetic oligonucleotide
acuguuggauucccaccag

SEQ ID NO: 1524018 - RNA, 19 nt, Artificial Sequence
  Description of Artificial Sequence: Synthetic oligonucleotide
ugcugccuuuauuucggag

SEQ ID NO: 1524019 - RNA, 19 nt, Artificial Sequence
  Description of Artificial Sequence: Synthetic oligonucleotide
caaugcguggaagauggac

SEQ ID NO: 1524020 - RNA, 19 nt, Artificial Sequence
  Description of Artificial Sequence: Synthetic oligonucleotide
gacagauguuuccgaauga

SEQ ID NO: 1524021 - RNA, 19 nt, Artificial Sequence
  Description of Artificial Sequence: Synthetic oligonucleotide
uuuaaguaucucgcuuaac

SEQ ID NO: 1524022 - RNA, 19 nt, Artificial Sequence
  Description of Artificial Sequence: Synthetic oligonucleotide
aaucagccgaaugacuuua

SEQ ID NO: 1524023 - RNA, 19 nt, Artificial Sequence
  Description of Artificial Sequence: Synthetic oligonucleotide
cagccgaaugacuuuaaca

SEQ ID NO: 1524024 - RNA, 19 nt, Artificial Sequence
  Description of Artificial Sequence: Synthetic oligonucleotide
uguugguaagcugcaauuu

SEQ ID NO: 1524025 - RNA, 19 nt, Artificial Sequence
  Description of Artificial Sequence: Synthetic oligonucleotide
ugccaaucagccgaaugac

SEQ ID NO: 1524026 - RNA, 19 nt, Artificial Sequence
  Description of Artificial Sequence: Synthetic oligonucleotide
uuccuuacugggcucuuua

SEQ ID NO: 1524027 - RNA, 19 nt, Artificial Sequence
  Description of Artificial Sequence: Synthetic oligonucleotide
cugaucgugcuuccagagc

SEQ ID NO: 1524028 - RNA, 19 nt, Artificial Sequence
  Description of Artificial Sequence: Synthetic oligonucleotide
gacaaagauaacgguaucu

SEQ ID NO: 1524029 - RNA, 19 nt, Artificial Sequence
  Description of Artificial Sequence: Synthetic oligonucleotide
auaaggacgcugcugccuu

SEQ ID NO: 1524030 - RNA, 19 nt, Artificial Sequence
  Description of Artificial Sequence: Synthetic oligonucleotide
ugcccgggugcucaggaga

SEQ ID NO: 1524031 - RNA, 19 nt, Artificial Sequence
  Description of Artificial Sequence: Synthetic oligonucleotide
aagccgaauuuaaguaucu

SEQ ID NO: 1524032 - RNA, 19 nt, Artificial Sequence
  Description of Artificial Sequence: Synthetic oligonucleotide
ccuagggugaaauggcccc

SEQ ID NO: 1524033 - RNA, 19 nt, Artificial Sequence
  Description of Artificial Sequence: Synthetic oligonucleotide
ccugggauaaggacgcugc

SEQ ID NO: 1524034 - RNA, 19 nt, Artificial Sequence
  Description of Artificial Sequence: Synthetic oligonucleotide
ucggcaucagccugugggu

SEQ ID NO: 1524035 - RNA, 19 nt, Artificial Sequence
  Description of Artificial Sequence: Synthetic oligonucleotide
gaucacggugcugagccac

SEQ ID NO: 1524036 - RNA, 19 nt, Artificial Sequence
  Description of Artificial Sequence: Synthetic oligonucleotide
ccuguacacgauuucuucc

SEQ ID NO: 1524037 - RNA, 19 nt, Artificial Sequence
  Description of Artificial Sequence: Synthetic oligonucleotide
uaacgguaucugcugccgu

SEQ ID NO: 1524038 - RNA, 19 nt, Artificial Sequence
  Description of Artificial Sequence: Synthetic oligonucleotide
gacgcugcugccuuuauuu

SEQ ID NO: 1524039 - RNA, 19 nt, Artificial Sequence
  Description of Artificial Sequence: Synthetic oligonucleotide
ugauagccauugagucuag

SEQ ID NO: 1524040 - RNA, 19 nt, Artificial Sequence
  Description of Artificial Sequence: Synthetic oligonucleotide
gucaccgcuaacguacuug

SEQ ID NO: 1524041 - RNA, 19 nt, Artificial Sequence
  Description of Artificial Sequence: Synthetic oligonucleotide
uggaucccaggucuacuuc

SEQ ID NO: 1524042 - RNA, 19 nt, Artificial Sequence
  Description of Artificial Sequence: Synthetic oligonucleotide
uuguuuucucuagcagagc

SEQ ID NO: 1524043 - RNA, 19 nt, Artificial Sequence
  Description of Artificial Sequence: Synthetic oligonucleotide
cucaccagaagucucgucu

SEQ ID NO: 1524044 - RNA, 19 nt, Artificial Sequence
  Description of Artificial Sequence: Synthetic oligonucleotide
agcgaucacggugcugagc

SEQ ID NO: 1524045 - RNA, 19 nt, Artificial Sequence
  Description of Artificial Sequence: Synthetic oligonucleotide
aaaacccuuuguagcgugu

SEQ ID NO: 1524046 - RNA, 19 nt, Artificial Sequence
  Description of Artificial Sequence: Synthetic oligonucleotide
gucgacaaagauaacggua

SEQ ID NO: 1524047 - RNA, 19 nt, Artificial Sequence
  Description of Artificial Sequence: Synthetic oligonucleotide
gacaccucccaaacucaag

SEQ ID NO: 1524048 - RNA, 19 nt, Artificial Sequence
  Description of Artificial Sequence: Synthetic oligonucleotide
ugcaagucguucugaggau

SEQ ID NO: 1524049 - RNA, 19 nt, Artificial Sequence
  Description of Artificial Sequence: Synthetic oligonucleotide
gcugaucgugcuuccagag

SEQ ID NO: 1524050 - RNA, 19 nt, Artificial Sequence
  Description of Artificial Sequence: Synthetic oligonucleotide
ucggugccguaccaguuaa

SEQ ID NO: 1524051 - RNA, 19 nt, Artificial Sequence
  Description of Artificial Sequence: Synthetic oligonucleotide
ggagcgaucacggugcuga

SEQ ID NO: 1524052 - RNA, 19 nt, Artificial Sequence
  Description of Artificial Sequence: Synthetic oligonucleotide
caggacauuggagcgauca

SEQ ID NO: 1524053 - RNA, 19 nt, Artificial Sequence
  Description of Artificial Sequence: Synthetic oligonucleotide
guagcguguccaaugcgug

SEQ ID NO: 1524054 - RNA, 19 nt, Artificial Sequence
  Description of Artificial Sequence: Synthetic oligonucleotide
guacacgauuucuuccaca

SEQ ID NO: 1524055 - RNA, 19 nt, Artificial Sequence
  Description of Artificial Sequence: Synthetic oligonucleotide
auggaucccaggucuacuu

SEQ ID NO: 1524056 - RNA, 19 nt, Artificial Sequence
  Description of Artificial Sequence: Synthetic oligonucleotide
uuucggugccguaccaguu

SEQ ID NO: 1524057 - RNA, 19 nt, Artificial Sequence
  Description of Artificial Sequence: Synthetic oligonucleotide
auguuuccgaaugagccuu

SEQ ID NO: 1524058 - RNA, 19 nt, Artificial Sequence
  Description of Artificial Sequence: Synthetic oligonucleotide
uccccucagaggacagcag

SEQ ID NO: 1524059 - RNA, 19 nt, Artificial Sequence
  Description of Artificial Sequence: Synthetic oligonucleotide
cgaaugagccuuucggugc

SEQ ID NO: 1524060 - RNA, 19 nt, Artificial Sequence
  Description of Artificial Sequence: Synthetic oligonucleotide
caucuagcucaccagaagu

SEQ ID NO: 1524061 - RNA, 19 nt, Artificial Sequence
  Description of Artificial Sequence: Synthetic oligonucleotide
acggugcuccccucagagg

SEQ ID NO: 1524062 - RNA, 19 nt, Artificial Sequence
  Description of Artificial Sequence: Synthetic oligonucleotide
ccgaaugagccuuucggug

SEQ ID NO: 1524063 - RNA, 19 nt, Artificial Sequence
  Description of Artificial Sequence: Synthetic oligonucleotide
gguaagcugcaauuuugga

SEQ ID NO: 1524064 - RNA, 19 nt, Artificial Sequence
  Description of Artificial Sequence: Synthetic oligonucleotide
cagcggacggucucugggc

SEQ ID NO: 1524065 - RNA, 19 nt, Artificial Sequence
  Description of Artificial Sequence: Synthetic oligonucleotide
acauuggagcgaucacggu

SEQ ID NO: 1524066 - RNA, 19 nt, Artificial Sequence
  Description of Artificial Sequence: Synthetic oligonucleotide
caccucccaaacucaaguc

SEQ ID NO: 1524067 - RNA, 19 nt, Artificial Sequence
  Description of Artificial Sequence: Synthetic oligonucleotide
accagaagucucgucuucu

SEQ ID NO: 1524068 - RNA, 19 nt, Artificial Sequence
  Description of Artificial Sequence: Synthetic oligonucleotide
gccguaccaguuaaaaccc

SEQ ID NO: 1524069 - RNA, 19 nt, Artificial Sequence
  Description of Artificial Sequence: Synthetic oligonucleotide
ugggcuccuagggugaaau

SEQ ID NO: 1524070 - RNA, 19 nt, Artificial Sequence
  Description of Artificial Sequence: Synthetic oligonucleotide
gauaaggacgcugcugccu

SEQ ID NO: 1524071 - RNA, 19 nt, Artificial Sequence
  Description of Artificial Sequence: Synthetic oligonucleotide
  modified_base (19)..(19): a, c, u, g, unknown or other
ggaaaguaguauauguaun

SEQ ID NO: 1524072 - RNA, 19 nt, Artificial Sequence
  Description of Artificial Sequence: Synthetic oligonucleotide
guccaaugcguggaagaug

SEQ ID NO: 1524073 - RNA, 19 nt, Artificial Sequence
  Description of Artificial Sequence: Synthetic oligonucleotide
ucugcugaucgugcuucca

SEQ ID NO: 1524074 - RNA, 19 nt, Artificial Sequence
  Description of Artificial Sequence: Synthetic oligonucleotide
agcggacggucucugggcu

SEQ ID NO: 1524075 - RNA, 19 nt, Artificial Sequence
  Description of Artificial Sequence: Synthetic oligonucleotide
ugacgucaccgcuaacgua

SEQ ID NO: 1524076 - RNA, 19 nt, Artificial Sequence
  Description of Artificial Sequence: Synthetic oligonucleotide
gccacaaucaaggccaaca

SEQ ID NO: 1524077 - RNA, 19 nt, Artificial Sequence
  Description of Artificial Sequence: Synthetic oligonucleotide
gccuuuauuucggagggac

SEQ ID NO: 1524078 - RNA, 19 nt, Artificial Sequence
  Description of Artificial Sequence: Synthetic oligonucleotide
gcuuaacuggaagucggcc

SEQ ID NO: 1524079 - RNA, 19 nt, Artificial Sequence
  Description of Artificial Sequence: Synthetic oligonucleotide
guugguaagcugcaauuuu

SEQ ID NO: 1524080 - RNA, 19 nt, Artificial Sequence
  Description of Artificial Sequence: Synthetic oligonucleotide
gaucgugcuuccagagcug

SEQ ID NO: 1524081 - RNA, 19 nt, Artificial Sequence
  Description of Artificial Sequence: Synthetic oligonucleotide
augccucuugcagacagau

SEQ ID NO: 1524082 - RNA, 19 nt, Artificial Sequence
  Description of Artificial Sequence: Synthetic oligonucleotide
gguaucugcugccguuaag

SEQ ID NO: 1524083 - RNA, 19 nt, Artificial Sequence
  Description of Artificial Sequence: Synthetic oligonucleotide
cauugagucuaggucuuca

SEQ ID NO: 1524084 - RNA, 19 nt, Artificial Sequence
  Description of Artificial Sequence: Synthetic oligonucleotide
gcuccuagggugaaauggc

SEQ ID NO: 1524085 - RNA, 19 nt, Artificial Sequence
  Description of Artificial Sequence: Synthetic oligonucleotide
aagucguucugaggauuaa

SEQ ID NO: 1524086 - RNA, 19 nt, Artificial Sequence
  Description of Artificial Sequence: Synthetic oligonucleotide
uugucucgugacucuuuau

SEQ ID NO: 1524087 - RNA, 19 nt, Artificial Sequence
  Description of Artificial Sequence: Synthetic oligonucleotide
ugccuuccuguacacgauu

SEQ ID NO: 1524088 - RNA, 19 nt, Artificial Sequence
  Description of Artificial Sequence: Synthetic oligonucleotide
agcugagaauaagccaccu

SEQ ID NO: 1524089 - RNA, 19 nt, Artificial Sequence
  Description of Artificial Sequence: Synthetic oligonucleotide
caagucguucugaggauua

SEQ ID NO: 1524090 - RNA, 19 nt, Artificial Sequence
  Description of Artificial Sequence: Synthetic oligonucleotide
ugcuuccagagcugagaau

SEQ ID NO: 1524091 - RNA, 19 nt, Artificial Sequence
  Description of Artificial Sequence: Synthetic oligonucleotide
agucguucugaggauuaaa

SEQ ID NO: 1524092 - RNA, 19 nt, Artificial Sequence
  Description of Artificial Sequence: Synthetic oligonucleotide
uguuuccgaaugagccuuu

SEQ ID NO: 1524093 - RNA, 19 nt, Artificial Sequence
  Description of Artificial Sequence: Synthetic oligonucleotide
ggaagucggccucagcgga

SEQ ID NO: 1524094 - RNA, 19 nt, Artificial Sequence
  Description of Artificial Sequence: Synthetic oligonucleotide
agucggccucagcggacgg

SEQ ID NO: 1524095 - RNA, 19 nt, Artificial Sequence
  Description of Artificial Sequence: Synthetic oligonucleotide
gagcgaucacggugcugag

SEQ ID NO: 1524096 - RNA, 19 nt, Artificial Sequence
  Description of Artificial Sequence: Synthetic oligonucleotide
caccagaagucucgucuuc

SEQ ID NO: 1524097 - RNA, 19 nt, Artificial Sequence
  Description of Artificial Sequence: Synthetic oligonucleotide
gaagucucgucuucuccau

SEQ ID NO: 1524098 - RNA, 19 nt, Artificial Sequence
  Description of Artificial Sequence: Synthetic oligonucleotide
gugacgucaccgcuaacgu

SEQ ID NO: 1524099 - RNA, 19 nt, Artificial Sequence
  Description of Artificial Sequence: Synthetic oligonucleotide
cuuucggugccguaccagu

SEQ ID NO: 1524100 - RNA, 19 nt, Artificial Sequence
  Description of Artificial Sequence: Synthetic oligonucleotide
gccguuaaguucaugccca

SEQ ID NO: 1524101 - RNA, 19 nt, Artificial Sequence
  Description of Artificial Sequence: Synthetic oligonucleotide
ucaagguccucgggcucgc

SEQ ID NO: 1524102 - RNA, 19 nt, Artificial Sequence
  Description of Artificial Sequence: Synthetic oligonucleotide
gacugguaacuguuggauu

SEQ ID NO: 1524103 - RNA, 19 nt, Artificial Sequence
  Description of Artificial Sequence: Synthetic oligonucleotide
cuccccucagaggacagca

SEQ ID NO: 1524104 - RNA, 19 nt, Artificial Sequence
  Description of Artificial Sequence: Synthetic oligonucleotide
aacguacuugauagccauu

SEQ ID NO: 1524105 - RNA, 19 nt, Artificial Sequence
  Description of Artificial Sequence: Synthetic oligonucleotide
ggcagccgccugcaagucg

SEQ ID NO: 1524106 - RNA, 19 nt, Artificial Sequence
  Description of Artificial Sequence: Synthetic oligonucleotide
ugagccuuucggugccgua

SEQ ID NO: 1524107 - RNA, 19 nt, Artificial Sequence
  Description of Artificial Sequence: Synthetic oligonucleotide
gacaggacauuggagcgau

SEQ ID NO: 1524108 - RNA, 19 nt, Artificial Sequence
  Description of Artificial Sequence: Synthetic oligonucleotide
cuguguucggcuuccuccu

SEQ ID NO: 1524109 - RNA, 19 nt, Artificial Sequence
  Description of Artificial Sequence: Synthetic oligonucleotide
agcucaccagaagucucgu

SEQ ID NO: 1524110 - RNA, 19 nt, Artificial Sequence
  Description of Artificial Sequence: Synthetic oligonucleotide
ccagcggccagaaucaucu

SEQ ID NO: 1524111 - RNA, 19 nt, Artificial Sequence
  Description of Artificial Sequence: Synthetic oligonucleotide
guuuccgaaugagccuuuc

SEQ ID NO: 1524112 - RNA, 19 nt, Artificial Sequence
  Description of Artificial Sequence: Synthetic oligonucleotide
ccuuacugggcucuuuaga

SEQ ID NO: 1524113 - RNA, 19 nt, Artificial Sequence
  Description of Artificial Sequence: Synthetic oligonucleotide
ggaggcugccuuccuguac

SEQ ID NO: 1524114 - RNA, 19 nt, Artificial Sequence
  Description of Artificial Sequence: Synthetic oligonucleotide
gggcucuuuuccaaaguuc

SEQ ID NO: 1524115 - RNA, 19 nt, Artificial Sequence
  Description of Artificial Sequence: Synthetic oligonucleotide
cacugucgacaaagauaac

SEQ ID NO: 1524116 - RNA, 19 nt, Artificial Sequence
  Description of Artificial Sequence: Synthetic oligonucleotide
ggacagcaguuuauccaag

SEQ ID NO: 1524117 - RNA, 19 nt, Artificial Sequence
  Description of Artificial Sequence: Synthetic oligonucleotide
agccgccugcaagucguuc

SEQ ID NO: 1524118 - RNA, 19 nt, Artificial Sequence
  Description of Artificial Sequence: Synthetic oligonucleotide
uaaugccagacaggacauu

SEQ ID NO: 1524119 - RNA, 19 nt, Artificial Sequence
  Description of Artificial Sequence: Synthetic oligonucleotide
ggauggaucccaggucuac

SEQ ID NO: 1524120 - RNA, 19 nt, Artificial Sequence
  Description of Artificial Sequence: Synthetic oligonucleotide
acgguaucugcugccguua

SEQ ID NO: 1524121 - RNA, 19 nt, Artificial Sequence
  Description of Artificial Sequence: Synthetic oligonucleotide
cuuccuuuugaugggcccu

SEQ ID NO: 1524122 - RNA, 19 nt, Artificial Sequence
  Description of Artificial Sequence: Synthetic oligonucleotide
caucuacacaaugaacaau

SEQ ID NO: 1524123 - RNA, 19 nt, Artificial Sequence
  Description of Artificial Sequence: Synthetic oligonucleotide
caaucagccgaaugacuuu

SEQ ID NO: 1524124 - RNA, 19 nt, Artificial Sequence
  Description of Artificial Sequence: Synthetic oligonucleotide
ccaaucagccgaaugacuu

SEQ ID NO: 1524125 - RNA, 19 nt, Artificial Sequence
  Description of Artificial Sequence: Synthetic oligonucleotide
guaccaguuaaaacccuuu

SEQ ID NO: 1524126 - RNA, 19 nt, Artificial Sequence
  Description of Artificial Sequence: Synthetic oligonucleotide
guaucucgcuuaacuggaa

SEQ ID NO: 1524127 - RNA, 19 nt, Artificial Sequence
  Description of Artificial Sequence: Synthetic oligonucleotide
ccacaaucaaggccaacaa

SEQ ID NO: 1524128 - RNA, 19 nt, Artificial Sequence
  Description of Artificial Sequence: Synthetic oligonucleotide
  modified_base (5)..(5): a, c, u, g, unknown or other
guaunuugggaugccucuu

SEQ ID NO: 1524129 - RNA, 19 nt, Artificial Sequence
  Description of Artificial Sequence: Synthetic oligonucleotide
ugcugccguuaaguucaug

SEQ ID NO: 1524130 - RNA, 19 nt, Artificial Sequence
  Description of Artificial Sequence: Synthetic oligonucleotide
ggacugguaacuguuggau

SEQ ID NO: 1524131 - RNA, 19 nt, Artificial Sequence
  Description of Artificial Sequence: Synthetic oligonucleotide
aucagccgaaugacuuuaa

SEQ ID NO: 1524132 - RNA, 19 nt, Artificial Sequence
  Description of Artificial Sequence: Synthetic oligonucleotide
cgaauuuaaguaucucgcu

SEQ ID NO: 1524133 - RNA, 19 nt, Artificial Sequence
  Description of Artificial Sequence: Synthetic oligonucleotide
gaucccaggucuacuucau

SEQ ID NO: 1524134 - RNA, 19 nt, Artificial Sequence
  Description of Artificial Sequence: Synthetic oligonucleotide
ccaagccgaauuuaaguau

SEQ ID NO: 1524135 - RNA, 19 nt, Artificial Sequence
  Description of Artificial Sequence: Synthetic oligonucleotide
ccguuaaguucaugcccac

SEQ ID NO: 1524136 - RNA, 19 nt, Artificial Sequence
  Description of Artificial Sequence: Synthetic oligonucleotide
cgcuaacguacuugauagc

SEQ ID NO: 1524137 - RNA, 19 nt, Artificial Sequence
  Description of Artificial Sequence: Synthetic oligonucleotide
acgucaccgcuaacguacu

SEQ ID NO: 1524138 - RNA, 19 nt, Artificial Sequence
  Description of Artificial Sequence: Synthetic oligonucleotide
ggugggugacgucaccgcu

SEQ ID NO: 1524139 - RNA, 19 nt, Artificial Sequence
  Description of Artificial Sequence: Synthetic oligonucleotide
cgacaaagauaacgguauc

SEQ ID NO: 1524140 - RNA, 19 nt, Artificial Sequence
  Description of Artificial Sequence: Synthetic oligonucleotide
caguuuauccaagccgaau

SEQ ID NO: 1524141 - RNA, 19 nt, Artificial Sequence
  Description of Artificial Sequence: Synthetic oligonucleotide
cagggacccacuggccauc

SEQ ID NO: 1524142 - RNA, 19 nt, Artificial Sequence
  Description of Artificial Sequence: Synthetic oligonucleotide
ggugcuccccucagaggac

SEQ ID NO: 1524143 - RNA, 19 nt, Artificial Sequence
  Description of Artificial Sequence: Synthetic oligonucleotide
ggacccacuggccaucuuu

SEQ ID NO: 1524144 - RNA, 19 nt, Artificial Sequence
  Description of Artificial Sequence: Synthetic oligonucleotide
caccugcccgggugcucag

SEQ ID NO: 1524145 - RNA, 19 nt, Artificial Sequence
  Description of Artificial Sequence: Synthetic oligonucleotide
cguacuugauagccauuga

SEQ ID NO: 1524146 - RNA, 19 nt, Artificial Sequence
  Description of Artificial Sequence: Synthetic oligonucleotide
cguguccaaugcguggaag

SEQ ID NO: 1524147 - RNA, 19 nt, Artificial Sequence
  Description of Artificial Sequence: Synthetic oligonucleotide
cugccuuccuguacacgau

SEQ ID NO: 1524148 - RNA, 19 nt, Artificial Sequence
  Description of Artificial Sequence: Synthetic oligonucleotide
cagccagcucauauauuuu

SEQ ID NO: 1524149 - RNA, 19 nt, Artificial Sequence
  Description of Artificial Sequence: Synthetic oligonucleotide
cugggcucuuuagaguaau

SEQ ID NO: 1524150 - RNA, 19 nt, Artificial Sequence
  Description of Artificial Sequence: Synthetic oligonucleotide
gccaacaaaucuugcccuu

SEQ ID NO: 1524151 - RNA, 19 nt, Artificial Sequence
  Description of Artificial Sequence: Synthetic oligonucleotide
gcagccgccugcaagucgu

SEQ ID NO: 1524152 - RNA, 19 nt, Artificial Sequence
  Description of Artificial Sequence: Synthetic oligonucleotide
cccuuuguagcguguccaa

SEQ ID NO: 1524153 - RNA, 19 nt, Artificial Sequence
  Description of Artificial Sequence: Synthetic oligonucleotide
cuagagccuccaucuuaau

SEQ ID NO: 1524154 - RNA, 19 nt, Artificial Sequence
  Description of Artificial Sequence: Synthetic oligonucleotide
gcggacggucucugggcuc

SEQ ID NO: 1524155 - RNA, 19 nt, Artificial Sequence
  Description of Artificial Sequence: Synthetic oligonucleotide
gcaagucguucugaggauu

SEQ ID NO: 1524156 - RNA, 19 nt, Artificial Sequence
  Description of Artificial Sequence: Synthetic oligonucleotide
ccgggugcucaggagaaaa

SEQ ID NO: 1524157 - RNA, 19 nt, Artificial Sequence
  Description of Artificial Sequence: Synthetic oligonucleotide
caccgcuaacguacuugau

SEQ ID NO: 1524158 - RNA, 19 nt, Artificial Sequence
  Description of Artificial Sequence: Synthetic oligonucleotide
gacggucucugggcuccua

SEQ ID NO: 1524159 - RNA, 19 nt, Artificial Sequence
  Description of Artificial Sequence: Synthetic oligonucleotide
ccaaugcguggaagaugga

SEQ ID NO: 1524160 - RNA, 19 nt, Artificial Sequence
  Description of Artificial Sequence: Synthetic oligonucleotide
gccauugagucuaggucuu

SEQ ID NO: 1524161 - RNA, 19 nt, Artificial Sequence
  Description of Artificial Sequence: Synthetic oligonucleotide
cuuccuuacugggcucuuu

SEQ ID NO: 1524162 - RNA, 19 nt, Artificial Sequence
  Description of Artificial Sequence: Synthetic oligonucleotide
cagacuuguucuggccaau

SEQ ID NO: 1524163 - RNA, 19 nt, Artificial Sequence
  Description of Artificial Sequence: Synthetic oligonucleotide
gccugugggugggugacgu

SEQ ID NO: 1524164 - RNA, 19 nt, Artificial Sequence
  Description of Artificial Sequence: Synthetic oligonucleotide
cagcggccagaaucaucua

SEQ ID NO: 1524165 - RNA, 19 nt, Artificial Sequence
  Description of Artificial Sequence: Synthetic oligonucleotide
cugggcuccuagggugaaa

SEQ ID NO: 1524166 - RNA, 19 nt, Artificial Sequence
  Description of Artificial Sequence: Synthetic oligonucleotide
gggugacgucaccgcuaac

SEQ ID NO: 1524167 - RNA, 19 nt, Artificial Sequence
  Description of Artificial Sequence: Synthetic oligonucleotide
ggacgcugcugccuuuauu

SEQ ID NO: 1524168 - RNA, 19 nt, Artificial Sequence
  Description of Artificial Sequence: Synthetic oligonucleotide
ccguaccaguuaaaacccu

SEQ ID NO: 1524169 - RNA, 19 nt, Artificial Sequence
  Description of Artificial Sequence: Synthetic oligonucleotide
cgaucacggugcugagcca

SEQ ID NO: 1524170 - RNA, 19 nt, Artificial Sequence
  Description of Artificial Sequence: Synthetic oligonucleotide
ccuuuguagcguguccaau

SEQ ID NO: 1524171 - RNA, 19 nt, Artificial Sequence
  Description of Artificial Sequence: Synthetic oligonucleotide
cguuaaguucaugcccacu

SEQ ID NO: 1524172 - RNA, 19 nt, Artificial Sequence
  Description of Artificial Sequence: Synthetic oligonucleotide
cugcugccguuaaguucau

SEQ ID NO: 1524173 - RNA, 19 nt, Artificial Sequence
  Description of Artificial Sequence: Synthetic oligonucleotide
cucugccaaucagccgaau

SEQ ID NO: 1524174 - RNA, 19 nt, Artificial Sequence
  Description of Artificial Sequence: Synthetic oligonucleotide
caucagccugugggugggu

SEQ ID NO: 1524175 - RNA, 19 nt, Artificial Sequence
  Description of Artificial Sequence: Synthetic oligonucleotide
caagguccucgggcucgcu

SEQ ID NO: 1524176 - RNA, 19 nt, Artificial Sequence
  Description of Artificial Sequence: Synthetic oligonucleotide
cggugccguaccaguuaaa

SEQ ID NO: 1524177 - RNA, 19 nt, Artificial Sequence
  Description of Artificial Sequence: Synthetic oligonucleotide
gggacccacuggccaucuu

SEQ ID NO: 1524178 - RNA, 19 nt, Artificial Sequence
  Description of Artificial Sequence: Synthetic oligonucleotide
ccacuccaccugcccgggu

SEQ ID NO: 1524179 - RNA, 19 nt, Artificial Sequence
  Description of Artificial Sequence: Synthetic oligonucleotide
cgucaccgcuaacguacuu

SEQ ID NO: 1524180 - RNA, 19 nt, Artificial Sequence
  Description of Artificial Sequence: Synthetic oligonucleotide
cugugaaugacccagaagg

SEQ ID NO: 1524181 - RNA, 19 nt, Artificial Sequence
  Description of Artificial Sequence: Synthetic oligonucleotide
ugguauaucaagaaaacga

SEQ ID NO: 1524182 - RNA, 19 nt, Artificial Sequence
  Description of Artificial Sequence: Synthetic oligonucleotide
acaaagauggaauggacac

SEQ ID NO: 1524183 - RNA, 19 nt, Artificial Sequence
  Description of Artificial Sequence: Synthetic oligonucleotide
aaacgaucugguuaggugu

SEQ ID NO: 1524184 - RNA, 19 nt, Artificial Sequence
  Description of Artificial Sequence: Synthetic oligonucleotide
uagacaagagguccggugg

SEQ ID NO: 1524185 - RNA, 19 nt, Artificial Sequence
  Description of Artificial Sequence: Synthetic oligonucleotide
aaaagacgaagggagguac

SEQ ID NO: 1524186 - RNA, 19 nt, Artificial Sequence
  Description of Artificial Sequence: Synthetic oligonucleotide
ugaaugacccagaagguga

SEQ ID NO: 1524187 - RNA, 19 nt, Artificial Sequence
  Description of Artificial Sequence: Synthetic oligonucleotide
agaggcacaacacaugaag

SEQ ID NO: 1524188 - RNA, 19 nt, Artificial Sequence
  Description of Artificial Sequence: Synthetic oligonucleotide
agcgacagaauacuuuccc

SEQ ID NO: 1524189 - RNA, 19 nt, Artificial Sequence
  Description of Artificial Sequence: Synthetic oligonucleotide
cauaaagguguacacaaag

SEQ ID NO: 1524190 - RNA, 19 nt, Artificial Sequence
  Description of Artificial Sequence: Synthetic oligonucleotide
ugugccauugaugacaccc

SEQ ID NO: 1524191 - RNA, 19 nt, Artificial Sequence
  Description of Artificial Sequence: Synthetic oligonucleotide
uaagaggcacaacacauga

SEQ ID NO: 1524192 - RNA, 19 nt, Artificial Sequence
  Description of Artificial Sequence: Synthetic oligonucleotide
uaucaagaaaacgagcagc

SEQ ID NO: 1524193 - RNA, 19 nt, Artificial Sequence
  Description of Artificial Sequence: Synthetic oligonucleotide
aagguguacacaaagccag

SEQ ID NO: 1524194 - RNA, 19 nt, Artificial Sequence
  Description of Artificial Sequence: Synthetic oligonucleotide
auaaagguguacacaaagc

SEQ ID NO: 1524195 - RNA, 19 nt, Artificial Sequence
  Description of Artificial Sequence: Synthetic oligonucleotide
aguaaggagaaggaauagc

SEQ ID NO: 1524196 - RNA, 19 nt, Artificial Sequence
  Description of Artificial Sequence: Synthetic oligonucleotide
caagaaaacgagcagcaag

SEQ ID NO: 1524197 - RNA, 19 nt, Artificial Sequence
  Description of Artificial Sequence: Synthetic oligonucleotide
gaaacgaucugguuaggug

SEQ ID NO: 1524198 - RNA, 19 nt, Artificial Sequence
  Description of Artificial Sequence: Synthetic oligonucleotide
uaccuuggaggucuggugg

SEQ ID NO: 1524199 - RNA, 19 nt, Artificial Sequence
  Description of Artificial Sequence: Synthetic oligonucleotide
gaauggacacgguaagagg

SEQ ID NO: 1524200 - RNA, 19 nt, Artificial Sequence
  Description of Artificial Sequence: Synthetic oligonucleotide
aaacugacggccaagguca

SEQ ID NO: 1524201 - RNA, 19 nt, Artificial Sequence
  Description of Artificial Sequence: Synthetic oligonucleotide
cauuggaagagaaacugac

SEQ ID NO: 1524202 - RNA, 19 nt, Artificial Sequence
  Description of Artificial Sequence: Synthetic oligonucleotide
gaguuuuccugcuaggcug

SEQ ID NO: 1524203 - RNA, 19 nt, Artificial Sequence
  Description of Artificial Sequence: Synthetic oligonucleotide
ugaguaaggagaaggaaua

SEQ ID NO: 1524204 - RNA, 19 nt, Artificial Sequence
  Description of Artificial Sequence: Synthetic oligonucleotide
gagacggccagacugaaac

SEQ ID NO: 1524205 - RNA, 19 nt, Artificial Sequence
  Description of Artificial Sequence: Synthetic oligonucleotide
guggaaacgaucugguuag

SEQ ID NO: 1524206 - RNA, 19 nt, Artificial Sequence
  Description of Artificial Sequence: Synthetic oligonucleotide
uuaggaagagcaaugccau

SEQ ID NO: 1524207 - RNA, 19 nt, Artificial Sequence
  Description of Artificial Sequence: Synthetic oligonucleotide
accauaaagguguacacaa

SEQ ID NO: 1524208 - RNA, 19 nt, Artificial Sequence
  Description of Artificial Sequence: Synthetic oligonucleotide
aaggauguggauggguacg

SEQ ID NO: 1524209 - RNA, 19 nt, Artificial Sequence
  Description of Artificial Sequence: Synthetic oligonucleotide
aaacugguagugcagggaa

SEQ ID NO: 1524210 - RNA, 19 nt, Artificial Sequence
  Description of Artificial Sequence: Synthetic oligonucleotide
agacauaaaacugguagug

SEQ ID NO: 1524211 - RNA, 19 nt, Artificial Sequence
  Description of Artificial Sequence: Synthetic oligonucleotide
ugaguuuuccugcuaggcu

SEQ ID NO: 1524212 - RNA, 19 nt, Artificial Sequence
  Description of Artificial Sequence: Synthetic oligonucleotide
gguauaucaagaaaacgag

SEQ ID NO: 1524213 - RNA, 19 nt, Artificial Sequence
  Description of Artificial Sequence: Synthetic oligonucleotide
aaagacgaagggagguacc

SEQ ID NO: 1524214 - RNA, 19 nt, Artificial Sequence
  Description of Artificial Sequence: Synthetic oligonucleotide
uucagcagcgacagaauac

SEQ ID NO: 1524215 - RNA, 19 nt, Artificial Sequence
  Description of Artificial Sequence: Synthetic oligonucleotide
cacagagacggccagacug

SEQ ID NO: 1524216 - RNA, 19 nt, Artificial Sequence
  Description of Artificial Sequence: Synthetic oligonucleotide
aagagguccgguggcaccc

SEQ ID NO: 1524217 - RNA, 19 nt, Artificial Sequence
  Description of Artificial Sequence: Synthetic oligonucleotide
uguguggaaauaccagaca

SEQ ID NO: 1524218 - RNA, 19 nt, Artificial Sequence
  Description of Artificial Sequence: Synthetic oligonucleotide
agacaagagguccgguggc

SEQ ID NO: 1524219 - RNA, 19 nt, Artificial Sequence
  Description of Artificial Sequence: Synthetic oligonucleotide
auaugugccauugaugaca

SEQ ID NO: 1524220 - RNA, 19 nt, Artificial Sequence
  Description of Artificial Sequence: Synthetic oligonucleotide
uguagcguggcucccgcag

SEQ ID NO: 1524221 - RNA, 19 nt, Artificial Sequence
  Description of Artificial Sequence: Synthetic oligonucleotide
accuacagagggcaaacag

SEQ ID NO: 1524222 - RNA, 19 nt, Artificial Sequence
  Description of Artificial Sequence: Synthetic oligonucleotide
gaaggauccuucagcagcg

SEQ ID NO: 1524223 - RNA, 19 nt, Artificial Sequence
  Description of Artificial Sequence: Synthetic oligonucleotide
agucauaugugccauugau

SEQ ID NO: 1524224 - RNA, 19 nt, Artificial Sequence
  Description of Artificial Sequence: Synthetic oligonucleotide
guaaggagaaggaauagca

SEQ ID NO: 1524225 - RNA, 19 nt, Artificial Sequence
  Description of Artificial Sequence: Synthetic oligonucleotide
ugaaggauguggaugggua

SEQ ID NO: 1524226 - RNA, 19 nt, Artificial Sequence
  Description of Artificial Sequence: Synthetic oligonucleotide
agcaggaugacagcauggc

SEQ ID NO: 1524227 - RNA, 19 nt, Artificial Sequence
  Description of Artificial Sequence: Synthetic oligonucleotide
gaugucagugcccuggcca

SEQ ID NO: 1524228 - RNA, 19 nt, Artificial Sequence
  Description of Artificial Sequence: Synthetic oligonucleotide
gacaagguagagaacagca

SEQ ID NO: 1524229 - RNA, 19 nt, Artificial Sequence
  Description of Artificial Sequence: Synthetic oligonucleotide
uccgguggcacccugcagc

SEQ ID NO: 1524230 - RNA, 19 nt, Artificial Sequence
  Description of Artificial Sequence: Synthetic oligonucleotide
acugguagugcagggaacg

SEQ ID NO: 1524231 - RNA, 19 nt, Artificial Sequence
  Description of Artificial Sequence: Synthetic oligonucleotide
gacauaaaacugguagugc

SEQ ID NO: 1524232 - RNA, 19 nt, Artificial Sequence
  Description of Artificial Sequence: Synthetic oligonucleotide
cuacagagggcaaacagca

SEQ ID NO: 1524233 - RNA, 19 nt, Artificial Sequence
  Description of Artificial Sequence: Synthetic oligonucleotide
acggaagccaaacugagua

SEQ ID NO: 1524234 - RNA, 19 nt, Artificial Sequence
  Description of Artificial Sequence: Synthetic oligonucleotide
aagccagcgggguagacaa

SEQ ID NO: 1524235 - RNA, 19 nt, Artificial Sequence
  Description of Artificial Sequence: Synthetic oligonucleotide
cauaugugcagggaggcag

SEQ ID NO: 1524236 - RNA, 19 nt, Artificial Sequence
  Description of Artificial Sequence: Synthetic oligonucleotide
gguccuaguaggaugaggg

SEQ ID NO: 1524237 - RNA, 19 nt, Artificial Sequence
  Description of Artificial Sequence: Synthetic oligonucleotide
guauaucaagaaaacgagc

SEQ ID NO: 1524238 - RNA, 19 nt, Artificial Sequence
  Description of Artificial Sequence: Synthetic oligonucleotide
gaucugguuaggugugagg

SEQ ID NO: 1524239 - RNA, 19 nt, Artificial Sequence
  Description of Artificial Sequence: Synthetic oligonucleotide
gaaggcccgaugcaggaag

SEQ ID NO: 1524240 - RNA, 19 nt, Artificial Sequence
  Description of Artificial Sequence: Synthetic oligonucleotide
gaagccaaacugaguaagg

SEQ ID NO: 1524241 - RNA, 19 nt, Artificial Sequence
  Description of Artificial Sequence: Synthetic oligonucleotide
uggccaguugcauaguaca

SEQ ID NO: 1524242 - RNA, 19 nt, Artificial Sequence
  Description of Artificial Sequence: Synthetic oligonucleotide
aacgccaguucacugucca

SEQ ID NO: 1524243 - RNA, 19 nt, Artificial Sequence
  Description of Artificial Sequence: Synthetic oligonucleotide
aaacgagcagcaaggugac

SEQ ID NO: 1524244 - RNA, 19 nt, Artificial Sequence
  Description of Artificial Sequence: Synthetic oligonucleotide
agguuuauucuaagaacac

SEQ ID NO: 1524245 - RNA, 19 nt, Artificial Sequence
  Description of Artificial Sequence: Synthetic oligonucleotide
guagacaagagguccggug

SEQ ID NO: 1524246 - RNA, 19 nt, Artificial Sequence
  Description of Artificial Sequence: Synthetic oligonucleotide
agagccgcaguacaaagau

SEQ ID NO: 1524247 - RNA, 19 nt, Artificial Sequence
  Description of Artificial Sequence: Synthetic oligonucleotide
uaccagacauaaaacuggu

SEQ ID NO: 1524248 - RNA, 19 nt, Artificial Sequence
  Description of Artificial Sequence: Synthetic oligonucleotide
uguggaaauaccagacaua

SEQ ID NO: 1524249 - RNA, 19 nt, Artificial Sequence
  Description of Artificial Sequence: Synthetic oligonucleotide
aagccaaacugaguaagga

SEQ ID NO: 1524250 - RNA, 19 nt, Artificial Sequence
  Description of Artificial Sequence: Synthetic oligonucleotide
cacgguaagaggcacaaca

SEQ ID NO: 1524251 - RNA, 19 nt, Artificial Sequence
  Description of Artificial Sequence: Synthetic oligonucleotide
uguguaugccacccuguga

SEQ ID NO: 1524252 - RNA, 19 nt, Artificial Sequence
  Description of Artificial Sequence: Synthetic oligonucleotide
ucaaaggagcgggagaggu

SEQ ID NO: 1524253 - RNA, 19 nt, Artificial Sequence
  Description of Artificial Sequence: Synthetic oligonucleotide
aauagcaacccaggggcga

SEQ ID NO: 1524254 - RNA, 19 nt, Artificial Sequence
  Description of Artificial Sequence: Synthetic oligonucleotide
gaagagguugaugcuuagg

SEQ ID NO: 1524255 - RNA, 19 nt, Artificial Sequence
  Description of Artificial Sequence: Synthetic oligonucleotide
auggguacguguuccagga

SEQ ID NO: 1524256 - RNA, 19 nt, Artificial Sequence
  Description of Artificial Sequence: Synthetic oligonucleotide
gagucuauuccacccacga

SEQ ID NO: 1524257 - RNA, 19 nt, Artificial Sequence
  Description of Artificial Sequence: Synthetic oligonucleotide
aaggaaacgccaguucacu

SEQ ID NO: 1524258 - RNA, 19 nt, Artificial Sequence
  Description of Artificial Sequence: Synthetic oligonucleotide
uacagcagaugccaaugaa

SEQ ID NO: 1524259 - RNA, 19 nt, Artificial Sequence
  Description of Artificial Sequence: Synthetic oligonucleotide
ggugacaagguagagaaca

SEQ ID NO: 1524260 - RNA, 19 nt, Artificial Sequence
  Description of Artificial Sequence: Synthetic oligonucleotide
gacagaacccggcgggccg

SEQ ID NO: 1524261 - RNA, 19 nt, Artificial Sequence
  Description of Artificial Sequence: Synthetic oligonucleotide
ucuguguaugccacccugu

SEQ ID NO: 1524262 - RNA, 19 nt, Artificial Sequence
  Description of Artificial Sequence: Synthetic oligonucleotide
aagacgaagggagguaccu

SEQ ID NO: 1524263 - RNA, 19 nt, Artificial Sequence
  Description of Artificial Sequence: Synthetic oligonucleotide
ggaauggacacgguaagag

SEQ ID NO: 1524264 - RNA, 19 nt, Artificial Sequence
  Description of Artificial Sequence: Synthetic oligonucleotide
gaggucuggugguauauca

SEQ ID NO: 1524265 - RNA, 19 nt, Artificial Sequence
  Description of Artificial Sequence: Synthetic oligonucleotide
cagucaaucucuguguaug

SEQ ID NO: 1524266 - RNA, 19 nt, Artificial Sequence
  Description of Artificial Sequence: Synthetic oligonucleotide
uacguguuccaggaaagcu

SEQ ID NO: 1524267 - RNA, 19 nt, Artificial Sequence
  Description of Artificial Sequence: Synthetic oligonucleotide
acgguaagaggcacaacac

SEQ ID NO: 1524268 - RNA, 19 nt, Artificial Sequence
  Description of Artificial Sequence: Synthetic oligonucleotide
acguguuccaggaaagcuc

SEQ ID NO: 1524269 - RNA, 19 nt, Artificial Sequence
  Description of Artificial Sequence: Synthetic oligonucleotide
agcgggguagacaagaggu

SEQ ID NO: 1524270 - RNA, 19 nt, Artificial Sequence
  Description of Artificial Sequence: Synthetic oligonucleotide
gcaagguuuauucuaagaa

SEQ ID NO: 1524271 - RNA, 19 nt, Artificial Sequence
  Description of Artificial Sequence: Synthetic oligonucleotide
ugacggccaaggucaaagg

SEQ ID NO: 1524272 - RNA, 19 nt, Artificial Sequence
  Description of Artificial Sequence: Synthetic oligonucleotide
agcaagaggagggugagau

SEQ ID NO: 1524273 - RNA, 19 nt, Artificial Sequence
  Description of Artificial Sequence: Synthetic oligonucleotide
aacgaucugguuaggugug

SEQ ID NO: 1524274 - RNA, 19 nt, Artificial Sequence
  Description of Artificial Sequence: Synthetic oligonucleotide
uguguagcguggcucccgc

SEQ ID NO: 1524275 - RNA, 19 nt, Artificial Sequence
  Description of Artificial Sequence: Synthetic oligonucleotide
ggucuggugguauaucaag

SEQ ID NO: 1524276 - RNA, 19 nt, Artificial Sequence
  Description of Artificial Sequence: Synthetic oligonucleotide
ugaugcuuaggaagagcaa

SEQ ID NO: 1524277 - RNA, 19 nt, Artificial Sequence
  Description of Artificial Sequence: Synthetic oligonucleotide
gugaaugacccagaaggug

SEQ ID NO: 1524278 - RNA, 19 nt, Artificial Sequence
  Description of Artificial Sequence: Synthetic oligonucleotide
gaauagcaacccaggggcg

SEQ ID NO: 1524279 - RNA, 19 nt, Artificial Sequence
  Description of Artificial Sequence: Synthetic oligonucleotide
cagggaacggcuacagcag

SEQ ID NO: 1524280 - RNA, 19 nt, Artificial Sequence
  Description of Artificial Sequence: Synthetic oligonucleotide
cugacggccaaggucaaag

SEQ ID NO: 1524281 - RNA, 19 nt, Artificial Sequence
  Description of Artificial Sequence: Synthetic oligonucleotide
acuuggcaagguuuauucu

SEQ ID NO: 1524282 - RNA, 19 nt, Artificial Sequence
  Description of Artificial Sequence: Synthetic oligonucleotide
ccuacagagggcaaacagc

SEQ ID NO: 1524283 - RNA, 19 nt, Artificial Sequence
  Description of Artificial Sequence: Synthetic oligonucleotide
cuuggcaagguuuauucua

SEQ ID NO: 1524284 - RNA, 19 nt, Artificial Sequence
  Description of Artificial Sequence: Synthetic oligonucleotide
cauaugugccauugaugac

SEQ ID NO: 1524285 - RNA, 19 nt, Artificial Sequence
  Description of Artificial Sequence: Synthetic oligonucleotide
cucgggaaggaaacgccag

SEQ ID NO: 1524286 - RNA, 19 nt, Artificial Sequence
  Description of Artificial Sequence: Synthetic oligonucleotide
uagucauaugugccauuga

SEQ ID NO: 1524287 - RNA, 19 nt, Artificial Sequence
  Description of Artificial Sequence: Synthetic oligonucleotide
cacccugugaaugacccag

SEQ ID NO: 1524288 - RNA, 19 nt, Artificial Sequence
  Description of Artificial Sequence: Synthetic oligonucleotide
aggaaacgccaguucacug

SEQ ID NO: 1524289 - RNA, 19 nt, Artificial Sequence
  Description of Artificial Sequence: Synthetic oligonucleotide
ugugugagccagcgugcag

SEQ ID NO: 1524290 - RNA, 19 nt, Artificial Sequence
  Description of Artificial Sequence: Synthetic oligonucleotide
ggaagccaaacugaguaag

SEQ ID NO: 1524291 - RNA, 19 nt, Artificial Sequence
  Description of Artificial Sequence: Synthetic oligonucleotide
agguagagaacagcaaaga

SEQ ID NO: 1524292 - RNA, 19 nt, Artificial Sequence
  Description of Artificial Sequence: Synthetic oligonucleotide
guaccuuggaggucuggug

SEQ ID NO: 1524293 - RNA, 19 nt, Artificial Sequence
  Description of Artificial Sequence: Synthetic oligonucleotide
ggugguauaucaagaaaac

SEQ ID NO: 1524294 - RNA, 19 nt, Artificial Sequence
  Description of Artificial Sequence: Synthetic oligonucleotide
acaagagguccgguggcac

SEQ ID NO: 1524295 - RNA, 19 nt, Artificial Sequence
  Description of Artificial Sequence: Synthetic oligonucleotide
gaacagcaaagauguucug

SEQ ID NO: 1524296 - RNA, 19 nt, Artificial Sequence
  Description of Artificial Sequence: Synthetic oligonucleotide
gauuucagugaguuuuccu

SEQ ID NO: 1524297 - RNA, 19 nt, Artificial Sequence
  Description of Artificial Sequence: Synthetic oligonucleotide
ggcgaagaguaacacauuc

SEQ ID NO: 1524298 - RNA, 19 nt, Artificial Sequence
  Description of Artificial Sequence: Synthetic oligonucleotide
cuggccaguugcauaguac

SEQ ID NO: 1524299 - RNA, 19 nt, Artificial Sequence
  Description of Artificial Sequence: Synthetic oligonucleotide
ucgggaaggaaacgccagu

SEQ ID NO: 1524300 - RNA, 19 nt, Artificial Sequence
  Description of Artificial Sequence: Synthetic oligonucleotide
aggucaaaggagcgggaga

SEQ ID NO: 1524301 - RNA, 19 nt, Artificial Sequence
  Description of Artificial Sequence: Synthetic oligonucleotide
agguguacacaaagccagc

SEQ ID NO: 1524302 - RNA, 19 nt, Artificial Sequence
  Description of Artificial Sequence: Synthetic oligonucleotide
ugguagugcagggaacggc

SEQ ID NO: 1524303 - RNA, 19 nt, Artificial Sequence
  Description of Artificial Sequence: Synthetic oligonucleotide
gauguggauggguacgugu

SEQ ID NO: 1524304 - RNA, 19 nt, Artificial Sequence
  Description of Artificial Sequence: Synthetic oligonucleotide
caccugaauggcagcacag

SEQ ID NO: 1524305 - RNA, 19 nt, Artificial Sequence
  Description of Artificial Sequence: Synthetic oligonucleotide
ggccauguaggcuuuccag

SEQ ID NO: 1524306 - RNA, 19 nt, Artificial Sequence
  Description of Artificial Sequence: Synthetic oligonucleotide
gaggcacaacacaugaaga

SEQ ID NO: 1524307 - RNA, 19 nt, Artificial Sequence
  Description of Artificial Sequence: Synthetic oligonucleotide
aagagccgcaguacaaaga

SEQ ID NO: 1524308 - RNA, 19 nt, Artificial Sequence
  Description of Artificial Sequence: Synthetic oligonucleotide
gugaacaggguggaaacga

SEQ ID NO: 1524309 - RNA, 19 nt, Artificial Sequence
  Description of Artificial Sequence: Synthetic oligonucleotide
ggcgacagaacccggcggg

SEQ ID NO: 1524310 - RNA, 19 nt, Artificial Sequence
  Description of Artificial Sequence: Synthetic oligonucleotide
guaugccacccugugaaug

SEQ ID NO: 1524311 - RNA, 19 nt, Artificial Sequence
  Description of Artificial Sequence: Synthetic oligonucleotide
uccacccacgauccugggc

SEQ ID NO: 1524312 - RNA, 19 nt, Artificial Sequence
  Description of Artificial Sequence: Synthetic oligonucleotide
uggaauggacacgguaaga

SEQ ID NO: 1524313 - RNA, 19 nt, Artificial Sequence
  Description of Artificial Sequence: Synthetic oligonucleotide
accacggaagccaaacuga

SEQ ID NO: 1524314 - RNA, 19 nt, Artificial Sequence
  Description of Artificial Sequence: Synthetic oligonucleotide
cagcgacagaauacuuucc

SEQ ID NO: 1524315 - RNA, 19 nt, Artificial Sequence
  Description of Artificial Sequence: Synthetic oligonucleotide
aggggcgaagaguaacaca

SEQ ID NO: 1524316 - RNA, 19 nt, Artificial Sequence
  Description of Artificial Sequence: Synthetic oligonucleotide
guaggcuuuccagucaauc

SEQ ID NO: 1524317 - RNA, 19 nt, Artificial Sequence
  Description of Artificial Sequence: Synthetic oligonucleotide
gguacguguuccaggaaag

SEQ ID NO: 1524318 - RNA, 19 nt, Artificial Sequence
  Description of Artificial Sequence: Synthetic oligonucleotide
guuaggugugagggguugg

SEQ ID NO: 1524319 - RNA, 19 nt, Artificial Sequence
  Description of Artificial Sequence: Synthetic oligonucleotide
cugggcgacagaacccggc

SEQ ID NO: 1524320 - RNA, 19 nt, Artificial Sequence
  Description of Artificial Sequence: Synthetic oligonucleotide
uggauggguacguguucca

SEQ ID NO: 1524321 - RNA, 19 nt, Artificial Sequence
  Description of Artificial Sequence: Synthetic oligonucleotide
ggcaagguuuauucuaaga

SEQ ID NO: 1524322 - RNA, 19 nt, Artificial Sequence
  Description of Artificial Sequence: Synthetic oligonucleotide
aagauggccucgggaagga

SEQ ID NO: 1524323 - RNA, 19 nt, Artificial Sequence
  Description of Artificial Sequence: Synthetic oligonucleotide
gaacaggguggaaacgauc

SEQ ID NO: 1524324 - RNA, 19 nt, Artificial Sequence
  Description of Artificial Sequence: Synthetic oligonucleotide
acgaagggagguaccuugg

SEQ ID NO: 1524325 - RNA, 19 nt, Artificial Sequence
  Description of Artificial Sequence: Synthetic oligonucleotide
guacagcaccauaaaggug

SEQ ID NO: 1524326 - RNA, 19 nt, Artificial Sequence
  Description of Artificial Sequence: Synthetic oligonucleotide
acagaacccggcgggccgc

SEQ ID NO: 1524327 - RNA, 19 nt, Artificial Sequence
  Description of Artificial Sequence: Synthetic oligonucleotide
gcuacagcagaugccaaug

SEQ ID NO: 1524328 - RNA, 19 nt, Artificial Sequence
  Description of Artificial Sequence: Synthetic oligonucleotide
guagcguggcucccgcagc

SEQ ID NO: 1524329 - RNA, 19 nt, Artificial Sequence
  Description of Artificial Sequence: Synthetic oligonucleotide
cuggugguauaucaagaaa

SEQ ID NO: 1524330 - RNA, 19 nt, Artificial Sequence
  Description of Artificial Sequence: Synthetic oligonucleotide
agggaacggcuacagcaga

SEQ ID NO: 1524331 - RNA, 19 nt, Artificial Sequence
  Description of Artificial Sequence: Synthetic oligonucleotide
guacguguuccaggaaagc

SEQ ID NO: 1524332 - RNA, 19 nt, Artificial Sequence
  Description of Artificial Sequence: Synthetic oligonucleotide
acagagacggccagacuga

SEQ ID NO: 1524333 - RNA, 19 nt, Artificial Sequence
  Description of Artificial Sequence: Synthetic oligonucleotide
uguaugccacccugugaau

SEQ ID NO: 1524334 - RNA, 19 nt, Artificial Sequence
  Description of Artificial Sequence: Synthetic oligonucleotide
gauggccucgggaaggaaa

SEQ ID NO: 1524335 - RNA, 19 nt, Artificial Sequence
  Description of Artificial Sequence: Synthetic oligonucleotide
gagcgggagagguagccaa

SEQ ID NO: 1524336 - RNA, 19 nt, Artificial Sequence
  Description of Artificial Sequence: Synthetic oligonucleotide
ccagcaguguguagcgugg

SEQ ID NO: 1524337 - RNA, 19 nt, Artificial Sequence
  Description of Artificial Sequence: Synthetic oligonucleotide
ccauguaggcuuuccaguc

SEQ ID NO: 1524338 - RNA, 19 nt, Artificial Sequence
  Description of Artificial Sequence: Synthetic oligonucleotide
ggcauaugugcagggaggc

SEQ ID NO: 1524339 - RNA, 19 nt, Artificial Sequence
  Description of Artificial Sequence: Synthetic oligonucleotide
ugggccauguaggcuuucc

SEQ ID NO: 1524340 - RNA, 19 nt, Artificial Sequence
  Description of Artificial Sequence: Synthetic oligonucleotide
gagucccgccggcugggcg

SEQ ID NO: 1524341 - RNA, 19 nt, Artificial Sequence
  Description of Artificial Sequence: Synthetic oligonucleotide
caaugagucccagcaccag

SEQ ID NO: 1524342 - RNA, 19 nt, Artificial Sequence
  Description of Artificial Sequence: Synthetic oligonucleotide
ggcaguguguggaaauacc

SEQ ID NO: 1524343 - RNA, 19 nt, Artificial Sequence
  Description of Artificial Sequence: Synthetic oligonucleotide
gccaguugcauaguacagc

SEQ ID NO: 1524344 - RNA, 19 nt, Artificial Sequence
  Description of Artificial Sequence: Synthetic oligonucleotide
ccagcgugcaggcauggcc

SEQ ID NO: 1524345 - RNA, 19 nt, Artificial Sequence
  Description of Artificial Sequence: Synthetic oligonucleotide
agucccgccggcugggcga

SEQ ID NO: 1524346 - RNA, 19 nt, Artificial Sequence
  Description of Artificial Sequence: Synthetic oligonucleotide
gcauggcauaugugcaggg

SEQ ID NO: 1524347 - RNA, 19 nt, Artificial Sequence
  Description of Artificial Sequence: Synthetic oligonucleotide
agugcagggaacggcuaca

SEQ ID NO: 1524348 - RNA, 19 nt, Artificial Sequence
  Description of Artificial Sequence: Synthetic oligonucleotide
augccacccugugaaugac

SEQ ID NO: 1524349 - RNA, 19 nt, Artificial Sequence
  Description of Artificial Sequence: Synthetic oligonucleotide
aggauguggauggguacgu

SEQ ID NO: 1524350 - RNA, 19 nt, Artificial Sequence
  Description of Artificial Sequence: Synthetic oligonucleotide
guguguagcguggcucccg

SEQ ID NO: 1524351 - RNA, 19 nt, Artificial Sequence
  Description of Artificial Sequence: Synthetic oligonucleotide
agcagcgacagaauacuuu

SEQ ID NO: 1524352 - RNA, 19 nt, Artificial Sequence
  Description of Artificial Sequence: Synthetic oligonucleotide
ggcugggcgacagaacccg

SEQ ID NO: 1524353 - RNA, 19 nt, Artificial Sequence
  Description of Artificial Sequence: Synthetic oligonucleotide
cugggucauugaagagccg

SEQ ID NO: 1524354 - RNA, 19 nt, Artificial Sequence
  Description of Artificial Sequence: Synthetic oligonucleotide
caggaagauggccucggga

SEQ ID NO: 1524355 - RNA, 19 nt, Artificial Sequence
  Description of Artificial Sequence: Synthetic oligonucleotide
gcuguagccauuguuucca

SEQ ID NO: 1524356 - RNA, 19 nt, Artificial Sequence
  Description of Artificial Sequence: Synthetic oligonucleotide
gacaagagguccgguggca

SEQ ID NO: 1524357 - RNA, 19 nt, Artificial Sequence
  Description of Artificial Sequence: Synthetic oligonucleotide
ggaaacgccaguucacugu

SEQ ID NO: 1524358 - RNA, 19 nt, Artificial Sequence
  Description of Artificial Sequence: Synthetic oligonucleotide
ggguacguguuccaggaaa

SEQ ID NO: 1524359 - RNA, 19 nt, Artificial Sequence
  Description of Artificial Sequence: Synthetic oligonucleotide
aggugacaagguagagaac

SEQ ID NO: 1524360 - RNA, 19 nt, Artificial Sequence
  Description of Artificial Sequence: Synthetic oligonucleotide
gguaagaggcacaacacau

SEQ ID NO: 1524361 - RNA, 19 nt, Artificial Sequence
  Description of Artificial Sequence: Synthetic oligonucleotide
acacgguaagaggcacaac

SEQ ID NO: 1524362 - RNA, 19 nt, Artificial Sequence
  Description of Artificial Sequence: Synthetic oligonucleotide
ggguagacaagagguccgg

SEQ ID NO: 1524363 - RNA, 19 nt, Artificial Sequence
  Description of Artificial Sequence: Synthetic oligonucleotide
cagaaggugaugcccaccu

SEQ ID NO: 1524364 - RNA, 19 nt, Artificial Sequence
  Description of Artificial Sequence: Synthetic oligonucleotide
ggauccuucagcagcgaca

SEQ ID NO: 1524365 - RNA, 19 nt, Artificial Sequence
  Description of Artificial Sequence: Synthetic oligonucleotide
cauggcauaugugcaggga

SEQ ID NO: 1524366 - RNA, 19 nt, Artificial Sequence
  Description of Artificial Sequence: Synthetic oligonucleotide
gugcagggaacggcuacag

SEQ ID NO: 1524367 - RNA, 19 nt, Artificial Sequence
  Description of Artificial Sequence: Synthetic oligonucleotide
ggaacggcuacagcagaug

SEQ ID NO: 1524368 - RNA, 19 nt, Artificial Sequence
  Description of Artificial Sequence: Synthetic oligonucleotide
aguuggaggugaacagggu

SEQ ID NO: 1524369 - RNA, 19 nt, Artificial Sequence
  Description of Artificial Sequence: Synthetic oligonucleotide
caaggucaaaggagcggga

SEQ ID NO: 1524370 - RNA, 19 nt, Artificial Sequence
  Description of Artificial Sequence: Synthetic oligonucleotide
ccacccacgauccugggca

SEQ ID NO: 1524371 - RNA, 19 nt, Artificial Sequence
  Description of Artificial Sequence: Synthetic oligonucleotide
uggguacguguuccaggaa

SEQ ID NO: 1524372 - RNA, 19 nt, Artificial Sequence
  Description of Artificial Sequence: Synthetic oligonucleotide
auagcaacccaggggcgaa

SEQ ID NO: 1524373 - RNA, 19 nt, Artificial Sequence
  Description of Artificial Sequence: Synthetic oligonucleotide
agcgugcaggcauggccca

SEQ ID NO: 1524374 - RNA, 19 nt, Artificial Sequence
  Description of Artificial Sequence: Synthetic oligonucleotide
caggggcgaagaguaacac

SEQ ID NO: 1524375 - RNA, 19 nt, Artificial Sequence
  Description of Artificial Sequence: Synthetic oligonucleotide
auccugggcagguccuagu

SEQ ID NO: 1524376 - RNA, 19 nt, Artificial Sequence
  Description of Artificial Sequence: Synthetic oligonucleotide
uccugcuaggcuggaugcu

SEQ ID NO: 1524377 - RNA, 19 nt, Artificial Sequence
  Description of Artificial Sequence: Synthetic oligonucleotide
agucccaguaccaccugaa

SEQ ID NO: 1524378 - RNA, 19 nt, Artificial Sequence
  Description of Artificial Sequence: Synthetic oligonucleotide
cugguuaggugugaggggu

SEQ ID NO: 1524379 - RNA, 19 nt, Artificial Sequence
  Description of Artificial Sequence: Synthetic oligonucleotide
gggcgacagaacccggcgg

SEQ ID NO: 1524380 - RNA, 19 nt, Artificial Sequence
  Description of Artificial Sequence: Synthetic oligonucleotide
uggacuuggcaagguuuau

SEQ ID NO: 1524381 - RNA, 19 nt, Artificial Sequence
  Description of Artificial Sequence: Synthetic oligonucleotide
guggacuuggcaagguuua

SEQ ID NO: 1524382 - RNA, 19 nt, Artificial Sequence
  Description of Artificial Sequence: Synthetic oligonucleotide
agcaacccaggggcgaaga

SEQ ID NO: 1524383 - RNA, 19 nt, Artificial Sequence
  Description of Artificial Sequence: Synthetic oligonucleotide
gcgaagaguaacacauuca

SEQ ID NO: 1524384 - RNA, 19 nt, Artificial Sequence
  Description of Artificial Sequence: Synthetic oligonucleotide
aggucuggugguauaucaa

SEQ ID NO: 1524385 - RNA, 19 nt, Artificial Sequence
  Description of Artificial Sequence: Synthetic oligonucleotide
agagucccgccggcugggc

SEQ ID NO: 1524386 - RNA, 19 nt, Artificial Sequence
  Description of Artificial Sequence: Synthetic oligonucleotide
aacccggcgggccgcguuu

SEQ ID NO: 1524387 - RNA, 19 nt, Artificial Sequence
  Description of Artificial Sequence: Synthetic oligonucleotide
guccauuggaagagaaacu

SEQ ID NO: 1524388 - RNA, 19 nt, Artificial Sequence
  Description of Artificial Sequence: Synthetic oligonucleotide
caaaggagcgggagaggua

SEQ ID NO: 1524389 - RNA, 19 nt, Artificial Sequence
  Description of Artificial Sequence: Synthetic oligonucleotide
acgaucugguuagguguga

SEQ ID NO: 1524390 - RNA, 19 nt, Artificial Sequence
  Description of Artificial Sequence: Synthetic oligonucleotide
gcggcauucuugccaggcc

SEQ ID NO: 1524391 - RNA, 19 nt, Artificial Sequence
  Description of Artificial Sequence: Synthetic oligonucleotide
gagguccgguggcacccug

SEQ ID NO: 1524392 - RNA, 19 nt, Artificial Sequence
  Description of Artificial Sequence: Synthetic oligonucleotide
ugcuaggcuggaugcucuu

SEQ ID NO: 1524393 - RNA, 19 nt, Artificial Sequence
  Description of Artificial Sequence: Synthetic oligonucleotide
gggauuucagugaguuuuc

SEQ ID NO: 1524394 - RNA, 19 nt, Artificial Sequence
  Description of Artificial Sequence: Synthetic oligonucleotide
gggcaguguguggaaauac

SEQ ID NO: 1524395 - RNA, 19 nt, Artificial Sequence
  Description of Artificial Sequence: Synthetic oligonucleotide
agacgaagggagguaccuu

SEQ ID NO: 1524396 - RNA, 19 nt, Artificial Sequence
  Description of Artificial Sequence: Synthetic oligonucleotide
guccgguggcacccugcag

SEQ ID NO: 1524397 - RNA, 19 nt, Artificial Sequence
  Description of Artificial Sequence: Synthetic oligonucleotide
gugugugagccagcgugca

SEQ ID NO: 1524398 - RNA, 19 nt, Artificial Sequence
  Description of Artificial Sequence: Synthetic oligonucleotide
ccacugggucauugaagag

SEQ ID NO: 1524399 - RNA, 19 nt, Artificial Sequence
  Description of Artificial Sequence: Synthetic oligonucleotide
acgccaguucacuguccau

SEQ ID NO: 1524400 - RNA, 19 nt, Artificial Sequence
  Description of Artificial Sequence: Synthetic oligonucleotide
ggauguggauggguacgug

SEQ ID NO: 1524401 - RNA, 19 nt, Artificial Sequence
  Description of Artificial Sequence: Synthetic oligonucleotide
ccgaugcaggaagauggcc

SEQ ID NO: 1524402 - RNA, 19 nt, Artificial Sequence
  Description of Artificial Sequence: Synthetic oligonucleotide
caaagccagcgggguagac

SEQ ID NO: 1524403 - RNA, 19 nt, Artificial Sequence
  Description of Artificial Sequence: Synthetic oligonucleotide
cacggaagccaaacugagu

SEQ ID NO: 1524404 - RNA, 19 nt, Artificial Sequence
  Description of Artificial Sequence: Synthetic oligonucleotide
ccugcuaggcuggaugcuc

SEQ ID NO: 1524405 - RNA, 19 nt, Artificial Sequence
  Description of Artificial Sequence: Synthetic oligonucleotide
gguccgguggcacccugca

SEQ ID NO: 1524406 - RNA, 19 nt, Artificial Sequence
  Description of Artificial Sequence: Synthetic oligonucleotide
gguaccuuggaggucuggu

SEQ ID NO: 1524407 - RNA, 19 nt, Artificial Sequence
  Description of Artificial Sequence: Synthetic oligonucleotide
ccaggggcgaagaguaaca

SEQ ID NO: 1524408 - RNA, 19 nt, Artificial Sequence
  Description of Artificial Sequence: Synthetic oligonucleotide
gccgcguuuccgcagccca

SEQ ID NO: 1524409 - RNA, 19 nt, Artificial Sequence
  Description of Artificial Sequence: Synthetic oligonucleotide
cccaggggcgaagaguaac

SEQ ID NO: 1524410 - RNA, 19 nt, Artificial Sequence
  Description of Artificial Sequence: Synthetic oligonucleotide
gcgggagagguagccaaug

SEQ ID NO: 1524411 - RNA, 19 nt, Artificial Sequence
  Description of Artificial Sequence: Synthetic oligonucleotide
ggcuuuccagucaaucucu

SEQ ID NO: 1524412 - RNA, 19 nt, Artificial Sequence
  Description of Artificial Sequence: Synthetic oligonucleotide
gcauucuugccaggcccgc

SEQ ID NO: 1524413 - RNA, 19 nt, Artificial Sequence
  Description of Artificial Sequence: Synthetic oligonucleotide
cagaacccggcgggccgcg

SEQ ID NO: 1524414 - RNA, 19 nt, Artificial Sequence
  Description of Artificial Sequence: Synthetic oligonucleotide
agagguccgguggcacccu

SEQ ID NO: 1524415 - RNA, 19 nt, Artificial Sequence
  Description of Artificial Sequence: Synthetic oligonucleotide
guguagcguggcucccgca

SEQ ID NO: 1524416 - RNA, 19 nt, Artificial Sequence
  Description of Artificial Sequence: Synthetic oligonucleotide
agcgggagagguagccaau

SEQ ID NO: 1524417 - RNA, 19 nt, Artificial Sequence
  Description of Artificial Sequence: Synthetic oligonucleotide
cgaugcaggaagauggccu

SEQ ID NO: 1524418 - RNA, 19 nt, Artificial Sequence
  Description of Artificial Sequence: Synthetic oligonucleotide
gcauaugugcagggaggca

SEQ ID NO: 1524419 - RNA, 19 nt, Artificial Sequence
  Description of Artificial Sequence: Synthetic oligonucleotide
aggcccgaugcaggaagau

SEQ ID NO: 1524420 - RNA, 19 nt, Artificial Sequence
  Description of Artificial Sequence: Synthetic oligonucleotide
ggcuacagcagaugccaau

SEQ ID NO: 1524421 - RNA, 19 nt, Artificial Sequence
  Description of Artificial Sequence: Synthetic oligonucleotide
gggaaaggcugaggggaca

SEQ ID NO: 1524422 - RNA, 19 nt, Artificial Sequence
  Description of Artificial Sequence: Synthetic oligonucleotide
gucccaguaccaccugaau

SEQ ID NO: 1524423 - RNA, 19 nt, Artificial Sequence
  Description of Artificial Sequence: Synthetic oligonucleotide
cgaucugguuaggugugag

SEQ ID NO: 1524424 - RNA, 19 nt, Artificial Sequence
  Description of Artificial Sequence: Synthetic oligonucleotide
gcugggcgacagaacccgg

SEQ ID NO: 1524425 - RNA, 19 nt, Artificial Sequence
  Description of Artificial Sequence: Synthetic oligonucleotide
gcaaccuaagcaggugugu

SEQ ID NO: 1524426 - RNA, 19 nt, Artificial Sequence
  Description of Artificial Sequence: Synthetic oligonucleotide
gcgggguagacaagagguc

SEQ ID NO: 1524427 - RNA, 19 nt, Artificial Sequence
  Description of Artificial Sequence: Synthetic oligonucleotide
gcgacagaacccggcgggc

SEQ ID NO: 1524428 - RNA, 19 nt, Artificial Sequence
  Description of Artificial Sequence: Synthetic oligonucleotide
cguuuccgcagcccagcag

SEQ ID NO: 1524429 - RNA, 19 nt, Artificial Sequence
  Description of Artificial Sequence: Synthetic oligonucleotide
ccgcaguacaaagauggaa

SEQ ID NO: 1524430 - RNA, 19 nt, Artificial Sequence
  Description of Artificial Sequence: Synthetic oligonucleotide
caaagauguucugggccau

SEQ ID NO: 1524431 - RNA, 19 nt, Artificial Sequence
  Description of Artificial Sequence: Synthetic oligonucleotide
cagagacggccagacugaa

SEQ ID NO: 1524432 - RNA, 19 nt, Artificial Sequence
  Description of Artificial Sequence: Synthetic oligonucleotide
cuauuccacccacgauccu

SEQ ID NO: 1524433 - RNA, 19 nt, Artificial Sequence
  Description of Artificial Sequence: Synthetic oligonucleotide
gguagacaagagguccggu

SEQ ID NO: 1524434 - RNA, 19 nt, Artificial Sequence
  Description of Artificial Sequence: Synthetic oligonucleotide
cgacagaacccggcgggcc

SEQ ID NO: 1524435 - RNA, 19 nt, Artificial Sequence
  Description of Artificial Sequence: Synthetic oligonucleotide
gccgcaguacaaagaugga

SEQ ID NO: 1524436 - RNA, 19 nt, Artificial Sequence
  Description of Artificial Sequence: Synthetic oligonucleotide
cccugugaaugacccagaa

SEQ ID NO: 1524437 - RNA, 19 nt, Artificial Sequence
  Description of Artificial Sequence: Synthetic oligonucleotide
cauucuugccaggcccgcu

SEQ ID NO: 1524438 - RNA, 19 nt, Artificial Sequence
  Description of Artificial Sequence: Synthetic oligonucleotide
agaacccggcgggccgcgu

SEQ ID NO: 1524439 - RNA, 19 nt, Artificial Sequence
  Description of Artificial Sequence: Synthetic oligonucleotide
gaacccggcgggccgcguu

SEQ ID NO: 1524440 - RNA, 19 nt, Artificial Sequence
  Description of Artificial Sequence: Synthetic oligonucleotide
ggaggugaacaggguggaa

SEQ ID NO: 1524441 - RNA, 19 nt, Artificial Sequence
  Description of Artificial Sequence: Synthetic oligonucleotide
cagcagcgacagaauacuu

SEQ ID NO: 1524442 - RNA, 19 nt, Artificial Sequence
  Description of Artificial Sequence: Synthetic oligonucleotide
gucccgccggcugggcgac

SEQ ID NO: 1524443 - RNA, 19 nt, Artificial Sequence
  Description of Artificial Sequence: Synthetic oligonucleotide
gggccgcguuuccgcagcc

SEQ ID NO: 1524444 - RNA, 19 nt, Artificial Sequence
  Description of Artificial Sequence: Synthetic oligonucleotide
cgggccgcguuuccgcagc

SEQ ID NO: 1524445 - RNA, 19 nt, Artificial Sequence
  Description of Artificial Sequence: Synthetic oligonucleotide
gggaacggcuacagcagau

SEQ ID NO: 1524446 - RNA, 19 nt, Artificial Sequence
  Description of Artificial Sequence: Synthetic oligonucleotide
ggaugacagcauggcauau

SEQ ID NO: 1524447 - RNA, 19 nt, Artificial Sequence
  Description of Artificial Sequence: Synthetic oligonucleotide
gggguggaacuuuccuuuu

SEQ ID NO: 1524448 - RNA, 19 nt, Artificial Sequence
  Description of Artificial Sequence: Synthetic oligonucleotide
cggcgggccgcguuuccgc

SEQ ID NO: 1524449 - RNA, 19 nt, Artificial Sequence
  Description of Artificial Sequence: Synthetic oligonucleotide
cccgccggcugggcgacag

SEQ ID NO: 1524450 - RNA, 19 nt, Artificial Sequence
  Description of Artificial Sequence: Synthetic oligonucleotide
gcccgcuguagccauuguu

SEQ ID NO: 1524451 - RNA, 19 nt, Artificial Sequence
  Description of Artificial Sequence: Synthetic oligonucleotide
cccggcgggccgcguuucc

SEQ ID NO: 1524452 - RNA, 19 nt, Artificial Sequence
  Description of Artificial Sequence: Synthetic oligonucleotide
cgugcaggcauggcccaca

SEQ ID NO: 1524453 - RNA, 19 nt, Artificial Sequence
  Description of Artificial Sequence: Synthetic oligonucleotide
gggcgaagaguaacacauu

SEQ ID NO: 1524454 - RNA, 19 nt, Artificial Sequence
  Description of Artificial Sequence: Synthetic oligonucleotide
ucccgccggcugggcgaca

SEQ ID NO: 1524455 - RNA, 19 nt, Artificial Sequence
  Description of Artificial Sequence: Synthetic oligonucleotide
cgauccugggcagguccua

SEQ ID NO: 1524456 - RNA, 19 nt, Artificial Sequence
  Description of Artificial Sequence: Synthetic oligonucleotide
ccgccggcugggcgacaga

SEQ ID NO: 1524457 - RNA, 19 nt, Artificial Sequence
  Description of Artificial Sequence: Synthetic oligonucleotide
uacacaaucacauugaucc

SEQ ID NO: 1524458 - RNA, 19 nt, Artificial Sequence
  Description of Artificial Sequence: Synthetic oligonucleotide
aauuuggacagauauggcc

SEQ ID NO: 1524459 - RNA, 19 nt, Artificial Sequence
  Description of Artificial Sequence: Synthetic oligonucleotide
acaaagacgaacuaagggg

SEQ ID NO: 1524460 - RNA, 19 nt, Artificial Sequence
  Description of Artificial Sequence: Synthetic oligonucleotide
uuaugaagacguaagauga

SEQ ID NO: 1524461 - RNA, 19 nt, Artificial Sequence
  Description of Artificial Sequence: Synthetic oligonucleotide
aaugucggacaccucagcc

SEQ ID NO: 1524462 - RNA, 19 nt, Artificial Sequence
  Description of Artificial Sequence: Synthetic oligonucleotide
uguuauagaaguuuacccc

SEQ ID NO: 1524463 - RNA, 19 nt, Artificial Sequence
  Description of Artificial Sequence: Synthetic oligonucleotide
uuaggauugcuguacaggg

SEQ ID NO: 1524464 - RNA, 19 nt, Artificial Sequence
  Description of Artificial Sequence: Synthetic oligonucleotide
uaauagagccaccagaaca

SEQ ID NO: 1524465 - RNA, 19 nt, Artificial Sequence
  Description of Artificial Sequence: Synthetic oligonucleotide
uuugucaucaaggagagac

SEQ ID NO: 1524466 - RNA, 19 nt, Artificial Sequence
  Description of Artificial Sequence: Synthetic oligonucleotide
ugaagcucuagacuaaugc

SEQ ID NO: 1524467 - RNA, 19 nt, Artificial Sequence
  Description of Artificial Sequence: Synthetic oligonucleotide
uuauggcaaucaaagaagg

SEQ ID NO: 1524468 - RNA, 19 nt, Artificial Sequence
  Description of Artificial Sequence: Synthetic oligonucleotide
agugggaccggacagacac

SEQ ID NO: 1524469 - RNA, 19 nt, Artificial Sequence
  Description of Artificial Sequence: Synthetic oligonucleotide
uuauccacaaacaggagac

SEQ ID NO: 1524470 - RNA, 19 nt, Artificial Sequence
  Description of Artificial Sequence: Synthetic oligonucleotide
cuuaugaagacguaagaug

SEQ ID NO: 1524471 - RNA, 19 nt, Artificial Sequence
  Description of Artificial Sequence: Synthetic oligonucleotide
caugaguugacuuaaggug

SEQ ID NO: 1524472 - RNA, 19 nt, Artificial Sequence
  Description of Artificial Sequence: Synthetic oligonucleotide
aagacguaagaugacuggc

SEQ ID NO: 1524473 - RNA, 19 nt, Artificial Sequence
  Description of Artificial Sequence: Synthetic oligonucleotide
uguucacguaacuaaagcc

SEQ ID NO: 1524474 - RNA, 19 nt, Artificial Sequence
  Description of Artificial Sequence: Synthetic oligonucleotide
auaggcaucaguuguguuc

SEQ ID NO: 1524475 - RNA, 19 nt, Artificial Sequence
  Description of Artificial Sequence: Synthetic oligonucleotide
aaggcuagguuuucguagg

SEQ ID NO: 1524476 - RNA, 19 nt, Artificial Sequence
  Description of Artificial Sequence: Synthetic oligonucleotide
aucaaagaaggauuucagg

SEQ ID NO: 1524477 - RNA, 19 nt, Artificial Sequence
  Description of Artificial Sequence: Synthetic oligonucleotide
caaagacgaacuaaggggc

SEQ ID NO: 1524478 - RNA, 19 nt, Artificial Sequence
  Description of Artificial Sequence: Synthetic oligonucleotide
uuuucggacggucacauaa

SEQ ID NO: 1524479 - RNA, 19 nt, Artificial Sequence
  Description of Artificial Sequence: Synthetic oligonucleotide
uuuccgaagacuuaggauu

SEQ ID NO: 1524480 - RNA, 19 nt, Artificial Sequence
  Description of Artificial Sequence: Synthetic oligonucleotide
aagaggaccgauuuccuca

SEQ ID NO: 1524481 - RNA, 19 nt, Artificial Sequence
  Description of Artificial Sequence: Synthetic oligonucleotide
gauguucccuugcugaacg

SEQ ID NO: 1524482 - RNA, 19 nt, Artificial Sequence
  Description of Artificial Sequence: Synthetic oligonucleotide
uucacguaacuaaagccag

SEQ ID NO: 1524483 - RNA, 19 nt, Artificial Sequence
  Description of Artificial Sequence: Synthetic oligonucleotide
gaaggcuagguuuucguag

SEQ ID NO: 1524484 - RNA, 19 nt, Artificial Sequence
  Description of Artificial Sequence: Synthetic oligonucleotide
aaagcagauguuuccgaag

SEQ ID NO: 1524485 - RNA, 19 nt, Artificial Sequence
  Description of Artificial Sequence: Synthetic oligonucleotide
gaagcucuagacuaaugcc

SEQ ID NO: 1524486 - RNA, 19 nt, Artificial Sequence
  Description of Artificial Sequence: Synthetic oligonucleotide
aaaggaaccgucuggaauu

SEQ ID NO: 1524487 - RNA, 19 nt, Artificial Sequence
  Description of Artificial Sequence: Synthetic oligonucleotide
ugcaaugucggacaccuca

SEQ ID NO: 1524488 - RNA, 19 nt, Artificial Sequence
  Description of Artificial Sequence: Synthetic oligonucleotide
aacuaaggggcuccggagg

SEQ ID NO: 1524489 - RNA, 19 nt, Artificial Sequence
  Description of Artificial Sequence: Synthetic oligonucleotide
uuucaggagaaccaucaug

SEQ ID NO: 1524490 - RNA, 19 nt, Artificial Sequence
  Description of Artificial Sequence: Synthetic oligonucleotide
auugaucccggcuuccagc

SEQ ID NO: 1524491 - RNA, 19 nt, Artificial Sequence
  Description of Artificial Sequence: Synthetic oligonucleotide
ugacaaagacgaacuaagg

SEQ ID NO: 1524492 - RNA, 19 nt, Artificial Sequence
  Description of Artificial Sequence: Synthetic oligonucleotide
agaaguuuaccccaucugu

SEQ ID NO: 1524493 - RNA, 19 nt, Artificial Sequence
  Description of Artificial Sequence: Synthetic oligonucleotide
ugaagacguaagaugacug

SEQ ID NO: 1524494 - RNA, 19 nt, Artificial Sequence
  Description of Artificial Sequence: Synthetic oligonucleotide
uuugcauaggcaucaguug

SEQ ID NO: 1524495 - RNA, 19 nt, Artificial Sequence
  Description of Artificial Sequence: Synthetic oligonucleotide
gauguuuccgaagacuuag

SEQ ID NO: 1524496 - RNA, 19 nt, Artificial Sequence
  Description of Artificial Sequence: Synthetic oligonucleotide
uccauggugaauacagugc

SEQ ID NO: 1524497 - RNA, 19 nt, Artificial Sequence
  Description of Artificial Sequence: Synthetic oligonucleotide
aggagaaccaucauguccg

SEQ ID NO: 1524498 - RNA, 19 nt, Artificial Sequence
  Description of Artificial Sequence: Synthetic oligonucleotide
uguguucacguaacuaaag

SEQ ID NO: 1524499 - RNA, 19 nt, Artificial Sequence
  Description of Artificial Sequence: Synthetic oligonucleotide
aaccaucauguccgaagcc

SEQ ID NO: 1524500 - RNA, 19 nt, Artificial Sequence
  Description of Artificial Sequence: Synthetic oligonucleotide
ucucacgugacgcugacaa

SEQ ID NO: 1524501 - RNA, 19 nt, Artificial Sequence
  Description of Artificial Sequence: Synthetic oligonucleotide
aagcagauguuuccgaaga

SEQ ID NO: 1524502 - RNA, 19 nt, Artificial Sequence
  Description of Artificial Sequence: Synthetic oligonucleotide
uauagcgucaaggacuugc

SEQ ID NO: 1524503 - RNA, 19 nt, Artificial Sequence
  Description of Artificial Sequence: Synthetic oligonucleotide
auggugaauacagugccgc

SEQ ID NO: 1524504 - RNA, 19 nt, Artificial Sequence
  Description of Artificial Sequence: Synthetic oligonucleotide
agauccauggugaauacag

SEQ ID NO: 1524505 - RNA, 19 nt, Artificial Sequence
  Description of Artificial Sequence: Synthetic oligonucleotide
agauauggccacuucagcu

SEQ ID NO: 1524506 - RNA, 19 nt, Artificial Sequence
  Description of Artificial Sequence: Synthetic oligonucleotide
ugaagccacaugaccaggg

SEQ ID NO: 1524507 - RNA, 19 nt, Artificial Sequence
  Description of Artificial Sequence: Synthetic oligonucleotide
uagauuucucacgugacgc

SEQ ID NO: 1524508 - RNA, 19 nt, Artificial Sequence
  Description of Artificial Sequence: Synthetic oligonucleotide
uugcauaggcaucaguugu

SEQ ID NO: 1524509 - RNA, 19 nt, Artificial Sequence
  Description of Artificial Sequence: Synthetic oligonucleotide
aagccuuugucaucaagga

SEQ ID NO: 1524510 - RNA, 19 nt, Artificial Sequence
  Description of Artificial Sequence: Synthetic oligonucleotide
uagaaguuuaccccaucug

SEQ ID NO: 1524511 - RNA, 19 nt, Artificial Sequence
  Description of Artificial Sequence: Synthetic oligonucleotide
acaaaagcagauguuuccg

SEQ ID NO: 1524512 - RNA, 19 nt, Artificial Sequence
  Description of Artificial Sequence: Synthetic oligonucleotide
cuuaggauugcuguacagg

SEQ ID NO: 1524513 - RNA, 19 nt, Artificial Sequence
  Description of Artificial Sequence: Synthetic oligonucleotide
auagaaguuuaccccaucu

SEQ ID NO: 1524514 - RNA, 19 nt, Artificial Sequence
  Description of Artificial Sequence: Synthetic oligonucleotide
cuagacuaaugccagcagc

SEQ ID NO: 1524515 - RNA, 19 nt, Artificial Sequence
  Description of Artificial Sequence: Synthetic oligonucleotide
aaccccagaaaaguugcac

SEQ ID NO: 1524516 - RNA, 19 nt, Artificial Sequence
  Description of Artificial Sequence: Synthetic oligonucleotide
gauuccauagaggucucgg

SEQ ID NO: 1524517 - RNA, 19 nt, Artificial Sequence
  Description of Artificial Sequence: Synthetic oligonucleotide
auuccguggcuugagaugg

SEQ ID NO: 1524518 - RNA, 19 nt, Artificial Sequence
  Description of Artificial Sequence: Synthetic oligonucleotide
gaaccaucauguccgaagc

SEQ ID NO: 1524519 - RNA, 19 nt, Artificial Sequence
  Description of Artificial Sequence: Synthetic oligonucleotide
uuuauagcgucaaggacuu

SEQ ID NO: 1524520 - RNA, 19 nt, Artificial Sequence
  Description of Artificial Sequence: Synthetic oligonucleotide
ucugcaaugucggacaccu

SEQ ID NO: 1524521 - RNA, 19 nt, Artificial Sequence
  Description of Artificial Sequence: Synthetic oligonucleotide
agccauuuccccuugguca

SEQ ID NO: 1524522 - RNA, 19 nt, Artificial Sequence
  Description of Artificial Sequence: Synthetic oligonucleotide
ucuagacuaaugccagcag

SEQ ID NO: 1524523 - RNA, 19 nt, Artificial Sequence
  Description of Artificial Sequence: Synthetic oligonucleotide
guuauccacaaacaggaga

SEQ ID NO: 1524524 - RNA, 19 nt, Artificial Sequence
  Description of Artificial Sequence: Synthetic oligonucleotide
acguaacuaaagccagugc

SEQ ID NO: 1524525 - RNA, 19 nt, Artificial Sequence
  Description of Artificial Sequence: Synthetic oligonucleotide
cauaauagagccaccagaa

SEQ ID NO: 1524526 - RNA, 19 nt, Artificial Sequence
  Description of Artificial Sequence: Synthetic oligonucleotide
aaggauuucaggagaacca

SEQ ID NO: 1524527 - RNA, 19 nt, Artificial Sequence
  Description of Artificial Sequence: Synthetic oligonucleotide
ugcuuaugaagacguaaga

SEQ ID NO: 1524528 - RNA, 19 nt, Artificial Sequence
  Description of Artificial Sequence: Synthetic oligonucleotide
agcgucaaggacuugcucu

SEQ ID NO: 1524529 - RNA, 19 nt, Artificial Sequence
  Description of Artificial Sequence: Synthetic oligonucleotide
gauuucaggagaaccauca

SEQ ID NO: 1524530 - RNA, 19 nt, Artificial Sequence
  Description of Artificial Sequence: Synthetic oligonucleotide
gucaagaggaccgauuucc

SEQ ID NO: 1524531 - RNA, 19 nt, Artificial Sequence
  Description of Artificial Sequence: Synthetic oligonucleotide
ucaguuguguucacguaac

SEQ ID NO: 1524532 - RNA, 19 nt, Artificial Sequence
  Description of Artificial Sequence: Synthetic oligonucleotide
guuguguucacguaacuaa

SEQ ID NO: 1524533 - RNA, 19 nt, Artificial Sequence
  Description of Artificial Sequence: Synthetic oligonucleotide
guaacuaaagccagugccc

SEQ ID NO: 1524534 - RNA, 19 nt, Artificial Sequence
  Description of Artificial Sequence: Synthetic oligonucleotide
ugcccauuauacacaauca

SEQ ID NO: 1524535 - RNA, 19 nt, Artificial Sequence
  Description of Artificial Sequence: Synthetic oligonucleotide
aguuaagauguuauagaag

SEQ ID NO: 1524536 - RNA, 19 nt, Artificial Sequence
  Description of Artificial Sequence: Synthetic oligonucleotide
uauuccguggcuugagaug

SEQ ID NO: 1524537 - RNA, 19 nt, Artificial Sequence
  Description of Artificial Sequence: Synthetic oligonucleotide
uccggaggaacucaaggcu

SEQ ID NO: 1524538 - RNA, 19 nt, Artificial Sequence
  Description of Artificial Sequence: Synthetic oligonucleotide
ucuugcaaggguugguggc

SEQ ID NO: 1524539 - RNA, 19 nt, Artificial Sequence
  Description of Artificial Sequence: Synthetic oligonucleotide
cuugauguucccuugcuga

SEQ ID NO: 1524540 - RNA, 19 nt, Artificial Sequence
  Description of Artificial Sequence: Synthetic oligonucleotide
uaugaagacguaagaugac

SEQ ID NO: 1524541 - RNA, 19 nt, Artificial Sequence
  Description of Artificial Sequence: Synthetic oligonucleotide
gacacgccacgccagaucc

SEQ ID NO: 1524542 - RNA, 19 nt, Artificial Sequence
  Description of Artificial Sequence: Synthetic oligonucleotide
gugggcaucuuuucggacg

SEQ ID NO: 1524543 - RNA, 19 nt, Artificial Sequence
  Description of Artificial Sequence: Synthetic oligonucleotide
cugcccauuauacacaauc

SEQ ID NO: 1524544 - RNA, 19 nt, Artificial Sequence
  Description of Artificial Sequence: Synthetic oligonucleotide
cuugugaagcucuagacua

SEQ ID NO: 1524545 - RNA, 19 nt, Artificial Sequence
  Description of Artificial Sequence: Synthetic oligonucleotide
auuuggacagauauggcca

SEQ ID NO: 1524546 - RNA, 19 nt, Artificial Sequence
  Description of Artificial Sequence: Synthetic oligonucleotide
uccugaugagucaccagcc

SEQ ID NO: 1524547 - RNA, 19 nt, Artificial Sequence
  Description of Artificial Sequence: Synthetic oligonucleotide
gaacuaaggggcuccggag

SEQ ID NO: 1524548 - RNA, 19 nt, Artificial Sequence
  Description of Artificial Sequence: Synthetic oligonucleotide
agauccacgagucacccaa

SEQ ID NO: 1524549 - RNA, 19 nt, Artificial Sequence
  Description of Artificial Sequence: Synthetic oligonucleotide
agauguuauagaaguuuac

SEQ ID NO: 1524550 - RNA, 19 nt, Artificial Sequence
  Description of Artificial Sequence: Synthetic oligonucleotide
cucagggaugauuuugagc

SEQ ID NO: 1524551 - RNA, 19 nt, Artificial Sequence
  Description of Artificial Sequence: Synthetic oligonucleotide
aaguugcacuugauguucc

SEQ ID NO: 1524552 - RNA, 19 nt, Artificial Sequence
  Description of Artificial Sequence: Synthetic oligonucleotide
uggcaaucaaagaaggauu

SEQ ID NO: 1524553 - RNA, 19 nt, Artificial Sequence
  Description of Artificial Sequence: Synthetic oligonucleotide
uuucguaggacuugacaaa

SEQ ID NO: 1524554 - RNA, 19 nt, Artificial Sequence
  Description of Artificial Sequence: Synthetic oligonucleotide
ugaguggccuccuuguaga

SEQ ID NO: 1524555 - RNA, 19 nt, Artificial Sequence
  Description of Artificial Sequence: Synthetic oligonucleotide
ucggacggucacauaaucc

SEQ ID NO: 1524556 - RNA, 19 nt, Artificial Sequence
  Description of Artificial Sequence: Synthetic oligonucleotide
aagacgaacuaaggggcuc

SEQ ID NO: 1524557 - RNA, 19 nt, Artificial Sequence
  Description of Artificial Sequence: Synthetic oligonucleotide
guggccuccuuguagaagc

SEQ ID NO: 1524558 - RNA, 19 nt, Artificial Sequence
  Description of Artificial Sequence: Synthetic oligonucleotide
guucacguaacuaaagcca

SEQ ID NO: 1524559 - RNA, 19 nt, Artificial Sequence
  Description of Artificial Sequence: Synthetic oligonucleotide
aacggcagcuccugcacug

SEQ ID NO: 1524560 - RNA, 19 nt, Artificial Sequence
  Description of Artificial Sequence: Synthetic oligonucleotide
aggaccgauuuccucaaag

SEQ ID NO: 1524561 - RNA, 19 nt, Artificial Sequence
  Description of Artificial Sequence: Synthetic oligonucleotide
guuuauagcgucaaggacu

SEQ ID NO: 1524562 - RNA, 19 nt, Artificial Sequence
  Description of Artificial Sequence: Synthetic oligonucleotide
cauggugaauacagugccg

SEQ ID NO: 1524563 - RNA, 19 nt, Artificial Sequence
  Description of Artificial Sequence: Synthetic oligonucleotide
agcagauguuuccgaagac

SEQ ID NO: 1524564 - RNA, 19 nt, Artificial Sequence
  Description of Artificial Sequence: Synthetic oligonucleotide
ugacccgcccuuaggaucc

SEQ ID NO: 1524565 - RNA, 19 nt, Artificial Sequence
  Description of Artificial Sequence: Synthetic oligonucleotide
agcccuuguuuauagcguc

SEQ ID NO: 1524566 - RNA, 19 nt, Artificial Sequence
  Description of Artificial Sequence: Synthetic oligonucleotide
uuguguucacguaacuaaa

SEQ ID NO: 1524567 - RNA, 19 nt, Artificial Sequence
  Description of Artificial Sequence: Synthetic oligonucleotide
uguguucuuuucaaugaua

SEQ ID NO: 1524568 - RNA, 19 nt, Artificial Sequence
  Description of Artificial Sequence: Synthetic oligonucleotide
uaacuaaagccagugccca

SEQ ID NO: 1524569 - RNA, 19 nt, Artificial Sequence
  Description of Artificial Sequence: Synthetic oligonucleotide
caaauccagugcuggaacc

SEQ ID NO: 1524570 - RNA, 19 nt, Artificial Sequence
  Description of Artificial Sequence: Synthetic oligonucleotide
gacgcugacaaagacgaac

SEQ ID NO: 1524571 - RNA, 19 nt, Artificial Sequence
  Description of Artificial Sequence: Synthetic oligonucleotide
acaggggagauccacgagu

SEQ ID NO: 1524572 - RNA, 19 nt, Artificial Sequence
  Description of Artificial Sequence: Synthetic oligonucleotide
accgauuuccucaaaguug

SEQ ID NO: 1524573 - RNA, 19 nt, Artificial Sequence
  Description of Artificial Sequence: Synthetic oligonucleotide
aagauguuauagaaguuua

SEQ ID NO: 1524574 - RNA, 19 nt, Artificial Sequence
  Description of Artificial Sequence: Synthetic oligonucleotide
acuuaggauugcuguacag

SEQ ID NO: 1524575 - RNA, 19 nt, Artificial Sequence
  Description of Artificial Sequence: Synthetic oligonucleotide
cuugagaugggugucaaga

SEQ ID NO: 1524576 - RNA, 19 nt, Artificial Sequence
  Description of Artificial Sequence: Synthetic oligonucleotide
uugucaucaaggagagaca

SEQ ID NO: 1524577 - RNA, 19 nt, Artificial Sequence
  Description of Artificial Sequence: Synthetic oligonucleotide
aucauguccgaagccaccg

SEQ ID NO: 1524578 - RNA, 19 nt, Artificial Sequence
  Description of Artificial Sequence: Synthetic oligonucleotide
ugucggacaccucagccaa

SEQ ID NO: 1524579 - RNA, 19 nt, Artificial Sequence
  Description of Artificial Sequence: Synthetic oligonucleotide
agacgaacuaaggggcucc

SEQ ID NO: 1524580 - RNA, 19 nt, Artificial Sequence
  Description of Artificial Sequence: Synthetic oligonucleotide
caugguguccacaaugaga

SEQ ID NO: 1524581 - RNA, 19 nt, Artificial Sequence
  Description of Artificial Sequence: Synthetic oligonucleotide
auacacaaucacauugauc

SEQ ID NO: 1524582 - RNA, 19 nt, Artificial Sequence
  Description of Artificial Sequence: Synthetic oligonucleotide
guuuucguaggacuugaca

SEQ ID NO: 1524583 - RNA, 19 nt, Artificial Sequence
  Description of Artificial Sequence: Synthetic oligonucleotide
augcuuaugaagacguaag

SEQ ID NO: 1524584 - RNA, 19 nt, Artificial Sequence
  Description of Artificial Sequence: Synthetic oligonucleotide
gauuucucacgugacgcug

SEQ ID NO: 1524585 - RNA, 19 nt, Artificial Sequence
  Description of Artificial Sequence: Synthetic oligonucleotide
uccacgagucacccaaggc

SEQ ID NO: 1524586 - RNA, 19 nt, Artificial Sequence
  Description of Artificial Sequence: Synthetic oligonucleotide
gugacgcugacaaagacga

SEQ ID NO: 1524587 - RNA, 19 nt, Artificial Sequence
  Description of Artificial Sequence: Synthetic oligonucleotide
ugcacuugauguucccuug

SEQ ID NO: 1524588 - RNA, 19 nt, Artificial Sequence
  Description of Artificial Sequence: Synthetic oligonucleotide
gagacuggccgacugcagc

SEQ ID NO: 1524589 - RNA, 19 nt, Artificial Sequence
  Description of Artificial Sequence: Synthetic oligonucleotide
aaggguugguggcauaaua

SEQ ID NO: 1524590 - RNA, 19 nt, Artificial Sequence
  Description of Artificial Sequence: Synthetic oligonucleotide
ugucaucaaggagagacau

SEQ ID NO: 1524591 - RNA, 19 nt, Artificial Sequence
  Description of Artificial Sequence: Synthetic oligonucleotide
gccgacugcagccaggugg

SEQ ID NO: 1524592 - RNA, 19 nt, Artificial Sequence
  Description of Artificial Sequence: Synthetic oligonucleotide
uugaucccggcuuccagca

SEQ ID NO: 1524593 - RNA, 19 nt, Artificial Sequence
  Description of Artificial Sequence: Synthetic oligonucleotide
cugaacggccuugugaagc

SEQ ID NO: 1524594 - RNA, 19 nt, Artificial Sequence
  Description of Artificial Sequence: Synthetic oligonucleotide
gaauuuggacagauauggc

SEQ ID NO: 1524595 - RNA, 19 nt, Artificial Sequence
  Description of Artificial Sequence: Synthetic oligonucleotide
acguaagaugacuggccuc

SEQ ID NO: 1524596 - RNA, 19 nt, Artificial Sequence
  Description of Artificial Sequence: Synthetic oligonucleotide
uggcauaauagagccacca

SEQ ID NO: 1524597 - RNA, 19 nt, Artificial Sequence
  Description of Artificial Sequence: Synthetic oligonucleotide
augaagacguaagaugacu

SEQ ID NO: 1524598 - RNA, 19 nt, Artificial Sequence
  Description of Artificial Sequence: Synthetic oligonucleotide
gacuugacaaaagcagaug

SEQ ID NO: 1524599 - RNA, 19 nt, Artificial Sequence
  Description of Artificial Sequence: Synthetic oligonucleotide
gaugggugucaagaggacc

SEQ ID NO: 1524600 - RNA, 19 nt, Artificial Sequence
  Description of Artificial Sequence: Synthetic oligonucleotide
gauggggccauucaugagu

SEQ ID NO: 1524601 - RNA, 19 nt, Artificial Sequence
  Description of Artificial Sequence: Synthetic oligonucleotide
ugacccaugguguccacaa

SEQ ID NO: 1524602 - RNA, 19 nt, Artificial Sequence
  Description of Artificial Sequence: Synthetic oligonucleotide
accccagaaaaguugcacu

SEQ ID NO: 1524603 - RNA, 19 nt, Artificial Sequence
  Description of Artificial Sequence: Synthetic oligonucleotide
agauuucucacgugacgcu

SEQ ID NO: 1524604 - RNA, 19 nt, Artificial Sequence
  Description of Artificial Sequence: Synthetic oligonucleotide
acaugcuguacagguaagg

SEQ ID NO: 1524605 - RNA, 19 nt, Artificial Sequence
  Description of Artificial Sequence: Synthetic oligonucleotide
auccacgagucacccaagg

SEQ ID NO: 1524606 - RNA, 19 nt, Artificial Sequence
  Description of Artificial Sequence: Synthetic oligonucleotide
caucuuuucggacggucac

SEQ ID NO: 1524607 - RNA, 19 nt, Artificial Sequence
  Description of Artificial Sequence: Synthetic oligonucleotide
aaagacgaacuaaggggcu

SEQ ID NO: 1524608 - RNA, 19 nt, Artificial Sequence
  Description of Artificial Sequence: Synthetic oligonucleotide
cagauauggccacuucagc

SEQ ID NO: 1524609 - RNA, 19 nt, Artificial Sequence
  Description of Artificial Sequence: Synthetic oligonucleotide
acuaaggggcuccggagga

SEQ ID NO: 1524610 - RNA, 19 nt, Artificial Sequence
  Description of Artificial Sequence: Synthetic oligonucleotide
cugaguggccuccuuguag

SEQ ID NO: 1524611 - RNA, 19 nt, Artificial Sequence
  Description of Artificial Sequence: Synthetic oligonucleotide
guaggacuugacaaaagca

SEQ ID NO: 1524612 - RNA, 19 nt, Artificial Sequence
  Description of Artificial Sequence: Synthetic oligonucleotide
agguaagguccccaggaca

SEQ ID NO: 1524613 - RNA, 19 nt, Artificial Sequence
  Description of Artificial Sequence: Synthetic oligonucleotide
uguacagguaaggucccca

SEQ ID NO: 1524614 - RNA, 19 nt, Artificial Sequence
  Description of Artificial Sequence: Synthetic oligonucleotide
ugaacggccuugugaagcu

SEQ ID NO: 1524615 - RNA, 19 nt, Artificial Sequence
  Description of Artificial Sequence: Synthetic oligonucleotide
accaucauguccgaagcca

SEQ ID NO: 1524616 - RNA, 19 nt, Artificial Sequence
  Description of Artificial Sequence: Synthetic oligonucleotide
cacguaacuaaagccagug

SEQ ID NO: 1524617 - RNA, 19 nt, Artificial Sequence
  Description of Artificial Sequence: Synthetic oligonucleotide
gauccaguagaaggcuagg

SEQ ID NO: 1524618 - RNA, 19 nt, Artificial Sequence
  Description of Artificial Sequence: Synthetic oligonucleotide
agcucuagacuaaugccag

SEQ ID NO: 1524619 - RNA, 19 nt, Artificial Sequence
  Description of Artificial Sequence: Synthetic oligonucleotide
guagaaggcuagguuuucg

SEQ ID NO: 1524620 - RNA, 19 nt, Artificial Sequence
  Description of Artificial Sequence: Synthetic oligonucleotide
uucguaggacuugacaaaa

SEQ ID NO: 1524621 - RNA, 19 nt, Artificial Sequence
  Description of Artificial Sequence: Synthetic oligonucleotide
augucggacaccucagcca

SEQ ID NO: 1524622 - RNA, 19 nt, Artificial Sequence
  Description of Artificial Sequence: Synthetic oligonucleotide
agacacgccacgccagauc

SEQ ID NO: 1524623 - RNA, 19 nt, Artificial Sequence
  Description of Artificial Sequence: Synthetic oligonucleotide
ucacauugaucccggcuuc

SEQ ID NO: 1524624 - RNA, 19 nt, Artificial Sequence
  Description of Artificial Sequence: Synthetic oligonucleotide
gaaaggaaccgucuggaau

SEQ ID NO: 1524625 - RNA, 19 nt, Artificial Sequence
  Description of Artificial Sequence: Synthetic oligonucleotide
uugauguucccuugcugaa

SEQ ID NO: 1524626 - RNA, 19 nt, Artificial Sequence
  Description of Artificial Sequence: Synthetic oligonucleotide
uagguuuucguaggacuug

SEQ ID NO: 1524627 - RNA, 19 nt, Artificial Sequence
  Description of Artificial Sequence: Synthetic oligonucleotide
augugacccgcccuuagga

SEQ ID NO: 1524628 - RNA, 19 nt, Artificial Sequence
  Description of Artificial Sequence: Synthetic oligonucleotide
gguaagguccccaggacag

SEQ ID NO: 1524629 - RNA, 19 nt, Artificial Sequence
  Description of Artificial Sequence: Synthetic oligonucleotide
aaccaugugacccgcccuu

SEQ ID NO: 1524630 - RNA, 19 nt, Artificial Sequence
  Description of Artificial Sequence: Synthetic oligonucleotide
uguccagauccuuugcaua

SEQ ID NO: 1524631 - RNA, 19 nt, Artificial Sequence
  Description of Artificial Sequence: Synthetic oligonucleotide
gcauaauagagccaccaga

SEQ ID NO: 1524632 - RNA, 19 nt, Artificial Sequence
  Description of Artificial Sequence: Synthetic oligonucleotide
uucggacggucacauaauc

SEQ ID NO: 1524633 - RNA, 19 nt, Artificial Sequence
  Description of Artificial Sequence: Synthetic oligonucleotide
aaccgucuggaauucuuua

SEQ ID NO: 1524634 - RNA, 19 nt, Artificial Sequence
  Description of Artificial Sequence: Synthetic oligonucleotide
caugugacccgcccuuagg

SEQ ID NO: 1524635 - RNA, 19 nt, Artificial Sequence
  Description of Artificial Sequence: Synthetic oligonucleotide
uguucccuugcugaacggc

SEQ ID NO: 1524636 - RNA, 19 nt, Artificial Sequence
  Description of Artificial Sequence: Synthetic oligonucleotide
ugucaagaggaccgauuuc

SEQ ID NO: 1524637 - RNA, 19 nt, Artificial Sequence
  Description of Artificial Sequence: Synthetic oligonucleotide
gaucccggcuuccagcaac

SEQ ID NO: 1524638 - RNA, 19 nt, Artificial Sequence
  Description of Artificial Sequence: Synthetic oligonucleotide
aguagaaggcuagguuuuc

SEQ ID NO: 1524639 - RNA, 19 nt, Artificial Sequence
  Description of Artificial Sequence: Synthetic oligonucleotide
aacucaaggcuggauucca

SEQ ID NO: 1524640 - RNA, 19 nt, Artificial Sequence
  Description of Artificial Sequence: Synthetic oligonucleotide
gaugauuuugagcuucuuu

SEQ ID NO: 1524641 - RNA, 19 nt, Artificial Sequence
  Description of Artificial Sequence: Synthetic oligonucleotide
uuucggacggucacauaau

SEQ ID NO: 1524642 - RNA, 19 nt, Artificial Sequence
  Description of Artificial Sequence: Synthetic oligonucleotide
augacuggccuccccagga

SEQ ID NO: 1524643 - RNA, 19 nt, Artificial Sequence
  Description of Artificial Sequence: Synthetic oligonucleotide
gccauuuucccuccauagg

SEQ ID NO: 1524644 - RNA, 19 nt, Artificial Sequence
  Description of Artificial Sequence: Synthetic oligonucleotide
ugggaccggacagacacgc

SEQ ID NO: 1524645 - RNA, 19 nt, Artificial Sequence
  Description of Artificial Sequence: Synthetic oligonucleotide
aagcccuuguuuauagcgu

SEQ ID NO: 1524646 - RNA, 19 nt, Artificial Sequence
  Description of Artificial Sequence: Synthetic oligonucleotide
ggcauaauagagccaccag

SEQ ID NO: 1524647 - RNA, 19 nt, Artificial Sequence
  Description of Artificial Sequence: Synthetic oligonucleotide
agcaacucauccacaaugu

SEQ ID NO: 1524648 - RNA, 19 nt, Artificial Sequence
  Description of Artificial Sequence: Synthetic oligonucleotide
gccuuugucaucaaggaga

SEQ ID NO: 1524649 - RNA, 19 nt, Artificial Sequence
  Description of Artificial Sequence: Synthetic oligonucleotide
gacuuaggauugcuguaca

SEQ ID NO: 1524650 - RNA, 19 nt, Artificial Sequence
  Description of Artificial Sequence: Synthetic oligonucleotide
ggugaauacagugccgcag

SEQ ID NO: 1524651 - RNA, 19 nt, Artificial Sequence
  Description of Artificial Sequence: Synthetic oligonucleotide
agcuuccgcagccaggccu

SEQ ID NO: 1524652 - RNA, 19 nt, Artificial Sequence
  Description of Artificial Sequence: Synthetic oligonucleotide
uucccuugcugaacggccu

SEQ ID NO: 1524653 - RNA, 19 nt, Artificial Sequence
  Description of Artificial Sequence: Synthetic oligonucleotide
uacagugccgcagcaucag

SEQ ID NO: 1524654 - RNA, 19 nt, Artificial Sequence
  Description of Artificial Sequence: Synthetic oligonucleotide
cacgccagauccaugguga

SEQ ID NO: 1524655 - RNA, 19 nt, Artificial Sequence
  Description of Artificial Sequence: Synthetic oligonucleotide
uuucucacgugacgcugac

SEQ ID NO: 1524656 - RNA, 19 nt, Artificial Sequence
  Description of Artificial Sequence: Synthetic oligonucleotide
agaaggcuagguuuucgua

SEQ ID NO: 1524657 - RNA, 19 nt, Artificial Sequence
  Description of Artificial Sequence: Synthetic oligonucleotide
uggugaauacagugccgca

SEQ ID NO: 1524658 - RNA, 19 nt, Artificial Sequence
  Description of Artificial Sequence: Synthetic oligonucleotide
cauguccgaagccaccgug

SEQ ID NO: 1524659 - RNA, 19 nt, Artificial Sequence
  Description of Artificial Sequence: Synthetic oligonucleotide
aggacuugcucugcaaugu

SEQ ID NO: 1524660 - RNA, 19 nt, Artificial Sequence
  Description of Artificial Sequence: Synthetic oligonucleotide
guucccuugcugaacggcc

SEQ ID NO: 1524661 - RNA, 19 nt, Artificial Sequence
  Description of Artificial Sequence: Synthetic oligonucleotide
ucaggagaaccaucauguc

SEQ ID NO: 1524662 - RNA, 19 nt, Artificial Sequence
  Description of Artificial Sequence: Synthetic oligonucleotide
aguuguguucacguaacua

SEQ ID NO: 1524663 - RNA, 19 nt, Artificial Sequence
  Description of Artificial Sequence: Synthetic oligonucleotide
aguuuaccccaucuguguu

SEQ ID NO: 1524664 - RNA, 19 nt, Artificial Sequence
  Description of Artificial Sequence: Synthetic oligonucleotide
caaugucggacaccucagc

SEQ ID NO: 1524665 - RNA, 19 nt, Artificial Sequence
  Description of Artificial Sequence: Synthetic oligonucleotide
caugcuuaugaagacguaa

SEQ ID NO: 1524666 - RNA, 19 nt, Artificial Sequence
  Description of Artificial Sequence: Synthetic oligonucleotide
ggaaccaugugacccgccc

SEQ ID NO: 1524667 - RNA, 19 nt, Artificial Sequence
  Description of Artificial Sequence: Synthetic oligonucleotide
accgucuggaauucuuuau

SEQ ID NO: 1524668 - RNA, 19 nt, Artificial Sequence
  Description of Artificial Sequence: Synthetic oligonucleotide
caaacaggagacuggccga

SEQ ID NO: 1524669 - RNA, 19 nt, Artificial Sequence
  Description of Artificial Sequence: Synthetic oligonucleotide
agccaagccuuugucauca

SEQ ID NO: 1524670 - RNA, 19 nt, Artificial Sequence
  Description of Artificial Sequence: Synthetic oligonucleotide
agaugggugucaagaggac

SEQ ID NO: 1524671 - RNA, 19 nt, Artificial Sequence
  Description of Artificial Sequence: Synthetic oligonucleotide
auguucccuugcugaacgg

SEQ ID NO: 1524672 - RNA, 19 nt, Artificial Sequence
  Description of Artificial Sequence: Synthetic oligonucleotide
uccauaggauucugagaaa

SEQ ID NO: 1524673 - RNA, 19 nt, Artificial Sequence
  Description of Artificial Sequence: Synthetic oligonucleotide
cguaggacuugacaaaagc

SEQ ID NO: 1524674 - RNA, 19 nt, Artificial Sequence
  Description of Artificial Sequence: Synthetic oligonucleotide
caggcuucaugaagucacc

SEQ ID NO: 1524675 - RNA, 19 nt, Artificial Sequence
  Description of Artificial Sequence: Synthetic oligonucleotide
ucucgggagugcuuuuagu

SEQ ID NO: 1524676 - RNA, 19 nt, Artificial Sequence
  Description of Artificial Sequence: Synthetic oligonucleotide
ugguauuccguggcuugag

SEQ ID NO: 1524677 - RNA, 19 nt, Artificial Sequence
  Description of Artificial Sequence: Synthetic oligonucleotide
ggaggagcgacugcaacag

SEQ ID NO: 1524678 - RNA, 19 nt, Artificial Sequence
  Description of Artificial Sequence: Synthetic oligonucleotide
acggucacauaaucccaug

SEQ ID NO: 1524679 - RNA, 19 nt, Artificial Sequence
  Description of Artificial Sequence: Synthetic oligonucleotide
ugugacccgcccuuaggau

SEQ ID NO: 1524680 - RNA, 19 nt, Artificial Sequence
  Description of Artificial Sequence: Synthetic oligonucleotide
gcccauuauacacaaucac

SEQ ID NO: 1524681 - RNA, 19 nt, Artificial Sequence
  Description of Artificial Sequence: Synthetic oligonucleotide
gacaugcuguacagguaag

SEQ ID NO: 1524682 - RNA, 19 nt, Artificial Sequence
  Description of Artificial Sequence: Synthetic oligonucleotide
acgcugacaaagacgaacu

SEQ ID NO: 1524683 - RNA, 19 nt, Artificial Sequence
  Description of Artificial Sequence: Synthetic oligonucleotide
ucauguccgaagccaccgu

SEQ ID NO: 1524684 - RNA, 19 nt, Artificial Sequence
  Description of Artificial Sequence: Synthetic oligonucleotide
cacgagucacccaaggcaa

SEQ ID NO: 1524685 - RNA, 19 nt, Artificial Sequence
  Description of Artificial Sequence: Synthetic oligonucleotide
agugccgcagcaucagcaa

SEQ ID NO: 1524686 - RNA, 19 nt, Artificial Sequence
  Description of Artificial Sequence: Synthetic oligonucleotide
accggacagacacgccacg

SEQ ID NO: 1524687 - RNA, 19 nt, Artificial Sequence
  Description of Artificial Sequence: Synthetic oligonucleotide
gugcgggccagucaacggc

SEQ ID NO: 1524688 - RNA, 19 nt, Artificial Sequence
  Description of Artificial Sequence: Synthetic oligonucleotide
gcccuuaggauccaguaga

SEQ ID NO: 1524689 - RNA, 19 nt, Artificial Sequence
  Description of Artificial Sequence: Synthetic oligonucleotide
gacgaacuaaggggcuccg

SEQ ID NO: 1524690 - RNA, 19 nt, Artificial Sequence
  Description of Artificial Sequence: Synthetic oligonucleotide
ggauccaguagaaggcuag

SEQ ID NO: 1524691 - RNA, 19 nt, Artificial Sequence
  Description of Artificial Sequence: Synthetic oligonucleotide
uuccguggcuugagauggg

SEQ ID NO: 1524692 - RNA, 19 nt, Artificial Sequence
  Description of Artificial Sequence: Synthetic oligonucleotide
auucaugaguugacuuaag

SEQ ID NO: 1524693 - RNA, 19 nt, Artificial Sequence
  Description of Artificial Sequence: Synthetic oligonucleotide
gucaacggcagcuccugca

SEQ ID NO: 1524694 - RNA, 19 nt, Artificial Sequence
  Description of Artificial Sequence: Synthetic oligonucleotide
agacuaaugccagcagcca

SEQ ID NO: 1524695 - RNA, 19 nt, Artificial Sequence
  Description of Artificial Sequence: Synthetic oligonucleotide
gacggccagcgcgugacgg

SEQ ID NO: 1524696 - RNA, 19 nt, Artificial Sequence
  Description of Artificial Sequence: Synthetic oligonucleotide
agaggaccgauuuccucaa

SEQ ID NO: 1524697 - RNA, 19 nt, Artificial Sequence
  Description of Artificial Sequence: Synthetic oligonucleotide
gaagucacccuccaugcuu

SEQ ID NO: 1524698 - RNA, 19 nt, Artificial Sequence
  Description of Artificial Sequence: Synthetic oligonucleotide
guuuccgaagacuuaggau

SEQ ID NO: 1524699 - RNA, 19 nt, Artificial Sequence
  Description of Artificial Sequence: Synthetic oligonucleotide
caaucacauugaucccggc

SEQ ID NO: 1524700 - RNA, 19 nt, Artificial Sequence
  Description of Artificial Sequence: Synthetic oligonucleotide
agguuuucguaggacuuga

SEQ ID NO: 1524701 - RNA, 19 nt, Artificial Sequence
  Description of Artificial Sequence: Synthetic oligonucleotide
gugacccgcccuuaggauc

SEQ ID NO: 1524702 - RNA, 19 nt, Artificial Sequence
  Description of Artificial Sequence: Synthetic oligonucleotide
caacaggcuggacccagac

SEQ ID NO: 1524703 - RNA, 19 nt, Artificial Sequence
  Description of Artificial Sequence: Synthetic oligonucleotide
cguaagaugacuggccucc

SEQ ID NO: 1524704 - RNA, 19 nt, Artificial Sequence
  Description of Artificial Sequence: Synthetic oligonucleotide
gaccgauuuccucaaaguu

SEQ ID NO: 1524705 - RNA, 19 nt, Artificial Sequence
  Description of Artificial Sequence: Synthetic oligonucleotide
acuaaugccagcagccauu

SEQ ID NO: 1524706 - RNA, 19 nt, Artificial Sequence
  Description of Artificial Sequence: Synthetic oligonucleotide
auuucucacgugacgcuga

SEQ ID NO: 1524707 - RNA, 19 nt, Artificial Sequence
  Description of Artificial Sequence: Synthetic oligonucleotide
gccuugugaagcucuagac

SEQ ID NO: 1524708 - RNA, 19 nt, Artificial Sequence
  Description of Artificial Sequence: Synthetic oligonucleotide
aagucacccuccaugcuua

SEQ ID NO: 1524709 - RNA, 19 nt, Artificial Sequence
  Description of Artificial Sequence: Synthetic oligonucleotide
ccaaauccagugcuggaac

SEQ ID NO: 1524710 - RNA, 19 nt, Artificial Sequence
  Description of Artificial Sequence: Synthetic oligonucleotide
acuggccgacugcagccag

SEQ ID NO: 1524711 - RNA, 19 nt, Artificial Sequence
  Description of Artificial Sequence: Synthetic oligonucleotide
uagaggucucgggagugcu

SEQ ID NO: 1524712 - RNA, 19 nt, Artificial Sequence
  Description of Artificial Sequence: Synthetic oligonucleotide
gucacauaaucccaugcuu

SEQ ID NO: 1524713 - RNA, 19 nt, Artificial Sequence
  Description of Artificial Sequence: Synthetic oligonucleotide
cagcaggaaccaugugacc

SEQ ID NO: 1524714 - RNA, 19 nt, Artificial Sequence
  Description of Artificial Sequence: Synthetic oligonucleotide
aucuuuucggacggucaca

SEQ ID NO: 1524715 - RNA, 19 nt, Artificial Sequence
  Description of Artificial Sequence: Synthetic oligonucleotide
cacaggggagauccacgag

SEQ ID NO: 1524716 - RNA, 19 nt, Artificial Sequence
  Description of Artificial Sequence: Synthetic oligonucleotide
uggacagauauggccacuu

SEQ ID NO: 1524717 - RNA, 19 nt, Artificial Sequence
  Description of Artificial Sequence: Synthetic oligonucleotide
acgaacuaaggggcuccgg

SEQ ID NO: 1524718 - RNA, 19 nt, Artificial Sequence
  Description of Artificial Sequence: Synthetic oligonucleotide
gcgucaaggacuugcucug

SEQ ID NO: 1524719 - RNA, 19 nt, Artificial Sequence
  Description of Artificial Sequence: Synthetic oligonucleotide
auacagugccgcagcauca

SEQ ID NO: 1524720 - RNA, 19 nt, Artificial Sequence
  Description of Artificial Sequence: Synthetic oligonucleotide
gcuagguuuucguaggacu

SEQ ID NO: 1524721 - RNA, 19 nt, Artificial Sequence
  Description of Artificial Sequence: Synthetic oligonucleotide
gauccacgagucacccaag

SEQ ID NO: 1524722 - RNA, 19 nt, Artificial Sequence
  Description of Artificial Sequence: Synthetic oligonucleotide
ggggagauccacgagucac

SEQ ID NO: 1524723 - RNA, 19 nt, Artificial Sequence
  Description of Artificial Sequence: Synthetic oligonucleotide
ggaccggacagacacgcca

SEQ ID NO: 1524724 - RNA, 19 nt, Artificial Sequence
  Description of Artificial Sequence: Synthetic oligonucleotide
ggagauccacgagucaccc

SEQ ID NO: 1524725 - RNA, 19 nt, Artificial Sequence
  Description of Artificial Sequence: Synthetic oligonucleotide
gacuaaugccagcagccau

SEQ ID NO: 1524726 - RNA, 19 nt, Artificial Sequence
  Description of Artificial Sequence: Synthetic oligonucleotide
aggcaucaguuguguucac

SEQ ID NO: 1524727 - RNA, 19 nt, Artificial Sequence
  Description of Artificial Sequence: Synthetic oligonucleotide
ggucacauaaucccaugcu

SEQ ID NO: 1524728 - RNA, 19 nt, Artificial Sequence
  Description of Artificial Sequence: Synthetic oligonucleotide
gugucaagaggaccgauuu

SEQ ID NO: 1524729 - RNA, 19 nt, Artificial Sequence
  Description of Artificial Sequence: Synthetic oligonucleotide
gcugacaaagacgaacuaa

SEQ ID NO: 1524730 - RNA, 19 nt, Artificial Sequence
  Description of Artificial Sequence: Synthetic oligonucleotide
gacaccucagccaagccuu

SEQ ID NO: 1524731 - RNA, 19 nt, Artificial Sequence
  Description of Artificial Sequence: Synthetic oligonucleotide
cagauccuuugcauaggca

SEQ ID NO: 1524732 - RNA, 19 nt, Artificial Sequence
  Description of Artificial Sequence: Synthetic oligonucleotide
guauuccguggcuugagau

SEQ ID NO: 1524733 - RNA, 19 nt, Artificial Sequence
  Description of Artificial Sequence: Synthetic oligonucleotide
ggacagacacgccacgcca

SEQ ID NO: 1524734 - RNA, 19 nt, Artificial Sequence
  Description of Artificial Sequence: Synthetic oligonucleotide
cacgugacgcugacaaaga

SEQ ID NO: 1524735 - RNA, 19 nt, Artificial Sequence
  Description of Artificial Sequence: Synthetic oligonucleotide
aggcuagguuuucguagga

SEQ ID NO: 1524736 - RNA, 19 nt, Artificial Sequence
  Description of Artificial Sequence: Synthetic oligonucleotide
acgagucacccaaggcaac

SEQ ID NO: 1524737 - RNA, 19 nt, Artificial Sequence
  Description of Artificial Sequence: Synthetic oligonucleotide
caggcuggacccagacggc

SEQ ID NO: 1524738 - RNA, 19 nt, Artificial Sequence
  Description of Artificial Sequence: Synthetic oligonucleotide
caaugauaguuucugcuuu

SEQ ID NO: 1524739 - RNA, 19 nt, Artificial Sequence
  Description of Artificial Sequence: Synthetic oligonucleotide
cuggccgacugcagccagg

SEQ ID NO: 1524740 - RNA, 19 nt, Artificial Sequence
  Description of Artificial Sequence: Synthetic oligonucleotide
ccaucauguccgaagccac

SEQ ID NO: 1524741 - RNA, 19 nt, Artificial Sequence
  Description of Artificial Sequence: Synthetic oligonucleotide
gguuauccacaaacaggag

SEQ ID NO: 1524742 - RNA, 19 nt, Artificial Sequence
  Description of Artificial Sequence: Synthetic oligonucleotide
aggaaccaugugacccgcc

SEQ ID NO: 1524743 - RNA, 19 nt, Artificial Sequence
  Description of Artificial Sequence: Synthetic oligonucleotide
cagacggccagcgcgugac

SEQ ID NO: 1524744 - RNA, 19 nt, Artificial Sequence
  Description of Artificial Sequence: Synthetic oligonucleotide
aggggagauccacgaguca

SEQ ID NO: 1524745 - RNA, 19 nt, Artificial Sequence
  Description of Artificial Sequence: Synthetic oligonucleotide
ugggugucaagaggaccga

SEQ ID NO: 1524746 - RNA, 19 nt, Artificial Sequence
  Description of Artificial Sequence: Synthetic oligonucleotide
gcaaugucggacaccucag

SEQ ID NO: 1524747 - RNA, 19 nt, Artificial Sequence
  Description of Artificial Sequence: Synthetic oligonucleotide
cagucaacggcagcuccug

SEQ ID NO: 1524748 - RNA, 19 nt, Artificial Sequence
  Description of Artificial Sequence: Synthetic oligonucleotide
caugcuguacagguaaggu

SEQ ID NO: 1524749 - RNA, 19 nt, Artificial Sequence
  Description of Artificial Sequence: Synthetic oligonucleotide
guaagguccccaggacagc

SEQ ID NO: 1524750 - RNA, 19 nt, Artificial Sequence
  Description of Artificial Sequence: Synthetic oligonucleotide
uccguggcuugagaugggu

SEQ ID NO: 1524751 - RNA, 19 nt, Artificial Sequence
  Description of Artificial Sequence: Synthetic oligonucleotide
ugacgcugacaaagacgaa

SEQ ID NO: 1524752 - RNA, 19 nt, Artificial Sequence
  Description of Artificial Sequence: Synthetic oligonucleotide
uggccgacugcagccaggu

SEQ ID NO: 1524753 - RNA, 19 nt, Artificial Sequence
  Description of Artificial Sequence: Synthetic oligonucleotide
ggggccauucaugaguuga

SEQ ID NO: 1524754 - RNA, 19 nt, Artificial Sequence
  Description of Artificial Sequence: Synthetic oligonucleotide
agacggccagcgcgugacg

SEQ ID NO: 1524755 - RNA, 19 nt, Artificial Sequence
  Description of Artificial Sequence: Synthetic oligonucleotide
gccagucaacggcagcucc

SEQ ID NO: 1524756 - RNA, 19 nt, Artificial Sequence
  Description of Artificial Sequence: Synthetic oligonucleotide
cucgggagugcuuuuaguu

SEQ ID NO: 1524757 - RNA, 19 nt, Artificial Sequence
  Description of Artificial Sequence: Synthetic oligonucleotide
cagccaagccuuugucauc

SEQ ID NO: 1524758 - RNA, 19 nt, Artificial Sequence
  Description of Artificial Sequence: Synthetic oligonucleotide
gguauuccguggcuugaga

SEQ ID NO: 1524759 - RNA, 19 nt, Artificial Sequence
  Description of Artificial Sequence: Synthetic oligonucleotide
gcuuaugaagacguaagau

SEQ ID NO: 1524760 - RNA, 19 nt, Artificial Sequence
  Description of Artificial Sequence: Synthetic oligonucleotide
gcuuuuaguuaagauguua

SEQ ID NO: 1524761 - RNA, 19 nt, Artificial Sequence
  Description of Artificial Sequence: Synthetic oligonucleotide
gccacagugggaccggaca

SEQ ID NO: 1524762 - RNA, 19 nt, Artificial Sequence
  Description of Artificial Sequence: Synthetic oligonucleotide
ccacaauguggaugacagg

SEQ ID NO: 1524763 - RNA, 19 nt, Artificial Sequence
  Description of Artificial Sequence: Synthetic oligonucleotide
ugguguccacaaugagauc

SEQ ID NO: 1524764 - RNA, 19 nt, Artificial Sequence
  Description of Artificial Sequence: Synthetic oligonucleotide
gcucuagacuaaugccagc

SEQ ID NO: 1524765 - RNA, 19 nt, Artificial Sequence
  Description of Artificial Sequence: Synthetic oligonucleotide
ggauuccauagaggucucg

SEQ ID NO: 1524766 - RNA, 19 nt, Artificial Sequence
  Description of Artificial Sequence: Synthetic oligonucleotide
uuauagcgucaaggacuug

SEQ ID NO: 1524767 - RNA, 19 nt, Artificial Sequence
  Description of Artificial Sequence: Synthetic oligonucleotide
uucucacgugacgcugaca

SEQ ID NO: 1524768 - RNA, 19 nt, Artificial Sequence
  Description of Artificial Sequence: Synthetic oligonucleotide
gggcaguucugaaaaguuc

SEQ ID NO: 1524769 - RNA, 19 nt, Artificial Sequence
  Description of Artificial Sequence: Synthetic oligonucleotide
caugaccaggggcaguucu

SEQ ID NO: 1524770 - RNA, 19 nt, Artificial Sequence
  Description of Artificial Sequence: Synthetic oligonucleotide
caaccccagaaaaguugca

SEQ ID NO: 1524771 - RNA, 19 nt, Artificial Sequence
  Description of Artificial Sequence: Synthetic oligonucleotide
caguagaaggcuagguuuu

SEQ ID NO: 1524772 - RNA, 19 nt, Artificial Sequence
  Description of Artificial Sequence: Synthetic oligonucleotide
gugggaccggacagacacg

SEQ ID NO: 1524773 - RNA, 19 nt, Artificial Sequence
  Description of Artificial Sequence: Synthetic oligonucleotide
auggggccauucaugaguu

SEQ ID NO: 1524774 - RNA, 19 nt, Artificial Sequence
  Description of Artificial Sequence: Synthetic oligonucleotide
ccauaggauucugagaaaa

SEQ ID NO: 1524775 - RNA, 19 nt, Artificial Sequence
  Description of Artificial Sequence: Synthetic oligonucleotide
gcaucuuuucggacgguca

SEQ ID NO: 1524776 - RNA, 19 nt, Artificial Sequence
  Description of Artificial Sequence: Synthetic oligonucleotide
caaggacuugcucugcaau

SEQ ID NO: 1524777 - RNA, 19 nt, Artificial Sequence
  Description of Artificial Sequence: Synthetic oligonucleotide
gugcuggaaccaccuggac

SEQ ID NO: 1524778 - RNA, 19 nt, Artificial Sequence
  Description of Artificial Sequence: Synthetic oligonucleotide
acgccagauccauggugaa

SEQ ID NO: 1524779 - RNA, 19 nt, Artificial Sequence
  Description of Artificial Sequence: Synthetic oligonucleotide
aggugucucuuuguagauu

SEQ ID NO: 1524780 - RNA, 19 nt, Artificial Sequence
  Description of Artificial Sequence: Synthetic oligonucleotide
gacggucacauaaucccau

SEQ ID NO: 1524781 - RNA, 19 nt, Artificial Sequence
  Description of Artificial Sequence: Synthetic oligonucleotide
ggcaucuuuucggacgguc

SEQ ID NO: 1524782 - RNA, 19 nt, Artificial Sequence
  Description of Artificial Sequence: Synthetic oligonucleotide
gggagugcuuuuaguuaag

SEQ ID NO: 1524783 - RNA, 19 nt, Artificial Sequence
  Description of Artificial Sequence: Synthetic oligonucleotide
ccaguagaaggcuagguuu

SEQ ID NO: 1524784 - RNA, 19 nt, Artificial Sequence
  Description of Artificial Sequence: Synthetic oligonucleotide
cagauccauggugaauaca

SEQ ID NO: 1524785 - RNA, 19 nt, Artificial Sequence
  Description of Artificial Sequence: Synthetic oligonucleotide
ggacggucacauaauccca

SEQ ID NO: 1524786 - RNA, 19 nt, Artificial Sequence
  Description of Artificial Sequence: Synthetic oligonucleotide
gacuggccgacugcagcca

SEQ ID NO: 1524787 - RNA, 19 nt, Artificial Sequence
  Description of Artificial Sequence: Synthetic oligonucleotide
ccuugugaagcucuagacu

SEQ ID NO: 1524788 - RNA, 19 nt, Artificial Sequence
  Description of Artificial Sequence: Synthetic oligonucleotide
agucacccuccaugcuuau

SEQ ID NO: 1524789 - RNA, 19 nt, Artificial Sequence
  Description of Artificial Sequence: Synthetic oligonucleotide
ggcaaucaaagaaggauuu

SEQ ID NO: 1524790 - RNA, 19 nt, Artificial Sequence
  Description of Artificial Sequence: Synthetic oligonucleotide
cgaacuaaggggcuccgga

SEQ ID NO: 1524791 - RNA, 19 nt, Artificial Sequence
  Description of Artificial Sequence: Synthetic oligonucleotide
cagaaaaguugcacuugau

SEQ ID NO: 1524792 - RNA, 19 nt, Artificial Sequence
  Description of Artificial Sequence: Synthetic oligonucleotide
gaguugacuuaaggugucu

SEQ ID NO: 1524793 - RNA, 19 nt, Artificial Sequence
  Description of Artificial Sequence: Synthetic oligonucleotide
aggaaccgucuggaauucu

SEQ ID NO: 1524794 - RNA, 19 nt, Artificial Sequence
  Description of Artificial Sequence: Synthetic oligonucleotide
ggagaaccaucauguccga

SEQ ID NO: 1524795 - RNA, 19 nt, Artificial Sequence
  Description of Artificial Sequence: Synthetic oligonucleotide
ccaugugacccgcccuuag

SEQ ID NO: 1524796 - RNA, 19 nt, Artificial Sequence
  Description of Artificial Sequence: Synthetic oligonucleotide
acccagacggccagcgcgu

SEQ ID NO: 1524797 - RNA, 19 nt, Artificial Sequence
  Description of Artificial Sequence: Synthetic oligonucleotide
cucacgugacgcugacaaa

SEQ ID NO: 1524798 - RNA, 19 nt, Artificial Sequence
  Description of Artificial Sequence: Synthetic oligonucleotide
gguuuucguaggacuugac

SEQ ID NO: 1524799 - RNA, 19 nt, Artificial Sequence
  Description of Artificial Sequence: Synthetic oligonucleotide
cggacagacacgccacgcc

SEQ ID NO: 1524800 - RNA, 19 nt, Artificial Sequence
  Description of Artificial Sequence: Synthetic oligonucleotide
cugcaaugucggacaccuc

SEQ ID NO: 1524801 - RNA, 19 nt, Artificial Sequence
  Description of Artificial Sequence: Synthetic oligonucleotide
cgcccuuaggauccaguag

SEQ ID NO: 1524802 - RNA, 19 nt, Artificial Sequence
  Description of Artificial Sequence: Synthetic oligonucleotide
cgagucacccaaggcaacc

SEQ ID NO: 1524803 - RNA, 19 nt, Artificial Sequence
  Description of Artificial Sequence: Synthetic oligonucleotide
cuuuucggacggucacaua

SEQ ID NO: 1524804 - RNA, 19 nt, Artificial Sequence
  Description of Artificial Sequence: Synthetic oligonucleotide
ccguggcuugagaugggug

SEQ ID NO: 1524805 - RNA, 19 nt, Artificial Sequence
  Description of Artificial Sequence: Synthetic oligonucleotide
caguuguguucacguaacu

SEQ ID NO: 1524806 - RNA, 19 nt, Artificial Sequence
  Description of Artificial Sequence: Synthetic oligonucleotide
cgggagugcuuuuaguuaa

SEQ ID NO: 1524807 - RNA, 19 nt, Artificial Sequence
  Description of Artificial Sequence: Synthetic oligonucleotide
ggcuccggaggaacucaag

SEQ ID NO: 1524808 - RNA, 19 nt, Artificial Sequence
  Description of Artificial Sequence: Synthetic oligonucleotide
cuaaugccagcagccauuu

SEQ ID NO: 1524809 - RNA, 19 nt, Artificial Sequence
  Description of Artificial Sequence: Synthetic oligonucleotide
cauaggcaucaguuguguu

SEQ ID NO: 1524810 - RNA, 19 nt, Artificial Sequence
  Description of Artificial Sequence: Synthetic oligonucleotide
cuaaggggcuccggaggaa

SEQ ID NO: 1524811 - RNA, 19 nt, Artificial Sequence
  Description of Artificial Sequence: Synthetic oligonucleotide
cccuuaggauccaguagaa

SEQ ID NO: 1524812 - RNA, 19 nt, Artificial Sequence
  Description of Artificial Sequence: Synthetic oligonucleotide
gcccuuguuuauagcguca

SEQ ID NO: 1524813 - RNA, 19 nt, Artificial Sequence
  Description of Artificial Sequence: Synthetic oligonucleotide
ucccggcuuccagcaacuc

SEQ ID NO: 1524814 - RNA, 19 nt, Artificial Sequence
  Description of Artificial Sequence: Synthetic oligonucleotide
acacgccacgccagaucca

SEQ ID NO: 1524815 - RNA, 19 nt, Artificial Sequence
  Description of Artificial Sequence: Synthetic oligonucleotide
ggugucaagaggaccgauu

SEQ ID NO: 1524816 - RNA, 19 nt, Artificial Sequence
  Description of Artificial Sequence: Synthetic oligonucleotide
ggaaccgucuggaauucuu

SEQ ID NO: 1524817 - RNA, 19 nt, Artificial Sequence
  Description of Artificial Sequence: Synthetic oligonucleotide
caccguguccagauccuuu

SEQ ID NO: 1524818 - RNA, 19 nt, Artificial Sequence
  Description of Artificial Sequence: Synthetic oligonucleotide
ggggcuccggaggaacuca

SEQ ID NO: 1524819 - RNA, 19 nt, Artificial Sequence
  Description of Artificial Sequence: Synthetic oligonucleotide
agcaauccucagggaugau

SEQ ID NO: 1524820 - RNA, 19 nt, Artificial Sequence
  Description of Artificial Sequence: Synthetic oligonucleotide
ccauagaggucucgggagu

SEQ ID NO: 1524821 - RNA, 19 nt, Artificial Sequence
  Description of Artificial Sequence: Synthetic oligonucleotide
gggaccggacagacacgcc

SEQ ID NO: 1524822 - RNA, 19 nt, Artificial Sequence
  Description of Artificial Sequence: Synthetic oligonucleotide
acccgcccuuaggauccag

SEQ ID NO: 1524823 - RNA, 19 nt, Artificial Sequence
  Description of Artificial Sequence: Synthetic oligonucleotide
cacgccacgccagauccau

SEQ ID NO: 1524824 - RNA, 19 nt, Artificial Sequence
  Description of Artificial Sequence: Synthetic oligonucleotide
acgccacgccagauccaug

SEQ ID NO: 1524825 - RNA, 19 nt, Artificial Sequence
  Description of Artificial Sequence: Synthetic oligonucleotide
ccgcccuuaggauccagua

SEQ ID NO: 1524826 - RNA, 19 nt, Artificial Sequence
  Description of Artificial Sequence: Synthetic oligonucleotide
ggccgacugcagccaggug

SEQ ID NO: 1524827 - RNA, 19 nt, Artificial Sequence
  Description of Artificial Sequence: Synthetic oligonucleotide
cgggccagucaacggcagc

SEQ ID NO: 1524828 - RNA, 19 nt, Artificial Sequence
  Description of Artificial Sequence: Synthetic oligonucleotide
gacccgcccuuaggaucca

SEQ ID NO: 1524829 - RNA, 19 nt, Artificial Sequence
  Description of Artificial Sequence: Synthetic oligonucleotide
ccgaagacuuaggauugcu

SEQ ID NO: 1524830 - RNA, 19 nt, Artificial Sequence
  Description of Artificial Sequence: Synthetic oligonucleotide
cagacacgccacgccagau

SEQ ID NO: 1524831 - RNA, 19 nt, Artificial Sequence
  Description of Artificial Sequence: Synthetic oligonucleotide
ccagacggccagcgcguga

SEQ ID NO: 1524832 - RNA, 19 nt, Artificial Sequence
  Description of Artificial Sequence: Synthetic oligonucleotide
cccagacggccagcgcgug

SEQ ID NO: 1524833 - RNA, 19 nt, Artificial Sequence
  Description of Artificial Sequence: Synthetic oligonucleotide
cccgcccuuaggauccagu

SEQ ID NO: 1524834 - RNA, 19 nt, Artificial Sequence
  Description of Artificial Sequence: Synthetic oligonucleotide
aguaaauaucuucagaggg

SEQ ID NO: 1524835 - RNA, 19 nt, Artificial Sequence
  Description of Artificial Sequence: Synthetic oligonucleotide
aaaacuuuugagugucagc

SEQ ID NO: 1524836 - RNA, 19 nt, Artificial Sequence
  Description of Artificial Sequence: Synthetic oligonucleotide
ucuaggagugugcugaugg

SEQ ID NO: 1524837 - RNA, 19 nt, Artificial Sequence
  Description of Artificial Sequence: Synthetic oligonucleotide
aagcuauuggcaugcaggc

SEQ ID NO: 1524838 - RNA, 19 nt, Artificial Sequence
  Description of Artificial Sequence: Synthetic oligonucleotide
gaugcgaugagccaccccg

SEQ ID NO: 1524839 - RNA, 19 nt, Artificial Sequence
  Description of Artificial Sequence: Synthetic oligonucleotide
aaacuuuugagugucagcu

SEQ ID NO: 1524840 - RNA, 19 nt, Artificial Sequence
  Description of Artificial Sequence: Synthetic oligonucleotide
ugagugucagcucauaugu

SEQ ID NO: 1524841 - RNA, 19 nt, Artificial Sequence
  Description of Artificial Sequence: Synthetic oligonucleotide
ucaggcauugcaucuaccg

SEQ ID NO: 1524842 - RNA, 19 nt, Artificial Sequence
  Description of Artificial Sequence: Synthetic oligonucleotide
ucauauguuagaucugugc

SEQ ID NO: 1524843 - RNA, 19 nt, Artificial Sequence
  Description of Artificial Sequence: Synthetic oligonucleotide
aggcauugcaucuaccggc

SEQ ID NO: 1524844 - RNA, 19 nt, Artificial Sequence
  Description of Artificial Sequence: Synthetic oligonucleotide
aguguguuacuaugggacc

SEQ ID NO: 1524845 - RNA, 19 nt, Artificial Sequence
  Description of Artificial Sequence: Synthetic oligonucleotide
uuaucuaggagugugcuga

SEQ ID NO: 1524846 - RNA, 19 nt, Artificial Sequence
  Description of Artificial Sequence: Synthetic oligonucleotide
ucuagaagagccaucuccu

SEQ ID NO: 1524847 - RNA, 19 nt, Artificial Sequence
  Description of Artificial Sequence: Synthetic oligonucleotide
guuacuaugggaccaggag

SEQ ID NO: 1524848 - RNA, 19 nt, Artificial Sequence
  Description of Artificial Sequence: Synthetic oligonucleotide
aagcaagcuauuggcaugc

SEQ ID NO: 1524849 - RNA, 19 nt, Artificial Sequence
  Description of Artificial Sequence: Synthetic oligonucleotide
uaaauaucuucagagggga

SEQ ID NO: 1524850 - RNA, 19 nt, Artificial Sequence
  Description of Artificial Sequence: Synthetic oligonucleotide
aacuuuugagugucagcuc

SEQ ID NO: 1524851 - RNA, 19 nt, Artificial Sequence
  Description of Artificial Sequence: Synthetic oligonucleotide
ucuugcaguaacuugcggu

SEQ ID NO: 1524852 - RNA, 19 nt, Artificial Sequence
  Description of Artificial Sequence: Synthetic oligonucleotide
ucuaacucaccagacagca

SEQ ID NO: 1524853 - RNA, 19 nt, Artificial Sequence
  Description of Artificial Sequence: Synthetic oligonucleotide
uucuuuugugcacugugca

SEQ ID NO: 1524854 - RNA, 19 nt, Artificial Sequence
  Description of Artificial Sequence: Synthetic oligonucleotide
uagaccuccucaaacucag

SEQ ID NO: 1524855 - RNA, 19 nt, Artificial Sequence
  Description of Artificial Sequence: Synthetic oligonucleotide
uaggccuuaucuaggagug

SEQ ID NO: 1524856 - RNA, 19 nt, Artificial Sequence
  Description of Artificial Sequence: Synthetic oligonucleotide
agcaguguguuacuauggg

SEQ ID NO: 1524857 - RNA, 19 nt, Artificial Sequence
  Description of Artificial Sequence: Synthetic oligonucleotide
agaggggacaccaucauag

SEQ ID NO: 1524858 - RNA, 19 nt, Artificial Sequence
  Description of Artificial Sequence: Synthetic oligonucleotide
uauguuagaucugugcagu

SEQ ID NO: 1524859 - RNA, 19 nt, Artificial Sequence
  Description of Artificial Sequence: Synthetic oligonucleotide
auaucuucagaggggacac

SEQ ID NO: 1524860 - RNA, 19 nt, Artificial Sequence
  Description of Artificial Sequence: Synthetic oligonucleotide
ucuuuugugcacugugcag

SEQ ID NO: 1524861 - RNA, 19 nt, Artificial Sequence
  Description of Artificial Sequence: Synthetic oligonucleotide
ugagcuggaccucagcaga

SEQ ID NO: 1524862 - RNA, 19 nt, Artificial Sequence
  Description of Artificial Sequence: Synthetic oligonucleotide
augguaggaaacauuuggc

SEQ ID NO: 1524863 - RNA, 19 nt, Artificial Sequence
  Description of Artificial Sequence: Synthetic oligonucleotide
ucuucaugcggcgacgggg

SEQ ID NO: 1524864 - RNA, 19 nt, Artificial Sequence
  Description of Artificial Sequence: Synthetic oligonucleotide
uucagaggggacaccauca

SEQ ID NO: 1524865 - RNA, 19 nt, Artificial Sequence
  Description of Artificial Sequence: Synthetic oligonucleotide
uauaugcuuugauuucaag

SEQ ID NO: 1524866 - RNA, 19 nt, Artificial Sequence
  Description of Artificial Sequence: Synthetic oligonucleotide
gcuagaagcaagcuauugg

SEQ ID NO: 1524867 - RNA, 19 nt, Artificial Sequence
  Description of Artificial Sequence: Synthetic oligonucleotide
cuggauauugggaggggcg

SEQ ID NO: 1524868 - RNA, 19 nt, Artificial Sequence
  Description of Artificial Sequence: Synthetic oligonucleotide
caacuuguggcucuucacc

SEQ ID NO: 1524869 - RNA, 19 nt, Artificial Sequence
  Description of Artificial Sequence: Synthetic oligonucleotide
gcaguucugauucugagug

SEQ ID NO: 1524870 - RNA, 19 nt, Artificial Sequence
  Description of Artificial Sequence: Synthetic oligonucleotide
cacagugccaguaaauauc

SEQ ID NO: 1524871 - RNA, 19 nt, Artificial Sequence
  Description of Artificial Sequence: Synthetic oligonucleotide
uggccuaggccuuaucuag

SEQ ID NO: 1524872 - RNA, 19 nt, Artificial Sequence
  Description of Artificial Sequence: Synthetic oligonucleotide
ugcaaguacucccacccca

SEQ ID NO: 1524873 - RNA, 19 nt, Artificial Sequence
  Description of Artificial Sequence: Synthetic oligonucleotide
uucacagcgccucuucagc

SEQ ID NO: 1524874 - RNA, 19 nt, Artificial Sequence
  Description of Artificial Sequence: Synthetic oligonucleotide
auuucaagcaguucugauu

SEQ ID NO: 1524875 - RNA, 19 nt, Artificial Sequence
  Description of Artificial Sequence: Synthetic oligonucleotide
aacauuuggcuuggguggg

SEQ ID NO: 1524876 - RNA, 19 nt, Artificial Sequence
  Description of Artificial Sequence: Synthetic oligonucleotide
uauguugcccacuggcgcc

SEQ ID NO: 1524877 - RNA, 19 nt, Artificial Sequence
  Description of Artificial Sequence: Synthetic oligonucleotide
gagguaugacaagaggccg

SEQ ID NO: 1524878 - RNA, 19 nt, Artificial Sequence
  Description of Artificial Sequence: Synthetic oligonucleotide
gacggggugucucaggcag

SEQ ID NO: 1524879 - RNA, 19 nt, Artificial Sequence
  Description of Artificial Sequence: Synthetic oligonucleotide
auugcaucuaccggcuccc

SEQ ID NO: 1524880 - RNA, 19 nt, Artificial Sequence
  Description of Artificial Sequence: Synthetic oligonucleotide
uguuacuaugggaccagga

SEQ ID NO: 1524881 - RNA, 19 nt, Artificial Sequence
  Description of Artificial Sequence: Synthetic oligonucleotide
ucgugcugggcuauguugc

SEQ ID NO: 1524882 - RNA, 19 nt, Artificial Sequence
  Description of Artificial Sequence: Synthetic oligonucleotide
uguuagaucugugcagugc

SEQ ID NO: 1524883 - RNA, 19 nt, Artificial Sequence
  Description of Artificial Sequence: Synthetic oligonucleotide
cauugcaucuaccggcucc

SEQ ID NO: 1524884 - RNA, 19 nt, Artificial Sequence
  Description of Artificial Sequence: Synthetic oligonucleotide
ucaggaugcaguggggccg

SEQ ID NO: 1524885 - RNA, 19 nt, Artificial Sequence
  Description of Artificial Sequence: Synthetic oligonucleotide
cuccucaaacucaggaugc

SEQ ID NO: 1524886 - RNA, 19 nt, Artificial Sequence
  Description of Artificial Sequence: Synthetic oligonucleotide
agcuccgucguucuagaag

SEQ ID NO: 1524887 - RNA, 19 nt, Artificial Sequence
  Description of Artificial Sequence: Synthetic oligonucleotide
uggauauugggaggggcgg

SEQ ID NO: 1524888 - RNA, 19 nt, Artificial Sequence
  Description of Artificial Sequence: Synthetic oligonucleotide
ugggcuauguugcccacug

SEQ ID NO: 1524889 - RNA, 19 nt, Artificial Sequence
  Description of Artificial Sequence: Synthetic oligonucleotide
uuccgcaccaccuucccug

SEQ ID NO: 1524890 - RNA, 19 nt, Artificial Sequence
  Description of Artificial Sequence: Synthetic oligonucleotide
gcucuaacucaccagacag

SEQ ID NO: 1524891 - RNA, 19 nt, Artificial Sequence
  Description of Artificial Sequence: Synthetic oligonucleotide
gauggaugcgaugagccac

SEQ ID NO: 1524892 - RNA, 19 nt, Artificial Sequence
  Description of Artificial Sequence: Synthetic oligonucleotide
gugugggcguuauagcugg

SEQ ID NO: 1524893 - RNA, 19 nt, Artificial Sequence
  Description of Artificial Sequence: Synthetic oligonucleotide
aguucugauucugagugug

SEQ ID NO: 1524894 - RNA, 19 nt, Artificial Sequence
  Description of Artificial Sequence: Synthetic oligonucleotide
ucugaguguggcaugugau

SEQ ID NO: 1524895 - RNA, 19 nt, Artificial Sequence
  Description of Artificial Sequence: Synthetic oligonucleotide
caagaggccgcucuuugag

SEQ ID NO: 1524896 - RNA, 19 nt, Artificial Sequence
  Description of Artificial Sequence: Synthetic oligonucleotide
caggcauugcaucuaccgg

SEQ ID NO: 1524897 - RNA, 19 nt, Artificial Sequence
  Description of Artificial Sequence: Synthetic oligonucleotide
agguaugacaagaggccgc

SEQ ID NO: 1524898 - RNA, 19 nt, Artificial Sequence
  Description of Artificial Sequence: Synthetic oligonucleotide
uguguuacuaugggaccag

SEQ ID NO: 1524899 - RNA, 19 nt, Artificial Sequence
  Description of Artificial Sequence: Synthetic oligonucleotide
gacaagaggccgcucuuug

SEQ ID NO: 1524900 - RNA, 19 nt, Artificial Sequence
  Description of Artificial Sequence: Synthetic oligonucleotide
cucuaacucaccagacagc

SEQ ID NO: 1524901 - RNA, 19 nt, Artificial Sequence
  Description of Artificial Sequence: Synthetic oligonucleotide
ugggcguuauagcuggcca

SEQ ID NO: 1524902 - RNA, 19 nt, Artificial Sequence
  Description of Artificial Sequence: Synthetic oligonucleotide
uguggcuugucucgugcug

SEQ ID NO: 1524903 - RNA, 19 nt, Artificial Sequence
  Description of Artificial Sequence: Synthetic oligonucleotide
ucuucuucaugcggcgacg

SEQ ID NO: 1524904 - RNA, 19 nt, Artificial Sequence
  Description of Artificial Sequence: Synthetic oligonucleotide
acugcucugcucucauagg

SEQ ID NO: 1524905 - RNA, 19 nt, Artificial Sequence
  Description of Artificial Sequence: Synthetic oligonucleotide
cuuauaugcuuugauuuca

SEQ ID NO: 1524906 - RNA, 19 nt, Artificial Sequence
  Description of Artificial Sequence: Synthetic oligonucleotide
agcaguucugauucugagu

SEQ ID NO: 1524907 - RNA, 19 nt, Artificial Sequence
  Description of Artificial Sequence: Synthetic oligonucleotide
cuucacagcgccucuucag

SEQ ID NO: 1524908 - RNA, 19 nt, Artificial Sequence
  Description of Artificial Sequence: Synthetic oligonucleotide
agaggccgcucuuugagcu

SEQ ID NO: 1524909 - RNA, 19 nt, Artificial Sequence
  Description of Artificial Sequence: Synthetic oligonucleotide
ucgugcuucaaaacugcuc

SEQ ID NO: 1524910 - RNA, 19 nt, Artificial Sequence
  Description of Artificial Sequence: Synthetic oligonucleotide
ugcauguagcugugaagug

SEQ ID NO: 1524911 - RNA, 19 nt, Artificial Sequence
  Description of Artificial Sequence: Synthetic oligonucleotide
uaggcugcccuggauauug

SEQ ID NO: 1524912 - RNA, 19 nt, Artificial Sequence
  Description of Artificial Sequence: Synthetic oligonucleotide
aacggggugggaucaggca

SEQ ID NO: 1524913 - RNA, 19 nt, Artificial Sequence
  Description of Artificial Sequence: Synthetic oligonucleotide
ggagguaugacaagaggcc

SEQ ID NO: 1524914 - RNA, 19 nt, Artificial Sequence
  Description of Artificial Sequence: Synthetic oligonucleotide
ugcccuggauauugggagg

SEQ ID NO: 1524915 - RNA, 19 nt, Artificial Sequence
  Description of Artificial Sequence: Synthetic oligonucleotide
ggaggugugggcguuauag

SEQ ID NO: 1524916 - RNA, 19 nt, Artificial Sequence
  Description of Artificial Sequence: Synthetic oligonucleotide
uguucacuugguccacggc

SEQ ID NO: 1524917 - RNA, 19 nt, Artificial Sequence
  Description of Artificial Sequence: Synthetic oligonucleotide
agcauguagccccuugagu

SEQ ID NO: 1524918 - RNA, 19 nt, Artificial Sequence
  Description of Artificial Sequence: Synthetic oligonucleotide
guucuuuugugcacugugc

SEQ ID NO: 1524919 - RNA, 19 nt, Artificial Sequence
  Description of Artificial Sequence: Synthetic oligonucleotide
accugcuaguccuucccuc

SEQ ID NO: 1524920 - RNA, 19 nt, Artificial Sequence
  Description of Artificial Sequence: Synthetic oligonucleotide
gaggugugggcguuauagc

SEQ ID NO: 1524921 - RNA, 19 nt, Artificial Sequence
  Description of Artificial Sequence: Synthetic oligonucleotide
ugggaucaggcauugcauc

SEQ ID NO: 1524922 - RNA, 19 nt, Artificial Sequence
  Description of Artificial Sequence: Synthetic oligonucleotide
cucgugcugggcuauguug

SEQ ID NO: 1524923 - RNA, 19 nt, Artificial Sequence
  Description of Artificial Sequence: Synthetic oligonucleotide
guguucacuugguccacgg

SEQ ID NO: 1524924 - RNA, 19 nt, Artificial Sequence
  Description of Artificial Sequence: Synthetic oligonucleotide
gccgcuagagcucaguagc

SEQ ID NO: 1524925 - RNA, 19 nt, Artificial Sequence
  Description of Artificial Sequence: Synthetic oligonucleotide
agucccucgugcuucaaaa

SEQ ID NO: 1524926 - RNA, 19 nt, Artificial Sequence
  Description of Artificial Sequence: Synthetic oligonucleotide
ucgccuccgaaccuguaga

SEQ ID NO: 1524927 - RNA, 19 nt, Artificial Sequence
  Description of Artificial Sequence: Synthetic oligonucleotide
ugaggcgauaggagguaug

SEQ ID NO: 1524928 - RNA, 19 nt, Artificial Sequence
  Description of Artificial Sequence: Synthetic oligonucleotide
cucauauguuagaucugug

SEQ ID NO: 1524929 - RNA, 19 nt, Artificial Sequence
  Description of Artificial Sequence: Synthetic oligonucleotide
ugucagcucauauguuaga

SEQ ID NO: 1524930 - RNA, 19 nt, Artificial Sequence
  Description of Artificial Sequence: Synthetic oligonucleotide
uguguucacuugguccacg

SEQ ID NO: 1524931 - RNA, 19 nt, Artificial Sequence
  Description of Artificial Sequence: Synthetic oligonucleotide
gcucacagugcacggaugg

SEQ ID NO: 1524932 - RNA, 19 nt, Artificial Sequence
  Description of Artificial Sequence: Synthetic oligonucleotide
uccuccacagucccucgug

SEQ ID NO: 1524933 - RNA, 19 nt, Artificial Sequence
  Description of Artificial Sequence: Synthetic oligonucleotide
ggcgauaggagguaugaca

SEQ ID NO: 1524934 - RNA, 19 nt, Artificial Sequence
  Description of Artificial Sequence: Synthetic oligonucleotide
acguuggggcugcaaguac

SEQ ID NO: 1524935 - RNA, 19 nt, Artificial Sequence
  Description of Artificial Sequence: Synthetic oligonucleotide
ugucccugagugcuuccgc

SEQ ID NO: 1524936 - RNA, 19 nt, Artificial Sequence
  Description of Artificial Sequence: Synthetic oligonucleotide
ugcucucauaggcugcccu

SEQ ID NO: 1524937 - RNA, 19 nt, Artificial Sequence
  Description of Artificial Sequence: Synthetic oligonucleotide
cacacaguucggucugucc

SEQ ID NO: 1524938 - RNA, 19 nt, Artificial Sequence
  Description of Artificial Sequence: Synthetic oligonucleotide
ugcaucuaccggcucccgc

SEQ ID NO: 1524939 - RNA, 19 nt, Artificial Sequence
  Description of Artificial Sequence: Synthetic oligonucleotide
uggcgccacggucugaggc

SEQ ID NO: 1524940 - RNA, 19 nt, Artificial Sequence
  Description of Artificial Sequence: Synthetic oligonucleotide
ggugggaucaggcauugca

SEQ ID NO: 1524941 - RNA, 19 nt, Artificial Sequence
  Description of Artificial Sequence: Synthetic oligonucleotide
ugcgaugguaggaaacauu

SEQ ID NO: 1524942 - RNA, 19 nt, Artificial Sequence
  Description of Artificial Sequence: Synthetic oligonucleotide
gugccaguaaauaucuuca

SEQ ID NO: 1524943 - RNA, 19 nt, Artificial Sequence
  Description of Artificial Sequence: Synthetic oligonucleotide
acagcgauggcagcguucu

SEQ ID NO: 1524944 - RNA, 19 nt, Artificial Sequence
  Description of Artificial Sequence: Synthetic oligonucleotide
gaggggacaccaucauagc

SEQ ID NO: 1524945 - RNA, 19 nt, Artificial Sequence
  Description of Artificial Sequence: Synthetic oligonucleotide
cuuguggcucuucaccuuc

SEQ ID NO: 1524946 - RNA, 19 nt, Artificial Sequence
  Description of Artificial Sequence: Synthetic oligonucleotide
uuggcugcauguagcugug

SEQ ID NO: 1524947 - RNA, 19 nt, Artificial Sequence
  Description of Artificial Sequence: Synthetic oligonucleotide
ugcaguaacuugcgguuuu

SEQ ID NO: 1524948 - RNA, 19 nt, Artificial Sequence
  Description of Artificial Sequence: Synthetic oligonucleotide
guggcgcucacagugcacg

SEQ ID NO: 1524949 - RNA, 19 nt, Artificial Sequence
  Description of Artificial Sequence: Synthetic oligonucleotide
cuuugagcuggaccucagc

SEQ ID NO: 1524950 - RNA, 19 nt, Artificial Sequence
  Description of Artificial Sequence: Synthetic oligonucleotide
ccuuauaugcuuugauuuc

SEQ ID NO: 1524951 - RNA, 19 nt, Artificial Sequence
  Description of Artificial Sequence: Synthetic oligonucleotide
cagcauguagccccuugag

SEQ ID NO: 1524952 - RNA, 19 nt, Artificial Sequence
  Description of Artificial Sequence: Synthetic oligonucleotide
ggugagguucccuguggcg

SEQ ID NO: 1524953 - RNA, 19 nt, Artificial Sequence
  Description of Artificial Sequence: Synthetic oligonucleotide
uccgucguucuagaagagc

SEQ ID NO: 1524954 - RNA, 19 nt, Artificial Sequence
  Description of Artificial Sequence: Synthetic oligonucleotide
agaggugccgcuagagcuc

SEQ ID NO: 1524955 - RNA, 19 nt, Artificial Sequence
  Description of Artificial Sequence: Synthetic oligonucleotide
ccggaucucagcauguagc

SEQ ID NO: 1524956 - RNA, 19 nt, Artificial Sequence
  Description of Artificial Sequence: Synthetic oligonucleotide
gaggcgauaggagguauga

SEQ ID NO: 1524957 - RNA, 19 nt, Artificial Sequence
  Description of Artificial Sequence: Synthetic oligonucleotide
ggcagcguucuucuguucc

SEQ ID NO: 1524958 - RNA, 19 nt, Artificial Sequence
  Description of Artificial Sequence: Synthetic oligonucleotide
aagugagguaggccacagu

SEQ ID NO: 1524959 - RNA, 19 nt, Artificial Sequence
  Description of Artificial Sequence: Synthetic oligonucleotide
gcuauguugcccacuggcg

SEQ ID NO: 1524960 - RNA, 19 nt, Artificial Sequence
  Description of Artificial Sequence: Synthetic oligonucleotide
ugcuaguccuucccuccca

SEQ ID NO: 1524961 - RNA, 19 nt, Artificial Sequence
  Description of Artificial Sequence: Synthetic oligonucleotide
gcuccgucguucuagaaga

SEQ ID NO: 1524962 - RNA, 19 nt, Artificial Sequence
  Description of Artificial Sequence: Synthetic oligonucleotide
gauuucaagcaguucugau

SEQ ID NO: 1524963 - RNA, 19 nt, Artificial Sequence
  Description of Artificial Sequence: Synthetic oligonucleotide
uguagccccuugagugugc

SEQ ID NO: 1524964 - RNA, 19 nt, Artificial Sequence
  Description of Artificial Sequence: Synthetic oligonucleotide
ggaguuugcggcucucgcc

SEQ ID NO: 1524965 - RNA, 19 nt, Artificial Sequence
  Description of Artificial Sequence: Synthetic oligonucleotide
uccgaaccuguagaccucc

SEQ ID NO: 1524966 - RNA, 19 nt, Artificial Sequence
  Description of Artificial Sequence: Synthetic oligonucleotide
cuuugauuucaagcaguuc

SEQ ID NO: 1524967 - RNA, 19 nt, Artificial Sequence
  Description of Artificial Sequence: Synthetic oligonucleotide
auuuggcuuggguggggug

SEQ ID NO: 1524968 - RNA, 19 nt, Artificial Sequence
  Description of Artificial Sequence: Synthetic oligonucleotide
guauucuccagcacagcga

SEQ ID NO: 1524969 - RNA, 19 nt, Artificial Sequence
  Description of Artificial Sequence: Synthetic oligonucleotide
cugugaagugagguaggcc

SEQ ID NO: 1524970 - RNA, 19 nt, Artificial Sequence
  Description of Artificial Sequence: Synthetic oligonucleotide
ggggcggguccuuauaugc

SEQ ID NO: 1524971 - RNA, 19 nt, Artificial Sequence
  Description of Artificial Sequence: Synthetic oligonucleotide
agugcuuccgcaccaccuu

SEQ ID NO: 1524972 - RNA, 19 nt, Artificial Sequence
  Description of Artificial Sequence: Synthetic oligonucleotide
acggggugggaucaggcau

SEQ ID NO: 1524973 - RNA, 19 nt, Artificial Sequence
  Description of Artificial Sequence: Synthetic oligonucleotide
ucguucuagaagagccauc

SEQ ID NO: 1524974 - RNA, 19 nt, Artificial Sequence
  Description of Artificial Sequence: Synthetic oligonucleotide
ugaugcagccauggccuag

SEQ ID NO: 1524975 - RNA, 19 nt, Artificial Sequence
  Description of Artificial Sequence: Synthetic oligonucleotide
acggucugaggcgauagga

SEQ ID NO: 1524976 - RNA, 19 nt, Artificial Sequence
  Description of Artificial Sequence: Synthetic oligonucleotide
gaguguggcaugugaugca

SEQ ID NO: 1524977 - RNA, 19 nt, Artificial Sequence
  Description of Artificial Sequence: Synthetic oligonucleotide
ugugcacugugcagcuggu

SEQ ID NO: 1524978 - RNA, 19 nt, Artificial Sequence
  Description of Artificial Sequence: Synthetic oligonucleotide
uuugcggcucucgccuccg

SEQ ID NO: 1524979 - RNA, 19 nt, Artificial Sequence
  Description of Artificial Sequence: Synthetic oligonucleotide
uggcgcucacagugcacgg

SEQ ID NO: 1524980 - RNA, 19 nt, Artificial Sequence
  Description of Artificial Sequence: Synthetic oligonucleotide
gaacggggugggaucaggc

SEQ ID NO: 1524981 - RNA, 19 nt, Artificial Sequence
  Description of Artificial Sequence: Synthetic oligonucleotide
guguguuacuaugggacca

SEQ ID NO: 1524982 - RNA, 19 nt, Artificial Sequence
  Description of Artificial Sequence: Synthetic oligonucleotide
aggcgauaggagguaugac

SEQ ID NO: 1524983 - RNA, 19 nt, Artificial Sequence
  Description of Artificial Sequence: Synthetic oligonucleotide
ucggucugucccugagugc

SEQ ID NO: 1524984 - RNA, 19 nt, Artificial Sequence
  Description of Artificial Sequence: Synthetic oligonucleotide
gcaagcuauuggcaugcag

SEQ ID NO: 1524985 - RNA, 19 nt, Artificial Sequence
  Description of Artificial Sequence: Synthetic oligonucleotide
cugcauguagcugugaagu

SEQ ID NO: 1524986 - RNA, 19 nt, Artificial Sequence
  Description of Artificial Sequence: Synthetic oligonucleotide
ggcgccacggucugaggcg

SEQ ID NO: 1524987 - RNA, 19 nt, Artificial Sequence
  Description of Artificial Sequence: Synthetic oligonucleotide
uugcgguuuucuuccuccu

SEQ ID NO: 1524988 - RNA, 19 nt, Artificial Sequence
  Description of Artificial Sequence: Synthetic oligonucleotide
cugcuaguccuucccuccc

SEQ ID NO: 1524989 - RNA, 19 nt, Artificial Sequence
  Description of Artificial Sequence: Synthetic oligonucleotide
ccugcuaguccuucccucc

SEQ ID NO: 1524990 - RNA, 19 nt, Artificial Sequence
  Description of Artificial Sequence: Synthetic oligonucleotide
cuugcaguaacuugcgguu

SEQ ID NO: 1524991 - RNA, 19 nt, Artificial Sequence
  Description of Artificial Sequence: Synthetic oligonucleotide
gaugagccaccccgaugug

SEQ ID NO: 1524992 - RNA, 19 nt, Artificial Sequence
  Description of Artificial Sequence: Synthetic oligonucleotide
aggggcggguccuuauaug

SEQ ID NO: 1524993 - RNA, 19 nt, Artificial Sequence
  Description of Artificial Sequence: Synthetic oligonucleotide
ggccuuaucuaggagugug

SEQ ID NO: 1524994 - RNA, 19 nt, Artificial Sequence
  Description of Artificial Sequence: Synthetic oligonucleotide
uaucuaggagugugcugau

SEQ ID NO: 1524995 - RNA, 19 nt, Artificial Sequence
  Description of Artificial Sequence: Synthetic oligonucleotide
ccucgugcuucaaaacugc

SEQ ID NO: 1524996 - RNA, 19 nt, Artificial Sequence
  Description of Artificial Sequence: Synthetic oligonucleotide
ugcgaugagccaccccgau

SEQ ID NO: 1524997 - RNA, 19 nt, Artificial Sequence
  Description of Artificial Sequence: Synthetic oligonucleotide
caucuaccggcucccgcag

SEQ ID NO: 1524998 - RNA, 19 nt, Artificial Sequence
  Description of Artificial Sequence: Synthetic oligonucleotide
ucugaggcgauaggaggua

SEQ ID NO: 1524999 - RNA, 19 nt, Artificial Sequence
  Description of Artificial Sequence: Synthetic oligonucleotide
cacggucugaggcgauagg

SEQ ID NO: 1525000 - RNA, 19 nt, Artificial Sequence
  Description of Artificial Sequence: Synthetic oligonucleotide
uucaugcggcgacggggug

SEQ ID NO: 1525001 - RNA, 19 nt, Artificial Sequence
  Description of Artificial Sequence: Synthetic oligonucleotide
agugcacggauggcugcgg

SEQ ID NO: 1525002 - RNA, 19 nt, Artificial Sequence
  Description of Artificial Sequence: Synthetic oligonucleotide
ggauauugggaggggcggg

SEQ ID NO: 1525003 - RNA, 19 nt, Artificial Sequence
  Description of Artificial Sequence: Synthetic oligonucleotide
cagguuuguggcugccaug

SEQ ID NO: 1525004 - RNA, 19 nt, Artificial Sequence
  Description of Artificial Sequence: Synthetic oligonucleotide
gcuauuggcaugcaggcau

SEQ ID NO: 1525005 - RNA, 19 nt, Artificial Sequence
  Description of Artificial Sequence: Synthetic oligonucleotide
ggugugggcguuauagcug

SEQ ID NO: 1525006 - RNA, 19 nt, Artificial Sequence
  Description of Artificial Sequence: Synthetic oligonucleotide
gggcguuauagcuggccag

SEQ ID NO: 1525007 - RNA, 19 nt, Artificial Sequence
  Description of Artificial Sequence: Synthetic oligonucleotide
uuugugcacugugcagcug

SEQ ID NO: 1525008 - RNA, 19 nt, Artificial Sequence
  Description of Artificial Sequence: Synthetic oligonucleotide
ccgaugugggucuugugug

SEQ ID NO: 1525009 - RNA, 19 nt, Artificial Sequence
  Description of Artificial Sequence: Synthetic oligonucleotide
ucucgugcugggcuauguu

SEQ ID NO: 1525010 - RNA, 19 nt, Artificial Sequence
  Description of Artificial Sequence: Synthetic oligonucleotide
cccucgugcuucaaaacug

SEQ ID NO: 1525011 - RNA, 19 nt, Artificial Sequence
  Description of Artificial Sequence: Synthetic oligonucleotide
cauggccuaggccuuaucu

SEQ ID NO: 1525012 - RNA, 19 nt, Artificial Sequence
  Description of Artificial Sequence: Synthetic oligonucleotide
agccaccccgauguggguc

SEQ ID NO: 1525013 - RNA, 19 nt, Artificial Sequence
  Description of Artificial Sequence: Synthetic oligonucleotide
ggcuagaagcaagcuauug

SEQ ID NO: 1525014 - RNA, 19 nt, Artificial Sequence
  Description of Artificial Sequence: Synthetic oligonucleotide
gaggccgcucuuugagcug

SEQ ID NO: 1525015 - RNA, 19 nt, Artificial Sequence
  Description of Artificial Sequence: Synthetic oligonucleotide
ccaacaucucagcaagcac

SEQ ID NO: 1525016 - RNA, 19 nt, Artificial Sequence
  Description of Artificial Sequence: Synthetic oligonucleotide
gugggcguuauagcuggcc

SEQ ID NO: 1525017 - RNA, 19 nt, Artificial Sequence
  Description of Artificial Sequence: Synthetic oligonucleotide
gcauguagcugugaaguga

SEQ ID NO: 1525018 - RNA, 19 nt, Artificial Sequence
  Description of Artificial Sequence: Synthetic oligonucleotide
cuccgucguucuagaagag

SEQ ID NO: 1525019 - RNA, 19 nt, Artificial Sequence
  Description of Artificial Sequence: Synthetic oligonucleotide
ggaaacauuuggcuugggu

SEQ ID NO: 1525020 - RNA, 19 nt, Artificial Sequence
  Description of Artificial Sequence: Synthetic oligonucleotide
ugugggcguuauagcuggc

SEQ ID NO: 1525021 - RNA, 19 nt, Artificial Sequence
  Description of Artificial Sequence: Synthetic oligonucleotide
cacagcgauggcagcguuc

SEQ ID NO: 1525022 - RNA, 19 nt, Artificial Sequence
  Description of Artificial Sequence: Synthetic oligonucleotide
gcgauaggagguaugacaa

SEQ ID NO: 1525023 - RNA, 19 nt, Artificial Sequence
  Description of Artificial Sequence: Synthetic oligonucleotide
ggcugcaaguacucccacc

SEQ ID NO: 1525024 - RNA, 19 nt, Artificial Sequence
  Description of Artificial Sequence: Synthetic oligonucleotide
guuggggcugcaaguacuc

SEQ ID NO: 1525025 - RNA, 19 nt, Artificial Sequence
  Description of Artificial Sequence: Synthetic oligonucleotide
aggcuucacacaguucggu

SEQ ID NO: 1525026 - RNA, 19 nt, Artificial Sequence
  Description of Artificial Sequence: Synthetic oligonucleotide
ugagugugcuggcgugcuc

SEQ ID NO: 1525027 - RNA, 19 nt, Artificial Sequence
  Description of Artificial Sequence: Synthetic oligonucleotide
ugacaagaggccgcucuuu

SEQ ID NO: 1525028 - RNA, 19 nt, Artificial Sequence
  Description of Artificial Sequence: Synthetic oligonucleotide
ggaucucagcauguagccc

SEQ ID NO: 1525029 - RNA, 19 nt, Artificial Sequence
  Description of Artificial Sequence: Synthetic oligonucleotide
ggcuucacacaguucgguc

SEQ ID NO: 1525030 - RNA, 19 nt, Artificial Sequence
  Description of Artificial Sequence: Synthetic oligonucleotide
ugcggcucucgccuccgaa

SEQ ID NO: 1525031 - RNA, 19 nt, Artificial Sequence
  Description of Artificial Sequence: Synthetic oligonucleotide
uugcaguaacuugcgguuu

SEQ ID NO: 1525032 - RNA, 19 nt, Artificial Sequence
  Description of Artificial Sequence: Synthetic oligonucleotide
gcgacggggugucucaggc

SEQ ID NO: 1525033 - RNA, 19 nt, Artificial Sequence
  Description of Artificial Sequence: Synthetic oligonucleotide
uugguccacggcccugguc

SEQ ID NO: 1525034 - RNA, 19 nt, Artificial Sequence
  Description of Artificial Sequence: Synthetic oligonucleotide
cuccgaaccuguagaccuc

SEQ ID NO: 1525035 - RNA, 19 nt, Artificial Sequence
  Description of Artificial Sequence: Synthetic oligonucleotide
gauauugggaggggcgggu

SEQ ID NO: 1525036 - RNA, 19 nt, Artificial Sequence
  Description of Artificial Sequence: Synthetic oligonucleotide
gcccuggauauugggaggg

SEQ ID NO: 1525037 - RNA, 19 nt, Artificial Sequence
  Description of Artificial Sequence: Synthetic oligonucleotide
uucacacaguucggucugu

SEQ ID NO: 1525038 - RNA, 19 nt, Artificial Sequence
  Description of Artificial Sequence: Synthetic oligonucleotide
gacuggcaugauggaugcg

SEQ ID NO: 1525039 - RNA, 19 nt, Artificial Sequence
  Description of Artificial Sequence: Synthetic oligonucleotide
caguggggccgacaggcuc

SEQ ID NO: 1525040 - RNA, 19 nt, Artificial Sequence
  Description of Artificial Sequence: Synthetic oligonucleotide
ugggucuuguguggcuugu

SEQ ID NO: 1525041 - RNA, 19 nt, Artificial Sequence
  Description of Artificial Sequence: Synthetic oligonucleotide
gcugcgaugguaggaaaca

SEQ ID NO: 1525042 - RNA, 19 nt, Artificial Sequence
  Description of Artificial Sequence: Synthetic oligonucleotide
uggaugcgaugagccaccc

SEQ ID NO: 1525043 - RNA, 19 nt, Artificial Sequence
  Description of Artificial Sequence: Synthetic oligonucleotide
aggaaacauuuggcuuggg

SEQ ID NO: 1525044 - RNA, 19 nt, Artificial Sequence
  Description of Artificial Sequence: Synthetic oligonucleotide
cuucaugcggcgacggggu

SEQ ID NO: 1525045 - RNA, 19 nt, Artificial Sequence
  Description of Artificial Sequence: Synthetic oligonucleotide
ccuggauauugggaggggc

SEQ ID NO: 1525046 - RNA, 19 nt, Artificial Sequence
  Description of Artificial Sequence: Synthetic oligonucleotide
cagacucccgggccagcag

SEQ ID NO: 1525047 - RNA, 19 nt, Artificial Sequence
  Description of Artificial Sequence: Synthetic oligonucleotide
cguuauagcuggccagugc

SEQ ID NO: 1525048 - RNA, 19 nt, Artificial Sequence
  Description of Artificial Sequence: Synthetic oligonucleotide
ggccuaggccuuaucuagg

SEQ ID NO: 1525049 - RNA, 19 nt, Artificial Sequence
  Description of Artificial Sequence: Synthetic oligonucleotide
acucaccagacagcaugcu

SEQ ID NO: 1525050 - RNA, 19 nt, Artificial Sequence
  Description of Artificial Sequence: Synthetic oligonucleotide
caugcggcgacgggguguc

SEQ ID NO: 1525051 - RNA, 19 nt, Artificial Sequence
  Description of Artificial Sequence: Synthetic oligonucleotide
cuguguucacuugguccac

SEQ ID NO: 1525052 - RNA, 19 nt, Artificial Sequence
  Description of Artificial Sequence: Synthetic oligonucleotide
ugcuggcgugcucccgcug

SEQ ID NO: 1525053 - RNA, 19 nt, Artificial Sequence
  Description of Artificial Sequence: Synthetic oligonucleotide
cacaguucggucugucccu

SEQ ID NO: 1525054 - RNA, 19 nt, Artificial Sequence
  Description of Artificial Sequence: Synthetic oligonucleotide
gagugcuuccgcaccaccu

SEQ ID NO: 1525055 - RNA, 19 nt, Artificial Sequence
  Description of Artificial Sequence: Synthetic oligonucleotide
gcaugcucaacuuguggcu

SEQ ID NO: 1525056 - RNA, 19 nt, Artificial Sequence
  Description of Artificial Sequence: Synthetic oligonucleotide
gccuuaucuaggagugugc

SEQ ID NO: 1525057 - RNA, 19 nt, Artificial Sequence
  Description of Artificial Sequence: Synthetic oligonucleotide
ccuaggccuuaucuaggag

SEQ ID NO: 1525058 - RNA, 19 nt, Artificial Sequence
  Description of Artificial Sequence: Synthetic oligonucleotide
gcaaguacucccaccccac

SEQ ID NO: 1525059 - RNA, 19 nt, Artificial Sequence
  Description of Artificial Sequence: Synthetic oligonucleotide
ggcgacggggugucucagg

SEQ ID NO: 1525060 - RNA, 19 nt, Artificial Sequence
  Description of Artificial Sequence: Synthetic oligonucleotide
gccuaggccuuaucuagga

SEQ ID NO: 1525061 - RNA, 19 nt, Artificial Sequence
  Description of Artificial Sequence: Synthetic oligonucleotide
aucucagcauguagccccu

SEQ ID NO: 1525062 - RNA, 19 nt, Artificial Sequence
  Description of Artificial Sequence: Synthetic oligonucleotide
gggcuauguugcccacugg

SEQ ID NO: 1525063 - RNA, 19 nt, Artificial Sequence
  Description of Artificial Sequence: Synthetic oligonucleotide
auguugcccacuggcgcca

SEQ ID NO: 1525064 - RNA, 19 nt, Artificial Sequence
  Description of Artificial Sequence: Synthetic oligonucleotide
cuggcgccacggucugagg

SEQ ID NO: 1525065 - RNA, 19 nt, Artificial Sequence
  Description of Artificial Sequence: Synthetic oligonucleotide
cccugagugcuuccgcacc

SEQ ID NO: 1525066 - RNA, 19 nt, Artificial Sequence
  Description of Artificial Sequence: Synthetic oligonucleotide
cgaugguaggaaacauuug

SEQ ID NO: 1525067 - RNA, 19 nt, Artificial Sequence
  Description of Artificial Sequence: Synthetic oligonucleotide
ccuccgaaccuguagaccu

SEQ ID NO: 1525068 - RNA, 19 nt, Artificial Sequence
  Description of Artificial Sequence: Synthetic oligonucleotide
gucguucuagaagagccau

SEQ ID NO: 1525069 - RNA, 19 nt, Artificial Sequence
  Description of Artificial Sequence: Synthetic oligonucleotide
ggcgcgcugcucuaacuca

SEQ ID NO: 1525070 - RNA, 19 nt, Artificial Sequence
  Description of Artificial Sequence: Synthetic oligonucleotide
aggcugcgaugguaggaaa

SEQ ID NO: 1525071 - RNA, 19 nt, Artificial Sequence
  Description of Artificial Sequence: Synthetic oligonucleotide
gcgaugagccaccccgaug

SEQ ID NO: 1525072 - RNA, 19 nt, Artificial Sequence
  Description of Artificial Sequence: Synthetic oligonucleotide
ugcggcgacggggugucuc

SEQ ID NO: 1525073 - RNA, 19 nt, Artificial Sequence
  Description of Artificial Sequence: Synthetic oligonucleotide
ggcugcgaugguaggaaac

SEQ ID NO: 1525074 - RNA, 19 nt, Artificial Sequence
  Description of Artificial Sequence: Synthetic oligonucleotide
gaggggcggguccuuauau

SEQ ID NO: 1525075 - RNA, 19 nt, Artificial Sequence
  Description of Artificial Sequence: Synthetic oligonucleotide
ggaugcgaugagccacccc

SEQ ID NO: 1525076 - RNA, 19 nt, Artificial Sequence
  Description of Artificial Sequence: Synthetic oligonucleotide
aggaacggggugggaucag

SEQ ID NO: 1525077 - RNA, 19 nt, Artificial Sequence
  Description of Artificial Sequence: Synthetic oligonucleotide
agcuuguccuugggaggug

SEQ ID NO: 1525078 - RNA, 19 nt, Artificial Sequence
  Description of Artificial Sequence: Synthetic oligonucleotide
gguaugacaagaggccgcu

SEQ ID NO: 1525079 - RNA, 19 nt, Artificial Sequence
  Description of Artificial Sequence: Synthetic oligonucleotide
gcaagcacguuggggcugc

SEQ ID NO: 1525080 - RNA, 19 nt, Artificial Sequence
  Description of Artificial Sequence: Synthetic oligonucleotide
gccuccgaaccuguagacc

SEQ ID NO: 1525081 - RNA, 19 nt, Artificial Sequence
  Description of Artificial Sequence: Synthetic oligonucleotide
augcgaugagccaccccga

SEQ ID NO: 1525082 - RNA, 19 nt, Artificial Sequence
  Description of Artificial Sequence: Synthetic oligonucleotide
cucgugcuucaaaacugcu

SEQ ID NO: 1525083 - RNA, 19 nt, Artificial Sequence
  Description of Artificial Sequence: Synthetic oligonucleotide
gcgaugguaggaaacauuu

SEQ ID NO: 1525084 - RNA, 19 nt, Artificial Sequence
  Description of Artificial Sequence: Synthetic oligonucleotide
gugggaucaggcauugcau

SEQ ID NO: 1525085 - RNA, 19 nt, Artificial Sequence
  Description of Artificial Sequence: Synthetic oligonucleotide
gcggcucucgccuccgaac

SEQ ID NO: 1525086 - RNA, 19 nt, Artificial Sequence
  Description of Artificial Sequence: Synthetic oligonucleotide
guaugacaagaggccgcuc

SEQ ID NO: 1525087 - RNA, 19 nt, Artificial Sequence
  Description of Artificial Sequence: Synthetic oligonucleotide
uugcggcucucgccuccga

SEQ ID NO: 1525088 - RNA, 19 nt, Artificial Sequence
  Description of Artificial Sequence: Synthetic oligonucleotide
cuggcaugauggaugcgau

SEQ ID NO: 1525089 - RNA, 19 nt, Artificial Sequence
  Description of Artificial Sequence: Synthetic oligonucleotide
caccaucauagcagugugu

SEQ ID NO: 1525090 - RNA, 19 nt, Artificial Sequence
  Description of Artificial Sequence: Synthetic oligonucleotide
gcguuauagcuggccagug

SEQ ID NO: 1525091 - RNA, 19 nt, Artificial Sequence
  Description of Artificial Sequence: Synthetic oligonucleotide
cuaacucaccagacagcau

SEQ ID NO: 1525092 - RNA, 19 nt, Artificial Sequence
  Description of Artificial Sequence: Synthetic oligonucleotide
gcucccgcugaaggaagag

SEQ ID NO: 1525093 - RNA, 19 nt, Artificial Sequence
  Description of Artificial Sequence: Synthetic oligonucleotide
cgaugagccaccccgaugu

SEQ ID NO: 1525094 - RNA, 19 nt, Artificial Sequence
  Description of Artificial Sequence: Synthetic oligonucleotide
ggccgacaggcucuucuuc

SEQ ID NO: 1525095 - RNA, 19 nt, Artificial Sequence
  Description of Artificial Sequence: Synthetic oligonucleotide
uguugcccacuggcgccac

SEQ ID NO: 1525096 - RNA, 19 nt, Artificial Sequence
  Description of Artificial Sequence: Synthetic oligonucleotide
cuccacagucccucgugcu

SEQ ID NO: 1525097 - RNA, 19 nt, Artificial Sequence
  Description of Artificial Sequence: Synthetic oligonucleotide
ggguccuuauaugcuuuga

SEQ ID NO: 1525098 - RNA, 19 nt, Artificial Sequence
  Description of Artificial Sequence: Synthetic oligonucleotide
ccacggucugaggcgauag

SEQ ID NO: 1525099 - RNA, 19 nt, Artificial Sequence
  Description of Artificial Sequence: Synthetic oligonucleotide
gguggccgcaggcuucaca

SEQ ID NO: 1525100 - RNA, 19 nt, Artificial Sequence
  Description of Artificial Sequence: Synthetic oligonucleotide
cccgaugugggucuugugu

SEQ ID NO: 1525101 - RNA, 19 nt, Artificial Sequence
  Description of Artificial Sequence: Synthetic oligonucleotide
aggaugcaguggggccgac

SEQ ID NO: 1525102 - RNA, 19 nt, Artificial Sequence
  Description of Artificial Sequence: Synthetic oligonucleotide
cagucccucgugcuucaaa

SEQ ID NO: 1525103 - RNA, 19 nt, Artificial Sequence
  Description of Artificial Sequence: Synthetic oligonucleotide
gccccuugagugugcuggc

SEQ ID NO: 1525104 - RNA, 19 nt, Artificial Sequence
  Description of Artificial Sequence: Synthetic oligonucleotide
gagguucccuguggcgcuc

SEQ ID NO: 1525105 - RNA, 19 nt, Artificial Sequence
  Description of Artificial Sequence: Synthetic oligonucleotide
gcuggcgcgcugcucuaac

SEQ ID NO: 1525106 - RNA, 19 nt, Artificial Sequence
  Description of Artificial Sequence: Synthetic oligonucleotide
ggcauugcaucuaccggcu

SEQ ID NO: 1525107 - RNA, 19 nt, Artificial Sequence
  Description of Artificial Sequence: Synthetic oligonucleotide
caggaugcaguggggccga

SEQ ID NO: 1525108 - RNA, 19 nt, Artificial Sequence
  Description of Artificial Sequence: Synthetic oligonucleotide
ggcguuauagcuggccagu

SEQ ID NO: 1525109 - RNA, 19 nt, Artificial Sequence
  Description of Artificial Sequence: Synthetic oligonucleotide
ggaccucagcagacucccg

SEQ ID NO: 1525110 - RNA, 19 nt, Artificial Sequence
  Description of Artificial Sequence: Synthetic oligonucleotide
gcacguuggggcugcaagu

SEQ ID NO: 1525111 - RNA, 19 nt, Artificial Sequence
  Description of Artificial Sequence: Synthetic oligonucleotide
cauuuggcuuggguggggu

SEQ ID NO: 1525112 - RNA, 19 nt, Artificial Sequence
  Description of Artificial Sequence: Synthetic oligonucleotide
ggggccgacaggcucuucu

SEQ ID NO: 1525113 - RNA, 19 nt, Artificial Sequence
  Description of Artificial Sequence: Synthetic oligonucleotide
ugcuggcgcgcugcucuaa

SEQ ID NO: 1525114 - RNA, 19 nt, Artificial Sequence
  Description of Artificial Sequence: Synthetic oligonucleotide
gcuuugauuucaagcaguu

SEQ ID NO: 1525115 - RNA, 19 nt, Artificial Sequence
  Description of Artificial Sequence: Synthetic oligonucleotide
cccuggauauugggagggg

SEQ ID NO: 1525116 - RNA, 19 nt, Artificial Sequence
  Description of Artificial Sequence: Synthetic oligonucleotide
ccuuaucuaggagugugcu

SEQ ID NO: 1525117 - RNA, 19 nt, Artificial Sequence
  Description of Artificial Sequence: Synthetic oligonucleotide
ggcggguccuuauaugcuu

SEQ ID NO: 1525118 - RNA, 19 nt, Artificial Sequence
  Description of Artificial Sequence: Synthetic oligonucleotide
guagccccuugagugugcu

SEQ ID NO: 1525119 - RNA, 19 nt, Artificial Sequence
  Description of Artificial Sequence: Synthetic oligonucleotide
gcggcgacggggugucuca

SEQ ID NO: 1525120 - RNA, 19 nt, Artificial Sequence
  Description of Artificial Sequence: Synthetic oligonucleotide
ggcgcucacagugcacgga

SEQ ID NO: 1525121 - RNA, 19 nt, Artificial Sequence
  Description of Artificial Sequence: Synthetic oligonucleotide
gucucgugcugggcuaugu

SEQ ID NO: 1525122 - RNA, 19 nt, Artificial Sequence
  Description of Artificial Sequence: Synthetic oligonucleotide
cuggcgcgcugcucuaacu

SEQ ID NO: 1525123 - RNA, 19 nt, Artificial Sequence
  Description of Artificial Sequence: Synthetic oligonucleotide
cgccuccgaaccuguagac

SEQ ID NO: 1525124 - RNA, 19 nt, Artificial Sequence
  Description of Artificial Sequence: Synthetic oligonucleotide
cugcgaugguaggaaacau

SEQ ID NO: 1525125 - RNA, 19 nt, Artificial Sequence
  Description of Artificial Sequence: Synthetic oligonucleotide
caccccgaugugggucuug

SEQ ID NO: 1525126 - RNA, 19 nt, Artificial Sequence
  Description of Artificial Sequence: Synthetic oligonucleotide
ggaugcaguggggccgaca

SEQ ID NO: 1525127 - RNA, 19 nt, Artificial Sequence
  Description of Artificial Sequence: Synthetic oligonucleotide
gccaccccgaugugggucu

SEQ ID NO: 1525128 - RNA, 19 nt, Artificial Sequence
  Description of Artificial Sequence: Synthetic oligonucleotide
gccugugguggacuggcau

SEQ ID NO: 1525129 - RNA, 19 nt, Artificial Sequence
  Description of Artificial Sequence: Synthetic oligonucleotide
ccagguuuguggcugccau

SEQ ID NO: 1525130 - RNA, 19 nt, Artificial Sequence
  Description of Artificial Sequence: Synthetic oligonucleotide
gcucaacuuguggcucuuc

SEQ ID NO: 1525131 - RNA, 19 nt, Artificial Sequence
  Description of Artificial Sequence: Synthetic oligonucleotide
ccccgaugugggucuugug

SEQ ID NO: 1525132 - RNA, 19 nt, Artificial Sequence
  Description of Artificial Sequence: Synthetic oligonucleotide
gggugggaucaggcauugc

SEQ ID NO: 1525133 - RNA, 19 nt, Artificial Sequence
  Description of Artificial Sequence: Synthetic oligonucleotide
aggugccgcuagagcucag

SEQ ID NO: 1525134 - RNA, 19 nt, Artificial Sequence
  Description of Artificial Sequence: Synthetic oligonucleotide
ggugccgcuagagcucagu

SEQ ID NO: 1525135 - RNA, 19 nt, Artificial Sequence
  Description of Artificial Sequence: Synthetic oligonucleotide
cuugguccacggcccuggu

SEQ ID NO: 1525136 - RNA, 19 nt, Artificial Sequence
  Description of Artificial Sequence: Synthetic oligonucleotide
ggccacagugccaguaaau

SEQ ID NO: 1525137 - RNA, 19 nt, Artificial Sequence
  Description of Artificial Sequence: Synthetic oligonucleotide
ggcucucgccuccgaaccu

SEQ ID NO: 1525138 - RNA, 19 nt, Artificial Sequence
  Description of Artificial Sequence: Synthetic oligonucleotide
gugcuggcgcgcugcucua

SEQ ID NO: 1525139 - RNA, 19 nt, Artificial Sequence
  Description of Artificial Sequence: Synthetic oligonucleotide
cauuggccacagugccagu

SEQ ID NO: 1525140 - RNA, 19 nt, Artificial Sequence
  Description of Artificial Sequence: Synthetic oligonucleotide
gggcggguccuuauaugcu

SEQ ID NO: 1525141 - RNA, 19 nt, Artificial Sequence
  Description of Artificial Sequence: Synthetic oligonucleotide
gccgcucuuugagcuggac

SEQ ID NO: 1525142 - RNA, 19 nt, Artificial Sequence
  Description of Artificial Sequence: Synthetic oligonucleotide
gcgccacggucugaggcga

SEQ ID NO: 1525143 - RNA, 19 nt, Artificial Sequence
  Description of Artificial Sequence: Synthetic oligonucleotide
ccgcuagagcucaguagcu

SEQ ID NO: 1525144 - RNA, 19 nt, Artificial Sequence
  Description of Artificial Sequence: Synthetic oligonucleotide
uggggccgacaggcucuuc

SEQ ID NO: 1525145 - RNA, 19 nt, Artificial Sequence
  Description of Artificial Sequence: Synthetic oligonucleotide
caagcacguuggggcugca

SEQ ID NO: 1525146 - RNA, 19 nt, Artificial Sequence
  Description of Artificial Sequence: Synthetic oligonucleotide
gggaggugugggcguuaua

SEQ ID NO: 1525147 - RNA, 19 nt, Artificial Sequence
  Description of Artificial Sequence: Synthetic oligonucleotide
gggaggggcggguccuuau

SEQ ID NO: 1525148 - RNA, 19 nt, Artificial Sequence
  Description of Artificial Sequence: Synthetic oligonucleotide
cgacggggugucucaggca

SEQ ID NO: 1525149 - RNA, 19 nt, Artificial Sequence
  Description of Artificial Sequence: Synthetic oligonucleotide
gccacggucugaggcgaua

SEQ ID NO: 1525150 - RNA, 19 nt, Artificial Sequence
  Description of Artificial Sequence: Synthetic oligonucleotide
augcggcgacggggugucu

SEQ ID NO: 1525151 - RNA, 19 nt, Artificial Sequence
  Description of Artificial Sequence: Synthetic oligonucleotide
gcggguccuuauaugcuuu

SEQ ID NO: 1525152 - RNA, 19 nt, Artificial Sequence
  Description of Artificial Sequence: Synthetic oligonucleotide
ccgcaggcuucacacaguu

SEQ ID NO: 1525153 - RNA, 19 nt, Artificial Sequence
  Description of Artificial Sequence: Synthetic oligonucleotide
gggcuagaagcaagcuauu

SEQ ID NO: 1525154 - RNA, 19 nt, Artificial Sequence
  Description of Artificial Sequence: Synthetic oligonucleotide
gcacagcgauggcagcguu

SEQ ID NO: 1525155 - RNA, 19 nt, Artificial Sequence
  Description of Artificial Sequence: Synthetic oligonucleotide
ggccgcucuuugagcugga

SEQ ID NO: 1525156 - RNA, 19 nt, Artificial Sequence
  Description of Artificial Sequence: Synthetic oligonucleotide
ccgaaccuguagaccuccu

SEQ ID NO: 1525157 - RNA, 19 nt, Artificial Sequence
  Description of Artificial Sequence: Synthetic oligonucleotide
cggcgacggggugucucag

SEQ ID NO: 1525158 - RNA, 19 nt, Artificial Sequence
  Description of Artificial Sequence: Synthetic oligonucleotide
ccaccccgaugugggucuu

SEQ ID NO: 1525159 - RNA, 19 nt, Artificial Sequence
  Description of Artificial Sequence: Synthetic oligonucleotide
ugaagaaacccucauagcg

SEQ ID NO: 1525160 - RNA, 19 nt, Artificial Sequence
  Description of Artificial Sequence: Synthetic oligonucleotide
auucgcauauuuuggaucc

SEQ ID NO: 1525161 - RNA, 19 nt, Artificial Sequence
  Description of Artificial Sequence: Synthetic oligonucleotide
uccaauuuauuaauuaucu

SEQ ID NO: 1525162 - RNA, 19 nt, Artificial Sequence
  Description of Artificial Sequence: Synthetic oligonucleotide
uuaauuaucuccucgggga

SEQ ID NO: 1525163 - RNA, 19 nt, Artificial Sequence
  Description of Artificial Sequence: Synthetic oligonucleotide
aacuugaccgacuuagggg

SEQ ID NO: 1525164 - RNA, 19 nt, Artificial Sequence
  Description of Artificial Sequence: Synthetic oligonucleotide
agucauaccaaucagggcu

SEQ ID NO: 1525165 - RNA, 19 nt, Artificial Sequence
  Description of Artificial Sequence: Synthetic oligonucleotide
ucuuugugcaguuagcucc

SEQ ID NO: 1525166 - RNA, 19 nt, Artificial Sequence
  Description of Artificial Sequence: Synthetic oligonucleotide
auuaauuaucuccucgggg

SEQ ID NO: 1525167 - RNA, 19 nt, Artificial Sequence
  Description of Artificial Sequence: Synthetic oligonucleotide
uauuaauuaucuccucggg

SEQ ID NO: 1525168 - RNA, 19 nt, Artificial Sequence
  Description of Artificial Sequence: Synthetic oligonucleotide
aauccaauuuauuaauuau

SEQ ID NO: 1525169 - RNA, 19 nt, Artificial Sequence
  Description of Artificial Sequence: Synthetic oligonucleotide
ugacuagaaauccagggca

SEQ ID NO: 1525170 - RNA, 19 nt, Artificial Sequence
  Description of Artificial Sequence: Synthetic oligonucleotide
cauaguauggugugaagcc

SEQ ID NO: 1525171 - RNA, 19 nt, Artificial Sequence
  Description of Artificial Sequence: Synthetic oligonucleotide
agacuauccagauuugggg

SEQ ID NO: 1525172 - RNA, 19 nt, Artificial Sequence
  Description of Artificial Sequence: Synthetic oligonucleotide
gauuagggcauuaaacacg

SEQ ID NO: 1525173 - RNA, 19 nt, Artificial Sequence
  Description of Artificial Sequence: Synthetic oligonucleotide
caaucauucgcauauuuug

SEQ ID NO: 1525174 - RNA, 19 nt, Artificial Sequence
  Description of Artificial Sequence: Synthetic oligonucleotide
uaucaauccaauuuauuaa

SEQ ID NO: 1525175 - RNA, 19 nt, Artificial Sequence
  Description of Artificial Sequence: Synthetic oligonucleotide
aaucauucgcauauuuugg

SEQ ID NO: 1525176 - RNA, 19 nt, Artificial Sequence
  Description of Artificial Sequence: Synthetic oligonucleotide
gagagagagagagagagag

SEQ ID NO: 1525177 - RNA, 19 nt, Artificial Sequence
  Description of Artificial Sequence: Synthetic oligonucleotide
uccagagagagagagagag

SEQ ID NO: 1525178 - RNA, 19 nt, Artificial Sequence
  Description of Artificial Sequence: Synthetic oligonucleotide
uguccagagagagagagag

SEQ ID NO: 1525179 - RNA, 19 nt, Artificial Sequence
  Description of Artificial Sequence: Synthetic oligonucleotide
agucauccugauaagagcc

SEQ ID NO: 1525180 - RNA, 19 nt, Artificial Sequence
  Description of Artificial Sequence: Synthetic oligonucleotide
aagacuauccagauuuggg

SEQ ID NO: 1525181 - RNA, 19 nt, Artificial Sequence
  Description of Artificial Sequence: Synthetic oligonucleotide
uuuguccagagagagagag

SEQ ID NO: 1525182 - RNA, 19 nt, Artificial Sequence
  Description of Artificial Sequence: Synthetic oligonucleotide
uagcggacgacuuucauca

SEQ ID NO: 1525183 - RNA, 19 nt, Artificial Sequence
  Description of Artificial Sequence: Synthetic oligonucleotide
ucggauuagggcauuaaac

SEQ ID NO: 1525184 - RNA, 19 nt, Artificial Sequence
  Description of Artificial Sequence: Synthetic oligonucleotide
gacgacgacagcucgagcc

SEQ ID NO: 1525185 - RNA, 19 nt, Artificial Sequence
  Description of Artificial Sequence: Synthetic oligonucleotide
ugcccugaaacugacaucc

SEQ ID NO: 1525186 - RNA, 19 nt, Artificial Sequence
  Description of Artificial Sequence: Synthetic oligonucleotide
aggaagagacgcuuguagg

SEQ ID NO: 1525187 - RNA, 19 nt, Artificial Sequence
  Description of Artificial Sequence: Synthetic oligonucleotide
uaauuaucuccucggggag

SEQ ID NO: 1525188 - RNA, 19 nt, Artificial Sequence
  Description of Artificial Sequence: Synthetic oligonucleotide
aggacuugacacaucagcc

SEQ ID NO: 1525189 - RNA, 19 nt, Artificial Sequence
  Description of Artificial Sequence: Synthetic oligonucleotide
agaaauccagggcacauca

SEQ ID NO: 1525190 - RNA, 19 nt, Artificial Sequence
  Description of Artificial Sequence: Synthetic oligonucleotide
acuugaccgacuuagggga

SEQ ID NO: 1525191 - RNA, 19 nt, Artificial Sequence
  Description of Artificial Sequence: Synthetic oligonucleotide
acgguauagaugccaagac

SEQ ID NO: 1525192 - RNA, 19 nt, Artificial Sequence
  Description of Artificial Sequence: Synthetic oligonucleotide
uguaccgucagccccaguc

SEQ ID NO: 1525193 - RNA, 19 nt, Artificial Sequence
  Description of Artificial Sequence: Synthetic oligonucleotide
cuggcaauucggauuaggg

SEQ ID NO: 1525194 - RNA, 19 nt, Artificial Sequence
  Description of Artificial Sequence: Synthetic oligonucleotide
ccuaguuuugacaaugucc

SEQ ID NO: 1525195 - RNA, 19 nt, Artificial Sequence
  Description of Artificial Sequence: Synthetic oligonucleotide
auagcggacgacuuucauc

SEQ ID NO: 1525196 - RNA, 19 nt, Artificial Sequence
  Description of Artificial Sequence: Synthetic oligonucleotide
cagagagagagagagagag

SEQ ID NO: 1525197 - RNA, 19 nt, Artificial Sequence
  Description of Artificial Sequence: Synthetic oligonucleotide
caggacuugacacaucagc

SEQ ID NO: 1525198 - RNA, 19 nt, Artificial Sequence
  Description of Artificial Sequence: Synthetic oligonucleotide
agggauacagccccgccac

SEQ ID NO: 1525199 - RNA, 19 nt, Artificial Sequence
  Description of Artificial Sequence: Synthetic oligonucleotide
aauuaucuccucggggagg

SEQ ID NO: 1525200 - RNA, 19 nt, Artificial Sequence
  Description of Artificial Sequence: Synthetic oligonucleotide
ugguuuuguacucucgagu

SEQ ID NO: 1525201 - RNA, 19 nt, Artificial Sequence
  Description of Artificial Sequence: Synthetic oligonucleotide
gugacuagaaauccagggc

SEQ ID NO: 1525202 - RNA, 19 nt, Artificial Sequence
  Description of Artificial Sequence: Synthetic oligonucleotide
aacugcuuggauugggagu

SEQ ID NO: 1525203 - RNA, 19 nt, Artificial Sequence
  Description of Artificial Sequence: Synthetic oligonucleotide
uggauccuaguuuugacaa

SEQ ID NO: 1525204 - RNA, 19 nt, Artificial Sequence
  Description of Artificial Sequence: Synthetic oligonucleotide
gacaccagcgcgcaacagg

SEQ ID NO: 1525205 - RNA, 19 nt, Artificial Sequence
  Description of Artificial Sequence: Synthetic oligonucleotide
auagaugccaagacgagug

SEQ ID NO: 1525206 - RNA, 19 nt, Artificial Sequence
  Description of Artificial Sequence: Synthetic oligonucleotide
uggcaauucggauuagggc

SEQ ID NO: 1525207 - RNA, 19 nt, Artificial Sequence
  Description of Artificial Sequence: Synthetic oligonucleotide
gaaacccucauagcggacg

SEQ ID NO: 1525208 - RNA, 19 nt, Artificial Sequence
  Description of Artificial Sequence: Synthetic oligonucleotide
caugguagggauacagccc

SEQ ID NO: 1525209 - RNA, 19 nt, Artificial Sequence
  Description of Artificial Sequence: Synthetic oligonucleotide
aacugcauccgguucuuca

SEQ ID NO: 1525210 - RNA, 19 nt, Artificial Sequence
  Description of Artificial Sequence: Synthetic oligonucleotide
uuggauccuaguuuugaca

SEQ ID NO: 1525211 - RNA, 19 nt, Artificial Sequence
  Description of Artificial Sequence: Synthetic oligonucleotide
gaagccucguccuuccacc

SEQ ID NO: 1525212 - RNA, 19 nt, Artificial Sequence
  Description of Artificial Sequence: Synthetic oligonucleotide
gauaagagccaccucagcu

SEQ ID NO: 1525213 - RNA, 19 nt, Artificial Sequence
  Description of Artificial Sequence: Synthetic oligonucleotide
ggcaauucggauuagggca

SEQ ID NO: 1525214 - RNA, 19 nt, Artificial Sequence
  Description of Artificial Sequence: Synthetic oligonucleotide
gagagagagagagaucugc

SEQ ID NO: 1525215 - RNA, 19 nt, Artificial Sequence
  Description of Artificial Sequence: Synthetic oligonucleotide
uuuuggauccuaguuuuga

SEQ ID NO: 1525216 - RNA, 19 nt, Artificial Sequence
  Description of Artificial Sequence: Synthetic oligonucleotide
guacucucgagucuuggcc

SEQ ID NO: 1525217 - RNA, 19 nt, Artificial Sequence
  Description of Artificial Sequence: Synthetic oligonucleotide
agcauugacgacgacagcu

SEQ ID NO: 1525218 - RNA, 19 nt, Artificial Sequence
  Description of Artificial Sequence: Synthetic oligonucleotide
aggauccucaagacuaucc

SEQ ID NO: 1525219 - RNA, 19 nt, Artificial Sequence
  Description of Artificial Sequence: Synthetic oligonucleotide
gagagagagagaucugcug

SEQ ID NO: 1525220 - RNA, 19 nt, Artificial Sequence
  Description of Artificial Sequence: Synthetic oligonucleotide
gaagagacgcuuguaggcc

SEQ ID NO: 1525221 - RNA, 19 nt, Artificial Sequence
  Description of Artificial Sequence: Synthetic oligonucleotide
acugacauccgagagguga

SEQ ID NO: 1525222 - RNA, 19 nt, Artificial Sequence
  Description of Artificial Sequence: Synthetic oligonucleotide
uaguauggugugaagcccu

SEQ ID NO: 1525223 - RNA, 19 nt, Artificial Sequence
  Description of Artificial Sequence: Synthetic oligonucleotide
accgacuuaggggagguac

SEQ ID NO: 1525224 - RNA, 19 nt, Artificial Sequence
  Description of Artificial Sequence: Synthetic oligonucleotide
cauucgcauauuuuggauc

SEQ ID NO: 1525225 - RNA, 19 nt, Artificial Sequence
  Description of Artificial Sequence: Synthetic oligonucleotide
ucaauccaauuuauuaauu

SEQ ID NO: 1525226 - RNA, 19 nt, Artificial Sequence
  Description of Artificial Sequence: Synthetic oligonucleotide
cugauaagagccaccucag

SEQ ID NO: 1525227 - RNA, 19 nt, Artificial Sequence
  Description of Artificial Sequence: Synthetic oligonucleotide
gacgacuuucaucagcaca

SEQ ID NO: 1525228 - RNA, 19 nt, Artificial Sequence
  Description of Artificial Sequence: Synthetic oligonucleotide
aagagacgcuuguaggccu

SEQ ID NO: 1525229 - RNA, 19 nt, Artificial Sequence
  Description of Artificial Sequence: Synthetic oligonucleotide
gguauagaugccaagacga

SEQ ID NO: 1525230 - RNA, 19 nt, Artificial Sequence
  Description of Artificial Sequence: Synthetic oligonucleotide
gagagagagagagagaucu

SEQ ID NO: 1525231 - RNA, 19 nt, Artificial Sequence
  Description of Artificial Sequence: Synthetic oligonucleotide
cuuugugcaguuagcuccc

SEQ ID NO: 1525232 - RNA, 19 nt, Artificial Sequence
  Description of Artificial Sequence: Synthetic oligonucleotide
ugauaagagccaccucagc

SEQ ID NO: 1525233 - RNA, 19 nt, Artificial Sequence
  Description of Artificial Sequence: Synthetic oligonucleotide
ggacuugacacaucagccg

SEQ ID NO: 1525234 - RNA, 19 nt, Artificial Sequence
  Description of Artificial Sequence: Synthetic oligonucleotide
cuuggauugggaguaggag

SEQ ID NO: 1525235 - RNA, 19 nt, Artificial Sequence
  Description of Artificial Sequence: Synthetic oligonucleotide
aggcgcucaaacaacacgg

SEQ ID NO: 1525236 - RNA, 19 nt, Artificial Sequence
  Description of Artificial Sequence: Synthetic oligonucleotide
auuagggcauuaaacacgu

SEQ ID NO: 1525237 - RNA, 19 nt, Artificial Sequence
  Description of Artificial Sequence: Synthetic oligonucleotide
ggaagagacgcuuguaggc

SEQ ID NO: 1525238 - RNA, 19 nt, Artificial Sequence
  Description of Artificial Sequence: Synthetic oligonucleotide
caagacuauccagauuugg

SEQ ID NO: 1525239 - RNA, 19 nt, Artificial Sequence
  Description of Artificial Sequence: Synthetic oligonucleotide
aaacccucauagcggacga

SEQ ID NO: 1525240 - RNA, 19 nt, Artificial Sequence
  Description of Artificial Sequence: Synthetic oligonucleotide
uggcacagaauauugucau

SEQ ID NO: 1525241 - RNA, 19 nt, Artificial Sequence
  Description of Artificial Sequence: Synthetic oligonucleotide
acucaacugcauccgguuc

SEQ ID NO: 1525242 - RNA, 19 nt, Artificial Sequence
  Description of Artificial Sequence: Synthetic oligonucleotide
ucauucgcauauuuuggau

SEQ ID NO: 1525243 - RNA, 19 nt, Artificial Sequence
  Description of Artificial Sequence: Synthetic oligonucleotide
gguuuuguacucucgaguc

SEQ ID NO: 1525244 - RNA, 19 nt, Artificial Sequence
  Description of Artificial Sequence: Synthetic oligonucleotide
cauugacgacgacagcucg

SEQ ID NO: 1525245 - RNA, 19 nt, Artificial Sequence
  Description of Artificial Sequence: Synthetic oligonucleotide
uugacgacgacagcucgag

SEQ ID NO: 1525246 - RNA, 19 nt, Artificial Sequence
  Description of Artificial Sequence: Synthetic oligonucleotide
cugguuuuguacucucgag

SEQ ID NO: 1525247 - RNA, 19 nt, Artificial Sequence
  Description of Artificial Sequence: Synthetic oligonucleotide
uuuguagccucggcgcugg

SEQ ID NO: 1525248 - RNA, 19 nt, Artificial Sequence
  Description of Artificial Sequence: Synthetic oligonucleotide
guaaaugcccuucaguccu

SEQ ID NO: 1525249 - RNA, 19 nt, Artificial Sequence
  Description of Artificial Sequence: Synthetic oligonucleotide
uugguguuaucaauccaau

SEQ ID NO: 1525250 - RNA, 19 nt, Artificial Sequence
  Description of Artificial Sequence: Synthetic oligonucleotide
ccacaaaugcaccaguugc

SEQ ID NO: 1525251 - RNA, 19 nt, Artificial Sequence
  Description of Artificial Sequence: Synthetic oligonucleotide
ugguguagguagccuggcg

SEQ ID NO: 1525252 - RNA, 19 nt, Artificial Sequence
  Description of Artificial Sequence: Synthetic oligonucleotide
aacagggcgaaggcgcgcg

SEQ ID NO: 1525253 - RNA, 19 nt, Artificial Sequence
  Description of Artificial Sequence: Synthetic oligonucleotide
uccuaguuuugacaauguc

SEQ ID NO: 1525254 - RNA, 19 nt, Artificial Sequence
  Description of Artificial Sequence: Synthetic oligonucleotide
uggcacucuagucccagga

SEQ ID NO: 1525255 - RNA, 19 nt, Artificial Sequence
  Description of Artificial Sequence: Synthetic oligonucleotide
ggcacaucacuguaggagc

SEQ ID NO: 1525256 - RNA, 19 nt, Artificial Sequence
  Description of Artificial Sequence: Synthetic oligonucleotide
aagacgaguggugguguag

SEQ ID NO: 1525257 - RNA, 19 nt, Artificial Sequence
  Description of Artificial Sequence: Synthetic oligonucleotide
guugguguuaucaauccaa

SEQ ID NO: 1525258 - RNA, 19 nt, Artificial Sequence
  Description of Artificial Sequence: Synthetic oligonucleotide
acauccgagaggugacuag

SEQ ID NO: 1525259 - RNA, 19 nt, Artificial Sequence
  Description of Artificial Sequence: Synthetic oligonucleotide
augccaagacgaguggugg

SEQ ID NO: 1525260 - RNA, 19 nt, Artificial Sequence
  Description of Artificial Sequence: Synthetic oligonucleotide
cagucauaccaaucagggc

SEQ ID NO: 1525261 - RNA, 19 nt, Artificial Sequence
  Description of Artificial Sequence: Synthetic oligonucleotide
ucccuggcaauucggauua

SEQ ID NO: 1525262 - RNA, 19 nt, Artificial Sequence
  Description of Artificial Sequence: Synthetic oligonucleotide
guauagaugccaagacgag

SEQ ID NO: 1525263 - RNA, 19 nt, Artificial Sequence
  Description of Artificial Sequence: Synthetic oligonucleotide
agcccauucuuguacucug

SEQ ID NO: 1525264 - RNA, 19 nt, Artificial Sequence
  Description of Artificial Sequence: Synthetic oligonucleotide
gguguuaucaauccaauuu

SEQ ID NO: 1525265 - RNA, 19 nt, Artificial Sequence
  Description of Artificial Sequence: Synthetic oligonucleotide
gacagcucgagccauggua

SEQ ID NO: 1525266 - RNA, 19 nt, Artificial Sequence
  Description of Artificial Sequence: Synthetic oligonucleotide
cuccaguuuuguuuuccag

SEQ ID NO: 1525267 - RNA, 19 nt, Artificial Sequence
  Description of Artificial Sequence: Synthetic oligonucleotide
agacgaguggugguguagg

SEQ ID NO: 1525268 - RNA, 19 nt, Artificial Sequence
  Description of Artificial Sequence: Synthetic oligonucleotide
gguagccuggcgcaguagg

SEQ ID NO: 1525269 - RNA, 19 nt, Artificial Sequence
  Description of Artificial Sequence: Synthetic oligonucleotide
gacuauccagauuuggggu

SEQ ID NO: 1525270 - RNA, 19 nt, Artificial Sequence
  Description of Artificial Sequence: Synthetic oligonucleotide
auacagccccgccacagug

SEQ ID NO: 1525271 - RNA, 19 nt, Artificial Sequence
  Description of Artificial Sequence: Synthetic oligonucleotide
acuauccagauuugggguu

SEQ ID NO: 1525272 - RNA, 19 nt, Artificial Sequence
  Description of Artificial Sequence: Synthetic oligonucleotide
gagagagagagagagagau

SEQ ID NO: 1525273 - RNA, 19 nt, Artificial Sequence
  Description of Artificial Sequence: Synthetic oligonucleotide
gucuagcaagaacugcuug

SEQ ID NO: 1525274 - RNA, 19 nt, Artificial Sequence
  Description of Artificial Sequence: Synthetic oligonucleotide
gacuagaaauccagggcac

SEQ ID NO: 1525275 - RNA, 19 nt, Artificial Sequence
  Description of Artificial Sequence: Synthetic oligonucleotide
uugaccgacuuaggggagg

SEQ ID NO: 1525276 - RNA, 19 nt, Artificial Sequence
  Description of Artificial Sequence: Synthetic oligonucleotide
ggagguacggggcuucccg

SEQ ID NO: 1525277 - RNA, 19 nt, Artificial Sequence
  Description of Artificial Sequence: Synthetic oligonucleotide
gcauaguauggugugaagc

SEQ ID NO: 1525278 - RNA, 19 nt, Artificial Sequence
  Description of Artificial Sequence: Synthetic oligonucleotide
ugugugcccugaaacugac

SEQ ID NO: 1525279 - RNA, 19 nt, Artificial Sequence
  Description of Artificial Sequence: Synthetic oligonucleotide
cugacauccgagaggugac

SEQ ID NO: 1525280 - RNA, 19 nt, Artificial Sequence
  Description of Artificial Sequence: Synthetic oligonucleotide
aaggcgcgcgcgcgcacgc

SEQ ID NO: 1525281 - RNA, 19 nt, Artificial Sequence
  Description of Artificial Sequence: Synthetic oligonucleotide
agucgggcauaguauggug

SEQ ID NO: 1525282 - RNA, 19 nt, Artificial Sequence
  Description of Artificial Sequence: Synthetic oligonucleotide
uccgagaggugacuagaaa

SEQ ID NO: 1525283 - RNA, 19 nt, Artificial Sequence
  Description of Artificial Sequence: Synthetic oligonucleotide
uuuuguagccucggcgcug

SEQ ID NO: 1525284 - RNA, 19 nt, Artificial Sequence
  Description of Artificial Sequence: Synthetic oligonucleotide
uuguccagagagagagaga

SEQ ID NO: 1525285 - RNA, 19 nt, Artificial Sequence
  Description of Artificial Sequence: Synthetic oligonucleotide
acacgguauagaugccaag

SEQ ID NO: 1525286 - RNA, 19 nt, Artificial Sequence
  Description of Artificial Sequence: Synthetic oligonucleotide
agggcgaaggcgcgcgcgc

SEQ ID NO: 1525287 - RNA, 19 nt, Artificial Sequence
  Description of Artificial Sequence: Synthetic oligonucleotide
ugguagggauacagccccg

SEQ ID NO: 1525288 - RNA, 19 nt, Artificial Sequence
  Description of Artificial Sequence: Synthetic oligonucleotide
uguagguagccuggcgcag

SEQ ID NO: 1525289 - RNA, 19 nt, Artificial Sequence
  Description of Artificial Sequence: Synthetic oligonucleotide
acgacgacagcucgagcca

SEQ ID NO: 1525290 - RNA, 19 nt, Artificial Sequence
  Description of Artificial Sequence: Synthetic oligonucleotide
ugcuguuuugugugcccug

SEQ ID NO: 1525291 - RNA, 19 nt, Artificial Sequence
  Description of Artificial Sequence: Synthetic oligonucleotide
caguguaaaugcccuucag

SEQ ID NO: 1525292 - RNA, 19 nt, Artificial Sequence
  Description of Artificial Sequence: Synthetic oligonucleotide
cuauccagauuugggguug

SEQ ID NO: 1525293 - RNA, 19 nt, Artificial Sequence
  Description of Artificial Sequence: Synthetic oligonucleotide
agguacggggcuucccguc

SEQ ID NO: 1525294 - RNA, 19 nt, Artificial Sequence
  Description of Artificial Sequence: Synthetic oligonucleotide
agagagagagagagagauc

SEQ ID NO: 1525295 - RNA, 19 nt, Artificial Sequence
  Description of Artificial Sequence: Synthetic oligonucleotide
acaacacgguauagaugcc

SEQ ID NO: 1525296 - RNA, 19 nt, Artificial Sequence
  Description of Artificial Sequence: Synthetic oligonucleotide
uucuuguacucuggcuucc

SEQ ID NO: 1525297 - RNA, 19 nt, Artificial Sequence
  Description of Artificial Sequence: Synthetic oligonucleotide
cuugaccgacuuaggggag

SEQ ID NO: 1525298 - RNA, 19 nt, Artificial Sequence
  Description of Artificial Sequence: Synthetic oligonucleotide
agagagagagagaucugcu

SEQ ID NO: 1525299 - RNA, 19 nt, Artificial Sequence
  Description of Artificial Sequence: Synthetic oligonucleotide
agccccgccacaguguggg

SEQ ID NO: 1525300 - RNA, 19 nt, Artificial Sequence
  Description of Artificial Sequence: Synthetic oligonucleotide
ugguguuaucaauccaauu

SEQ ID NO: 1525301 - RNA, 19 nt, Artificial Sequence
  Description of Artificial Sequence: Synthetic oligonucleotide
agggcauuaaacacguuuu

SEQ ID NO: 1525302 - RNA, 19 nt, Artificial Sequence
  Description of Artificial Sequence: Synthetic oligonucleotide
cacgguauagaugccaaga

SEQ ID NO: 1525303 - RNA, 19 nt, Artificial Sequence
  Description of Artificial Sequence: Synthetic oligonucleotide
guagggauacagccccgcc

SEQ ID NO: 1525304 - RNA, 19 nt, Artificial Sequence
  Description of Artificial Sequence: Synthetic oligonucleotide
ccaaggugacaccagcgcg

SEQ ID NO: 1525305 - RNA, 19 nt, Artificial Sequence
  Description of Artificial Sequence: Synthetic oligonucleotide
cacagaauauugucauaga

SEQ ID NO: 1525306 - RNA, 19 nt, Artificial Sequence
  Description of Artificial Sequence: Synthetic oligonucleotide
ggauccucaagacuaucca

SEQ ID NO: 1525307 - RNA, 19 nt, Artificial Sequence
  Description of Artificial Sequence: Synthetic oligonucleotide
guggcacagaauauuguca

SEQ ID NO: 1525308 - RNA, 19 nt, Artificial Sequence
  Description of Artificial Sequence: Synthetic oligonucleotide
cagucaggcgcucaaacaa

SEQ ID NO: 1525309 - RNA, 19 nt, Artificial Sequence
  Description of Artificial Sequence: Synthetic oligonucleotide
agcucgagccaugguaggg

SEQ ID NO: 1525310 - RNA, 19 nt, Artificial Sequence
  Description of Artificial Sequence: Synthetic oligonucleotide
auggacgcggcagugguga

SEQ ID NO: 1525311 - RNA, 19 nt, Artificial Sequence
  Description of Artificial Sequence: Synthetic oligonucleotide
agaggugacuagaaaucca

SEQ ID NO: 1525312 - RNA, 19 nt, Artificial Sequence
  Description of Artificial Sequence: Synthetic oligonucleotide
ggugugaagcccuuccaca

SEQ ID NO: 1525313 - RNA, 19 nt, Artificial Sequence
  Description of Artificial Sequence: Synthetic oligonucleotide
caccacucaacugcauccg

SEQ ID NO: 1525314 - RNA, 19 nt, Artificial Sequence
  Description of Artificial Sequence: Synthetic oligonucleotide
aacccucauagcggacgac

SEQ ID NO: 1525315 - RNA, 19 nt, Artificial Sequence
  Description of Artificial Sequence: Synthetic oligonucleotide
agccucguccuuccaccac

SEQ ID NO: 1525316 - RNA, 19 nt, Artificial Sequence
  Description of Artificial Sequence: Synthetic oligonucleotide
ggcgcaguaggccagcuga

SEQ ID NO: 1525317 - RNA, 19 nt, Artificial Sequence
  Description of Artificial Sequence: Synthetic oligonucleotide
ugccaagacgagugguggu

SEQ ID NO: 1525318 - RNA, 19 nt, Artificial Sequence
  Description of Artificial Sequence: Synthetic oligonucleotide
gauggcccucggcuuuggg

SEQ ID NO: 1525319 - RNA, 19 nt, Artificial Sequence
  Description of Artificial Sequence: Synthetic oligonucleotide
cgguauagaugccaagacg

SEQ ID NO: 1525320 - RNA, 19 nt, Artificial Sequence
  Description of Artificial Sequence: Synthetic oligonucleotide
guagcacccaucccagcca

SEQ ID NO: 1525321 - RNA, 19 nt, Artificial Sequence
  Description of Artificial Sequence: Synthetic oligonucleotide
gcacgcacagccccgcucg

SEQ ID NO: 1525322 - RNA, 19 nt, Artificial Sequence
  Description of Artificial Sequence: Synthetic oligonucleotide
ggcauaguauggugugaag

SEQ ID NO: 1525323 - RNA, 19 nt, Artificial Sequence
  Description of Artificial Sequence: Synthetic oligonucleotide
cggauuagggcauuaaaca

SEQ ID NO: 1525324 - RNA, 19 nt, Artificial Sequence
  Description of Artificial Sequence: Synthetic oligonucleotide
acccucauagcggacgacu

SEQ ID NO: 1525325 - RNA, 19 nt, Artificial Sequence
  Description of Artificial Sequence: Synthetic oligonucleotide
cacagacccuuuuguuggc

SEQ ID NO: 1525326 - RNA, 19 nt, Artificial Sequence
  Description of Artificial Sequence: Synthetic oligonucleotide
gggguguaccgucagcccc

SEQ ID NO: 1525327 - RNA, 19 nt, Artificial Sequence
  Description of Artificial Sequence: Synthetic oligonucleotide
caucgccccuugauggccc

SEQ ID NO: 1525328 - RNA, 19 nt, Artificial Sequence
  Description of Artificial Sequence: Synthetic oligonucleotide
guaccgucagccccaguca

SEQ ID NO: 1525329 - RNA, 19 nt, Artificial Sequence
  Description of Artificial Sequence: Synthetic oligonucleotide
agaaacccucauagcggac

SEQ ID NO: 1525330 - RNA, 19 nt, Artificial Sequence
  Description of Artificial Sequence: Synthetic oligonucleotide
gacgcggcaguggugacga

SEQ ID NO: 1525331 - RNA, 19 nt, Artificial Sequence
  Description of Artificial Sequence: Synthetic oligonucleotide
aauucggauuagggcauua

SEQ ID NO: 1525332 - RNA, 19 nt, Artificial Sequence
  Description of Artificial Sequence: Synthetic oligonucleotide
agccuggcgcaguaggcca

SEQ ID NO: 1525333 - RNA, 19 nt, Artificial Sequence
  Description of Artificial Sequence: Synthetic oligonucleotide
gauugggaguaggaggcaa

SEQ ID NO: 1525334 - RNA, 19 nt, Artificial Sequence
  Description of Artificial Sequence: Synthetic oligonucleotide
guccauccggccauccccg

SEQ ID NO: 1525335 - RNA, 19 nt, Artificial Sequence
  Description of Artificial Sequence: Synthetic oligonucleotide
ugacgacgacagcucgagc

SEQ ID NO: 1525336 - RNA, 19 nt, Artificial Sequence
  Description of Artificial Sequence: Synthetic oligonucleotide
cucgcgcccaaggugacac

SEQ ID NO: 1525337 - RNA, 19 nt, Artificial Sequence
  Description of Artificial Sequence: Synthetic oligonucleotide
agacccuuuuguuggccau

SEQ ID NO: 1525338 - RNA, 19 nt, Artificial Sequence
  Description of Artificial Sequence: Synthetic oligonucleotide
guagccuggcgcaguaggc

SEQ ID NO: 1525339 - RNA, 19 nt, Artificial Sequence
  Description of Artificial Sequence: Synthetic oligonucleotide
gaaggcgcgcgcgcgcacg

SEQ ID NO: 1525340 - RNA, 19 nt, Artificial Sequence
  Description of Artificial Sequence: Synthetic oligonucleotide
ccagucgggcauaguaugg

SEQ ID NO: 1525341 - RNA, 19 nt, Artificial Sequence
  Description of Artificial Sequence: Synthetic oligonucleotide
ucgcauauuuuggauccua

SEQ ID NO: 1525342 - RNA, 19 nt, Artificial Sequence
  Description of Artificial Sequence: Synthetic oligonucleotide
auugacgacgacagcucga

SEQ ID NO: 1525343 - RNA, 19 nt, Artificial Sequence
  Description of Artificial Sequence: Synthetic oligonucleotide
uccauccggccauccccgg

SEQ ID NO: 1525344 - RNA, 19 nt, Artificial Sequence
  Description of Artificial Sequence: Synthetic oligonucleotide
uuugggucccgugcacgca

SEQ ID NO: 1525345 - RNA, 19 nt, Artificial Sequence
  Description of Artificial Sequence: Synthetic oligonucleotide
cuuggccccuucaccacuc

SEQ ID NO: 1525346 - RNA, 19 nt, Artificial Sequence
  Description of Artificial Sequence: Synthetic oligonucleotide
agcccaguguaaaugcccu

SEQ ID NO: 1525347 - RNA, 19 nt, Artificial Sequence
  Description of Artificial Sequence: Synthetic oligonucleotide
ugaccgacuuaggggaggu

SEQ ID NO: 1525348 - RNA, 19 nt, Artificial Sequence
  Description of Artificial Sequence: Synthetic oligonucleotide
agagagagagagagaucug

SEQ ID NO: 1525349 - RNA, 19 nt, Artificial Sequence
  Description of Artificial Sequence: Synthetic oligonucleotide
ccgacuuaggggagguacg

SEQ ID NO: 1525350 - RNA, 19 nt, Artificial Sequence
  Description of Artificial Sequence: Synthetic oligonucleotide
uucgcauauuuuggauccu

SEQ ID NO: 1525351 - RNA, 19 nt, Artificial Sequence
  Description of Artificial Sequence: Synthetic oligonucleotide
cucaacugcauccgguucu

SEQ ID NO: 1525352 - RNA, 19 nt, Artificial Sequence
  Description of Artificial Sequence: Synthetic oligonucleotide
gugcaguuagcucccacua

SEQ ID NO: 1525353 - RNA, 19 nt, Artificial Sequence
  Description of Artificial Sequence: Synthetic oligonucleotide
agagagagagagagagaga

SEQ ID NO: 1525354 - RNA, 19 nt, Artificial Sequence
  Description of Artificial Sequence: Synthetic oligonucleotide
auccuaguuuugacaaugu

SEQ ID NO: 1525355 - RNA, 19 nt, Artificial Sequence
  Description of Artificial Sequence: Synthetic oligonucleotide
caacacgguauagaugcca

SEQ ID NO: 1525356 - RNA, 19 nt, Artificial Sequence
  Description of Artificial Sequence: Synthetic oligonucleotide
cccacaaaugcaccaguug

SEQ ID NO: 1525357 - RNA, 19 nt, Artificial Sequence
  Description of Artificial Sequence: Synthetic oligonucleotide
auccggccauccccgggac

SEQ ID NO: 1525358 - RNA, 19 nt, Artificial Sequence
  Description of Artificial Sequence: Synthetic oligonucleotide
gguacggggcuucccgucc

SEQ ID NO: 1525359 - RNA, 19 nt, Artificial Sequence
  Description of Artificial Sequence: Synthetic oligonucleotide
ggaagccucguccuuccac

SEQ ID NO: 1525360 - RNA, 19 nt, Artificial Sequence
  Description of Artificial Sequence: Synthetic oligonucleotide
uggcgcaguaggccagcug

SEQ ID NO: 1525361 - RNA, 19 nt, Artificial Sequence
  Description of Artificial Sequence: Synthetic oligonucleotide
gcggacgacuuucaucagc

SEQ ID NO: 1525362 - RNA, 19 nt, Artificial Sequence
  Description of Artificial Sequence: Synthetic oligonucleotide
ccaggccccaaacaggaac

SEQ ID NO: 1525363 - RNA, 19 nt, Artificial Sequence
  Description of Artificial Sequence: Synthetic oligonucleotide
cauggacgcggcaguggug

SEQ ID NO: 1525364 - RNA, 19 nt, Artificial Sequence
  Description of Artificial Sequence: Synthetic oligonucleotide
gggcuucccguccauccgg

SEQ ID NO: 1525365 - RNA, 19 nt, Artificial Sequence
  Description of Artificial Sequence: Synthetic oligonucleotide
cauccgagaggugacuaga

SEQ ID NO: 1525366 - RNA, 19 nt, Artificial Sequence
  Description of Artificial Sequence: Synthetic oligonucleotide
agcggacgacuuucaucag

SEQ ID NO: 1525367 - RNA, 19 nt, Artificial Sequence
  Description of Artificial Sequence: Synthetic oligonucleotide
ggggcuucccguccauccg

SEQ ID NO: 1525368 - RNA, 19 nt, Artificial Sequence
  Description of Artificial Sequence: Synthetic oligonucleotide
gagagagagaucugcuguu

SEQ ID NO: 1525369 - RNA, 19 nt, Artificial Sequence
  Description of Artificial Sequence: Synthetic oligonucleotide
ggcacucuagucccaggac

SEQ ID NO: 1525370 - RNA, 19 nt, Artificial Sequence
  Description of Artificial Sequence: Synthetic oligonucleotide
agcuggcguucccacaaau

SEQ ID NO: 1525371 - RNA, 19 nt, Artificial Sequence
  Description of Artificial Sequence: Synthetic oligonucleotide
cucggcuuugggucccgug

SEQ ID NO: 1525372 - RNA, 19 nt, Artificial Sequence
  Description of Artificial Sequence: Synthetic oligonucleotide
cgcauauuuuggauccuag

SEQ ID NO: 1525373 - RNA, 19 nt, Artificial Sequence
  Description of Artificial Sequence: Synthetic oligonucleotide
ccacuaggauccucaagac

SEQ ID NO: 1525374 - RNA, 19 nt, Artificial Sequence
  Description of Artificial Sequence: Synthetic oligonucleotide
cauaccaaucagggcuuuc

SEQ ID NO: 1525375 - RNA, 19 nt, Artificial Sequence
  Description of Artificial Sequence: Synthetic oligonucleotide
cgccaucgccccuugaugg

SEQ ID NO: 1525376 - RNA, 19 nt, Artificial Sequence
  Description of Artificial Sequence: Synthetic oligonucleotide
aggggagguacggggcuuc

SEQ ID NO: 1525377 - RNA, 19 nt, Artificial Sequence
  Description of Artificial Sequence: Synthetic oligonucleotide
gacgacagcucgagccaug

SEQ ID NO: 1525378 - RNA, 19 nt, Artificial Sequence
  Description of Artificial Sequence: Synthetic oligonucleotide
ugauggcccucggcuuugg

SEQ ID NO: 1525379 - RNA, 19 nt, Artificial Sequence
  Description of Artificial Sequence: Synthetic oligonucleotide
gugcccugaaacugacauc

SEQ ID NO: 1525380 - RNA, 19 nt, Artificial Sequence
  Description of Artificial Sequence: Synthetic oligonucleotide
accgucagccccagucagg

SEQ ID NO: 1525381 - RNA, 19 nt, Artificial Sequence
  Description of Artificial Sequence: Synthetic oligonucleotide
ucgagccaugguagggaua

SEQ ID NO: 1525382 - RNA, 19 nt, Artificial Sequence
  Description of Artificial Sequence: Synthetic oligonucleotide
gacccuuuuguuggccauc

SEQ ID NO: 1525383 - RNA, 19 nt, Artificial Sequence
  Description of Artificial Sequence: Synthetic oligonucleotide
gacauccgagaggugacua

SEQ ID NO: 1525384 - RNA, 19 nt, Artificial Sequence
  Description of Artificial Sequence: Synthetic oligonucleotide
cauccggccauccccggga

SEQ ID NO: 1525385 - RNA, 19 nt, Artificial Sequence
  Description of Artificial Sequence: Synthetic oligonucleotide
gguagggauacagccccgc

SEQ ID NO: 1525386 - RNA, 19 nt, Artificial Sequence
  Description of Artificial Sequence: Synthetic oligonucleotide
gccaagacgagugguggug

SEQ ID NO: 1525387 - RNA, 19 nt, Artificial Sequence
  Description of Artificial Sequence: Synthetic oligonucleotide
cgagccaugguagggauac

SEQ ID NO: 1525388 - RNA, 19 nt, Artificial Sequence
  Description of Artificial Sequence: Synthetic oligonucleotide
uuagggcauuaaacacguu

SEQ ID NO: 1525389 - RNA, 19 nt, Artificial Sequence
  Description of Artificial Sequence: Synthetic oligonucleotide
gcgcgcaacagggcgaagg

SEQ ID NO: 1525390 - RNA, 19 nt, Artificial Sequence
  Description of Artificial Sequence: Synthetic oligonucleotide
gagacgcuuguaggccuug

SEQ ID NO: 1525391 - RNA, 19 nt, Artificial Sequence
  Description of Artificial Sequence: Synthetic oligonucleotide
cacagccccgcucgcgccc

SEQ ID NO: 1525392 - RNA, 19 nt, Artificial Sequence
  Description of Artificial Sequence: Synthetic oligonucleotide
cucuagucccaggacuuga

SEQ ID NO: 1525393 - RNA, 19 nt, Artificial Sequence
  Description of Artificial Sequence: Synthetic oligonucleotide
gcccaaggugacaccagcg

SEQ ID NO: 1525394 - RNA, 19 nt, Artificial Sequence
  Description of Artificial Sequence: Synthetic oligonucleotide
gacgaguggugguguaggu

SEQ ID NO: 1525395 - RNA, 19 nt, Artificial Sequence
  Description of Artificial Sequence: Synthetic oligonucleotide
gcauugacgacgacagcuc

SEQ ID NO: 1525396 - RNA, 19 nt, Artificial Sequence
  Description of Artificial Sequence: Synthetic oligonucleotide
gcuggcguucccacaaaug

SEQ ID NO: 1525397 - RNA, 19 nt, Artificial Sequence
  Description of Artificial Sequence: Synthetic oligonucleotide
ucauaccaaucagggcuuu

SEQ ID NO: 1525398 - RNA, 19 nt, Artificial Sequence
  Description of Artificial Sequence: Synthetic oligonucleotide
uccccgggacucgccgucg

SEQ ID NO: 1525399 - RNA, 19 nt, Artificial Sequence
  Description of Artificial Sequence: Synthetic oligonucleotide
acgaguggugguguaggua

SEQ ID NO: 1525400 - RNA, 19 nt, Artificial Sequence
  Description of Artificial Sequence: Synthetic oligonucleotide
caggccccaaacaggaacu

SEQ ID NO: 1525401 - RNA, 19 nt, Artificial Sequence
  Description of Artificial Sequence: Synthetic oligonucleotide
cccaguguaaaugcccuuc

SEQ ID NO: 1525402 - RNA, 19 nt, Artificial Sequence
  Description of Artificial Sequence: Synthetic oligonucleotide
acgcacagccccgcucgcg

SEQ ID NO: 1525403 - RNA, 19 nt, Artificial Sequence
  Description of Artificial Sequence: Synthetic oligonucleotide
caacagggcgaaggcgcgc

SEQ ID NO: 1525404 - RNA, 19 nt, Artificial Sequence
  Description of Artificial Sequence: Synthetic oligonucleotide
aguauggugugaagcccuu

SEQ ID NO: 1525405 - RNA, 19 nt, Artificial Sequence
  Description of Artificial Sequence: Synthetic oligonucleotide
caucagccgcugaggaaga

SEQ ID NO: 1525406 - RNA, 19 nt, Artificial Sequence
  Description of Artificial Sequence: Synthetic oligonucleotide
auccgagaggugacuagaa

SEQ ID NO: 1525407 - RNA, 19 nt, Artificial Sequence
  Description of Artificial Sequence: Synthetic oligonucleotide
ggcccagucgggcauagua

SEQ ID NO: 1525408 - RNA, 19 nt, Artificial Sequence
  Description of Artificial Sequence: Synthetic oligonucleotide
ccaggacuugacacaucag

SEQ ID NO: 1525409 - RNA, 19 nt, Artificial Sequence
  Description of Artificial Sequence: Synthetic oligonucleotide
gcuuggauugggaguagga

SEQ ID NO: 1525410 - RNA, 19 nt, Artificial Sequence
  Description of Artificial Sequence: Synthetic oligonucleotide
gccaucgccccuugauggc

SEQ ID NO: 1525411 - RNA, 19 nt, Artificial Sequence
  Description of Artificial Sequence: Synthetic oligonucleotide
cggacgacuuucaucagca

SEQ ID NO: 1525412 - RNA, 19 nt, Artificial Sequence
  Description of Artificial Sequence: Synthetic oligonucleotide
gucgggcauaguauggugu

SEQ ID NO: 1525413 - RNA, 19 nt, Artificial Sequence
  Description of Artificial Sequence: Synthetic oligonucleotide
cacucuagucccaggacuu

SEQ ID NO: 1525414 - RNA, 19 nt, Artificial Sequence
  Description of Artificial Sequence: Synthetic oligonucleotide
cccgugcacgcacagcccc

SEQ ID NO: 1525415 - RNA, 19 nt, Artificial Sequence
  Description of Artificial Sequence: Synthetic oligonucleotide
gagguacggggcuucccgu

SEQ ID NO: 1525416 - RNA, 19 nt, Artificial Sequence
  Description of Artificial Sequence: Synthetic oligonucleotide
guacggggcuucccgucca

SEQ ID NO: 1525417 - RNA, 19 nt, Artificial Sequence
  Description of Artificial Sequence: Synthetic oligonucleotide
ggacgcggcaguggugacg

SEQ ID NO: 1525418 - RNA, 19 nt, Artificial Sequence
  Description of Artificial Sequence: Synthetic oligonucleotide
aucgccccuugauggcccu

SEQ ID NO: 1525419 - RNA, 19 nt, Artificial Sequence
  Description of Artificial Sequence: Synthetic oligonucleotide
cucgagucuuggccccuuc

SEQ ID NO: 1525420 - RNA, 19 nt, Artificial Sequence
  Description of Artificial Sequence: Synthetic oligonucleotide
cacagaaguggcacagaau

SEQ ID NO: 1525421 - RNA, 19 nt, Artificial Sequence
  Description of Artificial Sequence: Synthetic oligonucleotide
gggcauaguauggugugaa

SEQ ID NO: 1525422 - RNA, 19 nt, Artificial Sequence
  Description of Artificial Sequence: Synthetic oligonucleotide
ccaguguaaaugcccuuca

SEQ ID NO: 1525423 - RNA, 19 nt, Artificial Sequence
  Description of Artificial Sequence: Synthetic oligonucleotide
uacggggcuucccguccau

SEQ ID NO: 1525424 - RNA, 19 nt, Artificial Sequence
  Description of Artificial Sequence: Synthetic oligonucleotide
cgacuuaggggagguacgg

SEQ ID NO: 1525425 - RNA, 19 nt, Artificial Sequence
  Description of Artificial Sequence: Synthetic oligonucleotide
gcgcaacagggcgaaggcg

SEQ ID NO: 1525426 - RNA, 19 nt, Artificial Sequence
  Description of Artificial Sequence: Synthetic oligonucleotide
aguugcaccugcagucaua

SEQ ID NO: 1525427 - RNA, 19 nt, Artificial Sequence
  Description of Artificial Sequence: Synthetic oligonucleotide
caagacgagugguggugua

SEQ ID NO: 1525428 - RNA, 19 nt, Artificial Sequence
  Description of Artificial Sequence: Synthetic oligonucleotide
cugcuuggauugggaguag

SEQ ID NO: 1525429 - RNA, 19 nt, Artificial Sequence
  Description of Artificial Sequence: Synthetic oligonucleotide
cuucccuggcaauucggau

SEQ ID NO: 1525430 - RNA, 19 nt, Artificial Sequence
  Description of Artificial Sequence: Synthetic oligonucleotide
cacgcacagccccgcucgc

SEQ ID NO: 1525431 - RNA, 19 nt, Artificial Sequence
  Description of Artificial Sequence: Synthetic oligonucleotide
cuugauggcccucggcuuu

SEQ ID NO: 1525432 - RNA, 19 nt, Artificial Sequence
  Description of Artificial Sequence: Synthetic oligonucleotide
agcacccaucccagccagg

SEQ ID NO: 1525433 - RNA, 19 nt, Artificial Sequence
  Description of Artificial Sequence: Synthetic oligonucleotide
ccucguccuuccaccacag

SEQ ID NO: 1525434 - RNA, 19 nt, Artificial Sequence
  Description of Artificial Sequence: Synthetic oligonucleotide
ccgagaggugacuagaaau

SEQ ID NO: 1525435 - RNA, 19 nt, Artificial Sequence
  Description of Artificial Sequence: Synthetic oligonucleotide
ggcuuugggucccgugcac

SEQ ID NO: 1525436 - RNA, 19 nt, Artificial Sequence
  Description of Artificial Sequence: Synthetic oligonucleotide
ggauagcuucugcucucuc

SEQ ID NO: 1525437 - RNA, 19 nt, Artificial Sequence
  Description of Artificial Sequence: Synthetic oligonucleotide
guccagagagagagagaga

SEQ ID NO: 1525438 - RNA, 19 nt, Artificial Sequence
  Description of Artificial Sequence: Synthetic oligonucleotide
cgcgcaacagggcgaaggc

SEQ ID NO: 1525439 - RNA, 19 nt, Artificial Sequence
  Description of Artificial Sequence: Synthetic oligonucleotide
gacgcuuguaggccuuguu

SEQ ID NO: 1525440 - RNA, 19 nt, Artificial Sequence
  Description of Artificial Sequence: Synthetic oligonucleotide
agagacgcuuguaggccuu

SEQ ID NO: 1525441 - RNA, 19 nt, Artificial Sequence
  Description of Artificial Sequence: Synthetic oligonucleotide
gucauaccaaucagggcuu

SEQ ID NO: 1525442 - RNA, 19 nt, Artificial Sequence
  Description of Artificial Sequence: Synthetic oligonucleotide
ccaucgccccuugauggcc

SEQ ID NO: 1525443 - RNA, 19 nt, Artificial Sequence
  Description of Artificial Sequence: Synthetic oligonucleotide
ccagagagagagagagaga

SEQ ID NO: 1525444 - RNA, 19 nt, Artificial Sequence
  Description of Artificial Sequence: Synthetic oligonucleotide
cccgcucgcgcccaaggug

SEQ ID NO: 1525445 - RNA, 19 nt, Artificial Sequence
  Description of Artificial Sequence: Synthetic oligonucleotide
gcguucccacaaaugcacc

SEQ ID NO: 1525446 - RNA, 19 nt, Artificial Sequence
  Description of Artificial Sequence: Synthetic oligonucleotide
ggcgaaggcgcgcgcgcgc

SEQ ID NO: 1525447 - RNA, 19 nt, Artificial Sequence
  Description of Artificial Sequence: Synthetic oligonucleotide
cauagcggacgacuuucau

SEQ ID NO: 1525448 - RNA, 19 nt, Artificial Sequence
  Description of Artificial Sequence: Synthetic oligonucleotide
ccgugcacgcacagccccg

SEQ ID NO: 1525449 - RNA, 19 nt, Artificial Sequence
  Description of Artificial Sequence: Synthetic oligonucleotide
ccauccggccauccccggg

SEQ ID NO: 1525450 - RNA, 19 nt, Artificial Sequence
  Description of Artificial Sequence: Synthetic oligonucleotide
ucucgagucuuggccccuu

SEQ ID NO: 1525451 - RNA, 19 nt, Artificial Sequence
  Description of Artificial Sequence: Synthetic oligonucleotide
gcgcucaaacaacacggua

SEQ ID NO: 1525452 - RNA, 19 nt, Artificial Sequence
  Description of Artificial Sequence: Synthetic oligonucleotide
guagguagccuggcgcagu

SEQ ID NO: 1525453 - RNA, 19 nt, Artificial Sequence
  Description of Artificial Sequence: Synthetic oligonucleotide
gcauggacgcggcaguggu

SEQ ID NO: 1525454 - RNA, 19 nt, Artificial Sequence
  Description of Artificial Sequence: Synthetic oligonucleotide
ccgccaucgccccuugaug

SEQ ID NO: 1525455 - RNA, 19 nt, Artificial Sequence
  Description of Artificial Sequence: Synthetic oligonucleotide
cgcucaaacaacacgguau

SEQ ID NO: 1525456 - RNA, 19 nt, Artificial Sequence
  Description of Artificial Sequence: Synthetic oligonucleotide
cucgagccaugguagggau

SEQ ID NO: 1525457 - RNA, 19 nt, Artificial Sequence
  Description of Artificial Sequence: Synthetic oligonucleotide
aggcgcgcgcgcgcacgcc

SEQ ID NO: 1525458 - RNA, 19 nt, Artificial Sequence
  Description of Artificial Sequence: Synthetic oligonucleotide
ccgggacucgccgucgccg

SEQ ID NO: 1525459 - RNA, 19 nt, Artificial Sequence
  Description of Artificial Sequence: Synthetic oligonucleotide
cccaucaaucauucgcaua

SEQ ID NO: 1525460 - RNA, 19 nt, Artificial Sequence
  Description of Artificial Sequence: Synthetic oligonucleotide
ggcuucccguccauccggc

SEQ ID NO: 1525461 - RNA, 19 nt, Artificial Sequence
  Description of Artificial Sequence: Synthetic oligonucleotide
ggcgcgcgcgcgcacgccc

SEQ ID NO: 1525462 - RNA, 19 nt, Artificial Sequence
  Description of Artificial Sequence: Synthetic oligonucleotide
cagucgggcauaguauggu

SEQ ID NO: 1525463 - RNA, 19 nt, Artificial Sequence
  Description of Artificial Sequence: Synthetic oligonucleotide
ccgcucgcgcccaagguga

SEQ ID NO: 1525464 - RNA, 19 nt, Artificial Sequence
  Description of Artificial Sequence: Synthetic oligonucleotide
gcacagccccgcucgcgcc

SEQ ID NO: 1525465 - RNA, 19 nt, Artificial Sequence
  Description of Artificial Sequence: Synthetic oligonucleotide
cucguccuuccaccacaga

SEQ ID NO: 1525466 - RNA, 19 nt, Artificial Sequence
  Description of Artificial Sequence: Synthetic oligonucleotide
cugcuguuuugugugcccu

SEQ ID NO: 1525467 - RNA, 19 nt, Artificial Sequence
  Description of Artificial Sequence: Synthetic oligonucleotide
gcaauucggauuagggcau

SEQ ID NO: 1525468 - RNA, 19 nt, Artificial Sequence
  Description of Artificial Sequence: Synthetic oligonucleotide
gggagguacggggcuuccc

SEQ ID NO: 1525469 - RNA, 19 nt, Artificial Sequence
  Description of Artificial Sequence: Synthetic oligonucleotide
gggauacagccccgccaca

SEQ ID NO: 1525470 - RNA, 19 nt, Artificial Sequence
  Description of Artificial Sequence: Synthetic oligonucleotide
gcgcccaaggugacaccag

SEQ ID NO: 1525471 - RNA, 19 nt, Artificial Sequence
  Description of Artificial Sequence: Synthetic oligonucleotide
ggggagguacggggcuucc

SEQ ID NO: 1525472 - RNA, 19 nt, Artificial Sequence
  Description of Artificial Sequence: Synthetic oligonucleotide
caucaaucauucgcauauu

SEQ ID NO: 1525473 - RNA, 19 nt, Artificial Sequence
  Description of Artificial Sequence: Synthetic oligonucleotide
cccuuuuguuggccaucug

SEQ ID NO: 1525474 - RNA, 19 nt, Artificial Sequence
  Description of Artificial Sequence: Synthetic oligonucleotide
caccugcagucauaccaau

SEQ ID NO: 1525475 - RNA, 19 nt, Artificial Sequence
  Description of Artificial Sequence: Synthetic oligonucleotide
cauccccgggacucgccgu

SEQ ID NO: 1525476 - RNA, 19 nt, Artificial Sequence
  Description of Artificial Sequence: Synthetic oligonucleotide
ggcgcucaaacaacacggu

SEQ ID NO: 1525477 - RNA, 19 nt, Artificial Sequence
  Description of Artificial Sequence: Synthetic oligonucleotide
ggacucgccgucgccgcca

SEQ ID NO: 1525478 - RNA, 19 nt, Artificial Sequence
  Description of Artificial Sequence: Synthetic oligonucleotide
gcgcaguaggccagcugac

SEQ ID NO: 1525479 - RNA, 19 nt, Artificial Sequence
  Description of Artificial Sequence: Synthetic oligonucleotide
cgccccuugauggcccucg

SEQ ID NO: 1525480 - RNA, 19 nt, Artificial Sequence
  Description of Artificial Sequence: Synthetic oligonucleotide
gaccgacuuaggggaggua

SEQ ID NO: 1525481 - RNA, 19 nt, Artificial Sequence
  Description of Artificial Sequence: Synthetic oligonucleotide
ggggcccagucgggcauag

SEQ ID NO: 1525482 - RNA, 19 nt, Artificial Sequence
  Description of Artificial Sequence: Synthetic oligonucleotide
cagcuggcguucccacaaa

SEQ ID NO: 1525483 - RNA, 19 nt, Artificial Sequence
  Description of Artificial Sequence: Synthetic oligonucleotide
ucgccccuugauggcccuc

SEQ ID NO: 1525484 - RNA, 19 nt, Artificial Sequence
  Description of Artificial Sequence: Synthetic oligonucleotide
gcgcgcgcacgccccuccg

SEQ ID NO: 1525485 - RNA, 19 nt, Artificial Sequence
  Description of Artificial Sequence: Synthetic oligonucleotide
gacucgccgucgccgccau

SEQ ID NO: 1525486 - RNA, 19 nt, Artificial Sequence
  Description of Artificial Sequence: Synthetic oligonucleotide
gcccagucgggcauaguau

SEQ ID NO: 1525487 - RNA, 19 nt, Artificial Sequence
  Description of Artificial Sequence: Synthetic oligonucleotide
caauucggauuagggcauu

SEQ ID NO: 1525488 - RNA, 19 nt, Artificial Sequence
  Description of Artificial Sequence: Synthetic oligonucleotide
gcccucggcuuuggguccc

SEQ ID NO: 1525489 - RNA, 19 nt, Artificial Sequence
  Description of Artificial Sequence: Synthetic oligonucleotide
gcgaaggcgcgcgcgcgca

SEQ ID NO: 1525490 - RNA, 19 nt, Artificial Sequence
  Description of Artificial Sequence: Synthetic oligonucleotide
ccaagacgagugguggugu

SEQ ID NO: 1525491 - RNA, 19 nt, Artificial Sequence
  Description of Artificial Sequence: Synthetic oligonucleotide
cucucgagucuuggccccu

SEQ ID NO: 1525492 - RNA, 19 nt, Artificial Sequence
  Description of Artificial Sequence: Synthetic oligonucleotide
ccucauagcggacgacuuu

SEQ ID NO: 1525493 - RNA, 19 nt, Artificial Sequence
  Description of Artificial Sequence: Synthetic oligonucleotide
cccucauagcggacgacuu

SEQ ID NO: 1525494 - RNA, 19 nt, Artificial Sequence
  Description of Artificial Sequence: Synthetic oligonucleotide
ccccgccacagugugggga

SEQ ID NO: 1525495 - RNA, 19 nt, Artificial Sequence
  Description of Artificial Sequence: Synthetic oligonucleotide
cccuggcaauucggauuag

SEQ ID NO: 1525496 - RNA, 19 nt, Artificial Sequence
  Description of Artificial Sequence: Synthetic oligonucleotide
gcucgcgcccaaggugaca

SEQ ID NO: 1525497 - RNA, 19 nt, Artificial Sequence
  Description of Artificial Sequence: Synthetic oligonucleotide
cuggcgcaguaggccagcu

SEQ ID NO: 1525498 - RNA, 19 nt, Artificial Sequence
  Description of Artificial Sequence: Synthetic oligonucleotide
cccucggcuuugggucccg

SEQ ID NO: 1525499 - RNA, 19 nt, Artificial Sequence
  Description of Artificial Sequence: Synthetic oligonucleotide
guguaccgucagccccagu

SEQ ID NO: 1525500 - RNA, 19 nt, Artificial Sequence
  Description of Artificial Sequence: Synthetic oligonucleotide
gcgcgcgcgcgcacgcccc

SEQ ID NO: 1525501 - RNA, 19 nt, Artificial Sequence
  Description of Artificial Sequence: Synthetic oligonucleotide
cgcucgcgcccaaggugac

SEQ ID NO: 1525502 - RNA, 19 nt, Artificial Sequence
  Description of Artificial Sequence: Synthetic oligonucleotide
cgaaggcgcgcgcgcgcac

SEQ ID NO: 1525503 - RNA, 19 nt, Artificial Sequence
  Description of Artificial Sequence: Synthetic oligonucleotide
cgacgacagcucgagccau

SEQ ID NO: 1525504 - RNA, 19 nt, Artificial Sequence
  Description of Artificial Sequence: Synthetic oligonucleotide
gggcccagucgggcauagu

SEQ ID NO: 1525505 - RNA, 19 nt, Artificial Sequence
  Description of Artificial Sequence: Synthetic oligonucleotide
ccgccacaguguggggacu

SEQ ID NO: 1525506 - RNA, 19 nt, Artificial Sequence
  Description of Artificial Sequence: Synthetic oligonucleotide
ccucggcuuugggucccgu

SEQ ID NO: 1525507 - RNA, 19 nt, Artificial Sequence
  Description of Artificial Sequence: Synthetic oligonucleotide
uuuaaauuguaucaaaugc

SEQ ID NO: 1525508 - RNA, 19 nt, Artificial Sequence
  Description of Artificial Sequence: Synthetic oligonucleotide
uaucaaaugccuaacaagg

SEQ ID NO: 1525509 - RNA, 19 nt, Artificial Sequence
  Description of Artificial Sequence: Synthetic oligonucleotide
aaugcuuuaaauuguauca

SEQ ID NO: 1525510 - RNA, 19 nt, Artificial Sequence
  Description of Artificial Sequence: Synthetic oligonucleotide
uuguucuuuaaacagaccg

SEQ ID NO: 1525511 - RNA, 19 nt, Artificial Sequence
  Description of Artificial Sequence: Synthetic oligonucleotide
aaaugguaaaacuccagac

SEQ ID NO: 1525512 - RNA, 19 nt, Artificial Sequence
  Description of Artificial Sequence: Synthetic oligonucleotide
uuaaauuguaucaaaugcc

SEQ ID NO: 1525513 - RNA, 19 nt, Artificial Sequence
  Description of Artificial Sequence: Synthetic oligonucleotide
uacauacagagauagaggg

SEQ ID NO: 1525514 - RNA, 19 nt, Artificial Sequence
  Description of Artificial Sequence: Synthetic oligonucleotide
acaugcuacauauuaauac

SEQ ID NO: 1525515 - RNA, 19 nt, Artificial Sequence
  Description of Artificial Sequence: Synthetic oligonucleotide
ucaacugacaguagaaagg

SEQ ID NO: 1525516 - RNA, 19 nt, Artificial Sequence
  Description of Artificial Sequence: Synthetic oligonucleotide
aguuuaugaaaacuggagg

SEQ ID NO: 1525517 - RNA, 19 nt, Artificial Sequence
  Description of Artificial Sequence: Synthetic oligonucleotide
uuguauacagagaacaacc

SEQ ID NO: 1525518 - RNA, 19 nt, Artificial Sequence
  Description of Artificial Sequence: Synthetic oligonucleotide
uaaaacuccagacugguga

SEQ ID NO: 1525519 - RNA, 19 nt, Artificial Sequence
  Description of Artificial Sequence: Synthetic oligonucleotide
aaguucacccagcauacgc

SEQ ID NO: 1525520 - RNA, 19 nt, Artificial Sequence
  Description of Artificial Sequence: Synthetic oligonucleotide
cuuaguuuaugaaaacugg

SEQ ID NO: 1525521 - RNA, 19 nt, Artificial Sequence
  Description of Artificial Sequence: Synthetic oligonucleotide
aaugguaaaacuccagacu

SEQ ID NO: 1525522 - RNA, 19 nt, Artificial Sequence
  Description of Artificial Sequence: Synthetic oligonucleotide
uuacuagugacauucagga

SEQ ID NO: 1525523 - RNA, 19 nt, Artificial Sequence
  Description of Artificial Sequence: Synthetic oligonucleotide
agauuaaugucucagguga

SEQ ID NO: 1525524 - RNA, 19 nt, Artificial Sequence
  Description of Artificial Sequence: Synthetic oligonucleotide
uaguuuaugaaaacuggag

SEQ ID NO: 1525525 - RNA, 19 nt, Artificial Sequence
  Description of Artificial Sequence: Synthetic oligonucleotide
agauagagggaacaagggc

SEQ ID NO: 1525526 - RNA, 19 nt, Artificial Sequence
  Description of Artificial Sequence: Synthetic oligonucleotide
uuuaucaacugacaguaga

SEQ ID NO: 1525527 - RNA, 19 nt, Artificial Sequence
  Description of Artificial Sequence: Synthetic oligonucleotide
aauuguaucaaaugccuaa

SEQ ID NO: 1525528 - RNA, 19 nt, Artificial Sequence
  Description of Artificial Sequence: Synthetic oligonucleotide
uacccuaccaucaagcuug

SEQ ID NO: 1525529 - RNA, 19 nt, Artificial Sequence
  Description of Artificial Sequence: Synthetic oligonucleotide
uugaucccuagacagaccg

SEQ ID NO: 1525530 - RNA, 19 nt, Artificial Sequence
  Description of Artificial Sequence: Synthetic oligonucleotide
aggagcaucagccagcgcg

SEQ ID NO: 1525531 - RNA, 19 nt, Artificial Sequence
  Description of Artificial Sequence: Synthetic oligonucleotide
aaucauggggaccuuagug

SEQ ID NO: 1525532 - RNA, 19 nt, Artificial Sequence
  Description of Artificial Sequence: Synthetic oligonucleotide
gacauucaggacuauagag

SEQ ID NO: 1525533 - RNA, 19 nt, Artificial Sequence
  Description of Artificial Sequence: Synthetic oligonucleotide
gaaaggcaaaucucaaugg

SEQ ID NO: 1525534 - RNA, 19 nt, Artificial Sequence
  Description of Artificial Sequence: Synthetic oligonucleotide
aacaagauuaaugucucag

SEQ ID NO: 1525535 - RNA, 19 nt, Artificial Sequence
  Description of Artificial Sequence: Synthetic oligonucleotide
acagguaugauguauacau

SEQ ID NO: 1525536 - RNA, 19 nt, Artificial Sequence
  Description of Artificial Sequence: Synthetic oligonucleotide
uguggacagaaucaugggg

SEQ ID NO: 1525537 - RNA, 19 nt, Artificial Sequence
  Description of Artificial Sequence: Synthetic oligonucleotide
uuaguuuaugaaaacugga

SEQ ID NO: 1525538 - RNA, 19 nt, Artificial Sequence
  Description of Artificial Sequence: Synthetic oligonucleotide
uacaaaguucauuaaggcc

SEQ ID NO: 1525539 - RNA, 19 nt, Artificial Sequence
  Description of Artificial Sequence: Synthetic oligonucleotide
gagaacaacccauugccgg

SEQ ID NO: 1525540 - RNA, 19 nt, Artificial Sequence
  Description of Artificial Sequence: Synthetic oligonucleotide
augguaaaacuccagacug

SEQ ID NO: 1525541 - RNA, 19 nt, Artificial Sequence
  Description of Artificial Sequence: Synthetic oligonucleotide
aaacuuuggaacugcaaga

SEQ ID NO: 1525542 - RNA, 19 nt, Artificial Sequence
  Description of Artificial Sequence: Synthetic oligonucleotide
ucaaaugccuaacaaggca

SEQ ID NO: 1525543 - RNA, 19 nt, Artificial Sequence
  Description of Artificial Sequence: Synthetic oligonucleotide
acaaaguucauuaaggccu

SEQ ID NO: 1525544 - RNA, 19 nt, Artificial Sequence
  Description of Artificial Sequence: Synthetic oligonucleotide
uguauacagagaacaaccc

SEQ ID NO: 1525545 - RNA, 19 nt, Artificial Sequence
  Description of Artificial Sequence: Synthetic oligonucleotide
aucaacugacaguagaaag

SEQ ID NO: 1525546 - RNA, 19 nt, Artificial Sequence
  Description of Artificial Sequence: Synthetic oligonucleotide
uguaucaaaugccuaacaa

SEQ ID NO: 1525547 - RNA, 19 nt, Artificial Sequence
  Description of Artificial Sequence: Synthetic oligonucleotide
cuaacaucagcucagcaac

SEQ ID NO: 1525548 - RNA, 19 nt, Artificial Sequence
  Description of Artificial Sequence: Synthetic oligonucleotide
uuccuauucaacucuaaca

SEQ ID NO: 1525549 - RNA, 19 nt, Artificial Sequence
  Description of Artificial Sequence: Synthetic oligonucleotide
agcucagcaaccuaacagg

SEQ ID NO: 1525550 - RNA, 19 nt, Artificial Sequence
  Description of Artificial Sequence: Synthetic oligonucleotide
cuauucaacucuaacauca

SEQ ID NO: 1525551 - RNA, 19 nt, Artificial Sequence
  Description of Artificial Sequence: Synthetic oligonucleotide
auguauacaugcuacauau

SEQ ID NO: 1525552 - RNA, 19 nt, Artificial Sequence
  Description of Artificial Sequence: Synthetic oligonucleotide
agagauagagggaacaagg

SEQ ID NO: 1525553 - RNA, 19 nt, Artificial Sequence
  Description of Artificial Sequence: Synthetic oligonucleotide
acaggaucuguuuguauac

SEQ ID NO: 1525554 - RNA, 19 nt, Artificial Sequence
  Description of Artificial Sequence: Synthetic oligonucleotide
gaugaucagggccucaaag

SEQ ID NO: 1525555 - RNA, 19 nt, Artificial Sequence
  Description of Artificial Sequence: Synthetic oligonucleotide
acauauuaauacaaaguuc

SEQ ID NO: 1525556 - RNA, 19 nt, Artificial Sequence
  Description of Artificial Sequence: Synthetic oligonucleotide
uucauuaaggccugcugag

SEQ ID NO: 1525557 - RNA, 19 nt, Artificial Sequence
  Description of Artificial Sequence: Synthetic oligonucleotide
aagcuugcgaucugcuuac

SEQ ID NO: 1525558 - RNA, 19 nt, Artificial Sequence
  Description of Artificial Sequence: Synthetic oligonucleotide
cuauaauaugagauguuug

SEQ ID NO: 1525559 - RNA, 19 nt, Artificial Sequence
  Description of Artificial Sequence: Synthetic oligonucleotide
agaccgacggaguugaaag

SEQ ID NO: 1525560 - RNA, 19 nt, Artificial Sequence
  Description of Artificial Sequence: Synthetic oligonucleotide
caaccuaacagguaugaug

SEQ ID NO: 1525561 - RNA, 19 nt, Artificial Sequence
  Description of Artificial Sequence: Synthetic oligonucleotide
uuuguauacagagaacaac

SEQ ID NO: 1525562 - RNA, 19 nt, Artificial Sequence
  Description of Artificial Sequence: Synthetic oligonucleotide
ucucguauggguuuuguuc

SEQ ID NO: 1525563 - RNA, 19 nt, Artificial Sequence
  Description of Artificial Sequence: Synthetic oligonucleotide
ucccuagacagaccgacgg

SEQ ID NO: 1525564 - RNA, 19 nt, Artificial Sequence
  Description of Artificial Sequence: Synthetic oligonucleotide
uuaucaacugacaguagaa

SEQ ID NO: 1525565 - RNA, 19 nt, Artificial Sequence
  Description of Artificial Sequence: Synthetic oligonucleotide
aauggcugcuauaauauga

SEQ ID NO: 1525566 - RNA, 19 nt, Artificial Sequence
  Description of Artificial Sequence: Synthetic oligonucleotide
cuugcgaucugcuuacuag

SEQ ID NO: 1525567 - RNA, 19 nt, Artificial Sequence
  Description of Artificial Sequence: Synthetic oligonucleotide
uucccuuaguuuaugaaaa

SEQ ID NO: 1525568 - RNA, 19 nt, Artificial Sequence
  Description of Artificial Sequence: Synthetic oligonucleotide
cauuacccuaccaucaagc

SEQ ID NO: 1525569 - RNA, 19 nt, Artificial Sequence
  Description of Artificial Sequence: Synthetic oligonucleotide
ugguaaaacuccagacugg

SEQ ID NO: 1525570 - RNA, 19 nt, Artificial Sequence
  Description of Artificial Sequence: Synthetic oligonucleotide
caaugcuuuaaauuguauc

SEQ ID NO: 1525571 - RNA, 19 nt, Artificial Sequence
  Description of Artificial Sequence: Synthetic oligonucleotide
acuauagagaaauguacau

SEQ ID NO: 1525572 - RNA, 19 nt, Artificial Sequence
  Description of Artificial Sequence: Synthetic oligonucleotide
auuguaucaaaugccuaac

SEQ ID NO: 1525573 - RNA, 19 nt, Artificial Sequence
  Description of Artificial Sequence: Synthetic oligonucleotide
agcagcacacgguaauacc

SEQ ID NO: 1525574 - RNA, 19 nt, Artificial Sequence
  Description of Artificial Sequence: Synthetic oligonucleotide
uguuugacaaugcuuuaaa

SEQ ID NO: 1525575 - RNA, 19 nt, Artificial Sequence
  Description of Artificial Sequence: Synthetic oligonucleotide
aacuccagacuggugaagg

SEQ ID NO: 1525576 - RNA, 19 nt, Artificial Sequence
  Description of Artificial Sequence: Synthetic oligonucleotide
aguagaaaggcaaaucuca

SEQ ID NO: 1525577 - RNA, 19 nt, Artificial Sequence
  Description of Artificial Sequence: Synthetic oligonucleotide
acguuuuccggcuuuguag

SEQ ID NO: 1525578 - RNA, 19 nt, Artificial Sequence
  Description of Artificial Sequence: Synthetic oligonucleotide
cacgagacauuccugaggc

SEQ ID NO: 1525579 - RNA, 19 nt, Artificial Sequence
  Description of Artificial Sequence: Synthetic oligonucleotide
uauucaacucuaacaucag

SEQ ID NO: 1525580 - RNA, 19 nt, Artificial Sequence
  Description of Artificial Sequence: Synthetic oligonucleotide
cuagaugagguguccaggc

SEQ ID NO: 1525581 - RNA, 19 nt, Artificial Sequence
  Description of Artificial Sequence: Synthetic oligonucleotide
aguguggggaccaaguacg

SEQ ID NO: 1525582 - RNA, 19 nt, Artificial Sequence
  Description of Artificial Sequence: Synthetic oligonucleotide
auacaugcuacauauuaau

SEQ ID NO: 1525583 - RNA, 19 nt, Artificial Sequence
  Description of Artificial Sequence: Synthetic oligonucleotide
gagauagagggaacaaggg

SEQ ID NO: 1525584 - RNA, 19 nt, Artificial Sequence
  Description of Artificial Sequence: Synthetic oligonucleotide
caaaguucacccagcauac

SEQ ID NO: 1525585 - RNA, 19 nt, Artificial Sequence
  Description of Artificial Sequence: Synthetic oligonucleotide
uuuccggcuuuguagagug

SEQ ID NO: 1525586 - RNA, 19 nt, Artificial Sequence
  Description of Artificial Sequence: Synthetic oligonucleotide
aaugucucaggugauuaca

SEQ ID NO: 1525587 - RNA, 19 nt, Artificial Sequence
  Description of Artificial Sequence: Synthetic oligonucleotide
ugacauucaggacuauaga

SEQ ID NO: 1525588 - RNA, 19 nt, Artificial Sequence
  Description of Artificial Sequence: Synthetic oligonucleotide
cuuuagaacuucucguaug

SEQ ID NO: 1525589 - RNA, 19 nt, Artificial Sequence
  Description of Artificial Sequence: Synthetic oligonucleotide
auuucaucgugucuugacu

SEQ ID NO: 1525590 - RNA, 19 nt, Artificial Sequence
  Description of Artificial Sequence: Synthetic oligonucleotide
guacauuguggacagaauc

SEQ ID NO: 1525591 - RNA, 19 nt, Artificial Sequence
  Description of Artificial Sequence: Synthetic oligonucleotide
gauuucaucgugucuugac

SEQ ID NO: 1525592 - RNA, 19 nt, Artificial Sequence
  Description of Artificial Sequence: Synthetic oligonucleotide
aguucauuaaggccugcug

SEQ ID NO: 1525593 - RNA, 19 nt, Artificial Sequence
  Description of Artificial Sequence: Synthetic oligonucleotide
uuguaucaaaugccuaaca

SEQ ID NO: 1525594 - RNA, 19 nt, Artificial Sequence
  Description of Artificial Sequence: Synthetic oligonucleotide
aacugcaagaucugccgca

SEQ ID NO: 1525595 - RNA, 19 nt, Artificial Sequence
  Description of Artificial Sequence: Synthetic oligonucleotide
ucaacucuaacaucagcuc

SEQ ID NO: 1525596 - RNA, 19 nt, Artificial Sequence
  Description of Artificial Sequence: Synthetic oligonucleotide
gucucaggugauuacauac

SEQ ID NO: 1525597 - RNA, 19 nt, Artificial Sequence
  Description of Artificial Sequence: Synthetic oligonucleotide
cucguugcaccacagacac

SEQ ID NO: 1525598 - RNA, 19 nt, Artificial Sequence
  Description of Artificial Sequence: Synthetic oligonucleotide
caacugacaguagaaaggc

SEQ ID NO: 1525599 - RNA, 19 nt, Artificial Sequence
  Description of Artificial Sequence: Synthetic oligonucleotide
caggauuguccucucaagg

SEQ ID NO: 1525600 - RNA, 19 nt, Artificial Sequence
  Description of Artificial Sequence: Synthetic oligonucleotide
ugucuugacuucaucucug

SEQ ID NO: 1525601 - RNA, 19 nt, Artificial Sequence
  Description of Artificial Sequence: Synthetic oligonucleotide
gagguguccaggcaugaag

SEQ ID NO: 1525602 - RNA, 19 nt, Artificial Sequence
  Description of Artificial Sequence: Synthetic oligonucleotide
gaccaaguacguuuccucc

SEQ ID NO: 1525603 - RNA, 19 nt, Artificial Sequence
  Description of Artificial Sequence: Synthetic oligonucleotide
acacgagacauuccugagg

SEQ ID NO: 1525604 - RNA, 19 nt, Artificial Sequence
  Description of Artificial Sequence: Synthetic oligonucleotide
cucaggugauuacauacag

SEQ ID NO: 1525605 - RNA, 19 nt, Artificial Sequence
  Description of Artificial Sequence: Synthetic oligonucleotide
ucgugucuugacuucaucu

SEQ ID NO: 1525606 - RNA, 19 nt, Artificial Sequence
  Description of Artificial Sequence: Synthetic oligonucleotide
agacacgagacauuccuga

SEQ ID NO: 1525607 - RNA, 19 nt, Artificial Sequence
  Description of Artificial Sequence: Synthetic oligonucleotide
acuuuggaacugcaagauc

SEQ ID NO: 1525608 - RNA, 19 nt, Artificial Sequence
  Description of Artificial Sequence: Synthetic oligonucleotide
guuacugaacagcuagaug

SEQ ID NO: 1525609 - RNA, 19 nt, Artificial Sequence
  Description of Artificial Sequence: Synthetic oligonucleotide
agcagaacucaauuuacaa

SEQ ID NO: 1525610 - RNA, 19 nt, Artificial Sequence
  Description of Artificial Sequence: Synthetic oligonucleotide
auuacccuaccaucaagcu

SEQ ID NO: 1525611 - RNA, 19 nt, Artificial Sequence
  Description of Artificial Sequence: Synthetic oligonucleotide
cugcuuacuagugacauuc

SEQ ID NO: 1525612 - RNA, 19 nt, Artificial Sequence
  Description of Artificial Sequence: Synthetic oligonucleotide
acaacccauugccggaggc

SEQ ID NO: 1525613 - RNA, 19 nt, Artificial Sequence
  Description of Artificial Sequence: Synthetic oligonucleotide
ugcucauuacccuaccauc

SEQ ID NO: 1525614 - RNA, 19 nt, Artificial Sequence
  Description of Artificial Sequence: Synthetic oligonucleotide
uuugcucauuacccuacca

SEQ ID NO: 1525615 - RNA, 19 nt, Artificial Sequence
  Description of Artificial Sequence: Synthetic oligonucleotide
aaaucucaauggcugcuau

SEQ ID NO: 1525616 - RNA, 19 nt, Artificial Sequence
  Description of Artificial Sequence: Synthetic oligonucleotide
uacaugcuacauauuaaua

SEQ ID NO: 1525617 - RNA, 19 nt, Artificial Sequence
  Description of Artificial Sequence: Synthetic oligonucleotide
gacaagcuuuccaagggcc

SEQ ID NO: 1525618 - RNA, 19 nt, Artificial Sequence
  Description of Artificial Sequence: Synthetic oligonucleotide
uguuacggcggcgacagca

SEQ ID NO: 1525619 - RNA, 19 nt, Artificial Sequence
  Description of Artificial Sequence: Synthetic oligonucleotide
ugcgaucugcuuacuagug

SEQ ID NO: 1525620 - RNA, 19 nt, Artificial Sequence
  Description of Artificial Sequence: Synthetic oligonucleotide
gauguauacaugcuacaua

SEQ ID NO: 1525621 - RNA, 19 nt, Artificial Sequence
  Description of Artificial Sequence: Synthetic oligonucleotide
acauucaggacuauagaga

SEQ ID NO: 1525622 - RNA, 19 nt, Artificial Sequence
  Description of Artificial Sequence: Synthetic oligonucleotide
uuucaucgugucuugacuu

SEQ ID NO: 1525623 - RNA, 19 nt, Artificial Sequence
  Description of Artificial Sequence: Synthetic oligonucleotide
ugauguauacaugcuacau

SEQ ID NO: 1525624 - RNA, 19 nt, Artificial Sequence
  Description of Artificial Sequence: Synthetic oligonucleotide
caaaguucauuaaggccug

SEQ ID NO: 1525625 - RNA, 19 nt, Artificial Sequence
  Description of Artificial Sequence: Synthetic oligonucleotide
caguagaaaggcaaaucuc

SEQ ID NO: 1525626 - RNA, 19 nt, Artificial Sequence
  Description of Artificial Sequence: Synthetic oligonucleotide
uuaaugucucaggugauua

SEQ ID NO: 1525627 - RNA, 19 nt, Artificial Sequence
  Description of Artificial Sequence: Synthetic oligonucleotide
gacacgagacauuccugag

SEQ ID NO: 1525628 - RNA, 19 nt, Artificial Sequence
  Description of Artificial Sequence: Synthetic oligonucleotide
agaacaacccauugccgga

SEQ ID NO: 1525629 - RNA, 19 nt, Artificial Sequence
  Description of Artificial Sequence: Synthetic oligonucleotide
uccaagcaugccuuguucu

SEQ ID NO: 1525630 - RNA, 19 nt, Artificial Sequence
  Description of Artificial Sequence: Synthetic oligonucleotide
accgacggaguugaaaggg

SEQ ID NO: 1525631 - RNA, 19 nt, Artificial Sequence
  Description of Artificial Sequence: Synthetic oligonucleotide
uguacauuguggacagaau

SEQ ID NO: 1525632 - RNA, 19 nt, Artificial Sequence
  Description of Artificial Sequence: Synthetic oligonucleotide
acggaguugaaaggguuac

SEQ ID NO: 1525633 - RNA, 19 nt, Artificial Sequence
  Description of Artificial Sequence: Synthetic oligonucleotide
ugucccuugacaagcuuuc

SEQ ID NO: 1525634 - RNA, 19 nt, Artificial Sequence
  Description of Artificial Sequence: Synthetic oligonucleotide
uaaugucucaggugauuac

SEQ ID NO: 1525635 - RNA, 19 nt, Artificial Sequence
  Description of Artificial Sequence: Synthetic oligonucleotide
aucucaauggcugcuauaa

SEQ ID NO: 1525636 - RNA, 19 nt, Artificial Sequence
  Description of Artificial Sequence: Synthetic oligonucleotide
uugcgaucugcuuacuagu

SEQ ID NO: 1525637 - RNA, 19 nt, Artificial Sequence
  Description of Artificial Sequence: Synthetic oligonucleotide
accuuagugucccuugaca

SEQ ID NO: 1525638 - RNA, 19 nt, Artificial Sequence
  Description of Artificial Sequence: Synthetic oligonucleotide
ggaugacucaggucaaggg

SEQ ID NO: 1525639 - RNA, 19 nt, Artificial Sequence
  Description of Artificial Sequence: Synthetic oligonucleotide
gaucccuagacagaccgac

SEQ ID NO: 1525640 - RNA, 19 nt, Artificial Sequence
  Description of Artificial Sequence: Synthetic oligonucleotide
aggcaaaucucaauggcug

SEQ ID NO: 1525641 - RNA, 19 nt, Artificial Sequence
  Description of Artificial Sequence: Synthetic oligonucleotide
ggauuguccucucaaggcc

SEQ ID NO: 1525642 - RNA, 19 nt, Artificial Sequence
  Description of Artificial Sequence: Synthetic oligonucleotide
caagcaugccuuguucucg

SEQ ID NO: 1525643 - RNA, 19 nt, Artificial Sequence
  Description of Artificial Sequence: Synthetic oligonucleotide
ucaccucaucugcuggcgg

SEQ ID NO: 1525644 - RNA, 19 nt, Artificial Sequence
  Description of Artificial Sequence: Synthetic oligonucleotide
agagaacaacccauugccg

SEQ ID NO: 1525645 - RNA, 19 nt, Artificial Sequence
  Description of Artificial Sequence: Synthetic oligonucleotide
uugcaccacagacacgaga

SEQ ID NO: 1525646 - RNA, 19 nt, Artificial Sequence
  Description of Artificial Sequence: Synthetic oligonucleotide
uuacccuaccaucaagcuu

SEQ ID NO: 1525647 - RNA, 19 nt, Artificial Sequence
  Description of Artificial Sequence: Synthetic oligonucleotide
agcagcagacgccauggug

SEQ ID NO: 1525648 - RNA, 19 nt, Artificial Sequence
  Description of Artificial Sequence: Synthetic oligonucleotide
cugagacauggcuggaagc

SEQ ID NO: 1525649 - RNA, 19 nt, Artificial Sequence
  Description of Artificial Sequence: Synthetic oligonucleotide
ggacuauagagaaauguac

SEQ ID NO: 1525650 - RNA, 19 nt, Artificial Sequence
  Description of Artificial Sequence: Synthetic oligonucleotide
accaucaagcuugcgaucu

SEQ ID NO: 1525651 - RNA, 19 nt, Artificial Sequence
  Description of Artificial Sequence: Synthetic oligonucleotide
ugaaggucauucccuuagu

SEQ ID NO: 1525652 - RNA, 19 nt, Artificial Sequence
  Description of Artificial Sequence: Synthetic oligonucleotide
ugcuauaauaugagauguu

SEQ ID NO: 1525653 - RNA, 19 nt, Artificial Sequence
  Description of Artificial Sequence: Synthetic oligonucleotide
guaugauguauacaugcua

SEQ ID NO: 1525654 - RNA, 19 nt, Artificial Sequence
  Description of Artificial Sequence: Synthetic oligonucleotide
ucaggcacguuuuccggcu

SEQ ID NO: 1525655 - RNA, 19 nt, Artificial Sequence
  Description of Artificial Sequence: Synthetic oligonucleotide
cauuaaggccugcugagga

SEQ ID NO: 1525656 - RNA, 19 nt, Artificial Sequence
  Description of Artificial Sequence: Synthetic oligonucleotide
aaauuguaucaaaugccua

SEQ ID NO: 1525657 - RNA, 19 nt, Artificial Sequence
  Description of Artificial Sequence: Synthetic oligonucleotide
uucaucgugucuugacuuc

SEQ ID NO: 1525658 - RNA, 19 nt, Artificial Sequence
  Description of Artificial Sequence: Synthetic oligonucleotide
cagagauagagggaacaag

SEQ ID NO: 1525659 - RNA, 19 nt, Artificial Sequence
  Description of Artificial Sequence: Synthetic oligonucleotide
uccggcuuuguagagugug

SEQ ID NO: 1525660 - RNA, 19 nt, Artificial Sequence
  Description of Artificial Sequence: Synthetic oligonucleotide
gacgagggcacucccagga

SEQ ID NO: 1525661 - RNA, 19 nt, Artificial Sequence
  Description of Artificial Sequence: Synthetic oligonucleotide
acgguaauacccaggagca

SEQ ID NO: 1525662 - RNA, 19 nt, Artificial Sequence
  Description of Artificial Sequence: Synthetic oligonucleotide
ucccuuaguuuaugaaaac

SEQ ID NO: 1525663 - RNA, 19 nt, Artificial Sequence
  Description of Artificial Sequence: Synthetic oligonucleotide
gucuccgcaggcuaugcug

SEQ ID NO: 1525664 - RNA, 19 nt, Artificial Sequence
  Description of Artificial Sequence: Synthetic oligonucleotide
agcacacgguaauacccag

SEQ ID NO: 1525665 - RNA, 19 nt, Artificial Sequence
  Description of Artificial Sequence: Synthetic oligonucleotide
uacuagugacauucaggac

SEQ ID NO: 1525666 - RNA, 19 nt, Artificial Sequence
  Description of Artificial Sequence: Synthetic oligonucleotide
aggacuauagagaaaugua

SEQ ID NO: 1525667 - RNA, 19 nt, Artificial Sequence
  Description of Artificial Sequence: Synthetic oligonucleotide
uagacagaccgacggaguu

SEQ ID NO: 1525668 - RNA, 19 nt, Artificial Sequence
  Description of Artificial Sequence: Synthetic oligonucleotide
gacagcagcagcagcagca

SEQ ID NO: 1525669 - RNA, 19 nt, Artificial Sequence
  Description of Artificial Sequence: Synthetic oligonucleotide
cucaggcacguuuuccggc

SEQ ID NO: 1525670 - RNA, 19 nt, Artificial Sequence
  Description of Artificial Sequence: Synthetic oligonucleotide
cuuugcucauuacccuacc

SEQ ID NO: 1525671 - RNA, 19 nt, Artificial Sequence
  Description of Artificial Sequence: Synthetic oligonucleotide
uguauacaugcuacauauu

SEQ ID NO: 1525672 - RNA, 19 nt, Artificial Sequence
  Description of Artificial Sequence: Synthetic oligonucleotide
ugcuuacuagugacauuca

SEQ ID NO: 1525673 - RNA, 19 nt, Artificial Sequence
  Description of Artificial Sequence: Synthetic oligonucleotide
gucuugacuucaucucugc

SEQ ID NO: 1525674 - RNA, 19 nt, Artificial Sequence
  Description of Artificial Sequence: Synthetic oligonucleotide
agaacucaauuuacaaaga

SEQ ID NO: 1525675 - RNA, 19 nt, Artificial Sequence
  Description of Artificial Sequence: Synthetic oligonucleotide
ucaucgugucuugacuuca

SEQ ID NO: 1525676 - RNA, 19 nt, Artificial Sequence
  Description of Artificial Sequence: Synthetic oligonucleotide
gauuguccucucaaggcca

SEQ ID NO: 1525677 - RNA, 19 nt, Artificial Sequence
  Description of Artificial Sequence: Synthetic oligonucleotide
auacagagauagagggaac

SEQ ID NO: 1525678 - RNA, 19 nt, Artificial Sequence
  Description of Artificial Sequence: Synthetic oligonucleotide
auggcccgcucaucgcucc

SEQ ID NO: 1525679 - RNA, 19 nt, Artificial Sequence
  Description of Artificial Sequence: Synthetic oligonucleotide
gaggggagaaauguugauc

SEQ ID NO: 1525680 - RNA, 19 nt, Artificial Sequence
  Description of Artificial Sequence: Synthetic oligonucleotide
gaacaacccauugccggag

SEQ ID NO: 1525681 - RNA, 19 nt, Artificial Sequence
  Description of Artificial Sequence: Synthetic oligonucleotide
guuuuccggcuuuguagag

SEQ ID NO: 1525682 - RNA, 19 nt, Artificial Sequence
  Description of Artificial Sequence: Synthetic oligonucleotide
gcaguaaggucuccgcagg

SEQ ID NO: 1525683 - RNA, 19 nt, Artificial Sequence
  Description of Artificial Sequence: Synthetic oligonucleotide
agcaaccuaacagguauga

SEQ ID NO: 1525684 - RNA, 19 nt, Artificial Sequence
  Description of Artificial Sequence: Synthetic oligonucleotide
acagcagcagcagcagcac

SEQ ID NO: 1525685 - RNA, 19 nt, Artificial Sequence
  Description of Artificial Sequence: Synthetic oligonucleotide
caagcuugcgaucugcuua

SEQ ID NO: 1525686 - RNA, 19 nt, Artificial Sequence
  Description of Artificial Sequence: Synthetic oligonucleotide
cuagugacauucaggacua

SEQ ID NO: 1525687 - RNA, 19 nt, Artificial Sequence
  Description of Artificial Sequence: Synthetic oligonucleotide
ugaggagggcuccuuuauc

SEQ ID NO: 1525688 - RNA, 19 nt, Artificial Sequence
  Description of Artificial Sequence: Synthetic oligonucleotide
cacaggaucuguuuguaua

SEQ ID NO: 1525689 - RNA, 19 nt, Artificial Sequence
  Description of Artificial Sequence: Synthetic oligonucleotide
caucaagcuugcgaucugc

SEQ ID NO: 1525690 - RNA, 19 nt, Artificial Sequence
  Description of Artificial Sequence: Synthetic oligonucleotide
uggcugcuauaauaugaga

SEQ ID NO: 1525691 - RNA, 19 nt, Artificial Sequence
  Description of Artificial Sequence: Synthetic oligonucleotide
aggcuaugcugacgagggc

SEQ ID NO: 1525692 - RNA, 19 nt, Artificial Sequence
  Description of Artificial Sequence: Synthetic oligonucleotide
gauguuugacaaugcuuua

SEQ ID NO: 1525693 - RNA, 19 nt, Artificial Sequence
  Description of Artificial Sequence: Synthetic oligonucleotide
ugaucccuagacagaccga

SEQ ID NO: 1525694 - RNA, 19 nt, Artificial Sequence
  Description of Artificial Sequence: Synthetic oligonucleotide
cucaggucaaggguggcug

SEQ ID NO: 1525695 - RNA, 19 nt, Artificial Sequence
  Description of Artificial Sequence: Synthetic oligonucleotide
caccucaucugcuggcggc

SEQ ID NO: 1525696 - RNA, 19 nt, Artificial Sequence
  Description of Artificial Sequence: Synthetic oligonucleotide
gacagaccgacggaguuga

SEQ ID NO: 1525697 - RNA, 19 nt, Artificial Sequence
  Description of Artificial Sequence: Synthetic oligonucleotide
aguaaggucuccgcaggcu

SEQ ID NO: 1525698 - RNA, 19 nt, Artificial Sequence
  Description of Artificial Sequence: Synthetic oligonucleotide
ugucucaggugauuacaua

SEQ ID NO: 1525699 - RNA, 19 nt, Artificial Sequence
  Description of Artificial Sequence: Synthetic oligonucleotide
guuuguauacagagaacaa

SEQ ID NO: 1525700 - RNA, 19 nt, Artificial Sequence
  Description of Artificial Sequence: Synthetic oligonucleotide
agcgagcagaacucaauuu

SEQ ID NO: 1525701 - RNA, 19 nt, Artificial Sequence
  Description of Artificial Sequence: Synthetic oligonucleotide
gaccuuagugucccuugac

SEQ ID NO: 1525702 - RNA, 19 nt, Artificial Sequence
  Description of Artificial Sequence: Synthetic oligonucleotide
ggcaaaucucaauggcugc

SEQ ID NO: 1525703 - RNA, 19 nt, Artificial Sequence
  Description of Artificial Sequence: Synthetic oligonucleotide
gacaaugcuuuaaauugua

SEQ ID NO: 1525704 - RNA, 19 nt, Artificial Sequence
  Description of Artificial Sequence: Synthetic oligonucleotide
caggaggguagcuuugcuc

SEQ ID NO: 1525705 - RNA, 19 nt, Artificial Sequence
  Description of Artificial Sequence: Synthetic oligonucleotide
ugauuucaucgugucuuga

SEQ ID NO: 1525706 - RNA, 19 nt, Artificial Sequence
  Description of Artificial Sequence: Synthetic oligonucleotide
cuaccaucaagcuugcgau

SEQ ID NO: 1525707 - RNA, 19 nt, Artificial Sequence
  Description of Artificial Sequence: Synthetic oligonucleotide
ucacaggaucuguuuguau

SEQ ID NO: 1525708 - RNA, 19 nt, Artificial Sequence
  Description of Artificial Sequence: Synthetic oligonucleotide
ccauaaaaggaugucaaca

SEQ ID NO: 1525709 - RNA, 19 nt, Artificial Sequence
  Description of Artificial Sequence: Synthetic oligonucleotide
uuacggcggcgacagcagc

SEQ ID NO: 1525710 - RNA, 19 nt, Artificial Sequence
  Description of Artificial Sequence: Synthetic oligonucleotide
cugacaguagaaaggcaaa

SEQ ID NO: 1525711 - RNA, 19 nt, Artificial Sequence
  Description of Artificial Sequence: Synthetic oligonucleotide
guaaaacuccagacuggug

SEQ ID NO: 1525712 - RNA, 19 nt, Artificial Sequence
  Description of Artificial Sequence: Synthetic oligonucleotide
gcaggauuguccucucaag

SEQ ID NO: 1525713 - RNA, 19 nt, Artificial Sequence
  Description of Artificial Sequence: Synthetic oligonucleotide
ccuaccaucaagcuugcga

SEQ ID NO: 1525714 - RNA, 19 nt, Artificial Sequence
  Description of Artificial Sequence: Synthetic oligonucleotide
gaacagcuagaugaggugu

SEQ ID NO: 1525715 - RNA, 19 nt, Artificial Sequence
  Description of Artificial Sequence: Synthetic oligonucleotide
guagaaaggcaaaucucaa

SEQ ID NO: 1525716 - RNA, 19 nt, Artificial Sequence
  Description of Artificial Sequence: Synthetic oligonucleotide
uccgcaggcuaugcugacg

SEQ ID NO: 1525717 - RNA, 19 nt, Artificial Sequence
  Description of Artificial Sequence: Synthetic oligonucleotide
ucugcuuacuagugacauu

SEQ ID NO: 1525718 - RNA, 19 nt, Artificial Sequence
  Description of Artificial Sequence: Synthetic oligonucleotide
ucguugcaccacagacacg

SEQ ID NO: 1525719 - RNA, 19 nt, Artificial Sequence
  Description of Artificial Sequence: Synthetic oligonucleotide
guuacggcggcgacagcag

SEQ ID NO: 1525720 - RNA, 19 nt, Artificial Sequence
  Description of Artificial Sequence: Synthetic oligonucleotide
uucucguauggguuuuguu

SEQ ID NO: 1525721 - RNA, 19 nt, Artificial Sequence
  Description of Artificial Sequence: Synthetic oligonucleotide
aguccaagcaugccuuguu

SEQ ID NO: 1525722 - RNA, 19 nt, Artificial Sequence
  Description of Artificial Sequence: Synthetic oligonucleotide
caggcguaaggucaccuca

SEQ ID NO: 1525723 - RNA, 19 nt, Artificial Sequence
  Description of Artificial Sequence: Synthetic oligonucleotide
cugcuuuagaacuucucgu

SEQ ID NO: 1525724 - RNA, 19 nt, Artificial Sequence
  Description of Artificial Sequence: Synthetic oligonucleotide
aggguagcuuugcucauua

SEQ ID NO: 1525725 - RNA, 19 nt, Artificial Sequence
  Description of Artificial Sequence: Synthetic oligonucleotide
uggagggaugacucagguc

SEQ ID NO: 1525726 - RNA, 19 nt, Artificial Sequence
  Description of Artificial Sequence: Synthetic oligonucleotide
ccaaguacguuuccucccc

SEQ ID NO: 1525727 - RNA, 19 nt, Artificial Sequence
  Description of Artificial Sequence: Synthetic oligonucleotide
caagggcccaugaugaugu

SEQ ID NO: 1525728 - RNA, 19 nt, Artificial Sequence
  Description of Artificial Sequence: Synthetic oligonucleotide
ccuauucaacucuaacauc

SEQ ID NO: 1525729 - RNA, 19 nt, Artificial Sequence
  Description of Artificial Sequence: Synthetic oligonucleotide
uggguaguccaagcaugcc

SEQ ID NO: 1525730 - RNA, 19 nt, Artificial Sequence
  Description of Artificial Sequence: Synthetic oligonucleotide
gcaugaaggagccaggcgu

SEQ ID NO: 1525731 - RNA, 19 nt, Artificial Sequence
  Description of Artificial Sequence: Synthetic oligonucleotide
aggucuccgcaggcuaugc

SEQ ID NO: 1525732 - RNA, 19 nt, Artificial Sequence
  Description of Artificial Sequence: Synthetic oligonucleotide
guaaggucuccgcaggcua

SEQ ID NO: 1525733 - RNA, 19 nt, Artificial Sequence
  Description of Artificial Sequence: Synthetic oligonucleotide
agccagcgcggcgucagcc

SEQ ID NO: 1525734 - RNA, 19 nt, Artificial Sequence
  Description of Artificial Sequence: Synthetic oligonucleotide
acaaugcuuuaaauuguau

SEQ ID NO: 1525735 - RNA, 19 nt, Artificial Sequence
  Description of Artificial Sequence: Synthetic oligonucleotide
cagugcggcgccgaggagc

SEQ ID NO: 1525736 - RNA, 19 nt, Artificial Sequence
  Description of Artificial Sequence: Synthetic oligonucleotide
agggaacaagggcaggauu

SEQ ID NO: 1525737 - RNA, 19 nt, Artificial Sequence
  Description of Artificial Sequence: Synthetic oligonucleotide
cucaucgcuccugucuggc

SEQ ID NO: 1525738 - RNA, 19 nt, Artificial Sequence
  Description of Artificial Sequence: Synthetic oligonucleotide
caggacuauagagaaaugu

SEQ ID NO: 1525739 - RNA, 19 nt, Artificial Sequence
  Description of Artificial Sequence: Synthetic oligonucleotide
ccuguuacggcggcgacag

SEQ ID NO: 1525740 - RNA, 19 nt, Artificial Sequence
  Description of Artificial Sequence: Synthetic oligonucleotide
cccagcauacgccccagcg

SEQ ID NO: 1525741 - RNA, 19 nt, Artificial Sequence
  Description of Artificial Sequence: Synthetic oligonucleotide
cgaucugcuuacuagugac

SEQ ID NO: 1525742 - RNA, 19 nt, Artificial Sequence
  Description of Artificial Sequence: Synthetic oligonucleotide
caacaagauuaaugucuca

SEQ ID NO: 1525743 - RNA, 19 nt, Artificial Sequence
  Description of Artificial Sequence: Synthetic oligonucleotide
cucauuacccuaccaucaa

SEQ ID NO: 1525744 - RNA, 19 nt, Artificial Sequence
  Description of Artificial Sequence: Synthetic oligonucleotide
cccauaaaaggaugucaac

SEQ ID NO: 1525745 - RNA, 19 nt, Artificial Sequence
  Description of Artificial Sequence: Synthetic oligonucleotide
gcuccugucuggcuuccgg

SEQ ID NO: 1525746 - RNA, 19 nt, Artificial Sequence
  Description of Artificial Sequence: Synthetic oligonucleotide
gcucauuacccuaccauca

SEQ ID NO: 1525747 - RNA, 19 nt, Artificial Sequence
  Description of Artificial Sequence: Synthetic oligonucleotide
auacgccccagcgagcaga

SEQ ID NO: 1525748 - RNA, 19 nt, Artificial Sequence
  Description of Artificial Sequence: Synthetic oligonucleotide
cgagcagaacucaauuuac

SEQ ID NO: 1525749 - RNA, 19 nt, Artificial Sequence
  Description of Artificial Sequence: Synthetic oligonucleotide
augucucaggugauuacau

SEQ ID NO: 1525750 - RNA, 19 nt, Artificial Sequence
  Description of Artificial Sequence: Synthetic oligonucleotide
augccuaacaaggcagaaa

SEQ ID NO: 1525751 - RNA, 19 nt, Artificial Sequence
  Description of Artificial Sequence: Synthetic oligonucleotide
gaacaagggcaggauuguc

SEQ ID NO: 1525752 - RNA, 19 nt, Artificial Sequence
  Description of Artificial Sequence: Synthetic oligonucleotide
ggcuaugcugacgagggca

SEQ ID NO: 1525753 - RNA, 19 nt, Artificial Sequence
  Description of Artificial Sequence: Synthetic oligonucleotide
agggaugacucaggucaag

SEQ ID NO: 1525754 - RNA, 19 nt, Artificial Sequence
  Description of Artificial Sequence: Synthetic oligonucleotide
uaauacccaggagcacaga

SEQ ID NO: 1525755 - RNA, 19 nt, Artificial Sequence
  Description of Artificial Sequence: Synthetic oligonucleotide
aagcuuuccaagggcccau

SEQ ID NO: 1525756 - RNA, 19 nt, Artificial Sequence
  Description of Artificial Sequence: Synthetic oligonucleotide
aggucaaggguggcugcag

SEQ ID NO: 1525757 - RNA, 19 nt, Artificial Sequence
  Description of Artificial Sequence: Synthetic oligonucleotide
ucguauggguuuuguucuu

SEQ ID NO: 1525758 - RNA, 19 nt, Artificial Sequence
  Description of Artificial Sequence: Synthetic oligonucleotide
uccaagggcccaugaugau

SEQ ID NO: 1525759 - RNA, 19 nt, Artificial Sequence
  Description of Artificial Sequence: Synthetic oligonucleotide
ccuuagugucccuugacaa

SEQ ID NO: 1525760 - RNA, 19 nt, Artificial Sequence
  Description of Artificial Sequence: Synthetic oligonucleotide
uacgccccagcgagcagaa

SEQ ID NO: 1525761 - RNA, 19 nt, Artificial Sequence
  Description of Artificial Sequence: Synthetic oligonucleotide
ggcaggauuguccucucaa

SEQ ID NO: 1525762 - RNA, 19 nt, Artificial Sequence
  Description of Artificial Sequence: Synthetic oligonucleotide
cuauagagaaauguacauu

SEQ ID NO: 1525763 - RNA, 19 nt, Artificial Sequence
  Description of Artificial Sequence: Synthetic oligonucleotide
ccggcuuuguagagugugg

SEQ ID NO: 1525764 - RNA, 19 nt, Artificial Sequence
  Description of Artificial Sequence: Synthetic oligonucleotide
ggcugcaguaaggucuccg

SEQ ID NO: 1525765 - RNA, 19 nt, Artificial Sequence
  Description of Artificial Sequence: Synthetic oligonucleotide
cucagcaaccuaacaggua

SEQ ID NO: 1525766 - RNA, 19 nt, Artificial Sequence
  Description of Artificial Sequence: Synthetic oligonucleotide
gcuauaauaugagauguuu

SEQ ID NO: 1525767 - RNA, 19 nt, Artificial Sequence
  Description of Artificial Sequence: Synthetic oligonucleotide
uguagaguguggggaccaa

SEQ ID NO: 1525768 - RNA, 19 nt, Artificial Sequence
  Description of Artificial Sequence: Synthetic oligonucleotide
ggcugcuauaauaugagau

SEQ ID NO: 1525769 - RNA, 19 nt, Artificial Sequence
  Description of Artificial Sequence: Synthetic oligonucleotide
cuagacagaccgacggagu

SEQ ID NO: 1525770 - RNA, 19 nt, Artificial Sequence
  Description of Artificial Sequence: Synthetic oligonucleotide
gguaugauguauacaugcu

SEQ ID NO: 1525771 - RNA, 19 nt, Artificial Sequence
  Description of Artificial Sequence: Synthetic oligonucleotide
ggacagaaucauggggacc

SEQ ID NO: 1525772 - RNA, 19 nt, Artificial Sequence
  Description of Artificial Sequence: Synthetic oligonucleotide
gauuaaugucucaggugau

SEQ ID NO: 1525773 - RNA, 19 nt, Artificial Sequence
  Description of Artificial Sequence: Synthetic oligonucleotide
acccuaccaucaagcuugc

SEQ ID NO: 1525774 - RNA, 19 nt, Artificial Sequence
  Description of Artificial Sequence: Synthetic oligonucleotide
ccccauaaaaggaugucaa

SEQ ID NO: 1525775 - RNA, 19 nt, Artificial Sequence
  Description of Artificial Sequence: Synthetic oligonucleotide
uuccggcuuuguagagugu

SEQ ID NO: 1525776 - RNA, 19 nt, Artificial Sequence
  Description of Artificial Sequence: Synthetic oligonucleotide
gcuuugcucauuacccuac

SEQ ID NO: 1525777 - RNA, 19 nt, Artificial Sequence
  Description of Artificial Sequence: Synthetic oligonucleotide
ccgaggagcaucagccagc

SEQ ID NO: 1525778 - RNA, 19 nt, Artificial Sequence
  Description of Artificial Sequence: Synthetic oligonucleotide
ggagaaauguugaucccua

SEQ ID NO: 1525779 - RNA, 19 nt, Artificial Sequence
  Description of Artificial Sequence: Synthetic oligonucleotide
cguugcaccacagacacga

SEQ ID NO: 1525780 - RNA, 19 nt, Artificial Sequence
  Description of Artificial Sequence: Synthetic oligonucleotide
ggguaguccaagcaugccu

SEQ ID NO: 1525781 - RNA, 19 nt, Artificial Sequence
  Description of Artificial Sequence: Synthetic oligonucleotide
ggcgccgaggagcaucagc

SEQ ID NO: 1525782 - RNA, 19 nt, Artificial Sequence
  Description of Artificial Sequence: Synthetic oligonucleotide
gcgaucugcuuacuaguga

SEQ ID NO: 1525783 - RNA, 19 nt, Artificial Sequence
  Description of Artificial Sequence: Synthetic oligonucleotide
ccaggaaacuuuggaacug

SEQ ID NO: 1525784 - RNA, 19 nt, Artificial Sequence
  Description of Artificial Sequence: Synthetic oligonucleotide
accuaacagguaugaugua

SEQ ID NO: 1525785 - RNA, 19 nt, Artificial Sequence
  Description of Artificial Sequence: Synthetic oligonucleotide
gucccuugacaagcuuucc

SEQ ID NO: 1525786 - RNA, 19 nt, Artificial Sequence
  Description of Artificial Sequence: Synthetic oligonucleotide
caaaucucaauggcugcua

SEQ ID NO: 1525787 - RNA, 19 nt, Artificial Sequence
  Description of Artificial Sequence: Synthetic oligonucleotide
cauacgccccagcgagcag

SEQ ID NO: 1525788 - RNA, 19 nt, Artificial Sequence
  Description of Artificial Sequence: Synthetic oligonucleotide
guugcaccacagacacgag

SEQ ID NO: 1525789 - RNA, 19 nt, Artificial Sequence
  Description of Artificial Sequence: Synthetic oligonucleotide
caggaucuguuuguauaca

SEQ ID NO: 1525790 - RNA, 19 nt, Artificial Sequence
  Description of Artificial Sequence: Synthetic oligonucleotide
ggaccuuagugucccuuga

SEQ ID NO: 1525791 - RNA, 19 nt, Artificial Sequence
  Description of Artificial Sequence: Synthetic oligonucleotide
gcuaugcugacgagggcac

SEQ ID NO: 1525792 - RNA, 19 nt, Artificial Sequence
  Description of Artificial Sequence: Synthetic oligonucleotide
cuccuguuacggcggcgac

SEQ ID NO: 1525793 - RNA, 19 nt, Artificial Sequence
  Description of Artificial Sequence: Synthetic oligonucleotide
cguuuuccggcuuuguaga

SEQ ID NO: 1525794 - RNA, 19 nt, Artificial Sequence
  Description of Artificial Sequence: Synthetic oligonucleotide
acgagggcacucccaggaa

SEQ ID NO: 1525795 - RNA, 19 nt, Artificial Sequence
  Description of Artificial Sequence: Synthetic oligonucleotide
gcacucuucacaggaucug

SEQ ID NO: 1525796 - RNA, 19 nt, Artificial Sequence
  Description of Artificial Sequence: Synthetic oligonucleotide
cuuuccaagggcccaugau

SEQ ID NO: 1525797 - RNA, 19 nt, Artificial Sequence
  Description of Artificial Sequence: Synthetic oligonucleotide
gggagaaauguugaucccu

SEQ ID NO: 1525798 - RNA, 19 nt, Artificial Sequence
  Description of Artificial Sequence: Synthetic oligonucleotide
ugccgcagugggugccagc

SEQ ID NO: 1525799 - RNA, 19 nt, Artificial Sequence
  Description of Artificial Sequence: Synthetic oligonucleotide
aggcacguuuuccggcuuu

SEQ ID NO: 1525800 - RNA, 19 nt, Artificial Sequence
  Description of Artificial Sequence: Synthetic oligonucleotide
ccucaaaguucacccagca

SEQ ID NO: 1525801 - RNA, 19 nt, Artificial Sequence
  Description of Artificial Sequence: Synthetic oligonucleotide
aggcguaaggucaccucau

SEQ ID NO: 1525802 - RNA, 19 nt, Artificial Sequence
  Description of Artificial Sequence: Synthetic oligonucleotide
ggcguaaggucaccucauc

SEQ ID NO: 1525803 - RNA, 19 nt, Artificial Sequence
  Description of Artificial Sequence: Synthetic oligonucleotide
cagaccgacggaguugaaa

SEQ ID NO: 1525804 - RNA, 19 nt, Artificial Sequence
  Description of Artificial Sequence: Synthetic oligonucleotide
ggggaccaaguacguuucc

SEQ ID NO: 1525805 - RNA, 19 nt, Artificial Sequence
  Description of Artificial Sequence: Synthetic oligonucleotide
gggaagugaggugggcgug

SEQ ID NO: 1525806 - RNA, 19 nt, Artificial Sequence
  Description of Artificial Sequence: Synthetic oligonucleotide
gcguaaggucaccucaucu

SEQ ID NO: 1525807 - RNA, 19 nt, Artificial Sequence
  Description of Artificial Sequence: Synthetic oligonucleotide
gagggaacaagggcaggau

SEQ ID NO: 1525808 - RNA, 19 nt, Artificial Sequence
  Description of Artificial Sequence: Synthetic oligonucleotide
ggcacguuuuccggcuuug

SEQ ID NO: 1525809 - RNA, 19 nt, Artificial Sequence
  Description of Artificial Sequence: Synthetic oligonucleotide
agcaugccuuguucucguu

SEQ ID NO: 1525810 - RNA, 19 nt, Artificial Sequence
  Description of Artificial Sequence: Synthetic oligonucleotide
gguaguccaagcaugccuu

SEQ ID NO: 1525811 - RNA, 19 nt, Artificial Sequence
  Description of Artificial Sequence: Synthetic oligonucleotide
ggguagcuuugcucauuac

SEQ ID NO: 1525812 - RNA, 19 nt, Artificial Sequence
  Description of Artificial Sequence: Synthetic oligonucleotide
ccagcauacgccccagcga

SEQ ID NO: 1525813 - RNA, 19 nt, Artificial Sequence
  Description of Artificial Sequence: Synthetic oligonucleotide
gcaaaucucaauggcugcu

SEQ ID NO: 1525814 - RNA, 19 nt, Artificial Sequence
  Description of Artificial Sequence: Synthetic oligonucleotide
gcuccuguuacggcggcga

SEQ ID NO: 1525815 - RNA, 19 nt, Artificial Sequence
  Description of Artificial Sequence: Synthetic oligonucleotide
cgcucaucgcuccugucug

SEQ ID NO: 1525816 - RNA, 19 nt, Artificial Sequence
  Description of Artificial Sequence: Synthetic oligonucleotide
caggucaaggguggcugca

SEQ ID NO: 1525817 - RNA, 19 nt, Artificial Sequence
  Description of Artificial Sequence: Synthetic oligonucleotide
ccaucaagcuugcgaucug

SEQ ID NO: 1525818 - RNA, 19 nt, Artificial Sequence
  Description of Artificial Sequence: Synthetic oligonucleotide
ggguuacugaacagcuaga

SEQ ID NO: 1525819 - RNA, 19 nt, Artificial Sequence
  Description of Artificial Sequence: Synthetic oligonucleotide
gcuugcgaucugcuuacua

SEQ ID NO: 1525820 - RNA, 19 nt, Artificial Sequence
  Description of Artificial Sequence: Synthetic oligonucleotide
ccgcaggcuaugcugacga

SEQ ID NO: 1525821 - RNA, 19 nt, Artificial Sequence
  Description of Artificial Sequence: Synthetic oligonucleotide
cagcgagcagaacucaauu

SEQ ID NO: 1525822 - RNA, 19 nt, Artificial Sequence
  Description of Artificial Sequence: Synthetic oligonucleotide
cagcagcagcagcagcaca

SEQ ID NO: 1525823 - RNA, 19 nt, Artificial Sequence
  Description of Artificial Sequence: Synthetic oligonucleotide
cuguuacggcggcgacagc

SEQ ID NO: 1525824 - RNA, 19 nt, Artificial Sequence
  Description of Artificial Sequence: Synthetic oligonucleotide
ggaggggagaaauguugau

SEQ ID NO: 1525825 - RNA, 19 nt, Artificial Sequence
  Description of Artificial Sequence: Synthetic oligonucleotide
cccuuaguuuaugaaaacu

SEQ ID NO: 1525826 - RNA, 19 nt, Artificial Sequence
  Description of Artificial Sequence: Synthetic oligonucleotide
caucgugucuugacuucau

SEQ ID NO: 1525827 - RNA, 19 nt, Artificial Sequence
  Description of Artificial Sequence: Synthetic oligonucleotide
ggcuccuguuacggcggcg

SEQ ID NO: 1525828 - RNA, 19 nt, Artificial Sequence
  Description of Artificial Sequence: Synthetic oligonucleotide
gcucagcaaccuaacaggu

SEQ ID NO: 1525829 - RNA, 19 nt, Artificial Sequence
  Description of Artificial Sequence: Synthetic oligonucleotide
gggaccaaguacguuuccu

SEQ ID NO: 1525830 - RNA, 19 nt, Artificial Sequence
  Description of Artificial Sequence: Synthetic oligonucleotide
caacccauugccggaggcu

SEQ ID NO: 1525831 - RNA, 19 nt, Artificial Sequence
  Description of Artificial Sequence: Synthetic oligonucleotide
agcuugcgaucugcuuacu

SEQ ID NO: 1525832 - RNA, 19 nt, Artificial Sequence
  Description of Artificial Sequence: Synthetic oligonucleotide
ggcgucagcccgagagcag

SEQ ID NO: 1525833 - RNA, 19 nt, Artificial Sequence
  Description of Artificial Sequence: Synthetic oligonucleotide
cagccagcgcggcgucagc

SEQ ID NO: 1525834 - RNA, 19 nt, Artificial Sequence
  Description of Artificial Sequence: Synthetic oligonucleotide
ccgagagcagcagacgcca

SEQ ID NO: 1525835 - RNA, 19 nt, Artificial Sequence
  Description of Artificial Sequence: Synthetic oligonucleotide
gccccagcgagcagaacuc

SEQ ID NO: 1525836 - RNA, 19 nt, Artificial Sequence
  Description of Artificial Sequence: Synthetic oligonucleotide
gaggcacucuucacaggau

SEQ ID NO: 1525837 - RNA, 19 nt, Artificial Sequence
  Description of Artificial Sequence: Synthetic oligonucleotide
gugggcgugugugucugcu

SEQ ID NO: 1525838 - RNA, 19 nt, Artificial Sequence
  Description of Artificial Sequence: Synthetic oligonucleotide
cugccgcagugggugccag

SEQ ID NO: 1525839 - RNA, 19 nt, Artificial Sequence
  Description of Artificial Sequence: Synthetic oligonucleotide
cccuagacagaccgacgga

SEQ ID NO: 1525840 - RNA, 19 nt, Artificial Sequence
  Description of Artificial Sequence: Synthetic oligonucleotide
gcuggcggcugcucuccca

SEQ ID NO: 1525841 - RNA, 19 nt, Artificial Sequence
  Description of Artificial Sequence: Synthetic oligonucleotide
ggcacucccaggaaacuuu

SEQ ID NO: 1525842 - RNA, 19 nt, Artificial Sequence
  Description of Artificial Sequence: Synthetic oligonucleotide
guguggggaccaaguacgu

SEQ ID NO: 1525843 - RNA, 19 nt, Artificial Sequence
  Description of Artificial Sequence: Synthetic oligonucleotide
gcagugcggcgccgaggag

SEQ ID NO: 1525844 - RNA, 19 nt, Artificial Sequence
  Description of Artificial Sequence: Synthetic oligonucleotide
ccgcucaucgcuccugucu

SEQ ID NO: 1525845 - RNA, 19 nt, Artificial Sequence
  Description of Artificial Sequence: Synthetic oligonucleotide
gcaaccuaacagguaugau

SEQ ID NO: 1525846 - RNA, 19 nt, Artificial Sequence
  Description of Artificial Sequence: Synthetic oligonucleotide
ccgacggaguugaaagggu

SEQ ID NO: 1525847 - RNA, 19 nt, Artificial Sequence
  Description of Artificial Sequence: Synthetic oligonucleotide
acagaccgacggaguugaa

SEQ ID NO: 1525848 - RNA, 19 nt, Artificial Sequence
  Description of Artificial Sequence: Synthetic oligonucleotide
cccgcucaucgcuccuguc

SEQ ID NO: 1525849 - RNA, 19 nt, Artificial Sequence
  Description of Artificial Sequence: Synthetic oligonucleotide
ccgcagugggugccagcug

SEQ ID NO: 1525850 - RNA, 19 nt, Artificial Sequence
  Description of Artificial Sequence: Synthetic oligonucleotide
ccaggaggguagcuuugcu

SEQ ID NO: 1525851 - RNA, 19 nt, Artificial Sequence
  Description of Artificial Sequence: Synthetic oligonucleotide
cgucagcccgagagcagca

SEQ ID NO: 1525852 - RNA, 19 nt, Artificial Sequence
  Description of Artificial Sequence: Synthetic oligonucleotide
gggcacucccaggaaacuu

SEQ ID NO: 1525853 - RNA, 19 nt, Artificial Sequence
  Description of Artificial Sequence: Synthetic oligonucleotide
cggcgucagcccgagagca

SEQ ID NO: 1525854 - RNA, 19 nt, Artificial Sequence
  Description of Artificial Sequence: Synthetic oligonucleotide
gcacguuuuccggcuuugu

SEQ ID NO: 1525855 - RNA, 19 nt, Artificial Sequence
  Description of Artificial Sequence: Synthetic oligonucleotide
gcccgcucaucgcuccugu

SEQ ID NO: 1525856 - RNA, 19 nt, Artificial Sequence
  Description of Artificial Sequence: Synthetic oligonucleotide
caggcacguuuuccggcuu

SEQ ID NO: 1525857 - RNA, 19 nt, Artificial Sequence
  Description of Artificial Sequence: Synthetic oligonucleotide
ccauugccggaggcuccug

SEQ ID NO: 1525858 - RNA, 19 nt, Artificial Sequence
  Description of Artificial Sequence: Synthetic oligonucleotide
ggggaccuuagugucccuu

SEQ ID NO: 1525859 - RNA, 19 nt, Artificial Sequence
  Description of Artificial Sequence: Synthetic oligonucleotide
cgacggaguugaaaggguu

SEQ ID NO: 1525860 - RNA, 19 nt, Artificial Sequence
  Description of Artificial Sequence: Synthetic oligonucleotide
ccccagcgagcagaacuca

SEQ ID NO: 1525861 - RNA, 19 nt, Artificial Sequence
  Description of Artificial Sequence: Synthetic oligonucleotide
cgcuccugucuggcuuccg

SEQ ID NO: 1525862 - RNA, 19 nt, Artificial Sequence
  Description of Artificial Sequence: Synthetic oligonucleotide
cguauggguuuuguucuuu

SEQ ID NO: 1525863 - RNA, 19 nt, Artificial Sequence
  Description of Artificial Sequence: Synthetic oligonucleotide
gcgcggcgucagcccgaga

SEQ ID NO: 1525864 - RNA, 19 nt, Artificial Sequence
  Description of Artificial Sequence: Synthetic oligonucleotide
cggcgccgaggagcaucag

SEQ ID NO: 1525865 - RNA, 19 nt, Artificial Sequence
  Description of Artificial Sequence: Synthetic oligonucleotide
gugcggcgccgaggagcau

SEQ ID NO: 1525866 - RNA, 19 nt, Artificial Sequence
  Description of Artificial Sequence: Synthetic oligonucleotide
aauuuuagugcacagaccg

SEQ ID NO: 1525867 - RNA, 19 nt, Artificial Sequence
  Description of Artificial Sequence: Synthetic oligonucleotide
agugaaauuuauuugaccc

SEQ ID NO: 1525868 - RNA, 19 nt, Artificial Sequence
  Description of Artificial Sequence: Synthetic oligonucleotide
aaauguuagaaaucuauuc

SEQ ID NO: 1525869 - RNA, 19 nt, Artificial Sequence
  Description of Artificial Sequence: Synthetic oligonucleotide
aauauuguaguacuuuauc

SEQ ID NO: 1525870 - RNA, 19 nt, Artificial Sequence
  Description of Artificial Sequence: Synthetic oligonucleotide
agaauuuuagugcacagac

SEQ ID NO: 1525871 - RNA, 19 nt, Artificial Sequence
  Description of Artificial Sequence: Synthetic oligonucleotide
uuaaugaguagucuaaucc

SEQ ID NO: 1525872 - RNA, 19 nt, Artificial Sequence
  Description of Artificial Sequence: Synthetic oligonucleotide
uaaacuuguuuauacaugg

SEQ ID NO: 1525873 - RNA, 19 nt, Artificial Sequence
  Description of Artificial Sequence: Synthetic oligonucleotide
uauaaauugacaacugcag

SEQ ID NO: 1525874 - RNA, 19 nt, Artificial Sequence
  Description of Artificial Sequence: Synthetic oligonucleotide
uguaaaguagcuuaaugag

SEQ ID NO: 1525875 - RNA, 19 nt, Artificial Sequence
  Description of Artificial Sequence: Synthetic oligonucleotide
aaguucauauuucauccgc

SEQ ID NO: 1525876 - RNA, 19 nt, Artificial Sequence
  Description of Artificial Sequence: Synthetic oligonucleotide
aaguauagguuuuagucuc

SEQ ID NO: 1525877 - RNA, 19 nt, Artificial Sequence
  Description of Artificial Sequence: Synthetic oligonucleotide
aaugggauaguaaaacugc

SEQ ID NO: 1525878 - RNA, 19 nt, Artificial Sequence
  Description of Artificial Sequence: Synthetic oligonucleotide
auuaggacugcauagggac

SEQ ID NO: 1525879 - RNA, 19 nt, Artificial Sequence
  Description of Artificial Sequence: Synthetic oligonucleotide
uuuauaacacacacuauug

SEQ ID NO: 1525880 - RNA, 19 nt, Artificial Sequence
  Description of Artificial Sequence: Synthetic oligonucleotide
aaauguggcaaacaggcug

SEQ ID NO: 1525881 - RNA, 19 nt, Artificial Sequence
  Description of Artificial Sequence: Synthetic oligonucleotide
caaaguucauauuucaucc

SEQ ID NO: 1525882 - RNA, 19 nt, Artificial Sequence
  Description of Artificial Sequence: Synthetic oligonucleotide
aguucgccaaguuugaagc

SEQ ID NO: 1525883 - RNA, 19 nt, Artificial Sequence
  Description of Artificial Sequence: Synthetic oligonucleotide
aaaucuauucuucaacuga

SEQ ID NO: 1525884 - RNA, 19 nt, Artificial Sequence
  Description of Artificial Sequence: Synthetic oligonucleotide
cacaugguuauuuaaaugc

SEQ ID NO: 1525885 - RNA, 19 nt, Artificial Sequence
  Description of Artificial Sequence: Synthetic oligonucleotide
aaaagcuacauauugguua

SEQ ID NO: 1525886 - RNA, 19 nt, Artificial Sequence
  Description of Artificial Sequence: Synthetic oligonucleotide
aacuuacacugucaugucc

SEQ ID NO: 1525887 - RNA, 19 nt, Artificial Sequence
  Description of Artificial Sequence: Synthetic oligonucleotide
gacaacugcagauagcuag

SEQ ID NO: 1525888 - RNA, 19 nt, Artificial Sequence
  Description of Artificial Sequence: Synthetic oligonucleotide
ugaaguuuuagcaccaugu

SEQ ID NO: 1525889 - RNA, 19 nt, Artificial Sequence
  Description of Artificial Sequence: Synthetic oligonucleotide
ucuauaaauugacaacugc

SEQ ID NO: 1525890 - RNA, 19 nt, Artificial Sequence
  Description of Artificial Sequence: Synthetic oligonucleotide
uuuagaaugcugaagcacu

SEQ ID NO: 1525891 - RNA, 19 nt, Artificial Sequence
  Description of Artificial Sequence: Synthetic oligonucleotide
acacggauuacccaguucg

SEQ ID NO: 1525892 - RNA, 19 nt, Artificial Sequence
  Description of Artificial Sequence: Synthetic oligonucleotide
uaaugggauaguaaaacug

SEQ ID NO: 1525893 - RNA, 19 nt, Artificial Sequence
  Description of Artificial Sequence: Synthetic oligonucleotide
uuaaacuuguuuauacaug

SEQ ID NO: 1525894 - RNA, 19 nt, Artificial Sequence
  Description of Artificial Sequence: Synthetic oligonucleotide
uaaaguagcuuaaugagua

SEQ ID NO: 1525895 - RNA, 19 nt, Artificial Sequence
  Description of Artificial Sequence: Synthetic oligonucleotide
ucaguuuugaaguuuuagc

SEQ ID NO: 1525896 - RNA, 19 nt, Artificial Sequence
  Description of Artificial Sequence: Synthetic oligonucleotide
uuuauucugugacaggucu

SEQ ID NO: 1525897 - RNA, 19 nt, Artificial Sequence
  Description of Artificial Sequence: Synthetic oligonucleotide
auaguagugcaagauaggc

SEQ ID NO: 1525898 - RNA, 19 nt, Artificial Sequence
  Description of Artificial Sequence: Synthetic oligonucleotide
gaaaacauaguagugcaag

SEQ ID NO: 1525899 - RNA, 19 nt, Artificial Sequence
  Description of Artificial Sequence: Synthetic oligonucleotide
uaaauuggcauguaaagua

SEQ ID NO: 1525900 - RNA, 19 nt, Artificial Sequence
  Description of Artificial Sequence: Synthetic oligonucleotide
uuauaacacacacuauugc

SEQ ID NO: 1525901 - RNA, 19 nt, Artificial Sequence
  Description of Artificial Sequence: Synthetic oligonucleotide
uauuugacccauaacaaaa

SEQ ID NO: 1525902 - RNA, 19 nt, Artificial Sequence
  Description of Artificial Sequence: Synthetic oligonucleotide
uaaguauagguuuuagucu

SEQ ID NO: 1525903 - RNA, 19 nt, Artificial Sequence
  Description of Artificial Sequence: Synthetic oligonucleotide
uauccuuucuauaaauuga

SEQ ID NO: 1525904 - RNA, 19 nt, Artificial Sequence
  Description of Artificial Sequence: Synthetic oligonucleotide
aucagagaucugcauaucc

SEQ ID NO: 1525905 - RNA, 19 nt, Artificial Sequence
  Description of Artificial Sequence: Synthetic oligonucleotide
auguaaaguagcuuaauga

SEQ ID NO: 1525906 - RNA, 19 nt, Artificial Sequence
  Description of Artificial Sequence: Synthetic oligonucleotide
uccaacaaccuacuagugg

SEQ ID NO: 1525907 - RNA, 19 nt, Artificial Sequence
  Description of Artificial Sequence: Synthetic oligonucleotide
gucuaauccuuuuagaaug

SEQ ID NO: 1525908 - RNA, 19 nt, Artificial Sequence
  Description of Artificial Sequence: Synthetic oligonucleotide
uauugcucgucaaauauac

SEQ ID NO: 1525909 - RNA, 19 nt, Artificial Sequence
  Description of Artificial Sequence: Synthetic oligonucleotide
ucaugcuaaucccauagcc

SEQ ID NO: 1525910 - RNA, 19 nt, Artificial Sequence
  Description of Artificial Sequence: Synthetic oligonucleotide
aaagcuaaauguggcaaac

SEQ ID NO: 1525911 - RNA, 19 nt, Artificial Sequence
  Description of Artificial Sequence: Synthetic oligonucleotide
gacaggucugaucugauag

SEQ ID NO: 1525912 - RNA, 19 nt, Artificial Sequence
  Description of Artificial Sequence: Synthetic oligonucleotide
aguggauuaauguaaggca

SEQ ID NO: 1525913 - RNA, 19 nt, Artificial Sequence
  Description of Artificial Sequence: Synthetic oligonucleotide
uagguuuuagucuccagag

SEQ ID NO: 1525914 - RNA, 19 nt, Artificial Sequence
  Description of Artificial Sequence: Synthetic oligonucleotide
uuaauguaaggcauuaaua

SEQ ID NO: 1525915 - RNA, 19 nt, Artificial Sequence
  Description of Artificial Sequence: Synthetic oligonucleotide
auagcuaggaacucaaggu

SEQ ID NO: 1525916 - RNA, 19 nt, Artificial Sequence
  Description of Artificial Sequence: Synthetic oligonucleotide
gaauuaggacugcauaggg

SEQ ID NO: 1525917 - RNA, 19 nt, Artificial Sequence
  Description of Artificial Sequence: Synthetic oligonucleotide
ucgucaaauauacauguac

SEQ ID NO: 1525918 - RNA, 19 nt, Artificial Sequence
  Description of Artificial Sequence: Synthetic oligonucleotide
aaucccauagcccuccuca

SEQ ID NO: 1525919 - RNA, 19 nt, Artificial Sequence
  Description of Artificial Sequence: Synthetic oligonucleotide
agaaaucuauucuucaacu

SEQ ID NO: 1525920 - RNA, 19 nt, Artificial Sequence
  Description of Artificial Sequence: Synthetic oligonucleotide
cauagugaaauuuauuuga

SEQ ID NO: 1525921 - RNA, 19 nt, Artificial Sequence
  Description of Artificial Sequence: Synthetic oligonucleotide
acauagugaaauuuauuug

SEQ ID NO: 1525922 - RNA, 19 nt, Artificial Sequence
  Description of Artificial Sequence: Synthetic oligonucleotide
agcuaaauguggcaaacag

SEQ ID NO: 1525923 - RNA, 19 nt, Artificial Sequence
  Description of Artificial Sequence: Synthetic oligonucleotide
gaggcuguaacuuuuguca

SEQ ID NO: 1525924 - RNA, 19 nt, Artificial Sequence
  Description of Artificial Sequence: Synthetic oligonucleotide
uaaugaguagucuaauccu

SEQ ID NO: 1525925 - RNA, 19 nt, Artificial Sequence
  Description of Artificial Sequence: Synthetic oligonucleotide
cuuaaugggauaguaaaac

SEQ ID NO: 1525926 - RNA, 19 nt, Artificial Sequence
  Description of Artificial Sequence: Synthetic oligonucleotide
guagaaaggagacauugug

SEQ ID NO: 1525927 - RNA, 19 nt, Artificial Sequence
  Description of Artificial Sequence: Synthetic oligonucleotide
uacuaauaaguauagguuu

SEQ ID NO: 1525928 - RNA, 19 nt, Artificial Sequence
  Description of Artificial Sequence: Synthetic oligonucleotide
ugguuagaguaacugaggc

SEQ ID NO: 1525929 - RNA, 19 nt, Artificial Sequence
  Description of Artificial Sequence: Synthetic oligonucleotide
uguuagaaaucuauucuuc

SEQ ID NO: 1525930 - RNA, 19 nt, Artificial Sequence
  Description of Artificial Sequence: Synthetic oligonucleotide
uuaauauuguaguacuuua

SEQ ID NO: 1525931 - RNA, 19 nt, Artificial Sequence
  Description of Artificial Sequence: Synthetic oligonucleotide
aauuggcauguaaaguagc

SEQ ID NO: 1525932 - RNA, 19 nt, Artificial Sequence
  Description of Artificial Sequence: Synthetic oligonucleotide
uuaaugggauaguaaaacu

SEQ ID NO: 1525933 - RNA, 19 nt, Artificial Sequence
  Description of Artificial Sequence: Synthetic oligonucleotide
uacuaguggauuaauguaa

SEQ ID NO: 1525934 - RNA, 19 nt, Artificial Sequence
  Description of Artificial Sequence: Synthetic oligonucleotide
cagaauuaggacugcauag

SEQ ID NO: 1525935 - RNA, 19 nt, Artificial Sequence
  Description of Artificial Sequence: Synthetic oligonucleotide
auaaauugacaacugcaga

SEQ ID NO: 1525936 - RNA, 19 nt, Artificial Sequence
  Description of Artificial Sequence: Synthetic oligonucleotide
acucaugcuaaucccauag

SEQ ID NO: 1525937 - RNA, 19 nt, Artificial Sequence
  Description of Artificial Sequence: Synthetic oligonucleotide
uuaguguuacuaauaagua

SEQ ID NO: 1525938 - RNA, 19 nt, Artificial Sequence
  Description of Artificial Sequence: Synthetic oligonucleotide
ucugcauauccagacacgg

SEQ ID NO: 1525939 - RNA, 19 nt, Artificial Sequence
  Description of Artificial Sequence: Synthetic oligonucleotide
acauaguagugcaagauag

SEQ ID NO: 1525940 - RNA, 19 nt, Artificial Sequence
  Description of Artificial Sequence: Synthetic oligonucleotide
aaaguagcuuaaugaguag

SEQ ID NO: 1525941 - RNA, 19 nt, Artificial Sequence
  Description of Artificial Sequence: Synthetic oligonucleotide
uauuucauccgcugcugcg

SEQ ID NO: 1525942 - RNA, 19 nt, Artificial Sequence
  Description of Artificial Sequence: Synthetic oligonucleotide
aaauuggcauguaaaguag

SEQ ID NO: 1525943 - RNA, 19 nt, Artificial Sequence
  Description of Artificial Sequence: Synthetic oligonucleotide
uagucuaauccuuuuagaa

SEQ ID NO: 1525944 - RNA, 19 nt, Artificial Sequence
  Description of Artificial Sequence: Synthetic oligonucleotide
agaauuaggacugcauagg

SEQ ID NO: 1525945 - RNA, 19 nt, Artificial Sequence
  Description of Artificial Sequence: Synthetic oligonucleotide
auagguuuuagucuccaga

SEQ ID NO: 1525946 - RNA, 19 nt, Artificial Sequence
  Description of Artificial Sequence: Synthetic oligonucleotide
uuguuaguguuacuaauaa

SEQ ID NO: 1525947 - RNA, 19 nt, Artificial Sequence
  Description of Artificial Sequence: Synthetic oligonucleotide
ucuaauccuuuuagaaugc

SEQ ID NO: 1525948 - RNA, 19 nt, Artificial Sequence
  Description of Artificial Sequence: Synthetic oligonucleotide
uguuaguguuacuaauaag

SEQ ID NO: 1525949 - RNA, 19 nt, Artificial Sequence
  Description of Artificial Sequence: Synthetic oligonucleotide
aaggagacauugugggagg

SEQ ID NO: 1525950 - RNA, 19 nt, Artificial Sequence
  Description of Artificial Sequence: Synthetic oligonucleotide
cuauuucuguacuucagug

SEQ ID NO: 1525951 - RNA, 19 nt, Artificial Sequence
  Description of Artificial Sequence: Synthetic oligonucleotide
aauauagugcaagauuuau

SEQ ID NO: 1525952 - RNA, 19 nt, Artificial Sequence
  Description of Artificial Sequence: Synthetic oligonucleotide
uagugcaagauuuaugaau

SEQ ID NO: 1525953 - RNA, 19 nt, Artificial Sequence
  Description of Artificial Sequence: Synthetic oligonucleotide
acuauugcucgucaaauau

SEQ ID NO: 1525954 - RNA, 19 nt, Artificial Sequence
  Description of Artificial Sequence: Synthetic oligonucleotide
aacauaguagugcaagaua

SEQ ID NO: 1525955 - RNA, 19 nt, Artificial Sequence
  Description of Artificial Sequence: Synthetic oligonucleotide
uagugaaauuuauuugacc

SEQ ID NO: 1525956 - RNA, 19 nt, Artificial Sequence
  Description of Artificial Sequence: Synthetic oligonucleotide
uuauuugacccauaacaaa

SEQ ID NO: 1525957 - RNA, 19 nt, Artificial Sequence
  Description of Artificial Sequence: Synthetic oligonucleotide
uaacuuuacaaaugagacu

SEQ ID NO: 1525958 - RNA, 19 nt, Artificial Sequence
  Description of Artificial Sequence: Synthetic oligonucleotide
guacauauaccacugauua

SEQ ID NO: 1525959 - RNA, 19 nt, Artificial Sequence
  Description of Artificial Sequence: Synthetic oligonucleotide
uaguaaaacugcaaaugaa

SEQ ID NO: 1525960 - RNA, 19 nt, Artificial Sequence
  Description of Artificial Sequence: Synthetic oligonucleotide
uugcucgucaaauauacau

SEQ ID NO: 1525961 - RNA, 19 nt, Artificial Sequence
  Description of Artificial Sequence: Synthetic oligonucleotide
ugcucgucaaauauacaug

SEQ ID NO: 1525962 - RNA, 19 nt, Artificial Sequence
  Description of Artificial Sequence: Synthetic oligonucleotide
accacauaacuuuacaaau

SEQ ID NO: 1525963 - RNA, 19 nt, Artificial Sequence
  Description of Artificial Sequence: Synthetic oligonucleotide
ccuuuuagaaugcugaagc

SEQ ID NO: 1525964 - RNA, 19 nt, Artificial Sequence
  Description of Artificial Sequence: Synthetic oligonucleotide
ucagugggcuacaucauca

SEQ ID NO: 1525965 - RNA, 19 nt, Artificial Sequence
  Description of Artificial Sequence: Synthetic oligonucleotide
guuaguguuacuaauaagu

SEQ ID NO: 1525966 - RNA, 19 nt, Artificial Sequence
  Description of Artificial Sequence: Synthetic oligonucleotide
aaacaccuuuguaaaaguc

SEQ ID NO: 1525967 - RNA, 19 nt, Artificial Sequence
  Description of Artificial Sequence: Synthetic oligonucleotide
auaaauuggcauguaaagu

SEQ ID NO: 1525968 - RNA, 19 nt, Artificial Sequence
  Description of Artificial Sequence: Synthetic oligonucleotide
acauauaccacugauuaau

SEQ ID NO: 1525969 - RNA, 19 nt, Artificial Sequence
  Description of Artificial Sequence: Synthetic oligonucleotide
acugauuaaucaggugucc

SEQ ID NO: 1525970 - RNA, 19 nt, Artificial Sequence
  Description of Artificial Sequence: Synthetic oligonucleotide
uguacauauaccacugauu

SEQ ID NO: 1525971 - RNA, 19 nt, Artificial Sequence
  Description of Artificial Sequence: Synthetic oligonucleotide
uuuuagugcacagaccgga

SEQ ID NO: 1525972 - RNA, 19 nt, Artificial Sequence
  Description of Artificial Sequence: Synthetic oligonucleotide
aguagcuuaaugaguaguc

SEQ ID NO: 1525973 - RNA, 19 nt, Artificial Sequence
  Description of Artificial Sequence: Synthetic oligonucleotide
gaggcaaacagucuuaaua

SEQ ID NO: 1525974 - RNA, 19 nt, Artificial Sequence
  Description of Artificial Sequence: Synthetic oligonucleotide
ugaaauuuauuugacccau

SEQ ID NO: 1525975 - RNA, 19 nt, Artificial Sequence
  Description of Artificial Sequence: Synthetic oligonucleotide
agucuaauccuuuuagaau

SEQ ID NO: 1525976 - RNA, 19 nt, Artificial Sequence
  Description of Artificial Sequence: Synthetic oligonucleotide
auauaccacugauuaauca

SEQ ID NO: 1525977 - RNA, 19 nt, Artificial Sequence
  Description of Artificial Sequence: Synthetic oligonucleotide
aguguuacuaauaaguaua

SEQ ID NO: 1525978 - RNA, 19 nt, Artificial Sequence
  Description of Artificial Sequence: Synthetic oligonucleotide
gcauuaauaaauuggcaug

SEQ ID NO: 1525979 - RNA, 19 nt, Artificial Sequence
  Description of Artificial Sequence: Synthetic oligonucleotide
uuagugcacagaccggaag

SEQ ID NO: 1525980 - RNA, 19 nt, Artificial Sequence
  Description of Artificial Sequence: Synthetic oligonucleotide
aaacauaguagugcaagau

SEQ ID NO: 1525981 - RNA, 19 nt, Artificial Sequence
  Description of Artificial Sequence: Synthetic oligonucleotide
auccuuucuauaaauugac

SEQ ID NO: 1525982 - RNA, 19 nt, Artificial Sequence
  Description of Artificial Sequence: Synthetic oligonucleotide
ugucuauuucuguacuuca

SEQ ID NO: 1525983 - RNA, 19 nt, Artificial Sequence
  Description of Artificial Sequence: Synthetic oligonucleotide
cuuguuuauacauggcuca

SEQ ID NO: 1525984 - RNA, 19 nt, Artificial Sequence
  Description of Artificial Sequence: Synthetic oligonucleotide
uggcauguaaaguagcuua

SEQ ID NO: 1525985 - RNA, 19 nt, Artificial Sequence
  Description of Artificial Sequence: Synthetic oligonucleotide
uaguguuacuaauaaguau

SEQ ID NO: 1525986 - RNA, 19 nt, Artificial Sequence
  Description of Artificial Sequence: Synthetic oligonucleotide
uguuguuaguguuacuaau

SEQ ID NO: 1525987 - RNA, 19 nt, Artificial Sequence
  Description of Artificial Sequence: Synthetic oligonucleotide
auaccacugauuaaucagg

SEQ ID NO: 1525988 - RNA, 19 nt, Artificial Sequence
  Description of Artificial Sequence: Synthetic oligonucleotide
ugaaagcuaaauguggcaa

SEQ ID NO: 1525989 - RNA, 19 nt, Artificial Sequence
  Description of Artificial Sequence: Synthetic oligonucleotide
gcaagaucuggucagaaug

SEQ ID NO: 1525990 - RNA, 19 nt, Artificial Sequence
  Description of Artificial Sequence: Synthetic oligonucleotide
uacagaauuuuagugcaca

SEQ ID NO: 1525991 - RNA, 19 nt, Artificial Sequence
  Description of Artificial Sequence: Synthetic oligonucleotide
aaucuauucuucaacugaa

SEQ ID NO: 1525992 - RNA, 19 nt, Artificial Sequence
  Description of Artificial Sequence: Synthetic oligonucleotide
cagagaucugcauauccag

SEQ ID NO: 1525993 - RNA, 19 nt, Artificial Sequence
  Description of Artificial Sequence: Synthetic oligonucleotide
uccaccacauaacuuuaca

SEQ ID NO: 1525994 - RNA, 19 nt, Artificial Sequence
  Description of Artificial Sequence: Synthetic oligonucleotide
uccuuuuagaaugcugaag

SEQ ID NO: 1525995 - RNA, 19 nt, Artificial Sequence
  Description of Artificial Sequence: Synthetic oligonucleotide
cuaguggauuaauguaagg

SEQ ID NO: 1525996 - RNA, 19 nt, Artificial Sequence
  Description of Artificial Sequence: Synthetic oligonucleotide
ggucugaucugauaggcag

SEQ ID NO: 1525997 - RNA, 19 nt, Artificial Sequence
  Description of Artificial Sequence: Synthetic oligonucleotide
uuaaucagguguccaucca

SEQ ID NO: 1525998 - RNA, 19 nt, Artificial Sequence
  Description of Artificial Sequence: Synthetic oligonucleotide
auguuagaaaucuauucuu

SEQ ID NO: 1525999 - RNA, 19 nt, Artificial Sequence
  Description of Artificial Sequence: Synthetic oligonucleotide
ucgccaaguuugaagcgcg

SEQ ID NO: 1526000 - RNA, 19 nt, Artificial Sequence
  Description of Artificial Sequence: Synthetic oligonucleotide
aguuuuagcaccaugugua

SEQ ID NO: 1526001 - RNA, 19 nt, Artificial Sequence
  Description of Artificial Sequence: Synthetic oligonucleotide
ugcacccaauauuuuaaca

SEQ ID NO: 1526002 - RNA, 19 nt, Artificial Sequence
  Description of Artificial Sequence: Synthetic oligonucleotide
cugggaacuuucaaggcac

SEQ ID NO: 1526003 - RNA, 19 nt, Artificial Sequence
  Description of Artificial Sequence: Synthetic oligonucleotide
ugaggcaacagcccacaca

SEQ ID NO: 1526004 - RNA, 19 nt, Artificial Sequence
  Description of Artificial Sequence: Synthetic oligonucleotide
uuauucugugacaggucug

SEQ ID NO: 1526005 - RNA, 19 nt, Artificial Sequence
  Description of Artificial Sequence: Synthetic oligonucleotide
auguaaggcauuaauaaau

SEQ ID NO: 1526006 - RNA, 19 nt, Artificial Sequence
  Description of Artificial Sequence: Synthetic oligonucleotide
gaacuuucaaggcacuuaa

SEQ ID NO: 1526007 - RNA, 19 nt, Artificial Sequence
  Description of Artificial Sequence: Synthetic oligonucleotide
aaauugacaacugcagaua

SEQ ID NO: 1526008 - RNA, 19 nt, Artificial Sequence
  Description of Artificial Sequence: Synthetic oligonucleotide
gauuuauucugugacaggu

SEQ ID NO: 1526009 - RNA, 19 nt, Artificial Sequence
  Description of Artificial Sequence: Synthetic oligonucleotide
aauuaggacugcauaggga

SEQ ID NO: 1526010 - RNA, 19 nt, Artificial Sequence
  Description of Artificial Sequence: Synthetic oligonucleotide
auuucauccgcugcugcgg

SEQ ID NO: 1526011 - RNA, 19 nt, Artificial Sequence
  Description of Artificial Sequence: Synthetic oligonucleotide
augcacccaauauuuuaac

SEQ ID NO: 1526012 - RNA, 19 nt, Artificial Sequence
  Description of Artificial Sequence: Synthetic oligonucleotide
ugggauaguaaaacugcaa

SEQ ID NO: 1526013 - RNA, 19 nt, Artificial Sequence
  Description of Artificial Sequence: Synthetic oligonucleotide
ugcaaaguucauauuucau

SEQ ID NO: 1526014 - RNA, 19 nt, Artificial Sequence
  Description of Artificial Sequence: Synthetic oligonucleotide
agcuacauauugguuagag

SEQ ID NO: 1526015 - RNA, 19 nt, Artificial Sequence
  Description of Artificial Sequence: Synthetic oligonucleotide
gugaaauuuauuugaccca

SEQ ID NO: 1526016 - RNA, 19 nt, Artificial Sequence
  Description of Artificial Sequence: Synthetic oligonucleotide
agugggcuacaucaucagg

SEQ ID NO: 1526017 - RNA, 19 nt, Artificial Sequence
  Description of Artificial Sequence: Synthetic oligonucleotide
uuguuguuaguguuacuaa

SEQ ID NO: 1526018 - RNA, 19 nt, Artificial Sequence
  Description of Artificial Sequence: Synthetic oligonucleotide
ucaugcacccaauauuuua

SEQ ID NO: 1526019 - RNA, 19 nt, Artificial Sequence
  Description of Artificial Sequence: Synthetic oligonucleotide
uuugaagcgcgcaggggcu

SEQ ID NO: 1526020 - RNA, 19 nt, Artificial Sequence
  Description of Artificial Sequence: Synthetic oligonucleotide
ucuuaauauuguaguacuu

SEQ ID NO: 1526021 - RNA, 19 nt, Artificial Sequence
  Description of Artificial Sequence: Synthetic oligonucleotide
acuaguggauuaauguaag

SEQ ID NO: 1526022 - RNA, 19 nt, Artificial Sequence
  Description of Artificial Sequence: Synthetic oligonucleotide
aaauaaacucaugcaccca

SEQ ID NO: 1526023 - RNA, 19 nt, Artificial Sequence
  Description of Artificial Sequence: Synthetic oligonucleotide
auuugacccauaacaaaag

SEQ ID NO: 1526024 - RNA, 19 nt, Artificial Sequence
  Description of Artificial Sequence: Synthetic oligonucleotide
acggauuacccaguucgcc

SEQ ID NO: 1526025 - RNA, 19 nt, Artificial Sequence
  Description of Artificial Sequence: Synthetic oligonucleotide
agugcaagauuuaugaaua

SEQ ID NO: 1526026 - RNA, 19 nt, Artificial Sequence
  Description of Artificial Sequence: Synthetic oligonucleotide
cauauaccacugauuaauc

SEQ ID NO: 1526027 - RNA, 19 nt, Artificial Sequence
  Description of Artificial Sequence: Synthetic oligonucleotide
uaaacucaugcacccaaua

SEQ ID NO: 1526028 - RNA, 19 nt, Artificial Sequence
  Description of Artificial Sequence: Synthetic oligonucleotide
uagcuuaaugaguagucua

SEQ ID NO: 1526029 - RNA, 19 nt, Artificial Sequence
  Description of Artificial Sequence: Synthetic oligonucleotide
cugcauagggacucuacug

SEQ ID NO: 1526030 - RNA, 19 nt, Artificial Sequence
  Description of Artificial Sequence: Synthetic oligonucleotide
agauaggcagacaugguca

SEQ ID NO: 1526031 - RNA, 19 nt, Artificial Sequence
  Description of Artificial Sequence: Synthetic oligonucleotide
uucgccaaguuugaagcgc

SEQ ID NO: 1526032 - RNA, 19 nt, Artificial Sequence
  Description of Artificial Sequence: Synthetic oligonucleotide
uuagaguaacugaggcugu

SEQ ID NO: 1526033 - RNA, 19 nt, Artificial Sequence
  Description of Artificial Sequence: Synthetic oligonucleotide
gacauugugggaggugagg

SEQ ID NO: 1526034 - RNA, 19 nt, Artificial Sequence
  Description of Artificial Sequence: Synthetic oligonucleotide
caccauguguagaaaggag

SEQ ID NO: 1526035 - RNA, 19 nt, Artificial Sequence
  Description of Artificial Sequence: Synthetic oligonucleotide
caguucgccaaguuugaag

SEQ ID NO: 1526036 - RNA, 19 nt, Artificial Sequence
  Description of Artificial Sequence: Synthetic oligonucleotide
gaaagcuaaauguggcaaa

SEQ ID NO: 1526037 - RNA, 19 nt, Artificial Sequence
  Description of Artificial Sequence: Synthetic oligonucleotide
gggauuuauucugugacag

SEQ ID NO: 1526038 - RNA, 19 nt, Artificial Sequence
  Description of Artificial Sequence: Synthetic oligonucleotide
uuccaacuuacacugucau

SEQ ID NO: 1526039 - RNA, 19 nt, Artificial Sequence
  Description of Artificial Sequence: Synthetic oligonucleotide
uccaacuuacacugucaug

SEQ ID NO: 1526040 - RNA, 19 nt, Artificial Sequence
  Description of Artificial Sequence: Synthetic oligonucleotide
uggauuaauguaaggcauu

SEQ ID NO: 1526041 - RNA, 19 nt, Artificial Sequence
  Description of Artificial Sequence: Synthetic oligonucleotide
acuuacacugucaugucca

SEQ ID NO: 1526042 - RNA, 19 nt, Artificial Sequence
  Description of Artificial Sequence: Synthetic oligonucleotide
ggguccaacaaccuacuag

SEQ ID NO: 1526043 - RNA, 19 nt, Artificial Sequence
  Description of Artificial Sequence: Synthetic oligonucleotide
uuaggacugcauagggacu

SEQ ID NO: 1526044 - RNA, 19 nt, Artificial Sequence
  Description of Artificial Sequence: Synthetic oligonucleotide
guagucuaauccuuuuaga

SEQ ID NO: 1526045 - RNA, 19 nt, Artificial Sequence
  Description of Artificial Sequence: Synthetic oligonucleotide
cuuuuagaaugcugaagca

SEQ ID NO: 1526046 - RNA, 19 nt, Artificial Sequence
  Description of Artificial Sequence: Synthetic oligonucleotide
uucuccccgggucaccccg

SEQ ID NO: 1526047 - RNA, 19 nt, Artificial Sequence
  Description of Artificial Sequence: Synthetic oligonucleotide
uuuagugcacagaccggaa

SEQ ID NO: 1526048 - RNA, 19 nt, Artificial Sequence
  Description of Artificial Sequence: Synthetic oligonucleotide
gcuaaauguggcaaacagg

SEQ ID NO: 1526049 - RNA, 19 nt, Artificial Sequence
  Description of Artificial Sequence: Synthetic oligonucleotide
guucgccaaguuugaagcg

SEQ ID NO: 1526050 - RNA, 19 nt, Artificial Sequence
  Description of Artificial Sequence: Synthetic oligonucleotide
gagacauugugggagguga

SEQ ID NO: 1526051 - RNA, 19 nt, Artificial Sequence
  Description of Artificial Sequence: Synthetic oligonucleotide
acaaccuacuaguggauua

SEQ ID NO: 1526052 - RNA, 19 nt, Artificial Sequence
  Description of Artificial Sequence: Synthetic oligonucleotide
auguguacucaugcuaauc

SEQ ID NO: 1526053 - RNA, 19 nt, Artificial Sequence
  Description of Artificial Sequence: Synthetic oligonucleotide
ucaaggcacuuaaugggau

SEQ ID NO: 1526054 - RNA, 19 nt, Artificial Sequence
  Description of Artificial Sequence: Synthetic oligonucleotide
acuaauaaguauagguuuu

SEQ ID NO: 1526055 - RNA, 19 nt, Artificial Sequence
  Description of Artificial Sequence: Synthetic oligonucleotide
aaugcaagaucuggucaga

SEQ ID NO: 1526056 - RNA, 19 nt, Artificial Sequence
  Description of Artificial Sequence: Synthetic oligonucleotide
auuuuagugcacagaccgg

SEQ ID NO: 1526057 - RNA, 19 nt, Artificial Sequence
  Description of Artificial Sequence: Synthetic oligonucleotide
cacccaauauuuuaacaga

SEQ ID NO: 1526058 - RNA, 19 nt, Artificial Sequence
  Description of Artificial Sequence: Synthetic oligonucleotide
ggauuuauucugugacagg

SEQ ID NO: 1526059 - RNA, 19 nt, Artificial Sequence
  Description of Artificial Sequence: Synthetic oligonucleotide
uucuguacuucagugcuuc

SEQ ID NO: 1526060 - RNA, 19 nt, Artificial Sequence
  Description of Artificial Sequence: Synthetic oligonucleotide
acaugguuauuuaaaugca

SEQ ID NO: 1526061 - RNA, 19 nt, Artificial Sequence
  Description of Artificial Sequence: Synthetic oligonucleotide
uucugugguaaauguuaga

SEQ ID NO: 1526062 - RNA, 19 nt, Artificial Sequence
  Description of Artificial Sequence: Synthetic oligonucleotide
ucaccgucuugcaaaguuc

SEQ ID NO: 1526063 - RNA, 19 nt, Artificial Sequence
  Description of Artificial Sequence: Synthetic oligonucleotide
aacugcagauagcuaggaa

SEQ ID NO: 1526064 - RNA, 19 nt, Artificial Sequence
  Description of Artificial Sequence: Synthetic oligonucleotide
aacacacacuauugcucgu

SEQ ID NO: 1526065 - RNA, 19 nt, Artificial Sequence
  Description of Artificial Sequence: Synthetic oligonucleotide
uuuuagcaccauguguaga

SEQ ID NO: 1526066 - RNA, 19 nt, Artificial Sequence
  Description of Artificial Sequence: Synthetic oligonucleotide
cccgccuuuaaaaucagag

SEQ ID NO: 1526067 - RNA, 19 nt, Artificial Sequence
  Description of Artificial Sequence: Synthetic oligonucleotide
accacugauuaaucaggug

SEQ ID NO: 1526068 - RNA, 19 nt, Artificial Sequence
  Description of Artificial Sequence: Synthetic oligonucleotide
uuuagucuccagaggcaaa

SEQ ID NO: 1526069 - RNA, 19 nt, Artificial Sequence
  Description of Artificial Sequence: Synthetic oligonucleotide
aagcuaaauguggcaaaca

SEQ ID NO: 1526070 - RNA, 19 nt, Artificial Sequence
  Description of Artificial Sequence: Synthetic oligonucleotide
cuacuaguggauuaaugua

SEQ ID NO: 1526071 - RNA, 19 nt, Artificial Sequence
  Description of Artificial Sequence: Synthetic oligonucleotide
cauauuucauccgcugcug

SEQ ID NO: 1526072 - RNA, 19 nt, Artificial Sequence
  Description of Artificial Sequence: Synthetic oligonucleotide
ugaguagucuaauccuuuu

SEQ ID NO: 1526073 - RNA, 19 nt, Artificial Sequence
  Description of Artificial Sequence: Synthetic oligonucleotide
gggauaguaaaacugcaaa

SEQ ID NO: 1526074 - RNA, 19 nt, Artificial Sequence
  Description of Artificial Sequence: Synthetic oligonucleotide
cugucuauuucuguacuuc

SEQ ID NO: 1526075 - RNA, 19 nt, Artificial Sequence
  Description of Artificial Sequence: Synthetic oligonucleotide
ggcauuaauaaauuggcau

SEQ ID NO: 1526076 - RNA, 19 nt, Artificial Sequence
  Description of Artificial Sequence: Synthetic oligonucleotide
gaggugaggcaacagccca

SEQ ID NO: 1526077 - RNA, 19 nt, Artificial Sequence
  Description of Artificial Sequence: Synthetic oligonucleotide
acucaugcacccaauauuu

SEQ ID NO: 1526078 - RNA, 19 nt, Artificial Sequence
  Description of Artificial Sequence: Synthetic oligonucleotide
caggcggcgggauuuauuc

SEQ ID NO: 1526079 - RNA, 19 nt, Artificial Sequence
  Description of Artificial Sequence: Synthetic oligonucleotide
aguuugaagcgcgcagggg

SEQ ID NO: 1526080 - RNA, 19 nt, Artificial Sequence
  Description of Artificial Sequence: Synthetic oligonucleotide
ugcaagaucuggucagaau

SEQ ID NO: 1526081 - RNA, 19 nt, Artificial Sequence
  Description of Artificial Sequence: Synthetic oligonucleotide
acacacacuauugcucguc

SEQ ID NO: 1526082 - RNA, 19 nt, Artificial Sequence
  Description of Artificial Sequence: Synthetic oligonucleotide
ccuuucuauaaauugacaa

SEQ ID NO: 1526083 - RNA, 19 nt, Artificial Sequence
  Description of Artificial Sequence: Synthetic oligonucleotide
aacucaagguacagaauuu

SEQ ID NO: 1526084 - RNA, 19 nt, Artificial Sequence
  Description of Artificial Sequence: Synthetic oligonucleotide
ugggcuacaucaucaggau

SEQ ID NO: 1526085 - RNA, 19 nt, Artificial Sequence
  Description of Artificial Sequence: Synthetic oligonucleotide
aguucauauuucauccgcu

SEQ ID NO: 1526086 - RNA, 19 nt, Artificial Sequence
  Description of Artificial Sequence: Synthetic oligonucleotide
uguguagaaaggagacauu

SEQ ID NO: 1526087 - RNA, 19 nt, Artificial Sequence
  Description of Artificial Sequence: Synthetic oligonucleotide
acuuaaugggauaguaaaa

SEQ ID NO: 1526088 - RNA, 19 nt, Artificial Sequence
  Description of Artificial Sequence: Synthetic oligonucleotide
uccagugaacauucuugaa

SEQ ID NO: 1526089 - RNA, 19 nt, Artificial Sequence
  Description of Artificial Sequence: Synthetic oligonucleotide
aucugcauauccagacacg

SEQ ID NO: 1526090 - RNA, 19 nt, Artificial Sequence
  Description of Artificial Sequence: Synthetic oligonucleotide
gcauagggacucuacuggg

SEQ ID NO: 1526091 - RNA, 19 nt, Artificial Sequence
  Description of Artificial Sequence: Synthetic oligonucleotide
cagaccggaaggacucugg

SEQ ID NO: 1526092 - RNA, 19 nt, Artificial Sequence
  Description of Artificial Sequence: Synthetic oligonucleotide
uuccaccacauaacuuuac

SEQ ID NO: 1526093 - RNA, 19 nt, Artificial Sequence
  Description of Artificial Sequence: Synthetic oligonucleotide
agcuuaaugaguagucuaa

SEQ ID NO: 1526094 - RNA, 19 nt, Artificial Sequence
  Description of Artificial Sequence: Synthetic oligonucleotide
guuguuaguguuacuaaua

SEQ ID NO: 1526095 - RNA, 19 nt, Artificial Sequence
  Description of Artificial Sequence: Synthetic oligonucleotide
acacuauugcucgucaaau

SEQ ID NO: 1526096 - RNA, 19 nt, Artificial Sequence
  Description of Artificial Sequence: Synthetic oligonucleotide
gcgggauuuauucugugac

SEQ ID NO: 1526097 - RNA, 19 nt, Artificial Sequence
  Description of Artificial Sequence: Synthetic oligonucleotide
cacggauuacccaguucgc

SEQ ID NO: 1526098 - RNA, 19 nt, Artificial Sequence
  Description of Artificial Sequence: Synthetic oligonucleotide
guaaaguagcuuaaugagu

SEQ ID NO: 1526099 - RNA, 19 nt, Artificial Sequence
  Description of Artificial Sequence: Synthetic oligonucleotide
gguccaacaaccuacuagu

SEQ ID NO: 1526100 - RNA, 19 nt, Artificial Sequence
  Description of Artificial Sequence: Synthetic oligonucleotide
auugugggaggugaggcaa

SEQ ID NO: 1526101 - RNA, 19 nt, Artificial Sequence
  Description of Artificial Sequence: Synthetic oligonucleotide
aacaaccuacuaguggauu

SEQ ID NO: 1526102 - RNA, 19 nt, Artificial Sequence
  Description of Artificial Sequence: Synthetic oligonucleotide
ugcgggagaagagccgccg

SEQ ID NO: 1526103 - RNA, 19 nt, Artificial Sequence
  Description of Artificial Sequence: Synthetic oligonucleotide
ucaccccgccuuuaaaauc

SEQ ID NO: 1526104 - RNA, 19 nt, Artificial Sequence
  Description of Artificial Sequence: Synthetic oligonucleotide
augagacuuucaaaagucu

SEQ ID NO: 1526105 - RNA, 19 nt, Artificial Sequence
  Description of Artificial Sequence: Synthetic oligonucleotide
caccccgccuuuaaaauca

SEQ ID NO: 1526106 - RNA, 19 nt, Artificial Sequence
  Description of Artificial Sequence: Synthetic oligonucleotide
uacccaguucgccaaguuu

SEQ ID NO: 1526107 - RNA, 19 nt, Artificial Sequence
  Description of Artificial Sequence: Synthetic oligonucleotide
acccaauauuuuaacagaa

SEQ ID NO: 1526108 - RNA, 19 nt, Artificial Sequence
  Description of Artificial Sequence: Synthetic oligonucleotide
augggauaguaaaacugca

SEQ ID NO: 1526109 - RNA, 19 nt, Artificial Sequence
  Description of Artificial Sequence: Synthetic oligonucleotide
ugucagugggcuacaucau

SEQ ID NO: 1526110 - RNA, 19 nt, Artificial Sequence
  Description of Artificial Sequence: Synthetic oligonucleotide
ucccauagcccuccucagu

SEQ ID NO: 1526111 - RNA, 19 nt, Artificial Sequence
  Description of Artificial Sequence: Synthetic oligonucleotide
accuacuaguggauuaaug

SEQ ID NO: 1526112 - RNA, 19 nt, Artificial Sequence
  Description of Artificial Sequence: Synthetic oligonucleotide
ugcuaaucccauagcccuc

SEQ ID NO: 1526113 - RNA, 19 nt, Artificial Sequence
  Description of Artificial Sequence: Synthetic oligonucleotide
cuuaauauuguaguacuuu

SEQ ID NO: 1526114 - RNA, 19 nt, Artificial Sequence
  Description of Artificial Sequence: Synthetic oligonucleotide
auccacaugguuauuuaaa

SEQ ID NO: 1526115 - RNA, 19 nt, Artificial Sequence
  Description of Artificial Sequence: Synthetic oligonucleotide
uguuuauacauggcucauu

SEQ ID NO: 1526116 - RNA, 19 nt, Artificial Sequence
  Description of Artificial Sequence: Synthetic oligonucleotide
uuguuuauacauggcucau

SEQ ID NO: 1526117 - RNA, 19 nt, Artificial Sequence
  Description of Artificial Sequence: Synthetic oligonucleotide
ggcaucaccgucuugcaaa

SEQ ID NO: 1526118 - RNA, 19 nt, Artificial Sequence
  Description of Artificial Sequence: Synthetic oligonucleotide
ugggaacuuucaaggcacu

SEQ ID NO: 1526119 - RNA, 19 nt, Artificial Sequence
  Description of Artificial Sequence: Synthetic oligonucleotide
uuggcauguaaaguagcuu

SEQ ID NO: 1526120 - RNA, 19 nt, Artificial Sequence
  Description of Artificial Sequence: Synthetic oligonucleotide
caccgucuugcaaaguuca

SEQ ID NO: 1526121 - RNA, 19 nt, Artificial Sequence
  Description of Artificial Sequence: Synthetic oligonucleotide
gaccggaaggacucuggca

SEQ ID NO: 1526122 - RNA, 19 nt, Artificial Sequence
  Description of Artificial Sequence: Synthetic oligonucleotide
ugacaacugcagauagcua

SEQ ID NO: 1526123 - RNA, 19 nt, Artificial Sequence
  Description of Artificial Sequence: Synthetic oligonucleotide
cagauagcuaggaacucaa

SEQ ID NO: 1526124 - RNA, 19 nt, Artificial Sequence
  Description of Artificial Sequence: Synthetic oligonucleotide
ccaaguuugaagcgcgcag

SEQ ID NO: 1526125 - RNA, 19 nt, Artificial Sequence
  Description of Artificial Sequence: Synthetic oligonucleotide
cuauugcucgucaaauaua

SEQ ID NO: 1526126 - RNA, 19 nt, Artificial Sequence
  Description of Artificial Sequence: Synthetic oligonucleotide
gaagagccgccgccggugc

SEQ ID NO: 1526127 - RNA, 19 nt, Artificial Sequence
  Description of Artificial Sequence: Synthetic oligonucleotide
guaacugaggcuguaacuu

SEQ ID NO: 1526128 - RNA, 19 nt, Artificial Sequence
  Description of Artificial Sequence: Synthetic oligonucleotide
cacacuauugcucgucaaa

SEQ ID NO: 1526129 - RNA, 19 nt, Artificial Sequence
  Description of Artificial Sequence: Synthetic oligonucleotide
ccuacuaguggauuaaugu

SEQ ID NO: 1526130 - RNA, 19 nt, Artificial Sequence
  Description of Artificial Sequence: Synthetic oligonucleotide
gcuuccaacuuacacuguc

SEQ ID NO: 1526131 - RNA, 19 nt, Artificial Sequence
  Description of Artificial Sequence: Synthetic oligonucleotide
ggcggcgggauuuauucug

SEQ ID NO: 1526132 - RNA, 19 nt, Artificial Sequence
  Description of Artificial Sequence: Synthetic oligonucleotide
ggcucauuugguuuugaaa

SEQ ID NO: 1526133 - RNA, 19 nt, Artificial Sequence
  Description of Artificial Sequence: Synthetic oligonucleotide
ugcagauagcuaggaacuc

SEQ ID NO: 1526134 - RNA, 19 nt, Artificial Sequence
  Description of Artificial Sequence: Synthetic oligonucleotide
uugugggaggugaggcaac

SEQ ID NO: 1526135 - RNA, 19 nt, Artificial Sequence
  Description of Artificial Sequence: Synthetic oligonucleotide
agaggcaaacagucuuaau

SEQ ID NO: 1526136 - RNA, 19 nt, Artificial Sequence
  Description of Artificial Sequence: Synthetic oligonucleotide
gcucgucaaauauacaugu

SEQ ID NO: 1526137 - RNA, 19 nt, Artificial Sequence
  Description of Artificial Sequence: Synthetic oligonucleotide
ggauaguaaaacugcaaau

SEQ ID NO: 1526138 - RNA, 19 nt, Artificial Sequence
  Description of Artificial Sequence: Synthetic oligonucleotide
uuacacugucauguccagu

SEQ ID NO: 1526139 - RNA, 19 nt, Artificial Sequence
  Description of Artificial Sequence: Synthetic oligonucleotide
agauagcuaggaacucaag

SEQ ID NO: 1526140 - RNA, 19 nt, Artificial Sequence
  Description of Artificial Sequence: Synthetic oligonucleotide
aaccuacuaguggauuaau

SEQ ID NO: 1526141 - RNA, 19 nt, Artificial Sequence
  Description of Artificial Sequence: Synthetic oligonucleotide
ccaacuuacacugucaugu

SEQ ID NO: 1526142 - RNA, 19 nt, Artificial Sequence
  Description of Artificial Sequence: Synthetic oligonucleotide
guagcuuaaugaguagucu

SEQ ID NO: 1526143 - RNA, 19 nt, Artificial Sequence
  Description of Artificial Sequence: Synthetic oligonucleotide
guauagguuuuagucucca

SEQ ID NO: 1526144 - RNA, 19 nt, Artificial Sequence
  Description of Artificial Sequence: Synthetic oligonucleotide
guggauuaauguaaggcau

SEQ ID NO: 1526145 - RNA, 19 nt, Artificial Sequence
  Description of Artificial Sequence: Synthetic oligonucleotide
aggugaggcaacagcccac

SEQ ID NO: 1526146 - RNA, 19 nt, Artificial Sequence
  Description of Artificial Sequence: Synthetic oligonucleotide
cauguguagaaaggagaca

SEQ ID NO: 1526147 - RNA, 19 nt, Artificial Sequence
  Description of Artificial Sequence: Synthetic oligonucleotide
agaguaacugaggcuguaa

SEQ ID NO: 1526148 - RNA, 19 nt, Artificial Sequence
  Description of Artificial Sequence: Synthetic oligonucleotide
gauaggcagacauggucau

SEQ ID NO: 1526149 - RNA, 19 nt, Artificial Sequence
  Description of Artificial Sequence: Synthetic oligonucleotide
uggcaucaccgucuugcaa

SEQ ID NO: 1526150 - RNA, 19 nt, Artificial Sequence
  Description of Artificial Sequence: Synthetic oligonucleotide
auaaacucaugcacccaau

SEQ ID NO: 1526151 - RNA, 19 nt, Artificial Sequence
  Description of Artificial Sequence: Synthetic oligonucleotide
uggacgccccgacucuucu

SEQ ID NO: 1526152 - RNA, 19 nt, Artificial Sequence
  Description of Artificial Sequence: Synthetic oligonucleotide
gcaucaccgucuugcaaag

SEQ ID NO: 1526153 - RNA, 19 nt, Artificial Sequence
  Description of Artificial Sequence: Synthetic oligonucleotide
acgccccgacucuucuccc

SEQ ID NO: 1526154 - RNA, 19 nt, Artificial Sequence
  Description of Artificial Sequence: Synthetic oligonucleotide
ccagugaacauucuugaaa

SEQ ID NO: 1526155 - RNA, 19 nt, Artificial Sequence
  Description of Artificial Sequence: Synthetic oligonucleotide
cacacacuauugcucguca

SEQ ID NO: 1526156 - RNA, 19 nt, Artificial Sequence
  Description of Artificial Sequence: Synthetic oligonucleotide
ggcauguguacucaugcua

SEQ ID NO: 1526157 - RNA, 19 nt, Artificial Sequence
  Description of Artificial Sequence: Synthetic oligonucleotide
augaguagucuaauccuuu

SEQ ID NO: 1526158 - RNA, 19 nt, Artificial Sequence
  Description of Artificial Sequence: Synthetic oligonucleotide
aucuauucuucaacugaaa

SEQ ID NO: 1526159 - RNA, 19 nt, Artificial Sequence
  Description of Artificial Sequence: Synthetic oligonucleotide
auugcucgucaaauauaca

SEQ ID NO: 1526160 - RNA, 19 nt, Artificial Sequence
  Description of Artificial Sequence: Synthetic oligonucleotide
cacuauugcucgucaaaua

SEQ ID NO: 1526161 - RNA, 19 nt, Artificial Sequence
  Description of Artificial Sequence: Synthetic oligonucleotide
gguuagaguaacugaggcu

SEQ ID NO: 1526162 - RNA, 19 nt, Artificial Sequence
  Description of Artificial Sequence: Synthetic oligonucleotide
acagaccggaaggacucug

SEQ ID NO: 1526163 - RNA, 19 nt, Artificial Sequence
  Description of Artificial Sequence: Synthetic oligonucleotide
uagaguaacugaggcugua

SEQ ID NO: 1526164 - RNA, 19 nt, Artificial Sequence
  Description of Artificial Sequence: Synthetic oligonucleotide
ggaggugaggcaacagccc

SEQ ID NO: 1526165 - RNA, 19 nt, Artificial Sequence
  Description of Artificial Sequence: Synthetic oligonucleotide
gaagcgcgcaggggcuucg

SEQ ID NO: 1526166 - RNA, 19 nt, Artificial Sequence
  Description of Artificial Sequence: Synthetic oligonucleotide
uuuugucagugggcuacau

SEQ ID NO: 1526167 - RNA, 19 nt, Artificial Sequence
  Description of Artificial Sequence: Synthetic oligonucleotide
ggucaccccgccuuuaaaa

SEQ ID NO: 1526168 - RNA, 19 nt, Artificial Sequence
  Description of Artificial Sequence: Synthetic oligonucleotide
ggauuacccaguucgccaa

SEQ ID NO: 1526169 - RNA, 19 nt, Artificial Sequence
  Description of Artificial Sequence: Synthetic oligonucleotide
gcauguguacucaugcuaa

SEQ ID NO: 1526170 - RNA, 19 nt, Artificial Sequence
  Description of Artificial Sequence: Synthetic oligonucleotide
gcagauagcuaggaacuca

SEQ ID NO: 1526171 - RNA, 19 nt, Artificial Sequence
  Description of Artificial Sequence: Synthetic oligonucleotide
ggcgggauuuauucuguga

SEQ ID NO: 1526172 - RNA, 19 nt, Artificial Sequence
  Description of Artificial Sequence: Synthetic oligonucleotide
ggaacuuucaaggcacuua

SEQ ID NO: 1526173 - RNA, 19 nt, Artificial Sequence
  Description of Artificial Sequence: Synthetic oligonucleotide
aggucugaucugauaggca

SEQ ID NO: 1526174 - RNA, 19 nt, Artificial Sequence
  Description of Artificial Sequence: Synthetic oligonucleotide
agguucuccccgggucacc

SEQ ID NO: 1526175 - RNA, 19 nt, Artificial Sequence
  Description of Artificial Sequence: Synthetic oligonucleotide
cugcgggagaagagccgcc

SEQ ID NO: 1526176 - RNA, 19 nt, Artificial Sequence
  Description of Artificial Sequence: Synthetic oligonucleotide
caaccuacuaguggauuaa

SEQ ID NO: 1526177 - RNA, 19 nt, Artificial Sequence
  Description of Artificial Sequence: Synthetic oligonucleotide
aggcggcgggauuuauucu

SEQ ID NO: 1526178 - RNA, 19 nt, Artificial Sequence
  Description of Artificial Sequence: Synthetic oligonucleotide
auagcccuccucaguuuug

SEQ ID NO: 1526179 - RNA, 19 nt, Artificial Sequence
  Description of Artificial Sequence: Synthetic oligonucleotide
ggugcgcagcagcaagacc

SEQ ID NO: 1526180 - RNA, 19 nt, Artificial Sequence
  Description of Artificial Sequence: Synthetic oligonucleotide
uucggcccgcgggagaggu

SEQ ID NO: 1526181 - RNA, 19 nt, Artificial Sequence
  Description of Artificial Sequence: Synthetic oligonucleotide
augcaagaucuggucagaa

SEQ ID NO: 1526182 - RNA, 19 nt, Artificial Sequence
  Description of Artificial Sequence: Synthetic oligonucleotide
ggagacauugugggaggug

SEQ ID NO: 1526183 - RNA, 19 nt, Artificial Sequence
  Description of Artificial Sequence: Synthetic oligonucleotide
acugcaccugcgggcuucg

SEQ ID NO: 1526184 - RNA, 19 nt, Artificial Sequence
  Description of Artificial Sequence: Synthetic oligonucleotide
aggagacauugugggaggu

SEQ ID NO: 1526185 - RNA, 19 nt, Artificial Sequence
  Description of Artificial Sequence: Synthetic oligonucleotide
gucaccccgccuuuaaaau

SEQ ID NO: 1526186 - RNA, 19 nt, Artificial Sequence
  Description of Artificial Sequence: Synthetic oligonucleotide
aggcacuuaaugggauagu

SEQ ID NO: 1526187 - RNA, 19 nt, Artificial Sequence
  Description of Artificial Sequence: Synthetic oligonucleotide
ccgccuuuaaaaucagaga

SEQ ID NO: 1526188 - RNA, 19 nt, Artificial Sequence
  Description of Artificial Sequence: Synthetic oligonucleotide
ccaccacauaacuuuacaa

SEQ ID NO: 1526189 - RNA, 19 nt, Artificial Sequence
  Description of Artificial Sequence: Synthetic oligonucleotide
ggcauguaaaguagcuuaa

SEQ ID NO: 1526190 - RNA, 19 nt, Artificial Sequence
  Description of Artificial Sequence: Synthetic oligonucleotide
gguucuccccgggucaccc

SEQ ID NO: 1526191 - RNA, 19 nt, Artificial Sequence
  Description of Artificial Sequence: Synthetic oligonucleotide
cuggacgccccgacucuuc

SEQ ID NO: 1526192 - RNA, 19 nt, Artificial Sequence
  Description of Artificial Sequence: Synthetic oligonucleotide
aggacugcauagggacucu

SEQ ID NO: 1526193 - RNA, 19 nt, Artificial Sequence
  Description of Artificial Sequence: Synthetic oligonucleotide
ugaagcgcgcaggggcuuc

SEQ ID NO: 1526194 - RNA, 19 nt, Artificial Sequence
  Description of Artificial Sequence: Synthetic oligonucleotide
ugcgggcuucggcccgcgg

SEQ ID NO: 1526195 - RNA, 19 nt, Artificial Sequence
  Description of Artificial Sequence: Synthetic oligonucleotide
gccccgacucuucucccgg

SEQ ID NO: 1526196 - RNA, 19 nt, Artificial Sequence
  Description of Artificial Sequence: Synthetic oligonucleotide
cgccuuuaaaaucagagau

SEQ ID NO: 1526197 - RNA, 19 nt, Artificial Sequence
  Description of Artificial Sequence: Synthetic oligonucleotide
guacucaugcuaaucccau

SEQ ID NO: 1526198 - RNA, 19 nt, Artificial Sequence
  Description of Artificial Sequence: Synthetic oligonucleotide
ggugaggcaacagcccaca

SEQ ID NO: 1526199 - RNA, 19 nt, Artificial Sequence
  Description of Artificial Sequence: Synthetic oligonucleotide
cagaggcaaacagucuuaa

SEQ ID NO: 1526200 - RNA, 19 nt, Artificial Sequence
  Description of Artificial Sequence: Synthetic oligonucleotide
gcgcgcaggggcuucgcag

SEQ ID NO: 1526201 - RNA, 19 nt, Artificial Sequence
  Description of Artificial Sequence: Synthetic oligonucleotide
agcgcgcaggggcuucgca

SEQ ID NO: 1526202 - RNA, 19 nt, Artificial Sequence
  Description of Artificial Sequence: Synthetic oligonucleotide
gcgcacgccucacugcacc

SEQ ID NO: 1526203 - RNA, 19 nt, Artificial Sequence
  Description of Artificial Sequence: Synthetic oligonucleotide
cauguguacucaugcuaau

SEQ ID NO: 1526204 - RNA, 19 nt, Artificial Sequence
  Description of Artificial Sequence: Synthetic oligonucleotide
gcuucggcccgcgggagag

SEQ ID NO: 1526205 - RNA, 19 nt, Artificial Sequence
  Description of Artificial Sequence: Synthetic oligonucleotide
cggauuacccaguucgcca

SEQ ID NO: 1526206 - RNA, 19 nt, Artificial Sequence
  Description of Artificial Sequence: Synthetic oligonucleotide
gccaaguuugaagcgcgca

SEQ ID NO: 1526207 - RNA, 19 nt, Artificial Sequence
  Description of Artificial Sequence: Synthetic oligonucleotide
uugaagcgcgcaggggcuu

SEQ ID NO: 1526208 - RNA, 19 nt, Artificial Sequence
  Description of Artificial Sequence: Synthetic oligonucleotide
caacaaccuacuaguggau

SEQ ID NO: 1526209 - RNA, 19 nt, Artificial Sequence
  Description of Artificial Sequence: Synthetic oligonucleotide
accccgccuuuaaaaucag

SEQ ID NO: 1526210 - RNA, 19 nt, Artificial Sequence
  Description of Artificial Sequence: Synthetic oligonucleotide
ggggcucggcagcuucggg

SEQ ID NO: 1526211 - RNA, 19 nt, Artificial Sequence
  Description of Artificial Sequence: Synthetic oligonucleotide
accgucuugcaaaguucau

SEQ ID NO: 1526212 - RNA, 19 nt, Artificial Sequence
  Description of Artificial Sequence: Synthetic oligonucleotide
ggaaggacucuggcaugug

SEQ ID NO: 1526213 - RNA, 19 nt, Artificial Sequence
  Description of Artificial Sequence: Synthetic oligonucleotide
gcgggagaagagccgccgc

SEQ ID NO: 1526214 - RNA, 19 nt, Artificial Sequence
  Description of Artificial Sequence: Synthetic oligonucleotide
cgggauuuauucugugaca

SEQ ID NO: 1526215 - RNA, 19 nt, Artificial Sequence
  Description of Artificial Sequence: Synthetic oligonucleotide
ccgcgggagagguucuccc

SEQ ID NO: 1526216 - RNA, 19 nt, Artificial Sequence
  Description of Artificial Sequence: Synthetic oligonucleotide
cccaauauuuuaacagaau

SEQ ID NO: 1526217 - RNA, 19 nt, Artificial Sequence
  Description of Artificial Sequence: Synthetic oligonucleotide
cucaugcacccaauauuuu

SEQ ID NO: 1526218 - RNA, 19 nt, Artificial Sequence
  Description of Artificial Sequence: Synthetic oligonucleotide
cuucggcccgcgggagagg

SEQ ID NO: 1526219 - RNA, 19 nt, Artificial Sequence
  Description of Artificial Sequence: Synthetic oligonucleotide
ccagaggcaaacagucuua

SEQ ID NO: 1526220 - RNA, 19 nt, Artificial Sequence
  Description of Artificial Sequence: Synthetic oligonucleotide
cccaguucgccaaguuuga

SEQ ID NO: 1526221 - RNA, 19 nt, Artificial Sequence
  Description of Artificial Sequence: Synthetic oligonucleotide
ccagcacccgccgcgcacg

SEQ ID NO: 1526222 - RNA, 19 nt, Artificial Sequence
  Description of Artificial Sequence: Synthetic oligonucleotide
caguuacaggaaacagaau

SEQ ID NO: 1526223 - RNA, 19 nt, Artificial Sequence
  Description of Artificial Sequence: Synthetic oligonucleotide
cgcgggagagguucucccc

SEQ ID NO: 1526224 - RNA, 19 nt, Artificial Sequence
  Description of Artificial Sequence: Synthetic oligonucleotide
cauggucaucacucagcau

SEQ ID NO: 1526225 - RNA, 19 nt, Artificial Sequence
  Description of Artificial Sequence: Synthetic oligonucleotide
gcacgccucacugcaccug

SEQ ID NO: 1526226 - RNA, 19 nt, Artificial Sequence
  Description of Artificial Sequence: Synthetic oligonucleotide
ccccgccccgccuggacgc

SEQ ID NO: 1526227 - RNA, 19 nt, Artificial Sequence
  Description of Artificial Sequence: Synthetic oligonucleotide
cugcaccugcgggcuucgg

SEQ ID NO: 1526228 - RNA, 19 nt, Artificial Sequence
  Description of Artificial Sequence: Synthetic oligonucleotide
cgccccgacucuucucccg

SEQ ID NO: 1526229 - RNA, 19 nt, Artificial Sequence
  Description of Artificial Sequence: Synthetic oligonucleotide
gggucaccccgccuuuaaa

SEQ ID NO: 1526230 - RNA, 19 nt, Artificial Sequence
  Description of Artificial Sequence: Synthetic oligonucleotide
gugacaggucugaucugau

SEQ ID NO: 1526231 - RNA, 19 nt, Artificial Sequence
  Description of Artificial Sequence: Synthetic oligonucleotide
ccgucuugcaaaguucaua

SEQ ID NO: 1526232 - RNA, 19 nt, Artificial Sequence
  Description of Artificial Sequence: Synthetic oligonucleotide
cccgcgggagagguucucc

SEQ ID NO: 1526233 - RNA, 19 nt, Artificial Sequence
  Description of Artificial Sequence: Synthetic oligonucleotide
ccgcgcacgccucacugca

SEQ ID NO: 1526234 - RNA, 19 nt, Artificial Sequence
  Description of Artificial Sequence: Synthetic oligonucleotide
gggguccaacaaccuacua

SEQ ID NO: 1526235 - RNA, 19 nt, Artificial Sequence
  Description of Artificial Sequence: Synthetic oligonucleotide
cccgccuggacgccccgac

SEQ ID NO: 1526236 - RNA, 19 nt, Artificial Sequence
  Description of Artificial Sequence: Synthetic oligonucleotide
gcgcaggggcuucgcagca

SEQ ID NO: 1526237 - RNA, 19 nt, Artificial Sequence
  Description of Artificial Sequence: Synthetic oligonucleotide
ccggugcgcagcagcaaga

SEQ ID NO: 1526238 - RNA, 19 nt, Artificial Sequence
  Description of Artificial Sequence: Synthetic oligonucleotide
ggacugcauagggacucua

SEQ ID NO: 1526239 - RNA, 19 nt, Artificial Sequence
  Description of Artificial Sequence: Synthetic oligonucleotide
ccccgccuuuaaaaucaga

SEQ ID NO: 1526240 - RNA, 19 nt, Artificial Sequence
  Description of Artificial Sequence: Synthetic oligonucleotide
gccuggacgccccgacucu

SEQ ID NO: 1526241 - RNA, 19 nt, Artificial Sequence
  Description of Artificial Sequence: Synthetic oligonucleotide
cggggcucggcagcuucgg

SEQ ID NO: 1526242 - RNA, 19 nt, Artificial Sequence
  Description of Artificial Sequence: Synthetic oligonucleotide
ccaguucgccaaguuugaa

SEQ ID NO: 1526243 - RNA, 19 nt, Artificial Sequence
  Description of Artificial Sequence: Synthetic oligonucleotide
gcaggcggcgggauuuauu

SEQ ID NO: 1526244 - RNA, 19 nt, Artificial Sequence
  Description of Artificial Sequence: Synthetic oligonucleotide
gcccgcgggagagguucuc

SEQ ID NO: 1526245 - RNA, 19 nt, Artificial Sequence
  Description of Artificial Sequence: Synthetic oligonucleotide
cgcacgccucacugcaccu

SEQ ID NO: 1526246 - RNA, 19 nt, Artificial Sequence
  Description of Artificial Sequence: Synthetic oligonucleotide
ggcccgcgggagagguucu

SEQ ID NO: 1526247 - RNA, 19 nt, Artificial Sequence
  Description of Artificial Sequence: Synthetic oligonucleotide
ccuggacgccccgacucuu

SEQ ID NO: 1526248 - RNA, 19 nt, Artificial Sequence
  Description of Artificial Sequence: Synthetic oligonucleotide
ccgggucaccccgccuuua

SEQ ID NO: 1526249 - RNA, 19 nt, Artificial Sequence
  Description of Artificial Sequence: Synthetic oligonucleotide
aaauaaaucauuucugugg

SEQ ID NO: 1526250 - RNA, 19 nt, Artificial Sequence
  Description of Artificial Sequence: Synthetic oligonucleotide
uauauauauauauauaaag

SEQ ID NO: 1526251 - RNA, 19 nt, Artificial Sequence
  Description of Artificial Sequence: Synthetic oligonucleotide
uguauuauacaaaagguca

SEQ ID NO: 1526252 - RNA, 19 nt, Artificial Sequence
  Description of Artificial Sequence: Synthetic oligonucleotide
uauauauauauaaagguac

SEQ ID NO: 1526253 - RNA, 19 nt, Artificial Sequence
  Description of Artificial Sequence: Synthetic oligonucleotide
cuaauuguggacuauaggg

SEQ ID NO: 1526254 - RNA, 19 nt, Artificial Sequence
  Description of Artificial Sequence: Synthetic oligonucleotide
uauauauauauauaaaggu

SEQ ID NO: 1526255 - RNA, 19 nt, Artificial Sequence
  Description of Artificial Sequence: Synthetic oligonucleotide
uauauauauauauauauaa

SEQ ID NO: 1526256 - RNA, 19 nt, Artificial Sequence
  Description of Artificial Sequence: Synthetic oligonucleotide
ucagaagcuaugaaaaucg

SEQ ID NO: 1526257 - RNA, 19 nt, Artificial Sequence
  Description of Artificial Sequence: Synthetic oligonucleotide
uauauauauauauauauau

SEQ ID NO: 1526258 - RNA, 19 nt, Artificial Sequence
  Description of Artificial Sequence: Synthetic oligonucleotide
gauacaauagguaacuugg

SEQ ID NO: 1526259 - RNA, 19 nt, Artificial Sequence
  Description of Artificial Sequence: Synthetic oligonucleotide
aaguagacaauuuuggucu

SEQ ID NO: 1526260 - RNA, 19 nt, Artificial Sequence
  Description of Artificial Sequence: Synthetic oligonucleotide
aaacaaaugguacuuccac

SEQ ID NO: 1526261 - RNA, 19 nt, Artificial Sequence
  Description of Artificial Sequence: Synthetic oligonucleotide
ugagcauucaauuguaagg

SEQ ID NO: 1526262 - RNA, 19 nt, Artificial Sequence
  Description of Artificial Sequence: Synthetic oligonucleotide
auauauauauauauaaagg

SEQ ID NO: 1526263 - RNA, 19 nt, Artificial Sequence
  Description of Artificial Sequence: Synthetic oligonucleotide
ugagcuaacaauuucuucc

SEQ ID NO: 1526264 - RNA, 19 nt, Artificial Sequence
  Description of Artificial Sequence: Synthetic oligonucleotide
uauauaaagguacuguaca

SEQ ID NO: 1526265 - RNA, 19 nt, Artificial Sequence
  Description of Artificial Sequence: Synthetic oligonucleotide
uauaaaucaguacagugac

SEQ ID NO: 1526266 - RNA, 19 nt, Artificial Sequence
  Description of Artificial Sequence: Synthetic oligonucleotide
augaaaaucggcaagugcc

SEQ ID NO: 1526267 - RNA, 19 nt, Artificial Sequence
  Description of Artificial Sequence: Synthetic oligonucleotide
acagacaugauacaauagg

SEQ ID NO: 1526268 - RNA, 19 nt, Artificial Sequence
  Description of Artificial Sequence: Synthetic oligonucleotide
uuuguaucacuaauugugg

SEQ ID NO: 1526269 - RNA, 19 nt, Artificial Sequence
  Description of Artificial Sequence: Synthetic oligonucleotide
agacuaaugauuaauaauc

SEQ ID NO: 1526270 - RNA, 19 nt, Artificial Sequence
  Description of Artificial Sequence: Synthetic oligonucleotide
acaauagguaacuuggcac

SEQ ID NO: 1526271 - RNA, 19 nt, Artificial Sequence
  Description of Artificial Sequence: Synthetic oligonucleotide
ugaaacaccuuacuuagcc

SEQ ID NO: 1526272 - RNA, 19 nt, Artificial Sequence
  Description of Artificial Sequence: Synthetic oligonucleotide
uuuaacaguuacuugaaac

SEQ ID NO: 1526273 - RNA, 19 nt, Artificial Sequence
  Description of Artificial Sequence: Synthetic oligonucleotide
uaaaucaguacagugacag

SEQ ID NO: 1526274 - RNA, 19 nt, Artificial Sequence
  Description of Artificial Sequence: Synthetic oligonucleotide
aaaguuaugucacaauuaa

SEQ ID NO: 1526275 - RNA, 19 nt, Artificial Sequence
  Description of Artificial Sequence: Synthetic oligonucleotide
uuaaugaugagcuaacaau

SEQ ID NO: 1526276 - RNA, 19 nt, Artificial Sequence
  Description of Artificial Sequence: Synthetic oligonucleotide
aaugggaaugauaaaacag

SEQ ID NO: 1526277 - RNA, 19 nt, Artificial Sequence
  Description of Artificial Sequence: Synthetic oligonucleotide
aauuguaaggacuaucuuu

SEQ ID NO: 1526278 - RNA, 19 nt, Artificial Sequence
  Description of Artificial Sequence: Synthetic oligonucleotide
ugaguauuaaagacuaaug

SEQ ID NO: 1526279 - RNA, 19 nt, Artificial Sequence
  Description of Artificial Sequence: Synthetic oligonucleotide
aucuuuaacaguuacuuga

SEQ ID NO: 1526280 - RNA, 19 nt, Artificial Sequence
  Description of Artificial Sequence: Synthetic oligonucleotide
uggacuauagggaaaauaa

SEQ ID NO: 1526281 - RNA, 19 nt, Artificial Sequence
  Description of Artificial Sequence: Synthetic oligonucleotide
aauuuugcucuauucaagu

SEQ ID NO: 1526282 - RNA, 19 nt, Artificial Sequence
  Description of Artificial Sequence: Synthetic oligonucleotide
aguacaguuggucacagug

SEQ ID NO: 1526283 - RNA, 19 nt, Artificial Sequence
  Description of Artificial Sequence: Synthetic oligonucleotide
aaaccgaacuguuucauga

SEQ ID NO: 1526284 - RNA, 19 nt, Artificial Sequence
  Description of Artificial Sequence: Synthetic oligonucleotide
ugguacuaaauucuuagca

SEQ ID NO: 1526285 - RNA, 19 nt, Artificial Sequence
  Description of Artificial Sequence: Synthetic oligonucleotide
aguggaguuugucagacuc

SEQ ID NO: 1526286 - RNA, 19 nt, Artificial Sequence
  Description of Artificial Sequence: Synthetic oligonucleotide
auggguuaaauauaguucu

SEQ ID NO: 1526287 - RNA, 19 nt, Artificial Sequence
  Description of Artificial Sequence: Synthetic oligonucleotide
ucaaguaguuauaauagau

SEQ ID NO: 1526288 - RNA, 19 nt, Artificial Sequence
  Description of Artificial Sequence: Synthetic oligonucleotide
uaauuuugcucuauucaag

SEQ ID NO: 1526289 - RNA, 19 nt, Artificial Sequence
  Description of Artificial Sequence: Synthetic oligonucleotide
agugacagguuacuuaagg

SEQ ID NO: 1526290 - RNA, 19 nt, Artificial Sequence
  Description of Artificial Sequence: Synthetic oligonucleotide
ugauacaauagguaacuug

SEQ ID NO: 1526291 - RNA, 19 nt, Artificial Sequence
  Description of Artificial Sequence: Synthetic oligonucleotide
aguuaugucacaauuaaca

SEQ ID NO: 1526292 - RNA, 19 nt, Artificial Sequence
  Description of Artificial Sequence: Synthetic oligonucleotide
agcuaaaccgaacuguuuc

SEQ ID NO: 1526293 - RNA, 19 nt, Artificial Sequence
  Description of Artificial Sequence: Synthetic oligonucleotide
gacuggaaauaucagaaug

SEQ ID NO: 1526294 - RNA, 19 nt, Artificial Sequence
  Description of Artificial Sequence: Synthetic oligonucleotide
aguacuuccucauuuugag

SEQ ID NO: 1526295 - RNA, 19 nt, Artificial Sequence
  Description of Artificial Sequence: Synthetic oligonucleotide
uguuugucagccaugccag

SEQ ID NO: 1526296 - RNA, 19 nt, Artificial Sequence
  Description of Artificial Sequence: Synthetic oligonucleotide
caauagguaacuuggcacg

SEQ ID NO: 1526297 - RNA, 19 nt, Artificial Sequence
  Description of Artificial Sequence: Synthetic oligonucleotide
uaaggacuaucuuuaacag

SEQ ID NO: 1526298 - RNA, 19 nt, Artificial Sequence
  Description of Artificial Sequence: Synthetic oligonucleotide
uucuuagcauuuaucaagc

SEQ ID NO: 1526299 - RNA, 19 nt, Artificial Sequence
  Description of Artificial Sequence: Synthetic oligonucleotide
uuaccuaacgucaucuucu

SEQ ID NO: 1526300 - RNA, 19 nt, Artificial Sequence
  Description of Artificial Sequence: Synthetic oligonucleotide
guaaggacuaucuuuaaca

SEQ ID NO: 1526301 - RNA, 19 nt, Artificial Sequence
  Description of Artificial Sequence: Synthetic oligonucleotide
acuaauuguggacuauagg

SEQ ID NO: 1526302 - RNA, 19 nt, Artificial Sequence
  Description of Artificial Sequence: Synthetic oligonucleotide
uguaauguagugaucuuuc

SEQ ID NO: 1526303 - RNA, 19 nt, Artificial Sequence
  Description of Artificial Sequence: Synthetic oligonucleotide
uaagcaugcaacaugcuau

SEQ ID NO: 1526304 - RNA, 19 nt, Artificial Sequence
  Description of Artificial Sequence: Synthetic oligonucleotide
gaagcuaugaaaaucggca

SEQ ID NO: 1526305 - RNA, 19 nt, Artificial Sequence
  Description of Artificial Sequence: Synthetic oligonucleotide
uauagggaaaauaaaucau

SEQ ID NO: 1526306 - RNA, 19 nt, Artificial Sequence
  Description of Artificial Sequence: Synthetic oligonucleotide
aaaaucggcaagugccaac

SEQ ID NO: 1526307 - RNA, 19 nt, Artificial Sequence
  Description of Artificial Sequence: Synthetic oligonucleotide
ucaaaguuaugucacaauu

SEQ ID NO: 1526308 - RNA, 19 nt, Artificial Sequence
  Description of Artificial Sequence: Synthetic oligonucleotide
aauuguggacuauagggaa

SEQ ID NO: 1526309 - RNA, 19 nt, Artificial Sequence
  Description of Artificial Sequence: Synthetic oligonucleotide
agauaguagcuuuucuugg

SEQ ID NO: 1526310 - RNA, 19 nt, Artificial Sequence
  Description of Artificial Sequence: Synthetic oligonucleotide
aaauaucagaaugggaaug

SEQ ID NO: 1526311 - RNA, 19 nt, Artificial Sequence
  Description of Artificial Sequence: Synthetic oligonucleotide
cuauagggaaaauaaauca

SEQ ID NO: 1526312 - RNA, 19 nt, Artificial Sequence
  Description of Artificial Sequence: Synthetic oligonucleotide
acgacaggugaucugagac

SEQ ID NO: 1526313 - RNA, 19 nt, Artificial Sequence
  Description of Artificial Sequence: Synthetic oligonucleotide
uauaguucuggguggaagc

SEQ ID NO: 1526314 - RNA, 19 nt, Artificial Sequence
  Description of Artificial Sequence: Synthetic oligonucleotide
uguguuaccuacaggggcc

SEQ ID NO: 1526315 - RNA, 19 nt, Artificial Sequence
  Description of Artificial Sequence: Synthetic oligonucleotide
gacaugauacaauagguaa

SEQ ID NO: 1526316 - RNA, 19 nt, Artificial Sequence
  Description of Artificial Sequence: Synthetic oligonucleotide
uuuaaacuaggauggucag

SEQ ID NO: 1526317 - RNA, 19 nt, Artificial Sequence
  Description of Artificial Sequence: Synthetic oligonucleotide
agugaucuuucugaguugc

SEQ ID NO: 1526318 - RNA, 19 nt, Artificial Sequence
  Description of Artificial Sequence: Synthetic oligonucleotide
auuauacaaaaggucauag

SEQ ID NO: 1526319 - RNA, 19 nt, Artificial Sequence
  Description of Artificial Sequence: Synthetic oligonucleotide
uuugcucuauucaaguagu

SEQ ID NO: 1526320 - RNA, 19 nt, Artificial Sequence
  Description of Artificial Sequence: Synthetic oligonucleotide
gugaguuguaaccauacug

SEQ ID NO: 1526321 - RNA, 19 nt, Artificial Sequence
  Description of Artificial Sequence: Synthetic oligonucleotide
cuguaagcaugcaacaugc

SEQ ID NO: 1526322 - RNA, 19 nt, Artificial Sequence
  Description of Artificial Sequence: Synthetic oligonucleotide
uguaucacuaauuguggac

SEQ ID NO: 1526323 - RNA, 19 nt, Artificial Sequence
  Description of Artificial Sequence: Synthetic oligonucleotide
uaaacuaggauggucagaa

SEQ ID NO: 1526324 - RNA, 19 nt, Artificial Sequence
  Description of Artificial Sequence: Synthetic oligonucleotide
aaacaccuuacuuagccau

SEQ ID NO: 1526325 - RNA, 19 nt, Artificial Sequence
  Description of Artificial Sequence: Synthetic oligonucleotide
aaaucaguacagugacagg

SEQ ID NO: 1526326 - RNA, 19 nt, Artificial Sequence
  Description of Artificial Sequence: Synthetic oligonucleotide
aauaucagaaugggaauga

SEQ ID NO: 1526327 - RNA, 19 nt, Artificial Sequence
  Description of Artificial Sequence: Synthetic oligonucleotide
acuggaaauaucagaaugg

SEQ ID NO: 1526328 - RNA, 19 nt, Artificial Sequence
  Description of Artificial Sequence: Synthetic oligonucleotide
ugagcgggcagccugagca

SEQ ID NO: 1526329 - RNA, 19 nt, Artificial Sequence
  Description of Artificial Sequence: Synthetic oligonucleotide
cagaaugacaacauaugac

SEQ ID NO: 1526330 - RNA, 19 nt, Artificial Sequence
  Description of Artificial Sequence: Synthetic oligonucleotide
auagauggguuaaauauag

SEQ ID NO: 1526331 - RNA, 19 nt, Artificial Sequence
  Description of Artificial Sequence: Synthetic oligonucleotide
uuugcucagcauuccaagg

SEQ ID NO: 1526332 - RNA, 19 nt, Artificial Sequence
  Description of Artificial Sequence: Synthetic oligonucleotide
uuuaccuaacgucaucuuc

SEQ ID NO: 1526333 - RNA, 19 nt, Artificial Sequence
  Description of Artificial Sequence: Synthetic oligonucleotide
augaugagcuaacaauuuc

SEQ ID NO: 1526334 - RNA, 19 nt, Artificial Sequence
  Description of Artificial Sequence: Synthetic oligonucleotide
caugucauugcugagcggg

SEQ ID NO: 1526335 - RNA, 19 nt, Artificial Sequence
  Description of Artificial Sequence: Synthetic oligonucleotide
acuggcaggaguuuguuca

SEQ ID NO: 1526336 - RNA, 19 nt, Artificial Sequence
  Description of Artificial Sequence: Synthetic oligonucleotide
uggucugaguauuaaagac

SEQ ID NO: 1526337 - RNA, 19 nt, Artificial Sequence
  Description of Artificial Sequence: Synthetic oligonucleotide
ugggaaugauaaaacagac

SEQ ID NO: 1526338 - RNA, 19 nt, Artificial Sequence
  Description of Artificial Sequence: Synthetic oligonucleotide
gauggguuaaauauaguuc

SEQ ID NO: 1526339 - RNA, 19 nt, Artificial Sequence
  Description of Artificial Sequence: Synthetic oligonucleotide
aacgucaucuucucuucag

SEQ ID NO: 1526340 - RNA, 19 nt, Artificial Sequence
  Description of Artificial Sequence: Synthetic oligonucleotide
aaccgaacuguuucaugac

SEQ ID NO: 1526341 - RNA, 19 nt, Artificial Sequence
  Description of Artificial Sequence: Synthetic oligonucleotide
uuggcacgaauacaaagug

SEQ ID NO: 1526342 - RNA, 19 nt, Artificial Sequence
  Description of Artificial Sequence: Synthetic oligonucleotide
gacagguuacuuaaggaag

SEQ ID NO: 1526343 - RNA, 19 nt, Artificial Sequence
  Description of Artificial Sequence: Synthetic oligonucleotide
aguuauaauagauggguua

SEQ ID NO: 1526344 - RNA, 19 nt, Artificial Sequence
  Description of Artificial Sequence: Synthetic oligonucleotide
aagcauguguuaccuacag

SEQ ID NO: 1526345 - RNA, 19 nt, Artificial Sequence
  Description of Artificial Sequence: Synthetic oligonucleotide
aauacaaagugaguuguaa

SEQ ID NO: 1526346 - RNA, 19 nt, Artificial Sequence
  Description of Artificial Sequence: Synthetic oligonucleotide
aagugaguuguaaccauac

SEQ ID NO: 1526347 - RNA, 19 nt, Artificial Sequence
  Description of Artificial Sequence: Synthetic oligonucleotide
aaggccacguggcuaaguc

SEQ ID NO: 1526348 - RNA, 19 nt, Artificial Sequence
  Description of Artificial Sequence: Synthetic oligonucleotide
auuucugugguacuaaauu

SEQ ID NO: 1526349 - RNA, 19 nt, Artificial Sequence
  Description of Artificial Sequence: Synthetic oligonucleotide
gucacaauuaacaauaaaa

SEQ ID NO: 1526350 - RNA, 19 nt, Artificial Sequence
  Description of Artificial Sequence: Synthetic oligonucleotide
aagccuccuaauuuugcuc

SEQ ID NO: 1526351 - RNA, 19 nt, Artificial Sequence
  Description of Artificial Sequence: Synthetic oligonucleotide
ugcucaaauacucccuaag

SEQ ID NO: 1526352 - RNA, 19 nt, Artificial Sequence
  Description of Artificial Sequence: Synthetic oligonucleotide
ugcaacaugcuauuggaaa

SEQ ID NO: 1526353 - RNA, 19 nt, Artificial Sequence
  Description of Artificial Sequence: Synthetic oligonucleotide
uucaaguaguuauaauaga

SEQ ID NO: 1526354 - RNA, 19 nt, Artificial Sequence
  Description of Artificial Sequence: Synthetic oligonucleotide
ugaaaaucggcaagugcca

SEQ ID NO: 1526355 - RNA, 19 nt, Artificial Sequence
  Description of Artificial Sequence: Synthetic oligonucleotide
acgaauacaaagugaguug

SEQ ID NO: 1526356 - RNA, 19 nt, Artificial Sequence
  Description of Artificial Sequence: Synthetic oligonucleotide
agauggguuaaauauaguu

SEQ ID NO: 1526357 - RNA, 19 nt, Artificial Sequence
  Description of Artificial Sequence: Synthetic oligonucleotide
acucaaauauuucucucug

SEQ ID NO: 1526358 - RNA, 19 nt, Artificial Sequence
  Description of Artificial Sequence: Synthetic oligonucleotide
uucaagcuaaaccgaacug

SEQ ID NO: 1526359 - RNA, 19 nt, Artificial Sequence
  Description of Artificial Sequence: Synthetic oligonucleotide
uguaaggacuaucuuuaac

SEQ ID NO: 1526360 - RNA, 19 nt, Artificial Sequence
  Description of Artificial Sequence: Synthetic oligonucleotide
aagucaguauauaaaucag

SEQ ID NO: 1526361 - RNA, 19 nt, Artificial Sequence
  Description of Artificial Sequence: Synthetic oligonucleotide
uuacuuaaggaagagccac

SEQ ID NO: 1526362 - RNA, 19 nt, Artificial Sequence
  Description of Artificial Sequence: Synthetic oligonucleotide
uccuguaauguagugaucu

SEQ ID NO: 1526363 - RNA, 19 nt, Artificial Sequence
  Description of Artificial Sequence: Synthetic oligonucleotide
gcaagugccaacuuuaaug

SEQ ID NO: 1526364 - RNA, 19 nt, Artificial Sequence
  Description of Artificial Sequence: Synthetic oligonucleotide
aggaguuuguucauucugc

SEQ ID NO: 1526365 - RNA, 19 nt, Artificial Sequence
  Description of Artificial Sequence: Synthetic oligonucleotide
acuuggcacgaauacaaag

SEQ ID NO: 1526366 - RNA, 19 nt, Artificial Sequence
  Description of Artificial Sequence: Synthetic oligonucleotide
ggauuuguaucacuaauug

SEQ ID NO: 1526367 - RNA, 19 nt, Artificial Sequence
  Description of Artificial Sequence: Synthetic oligonucleotide
aauaggauuuguaucacua

SEQ ID NO: 1526368 - RNA, 19 nt, Artificial Sequence
  Description of Artificial Sequence: Synthetic oligonucleotide
ucaagcuaaaccgaacugu

SEQ ID NO: 1526369 - RNA, 19 nt, Artificial Sequence
  Description of Artificial Sequence: Synthetic oligonucleotide
auauauauauauaaaggua

SEQ ID NO: 1526370 - RNA, 19 nt, Artificial Sequence
  Description of Artificial Sequence: Synthetic oligonucleotide
agcauucaauuguaaggac

SEQ ID NO: 1526371 - RNA, 19 nt, Artificial Sequence
  Description of Artificial Sequence: Synthetic oligonucleotide
aaggacuaucuuuaacagu

SEQ ID NO: 1526372 - RNA, 19 nt, Artificial Sequence
  Description of Artificial Sequence: Synthetic oligonucleotide
aaguuaugucacaauuaac

SEQ ID NO: 1526373 - RNA, 19 nt, Artificial Sequence
  Description of Artificial Sequence: Synthetic oligonucleotide
uaguacuuccucauuuuga

SEQ ID NO: 1526374 - RNA, 19 nt, Artificial Sequence
  Description of Artificial Sequence: Synthetic oligonucleotide
uucugcuuuaccuaacguc

SEQ ID NO: 1526375 - RNA, 19 nt, Artificial Sequence
  Description of Artificial Sequence: Synthetic oligonucleotide
acaugauacaauagguaac

SEQ ID NO: 1526376 - RNA, 19 nt, Artificial Sequence
  Description of Artificial Sequence: Synthetic oligonucleotide
uuuuccuguaauguaguga

SEQ ID NO: 1526377 - RNA, 19 nt, Artificial Sequence
  Description of Artificial Sequence: Synthetic oligonucleotide
ggaaugauaaaacagacau

SEQ ID NO: 1526378 - RNA, 19 nt, Artificial Sequence
  Description of Artificial Sequence: Synthetic oligonucleotide
ucaaaauauccagauagua

SEQ ID NO: 1526379 - RNA, 19 nt, Artificial Sequence
  Description of Artificial Sequence: Synthetic oligonucleotide
auauauauauauauauaaa

SEQ ID NO: 1526380 - RNA, 19 nt, Artificial Sequence
  Description of Artificial Sequence: Synthetic oligonucleotide
auauaaagguacuguacau

SEQ ID NO: 1526381 - RNA, 19 nt, Artificial Sequence
  Description of Artificial Sequence: Synthetic oligonucleotide
uacuaaauucuuagcauuu

SEQ ID NO: 1526382 - RNA, 19 nt, Artificial Sequence
  Description of Artificial Sequence: Synthetic oligonucleotide
gacuaucuuuaacaguuac

SEQ ID NO: 1526383 - RNA, 19 nt, Artificial Sequence
  Description of Artificial Sequence: Synthetic oligonucleotide
aauagauggguuaaauaua

SEQ ID NO: 1526384 - RNA, 19 nt, Artificial Sequence
  Description of Artificial Sequence: Synthetic oligonucleotide
aagcuaugaaaaucggcaa

SEQ ID NO: 1526385 - RNA, 19 nt, Artificial Sequence
  Description of Artificial Sequence: Synthetic oligonucleotide
agaagacuuucaugcaguc

SEQ ID NO: 1526386 - RNA, 19 nt, Artificial Sequence
  Description of Artificial Sequence: Synthetic oligonucleotide
aaaucggcaagugccaacu

SEQ ID NO: 1526387 - RNA, 19 nt, Artificial Sequence
  Description of Artificial Sequence: Synthetic oligonucleotide
acugcuaagaucaugucau

SEQ ID NO: 1526388 - RNA, 19 nt, Artificial Sequence
  Description of Artificial Sequence: Synthetic oligonucleotide
auacaauagguaacuuggc

SEQ ID NO: 1526389 - RNA, 19 nt, Artificial Sequence
  Description of Artificial Sequence: Synthetic oligonucleotide
cacuaauuguggacuauag

SEQ ID NO: 1526390 - RNA, 19 nt, Artificial Sequence
  Description of Artificial Sequence: Synthetic oligonucleotide
ugauuacaacuuaauuuuc

SEQ ID NO: 1526391 - RNA, 19 nt, Artificial Sequence
  Description of Artificial Sequence: Synthetic oligonucleotide
aaaggucauagcuguuugu

SEQ ID NO: 1526392 - RNA, 19 nt, Artificial Sequence
  Description of Artificial Sequence: Synthetic oligonucleotide
gagcauucaauuguaagga

SEQ ID NO: 1526393 - RNA, 19 nt, Artificial Sequence
  Description of Artificial Sequence: Synthetic oligonucleotide
gcuaagaucaugucauugc

SEQ ID NO: 1526394 - RNA, 19 nt, Artificial Sequence
  Description of Artificial Sequence: Synthetic oligonucleotide
uuguaucacuaauugugga

SEQ ID NO: 1526395 - RNA, 19 nt, Artificial Sequence
  Description of Artificial Sequence: Synthetic oligonucleotide
auguagugaucuuucugag

SEQ ID NO: 1526396 - RNA, 19 nt, Artificial Sequence
  Description of Artificial Sequence: Synthetic oligonucleotide
acaaagugaguuguaacca

SEQ ID NO: 1526397 - RNA, 19 nt, Artificial Sequence
  Description of Artificial Sequence: Synthetic oligonucleotide
ucuucaagcuaaaccgaac

SEQ ID NO: 1526398 - RNA, 19 nt, Artificial Sequence
  Description of Artificial Sequence: Synthetic oligonucleotide
uagcauuuaucaagccucc

SEQ ID NO: 1526399 - RNA, 19 nt, Artificial Sequence
  Description of Artificial Sequence: Synthetic oligonucleotide
aggacuaucuuuaacaguu

SEQ ID NO: 1526400 - RNA, 19 nt, Artificial Sequence
  Description of Artificial Sequence: Synthetic oligonucleotide
guuacuugaaacaccuuac

SEQ ID NO: 1526401 - RNA, 19 nt, Artificial Sequence
  Description of Artificial Sequence: Synthetic oligonucleotide
guaguuauaauagaugggu

SEQ ID NO: 1526402 - RNA, 19 nt, Artificial Sequence
  Description of Artificial Sequence: Synthetic oligonucleotide
uuucaugcagucugauuac

SEQ ID NO: 1526403 - RNA, 19 nt, Artificial Sequence
  Description of Artificial Sequence: Synthetic oligonucleotide
auauauauauauauauaua

SEQ ID NO: 1526404 - RNA, 19 nt, Artificial Sequence
  Description of Artificial Sequence: Synthetic oligonucleotide
auuaaagacuaaugauuaa

SEQ ID NO: 1526405 - RNA, 19 nt, Artificial Sequence
  Description of Artificial Sequence: Synthetic oligonucleotide
uggguuaaauauaguucug

SEQ ID NO: 1526406 - RNA, 19 nt, Artificial Sequence
  Description of Artificial Sequence: Synthetic oligonucleotide
uugucagacucacagggua

SEQ ID NO: 1526407 - RNA, 19 nt, Artificial Sequence
  Description of Artificial Sequence: Synthetic oligonucleotide
auuguaaggacuaucuuua

SEQ ID NO: 1526408 - RNA, 19 nt, Artificial Sequence
  Description of Artificial Sequence: Synthetic oligonucleotide
auauaguucuggguggaag

SEQ ID NO: 1526409 - RNA, 19 nt, Artificial Sequence
  Description of Artificial Sequence: Synthetic oligonucleotide
ggcacgaauacaaagugag

SEQ ID NO: 1526410 - RNA, 19 nt, Artificial Sequence
  Description of Artificial Sequence: Synthetic oligonucleotide
gacaggugaucugagacac

SEQ ID NO: 1526411 - RNA, 19 nt, Artificial Sequence
  Description of Artificial Sequence: Synthetic oligonucleotide
aauagguaacuuggcacga

SEQ ID NO: 1526412 - RNA, 19 nt, Artificial Sequence
  Description of Artificial Sequence: Synthetic oligonucleotide
uaucaagccuccuaauuuu

SEQ ID NO: 1526413 - RNA, 19 nt, Artificial Sequence
  Description of Artificial Sequence: Synthetic oligonucleotide
ggaagcauguguuaccuac

SEQ ID NO: 1526414 - RNA, 19 nt, Artificial Sequence
  Description of Artificial Sequence: Synthetic oligonucleotide
gaaugugagaagggcagcc

SEQ ID NO: 1526415 - RNA, 19 nt, Artificial Sequence
  Description of Artificial Sequence: Synthetic oligonucleotide
guuaaauauaguucugggu

SEQ ID NO: 1526416 - RNA, 19 nt, Artificial Sequence
  Description of Artificial Sequence: Synthetic oligonucleotide
acaccguagcuacauuagg

SEQ ID NO: 1526417 - RNA, 19 nt, Artificial Sequence
  Description of Artificial Sequence: Synthetic oligonucleotide
caugcaacaugcuauugga

SEQ ID NO: 1526418 - RNA, 19 nt, Artificial Sequence
  Description of Artificial Sequence: Synthetic oligonucleotide
aaacuaggauggucagaag

SEQ ID NO: 1526419 - RNA, 19 nt, Artificial Sequence
  Description of Artificial Sequence: Synthetic oligonucleotide
uguaaccauacugcuaaga

SEQ ID NO: 1526420 - RNA, 19 nt, Artificial Sequence
  Description of Artificial Sequence: Synthetic oligonucleotide
uacuuaaggaagagccaca

SEQ ID NO: 1526421 - RNA, 19 nt, Artificial Sequence
  Description of Artificial Sequence: Synthetic oligonucleotide
auggcagaugagcccaugg

SEQ ID NO: 1526422 - RNA, 19 nt, Artificial Sequence
  Description of Artificial Sequence: Synthetic oligonucleotide
acgucaucuucucuucagg

SEQ ID NO: 1526423 - RNA, 19 nt, Artificial Sequence
  Description of Artificial Sequence: Synthetic oligonucleotide
gcaugcaacaugcuauugg

SEQ ID NO: 1526424 - RNA, 19 nt, Artificial Sequence
  Description of Artificial Sequence: Synthetic oligonucleotide
uccagauaguagcuuuucu

SEQ ID NO: 1526425 - RNA, 19 nt, Artificial Sequence
  Description of Artificial Sequence: Synthetic oligonucleotide
uucaauuguaaggacuauc

SEQ ID NO: 1526426 - RNA, 19 nt, Artificial Sequence
  Description of Artificial Sequence: Synthetic oligonucleotide
auacugcuaagaucauguc

SEQ ID NO: 1526427 - RNA, 19 nt, Artificial Sequence
  Description of Artificial Sequence: Synthetic oligonucleotide
gacaccguagcuacauuag

SEQ ID NO: 1526428 - RNA, 19 nt, Artificial Sequence
  Description of Artificial Sequence: Synthetic oligonucleotide
uggcagaugagcccauggc

SEQ ID NO: 1526429 - RNA, 19 nt, Artificial Sequence
  Description of Artificial Sequence: Synthetic oligonucleotide
agcauguguuaccuacagg

SEQ ID NO: 1526430 - RNA, 19 nt, Artificial Sequence
  Description of Artificial Sequence: Synthetic oligonucleotide
uggcacgaauacaaaguga

SEQ ID NO: 1526431 - RNA, 19 nt, Artificial Sequence
  Description of Artificial Sequence: Synthetic oligonucleotide
uuggcuacuggcaggaguu

SEQ ID NO: 1526432 - RNA, 19 nt, Artificial Sequence
  Description of Artificial Sequence: Synthetic oligonucleotide
agccuccuaauuuugcucu

SEQ ID NO: 1526433 - RNA, 19 nt, Artificial Sequence
  Description of Artificial Sequence: Synthetic oligonucleotide
auaggauuuguaucacuaa

SEQ ID NO: 1526434 - RNA, 19 nt, Artificial Sequence
  Description of Artificial Sequence: Synthetic oligonucleotide
accuacaggggccaguaca

SEQ ID NO: 1526435 - RNA, 19 nt, Artificial Sequence
  Description of Artificial Sequence: Synthetic oligonucleotide
ucaguacagugacagguua

SEQ ID NO: 1526436 - RNA, 19 nt, Artificial Sequence
  Description of Artificial Sequence: Synthetic oligonucleotide
acagaaugauugcucaaau

SEQ ID NO: 1526437 - RNA, 19 nt, Artificial Sequence
  Description of Artificial Sequence: Synthetic oligonucleotide
gaaacaccuuacuuagcca

SEQ ID NO: 1526438 - RNA, 19 nt, Artificial Sequence
  Description of Artificial Sequence: Synthetic oligonucleotide
cuaacgucaucuucucuuc

SEQ ID NO: 1526439 - RNA, 19 nt, Artificial Sequence
  Description of Artificial Sequence: Synthetic oligonucleotide
aucaaaguuaugucacaau

SEQ ID NO: 1526440 - RNA, 19 nt, Artificial Sequence
  Description of Artificial Sequence: Synthetic oligonucleotide
uugacuggagagcuguuuu

SEQ ID NO: 1526441 - RNA, 19 nt, Artificial Sequence
  Description of Artificial Sequence: Synthetic oligonucleotide
uuaaacuaggauggucaga

SEQ ID NO: 1526442 - RNA, 19 nt, Artificial Sequence
  Description of Artificial Sequence: Synthetic oligonucleotide
gugguacuaaauucuuagc

SEQ ID NO: 1526443 - RNA, 19 nt, Artificial Sequence
  Description of Artificial Sequence: Synthetic oligonucleotide
ucggcaagugccaacuuua

SEQ ID NO: 1526444 - RNA, 19 nt, Artificial Sequence
  Description of Artificial Sequence: Synthetic oligonucleotide
aaugugagaagggcagcca

SEQ ID NO: 1526445 - RNA, 19 nt, Artificial Sequence
  Description of Artificial Sequence: Synthetic oligonucleotide
caggaguuuguucauucug

SEQ ID NO: 1526446 - RNA, 19 nt, Artificial Sequence
  Description of Artificial Sequence: Synthetic oligonucleotide
aguagacaauuuuggucug

SEQ ID NO: 1526447 - RNA, 19 nt, Artificial Sequence
  Description of Artificial Sequence: Synthetic oligonucleotide
ucccuaaguagacaauuuu

SEQ ID NO: 1526448 - RNA, 19 nt, Artificial Sequence
  Description of Artificial Sequence: Synthetic oligonucleotide
guauuaaagacuaaugauu

SEQ ID NO: 1526449 - RNA, 19 nt, Artificial Sequence
  Description of Artificial Sequence: Synthetic oligonucleotide
uggaguuugucagacucac

SEQ ID NO: 1526450 - RNA, 19 nt, Artificial Sequence
  Description of Artificial Sequence: Synthetic oligonucleotide
agugaguuguaaccauacu

SEQ ID NO: 1526451 - RNA, 19 nt, Artificial Sequence
  Description of Artificial Sequence: Synthetic oligonucleotide
gauuacaacuuaauuuucu

SEQ ID NO: 1526452 - RNA, 19 nt, Artificial Sequence
  Description of Artificial Sequence: Synthetic oligonucleotide
cugcacuucucuuccuacg

SEQ ID NO: 1526453 - RNA, 19 nt, Artificial Sequence
  Description of Artificial Sequence: Synthetic oligonucleotide
guaagcaugcaacaugcua

SEQ ID NO: 1526454 - RNA, 19 nt, Artificial Sequence
  Description of Artificial Sequence: Synthetic oligonucleotide
acuaucuuuaacaguuacu

SEQ ID NO: 1526455 - RNA, 19 nt, Artificial Sequence
  Description of Artificial Sequence: Synthetic oligonucleotide
uaucacuaauuguggacua

SEQ ID NO: 1526456 - RNA, 19 nt, Artificial Sequence
  Description of Artificial Sequence: Synthetic oligonucleotide
ugucagacucacaggguaa

SEQ ID NO: 1526457 - RNA, 19 nt, Artificial Sequence
  Description of Artificial Sequence: Synthetic oligonucleotide
agaucaugucauugcugag

SEQ ID NO: 1526458 - RNA, 19 nt, Artificial Sequence
  Description of Artificial Sequence: Synthetic oligonucleotide
cagaugagcccauggcugc

SEQ ID NO: 1526459 - RNA, 19 nt, Artificial Sequence
  Description of Artificial Sequence: Synthetic oligonucleotide
uugcugagcgggcagccug

SEQ ID NO: 1526460 - RNA, 19 nt, Artificial Sequence
  Description of Artificial Sequence: Synthetic oligonucleotide
uuauaauagauggguuaaa

SEQ ID NO: 1526461 - RNA, 19 nt, Artificial Sequence
  Description of Artificial Sequence: Synthetic oligonucleotide
uagugaucuuucugaguug

SEQ ID NO: 1526462 - RNA, 19 nt, Artificial Sequence
  Description of Artificial Sequence: Synthetic oligonucleotide
uagguaacuuggcacgaau

SEQ ID NO: 1526463 - RNA, 19 nt, Artificial Sequence
  Description of Artificial Sequence: Synthetic oligonucleotide
cuuggcacgaauacaaagu

SEQ ID NO: 1526464 - RNA, 19 nt, Artificial Sequence
  Description of Artificial Sequence: Synthetic oligonucleotide
uuugcacguggcacucucc

SEQ ID NO: 1526465 - RNA, 19 nt, Artificial Sequence
  Description of Artificial Sequence: Synthetic oligonucleotide
uagauggguuaaauauagu

SEQ ID NO: 1526466 - RNA, 19 nt, Artificial Sequence
  Description of Artificial Sequence: Synthetic oligonucleotide
ucugaguauuaaagacuaa

SEQ ID NO: 1526467 - RNA, 19 nt, Artificial Sequence
  Description of Artificial Sequence: Synthetic oligonucleotide
cacguggcacucuccaggg

SEQ ID NO: 1526468 - RNA, 19 nt, Artificial Sequence
  Description of Artificial Sequence: Synthetic oligonucleotide
guaaccauacugcuaagau

SEQ ID NO: 1526469 - RNA, 19 nt, Artificial Sequence
  Description of Artificial Sequence: Synthetic oligonucleotide
cauucugcugguuaguacu

SEQ ID NO: 1526470 - RNA, 19 nt, Artificial Sequence
  Description of Artificial Sequence: Synthetic oligonucleotide
ugcucuauucaaguaguua

SEQ ID NO: 1526471 - RNA, 19 nt, Artificial Sequence
  Description of Artificial Sequence: Synthetic oligonucleotide
caguacagugacagguuac

SEQ ID NO: 1526472 - RNA, 19 nt, Artificial Sequence
  Description of Artificial Sequence: Synthetic oligonucleotide
uacgacaggugaucugaga

SEQ ID NO: 1526473 - RNA, 19 nt, Artificial Sequence
  Description of Artificial Sequence: Synthetic oligonucleotide
ugcuuuaccuaacgucauc

SEQ ID NO: 1526474 - RNA, 19 nt, Artificial Sequence
  Description of Artificial Sequence: Synthetic oligonucleotide
cauuaggguuggcuacugg

SEQ ID NO: 1526475 - RNA, 19 nt, Artificial Sequence
  Description of Artificial Sequence: Synthetic oligonucleotide
guaacuuggcacgaauaca

SEQ ID NO: 1526476 - RNA, 19 nt, Artificial Sequence
  Description of Artificial Sequence: Synthetic oligonucleotide
cagacaugauacaauaggu

SEQ ID NO: 1526477 - RNA, 19 nt, Artificial Sequence
  Description of Artificial Sequence: Synthetic oligonucleotide
caucuucaagcuaaaccga

SEQ ID NO: 1526478 - RNA, 19 nt, Artificial Sequence
  Description of Artificial Sequence: Synthetic oligonucleotide
ugggucuuaggaucccaga

SEQ ID NO: 1526479 - RNA, 19 nt, Artificial Sequence
  Description of Artificial Sequence: Synthetic oligonucleotide
caugauacaauagguaacu

SEQ ID NO: 1526480 - RNA, 19 nt, Artificial Sequence
  Description of Artificial Sequence: Synthetic oligonucleotide
uuauuugcacguggcacuc

SEQ ID NO: 1526481 - RNA, 19 nt, Artificial Sequence
  Description of Artificial Sequence: Synthetic oligonucleotide
gagcuaacaauuucuuccu

SEQ ID NO: 1526482 - RNA, 19 nt, Artificial Sequence
  Description of Artificial Sequence: Synthetic oligonucleotide
gguggaagcauguguuacc

SEQ ID NO: 1526483 - RNA, 19 nt, Artificial Sequence
  Description of Artificial Sequence: Synthetic oligonucleotide
aauauaguucuggguggaa

SEQ ID NO: 1526484 - RNA, 19 nt, Artificial Sequence
  Description of Artificial Sequence: Synthetic oligonucleotide
auaguucuggguggaagca

SEQ ID NO: 1526485 - RNA, 19 nt, Artificial Sequence
  Description of Artificial Sequence: Synthetic oligonucleotide
ucacuaauuguggacuaua

SEQ ID NO: 1526486 - RNA, 19 nt, Artificial Sequence
  Description of Artificial Sequence: Synthetic oligonucleotide
augucauugcugagcgggc

SEQ ID NO: 1526487 - RNA, 19 nt, Artificial Sequence
  Description of Artificial Sequence: Synthetic oligonucleotide
ugacuggagagcuguuuuc

SEQ ID NO: 1526488 - RNA, 19 nt, Artificial Sequence
  Description of Artificial Sequence: Synthetic oligonucleotide
acuuaaggaagagccacau

SEQ ID NO: 1526489 - RNA, 19 nt, Artificial Sequence
  Description of Artificial Sequence: Synthetic oligonucleotide
cuuaaggaagagccacauc

SEQ ID NO: 1526490 - RNA, 19 nt, Artificial Sequence
  Description of Artificial Sequence: Synthetic oligonucleotide
cuuccuacgacaggugauc

SEQ ID NO: 1526491 - RNA, 19 nt, Artificial Sequence
  Description of Artificial Sequence: Synthetic oligonucleotide
guaucacuaauuguggacu

SEQ ID NO: 1526492 - RNA, 19 nt, Artificial Sequence
  Description of Artificial Sequence: Synthetic oligonucleotide
cuucaagcuaaaccgaacu

SEQ ID NO: 1526493 - RNA, 19 nt, Artificial Sequence
  Description of Artificial Sequence: Synthetic oligonucleotide
gaguuguaaccauacugcu

SEQ ID NO: 1526494 - RNA, 19 nt, Artificial Sequence
  Description of Artificial Sequence: Synthetic oligonucleotide
gguacuaaauucuuagcau

SEQ ID NO: 1526495 - RNA, 19 nt, Artificial Sequence
  Description of Artificial Sequence: Synthetic oligonucleotide
gcauuccaaggccacgugg

SEQ ID NO: 1526496 - RNA, 19 nt, Artificial Sequence
  Description of Artificial Sequence: Synthetic oligonucleotide
cuaagaucaugucauugcu

SEQ ID NO: 1526497 - RNA, 19 nt, Artificial Sequence
  Description of Artificial Sequence: Synthetic oligonucleotide
ugucauugcugagcgggca

SEQ ID NO: 1526498 - RNA, 19 nt, Artificial Sequence
  Description of Artificial Sequence: Synthetic oligonucleotide
gcacguggcacucuccagg

SEQ ID NO: 1526499 - RNA, 19 nt, Artificial Sequence
  Description of Artificial Sequence: Synthetic oligonucleotide
uacaggggccaguacaguu

SEQ ID NO: 1526500 - RNA, 19 nt, Artificial Sequence
  Description of Artificial Sequence: Synthetic oligonucleotide
cagguuacuuaaggaagag

SEQ ID NO: 1526501 - RNA, 19 nt, Artificial Sequence
  Description of Artificial Sequence: Synthetic oligonucleotide
ugcacguggcacucuccag

SEQ ID NO: 1526502 - RNA, 19 nt, Artificial Sequence
  Description of Artificial Sequence: Synthetic oligonucleotide
uugcucaaauacucccuaa

SEQ ID NO: 1526503 - RNA, 19 nt, Artificial Sequence
  Description of Artificial Sequence: Synthetic oligonucleotide
aggauuuguaucacuaauu

SEQ ID NO: 1526504 - RNA, 19 nt, Artificial Sequence
  Description of Artificial Sequence: Synthetic oligonucleotide
uuugacuggagagcuguuu

SEQ ID NO: 1526505 - RNA, 19 nt, Artificial Sequence
  Description of Artificial Sequence: Synthetic oligonucleotide
uaccuaacgucaucuucuc

SEQ ID NO: 1526506 - RNA, 19 nt, Artificial Sequence
  Description of Artificial Sequence: Synthetic oligonucleotide
aucggcaagugccaacuuu

SEQ ID NO: 1526507 - RNA, 19 nt, Artificial Sequence
  Description of Artificial Sequence: Synthetic oligonucleotide
aguuggucacaguggaguu

SEQ ID NO: 1526508 - RNA, 19 nt, Artificial Sequence
  Description of Artificial Sequence: Synthetic oligonucleotide
cguagcuacauuaggguug

SEQ ID NO: 1526509 - RNA, 19 nt, Artificial Sequence
  Description of Artificial Sequence: Synthetic oligonucleotide
acucccuaaguagacaauu

SEQ ID NO: 1526510 - RNA, 19 nt, Artificial Sequence
  Description of Artificial Sequence: Synthetic oligonucleotide
gaagcauguguuaccuaca

SEQ ID NO: 1526511 - RNA, 19 nt, Artificial Sequence
  Description of Artificial Sequence: Synthetic oligonucleotide
uuaccuacaggggccagua

SEQ ID NO: 1526512 - RNA, 19 nt, Artificial Sequence
  Description of Artificial Sequence: Synthetic oligonucleotide
cuacgacaggugaucugag

SEQ ID NO: 1526513 - RNA, 19 nt, Artificial Sequence
  Description of Artificial Sequence: Synthetic oligonucleotide
agcauuccaaggccacgug

SEQ ID NO: 1526514 - RNA, 19 nt, Artificial Sequence
  Description of Artificial Sequence: Synthetic oligonucleotide
cucuauucaaguaguuaua

SEQ ID NO: 1526515 - RNA, 19 nt, Artificial Sequence
  Description of Artificial Sequence: Synthetic oligonucleotide
gcucuauucaaguaguuau

SEQ ID NO: 1526516 - RNA, 19 nt, Artificial Sequence
  Description of Artificial Sequence: Synthetic oligonucleotide
ccuacaggggccaguacag

SEQ ID NO: 1526517 - RNA, 19 nt, Artificial Sequence
  Description of Artificial Sequence: Synthetic oligonucleotide
uccugcacuucucuuccua

SEQ ID NO: 1526518 - RNA, 19 nt, Artificial Sequence
  Description of Artificial Sequence: Synthetic oligonucleotide
cuuaggaucccagaagacu

SEQ ID NO: 1526519 - RNA, 19 nt, Artificial Sequence
  Description of Artificial Sequence: Synthetic oligonucleotide
gauugcucaaauacucccu

SEQ ID NO: 1526520 - RNA, 19 nt, Artificial Sequence
  Description of Artificial Sequence: Synthetic oligonucleotide
aucuucaagcuaaaccgaa

SEQ ID NO: 1526521 - RNA, 19 nt, Artificial Sequence
  Description of Artificial Sequence: Synthetic oligonucleotide
acguggcacucuccagggc

SEQ ID NO: 1526522 - RNA, 19 nt, Artificial Sequence
  Description of Artificial Sequence: Synthetic oligonucleotide
aucugagacaccguagcua

SEQ ID NO: 1526523 - RNA, 19 nt, Artificial Sequence
  Description of Artificial Sequence: Synthetic oligonucleotide
ugccaacuuuaaugaugag

SEQ ID NO: 1526524 - RNA, 19 nt, Artificial Sequence
  Description of Artificial Sequence: Synthetic oligonucleotide
uacuggcaggaguuuguuc

SEQ ID NO: 1526525 - RNA, 19 nt, Artificial Sequence
  Description of Artificial Sequence: Synthetic oligonucleotide
auaucagaaugggaaugau

SEQ ID NO: 1526526 - RNA, 19 nt, Artificial Sequence
  Description of Artificial Sequence: Synthetic oligonucleotide
aguuguaaccauacugcua

SEQ ID NO: 1526527 - RNA, 19 nt, Artificial Sequence
  Description of Artificial Sequence: Synthetic oligonucleotide
gcuaaaccgaacuguuuca

SEQ ID NO: 1526528 - RNA, 19 nt, Artificial Sequence
  Description of Artificial Sequence: Synthetic oligonucleotide
cugaguauuaaagacuaau

SEQ ID NO: 1526529 - RNA, 19 nt, Artificial Sequence
  Description of Artificial Sequence: Synthetic oligonucleotide
gaaaaucggcaagugccaa

SEQ ID NO: 1526530 - RNA, 19 nt, Artificial Sequence
  Description of Artificial Sequence: Synthetic oligonucleotide
cagugacagguuacuuaag

SEQ ID NO: 1526531 - RNA, 19 nt, Artificial Sequence
  Description of Artificial Sequence: Synthetic oligonucleotide
acaccuuacuuagccauaa

SEQ ID NO: 1526532 - RNA, 19 nt, Artificial Sequence
  Description of Artificial Sequence: Synthetic oligonucleotide
acaggugaucugagacacc

SEQ ID NO: 1526533 - RNA, 19 nt, Artificial Sequence
  Description of Artificial Sequence: Synthetic oligonucleotide
cacgaauacaaagugaguu

SEQ ID NO: 1526534 - RNA, 19 nt, Artificial Sequence
  Description of Artificial Sequence: Synthetic oligonucleotide
cucuuccuacgacagguga

SEQ ID NO: 1526535 - RNA, 19 nt, Artificial Sequence
  Description of Artificial Sequence: Synthetic oligonucleotide
aaucggcaagugccaacuu

SEQ ID NO: 1526536 - RNA, 19 nt, Artificial Sequence
  Description of Artificial Sequence: Synthetic oligonucleotide
guauuauacaaaaggucau

SEQ ID NO: 1526537 - RNA, 19 nt, Artificial Sequence
  Description of Artificial Sequence: Synthetic oligonucleotide
uuccuacgacaggugaucu

SEQ ID NO: 1526538 - RNA, 19 nt, Artificial Sequence
  Description of Artificial Sequence: Synthetic oligonucleotide
guuaguacuuccucauuuu

SEQ ID NO: 1526539 - RNA, 19 nt, Artificial Sequence
  Description of Artificial Sequence: Synthetic oligonucleotide
auucaauuguaaggacuau

SEQ ID NO: 1526540 - RNA, 19 nt, Artificial Sequence
  Description of Artificial Sequence: Synthetic oligonucleotide
aacaccuuacuuagccaua

SEQ ID NO: 1526541 - RNA, 19 nt, Artificial Sequence
  Description of Artificial Sequence: Synthetic oligonucleotide
accuaacgucaucuucucu

SEQ ID NO: 1526542 - RNA, 19 nt, Artificial Sequence
  Description of Artificial Sequence: Synthetic oligonucleotide
aagcuaaaccgaacuguuu

SEQ ID NO: 1526543 - RNA, 19 nt, Artificial Sequence
  Description of Artificial Sequence: Synthetic oligonucleotide
auuguggacuauagggaaa

SEQ ID NO: 1526544 - RNA, 19 nt, Artificial Sequence
  Description of Artificial Sequence: Synthetic oligonucleotide
agcaugcaacaugcuauug

SEQ ID NO: 1526545 - RNA, 19 nt, Artificial Sequence
  Description of Artificial Sequence: Synthetic oligonucleotide
gucagacucacaggguaac

SEQ ID NO: 1526546 - RNA, 19 nt, Artificial Sequence
  Description of Artificial Sequence: Synthetic oligonucleotide
acauuaggguuggcuacug

SEQ ID NO: 1526547 - RNA, 19 nt, Artificial Sequence
  Description of Artificial Sequence: Synthetic oligonucleotide
aucacuaauuguggacuau

SEQ ID NO: 1526548 - RNA, 19 nt, Artificial Sequence
  Description of Artificial Sequence: Synthetic oligonucleotide
gggaaugauaaaacagaca

SEQ ID NO: 1526549 - RNA, 19 nt, Artificial Sequence
  Description of Artificial Sequence: Synthetic oligonucleotide
guuggcuacuggcaggagu

SEQ ID NO: 1526550 - RNA, 19 nt, Artificial Sequence
  Description of Artificial Sequence: Synthetic oligonucleotide
uguuaccuacaggggccag

SEQ ID NO: 1526551 - RNA, 19 nt, Artificial Sequence
  Description of Artificial Sequence: Synthetic oligonucleotide
cacaucagaaugacaacau

SEQ ID NO: 1526552 - RNA, 19 nt, Artificial Sequence
  Description of Artificial Sequence: Synthetic oligonucleotide
aucaguacagugacagguu

SEQ ID NO: 1526553 - RNA, 19 nt, Artificial Sequence
  Description of Artificial Sequence: Synthetic oligonucleotide
caagccuccuaauuuugcu

SEQ ID NO: 1526554 - RNA, 19 nt, Artificial Sequence
  Description of Artificial Sequence: Synthetic oligonucleotide
guagacaauuuuggucuga

SEQ ID NO: 1526555 - RNA, 19 nt, Artificial Sequence
  Description of Artificial Sequence: Synthetic oligonucleotide
ggccaguacaguuggucac

SEQ ID NO: 1526556 - RNA, 19 nt, Artificial Sequence
  Description of Artificial Sequence: Synthetic oligonucleotide
caaagugaguuguaaccau

SEQ ID NO: 1526557 - RNA, 19 nt, Artificial Sequence
  Description of Artificial Sequence: Synthetic oligonucleotide
auagguaacuuggcacgaa

SEQ ID NO: 1526558 - RNA, 19 nt, Artificial Sequence
  Description of Artificial Sequence: Synthetic oligonucleotide
uggaagcauguguuaccua

SEQ ID NO: 1526559 - RNA, 19 nt, Artificial Sequence
  Description of Artificial Sequence: Synthetic oligonucleotide
augauacaauagguaacuu

SEQ ID NO: 1526560 - RNA, 19 nt, Artificial Sequence
  Description of Artificial Sequence: Synthetic oligonucleotide
uaccuacaggggccaguac

SEQ ID NO: 1526561 - RNA, 19 nt, Artificial Sequence
  Description of Artificial Sequence: Synthetic oligonucleotide
gcucaaauacucccuaagu

SEQ ID NO: 1526562 - RNA, 19 nt, Artificial Sequence
  Description of Artificial Sequence: Synthetic oligonucleotide
augucacaauuaacaauaa

SEQ ID NO: 1526563 - RNA, 19 nt, Artificial Sequence
  Description of Artificial Sequence: Synthetic oligonucleotide
caguuggucacaguggagu

SEQ ID NO: 1526564 - RNA, 19 nt, Artificial Sequence
  Description of Artificial Sequence: Synthetic oligonucleotide
caacuuuaaugaugagcua

SEQ ID NO: 1526565 - RNA, 19 nt, Artificial Sequence
  Description of Artificial Sequence: Synthetic oligonucleotide
ggacuauagggaaaauaaa

SEQ ID NO: 1526566 - RNA, 19 nt, Artificial Sequence
  Description of Artificial Sequence: Synthetic oligonucleotide
agguaacuuggcacgaaua

SEQ ID NO: 1526567 - RNA, 19 nt, Artificial Sequence
  Description of Artificial Sequence: Synthetic oligonucleotide
acgcuccuugcaucuguca

SEQ ID NO: 1526568 - RNA, 19 nt, Artificial Sequence
  Description of Artificial Sequence: Synthetic oligonucleotide
agcagggccuaugauuuua

SEQ ID NO: 1526569 - RNA, 19 nt, Artificial Sequence
  Description of Artificial Sequence: Synthetic oligonucleotide
ggguggaagcauguguuac

SEQ ID NO: 1526570 - RNA, 19 nt, Artificial Sequence
  Description of Artificial Sequence: Synthetic oligonucleotide
ccugcacuucucuuccuac

SEQ ID NO: 1526571 - RNA, 19 nt, Artificial Sequence
  Description of Artificial Sequence: Synthetic oligonucleotide
auugcugagcgggcagccu

SEQ ID NO: 1526572 - RNA, 19 nt, Artificial Sequence
  Description of Artificial Sequence: Synthetic oligonucleotide
ccuacgacaggugaucuga

SEQ ID NO: 1526573 - RNA, 19 nt, Artificial Sequence
  Description of Artificial Sequence: Synthetic oligonucleotide
ugcacgcuccuugcaucug

SEQ ID NO: 1526574 - RNA, 19 nt, Artificial Sequence
  Description of Artificial Sequence: Synthetic oligonucleotide
cuucugcuuuaccuaacgu

SEQ ID NO: 1526575 - RNA, 19 nt, Artificial Sequence
  Description of Artificial Sequence: Synthetic oligonucleotide
gcuuuaccuaacgucaucu

SEQ ID NO: 1526576 - RNA, 19 nt, Artificial Sequence
  Description of Artificial Sequence: Synthetic oligonucleotide
cugagcgggcagccugagc

SEQ ID NO: 1526577 - RNA, 19 nt, Artificial Sequence
  Description of Artificial Sequence: Synthetic oligonucleotide
guguuaccuacaggggcca

SEQ ID NO: 1526578 - RNA, 19 nt, Artificial Sequence
  Description of Artificial Sequence: Synthetic oligonucleotide
cuguaauguagugaucuuu

SEQ ID NO: 1526579 - RNA, 19 nt, Artificial Sequence
  Description of Artificial Sequence: Synthetic oligonucleotide
cucccuaaguagacaauuu

SEQ ID NO: 1526580 - RNA, 19 nt, Artificial Sequence
  Description of Artificial Sequence: Synthetic oligonucleotide
cuaaaccgaacuguuucau

SEQ ID NO: 1526581 - RNA, 19 nt, Artificial Sequence
  Description of Artificial Sequence: Synthetic oligonucleotide
cuuuaccuaacgucaucuu

SEQ ID NO: 1526582 - RNA, 19 nt, Artificial Sequence
  Description of Artificial Sequence: Synthetic oligonucleotide
cugagacaccguagcuaca

SEQ ID NO: 1526583 - RNA, 19 nt, Artificial Sequence
  Description of Artificial Sequence: Synthetic oligonucleotide
guuaccuacaggggccagu

SEQ ID NO: 1526584 - RNA, 19 nt, Artificial Sequence
  Description of Artificial Sequence: Synthetic oligonucleotide
ccagauaguagcuuuucuu

SEQ ID NO: 1526585 - RNA, 19 nt, Artificial Sequence
  Description of Artificial Sequence: Synthetic oligonucleotide
gccaguacaguuggucaca

SEQ ID NO: 1526586 - RNA, 19 nt, Artificial Sequence
  Description of Artificial Sequence: Synthetic oligonucleotide
cugcuuuaccuaacgucau

SEQ ID NO: 1526587 - RNA, 19 nt, Artificial Sequence
  Description of Artificial Sequence: Synthetic oligonucleotide
gcaggaguuuguucauucu

SEQ ID NO: 1526588 - RNA, 19 nt, Artificial Sequence
  Description of Artificial Sequence: Synthetic oligonucleotide
ggaucccagaagacuuuca

SEQ ID NO: 1526589 - RNA, 19 nt, Artificial Sequence
  Description of Artificial Sequence: Synthetic oligonucleotide
ccagcagggccuaugauuu

SEQ ID NO: 1526590 - RNA, 19 nt, Artificial Sequence
  Description of Artificial Sequence: Synthetic oligonucleotide
caccuuacuuagccauaaa

SEQ ID NO: 1526591 - RNA, 19 nt, Artificial Sequence
  Description of Artificial Sequence: Synthetic oligonucleotide
cgacaggugaucugagaca

SEQ ID NO: 1526592 - RNA, 19 nt, Artificial Sequence
  Description of Artificial Sequence: Synthetic oligonucleotide
uggcuacuggcaggaguuu

SEQ ID NO: 1526593 - RNA, 19 nt, Artificial Sequence
  Description of Artificial Sequence: Synthetic oligonucleotide
ggcaagugccaacuuuaau

SEQ ID NO: 1526594 - RNA, 19 nt, Artificial Sequence
  Description of Artificial Sequence: Synthetic oligonucleotide
ggacuaucuuuaacaguua

SEQ ID NO: 1526595 - RNA, 19 nt, Artificial Sequence
  Description of Artificial Sequence: Synthetic oligonucleotide
caguacaguuggucacagu

SEQ ID NO: 1526596 - RNA, 19 nt, Artificial Sequence
  Description of Artificial Sequence: Synthetic oligonucleotide
cugcuaagaucaugucauu

SEQ ID NO: 1526597 - RNA, 19 nt, Artificial Sequence
  Description of Artificial Sequence: Synthetic oligonucleotide
gcacgaauacaaagugagu

SEQ ID NO: 1526598 - RNA, 19 nt, Artificial Sequence
  Description of Artificial Sequence: Synthetic oligonucleotide
cuggagugaugggagcuuu

SEQ ID NO: 1526599 - RNA, 19 nt, Artificial Sequence
  Description of Artificial Sequence: Synthetic oligonucleotide
cagggccuaugauuuuauu

SEQ ID NO: 1526600 - RNA, 19 nt, Artificial Sequence
  Description of Artificial Sequence: Synthetic oligonucleotide
ccguagcuacauuaggguu

SEQ ID NO: 1526601 - RNA, 19 nt, Artificial Sequence
  Description of Artificial Sequence: Synthetic oligonucleotide
caaggccacguggcuaagu

SEQ ID NO: 1526602 - RNA, 19 nt, Artificial Sequence
  Description of Artificial Sequence: Synthetic oligonucleotide
ccacguggcuaagucagua

SEQ ID NO: 1526603 - RNA, 19 nt, Artificial Sequence
  Description of Artificial Sequence: Synthetic oligonucleotide
cggcaagugccaacuuuaa

SEQ ID NO: 1526604 - RNA, 19 nt, Artificial Sequence
  Description of Artificial Sequence: Synthetic oligonucleotide
gcagggccuaugauuuuau

SEQ ID NO: 1526605 - RNA, 19 nt, Artificial Sequence
  Description of Artificial Sequence: Synthetic oligonucleotide
cagcagggccuaugauuuu

SEQ ID NO: 1526606 - RNA, 19 nt, Artificial Sequence
  Description of Artificial Sequence: Synthetic oligonucleotide
ccagggccccuggagugau

SEQ ID NO: 1526607 - RNA, 19 nt, Artificial Sequence
  Description of Artificial Sequence: Synthetic oligonucleotide
aauguugguuccuagagag

SEQ ID NO: 1526608 - RNA, 19 nt, Artificial Sequence
  Description of Artificial Sequence: Synthetic oligonucleotide
aguccgguaaaauaggucc

SEQ ID NO: 1526609 - RNA, 19 nt, Artificial Sequence
  Description of Artificial Sequence: Synthetic oligonucleotide
uaaaauagccagaugacag

SEQ ID NO: 1526610 - RNA, 19 nt, Artificial Sequence
  Description of Artificial Sequence: Synthetic oligonucleotide
uaaaauagguccuugaggu

SEQ ID NO: 1526611 - RNA, 19 nt, Artificial Sequence
  Description of Artificial Sequence: Synthetic oligonucleotide
aaagcaugaagguggacac

SEQ ID NO: 1526612 - RNA, 19 nt, Artificial Sequence
  Description of Artificial Sequence: Synthetic oligonucleotide
aaagcaagcgccccaaaac

SEQ ID NO: 1526613 - RNA, 19 nt, Artificial Sequence
  Description of Artificial Sequence: Synthetic oligonucleotide
aguaggauagcacacacag

SEQ ID NO: 1526614 - RNA, 19 nt, Artificial Sequence
  Description of Artificial Sequence: Synthetic oligonucleotide
uguuccauagccuauauaa

SEQ ID NO: 1526615 - RNA, 19 nt, Artificial Sequence
  Description of Artificial Sequence: Synthetic oligonucleotide
aauaccguuguaaacagag

SEQ ID NO: 1526616 - RNA, 19 nt, Artificial Sequence
  Description of Artificial Sequence: Synthetic oligonucleotide
uaggaaacuagucaagaag

SEQ ID NO: 1526617 - RNA, 19 nt, Artificial Sequence
  Description of Artificial Sequence: Synthetic oligonucleotide
auauaaaccgcaucccagc

SEQ ID NO: 1526618 - RNA, 19 nt, Artificial Sequence
  Description of Artificial Sequence: Synthetic oligonucleotide
aaugcaaagaucgguucgc

SEQ ID NO: 1526619 - RNA, 19 nt, Artificial Sequence
  Description of Artificial Sequence: Synthetic oligonucleotide
cuugacaccccauagacug

SEQ ID NO: 1526620 - RNA, 19 nt, Artificial Sequence
  Description of Artificial Sequence: Synthetic oligonucleotide
guaguuaccguuuucuucc

SEQ ID NO: 1526621 - RNA, 19 nt, Artificial Sequence
  Description of Artificial Sequence: Synthetic oligonucleotide
aagaaugguauccugacua

SEQ ID NO: 1526622 - RNA, 19 nt, Artificial Sequence
  Description of Artificial Sequence: Synthetic oligonucleotide
gacuaaaagcaucaucagg

SEQ ID NO: 1526623 - RNA, 19 nt, Artificial Sequence
  Description of Artificial Sequence: Synthetic oligonucleotide
uauucgaaugauuuucugc

SEQ ID NO: 1526624 - RNA, 19 nt, Artificial Sequence
  Description of Artificial Sequence: Synthetic oligonucleotide
uucgcuuuuguuuugguga

SEQ ID NO: 1526625 - RNA, 19 nt, Artificial Sequence
  Description of Artificial Sequence: Synthetic oligonucleotide
auagcaaaagcguuuagga

SEQ ID NO: 1526626 - RNA, 19 nt, Artificial Sequence
  Description of Artificial Sequence: Synthetic oligonucleotide
cugacuaaaagcaucauca

SEQ ID NO: 1526627 - RNA, 19 nt, Artificial Sequence
  Description of Artificial Sequence: Synthetic oligonucleotide
auucgaaugauuuucugcu

SEQ ID NO: 1526628 - RNA, 19 nt, Artificial Sequence
  Description of Artificial Sequence: Synthetic oligonucleotide
agcaaaagcguuuaggaga

SEQ ID NO: 1526629 - RNA, 19 nt, Artificial Sequence
  Description of Artificial Sequence: Synthetic oligonucleotide
aguaaguccgguaaaauag

SEQ ID NO: 1526630 - RNA, 19 nt, Artificial Sequence
  Description of Artificial Sequence: Synthetic oligonucleotide
gacuguaagaacuauggca

SEQ ID NO: 1526631 - RNA, 19 nt, Artificial Sequence
  Description of Artificial Sequence: Synthetic oligonucleotide
cuagucaagaaggagacgc

SEQ ID NO: 1526632 - RNA, 19 nt, Artificial Sequence
  Description of Artificial Sequence: Synthetic oligonucleotide
gaacaaugcaccuuguuca

SEQ ID NO: 1526633 - RNA, 19 nt, Artificial Sequence
  Description of Artificial Sequence: Synthetic oligonucleotide
uaaauaccguuguaaacag

SEQ ID NO: 1526634 - RNA, 19 nt, Artificial Sequence
  Description of Artificial Sequence: Synthetic oligonucleotide
aaugaugaaauaggaccac

SEQ ID NO: 1526635 - RNA, 19 nt, Artificial Sequence
  Description of Artificial Sequence: Synthetic oligonucleotide
aagaaagcuaugcaagcga

SEQ ID NO: 1526636 - RNA, 19 nt, Artificial Sequence
  Description of Artificial Sequence: Synthetic oligonucleotide
aaacuagucaagaaggaga

SEQ ID NO: 1526637 - RNA, 19 nt, Artificial Sequence
  Description of Artificial Sequence: Synthetic oligonucleotide
aaauuggagaaauuccgau

SEQ ID NO: 1526638 - RNA, 19 nt, Artificial Sequence
  Description of Artificial Sequence: Synthetic oligonucleotide
aaagcguuuaggagaaugg

SEQ ID NO: 1526639 - RNA, 19 nt, Artificial Sequence
  Description of Artificial Sequence: Synthetic oligonucleotide
caguucucggauaaaauag

SEQ ID NO: 1526640 - RNA, 19 nt, Artificial Sequence
  Description of Artificial Sequence: Synthetic oligonucleotide
aagcguuuaggagaauggc

SEQ ID NO: 1526641 - RNA, 19 nt, Artificial Sequence
  Description of Artificial Sequence: Synthetic oligonucleotide
gaugcaaugagaaacugga

SEQ ID NO: 1526642 - RNA, 19 nt, Artificial Sequence
  Description of Artificial Sequence: Synthetic oligonucleotide
uguugguuccuagagagcc

SEQ ID NO: 1526643 - RNA, 19 nt, Artificial Sequence
  Description of Artificial Sequence: Synthetic oligonucleotide
aauuccgauuaccacaaaa

SEQ ID NO: 1526644 - RNA, 19 nt, Artificial Sequence
  Description of Artificial Sequence: Synthetic oligonucleotide
ucugcuuguagucuuuaca

SEQ ID NO: 1526645 - RNA, 19 nt, Artificial Sequence
  Description of Artificial Sequence: Synthetic oligonucleotide
aaauguugguuccuagaga

SEQ ID NO: 1526646 - RNA, 19 nt, Artificial Sequence
  Description of Artificial Sequence: Synthetic oligonucleotide
cuccaguacacauacugcg

SEQ ID NO: 1526647 - RNA, 19 nt, Artificial Sequence
  Description of Artificial Sequence: Synthetic oligonucleotide
aacaaugcaccuuguucag

SEQ ID NO: 1526648 - RNA, 19 nt, Artificial Sequence
  Description of Artificial Sequence: Synthetic oligonucleotide
aggaaaacggaaauguagg

SEQ ID NO: 1526649 - RNA, 19 nt, Artificial Sequence
  Description of Artificial Sequence: Synthetic oligonucleotide
ugauguaugcucacugggc

SEQ ID NO: 1526650 - RNA, 19 nt, Artificial Sequence
  Description of Artificial Sequence: Synthetic oligonucleotide
uaaaccgcaucccagcaga

SEQ ID NO: 1526651 - RNA, 19 nt, Artificial Sequence
  Description of Artificial Sequence: Synthetic oligonucleotide
aacacggcuauucgaauga

SEQ ID NO: 1526652 - RNA, 19 nt, Artificial Sequence
  Description of Artificial Sequence: Synthetic oligonucleotide
gaaacuagucaagaaggag

SEQ ID NO: 1526653 - RNA, 19 nt, Artificial Sequence
  Description of Artificial Sequence: Synthetic oligonucleotide
cauagcaaaagcguuuagg

SEQ ID NO: 1526654 - RNA, 19 nt, Artificial Sequence
  Description of Artificial Sequence: Synthetic oligonucleotide
acgaagaguguguagcuuc

SEQ ID NO: 1526655 - RNA, 19 nt, Artificial Sequence
  Description of Artificial Sequence: Synthetic oligonucleotide
gacaaucugagaugaagac

SEQ ID NO: 1526656 - RNA, 19 nt, Artificial Sequence
  Description of Artificial Sequence: Synthetic oligonucleotide
uguaguuaccguuuucuuc

SEQ ID NO: 1526657 - RNA, 19 nt, Artificial Sequence
  Description of Artificial Sequence: Synthetic oligonucleotide
ugguauccugacuaaaagc

SEQ ID NO: 1526658 - RNA, 19 nt, Artificial Sequence
  Description of Artificial Sequence: Synthetic oligonucleotide
aacgacuccgagcauaaaa

SEQ ID NO: 1526659 - RNA, 19 nt, Artificial Sequence
  Description of Artificial Sequence: Synthetic oligonucleotide
aagcaaguaaguccgguaa

SEQ ID NO: 1526660 - RNA, 19 nt, Artificial Sequence
  Description of Artificial Sequence: Synthetic oligonucleotide
augguauccugacuaaaag

SEQ ID NO: 1526661 - RNA, 19 nt, Artificial Sequence
  Description of Artificial Sequence: Synthetic oligonucleotide
accauagggaguuuccguc

SEQ ID NO: 1526662 - RNA, 19 nt, Artificial Sequence
  Description of Artificial Sequence: Synthetic oligonucleotide
uguuagcccaguaacgacu

SEQ ID NO: 1526663 - RNA, 19 nt, Artificial Sequence
  Description of Artificial Sequence: Synthetic oligonucleotide
aagaccgccgcuuaccgga

SEQ ID NO: 1526664 - RNA, 19 nt, Artificial Sequence
  Description of Artificial Sequence: Synthetic oligonucleotide
acaccccauagacugaugg

SEQ ID NO: 1526665 - RNA, 19 nt, Artificial Sequence
  Description of Artificial Sequence: Synthetic oligonucleotide
aaaauuggagaaauuccga

SEQ ID NO: 1526666 - RNA, 19 nt, Artificial Sequence
  Description of Artificial Sequence: Synthetic oligonucleotide
aguucucggauaaaauagc

SEQ ID NO: 1526667 - RNA, 19 nt, Artificial Sequence
  Description of Artificial Sequence: Synthetic oligonucleotide
uauaaaccgcaucccagca

SEQ ID NO: 1526668 - RNA, 19 nt, Artificial Sequence
  Description of Artificial Sequence: Synthetic oligonucleotide
cugcuuguagucuuuacac

SEQ ID NO: 1526669 - RNA, 19 nt, Artificial Sequence
  Description of Artificial Sequence: Synthetic oligonucleotide
agacauugcuaccggaauc

SEQ ID NO: 1526670 - RNA, 19 nt, Artificial Sequence
  Description of Artificial Sequence: Synthetic oligonucleotide
acauacugcgccguuagcg

SEQ ID NO: 1526671 - RNA, 19 nt, Artificial Sequence
  Description of Artificial Sequence: Synthetic oligonucleotide
cagccaaugcacuugacac

SEQ ID NO: 1526672 - RNA, 19 nt, Artificial Sequence
  Description of Artificial Sequence: Synthetic oligonucleotide
ugcaagcgaacaaugcacc

SEQ ID NO: 1526673 - RNA, 19 nt, Artificial Sequence
  Description of Artificial Sequence: Synthetic oligonucleotide
cauacugcgccguuagcgg

SEQ ID NO: 1526674 - RNA, 19 nt, Artificial Sequence
  Description of Artificial Sequence: Synthetic oligonucleotide
cuaugcaagcgaacaaugc

SEQ ID NO: 1526675 - RNA, 19 nt, Artificial Sequence
  Description of Artificial Sequence: Synthetic oligonucleotide
agaauggcgggcucgauga

SEQ ID NO: 1526676 - RNA, 19 nt, Artificial Sequence
  Description of Artificial Sequence: Synthetic oligonucleotide
uguaagaacuauggcaaug

SEQ ID NO: 1526677 - RNA, 19 nt, Artificial Sequence
  Description of Artificial Sequence: Synthetic oligonucleotide
auaaaauagccagaugaca

SEQ ID NO: 1526678 - RNA, 19 nt, Artificial Sequence
  Description of Artificial Sequence: Synthetic oligonucleotide
uaugccuaggaaacuaguc

SEQ ID NO: 1526679 - RNA, 19 nt, Artificial Sequence
  Description of Artificial Sequence: Synthetic oligonucleotide
gccuauauaaaccgcaucc

SEQ ID NO: 1526680 - RNA, 19 nt, Artificial Sequence
  Description of Artificial Sequence: Synthetic oligonucleotide
gguggcugaauaaauaccg

SEQ ID NO: 1526681 - RNA, 19 nt, Artificial Sequence
  Description of Artificial Sequence: Synthetic oligonucleotide
uggaccgcaggacagagaa

SEQ ID NO: 1526682 - RNA, 19 nt, Artificial Sequence
  Description of Artificial Sequence: Synthetic oligonucleotide
augccuaggaaacuaguca

SEQ ID NO: 1526683 - RNA, 19 nt, Artificial Sequence
  Description of Artificial Sequence: Synthetic oligonucleotide
gacuccgagcauaaaaucc

SEQ ID NO: 1526684 - RNA, 19 nt, Artificial Sequence
  Description of Artificial Sequence: Synthetic oligonucleotide
auagccagaugacaggccu

SEQ ID NO: 1526685 - RNA, 19 nt, Artificial Sequence
  Description of Artificial Sequence: Synthetic oligonucleotide
ugcuaccggaaucaaaggu

SEQ ID NO: 1526686 - RNA, 19 nt, Artificial Sequence
  Description of Artificial Sequence: Synthetic oligonucleotide
aaagcaaguaaguccggua

SEQ ID NO: 1526687 - RNA, 19 nt, Artificial Sequence
  Description of Artificial Sequence: Synthetic oligonucleotide
cauagccuauauaaaccgc

SEQ ID NO: 1526688 - RNA, 19 nt, Artificial Sequence
  Description of Artificial Sequence: Synthetic oligonucleotide
aaagaccgccgcuuaccgg

SEQ ID NO: 1526689 - RNA, 19 nt, Artificial Sequence
  Description of Artificial Sequence: Synthetic oligonucleotide
accuuguucagucgagggg

SEQ ID NO: 1526690 - RNA, 19 nt, Artificial Sequence
  Description of Artificial Sequence: Synthetic oligonucleotide
aaaagcaaguaaguccggu

SEQ ID NO: 1526691 - RNA, 19 nt, Artificial Sequence
  Description of Artificial Sequence: Synthetic oligonucleotide
auagacugauggcugggag

SEQ ID NO: 1526692 - RNA, 19 nt, Artificial Sequence
  Description of Artificial Sequence: Synthetic oligonucleotide
gaccgcaggacagagaaug

SEQ ID NO: 1526693 - RNA, 19 nt, Artificial Sequence
  Description of Artificial Sequence: Synthetic oligonucleotide
aaugguauccugacuaaaa

SEQ ID NO: 1526694 - RNA, 19 nt, Artificial Sequence
  Description of Artificial Sequence: Synthetic oligonucleotide
gaaaacggaaauguagguc

SEQ ID NO: 1526695 - RNA, 19 nt, Artificial Sequence
  Description of Artificial Sequence: Synthetic oligonucleotide
uaaguccgguaaaauaggu

SEQ ID NO: 1526696 - RNA, 19 nt, Artificial Sequence
  Description of Artificial Sequence: Synthetic oligonucleotide
guaaguccgguaaaauagg

SEQ ID NO: 1526697 - RNA, 19 nt, Artificial Sequence
  Description of Artificial Sequence: Synthetic oligonucleotide
uaacccacucauuuccacc

SEQ ID NO: 1526698 - RNA, 19 nt, Artificial Sequence
  Description of Artificial Sequence: Synthetic oligonucleotide
aaguccgguaaaauagguc

SEQ ID NO: 1526699 - RNA, 19 nt, Artificial Sequence
  Description of Artificial Sequence: Synthetic oligonucleotide
guuagcgggauggucaggg

SEQ ID NO: 1526700 - RNA, 19 nt, Artificial Sequence
  Description of Artificial Sequence: Synthetic oligonucleotide
agcguuuaggagaauggcg

SEQ ID NO: 1526701 - RNA, 19 nt, Artificial Sequence
  Description of Artificial Sequence: Synthetic oligonucleotide
agcaauaagaaaacagcca

SEQ ID NO: 1526702 - RNA, 19 nt, Artificial Sequence
  Description of Artificial Sequence: Synthetic oligonucleotide
gguggaugcaaugagaaac

SEQ ID NO: 1526703 - RNA, 19 nt, Artificial Sequence
  Description of Artificial Sequence: Synthetic oligonucleotide
guuccuagagagccaagag

SEQ ID NO: 1526704 - RNA, 19 nt, Artificial Sequence
  Description of Artificial Sequence: Synthetic oligonucleotide
acacauacugcgccguuag

SEQ ID NO: 1526705 - RNA, 19 nt, Artificial Sequence
  Description of Artificial Sequence: Synthetic oligonucleotide
guaauucccaaagagggca

SEQ ID NO: 1526706 - RNA, 19 nt, Artificial Sequence
  Description of Artificial Sequence: Synthetic oligonucleotide
ugccuaggaaacuagucaa

SEQ ID NO: 1526707 - RNA, 19 nt, Artificial Sequence
  Description of Artificial Sequence: Synthetic oligonucleotide
uggagaaauuccgauuacc

SEQ ID NO: 1526708 - RNA, 19 nt, Artificial Sequence
  Description of Artificial Sequence: Synthetic oligonucleotide
agggaguuuccguccaugg

SEQ ID NO: 1526709 - RNA, 19 nt, Artificial Sequence
  Description of Artificial Sequence: Synthetic oligonucleotide
uaaacagagguugcaguga

SEQ ID NO: 1526710 - RNA, 19 nt, Artificial Sequence
  Description of Artificial Sequence: Synthetic oligonucleotide
auaaaccgcaucccagcag

SEQ ID NO: 1526711 - RNA, 19 nt, Artificial Sequence
  Description of Artificial Sequence: Synthetic oligonucleotide
ucggauaaaauagccagau

SEQ ID NO: 1526712 - RNA, 19 nt, Artificial Sequence
  Description of Artificial Sequence: Synthetic oligonucleotide
auauugcucaggugggcag

SEQ ID NO: 1526713 - RNA, 19 nt, Artificial Sequence
  Description of Artificial Sequence: Synthetic oligonucleotide
caaugcaccuuguucaguc

SEQ ID NO: 1526714 - RNA, 19 nt, Artificial Sequence
  Description of Artificial Sequence: Synthetic oligonucleotide
uugcuaccggaaucaaagg

SEQ ID NO: 1526715 - RNA, 19 nt, Artificial Sequence
  Description of Artificial Sequence: Synthetic oligonucleotide
ccauagccuauauaaaccg

SEQ ID NO: 1526716 - RNA, 19 nt, Artificial Sequence
  Description of Artificial Sequence: Synthetic oligonucleotide
uuuucgcuacaggacacag

SEQ ID NO: 1526717 - RNA, 19 nt, Artificial Sequence
  Description of Artificial Sequence: Synthetic oligonucleotide
auagccuauauaaaccgca

SEQ ID NO: 1526718 - RNA, 19 nt, Artificial Sequence
  Description of Artificial Sequence: Synthetic oligonucleotide
ugagaugaagacuccuuua

SEQ ID NO: 1526719 - RNA, 19 nt, Artificial Sequence
  Description of Artificial Sequence: Synthetic oligonucleotide
uccuccaagcaauaagaaa

SEQ ID NO: 1526720 - RNA, 19 nt, Artificial Sequence
  Description of Artificial Sequence: Synthetic oligonucleotide
agucagugucauucccacc

SEQ ID NO: 1526721 - RNA, 19 nt, Artificial Sequence
  Description of Artificial Sequence: Synthetic oligonucleotide
auguaugcucacugggcuc

SEQ ID NO: 1526722 - RNA, 19 nt, Artificial Sequence
  Description of Artificial Sequence: Synthetic oligonucleotide
acaaucugagaugaagacu

SEQ ID NO: 1526723 - RNA, 19 nt, Artificial Sequence
  Description of Artificial Sequence: Synthetic oligonucleotide
cuauucgaaugauuuucug

SEQ ID NO: 1526724 - RNA, 19 nt, Artificial Sequence
  Description of Artificial Sequence: Synthetic oligonucleotide
caaagaccgccgcuuaccg

SEQ ID NO: 1526725 - RNA, 19 nt, Artificial Sequence
  Description of Artificial Sequence: Synthetic oligonucleotide
uuaacccacucauuuccac

SEQ ID NO: 1526726 - RNA, 19 nt, Artificial Sequence
  Description of Artificial Sequence: Synthetic oligonucleotide
aacggaaauguaggucagg

SEQ ID NO: 1526727 - RNA, 19 nt, Artificial Sequence
  Description of Artificial Sequence: Synthetic oligonucleotide
gaaauuccgauuaccacaa

SEQ ID NO: 1526728 - RNA, 19 nt, Artificial Sequence
  Description of Artificial Sequence: Synthetic oligonucleotide
uuuccguccaugguuguca

SEQ ID NO: 1526729 - RNA, 19 nt, Artificial Sequence
  Description of Artificial Sequence: Synthetic oligonucleotide
gacauugcuaccggaauca

SEQ ID NO: 1526730 - RNA, 19 nt, Artificial Sequence
  Description of Artificial Sequence: Synthetic oligonucleotide
caccuuguucagucgaggg

SEQ ID NO: 1526731 - RNA, 19 nt, Artificial Sequence
  Description of Artificial Sequence: Synthetic oligonucleotide
guucucggauaaaauagcc

SEQ ID NO: 1526732 - RNA, 19 nt, Artificial Sequence
  Description of Artificial Sequence: Synthetic oligonucleotide
uguucagucgaggggacga

SEQ ID NO: 1526733 - RNA, 19 nt, Artificial Sequence
  Description of Artificial Sequence: Synthetic oligonucleotide
uguaugcucacugggcucu

SEQ ID NO: 1526734 - RNA, 19 nt, Artificial Sequence
  Description of Artificial Sequence: Synthetic oligonucleotide
auacugcgccguuagcggg

SEQ ID NO: 1526735 - RNA, 19 nt, Artificial Sequence
  Description of Artificial Sequence: Synthetic oligonucleotide
guucgcuuuuguuuuggug

SEQ ID NO: 1526736 - RNA, 19 nt, Artificial Sequence
  Description of Artificial Sequence: Synthetic oligonucleotide
accggaaucaaagguguag

SEQ ID NO: 1526737 - RNA, 19 nt, Artificial Sequence
  Description of Artificial Sequence: Synthetic oligonucleotide
aaacggaaauguaggucag

SEQ ID NO: 1526738 - RNA, 19 nt, Artificial Sequence
  Description of Artificial Sequence: Synthetic oligonucleotide
aggacagagaaugguauca

SEQ ID NO: 1526739 - RNA, 19 nt, Artificial Sequence
  Description of Artificial Sequence: Synthetic oligonucleotide
aggaccauagggaguuucc

SEQ ID NO: 1526740 - RNA, 19 nt, Artificial Sequence
  Description of Artificial Sequence: Synthetic oligonucleotide
gcguuuaggagaauggcgg

SEQ ID NO: 1526741 - RNA, 19 nt, Artificial Sequence
  Description of Artificial Sequence: Synthetic oligonucleotide
gucagguugacuguaagaa

SEQ ID NO: 1526742 - RNA, 19 nt, Artificial Sequence
  Description of Artificial Sequence: Synthetic oligonucleotide
uaccaagcaacgguggcug

SEQ ID NO: 1526743 - RNA, 19 nt, Artificial Sequence
  Description of Artificial Sequence: Synthetic oligonucleotide
aucgguucgcuuuuguuuu

SEQ ID NO: 1526744 - RNA, 19 nt, Artificial Sequence
  Description of Artificial Sequence: Synthetic oligonucleotide
uagucaagaaggagacgcu

SEQ ID NO: 1526745 - RNA, 19 nt, Artificial Sequence
  Description of Artificial Sequence: Synthetic oligonucleotide
aagaucgguucgcuuuugu

SEQ ID NO: 1526746 - RNA, 19 nt, Artificial Sequence
  Description of Artificial Sequence: Synthetic oligonucleotide
uuggacagcauggaccgca

SEQ ID NO: 1526747 - RNA, 19 nt, Artificial Sequence
  Description of Artificial Sequence: Synthetic oligonucleotide
gacgaccuuggacagcaug

SEQ ID NO: 1526748 - RNA, 19 nt, Artificial Sequence
  Description of Artificial Sequence: Synthetic oligonucleotide
ucgcuuuuguuuuggugac

SEQ ID NO: 1526749 - RNA, 19 nt, Artificial Sequence
  Description of Artificial Sequence: Synthetic oligonucleotide
uggcugaauaaauaccguu

SEQ ID NO: 1526750 - RNA, 19 nt, Artificial Sequence
  Description of Artificial Sequence: Synthetic oligonucleotide
uggucagaaugccaaugaa

SEQ ID NO: 1526751 - RNA, 19 nt, Artificial Sequence
  Description of Artificial Sequence: Synthetic oligonucleotide
uagccuauauaaaccgcau

SEQ ID NO: 1526752 - RNA, 19 nt, Artificial Sequence
  Description of Artificial Sequence: Synthetic oligonucleotide
ggaugcaaugagaaacugg

SEQ ID NO: 1526753 - RNA, 19 nt, Artificial Sequence
  Description of Artificial Sequence: Synthetic oligonucleotide
acggaaauguaggucaggu

SEQ ID NO: 1526754 - RNA, 19 nt, Artificial Sequence
  Description of Artificial Sequence: Synthetic oligonucleotide
uccgagcauaaaauccaac

SEQ ID NO: 1526755 - RNA, 19 nt, Artificial Sequence
  Description of Artificial Sequence: Synthetic oligonucleotide
aagguggacaccagaccag

SEQ ID NO: 1526756 - RNA, 19 nt, Artificial Sequence
  Description of Artificial Sequence: Synthetic oligonucleotide
cagguugacuguaagaacu

SEQ ID NO: 1526757 - RNA, 19 nt, Artificial Sequence
  Description of Artificial Sequence: Synthetic oligonucleotide
agagcggagaggccagcuc

SEQ ID NO: 1526758 - RNA, 19 nt, Artificial Sequence
  Description of Artificial Sequence: Synthetic oligonucleotide
aggaaagccaaaguaggau

SEQ ID NO: 1526759 - RNA, 19 nt, Artificial Sequence
  Description of Artificial Sequence: Synthetic oligonucleotide
guuuaggagaauggcgggc

SEQ ID NO: 1526760 - RNA, 19 nt, Artificial Sequence
  Description of Artificial Sequence: Synthetic oligonucleotide
agguguaguuaccguuuuc

SEQ ID NO: 1526761 - RNA, 19 nt, Artificial Sequence
  Description of Artificial Sequence: Synthetic oligonucleotide
acggcuauucgaaugauuu

SEQ ID NO: 1526762 - RNA, 19 nt, Artificial Sequence
  Description of Artificial Sequence: Synthetic oligonucleotide
acuagucaagaaggagacg

SEQ ID NO: 1526763 - RNA, 19 nt, Artificial Sequence
  Description of Artificial Sequence: Synthetic oligonucleotide
auaccguuguaaacagagg

SEQ ID NO: 1526764 - RNA, 19 nt, Artificial Sequence
  Description of Artificial Sequence: Synthetic oligonucleotide
aggguggucuuggugaaag

SEQ ID NO: 1526765 - RNA, 19 nt, Artificial Sequence
  Description of Artificial Sequence: Synthetic oligonucleotide
cuguuagcccaguaacgac

SEQ ID NO: 1526766 - RNA, 19 nt, Artificial Sequence
  Description of Artificial Sequence: Synthetic oligonucleotide
aaacgugguguaauuccca

SEQ ID NO: 1526767 - RNA, 19 nt, Artificial Sequence
  Description of Artificial Sequence: Synthetic oligonucleotide
ccaguaacgacuccgagca

SEQ ID NO: 1526768 - RNA, 19 nt, Artificial Sequence
  Description of Artificial Sequence: Synthetic oligonucleotide
gcuaccggaaucaaaggug

SEQ ID NO: 1526769 - RNA, 19 nt, Artificial Sequence
  Description of Artificial Sequence: Synthetic oligonucleotide
aguaacgacuccgagcaua

SEQ ID NO: 1526770 - RNA, 19 nt, Artificial Sequence
  Description of Artificial Sequence: Synthetic oligonucleotide
ggaauuaacccacucauuu

SEQ ID NO: 1526771 - RNA, 19 nt, Artificial Sequence
  Description of Artificial Sequence: Synthetic oligonucleotide
augaugaaauaggaccaca

SEQ ID NO: 1526772 - RNA, 19 nt, Artificial Sequence
  Description of Artificial Sequence: Synthetic oligonucleotide
aaguaggauagcacacaca

SEQ ID NO: 1526773 - RNA, 19 nt, Artificial Sequence
  Description of Artificial Sequence: Synthetic oligonucleotide
agcuaugcaagcgaacaau

SEQ ID NO: 1526774 - RNA, 19 nt, Artificial Sequence
  Description of Artificial Sequence: Synthetic oligonucleotide
auguugguuccuagagagc

SEQ ID NO: 1526775 - RNA, 19 nt, Artificial Sequence
  Description of Artificial Sequence: Synthetic oligonucleotide
aaagaucgguucgcuuuug

SEQ ID NO: 1526776 - RNA, 19 nt, Artificial Sequence
  Description of Artificial Sequence: Synthetic oligonucleotide
ucugaacuuccucccggaa

SEQ ID NO: 1526777 - RNA, 19 nt, Artificial Sequence
  Description of Artificial Sequence: Synthetic oligonucleotide
gaucgguucgcuuuuguuu

SEQ ID NO: 1526778 - RNA, 19 nt, Artificial Sequence
  Description of Artificial Sequence: Synthetic oligonucleotide
uuagcccaguaacgacucc

SEQ ID NO: 1526779 - RNA, 19 nt, Artificial Sequence
  Description of Artificial Sequence: Synthetic oligonucleotide
uucgaaugauuuucugcuu

SEQ ID NO: 1526780 - RNA, 19 nt, Artificial Sequence
  Description of Artificial Sequence: Synthetic oligonucleotide
gcagauugaagagagaugu

SEQ ID NO: 1526781 - RNA, 19 nt, Artificial Sequence
  Description of Artificial Sequence: Synthetic oligonucleotide
aaauaccguuguaaacaga

SEQ ID NO: 1526782 - RNA, 19 nt, Artificial Sequence
  Description of Artificial Sequence: Synthetic oligonucleotide
uagcgggauggucaggguc

SEQ ID NO: 1526783 - RNA, 19 nt, Artificial Sequence
  Description of Artificial Sequence: Synthetic oligonucleotide
uaguuaccguuuucuuccc

SEQ ID NO: 1526784 - RNA, 19 nt, Artificial Sequence
  Description of Artificial Sequence: Synthetic oligonucleotide
uuguucagucgaggggacg

SEQ ID NO: 1526785 - RNA, 19 nt, Artificial Sequence
  Description of Artificial Sequence: Synthetic oligonucleotide
gaggaaagccaaaguagga

SEQ ID NO: 1526786 - RNA, 19 nt, Artificial Sequence
  Description of Artificial Sequence: Synthetic oligonucleotide
uagccagaugacaggccug

SEQ ID NO: 1526787 - RNA, 19 nt, Artificial Sequence
  Description of Artificial Sequence: Synthetic oligonucleotide
uuaggagaauggcgggcuc

SEQ ID NO: 1526788 - RNA, 19 nt, Artificial Sequence
  Description of Artificial Sequence: Synthetic oligonucleotide
uugacaccccauagacuga

SEQ ID NO: 1526789 - RNA, 19 nt, Artificial Sequence
  Description of Artificial Sequence: Synthetic oligonucleotide
cuuguucagucgaggggac

SEQ ID NO: 1526790 - RNA, 19 nt, Artificial Sequence
  Description of Artificial Sequence: Synthetic oligonucleotide
agaaagcuaugcaagcgaa

SEQ ID NO: 1526791 - RNA, 19 nt, Artificial Sequence
  Description of Artificial Sequence: Synthetic oligonucleotide
ggcucgaugaaugaaaucu

SEQ ID NO: 1526792 - RNA, 19 nt, Artificial Sequence
  Description of Artificial Sequence: Synthetic oligonucleotide
caggacagagaaugguauc

SEQ ID NO: 1526793 - RNA, 19 nt, Artificial Sequence
  Description of Artificial Sequence: Synthetic oligonucleotide
aaacagccauaugccuagg

SEQ ID NO: 1526794 - RNA, 19 nt, Artificial Sequence
  Description of Artificial Sequence: Synthetic oligonucleotide
cucggauaaaauagccaga

SEQ ID NO: 1526795 - RNA, 19 nt, Artificial Sequence
  Description of Artificial Sequence: Synthetic oligonucleotide
aauggcgggcucgaugaau

SEQ ID NO: 1526796 - RNA, 19 nt, Artificial Sequence
  Description of Artificial Sequence: Synthetic oligonucleotide
uacugcgccguuagcggga

SEQ ID NO: 1526797 - RNA, 19 nt, Artificial Sequence
  Description of Artificial Sequence: Synthetic oligonucleotide
acgacuccgagcauaaaau

SEQ ID NO: 1526798 - RNA, 19 nt, Artificial Sequence
  Description of Artificial Sequence: Synthetic oligonucleotide
gacuccuuuauggggucgc

SEQ ID NO: 1526799 - RNA, 19 nt, Artificial Sequence
  Description of Artificial Sequence: Synthetic oligonucleotide
cccaguaacgacuccgagc

SEQ ID NO: 1526800 - RNA, 19 nt, Artificial Sequence
  Description of Artificial Sequence: Synthetic oligonucleotide
aggggacgaccuuggacag

SEQ ID NO: 1526801 - RNA, 19 nt, Artificial Sequence
  Description of Artificial Sequence: Synthetic oligonucleotide
aggguaccaagcaacggug

SEQ ID NO: 1526802 - RNA, 19 nt, Artificial Sequence
  Description of Artificial Sequence: Synthetic oligonucleotide
cagauugaagagagauguc

SEQ ID NO: 1526803 - RNA, 19 nt, Artificial Sequence
  Description of Artificial Sequence: Synthetic oligonucleotide
ggccuguuagcccaguaac

SEQ ID NO: 1526804 - RNA, 19 nt, Artificial Sequence
  Description of Artificial Sequence: Synthetic oligonucleotide
uucagucgaggggacgacc

SEQ ID NO: 1526805 - RNA, 19 nt, Artificial Sequence
  Description of Artificial Sequence: Synthetic oligonucleotide
aauagguccuugagguuuu

SEQ ID NO: 1526806 - RNA, 19 nt, Artificial Sequence
  Description of Artificial Sequence: Synthetic oligonucleotide
ccgagcauaaaauccaaca

SEQ ID NO: 1526807 - RNA, 19 nt, Artificial Sequence
  Description of Artificial Sequence: Synthetic oligonucleotide
ucgucugauguaugcucac

SEQ ID NO: 1526808 - RNA, 19 nt, Artificial Sequence
  Description of Artificial Sequence: Synthetic oligonucleotide
agagcaaagaccgccgcuu

SEQ ID NO: 1526809 - RNA, 19 nt, Artificial Sequence
  Description of Artificial Sequence: Synthetic oligonucleotide
agaucgguucgcuuuuguu

SEQ ID NO: 1526810 - RNA, 19 nt, Artificial Sequence
  Description of Artificial Sequence: Synthetic oligonucleotide
gggucgcugaggaaaacgg

SEQ ID NO: 1526811 - RNA, 19 nt, Artificial Sequence
  Description of Artificial Sequence: Synthetic oligonucleotide
cgaacaaugcaccuuguuc

SEQ ID NO: 1526812 - RNA, 19 nt, Artificial Sequence
  Description of Artificial Sequence: Synthetic oligonucleotide
gugguguaauucccaaaga

SEQ ID NO: 1526813 - RNA, 19 nt, Artificial Sequence
  Description of Artificial Sequence: Synthetic oligonucleotide
guuagcccaguaacgacuc

SEQ ID NO: 1526814 - RNA, 19 nt, Artificial Sequence
  Description of Artificial Sequence: Synthetic oligonucleotide
aguuaccguuuucuuccca

SEQ ID NO: 1526815 - RNA, 19 nt, Artificial Sequence
  Description of Artificial Sequence: Synthetic oligonucleotide
aaauuccgauuaccacaaa

SEQ ID NO: 1526816 - RNA, 19 nt, Artificial Sequence
  Description of Artificial Sequence: Synthetic oligonucleotide
gcuaugcaagcgaacaaug

SEQ ID NO: 1526817 - RNA, 19 nt, Artificial Sequence
  Description of Artificial Sequence: Synthetic oligonucleotide
cuaccggaaucaaaggugu

SEQ ID NO: 1526818 - RNA, 19 nt, Artificial Sequence
  Description of Artificial Sequence: Synthetic oligonucleotide
ccguuguaaacagagguug

SEQ ID NO: 1526819 - RNA, 19 nt, Artificial Sequence
  Description of Artificial Sequence: Synthetic oligonucleotide
agucgaggggacgaccuug

SEQ ID NO: 1526820 - RNA, 19 nt, Artificial Sequence
  Description of Artificial Sequence: Synthetic oligonucleotide
ucgcuacaggacacaguga

SEQ ID NO: 1526821 - RNA, 19 nt, Artificial Sequence
  Description of Artificial Sequence: Synthetic oligonucleotide
ggaccauagggaguuuccg

SEQ ID NO: 1526822 - RNA, 19 nt, Artificial Sequence
  Description of Artificial Sequence: Synthetic oligonucleotide
agcgggauggucaggguca

SEQ ID NO: 1526823 - RNA, 19 nt, Artificial Sequence
  Description of Artificial Sequence: Synthetic oligonucleotide
ggauagcacacacagccaa

SEQ ID NO: 1526824 - RNA, 19 nt, Artificial Sequence
  Description of Artificial Sequence: Synthetic oligonucleotide
uggugacauucagagacau

SEQ ID NO: 1526825 - RNA, 19 nt, Artificial Sequence
  Description of Artificial Sequence: Synthetic oligonucleotide
cacugcuugauaaaagcau

SEQ ID NO: 1526826 - RNA, 19 nt, Artificial Sequence
  Description of Artificial Sequence: Synthetic oligonucleotide
gaaugguauccugacuaaa

SEQ ID NO: 1526827 - RNA, 19 nt, Artificial Sequence
  Description of Artificial Sequence: Synthetic oligonucleotide
gaccauagggaguuuccgu

SEQ ID NO: 1526828 - RNA, 19 nt, Artificial Sequence
  Description of Artificial Sequence: Synthetic oligonucleotide
auggcgggcucgaugaaug

SEQ ID NO: 1526829 - RNA, 19 nt, Artificial Sequence
  Description of Artificial Sequence: Synthetic oligonucleotide
cauagggaguuuccgucca

SEQ ID NO: 1526830 - RNA, 19 nt, Artificial Sequence
  Description of Artificial Sequence: Synthetic oligonucleotide
ucgguucgcuuuuguuuug

SEQ ID NO: 1526831 - RNA, 19 nt, Artificial Sequence
  Description of Artificial Sequence: Synthetic oligonucleotide
uuagcgggauggucagggu

SEQ ID NO: 1526832 - RNA, 19 nt, Artificial Sequence
  Description of Artificial Sequence: Synthetic oligonucleotide
cugaauaaauaccguugua

SEQ ID NO: 1526833 - RNA, 19 nt, Artificial Sequence
  Description of Artificial Sequence: Synthetic oligonucleotide
gauagcacacacagccaaa

SEQ ID NO: 1526834 - RNA, 19 nt, Artificial Sequence
  Description of Artificial Sequence: Synthetic oligonucleotide
gguggucuuggugaaagca

SEQ ID NO: 1526835 - RNA, 19 nt, Artificial Sequence
  Description of Artificial Sequence: Synthetic oligonucleotide
ugacaccccauagacugau

SEQ ID NO: 1526836 - RNA, 19 nt, Artificial Sequence
  Description of Artificial Sequence: Synthetic oligonucleotide
gaacuauggcaaugaugaa

SEQ ID NO: 1526837 - RNA, 19 nt, Artificial Sequence
  Description of Artificial Sequence: Synthetic oligonucleotide
acuugacaccccauagacu

SEQ ID NO: 1526838 - RNA, 19 nt, Artificial Sequence
  Description of Artificial Sequence: Synthetic oligonucleotide
cgcuacaggacacagugac

SEQ ID NO: 1526839 - RNA, 19 nt, Artificial Sequence
  Description of Artificial Sequence: Synthetic oligonucleotide
aguguguagcuuccuucuu

SEQ ID NO: 1526840 - RNA, 19 nt, Artificial Sequence
  Description of Artificial Sequence: Synthetic oligonucleotide
gccuguuagcccaguaacg

SEQ ID NO: 1526841 - RNA, 19 nt, Artificial Sequence
  Description of Artificial Sequence: Synthetic oligonucleotide
cauauccuccaguacacau

SEQ ID NO: 1526842 - RNA, 19 nt, Artificial Sequence
  Description of Artificial Sequence: Synthetic oligonucleotide
cacauacugcgccguuagc

SEQ ID NO: 1526843 - RNA, 19 nt, Artificial Sequence
  Description of Artificial Sequence: Synthetic oligonucleotide
gcaaagaccgccgcuuacc

SEQ ID NO: 1526844 - RNA, 19 nt, Artificial Sequence
  Description of Artificial Sequence: Synthetic oligonucleotide
accguuguaaacagagguu

SEQ ID NO: 1526845 - RNA, 19 nt, Artificial Sequence
  Description of Artificial Sequence: Synthetic oligonucleotide
guaacgacuccgagcauaa

SEQ ID NO: 1526846 - RNA, 19 nt, Artificial Sequence
  Description of Artificial Sequence: Synthetic oligonucleotide
caaagguguaguuaccguu

SEQ ID NO: 1526847 - RNA, 19 nt, Artificial Sequence
  Description of Artificial Sequence: Synthetic oligonucleotide
acgugguguaauucccaaa

SEQ ID NO: 1526848 - RNA, 19 nt, Artificial Sequence
  Description of Artificial Sequence: Synthetic oligonucleotide
gguguaguuaccguuuucu

SEQ ID NO: 1526849 - RNA, 19 nt, Artificial Sequence
  Description of Artificial Sequence: Synthetic oligonucleotide
agcgccccaaaacguggug

SEQ ID NO: 1526850 - RNA, 19 nt, Artificial Sequence
  Description of Artificial Sequence: Synthetic oligonucleotide
uuauggggucgcugaggaa

SEQ ID NO: 1526851 - RNA, 19 nt, Artificial Sequence
  Description of Artificial Sequence: Synthetic oligonucleotide
gagguugcagugacuccac

SEQ ID NO: 1526852 - RNA, 19 nt, Artificial Sequence
  Description of Artificial Sequence: Synthetic oligonucleotide
uaccggaaucaaaggugua

SEQ ID NO: 1526853 - RNA, 19 nt, Artificial Sequence
  Description of Artificial Sequence: Synthetic oligonucleotide
gcaaaagcguuuaggagaa

SEQ ID NO: 1526854 - RNA, 19 nt, Artificial Sequence
  Description of Artificial Sequence: Synthetic oligonucleotide
aggauagcacacacagcca

SEQ ID NO: 1526855 - RNA, 19 nt, Artificial Sequence
  Description of Artificial Sequence: Synthetic oligonucleotide
gaccacacaaagcccaguu

SEQ ID NO: 1526856 - RNA, 19 nt, Artificial Sequence
  Description of Artificial Sequence: Synthetic oligonucleotide
aggaauuaacccacucauu

SEQ ID NO: 1526857 - RNA, 19 nt, Artificial Sequence
  Description of Artificial Sequence: Synthetic oligonucleotide
cagagacauugcuaccgga

SEQ ID NO: 1526858 - RNA, 19 nt, Artificial Sequence
  Description of Artificial Sequence: Synthetic oligonucleotide
ggcgucacucgucugaugu

SEQ ID NO: 1526859 - RNA, 19 nt, Artificial Sequence
  Description of Artificial Sequence: Synthetic oligonucleotide
ccuuguucagucgagggga

SEQ ID NO: 1526860 - RNA, 19 nt, Artificial Sequence
  Description of Artificial Sequence: Synthetic oligonucleotide
gguuuucgcuacaggacac

SEQ ID NO: 1526861 - RNA, 19 nt, Artificial Sequence
  Description of Artificial Sequence: Synthetic oligonucleotide
aagcgccccaaaacguggu

SEQ ID NO: 1526862 - RNA, 19 nt, Artificial Sequence
  Description of Artificial Sequence: Synthetic oligonucleotide
uggcgggcucgaugaauga

SEQ ID NO: 1526863 - RNA, 19 nt, Artificial Sequence
  Description of Artificial Sequence: Synthetic oligonucleotide
gcaccuuguucagucgagg

SEQ ID NO: 1526864 - RNA, 19 nt, Artificial Sequence
  Description of Artificial Sequence: Synthetic oligonucleotide
gggacgaccuuggacagca

SEQ ID NO: 1526865 - RNA, 19 nt, Artificial Sequence
  Description of Artificial Sequence: Synthetic oligonucleotide
cuccgagcauaaaauccaa

SEQ ID NO: 1526866 - RNA, 19 nt, Artificial Sequence
  Description of Artificial Sequence: Synthetic oligonucleotide
acaccagaccaggaauuaa

SEQ ID NO: 1526867 - RNA, 19 nt, Artificial Sequence
  Description of Artificial Sequence: Synthetic oligonucleotide
ccuaggaaacuagucaaga

SEQ ID NO: 1526868 - RNA, 19 nt, Artificial Sequence
  Description of Artificial Sequence: Synthetic oligonucleotide
gcaaguaaguccgguaaaa

SEQ ID NO: 1526869 - RNA, 19 nt, Artificial Sequence
  Description of Artificial Sequence: Synthetic oligonucleotide
cacugggcucuuccgggac

SEQ ID NO: 1526870 - RNA, 19 nt, Artificial Sequence
  Description of Artificial Sequence: Synthetic oligonucleotide
ccuguuagcccaguaacga

SEQ ID NO: 1526871 - RNA, 19 nt, Artificial Sequence
  Description of Artificial Sequence: Synthetic oligonucleotide
uccguccaugguugucacu

SEQ ID NO: 1526872 - RNA, 19 nt, Artificial Sequence
  Description of Artificial Sequence: Synthetic oligonucleotide
uggcgucacucgucugaug

SEQ ID NO: 1526873 - RNA, 19 nt, Artificial Sequence
  Description of Artificial Sequence: Synthetic oligonucleotide
acuccuuuauggggucgcu

SEQ ID NO: 1526874 - RNA, 19 nt, Artificial Sequence
  Description of Artificial Sequence: Synthetic oligonucleotide
cagugucauucccaccaca

SEQ ID NO: 1526875 - RNA, 19 nt, Artificial Sequence
  Description of Artificial Sequence: Synthetic oligonucleotide
guucagucgaggggacgac

SEQ ID NO: 1526876 - RNA, 19 nt, Artificial Sequence
  Description of Artificial Sequence: Synthetic oligonucleotide
acauugcuaccggaaucaa

SEQ ID NO: 1526877 - RNA, 19 nt, Artificial Sequence
  Description of Artificial Sequence: Synthetic oligonucleotide
guguaguuaccguuuucuu

SEQ ID NO: 1526878 - RNA, 19 nt, Artificial Sequence
  Description of Artificial Sequence: Synthetic oligonucleotide
ccguuagcgggauggucag

SEQ ID NO: 1526879 - RNA, 19 nt, Artificial Sequence
  Description of Artificial Sequence: Synthetic oligonucleotide
gaccgccgcuuaccggagc

SEQ ID NO: 1526880 - RNA, 19 nt, Artificial Sequence
  Description of Artificial Sequence: Synthetic oligonucleotide
gcuauucgaaugauuuucu

SEQ ID NO: 1526881 - RNA, 19 nt, Artificial Sequence
  Description of Artificial Sequence: Synthetic oligonucleotide
ggguggucuuggugaaagc

SEQ ID NO: 1526882 - RNA, 19 nt, Artificial Sequence
  Description of Artificial Sequence: Synthetic oligonucleotide
caaagaucgguucgcuuuu

SEQ ID NO: 1526883 - RNA, 19 nt, Artificial Sequence
  Description of Artificial Sequence: Synthetic oligonucleotide
gaauggcgggcucgaugaa

SEQ ID NO: 1526884 - RNA, 19 nt, Artificial Sequence
  Description of Artificial Sequence: Synthetic oligonucleotide
cuguuccauagccuauaua

SEQ ID NO: 1526885 - RNA, 19 nt, Artificial Sequence
  Description of Artificial Sequence: Synthetic oligonucleotide
gggcucgaugaaugaaauc

SEQ ID NO: 1526886 - RNA, 19 nt, Artificial Sequence
  Description of Artificial Sequence: Synthetic oligonucleotide
cgacuccgagcauaaaauc

SEQ ID NO: 1526887 - RNA, 19 nt, Artificial Sequence
  Description of Artificial Sequence: Synthetic oligonucleotide
acacggcuauucgaaugau

SEQ ID NO: 1526888 - RNA, 19 nt, Artificial Sequence
  Description of Artificial Sequence: Synthetic oligonucleotide
uaacgacuccgagcauaaa

SEQ ID NO: 1526889 - RNA, 19 nt, Artificial Sequence
  Description of Artificial Sequence: Synthetic oligonucleotide
auggggucgcugaggaaaa

SEQ ID NO: 1526890 - RNA, 19 nt, Artificial Sequence
  Description of Artificial Sequence: Synthetic oligonucleotide
guccgguaaaauagguccu

SEQ ID NO: 1526891 - RNA, 19 nt, Artificial Sequence
  Description of Artificial Sequence: Synthetic oligonucleotide
uggggucgcugaggaaaac

SEQ ID NO: 1526892 - RNA, 19 nt, Artificial Sequence
  Description of Artificial Sequence: Synthetic oligonucleotide
ccuggcgucacucgucuga

SEQ ID NO: 1526893 - RNA, 19 nt, Artificial Sequence
  Description of Artificial Sequence: Synthetic oligonucleotide
cagagcaaagaccgccgcu

SEQ ID NO: 1526894 - RNA, 19 nt, Artificial Sequence
  Description of Artificial Sequence: Synthetic oligonucleotide
agaccgccgcuuaccggag

SEQ ID NO: 1526895 - RNA, 19 nt, Artificial Sequence
  Description of Artificial Sequence: Synthetic oligonucleotide
cgguaaaauagguccuuga

SEQ ID NO: 1526896 - RNA, 19 nt, Artificial Sequence
  Description of Artificial Sequence: Synthetic oligonucleotide
ccacucauuuccaccugca

SEQ ID NO: 1526897 - RNA, 19 nt, Artificial Sequence
  Description of Artificial Sequence: Synthetic oligonucleotide
auggaccgcaggacagaga

SEQ ID NO: 1526898 - RNA, 19 nt, Artificial Sequence
  Description of Artificial Sequence: Synthetic oligonucleotide
gcccaguucucggauaaaa

SEQ ID NO: 1526899 - RNA, 19 nt, Artificial Sequence
  Description of Artificial Sequence: Synthetic oligonucleotide
cacucgucugauguaugcu

SEQ ID NO: 1526900 - RNA, 19 nt, Artificial Sequence
  Description of Artificial Sequence: Synthetic oligonucleotide
acugcgccguuagcgggau

SEQ ID NO: 1526901 - RNA, 19 nt, Artificial Sequence
  Description of Artificial Sequence: Synthetic oligonucleotide
gcgggcucgaugaaugaaa

SEQ ID NO: 1526902 - RNA, 19 nt, Artificial Sequence
  Description of Artificial Sequence: Synthetic oligonucleotide
gguucgcuuuuguuuuggu

SEQ ID NO: 1526903 - RNA, 19 nt, Artificial Sequence
  Description of Artificial Sequence: Synthetic oligonucleotide
cacggcuauucgaaugauu

SEQ ID NO: 1526904 - RNA, 19 nt, Artificial Sequence
  Description of Artificial Sequence: Synthetic oligonucleotide
gguugacuguaagaacuau

SEQ ID NO: 1526905 - RNA, 19 nt, Artificial Sequence
  Description of Artificial Sequence: Synthetic oligonucleotide
ggggacgaccuuggacagc

SEQ ID NO: 1526906 - RNA, 19 nt, Artificial Sequence
  Description of Artificial Sequence: Synthetic oligonucleotide
ggcgggcucgaugaaugaa

SEQ ID NO: 1526907 - RNA, 19 nt, Artificial Sequence
  Description of Artificial Sequence: Synthetic oligonucleotide
ccggaaucaaagguguagu

SEQ ID NO: 1526908 - RNA, 19 nt, Artificial Sequence
  Description of Artificial Sequence: Synthetic oligonucleotide
ccggaaugcaaagaucggu

SEQ ID NO: 1526909 - RNA, 19 nt, Artificial Sequence
  Description of Artificial Sequence: Synthetic oligonucleotide
gcgaacaaugcaccuuguu

SEQ ID NO: 1526910 - RNA, 19 nt, Artificial Sequence
  Description of Artificial Sequence: Synthetic oligonucleotide
cggaaugcaaagaucgguu

SEQ ID NO: 1526911 - RNA, 19 nt, Artificial Sequence
  Description of Artificial Sequence: Synthetic oligonucleotide
ggauguccuccaagcaaua

SEQ ID NO: 1526912 - RNA, 19 nt, Artificial Sequence
  Description of Artificial Sequence: Synthetic oligonucleotide
gacgcugcccaaagcuguu

SEQ ID NO: 1526913 - RNA, 19 nt, Artificial Sequence
  Description of Artificial Sequence: Synthetic oligonucleotide
gcgucacucgucugaugua

SEQ ID NO: 1526914 - RNA, 19 nt, Artificial Sequence
  Description of Artificial Sequence: Synthetic oligonucleotide
cccaaaacgugguguaauu

SEQ ID NO: 1526915 - RNA, 19 nt, Artificial Sequence
  Description of Artificial Sequence: Synthetic oligonucleotide
cugcgccguuagcgggaug

SEQ ID NO: 1526916 - RNA, 19 nt, Artificial Sequence
  Description of Artificial Sequence: Synthetic oligonucleotide
cuggcgucacucgucugau

SEQ ID NO: 1526917 - RNA, 19 nt, Artificial Sequence
  Description of Artificial Sequence: Synthetic oligonucleotide
cguuagcgggauggucagg

SEQ ID NO: 1526918 - RNA, 19 nt, Artificial Sequence
  Description of Artificial Sequence: Synthetic oligonucleotide
ccaacacggcuauucgaau

SEQ ID NO: 1526919 - RNA, 19 nt, Artificial Sequence
  Description of Artificial Sequence: Synthetic oligonucleotide
gccccaaaacgugguguaa

SEQ ID NO: 1526920 - RNA, 19 nt, Artificial Sequence
  Description of Artificial Sequence: Synthetic oligonucleotide
gcgccccaaaacguggugu

SEQ ID NO: 1526921 - RNA, 19 nt, Artificial Sequence
  Description of Artificial Sequence: Synthetic oligonucleotide
cgcaucccagcagagcgga

SEQ ID NO: 1526922 - RNA, 19 nt, Artificial Sequence
  Description of Artificial Sequence: Synthetic oligonucleotide
cgccccaaaacguggugua

SEQ ID NO: 1526923 - RNA, 19 nt, Artificial Sequence
  Description of Artificial Sequence: Synthetic oligonucleotide
caguaacgacuccgagcau

SEQ ID NO: 1526924 - RNA, 19 nt, Artificial Sequence
  Description of Artificial Sequence: Synthetic oligonucleotide
cggaaucaaagguguaguu

SEQ ID NO: 1526925 - RNA, 19 nt, Artificial Sequence
  Description of Artificial Sequence: Synthetic oligonucleotide
ccccaaaacgugguguaau

SEQ ID NO: 1526926 - RNA, 19 nt, Artificial Sequence
  Description of Artificial Sequence: Synthetic oligonucleotide
caaaagcguuuaggagaau

SEQ ID NO: 1526927 - RNA, 19 nt, Artificial Sequence
  Description of Artificial Sequence: Synthetic oligonucleotide
ccgcaggacagagaauggu

SEQ ID NO: 1526928 - RNA, 19 nt, Artificial Sequence
  Description of Artificial Sequence: Synthetic oligonucleotide
cgggcucgaugaaugaaau

SEQ ID NO: 1526929 - RNA, 19 nt, Artificial Sequence
  Description of Artificial Sequence: Synthetic oligonucleotide
gcggagaggccagcucaua

SEQ ID NO: 1526930 - RNA, 19 nt, Artificial Sequence
  Description of Artificial Sequence: Synthetic oligonucleotide
ccgcuuaccggagccauuu

SEQ ID NO: 1526931 - RNA, 19 nt, Artificial Sequence
  Description of Artificial Sequence: Synthetic oligonucleotide
ggaccgcaggacagagaau

SEQ ID NO: 1526932 - RNA, 19 nt, Artificial Sequence
  Description of Artificial Sequence: Synthetic oligonucleotide
ccgccgcuuaccggagcca

SEQ ID NO: 1526933 - RNA, 19 nt, Artificial Sequence
  Description of Artificial Sequence: Synthetic oligonucleotide
ggacgaccuuggacagcau

SEQ ID NO: 1526934 - RNA, 19 nt, Artificial Sequence
  Description of Artificial Sequence: Synthetic oligonucleotide
cgcuuaccggagccauuuu

SEQ ID NO: 1526935 - RNA, 19 nt, Artificial Sequence
  Description of Artificial Sequence: Synthetic oligonucleotide
cgggauggucagggucaua

SEQ ID NO: 1526936 - RNA, 19 nt, Artificial Sequence
  Description of Artificial Sequence: Synthetic oligonucleotide
aaauauaucugcaauaagg

SEQ ID NO: 1526937 - RNA, 19 nt, Artificial Sequence
  Description of Artificial Sequence: Synthetic oligonucleotide
uuucguuuuaacaucaucu

SEQ ID NO: 1526938 - RNA, 19 nt, Artificial Sequence
  Description of Artificial Sequence: Synthetic oligonucleotide
aguuaaauacgucccaggc

SEQ ID NO: 1526939 - RNA, 19 nt, Artificial Sequence
  Description of Artificial Sequence: Synthetic oligonucleotide
uaagaccaaauauaggccg

SEQ ID NO: 1526940 - RNA, 19 nt, Artificial Sequence
  Description of Artificial Sequence: Synthetic oligonucleotide
uuaaauacgucccaggcaa

SEQ ID NO: 1526941 - RNA, 19 nt, Artificial Sequence
  Description of Artificial Sequence: Synthetic oligonucleotide
acaauggcuauuuuauugc

SEQ ID NO: 1526942 - RNA, 19 nt, Artificial Sequence
  Description of Artificial Sequence: Synthetic oligonucleotide
ugauaugacaucacuauca

SEQ ID NO: 1526943 - RNA, 19 nt, Artificial Sequence
  Description of Artificial Sequence: Synthetic oligonucleotide
aggucuaagagccuuuucc

SEQ ID NO: 1526944 - RNA, 19 nt, Artificial Sequence
  Description of Artificial Sequence: Synthetic oligonucleotide
uauaucugcaauaagguuu

SEQ ID NO: 1526945 - RNA, 19 nt, Artificial Sequence
  Description of Artificial Sequence: Synthetic oligonucleotide
caucuuuacaaucauggcg

SEQ ID NO: 1526946 - RNA, 19 nt, Artificial Sequence
  Description of Artificial Sequence: Synthetic oligonucleotide
ucuucaacaauuccucccg

SEQ ID NO: 1526947 - RNA, 19 nt, Artificial Sequence
  Description of Artificial Sequence: Synthetic oligonucleotide
uucacuaucacucccaaau

SEQ ID NO: 1526948 - RNA, 19 nt, Artificial Sequence
  Description of Artificial Sequence: Synthetic oligonucleotide
cacucauugauuaauuucc

SEQ ID NO: 1526949 - RNA, 19 nt, Artificial Sequence
  Description of Artificial Sequence: Synthetic oligonucleotide
uuauguuaucaucagaauc

SEQ ID NO: 1526950 - RNA, 19 nt, Artificial Sequence
  Description of Artificial Sequence: Synthetic oligonucleotide
auaucugugaacuuucuca

SEQ ID NO: 1526951 - RNA, 19 nt, Artificial Sequence
  Description of Artificial Sequence: Synthetic oligonucleotide
auugauuaauuucccugcc

SEQ ID NO: 1526952 - RNA, 19 nt, Artificial Sequence
  Description of Artificial Sequence: Synthetic oligonucleotide
ucauugauuaauuucccug

SEQ ID NO: 1526953 - RNA, 19 nt, Artificial Sequence
  Description of Artificial Sequence: Synthetic oligonucleotide
uuaaggugcauaaccacag

SEQ ID NO: 1526954 - RNA, 19 nt, Artificial Sequence
  Description of Artificial Sequence: Synthetic oligonucleotide
uuugauuauucaauugucu

SEQ ID NO: 1526955 - RNA, 19 nt, Artificial Sequence
  Description of Artificial Sequence: Synthetic oligonucleotide
ucaucucaaaauccgacag

SEQ ID NO: 1526956 - RNA, 19 nt, Artificial Sequence
  Description of Artificial Sequence: Synthetic oligonucleotide
ucauucaucuuuacaauca

SEQ ID NO: 1526957 - RNA, 19 nt, Artificial Sequence
  Description of Artificial Sequence: Synthetic oligonucleotide
ugcaauaagguuuucuucu

SEQ ID NO: 1526958 - RNA, 19 nt, Artificial Sequence
  Description of Artificial Sequence: Synthetic oligonucleotide
uuuaaggugcauaaccaca

SEQ ID NO: 1526959 - RNA, 19 nt, Artificial Sequence
  Description of Artificial Sequence: Synthetic oligonucleotide
aaaaguuaaauacguccca

SEQ ID NO: 1526960 - RNA, 19 nt, Artificial Sequence
  Description of Artificial Sequence: Synthetic oligonucleotide
uaauuucccugccauaucc

SEQ ID NO: 1526961 - RNA, 19 nt, Artificial Sequence
  Description of Artificial Sequence: Synthetic oligonucleotide
accaaauauaggccgagac

SEQ ID NO: 1526962 - RNA, 19 nt, Artificial Sequence
  Description of Artificial Sequence: Synthetic oligonucleotide
cauugauuaauuucccugc

SEQ ID NO: 1526963 - RNA, 19 nt, Artificial Sequence
  Description of Artificial Sequence: Synthetic oligonucleotide
acugauaccuuucuuggag

SEQ ID NO: 1526964 - RNA, 19 nt, Artificial Sequence
  Description of Artificial Sequence: Synthetic oligonucleotide
ugacuuaucugauaugaca

SEQ ID NO: 1526965 - RNA, 19 nt, Artificial Sequence
  Description of Artificial Sequence: Synthetic oligonucleotide
ucugauaugacaucacuau

SEQ ID NO: 1526966 - RNA, 19 nt, Artificial Sequence
  Description of Artificial Sequence: Synthetic oligonucleotide
ugagguaagaccaaauaua

SEQ ID NO: 1526967 - RNA, 19 nt, Artificial Sequence
  Description of Artificial Sequence: Synthetic oligonucleotide
auuccuuuauaguuugagg

SEQ ID NO: 1526968 - RNA, 19 nt, Artificial Sequence
  Description of Artificial Sequence: Synthetic oligonucleotide
ucacuaauaaaagugcccc

SEQ ID NO: 1526969 - RNA, 19 nt, Artificial Sequence
  Description of Artificial Sequence: Synthetic oligonucleotide
ucaaaauccgacagaaagu

SEQ ID NO: 1526970 - RNA, 19 nt, Artificial Sequence
  Description of Artificial Sequence: Synthetic oligonucleotide
ucaucuguuuauccagucg

SEQ ID NO: 1526971 - RNA, 19 nt, Artificial Sequence
  Description of Artificial Sequence: Synthetic oligonucleotide
acuccuaucugguagaggu

SEQ ID NO: 1526972 - RNA, 19 nt, Artificial Sequence
  Description of Artificial Sequence: Synthetic oligonucleotide
ugauuuucacugcaugugc

SEQ ID NO: 1526973 - RNA, 19 nt, Artificial Sequence
  Description of Artificial Sequence: Synthetic oligonucleotide
uuauccagucgacugauac

SEQ ID NO: 1526974 - RNA, 19 nt, Artificial Sequence
  Description of Artificial Sequence: Synthetic oligonucleotide
gagguaagaccaaauauag

SEQ ID NO: 1526975 - RNA, 19 nt, Artificial Sequence
  Description of Artificial Sequence: Synthetic oligonucleotide
uugagguaagaccaaauau

SEQ ID NO: 1526976 - RNA, 19 nt, Artificial Sequence
  Description of Artificial Sequence: Synthetic oligonucleotide
aucacuaauaaaagugccc

SEQ ID NO: 1526977 - RNA, 19 nt, Artificial Sequence
  Description of Artificial Sequence: Synthetic oligonucleotide
gagagccauucuuugaugg

SEQ ID NO: 1526978 - RNA, 19 nt, Artificial Sequence
  Description of Artificial Sequence: Synthetic oligonucleotide
aucacugcucguccaaucc

SEQ ID NO: 1526979 - RNA, 19 nt, Artificial Sequence
  Description of Artificial Sequence: Synthetic oligonucleotide
uggaccuugauuccuuggg

SEQ ID NO: 1526980 - RNA, 19 nt, Artificial Sequence
  Description of Artificial Sequence: Synthetic oligonucleotide
ucgaugcugauuuucacug

SEQ ID NO: 1526981 - RNA, 19 nt, Artificial Sequence
  Description of Artificial Sequence: Synthetic oligonucleotide
ugcguuugccuacacauug

SEQ ID NO: 1526982 - RNA, 19 nt, Artificial Sequence
  Description of Artificial Sequence: Synthetic oligonucleotide
cauucuucgucgcugaggc

SEQ ID NO: 1526983 - RNA, 19 nt, Artificial Sequence
  Description of Artificial Sequence: Synthetic oligonucleotide
accacaguaggcaauaagg

SEQ ID NO: 1526984 - RNA, 19 nt, Artificial Sequence
  Description of Artificial Sequence: Synthetic oligonucleotide
caggcaaacuccuaucugg

SEQ ID NO: 1526985 - RNA, 19 nt, Artificial Sequence
  Description of Artificial Sequence: Synthetic oligonucleotide
aaauccgacagaaagucca

SEQ ID NO: 1526986 - RNA, 19 nt, Artificial Sequence
  Description of Artificial Sequence: Synthetic oligonucleotide
aaaauccgacagaaagucc

SEQ ID NO: 1526987 - RNA, 19 nt, Artificial Sequence
  Description of Artificial Sequence: Synthetic oligonucleotide
ucugcguuugccuacacau

SEQ ID NO: 1526988 - RNA, 19 nt, Artificial Sequence
  Description of Artificial Sequence: Synthetic oligonucleotide
uccaaucccacuaugcuuc

SEQ ID NO: 1526989 - RNA, 19 nt, Artificial Sequence
  Description of Artificial Sequence: Synthetic oligonucleotide
ucguuuuaacaucaucuca

SEQ ID NO: 1526990 - RNA, 19 nt, Artificial Sequence
  Description of Artificial Sequence: Synthetic oligonucleotide
ugcauaaccacaguaggca

SEQ ID NO: 1526991 - RNA, 19 nt, Artificial Sequence
  Description of Artificial Sequence: Synthetic oligonucleotide
agaaucuucaacaauuccu

SEQ ID NO: 1526992 - RNA, 19 nt, Artificial Sequence
  Description of Artificial Sequence: Synthetic oligonucleotide
aauugucugucuuccucag

SEQ ID NO: 1526993 - RNA, 19 nt, Artificial Sequence
  Description of Artificial Sequence: Synthetic oligonucleotide
uguuuauccagucgacuga

SEQ ID NO: 1526994 - RNA, 19 nt, Artificial Sequence
  Description of Artificial Sequence: Synthetic oligonucleotide
uaucugauaugacaucacu

SEQ ID NO: 1526995 - RNA, 19 nt, Artificial Sequence
  Description of Artificial Sequence: Synthetic oligonucleotide
aaauacgucccaggcaagg

SEQ ID NO: 1526996 - RNA, 19 nt, Artificial Sequence
  Description of Artificial Sequence: Synthetic oligonucleotide
acgacauaguccuuguuug

SEQ ID NO: 1526997 - RNA, 19 nt, Artificial Sequence
  Description of Artificial Sequence: Synthetic oligonucleotide
cuuucuuggagguugccug

SEQ ID NO: 1526998 - RNA, 19 nt, Artificial Sequence
  Description of Artificial Sequence: Synthetic oligonucleotide
guugccugaaaccuggaug

SEQ ID NO: 1526999 - RNA, 19 nt, Artificial Sequence
  Description of Artificial Sequence: Synthetic oligonucleotide
uuuauugcccucgaugcug

SEQ ID NO: 1527000 - RNA, 19 nt, Artificial Sequence
  Description of Artificial Sequence: Synthetic oligonucleotide
caaauauaggccgagacca

SEQ ID NO: 1527001 - RNA, 19 nt, Artificial Sequence
  Description of Artificial Sequence: Synthetic oligonucleotide
ugcuugacuuaucugauau

SEQ ID NO: 1527002 - RNA, 19 nt, Artificial Sequence
  Description of Artificial Sequence: Synthetic oligonucleotide
ucaucuuuacaaucauggc

SEQ ID NO: 1527003 - RNA, 19 nt, Artificial Sequence
  Description of Artificial Sequence: Synthetic oligonucleotide
ucuagcacgggcacagaag

SEQ ID NO: 1527004 - RNA, 19 nt, Artificial Sequence
  Description of Artificial Sequence: Synthetic oligonucleotide
ucuuuacagacaauucuuc

SEQ ID NO: 1527005 - RNA, 19 nt, Artificial Sequence
  Description of Artificial Sequence: Synthetic oligonucleotide
uucguuuuaacaucaucuc

SEQ ID NO: 1527006 - RNA, 19 nt, Artificial Sequence
  Description of Artificial Sequence: Synthetic oligonucleotide
agauacaucacugcucguc

SEQ ID NO: 1527007 - RNA, 19 nt, Artificial Sequence
  Description of Artificial Sequence: Synthetic oligonucleotide
uuuacagacaauucuucuu

SEQ ID NO: 1527008 - RNA, 19 nt, Artificial Sequence
  Description of Artificial Sequence: Synthetic oligonucleotide
ugauucacuaucacuccca

SEQ ID NO: 1527009 - RNA, 19 nt, Artificial Sequence
  Description of Artificial Sequence: Synthetic oligonucleotide
cuguuuauccagucgacug

SEQ ID NO: 1527010 - RNA, 19 nt, Artificial Sequence
  Description of Artificial Sequence: Synthetic oligonucleotide
aauagauccuucucuucau

SEQ ID NO: 1527011 - RNA, 19 nt, Artificial Sequence
  Description of Artificial Sequence: Synthetic oligonucleotide
uuauaguuugagguaagac

SEQ ID NO: 1527012 - RNA, 19 nt, Artificial Sequence
  Description of Artificial Sequence: Synthetic oligonucleotide
gaugauuccauuucuacau

SEQ ID NO: 1527013 - RNA, 19 nt, Artificial Sequence
  Description of Artificial Sequence: Synthetic oligonucleotide
uucauucaucuuuacaauc

SEQ ID NO: 1527014 - RNA, 19 nt, Artificial Sequence
  Description of Artificial Sequence: Synthetic oligonucleotide
auuuucacugcaugugcag

SEQ ID NO: 1527015 - RNA, 19 nt, Artificial Sequence
  Description of Artificial Sequence: Synthetic oligonucleotide
cuagcacgggcacagaagc

SEQ ID NO: 1527016 - RNA, 19 nt, Artificial Sequence
  Description of Artificial Sequence: Synthetic oligonucleotide
caaaauccgacagaaaguc

SEQ ID NO: 1527017 - RNA, 19 nt, Artificial Sequence
  Description of Artificial Sequence: Synthetic oligonucleotide
ggugcauaaccacaguagg

SEQ ID NO: 1527018 - RNA, 19 nt, Artificial Sequence
  Description of Artificial Sequence: Synthetic oligonucleotide
uggaugauuccauuucuac

SEQ ID NO: 1527019 - RNA, 19 nt, Artificial Sequence
  Description of Artificial Sequence: Synthetic oligonucleotide
agacaauucuucuuuuccu

SEQ ID NO: 1527020 - RNA, 19 nt, Artificial Sequence
  Description of Artificial Sequence: Synthetic oligonucleotide
cacuaucacucccaaauag

SEQ ID NO: 1527021 - RNA, 19 nt, Artificial Sequence
  Description of Artificial Sequence: Synthetic oligonucleotide
ucucuugucauuccuuuau

SEQ ID NO: 1527022 - RNA, 19 nt, Artificial Sequence
  Description of Artificial Sequence: Synthetic oligonucleotide
aucaucucaaaauccgaca

SEQ ID NO: 1527023 - RNA, 19 nt, Artificial Sequence
  Description of Artificial Sequence: Synthetic oligonucleotide
caucaucucaaaauccgac

SEQ ID NO: 1527024 - RNA, 19 nt, Artificial Sequence
  Description of Artificial Sequence: Synthetic oligonucleotide
ugucugaccaccagugcug

SEQ ID NO: 1527025 - RNA, 19 nt, Artificial Sequence
  Description of Artificial Sequence: Synthetic oligonucleotide
uuaucugauaugacaucac

SEQ ID NO: 1527026 - RNA, 19 nt, Artificial Sequence
  Description of Artificial Sequence: Synthetic oligonucleotide
cuugacuuaucugauauga

SEQ ID NO: 1527027 - RNA, 19 nt, Artificial Sequence
  Description of Artificial Sequence: Synthetic oligonucleotide
uuggagguugccugaaacc

SEQ ID NO: 1527028 - RNA, 19 nt, Artificial Sequence
  Description of Artificial Sequence: Synthetic oligonucleotide
acucauugauuaauuuccc

SEQ ID NO: 1527029 - RNA, 19 nt, Artificial Sequence
  Description of Artificial Sequence: Synthetic oligonucleotide
aaauauaggccgagaccac

SEQ ID NO: 1527030 - RNA, 19 nt, Artificial Sequence
  Description of Artificial Sequence: Synthetic oligonucleotide
aucccacuaugcuucaggg

SEQ ID NO: 1527031 - RNA, 19 nt, Artificial Sequence
  Description of Artificial Sequence: Synthetic oligonucleotide
cauuucuacauuccacuug

SEQ ID NO: 1527032 - RNA, 19 nt, Artificial Sequence
  Description of Artificial Sequence: Synthetic oligonucleotide
aucugguagaggugagagc

SEQ ID NO: 1527033 - RNA, 19 nt, Artificial Sequence
  Description of Artificial Sequence: Synthetic oligonucleotide
guuaaauacgucccaggca

SEQ ID NO: 1527034 - RNA, 19 nt, Artificial Sequence
  Description of Artificial Sequence: Synthetic oligonucleotide
ucugacgacauaguccuug

SEQ ID NO: 1527035 - RNA, 19 nt, Artificial Sequence
  Description of Artificial Sequence: Synthetic oligonucleotide
uauccagucgacugauacc

SEQ ID NO: 1527036 - RNA, 19 nt, Artificial Sequence
  Description of Artificial Sequence: Synthetic oligonucleotide
cugauaccuuucuuggagg

SEQ ID NO: 1527037 - RNA, 19 nt, Artificial Sequence
  Description of Artificial Sequence: Synthetic oligonucleotide
ucguccaaucccacuaugc

SEQ ID NO: 1527038 - RNA, 19 nt, Artificial Sequence
  Description of Artificial Sequence: Synthetic oligonucleotide
cuuuauaguuugagguaag

SEQ ID NO: 1527039 - RNA, 19 nt, Artificial Sequence
  Description of Artificial Sequence: Synthetic oligonucleotide
uuuauaguuugagguaaga

SEQ ID NO: 1527040 - RNA, 19 nt, Artificial Sequence
  Description of Artificial Sequence: Synthetic oligonucleotide
uccuacuucuucuucacua

SEQ ID NO: 1527041 - RNA, 19 nt, Artificial Sequence
  Description of Artificial Sequence: Synthetic oligonucleotide
caauggcuauuuuauugcc

SEQ ID NO: 1527042 - RNA, 19 nt, Artificial Sequence
  Description of Artificial Sequence: Synthetic oligonucleotide
aauauaggccgagaccacu

SEQ ID NO: 1527043 - RNA, 19 nt, Artificial Sequence
  Description of Artificial Sequence: Synthetic oligonucleotide
gcaaacuccuaucugguag

SEQ ID NO: 1527044 - RNA, 19 nt, Artificial Sequence
  Description of Artificial Sequence: Synthetic oligonucleotide
aaggugcauaaccacagua

SEQ ID NO: 1527045 - RNA, 19 nt, Artificial Sequence
  Description of Artificial Sequence: Synthetic oligonucleotide
ugauuccauuucuacauuc

SEQ ID NO: 1527046 - RNA, 19 nt, Artificial Sequence
  Description of Artificial Sequence: Synthetic oligonucleotide
uuccuugggguguuuauac

SEQ ID NO: 1527047 - RNA, 19 nt, Artificial Sequence
  Description of Artificial Sequence: Synthetic oligonucleotide
uugacuuaucugauaugac

SEQ ID NO: 1527048 - RNA, 19 nt, Artificial Sequence
  Description of Artificial Sequence: Synthetic oligonucleotide
uuuuagcuggguuucgcuc

SEQ ID NO: 1527049 - RNA, 19 nt, Artificial Sequence
  Description of Artificial Sequence: Synthetic oligonucleotide
auauaucugcaauaagguu

SEQ ID NO: 1527050 - RNA, 19 nt, Artificial Sequence
  Description of Artificial Sequence: Synthetic oligonucleotide
gagguugccugaaaccugg

SEQ ID NO: 1527051 - RNA, 19 nt, Artificial Sequence
  Description of Artificial Sequence: Synthetic oligonucleotide
uacgucccaggcaagguca

SEQ ID NO: 1527052 - RNA, 19 nt, Artificial Sequence
  Description of Artificial Sequence: Synthetic oligonucleotide
cauugggacucuagcacgg

SEQ ID NO: 1527053 - RNA, 19 nt, Artificial Sequence
  Description of Artificial Sequence: Synthetic oligonucleotide
cuuaucugauaugacauca

SEQ ID NO: 1527054 - RNA, 19 nt, Artificial Sequence
  Description of Artificial Sequence: Synthetic oligonucleotide
uccucuccugucaacaccu

SEQ ID NO: 1527055 - RNA, 19 nt, Artificial Sequence
  Description of Artificial Sequence: Synthetic oligonucleotide
acauaguccuuguuugaug

SEQ ID NO: 1527056 - RNA, 19 nt, Artificial Sequence
  Description of Artificial Sequence: Synthetic oligonucleotide
cacuagguagcucuugcag

SEQ ID NO: 1527057 - RNA, 19 nt, Artificial Sequence
  Description of Artificial Sequence: Synthetic oligonucleotide
uccuaucugguagagguga

SEQ ID NO: 1527058 - RNA, 19 nt, Artificial Sequence
  Description of Artificial Sequence: Synthetic oligonucleotide
caacaauuccucccgaauc

SEQ ID NO: 1527059 - RNA, 19 nt, Artificial Sequence
  Description of Artificial Sequence: Synthetic oligonucleotide
auacgucccaggcaagguc

SEQ ID NO: 1527060 - RNA, 19 nt, Artificial Sequence
  Description of Artificial Sequence: Synthetic oligonucleotide
uaucacucccaaauagauc

SEQ ID NO: 1527061 - RNA, 19 nt, Artificial Sequence
  Description of Artificial Sequence: Synthetic oligonucleotide
auuucgucugcguuugccu

SEQ ID NO: 1527062 - RNA, 19 nt, Artificial Sequence
  Description of Artificial Sequence: Synthetic oligonucleotide
uccucccgaaucuucagug

SEQ ID NO: 1527063 - RNA, 19 nt, Artificial Sequence
  Description of Artificial Sequence: Synthetic oligonucleotide
ugauaccuuucuuggaggu

SEQ ID NO: 1527064 - RNA, 19 nt, Artificial Sequence
  Description of Artificial Sequence: Synthetic oligonucleotide
cuuggagguugccugaaac

SEQ ID NO: 1527065 - RNA, 19 nt, Artificial Sequence
  Description of Artificial Sequence: Synthetic oligonucleotide
auccagucgacugauaccu

SEQ ID NO: 1527066 - RNA, 19 nt, Artificial Sequence
  Description of Artificial Sequence: Synthetic oligonucleotide
caucuguuuauccagucga

SEQ ID NO: 1527067 - RNA, 19 nt, Artificial Sequence
  Description of Artificial Sequence: Synthetic oligonucleotide
aucucaaaauccgacagaa

SEQ ID NO: 1527068 - RNA, 19 nt, Artificial Sequence
  Description of Artificial Sequence: Synthetic oligonucleotide
cugauucacuaucacuccc

SEQ ID NO: 1527069 - RNA, 19 nt, Artificial Sequence
  Description of Artificial Sequence: Synthetic oligonucleotide
ugggacucuagcacgggca

SEQ ID NO: 1527070 - RNA, 19 nt, Artificial Sequence
  Description of Artificial Sequence: Synthetic oligonucleotide
uuggaccuugauuccuugg

SEQ ID NO: 1527071 - RNA, 19 nt, Artificial Sequence
  Description of Artificial Sequence: Synthetic oligonucleotide
uggcauugggacucuagca

SEQ ID NO: 1527072 - RNA, 19 nt, Artificial Sequence
  Description of Artificial Sequence: Synthetic oligonucleotide
acaguaggcaauaagguua

SEQ ID NO: 1527073 - RNA, 19 nt, Artificial Sequence
  Description of Artificial Sequence: Synthetic oligonucleotide
ucacugcucguccaauccc

SEQ ID NO: 1527074 - RNA, 19 nt, Artificial Sequence
  Description of Artificial Sequence: Synthetic oligonucleotide
ugauaucugugaacuuucu

SEQ ID NO: 1527075 - RNA, 19 nt, Artificial Sequence
  Description of Artificial Sequence: Synthetic oligonucleotide
uuauugcccucgaugcuga

SEQ ID NO: 1527076 - RNA, 19 nt, Artificial Sequence
  Description of Artificial Sequence: Synthetic oligonucleotide
cacacuagguagcucuugc

SEQ ID NO: 1527077 - RNA, 19 nt, Artificial Sequence
  Description of Artificial Sequence: Synthetic oligonucleotide
ucuagaucucucugcuccc

SEQ ID NO: 1527078 - RNA, 19 nt, Artificial Sequence
  Description of Artificial Sequence: Synthetic oligonucleotide
uaaauacgucccaggcaag

SEQ ID NO: 1527079 - RNA, 19 nt, Artificial Sequence
  Description of Artificial Sequence: Synthetic oligonucleotide
cugcaauaagguuuucuuc

SEQ ID NO: 1527080 - RNA, 19 nt, Artificial Sequence
  Description of Artificial Sequence: Synthetic oligonucleotide
aggugcauaaccacaguag

SEQ ID NO: 1527081 - RNA, 19 nt, Artificial Sequence
  Description of Artificial Sequence: Synthetic oligonucleotide
gauuucgucugcguuugcc

SEQ ID NO: 1527082 - RNA, 19 nt, Artificial Sequence
  Description of Artificial Sequence: Synthetic oligonucleotide
gacucuagcacgggcacag

SEQ ID NO: 1527083 - RNA, 19 nt, Artificial Sequence
  Description of Artificial Sequence: Synthetic oligonucleotide
ugagagccauucuuugaug

SEQ ID NO: 1527084 - RNA, 19 nt, Artificial Sequence
  Description of Artificial Sequence: Synthetic oligonucleotide
uuuucacugcaugugcaga

SEQ ID NO: 1527085 - RNA, 19 nt, Artificial Sequence
  Description of Artificial Sequence: Synthetic oligonucleotide
ucccaaauagauccuucuc

SEQ ID NO: 1527086 - RNA, 19 nt, Artificial Sequence
  Description of Artificial Sequence: Synthetic oligonucleotide
uauaggccgagaccacuca

SEQ ID NO: 1527087 - RNA, 19 nt, Artificial Sequence
  Description of Artificial Sequence: Synthetic oligonucleotide
uaucagaugcugcugucuu

SEQ ID NO: 1527088 - RNA, 19 nt, Artificial Sequence
  Description of Artificial Sequence: Synthetic oligonucleotide
ucuguuuauccagucgacu

SEQ ID NO: 1527089 - RNA, 19 nt, Artificial Sequence
  Description of Artificial Sequence: Synthetic oligonucleotide
aauacgucccaggcaaggu

SEQ ID NO: 1527090 - RNA, 19 nt, Artificial Sequence
  Description of Artificial Sequence: Synthetic oligonucleotide
ccaaauauaggccgagacc

SEQ ID NO: 1527091 - RNA, 19 nt, Artificial Sequence
  Description of Artificial Sequence: Synthetic oligonucleotide
uucuucgucgcugaggcau

SEQ ID NO: 1527092 - RNA, 19 nt, Artificial Sequence
  Description of Artificial Sequence: Synthetic oligonucleotide
ucucuuuugcuugacuuau

SEQ ID NO: 1527093 - RNA, 19 nt, Artificial Sequence
  Description of Artificial Sequence: Synthetic oligonucleotide
ucuuuuagcuggguuucgc

SEQ ID NO: 1527094 - RNA, 19 nt, Artificial Sequence
  Description of Artificial Sequence: Synthetic oligonucleotide
cagugcugcucauucuucg

SEQ ID NO: 1527095 - RNA, 19 nt, Artificial Sequence
  Description of Artificial Sequence: Synthetic oligonucleotide
gucgcugaggcauuuguuc

SEQ ID NO: 1527096 - RNA, 19 nt, Artificial Sequence
  Description of Artificial Sequence: Synthetic oligonucleotide
accacugucaauaaauguu

SEQ ID NO: 1527097 - RNA, 19 nt, Artificial Sequence
  Description of Artificial Sequence: Synthetic oligonucleotide
cugauaugacaucacuauc

SEQ ID NO: 1527098 - RNA, 19 nt, Artificial Sequence
  Description of Artificial Sequence: Synthetic oligonucleotide
ugcucguccaaucccacua

SEQ ID NO: 1527099 - RNA, 19 nt, Artificial Sequence
  Description of Artificial Sequence: Synthetic oligonucleotide
aacuccuaucugguagagg

SEQ ID NO: 1527100 - RNA, 19 nt, Artificial Sequence
  Description of Artificial Sequence: Synthetic oligonucleotide
uucaacaauuccucccgaa

SEQ ID NO: 1527101 - RNA, 19 nt, Artificial Sequence
  Description of Artificial Sequence: Synthetic oligonucleotide
uucccugccauauccuugu

SEQ ID NO: 1527102 - RNA, 19 nt, Artificial Sequence
  Description of Artificial Sequence: Synthetic oligonucleotide
ugggucugacgacauaguc

SEQ ID NO: 1527103 - RNA, 19 nt, Artificial Sequence
  Description of Artificial Sequence: Synthetic oligonucleotide
uccuuguuggaccuugauu

SEQ ID NO: 1527104 - RNA, 19 nt, Artificial Sequence
  Description of Artificial Sequence: Synthetic oligonucleotide
aaacuccuaucugguagag

SEQ ID NO: 1527105 - RNA, 19 nt, Artificial Sequence
  Description of Artificial Sequence: Synthetic oligonucleotide
acuaucacucccaaauaga

SEQ ID NO: 1527106 - RNA, 19 nt, Artificial Sequence
  Description of Artificial Sequence: Synthetic oligonucleotide
ucgcugaggcauuuguucu

SEQ ID NO: 1527107 - RNA, 19 nt, Artificial Sequence
  Description of Artificial Sequence: Synthetic oligonucleotide
aaaccuggaugauuccauu

SEQ ID NO: 1527108 - RNA, 19 nt, Artificial Sequence
  Description of Artificial Sequence: Synthetic oligonucleotide
gauggcauugggacucuag

SEQ ID NO: 1527109 - RNA, 19 nt, Artificial Sequence
  Description of Artificial Sequence: Synthetic oligonucleotide
ggcuauuuuauugcccucg

SEQ ID NO: 1527110 - RNA, 19 nt, Artificial Sequence
  Description of Artificial Sequence: Synthetic oligonucleotide
gauuuucacugcaugugca

SEQ ID NO: 1527111 - RNA, 19 nt, Artificial Sequence
  Description of Artificial Sequence: Synthetic oligonucleotide
uucguggugucugaccacc

SEQ ID NO: 1527112 - RNA, 19 nt, Artificial Sequence
  Description of Artificial Sequence: Synthetic oligonucleotide
uaaggugcauaaccacagu

SEQ ID NO: 1527113 - RNA, 19 nt, Artificial Sequence
  Description of Artificial Sequence: Synthetic oligonucleotide
aggugagagccauucuuug

SEQ ID NO: 1527114 - RNA, 19 nt, Artificial Sequence
  Description of Artificial Sequence: Synthetic oligonucleotide
ucuuuacaaucauggcgcu

SEQ ID NO: 1527115 - RNA, 19 nt, Artificial Sequence
  Description of Artificial Sequence: Synthetic oligonucleotide
auauaggccgagaccacuc

SEQ ID NO: 1527116 - RNA, 19 nt, Artificial Sequence
  Description of Artificial Sequence: Synthetic oligonucleotide
uugggacucuagcacgggc

SEQ ID NO: 1527117 - RNA, 19 nt, Artificial Sequence
  Description of Artificial Sequence: Synthetic oligonucleotide
ucacuaucacucccaaaua

SEQ ID NO: 1527118 - RNA, 19 nt, Artificial Sequence
  Description of Artificial Sequence: Synthetic oligonucleotide
gcauugggacucuagcacg

SEQ ID NO: 1527119 - RNA, 19 nt, Artificial Sequence
  Description of Artificial Sequence: Synthetic oligonucleotide
cauggcgcucacaacauca

SEQ ID NO: 1527120 - RNA, 19 nt, Artificial Sequence
  Description of Artificial Sequence: Synthetic oligonucleotide
auauccuuguuggaccuug

SEQ ID NO: 1527121 - RNA, 19 nt, Artificial Sequence
  Description of Artificial Sequence: Synthetic oligonucleotide
aucuguuuauccagucgac

SEQ ID NO: 1527122 - RNA, 19 nt, Artificial Sequence
  Description of Artificial Sequence: Synthetic oligonucleotide
aagagccuuuuccucuccu

SEQ ID NO: 1527123 - RNA, 19 nt, Artificial Sequence
  Description of Artificial Sequence: Synthetic oligonucleotide
uacaucacugcucguccaa

SEQ ID NO: 1527124 - RNA, 19 nt, Artificial Sequence
  Description of Artificial Sequence: Synthetic oligonucleotide
cagacaucacaccacuguc

SEQ ID NO: 1527125 - RNA, 19 nt, Artificial Sequence
  Description of Artificial Sequence: Synthetic oligonucleotide
uucaauugucugucuuccu

SEQ ID NO: 1527126 - RNA, 19 nt, Artificial Sequence
  Description of Artificial Sequence: Synthetic oligonucleotide
cuagguagcucuugcagaa

SEQ ID NO: 1527127 - RNA, 19 nt, Artificial Sequence
  Description of Artificial Sequence: Synthetic oligonucleotide
gauuaauuucccugccaua

SEQ ID NO: 1527128 - RNA, 19 nt, Artificial Sequence
  Description of Artificial Sequence: Synthetic oligonucleotide
cagaaaguccaugcuuucc

SEQ ID NO: 1527129 - RNA, 19 nt, Artificial Sequence
  Description of Artificial Sequence: Synthetic oligonucleotide
ccuggcucacacuagguag

SEQ ID NO: 1527130 - RNA, 19 nt, Artificial Sequence
  Description of Artificial Sequence: Synthetic oligonucleotide
cccacuaugcuucaggguc

SEQ ID NO: 1527131 - RNA, 19 nt, Artificial Sequence
  Description of Artificial Sequence: Synthetic oligonucleotide
gugcauaaccacaguaggc

SEQ ID NO: 1527132 - RNA, 19 nt, Artificial Sequence
  Description of Artificial Sequence: Synthetic oligonucleotide
agcaucagagacaacucga

SEQ ID NO: 1527133 - RNA, 19 nt, Artificial Sequence
  Description of Artificial Sequence: Synthetic oligonucleotide
ucacuaucagaugcugcug

SEQ ID NO: 1527134 - RNA, 19 nt, Artificial Sequence
  Description of Artificial Sequence: Synthetic oligonucleotide
cacugucaauaaauguuuc

SEQ ID NO: 1527135 - RNA, 19 nt, Artificial Sequence
  Description of Artificial Sequence: Synthetic oligonucleotide
uaguuugagguaagaccaa

SEQ ID NO: 1527136 - RNA, 19 nt, Artificial Sequence
  Description of Artificial Sequence: Synthetic oligonucleotide
uuucgucugcguuugccua

SEQ ID NO: 1527137 - RNA, 19 nt, Artificial Sequence
  Description of Artificial Sequence: Synthetic oligonucleotide
auaucugcaauaagguuuu

SEQ ID NO: 1527138 - RNA, 19 nt, Artificial Sequence
  Description of Artificial Sequence: Synthetic oligonucleotide
gauucacuaucacucccaa

SEQ ID NO: 1527139 - RNA, 19 nt, Artificial Sequence
  Description of Artificial Sequence: Synthetic oligonucleotide
cacagaagccaggaucucc

SEQ ID NO: 1527140 - RNA, 19 nt, Artificial Sequence
  Description of Artificial Sequence: Synthetic oligonucleotide
gacgacauaguccuuguuu

SEQ ID NO: 1527141 - RNA, 19 nt, Artificial Sequence
  Description of Artificial Sequence: Synthetic oligonucleotide
caucacaccacugucaaua

SEQ ID NO: 1527142 - RNA, 19 nt, Artificial Sequence
  Description of Artificial Sequence: Synthetic oligonucleotide
agaccaaauauaggccgag

SEQ ID NO: 1527143 - RNA, 19 nt, Artificial Sequence
  Description of Artificial Sequence: Synthetic oligonucleotide
uguuggaccuugauuccuu

SEQ ID NO: 1527144 - RNA, 19 nt, Artificial Sequence
  Description of Artificial Sequence: Synthetic oligonucleotide
cuugucauuccuuuauagu

SEQ ID NO: 1527145 - RNA, 19 nt, Artificial Sequence
  Description of Artificial Sequence: Synthetic oligonucleotide
gacugauaccuuucuugga

SEQ ID NO: 1527146 - RNA, 19 nt, Artificial Sequence
  Description of Artificial Sequence: Synthetic oligonucleotide
gccugauucacuaucacuc

SEQ ID NO: 1527147 - RNA, 19 nt, Artificial Sequence
  Description of Artificial Sequence: Synthetic oligonucleotide
auacaucacugcucgucca

SEQ ID NO: 1527148 - RNA, 19 nt, Artificial Sequence
  Description of Artificial Sequence: Synthetic oligonucleotide
uuccucccgaaucuucagu

SEQ ID NO: 1527149 - RNA, 19 nt, Artificial Sequence
  Description of Artificial Sequence: Synthetic oligonucleotide
acaucacuaucagagucgu

SEQ ID NO: 1527150 - RNA, 19 nt, Artificial Sequence
  Description of Artificial Sequence: Synthetic oligonucleotide
auaaccacaguaggcaaua

SEQ ID NO: 1527151 - RNA, 19 nt, Artificial Sequence
  Description of Artificial Sequence: Synthetic oligonucleotide
ggucugacgacauaguccu

SEQ ID NO: 1527152 - RNA, 19 nt, Artificial Sequence
  Description of Artificial Sequence: Synthetic oligonucleotide
acacuagguagcucuugca

SEQ ID NO: 1527153 - RNA, 19 nt, Artificial Sequence
  Description of Artificial Sequence: Synthetic oligonucleotide
uauccuuguuggaccuuga

SEQ ID NO: 1527154 - RNA, 19 nt, Artificial Sequence
  Description of Artificial Sequence: Synthetic oligonucleotide
gucacaauggcuauuuuau

SEQ ID NO: 1527155 - RNA, 19 nt, Artificial Sequence
  Description of Artificial Sequence: Synthetic oligonucleotide
ccugauucacuaucacucc

SEQ ID NO: 1527156 - RNA, 19 nt, Artificial Sequence
  Description of Artificial Sequence: Synthetic oligonucleotide
uagcacgggcacagaagcc

SEQ ID NO: 1527157 - RNA, 19 nt, Artificial Sequence
  Description of Artificial Sequence: Synthetic oligonucleotide
uuacaaucauggcgcucac

SEQ ID NO: 1527158 - RNA, 19 nt, Artificial Sequence
  Description of Artificial Sequence: Synthetic oligonucleotide
caaucauggcgcucacaac

SEQ ID NO: 1527159 - RNA, 19 nt, Artificial Sequence
  Description of Artificial Sequence: Synthetic oligonucleotide
guuggaccuugauuccuug

SEQ ID NO: 1527160 - RNA, 19 nt, Artificial Sequence
  Description of Artificial Sequence: Synthetic oligonucleotide
uuguuggaccuugauuccu

SEQ ID NO: 1527161 - RNA, 19 nt, Artificial Sequence
  Description of Artificial Sequence: Synthetic oligonucleotide
aucugauaugacaucacua

SEQ ID NO: 1527162 - RNA, 19 nt, Artificial Sequence
  Description of Artificial Sequence: Synthetic oligonucleotide
ucccacuaugcuucagggu

SEQ ID NO: 1527163 - RNA, 19 nt, Artificial Sequence
  Description of Artificial Sequence: Synthetic oligonucleotide
agacaucacaccacuguca

SEQ ID NO: 1527164 - RNA, 19 nt, Artificial Sequence
  Description of Artificial Sequence: Synthetic oligonucleotide
gggucugacgacauagucc

SEQ ID NO: 1527165 - RNA, 19 nt, Artificial Sequence
  Description of Artificial Sequence: Synthetic oligonucleotide
ccugucaacaccuucucca

SEQ ID NO: 1527166 - RNA, 19 nt, Artificial Sequence
  Description of Artificial Sequence: Synthetic oligonucleotide
agaccacucauugauuaau

SEQ ID NO: 1527167 - RNA, 19 nt, Artificial Sequence
  Description of Artificial Sequence: Synthetic oligonucleotide
uggguuucgcucuucucuu

SEQ ID NO: 1527168 - RNA, 19 nt, Artificial Sequence
  Description of Artificial Sequence: Synthetic oligonucleotide
uccucgauuucgucugcgu

SEQ ID NO: 1527169 - RNA, 19 nt, Artificial Sequence
  Description of Artificial Sequence: Synthetic oligonucleotide
ucacacuagguagcucuug

SEQ ID NO: 1527170 - RNA, 19 nt, Artificial Sequence
  Description of Artificial Sequence: Synthetic oligonucleotide
cuaucacucccaaauagau

SEQ ID NO: 1527171 - RNA, 19 nt, Artificial Sequence
  Description of Artificial Sequence: Synthetic oligonucleotide
auugggacucuagcacggg

SEQ ID NO: 1527172 - RNA, 19 nt, Artificial Sequence
  Description of Artificial Sequence: Synthetic oligonucleotide
cagucgacugauaccuuuc

SEQ ID NO: 1527173 - RNA, 19 nt, Artificial Sequence
  Description of Artificial Sequence: Synthetic oligonucleotide
caucacugcucguccaauc

SEQ ID NO: 1527174 - RNA, 19 nt, Artificial Sequence
  Description of Artificial Sequence: Synthetic oligonucleotide
aucacaccacugucaauaa

SEQ ID NO: 1527175 - RNA, 19 nt, Artificial Sequence
  Description of Artificial Sequence: Synthetic oligonucleotide
ugggguguuuauacagaua

SEQ ID NO: 1527176 - RNA, 19 nt, Artificial Sequence
  Description of Artificial Sequence: Synthetic oligonucleotide
aguuugagguaagaccaaa

SEQ ID NO: 1527177 - RNA, 19 nt, Artificial Sequence
  Description of Artificial Sequence: Synthetic oligonucleotide
augauuccauuucuacauu

SEQ ID NO: 1527178 - RNA, 19 nt, Artificial Sequence
  Description of Artificial Sequence: Synthetic oligonucleotide
gagaccacucauugauuaa

SEQ ID NO: 1527179 - RNA, 19 nt, Artificial Sequence
  Description of Artificial Sequence: Synthetic oligonucleotide
ucuuggagguugccugaaa

SEQ ID NO: 1527180 - RNA, 19 nt, Artificial Sequence
  Description of Artificial Sequence: Synthetic oligonucleotide
aauccgacagaaaguccau

SEQ ID NO: 1527181 - RNA, 19 nt, Artificial Sequence
  Description of Artificial Sequence: Synthetic oligonucleotide
cuccuaucugguagaggug

SEQ ID NO: 1527182 - RNA, 19 nt, Artificial Sequence
  Description of Artificial Sequence: Synthetic oligonucleotide
acuaugcuucagggucucc

SEQ ID NO: 1527183 - RNA, 19 nt, Artificial Sequence
  Description of Artificial Sequence: Synthetic oligonucleotide
cucccgaaucuucagugca

SEQ ID NO: 1527184 - RNA, 19 nt, Artificial Sequence
  Description of Artificial Sequence: Synthetic oligonucleotide
uucacugcaugugcagauc

SEQ ID NO: 1527185 - RNA, 19 nt, Artificial Sequence
  Description of Artificial Sequence: Synthetic oligonucleotide
cuggguuucgcucuucucu

SEQ ID NO: 1527186 - RNA, 19 nt, Artificial Sequence
  Description of Artificial Sequence: Synthetic oligonucleotide
ucauggcgcucacaacauc

SEQ ID NO: 1527187 - RNA, 19 nt, Artificial Sequence
  Description of Artificial Sequence: Synthetic oligonucleotide
cacugcaugugcagaucug

SEQ ID NO: 1527188 - RNA, 19 nt, Artificial Sequence
  Description of Artificial Sequence: Synthetic oligonucleotide
uuagcuggguuucgcucuu

SEQ ID NO: 1527189 - RNA, 19 nt, Artificial Sequence
  Description of Artificial Sequence: Synthetic oligonucleotide
ugguagaggugagagccau

SEQ ID NO: 1527190 - RNA, 19 nt, Artificial Sequence
  Description of Artificial Sequence: Synthetic oligonucleotide
cuuuacaaucauggcgcuc

SEQ ID NO: 1527191 - RNA, 19 nt, Artificial Sequence
  Description of Artificial Sequence: Synthetic oligonucleotide
gugagagccauucuuugau

SEQ ID NO: 1527192 - RNA, 19 nt, Artificial Sequence
  Description of Artificial Sequence: Synthetic oligonucleotide
guuugauggcauugggacu

SEQ ID NO: 1527193 - RNA, 19 nt, Artificial Sequence
  Description of Artificial Sequence: Synthetic oligonucleotide
cucauucuucgucgcugag

SEQ ID NO: 1527194 - RNA, 19 nt, Artificial Sequence
  Description of Artificial Sequence: Synthetic oligonucleotide
ggcaaggucacaauggcua

SEQ ID NO: 1527195 - RNA, 19 nt, Artificial Sequence
  Description of Artificial Sequence: Synthetic oligonucleotide
auaggccgagaccacucau

SEQ ID NO: 1527196 - RNA, 19 nt, Artificial Sequence
  Description of Artificial Sequence: Synthetic oligonucleotide
cucguccaaucccacuaug

SEQ ID NO: 1527197 - RNA, 19 nt, Artificial Sequence
  Description of Artificial Sequence: Synthetic oligonucleotide
cucgaugcugauuuucacu

SEQ ID NO: 1527198 - RNA, 19 nt, Artificial Sequence
  Description of Artificial Sequence: Synthetic oligonucleotide
uacaaucauggcgcucaca

SEQ ID NO: 1527199 - RNA, 19 nt, Artificial Sequence
  Description of Artificial Sequence: Synthetic oligonucleotide
ggugagagccauucuuuga

SEQ ID NO: 1527200 - RNA, 19 nt, Artificial Sequence
  Description of Artificial Sequence: Synthetic oligonucleotide
agaucucucugcucccuuu

SEQ ID NO: 1527201 - RNA, 19 nt, Artificial Sequence
  Description of Artificial Sequence: Synthetic oligonucleotide
acccuguaaaauuccucuu

SEQ ID NO: 1527202 - RNA, 19 nt, Artificial Sequence
  Description of Artificial Sequence: Synthetic oligonucleotide
uccaggucuaagagccuuu

SEQ ID NO: 1527203 - RNA, 19 nt, Artificial Sequence
  Description of Artificial Sequence: Synthetic oligonucleotide
ucguggugucugaccacca

SEQ ID NO: 1527204 - RNA, 19 nt, Artificial Sequence
  Description of Artificial Sequence: Synthetic oligonucleotide
uagaucucucugcucccuu

SEQ ID NO: 1527205 - RNA, 19 nt, Artificial Sequence
  Description of Artificial Sequence: Synthetic oligonucleotide
auccuuguuggaccuugau

SEQ ID NO: 1527206 - RNA, 19 nt, Artificial Sequence
  Description of Artificial Sequence: Synthetic oligonucleotide
aggcaaacuccuaucuggu

SEQ ID NO: 1527207 - RNA, 19 nt, Artificial Sequence
  Description of Artificial Sequence: Synthetic oligonucleotide
cugcaucacuaauaaaagu

SEQ ID NO: 1527208 - RNA, 19 nt, Artificial Sequence
  Description of Artificial Sequence: Synthetic oligonucleotide
gcucacacuagguagcucu

SEQ ID NO: 1527209 - RNA, 19 nt, Artificial Sequence
  Description of Artificial Sequence: Synthetic oligonucleotide
cauuccacuugggucugac

SEQ ID NO: 1527210 - RNA, 19 nt, Artificial Sequence
  Description of Artificial Sequence: Synthetic oligonucleotide
gcuauuuuauugcccucga

SEQ ID NO: 1527211 - RNA, 19 nt, Artificial Sequence
  Description of Artificial Sequence: Synthetic oligonucleotide
cuuuuagcuggguuucgcu

SEQ ID NO: 1527212 - RNA, 19 nt, Artificial Sequence
  Description of Artificial Sequence: Synthetic oligonucleotide
gaccaaauauaggccgaga

SEQ ID NO: 1527213 - RNA, 19 nt, Artificial Sequence
  Description of Artificial Sequence: Synthetic oligonucleotide
ucuucgucgcugaggcauu

SEQ ID NO: 1527214 - RNA, 19 nt, Artificial Sequence
  Description of Artificial Sequence: Synthetic oligonucleotide
cuggaugauuccauuucua

SEQ ID NO: 1527215 - RNA, 19 nt, Artificial Sequence
  Description of Artificial Sequence: Synthetic oligonucleotide
cacgggcacagaagccagg

SEQ ID NO: 1527216 - RNA, 19 nt, Artificial Sequence
  Description of Artificial Sequence: Synthetic oligonucleotide
gcugaggcauuuguucuag

SEQ ID NO: 1527217 - RNA, 19 nt, Artificial Sequence
  Description of Artificial Sequence: Synthetic oligonucleotide
cuucaacaauuccucccga

SEQ ID NO: 1527218 - RNA, 19 nt, Artificial Sequence
  Description of Artificial Sequence: Synthetic oligonucleotide
ugacgacauaguccuuguu

SEQ ID NO: 1527219 - RNA, 19 nt, Artificial Sequence
  Description of Artificial Sequence: Synthetic oligonucleotide
caccacugucaauaaaugu

SEQ ID NO: 1527220 - RNA, 19 nt, Artificial Sequence
  Description of Artificial Sequence: Synthetic oligonucleotide
aguccuuguuugauggcau

SEQ ID NO: 1527221 - RNA, 19 nt, Artificial Sequence
  Description of Artificial Sequence: Synthetic oligonucleotide
caggucuaagagccuuuuc

SEQ ID NO: 1527222 - RNA, 19 nt, Artificial Sequence
  Description of Artificial Sequence: Synthetic oligonucleotide
gcugcucauucuucgucgc

SEQ ID NO: 1527223 - RNA, 19 nt, Artificial Sequence
  Description of Artificial Sequence: Synthetic oligonucleotide
auucuucgucgcugaggca

SEQ ID NO: 1527224 - RNA, 19 nt, Artificial Sequence
  Description of Artificial Sequence: Synthetic oligonucleotide
cacuaucagaugcugcugu

SEQ ID NO: 1527225 - RNA, 19 nt, Artificial Sequence
  Description of Artificial Sequence: Synthetic oligonucleotide
ucgucugcguuugccuaca

SEQ ID NO: 1527226 - RNA, 19 nt, Artificial Sequence
  Description of Artificial Sequence: Synthetic oligonucleotide
gucugcguuugccuacaca

SEQ ID NO: 1527227 - RNA, 19 nt, Artificial Sequence
  Description of Artificial Sequence: Synthetic oligonucleotide
aucauggcgcucacaacau

SEQ ID NO: 1527228 - RNA, 19 nt, Artificial Sequence
  Description of Artificial Sequence: Synthetic oligonucleotide
uaaccacaguaggcaauaa

SEQ ID NO: 1527229 - RNA, 19 nt, Artificial Sequence
  Description of Artificial Sequence: Synthetic oligonucleotide
gggacucuagcacgggcac

SEQ ID NO: 1527230 - RNA, 19 nt, Artificial Sequence
  Description of Artificial Sequence: Synthetic oligonucleotide
cauaaccacaguaggcaau

SEQ ID NO: 1527231 - RNA, 19 nt, Artificial Sequence
  Description of Artificial Sequence: Synthetic oligonucleotide
gucucuucguggugucuga

SEQ ID NO: 1527232 - RNA, 19 nt, Artificial Sequence
  Description of Artificial Sequence: Synthetic oligonucleotide
ccucccgaaucuucagugc

SEQ ID NO: 1527233 - RNA, 19 nt, Artificial Sequence
  Description of Artificial Sequence: Synthetic oligonucleotide
uucgucgcugaggcauuug

SEQ ID NO: 1527234 - RNA, 19 nt, Artificial Sequence
  Description of Artificial Sequence: Synthetic oligonucleotide
ggucuccuggcucacacua

SEQ ID NO: 1527235 - RNA, 19 nt, Artificial Sequence
  Description of Artificial Sequence: Synthetic oligonucleotide
ccuaucugguagaggugag

SEQ ID NO: 1527236 - RNA, 19 nt, Artificial Sequence
  Description of Artificial Sequence: Synthetic oligonucleotide
cuccaagucucuucguggu

SEQ ID NO: 1527237 - RNA, 19 nt, Artificial Sequence
  Description of Artificial Sequence: Synthetic oligonucleotide
ccauucuuugauggcagac

SEQ ID NO: 1527238 - RNA, 19 nt, Artificial Sequence
  Description of Artificial Sequence: Synthetic oligonucleotide
cccaaauagauccuucucu

SEQ ID NO: 1527239 - RNA, 19 nt, Artificial Sequence
  Description of Artificial Sequence: Synthetic oligonucleotide
cucuugucauuccuuuaua

SEQ ID NO: 1527240 - RNA, 19 nt, Artificial Sequence
  Description of Artificial Sequence: Synthetic oligonucleotide
guggugucugaccaccagu

SEQ ID NO: 1527241 - RNA, 19 nt, Artificial Sequence
  Description of Artificial Sequence: Synthetic oligonucleotide
guuuauccagucgacugau

SEQ ID NO: 1527242 - RNA, 19 nt, Artificial Sequence
  Description of Artificial Sequence: Synthetic oligonucleotide
acuugggucugacgacaua

SEQ ID NO: 1527243 - RNA, 19 nt, Artificial Sequence
  Description of Artificial Sequence: Synthetic oligonucleotide
gccgagaccacucauugau

SEQ ID NO: 1527244 - RNA, 19 nt, Artificial Sequence
  Description of Artificial Sequence: Synthetic oligonucleotide
ccgaaucuucagugcaggc

SEQ ID NO: 1527245 - RNA, 19 nt, Artificial Sequence
  Description of Artificial Sequence: Synthetic oligonucleotide
acgucccaggcaaggucac

SEQ ID NO: 1527246 - RNA, 19 nt, Artificial Sequence
  Description of Artificial Sequence: Synthetic oligonucleotide
gaggugagagccauucuuu

SEQ ID NO: 1527247 - RNA, 19 nt, Artificial Sequence
  Description of Artificial Sequence: Synthetic oligonucleotide
guuugagguaagaccaaau

SEQ ID NO: 1527248 - RNA, 19 nt, Artificial Sequence
  Description of Artificial Sequence: Synthetic oligonucleotide
cacuaugcuucagggucuc

SEQ ID NO: 1527249 - RNA, 19 nt, Artificial Sequence
  Description of Artificial Sequence: Synthetic oligonucleotide
auugcccucgaugcugauu

SEQ ID NO: 1527250 - RNA, 19 nt, Artificial Sequence
  Description of Artificial Sequence: Synthetic oligonucleotide
cuaucagaugcugcugucu

SEQ ID NO: 1527251 - RNA, 19 nt, Artificial Sequence
  Description of Artificial Sequence: Synthetic oligonucleotide
aggucacaauggcuauuuu

SEQ ID NO: 1527252 - RNA, 19 nt, Artificial Sequence
  Description of Artificial Sequence: Synthetic oligonucleotide
cugacgacauaguccuugu

SEQ ID NO: 1527253 - RNA, 19 nt, Artificial Sequence
  Description of Artificial Sequence: Synthetic oligonucleotide
uauugcccucgaugcugau

SEQ ID NO: 1527254 - RNA, 19 nt, Artificial Sequence
  Description of Artificial Sequence: Synthetic oligonucleotide
gaccacucauugauuaauu

SEQ ID NO: 1527255 - RNA, 19 nt, Artificial Sequence
  Description of Artificial Sequence: Synthetic oligonucleotide
gccauucuuugauggcaga

SEQ ID NO: 1527256 - RNA, 19 nt, Artificial Sequence
  Description of Artificial Sequence: Synthetic oligonucleotide
gcaauaagguuuucuucuu

SEQ ID NO: 1527257 - RNA, 19 nt, Artificial Sequence
  Description of Artificial Sequence: Synthetic oligonucleotide
cgagaccacucauugauua

SEQ ID NO: 1527258 - RNA, 19 nt, Artificial Sequence
  Description of Artificial Sequence: Synthetic oligonucleotide
cguggugucugaccaccag

SEQ ID NO: 1527259 - RNA, 19 nt, Artificial Sequence
  Description of Artificial Sequence: Synthetic oligonucleotide
ccuggaugauuccauuucu

SEQ ID NO: 1527260 - RNA, 19 nt, Artificial Sequence
  Description of Artificial Sequence: Synthetic oligonucleotide
cuagaucucucugcucccu

SEQ ID NO: 1527261 - RNA, 19 nt, Artificial Sequence
  Description of Artificial Sequence: Synthetic oligonucleotide
ugauggcauugggacucua

SEQ ID NO: 1527262 - RNA, 19 nt, Artificial Sequence
  Description of Artificial Sequence: Synthetic oligonucleotide
acauuccacuugggucuga

SEQ ID NO: 1527263 - RNA, 19 nt, Artificial Sequence
  Description of Artificial Sequence: Synthetic oligonucleotide
gguugccugaaaccuggau

SEQ ID NO: 1527264 - RNA, 19 nt, Artificial Sequence
  Description of Artificial Sequence: Synthetic oligonucleotide
cuccuggcucacacuaggu

SEQ ID NO: 1527265 - RNA, 19 nt, Artificial Sequence
  Description of Artificial Sequence: Synthetic oligonucleotide
cgacauaguccuuguuuga

SEQ ID NO: 1527266 - RNA, 19 nt, Artificial Sequence
  Description of Artificial Sequence: Synthetic oligonucleotide
cucacacuagguagcucuu

SEQ ID NO: 1527267 - RNA, 19 nt, Artificial Sequence
  Description of Artificial Sequence: Synthetic oligonucleotide
ccacuugggucugacgaca

SEQ ID NO: 1527268 - RNA, 19 nt, Artificial Sequence
  Description of Artificial Sequence: Synthetic oligonucleotide
caccagugcugcucauucu

SEQ ID NO: 1527269 - RNA, 19 nt, Artificial Sequence
  Description of Artificial Sequence: Synthetic oligonucleotide
cugcguuugccuacacauu

SEQ ID NO: 1527270 - RNA, 19 nt, Artificial Sequence
  Description of Artificial Sequence: Synthetic oligonucleotide
ccaagucucuucguggugu

SEQ ID NO: 1527271 - RNA, 19 nt, Artificial Sequence
  Description of Artificial Sequence: Synthetic oligonucleotide
ggacucuagcacgggcaca

SEQ ID NO: 1527272 - RNA, 19 nt, Artificial Sequence
  Description of Artificial Sequence: Synthetic oligonucleotide
cagauacaucacugcucgu

SEQ ID NO: 1527273 - RNA, 19 nt, Artificial Sequence
  Description of Artificial Sequence: Synthetic oligonucleotide
cacuugggucugacgacau

SEQ ID NO: 1527274 - RNA, 19 nt, Artificial Sequence
  Description of Artificial Sequence: Synthetic oligonucleotide
cguccaaucccacuaugcu

SEQ ID NO: 1527275 - RNA, 19 nt, Artificial Sequence
  Description of Artificial Sequence: Synthetic oligonucleotide
ccacuaugcuucagggucu

SEQ ID NO: 1527276 - RNA, 19 nt, Artificial Sequence
  Description of Artificial Sequence: Synthetic oligonucleotide
ggcucacacuagguagcuc

SEQ ID NO: 1527277 - RNA, 19 nt, Artificial Sequence
  Description of Artificial Sequence: Synthetic oligonucleotide
ccccauccucgauuucguc

SEQ ID NO: 1527278 - RNA, 19 nt, Artificial Sequence
  Description of Artificial Sequence: Synthetic oligonucleotide
ccagucgacugauaccuuu

SEQ ID NO: 1527279 - RNA, 19 nt, Artificial Sequence
  Description of Artificial Sequence: Synthetic oligonucleotide
gcucguccaaucccacuau

SEQ ID NO: 1527280 - RNA, 19 nt, Artificial Sequence
  Description of Artificial Sequence: Synthetic oligonucleotide
gcguuugccuacacauugu

SEQ ID NO: 1527281 - RNA, 19 nt, Artificial Sequence
  Description of Artificial Sequence: Synthetic oligonucleotide
cgauuucgucugcguuugc

SEQ ID NO: 1527282 - RNA, 19 nt, Artificial Sequence
  Description of Artificial Sequence: Synthetic oligonucleotide
ccuugauaucugugaacuu

SEQ ID NO: 1527283 - RNA, 19 nt, Artificial Sequence
  Description of Artificial Sequence: Synthetic oligonucleotide
gccugaaaccuggaugauu

SEQ ID NO: 1527284 - RNA, 19 nt, Artificial Sequence
  Description of Artificial Sequence: Synthetic oligonucleotide
cuucgucgcugaggcauuu

SEQ ID NO: 1527285 - RNA, 19 nt, Artificial Sequence
  Description of Artificial Sequence: Synthetic oligonucleotide
cgucugcguuugccuacac

SEQ ID NO: 1527286 - RNA, 19 nt, Artificial Sequence
  Description of Artificial Sequence: Synthetic oligonucleotide
ccgagaccacucauugauu

SEQ ID NO: 1527287 - RNA, 19 nt, Artificial Sequence
  Description of Artificial Sequence: Synthetic oligonucleotide
cgucgcugaggcauuuguu

SEQ ID NO: 1527288 - RNA, 19 nt, Artificial Sequence
  Description of Artificial Sequence: Synthetic oligonucleotide
aauagagaaaaccacaaag

SEQ ID NO: 1527289 - RNA, 19 nt, Artificial Sequence
  Description of Artificial Sequence: Synthetic oligonucleotide
aagaacaugaggcucaugg

SEQ ID NO: 1527290 - RNA, 19 nt, Artificial Sequence
  Description of Artificial Sequence: Synthetic oligonucleotide
uguaacaaaaucuaagaag

SEQ ID NO: 1527291 - RNA, 19 nt, Artificial Sequence
  Description of Artificial Sequence: Synthetic oligonucleotide
ugucgaaggaguuauaugg

SEQ ID NO: 1527292 - RNA, 19 nt, Artificial Sequence
  Description of Artificial Sequence: Synthetic oligonucleotide
aaaaucuaagaagaggucg

SEQ ID NO: 1527293 - RNA, 19 nt, Artificial Sequence
  Description of Artificial Sequence: Synthetic oligonucleotide
uucauuaucauagaacacg

SEQ ID NO: 1527294 - RNA, 19 nt, Artificial Sequence
  Description of Artificial Sequence: Synthetic oligonucleotide
aacuauauucacuaaucag

SEQ ID NO: 1527295 - RNA, 19 nt, Artificial Sequence
  Description of Artificial Sequence: Synthetic oligonucleotide
gaaaugugugaccacaugg

SEQ ID NO: 1527296 - RNA, 19 nt, Artificial Sequence
  Description of Artificial Sequence: Synthetic oligonucleotide
ucuaagaagaggucgaugc

SEQ ID NO: 1527297 - RNA, 19 nt, Artificial Sequence
  Description of Artificial Sequence: Synthetic oligonucleotide
aaccucaggaauaugaagc

SEQ ID NO: 1527298 - RNA, 19 nt, Artificial Sequence
  Description of Artificial Sequence: Synthetic oligonucleotide
uuaucauagaacacgacac

SEQ ID NO: 1527299 - RNA, 19 nt, Artificial Sequence
  Description of Artificial Sequence: Synthetic oligonucleotide
aaaauuuuaagagggcguc

SEQ ID NO: 1527300 - RNA, 19 nt, Artificial Sequence
  Description of Artificial Sequence: Synthetic oligonucleotide
ucaaaauagagaaaaccac

SEQ ID NO: 1527301 - RNA, 19 nt, Artificial Sequence
  Description of Artificial Sequence: Synthetic oligonucleotide
aauacaauagggaaacuug

SEQ ID NO: 1527302 - RNA, 19 nt, Artificial Sequence
  Description of Artificial Sequence: Synthetic oligonucleotide
uaugaguuagagaaugcag

SEQ ID NO: 1527303 - RNA, 19 nt, Artificial Sequence
  Description of Artificial Sequence: Synthetic oligonucleotide
aguacaaaagcuuuucuga

SEQ ID NO: 1527304 - RNA, 19 nt, Artificial Sequence
  Description of Artificial Sequence: Synthetic oligonucleotide
acaauuagcccugaggccc

SEQ ID NO: 1527305 - RNA, 19 nt, Artificial Sequence
  Description of Artificial Sequence: Synthetic oligonucleotide
aaacuauauucacuaauca

SEQ ID NO: 1527306 - RNA, 19 nt, Artificial Sequence
  Description of Artificial Sequence: Synthetic oligonucleotide
cacaguaugaguuagagaa

SEQ ID NO: 1527307 - RNA, 19 nt, Artificial Sequence
  Description of Artificial Sequence: Synthetic oligonucleotide
aagagguggaacuaaguca

SEQ ID NO: 1527308 - RNA, 19 nt, Artificial Sequence
  Description of Artificial Sequence: Synthetic oligonucleotide
caaacuccaaacuauauuc

SEQ ID NO: 1527309 - RNA, 19 nt, Artificial Sequence
  Description of Artificial Sequence: Synthetic oligonucleotide
ucuaccuugccauauauuc

SEQ ID NO: 1527310 - RNA, 19 nt, Artificial Sequence
  Description of Artificial Sequence: Synthetic oligonucleotide
aaaguugaucuuccgauca

SEQ ID NO: 1527311 - RNA, 19 nt, Artificial Sequence
  Description of Artificial Sequence: Synthetic oligonucleotide
gaucgguugacagaaaagg

SEQ ID NO: 1527312 - RNA, 19 nt, Artificial Sequence
  Description of Artificial Sequence: Synthetic oligonucleotide
aaguuugccuggaauagcc

SEQ ID NO: 1527313 - RNA, 19 nt, Artificial Sequence
  Description of Artificial Sequence: Synthetic oligonucleotide
ugaagaguguaacaaaauc

SEQ ID NO: 1527314 - RNA, 19 nt, Artificial Sequence
  Description of Artificial Sequence: Synthetic oligonucleotide
aacauacagagugcaaagc

SEQ ID NO: 1527315 - RNA, 19 nt, Artificial Sequence
  Description of Artificial Sequence: Synthetic oligonucleotide
agagaaaaccacaaaguac

SEQ ID NO: 1527316 - RNA, 19 nt, Artificial Sequence
  Description of Artificial Sequence: Synthetic oligonucleotide
ucauuaucauagaacacga

SEQ ID NO: 1527317 - RNA, 19 nt, Artificial Sequence
  Description of Artificial Sequence: Synthetic oligonucleotide
gaagagauagcuccggcgc

SEQ ID NO: 1527318 - RNA, 19 nt, Artificial Sequence
  Description of Artificial Sequence: Synthetic oligonucleotide
caaacuauauucacuaauc

SEQ ID NO: 1527319 - RNA, 19 nt, Artificial Sequence
  Description of Artificial Sequence: Synthetic oligonucleotide
aaugaaaugugugaccaca

SEQ ID NO: 1527320 - RNA, 19 nt, Artificial Sequence
  Description of Artificial Sequence: Synthetic oligonucleotide
aucaucaagcccaaggagc

SEQ ID NO: 1527321 - RNA, 19 nt, Artificial Sequence
  Description of Artificial Sequence: Synthetic oligonucleotide
aagagauagcuccggcgcc

SEQ ID NO: 1527322 - RNA, 19 nt, Artificial Sequence
  Description of Artificial Sequence: Synthetic oligonucleotide
uuuuaagagggcgucaaag

SEQ ID NO: 1527323 - RNA, 19 nt, Artificial Sequence
  Description of Artificial Sequence: Synthetic oligonucleotide
acuauauucacuaaucagu

SEQ ID NO: 1527324 - RNA, 19 nt, Artificial Sequence
  Description of Artificial Sequence: Synthetic oligonucleotide
ucaaaguugaucuuccgau

SEQ ID NO: 1527325 - RNA, 19 nt, Artificial Sequence
  Description of Artificial Sequence: Synthetic oligonucleotide
auauucacuaaucaguuuu

SEQ ID NO: 1527326 - RNA, 19 nt, Artificial Sequence
  Description of Artificial Sequence: Synthetic oligonucleotide
caagauaccucccaagaag

SEQ ID NO: 1527327 - RNA, 19 nt, Artificial Sequence
  Description of Artificial Sequence: Synthetic oligonucleotide
aacucaggagcuucccagc

SEQ ID NO: 1527328 - RNA, 19 nt, Artificial Sequence
  Description of Artificial Sequence: Synthetic oligonucleotide
agaacaugaggcucauggc

SEQ ID NO: 1527329 - RNA, 19 nt, Artificial Sequence
  Description of Artificial Sequence: Synthetic oligonucleotide
ggaauagccaaauggaucc

SEQ ID NO: 1527330 - RNA, 19 nt, Artificial Sequence
  Description of Artificial Sequence: Synthetic oligonucleotide
uaucauagaacacgacacc

SEQ ID NO: 1527331 - RNA, 19 nt, Artificial Sequence
  Description of Artificial Sequence: Synthetic oligonucleotide
agcaagaggcuauggaucg

SEQ ID NO: 1527332 - RNA, 19 nt, Artificial Sequence
  Description of Artificial Sequence: Synthetic oligonucleotide
ucaucaagcccaaggagcc

SEQ ID NO: 1527333 - RNA, 19 nt, Artificial Sequence
  Description of Artificial Sequence: Synthetic oligonucleotide
agaagagauagcuccggcg

SEQ ID NO: 1527334 - RNA, 19 nt, Artificial Sequence
  Description of Artificial Sequence: Synthetic oligonucleotide
ucaucaguacaauuagccc

SEQ ID NO: 1527335 - RNA, 19 nt, Artificial Sequence
  Description of Artificial Sequence: Synthetic oligonucleotide
gaguaggccagccugaaug

SEQ ID NO: 1527336 - RNA, 19 nt, Artificial Sequence
  Description of Artificial Sequence: Synthetic oligonucleotide
aauaugaagccaaacucca

SEQ ID NO: 1527337 - RNA, 19 nt, Artificial Sequence
  Description of Artificial Sequence: Synthetic oligonucleotide
aaaauagagaaaaccacaa

SEQ ID NO: 1527338 - RNA, 19 nt, Artificial Sequence
  Description of Artificial Sequence: Synthetic oligonucleotide
uuuaagagggcgucaaagu

SEQ ID NO: 1527339 - RNA, 19 nt, Artificial Sequence
  Description of Artificial Sequence: Synthetic oligonucleotide
aauauguucaugguuccga

SEQ ID NO: 1527340 - RNA, 19 nt, Artificial Sequence
  Description of Artificial Sequence: Synthetic oligonucleotide
aucagcaugagcuuccuga

SEQ ID NO: 1527341 - RNA, 19 nt, Artificial Sequence
  Description of Artificial Sequence: Synthetic oligonucleotide
ucgguugacagaaaaggga

SEQ ID NO: 1527342 - RNA, 19 nt, Artificial Sequence
  Description of Artificial Sequence: Synthetic oligonucleotide
aagaucauggcugugccca

SEQ ID NO: 1527343 - RNA, 19 nt, Artificial Sequence
  Description of Artificial Sequence: Synthetic oligonucleotide
acauacagagugcaaagcu

SEQ ID NO: 1527344 - RNA, 19 nt, Artificial Sequence
  Description of Artificial Sequence: Synthetic oligonucleotide
uggaauagccaaauggauc

SEQ ID NO: 1527345 - RNA, 19 nt, Artificial Sequence
  Description of Artificial Sequence: Synthetic oligonucleotide
uuuuacucaggccuuccca

SEQ ID NO: 1527346 - RNA, 19 nt, Artificial Sequence
  Description of Artificial Sequence: Synthetic oligonucleotide
agcaaagccagcaagaagu

SEQ ID NO: 1527347 - RNA, 19 nt, Artificial Sequence
  Description of Artificial Sequence: Synthetic oligonucleotide
aacacgacaccuguaaugu

SEQ ID NO: 1527348 - RNA, 19 nt, Artificial Sequence
  Description of Artificial Sequence: Synthetic oligonucleotide
ggaaaauuuuaagagggcg

SEQ ID NO: 1527349 - RNA, 19 nt, Artificial Sequence
  Description of Artificial Sequence: Synthetic oligonucleotide
uaagaagaggucgaugcag

SEQ ID NO: 1527350 - RNA, 19 nt, Artificial Sequence
  Description of Artificial Sequence: Synthetic oligonucleotide
agggcgucaaaguugaucu

SEQ ID NO: 1527351 - RNA, 19 nt, Artificial Sequence
  Description of Artificial Sequence: Synthetic oligonucleotide
gaacacgacaccuguaaug

SEQ ID NO: 1527352 - RNA, 19 nt, Artificial Sequence
  Description of Artificial Sequence: Synthetic oligonucleotide
acaauagggaaacuugaga

SEQ ID NO: 1527353 - RNA, 19 nt, Artificial Sequence
  Description of Artificial Sequence: Synthetic oligonucleotide
auggacauaggccccugcc

SEQ ID NO: 1527354 - RNA, 19 nt, Artificial Sequence
  Description of Artificial Sequence: Synthetic oligonucleotide
uacaaaagcuuuucugaug

SEQ ID NO: 1527355 - RNA, 19 nt, Artificial Sequence
  Description of Artificial Sequence: Synthetic oligonucleotide
uuucauuaucauagaacac

SEQ ID NO: 1527356 - RNA, 19 nt, Artificial Sequence
  Description of Artificial Sequence: Synthetic oligonucleotide
ucauagaacacgacaccug

SEQ ID NO: 1527357 - RNA, 19 nt, Artificial Sequence
  Description of Artificial Sequence: Synthetic oligonucleotide
aagcaaagccagcaagaag

SEQ ID NO: 1527358 - RNA, 19 nt, Artificial Sequence
  Description of Artificial Sequence: Synthetic oligonucleotide
uggaacuaagucaucagua

SEQ ID NO: 1527359 - RNA, 19 nt, Artificial Sequence
  Description of Artificial Sequence: Synthetic oligonucleotide
aaaucuaagaagaggucga

SEQ ID NO: 1527360 - RNA, 19 nt, Artificial Sequence
  Description of Artificial Sequence: Synthetic oligonucleotide
aaauauguucaugguuccg

SEQ ID NO: 1527361 - RNA, 19 nt, Artificial Sequence
  Description of Artificial Sequence: Synthetic oligonucleotide
uggacauaggccccugccg

SEQ ID NO: 1527362 - RNA, 19 nt, Artificial Sequence
  Description of Artificial Sequence: Synthetic oligonucleotide
caggugaagaucauggcug

SEQ ID NO: 1527363 - RNA, 19 nt, Artificial Sequence
  Description of Artificial Sequence: Synthetic oligonucleotide
uucaagagguggaacuaag

SEQ ID NO: 1527364 - RNA, 19 nt, Artificial Sequence
  Description of Artificial Sequence: Synthetic oligonucleotide
gaaccucaggaauaugaag

SEQ ID NO: 1527365 - RNA, 19 nt, Artificial Sequence
  Description of Artificial Sequence: Synthetic oligonucleotide
agacuauguagauauauuu

SEQ ID NO: 1527366 - RNA, 19 nt, Artificial Sequence
  Description of Artificial Sequence: Synthetic oligonucleotide
uucucgauaaugagcugag

SEQ ID NO: 1527367 - RNA, 19 nt, Artificial Sequence
  Description of Artificial Sequence: Synthetic oligonucleotide
agaggacaagaacaugagg

SEQ ID NO: 1527368 - RNA, 19 nt, Artificial Sequence
  Description of Artificial Sequence: Synthetic oligonucleotide
cauacagagugcaaagcug

SEQ ID NO: 1527369 - RNA, 19 nt, Artificial Sequence
  Description of Artificial Sequence: Synthetic oligonucleotide
cagguagagucccugaggg

SEQ ID NO: 1527370 - RNA, 19 nt, Artificial Sequence
  Description of Artificial Sequence: Synthetic oligonucleotide
uacaauuagcccugaggcc

SEQ ID NO: 1527371 - RNA, 19 nt, Artificial Sequence
  Description of Artificial Sequence: Synthetic oligonucleotide
caaauauguucaugguucc

SEQ ID NO: 1527372 - RNA, 19 nt, Artificial Sequence
  Description of Artificial Sequence: Synthetic oligonucleotide
uauggaucgguugacagaa

SEQ ID NO: 1527373 - RNA, 19 nt, Artificial Sequence
  Description of Artificial Sequence: Synthetic oligonucleotide
uuuacucaggccuucccac

SEQ ID NO: 1527374 - RNA, 19 nt, Artificial Sequence
  Description of Artificial Sequence: Synthetic oligonucleotide
uaagacuauguagauauau

SEQ ID NO: 1527375 - RNA, 19 nt, Artificial Sequence
  Description of Artificial Sequence: Synthetic oligonucleotide
caauagggaaacuugagaa

SEQ ID NO: 1527376 - RNA, 19 nt, Artificial Sequence
  Description of Artificial Sequence: Synthetic oligonucleotide
aaaugugugaccacaugga

SEQ ID NO: 1527377 - RNA, 19 nt, Artificial Sequence
  Description of Artificial Sequence: Synthetic oligonucleotide
cccaagaagagauagcucc

SEQ ID NO: 1527378 - RNA, 19 nt, Artificial Sequence
  Description of Artificial Sequence: Synthetic oligonucleotide
uuaagagggcgucaaaguu

SEQ ID NO: 1527379 - RNA, 19 nt, Artificial Sequence
  Description of Artificial Sequence: Synthetic oligonucleotide
acgccuacuucucaguccg

SEQ ID NO: 1527380 - RNA, 19 nt, Artificial Sequence
  Description of Artificial Sequence: Synthetic oligonucleotide
aaaacaccuuugucuucac

SEQ ID NO: 1527381 - RNA, 19 nt, Artificial Sequence
  Description of Artificial Sequence: Synthetic oligonucleotide
cauauacaaguuugccugg

SEQ ID NO: 1527382 - RNA, 19 nt, Artificial Sequence
  Description of Artificial Sequence: Synthetic oligonucleotide
caguccgcaacucaggagc

SEQ ID NO: 1527383 - RNA, 19 nt, Artificial Sequence
  Description of Artificial Sequence: Synthetic oligonucleotide
uaacaaagguauuaauuuu

SEQ ID NO: 1527384 - RNA, 19 nt, Artificial Sequence
  Description of Artificial Sequence: Synthetic oligonucleotide
cucauucaaagccaggauc

SEQ ID NO: 1527385 - RNA, 19 nt, Artificial Sequence
  Description of Artificial Sequence: Synthetic oligonucleotide
aguaacaaagguauuaauu

SEQ ID NO: 1527386 - RNA, 19 nt, Artificial Sequence
  Description of Artificial Sequence: Synthetic oligonucleotide
accacaaaguacaaaagcu

SEQ ID NO: 1527387 - RNA, 19 nt, Artificial Sequence
  Description of Artificial Sequence: Synthetic oligonucleotide
aguaugaguuagagaaugc

SEQ ID NO: 1527388 - RNA, 19 nt, Artificial Sequence
  Description of Artificial Sequence: Synthetic oligonucleotide
cgaucaaauauguucaugg

SEQ ID NO: 1527389 - RNA, 19 nt, Artificial Sequence
  Description of Artificial Sequence: Synthetic oligonucleotide
acaaguuugccuggaauag

SEQ ID NO: 1527390 - RNA, 19 nt, Artificial Sequence
  Description of Artificial Sequence: Synthetic oligonucleotide
gccuggaauagccaaaugg

SEQ ID NO: 1527391 - RNA, 19 nt, Artificial Sequence
  Description of Artificial Sequence: Synthetic oligonucleotide
gaagaguguaacaaaaucu

SEQ ID NO: 1527392 - RNA, 19 nt, Artificial Sequence
  Description of Artificial Sequence: Synthetic oligonucleotide
ugacagaaaagggagcaug

SEQ ID NO: 1527393 - RNA, 19 nt, Artificial Sequence
  Description of Artificial Sequence: Synthetic oligonucleotide
aguuauaugggaaaauuuu

SEQ ID NO: 1527394 - RNA, 19 nt, Artificial Sequence
  Description of Artificial Sequence: Synthetic oligonucleotide
acccauagccaccuagugg

SEQ ID NO: 1527395 - RNA, 19 nt, Artificial Sequence
  Description of Artificial Sequence: Synthetic oligonucleotide
gaacuaagucaucaguaca

SEQ ID NO: 1527396 - RNA, 19 nt, Artificial Sequence
  Description of Artificial Sequence: Synthetic oligonucleotide
aacaugaggcucauggcug

SEQ ID NO: 1527397 - RNA, 19 nt, Artificial Sequence
  Description of Artificial Sequence: Synthetic oligonucleotide
ucucaguccgcaacucagg

SEQ ID NO: 1527398 - RNA, 19 nt, Artificial Sequence
  Description of Artificial Sequence: Synthetic oligonucleotide
aagauaccucccaagaaga

SEQ ID NO: 1527399 - RNA, 19 nt, Artificial Sequence
  Description of Artificial Sequence: Synthetic oligonucleotide
ucgaaggaguuauauggga

SEQ ID NO: 1527400 - RNA, 19 nt, Artificial Sequence
  Description of Artificial Sequence: Synthetic oligonucleotide
caaucaguaacaaagguau

SEQ ID NO: 1527401 - RNA, 19 nt, Artificial Sequence
  Description of Artificial Sequence: Synthetic oligonucleotide
augagguguugccaucagc

SEQ ID NO: 1527402 - RNA, 19 nt, Artificial Sequence
  Description of Artificial Sequence: Synthetic oligonucleotide
cuuacccauagccaccuag

SEQ ID NO: 1527403 - RNA, 19 nt, Artificial Sequence
  Description of Artificial Sequence: Synthetic oligonucleotide
aaagggagcaugggagaac

SEQ ID NO: 1527404 - RNA, 19 nt, Artificial Sequence
  Description of Artificial Sequence: Synthetic oligonucleotide
ucgaugcagugccagaugu

SEQ ID NO: 1527405 - RNA, 19 nt, Artificial Sequence
  Description of Artificial Sequence: Synthetic oligonucleotide
agcagccccauauacaagu

SEQ ID NO: 1527406 - RNA, 19 nt, Artificial Sequence
  Description of Artificial Sequence: Synthetic oligonucleotide
uuacccauagccaccuagu

SEQ ID NO: 1527407 - RNA, 19 nt, Artificial Sequence
  Description of Artificial Sequence: Synthetic oligonucleotide
aaauuuuaagagggcguca

SEQ ID NO: 1527408 - RNA, 19 nt, Artificial Sequence
  Description of Artificial Sequence: Synthetic oligonucleotide
auagcaaugcacaacucca

SEQ ID NO: 1527409 - RNA, 19 nt, Artificial Sequence
  Description of Artificial Sequence: Synthetic oligonucleotide
ucaagagguggaacuaagu

SEQ ID NO: 1527410 - RNA, 19 nt, Artificial Sequence
  Description of Artificial Sequence: Synthetic oligonucleotide
gaucuuccgaucaaauaug

SEQ ID NO: 1527411 - RNA, 19 nt, Artificial Sequence
  Description of Artificial Sequence: Synthetic oligonucleotide
gaggcuauggaucgguuga

SEQ ID NO: 1527412 - RNA, 19 nt, Artificial Sequence
  Description of Artificial Sequence: Synthetic oligonucleotide
aagcacaagaagguggagu

SEQ ID NO: 1527413 - RNA, 19 nt, Artificial Sequence
  Description of Artificial Sequence: Synthetic oligonucleotide
gaaggaguuauaugggaaa

SEQ ID NO: 1527414 - RNA, 19 nt, Artificial Sequence
  Description of Artificial Sequence: Synthetic oligonucleotide
guggaggccaaucaguaac

SEQ ID NO: 1527415 - RNA, 19 nt, Artificial Sequence
  Description of Artificial Sequence: Synthetic oligonucleotide
caguaugaguuagagaaug

SEQ ID NO: 1527416 - RNA, 19 nt, Artificial Sequence
  Description of Artificial Sequence: Synthetic oligonucleotide
aaacuccaaacuauauuca

SEQ ID NO: 1527417 - RNA, 19 nt, Artificial Sequence
  Description of Artificial Sequence: Synthetic oligonucleotide
caguuucauggcuaugagg

SEQ ID NO: 1527418 - RNA, 19 nt, Artificial Sequence
  Description of Artificial Sequence: Synthetic oligonucleotide
uugagaacugucaucucua

SEQ ID NO: 1527419 - RNA, 19 nt, Artificial Sequence
  Description of Artificial Sequence: Synthetic oligonucleotide
caucaagauaccucccaag

SEQ ID NO: 1527420 - RNA, 19 nt, Artificial Sequence
  Description of Artificial Sequence: Synthetic oligonucleotide
acaccuguaaugugugcag

SEQ ID NO: 1527421 - RNA, 19 nt, Artificial Sequence
  Description of Artificial Sequence: Synthetic oligonucleotide
agccuucucgauaaugagc

SEQ ID NO: 1527422 - RNA, 19 nt, Artificial Sequence
  Description of Artificial Sequence: Synthetic oligonucleotide
aucauagaacacgacaccu

SEQ ID NO: 1527423 - RNA, 19 nt, Artificial Sequence
  Description of Artificial Sequence: Synthetic oligonucleotide
aucgguugacagaaaaggg

SEQ ID NO: 1527424 - RNA, 19 nt, Artificial Sequence
  Description of Artificial Sequence: Synthetic oligonucleotide
gaaaagggagcaugggaga

SEQ ID NO: 1527425 - RNA, 19 nt, Artificial Sequence
  Description of Artificial Sequence: Synthetic oligonucleotide
gauaaugagcugaguauca

SEQ ID NO: 1527426 - RNA, 19 nt, Artificial Sequence
  Description of Artificial Sequence: Synthetic oligonucleotide
gacaucaagauaccuccca

SEQ ID NO: 1527427 - RNA, 19 nt, Artificial Sequence
  Description of Artificial Sequence: Synthetic oligonucleotide
ugaggaaagcaaagccagc

SEQ ID NO: 1527428 - RNA, 19 nt, Artificial Sequence
  Description of Artificial Sequence: Synthetic oligonucleotide
ugguuccgaacucugcuca

SEQ ID NO: 1527429 - RNA, 19 nt, Artificial Sequence
  Description of Artificial Sequence: Synthetic oligonucleotide
ggaacuaagucaucaguac

SEQ ID NO: 1527430 - RNA, 19 nt, Artificial Sequence
  Description of Artificial Sequence: Synthetic oligonucleotide
gagaggacaagaacaugag

SEQ ID NO: 1527431 - RNA, 19 nt, Artificial Sequence
  Description of Artificial Sequence: Synthetic oligonucleotide
ucacaguaugaguuagaga

SEQ ID NO: 1527432 - RNA, 19 nt, Artificial Sequence
  Description of Artificial Sequence: Synthetic oligonucleotide
gaaaauuuuaagagggcgu

SEQ ID NO: 1527433 - RNA, 19 nt, Artificial Sequence
  Description of Artificial Sequence: Synthetic oligonucleotide
uugaucuuccgaucaaaua

SEQ ID NO: 1527434 - RNA, 19 nt, Artificial Sequence
  Description of Artificial Sequence: Synthetic oligonucleotide
uauacaaguuugccuggaa

SEQ ID NO: 1527435 - RNA, 19 nt, Artificial Sequence
  Description of Artificial Sequence: Synthetic oligonucleotide
ugacaucaagauaccuccc

SEQ ID NO: 1527436 - RNA, 19 nt, Artificial Sequence
  Description of Artificial Sequence: Synthetic oligonucleotide
guguaacaaaaucuaagaa

SEQ ID NO: 1527437 - RNA, 19 nt, Artificial Sequence
  Description of Artificial Sequence: Synthetic oligonucleotide
uaccuugccauauauucuu

SEQ ID NO: 1527438 - RNA, 19 nt, Artificial Sequence
  Description of Artificial Sequence: Synthetic oligonucleotide
caaaguugaucuuccgauc

SEQ ID NO: 1527439 - RNA, 19 nt, Artificial Sequence
  Description of Artificial Sequence: Synthetic oligonucleotide
gucgaaggaguuauauggg

SEQ ID NO: 1527440 - RNA, 19 nt, Artificial Sequence
  Description of Artificial Sequence: Synthetic oligonucleotide
uacccauagccaccuagug

SEQ ID NO: 1527441 - RNA, 19 nt, Artificial Sequence
  Description of Artificial Sequence: Synthetic oligonucleotide
uguucaugguuccgaacuc

SEQ ID NO: 1527442 - RNA, 19 nt, Artificial Sequence
  Description of Artificial Sequence: Synthetic oligonucleotide
caucaguacaauuagcccu

SEQ ID NO: 1527443 - RNA, 19 nt, Artificial Sequence
  Description of Artificial Sequence: Synthetic oligonucleotide
aagacuauguagauauauu

SEQ ID NO: 1527444 - RNA, 19 nt, Artificial Sequence
  Description of Artificial Sequence: Synthetic oligonucleotide
ugugucgaaggaguuauau

SEQ ID NO: 1527445 - RNA, 19 nt, Artificial Sequence
  Description of Artificial Sequence: Synthetic oligonucleotide
agagguggaacuaagucau

SEQ ID NO: 1527446 - RNA, 19 nt, Artificial Sequence
  Description of Artificial Sequence: Synthetic oligonucleotide
gaagaucauggcugugccc

SEQ ID NO: 1527447 - RNA, 19 nt, Artificial Sequence
  Description of Artificial Sequence: Synthetic oligonucleotide
gauugauagcaaugcacaa

SEQ ID NO: 1527448 - RNA, 19 nt, Artificial Sequence
  Description of Artificial Sequence: Synthetic oligonucleotide
gugaagaucauggcugugc

SEQ ID NO: 1527449 - RNA, 19 nt, Artificial Sequence
  Description of Artificial Sequence: Synthetic oligonucleotide
ugaggcucauggcugacau

SEQ ID NO: 1527450 - RNA, 19 nt, Artificial Sequence
  Description of Artificial Sequence: Synthetic oligonucleotide
agacuuacccauagccacc

SEQ ID NO: 1527451 - RNA, 19 nt, Artificial Sequence
  Description of Artificial Sequence: Synthetic oligonucleotide
agcagguagagucccugag

SEQ ID NO: 1527452 - RNA, 19 nt, Artificial Sequence
  Description of Artificial Sequence: Synthetic oligonucleotide
aaacaccuuugucuucaca

SEQ ID NO: 1527453 - RNA, 19 nt, Artificial Sequence
  Description of Artificial Sequence: Synthetic oligonucleotide
cauuaucauagaacacgac

SEQ ID NO: 1527454 - RNA, 19 nt, Artificial Sequence
  Description of Artificial Sequence: Synthetic oligonucleotide
aucaguacaauuagcccug

SEQ ID NO: 1527455 - RNA, 19 nt, Artificial Sequence
  Description of Artificial Sequence: Synthetic oligonucleotide
gguagagucccugagggcc

SEQ ID NO: 1527456 - RNA, 19 nt, Artificial Sequence
  Description of Artificial Sequence: Synthetic oligonucleotide
uauauucacuaaucaguuu

SEQ ID NO: 1527457 - RNA, 19 nt, Artificial Sequence
  Description of Artificial Sequence: Synthetic oligonucleotide
ugaugcuuuucauuaucau

SEQ ID NO: 1527458 - RNA, 19 nt, Artificial Sequence
  Description of Artificial Sequence: Synthetic oligonucleotide
uauguucaugguuccgaac

SEQ ID NO: 1527459 - RNA, 19 nt, Artificial Sequence
  Description of Artificial Sequence: Synthetic oligonucleotide
ucaggaauaugaagccaaa

SEQ ID NO: 1527460 - RNA, 19 nt, Artificial Sequence
  Description of Artificial Sequence: Synthetic oligonucleotide
aagccaaacuccaaacuau

SEQ ID NO: 1527461 - RNA, 19 nt, Artificial Sequence
  Description of Artificial Sequence: Synthetic oligonucleotide
uggaggccaaucaguaaca

SEQ ID NO: 1527462 - RNA, 19 nt, Artificial Sequence
  Description of Artificial Sequence: Synthetic oligonucleotide
ucucuaccuugccauauau

SEQ ID NO: 1527463 - RNA, 19 nt, Artificial Sequence
  Description of Artificial Sequence: Synthetic oligonucleotide
gauaccucccaagaagaga

SEQ ID NO: 1527464 - RNA, 19 nt, Artificial Sequence
  Description of Artificial Sequence: Synthetic oligonucleotide
uggauccaaagaaaagguu

SEQ ID NO: 1527465 - RNA, 19 nt, Artificial Sequence
  Description of Artificial Sequence: Synthetic oligonucleotide
cucaagcugaagcagguga

SEQ ID NO: 1527466 - RNA, 19 nt, Artificial Sequence
  Description of Artificial Sequence: Synthetic oligonucleotide
ugagaacugucaucucuac

SEQ ID NO: 1527467 - RNA, 19 nt, Artificial Sequence
  Description of Artificial Sequence: Synthetic oligonucleotide
aaguugaucuuccgaucaa

SEQ ID NO: 1527468 - RNA, 19 nt, Artificial Sequence
  Description of Artificial Sequence: Synthetic oligonucleotide
uaguggaggccaaucagua

SEQ ID NO: 1527469 - RNA, 19 nt, Artificial Sequence
  Description of Artificial Sequence: Synthetic oligonucleotide
aaggacaaagccgcacaug

SEQ ID NO: 1527470 - RNA, 19 nt, Artificial Sequence
  Description of Artificial Sequence: Synthetic oligonucleotide
gaucaaauauguucauggu

SEQ ID NO: 1527471 - RNA, 19 nt, Artificial Sequence
  Description of Artificial Sequence: Synthetic oligonucleotide
cucgauaaugagcugagua

SEQ ID NO: 1527472 - RNA, 19 nt, Artificial Sequence
  Description of Artificial Sequence: Synthetic oligonucleotide
uugccauauauucuuccuu

SEQ ID NO: 1527473 - RNA, 19 nt, Artificial Sequence
  Description of Artificial Sequence: Synthetic oligonucleotide
gugucgaaggaguuauaug

SEQ ID NO: 1527474 - RNA, 19 nt, Artificial Sequence
  Description of Artificial Sequence: Synthetic oligonucleotide
guaugaguuagagaaugca

SEQ ID NO: 1527475 - RNA, 19 nt, Artificial Sequence
  Description of Artificial Sequence: Synthetic oligonucleotide
aauagccaaauggauccaa

SEQ ID NO: 1527476 - RNA, 19 nt, Artificial Sequence
  Description of Artificial Sequence: Synthetic oligonucleotide
gcaaugcacaacuccaaag

SEQ ID NO: 1527477 - RNA, 19 nt, Artificial Sequence
  Description of Artificial Sequence: Synthetic oligonucleotide
agccccauauacaaguuug

SEQ ID NO: 1527478 - RNA, 19 nt, Artificial Sequence
  Description of Artificial Sequence: Synthetic oligonucleotide
auaccucccaagaagagau

SEQ ID NO: 1527479 - RNA, 19 nt, Artificial Sequence
  Description of Artificial Sequence: Synthetic oligonucleotide
acaccuuugucuucacagu

SEQ ID NO: 1527480 - RNA, 19 nt, Artificial Sequence
  Description of Artificial Sequence: Synthetic oligonucleotide
acaucaagauaccucccaa

SEQ ID NO: 1527481 - RNA, 19 nt, Artificial Sequence
  Description of Artificial Sequence: Synthetic oligonucleotide
gaugcagugccagauguaa

SEQ ID NO: 1527482 - RNA, 19 nt, Artificial Sequence
  Description of Artificial Sequence: Synthetic oligonucleotide
uggcauagagugcacucaa

SEQ ID NO: 1527483 - RNA, 19 nt, Artificial Sequence
  Description of Artificial Sequence: Synthetic oligonucleotide
aaucuaagaagaggucgau

SEQ ID NO: 1527484 - RNA, 19 nt, Artificial Sequence
  Description of Artificial Sequence: Synthetic oligonucleotide
uccaaacuauauucacuaa

SEQ ID NO: 1527485 - RNA, 19 nt, Artificial Sequence
  Description of Artificial Sequence: Synthetic oligonucleotide
ggauugauagcaaugcaca

SEQ ID NO: 1527486 - RNA, 19 nt, Artificial Sequence
  Description of Artificial Sequence: Synthetic oligonucleotide
agaaaagguuccccagaga

SEQ ID NO: 1527487 - RNA, 19 nt, Artificial Sequence
  Description of Artificial Sequence: Synthetic oligonucleotide
aagcagguagagucccuga

SEQ ID NO: 1527488 - RNA, 19 nt, Artificial Sequence
  Description of Artificial Sequence: Synthetic oligonucleotide
cacaacuccaaagcagggc

SEQ ID NO: 1527489 - RNA, 19 nt, Artificial Sequence
  Description of Artificial Sequence: Synthetic oligonucleotide
guuucauggcuaugaggug

SEQ ID NO: 1527490 - RNA, 19 nt, Artificial Sequence
  Description of Artificial Sequence: Synthetic oligonucleotide
cacgccuacuucucagucc

SEQ ID NO: 1527491 - RNA, 19 nt, Artificial Sequence
  Description of Artificial Sequence: Synthetic oligonucleotide
agcaaugcacaacuccaaa

SEQ ID NO: 1527492 - RNA, 19 nt, Artificial Sequence
  Description of Artificial Sequence: Synthetic oligonucleotide
caucagccagaucaucaag

SEQ ID NO: 1527493 - RNA, 19 nt, Artificial Sequence
  Description of Artificial Sequence: Synthetic oligonucleotide
agguggaacuaagucauca

SEQ ID NO: 1527494 - RNA, 19 nt, Artificial Sequence
  Description of Artificial Sequence: Synthetic oligonucleotide
uucccagcucugcuaaaac

SEQ ID NO: 1527495 - RNA, 19 nt, Artificial Sequence
  Description of Artificial Sequence: Synthetic oligonucleotide
caaguuugccuggaauagc

SEQ ID NO: 1527496 - RNA, 19 nt, Artificial Sequence
  Description of Artificial Sequence: Synthetic oligonucleotide
cuucucgauaaugagcuga

SEQ ID NO: 1527497 - RNA, 19 nt, Artificial Sequence
  Description of Artificial Sequence: Synthetic oligonucleotide
uuaagacuauguagauaua

SEQ ID NO: 1527498 - RNA, 19 nt, Artificial Sequence
  Description of Artificial Sequence: Synthetic oligonucleotide
gacauaggccccugccgcc

SEQ ID NO: 1527499 - RNA, 19 nt, Artificial Sequence
  Description of Artificial Sequence: Synthetic oligonucleotide
cuauauucacuaaucaguu

SEQ ID NO: 1527500 - RNA, 19 nt, Artificial Sequence
  Description of Artificial Sequence: Synthetic oligonucleotide
ccgaacucugcucagcacg

SEQ ID NO: 1527501 - RNA, 19 nt, Artificial Sequence
  Description of Artificial Sequence: Synthetic oligonucleotide
gggauugauagcaaugcac

SEQ ID NO: 1527502 - RNA, 19 nt, Artificial Sequence
  Description of Artificial Sequence: Synthetic oligonucleotide
cuauggaucgguugacaga

SEQ ID NO: 1527503 - RNA, 19 nt, Artificial Sequence
  Description of Artificial Sequence: Synthetic oligonucleotide
aggaaagcaaagccagcaa

SEQ ID NO: 1527504 - RNA, 19 nt, Artificial Sequence
  Description of Artificial Sequence: Synthetic oligonucleotide
agaacacgacaccuguaau

SEQ ID NO: 1527505 - RNA, 19 nt, Artificial Sequence
  Description of Artificial Sequence: Synthetic oligonucleotide
ccuggaauagccaaaugga

SEQ ID NO: 1527506 - RNA, 19 nt, Artificial Sequence
  Description of Artificial Sequence: Synthetic oligonucleotide
cauagaccuucuucaggug

SEQ ID NO: 1527507 - RNA, 19 nt, Artificial Sequence
  Description of Artificial Sequence: Synthetic oligonucleotide
cauagagugcacucaagcu

SEQ ID NO: 1527508 - RNA, 19 nt, Artificial Sequence
  Description of Artificial Sequence: Synthetic oligonucleotide
cuaagaagaggucgaugca

SEQ ID NO: 1527509 - RNA, 19 nt, Artificial Sequence
  Description of Artificial Sequence: Synthetic oligonucleotide
gugcacucaagcugaagca

SEQ ID NO: 1527510 - RNA, 19 nt, Artificial Sequence
  Description of Artificial Sequence: Synthetic oligonucleotide
gagucuggcuucaagaggu

SEQ ID NO: 1527511 - RNA, 19 nt, Artificial Sequence
  Description of Artificial Sequence: Synthetic oligonucleotide
acuucucaguccgcaacuc

SEQ ID NO: 1527512 - RNA, 19 nt, Artificial Sequence
  Description of Artificial Sequence: Synthetic oligonucleotide
ccugaaugaaaugugugac

SEQ ID NO: 1527513 - RNA, 19 nt, Artificial Sequence
  Description of Artificial Sequence: Synthetic oligonucleotide
uggcugacaucaagauacc

SEQ ID NO: 1527514 - RNA, 19 nt, Artificial Sequence
  Description of Artificial Sequence: Synthetic oligonucleotide
gaggucgaugcagugccag

SEQ ID NO: 1527515 - RNA, 19 nt, Artificial Sequence
  Description of Artificial Sequence: Synthetic oligonucleotide
auauacaaguuugccugga

SEQ ID NO: 1527516 - RNA, 19 nt, Artificial Sequence
  Description of Artificial Sequence: Synthetic oligonucleotide
ccagauguaauccuuaucu

SEQ ID NO: 1527517 - RNA, 19 nt, Artificial Sequence
  Description of Artificial Sequence: Synthetic oligonucleotide
agaguguaacaaaaucuaa

SEQ ID NO: 1527518 - RNA, 19 nt, Artificial Sequence
  Description of Artificial Sequence: Synthetic oligonucleotide
ugcucaguuucauggcuau

SEQ ID NO: 1527519 - RNA, 19 nt, Artificial Sequence
  Description of Artificial Sequence: Synthetic oligonucleotide
gagggcgucaaaguugauc

SEQ ID NO: 1527520 - RNA, 19 nt, Artificial Sequence
  Description of Artificial Sequence: Synthetic oligonucleotide
ggccaaucaguaacaaagg

SEQ ID NO: 1527521 - RNA, 19 nt, Artificial Sequence
  Description of Artificial Sequence: Synthetic oligonucleotide
cauagaacacgacaccugu

SEQ ID NO: 1527522 - RNA, 19 nt, Artificial Sequence
  Description of Artificial Sequence: Synthetic oligonucleotide
acuaagucaucaguacaau

SEQ ID NO: 1527523 - RNA, 19 nt, Artificial Sequence
  Description of Artificial Sequence: Synthetic oligonucleotide
gauagcuccggcgccuggc

SEQ ID NO: 1527524 - RNA, 19 nt, Artificial Sequence
  Description of Artificial Sequence: Synthetic oligonucleotide
cauucaaagccaggaucag

SEQ ID NO: 1527525 - RNA, 19 nt, Artificial Sequence
  Description of Artificial Sequence: Synthetic oligonucleotide
agccugaaugaaaugugug

SEQ ID NO: 1527526 - RNA, 19 nt, Artificial Sequence
  Description of Artificial Sequence: Synthetic oligonucleotide
agauaccucccaagaagag

SEQ ID NO: 1527527 - RNA, 19 nt, Artificial Sequence
  Description of Artificial Sequence: Synthetic oligonucleotide
uccgaucaaauauguucau

SEQ ID NO: 1527528 - RNA, 19 nt, Artificial Sequence
  Description of Artificial Sequence: Synthetic oligonucleotide
ugcugggauugauagcaau

SEQ ID NO: 1527529 - RNA, 19 nt, Artificial Sequence
  Description of Artificial Sequence: Synthetic oligonucleotide
cuucaggugcugcuguguc

SEQ ID NO: 1527530 - RNA, 19 nt, Artificial Sequence
  Description of Artificial Sequence: Synthetic oligonucleotide
gacuauguagauauauuuu

SEQ ID NO: 1527531 - RNA, 19 nt, Artificial Sequence
  Description of Artificial Sequence: Synthetic oligonucleotide
guacaaaagcuuuucugau

SEQ ID NO: 1527532 - RNA, 19 nt, Artificial Sequence
  Description of Artificial Sequence: Synthetic oligonucleotide
aucuuccgaucaaauaugu

SEQ ID NO: 1527533 - RNA, 19 nt, Artificial Sequence
  Description of Artificial Sequence: Synthetic oligonucleotide
gucgaugcagugccagaug

SEQ ID NO: 1527534 - RNA, 19 nt, Artificial Sequence
  Description of Artificial Sequence: Synthetic oligonucleotide
gggaaaauuuuaagagggc

SEQ ID NO: 1527535 - RNA, 19 nt, Artificial Sequence
  Description of Artificial Sequence: Synthetic oligonucleotide
ccuaguggaggccaaucag

SEQ ID NO: 1527536 - RNA, 19 nt, Artificial Sequence
  Description of Artificial Sequence: Synthetic oligonucleotide
aguugaucuuccgaucaaa

SEQ ID NO: 1527537 - RNA, 19 nt, Artificial Sequence
  Description of Artificial Sequence: Synthetic oligonucleotide
ggaucgguugacagaaaag

SEQ ID NO: 1527538 - RNA, 19 nt, Artificial Sequence
  Description of Artificial Sequence: Synthetic oligonucleotide
uccgcaacucaggagcuuc

SEQ ID NO: 1527539 - RNA, 19 nt, Artificial Sequence
  Description of Artificial Sequence: Synthetic oligonucleotide
aaucaguaacaaagguauu

SEQ ID NO: 1527540 - RNA, 19 nt, Artificial Sequence
  Description of Artificial Sequence: Synthetic oligonucleotide
gguggagucuggcuucaag

SEQ ID NO: 1527541 - RNA, 19 nt, Artificial Sequence
  Description of Artificial Sequence: Synthetic oligonucleotide
acacgacaccuguaaugug

SEQ ID NO: 1527542 - RNA, 19 nt, Artificial Sequence
  Description of Artificial Sequence: Synthetic oligonucleotide
cagcacgccuacuucucag

SEQ ID NO: 1527543 - RNA, 19 nt, Artificial Sequence
  Description of Artificial Sequence: Synthetic oligonucleotide
uccgaacucugcucagcac

SEQ ID NO: 1527544 - RNA, 19 nt, Artificial Sequence
  Description of Artificial Sequence: Synthetic oligonucleotide
acauaggccccugccgccg

SEQ ID NO: 1527545 - RNA, 19 nt, Artificial Sequence
  Description of Artificial Sequence: Synthetic oligonucleotide
agagauagcuccggcgccu

SEQ ID NO: 1527546 - RNA, 19 nt, Artificial Sequence
  Description of Artificial Sequence: Synthetic oligonucleotide
aggaguuauaugggaaaau

SEQ ID NO: 1527547 - RNA, 19 nt, Artificial Sequence
  Description of Artificial Sequence: Synthetic oligonucleotide
gugaccacauggacauagg

SEQ ID NO: 1527548 - RNA, 19 nt, Artificial Sequence
  Description of Artificial Sequence: Synthetic oligonucleotide
aggcuauggaucgguugac

SEQ ID NO: 1527549 - RNA, 19 nt, Artificial Sequence
  Description of Artificial Sequence: Synthetic oligonucleotide
caaccauuccccuuuucua

SEQ ID NO: 1527550 - RNA, 19 nt, Artificial Sequence
  Description of Artificial Sequence: Synthetic oligonucleotide
cuaguggaggccaaucagu

SEQ ID NO: 1527551 - RNA, 19 nt, Artificial Sequence
  Description of Artificial Sequence: Synthetic oligonucleotide
agcacgccuacuucucagu

SEQ ID NO: 1527552 - RNA, 19 nt, Artificial Sequence
  Description of Artificial Sequence: Synthetic oligonucleotide
aagguuccccagagaggac

SEQ ID NO: 1527553 - RNA, 19 nt, Artificial Sequence
  Description of Artificial Sequence: Synthetic oligonucleotide
caccccacagauggaaagc

SEQ ID NO: 1527554 - RNA, 19 nt, Artificial Sequence
  Description of Artificial Sequence: Synthetic oligonucleotide
auaggccccugccgccgcc

SEQ ID NO: 1527555 - RNA, 19 nt, Artificial Sequence
  Description of Artificial Sequence: Synthetic oligonucleotide
ccuuugucuucacaguaug

SEQ ID NO: 1527556 - RNA, 19 nt, Artificial Sequence
  Description of Artificial Sequence: Synthetic oligonucleotide
auagcuccggcgccuggca

SEQ ID NO: 1527557 - RNA, 19 nt, Artificial Sequence
  Description of Artificial Sequence: Synthetic oligonucleotide
agagugcaaagcuggcaua

SEQ ID NO: 1527558 - RNA, 19 nt, Artificial Sequence
  Description of Artificial Sequence: Synthetic oligonucleotide
acaaacauacagagugcaa

SEQ ID NO: 1527559 - RNA, 19 nt, Artificial Sequence
  Description of Artificial Sequence: Synthetic oligonucleotide
cuaccuugccauauauucu

SEQ ID NO: 1527560 - RNA, 19 nt, Artificial Sequence
  Description of Artificial Sequence: Synthetic oligonucleotide
cucaguccgcaacucagga

SEQ ID NO: 1527561 - RNA, 19 nt, Artificial Sequence
  Description of Artificial Sequence: Synthetic oligonucleotide
caguacaauuagcccugag

SEQ ID NO: 1527562 - RNA, 19 nt, Artificial Sequence
  Description of Artificial Sequence: Synthetic oligonucleotide
cucccaagaagagauagcu

SEQ ID NO: 1527563 - RNA, 19 nt, Artificial Sequence
  Description of Artificial Sequence: Synthetic oligonucleotide
gaauagccaaauggaucca

SEQ ID NO: 1527564 - RNA, 19 nt, Artificial Sequence
  Description of Artificial Sequence: Synthetic oligonucleotide
auuccccuuuucuauccuu

SEQ ID NO: 1527565 - RNA, 19 nt, Artificial Sequence
  Description of Artificial Sequence: Synthetic oligonucleotide
accccacagauggaaagca

SEQ ID NO: 1527566 - RNA, 19 nt, Artificial Sequence
  Description of Artificial Sequence: Synthetic oligonucleotide
guuccgaacucugcucagc

SEQ ID NO: 1527567 - RNA, 19 nt, Artificial Sequence
  Description of Artificial Sequence: Synthetic oligonucleotide
aagguggagucuggcuuca

SEQ ID NO: 1527568 - RNA, 19 nt, Artificial Sequence
  Description of Artificial Sequence: Synthetic oligonucleotide
aagccaggaucagcaugag

SEQ ID NO: 1527569 - RNA, 19 nt, Artificial Sequence
  Description of Artificial Sequence: Synthetic oligonucleotide
ucucgauaaugagcugagu

SEQ ID NO: 1527570 - RNA, 19 nt, Artificial Sequence
  Description of Artificial Sequence: Synthetic oligonucleotide
guuagagaaugcagccuga

SEQ ID NO: 1527571 - RNA, 19 nt, Artificial Sequence
  Description of Artificial Sequence: Synthetic oligonucleotide
aucucuaccuugccauaua

SEQ ID NO: 1527572 - RNA, 19 nt, Artificial Sequence
  Description of Artificial Sequence: Synthetic oligonucleotide
acaguaugaguuagagaau

SEQ ID NO: 1527573 - RNA, 19 nt, Artificial Sequence
  Description of Artificial Sequence: Synthetic oligonucleotide
cuggaauagccaaauggau

SEQ ID NO: 1527574 - RNA, 19 nt, Artificial Sequence
  Description of Artificial Sequence: Synthetic oligonucleotide
ccaacuccugugaggaaag

SEQ ID NO: 1527575 - RNA, 19 nt, Artificial Sequence
  Description of Artificial Sequence: Synthetic oligonucleotide
ucaguacaauuagcccuga

SEQ ID NO: 1527576 - RNA, 19 nt, Artificial Sequence
  Description of Artificial Sequence: Synthetic oligonucleotide
acucaagcugaagcaggug

SEQ ID NO: 1527577 - RNA, 19 nt, Artificial Sequence
  Description of Artificial Sequence: Synthetic oligonucleotide
cucugcucagcacgccuac

SEQ ID NO: 1527578 - RNA, 19 nt, Artificial Sequence
  Description of Artificial Sequence: Synthetic oligonucleotide
ggcgucaaaguugaucuuc

SEQ ID NO: 1527579 - RNA, 19 nt, Artificial Sequence
  Description of Artificial Sequence: Synthetic oligonucleotide
accuuugucuucacaguau

SEQ ID NO: 1527580 - RNA, 19 nt, Artificial Sequence
  Description of Artificial Sequence: Synthetic oligonucleotide
gaacucugcucagcacgcc

SEQ ID NO: 1527581 - RNA, 19 nt, Artificial Sequence
  Description of Artificial Sequence: Synthetic oligonucleotide
aggucgaugcagugccaga

SEQ ID NO: 1527582 - RNA, 19 nt, Artificial Sequence
  Description of Artificial Sequence: Synthetic oligonucleotide
ugcugugucgaaggaguua

SEQ ID NO: 1527583 - RNA, 19 nt, Artificial Sequence
  Description of Artificial Sequence: Synthetic oligonucleotide
ccuggcauagagugcacuc

SEQ ID NO: 1527584 - RNA, 19 nt, Artificial Sequence
  Description of Artificial Sequence: Synthetic oligonucleotide
caucaagcccaaggagccc

SEQ ID NO: 1527585 - RNA, 19 nt, Artificial Sequence
  Description of Artificial Sequence: Synthetic oligonucleotide
gguuccgaacucugcucag

SEQ ID NO: 1527586 - RNA, 19 nt, Artificial Sequence
  Description of Artificial Sequence: Synthetic oligonucleotide
caauuagcccugaggccca

SEQ ID NO: 1527587 - RNA, 19 nt, Artificial Sequence
  Description of Artificial Sequence: Synthetic oligonucleotide
cuggcauagagugcacuca

SEQ ID NO: 1527588 - RNA, 19 nt, Artificial Sequence
  Description of Artificial Sequence: Synthetic oligonucleotide
aguuugccuggaauagcca

SEQ ID NO: 1527589 - RNA, 19 nt, Artificial Sequence
  Description of Artificial Sequence: Synthetic oligonucleotide
cuucaagagguggaacuaa

SEQ ID NO: 1527590 - RNA, 19 nt, Artificial Sequence
  Description of Artificial Sequence: Synthetic oligonucleotide
gcgucaaaguugaucuucc

SEQ ID NO: 1527591 - RNA, 19 nt, Artificial Sequence
  Description of Artificial Sequence: Synthetic oligonucleotide
agcucugcuaaaaccggau

SEQ ID NO: 1527592 - RNA, 19 nt, Artificial Sequence
  Description of Artificial Sequence: Synthetic oligonucleotide
agaguaggccagccugaau

SEQ ID NO: 1527593 - RNA, 19 nt, Artificial Sequence
  Description of Artificial Sequence: Synthetic oligonucleotide
cagagugcaaagcuggcau

SEQ ID NO: 1527594 - RNA, 19 nt, Artificial Sequence
  Description of Artificial Sequence: Synthetic oligonucleotide
auuagcccugaggcccaac

SEQ ID NO: 1527595 - RNA, 19 nt, Artificial Sequence
  Description of Artificial Sequence: Synthetic oligonucleotide
ccccauauacaaguuugcc

SEQ ID NO: 1527596 - RNA, 19 nt, Artificial Sequence
  Description of Artificial Sequence: Synthetic oligonucleotide
ccaccccacagauggaaag

SEQ ID NO: 1527597 - RNA, 19 nt, Artificial Sequence
  Description of Artificial Sequence: Synthetic oligonucleotide
cgauaaugagcugaguauc

SEQ ID NO: 1527598 - RNA, 19 nt, Artificial Sequence
  Description of Artificial Sequence: Synthetic oligonucleotide
acuggcugccugagcagag

SEQ ID NO: 1527599 - RNA, 19 nt, Artificial Sequence
  Description of Artificial Sequence: Synthetic oligonucleotide
gagauagcuccggcgccug

SEQ ID NO: 1527600 - RNA, 19 nt, Artificial Sequence
  Description of Artificial Sequence: Synthetic oligonucleotide
agccaaacuccaaacuaua

SEQ ID NO: 1527601 - RNA, 19 nt, Artificial Sequence
  Description of Artificial Sequence: Synthetic oligonucleotide
cgaacucugcucagcacgc

SEQ ID NO: 1527602 - RNA, 19 nt, Artificial Sequence
  Description of Artificial Sequence: Synthetic oligonucleotide
cagccugaaugaaaugugu

SEQ ID NO: 1527603 - RNA, 19 nt, Artificial Sequence
  Description of Artificial Sequence: Synthetic oligonucleotide
gcccaagccaacuccugug

SEQ ID NO: 1527604 - RNA, 19 nt, Artificial Sequence
  Description of Artificial Sequence: Synthetic oligonucleotide
ggaguuauaugggaaaauu

SEQ ID NO: 1527605 - RNA, 19 nt, Artificial Sequence
  Description of Artificial Sequence: Synthetic oligonucleotide
gacuuacccauagccaccu

SEQ ID NO: 1527606 - RNA, 19 nt, Artificial Sequence
  Description of Artificial Sequence: Synthetic oligonucleotide
cagcucugcuaaaaccgga

SEQ ID NO: 1527607 - RNA, 19 nt, Artificial Sequence
  Description of Artificial Sequence: Synthetic oligonucleotide
gccaaucaguaacaaaggu

SEQ ID NO: 1527608 - RNA, 19 nt, Artificial Sequence
  Description of Artificial Sequence: Synthetic oligonucleotide
cauaggccccugccgccgc

SEQ ID NO: 1527609 - RNA, 19 nt, Artificial Sequence
  Description of Artificial Sequence: Synthetic oligonucleotide
ggcauagagugcacucaag

SEQ ID NO: 1527610 - RNA, 19 nt, Artificial Sequence
  Description of Artificial Sequence: Synthetic oligonucleotide
aagaggcuauggaucgguu

SEQ ID NO: 1527611 - RNA, 19 nt, Artificial Sequence
  Description of Artificial Sequence: Synthetic oligonucleotide
gagcuucccagcucugcua

SEQ ID NO: 1527612 - RNA, 19 nt, Artificial Sequence
  Description of Artificial Sequence: Synthetic oligonucleotide
auagaacacgacaccugua

SEQ ID NO: 1527613 - RNA, 19 nt, Artificial Sequence
  Description of Artificial Sequence: Synthetic oligonucleotide
aguccgcaacucaggagcu

SEQ ID NO: 1527614 - RNA, 19 nt, Artificial Sequence
  Description of Artificial Sequence: Synthetic oligonucleotide
gagaguaggccagccugaa

SEQ ID NO: 1527615 - RNA, 19 nt, Artificial Sequence
  Description of Artificial Sequence: Synthetic oligonucleotide
cuucccagcucugcuaaaa

SEQ ID NO: 1527616 - RNA, 19 nt, Artificial Sequence
  Description of Artificial Sequence: Synthetic oligonucleotide
ccgaucaaauauguucaug

SEQ ID NO: 1527617 - RNA, 19 nt, Artificial Sequence
  Description of Artificial Sequence: Synthetic oligonucleotide
ccaaacuauauucacuaau

SEQ ID NO: 1527618 - RNA, 19 nt, Artificial Sequence
  Description of Artificial Sequence: Synthetic oligonucleotide
gcaacucaggagcuuccca

SEQ ID NO: 1527619 - RNA, 19 nt, Artificial Sequence
  Description of Artificial Sequence: Synthetic oligonucleotide
agcuccggcgccuggcaua

SEQ ID NO: 1527620 - RNA, 19 nt, Artificial Sequence
  Description of Artificial Sequence: Synthetic oligonucleotide
gcaagaggcuauggaucgg

SEQ ID NO: 1527621 - RNA, 19 nt, Artificial Sequence
  Description of Artificial Sequence: Synthetic oligonucleotide
gccccauauacaaguuugc

SEQ ID NO: 1527622 - RNA, 19 nt, Artificial Sequence
  Description of Artificial Sequence: Synthetic oligonucleotide
cuggcuucaagagguggaa

SEQ ID NO: 1527623 - RNA, 19 nt, Artificial Sequence
  Description of Artificial Sequence: Synthetic oligonucleotide
aggcccaaccauuccccuu

SEQ ID NO: 1527624 - RNA, 19 nt, Artificial Sequence
  Description of Artificial Sequence: Synthetic oligonucleotide
gccagccugaaugaaaugu

SEQ ID NO: 1527625 - RNA, 19 nt, Artificial Sequence
  Description of Artificial Sequence: Synthetic oligonucleotide
gagguggaacuaagucauc

SEQ ID NO: 1527626 - RNA, 19 nt, Artificial Sequence
  Description of Artificial Sequence: Synthetic oligonucleotide
caccuguaaugugugcaga

SEQ ID NO: 1527627 - RNA, 19 nt, Artificial Sequence
  Description of Artificial Sequence: Synthetic oligonucleotide
gccaacuccugugaggaaa

SEQ ID NO: 1527628 - RNA, 19 nt, Artificial Sequence
  Description of Artificial Sequence: Synthetic oligonucleotide
cacagauggaaagcaggua

SEQ ID NO: 1527629 - RNA, 19 nt, Artificial Sequence
  Description of Artificial Sequence: Synthetic oligonucleotide
ggacaaagccgcacaugac

SEQ ID NO: 1527630 - RNA, 19 nt, Artificial Sequence
  Description of Artificial Sequence: Synthetic oligonucleotide
cgaaggaguuauaugggaa

SEQ ID NO: 1527631 - RNA, 19 nt, Artificial Sequence
  Description of Artificial Sequence: Synthetic oligonucleotide
gcacgccuacuucucaguc

SEQ ID NO: 1527632 - RNA, 19 nt, Artificial Sequence
  Description of Artificial Sequence: Synthetic oligonucleotide
caagaggcuauggaucggu

SEQ ID NO: 1527633 - RNA, 19 nt, Artificial Sequence
  Description of Artificial Sequence: Synthetic oligonucleotide
ccaaccauuccccuuuucu

SEQ ID NO: 1527634 - RNA, 19 nt, Artificial Sequence
  Description of Artificial Sequence: Synthetic oligonucleotide
augcagugccagauguaau

SEQ ID NO: 1527635 - RNA, 19 nt, Artificial Sequence
  Description of Artificial Sequence: Synthetic oligonucleotide
acucugcucagcacgccua

SEQ ID NO: 1527636 - RNA, 19 nt, Artificial Sequence
  Description of Artificial Sequence: Synthetic oligonucleotide
cggcgccuggcauagagug

SEQ ID NO: 1527637 - RNA, 19 nt, Artificial Sequence
  Description of Artificial Sequence: Synthetic oligonucleotide
gcgccuggcauagagugca

SEQ ID NO: 1527638 - RNA, 19 nt, Artificial Sequence
  Description of Artificial Sequence: Synthetic oligonucleotide
gcugugucgaaggaguuau

SEQ ID NO: 1527639 - RNA, 19 nt, Artificial Sequence
  Description of Artificial Sequence: Synthetic oligonucleotide
guaggccagccugaaugaa

SEQ ID NO: 1527640 - RNA, 19 nt, Artificial Sequence
  Description of Artificial Sequence: Synthetic oligonucleotide
gccuacuucucaguccgca

SEQ ID NO: 1527641 - RNA, 19 nt, Artificial Sequence
  Description of Artificial Sequence: Synthetic oligonucleotide
agaggucgaugcagugcca

SEQ ID NO: 1527642 - RNA, 19 nt, Artificial Sequence
  Description of Artificial Sequence: Synthetic oligonucleotide
ggcuauggaucgguugaca

SEQ ID NO: 1527643 - RNA, 19 nt, Artificial Sequence
  Description of Artificial Sequence: Synthetic oligonucleotide
ccgcaacucaggagcuucc

SEQ ID NO: 1527644 - RNA, 19 nt, Artificial Sequence
  Description of Artificial Sequence: Synthetic oligonucleotide
cucuaccuugccauauauu

SEQ ID NO: 1527645 - RNA, 19 nt, Artificial Sequence
  Description of Artificial Sequence: Synthetic oligonucleotide
gcuccggcgccuggcauag

SEQ ID NO: 1527646 - RNA, 19 nt, Artificial Sequence
  Description of Artificial Sequence: Synthetic oligonucleotide
ggcgccuggcauagagugc

SEQ ID NO: 1527647 - RNA, 19 nt, Artificial Sequence
  Description of Artificial Sequence: Synthetic oligonucleotide
gcucaguuucauggcuaug

SEQ ID NO: 1527648 - RNA, 19 nt, Artificial Sequence
  Description of Artificial Sequence: Synthetic oligonucleotide
agagugcacucaagcugaa

SEQ ID NO: 1527649 - RNA, 19 nt, Artificial Sequence
  Description of Artificial Sequence: Synthetic oligonucleotide
ggucgaugcagugccagau

SEQ ID NO: 1527650 - RNA, 19 nt, Artificial Sequence
  Description of Artificial Sequence: Synthetic oligonucleotide
cugugucgaaggaguuaua

SEQ ID NO: 1527651 - RNA, 19 nt, Artificial Sequence
  Description of Artificial Sequence: Synthetic oligonucleotide
caaagcuggcauagaccuu

SEQ ID NO: 1527652 - RNA, 19 nt, Artificial Sequence
  Description of Artificial Sequence: Synthetic oligonucleotide
cgcaacucaggagcuuccc

SEQ ID NO: 1527653 - RNA, 19 nt, Artificial Sequence
  Description of Artificial Sequence: Synthetic oligonucleotide
cccugccgccgccacaaac

SEQ ID NO: 1527654 - RNA, 19 nt, Artificial Sequence
  Description of Artificial Sequence: Synthetic oligonucleotide
gccagaucaucaagcccaa

SEQ ID NO: 1527655 - RNA, 19 nt, Artificial Sequence
  Description of Artificial Sequence: Synthetic oligonucleotide
cugcugugucgaaggaguu

SEQ ID NO: 1527656 - RNA, 19 nt, Artificial Sequence
  Description of Artificial Sequence: Synthetic oligonucleotide
agguggagucuggcuucaa

SEQ ID NO: 1527657 - RNA, 19 nt, Artificial Sequence
  Description of Artificial Sequence: Synthetic oligonucleotide
cugugcccaugaaggcugu

SEQ ID NO: 1527658 - RNA, 19 nt, Artificial Sequence
  Description of Artificial Sequence: Synthetic oligonucleotide
cccaccccacagauggaaa

SEQ ID NO: 1527659 - RNA, 19 nt, Artificial Sequence
  Description of Artificial Sequence: Synthetic oligonucleotide
agagggcgucaaaguugau

SEQ ID NO: 1527660 - RNA, 19 nt, Artificial Sequence
  Description of Artificial Sequence: Synthetic oligonucleotide
gggcgucaaaguugaucuu

SEQ ID NO: 1527661 - RNA, 19 nt, Artificial Sequence
  Description of Artificial Sequence: Synthetic oligonucleotide
gcagccccauauacaaguu

SEQ ID NO: 1527662 - RNA, 19 nt, Artificial Sequence
  Description of Artificial Sequence: Synthetic oligonucleotide
guccgcaacucaggagcuu

SEQ ID NO: 1527663 - RNA, 19 nt, Artificial Sequence
  Description of Artificial Sequence: Synthetic oligonucleotide
ccggcgccuggcauagagu

SEQ ID NO: 1527664 - RNA, 19 nt, Artificial Sequence
  Description of Artificial Sequence: Synthetic oligonucleotide
ccgccgccacaaacauaca

SEQ ID NO: 1527665 - RNA, 19 nt, Artificial Sequence
  Description of Artificial Sequence: Synthetic oligonucleotide
ccccugccgccgccacaaa

SEQ ID NO: 1527666 - RNA, 19 nt, Artificial Sequence
  Description of Artificial Sequence: Synthetic oligonucleotide
uuuguaagaaacuucaacg

SEQ ID NO: 1527667 - RNA, 19 nt, Artificial Sequence
  Description of Artificial Sequence: Synthetic oligonucleotide
uguaaagugaagaugauug

SEQ ID NO: 1527668 - RNA, 19 nt, Artificial Sequence
  Description of Artificial Sequence: Synthetic oligonucleotide
aagugaagaugauugaccc

SEQ ID NO: 1527669 - RNA, 19 nt, Artificial Sequence
  Description of Artificial Sequence: Synthetic oligonucleotide
aaacuauucaaguaauuag

SEQ ID NO: 1527670 - RNA, 19 nt, Artificial Sequence
  Description of Artificial Sequence: Synthetic oligonucleotide
ucuguaauagcuauuagca

SEQ ID NO: 1527671 - RNA, 19 nt, Artificial Sequence
  Description of Artificial Sequence: Synthetic oligonucleotide
aauagguagauaugaauag

SEQ ID NO: 1527672 - RNA, 19 nt, Artificial Sequence
  Description of Artificial Sequence: Synthetic oligonucleotide
uuaacaauuaacagagcgg

SEQ ID NO: 1527673 - RNA, 19 nt, Artificial Sequence
  Description of Artificial Sequence: Synthetic oligonucleotide
uccuuuguuaucaucaugg

SEQ ID NO: 1527674 - RNA, 19 nt, Artificial Sequence
  Description of Artificial Sequence: Synthetic oligonucleotide
aaagaugguauaaaggaac

SEQ ID NO: 1527675 - RNA, 19 nt, Artificial Sequence
  Description of Artificial Sequence: Synthetic oligonucleotide
agaaagaugguauaaagga

SEQ ID NO: 1527676 - RNA, 19 nt, Artificial Sequence
  Description of Artificial Sequence: Synthetic oligonucleotide
uguaauagcuauuagcaug

SEQ ID NO: 1527677 - RNA, 19 nt, Artificial Sequence
  Description of Artificial Sequence: Synthetic oligonucleotide
aucaugguuagcuuuaugg

SEQ ID NO: 1527678 - RNA, 19 nt, Artificial Sequence
  Description of Artificial Sequence: Synthetic oligonucleotide
uauaccagauugaagaagc

SEQ ID NO: 1527679 - RNA, 19 nt, Artificial Sequence
  Description of Artificial Sequence: Synthetic oligonucleotide
uuucuuuucacucagugaa

SEQ ID NO: 1527680 - RNA, 19 nt, Artificial Sequence
  Description of Artificial Sequence: Synthetic oligonucleotide
aauuauacuggaaauauga

SEQ ID NO: 1527681 - RNA, 19 nt, Artificial Sequence
  Description of Artificial Sequence: Synthetic oligonucleotide
agaguuaacaauuaacaga

SEQ ID NO: 1527682 - RNA, 19 nt, Artificial Sequence
  Description of Artificial Sequence: Synthetic oligonucleotide
caauauaccagauugaaga

SEQ ID NO: 1527683 - RNA, 19 nt, Artificial Sequence
  Description of Artificial Sequence: Synthetic oligonucleotide
ugcuguaaagugaagauga

SEQ ID NO: 1527684 - RNA, 19 nt, Artificial Sequence
  Description of Artificial Sequence: Synthetic oligonucleotide
aaucucuuauaccagaaaa

SEQ ID NO: 1527685 - RNA, 19 nt, Artificial Sequence
  Description of Artificial Sequence: Synthetic oligonucleotide
uuuagaaguguuaaagccu

SEQ ID NO: 1527686 - RNA, 19 nt, Artificial Sequence
  Description of Artificial Sequence: Synthetic oligonucleotide
uugucuucuauauacagga

SEQ ID NO: 1527687 - RNA, 19 nt, Artificial Sequence
  Description of Artificial Sequence: Synthetic oligonucleotide
aggagaaucucuuauacca

SEQ ID NO: 1527688 - RNA, 19 nt, Artificial Sequence
  Description of Artificial Sequence: Synthetic oligonucleotide
auggucacgagaaagaugg

SEQ ID NO: 1527689 - RNA, 19 nt, Artificial Sequence
  Description of Artificial Sequence: Synthetic oligonucleotide
gaaauaaggcguuucuucc

SEQ ID NO: 1527690 - RNA, 19 nt, Artificial Sequence
  Description of Artificial Sequence: Synthetic oligonucleotide
uagguagauaugaauagcc

SEQ ID NO: 1527691 - RNA, 19 nt, Artificial Sequence
  Description of Artificial Sequence: Synthetic oligonucleotide
caagaugugacgauaacac

SEQ ID NO: 1527692 - RNA, 19 nt, Artificial Sequence
  Description of Artificial Sequence: Synthetic oligonucleotide
aaaaggggaacauggacgu

SEQ ID NO: 1527693 - RNA, 19 nt, Artificial Sequence
  Description of Artificial Sequence: Synthetic oligonucleotide
auuauacaggauaaaauuc

SEQ ID NO: 1527694 - RNA, 19 nt, Artificial Sequence
  Description of Artificial Sequence: Synthetic oligonucleotide
uguaagaaacuucaacgga

SEQ ID NO: 1527695 - RNA, 19 nt, Artificial Sequence
  Description of Artificial Sequence: Synthetic oligonucleotide
uuuauggucacgagaaaga

SEQ ID NO: 1527696 - RNA, 19 nt, Artificial Sequence
  Description of Artificial Sequence: Synthetic oligonucleotide
ugaccuuggacccugacga

SEQ ID NO: 1527697 - RNA, 19 nt, Artificial Sequence
  Description of Artificial Sequence: Synthetic oligonucleotide
uuaggaaaaguucuccaug

SEQ ID NO: 1527698 - RNA, 19 nt, Artificial Sequence
  Description of Artificial Sequence: Synthetic oligonucleotide
aaggggaacauggacgugc

SEQ ID NO: 1527699 - RNA, 19 nt, Artificial Sequence
  Description of Artificial Sequence: Synthetic oligonucleotide
auaggcuuauuucacauca

SEQ ID NO: 1527700 - RNA, 19 nt, Artificial Sequence
  Description of Artificial Sequence: Synthetic oligonucleotide
ugaaauaaggcguuucuuc

SEQ ID NO: 1527701 - RNA, 19 nt, Artificial Sequence
  Description of Artificial Sequence: Synthetic oligonucleotide
aagccaguaaaauauuagu

SEQ ID NO: 1527702 - RNA, 19 nt, Artificial Sequence
  Description of Artificial Sequence: Synthetic oligonucleotide
caagaguuaacaauuaaca

SEQ ID NO: 1527703 - RNA, 19 nt, Artificial Sequence
  Description of Artificial Sequence: Synthetic oligonucleotide
uauuagugugguuuguaag

SEQ ID NO: 1527704 - RNA, 19 nt, Artificial Sequence
  Description of Artificial Sequence: Synthetic oligonucleotide
uucuacacaagaugugacg

SEQ ID NO: 1527705 - RNA, 19 nt, Artificial Sequence
  Description of Artificial Sequence: Synthetic oligonucleotide
aaauuccuccaccaaagca

SEQ ID NO: 1527706 - RNA, 19 nt, Artificial Sequence
  Description of Artificial Sequence: Synthetic oligonucleotide
uaacaauuaacagagcggu

SEQ ID NO: 1527707 - RNA, 19 nt, Artificial Sequence
  Description of Artificial Sequence: Synthetic oligonucleotide
auagcuauuagcaugugug

SEQ ID NO: 1527708 - RNA, 19 nt, Artificial Sequence
  Description of Artificial Sequence: Synthetic oligonucleotide
ucuauauacaggaauuaua

SEQ ID NO: 1527709 - RNA, 19 nt, Artificial Sequence
  Description of Artificial Sequence: Synthetic oligonucleotide
caguaaaauauuagugugg

SEQ ID NO: 1527710 - RNA, 19 nt, Artificial Sequence
  Description of Artificial Sequence: Synthetic oligonucleotide
ucaacggaggcucugcaag

SEQ ID NO: 1527711 - RNA, 19 nt, Artificial Sequence
  Description of Artificial Sequence: Synthetic oligonucleotide
uuagaauuuugcaguaaca

SEQ ID NO: 1527712 - RNA, 19 nt, Artificial Sequence
  Description of Artificial Sequence: Synthetic oligonucleotide
ugaauuuuagaaguguuaa

SEQ ID NO: 1527713 - RNA, 19 nt, Artificial Sequence
  Description of Artificial Sequence: Synthetic oligonucleotide
uaaauaaguaacucucccu

SEQ ID NO: 1527714 - RNA, 19 nt, Artificial Sequence
  Description of Artificial Sequence: Synthetic oligonucleotide
accgacaccagguaguggg

SEQ ID NO: 1527715 - RNA, 19 nt, Artificial Sequence
  Description of Artificial Sequence: Synthetic oligonucleotide
ucuauccuuacagauaggc

SEQ ID NO: 1527716 - RNA, 19 nt, Artificial Sequence
  Description of Artificial Sequence: Synthetic oligonucleotide
ucuucuauauacaggaauu

SEQ ID NO: 1527717 - RNA, 19 nt, Artificial Sequence
  Description of Artificial Sequence: Synthetic oligonucleotide
auuaucauuuuaucaauau

SEQ ID NO: 1527718 - RNA, 19 nt, Artificial Sequence
  Description of Artificial Sequence: Synthetic oligonucleotide
aauauaccagauugaagaa

SEQ ID NO: 1527719 - RNA, 19 nt, Artificial Sequence
  Description of Artificial Sequence: Synthetic oligonucleotide
ugucccugaaauaaggcgu

SEQ ID NO: 1527720 - RNA, 19 nt, Artificial Sequence
  Description of Artificial Sequence: Synthetic oligonucleotide
aauaugaaguaaaaguuua

SEQ ID NO: 1527721 - RNA, 19 nt, Artificial Sequence
  Description of Artificial Sequence: Synthetic oligonucleotide
cuauucaaguaauuaggag

SEQ ID NO: 1527722 - RNA, 19 nt, Artificial Sequence
  Description of Artificial Sequence: Synthetic oligonucleotide
acaggaauuauacuggaaa

SEQ ID NO: 1527723 - RNA, 19 nt, Artificial Sequence
  Description of Artificial Sequence: Synthetic oligonucleotide
gauugaagaagccaguaaa

SEQ ID NO: 1527724 - RNA, 19 nt, Artificial Sequence
  Description of Artificial Sequence: Synthetic oligonucleotide
guaagaaacuucaacggag

SEQ ID NO: 1527725 - RNA, 19 nt, Artificial Sequence
  Description of Artificial Sequence: Synthetic oligonucleotide
aguaaaauauuaguguggu

SEQ ID NO: 1527726 - RNA, 19 nt, Artificial Sequence
  Description of Artificial Sequence: Synthetic oligonucleotide
aguuuaauucugcagaauu

SEQ ID NO: 1527727 - RNA, 19 nt, Artificial Sequence
  Description of Artificial Sequence: Synthetic oligonucleotide
agaugauugaccccagcag

SEQ ID NO: 1527728 - RNA, 19 nt, Artificial Sequence
  Description of Artificial Sequence: Synthetic oligonucleotide
gaaaaguucuccauguuca

SEQ ID NO: 1527729 - RNA, 19 nt, Artificial Sequence
  Description of Artificial Sequence: Synthetic oligonucleotide
gaaacuucaacggaggcuc

SEQ ID NO: 1527730 - RNA, 19 nt, Artificial Sequence
  Description of Artificial Sequence: Synthetic oligonucleotide
uuacagauaggcuuauuuc

SEQ ID NO: 1527731 - RNA, 19 nt, Artificial Sequence
  Description of Artificial Sequence: Synthetic oligonucleotide
gagcauugcacucaaccag

SEQ ID NO: 1527732 - RNA, 19 nt, Artificial Sequence
  Description of Artificial Sequence: Synthetic oligonucleotide
ugaauagguagauaugaau

SEQ ID NO: 1527733 - RNA, 19 nt, Artificial Sequence
  Description of Artificial Sequence: Synthetic oligonucleotide
aaauaaggcguuucuuccu

SEQ ID NO: 1527734 - RNA, 19 nt, Artificial Sequence
  Description of Artificial Sequence: Synthetic oligonucleotide
acuaucaguuuauuugcag

SEQ ID NO: 1527735 - RNA, 19 nt, Artificial Sequence
  Description of Artificial Sequence: Synthetic oligonucleotide
ugucagucuucuuucuugg

SEQ ID NO: 1527736 - RNA, 19 nt, Artificial Sequence
  Description of Artificial Sequence: Synthetic oligonucleotide
uuauuuaggaaaaguucuc

SEQ ID NO: 1527737 - RNA, 19 nt, Artificial Sequence
  Description of Artificial Sequence: Synthetic oligonucleotide
ugagaucaugcuuugacau

SEQ ID NO: 1527738 - RNA, 19 nt, Artificial Sequence
  Description of Artificial Sequence: Synthetic oligonucleotide
ugugacgauaacaccaccu

SEQ ID NO: 1527739 - RNA, 19 nt, Artificial Sequence
  Description of Artificial Sequence: Synthetic oligonucleotide
ucaaguaauuaggagaauc

SEQ ID NO: 1527740 - RNA, 19 nt, Artificial Sequence
  Description of Artificial Sequence: Synthetic oligonucleotide
caugagaucaugcuuugac

SEQ ID NO: 1527741 - RNA, 19 nt, Artificial Sequence
  Description of Artificial Sequence: Synthetic oligonucleotide
uauauacaggaauuauacu

SEQ ID NO: 1527742 - RNA, 19 nt, Artificial Sequence
  Description of Artificial Sequence: Synthetic oligonucleotide
guuaccuuggaagggaagg

SEQ ID NO: 1527743 - RNA, 19 nt, Artificial Sequence
  Description of Artificial Sequence: Synthetic oligonucleotide
augaauagcccugggaaac

SEQ ID NO: 1527744 - RNA, 19 nt, Artificial Sequence
  Description of Artificial Sequence: Synthetic oligonucleotide
aagcaauggagcauugcac

SEQ ID NO: 1527745 - RNA, 19 nt, Artificial Sequence
  Description of Artificial Sequence: Synthetic oligonucleotide
acgauaacaccaccugccc

SEQ ID NO: 1527746 - RNA, 19 nt, Artificial Sequence
  Description of Artificial Sequence: Synthetic oligonucleotide
caugccucuccgaagagcc

SEQ ID NO: 1527747 - RNA, 19 nt, Artificial Sequence
  Description of Artificial Sequence: Synthetic oligonucleotide
ucuacacaagaugugacga

SEQ ID NO: 1527748 - RNA, 19 nt, Artificial Sequence
  Description of Artificial Sequence: Synthetic oligonucleotide
ucaugguuagcuuuauggu

SEQ ID NO: 1527749 - RNA, 19 nt, Artificial Sequence
  Description of Artificial Sequence: Synthetic oligonucleotide
acaauuaacagagcggugu

SEQ ID NO: 1527750 - RNA, 19 nt, Artificial Sequence
  Description of Artificial Sequence: Synthetic oligonucleotide
uuccaaucuccuuuuagca

SEQ ID NO: 1527751 - RNA, 19 nt, Artificial Sequence
  Description of Artificial Sequence: Synthetic oligonucleotide
aucaugacuauccagccau

SEQ ID NO: 1527752 - RNA, 19 nt, Artificial Sequence
  Description of Artificial Sequence: Synthetic oligonucleotide
cuuuauggucacgagaaag

SEQ ID NO: 1527753 - RNA, 19 nt, Artificial Sequence
  Description of Artificial Sequence: Synthetic oligonucleotide
uacaauauaccagauugaa

SEQ ID NO: 1527754 - RNA, 19 nt, Artificial Sequence
  Description of Artificial Sequence: Synthetic oligonucleotide
guugaauagguagauauga

SEQ ID NO: 1527755 - RNA, 19 nt, Artificial Sequence
  Description of Artificial Sequence: Synthetic oligonucleotide
cuaucaugacuauccagcc

SEQ ID NO: 1527756 - RNA, 19 nt, Artificial Sequence
  Description of Artificial Sequence: Synthetic oligonucleotide
aaaggaacaugagaucaug

SEQ ID NO: 1527757 - RNA, 19 nt, Artificial Sequence
  Description of Artificial Sequence: Synthetic oligonucleotide
auugucuucuauauacagg

SEQ ID NO: 1527758 - RNA, 19 nt, Artificial Sequence
  Description of Artificial Sequence: Synthetic oligonucleotide
gacgauaacaccaccugcc

SEQ ID NO: 1527759 - RNA, 19 nt, Artificial Sequence
  Description of Artificial Sequence: Synthetic oligonucleotide
gauaugaauagcccuggga

SEQ ID NO: 1527760 - RNA, 19 nt, Artificial Sequence
  Description of Artificial Sequence: Synthetic oligonucleotide
gaauagguagauaugaaua

SEQ ID NO: 1527761 - RNA, 19 nt, Artificial Sequence
  Description of Artificial Sequence: Synthetic oligonucleotide
ucuccgaagagcccgaauc

SEQ ID NO: 1527762 - RNA, 19 nt, Artificial Sequence
  Description of Artificial Sequence: Synthetic oligonucleotide
gauaaaauugucagucuuc

SEQ ID NO: 1527763 - RNA, 19 nt, Artificial Sequence
  Description of Artificial Sequence: Synthetic oligonucleotide
agguagauaugaauagccc

SEQ ID NO: 1527764 - RNA, 19 nt, Artificial Sequence
  Description of Artificial Sequence: Synthetic oligonucleotide
aucaugcuuugacauugcc

SEQ ID NO: 1527765 - RNA, 19 nt, Artificial Sequence
  Description of Artificial Sequence: Synthetic oligonucleotide
aauaaguaacucucccuuu

SEQ ID NO: 1527766 - RNA, 19 nt, Artificial Sequence
  Description of Artificial Sequence: Synthetic oligonucleotide
uucacucagugaaaacugc

SEQ ID NO: 1527767 - RNA, 19 nt, Artificial Sequence
  Description of Artificial Sequence: Synthetic oligonucleotide
caugguuagcuuuaugguc

SEQ ID NO: 1527768 - RNA, 19 nt, Artificial Sequence
  Description of Artificial Sequence: Synthetic oligonucleotide
ugacgauaacaccaccugc

SEQ ID NO: 1527769 - RNA, 19 nt, Artificial Sequence
  Description of Artificial Sequence: Synthetic oligonucleotide
augacgacgaccgaccccg

SEQ ID NO: 1527770 - RNA, 19 nt, Artificial Sequence
  Description of Artificial Sequence: Synthetic oligonucleotide
aggaacaugagaucaugcu

SEQ ID NO: 1527771 - RNA, 19 nt, Artificial Sequence
  Description of Artificial Sequence: Synthetic oligonucleotide
accagauugaagaagccag

SEQ ID NO: 1527772 - RNA, 19 nt, Artificial Sequence
  Description of Artificial Sequence: Synthetic oligonucleotide
agaucaugcuuugacauug

SEQ ID NO: 1527773 - RNA, 19 nt, Artificial Sequence
  Description of Artificial Sequence: Synthetic oligonucleotide
acagauaggcuuauuucac

SEQ ID NO: 1527774 - RNA, 19 nt, Artificial Sequence
  Description of Artificial Sequence: Synthetic oligonucleotide
gguauaaaggaacaugaga

SEQ ID NO: 1527775 - RNA, 19 nt, Artificial Sequence
  Description of Artificial Sequence: Synthetic oligonucleotide
uugaauagguagauaugaa

SEQ ID NO: 1527776 - RNA, 19 nt, Artificial Sequence
  Description of Artificial Sequence: Synthetic oligonucleotide
agcuauuagcaugugugac

SEQ ID NO: 1527777 - RNA, 19 nt, Artificial Sequence
  Description of Artificial Sequence: Synthetic oligonucleotide
uaggagaaucucuuauacc

SEQ ID NO: 1527778 - RNA, 19 nt, Artificial Sequence
  Description of Artificial Sequence: Synthetic oligonucleotide
aauaaggcguuucuuccuu

SEQ ID NO: 1527779 - RNA, 19 nt, Artificial Sequence
  Description of Artificial Sequence: Synthetic oligonucleotide
ggaaacuaggucacgaggg

SEQ ID NO: 1527780 - RNA, 19 nt, Artificial Sequence
  Description of Artificial Sequence: Synthetic oligonucleotide
uuaaagccuuagaauuuug

SEQ ID NO: 1527781 - RNA, 19 nt, Artificial Sequence
  Description of Artificial Sequence: Synthetic oligonucleotide
auauaccagauugaagaag

SEQ ID NO: 1527782 - RNA, 19 nt, Artificial Sequence
  Description of Artificial Sequence: Synthetic oligonucleotide
agcauugcacucaaccagc

SEQ ID NO: 1527783 - RNA, 19 nt, Artificial Sequence
  Description of Artificial Sequence: Synthetic oligonucleotide
uauccagccauuucuguaa

SEQ ID NO: 1527784 - RNA, 19 nt, Artificial Sequence
  Description of Artificial Sequence: Synthetic oligonucleotide
uuugacauugccagaugau

SEQ ID NO: 1527785 - RNA, 19 nt, Artificial Sequence
  Description of Artificial Sequence: Synthetic oligonucleotide
agcgccaucaccgacacca

SEQ ID NO: 1527786 - RNA, 19 nt, Artificial Sequence
  Description of Artificial Sequence: Synthetic oligonucleotide
acaauuagaaucauucaaa

SEQ ID NO: 1527787 - RNA, 19 nt, Artificial Sequence
  Description of Artificial Sequence: Synthetic oligonucleotide
aacagcuaucaugacuauc

SEQ ID NO: 1527788 - RNA, 19 nt, Artificial Sequence
  Description of Artificial Sequence: Synthetic oligonucleotide
uaucaugacuauccagcca

SEQ ID NO: 1527789 - RNA, 19 nt, Artificial Sequence
  Description of Artificial Sequence: Synthetic oligonucleotide
cuggacaggggauuauucc

SEQ ID NO: 1527790 - RNA, 19 nt, Artificial Sequence
  Description of Artificial Sequence: Synthetic oligonucleotide
ugcaguaacaagugaacuu

SEQ ID NO: 1527791 - RNA, 19 nt, Artificial Sequence
  Description of Artificial Sequence: Synthetic oligonucleotide
cacaauuagaaucauucaa

SEQ ID NO: 1527792 - RNA, 19 nt, Artificial Sequence
  Description of Artificial Sequence: Synthetic oligonucleotide
gacuccaccuacuauuuuc

SEQ ID NO: 1527793 - RNA, 19 nt, Artificial Sequence
  Description of Artificial Sequence: Synthetic oligonucleotide
agaaguguuaaagccuuag

SEQ ID NO: 1527794 - RNA, 19 nt, Artificial Sequence
  Description of Artificial Sequence: Synthetic oligonucleotide
augagaucaugcuuugaca

SEQ ID NO: 1527795 - RNA, 19 nt, Artificial Sequence
  Description of Artificial Sequence: Synthetic oligonucleotide
ucacaugauccacucguga

SEQ ID NO: 1527796 - RNA, 19 nt, Artificial Sequence
  Description of Artificial Sequence: Synthetic oligonucleotide
uucuuggcaugccucuccg

SEQ ID NO: 1527797 - RNA, 19 nt, Artificial Sequence
  Description of Artificial Sequence: Synthetic oligonucleotide
agagcggugucccugaaau

SEQ ID NO: 1527798 - RNA, 19 nt, Artificial Sequence
  Description of Artificial Sequence: Synthetic oligonucleotide
uccaagaguuaacaauuaa

SEQ ID NO: 1527799 - RNA, 19 nt, Artificial Sequence
  Description of Artificial Sequence: Synthetic oligonucleotide
agccaguaaaauauuagug

SEQ ID NO: 1527800 - RNA, 19 nt, Artificial Sequence
  Description of Artificial Sequence: Synthetic oligonucleotide
guuaucaucaugguuagcu

SEQ ID NO: 1527801 - RNA, 19 nt, Artificial Sequence
  Description of Artificial Sequence: Synthetic oligonucleotide
caauucuacacaagaugug

SEQ ID NO: 1527802 - RNA, 19 nt, Artificial Sequence
  Description of Artificial Sequence: Synthetic oligonucleotide
gcaguguuaccuuggaagg

SEQ ID NO: 1527803 - RNA, 19 nt, Artificial Sequence
  Description of Artificial Sequence: Synthetic oligonucleotide
uaaaggaacaugagaucau

SEQ ID NO: 1527804 - RNA, 19 nt, Artificial Sequence
  Description of Artificial Sequence: Synthetic oligonucleotide
uuuugccucccaagcacag

SEQ ID NO: 1527805 - RNA, 19 nt, Artificial Sequence
  Description of Artificial Sequence: Synthetic oligonucleotide
ugggaaacuaggucacgag

SEQ ID NO: 1527806 - RNA, 19 nt, Artificial Sequence
  Description of Artificial Sequence: Synthetic oligonucleotide
gugaccuuggacccugacg

SEQ ID NO: 1527807 - RNA, 19 nt, Artificial Sequence
  Description of Artificial Sequence: Synthetic oligonucleotide
uucacaugauccacucgug

SEQ ID NO: 1527808 - RNA, 19 nt, Artificial Sequence
  Description of Artificial Sequence: Synthetic oligonucleotide
uucuauauacaggaauuau

SEQ ID NO: 1527809 - RNA, 19 nt, Artificial Sequence
  Description of Artificial Sequence: Synthetic oligonucleotide
cacaugauccacucgugac

SEQ ID NO: 1527810 - RNA, 19 nt, Artificial Sequence
  Description of Artificial Sequence: Synthetic oligonucleotide
augguuagcuuuaugguca

SEQ ID NO: 1527811 - RNA, 19 nt, Artificial Sequence
  Description of Artificial Sequence: Synthetic oligonucleotide
uggugugcuguaaagugaa

SEQ ID NO: 1527812 - RNA, 19 nt, Artificial Sequence
  Description of Artificial Sequence: Synthetic oligonucleotide
acaguuucgauuccaguuu

SEQ ID NO: 1527813 - RNA, 19 nt, Artificial Sequence
  Description of Artificial Sequence: Synthetic oligonucleotide
cuauuagcaugugugacuc

SEQ ID NO: 1527814 - RNA, 19 nt, Artificial Sequence
  Description of Artificial Sequence: Synthetic oligonucleotide
aggggauuauuccaugcca

SEQ ID NO: 1527815 - RNA, 19 nt, Artificial Sequence
  Description of Artificial Sequence: Synthetic oligonucleotide
augugacgauaacaccacc

SEQ ID NO: 1527816 - RNA, 19 nt, Artificial Sequence
  Description of Artificial Sequence: Synthetic oligonucleotide
acuucaacggaggcucugc

SEQ ID NO: 1527817 - RNA, 19 nt, Artificial Sequence
  Description of Artificial Sequence: Synthetic oligonucleotide
gaugauugaccccagcagu

SEQ ID NO: 1527818 - RNA, 19 nt, Artificial Sequence
  Description of Artificial Sequence: Synthetic oligonucleotide
ccaagaguuaacaauuaac

SEQ ID NO: 1527819 - RNA, 19 nt, Artificial Sequence
  Description of Artificial Sequence: Synthetic oligonucleotide
gaugugacgauaacaccac

SEQ ID NO: 1527820 - RNA, 19 nt, Artificial Sequence
  Description of Artificial Sequence: Synthetic oligonucleotide
agauugaagaagccaguaa

SEQ ID NO: 1527821 - RNA, 19 nt, Artificial Sequence
  Description of Artificial Sequence: Synthetic oligonucleotide
uggcaugccucuccgaaga

SEQ ID NO: 1527822 - RNA, 19 nt, Artificial Sequence
  Description of Artificial Sequence: Synthetic oligonucleotide
cacucagugaaaacugcug

SEQ ID NO: 1527823 - RNA, 19 nt, Artificial Sequence
  Description of Artificial Sequence: Synthetic oligonucleotide
ccucuauccuuacagauag

SEQ ID NO: 1527824 - RNA, 19 nt, Artificial Sequence
  Description of Artificial Sequence: Synthetic oligonucleotide
auacaggauaaaauuccuc

SEQ ID NO: 1527825 - RNA, 19 nt, Artificial Sequence
  Description of Artificial Sequence: Synthetic oligonucleotide
cagugaaaacugcugcugc

SEQ ID NO: 1527826 - RNA, 19 nt, Artificial Sequence
  Description of Artificial Sequence: Synthetic oligonucleotide
uaccagauugaagaagcca

SEQ ID NO: 1527827 - RNA, 19 nt, Artificial Sequence
  Description of Artificial Sequence: Synthetic oligonucleotide
aaacuaggucacgagggca

SEQ ID NO: 1527828 - RNA, 19 nt, Artificial Sequence
  Description of Artificial Sequence: Synthetic oligonucleotide
ccuacuauuuuccaaguuc

SEQ ID NO: 1527829 - RNA, 19 nt, Artificial Sequence
  Description of Artificial Sequence: Synthetic oligonucleotide
uccucuauccuuacagaua

SEQ ID NO: 1527830 - RNA, 19 nt, Artificial Sequence
  Description of Artificial Sequence: Synthetic oligonucleotide
aacaauuaacagagcggug

SEQ ID NO: 1527831 - RNA, 19 nt, Artificial Sequence
  Description of Artificial Sequence: Synthetic oligonucleotide
acgacgaccgaccccgccg

SEQ ID NO: 1527832 - RNA, 19 nt, Artificial Sequence
  Description of Artificial Sequence: Synthetic oligonucleotide
guguuaaagccuuagaauu

SEQ ID NO: 1527833 - RNA, 19 nt, Artificial Sequence
  Description of Artificial Sequence: Synthetic oligonucleotide
gaagaugauugaccccagc

SEQ ID NO: 1527834 - RNA, 19 nt, Artificial Sequence
  Description of Artificial Sequence: Synthetic oligonucleotide
auacuggaaauaugaagua

SEQ ID NO: 1527835 - RNA, 19 nt, Artificial Sequence
  Description of Artificial Sequence: Synthetic oligonucleotide
aguguuaccuuggaaggga

SEQ ID NO: 1527836 - RNA, 19 nt, Artificial Sequence
  Description of Artificial Sequence: Synthetic oligonucleotide
uacaggaauuauacuggaa

SEQ ID NO: 1527837 - RNA, 19 nt, Artificial Sequence
  Description of Artificial Sequence: Synthetic oligonucleotide
cuuugacauugccagauga

SEQ ID NO: 1527838 - RNA, 19 nt, Artificial Sequence
  Description of Artificial Sequence: Synthetic oligonucleotide
uuauggucacgagaaagau

SEQ ID NO: 1527839 - RNA, 19 nt, Artificial Sequence
  Description of Artificial Sequence: Synthetic oligonucleotide
caugugugacuccaccuac

SEQ ID NO: 1527840 - RNA, 19 nt, Artificial Sequence
  Description of Artificial Sequence: Synthetic oligonucleotide
uucuuuucacucagugaaa

SEQ ID NO: 1527841 - RNA, 19 nt, Artificial Sequence
  Description of Artificial Sequence: Synthetic oligonucleotide
ccauccaacagcuaucaug

SEQ ID NO: 1527842 - RNA, 19 nt, Artificial Sequence
  Description of Artificial Sequence: Synthetic oligonucleotide
ggaaggacaacuucagcca

SEQ ID NO: 1527843 - RNA, 19 nt, Artificial Sequence
  Description of Artificial Sequence: Synthetic oligonucleotide
acuauccagccauuucugu

SEQ ID NO: 1527844 - RNA, 19 nt, Artificial Sequence
  Description of Artificial Sequence: Synthetic oligonucleotide
uuaccuuggaagggaagga

SEQ ID NO: 1527845 - RNA, 19 nt, Artificial Sequence
  Description of Artificial Sequence: Synthetic oligonucleotide
uuggcaugccucuccgaag

SEQ ID NO: 1527846 - RNA, 19 nt, Artificial Sequence
  Description of Artificial Sequence: Synthetic oligonucleotide
ccaccuacuauuuuccaag

SEQ ID NO: 1527847 - RNA, 19 nt, Artificial Sequence
  Description of Artificial Sequence: Synthetic oligonucleotide
caauuaacagagcgguguc

SEQ ID NO: 1527848 - RNA, 19 nt, Artificial Sequence
  Description of Artificial Sequence: Synthetic oligonucleotide
uugacauugccagaugauu

SEQ ID NO: 1527849 - RNA, 19 nt, Artificial Sequence
  Description of Artificial Sequence: Synthetic oligonucleotide
cugaauuuuagaaguguua

SEQ ID NO: 1527850 - RNA, 19 nt, Artificial Sequence
  Description of Artificial Sequence: Synthetic oligonucleotide
ugacgaggcagugccauug

SEQ ID NO: 1527851 - RNA, 19 nt, Artificial Sequence
  Description of Artificial Sequence: Synthetic oligonucleotide
uacacaagaugugacgaua

SEQ ID NO: 1527852 - RNA, 19 nt, Artificial Sequence
  Description of Artificial Sequence: Synthetic oligonucleotide
ggcucugcaagcauuauac

SEQ ID NO: 1527853 - RNA, 19 nt, Artificial Sequence
  Description of Artificial Sequence: Synthetic oligonucleotide
gagcccgaauccucugugg

SEQ ID NO: 1527854 - RNA, 19 nt, Artificial Sequence
  Description of Artificial Sequence: Synthetic oligonucleotide
aaguuuaauucugcagaau

SEQ ID NO: 1527855 - RNA, 19 nt, Artificial Sequence
  Description of Artificial Sequence: Synthetic oligonucleotide
auacaauauaccagauuga

SEQ ID NO: 1527856 - RNA, 19 nt, Artificial Sequence
  Description of Artificial Sequence: Synthetic oligonucleotide
cagccauuucuguaauagc

SEQ ID NO: 1527857 - RNA, 19 nt, Artificial Sequence
  Description of Artificial Sequence: Synthetic oligonucleotide
aggaauuauacuggaaaua

SEQ ID NO: 1527858 - RNA, 19 nt, Artificial Sequence
  Description of Artificial Sequence: Synthetic oligonucleotide
guaauagcuauuagcaugu

SEQ ID NO: 1527859 - RNA, 19 nt, Artificial Sequence
  Description of Artificial Sequence: Synthetic oligonucleotide
augauuggugugcuguaaa

SEQ ID NO: 1527860 - RNA, 19 nt, Artificial Sequence
  Description of Artificial Sequence: Synthetic oligonucleotide
gccauuggaagacaguuuc

SEQ ID NO: 1527861 - RNA, 19 nt, Artificial Sequence
  Description of Artificial Sequence: Synthetic oligonucleotide
ugauccacucgugacucca

SEQ ID NO: 1527862 - RNA, 19 nt, Artificial Sequence
  Description of Artificial Sequence: Synthetic oligonucleotide
uuccaugacgacgaccgac

SEQ ID NO: 1527863 - RNA, 19 nt, Artificial Sequence
  Description of Artificial Sequence: Synthetic oligonucleotide
ggucaucucaucccacagg

SEQ ID NO: 1527864 - RNA, 19 nt, Artificial Sequence
  Description of Artificial Sequence: Synthetic oligonucleotide
gguagauaugaauagcccu

SEQ ID NO: 1527865 - RNA, 19 nt, Artificial Sequence
  Description of Artificial Sequence: Synthetic oligonucleotide
gccaguaaaauauuagugu

SEQ ID NO: 1527866 - RNA, 19 nt, Artificial Sequence
  Description of Artificial Sequence: Synthetic oligonucleotide
ucacgagaaagaugguaua

SEQ ID NO: 1527867 - RNA, 19 nt, Artificial Sequence
  Description of Artificial Sequence: Synthetic oligonucleotide
caguguuaccuuggaaggg

SEQ ID NO: 1527868 - RNA, 19 nt, Artificial Sequence
  Description of Artificial Sequence: Synthetic oligonucleotide
cagccagaaguugaauagg

SEQ ID NO: 1527869 - RNA, 19 nt, Artificial Sequence
  Description of Artificial Sequence: Synthetic oligonucleotide
gaacaugagaucaugcuuu

SEQ ID NO: 1527870 - RNA, 19 nt, Artificial Sequence
  Description of Artificial Sequence: Synthetic oligonucleotide
caacggaggcucugcaagc

SEQ ID NO: 1527871 - RNA, 19 nt, Artificial Sequence
  Description of Artificial Sequence: Synthetic oligonucleotide
cauuggaagacaguuucga

SEQ ID NO: 1527872 - RNA, 19 nt, Artificial Sequence
  Description of Artificial Sequence: Synthetic oligonucleotide
uaccaccacacccuauaaa

SEQ ID NO: 1527873 - RNA, 19 nt, Artificial Sequence
  Description of Artificial Sequence: Synthetic oligonucleotide
uuggacccugacgaggcag

SEQ ID NO: 1527874 - RNA, 19 nt, Artificial Sequence
  Description of Artificial Sequence: Synthetic oligonucleotide
acccuauaaauaaguaacu

SEQ ID NO: 1527875 - RNA, 19 nt, Artificial Sequence
  Description of Artificial Sequence: Synthetic oligonucleotide
uucaacggaggcucugcaa

SEQ ID NO: 1527876 - RNA, 19 nt, Artificial Sequence
  Description of Artificial Sequence: Synthetic oligonucleotide
accuuggacccugacgagg

SEQ ID NO: 1527877 - RNA, 19 nt, Artificial Sequence
  Description of Artificial Sequence: Synthetic oligonucleotide
aacuucaacggaggcucug

SEQ ID NO: 1527878 - RNA, 19 nt, Artificial Sequence
  Description of Artificial Sequence: Synthetic oligonucleotide
auccacucgugacuccaag

SEQ ID NO: 1527879 - RNA, 19 nt, Artificial Sequence
  Description of Artificial Sequence: Synthetic oligonucleotide
ugaauagcccugggaaacu

SEQ ID NO: 1527880 - RNA, 19 nt, Artificial Sequence
  Description of Artificial Sequence: Synthetic oligonucleotide
ugauugaccccagcagugu

SEQ ID NO: 1527881 - RNA, 19 nt, Artificial Sequence
  Description of Artificial Sequence: Synthetic oligonucleotide
gucuucuauauacaggaau

SEQ ID NO: 1527882 - RNA, 19 nt, Artificial Sequence
  Description of Artificial Sequence: Synthetic oligonucleotide
ccagccauuucuguaauag

SEQ ID NO: 1527883 - RNA, 19 nt, Artificial Sequence
  Description of Artificial Sequence: Synthetic oligonucleotide
cucccaagcacagauaaaa

SEQ ID NO: 1527884 - RNA, 19 nt, Artificial Sequence
  Description of Artificial Sequence: Synthetic oligonucleotide
gaucaugcuuugacauugc

SEQ ID NO: 1527885 - RNA, 19 nt, Artificial Sequence
  Description of Artificial Sequence: Synthetic oligonucleotide
uaggcuuauuucacaucau

SEQ ID NO: 1527886 - RNA, 19 nt, Artificial Sequence
  Description of Artificial Sequence: Synthetic oligonucleotide
agaaucucuuauaccagaa

SEQ ID NO: 1527887 - RNA, 19 nt, Artificial Sequence
  Description of Artificial Sequence: Synthetic oligonucleotide
caguuucgauuccaguuuc

SEQ ID NO: 1527888 - RNA, 19 nt, Artificial Sequence
  Description of Artificial Sequence: Synthetic oligonucleotide
acgagaaagaugguauaaa

SEQ ID NO: 1527889 - RNA, 19 nt, Artificial Sequence
  Description of Artificial Sequence: Synthetic oligonucleotide
guauuccaugacgacgacc

SEQ ID NO: 1527890 - RNA, 19 nt, Artificial Sequence
  Description of Artificial Sequence: Synthetic oligonucleotide
ccaacagcuaucaugacua

SEQ ID NO: 1527891 - RNA, 19 nt, Artificial Sequence
  Description of Artificial Sequence: Synthetic oligonucleotide
accacacccuauaaauaag

SEQ ID NO: 1527892 - RNA, 19 nt, Artificial Sequence
  Description of Artificial Sequence: Synthetic oligonucleotide
uucauucccgcagccagaa

SEQ ID NO: 1527893 - RNA, 19 nt, Artificial Sequence
  Description of Artificial Sequence: Synthetic oligonucleotide
aggcagugccauuggaaga

SEQ ID NO: 1527894 - RNA, 19 nt, Artificial Sequence
  Description of Artificial Sequence: Synthetic oligonucleotide
cucuauccuuacagauagg

SEQ ID NO: 1527895 - RNA, 19 nt, Artificial Sequence
  Description of Artificial Sequence: Synthetic oligonucleotide
cagauaggcuuauuucaca

SEQ ID NO: 1527896 - RNA, 19 nt, Artificial Sequence
  Description of Artificial Sequence: Synthetic oligonucleotide
ugucuccucuauccuuaca

SEQ ID NO: 1527897 - RNA, 19 nt, Artificial Sequence
  Description of Artificial Sequence: Synthetic oligonucleotide
aucaccgacaccagguagu

SEQ ID NO: 1527898 - RNA, 19 nt, Artificial Sequence
  Description of Artificial Sequence: Synthetic oligonucleotide
ucaccgacaccagguagug

SEQ ID NO: 1527899 - RNA, 19 nt, Artificial Sequence
  Description of Artificial Sequence: Synthetic oligonucleotide
cuuggcaugccucuccgaa

SEQ ID NO: 1527900 - RNA, 19 nt, Artificial Sequence
  Description of Artificial Sequence: Synthetic oligonucleotide
gauuggugugcuguaaagu

SEQ ID NO: 1527901 - RNA, 19 nt, Artificial Sequence
  Description of Artificial Sequence: Synthetic oligonucleotide
cauugcacucaaccagcug

SEQ ID NO: 1527902 - RNA, 19 nt, Artificial Sequence
  Description of Artificial Sequence: Synthetic oligonucleotide
agaugauuggugugcugua

SEQ ID NO: 1527903 - RNA, 19 nt, Artificial Sequence
  Description of Artificial Sequence: Synthetic oligonucleotide
aaaggggaacauggacgug

SEQ ID NO: 1527904 - RNA, 19 nt, Artificial Sequence
  Description of Artificial Sequence: Synthetic oligonucleotide
gcaauucuacacaagaugu

SEQ ID NO: 1527905 - RNA, 19 nt, Artificial Sequence
  Description of Artificial Sequence: Synthetic oligonucleotide
gaccuuggacccugacgag

SEQ ID NO: 1527906 - RNA, 19 nt, Artificial Sequence
  Description of Artificial Sequence: Synthetic oligonucleotide
gaugauuggugugcuguaa

SEQ ID NO: 1527907 - RNA, 19 nt, Artificial Sequence
  Description of Artificial Sequence: Synthetic oligonucleotide
auccgguucaagguguccu

SEQ ID NO: 1527908 - RNA, 19 nt, Artificial Sequence
  Description of Artificial Sequence: Synthetic oligonucleotide
accuacuauuuuccaaguu

SEQ ID NO: 1527909 - RNA, 19 nt, Artificial Sequence
  Description of Artificial Sequence: Synthetic oligonucleotide
ccauuggaagacaguuucg

SEQ ID NO: 1527910 - RNA, 19 nt, Artificial Sequence
  Description of Artificial Sequence: Synthetic oligonucleotide
uguuaucaucaugguuagc

SEQ ID NO: 1527911 - RNA, 19 nt, Artificial Sequence
  Description of Artificial Sequence: Synthetic oligonucleotide
cauucccgcagccagaagu

SEQ ID NO: 1527912 - RNA, 19 nt, Artificial Sequence
  Description of Artificial Sequence: Synthetic oligonucleotide
acacaagaugugacgauaa

SEQ ID NO: 1527913 - RNA, 19 nt, Artificial Sequence
  Description of Artificial Sequence: Synthetic oligonucleotide
auaacaccaccugccccuc

SEQ ID NO: 1527914 - RNA, 19 nt, Artificial Sequence
  Description of Artificial Sequence: Synthetic oligonucleotide
aggggaacauggacgugcg

SEQ ID NO: 1527915 - RNA, 19 nt, Artificial Sequence
  Description of Artificial Sequence: Synthetic oligonucleotide
caggaauuauacuggaaau

SEQ ID NO: 1527916 - RNA, 19 nt, Artificial Sequence
  Description of Artificial Sequence: Synthetic oligonucleotide
ucgugacuccaagaguuaa

SEQ ID NO: 1527917 - RNA, 19 nt, Artificial Sequence
  Description of Artificial Sequence: Synthetic oligonucleotide
ucauucccgcagccagaag

SEQ ID NO: 1527918 - RNA, 19 nt, Artificial Sequence
  Description of Artificial Sequence: Synthetic oligonucleotide
ccuuggacccugacgaggc

SEQ ID NO: 1527919 - RNA, 19 nt, Artificial Sequence
  Description of Artificial Sequence: Synthetic oligonucleotide
gaaguugaauagguagaua

SEQ ID NO: 1527920 - RNA, 19 nt, Artificial Sequence
  Description of Artificial Sequence: Synthetic oligonucleotide
gggucaucucaucccacag

SEQ ID NO: 1527921 - RNA, 19 nt, Artificial Sequence
  Description of Artificial Sequence: Synthetic oligonucleotide
uugucuccucuauccuuac

SEQ ID NO: 1527922 - RNA, 19 nt, Artificial Sequence
  Description of Artificial Sequence: Synthetic oligonucleotide
caauggagcauugcacuca

SEQ ID NO: 1527923 - RNA, 19 nt, Artificial Sequence
  Description of Artificial Sequence: Synthetic oligonucleotide
agugccauuggaagacagu

SEQ ID NO: 1527924 - RNA, 19 nt, Artificial Sequence
  Description of Artificial Sequence: Synthetic oligonucleotide
gcuauuagcaugugugacu

SEQ ID NO: 1527925 - RNA, 19 nt, Artificial Sequence
  Description of Artificial Sequence: Synthetic oligonucleotide
acgaccgaccccgccggcc

SEQ ID NO: 1527926 - RNA, 19 nt, Artificial Sequence
  Description of Artificial Sequence: Synthetic oligonucleotide
auccuuacagauaggcuua

SEQ ID NO: 1527927 - RNA, 19 nt, Artificial Sequence
  Description of Artificial Sequence: Synthetic oligonucleotide
aaacuucaacggaggcucu

SEQ ID NO: 1527928 - RNA, 19 nt, Artificial Sequence
  Description of Artificial Sequence: Synthetic oligonucleotide
ggggauuauuccaugccac

SEQ ID NO: 1527929 - RNA, 19 nt, Artificial Sequence
  Description of Artificial Sequence: Synthetic oligonucleotide
gaccccgccggcccgagca

SEQ ID NO: 1527930 - RNA, 19 nt, Artificial Sequence
  Description of Artificial Sequence: Synthetic oligonucleotide
cacgagaaagaugguauaa

SEQ ID NO: 1527931 - RNA, 19 nt, Artificial Sequence
  Description of Artificial Sequence: Synthetic oligonucleotide
auuccaugacgacgaccga

SEQ ID NO: 1527932 - RNA, 19 nt, Artificial Sequence
  Description of Artificial Sequence: Synthetic oligonucleotide
ucaugacuauccagccauu

SEQ ID NO: 1527933 - RNA, 19 nt, Artificial Sequence
  Description of Artificial Sequence: Synthetic oligonucleotide
aggcucugcaagcauuaua

SEQ ID NO: 1527934 - RNA, 19 nt, Artificial Sequence
  Description of Artificial Sequence: Synthetic oligonucleotide
cugggaaacuaggucacga

SEQ ID NO: 1527935 - RNA, 19 nt, Artificial Sequence
  Description of Artificial Sequence: Synthetic oligonucleotide
gcaauggagcauugcacuc

SEQ ID NO: 1527936 - RNA, 19 nt, Artificial Sequence
  Description of Artificial Sequence: Synthetic oligonucleotide
aguuucgauuccaguuucu

SEQ ID NO: 1527937 - RNA, 19 nt, Artificial Sequence
  Description of Artificial Sequence: Synthetic oligonucleotide
gacgugcgggcgaagguca

SEQ ID NO: 1527938 - RNA, 19 nt, Artificial Sequence
  Description of Artificial Sequence: Synthetic oligonucleotide
uggucacgagaaagauggu

SEQ ID NO: 1527939 - RNA, 19 nt, Artificial Sequence
  Description of Artificial Sequence: Synthetic oligonucleotide
cuguaauagcuauuagcau

SEQ ID NO: 1527940 - RNA, 19 nt, Artificial Sequence
  Description of Artificial Sequence: Synthetic oligonucleotide
gcuuugacauugccagaug

SEQ ID NO: 1527941 - RNA, 19 nt, Artificial Sequence
  Description of Artificial Sequence: Synthetic oligonucleotide
cuucaacggaggcucugca

SEQ ID NO: 1527942 - RNA, 19 nt, Artificial Sequence
  Description of Artificial Sequence: Synthetic oligonucleotide
cacugaauuuuagaagugu

SEQ ID NO: 1527943 - RNA, 19 nt, Artificial Sequence
  Description of Artificial Sequence: Synthetic oligonucleotide
ugcacucaaccagcuggac

SEQ ID NO: 1527944 - RNA, 19 nt, Artificial Sequence
  Description of Artificial Sequence: Synthetic oligonucleotide
gaauagcccugggaaacua

SEQ ID NO: 1527945 - RNA, 19 nt, Artificial Sequence
  Description of Artificial Sequence: Synthetic oligonucleotide
gcacucaaccagcuggaca

SEQ ID NO: 1527946 - RNA, 19 nt, Artificial Sequence
  Description of Artificial Sequence: Synthetic oligonucleotide
cuccaccuacuauuuucca

SEQ ID NO: 1527947 - RNA, 19 nt, Artificial Sequence
  Description of Artificial Sequence: Synthetic oligonucleotide
auugaccccagcaguguua

SEQ ID NO: 1527948 - RNA, 19 nt, Artificial Sequence
  Description of Artificial Sequence: Synthetic oligonucleotide
acggaggcucugcaagcau

SEQ ID NO: 1527949 - RNA, 19 nt, Artificial Sequence
  Description of Artificial Sequence: Synthetic oligonucleotide
agggagcaagagucacagu

SEQ ID NO: 1527950 - RNA, 19 nt, Artificial Sequence
  Description of Artificial Sequence: Synthetic oligonucleotide
cccugggaaacuaggucac

SEQ ID NO: 1527951 - RNA, 19 nt, Artificial Sequence
  Description of Artificial Sequence: Synthetic oligonucleotide
gauugaccccagcaguguu

SEQ ID NO: 1527952 - RNA, 19 nt, Artificial Sequence
  Description of Artificial Sequence: Synthetic oligonucleotide
gcaguaacaagugaacuuu

SEQ ID NO: 1527953 - RNA, 19 nt, Artificial Sequence
  Description of Artificial Sequence: Synthetic oligonucleotide
ggucacgagaaagauggua

SEQ ID NO: 1527954 - RNA, 19 nt, Artificial Sequence
  Description of Artificial Sequence: Synthetic oligonucleotide
gaccgaccccgccggcccg

SEQ ID NO: 1527955 - RNA, 19 nt, Artificial Sequence
  Description of Artificial Sequence: Synthetic oligonucleotide
gggauuauuccaugccacu

SEQ ID NO: 1527956 - RNA, 19 nt, Artificial Sequence
  Description of Artificial Sequence: Synthetic oligonucleotide
acuaggucacgagggcaaa

SEQ ID NO: 1527957 - RNA, 19 nt, Artificial Sequence
  Description of Artificial Sequence: Synthetic oligonucleotide
ggugugcuguaaagugaag

SEQ ID NO: 1527958 - RNA, 19 nt, Artificial Sequence
  Description of Artificial Sequence: Synthetic oligonucleotide
cgugacuccaagaguuaac

SEQ ID NO: 1527959 - RNA, 19 nt, Artificial Sequence
  Description of Artificial Sequence: Synthetic oligonucleotide
ccgaagagcccgaauccuc

SEQ ID NO: 1527960 - RNA, 19 nt, Artificial Sequence
  Description of Artificial Sequence: Synthetic oligonucleotide
gguuuguaagaaacuucaa

SEQ ID NO: 1527961 - RNA, 19 nt, Artificial Sequence
  Description of Artificial Sequence: Synthetic oligonucleotide
gcuggacaggggauuauuc

SEQ ID NO: 1527962 - RNA, 19 nt, Artificial Sequence
  Description of Artificial Sequence: Synthetic oligonucleotide
caccgacaccagguagugg

SEQ ID NO: 1527963 - RNA, 19 nt, Artificial Sequence
  Description of Artificial Sequence: Synthetic oligonucleotide
ggcaugccucuccgaagag

SEQ ID NO: 1527964 - RNA, 19 nt, Artificial Sequence
  Description of Artificial Sequence: Synthetic oligonucleotide
ccugaaauaaggcguuucu

SEQ ID NO: 1527965 - RNA, 19 nt, Artificial Sequence
  Description of Artificial Sequence: Synthetic oligonucleotide
ccaugacgacgaccgaccc

SEQ ID NO: 1527966 - RNA, 19 nt, Artificial Sequence
  Description of Artificial Sequence: Synthetic oligonucleotide
caccuacuauuuuccaagu

SEQ ID NO: 1527967 - RNA, 19 nt, Artificial Sequence
  Description of Artificial Sequence: Synthetic oligonucleotide
acauggacgugcgggcgaa

SEQ ID NO: 1527968 - RNA, 19 nt, Artificial Sequence
  Description of Artificial Sequence: Synthetic oligonucleotide
guuucgauuccaguuucuu

SEQ ID NO: 1527969 - RNA, 19 nt, Artificial Sequence
  Description of Artificial Sequence: Synthetic oligonucleotide
cuguaaagugaagaugauu

SEQ ID NO: 1527970 - RNA, 19 nt, Artificial Sequence
  Description of Artificial Sequence: Synthetic oligonucleotide
ucccugaaauaaggcguuu

SEQ ID NO: 1527971 - RNA, 19 nt, Artificial Sequence
  Description of Artificial Sequence: Synthetic oligonucleotide
gacgaccgaccccgccggc

SEQ ID NO: 1527972 - RNA, 19 nt, Artificial Sequence
  Description of Artificial Sequence: Synthetic oligonucleotide
cacucgugacuccaagagu

SEQ ID NO: 1527973 - RNA, 19 nt, Artificial Sequence
  Description of Artificial Sequence: Synthetic oligonucleotide
gauccacucgugacuccaa

SEQ ID NO: 1527974 - RNA, 19 nt, Artificial Sequence
  Description of Artificial Sequence: Synthetic oligonucleotide
gcggugucccugaaauaag

SEQ ID NO: 1527975 - RNA, 19 nt, Artificial Sequence
  Description of Artificial Sequence: Synthetic oligonucleotide
caaacagcauccgguucaa

SEQ ID NO: 1527976 - RNA, 19 nt, Artificial Sequence
  Description of Artificial Sequence: Synthetic oligonucleotide
ggacgugcgggcgaagguc

SEQ ID NO: 1527977 - RNA, 19 nt, Artificial Sequence
  Description of Artificial Sequence: Synthetic oligonucleotide
cuuggacccugacgaggca

SEQ ID NO: 1527978 - RNA, 19 nt, Artificial Sequence
  Description of Artificial Sequence: Synthetic oligonucleotide
cacuuccuucauucccgca

SEQ ID NO: 1527979 - RNA, 19 nt, Artificial Sequence
  Description of Artificial Sequence: Synthetic oligonucleotide
gcuuuauggucacgagaaa

SEQ ID NO: 1527980 - RNA, 19 nt, Artificial Sequence
  Description of Artificial Sequence: Synthetic oligonucleotide
gagcggugucccugaaaua

SEQ ID NO: 1527981 - RNA, 19 nt, Artificial Sequence
  Description of Artificial Sequence: Synthetic oligonucleotide
cccgaauccucugugguga

SEQ ID NO: 1527982 - RNA, 19 nt, Artificial Sequence
  Description of Artificial Sequence: Synthetic oligonucleotide
gggcccauccaacagcuau

SEQ ID NO: 1527983 - RNA, 19 nt, Artificial Sequence
  Description of Artificial Sequence: Synthetic oligonucleotide
gcccauccaacagcuauca

SEQ ID NO: 1527984 - RNA, 19 nt, Artificial Sequence
  Description of Artificial Sequence: Synthetic oligonucleotide
cuaggucacgagggcaaaa

SEQ ID NO: 1527985 - RNA, 19 nt, Artificial Sequence
  Description of Artificial Sequence: Synthetic oligonucleotide
caaucuccuuuuagcaauu

SEQ ID NO: 1527986 - RNA, 19 nt, Artificial Sequence
  Description of Artificial Sequence: Synthetic oligonucleotide
cauggacgugcgggcgaag

SEQ ID NO: 1527987 - RNA, 19 nt, Artificial Sequence
  Description of Artificial Sequence: Synthetic oligonucleotide
caugacuauccagccauuu

SEQ ID NO: 1527988 - RNA, 19 nt, Artificial Sequence
  Description of Artificial Sequence: Synthetic oligonucleotide
cagagcggugucccugaaa

SEQ ID NO: 1527989 - RNA, 19 nt, Artificial Sequence
  Description of Artificial Sequence: Synthetic oligonucleotide
gccagaaguugaauaggua

SEQ ID NO: 1527990 - RNA, 19 nt, Artificial Sequence
  Description of Artificial Sequence: Synthetic oligonucleotide
ggacaacuucagccacuca

SEQ ID NO: 1527991 - RNA, 19 nt, Artificial Sequence
  Description of Artificial Sequence: Synthetic oligonucleotide
ggacccugacgaggcagug

SEQ ID NO: 1527992 - RNA, 19 nt, Artificial Sequence
  Description of Artificial Sequence: Synthetic oligonucleotide
cgacgaccgaccccgccgg

SEQ ID NO: 1527993 - RNA, 19 nt, Artificial Sequence
  Description of Artificial Sequence: Synthetic oligonucleotide
ggacaggggauuauuccau

SEQ ID NO: 1527994 - RNA, 19 nt, Artificial Sequence
  Description of Artificial Sequence: Synthetic oligonucleotide
ccgaauccucuguggugac

SEQ ID NO: 1527995 - RNA, 19 nt, Artificial Sequence
  Description of Artificial Sequence: Synthetic oligonucleotide
cagcgccaucaccgacacc

SEQ ID NO: 1527996 - RNA, 19 nt, Artificial Sequence
  Description of Artificial Sequence: Synthetic oligonucleotide
cgaauccucuguggugacc

SEQ ID NO: 1527997 - RNA, 19 nt, Artificial Sequence
  Description of Artificial Sequence: Synthetic oligonucleotide
cgaccgaccccgccggccc

SEQ ID NO: 1527998 - RNA, 19 nt, Artificial Sequence
  Description of Artificial Sequence: Synthetic oligonucleotide
ccaucaccgacaccaggua

SEQ ID NO: 1527999 - RNA, 19 nt, Artificial Sequence
  Description of Artificial Sequence: Synthetic oligonucleotide
ccucccaagcacagauaaa

SEQ ID NO: 1528000 - RNA, 19 nt, Artificial Sequence
  Description of Artificial Sequence: Synthetic oligonucleotide
cucuccgaagagcccgaau

SEQ ID NO: 1528001 - RNA, 19 nt, Artificial Sequence
  Description of Artificial Sequence: Synthetic oligonucleotide
cugacgaggcagugccauu

SEQ ID NO: 1528002 - RNA, 19 nt, Artificial Sequence
  Description of Artificial Sequence: Synthetic oligonucleotide
cagcuggacaggggauuau

SEQ ID NO: 1528003 - RNA, 19 nt, Artificial Sequence
  Description of Artificial Sequence: Synthetic oligonucleotide
ccgccggcccgagcagccg

SEQ ID NO: 1528004 - RNA, 19 nt, Artificial Sequence
  Description of Artificial Sequence: Synthetic oligonucleotide
ccgcugcuucagcgccauc

SEQ ID NO: 1528005 - RNA, 19 nt, Artificial Sequence
  Description of Artificial Sequence: Synthetic oligonucleotide
aaauuaaugcuuuuaaggg

SEQ ID NO: 1528006 - RNA, 19 nt, Artificial Sequence
  Description of Artificial Sequence: Synthetic oligonucleotide
ugagcaauaauuaaaauuc

SEQ ID NO: 1528007 - RNA, 19 nt, Artificial Sequence
  Description of Artificial Sequence: Synthetic oligonucleotide
uuuuaucucaguaaggaag

SEQ ID NO: 1528008 - RNA, 19 nt, Artificial Sequence
  Description of Artificial Sequence: Synthetic oligonucleotide
aaacagcugaaauauggcc

SEQ ID NO: 1528009 - RNA, 19 nt, Artificial Sequence
  Description of Artificial Sequence: Synthetic oligonucleotide
uuuucgugcauacaaauag

SEQ ID NO: 1528010 - RNA, 19 nt, Artificial Sequence
  Description of Artificial Sequence: Synthetic oligonucleotide
uaaucuaucugaaaguuug

SEQ ID NO: 1528011 - RNA, 19 nt, Artificial Sequence
  Description of Artificial Sequence: Synthetic oligonucleotide
aagauaguaaucuaucuga

SEQ ID NO: 1528012 - RNA, 19 nt, Artificial Sequence
  Description of Artificial Sequence: Synthetic oligonucleotide
aauucucccauuaaggcgc

SEQ ID NO: 1528013 - RNA, 19 nt, Artificial Sequence
  Description of Artificial Sequence: Synthetic oligonucleotide
uuuuaagggucauaggugg

SEQ ID NO: 1528014 - RNA, 19 nt, Artificial Sequence
  Description of Artificial Sequence: Synthetic oligonucleotide
aaagauaguaaucuaucug

SEQ ID NO: 1528015 - RNA, 19 nt, Artificial Sequence
  Description of Artificial Sequence: Synthetic oligonucleotide
auucuuaucauguauugag

SEQ ID NO: 1528016 - RNA, 19 nt, Artificial Sequence
  Description of Artificial Sequence: Synthetic oligonucleotide
ucugguacccucuagauca

SEQ ID NO: 1528017 - RNA, 19 nt, Artificial Sequence
  Description of Artificial Sequence: Synthetic oligonucleotide
caauagguuguuaaaaugg

SEQ ID NO: 1528018 - RNA, 19 nt, Artificial Sequence
  Description of Artificial Sequence: Synthetic oligonucleotide
uccauauuggucaacgagg

SEQ ID NO: 1528019 - RNA, 19 nt, Artificial Sequence
  Description of Artificial Sequence: Synthetic oligonucleotide
uguagaacuauucuccugc

SEQ ID NO: 1528020 - RNA, 19 nt, Artificial Sequence
  Description of Artificial Sequence: Synthetic oligonucleotide
aauuaaugcuuuuaagggu

SEQ ID NO: 1528021 - RNA, 19 nt, Artificial Sequence
  Description of Artificial Sequence: Synthetic oligonucleotide
uauuuucgccaaaagauag

SEQ ID NO: 1528022 - RNA, 19 nt, Artificial Sequence
  Description of Artificial Sequence: Synthetic oligonucleotide
aaugccacaaaauacguuu

SEQ ID NO: 1528023 - RNA, 19 nt, Artificial Sequence
  Description of Artificial Sequence: Synthetic oligonucleotide
uccaaaacaaaucuuauuu

SEQ ID NO: 1528024 - RNA, 19 nt, Artificial Sequence
  Description of Artificial Sequence: Synthetic oligonucleotide
ugugauuaagacaagcagu

SEQ ID NO: 1528025 - RNA, 19 nt, Artificial Sequence
  Description of Artificial Sequence: Synthetic oligonucleotide
aaaauggcuauuuucgcca

SEQ ID NO: 1528026 - RNA, 19 nt, Artificial Sequence
  Description of Artificial Sequence: Synthetic oligonucleotide
gaauaauucucccauuaag

SEQ ID NO: 1528027 - RNA, 19 nt, Artificial Sequence
  Description of Artificial Sequence: Synthetic oligonucleotide
auccaaaggcccuacaacc

SEQ ID NO: 1528028 - RNA, 19 nt, Artificial Sequence
  Description of Artificial Sequence: Synthetic oligonucleotide
uaauucucccauuaaggcg

SEQ ID NO: 1528029 - RNA, 19 nt, Artificial Sequence
  Description of Artificial Sequence: Synthetic oligonucleotide
ugguuagacaucaagcaag

SEQ ID NO: 1528030 - RNA, 19 nt, Artificial Sequence
  Description of Artificial Sequence: Synthetic oligonucleotide
uuucccauagugaaguuug

SEQ ID NO: 1528031 - RNA, 19 nt, Artificial Sequence
  Description of Artificial Sequence: Synthetic oligonucleotide
uuuaucucaguaaggaaga

SEQ ID NO: 1528032 - RNA, 19 nt, Artificial Sequence
  Description of Artificial Sequence: Synthetic oligonucleotide
uucaucuuagaaaccagag

SEQ ID NO: 1528033 - RNA, 19 nt, Artificial Sequence
  Description of Artificial Sequence: Synthetic oligonucleotide
ugcauauucaucaucgggu

SEQ ID NO: 1528034 - RNA, 19 nt, Artificial Sequence
  Description of Artificial Sequence: Synthetic oligonucleotide
acuuaagguaccuucaucu

SEQ ID NO: 1528035 - RNA, 19 nt, Artificial Sequence
  Description of Artificial Sequence: Synthetic oligonucleotide
uugcuuuuaucucaguaag

SEQ ID NO: 1528036 - RNA, 19 nt, Artificial Sequence
  Description of Artificial Sequence: Synthetic oligonucleotide
aucucaguaaggaagaaac

SEQ ID NO: 1528037 - RNA, 19 nt, Artificial Sequence
  Description of Artificial Sequence: Synthetic oligonucleotide
uguugagcaauaauuaaaa

SEQ ID NO: 1528038 - RNA, 19 nt, Artificial Sequence
  Description of Artificial Sequence: Synthetic oligonucleotide
ucuuaaugucuccaaaaca

SEQ ID NO: 1528039 - RNA, 19 nt, Artificial Sequence
  Description of Artificial Sequence: Synthetic oligonucleotide
auuaaugcuuuuaaggguc

SEQ ID NO: 1528040 - RNA, 19 nt, Artificial Sequence
  Description of Artificial Sequence: Synthetic oligonucleotide
uugagcaauaauuaaaauu

SEQ ID NO: 1528041 - RNA, 19 nt, Artificial Sequence
  Description of Artificial Sequence: Synthetic oligonucleotide
uuucgugcauacaaauagg

SEQ ID NO: 1528042 - RNA, 19 nt, Artificial Sequence
  Description of Artificial Sequence: Synthetic oligonucleotide
uggacuuuacgacagacuc

SEQ ID NO: 1528043 - RNA, 19 nt, Artificial Sequence
  Description of Artificial Sequence: Synthetic oligonucleotide
aacuuaagguaccuucauc

SEQ ID NO: 1528044 - RNA, 19 nt, Artificial Sequence
  Description of Artificial Sequence: Synthetic oligonucleotide
acaaaagcaaucuucagua

SEQ ID NO: 1528045 - RNA, 19 nt, Artificial Sequence
  Description of Artificial Sequence: Synthetic oligonucleotide
uuauuucuucaccugaacu

SEQ ID NO: 1528046 - RNA, 19 nt, Artificial Sequence
  Description of Artificial Sequence: Synthetic oligonucleotide
agugguuagacaucaagca

SEQ ID NO: 1528047 - RNA, 19 nt, Artificial Sequence
  Description of Artificial Sequence: Synthetic oligonucleotide
auuugccguucuuuuaucc

SEQ ID NO: 1528048 - RNA, 19 nt, Artificial Sequence
  Description of Artificial Sequence: Synthetic oligonucleotide
uguucaauuugucauuccu

SEQ ID NO: 1528049 - RNA, 19 nt, Artificial Sequence
  Description of Artificial Sequence: Synthetic oligonucleotide
ggaaguauaaggcagggug

SEQ ID NO: 1528050 - RNA, 19 nt, Artificial Sequence
  Description of Artificial Sequence: Synthetic oligonucleotide
aacaaaucuuauuugcuuu

SEQ ID NO: 1528051 - RNA, 19 nt, Artificial Sequence
  Description of Artificial Sequence: Synthetic oligonucleotide
ugaacuuaagguaccuuca

SEQ ID NO: 1528052 - RNA, 19 nt, Artificial Sequence
  Description of Artificial Sequence: Synthetic oligonucleotide
augcauauucaucaucggg

SEQ ID NO: 1528053 - RNA, 19 nt, Artificial Sequence
  Description of Artificial Sequence: Synthetic oligonucleotide
cuuuuaagggucauaggug

SEQ ID NO: 1528054 - RNA, 19 nt, Artificial Sequence
  Description of Artificial Sequence: Synthetic oligonucleotide
aggaaagacuuccacggcg

SEQ ID NO: 1528055 - RNA, 19 nt, Artificial Sequence
  Description of Artificial Sequence: Synthetic oligonucleotide
acaaccauacaucaggaau

SEQ ID NO: 1528056 - RNA, 19 nt, Artificial Sequence
  Description of Artificial Sequence: Synthetic oligonucleotide
ucgugcauacaaauagggg

SEQ ID NO: 1528057 - RNA, 19 nt, Artificial Sequence
  Description of Artificial Sequence: Synthetic oligonucleotide
aagcucucacuccauauug

SEQ ID NO: 1528058 - RNA, 19 nt, Artificial Sequence
  Description of Artificial Sequence: Synthetic oligonucleotide
auagugaaguuuguugagc

SEQ ID NO: 1528059 - RNA, 19 nt, Artificial Sequence
  Description of Artificial Sequence: Synthetic oligonucleotide
uuguugagcaauaauuaaa

SEQ ID NO: 1528060 - RNA, 19 nt, Artificial Sequence
  Description of Artificial Sequence: Synthetic oligonucleotide
cucaguaaggaagaaacag

SEQ ID NO: 1528061 - RNA, 19 nt, Artificial Sequence
  Description of Artificial Sequence: Synthetic oligonucleotide
uucgccaaaagauaguaau

SEQ ID NO: 1528062 - RNA, 19 nt, Artificial Sequence
  Description of Artificial Sequence: Synthetic oligonucleotide
acaagcagugguuagacau

SEQ ID NO: 1528063 - RNA, 19 nt, Artificial Sequence
  Description of Artificial Sequence: Synthetic oligonucleotide
uguccaccuauccaaaggc

SEQ ID NO: 1528064 - RNA, 19 nt, Artificial Sequence
  Description of Artificial Sequence: Synthetic oligonucleotide
uuuuguugcauuucauaac

SEQ ID NO: 1528065 - RNA, 19 nt, Artificial Sequence
  Description of Artificial Sequence: Synthetic oligonucleotide
aaaguuccccaaaaggauc

SEQ ID NO: 1528066 - RNA, 19 nt, Artificial Sequence
  Description of Artificial Sequence: Synthetic oligonucleotide
gacuuuacgacagacuccc

SEQ ID NO: 1528067 - RNA, 19 nt, Artificial Sequence
  Description of Artificial Sequence: Synthetic oligonucleotide
uaaugcuuggacucuuuag

SEQ ID NO: 1528068 - RNA, 19 nt, Artificial Sequence
  Description of Artificial Sequence: Synthetic oligonucleotide
aaugacaaggaaagacuuc

SEQ ID NO: 1528069 - RNA, 19 nt, Artificial Sequence
  Description of Artificial Sequence: Synthetic oligonucleotide
uacuacacugaaaauguuc

SEQ ID NO: 1528070 - RNA, 19 nt, Artificial Sequence
  Description of Artificial Sequence: Synthetic oligonucleotide
auaggaauugagcaagcca

SEQ ID NO: 1528071 - RNA, 19 nt, Artificial Sequence
  Description of Artificial Sequence: Synthetic oligonucleotide
aauacguuucccauaguga

SEQ ID NO: 1528072 - RNA, 19 nt, Artificial Sequence
  Description of Artificial Sequence: Synthetic oligonucleotide
aaauguucaauuugucauu

SEQ ID NO: 1528073 - RNA, 19 nt, Artificial Sequence
  Description of Artificial Sequence: Synthetic oligonucleotide
cauggaaguauaaggcagg

SEQ ID NO: 1528074 - RNA, 19 nt, Artificial Sequence
  Description of Artificial Sequence: Synthetic oligonucleotide
uccaccuauccaaaggccc

SEQ ID NO: 1528075 - RNA, 19 nt, Artificial Sequence
  Description of Artificial Sequence: Synthetic oligonucleotide
uaguaaucuaucugaaagu

SEQ ID NO: 1528076 - RNA, 19 nt, Artificial Sequence
  Description of Artificial Sequence: Synthetic oligonucleotide
cagugguuagacaucaagc

SEQ ID NO: 1528077 - RNA, 19 nt, Artificial Sequence
  Description of Artificial Sequence: Synthetic oligonucleotide
agcagaauaauucucccau

SEQ ID NO: 1528078 - RNA, 19 nt, Artificial Sequence
  Description of Artificial Sequence: Synthetic oligonucleotide
uuaaggcauaggaauugag

SEQ ID NO: 1528079 - RNA, 19 nt, Artificial Sequence
  Description of Artificial Sequence: Synthetic oligonucleotide
agguacuacacugaaaaug

SEQ ID NO: 1528080 - RNA, 19 nt, Artificial Sequence
  Description of Artificial Sequence: Synthetic oligonucleotide
agaccaagagaccgcagac

SEQ ID NO: 1528081 - RNA, 19 nt, Artificial Sequence
  Description of Artificial Sequence: Synthetic oligonucleotide
uccaauagguuguuaaaau

SEQ ID NO: 1528082 - RNA, 19 nt, Artificial Sequence
  Description of Artificial Sequence: Synthetic oligonucleotide
uguuaaggcauaggaauug

SEQ ID NO: 1528083 - RNA, 19 nt, Artificial Sequence
  Description of Artificial Sequence: Synthetic oligonucleotide
ugggucaaugcuauguacu

SEQ ID NO: 1528084 - RNA, 19 nt, Artificial Sequence
  Description of Artificial Sequence: Synthetic oligonucleotide
augcuuuuaagggucauag

SEQ ID NO: 1528085 - RNA, 19 nt, Artificial Sequence
  Description of Artificial Sequence: Synthetic oligonucleotide
uuaagguaccuucaucuua

SEQ ID NO: 1528086 - RNA, 19 nt, Artificial Sequence
  Description of Artificial Sequence: Synthetic oligonucleotide
auacguuucccauagugaa

SEQ ID NO: 1528087 - RNA, 19 nt, Artificial Sequence
  Description of Artificial Sequence: Synthetic oligonucleotide
gucaaugcuauguacucug

SEQ ID NO: 1528088 - RNA, 19 nt, Artificial Sequence
  Description of Artificial Sequence: Synthetic oligonucleotide
aaaggcccuacaaccauac

SEQ ID NO: 1528089 - RNA, 19 nt, Artificial Sequence
  Description of Artificial Sequence: Synthetic oligonucleotide
cuccauauuggucaacgag

SEQ ID NO: 1528090 - RNA, 19 nt, Artificial Sequence
  Description of Artificial Sequence: Synthetic oligonucleotide
cauagugaaguuuguugag

SEQ ID NO: 1528091 - RNA, 19 nt, Artificial Sequence
  Description of Artificial Sequence: Synthetic oligonucleotide
uaaguugggucaaugcuau

SEQ ID NO: 1528092 - RNA, 19 nt, Artificial Sequence
  Description of Artificial Sequence: Synthetic oligonucleotide
gaaaccagaguguucucac

SEQ ID NO: 1528093 - RNA, 19 nt, Artificial Sequence
  Description of Artificial Sequence: Synthetic oligonucleotide
acuacacugaaaauguuca

SEQ ID NO: 1528094 - RNA, 19 nt, Artificial Sequence
  Description of Artificial Sequence: Synthetic oligonucleotide
aaguuuguugagcaauaau

SEQ ID NO: 1528095 - RNA, 19 nt, Artificial Sequence
  Description of Artificial Sequence: Synthetic oligonucleotide
aaucuaucugaaaguuugg

SEQ ID NO: 1528096 - RNA, 19 nt, Artificial Sequence
  Description of Artificial Sequence: Synthetic oligonucleotide
auauuggucaacgagggaa

SEQ ID NO: 1528097 - RNA, 19 nt, Artificial Sequence
  Description of Artificial Sequence: Synthetic oligonucleotide
aguuuguugagcaauaauu

SEQ ID NO: 1528098 - RNA, 19 nt, Artificial Sequence
  Description of Artificial Sequence: Synthetic oligonucleotide
gcgcucauaaaauuaaugc

SEQ ID NO: 1528099 - RNA, 19 nt, Artificial Sequence
  Description of Artificial Sequence: Synthetic oligonucleotide
ugauuaagacaagcagugg

SEQ ID NO: 1528100 - RNA, 19 nt, Artificial Sequence
  Description of Artificial Sequence: Synthetic oligonucleotide
uccuaaguugggucaaugc

SEQ ID NO: 1528101 - RNA, 19 nt, Artificial Sequence
  Description of Artificial Sequence: Synthetic oligonucleotide
ucucaguaaggaagaaaca

SEQ ID NO: 1528102 - RNA, 19 nt, Artificial Sequence
  Description of Artificial Sequence: Synthetic oligonucleotide
uuuaagggucauagguggc

SEQ ID NO: 1528103 - RNA, 19 nt, Artificial Sequence
  Description of Artificial Sequence: Synthetic oligonucleotide
uuaaugcuuuuaaggguca

SEQ ID NO: 1528104 - RNA, 19 nt, Artificial Sequence
  Description of Artificial Sequence: Synthetic oligonucleotide
auauucaucaucggguugu

SEQ ID NO: 1528105 - RNA, 19 nt, Artificial Sequence
  Description of Artificial Sequence: Synthetic oligonucleotide
agcucguugaugguggugg

SEQ ID NO: 1528106 - RNA, 19 nt, Artificial Sequence
  Description of Artificial Sequence: Synthetic oligonucleotide
ucuccaaaacaaaucuuau

SEQ ID NO: 1528107 - RNA, 19 nt, Artificial Sequence
  Description of Artificial Sequence: Synthetic oligonucleotide
uacguuucccauagugaag

SEQ ID NO: 1528108 - RNA, 19 nt, Artificial Sequence
  Description of Artificial Sequence: Synthetic oligonucleotide
uccaaaggcccuacaacca

SEQ ID NO: 1528109 - RNA, 19 nt, Artificial Sequence
  Description of Artificial Sequence: Synthetic oligonucleotide
cacauugcuuugaacuucc

SEQ ID NO: 1528110 - RNA, 19 nt, Artificial Sequence
  Description of Artificial Sequence: Synthetic oligonucleotide
ugaaguuuguugagcaaua

SEQ ID NO: 1528111 - RNA, 19 nt, Artificial Sequence
  Description of Artificial Sequence: Synthetic oligonucleotide
uugcuuugaacuuccaaua

SEQ ID NO: 1528112 - RNA, 19 nt, Artificial Sequence
  Description of Artificial Sequence: Synthetic oligonucleotide
guaagcagagcauccugag

SEQ ID NO: 1528113 - RNA, 19 nt, Artificial Sequence
  Description of Artificial Sequence: Synthetic oligonucleotide
uacccucuagaucaguggu

SEQ ID NO: 1528114 - RNA, 19 nt, Artificial Sequence
  Description of Artificial Sequence: Synthetic oligonucleotide
guacccucuagaucagugg

SEQ ID NO: 1528115 - RNA, 19 nt, Artificial Sequence
  Description of Artificial Sequence: Synthetic oligonucleotide
acauuugccguucuuuuau

SEQ ID NO: 1528116 - RNA, 19 nt, Artificial Sequence
  Description of Artificial Sequence: Synthetic oligonucleotide
aguaaucuaucugaaaguu

SEQ ID NO: 1528117 - RNA, 19 nt, Artificial Sequence
  Description of Artificial Sequence: Synthetic oligonucleotide
uuugcaagcagugucugua

SEQ ID NO: 1528118 - RNA, 19 nt, Artificial Sequence
  Description of Artificial Sequence: Synthetic oligonucleotide
uuguuaaggcauaggaauu

SEQ ID NO: 1528119 - RNA, 19 nt, Artificial Sequence
  Description of Artificial Sequence: Synthetic oligonucleotide
cuguucggcacacagcuug

SEQ ID NO: 1528120 - RNA, 19 nt, Artificial Sequence
  Description of Artificial Sequence: Synthetic oligonucleotide
gugaaagggucauugagaa

SEQ ID NO: 1528121 - RNA, 19 nt, Artificial Sequence
  Description of Artificial Sequence: Synthetic oligonucleotide
aguugggucaaugcuaugu

SEQ ID NO: 1528122 - RNA, 19 nt, Artificial Sequence
  Description of Artificial Sequence: Synthetic oligonucleotide
uacuuuaacuuuguagaaa

SEQ ID NO: 1528123 - RNA, 19 nt, Artificial Sequence
  Description of Artificial Sequence: Synthetic oligonucleotide
guggagucagcucaccaag

SEQ ID NO: 1528124 - RNA, 19 nt, Artificial Sequence
  Description of Artificial Sequence: Synthetic oligonucleotide
cacuccauauuggucaacg

SEQ ID NO: 1528125 - RNA, 19 nt, Artificial Sequence
  Description of Artificial Sequence: Synthetic oligonucleotide
uuuucgccaaaagauagua

SEQ ID NO: 1528126 - RNA, 19 nt, Artificial Sequence
  Description of Artificial Sequence: Synthetic oligonucleotide
ucgccaaaagauaguaauc

SEQ ID NO: 1528127 - RNA, 19 nt, Artificial Sequence
  Description of Artificial Sequence: Synthetic oligonucleotide
caucauucuugggugagcc

SEQ ID NO: 1528128 - RNA, 19 nt, Artificial Sequence
  Description of Artificial Sequence: Synthetic oligonucleotide
uggucaacgagggaaggug

SEQ ID NO: 1528129 - RNA, 19 nt, Artificial Sequence
  Description of Artificial Sequence: Synthetic oligonucleotide
ccauacaucaggaauagca

SEQ ID NO: 1528130 - RNA, 19 nt, Artificial Sequence
  Description of Artificial Sequence: Synthetic oligonucleotide
aggcccuacaaccauacau

SEQ ID NO: 1528131 - RNA, 19 nt, Artificial Sequence
  Description of Artificial Sequence: Synthetic oligonucleotide
gacuguucggcacacagcu

SEQ ID NO: 1528132 - RNA, 19 nt, Artificial Sequence
  Description of Artificial Sequence: Synthetic oligonucleotide
uggcuauuuucgccaaaag

SEQ ID NO: 1528133 - RNA, 19 nt, Artificial Sequence
  Description of Artificial Sequence: Synthetic oligonucleotide
uuacgacagacucccugcc

SEQ ID NO: 1528134 - RNA, 19 nt, Artificial Sequence
  Description of Artificial Sequence: Synthetic oligonucleotide
ucaguaccaucuuaauguc

SEQ ID NO: 1528135 - RNA, 19 nt, Artificial Sequence
  Description of Artificial Sequence: Synthetic oligonucleotide
cucacagcaagcuuaguaa

SEQ ID NO: 1528136 - RNA, 19 nt, Artificial Sequence
  Description of Artificial Sequence: Synthetic oligonucleotide
ucuuagaaaccagaguguu

SEQ ID NO: 1528137 - RNA, 19 nt, Artificial Sequence
  Description of Artificial Sequence: Synthetic oligonucleotide
aagcagugguuagacauca

SEQ ID NO: 1528138 - RNA, 19 nt, Artificial Sequence
  Description of Artificial Sequence: Synthetic oligonucleotide
aaguuccccaaaaggauca

SEQ ID NO: 1528139 - RNA, 19 nt, Artificial Sequence
  Description of Artificial Sequence: Synthetic oligonucleotide
uuaaggcgcucauaaaauu

SEQ ID NO: 1528140 - RNA, 19 nt, Artificial Sequence
  Description of Artificial Sequence: Synthetic oligonucleotide
uugggucaaugcuauguac

SEQ ID NO: 1528141 - RNA, 19 nt, Artificial Sequence
  Description of Artificial Sequence: Synthetic oligonucleotide
cacauggaaguauaaggca

SEQ ID NO: 1528142 - RNA, 19 nt, Artificial Sequence
  Description of Artificial Sequence: Synthetic oligonucleotide
cauaggaauugagcaagcc

SEQ ID NO: 1528143 - RNA, 19 nt, Artificial Sequence
  Description of Artificial Sequence: Synthetic oligonucleotide
agagcauccugagacacca

SEQ ID NO: 1528144 - RNA, 19 nt, Artificial Sequence
  Description of Artificial Sequence: Synthetic oligonucleotide
guuuguugagcaauaauua

SEQ ID NO: 1528145 - RNA, 19 nt, Artificial Sequence
  Description of Artificial Sequence: Synthetic oligonucleotide
aaauggcuauuuucgccaa

SEQ ID NO: 1528146 - RNA, 19 nt, Artificial Sequence
  Description of Artificial Sequence: Synthetic oligonucleotide
uugcaagcagugucuguag

SEQ ID NO: 1528147 - RNA, 19 nt, Artificial Sequence
  Description of Artificial Sequence: Synthetic oligonucleotide
auuaaggcgcucauaaaau

SEQ ID NO: 1528148 - RNA, 19 nt, Artificial Sequence
  Description of Artificial Sequence: Synthetic oligonucleotide
ucauuccucuuuucgugca

SEQ ID NO: 1528149 - RNA, 19 nt, Artificial Sequence
  Description of Artificial Sequence: Synthetic oligonucleotide
agcauccugagacaccacu

SEQ ID NO: 1528150 - RNA, 19 nt, Artificial Sequence
  Description of Artificial Sequence: Synthetic oligonucleotide
auagcaaaugccacaaaau

SEQ ID NO: 1528151 - RNA, 19 nt, Artificial Sequence
  Description of Artificial Sequence: Synthetic oligonucleotide
ugcacacaugcugagguac

SEQ ID NO: 1528152 - RNA, 19 nt, Artificial Sequence
  Description of Artificial Sequence: Synthetic oligonucleotide
gguuagacaucaagcaagg

SEQ ID NO: 1528153 - RNA, 19 nt, Artificial Sequence
  Description of Artificial Sequence: Synthetic oligonucleotide
auuugagacauuugccguu

SEQ ID NO: 1528154 - RNA, 19 nt, Artificial Sequence
  Description of Artificial Sequence: Synthetic oligonucleotide
ggcauaggaauugagcaag

SEQ ID NO: 1528155 - RNA, 19 nt, Artificial Sequence
  Description of Artificial Sequence: Synthetic oligonucleotide
uucugguacccucuagauc

SEQ ID NO: 1528156 - RNA, 19 nt, Artificial Sequence
  Description of Artificial Sequence: Synthetic oligonucleotide
cuauuuucgccaaaagaua

SEQ ID NO: 1528157 - RNA, 19 nt, Artificial Sequence
  Description of Artificial Sequence: Synthetic oligonucleotide
gaaauauggccccaguuuu

SEQ ID NO: 1528158 - RNA, 19 nt, Artificial Sequence
  Description of Artificial Sequence: Synthetic oligonucleotide
ucaaugcuauguacucugu

SEQ ID NO: 1528159 - RNA, 19 nt, Artificial Sequence
  Description of Artificial Sequence: Synthetic oligonucleotide
uccacuuguuaaggcauag

SEQ ID NO: 1528160 - RNA, 19 nt, Artificial Sequence
  Description of Artificial Sequence: Synthetic oligonucleotide
gcuuuuaagggucauaggu

SEQ ID NO: 1528161 - RNA, 19 nt, Artificial Sequence
  Description of Artificial Sequence: Synthetic oligonucleotide
accgcagacagcaguuucc

SEQ ID NO: 1528162 - RNA, 19 nt, Artificial Sequence
  Description of Artificial Sequence: Synthetic oligonucleotide
ccaauagguuguuaaaaug

SEQ ID NO: 1528163 - RNA, 19 nt, Artificial Sequence
  Description of Artificial Sequence: Synthetic oligonucleotide
cauauucaucaucggguug

SEQ ID NO: 1528164 - RNA, 19 nt, Artificial Sequence
  Description of Artificial Sequence: Synthetic oligonucleotide
cacacagacuguucggcac

SEQ ID NO: 1528165 - RNA, 19 nt, Artificial Sequence
  Description of Artificial Sequence: Synthetic oligonucleotide
uccaucauucuugggugag

SEQ ID NO: 1528166 - RNA, 19 nt, Artificial Sequence
  Description of Artificial Sequence: Synthetic oligonucleotide
acggcguauucuuaucaug

SEQ ID NO: 1528167 - RNA, 19 nt, Artificial Sequence
  Description of Artificial Sequence: Synthetic oligonucleotide
acguuucccauagugaagu

SEQ ID NO: 1528168 - RNA, 19 nt, Artificial Sequence
  Description of Artificial Sequence: Synthetic oligonucleotide
agacauuugccguucuuuu

SEQ ID NO: 1528169 - RNA, 19 nt, Artificial Sequence
  Description of Artificial Sequence: Synthetic oligonucleotide
caaugcuauguacucugug

SEQ ID NO: 1528170 - RNA, 19 nt, Artificial Sequence
  Description of Artificial Sequence: Synthetic oligonucleotide
gcagugguuagacaucaag

SEQ ID NO: 1528171 - RNA, 19 nt, Artificial Sequence
  Description of Artificial Sequence: Synthetic oligonucleotide
aucuaucugaaaguuuggu

SEQ ID NO: 1528172 - RNA, 19 nt, Artificial Sequence
  Description of Artificial Sequence: Synthetic oligonucleotide
ggcuauuuucgccaaaaga

SEQ ID NO: 1528173 - RNA, 19 nt, Artificial Sequence
  Description of Artificial Sequence: Synthetic oligonucleotide
auuggucaacgagggaagg

SEQ ID NO: 1528174 - RNA, 19 nt, Artificial Sequence
  Description of Artificial Sequence: Synthetic oligonucleotide
ggaauugagcaagccaagg

SEQ ID NO: 1528175 - RNA, 19 nt, Artificial Sequence
  Description of Artificial Sequence: Synthetic oligonucleotide
uugggugagccaucaacaa

SEQ ID NO: 1528176 - RNA, 19 nt, Artificial Sequence
  Description of Artificial Sequence: Synthetic oligonucleotide
caguuuccuaaguuggguc

SEQ ID NO: 1528177 - RNA, 19 nt, Artificial Sequence
  Description of Artificial Sequence: Synthetic oligonucleotide
aagacuuccacggcguauu

SEQ ID NO: 1528178 - RNA, 19 nt, Artificial Sequence
  Description of Artificial Sequence: Synthetic oligonucleotide
cuuuuaucucaguaaggaa

SEQ ID NO: 1528179 - RNA, 19 nt, Artificial Sequence
  Description of Artificial Sequence: Synthetic oligonucleotide
gggugagccaucaacaaug

SEQ ID NO: 1528180 - RNA, 19 nt, Artificial Sequence
  Description of Artificial Sequence: Synthetic oligonucleotide
uagaacuauucuccugcau

SEQ ID NO: 1528181 - RNA, 19 nt, Artificial Sequence
  Description of Artificial Sequence: Synthetic oligonucleotide
aaagacuuccacggcguau

SEQ ID NO: 1528182 - RNA, 19 nt, Artificial Sequence
  Description of Artificial Sequence: Synthetic oligonucleotide
uaccaucuuaaugucucca

SEQ ID NO: 1528183 - RNA, 19 nt, Artificial Sequence
  Description of Artificial Sequence: Synthetic oligonucleotide
agagugaaguaaauacaca

SEQ ID NO: 1528184 - RNA, 19 nt, Artificial Sequence
  Description of Artificial Sequence: Synthetic oligonucleotide
cuguuguuaugaaucguga

SEQ ID NO: 1528185 - RNA, 19 nt, Artificial Sequence
  Description of Artificial Sequence: Synthetic oligonucleotide
aucuuagaaaccagagugu

SEQ ID NO: 1528186 - RNA, 19 nt, Artificial Sequence
  Description of Artificial Sequence: Synthetic oligonucleotide
ggucauugagaacaucuca

SEQ ID NO: 1528187 - RNA, 19 nt, Artificial Sequence
  Description of Artificial Sequence: Synthetic oligonucleotide
aauggcuauuuucgccaaa

SEQ ID NO: 1528188 - RNA, 19 nt, Artificial Sequence
  Description of Artificial Sequence: Synthetic oligonucleotide
uuccucuuuucgugcauac

SEQ ID NO: 1528189 - RNA, 19 nt, Artificial Sequence
  Description of Artificial Sequence: Synthetic oligonucleotide
gugguuagacaucaagcaa

SEQ ID NO: 1528190 - RNA, 19 nt, Artificial Sequence
  Description of Artificial Sequence: Synthetic oligonucleotide
gaagguguguggucauuga

SEQ ID NO: 1528191 - RNA, 19 nt, Artificial Sequence
  Description of Artificial Sequence: Synthetic oligonucleotide
ccaagcucguugauggugg

SEQ ID NO: 1528192 - RNA, 19 nt, Artificial Sequence
  Description of Artificial Sequence: Synthetic oligonucleotide
uguucggcacacagcuuga

SEQ ID NO: 1528193 - RNA, 19 nt, Artificial Sequence
  Description of Artificial Sequence: Synthetic oligonucleotide
gcuauuuucgccaaaagau

SEQ ID NO: 1528194 - RNA, 19 nt, Artificial Sequence
  Description of Artificial Sequence: Synthetic oligonucleotide
guuggacuuuacgacagac

SEQ ID NO: 1528195 - RNA, 19 nt, Artificial Sequence
  Description of Artificial Sequence: Synthetic oligonucleotide
ggcaucaccuggaauacag

SEQ ID NO: 1528196 - RNA, 19 nt, Artificial Sequence
  Description of Artificial Sequence: Synthetic oligonucleotide
aucaucggguuguucugug

SEQ ID NO: 1528197 - RNA, 19 nt, Artificial Sequence
  Description of Artificial Sequence: Synthetic oligonucleotide
acacagacuguucggcaca

SEQ ID NO: 1528198 - RNA, 19 nt, Artificial Sequence
  Description of Artificial Sequence: Synthetic oligonucleotide
agguuggacuuuacgacag

SEQ ID NO: 1528199 - RNA, 19 nt, Artificial Sequence
  Description of Artificial Sequence: Synthetic oligonucleotide
gguacuacacugaaaaugu

SEQ ID NO: 1528200 - RNA, 19 nt, Artificial Sequence
  Description of Artificial Sequence: Synthetic oligonucleotide
augcuuggacucuuuagua

SEQ ID NO: 1528201 - RNA, 19 nt, Artificial Sequence
  Description of Artificial Sequence: Synthetic oligonucleotide
accaagcucguugauggug

SEQ ID NO: 1528202 - RNA, 19 nt, Artificial Sequence
  Description of Artificial Sequence: Synthetic oligonucleotide
augccacaaaauacguuuc

SEQ ID NO: 1528203 - RNA, 19 nt, Artificial Sequence
  Description of Artificial Sequence: Synthetic oligonucleotide
agauaguaaucuaucugaa

SEQ ID NO: 1528204 - RNA, 19 nt, Artificial Sequence
  Description of Artificial Sequence: Synthetic oligonucleotide
uugaagcucucacuccaua

SEQ ID NO: 1528205 - RNA, 19 nt, Artificial Sequence
  Description of Artificial Sequence: Synthetic oligonucleotide
acagcaagcuuaguaaguu

SEQ ID NO: 1528206 - RNA, 19 nt, Artificial Sequence
  Description of Artificial Sequence: Synthetic oligonucleotide
caauggcuguaggugaccc

SEQ ID NO: 1528207 - RNA, 19 nt, Artificial Sequence
  Description of Artificial Sequence: Synthetic oligonucleotide
ugaccccaaccauaaaauu

SEQ ID NO: 1528208 - RNA, 19 nt, Artificial Sequence
  Description of Artificial Sequence: Synthetic oligonucleotide
accauacaucaggaauagc

SEQ ID NO: 1528209 - RNA, 19 nt, Artificial Sequence
  Description of Artificial Sequence: Synthetic oligonucleotide
cagguuggacuuuacgaca

SEQ ID NO: 1528210 - RNA, 19 nt, Artificial Sequence
  Description of Artificial Sequence: Synthetic oligonucleotide
aggaauugagcaagccaag

SEQ ID NO: 1528211 - RNA, 19 nt, Artificial Sequence
  Description of Artificial Sequence: Synthetic oligonucleotide
ugcuauguacucugugauu

SEQ ID NO: 1528212 - RNA, 19 nt, Artificial Sequence
  Description of Artificial Sequence: Synthetic oligonucleotide
auuuucgccaaaagauagu

SEQ ID NO: 1528213 - RNA, 19 nt, Artificial Sequence
  Description of Artificial Sequence: Synthetic oligonucleotide
uucccauagugaaguuugu

SEQ ID NO: 1528214 - RNA, 19 nt, Artificial Sequence
  Description of Artificial Sequence: Synthetic oligonucleotide
gugucuguagaacuauucu

SEQ ID NO: 1528215 - RNA, 19 nt, Artificial Sequence
  Description of Artificial Sequence: Synthetic oligonucleotide
agacuuccacggcguauuc

SEQ ID NO: 1528216 - RNA, 19 nt, Artificial Sequence
  Description of Artificial Sequence: Synthetic oligonucleotide
gacauuugccguucuuuua

SEQ ID NO: 1528217 - RNA, 19 nt, Artificial Sequence
  Description of Artificial Sequence: Synthetic oligonucleotide
uuccacggcguauucuuau

SEQ ID NO: 1528218 - RNA, 19 nt, Artificial Sequence
  Description of Artificial Sequence: Synthetic oligonucleotide
guagaacuauucuccugca

SEQ ID NO: 1528219 - RNA, 19 nt, Artificial Sequence
  Description of Artificial Sequence: Synthetic oligonucleotide
agguaccuucaucuuagaa

SEQ ID NO: 1528220 - RNA, 19 nt, Artificial Sequence
  Description of Artificial Sequence: Synthetic oligonucleotide
ugagacauuugccguucuu

SEQ ID NO: 1528221 - RNA, 19 nt, Artificial Sequence
  Description of Artificial Sequence: Synthetic oligonucleotide
agggugagaccaagagacc

SEQ ID NO: 1528222 - RNA, 19 nt, Artificial Sequence
  Description of Artificial Sequence: Synthetic oligonucleotide
ucaucggguuguucugugu

SEQ ID NO: 1528223 - RNA, 19 nt, Artificial Sequence
  Description of Artificial Sequence: Synthetic oligonucleotide
auggcuauuuucgccaaaa

SEQ ID NO: 1528224 - RNA, 19 nt, Artificial Sequence
  Description of Artificial Sequence: Synthetic oligonucleotide
cagcaagcuuaguaaguuc

SEQ ID NO: 1528225 - RNA, 19 nt, Artificial Sequence
  Description of Artificial Sequence: Synthetic oligonucleotide
uggaaguauaaggcagggu

SEQ ID NO: 1528226 - RNA, 19 nt, Artificial Sequence
  Description of Artificial Sequence: Synthetic oligonucleotide
ccaucaacaaugacaagga

SEQ ID NO: 1528227 - RNA, 19 nt, Artificial Sequence
  Description of Artificial Sequence: Synthetic oligonucleotide
guuagacaucaagcaaggc

SEQ ID NO: 1528228 - RNA, 19 nt, Artificial Sequence
  Description of Artificial Sequence: Synthetic oligonucleotide
acaucucaucccagguugg

SEQ ID NO: 1528229 - RNA, 19 nt, Artificial Sequence
  Description of Artificial Sequence: Synthetic oligonucleotide
aaggcccuacaaccauaca

SEQ ID NO: 1528230 - RNA, 19 nt, Artificial Sequence
  Description of Artificial Sequence: Synthetic oligonucleotide
accuauccaaaggcccuac

SEQ ID NO: 1528231 - RNA, 19 nt, Artificial Sequence
  Description of Artificial Sequence: Synthetic oligonucleotide
gggucaaugcuauguacuc

SEQ ID NO: 1528232 - RNA, 19 nt, Artificial Sequence
  Description of Artificial Sequence: Synthetic oligonucleotide
gcuauguacucugugauua

SEQ ID NO: 1528233 - RNA, 19 nt, Artificial Sequence
  Description of Artificial Sequence: Synthetic oligonucleotide
agcugaaauauggccccag

SEQ ID NO: 1528234 - RNA, 19 nt, Artificial Sequence
  Description of Artificial Sequence: Synthetic oligonucleotide
gaacuuaagguaccuucau

SEQ ID NO: 1528235 - RNA, 19 nt, Artificial Sequence
  Description of Artificial Sequence: Synthetic oligonucleotide
aagcaaucuucaguaccau

SEQ ID NO: 1528236 - RNA, 19 nt, Artificial Sequence
  Description of Artificial Sequence: Synthetic oligonucleotide
auauggccccaguuuuacu

SEQ ID NO: 1528237 - RNA, 19 nt, Artificial Sequence
  Description of Artificial Sequence: Synthetic oligonucleotide
uccucuuuucgugcauaca

SEQ ID NO: 1528238 - RNA, 19 nt, Artificial Sequence
  Description of Artificial Sequence: Synthetic oligonucleotide
cugccugcacacaugcuga

SEQ ID NO: 1528239 - RNA, 19 nt, Artificial Sequence
  Description of Artificial Sequence: Synthetic oligonucleotide
guccaccuauccaaaggcc

SEQ ID NO: 1528240 - RNA, 19 nt, Artificial Sequence
  Description of Artificial Sequence: Synthetic oligonucleotide
uccacggcguauucuuauc

SEQ ID NO: 1528241 - RNA, 19 nt, Artificial Sequence
  Description of Artificial Sequence: Synthetic oligonucleotide
aagcucguugaugguggug

SEQ ID NO: 1528242 - RNA, 19 nt, Artificial Sequence
  Description of Artificial Sequence: Synthetic oligonucleotide
agacaucaagcaaggccag

SEQ ID NO: 1528243 - RNA, 19 nt, Artificial Sequence
  Description of Artificial Sequence: Synthetic oligonucleotide
gguacccucuagaucagug

SEQ ID NO: 1528244 - RNA, 19 nt, Artificial Sequence
  Description of Artificial Sequence: Synthetic oligonucleotide
gaccaagagaccgcagaca

SEQ ID NO: 1528245 - RNA, 19 nt, Artificial Sequence
  Description of Artificial Sequence: Synthetic oligonucleotide
gucaacgagggaaggugug

SEQ ID NO: 1528246 - RNA, 19 nt, Artificial Sequence
  Description of Artificial Sequence: Synthetic oligonucleotide
caaugacaaggaaagacuu

SEQ ID NO: 1528247 - RNA, 19 nt, Artificial Sequence
  Description of Artificial Sequence: Synthetic oligonucleotide
gccacaaaauacguuuccc

SEQ ID NO: 1528248 - RNA, 19 nt, Artificial Sequence
  Description of Artificial Sequence: Synthetic oligonucleotide
gggaggaacaaaagcaauc

SEQ ID NO: 1528249 - RNA, 19 nt, Artificial Sequence
  Description of Artificial Sequence: Synthetic oligonucleotide
uaaugcuuuuaagggucau

SEQ ID NO: 1528250 - RNA, 19 nt, Artificial Sequence
  Description of Artificial Sequence: Synthetic oligonucleotide
gaagcucucacuccauauu

SEQ ID NO: 1528251 - RNA, 19 nt, Artificial Sequence
  Description of Artificial Sequence: Synthetic oligonucleotide
gguaagcagagcauccuga

SEQ ID NO: 1528252 - RNA, 19 nt, Artificial Sequence
  Description of Artificial Sequence: Synthetic oligonucleotide
cauauuggucaacgaggga

SEQ ID NO: 1528253 - RNA, 19 nt, Artificial Sequence
  Description of Artificial Sequence: Synthetic oligonucleotide
ccucuuuucgugcauacaa

SEQ ID NO: 1528254 - RNA, 19 nt, Artificial Sequence
  Description of Artificial Sequence: Synthetic oligonucleotide
cugguacccucuagaucag

SEQ ID NO: 1528255 - RNA, 19 nt, Artificial Sequence
  Description of Artificial Sequence: Synthetic oligonucleotide
gcuuggacucuuuaguaua

SEQ ID NO: 1528256 - RNA, 19 nt, Artificial Sequence
  Description of Artificial Sequence: Synthetic oligonucleotide
ccaaaagauaguaaucuau

SEQ ID NO: 1528257 - RNA, 19 nt, Artificial Sequence
  Description of Artificial Sequence: Synthetic oligonucleotide
gcaagcagugucuguagaa

SEQ ID NO: 1528258 - RNA, 19 nt, Artificial Sequence
  Description of Artificial Sequence: Synthetic oligonucleotide
cagacucccugccugcaca

SEQ ID NO: 1528259 - RNA, 19 nt, Artificial Sequence
  Description of Artificial Sequence: Synthetic oligonucleotide
gcccuacaaccauacauca

SEQ ID NO: 1528260 - RNA, 19 nt, Artificial Sequence
  Description of Artificial Sequence: Synthetic oligonucleotide
cuguggagucagcucacca

SEQ ID NO: 1528261 - RNA, 19 nt, Artificial Sequence
  Description of Artificial Sequence: Synthetic oligonucleotide
gcauccugagacaccacug

SEQ ID NO: 1528262 - RNA, 19 nt, Artificial Sequence
  Description of Artificial Sequence: Synthetic oligonucleotide
aacuuccaauagguuguua

SEQ ID NO: 1528263 - RNA, 19 nt, Artificial Sequence
  Description of Artificial Sequence: Synthetic oligonucleotide
uggccccaguuuuacuuua

SEQ ID NO: 1528264 - RNA, 19 nt, Artificial Sequence
  Description of Artificial Sequence: Synthetic oligonucleotide
guggccaauguccaccuau

SEQ ID NO: 1528265 - RNA, 19 nt, Artificial Sequence
  Description of Artificial Sequence: Synthetic oligonucleotide
gagguacuacacugaaaau

SEQ ID NO: 1528266 - RNA, 19 nt, Artificial Sequence
  Description of Artificial Sequence: Synthetic oligonucleotide
ggaauacagcaaucacaca

SEQ ID NO: 1528267 - RNA, 19 nt, Artificial Sequence
  Description of Artificial Sequence: Synthetic oligonucleotide
cuucugguacccucuagau

SEQ ID NO: 1528268 - RNA, 19 nt, Artificial Sequence
  Description of Artificial Sequence: Synthetic oligonucleotide
cacagacuguucggcacac

SEQ ID NO: 1528269 - RNA, 19 nt, Artificial Sequence
  Description of Artificial Sequence: Synthetic oligonucleotide
gugaccccaaccauaaaau

SEQ ID NO: 1528270 - RNA, 19 nt, Artificial Sequence
  Description of Artificial Sequence: Synthetic oligonucleotide
caaaggcccuacaaccaua

SEQ ID NO: 1528271 - RNA, 19 nt, Artificial Sequence
  Description of Artificial Sequence: Synthetic oligonucleotide
ggcuucugguacccucuag

SEQ ID NO: 1528272 - RNA, 19 nt, Artificial Sequence
  Description of Artificial Sequence: Synthetic oligonucleotide
ccacuuguuaaggcauagg

SEQ ID NO: 1528273 - RNA, 19 nt, Artificial Sequence
  Description of Artificial Sequence: Synthetic oligonucleotide
caguaccaucuuaaugucu

SEQ ID NO: 1528274 - RNA, 19 nt, Artificial Sequence
  Description of Artificial Sequence: Synthetic oligonucleotide
uggugaccccaaccauaaa

SEQ ID NO: 1528275 - RNA, 19 nt, Artificial Sequence
  Description of Artificial Sequence: Synthetic oligonucleotide
ugguacccucuagaucagu

SEQ ID NO: 1528276 - RNA, 19 nt, Artificial Sequence
  Description of Artificial Sequence: Synthetic oligonucleotide
ggucauagguggccaaugu

SEQ ID NO: 1528277 - RNA, 19 nt, Artificial Sequence
  Description of Artificial Sequence: Synthetic oligonucleotide
gcauauucaucaucggguu

SEQ ID NO: 1528278 - RNA, 19 nt, Artificial Sequence
  Description of Artificial Sequence: Synthetic oligonucleotide
ggcguauucuuaucaugua

SEQ ID NO: 1528279 - RNA, 19 nt, Artificial Sequence
  Description of Artificial Sequence: Synthetic oligonucleotide
ggaaagacuuccacggcgu

SEQ ID NO: 1528280 - RNA, 19 nt, Artificial Sequence
  Description of Artificial Sequence: Synthetic oligonucleotide
ggguuggggaggaacaaaa

SEQ ID NO: 1528281 - RNA, 19 nt, Artificial Sequence
  Description of Artificial Sequence: Synthetic oligonucleotide
guuucccauagugaaguuu

SEQ ID NO: 1528282 - RNA, 19 nt, Artificial Sequence
  Description of Artificial Sequence: Synthetic oligonucleotide
cuguguguccaucauucuu

SEQ ID NO: 1528283 - RNA, 19 nt, Artificial Sequence
  Description of Artificial Sequence: Synthetic oligonucleotide
auucucccauuaaggcgcu

SEQ ID NO: 1528284 - RNA, 19 nt, Artificial Sequence
  Description of Artificial Sequence: Synthetic oligonucleotide
gccccaguuuuacuuuaac

SEQ ID NO: 1528285 - RNA, 19 nt, Artificial Sequence
  Description of Artificial Sequence: Synthetic oligonucleotide
gguuggacuuuacgacaga

SEQ ID NO: 1528286 - RNA, 19 nt, Artificial Sequence
  Description of Artificial Sequence: Synthetic oligonucleotide
cagccccuggcaucaccug

SEQ ID NO: 1528287 - RNA, 19 nt, Artificial Sequence
  Description of Artificial Sequence: Synthetic oligonucleotide
cuuccacggcguauucuua

SEQ ID NO: 1528288 - RNA, 19 nt, Artificial Sequence
  Description of Artificial Sequence: Synthetic oligonucleotide
gccaaggcuucugguaccc

SEQ ID NO: 1528289 - RNA, 19 nt, Artificial Sequence
  Description of Artificial Sequence: Synthetic oligonucleotide
gacaucaagcaaggccagu

SEQ ID NO: 1528290 - RNA, 19 nt, Artificial Sequence
  Description of Artificial Sequence: Synthetic oligonucleotide
acccucuagaucagugguu

SEQ ID NO: 1528291 - RNA, 19 nt, Artificial Sequence
  Description of Artificial Sequence: Synthetic oligonucleotide
ucaucccagguuggacuuu

SEQ ID NO: 1528292 - RNA, 19 nt, Artificial Sequence
  Description of Artificial Sequence: Synthetic oligonucleotide
gccucuaucuuugcacaga

SEQ ID NO: 1528293 - RNA, 19 nt, Artificial Sequence
  Description of Artificial Sequence: Synthetic oligonucleotide
cugcacacaugcugaggua

SEQ ID NO: 1528294 - RNA, 19 nt, Artificial Sequence
  Description of Artificial Sequence: Synthetic oligonucleotide
ggucaaugcuauguacucu

SEQ ID NO: 1528295 - RNA, 19 nt, Artificial Sequence
  Description of Artificial Sequence: Synthetic oligonucleotide
cacggcguauucuuaucau

SEQ ID NO: 1528296 - RNA, 19 nt, Artificial Sequence
  Description of Artificial Sequence: Synthetic oligonucleotide
ccacggcguauucuuauca

SEQ ID NO: 1528297 - RNA, 19 nt, Artificial Sequence
  Description of Artificial Sequence: Synthetic oligonucleotide
acuuuacgacagacucccu

SEQ ID NO: 1528298 - RNA, 19 nt, Artificial Sequence
  Description of Artificial Sequence: Synthetic oligonucleotide
cguauucuuaucauguauu

SEQ ID NO: 1528299 - RNA, 19 nt, Artificial Sequence
  Description of Artificial Sequence: Synthetic oligonucleotide
caucaucggguuguucugu

SEQ ID NO: 1528300 - RNA, 19 nt, Artificial Sequence
  Description of Artificial Sequence: Synthetic oligonucleotide
acuguucggcacacagcuu

SEQ ID NO: 1528301 - RNA, 19 nt, Artificial Sequence
  Description of Artificial Sequence: Synthetic oligonucleotide
agcagugguuagacaucaa

SEQ ID NO: 1528302 - RNA, 19 nt, Artificial Sequence
  Description of Artificial Sequence: Synthetic oligonucleotide
cggcguauucuuaucaugu

SEQ ID NO: 1528303 - RNA, 19 nt, Artificial Sequence
  Description of Artificial Sequence: Synthetic oligonucleotide
guucggcacacagcuugaa

SEQ ID NO: 1528304 - RNA, 19 nt, Artificial Sequence
  Description of Artificial Sequence: Synthetic oligonucleotide
uucucccauuaaggcgcuc

SEQ ID NO: 1528305 - RNA, 19 nt, Artificial Sequence
  Description of Artificial Sequence: Synthetic oligonucleotide
ccaccuauccaaaggcccu

SEQ ID NO: 1528306 - RNA, 19 nt, Artificial Sequence
  Description of Artificial Sequence: Synthetic oligonucleotide
ccuauccaaaggcccuaca

SEQ ID NO: 1528307 - RNA, 19 nt, Artificial Sequence
  Description of Artificial Sequence: Synthetic oligonucleotide
caccuauccaaaggcccua

SEQ ID NO: 1528308 - RNA, 19 nt, Artificial Sequence
  Description of Artificial Sequence: Synthetic oligonucleotide
gucagcucaccaagcucgu

SEQ ID NO: 1528309 - RNA, 19 nt, Artificial Sequence
  Description of Artificial Sequence: Synthetic oligonucleotide
ccaaaggcccuacaaccau

SEQ ID NO: 1528310 - RNA, 19 nt, Artificial Sequence
  Description of Artificial Sequence: Synthetic oligonucleotide
ggccccaguuuuacuuuaa

SEQ ID NO: 1528311 - RNA, 19 nt, Artificial Sequence
  Description of Artificial Sequence: Synthetic oligonucleotide
gguggccaauguccaccua

SEQ ID NO: 1528312 - RNA, 19 nt, Artificial Sequence
  Description of Artificial Sequence: Synthetic oligonucleotide
ccgcagacagcaguuuccu

SEQ ID NO: 1528313 - RNA, 19 nt, Artificial Sequence
  Description of Artificial Sequence: Synthetic oligonucleotide
aauauaucagccauggugg

SEQ ID NO: 1528314 - RNA, 19 nt, Artificial Sequence
  Description of Artificial Sequence: Synthetic oligonucleotide
gaauauaucagccauggug

SEQ ID NO: 1528315 - RNA, 19 nt, Artificial Sequence
  Description of Artificial Sequence: Synthetic oligonucleotide
auugguaccacacuuccgc

SEQ ID NO: 1528316 - RNA, 19 nt, Artificial Sequence
  Description of Artificial Sequence: Synthetic oligonucleotide
guuacuggaaucuucacag

SEQ ID NO: 1528317 - RNA, 19 nt, Artificial Sequence
  Description of Artificial Sequence: Synthetic oligonucleotide
acugguauaguauccaagg

SEQ ID NO: 1528318 - RNA, 19 nt, Artificial Sequence
  Description of Artificial Sequence: Synthetic oligonucleotide
agaggaugucuguagaucc

SEQ ID NO: 1528319 - RNA, 19 nt, Artificial Sequence
  Description of Artificial Sequence: Synthetic oligonucleotide
aaaugucuuagagucauac

SEQ ID NO: 1528320 - RNA, 19 nt, Artificial Sequence
  Description of Artificial Sequence: Synthetic oligonucleotide
gaaccaauaaagcacuucc

SEQ ID NO: 1528321 - RNA, 19 nt, Artificial Sequence
  Description of Artificial Sequence: Synthetic oligonucleotide
uuagagucauaccagaccu

SEQ ID NO: 1528322 - RNA, 19 nt, Artificial Sequence
  Description of Artificial Sequence: Synthetic oligonucleotide
aaaccugcgguguaagaac

SEQ ID NO: 1528323 - RNA, 19 nt, Artificial Sequence
  Description of Artificial Sequence: Synthetic oligonucleotide
ugucauuccauaugaagag

SEQ ID NO: 1528324 - RNA, 19 nt, Artificial Sequence
  Description of Artificial Sequence: Synthetic oligonucleotide
cuuccuaaggccuaagacc

SEQ ID NO: 1528325 - RNA, 19 nt, Artificial Sequence
  Description of Artificial Sequence: Synthetic oligonucleotide
auggccgucaucaagauac

SEQ ID NO: 1528326 - RNA, 19 nt, Artificial Sequence
  Description of Artificial Sequence: Synthetic oligonucleotide
uuccauaugaagaggaugu

SEQ ID NO: 1528327 - RNA, 19 nt, Artificial Sequence
  Description of Artificial Sequence: Synthetic oligonucleotide
auaaugacccuucucauca

SEQ ID NO: 1528328 - RNA, 19 nt, Artificial Sequence
  Description of Artificial Sequence: Synthetic oligonucleotide
augucuuagagucauacca

SEQ ID NO: 1528329 - RNA, 19 nt, Artificial Sequence
  Description of Artificial Sequence: Synthetic oligonucleotide
auuggaugaaccaauaaag

SEQ ID NO: 1528330 - RNA, 19 nt, Artificial Sequence
  Description of Artificial Sequence: Synthetic oligonucleotide
aaugacccuucucaucagc

SEQ ID NO: 1528331 - RNA, 19 nt, Artificial Sequence
  Description of Artificial Sequence: Synthetic oligonucleotide
ucuucauaguuccagcggc

SEQ ID NO: 1528332 - RNA, 19 nt, Artificial Sequence
  Description of Artificial Sequence: Synthetic oligonucleotide
uuauugguaccacacuucc

SEQ ID NO: 1528333 - RNA, 19 nt, Artificial Sequence
  Description of Artificial Sequence: Synthetic oligonucleotide
agugcuuagagcaagccgg

SEQ ID NO: 1528334 - RNA, 19 nt, Artificial Sequence
  Description of Artificial Sequence: Synthetic oligonucleotide
aauugccauaaugaacagc

SEQ ID NO: 1528335 - RNA, 19 nt, Artificial Sequence
  Description of Artificial Sequence: Synthetic oligonucleotide
uaagaugagagaccaggcc

SEQ ID NO: 1528336 - RNA, 19 nt, Artificial Sequence
  Description of Artificial Sequence: Synthetic oligonucleotide
cauaugaagaggaugucug

SEQ ID NO: 1528337 - RNA, 19 nt, Artificial Sequence
  Description of Artificial Sequence: Synthetic oligonucleotide
ugucuuagagucauaccag

SEQ ID NO: 1528338 - RNA, 19 nt, Artificial Sequence
  Description of Artificial Sequence: Synthetic oligonucleotide
caugacgucauauggaaug

SEQ ID NO: 1528339 - RNA, 19 nt, Artificial Sequence
  Description of Artificial Sequence: Synthetic oligonucleotide
acaccuguugaucagaaca

SEQ ID NO: 1528340 - RNA, 19 nt, Artificial Sequence
  Description of Artificial Sequence: Synthetic oligonucleotide
agaacaccggaacagaaug

SEQ ID NO: 1528341 - RNA, 19 nt, Artificial Sequence
  Description of Artificial Sequence: Synthetic oligonucleotide
gagucagucauccagccug

SEQ ID NO: 1528342 - RNA, 19 nt, Artificial Sequence
  Description of Artificial Sequence: Synthetic oligonucleotide
acuuccgccucguugaaac

SEQ ID NO: 1528343 - RNA, 19 nt, Artificial Sequence
  Description of Artificial Sequence: Synthetic oligonucleotide
aaagaagcccuguucuuug

SEQ ID NO: 1528344 - RNA, 19 nt, Artificial Sequence
  Description of Artificial Sequence: Synthetic oligonucleotide
ugugcaaaugucuuagagu

SEQ ID NO: 1528345 - RNA, 19 nt, Artificial Sequence
  Description of Artificial Sequence: Synthetic oligonucleotide
accagaccucauuugaccc

SEQ ID NO: 1528346 - RNA, 19 nt, Artificial Sequence
  Description of Artificial Sequence: Synthetic oligonucleotide
gauuggaugaaccaauaaa

SEQ ID NO: 1528347 - RNA, 19 nt, Artificial Sequence
  Description of Artificial Sequence: Synthetic oligonucleotide
aagaggaugucuguagauc

SEQ ID NO: 1528348 - RNA, 19 nt, Artificial Sequence
  Description of Artificial Sequence: Synthetic oligonucleotide
uguaaaagcugcaggcuga

SEQ ID NO: 1528349 - RNA, 19 nt, Artificial Sequence
  Description of Artificial Sequence: Synthetic oligonucleotide
uuuauugguaccacacuuc

SEQ ID NO: 1528350 - RNA, 19 nt, Artificial Sequence
  Description of Artificial Sequence: Synthetic oligonucleotide
uguugaucagaacaccgga

SEQ ID NO: 1528351 - RNA, 19 nt, Artificial Sequence
  Description of Artificial Sequence: Synthetic oligonucleotide
uugaucagaacaccggaac

SEQ ID NO: 1528352 - RNA, 19 nt, Artificial Sequence
  Description of Artificial Sequence: Synthetic oligonucleotide
gaacucgacccacagaggc

SEQ ID NO: 1528353 - RNA, 19 nt, Artificial Sequence
  Description of Artificial Sequence: Synthetic oligonucleotide
caagccggaguccauaugg

SEQ ID NO: 1528354 - RNA, 19 nt, Artificial Sequence
  Description of Artificial Sequence: Synthetic oligonucleotide
aacuuuaccaucagaugag

SEQ ID NO: 1528355 - RNA, 19 nt, Artificial Sequence
  Description of Artificial Sequence: Synthetic oligonucleotide
gaugcuuuagugugguaug

SEQ ID NO: 1528356 - RNA, 19 nt, Artificial Sequence
  Description of Artificial Sequence: Synthetic oligonucleotide
accggaacagaaugaaaac

SEQ ID NO: 1528357 - RNA, 19 nt, Artificial Sequence
  Description of Artificial Sequence: Synthetic oligonucleotide
gguaagaugagagaccagg

SEQ ID NO: 1528358 - RNA, 19 nt, Artificial Sequence
  Description of Artificial Sequence: Synthetic oligonucleotide
uuuugcaugguuagcucug

SEQ ID NO: 1528359 - RNA, 19 nt, Artificial Sequence
  Description of Artificial Sequence: Synthetic oligonucleotide
auaguauccaagguuacug

SEQ ID NO: 1528360 - RNA, 19 nt, Artificial Sequence
  Description of Artificial Sequence: Synthetic oligonucleotide
guagaucccugauacacag

SEQ ID NO: 1528361 - RNA, 19 nt, Artificial Sequence
  Description of Artificial Sequence: Synthetic oligonucleotide
auguaaaagcugcaggcug

SEQ ID NO: 1528362 - RNA, 19 nt, Artificial Sequence
  Description of Artificial Sequence: Synthetic oligonucleotide
uuagugugguauguaaaag

SEQ ID NO: 1528363 - RNA, 19 nt, Artificial Sequence
  Description of Artificial Sequence: Synthetic oligonucleotide
uauugguaccacacuuccg

SEQ ID NO: 1528364 - RNA, 19 nt, Artificial Sequence
  Description of Artificial Sequence: Synthetic oligonucleotide
aaaaggccggaauaccacu

SEQ ID NO: 1528365 - RNA, 19 nt, Artificial Sequence
  Description of Artificial Sequence: Synthetic oligonucleotide
ugcacacgguaaaacagag

SEQ ID NO: 1528366 - RNA, 19 nt, Artificial Sequence
  Description of Artificial Sequence: Synthetic oligonucleotide
gggaacucgacccacagag

SEQ ID NO: 1528367 - RNA, 19 nt, Artificial Sequence
  Description of Artificial Sequence: Synthetic oligonucleotide
aaaaccugcgguguaagaa

SEQ ID NO: 1528368 - RNA, 19 nt, Artificial Sequence
  Description of Artificial Sequence: Synthetic oligonucleotide
cauaacagguucagaagac

SEQ ID NO: 1528369 - RNA, 19 nt, Artificial Sequence
  Description of Artificial Sequence: Synthetic oligonucleotide
gauaaugacccuucucauc

SEQ ID NO: 1528370 - RNA, 19 nt, Artificial Sequence
  Description of Artificial Sequence: Synthetic oligonucleotide
cauagacugaguagucagg

SEQ ID NO: 1528371 - RNA, 19 nt, Artificial Sequence
  Description of Artificial Sequence: Synthetic oligonucleotide
cacacgguaaaacagagaa

SEQ ID NO: 1528372 - RNA, 19 nt, Artificial Sequence
  Description of Artificial Sequence: Synthetic oligonucleotide
uuggugaaauccagguaag

SEQ ID NO: 1528373 - RNA, 19 nt, Artificial Sequence
  Description of Artificial Sequence: Synthetic oligonucleotide
uggcaggaauauaucagcc

SEQ ID NO: 1528374 - RNA, 19 nt, Artificial Sequence
  Description of Artificial Sequence: Synthetic oligonucleotide
augaauggccgucaucaag

SEQ ID NO: 1528375 - RNA, 19 nt, Artificial Sequence
  Description of Artificial Sequence: Synthetic oligonucleotide
ucugauagcuucccggauc

SEQ ID NO: 1528376 - RNA, 19 nt, Artificial Sequence
  Description of Artificial Sequence: Synthetic oligonucleotide
ugcaugguuagcucuggcc

SEQ ID NO: 1528377 - RNA, 19 nt, Artificial Sequence
  Description of Artificial Sequence: Synthetic oligonucleotide
uauccaagguuacuggaau

SEQ ID NO: 1528378 - RNA, 19 nt, Artificial Sequence
  Description of Artificial Sequence: Synthetic oligonucleotide
cucccaauugccauaauga

SEQ ID NO: 1528379 - RNA, 19 nt, Artificial Sequence
  Description of Artificial Sequence: Synthetic oligonucleotide
aggccuaagaccaagauuu

SEQ ID NO: 1528380 - RNA, 19 nt, Artificial Sequence
  Description of Artificial Sequence: Synthetic oligonucleotide
gucauauggaaugccaugc

SEQ ID NO: 1528381 - RNA, 19 nt, Artificial Sequence
  Description of Artificial Sequence: Synthetic oligonucleotide
gaagacugagggcucauuc

SEQ ID NO: 1528382 - RNA, 19 nt, Artificial Sequence
  Description of Artificial Sequence: Synthetic oligonucleotide
cuaagaccaagauuugcuc

SEQ ID NO: 1528383 - RNA, 19 nt, Artificial Sequence
  Description of Artificial Sequence: Synthetic oligonucleotide
auuccauaugaagaggaug

SEQ ID NO: 1528384 - RNA, 19 nt, Artificial Sequence
  Description of Artificial Sequence: Synthetic oligonucleotide
cacugaaagucucuaaguc

SEQ ID NO: 1528385 - RNA, 19 nt, Artificial Sequence
  Description of Artificial Sequence: Synthetic oligonucleotide
aguauccaagguuacugga

SEQ ID NO: 1528386 - RNA, 19 nt, Artificial Sequence
  Description of Artificial Sequence: Synthetic oligonucleotide
aacacugguauaguaucca

SEQ ID NO: 1528387 - RNA, 19 nt, Artificial Sequence
  Description of Artificial Sequence: Synthetic oligonucleotide
aaugaaaaccugcggugua

SEQ ID NO: 1528388 - RNA, 19 nt, Artificial Sequence
  Description of Artificial Sequence: Synthetic oligonucleotide
aaggccuaagaccaagauu

SEQ ID NO: 1528389 - RNA, 19 nt, Artificial Sequence
  Description of Artificial Sequence: Synthetic oligonucleotide
ugauuggaugaaccaauaa

SEQ ID NO: 1528390 - RNA, 19 nt, Artificial Sequence
  Description of Artificial Sequence: Synthetic oligonucleotide
aacucgacccacagaggcc

SEQ ID NO: 1528391 - RNA, 19 nt, Artificial Sequence
  Description of Artificial Sequence: Synthetic oligonucleotide
acggaaaagggcugguaag

SEQ ID NO: 1528392 - RNA, 19 nt, Artificial Sequence
  Description of Artificial Sequence: Synthetic oligonucleotide
ucauaccagaccucauuug

SEQ ID NO: 1528393 - RNA, 19 nt, Artificial Sequence
  Description of Artificial Sequence: Synthetic oligonucleotide
acuggaaugaauggccguc

SEQ ID NO: 1528394 - RNA, 19 nt, Artificial Sequence
  Description of Artificial Sequence: Synthetic oligonucleotide
agugcacccuccuuuccac

SEQ ID NO: 1528395 - RNA, 19 nt, Artificial Sequence
  Description of Artificial Sequence: Synthetic oligonucleotide
agcggguagucacagaaga

SEQ ID NO: 1528396 - RNA, 19 nt, Artificial Sequence
  Description of Artificial Sequence: Synthetic oligonucleotide
ggaugaaccaauaaagcac

SEQ ID NO: 1528397 - RNA, 19 nt, Artificial Sequence
  Description of Artificial Sequence: Synthetic oligonucleotide
guaagaacugguccuggug

SEQ ID NO: 1528398 - RNA, 19 nt, Artificial Sequence
  Description of Artificial Sequence: Synthetic oligonucleotide
guucagaagacaugugcac

SEQ ID NO: 1528399 - RNA, 19 nt, Artificial Sequence
  Description of Artificial Sequence: Synthetic oligonucleotide
auauggaaugccaugcuca

SEQ ID NO: 1528400 - RNA, 19 nt, Artificial Sequence
  Description of Artificial Sequence: Synthetic oligonucleotide
uauaguauccaagguuacu

SEQ ID NO: 1528401 - RNA, 19 nt, Artificial Sequence
  Description of Artificial Sequence: Synthetic oligonucleotide
aaaggccggaauaccacuc

SEQ ID NO: 1528402 - RNA, 19 nt, Artificial Sequence
  Description of Artificial Sequence: Synthetic oligonucleotide
agcguggccacggaaaagg

SEQ ID NO: 1528403 - RNA, 19 nt, Artificial Sequence
  Description of Artificial Sequence: Synthetic oligonucleotide
ugcucuauguccagccaca

SEQ ID NO: 1528404 - RNA, 19 nt, Artificial Sequence
  Description of Artificial Sequence: Synthetic oligonucleotide
gguacuggaaugaauggcc

SEQ ID NO: 1528405 - RNA, 19 nt, Artificial Sequence
  Description of Artificial Sequence: Synthetic oligonucleotide
guaccaacgauguugugaa

SEQ ID NO: 1528406 - RNA, 19 nt, Artificial Sequence
  Description of Artificial Sequence: Synthetic oligonucleotide
uccugaguagcucuugcau

SEQ ID NO: 1528407 - RNA, 19 nt, Artificial Sequence
  Description of Artificial Sequence: Synthetic oligonucleotide
uuugcaugguuagcucugg

SEQ ID NO: 1528408 - RNA, 19 nt, Artificial Sequence
  Description of Artificial Sequence: Synthetic oligonucleotide
gaggccucauaacagguuc

SEQ ID NO: 1528409 - RNA, 19 nt, Artificial Sequence
  Description of Artificial Sequence: Synthetic oligonucleotide
ucccaauugccauaaugaa

SEQ ID NO: 1528410 - RNA, 19 nt, Artificial Sequence
  Description of Artificial Sequence: Synthetic oligonucleotide
cauaccagaccucauuuga

SEQ ID NO: 1528411 - RNA, 19 nt, Artificial Sequence
  Description of Artificial Sequence: Synthetic oligonucleotide
agccgaguguauucuuccc

SEQ ID NO: 1528412 - RNA, 19 nt, Artificial Sequence
  Description of Artificial Sequence: Synthetic oligonucleotide
agagucauaccagaccuca

SEQ ID NO: 1528413 - RNA, 19 nt, Artificial Sequence
  Description of Artificial Sequence: Synthetic oligonucleotide
uaaggccuaagaccaagau

SEQ ID NO: 1528414 - RNA, 19 nt, Artificial Sequence
  Description of Artificial Sequence: Synthetic oligonucleotide
cacgguaaaacagagaaua

SEQ ID NO: 1528415 - RNA, 19 nt, Artificial Sequence
  Description of Artificial Sequence: Synthetic oligonucleotide
aacaccggaacagaaugaa

SEQ ID NO: 1528416 - RNA, 19 nt, Artificial Sequence
  Description of Artificial Sequence: Synthetic oligonucleotide
ucccugauacacaggaaaa

SEQ ID NO: 1528417 - RNA, 19 nt, Artificial Sequence
  Description of Artificial Sequence: Synthetic oligonucleotide
ugaaaaccugcgguguaag

SEQ ID NO: 1528418 - RNA, 19 nt, Artificial Sequence
  Description of Artificial Sequence: Synthetic oligonucleotide
caccuguugaucagaacac

SEQ ID NO: 1528419 - RNA, 19 nt, Artificial Sequence
  Description of Artificial Sequence: Synthetic oligonucleotide
gauacagcucucccucagc

SEQ ID NO: 1528420 - RNA, 19 nt, Artificial Sequence
  Description of Artificial Sequence: Synthetic oligonucleotide
aauaccacucucugaccuu

SEQ ID NO: 1528421 - RNA, 19 nt, Artificial Sequence
  Description of Artificial Sequence: Synthetic oligonucleotide
guaagaugagagaccaggc

SEQ ID NO: 1528422 - RNA, 19 nt, Artificial Sequence
  Description of Artificial Sequence: Synthetic oligonucleotide
ugguggagguacuggaaug

SEQ ID NO: 1528423 - RNA, 19 nt, Artificial Sequence
  Description of Artificial Sequence: Synthetic oligonucleotide
aagauacagcucucccuca

SEQ ID NO: 1528424 - RNA, 19 nt, Artificial Sequence
  Description of Artificial Sequence: Synthetic oligonucleotide
uauggaaugccaugcucau

SEQ ID NO: 1528425 - RNA, 19 nt, Artificial Sequence
  Description of Artificial Sequence: Synthetic oligonucleotide
guacuggaaugaauggccg

SEQ ID NO: 1528426 - RNA, 19 nt, Artificial Sequence
  Description of Artificial Sequence: Synthetic oligonucleotide
gcaugguuagcucuggccc

SEQ ID NO: 1528427 - RNA, 19 nt, Artificial Sequence
  Description of Artificial Sequence: Synthetic oligonucleotide
ggguagucacagaagaugg

SEQ ID NO: 1528428 - RNA, 19 nt, Artificial Sequence
  Description of Artificial Sequence: Synthetic oligonucleotide
aucgguaaugcugagggaa

SEQ ID NO: 1528429 - RNA, 19 nt, Artificial Sequence
  Description of Artificial Sequence: Synthetic oligonucleotide
gaccaggccaacauacucc

SEQ ID NO: 1528430 - RNA, 19 nt, Artificial Sequence
  Description of Artificial Sequence: Synthetic oligonucleotide
accaacgauguugugaagu

SEQ ID NO: 1528431 - RNA, 19 nt, Artificial Sequence
  Description of Artificial Sequence: Synthetic oligonucleotide
aaggccggaauaccacucu

SEQ ID NO: 1528432 - RNA, 19 nt, Artificial Sequence
  Description of Artificial Sequence: Synthetic oligonucleotide
cugaacuuuaccaucagau

SEQ ID NO: 1528433 - RNA, 19 nt, Artificial Sequence
  Description of Artificial Sequence: Synthetic oligonucleotide
gaugucuguagaucccuga

SEQ ID NO: 1528434 - RNA, 19 nt, Artificial Sequence
  Description of Artificial Sequence: Synthetic oligonucleotide
caaagucgccaccuucugg

SEQ ID NO: 1528435 - RNA, 19 nt, Artificial Sequence
  Description of Artificial Sequence: Synthetic oligonucleotide
auaccagaccucauuugac

SEQ ID NO: 1528436 - RNA, 19 nt, Artificial Sequence
  Description of Artificial Sequence: Synthetic oligonucleotide
agccacaugacgucauaug

SEQ ID NO: 1528437 - RNA, 19 nt, Artificial Sequence
  Description of Artificial Sequence: Synthetic oligonucleotide
cacuggucuuuauugguac

SEQ ID NO: 1528438 - RNA, 19 nt, Artificial Sequence
  Description of Artificial Sequence: Synthetic oligonucleotide
acgguaaaacagagaauac

SEQ ID NO: 1528439 - RNA, 19 nt, Artificial Sequence
  Description of Artificial Sequence: Synthetic oligonucleotide
caggccaacauacuccuuc

SEQ ID NO: 1528440 - RNA, 19 nt, Artificial Sequence
  Description of Artificial Sequence: Synthetic oligonucleotide
uaugcacuugcugggauaa

SEQ ID NO: 1528441 - RNA, 19 nt, Artificial Sequence
  Description of Artificial Sequence: Synthetic oligonucleotide
agcacuucccagcauguau

SEQ ID NO: 1528442 - RNA, 19 nt, Artificial Sequence
  Description of Artificial Sequence: Synthetic oligonucleotide
uguucaugguagcguggcc

SEQ ID NO: 1528443 - RNA, 19 nt, Artificial Sequence
  Description of Artificial Sequence: Synthetic oligonucleotide
caccggaacagaaugaaaa

SEQ ID NO: 1528444 - RNA, 19 nt, Artificial Sequence
  Description of Artificial Sequence: Synthetic oligonucleotide
ucauuugacccuggcagga

SEQ ID NO: 1528445 - RNA, 19 nt, Artificial Sequence
  Description of Artificial Sequence: Synthetic oligonucleotide
uccauauggggagucaguc

SEQ ID NO: 1528446 - RNA, 19 nt, Artificial Sequence
  Description of Artificial Sequence: Synthetic oligonucleotide
ugagugcuuagagcaagcc

SEQ ID NO: 1528447 - RNA, 19 nt, Artificial Sequence
  Description of Artificial Sequence: Synthetic oligonucleotide
ugucuguagaucccugaua

SEQ ID NO: 1528448 - RNA, 19 nt, Artificial Sequence
  Description of Artificial Sequence: Synthetic oligonucleotide
agucauaccagaccucauu

SEQ ID NO: 1528449 - RNA, 19 nt, Artificial Sequence
  Description of Artificial Sequence: Synthetic oligonucleotide
caugguagcguggccacgg

SEQ ID NO: 1528450 - RNA, 19 nt, Artificial Sequence
  Description of Artificial Sequence: Synthetic oligonucleotide
cacacuuccgccucguuga

SEQ ID NO: 1528451 - RNA, 19 nt, Artificial Sequence
  Description of Artificial Sequence: Synthetic oligonucleotide
gugugcucuauguccagcc

SEQ ID NO: 1528452 - RNA, 19 nt, Artificial Sequence
  Description of Artificial Sequence: Synthetic oligonucleotide
ugugaaguucccugugcuc

SEQ ID NO: 1528453 - RNA, 19 nt, Artificial Sequence
  Description of Artificial Sequence: Synthetic oligonucleotide
cagucaucgguaaugcuga

SEQ ID NO: 1528454 - RNA, 19 nt, Artificial Sequence
  Description of Artificial Sequence: Synthetic oligonucleotide
caucaagauacagcucucc

SEQ ID NO: 1528455 - RNA, 19 nt, Artificial Sequence
  Description of Artificial Sequence: Synthetic oligonucleotide
uaaugcugagggaaagcuu

SEQ ID NO: 1528456 - RNA, 19 nt, Artificial Sequence
  Description of Artificial Sequence: Synthetic oligonucleotide
accaggccaacauacuccu

SEQ ID NO: 1528457 - RNA, 19 nt, Artificial Sequence
  Description of Artificial Sequence: Synthetic oligonucleotide
gcugguaagcuccagccug

SEQ ID NO: 1528458 - RNA, 19 nt, Artificial Sequence
  Description of Artificial Sequence: Synthetic oligonucleotide
agggccgaugcuuuagugu

SEQ ID NO: 1528459 - RNA, 19 nt, Artificial Sequence
  Description of Artificial Sequence: Synthetic oligonucleotide
cacaugacgucauauggaa

SEQ ID NO: 1528460 - RNA, 19 nt, Artificial Sequence
  Description of Artificial Sequence: Synthetic oligonucleotide
uacuggaaugaauggccgu

SEQ ID NO: 1528461 - RNA, 19 nt, Artificial Sequence
  Description of Artificial Sequence: Synthetic oligonucleotide
gucuuagagucauaccaga

SEQ ID NO: 1528462 - RNA, 19 nt, Artificial Sequence
  Description of Artificial Sequence: Synthetic oligonucleotide
uuagggccgaugcuuuagu

SEQ ID NO: 1528463 - RNA, 19 nt, Artificial Sequence
  Description of Artificial Sequence: Synthetic oligonucleotide
caauugccauaaugaacag

SEQ ID NO: 1528464 - RNA, 19 nt, Artificial Sequence
  Description of Artificial Sequence: Synthetic oligonucleotide
auccagguaagaugagaga

SEQ ID NO: 1528465 - RNA, 19 nt, Artificial Sequence
  Description of Artificial Sequence: Synthetic oligonucleotide
aguccauauggggagucag

SEQ ID NO: 1528466 - RNA, 19 nt, Artificial Sequence
  Description of Artificial Sequence: Synthetic oligonucleotide
ucccggaucagccgagugu

SEQ ID NO: 1528467 - RNA, 19 nt, Artificial Sequence
  Description of Artificial Sequence: Synthetic oligonucleotide
accucauuugacccuggca

SEQ ID NO: 1528468 - RNA, 19 nt, Artificial Sequence
  Description of Artificial Sequence: Synthetic oligonucleotide
aagccggaguccauauggg

SEQ ID NO: 1528469 - RNA, 19 nt, Artificial Sequence
  Description of Artificial Sequence: Synthetic oligonucleotide
gucucuaagucaucaggga

SEQ ID NO: 1528470 - RNA, 19 nt, Artificial Sequence
  Description of Artificial Sequence: Synthetic oligonucleotide
ugaaagucucuaagucauc

SEQ ID NO: 1528471 - RNA, 19 nt, Artificial Sequence
  Description of Artificial Sequence: Synthetic oligonucleotide
gauuggugaaauccaggua

SEQ ID NO: 1528472 - RNA, 19 nt, Artificial Sequence
  Description of Artificial Sequence: Synthetic oligonucleotide
aucagaugagcggguaguc

SEQ ID NO: 1528473 - RNA, 19 nt, Artificial Sequence
  Description of Artificial Sequence: Synthetic oligonucleotide
uggagguacuggaaugaau

SEQ ID NO: 1528474 - RNA, 19 nt, Artificial Sequence
  Description of Artificial Sequence: Synthetic oligonucleotide
uagcuucccggaucagccg

SEQ ID NO: 1528475 - RNA, 19 nt, Artificial Sequence
  Description of Artificial Sequence: Synthetic oligonucleotide
gaaaaccugcgguguaaga

SEQ ID NO: 1528476 - RNA, 19 nt, Artificial Sequence
  Description of Artificial Sequence: Synthetic oligonucleotide
cagguaagaugagagacca

SEQ ID NO: 1528477 - RNA, 19 nt, Artificial Sequence
  Description of Artificial Sequence: Synthetic oligonucleotide
gguaccaacgauguuguga

SEQ ID NO: 1528478 - RNA, 19 nt, Artificial Sequence
  Description of Artificial Sequence: Synthetic oligonucleotide
ucccagucaucgguaaugc

SEQ ID NO: 1528479 - RNA, 19 nt, Artificial Sequence
  Description of Artificial Sequence: Synthetic oligonucleotide
cccaauugccauaaugaac

SEQ ID NO: 1528480 - RNA, 19 nt, Artificial Sequence
  Description of Artificial Sequence: Synthetic oligonucleotide
gucaucgguaaugcugagg

SEQ ID NO: 1528481 - RNA, 19 nt, Artificial Sequence
  Description of Artificial Sequence: Synthetic oligonucleotide
ugacgucauauggaaugcc

SEQ ID NO: 1528482 - RNA, 19 nt, Artificial Sequence
  Description of Artificial Sequence: Synthetic oligonucleotide
uugcaugguuagcucuggc

SEQ ID NO: 1528483 - RNA, 19 nt, Artificial Sequence
  Description of Artificial Sequence: Synthetic oligonucleotide
uccgccucguugaaacacu

SEQ ID NO: 1528484 - RNA, 19 nt, Artificial Sequence
  Description of Artificial Sequence: Synthetic oligonucleotide
cuuagggccgaugcuuuag

SEQ ID NO: 1528485 - RNA, 19 nt, Artificial Sequence
  Description of Artificial Sequence: Synthetic oligonucleotide
ccagacuuagggccgaugc

SEQ ID NO: 1528486 - RNA, 19 nt, Artificial Sequence
  Description of Artificial Sequence: Synthetic oligonucleotide
guucaugguagcguggcca

SEQ ID NO: 1528487 - RNA, 19 nt, Artificial Sequence
  Description of Artificial Sequence: Synthetic oligonucleotide
gcucccaauugccauaaug

SEQ ID NO: 1528488 - RNA, 19 nt, Artificial Sequence
  Description of Artificial Sequence: Synthetic oligonucleotide
auaccacucucugaccuug

SEQ ID NO: 1528489 - RNA, 19 nt, Artificial Sequence
  Description of Artificial Sequence: Synthetic oligonucleotide
uagggccgaugcuuuagug

SEQ ID NO: 1528490 - RNA, 19 nt, Artificial Sequence
  Description of Artificial Sequence: Synthetic oligonucleotide
gggccgaugcuuuagugug

SEQ ID NO: 1528491 - RNA, 19 nt, Artificial Sequence
  Description of Artificial Sequence: Synthetic oligonucleotide
cucguugaaacacugguau

SEQ ID NO: 1528492 - RNA, 19 nt, Artificial Sequence
  Description of Artificial Sequence: Synthetic oligonucleotide
guguucaugguagcguggc

SEQ ID NO: 1528493 - RNA, 19 nt, Artificial Sequence
  Description of Artificial Sequence: Synthetic oligonucleotide
uggcauagacugaguaguc

SEQ ID NO: 1528494 - RNA, 19 nt, Artificial Sequence
  Description of Artificial Sequence: Synthetic oligonucleotide
cagaagacaugugcacacg

SEQ ID NO: 1528495 - RNA, 19 nt, Artificial Sequence
  Description of Artificial Sequence: Synthetic oligonucleotide
aggccggaauaccacucuc

SEQ ID NO: 1528496 - RNA, 19 nt, Artificial Sequence
  Description of Artificial Sequence: Synthetic oligonucleotide
aauggccgucaucaagaua

SEQ ID NO: 1528497 - RNA, 19 nt, Artificial Sequence
  Description of Artificial Sequence: Synthetic oligonucleotide
gaaugaaaaccugcggugu

SEQ ID NO: 1528498 - RNA, 19 nt, Artificial Sequence
  Description of Artificial Sequence: Synthetic oligonucleotide
acuaugcacuugcugggau

SEQ ID NO: 1528499 - RNA, 19 nt, Artificial Sequence
  Description of Artificial Sequence: Synthetic oligonucleotide
ugucccaggugaaguauuu

SEQ ID NO: 1528500 - RNA, 19 nt, Artificial Sequence
  Description of Artificial Sequence: Synthetic oligonucleotide
acacugguauaguauccaa

SEQ ID NO: 1528501 - RNA, 19 nt, Artificial Sequence
  Description of Artificial Sequence: Synthetic oligonucleotide
guauaguauccaagguuac

SEQ ID NO: 1528502 - RNA, 19 nt, Artificial Sequence
  Description of Artificial Sequence: Synthetic oligonucleotide
acucgacccacagaggccu

SEQ ID NO: 1528503 - RNA, 19 nt, Artificial Sequence
  Description of Artificial Sequence: Synthetic oligonucleotide
uuccgccucguugaaacac

SEQ ID NO: 1528504 - RNA, 19 nt, Artificial Sequence
  Description of Artificial Sequence: Synthetic oligonucleotide
gaccucauuugacccuggc

SEQ ID NO: 1528505 - RNA, 19 nt, Artificial Sequence
  Description of Artificial Sequence: Synthetic oligonucleotide
ucguugaaacacugguaua

SEQ ID NO: 1528506 - RNA, 19 nt, Artificial Sequence
  Description of Artificial Sequence: Synthetic oligonucleotide
uggugaaauccagguaaga

SEQ ID NO: 1528507 - RNA, 19 nt, Artificial Sequence
  Description of Artificial Sequence: Synthetic oligonucleotide
guagcucuugcauucuucu

SEQ ID NO: 1528508 - RNA, 19 nt, Artificial Sequence
  Description of Artificial Sequence: Synthetic oligonucleotide
cuucauaguuccagcggca

SEQ ID NO: 1528509 - RNA, 19 nt, Artificial Sequence
  Description of Artificial Sequence: Synthetic oligonucleotide
agacuuagggccgaugcuu

SEQ ID NO: 1528510 - RNA, 19 nt, Artificial Sequence
  Description of Artificial Sequence: Synthetic oligonucleotide
uucccggaucagccgagug

SEQ ID NO: 1528511 - RNA, 19 nt, Artificial Sequence
  Description of Artificial Sequence: Synthetic oligonucleotide
guaaugcugagggaaagcu

SEQ ID NO: 1528512 - RNA, 19 nt, Artificial Sequence
  Description of Artificial Sequence: Synthetic oligonucleotide
gaagaggaugucuguagau

SEQ ID NO: 1528513 - RNA, 19 nt, Artificial Sequence
  Description of Artificial Sequence: Synthetic oligonucleotide
ggauuggugaaauccaggu

SEQ ID NO: 1528514 - RNA, 19 nt, Artificial Sequence
  Description of Artificial Sequence: Synthetic oligonucleotide
cacggaaaagggcugguaa

SEQ ID NO: 1528515 - RNA, 19 nt, Artificial Sequence
  Description of Artificial Sequence: Synthetic oligonucleotide
uaccaucagaugagcgggu

SEQ ID NO: 1528516 - RNA, 19 nt, Artificial Sequence
  Description of Artificial Sequence: Synthetic oligonucleotide
cauauggggagucagucau

SEQ ID NO: 1528517 - RNA, 19 nt, Artificial Sequence
  Description of Artificial Sequence: Synthetic oligonucleotide
uccauaugaagaggauguc

SEQ ID NO: 1528518 - RNA, 19 nt, Artificial Sequence
  Description of Artificial Sequence: Synthetic oligonucleotide
agacaugugcacacgguaa

SEQ ID NO: 1528519 - RNA, 19 nt, Artificial Sequence
  Description of Artificial Sequence: Synthetic oligonucleotide
agucaucgguaaugcugag

SEQ ID NO: 1528520 - RNA, 19 nt, Artificial Sequence
  Description of Artificial Sequence: Synthetic oligonucleotide
gaacaccggaacagaauga

SEQ ID NO: 1528521 - RNA, 19 nt, Artificial Sequence
  Description of Artificial Sequence: Synthetic oligonucleotide
uugucccaggugaaguauu

SEQ ID NO: 1528522 - RNA, 19 nt, Artificial Sequence
  Description of Artificial Sequence: Synthetic oligonucleotide
cuaaggccuaagaccaaga

SEQ ID NO: 1528523 - RNA, 19 nt, Artificial Sequence
  Description of Artificial Sequence: Synthetic oligonucleotide
ggcaggaauauaucagcca

SEQ ID NO: 1528524 - RNA, 19 nt, Artificial Sequence
  Description of Artificial Sequence: Synthetic oligonucleotide
uggugguaccccagggaaa

SEQ ID NO: 1528525 - RNA, 19 nt, Artificial Sequence
  Description of Artificial Sequence: Synthetic oligonucleotide
augguuagcucuggcccuc

SEQ ID NO: 1528526 - RNA, 19 nt, Artificial Sequence
  Description of Artificial Sequence: Synthetic oligonucleotide
auaggguaggaggguguag

SEQ ID NO: 1528527 - RNA, 19 nt, Artificial Sequence
  Description of Artificial Sequence: Synthetic oligonucleotide
cagaccucauuugacccug

SEQ ID NO: 1528528 - RNA, 19 nt, Artificial Sequence
  Description of Artificial Sequence: Synthetic oligonucleotide
uaaccacaagcuugcguuu

SEQ ID NO: 1528529 - RNA, 19 nt, Artificial Sequence
  Description of Artificial Sequence: Synthetic oligonucleotide
ggguucucgacgcuuggug

SEQ ID NO: 1528530 - RNA, 19 nt, Artificial Sequence
  Description of Artificial Sequence: Synthetic oligonucleotide
ugaguagcucuugcauucu

SEQ ID NO: 1528531 - RNA, 19 nt, Artificial Sequence
  Description of Artificial Sequence: Synthetic oligonucleotide
uaccaacgauguugugaag

SEQ ID NO: 1528532 - RNA, 19 nt, Artificial Sequence
  Description of Artificial Sequence: Synthetic oligonucleotide
cagguucagaagacaugug

SEQ ID NO: 1528533 - RNA, 19 nt, Artificial Sequence
  Description of Artificial Sequence: Synthetic oligonucleotide
gccgucaucaagauacagc

SEQ ID NO: 1528534 - RNA, 19 nt, Artificial Sequence
  Description of Artificial Sequence: Synthetic oligonucleotide
guugaucagaacaccggaa

SEQ ID NO: 1528535 - RNA, 19 nt, Artificial Sequence
  Description of Artificial Sequence: Synthetic oligonucleotide
aaccacaagcuugcguuuu

SEQ ID NO: 1528536 - RNA, 19 nt, Artificial Sequence
  Description of Artificial Sequence: Synthetic oligonucleotide
agcaagccggaguccauau

SEQ ID NO: 1528537 - RNA, 19 nt, Artificial Sequence
  Description of Artificial Sequence: Synthetic oligonucleotide
gagcggguagucacagaag

SEQ ID NO: 1528538 - RNA, 19 nt, Artificial Sequence
  Description of Artificial Sequence: Synthetic oligonucleotide
gccgaguguauucuucccc

SEQ ID NO: 1528539 - RNA, 19 nt, Artificial Sequence
  Description of Artificial Sequence: Synthetic oligonucleotide
agggaacucgacccacaga

SEQ ID NO: 1528540 - RNA, 19 nt, Artificial Sequence
  Description of Artificial Sequence: Synthetic oligonucleotide
gguaggaggguguagcgcu

SEQ ID NO: 1528541 - RNA, 19 nt, Artificial Sequence
  Description of Artificial Sequence: Synthetic oligonucleotide
gccggaauaccacucucug

SEQ ID NO: 1528542 - RNA, 19 nt, Artificial Sequence
  Description of Artificial Sequence: Synthetic oligonucleotide
ugcuuuagugugguaugua

SEQ ID NO: 1528543 - RNA, 19 nt, Artificial Sequence
  Description of Artificial Sequence: Synthetic oligonucleotide
guagcguggccacggaaaa

SEQ ID NO: 1528544 - RNA, 19 nt, Artificial Sequence
  Description of Artificial Sequence: Synthetic oligonucleotide
ucugggguuugcgaaccuc

SEQ ID NO: 1528545 - RNA, 19 nt, Artificial Sequence
  Description of Artificial Sequence: Synthetic oligonucleotide
aggguguagcgcucucuga

SEQ ID NO: 1528546 - RNA, 19 nt, Artificial Sequence
  Description of Artificial Sequence: Synthetic oligonucleotide
ccggaguccauauggggag

SEQ ID NO: 1528547 - RNA, 19 nt, Artificial Sequence
  Description of Artificial Sequence: Synthetic oligonucleotide
ucgacgcuugguguucaug

SEQ ID NO: 1528548 - RNA, 19 nt, Artificial Sequence
  Description of Artificial Sequence: Synthetic oligonucleotide
caggguucucgacgcuugg

SEQ ID NO: 1528549 - RNA, 19 nt, Artificial Sequence
  Description of Artificial Sequence: Synthetic oligonucleotide
gguguucaugguagcgugg

SEQ ID NO: 1528550 - RNA, 19 nt, Artificial Sequence
  Description of Artificial Sequence: Synthetic oligonucleotide
ugguagcguggccacggaa

SEQ ID NO: 1528551 - RNA, 19 nt, Artificial Sequence
  Description of Artificial Sequence: Synthetic oligonucleotide
uggccgucaucaagauaca

SEQ ID NO: 1528552 - RNA, 19 nt, Artificial Sequence
  Description of Artificial Sequence: Synthetic oligonucleotide
uaucagccaugguggucug

SEQ ID NO: 1528553 - RNA, 19 nt, Artificial Sequence
  Description of Artificial Sequence: Synthetic oligonucleotide
acgucauauggaaugccau

SEQ ID NO: 1528554 - RNA, 19 nt, Artificial Sequence
  Description of Artificial Sequence: Synthetic oligonucleotide
gucauaccagaccucauuu

SEQ ID NO: 1528555 - RNA, 19 nt, Artificial Sequence
  Description of Artificial Sequence: Synthetic oligonucleotide
ugcugggauaaugacccuu

SEQ ID NO: 1528556 - RNA, 19 nt, Artificial Sequence
  Description of Artificial Sequence: Synthetic oligonucleotide
uagcguggccacggaaaag

SEQ ID NO: 1528557 - RNA, 19 nt, Artificial Sequence
  Description of Artificial Sequence: Synthetic oligonucleotide
uucucgacgcuugguguuc

SEQ ID NO: 1528558 - RNA, 19 nt, Artificial Sequence
  Description of Artificial Sequence: Synthetic oligonucleotide
uucugggguuugcgaaccu

SEQ ID NO: 1528559 - RNA, 19 nt, Artificial Sequence
  Description of Artificial Sequence: Synthetic oligonucleotide
ucuccagacuuagggccga

SEQ ID NO: 1528560 - RNA, 19 nt, Artificial Sequence
  Description of Artificial Sequence: Synthetic oligonucleotide
ccugcgguguaagaacugg

SEQ ID NO: 1528561 - RNA, 19 nt, Artificial Sequence
  Description of Artificial Sequence: Synthetic oligonucleotide
ccuaagaccaagauuugcu

SEQ ID NO: 1528562 - RNA, 19 nt, Artificial Sequence
  Description of Artificial Sequence: Synthetic oligonucleotide
acccuggcaggaauauauc

SEQ ID NO: 1528563 - RNA, 19 nt, Artificial Sequence
  Description of Artificial Sequence: Synthetic oligonucleotide
uccagacuuagggccgaug

SEQ ID NO: 1528564 - RNA, 19 nt, Artificial Sequence
  Description of Artificial Sequence: Synthetic oligonucleotide
ccgucaucaagauacagcu

SEQ ID NO: 1528565 - RNA, 19 nt, Artificial Sequence
  Description of Artificial Sequence: Synthetic oligonucleotide
gccaacauacuccuucaaa

SEQ ID NO: 1528566 - RNA, 19 nt, Artificial Sequence
  Description of Artificial Sequence: Synthetic oligonucleotide
ggaacucgacccacagagg

SEQ ID NO: 1528567 - RNA, 19 nt, Artificial Sequence
  Description of Artificial Sequence: Synthetic oligonucleotide
gccuaagaccaagauuugc

SEQ ID NO: 1528568 - RNA, 19 nt, Artificial Sequence
  Description of Artificial Sequence: Synthetic oligonucleotide
ugguaccaacgauguugug

SEQ ID NO: 1528569 - RNA, 19 nt, Artificial Sequence
  Description of Artificial Sequence: Synthetic oligonucleotide
cuaugcacuugcugggaua

SEQ ID NO: 1528570 - RNA, 19 nt, Artificial Sequence
  Description of Artificial Sequence: Synthetic oligonucleotide
cccugauacacaggaaaag

SEQ ID NO: 1528571 - RNA, 19 nt, Artificial Sequence
  Description of Artificial Sequence: Synthetic oligonucleotide
cccucugaagacugagggc

SEQ ID NO: 1528572 - RNA, 19 nt, Artificial Sequence
  Description of Artificial Sequence: Synthetic oligonucleotide
ccuaaggccuaagaccaag

SEQ ID NO: 1528573 - RNA, 19 nt, Artificial Sequence
  Description of Artificial Sequence: Synthetic oligonucleotide
uuguccucagugugcucua

SEQ ID NO: 1528574 - RNA, 19 nt, Artificial Sequence
  Description of Artificial Sequence: Synthetic oligonucleotide
aucagccgaguguauucuu

SEQ ID NO: 1528575 - RNA, 19 nt, Artificial Sequence
  Description of Artificial Sequence: Synthetic oligonucleotide
ucucgacgcuugguguuca

SEQ ID NO: 1528576 - RNA, 19 nt, Artificial Sequence
  Description of Artificial Sequence: Synthetic oligonucleotide
acacgguaaaacagagaau

SEQ ID NO: 1528577 - RNA, 19 nt, Artificial Sequence
  Description of Artificial Sequence: Synthetic oligonucleotide
cagugcacccuccuuucca

SEQ ID NO: 1528578 - RNA, 19 nt, Artificial Sequence
  Description of Artificial Sequence: Synthetic oligonucleotide
gaguccauauggggaguca

SEQ ID NO: 1528579 - RNA, 19 nt, Artificial Sequence
  Description of Artificial Sequence: Synthetic oligonucleotide
gaucagccgaguguauucu

SEQ ID NO: 1528580 - RNA, 19 nt, Artificial Sequence
  Description of Artificial Sequence: Synthetic oligonucleotide
agguaagaugagagaccag

SEQ ID NO: 1528581 - RNA, 19 nt, Artificial Sequence
  Description of Artificial Sequence: Synthetic oligonucleotide
cauuccauaugaagaggau

SEQ ID NO: 1528582 - RNA, 19 nt, Artificial Sequence
  Description of Artificial Sequence: Synthetic oligonucleotide
ccacaugacgucauaugga

SEQ ID NO: 1528583 - RNA, 19 nt, Artificial Sequence
  Description of Artificial Sequence: Synthetic oligonucleotide
acuuagggccgaugcuuua

SEQ ID NO: 1528584 - RNA, 19 nt, Artificial Sequence
  Description of Artificial Sequence: Synthetic oligonucleotide
ccacacuuccgccucguug

SEQ ID NO: 1528585 - RNA, 19 nt, Artificial Sequence
  Description of Artificial Sequence: Synthetic oligonucleotide
ggugguaccccagggaaaa

SEQ ID NO: 1528586 - RNA, 19 nt, Artificial Sequence
  Description of Artificial Sequence: Synthetic oligonucleotide
caucgguaaugcugaggga

SEQ ID NO: 1528587 - RNA, 19 nt, Artificial Sequence
  Description of Artificial Sequence: Synthetic oligonucleotide
acaugacgucauauggaau

SEQ ID NO: 1528588 - RNA, 19 nt, Artificial Sequence
  Description of Artificial Sequence: Synthetic oligonucleotide
cacccuccuuuccacugug

SEQ ID NO: 1528589 - RNA, 19 nt, Artificial Sequence
  Description of Artificial Sequence: Synthetic oligonucleotide
ccagccuguggacuugccc

SEQ ID NO: 1528590 - RNA, 19 nt, Artificial Sequence
  Description of Artificial Sequence: Synthetic oligonucleotide
augguagcguggccacgga

SEQ ID NO: 1528591 - RNA, 19 nt, Artificial Sequence
  Description of Artificial Sequence: Synthetic oligonucleotide
gccucguugaaacacuggu

SEQ ID NO: 1528592 - RNA, 19 nt, Artificial Sequence
  Description of Artificial Sequence: Synthetic oligonucleotide
gaauggccgucaucaagau

SEQ ID NO: 1528593 - RNA, 19 nt, Artificial Sequence
  Description of Artificial Sequence: Synthetic oligonucleotide
ggauaaugacccuucucau

SEQ ID NO: 1528594 - RNA, 19 nt, Artificial Sequence
  Description of Artificial Sequence: Synthetic oligonucleotide
gaccuugggauuggugaaa

SEQ ID NO: 1528595 - RNA, 19 nt, Artificial Sequence
  Description of Artificial Sequence: Synthetic oligonucleotide
agaccucauuugacccugg

SEQ ID NO: 1528596 - RNA, 19 nt, Artificial Sequence
  Description of Artificial Sequence: Synthetic oligonucleotide
uccagcggcacugguggua

SEQ ID NO: 1528597 - RNA, 19 nt, Artificial Sequence
  Description of Artificial Sequence: Synthetic oligonucleotide
gcuuagagcaagccggagu

SEQ ID NO: 1528598 - RNA, 19 nt, Artificial Sequence
  Description of Artificial Sequence: Synthetic oligonucleotide
ccaggguucucgacgcuug

SEQ ID NO: 1528599 - RNA, 19 nt, Artificial Sequence
  Description of Artificial Sequence: Synthetic oligonucleotide
cagaacaccggaacagaau

SEQ ID NO: 1528600 - RNA, 19 nt, Artificial Sequence
  Description of Artificial Sequence: Synthetic oligonucleotide
ccgaguguauucuucccca

SEQ ID NO: 1528601 - RNA, 19 nt, Artificial Sequence
  Description of Artificial Sequence: Synthetic oligonucleotide
gguucucgacgcuuggugu

SEQ ID NO: 1528602 - RNA, 19 nt, Artificial Sequence
  Description of Artificial Sequence: Synthetic oligonucleotide
ugguaagcuccagccuggu

SEQ ID NO: 1528603 - RNA, 19 nt, Artificial Sequence
  Description of Artificial Sequence: Synthetic oligonucleotide
acaccggaacagaaugaaa

SEQ ID NO: 1528604 - RNA, 19 nt, Artificial Sequence
  Description of Artificial Sequence: Synthetic oligonucleotide
aggguucucgacgcuuggu

SEQ ID NO: 1528605 - RNA, 19 nt, Artificial Sequence
  Description of Artificial Sequence: Synthetic oligonucleotide
gaccaagauuugcuccacu

SEQ ID NO: 1528606 - RNA, 19 nt, Artificial Sequence
  Description of Artificial Sequence: Synthetic oligonucleotide
accugcgguguaagaacug

SEQ ID NO: 1528607 - RNA, 19 nt, Artificial Sequence
  Description of Artificial Sequence: Synthetic oligonucleotide
ggccgaugcuuuagugugg

SEQ ID NO: 1528608 - RNA, 19 nt, Artificial Sequence
  Description of Artificial Sequence: Synthetic oligonucleotide
uuccagcggcacugguggu

SEQ ID NO: 1528609 - RNA, 19 nt, Artificial Sequence
  Description of Artificial Sequence: Synthetic oligonucleotide
cuuccgccucguugaaaca

SEQ ID NO: 1528610 - RNA, 19 nt, Artificial Sequence
  Description of Artificial Sequence: Synthetic oligonucleotide
gagaccaggccaacauacu

SEQ ID NO: 1528611 - RNA, 19 nt, Artificial Sequence
  Description of Artificial Sequence: Synthetic oligonucleotide
gcaagccggaguccauaug

SEQ ID NO: 1528612 - RNA, 19 nt, Artificial Sequence
  Description of Artificial Sequence: Synthetic oligonucleotide
gucccaggugaaguauuuc

SEQ ID NO: 1528613 - RNA, 19 nt, Artificial Sequence
  Description of Artificial Sequence: Synthetic oligonucleotide
cagacuuagggccgaugcu

SEQ ID NO: 1528614 - RNA, 19 nt, Artificial Sequence
  Description of Artificial Sequence: Synthetic oligonucleotide
gguguagcgcucucugaua

SEQ ID NO: 1528615 - RNA, 19 nt, Artificial Sequence
  Description of Artificial Sequence: Synthetic oligonucleotide
guucucgacgcuugguguu

SEQ ID NO: 1528616 - RNA, 19 nt, Artificial Sequence
  Description of Artificial Sequence: Synthetic oligonucleotide
ggguuugcgaaccucuuuu

SEQ ID NO: 1528617 - RNA, 19 nt, Artificial Sequence
  Description of Artificial Sequence: Synthetic oligonucleotide
ugcucccaauugccauaau

SEQ ID NO: 1528618 - RNA, 19 nt, Artificial Sequence
  Description of Artificial Sequence: Synthetic oligonucleotide
ggguguagcgcucucugau

SEQ ID NO: 1528619 - RNA, 19 nt, Artificial Sequence
  Description of Artificial Sequence: Synthetic oligonucleotide
ggaauauaucagccauggu

SEQ ID NO: 1528620 - RNA, 19 nt, Artificial Sequence
  Description of Artificial Sequence: Synthetic oligonucleotide
cauuugacccuggcaggaa

SEQ ID NO: 1528621 - RNA, 19 nt, Artificial Sequence
  Description of Artificial Sequence: Synthetic oligonucleotide
ggaguccauauggggaguc

SEQ ID NO: 1528622 - RNA, 19 nt, Artificial Sequence
  Description of Artificial Sequence: Synthetic oligonucleotide
cugcgguguaagaacuggu

SEQ ID NO: 1528623 - RNA, 19 nt, Artificial Sequence
  Description of Artificial Sequence: Synthetic oligonucleotide
gacuuagggccgaugcuuu

SEQ ID NO: 1528624 - RNA, 19 nt, Artificial Sequence
  Description of Artificial Sequence: Synthetic oligonucleotide
cucgacccacagaggccuc

SEQ ID NO: 1528625 - RNA, 19 nt, Artificial Sequence
  Description of Artificial Sequence: Synthetic oligonucleotide
ccauaugaagaggaugucu

SEQ ID NO: 1528626 - RNA, 19 nt, Artificial Sequence
  Description of Artificial Sequence: Synthetic oligonucleotide
aucagccaugguggucugu

SEQ ID NO: 1528627 - RNA, 19 nt, Artificial Sequence
  Description of Artificial Sequence: Synthetic oligonucleotide
ccucguugaaacacuggua

SEQ ID NO: 1528628 - RNA, 19 nt, Artificial Sequence
  Description of Artificial Sequence: Synthetic oligonucleotide
ccggaauaccacucucuga

SEQ ID NO: 1528629 - RNA, 19 nt, Artificial Sequence
  Description of Artificial Sequence: Synthetic oligonucleotide
accacacuuccgccucguu

SEQ ID NO: 1528630 - RNA, 19 nt, Artificial Sequence
  Description of Artificial Sequence: Synthetic oligonucleotide
ccagcggcacuggugguac

SEQ ID NO: 1528631 - RNA, 19 nt, Artificial Sequence
  Description of Artificial Sequence: Synthetic oligonucleotide
cucugauagcuucccggau

SEQ ID NO: 1528632 - RNA, 19 nt, Artificial Sequence
  Description of Artificial Sequence: Synthetic oligonucleotide
ggcugguaagcuccagccu

SEQ ID NO: 1528633 - RNA, 19 nt, Artificial Sequence
  Description of Artificial Sequence: Synthetic oligonucleotide
ccaagauuugcuccacuau

SEQ ID NO: 1528634 - RNA, 19 nt, Artificial Sequence
  Description of Artificial Sequence: Synthetic oligonucleotide
ccauaaugaacagcauucu

SEQ ID NO: 1528635 - RNA, 19 nt, Artificial Sequence
  Description of Artificial Sequence: Synthetic oligonucleotide
gagucauaccagaccucau

SEQ ID NO: 1528636 - RNA, 19 nt, Artificial Sequence
  Description of Artificial Sequence: Synthetic oligonucleotide
cgguguaagaacugguccu

SEQ ID NO: 1528637 - RNA, 19 nt, Artificial Sequence
  Description of Artificial Sequence: Synthetic oligonucleotide
ccaacgauguugugaaguu

SEQ ID NO: 1528638 - RNA, 19 nt, Artificial Sequence
  Description of Artificial Sequence: Synthetic oligonucleotide
gccucauaacagguucaga

SEQ ID NO: 1528639 - RNA, 19 nt, Artificial Sequence
  Description of Artificial Sequence: Synthetic oligonucleotide
ccagaccucauuugacccu

SEQ ID NO: 1528640 - RNA, 19 nt, Artificial Sequence
  Description of Artificial Sequence: Synthetic oligonucleotide
ggccggaauaccacucucu

SEQ ID NO: 1528641 - RNA, 19 nt, Artificial Sequence
  Description of Artificial Sequence: Synthetic oligonucleotide
cccggaucagccgagugua

SEQ ID NO: 1528642 - RNA, 19 nt, Artificial Sequence
  Description of Artificial Sequence: Synthetic oligonucleotide
gggguuugcgaaccucuuu

SEQ ID NO: 1528643 - RNA, 19 nt, Artificial Sequence
  Description of Artificial Sequence: Synthetic oligonucleotide
gccgaugcuuuaguguggu

SEQ ID NO: 1528644 - RNA, 19 nt, Artificial Sequence
  Description of Artificial Sequence: Synthetic oligonucleotide
cagccacaugacgucauau

SEQ ID NO: 1528645 - RNA, 19 nt, Artificial Sequence
  Description of Artificial Sequence: Synthetic oligonucleotide
ccaaacagccaggguucuc

SEQ ID NO: 1528646 - RNA, 19 nt, Artificial Sequence
  Description of Artificial Sequence: Synthetic oligonucleotide
cacuuccgccucguugaaa

SEQ ID NO: 1528647 - RNA, 19 nt, Artificial Sequence
  Description of Artificial Sequence: Synthetic oligonucleotide
cuucccggaucagccgagu

SEQ ID NO: 1528648 - RNA, 19 nt, Artificial Sequence
  Description of Artificial Sequence: Synthetic oligonucleotide
ggucuguggcucugugauu

SEQ ID NO: 1528649 - RNA, 19 nt, Artificial Sequence
  Description of Artificial Sequence: Synthetic oligonucleotide
gcggguagucacagaagau

SEQ ID NO: 1528650 - RNA, 19 nt, Artificial Sequence
  Description of Artificial Sequence: Synthetic oligonucleotide
cccagucaucgguaaugcu

SEQ ID NO: 1528651 - RNA, 19 nt, Artificial Sequence
  Description of Artificial Sequence: Synthetic oligonucleotide
gcucuauguccagccacau

SEQ ID NO: 1528652 - RNA, 19 nt, Artificial Sequence
  Description of Artificial Sequence: Synthetic oligonucleotide
ccaagguuacuggaaucuu

SEQ ID NO: 1528653 - RNA, 19 nt, Artificial Sequence
  Description of Artificial Sequence: Synthetic oligonucleotide
cgauguugugaaguucccu

SEQ ID NO: 1528654 - RNA, 19 nt, Artificial Sequence
  Description of Artificial Sequence: Synthetic oligonucleotide
ccgaugcuuuaguguggua

SEQ ID NO: 1528655 - RNA, 19 nt, Artificial Sequence
  Description of Artificial Sequence: Synthetic oligonucleotide
cuccagacuuagggccgau

SEQ ID NO: 1528656 - RNA, 19 nt, Artificial Sequence
  Description of Artificial Sequence: Synthetic oligonucleotide
ccggaucagccgaguguau

SEQ ID NO: 1528657 - RNA, 19 nt, Artificial Sequence
  Description of Artificial Sequence: Synthetic oligonucleotide
cggaguccauauggggagu

SEQ ID NO: 1528658 - RNA, 19 nt, Artificial Sequence
  Description of Artificial Sequence: Synthetic oligonucleotide
cuagagaucacaaugauac

SEQ ID NO: 1528659 - RNA, 19 nt, Artificial Sequence
  Description of Artificial Sequence: Synthetic oligonucleotide
ucuucaaucagcaaaggug

SEQ ID NO: 1528660 - RNA, 19 nt, Artificial Sequence
  Description of Artificial Sequence: Synthetic oligonucleotide
uuauaaaacuugauccagg

SEQ ID NO: 1528661 - RNA, 19 nt, Artificial Sequence
  Description of Artificial Sequence: Synthetic oligonucleotide
agagaucacaaugauaccc

SEQ ID NO: 1528662 - RNA, 19 nt, Artificial Sequence
  Description of Artificial Sequence: Synthetic oligonucleotide
gaugaaaguggcaagaaac

SEQ ID NO: 1528663 - RNA, 19 nt, Artificial Sequence
  Description of Artificial Sequence: Synthetic oligonucleotide
agcaugaagacuuuggcca

SEQ ID NO: 1528664 - RNA, 19 nt, Artificial Sequence
  Description of Artificial Sequence: Synthetic oligonucleotide
aaagcuagcaagcuguuuu

SEQ ID NO: 1528665 - RNA, 19 nt, Artificial Sequence
  Description of Artificial Sequence: Synthetic oligonucleotide
aaugcucaaauagugacca

SEQ ID NO: 1528666 - RNA, 19 nt, Artificial Sequence
  Description of Artificial Sequence: Synthetic oligonucleotide
uugauuaccacaccugcug

SEQ ID NO: 1528667 - RNA, 19 nt, Artificial Sequence
  Description of Artificial Sequence: Synthetic oligonucleotide
gaugaacuggccaauaacc

SEQ ID NO: 1528668 - RNA, 19 nt, Artificial Sequence
  Description of Artificial Sequence: Synthetic oligonucleotide
uguuccauuggccuguccc

SEQ ID NO: 1528669 - RNA, 19 nt, Artificial Sequence
  Description of Artificial Sequence: Synthetic oligonucleotide
cugacuagagaucacaaug

SEQ ID NO: 1528670 - RNA, 19 nt, Artificial Sequence
  Description of Artificial Sequence: Synthetic oligonucleotide
aacauuuguugacaaagau

SEQ ID NO: 1528671 - RNA, 19 nt, Artificial Sequence
  Description of Artificial Sequence: Synthetic oligonucleotide
aagagcuaaggccuuaggu

SEQ ID NO: 1528672 - RNA, 19 nt, Artificial Sequence
  Description of Artificial Sequence: Synthetic oligonucleotide
aacuuagggagcuuagacu

SEQ ID NO: 1528673 - RNA, 19 nt, Artificial Sequence
  Description of Artificial Sequence: Synthetic oligonucleotide
ugacuagagaucacaauga

SEQ ID NO: 1528674 - RNA, 19 nt, Artificial Sequence
  Description of Artificial Sequence: Synthetic oligonucleotide
gagcuaaggccuuagguag

SEQ ID NO: 1528675 - RNA, 19 nt, Artificial Sequence
  Description of Artificial Sequence: Synthetic oligonucleotide
gguuauggcacuuacauuc

SEQ ID NO: 1528676 - RNA, 19 nt, Artificial Sequence
  Description of Artificial Sequence: Synthetic oligonucleotide
gaauaggccacccaggaga

SEQ ID NO: 1528677 - RNA, 19 nt, Artificial Sequence
  Description of Artificial Sequence: Synthetic oligonucleotide
ggagguaccacucagugcc

SEQ ID NO: 1528678 - RNA, 19 nt, Artificial Sequence
  Description of Artificial Sequence: Synthetic oligonucleotide
ugcauagugcaugagaaca

SEQ ID NO: 1528679 - RNA, 19 nt, Artificial Sequence
  Description of Artificial Sequence: Synthetic oligonucleotide
cccacuaagaugaagaccc

SEQ ID NO: 1528680 - RNA, 19 nt, Artificial Sequence
  Description of Artificial Sequence: Synthetic oligonucleotide
ggcauagucugcuugaagg

SEQ ID NO: 1528681 - RNA, 19 nt, Artificial Sequence
  Description of Artificial Sequence: Synthetic oligonucleotide
caaagguggggucucaugg

SEQ ID NO: 1528682 - RNA, 19 nt, Artificial Sequence
  Description of Artificial Sequence: Synthetic oligonucleotide
acgauggguaaccugacuc

SEQ ID NO: 1528683 - RNA, 19 nt, Artificial Sequence
  Description of Artificial Sequence: Synthetic oligonucleotide
auaacccucaguguagggc

SEQ ID NO: 1528684 - RNA, 19 nt, Artificial Sequence
  Description of Artificial Sequence: Synthetic oligonucleotide
uguaggagcuccuucaaaa

SEQ ID NO: 1528685 - RNA, 19 nt, Artificial Sequence
  Description of Artificial Sequence: Synthetic oligonucleotide
uggaguguuucauggaugc

SEQ ID NO: 1528686 - RNA, 19 nt, Artificial Sequence
  Description of Artificial Sequence: Synthetic oligonucleotide
gauauaacccucaguguag

SEQ ID NO: 1528687 - RNA, 19 nt, Artificial Sequence
  Description of Artificial Sequence: Synthetic oligonucleotide
cacaaugauacccucacuc

SEQ ID NO: 1528688 - RNA, 19 nt, Artificial Sequence
  Description of Artificial Sequence: Synthetic oligonucleotide
agaaaccuguggcagcuac

SEQ ID NO: 1528689 - RNA, 19 nt, Artificial Sequence
  Description of Artificial Sequence: Synthetic oligonucleotide
cuguagcccaccaaaaggc

SEQ ID NO: 1528690 - RNA, 19 nt, Artificial Sequence
  Description of Artificial Sequence: Synthetic oligonucleotide
gaaggcgacgcagagacag

SEQ ID NO: 1528691 - RNA, 19 nt, Artificial Sequence
  Description of Artificial Sequence: Synthetic oligonucleotide
aagauaagaggcaggagca

SEQ ID NO: 1528692 - RNA, 19 nt, Artificial Sequence
  Description of Artificial Sequence: Synthetic oligonucleotide
acuuacauucuugaugguc

SEQ ID NO: 1528693 - RNA, 19 nt, Artificial Sequence
  Description of Artificial Sequence: Synthetic oligonucleotide
guggcaagaaaccuguggc

SEQ ID NO: 1528694 - RNA, 19 nt, Artificial Sequence
  Description of Artificial Sequence: Synthetic oligonucleotide
accaguacgauggguaacc

SEQ ID NO: 1528695 - RNA, 19 nt, Artificial Sequence
  Description of Artificial Sequence: Synthetic oligonucleotide
aaaguggcaagaaaccugu

SEQ ID NO: 1528696 - RNA, 19 nt, Artificial Sequence
  Description of Artificial Sequence: Synthetic oligonucleotide
ucuccguucuucaaucagc

SEQ ID NO: 1528697 - RNA, 19 nt, Artificial Sequence
  Description of Artificial Sequence: Synthetic oligonucleotide
uucuucaaucagcaaaggu

SEQ ID NO: 1528698 - RNA, 19 nt, Artificial Sequence
  Description of Artificial Sequence: Synthetic oligonucleotide
gaaaguggcaagaaaccug

SEQ ID NO: 1528699 - RNA, 19 nt, Artificial Sequence
  Description of Artificial Sequence: Synthetic oligonucleotide
aguacaaaacugaagggcu

SEQ ID NO: 1528700 - RNA, 19 nt, Artificial Sequence
  Description of Artificial Sequence: Synthetic oligonucleotide
ugcucaaauagugaccacc

SEQ ID NO: 1528701 - RNA, 19 nt, Artificial Sequence
  Description of Artificial Sequence: Synthetic oligonucleotide
gaggagacugaagagguag

SEQ ID NO: 1528702 - RNA, 19 nt, Artificial Sequence
  Description of Artificial Sequence: Synthetic oligonucleotide
aagguggggucucauggag

SEQ ID NO: 1528703 - RNA, 19 nt, Artificial Sequence
  Description of Artificial Sequence: Synthetic oligonucleotide
cacguggaguguuucaugg

SEQ ID NO: 1528704 - RNA, 19 nt, Artificial Sequence
  Description of Artificial Sequence: Synthetic oligonucleotide
acaaugauacccucacucu

SEQ ID NO: 1528705 - RNA, 19 nt, Artificial Sequence
  Description of Artificial Sequence: Synthetic oligonucleotide
caaugcucaaauagugacc

SEQ ID NO: 1528706 - RNA, 19 nt, Artificial Sequence
  Description of Artificial Sequence: Synthetic oligonucleotide
uguuuuguaccccuaccuc

SEQ ID NO: 1528707 - RNA, 19 nt, Artificial Sequence
  Description of Artificial Sequence: Synthetic oligonucleotide
agagcuaaggccuuaggua

SEQ ID NO: 1528708 - RNA, 19 nt, Artificial Sequence
  Description of Artificial Sequence: Synthetic oligonucleotide
uagcaagcuguuuuguacc

SEQ ID NO: 1528709 - RNA, 19 nt, Artificial Sequence
  Description of Artificial Sequence: Synthetic oligonucleotide
acaaagauaagaggcagga

SEQ ID NO: 1528710 - RNA, 19 nt, Artificial Sequence
  Description of Artificial Sequence: Synthetic oligonucleotide
aguacgauggguaaccuga

SEQ ID NO: 1528711 - RNA, 19 nt, Artificial Sequence
  Description of Artificial Sequence: Synthetic oligonucleotide
ugauuaccacaccugcugc

SEQ ID NO: 1528712 - RNA, 19 nt, Artificial Sequence
  Description of Artificial Sequence: Synthetic oligonucleotide
uaacccucaguguagggcu

SEQ ID NO: 1528713 - RNA, 19 nt, Artificial Sequence
  Description of Artificial Sequence: Synthetic oligonucleotide
agacuugauuaccacaccu

SEQ ID NO: 1528714 - RNA, 19 nt, Artificial Sequence
  Description of Artificial Sequence: Synthetic oligonucleotide
gaacaaaaggccuuuggua

SEQ ID NO: 1528715 - RNA, 19 nt, Artificial Sequence
  Description of Artificial Sequence: Synthetic oligonucleotide
ggcacuuacauucuugaug

SEQ ID NO: 1528716 - RNA, 19 nt, Artificial Sequence
  Description of Artificial Sequence: Synthetic oligonucleotide
uuuuguaccccuaccucaa

SEQ ID NO: 1528717 - RNA, 19 nt, Artificial Sequence
  Description of Artificial Sequence: Synthetic oligonucleotide
ugaacuggccaauaaccaa

SEQ ID NO: 1528718 - RNA, 19 nt, Artificial Sequence
  Description of Artificial Sequence: Synthetic oligonucleotide
gguuauaaaacuugaucca

SEQ ID NO: 1528719 - RNA, 19 nt, Artificial Sequence
  Description of Artificial Sequence: Synthetic oligonucleotide
aguaucuuggagaugggca

SEQ ID NO: 1528720 - RNA, 19 nt, Artificial Sequence
  Description of Artificial Sequence: Synthetic oligonucleotide
uauaacccucaguguaggg

SEQ ID NO: 1528721 - RNA, 19 nt, Artificial Sequence
  Description of Artificial Sequence: Synthetic oligonucleotide
ucaaugcugacuguccgcc

SEQ ID NO: 1528722 - RNA, 19 nt, Artificial Sequence
  Description of Artificial Sequence: Synthetic oligonucleotide
guuuuguaccccuaccuca

SEQ ID NO: 1528723 - RNA, 19 nt, Artificial Sequence
  Description of Artificial Sequence: Synthetic oligonucleotide
uccccaaugcucaaauagu

SEQ ID NO: 1528724 - RNA, 19 nt, Artificial Sequence
  Description of Artificial Sequence: Synthetic oligonucleotide
cugucacugaaccaucccc

SEQ ID NO: 1528725 - RNA, 19 nt, Artificial Sequence
  Description of Artificial Sequence: Synthetic oligonucleotide
uagacuugauuaccacacc

SEQ ID NO: 1528726 - RNA, 19 nt, Artificial Sequence
  Description of Artificial Sequence: Synthetic oligonucleotide
ugugguaggccaggaauag

SEQ ID NO: 1528727 - RNA, 19 nt, Artificial Sequence
  Description of Artificial Sequence: Synthetic oligonucleotide
acuggccaauaaccaaagc

SEQ ID NO: 1528728 - RNA, 19 nt, Artificial Sequence
  Description of Artificial Sequence: Synthetic oligonucleotide
agcuaaagcuagcaagcug

SEQ ID NO: 1528729 - RNA, 19 nt, Artificial Sequence
  Description of Artificial Sequence: Synthetic oligonucleotide
ucucggagguaccacucag

SEQ ID NO: 1528730 - RNA, 19 nt, Artificial Sequence
  Description of Artificial Sequence: Synthetic oligonucleotide
ugcacccaaaugaacauuu

SEQ ID NO: 1528731 - RNA, 19 nt, Artificial Sequence
  Description of Artificial Sequence: Synthetic oligonucleotide
gauggcugaugaaaguggc

SEQ ID NO: 1528732 - RNA, 19 nt, Artificial Sequence
  Description of Artificial Sequence: Synthetic oligonucleotide
auauaacccucaguguagg

SEQ ID NO: 1528733 - RNA, 19 nt, Artificial Sequence
  Description of Artificial Sequence: Synthetic oligonucleotide
gggguuauaaaacuugauc

SEQ ID NO: 1528734 - RNA, 19 nt, Artificial Sequence
  Description of Artificial Sequence: Synthetic oligonucleotide
ucugagaaguggcccaagu

SEQ ID NO: 1528735 - RNA, 19 nt, Artificial Sequence
  Description of Artificial Sequence: Synthetic oligonucleotide
gaaagucauggagauggcc

SEQ ID NO: 1528736 - RNA, 19 nt, Artificial Sequence
  Description of Artificial Sequence: Synthetic oligonucleotide
accaaaaggccaaccaggg

SEQ ID NO: 1528737 - RNA, 19 nt, Artificial Sequence
  Description of Artificial Sequence: Synthetic oligonucleotide
uuguaccccuaccucaaug

SEQ ID NO: 1528738 - RNA, 19 nt, Artificial Sequence
  Description of Artificial Sequence: Synthetic oligonucleotide
gagaggcauagucugcuug

SEQ ID NO: 1528739 - RNA, 19 nt, Artificial Sequence
  Description of Artificial Sequence: Synthetic oligonucleotide
agaggcauagucugcuuga

SEQ ID NO: 1528740 - RNA, 19 nt, Artificial Sequence
  Description of Artificial Sequence: Synthetic oligonucleotide
gauggcgaugaacagcaga

SEQ ID NO: 1528741 - RNA, 19 nt, Artificial Sequence
  Description of Artificial Sequence: Synthetic oligonucleotide
gaguacugacuagagauca

SEQ ID NO: 1528742 - RNA, 19 nt, Artificial Sequence
  Description of Artificial Sequence: Synthetic oligonucleotide
gacuugauuaccacaccug

SEQ ID NO: 1528743 - RNA, 19 nt, Artificial Sequence
  Description of Artificial Sequence: Synthetic oligonucleotide
ucagugccacaaugaaggg

SEQ ID NO: 1528744 - RNA, 19 nt, Artificial Sequence
  Description of Artificial Sequence: Synthetic oligonucleotide
agugcauagugcaugagaa

SEQ ID NO: 1528745 - RNA, 19 nt, Artificial Sequence
  Description of Artificial Sequence: Synthetic oligonucleotide
uagagaucacaaugauacc

SEQ ID NO: 1528746 - RNA, 19 nt, Artificial Sequence
  Description of Artificial Sequence: Synthetic oligonucleotide
cccaaaugaacauuuguug

SEQ ID NO: 1528747 - RNA, 19 nt, Artificial Sequence
  Description of Artificial Sequence: Synthetic oligonucleotide
auggcuaggcuguagccca

SEQ ID NO: 1528748 - RNA, 19 nt, Artificial Sequence
  Description of Artificial Sequence: Synthetic oligonucleotide
aaggccuuagguagcauga

SEQ ID NO: 1528749 - RNA, 19 nt, Artificial Sequence
  Description of Artificial Sequence: Synthetic oligonucleotide
gauggguaaccugacuccc

SEQ ID NO: 1528750 - RNA, 19 nt, Artificial Sequence
  Description of Artificial Sequence: Synthetic oligonucleotide
ugaaagucauggagauggc

SEQ ID NO: 1528751 - RNA, 19 nt, Artificial Sequence
  Description of Artificial Sequence: Synthetic oligonucleotide
aaugauacccucacucuuu

SEQ ID NO: 1528752 - RNA, 19 nt, Artificial Sequence
  Description of Artificial Sequence: Synthetic oligonucleotide
ccaaugcucaaauagugac

SEQ ID NO: 1528753 - RNA, 19 nt, Artificial Sequence
  Description of Artificial Sequence: Synthetic oligonucleotide
ggagcuuagacuugauuac

SEQ ID NO: 1528754 - RNA, 19 nt, Artificial Sequence
  Description of Artificial Sequence: Synthetic oligonucleotide
uuagggagcuuagacuuga

SEQ ID NO: 1528755 - RNA, 19 nt, Artificial Sequence
  Description of Artificial Sequence: Synthetic oligonucleotide
gagcuuagacuugauuacc

SEQ ID NO: 1528756 - RNA, 19 nt, Artificial Sequence
  Description of Artificial Sequence: Synthetic oligonucleotide
gacaguggauggaguaugg

SEQ ID NO: 1528757 - RNA, 19 nt, Artificial Sequence
  Description of Artificial Sequence: Synthetic oligonucleotide
ggauauaacccucagugua

SEQ ID NO: 1528758 - RNA, 19 nt, Artificial Sequence
  Description of Artificial Sequence: Synthetic oligonucleotide
gaacuguggggacagugga

SEQ ID NO: 1528759 - RNA, 19 nt, Artificial Sequence
  Description of Artificial Sequence: Synthetic oligonucleotide
cauggcuaggcuguagccc

SEQ ID NO: 1528760 - RNA, 19 nt, Artificial Sequence
  Description of Artificial Sequence: Synthetic oligonucleotide
gaaccauccccaaugcuca

SEQ ID NO: 1528761 - RNA, 19 nt, Artificial Sequence
  Description of Artificial Sequence: Synthetic oligonucleotide
gaaacuggcccaagaggcc

SEQ ID NO: 1528762 - RNA, 19 nt, Artificial Sequence
  Description of Artificial Sequence: Synthetic oligonucleotide
ugggguuauaaaacuugau

SEQ ID NO: 1528763 - RNA, 19 nt, Artificial Sequence
  Description of Artificial Sequence: Synthetic oligonucleotide
ucccgaguacugacuagag

SEQ ID NO: 1528764 - RNA, 19 nt, Artificial Sequence
  Description of Artificial Sequence: Synthetic oligonucleotide
agcauagcuaaagcuagca

SEQ ID NO: 1528765 - RNA, 19 nt, Artificial Sequence
  Description of Artificial Sequence: Synthetic oligonucleotide
gggagcuuagacuugauua

SEQ ID NO: 1528766 - RNA, 19 nt, Artificial Sequence
  Description of Artificial Sequence: Synthetic oligonucleotide
gagaacuuagggagcuuag

SEQ ID NO: 1528767 - RNA, 19 nt, Artificial Sequence
  Description of Artificial Sequence: Synthetic oligonucleotide
guccucauggaacaggaaa

SEQ ID NO: 1528768 - RNA, 19 nt, Artificial Sequence
  Description of Artificial Sequence: Synthetic oligonucleotide
uccccaguaucuuggagau

SEQ ID NO: 1528769 - RNA, 19 nt, Artificial Sequence
  Description of Artificial Sequence: Synthetic oligonucleotide
aggaaagcauagaagggca

SEQ ID NO: 1528770 - RNA, 19 nt, Artificial Sequence
  Description of Artificial Sequence: Synthetic oligonucleotide
cagguagaggauuggguuc

SEQ ID NO: 1528771 - RNA, 19 nt, Artificial Sequence
  Description of Artificial Sequence: Synthetic oligonucleotide
cucuccguucuucaaucag

SEQ ID NO: 1528772 - RNA, 19 nt, Artificial Sequence
  Description of Artificial Sequence: Synthetic oligonucleotide
cucccacuaagaugaagac

SEQ ID NO: 1528773 - RNA, 19 nt, Artificial Sequence
  Description of Artificial Sequence: Synthetic oligonucleotide
aguacugacuagagaucac

SEQ ID NO: 1528774 - RNA, 19 nt, Artificial Sequence
  Description of Artificial Sequence: Synthetic oligonucleotide
ucacaaugauacccucacu

SEQ ID NO: 1528775 - RNA, 19 nt, Artificial Sequence
  Description of Artificial Sequence: Synthetic oligonucleotide
augaacauuuguugacaaa

SEQ ID NO: 1528776 - RNA, 19 nt, Artificial Sequence
  Description of Artificial Sequence: Synthetic oligonucleotide
cuuagggagcuuagacuug

SEQ ID NO: 1528777 - RNA, 19 nt, Artificial Sequence
  Description of Artificial Sequence: Synthetic oligonucleotide
uacgauggguaaccugacu

SEQ ID NO: 1528778 - RNA, 19 nt, Artificial Sequence
  Description of Artificial Sequence: Synthetic oligonucleotide
caagagcuaaggccuuagg

SEQ ID NO: 1528779 - RNA, 19 nt, Artificial Sequence
  Description of Artificial Sequence: Synthetic oligonucleotide
guaggccaggaauaggcca

SEQ ID NO: 1528780 - RNA, 19 nt, Artificial Sequence
  Description of Artificial Sequence: Synthetic oligonucleotide
caaagauaagaggcaggag

SEQ ID NO: 1528781 - RNA, 19 nt, Artificial Sequence
  Description of Artificial Sequence: Synthetic oligonucleotide
acuugauccaggguccuca

SEQ ID NO: 1528782 - RNA, 19 nt, Artificial Sequence
  Description of Artificial Sequence: Synthetic oligonucleotide
gaaacaaguugcuguagau

SEQ ID NO: 1528783 - RNA, 19 nt, Artificial Sequence
  Description of Artificial Sequence: Synthetic oligonucleotide
ugucccgaguacugacuag

SEQ ID NO: 1528784 - RNA, 19 nt, Artificial Sequence
  Description of Artificial Sequence: Synthetic oligonucleotide
agcuaaggccuuagguagc

SEQ ID NO: 1528785 - RNA, 19 nt, Artificial Sequence
  Description of Artificial Sequence: Synthetic oligonucleotide
ucacucuuuucagggaacu

SEQ ID NO: 1528786 - RNA, 19 nt, Artificial Sequence
  Description of Artificial Sequence: Synthetic oligonucleotide
ugaagacuuuggccaucag

SEQ ID NO: 1528787 - RNA, 19 nt, Artificial Sequence
  Description of Artificial Sequence: Synthetic oligonucleotide
agcaucucggagguaccac

SEQ ID NO: 1528788 - RNA, 19 nt, Artificial Sequence
  Description of Artificial Sequence: Synthetic oligonucleotide
aaggcgacgcagagacagc

SEQ ID NO: 1528789 - RNA, 19 nt, Artificial Sequence
  Description of Artificial Sequence: Synthetic oligonucleotide
aggauuggguucucugaga

SEQ ID NO: 1528790 - RNA, 19 nt, Artificial Sequence
  Description of Artificial Sequence: Synthetic oligonucleotide
caguaucuuggagaugggc

SEQ ID NO: 1528791 - RNA, 19 nt, Artificial Sequence
  Description of Artificial Sequence: Synthetic oligonucleotide
agaacuuagggagcuuaga

SEQ ID NO: 1528792 - RNA, 19 nt, Artificial Sequence
  Description of Artificial Sequence: Synthetic oligonucleotide
uagcuaaagcuagcaagcu

SEQ ID NO: 1528793 - RNA, 19 nt, Artificial Sequence
  Description of Artificial Sequence: Synthetic oligonucleotide
ccuuagguagcaugaagac

SEQ ID NO: 1528794 - RNA, 19 nt, Artificial Sequence
  Description of Artificial Sequence: Synthetic oligonucleotide
aauaggccacccaggagaa

SEQ ID NO: 1528795 - RNA, 19 nt, Artificial Sequence
  Description of Artificial Sequence: Synthetic oligonucleotide
ucucuccguucuucaauca

SEQ ID NO: 1528796 - RNA, 19 nt, Artificial Sequence
  Description of Artificial Sequence: Synthetic oligonucleotide
uggccugucccgaguacug

SEQ ID NO: 1528797 - RNA, 19 nt, Artificial Sequence
  Description of Artificial Sequence: Synthetic oligonucleotide
uugauccaggguccucaug

SEQ ID NO: 1528798 - RNA, 19 nt, Artificial Sequence
  Description of Artificial Sequence: Synthetic oligonucleotide
agcuuagacuugauuacca

SEQ ID NO: 1528799 - RNA, 19 nt, Artificial Sequence
  Description of Artificial Sequence: Synthetic oligonucleotide
cagcauagcuaaagcuagc

SEQ ID NO: 1528800 - RNA, 19 nt, Artificial Sequence
  Description of Artificial Sequence: Synthetic oligonucleotide
uucaggcacauggcuaggc

SEQ ID NO: 1528801 - RNA, 19 nt, Artificial Sequence
  Description of Artificial Sequence: Synthetic oligonucleotide
gcuguuuuguaccccuacc

SEQ ID NO: 1528802 - RNA, 19 nt, Artificial Sequence
  Description of Artificial Sequence: Synthetic oligonucleotide
gccugagaggcauagucug

SEQ ID NO: 1528803 - RNA, 19 nt, Artificial Sequence
  Description of Artificial Sequence: Synthetic oligonucleotide
uuauggcacuuacauucuu

SEQ ID NO: 1528804 - RNA, 19 nt, Artificial Sequence
  Description of Artificial Sequence: Synthetic oligonucleotide
ggcuguagcccaccaaaag

SEQ ID NO: 1528805 - RNA, 19 nt, Artificial Sequence
  Description of Artificial Sequence: Synthetic oligonucleotide
gugcauagugcaugagaac

SEQ ID NO: 1528806 - RNA, 19 nt, Artificial Sequence
  Description of Artificial Sequence: Synthetic oligonucleotide
gguagaagggaugucuuca

SEQ ID NO: 1528807 - RNA, 19 nt, Artificial Sequence
  Description of Artificial Sequence: Synthetic oligonucleotide
cugugaagcccaccaguac

SEQ ID NO: 1528808 - RNA, 19 nt, Artificial Sequence
  Description of Artificial Sequence: Synthetic oligonucleotide
guggaguguuucauggaug

SEQ ID NO: 1528809 - RNA, 19 nt, Artificial Sequence
  Description of Artificial Sequence: Synthetic oligonucleotide
acuagagaucacaaugaua

SEQ ID NO: 1528810 - RNA, 19 nt, Artificial Sequence
  Description of Artificial Sequence: Synthetic oligonucleotide
cacuuugcacccaaaugaa

SEQ ID NO: 1528811 - RNA, 19 nt, Artificial Sequence
  Description of Artificial Sequence: Synthetic oligonucleotide
acccugaugcagaaaucuc

SEQ ID NO: 1528812 - RNA, 19 nt, Artificial Sequence
  Description of Artificial Sequence: Synthetic oligonucleotide
agggaugucuucagcaggu

SEQ ID NO: 1528813 - RNA, 19 nt, Artificial Sequence
  Description of Artificial Sequence: Synthetic oligonucleotide
gguacagaacuguggggac

SEQ ID NO: 1528814 - RNA, 19 nt, Artificial Sequence
  Description of Artificial Sequence: Synthetic oligonucleotide
gacuagagaucacaaugau

SEQ ID NO: 1528815 - RNA, 19 nt, Artificial Sequence
  Description of Artificial Sequence: Synthetic oligonucleotide
uuuguaccccuaccucaau

SEQ ID NO: 1528816 - RNA, 19 nt, Artificial Sequence
  Description of Artificial Sequence: Synthetic oligonucleotide
augauacccucacucuuuu

SEQ ID NO: 1528817 - RNA, 19 nt, Artificial Sequence
  Description of Artificial Sequence: Synthetic oligonucleotide
gcuaaagcuagcaagcugu

SEQ ID NO: 1528818 - RNA, 19 nt, Artificial Sequence
  Description of Artificial Sequence: Synthetic oligonucleotide
cacugccccagguuauggc

SEQ ID NO: 1528819 - RNA, 19 nt, Artificial Sequence
  Description of Artificial Sequence: Synthetic oligonucleotide
agaccugaguggauguuca

SEQ ID NO: 1528820 - RNA, 19 nt, Artificial Sequence
  Description of Artificial Sequence: Synthetic oligonucleotide
agccagaccugaguggaug

SEQ ID NO: 1528821 - RNA, 19 nt, Artificial Sequence
  Description of Artificial Sequence: Synthetic oligonucleotide
ugcuauggggauggcgaug

SEQ ID NO: 1528822 - RNA, 19 nt, Artificial Sequence
  Description of Artificial Sequence: Synthetic oligonucleotide
cuugauuaccacaccugcu

SEQ ID NO: 1528823 - RNA, 19 nt, Artificial Sequence
  Description of Artificial Sequence: Synthetic oligonucleotide
guagauggcugaugaaagu

SEQ ID NO: 1528824 - RNA, 19 nt, Artificial Sequence
  Description of Artificial Sequence: Synthetic oligonucleotide
gguucucugagaaguggcc

SEQ ID NO: 1528825 - RNA, 19 nt, Artificial Sequence
  Description of Artificial Sequence: Synthetic oligonucleotide
ggauuggguucucugagaa

SEQ ID NO: 1528826 - RNA, 19 nt, Artificial Sequence
  Description of Artificial Sequence: Synthetic oligonucleotide
gcgacgcagagacagcugc

SEQ ID NO: 1528827 - RNA, 19 nt, Artificial Sequence
  Description of Artificial Sequence: Synthetic oligonucleotide
cuguuuuguaccccuaccu

SEQ ID NO: 1528828 - RNA, 19 nt, Artificial Sequence
  Description of Artificial Sequence: Synthetic oligonucleotide
agggagcuuagacuugauu

SEQ ID NO: 1528829 - RNA, 19 nt, Artificial Sequence
  Description of Artificial Sequence: Synthetic oligonucleotide
guagcccaccaaaaggcca

SEQ ID NO: 1528830 - RNA, 19 nt, Artificial Sequence
  Description of Artificial Sequence: Synthetic oligonucleotide
ugaaggcgacgcagagaca

SEQ ID NO: 1528831 - RNA, 19 nt, Artificial Sequence
  Description of Artificial Sequence: Synthetic oligonucleotide
gccuuagguagcaugaaga

SEQ ID NO: 1528832 - RNA, 19 nt, Artificial Sequence
  Description of Artificial Sequence: Synthetic oligonucleotide
aggugacacccugaugcag

SEQ ID NO: 1528833 - RNA, 19 nt, Artificial Sequence
  Description of Artificial Sequence: Synthetic oligonucleotide
ggagaaguacaaaacugaa

SEQ ID NO: 1528834 - RNA, 19 nt, Artificial Sequence
  Description of Artificial Sequence: Synthetic oligonucleotide
cauagugcaugagaacaaa

SEQ ID NO: 1528835 - RNA, 19 nt, Artificial Sequence
  Description of Artificial Sequence: Synthetic oligonucleotide
aguggauguucaccacgaa

SEQ ID NO: 1528836 - RNA, 19 nt, Artificial Sequence
  Description of Artificial Sequence: Synthetic oligonucleotide
uagguagcaugaagacuuu

SEQ ID NO: 1528837 - RNA, 19 nt, Artificial Sequence
  Description of Artificial Sequence: Synthetic oligonucleotide
gaugaacagcagagucccc

SEQ ID NO: 1528838 - RNA, 19 nt, Artificial Sequence
  Description of Artificial Sequence: Synthetic oligonucleotide
gaccugaguggauguucac

SEQ ID NO: 1528839 - RNA, 19 nt, Artificial Sequence
  Description of Artificial Sequence: Synthetic oligonucleotide
cgauggguaaccugacucc

SEQ ID NO: 1528840 - RNA, 19 nt, Artificial Sequence
  Description of Artificial Sequence: Synthetic oligonucleotide
gguaaugaugaggccaaga

SEQ ID NO: 1528841 - RNA, 19 nt, Artificial Sequence
  Description of Artificial Sequence: Synthetic oligonucleotide
guaaccugacucccacuaa

SEQ ID NO: 1528842 - RNA, 19 nt, Artificial Sequence
  Description of Artificial Sequence: Synthetic oligonucleotide
agcuagcaagcuguuuugu

SEQ ID NO: 1528843 - RNA, 19 nt, Artificial Sequence
  Description of Artificial Sequence: Synthetic oligonucleotide
cuuagguagcaugaagacu

SEQ ID NO: 1528844 - RNA, 19 nt, Artificial Sequence
  Description of Artificial Sequence: Synthetic oligonucleotide
gucacugaaccauccccaa

SEQ ID NO: 1528845 - RNA, 19 nt, Artificial Sequence
  Description of Artificial Sequence: Synthetic oligonucleotide
aacccucaguguagggcug

SEQ ID NO: 1528846 - RNA, 19 nt, Artificial Sequence
  Description of Artificial Sequence: Synthetic oligonucleotide
gucccgaguacugacuaga

SEQ ID NO: 1528847 - RNA, 19 nt, Artificial Sequence
  Description of Artificial Sequence: Synthetic oligonucleotide
aaguggcaagaaaccugug

SEQ ID NO: 1528848 - RNA, 19 nt, Artificial Sequence
  Description of Artificial Sequence: Synthetic oligonucleotide
gaaggcggcuguagauggc

SEQ ID NO: 1528849 - RNA, 19 nt, Artificial Sequence
  Description of Artificial Sequence: Synthetic oligonucleotide
guagggcugaggccuguuc

SEQ ID NO: 1528850 - RNA, 19 nt, Artificial Sequence
  Description of Artificial Sequence: Synthetic oligonucleotide
ggcagcuacuguugagaug

SEQ ID NO: 1528851 - RNA, 19 nt, Artificial Sequence
  Description of Artificial Sequence: Synthetic oligonucleotide
ggucucauggagguccaug

SEQ ID NO: 1528852 - RNA, 19 nt, Artificial Sequence
  Description of Artificial Sequence: Synthetic oligonucleotide
ggugacacccugaugcaga

SEQ ID NO: 1528853 - RNA, 19 nt, Artificial Sequence
  Description of Artificial Sequence: Synthetic oligonucleotide
gcuauggggauggcgauga

SEQ ID NO: 1528854 - RNA, 19 nt, Artificial Sequence
  Description of Artificial Sequence: Synthetic oligonucleotide
cacucuuuucagggaacuc

SEQ ID NO: 1528855 - RNA, 19 nt, Artificial Sequence
  Description of Artificial Sequence: Synthetic oligonucleotide
guacgauggguaaccugac

SEQ ID NO: 1528856 - RNA, 19 nt, Artificial Sequence
  Description of Artificial Sequence: Synthetic oligonucleotide
ggguagaagggaugucuuc

SEQ ID NO: 1528857 - RNA, 19 nt, Artificial Sequence
  Description of Artificial Sequence: Synthetic oligonucleotide
caccaguacgauggguaac

SEQ ID NO: 1528858 - RNA, 19 nt, Artificial Sequence
  Description of Artificial Sequence: Synthetic oligonucleotide
guuauggcacuuacauucu

SEQ ID NO: 1528859 - RNA, 19 nt, Artificial Sequence
  Description of Artificial Sequence: Synthetic oligonucleotide
uagggagcuuagacuugau

SEQ ID NO: 1528860 - RNA, 19 nt, Artificial Sequence
  Description of Artificial Sequence: Synthetic oligonucleotide
gcacguggaguguuucaug

SEQ ID NO: 1528861 - RNA, 19 nt, Artificial Sequence
  Description of Artificial Sequence: Synthetic oligonucleotide
cacccugaugcagaaaucu

SEQ ID NO: 1528862 - RNA, 19 nt, Artificial Sequence
  Description of Artificial Sequence: Synthetic oligonucleotide
gguggggucucauggaggu

SEQ ID NO: 1528863 - RNA, 19 nt, Artificial Sequence
  Description of Artificial Sequence: Synthetic oligonucleotide
ugaagcccaccaguacgau

SEQ ID NO: 1528864 - RNA, 19 nt, Artificial Sequence
  Description of Artificial Sequence: Synthetic oligonucleotide
ggauuugucugagugcaua

SEQ ID NO: 1528865 - RNA, 19 nt, Artificial Sequence
  Description of Artificial Sequence: Synthetic oligonucleotide
cccagguuauggcacuuac

SEQ ID NO: 1528866 - RNA, 19 nt, Artificial Sequence
  Description of Artificial Sequence: Synthetic oligonucleotide
ccacuaagaugaagacccc

SEQ ID NO: 1528867 - RNA, 19 nt, Artificial Sequence
  Description of Artificial Sequence: Synthetic oligonucleotide
ccaguaucuuggagauggg

SEQ ID NO: 1528868 - RNA, 19 nt, Artificial Sequence
  Description of Artificial Sequence: Synthetic oligonucleotide
guaccccuaccucaaugcu

SEQ ID NO: 1528869 - RNA, 19 nt, Artificial Sequence
  Description of Artificial Sequence: Synthetic oligonucleotide
ugacucccacuaagaugaa

SEQ ID NO: 1528870 - RNA, 19 nt, Artificial Sequence
  Description of Artificial Sequence: Synthetic oligonucleotide
ugcugacuguccgccgcug

SEQ ID NO: 1528871 - RNA, 19 nt, Artificial Sequence
  Description of Artificial Sequence: Synthetic oligonucleotide
cccaccaaaaggccaacca

SEQ ID NO: 1528872 - RNA, 19 nt, Artificial Sequence
  Description of Artificial Sequence: Synthetic oligonucleotide
gcaagcuguuuuguacccc

SEQ ID NO: 1528873 - RNA, 19 nt, Artificial Sequence
  Description of Artificial Sequence: Synthetic oligonucleotide
ugggcacguggaguguuuc

SEQ ID NO: 1528874 - RNA, 19 nt, Artificial Sequence
  Description of Artificial Sequence: Synthetic oligonucleotide
guccagggauauaacccuc

SEQ ID NO: 1528875 - RNA, 19 nt, Artificial Sequence
  Description of Artificial Sequence: Synthetic oligonucleotide
gaaaccuguggcagcuacu

SEQ ID NO: 1528876 - RNA, 19 nt, Artificial Sequence
  Description of Artificial Sequence: Synthetic oligonucleotide
ggguugaggguagaaggga

SEQ ID NO: 1528877 - RNA, 19 nt, Artificial Sequence
  Description of Artificial Sequence: Synthetic oligonucleotide
cgaguacugacuagagauc

SEQ ID NO: 1528878 - RNA, 19 nt, Artificial Sequence
  Description of Artificial Sequence: Synthetic oligonucleotide
ccacucagugccacaauga

SEQ ID NO: 1528879 - RNA, 19 nt, Artificial Sequence
  Description of Artificial Sequence: Synthetic oligonucleotide
ccaaccaggggcacuguga

SEQ ID NO: 1528880 - RNA, 19 nt, Artificial Sequence
  Description of Artificial Sequence: Synthetic oligonucleotide
uggcccaaguugggguuga

SEQ ID NO: 1528881 - RNA, 19 nt, Artificial Sequence
  Description of Artificial Sequence: Synthetic oligonucleotide
gcaugagaacaaaaggccu

SEQ ID NO: 1528882 - RNA, 19 nt, Artificial Sequence
  Description of Artificial Sequence: Synthetic oligonucleotide
aagcuguuuuguaccccua

SEQ ID NO: 1528883 - RNA, 19 nt, Artificial Sequence
  Description of Artificial Sequence: Synthetic oligonucleotide
gcuaaggccuuagguagca

SEQ ID NO: 1528884 - RNA, 19 nt, Artificial Sequence
  Description of Artificial Sequence: Synthetic oligonucleotide
ccaagagcuaaggccuuag

SEQ ID NO: 1528885 - RNA, 19 nt, Artificial Sequence
  Description of Artificial Sequence: Synthetic oligonucleotide
gcauagugcaugagaacaa

SEQ ID NO: 1528886 - RNA, 19 nt, Artificial Sequence
  Description of Artificial Sequence: Synthetic oligonucleotide
augaugaggccaagagcua

SEQ ID NO: 1528887 - RNA, 19 nt, Artificial Sequence
  Description of Artificial Sequence: Synthetic oligonucleotide
ggcggcuguagauggcuga

SEQ ID NO: 1528888 - RNA, 19 nt, Artificial Sequence
  Description of Artificial Sequence: Synthetic oligonucleotide
cugagaaguggcccaaguu

SEQ ID NO: 1528889 - RNA, 19 nt, Artificial Sequence
  Description of Artificial Sequence: Synthetic oligonucleotide
aggccuuagguagcaugaa

SEQ ID NO: 1528890 - RNA, 19 nt, Artificial Sequence
  Description of Artificial Sequence: Synthetic oligonucleotide
cuaaagcuagcaagcuguu

SEQ ID NO: 1528891 - RNA, 19 nt, Artificial Sequence
  Description of Artificial Sequence: Synthetic oligonucleotide
gcuguagauggcugaugaa

SEQ ID NO: 1528892 - RNA, 19 nt, Artificial Sequence
  Description of Artificial Sequence: Synthetic oligonucleotide
cccugaugcagaaaucucu

SEQ ID NO: 1528893 - RNA, 19 nt, Artificial Sequence
  Description of Artificial Sequence: Synthetic oligonucleotide
uguagggcugaggccuguu

SEQ ID NO: 1528894 - RNA, 19 nt, Artificial Sequence
  Description of Artificial Sequence: Synthetic oligonucleotide
cucggagguaccacucagu

SEQ ID NO: 1528895 - RNA, 19 nt, Artificial Sequence
  Description of Artificial Sequence: Synthetic oligonucleotide
gaggcccaacagcaugggu

SEQ ID NO: 1528896 - RNA, 19 nt, Artificial Sequence
  Description of Artificial Sequence: Synthetic oligonucleotide
ccgccaggugaugagcagg

SEQ ID NO: 1528897 - RNA, 19 nt, Artificial Sequence
  Description of Artificial Sequence: Synthetic oligonucleotide
gcaucucggagguaccacu

SEQ ID NO: 1528898 - RNA, 19 nt, Artificial Sequence
  Description of Artificial Sequence: Synthetic oligonucleotide
cagcaucucggagguacca

SEQ ID NO: 1528899 - RNA, 19 nt, Artificial Sequence
  Description of Artificial Sequence: Synthetic oligonucleotide
guagaggauuggguucucu

SEQ ID NO: 1528900 - RNA, 19 nt, Artificial Sequence
  Description of Artificial Sequence: Synthetic oligonucleotide
gggcacguggaguguuuca

SEQ ID NO: 1528901 - RNA, 19 nt, Artificial Sequence
  Description of Artificial Sequence: Synthetic oligonucleotide
caaaacugaagggcuugau

SEQ ID NO: 1528902 - RNA, 19 nt, Artificial Sequence
  Description of Artificial Sequence: Synthetic oligonucleotide
ggcgacgcagagacagcug

SEQ ID NO: 1528903 - RNA, 19 nt, Artificial Sequence
  Description of Artificial Sequence: Synthetic oligonucleotide
cccgaguacugacuagaga

SEQ ID NO: 1528904 - RNA, 19 nt, Artificial Sequence
  Description of Artificial Sequence: Synthetic oligonucleotide
ccaccaguacgauggguaa

SEQ ID NO: 1528905 - RNA, 19 nt, Artificial Sequence
  Description of Artificial Sequence: Synthetic oligonucleotide
ggccugagaggcauagucu

SEQ ID NO: 1528906 - RNA, 19 nt, Artificial Sequence
  Description of Artificial Sequence: Synthetic oligonucleotide
cacuuacauucuugauggu

SEQ ID NO: 1528907 - RNA, 19 nt, Artificial Sequence
  Description of Artificial Sequence: Synthetic oligonucleotide
cugcuauggggauggcgau

SEQ ID NO: 1528908 - RNA, 19 nt, Artificial Sequence
  Description of Artificial Sequence: Synthetic oligonucleotide
gucugagugcauagugcau

SEQ ID NO: 1528909 - RNA, 19 nt, Artificial Sequence
  Description of Artificial Sequence: Synthetic oligonucleotide
gccagaccugaguggaugu

SEQ ID NO: 1528910 - RNA, 19 nt, Artificial Sequence
  Description of Artificial Sequence: Synthetic oligonucleotide
cuucagcaggugacacccu

SEQ ID NO: 1528911 - RNA, 19 nt, Artificial Sequence
  Description of Artificial Sequence: Synthetic oligonucleotide
ggcacguggaguguuucau

SEQ ID NO: 1528912 - RNA, 19 nt, Artificial Sequence
  Description of Artificial Sequence: Synthetic oligonucleotide
uggcagcuucaggcacaug

SEQ ID NO: 1528913 - RNA, 19 nt, Artificial Sequence
  Description of Artificial Sequence: Synthetic oligonucleotide
ggguaaccugacucccacu

SEQ ID NO: 1528914 - RNA, 19 nt, Artificial Sequence
  Description of Artificial Sequence: Synthetic oligonucleotide
ggcugggguuauaaaacuu

SEQ ID NO: 1528915 - RNA, 19 nt, Artificial Sequence
  Description of Artificial Sequence: Synthetic oligonucleotide
cgacgcagagacagcugca

SEQ ID NO: 1528916 - RNA, 19 nt, Artificial Sequence
  Description of Artificial Sequence: Synthetic oligonucleotide
gccaagagcuaaggccuua

SEQ ID NO: 1528917 - RNA, 19 nt, Artificial Sequence
  Description of Artificial Sequence: Synthetic oligonucleotide
cagccagaccugaguggau

SEQ ID NO: 1528918 - RNA, 19 nt, Artificial Sequence
  Description of Artificial Sequence: Synthetic oligonucleotide
ccccaguaucuuggagaug

SEQ ID NO: 1528919 - RNA, 19 nt, Artificial Sequence
  Description of Artificial Sequence: Synthetic oligonucleotide
guguagggcugaggccugu

SEQ ID NO: 1528920 - RNA, 19 nt, Artificial Sequence
  Description of Artificial Sequence: Synthetic oligonucleotide
guccgccgcugggccacug

SEQ ID NO: 1528921 - RNA, 19 nt, Artificial Sequence
  Description of Artificial Sequence: Synthetic oligonucleotide
gcggcuguagauggcugau

SEQ ID NO: 1528922 - RNA, 19 nt, Artificial Sequence
  Description of Artificial Sequence: Synthetic oligonucleotide
ccaguacgauggguaaccu

SEQ ID NO: 1528923 - RNA, 19 nt, Artificial Sequence
  Description of Artificial Sequence: Synthetic oligonucleotide
gccaggugaugagcaggua

SEQ ID NO: 1528924 - RNA, 19 nt, Artificial Sequence
  Description of Artificial Sequence: Synthetic oligonucleotide
cgccgcugggccacuggca

SEQ ID NO: 1528925 - RNA, 19 nt, Artificial Sequence
  Description of Artificial Sequence: Synthetic oligonucleotide
gccccagguuauggcacuu

SEQ ID NO: 1528926 - RNA, 19 nt, Artificial Sequence
  Description of Artificial Sequence: Synthetic oligonucleotide
aaauaaauggucuuucacc

SEQ ID NO: 1528927 - RNA, 19 nt, Artificial Sequence
  Description of Artificial Sequence: Synthetic oligonucleotide
auaacugaggauuuaaggc

SEQ ID NO: 1528928 - RNA, 19 nt, Artificial Sequence
  Description of Artificial Sequence: Synthetic oligonucleotide
cuucauaccaaguagaggc

SEQ ID NO: 1528929 - RNA, 19 nt, Artificial Sequence
  Description of Artificial Sequence: Synthetic oligonucleotide
accuguaugacuucgaagg

SEQ ID NO: 1528930 - RNA, 19 nt, Artificial Sequence
  Description of Artificial Sequence: Synthetic oligonucleotide
aaugguaaggaucccagag

SEQ ID NO: 1528931 - RNA, 19 nt, Artificial Sequence
  Description of Artificial Sequence: Synthetic oligonucleotide
uuuagaauaacugaggauu

SEQ ID NO: 1528932 - RNA, 19 nt, Artificial Sequence
  Description of Artificial Sequence: Synthetic oligonucleotide
uacaagaucuugaugucgg

SEQ ID NO: 1528933 - RNA, 19 nt, Artificial Sequence
  Description of Artificial Sequence: Synthetic oligonucleotide
uaaggaguuauuauuagaa

SEQ ID NO: 1528934 - RNA, 19 nt, Artificial Sequence
  Description of Artificial Sequence: Synthetic oligonucleotide
ugucauauuguuuauugca

SEQ ID NO: 1528935 - RNA, 19 nt, Artificial Sequence
  Description of Artificial Sequence: Synthetic oligonucleotide
guuacaacuggauacuggg

SEQ ID NO: 1528936 - RNA, 19 nt, Artificial Sequence
  Description of Artificial Sequence: Synthetic oligonucleotide
aggcauaucacugugggcc

SEQ ID NO: 1528937 - RNA, 19 nt, Artificial Sequence
  Description of Artificial Sequence: Synthetic oligonucleotide
uauuggaaccagcagaucu

SEQ ID NO: 1528938 - RNA, 19 nt, Artificial Sequence
  Description of Artificial Sequence: Synthetic oligonucleotide
ugaauugccacuguuagca

SEQ ID NO: 1528939 - RNA, 19 nt, Artificial Sequence
  Description of Artificial Sequence: Synthetic oligonucleotide
uauagguuaagugauuugc

SEQ ID NO: 1528940 - RNA, 19 nt, Artificial Sequence
  Description of Artificial Sequence: Synthetic oligonucleotide
aaggaguuauuauuagaag

SEQ ID NO: 1528941 - RNA, 19 nt, Artificial Sequence
  Description of Artificial Sequence: Synthetic oligonucleotide
cauauuguuuauugcaucc

SEQ ID NO: 1528942 - RNA, 19 nt, Artificial Sequence
  Description of Artificial Sequence: Synthetic oligonucleotide
gaauuuucagccgacaggc

SEQ ID NO: 1528943 - RNA, 19 nt, Artificial Sequence
  Description of Artificial Sequence: Synthetic oligonucleotide
ugaagagccgguuacaacu

SEQ ID NO: 1528944 - RNA, 19 nt, Artificial Sequence
  Description of Artificial Sequence: Synthetic oligonucleotide
uuggacauacuagugaagg

SEQ ID NO: 1528945 - RNA, 19 nt, Artificial Sequence
  Description of Artificial Sequence: Synthetic oligonucleotide
uguaugacuucgaagguga

SEQ ID NO: 1528946 - RNA, 19 nt, Artificial Sequence
  Description of Artificial Sequence: Synthetic oligonucleotide
uauuguuuauugcauccag

SEQ ID NO: 1528947 - RNA, 19 nt, Artificial Sequence
  Description of Artificial Sequence: Synthetic oligonucleotide
acucgaauggcuugguccc

SEQ ID NO: 1528948 - RNA, 19 nt, Artificial Sequence
  Description of Artificial Sequence: Synthetic oligonucleotide
ugauccaaggugcauuagg

SEQ ID NO: 1528949 - RNA, 19 nt, Artificial Sequence
  Description of Artificial Sequence: Synthetic oligonucleotide
ucuuagaaugaauguacag

SEQ ID NO: 1528950 - RNA, 19 nt, Artificial Sequence
  Description of Artificial Sequence: Synthetic oligonucleotide
ucugagucacaaauaaaug

SEQ ID NO: 1528951 - RNA, 19 nt, Artificial Sequence
  Description of Artificial Sequence: Synthetic oligonucleotide
uuguuuauugcauccagga

SEQ ID NO: 1528952 - RNA, 19 nt, Artificial Sequence
  Description of Artificial Sequence: Synthetic oligonucleotide
ucaguauagguuaagugau

SEQ ID NO: 1528953 - RNA, 19 nt, Artificial Sequence
  Description of Artificial Sequence: Synthetic oligonucleotide
ucgaaggugaauuuucagc

SEQ ID NO: 1528954 - RNA, 19 nt, Artificial Sequence
  Description of Artificial Sequence: Synthetic oligonucleotide
gagauucccucccagagag

SEQ ID NO: 1528955 - RNA, 19 nt, Artificial Sequence
  Description of Artificial Sequence: Synthetic oligonucleotide
guggugacggaauagagug

SEQ ID NO: 1528956 - RNA, 19 nt, Artificial Sequence
  Description of Artificial Sequence: Synthetic oligonucleotide
uuucggagcacccacgucu

SEQ ID NO: 1528957 - RNA, 19 nt, Artificial Sequence
  Description of Artificial Sequence: Synthetic oligonucleotide
ugugcuucgaggugaagag

SEQ ID NO: 1528958 - RNA, 19 nt, Artificial Sequence
  Description of Artificial Sequence: Synthetic oligonucleotide
cucaguauagguuaaguga

SEQ ID NO: 1528959 - RNA, 19 nt, Artificial Sequence
  Description of Artificial Sequence: Synthetic oligonucleotide
gugauuugcacaaagcugc

SEQ ID NO: 1528960 - RNA, 19 nt, Artificial Sequence
  Description of Artificial Sequence: Synthetic oligonucleotide
ugcuucgaggugaagagcc

SEQ ID NO: 1528961 - RNA, 19 nt, Artificial Sequence
  Description of Artificial Sequence: Synthetic oligonucleotide
acugcuucgagcugagaac

SEQ ID NO: 1528962 - RNA, 19 nt, Artificial Sequence
  Description of Artificial Sequence: Synthetic oligonucleotide
agaagggagauucccuccc

SEQ ID NO: 1528963 - RNA, 19 nt, Artificial Sequence
  Description of Artificial Sequence: Synthetic oligonucleotide
cuucauccgacccaggugc

SEQ ID NO: 1528964 - RNA, 19 nt, Artificial Sequence
  Description of Artificial Sequence: Synthetic oligonucleotide
ggaguuauuauuagaaggg

SEQ ID NO: 1528965 - RNA, 19 nt, Artificial Sequence
  Description of Artificial Sequence: Synthetic oligonucleotide
uguacagacugcuucgagc

SEQ ID NO: 1528966 - RNA, 19 nt, Artificial Sequence
  Description of Artificial Sequence: Synthetic oligonucleotide
gaaggugaauuuucagccg

SEQ ID NO: 1528967 - RNA, 19 nt, Artificial Sequence
  Description of Artificial Sequence: Synthetic oligonucleotide
ucuacaggacacucgaaug

SEQ ID NO: 1528968 - RNA, 19 nt, Artificial Sequence
  Description of Artificial Sequence: Synthetic oligonucleotide
gauccaaggugcauuaggg

SEQ ID NO: 1528969 - RNA, 19 nt, Artificial Sequence
  Description of Artificial Sequence: Synthetic oligonucleotide
uagaaguuuggacauacua

SEQ ID NO: 1528970 - RNA, 19 nt, Artificial Sequence
  Description of Artificial Sequence: Synthetic oligonucleotide
agcugcuagaucuauguug

SEQ ID NO: 1528971 - RNA, 19 nt, Artificial Sequence
  Description of Artificial Sequence: Synthetic oligonucleotide
agccacaacugucugaguc

SEQ ID NO: 1528972 - RNA, 19 nt, Artificial Sequence
  Description of Artificial Sequence: Synthetic oligonucleotide
ugcuucauaccaaguagag

SEQ ID NO: 1528973 - RNA, 19 nt, Artificial Sequence
  Description of Artificial Sequence: Synthetic oligonucleotide
aacuuggaggcauaucacu

SEQ ID NO: 1528974 - RNA, 19 nt, Artificial Sequence
  Description of Artificial Sequence: Synthetic oligonucleotide
agcacugaacucugagucc

SEQ ID NO: 1528975 - RNA, 19 nt, Artificial Sequence
  Description of Artificial Sequence: Synthetic oligonucleotide
ucuagugaaugacuugcca

SEQ ID NO: 1528976 - RNA, 19 nt, Artificial Sequence
  Description of Artificial Sequence: Synthetic oligonucleotide
aguuuggacauacuaguga

SEQ ID NO: 1528977 - RNA, 19 nt, Artificial Sequence
  Description of Artificial Sequence: Synthetic oligonucleotide
cuacaggacacucgaaugg

SEQ ID NO: 1528978 - RNA, 19 nt, Artificial Sequence
  Description of Artificial Sequence: Synthetic oligonucleotide
cagacuauugcccaggcuc

SEQ ID NO: 1528979 - RNA, 19 nt, Artificial Sequence
  Description of Artificial Sequence: Synthetic oligonucleotide
uuuuagaauaacugaggau

SEQ ID NO: 1528980 - RNA, 19 nt, Artificial Sequence
  Description of Artificial Sequence: Synthetic oligonucleotide
uaaggcucaguauagguua

SEQ ID NO: 1528981 - RNA, 19 nt, Artificial Sequence
  Description of Artificial Sequence: Synthetic oligonucleotide
caaaugguaaggaucccag

SEQ ID NO: 1528982 - RNA, 19 nt, Artificial Sequence
  Description of Artificial Sequence: Synthetic oligonucleotide
ugcauuaggggagugagcu

SEQ ID NO: 1528983 - RNA, 19 nt, Artificial Sequence
  Description of Artificial Sequence: Synthetic oligonucleotide
gacauacuagugaaggucc

SEQ ID NO: 1528984 - RNA, 19 nt, Artificial Sequence
  Description of Artificial Sequence: Synthetic oligonucleotide
ucccaaacaugauccaagg

SEQ ID NO: 1528985 - RNA, 19 nt, Artificial Sequence
  Description of Artificial Sequence: Synthetic oligonucleotide
cacucgaauggcuuggucc

SEQ ID NO: 1528986 - RNA, 19 nt, Artificial Sequence
  Description of Artificial Sequence: Synthetic oligonucleotide
agaucuauguuggugagcu

SEQ ID NO: 1528987 - RNA, 19 nt, Artificial Sequence
  Description of Artificial Sequence: Synthetic oligonucleotide
ugccugaagagguuggugc

SEQ ID NO: 1528988 - RNA, 19 nt, Artificial Sequence
  Description of Artificial Sequence: Synthetic oligonucleotide
uugucauauuguuuauugc

SEQ ID NO: 1528989 - RNA, 19 nt, Artificial Sequence
  Description of Artificial Sequence: Synthetic oligonucleotide
auagacaggguucauccca

SEQ ID NO: 1528990 - RNA, 19 nt, Artificial Sequence
  Description of Artificial Sequence: Synthetic oligonucleotide
auacuagugaagguccagc

SEQ ID NO: 1528991 - RNA, 19 nt, Artificial Sequence
  Description of Artificial Sequence: Synthetic oligonucleotide
uuuggacauacuagugaag

SEQ ID NO: 1528992 - RNA, 19 nt, Artificial Sequence
  Description of Artificial Sequence: Synthetic oligonucleotide
uucuacaggacacucgaau

SEQ ID NO: 1528993 - RNA, 19 nt, Artificial Sequence
  Description of Artificial Sequence: Synthetic oligonucleotide
uuagaauaacugaggauuu

SEQ ID NO: 1528994 - RNA, 19 nt, Artificial Sequence
  Description of Artificial Sequence: Synthetic oligonucleotide
gaggauuuaaggcucagua

SEQ ID NO: 1528995 - RNA, 19 nt, Artificial Sequence
  Description of Artificial Sequence: Synthetic oligonucleotide
acaagaggacuguccaaac

SEQ ID NO: 1528996 - RNA, 19 nt, Artificial Sequence
  Description of Artificial Sequence: Synthetic oligonucleotide
cagagucaaagucagucag

SEQ ID NO: 1528997 - RNA, 19 nt, Artificial Sequence
  Description of Artificial Sequence: Synthetic oligonucleotide
uuacaacuggauacugggc

SEQ ID NO: 1528998 - RNA, 19 nt, Artificial Sequence
  Description of Artificial Sequence: Synthetic oligonucleotide
cuuagaaguuuggacauac

SEQ ID NO: 1528999 - RNA, 19 nt, Artificial Sequence
  Description of Artificial Sequence: Synthetic oligonucleotide
accgucugcauagacaggg

SEQ ID NO: 1529000 - RNA, 19 nt, Artificial Sequence
  Description of Artificial Sequence: Synthetic oligonucleotide
ggugagcucacuuuggccc

SEQ ID NO: 1529001 - RNA, 19 nt, Artificial Sequence
  Description of Artificial Sequence: Synthetic oligonucleotide
aaaugguaaggaucccaga

SEQ ID NO: 1529002 - RNA, 19 nt, Artificial Sequence
  Description of Artificial Sequence: Synthetic oligonucleotide
caggcuuccagacuauugc

SEQ ID NO: 1529003 - RNA, 19 nt, Artificial Sequence
  Description of Artificial Sequence: Synthetic oligonucleotide
cauuaggggagugagcuag

SEQ ID NO: 1529004 - RNA, 19 nt, Artificial Sequence
  Description of Artificial Sequence: Synthetic oligonucleotide
caauuccagagucaaaguc

SEQ ID NO: 1529005 - RNA, 19 nt, Artificial Sequence
  Description of Artificial Sequence: Synthetic oligonucleotide
ucaaaugguaaggauccca

SEQ ID NO: 1529006 - RNA, 19 nt, Artificial Sequence
  Description of Artificial Sequence: Synthetic oligonucleotide
aagagccgguuacaacugg

SEQ ID NO: 1529007 - RNA, 19 nt, Artificial Sequence
  Description of Artificial Sequence: Synthetic oligonucleotide
acuucgaaggugaauuuuc

SEQ ID NO: 1529008 - RNA, 19 nt, Artificial Sequence
  Description of Artificial Sequence: Synthetic oligonucleotide
auuuaaggcucaguauagg

SEQ ID NO: 1529009 - RNA, 19 nt, Artificial Sequence
  Description of Artificial Sequence: Synthetic oligonucleotide
gugagugauacuguggccc

SEQ ID NO: 1529010 - RNA, 19 nt, Artificial Sequence
  Description of Artificial Sequence: Synthetic oligonucleotide
uuggaggcauaucacugug

SEQ ID NO: 1529011 - RNA, 19 nt, Artificial Sequence
  Description of Artificial Sequence: Synthetic oligonucleotide
guacaagaucuugaugucg

SEQ ID NO: 1529012 - RNA, 19 nt, Artificial Sequence
  Description of Artificial Sequence: Synthetic oligonucleotide
guuagcaggugugucagag

SEQ ID NO: 1529013 - RNA, 19 nt, Artificial Sequence
  Description of Artificial Sequence: Synthetic oligonucleotide
ucuugacccaaguuccuca

SEQ ID NO: 1529014 - RNA, 19 nt, Artificial Sequence
  Description of Artificial Sequence: Synthetic oligonucleotide
uuggugagcucacuuuggc

SEQ ID NO: 1529015 - RNA, 19 nt, Artificial Sequence
  Description of Artificial Sequence: Synthetic oligonucleotide
aacuuggagucuuccagau

SEQ ID NO: 1529016 - RNA, 19 nt, Artificial Sequence
  Description of Artificial Sequence: Synthetic oligonucleotide
agacuauugcccaggcucc

SEQ ID NO: 1529017 - RNA, 19 nt, Artificial Sequence
  Description of Artificial Sequence: Synthetic oligonucleotide
agaaucaucuguacugaag

SEQ ID NO: 1529018 - RNA, 19 nt, Artificial Sequence
  Description of Artificial Sequence: Synthetic oligonucleotide
guaaggaucccagaguuca

SEQ ID NO: 1529019 - RNA, 19 nt, Artificial Sequence
  Description of Artificial Sequence: Synthetic oligonucleotide
augucccaagaacaagagg

SEQ ID NO: 1529020 - RNA, 19 nt, Artificial Sequence
  Description of Artificial Sequence: Synthetic oligonucleotide
cuagaucuauguuggugag

SEQ ID NO: 1529021 - RNA, 19 nt, Artificial Sequence
  Description of Artificial Sequence: Synthetic oligonucleotide
aacuggauacugggcagcg

SEQ ID NO: 1529022 - RNA, 19 nt, Artificial Sequence
  Description of Artificial Sequence: Synthetic oligonucleotide
cuucgagcugagaaccugg

SEQ ID NO: 1529023 - RNA, 19 nt, Artificial Sequence
  Description of Artificial Sequence: Synthetic oligonucleotide
uggaggcauaucacugugg

SEQ ID NO: 1529024 - RNA, 19 nt, Artificial Sequence
  Description of Artificial Sequence: Synthetic oligonucleotide
uucauaccaaguagaggcu

SEQ ID NO: 1529025 - RNA, 19 nt, Artificial Sequence
  Description of Artificial Sequence: Synthetic oligonucleotide
uggcugaugucccaagaac

SEQ ID NO: 1529026 - RNA, 19 nt, Artificial Sequence
  Description of Artificial Sequence: Synthetic oligonucleotide
ugguggugacggaauagag

SEQ ID NO: 1529027 - RNA, 19 nt, Artificial Sequence
  Description of Artificial Sequence: Synthetic oligonucleotide
uguacugaagcugccuggc

SEQ ID NO: 1529028 - RNA, 19 nt, Artificial Sequence
  Description of Artificial Sequence: Synthetic oligonucleotide
gaggugaagagccgguuac

SEQ ID NO: 1529029 - RNA, 19 nt, Artificial Sequence
  Description of Artificial Sequence: Synthetic oligonucleotide
ugacaucaaaugguaagga

SEQ ID NO: 1529030 - RNA, 19 nt, Artificial Sequence
  Description of Artificial Sequence: Synthetic oligonucleotide
uugaugucggcugugcugu

SEQ ID NO: 1529031 - RNA, 19 nt, Artificial Sequence
  Description of Artificial Sequence: Synthetic oligonucleotide
ugugccuuagaaguuugga

SEQ ID NO: 1529032 - RNA, 19 nt, Artificial Sequence
  Description of Artificial Sequence: Synthetic oligonucleotide
augacuucgaaggugaauu

SEQ ID NO: 1529033 - RNA, 19 nt, Artificial Sequence
  Description of Artificial Sequence: Synthetic oligonucleotide
uggaccacaucugggacag

SEQ ID NO: 1529034 - RNA, 19 nt, Artificial Sequence
  Description of Artificial Sequence: Synthetic oligonucleotide
ucuauguuggugagcucac

SEQ ID NO: 1529035 - RNA, 19 nt, Artificial Sequence
  Description of Artificial Sequence: Synthetic oligonucleotide
acuagugaagguccagcca

SEQ ID NO: 1529036 - RNA, 19 nt, Artificial Sequence
  Description of Artificial Sequence: Synthetic oligonucleotide
ucacagaagugacaucaaa

SEQ ID NO: 1529037 - RNA, 19 nt, Artificial Sequence
  Description of Artificial Sequence: Synthetic oligonucleotide
augguaaggaucccagagu

SEQ ID NO: 1529038 - RNA, 19 nt, Artificial Sequence
  Description of Artificial Sequence: Synthetic oligonucleotide
aggauuuaaggcucaguau

SEQ ID NO: 1529039 - RNA, 19 nt, Artificial Sequence
  Description of Artificial Sequence: Synthetic oligonucleotide
ucauaccaaguagaggcug

SEQ ID NO: 1529040 - RNA, 19 nt, Artificial Sequence
  Description of Artificial Sequence: Synthetic oligonucleotide
gucgccaccauugugugcc

SEQ ID NO: 1529041 - RNA, 19 nt, Artificial Sequence
  Description of Artificial Sequence: Synthetic oligonucleotide
uuuggcccgggcuacucag

SEQ ID NO: 1529042 - RNA, 19 nt, Artificial Sequence
  Description of Artificial Sequence: Synthetic oligonucleotide
auaccaaguagaggcugcc

SEQ ID NO: 1529043 - RNA, 19 nt, Artificial Sequence
  Description of Artificial Sequence: Synthetic oligonucleotide
cuucuguacaccagaaaga

SEQ ID NO: 1529044 - RNA, 19 nt, Artificial Sequence
  Description of Artificial Sequence: Synthetic oligonucleotide
uuagaaguuuggacauacu

SEQ ID NO: 1529045 - RNA, 19 nt, Artificial Sequence
  Description of Artificial Sequence: Synthetic oligonucleotide
ggauuuaaggcucaguaua

SEQ ID NO: 1529046 - RNA, 19 nt, Artificial Sequence
  Description of Artificial Sequence: Synthetic oligonucleotide
caggugagugauacugugg

SEQ ID NO: 1529047 - RNA, 19 nt, Artificial Sequence
  Description of Artificial Sequence: Synthetic oligonucleotide
ggugugagagaacuuggag

SEQ ID NO: 1529048 - RNA, 19 nt, Artificial Sequence
  Description of Artificial Sequence: Synthetic oligonucleotide
uggacauacuagugaaggu

SEQ ID NO: 1529049 - RNA, 19 nt, Artificial Sequence
  Description of Artificial Sequence: Synthetic oligonucleotide
uacaggacacucgaauggc

SEQ ID NO: 1529050 - RNA, 19 nt, Artificial Sequence
  Description of Artificial Sequence: Synthetic oligonucleotide
gguuaagugauuugcacaa

SEQ ID NO: 1529051 - RNA, 19 nt, Artificial Sequence
  Description of Artificial Sequence: Synthetic oligonucleotide
ugauacuguggcccuucag

SEQ ID NO: 1529052 - RNA, 19 nt, Artificial Sequence
  Description of Artificial Sequence: Synthetic oligonucleotide
gaguuauuauuagaaggga

SEQ ID NO: 1529053 - RNA, 19 nt, Artificial Sequence
  Description of Artificial Sequence: Synthetic oligonucleotide
cugaauugccacuguuagc

SEQ ID NO: 1529054 - RNA, 19 nt, Artificial Sequence
  Description of Artificial Sequence: Synthetic oligonucleotide
gugccuuagaaguuuggac

SEQ ID NO: 1529055 - RNA, 19 nt, Artificial Sequence
  Description of Artificial Sequence: Synthetic oligonucleotide
cuggcuggagaacuguggc

SEQ ID NO: 1529056 - RNA, 19 nt, Artificial Sequence
  Description of Artificial Sequence: Synthetic oligonucleotide
ugcucugcucuagugaaug

SEQ ID NO: 1529057 - RNA, 19 nt, Artificial Sequence
  Description of Artificial Sequence: Synthetic oligonucleotide
ugagugauacuguggcccu

SEQ ID NO: 1529058 - RNA, 19 nt, Artificial Sequence
  Description of Artificial Sequence: Synthetic oligonucleotide
cauagacaggguucauccc

SEQ ID NO: 1529059 - RNA, 19 nt, Artificial Sequence
  Description of Artificial Sequence: Synthetic oligonucleotide
cucaguucacugcugggug

SEQ ID NO: 1529060 - RNA, 19 nt, Artificial Sequence
  Description of Artificial Sequence: Synthetic oligonucleotide
cucuagugaaugacuugcc

SEQ ID NO: 1529061 - RNA, 19 nt, Artificial Sequence
  Description of Artificial Sequence: Synthetic oligonucleotide
acaacugucugagucacaa

SEQ ID NO: 1529062 - RNA, 19 nt, Artificial Sequence
  Description of Artificial Sequence: Synthetic oligonucleotide
gaauugccacuguuagcag

SEQ ID NO: 1529063 - RNA, 19 nt, Artificial Sequence
  Description of Artificial Sequence: Synthetic oligonucleotide
auauuguuuauugcaucca

SEQ ID NO: 1529064 - RNA, 19 nt, Artificial Sequence
  Description of Artificial Sequence: Synthetic oligonucleotide
aucccaaacaugauccaag

SEQ ID NO: 1529065 - RNA, 19 nt, Artificial Sequence
  Description of Artificial Sequence: Synthetic oligonucleotide
ccauugugugccuucaugc

SEQ ID NO: 1529066 - RNA, 19 nt, Artificial Sequence
  Description of Artificial Sequence: Synthetic oligonucleotide
gccgguuacaacuggauac

SEQ ID NO: 1529067 - RNA, 19 nt, Artificial Sequence
  Description of Artificial Sequence: Synthetic oligonucleotide
ucuugaugucggcugugcu

SEQ ID NO: 1529068 - RNA, 19 nt, Artificial Sequence
  Description of Artificial Sequence: Synthetic oligonucleotide
gacggaauagagugcuuca

SEQ ID NO: 1529069 - RNA, 19 nt, Artificial Sequence
  Description of Artificial Sequence: Synthetic oligonucleotide
ucagucaggcuuccagacu

SEQ ID NO: 1529070 - RNA, 19 nt, Artificial Sequence
  Description of Artificial Sequence: Synthetic oligonucleotide
ucagccgacaggcuuuguc

SEQ ID NO: 1529071 - RNA, 19 nt, Artificial Sequence
  Description of Artificial Sequence: Synthetic oligonucleotide
agugauacuguggcccuuc

SEQ ID NO: 1529072 - RNA, 19 nt, Artificial Sequence
  Description of Artificial Sequence: Synthetic oligonucleotide
ucagaugcucugcucuagu

SEQ ID NO: 1529073 - RNA, 19 nt, Artificial Sequence
  Description of Artificial Sequence: Synthetic oligonucleotide
cugcuucgagcugagaacc

SEQ ID NO: 1529074 - RNA, 19 nt, Artificial Sequence
  Description of Artificial Sequence: Synthetic oligonucleotide
gacaggguucaucccaaac

SEQ ID NO: 1529075 - RNA, 19 nt, Artificial Sequence
  Description of Artificial Sequence: Synthetic oligonucleotide
gcucaguauagguuaagug

SEQ ID NO: 1529076 - RNA, 19 nt, Artificial Sequence
  Description of Artificial Sequence: Synthetic oligonucleotide
gagugcuucauaccaagua

SEQ ID NO: 1529077 - RNA, 19 nt, Artificial Sequence
  Description of Artificial Sequence: Synthetic oligonucleotide
gguuacaacuggauacugg

SEQ ID NO: 1529078 - RNA, 19 nt, Artificial Sequence
  Description of Artificial Sequence: Synthetic oligonucleotide
gaucccagaguucaaggcu

SEQ ID NO: 1529079 - RNA, 19 nt, Artificial Sequence
  Description of Artificial Sequence: Synthetic oligonucleotide
gaaccuccggucaucauca

SEQ ID NO: 1529080 - RNA, 19 nt, Artificial Sequence
  Description of Artificial Sequence: Synthetic oligonucleotide
gaggcauaucacugugggc

SEQ ID NO: 1529081 - RNA, 19 nt, Artificial Sequence
  Description of Artificial Sequence: Synthetic oligonucleotide
cuugugagccccuggcuuc

SEQ ID NO: 1529082 - RNA, 19 nt, Artificial Sequence
  Description of Artificial Sequence: Synthetic oligonucleotide
gggagauucccucccagag

SEQ ID NO: 1529083 - RNA, 19 nt, Artificial Sequence
  Description of Artificial Sequence: Synthetic oligonucleotide
ccggucaucaucauguuuc

SEQ ID NO: 1529084 - RNA, 19 nt, Artificial Sequence
  Description of Artificial Sequence: Synthetic oligonucleotide
uggugacggaauagagugc

SEQ ID NO: 1529085 - RNA, 19 nt, Artificial Sequence
  Description of Artificial Sequence: Synthetic oligonucleotide
cuguaugacuucgaaggug

SEQ ID NO: 1529086 - RNA, 19 nt, Artificial Sequence
  Description of Artificial Sequence: Synthetic oligonucleotide
ccuaaggaguuauuauuag

SEQ ID NO: 1529087 - RNA, 19 nt, Artificial Sequence
  Description of Artificial Sequence: Synthetic oligonucleotide
aguccuugugagccccugg

SEQ ID NO: 1529088 - RNA, 19 nt, Artificial Sequence
  Description of Artificial Sequence: Synthetic oligonucleotide
cuugacccaaguuccucac

SEQ ID NO: 1529089 - RNA, 19 nt, Artificial Sequence
  Description of Artificial Sequence: Synthetic oligonucleotide
uuauugcauccaggaaagg

SEQ ID NO: 1529090 - RNA, 19 nt, Artificial Sequence
  Description of Artificial Sequence: Synthetic oligonucleotide
gcucuagugaaugacuugc

SEQ ID NO: 1529091 - RNA, 19 nt, Artificial Sequence
  Description of Artificial Sequence: Synthetic oligonucleotide
gaugucggcugugcugucg

SEQ ID NO: 1529092 - RNA, 19 nt, Artificial Sequence
  Description of Artificial Sequence: Synthetic oligonucleotide
augucaauuccagagucaa

SEQ ID NO: 1529093 - RNA, 19 nt, Artificial Sequence
  Description of Artificial Sequence: Synthetic oligonucleotide
gugugagagaacuuggagu

SEQ ID NO: 1529094 - RNA, 19 nt, Artificial Sequence
  Description of Artificial Sequence: Synthetic oligonucleotide
cuucgaggugaagagccgg

SEQ ID NO: 1529095 - RNA, 19 nt, Artificial Sequence
  Description of Artificial Sequence: Synthetic oligonucleotide
agagcucuuguucucugaa

SEQ ID NO: 1529096 - RNA, 19 nt, Artificial Sequence
  Description of Artificial Sequence: Synthetic oligonucleotide
cauacuagugaagguccag

SEQ ID NO: 1529097 - RNA, 19 nt, Artificial Sequence
  Description of Artificial Sequence: Synthetic oligonucleotide
caccuuuauuggaaccagc

SEQ ID NO: 1529098 - RNA, 19 nt, Artificial Sequence
  Description of Artificial Sequence: Synthetic oligonucleotide
cuucgaaggugaauuuuca

SEQ ID NO: 1529099 - RNA, 19 nt, Artificial Sequence
  Description of Artificial Sequence: Synthetic oligonucleotide
acacucgaauggcuugguc

SEQ ID NO: 1529100 - RNA, 19 nt, Artificial Sequence
  Description of Artificial Sequence: Synthetic oligonucleotide
ucgagcugagaaccuggca

SEQ ID NO: 1529101 - RNA, 19 nt, Artificial Sequence
  Description of Artificial Sequence: Synthetic oligonucleotide
guuccucacaggcagagcu

SEQ ID NO: 1529102 - RNA, 19 nt, Artificial Sequence
  Description of Artificial Sequence: Synthetic oligonucleotide
uaugacuucgaaggugaau

SEQ ID NO: 1529103 - RNA, 19 nt, Artificial Sequence
  Description of Artificial Sequence: Synthetic oligonucleotide
uagaucuauguuggugagc

SEQ ID NO: 1529104 - RNA, 19 nt, Artificial Sequence
  Description of Artificial Sequence: Synthetic oligonucleotide
ugucaauuccagagucaaa

SEQ ID NO: 1529105 - RNA, 19 nt, Artificial Sequence
  Description of Artificial Sequence: Synthetic oligonucleotide
uccuucuguacaccagaaa

SEQ ID NO: 1529106 - RNA, 19 nt, Artificial Sequence
  Description of Artificial Sequence: Synthetic oligonucleotide
acccacgucuugcaggugu

SEQ ID NO: 1529107 - RNA, 19 nt, Artificial Sequence
  Description of Artificial Sequence: Synthetic oligonucleotide
ugagagaacuuggagucuu

SEQ ID NO: 1529108 - RNA, 19 nt, Artificial Sequence
  Description of Artificial Sequence: Synthetic oligonucleotide
agcaggaaaagagcucuug

SEQ ID NO: 1529109 - RNA, 19 nt, Artificial Sequence
  Description of Artificial Sequence: Synthetic oligonucleotide
ggacauacuagugaagguc

SEQ ID NO: 1529110 - RNA, 19 nt, Artificial Sequence
  Description of Artificial Sequence: Synthetic oligonucleotide
guccuugugagccccuggc

SEQ ID NO: 1529111 - RNA, 19 nt, Artificial Sequence
  Description of Artificial Sequence: Synthetic oligonucleotide
gcucacagaagugacauca

SEQ ID NO: 1529112 - RNA, 19 nt, Artificial Sequence
  Description of Artificial Sequence: Synthetic oligonucleotide
ugaggauuuaaggcucagu

SEQ ID NO: 1529113 - RNA, 19 nt, Artificial Sequence
  Description of Artificial Sequence: Synthetic oligonucleotide
gagucuuccagaugaggua

SEQ ID NO: 1529114 - RNA, 19 nt, Artificial Sequence
  Description of Artificial Sequence: Synthetic oligonucleotide
uaucacugugggccacgag

SEQ ID NO: 1529115 - RNA, 19 nt, Artificial Sequence
  Description of Artificial Sequence: Synthetic oligonucleotide
uuaggggagugagcuagug

SEQ ID NO: 1529116 - RNA, 19 nt, Artificial Sequence
  Description of Artificial Sequence: Synthetic oligonucleotide
gcuucauaccaaguagagg

SEQ ID NO: 1529117 - RNA, 19 nt, Artificial Sequence
  Description of Artificial Sequence: Synthetic oligonucleotide
acgucuugcagguguuucu

SEQ ID NO: 1529118 - RNA, 19 nt, Artificial Sequence
  Description of Artificial Sequence: Synthetic oligonucleotide
uuuucggagcacccacguc

SEQ ID NO: 1529119 - RNA, 19 nt, Artificial Sequence
  Description of Artificial Sequence: Synthetic oligonucleotide
cauaucacugugggccacg

SEQ ID NO: 1529120 - RNA, 19 nt, Artificial Sequence
  Description of Artificial Sequence: Synthetic oligonucleotide
cucugcucuagugaaugac

SEQ ID NO: 1529121 - RNA, 19 nt, Artificial Sequence
  Description of Artificial Sequence: Synthetic oligonucleotide
gggucuugacccaaguucc

SEQ ID NO: 1529122 - RNA, 19 nt, Artificial Sequence
  Description of Artificial Sequence: Synthetic oligonucleotide
uagaauaacugaggauuua

SEQ ID NO: 1529123 - RNA, 19 nt, Artificial Sequence
  Description of Artificial Sequence: Synthetic oligonucleotide
agguccagccacaacuguc

SEQ ID NO: 1529124 - RNA, 19 nt, Artificial Sequence
  Description of Artificial Sequence: Synthetic oligonucleotide
augacuugccacagccuuc

SEQ ID NO: 1529125 - RNA, 19 nt, Artificial Sequence
  Description of Artificial Sequence: Synthetic oligonucleotide
gguccaugggcccuaagga

SEQ ID NO: 1529126 - RNA, 19 nt, Artificial Sequence
  Description of Artificial Sequence: Synthetic oligonucleotide
ugacuucgaaggugaauuu

SEQ ID NO: 1529127 - RNA, 19 nt, Artificial Sequence
  Description of Artificial Sequence: Synthetic oligonucleotide
cagguguuucuuagaauga

SEQ ID NO: 1529128 - RNA, 19 nt, Artificial Sequence
  Description of Artificial Sequence: Synthetic oligonucleotide
ugcuucgagcugagaaccu

SEQ ID NO: 1529129 - RNA, 19 nt, Artificial Sequence
  Description of Artificial Sequence: Synthetic oligonucleotide
agguguuucuuagaaugaa

SEQ ID NO: 1529130 - RNA, 19 nt, Artificial Sequence
  Description of Artificial Sequence: Synthetic oligonucleotide
gaagggagauucccuccca

SEQ ID NO: 1529131 - RNA, 19 nt, Artificial Sequence
  Description of Artificial Sequence: Synthetic oligonucleotide
cagccgacaggcuuuguca

SEQ ID NO: 1529132 - RNA, 19 nt, Artificial Sequence
  Description of Artificial Sequence: Synthetic oligonucleotide
ggugagugauacuguggcc

SEQ ID NO: 1529133 - RNA, 19 nt, Artificial Sequence
  Description of Artificial Sequence: Synthetic oligonucleotide
caugauccaaggugcauua

SEQ ID NO: 1529134 - RNA, 19 nt, Artificial Sequence
  Description of Artificial Sequence: Synthetic oligonucleotide
agcucacuuuggcccgggc

SEQ ID NO: 1529135 - RNA, 19 nt, Artificial Sequence
  Description of Artificial Sequence: Synthetic oligonucleotide
uggugggucuugacccaag

SEQ ID NO: 1529136 - RNA, 19 nt, Artificial Sequence
  Description of Artificial Sequence: Synthetic oligonucleotide
ugagaaccuggcacagcau

SEQ ID NO: 1529137 - RNA, 19 nt, Artificial Sequence
  Description of Artificial Sequence: Synthetic oligonucleotide
uccggucaucaucauguuu

SEQ ID NO: 1529138 - RNA, 19 nt, Artificial Sequence
  Description of Artificial Sequence: Synthetic oligonucleotide
gugcuucauaccaaguaga

SEQ ID NO: 1529139 - RNA, 19 nt, Artificial Sequence
  Description of Artificial Sequence: Synthetic oligonucleotide
cugaguccuugugagcccc

SEQ ID NO: 1529140 - RNA, 19 nt, Artificial Sequence
  Description of Artificial Sequence: Synthetic oligonucleotide
agccuacugcuccugugcu

SEQ ID NO: 1529141 - RNA, 19 nt, Artificial Sequence
  Description of Artificial Sequence: Synthetic oligonucleotide
aucuguacugaagcugccu

SEQ ID NO: 1529142 - RNA, 19 nt, Artificial Sequence
  Description of Artificial Sequence: Synthetic oligonucleotide
uguuagcaggugugucaga

SEQ ID NO: 1529143 - RNA, 19 nt, Artificial Sequence
  Description of Artificial Sequence: Synthetic oligonucleotide
cugucgccaccauugugug

SEQ ID NO: 1529144 - RNA, 19 nt, Artificial Sequence
  Description of Artificial Sequence: Synthetic oligonucleotide
gcuucauccgacccaggug

SEQ ID NO: 1529145 - RNA, 19 nt, Artificial Sequence
  Description of Artificial Sequence: Synthetic oligonucleotide
gaggcaagucuuguuccac

SEQ ID NO: 1529146 - RNA, 19 nt, Artificial Sequence
  Description of Artificial Sequence: Synthetic oligonucleotide
cacaaagcugcaagaaugu

SEQ ID NO: 1529147 - RNA, 19 nt, Artificial Sequence
  Description of Artificial Sequence: Synthetic oligonucleotide
ucgaauggcuuggucccca

SEQ ID NO: 1529148 - RNA, 19 nt, Artificial Sequence
  Description of Artificial Sequence: Synthetic oligonucleotide
auagagugcuucauaccaa

SEQ ID NO: 1529149 - RNA, 19 nt, Artificial Sequence
  Description of Artificial Sequence: Synthetic oligonucleotide
cuauugcccaggcuccauc

SEQ ID NO: 1529150 - RNA, 19 nt, Artificial Sequence
  Description of Artificial Sequence: Synthetic oligonucleotide
ggacacucgaauggcuugg

SEQ ID NO: 1529151 - RNA, 19 nt, Artificial Sequence
  Description of Artificial Sequence: Synthetic oligonucleotide
gucauauuguuuauugcau

SEQ ID NO: 1529152 - RNA, 19 nt, Artificial Sequence
  Description of Artificial Sequence: Synthetic oligonucleotide
uucggagcacccacgucuu

SEQ ID NO: 1529153 - RNA, 19 nt, Artificial Sequence
  Description of Artificial Sequence: Synthetic oligonucleotide
agccgguuacaacuggaua

SEQ ID NO: 1529154 - RNA, 19 nt, Artificial Sequence
  Description of Artificial Sequence: Synthetic oligonucleotide
ggcuuuucggagcacccac

SEQ ID NO: 1529155 - RNA, 19 nt, Artificial Sequence
  Description of Artificial Sequence: Synthetic oligonucleotide
cagacugcuucgagcugag

SEQ ID NO: 1529156 - RNA, 19 nt, Artificial Sequence
  Description of Artificial Sequence: Synthetic oligonucleotide
acauacuagugaaggucca

SEQ ID NO: 1529157 - RNA, 19 nt, Artificial Sequence
  Description of Artificial Sequence: Synthetic oligonucleotide
auagacugggauggccugu

SEQ ID NO: 1529158 - RNA, 19 nt, Artificial Sequence
  Description of Artificial Sequence: Synthetic oligonucleotide
gaggcugccggugccagca

SEQ ID NO: 1529159 - RNA, 19 nt, Artificial Sequence
  Description of Artificial Sequence: Synthetic oligonucleotide
ugugugccuucaugcugug

SEQ ID NO: 1529160 - RNA, 19 nt, Artificial Sequence
  Description of Artificial Sequence: Synthetic oligonucleotide
augauccaaggugcauuag

SEQ ID NO: 1529161 - RNA, 19 nt, Artificial Sequence
  Description of Artificial Sequence: Synthetic oligonucleotide
aggacuguccaaacuugga

SEQ ID NO: 1529162 - RNA, 19 nt, Artificial Sequence
  Description of Artificial Sequence: Synthetic oligonucleotide
ggagauucccucccagaga

SEQ ID NO: 1529163 - RNA, 19 nt, Artificial Sequence
  Description of Artificial Sequence: Synthetic oligonucleotide
aagucuuguuccaccuuua

SEQ ID NO: 1529164 - RNA, 19 nt, Artificial Sequence
  Description of Artificial Sequence: Synthetic oligonucleotide
gugggccacgagaacgagg

SEQ ID NO: 1529165 - RNA, 19 nt, Artificial Sequence
  Description of Artificial Sequence: Synthetic oligonucleotide
acggaauagagugcuucau

SEQ ID NO: 1529166 - RNA, 19 nt, Artificial Sequence
  Description of Artificial Sequence: Synthetic oligonucleotide
ucauccgacccaggugcug

SEQ ID NO: 1529167 - RNA, 19 nt, Artificial Sequence
  Description of Artificial Sequence: Synthetic oligonucleotide
ggcggagcugccaaguuac

SEQ ID NO: 1529168 - RNA, 19 nt, Artificial Sequence
  Description of Artificial Sequence: Synthetic oligonucleotide
agagccgguuacaacugga

SEQ ID NO: 1529169 - RNA, 19 nt, Artificial Sequence
  Description of Artificial Sequence: Synthetic oligonucleotide
ggugccagcacugaacucu

SEQ ID NO: 1529170 - RNA, 19 nt, Artificial Sequence
  Description of Artificial Sequence: Synthetic oligonucleotide
caggguucaucccaaacau

SEQ ID NO: 1529171 - RNA, 19 nt, Artificial Sequence
  Description of Artificial Sequence: Synthetic oligonucleotide
gcaggugaaccuccgguca

SEQ ID NO: 1529172 - RNA, 19 nt, Artificial Sequence
  Description of Artificial Sequence: Synthetic oligonucleotide
auaucacugugggccacga

SEQ ID NO: 1529173 - RNA, 19 nt, Artificial Sequence
  Description of Artificial Sequence: Synthetic oligonucleotide
ggcagcggcuuuucggagc

SEQ ID NO: 1529174 - RNA, 19 nt, Artificial Sequence
  Description of Artificial Sequence: Synthetic oligonucleotide
aggugcauuaggggaguga

SEQ ID NO: 1529175 - RNA, 19 nt, Artificial Sequence
  Description of Artificial Sequence: Synthetic oligonucleotide
gagagaacuuggagucuuc

SEQ ID NO: 1529176 - RNA, 19 nt, Artificial Sequence
  Description of Artificial Sequence: Synthetic oligonucleotide
gcuuuucggagcacccacg

SEQ ID NO: 1529177 - RNA, 19 nt, Artificial Sequence
  Description of Artificial Sequence: Synthetic oligonucleotide
gugcuucgaggugaagagc

SEQ ID NO: 1529178 - RNA, 19 nt, Artificial Sequence
  Description of Artificial Sequence: Synthetic oligonucleotide
augaauguacagacugcuu

SEQ ID NO: 1529179 - RNA, 19 nt, Artificial Sequence
  Description of Artificial Sequence: Synthetic oligonucleotide
gugcauuaggggagugagc

SEQ ID NO: 1529180 - RNA, 19 nt, Artificial Sequence
  Description of Artificial Sequence: Synthetic oligonucleotide
ggagucuuccagaugaggu

SEQ ID NO: 1529181 - RNA, 19 nt, Artificial Sequence
  Description of Artificial Sequence: Synthetic oligonucleotide
cucgaauggcuuggucccc

SEQ ID NO: 1529182 - RNA, 19 nt, Artificial Sequence
  Description of Artificial Sequence: Synthetic oligonucleotide
ggaggcaagucuuguucca

SEQ ID NO: 1529183 - RNA, 19 nt, Artificial Sequence
  Description of Artificial Sequence: Synthetic oligonucleotide
ggcauaucacugugggcca

SEQ ID NO: 1529184 - RNA, 19 nt, Artificial Sequence
  Description of Artificial Sequence: Synthetic oligonucleotide
gucuugacccaaguuccuc

SEQ ID NO: 1529185 - RNA, 19 nt, Artificial Sequence
  Description of Artificial Sequence: Synthetic oligonucleotide
uugugagccccuggcuucu

SEQ ID NO: 1529186 - RNA, 19 nt, Artificial Sequence
  Description of Artificial Sequence: Synthetic oligonucleotide
cuuuucggagcacccacgu

SEQ ID NO: 1529187 - RNA, 19 nt, Artificial Sequence
  Description of Artificial Sequence: Synthetic oligonucleotide
ggugacggaauagagugcu

SEQ ID NO: 1529188 - RNA, 19 nt, Artificial Sequence
  Description of Artificial Sequence: Synthetic oligonucleotide
uggcccgggcuacucaguu

SEQ ID NO: 1529189 - RNA, 19 nt, Artificial Sequence
  Description of Artificial Sequence: Synthetic oligonucleotide
gacuauugcccaggcucca

SEQ ID NO: 1529190 - RNA, 19 nt, Artificial Sequence
  Description of Artificial Sequence: Synthetic oligonucleotide
auuaggggagugagcuagu

SEQ ID NO: 1529191 - RNA, 19 nt, Artificial Sequence
  Description of Artificial Sequence: Synthetic oligonucleotide
cacugugggccacgagaac

SEQ ID NO: 1529192 - RNA, 19 nt, Artificial Sequence
  Description of Artificial Sequence: Synthetic oligonucleotide
gcccgggcuacucaguuca

SEQ ID NO: 1529193 - RNA, 19 nt, Artificial Sequence
  Description of Artificial Sequence: Synthetic oligonucleotide
cauccgacccaggugcuga

SEQ ID NO: 1529194 - RNA, 19 nt, Artificial Sequence
  Description of Artificial Sequence: Synthetic oligonucleotide
gugauacuguggcccuuca

SEQ ID NO: 1529195 - RNA, 19 nt, Artificial Sequence
  Description of Artificial Sequence: Synthetic oligonucleotide
cuagugguggugacggaau

SEQ ID NO: 1529196 - RNA, 19 nt, Artificial Sequence
  Description of Artificial Sequence: Synthetic oligonucleotide
acuauugcccaggcuccau

SEQ ID NO: 1529197 - RNA, 19 nt, Artificial Sequence
  Description of Artificial Sequence: Synthetic oligonucleotide
augggcccuaaggaguuau

SEQ ID NO: 1529198 - RNA, 19 nt, Artificial Sequence
  Description of Artificial Sequence: Synthetic oligonucleotide
ucgaggugaagagccgguu

SEQ ID NO: 1529199 - RNA, 19 nt, Artificial Sequence
  Description of Artificial Sequence: Synthetic oligonucleotide
gauacugggcagcggcuuu

SEQ ID NO: 1529200 - RNA, 19 nt, Artificial Sequence
  Description of Artificial Sequence: Synthetic oligonucleotide
gguaaggaucccagaguuc

SEQ ID NO: 1529201 - RNA, 19 nt, Artificial Sequence
  Description of Artificial Sequence: Synthetic oligonucleotide
agcuaccagacagccuacu

SEQ ID NO: 1529202 - RNA, 19 nt, Artificial Sequence
  Description of Artificial Sequence: Synthetic oligonucleotide
gacuucgaaggugaauuuu

SEQ ID NO: 1529203 - RNA, 19 nt, Artificial Sequence
  Description of Artificial Sequence: Synthetic oligonucleotide
uccccaggugagugauacu

SEQ ID NO: 1529204 - RNA, 19 nt, Artificial Sequence
  Description of Artificial Sequence: Synthetic oligonucleotide
cugcucuagugaaugacuu

SEQ ID NO: 1529205 - RNA, 19 nt, Artificial Sequence
  Description of Artificial Sequence: Synthetic oligonucleotide
ugggcccuaaggaguuauu

SEQ ID NO: 1529206 - RNA, 19 nt, Artificial Sequence
  Description of Artificial Sequence: Synthetic oligonucleotide
gagcuaccagacagccuac

SEQ ID NO: 1529207 - RNA, 19 nt, Artificial Sequence
  Description of Artificial Sequence: Synthetic oligonucleotide
cagcauagacugggauggc

SEQ ID NO: 1529208 - RNA, 19 nt, Artificial Sequence
  Description of Artificial Sequence: Synthetic oligonucleotide
gccuuagaaguuuggacau

SEQ ID NO: 1529209 - RNA, 19 nt, Artificial Sequence
  Description of Artificial Sequence: Synthetic oligonucleotide
ugaugucggcugugcuguc

SEQ ID NO: 1529210 - RNA, 19 nt, Artificial Sequence
  Description of Artificial Sequence: Synthetic oligonucleotide
gacagccuacugcuccugu

SEQ ID NO: 1529211 - RNA, 19 nt, Artificial Sequence
  Description of Artificial Sequence: Synthetic oligonucleotide
cuguccaaacuuggaggca

SEQ ID NO: 1529212 - RNA, 19 nt, Artificial Sequence
  Description of Artificial Sequence: Synthetic oligonucleotide
gugcucauggccugagaau

SEQ ID NO: 1529213 - RNA, 19 nt, Artificial Sequence
  Description of Artificial Sequence: Synthetic oligonucleotide
uacugggcagcggcuuuuc

SEQ ID NO: 1529214 - RNA, 19 nt, Artificial Sequence
  Description of Artificial Sequence: Synthetic oligonucleotide
caacugucugagucacaaa

SEQ ID NO: 1529215 - RNA, 19 nt, Artificial Sequence
  Description of Artificial Sequence: Synthetic oligonucleotide
cccaaguuccucacaggca

SEQ ID NO: 1529216 - RNA, 19 nt, Artificial Sequence
  Description of Artificial Sequence: Synthetic oligonucleotide
cacaacugucugagucaca

SEQ ID NO: 1529217 - RNA, 19 nt, Artificial Sequence
  Description of Artificial Sequence: Synthetic oligonucleotide
ggacucuggcagucucuug

SEQ ID NO: 1529218 - RNA, 19 nt, Artificial Sequence
  Description of Artificial Sequence: Synthetic oligonucleotide
ccugagaaucaucuguacu

SEQ ID NO: 1529219 - RNA, 19 nt, Artificial Sequence
  Description of Artificial Sequence: Synthetic oligonucleotide
ggcccuaaggaguuauuau

SEQ ID NO: 1529220 - RNA, 19 nt, Artificial Sequence
  Description of Artificial Sequence: Synthetic oligonucleotide
ggugcggcggagcugccaa

SEQ ID NO: 1529221 - RNA, 19 nt, Artificial Sequence
  Description of Artificial Sequence: Synthetic oligonucleotide
gggugugagagaacuugga

SEQ ID NO: 1529222 - RNA, 19 nt, Artificial Sequence
  Description of Artificial Sequence: Synthetic oligonucleotide
gcccuaaggaguuauuauu

SEQ ID NO: 1529223 - RNA, 19 nt, Artificial Sequence
  Description of Artificial Sequence: Synthetic oligonucleotide
auacugggcagcggcuuuu

SEQ ID NO: 1529224 - RNA, 19 nt, Artificial Sequence
  Description of Artificial Sequence: Synthetic oligonucleotide
uuggugcggcggagcugcc

SEQ ID NO: 1529225 - RNA, 19 nt, Artificial Sequence
  Description of Artificial Sequence: Synthetic oligonucleotide
uggugcggcggagcugcca

SEQ ID NO: 1529226 - RNA, 19 nt, Artificial Sequence
  Description of Artificial Sequence: Synthetic oligonucleotide
ucgccaccauugugugccu

SEQ ID NO: 1529227 - RNA, 19 nt, Artificial Sequence
  Description of Artificial Sequence: Synthetic oligonucleotide
cagaaagaaccgucugcau

SEQ ID NO: 1529228 - RNA, 19 nt, Artificial Sequence
  Description of Artificial Sequence: Synthetic oligonucleotide
gccggugccagcacugaac

SEQ ID NO: 1529229 - RNA, 19 nt, Artificial Sequence
  Description of Artificial Sequence: Synthetic oligonucleotide
gugagagaacuuggagucu

SEQ ID NO: 1529230 - RNA, 19 nt, Artificial Sequence
  Description of Artificial Sequence: Synthetic oligonucleotide
gagccgguuacaacuggau

SEQ ID NO: 1529231 - RNA, 19 nt, Artificial Sequence
  Description of Artificial Sequence: Synthetic oligonucleotide
gacacucgaauggcuuggu

SEQ ID NO: 1529232 - RNA, 19 nt, Artificial Sequence
  Description of Artificial Sequence: Synthetic oligonucleotide
uccgacccaggugcugaau

SEQ ID NO: 1529233 - RNA, 19 nt, Artificial Sequence
  Description of Artificial Sequence: Synthetic oligonucleotide
gcucacuuuggcccgggcu

SEQ ID NO: 1529234 - RNA, 19 nt, Artificial Sequence
  Description of Artificial Sequence: Synthetic oligonucleotide
gugggucuugacccaaguu

SEQ ID NO: 1529235 - RNA, 19 nt, Artificial Sequence
  Description of Artificial Sequence: Synthetic oligonucleotide
uucagccgacaggcuuugu

SEQ ID NO: 1529236 - RNA, 19 nt, Artificial Sequence
  Description of Artificial Sequence: Synthetic oligonucleotide
ugugagccccuggcuucuc

SEQ ID NO: 1529237 - RNA, 19 nt, Artificial Sequence
  Description of Artificial Sequence: Synthetic oligonucleotide
ccuguaugacuucgaaggu

SEQ ID NO: 1529238 - RNA, 19 nt, Artificial Sequence
  Description of Artificial Sequence: Synthetic oligonucleotide
gcauuaggggagugagcua

SEQ ID NO: 1529239 - RNA, 19 nt, Artificial Sequence
  Description of Artificial Sequence: Synthetic oligonucleotide
gugcugucgccaccauugu

SEQ ID NO: 1529240 - RNA, 19 nt, Artificial Sequence
  Description of Artificial Sequence: Synthetic oligonucleotide
caggugaaccuccggucau

SEQ ID NO: 1529241 - RNA, 19 nt, Artificial Sequence
  Description of Artificial Sequence: Synthetic oligonucleotide
cgaauggcuugguccccag

SEQ ID NO: 1529242 - RNA, 19 nt, Artificial Sequence
  Description of Artificial Sequence: Synthetic oligonucleotide
cugcuagaucuauguuggu

SEQ ID NO: 1529243 - RNA, 19 nt, Artificial Sequence
  Description of Artificial Sequence: Synthetic oligonucleotide
ggcccgggcuacucaguuc

SEQ ID NO: 1529244 - RNA, 19 nt, Artificial Sequence
  Description of Artificial Sequence: Synthetic oligonucleotide
cgguuacaacuggauacug

SEQ ID NO: 1529245 - RNA, 19 nt, Artificial Sequence
  Description of Artificial Sequence: Synthetic oligonucleotide
gggguccaugggcccuaag

SEQ ID NO: 1529246 - RNA, 19 nt, Artificial Sequence
  Description of Artificial Sequence: Synthetic oligonucleotide
gagcaggaaaagagcucuu

SEQ ID NO: 1529247 - RNA, 19 nt, Artificial Sequence
  Description of Artificial Sequence: Synthetic oligonucleotide
ccgguuacaacuggauacu

SEQ ID NO: 1529248 - RNA, 19 nt, Artificial Sequence
  Description of Artificial Sequence: Synthetic oligonucleotide
ccggugccagcacugaacu

SEQ ID NO: 1529249 - RNA, 19 nt, Artificial Sequence
  Description of Artificial Sequence: Synthetic oligonucleotide
cacccacgucuugcaggug

SEQ ID NO: 1529250 - RNA, 19 nt, Artificial Sequence
  Description of Artificial Sequence: Synthetic oligonucleotide
cgaggugaagagccgguua

SEQ ID NO: 1529251 - RNA, 19 nt, Artificial Sequence
  Description of Artificial Sequence: Synthetic oligonucleotide
ccuuagaaguuuggacaua

SEQ ID NO: 1529252 - RNA, 19 nt, Artificial Sequence
  Description of Artificial Sequence: Synthetic oligonucleotide
cuccggucaucaucauguu

SEQ ID NO: 1529253 - RNA, 19 nt, Artificial Sequence
  Description of Artificial Sequence: Synthetic oligonucleotide
cagcggcuuuucggagcac

SEQ ID NO: 1529254 - RNA, 19 nt, Artificial Sequence
  Description of Artificial Sequence: Synthetic oligonucleotide
caugggcccuaaggaguua

SEQ ID NO: 1529255 - RNA, 19 nt, Artificial Sequence
  Description of Artificial Sequence: Synthetic oligonucleotide
cccgggcuacucaguucac

SEQ ID NO: 1529256 - RNA, 19 nt, Artificial Sequence
  Description of Artificial Sequence: Synthetic oligonucleotide
ccagacuauugcccaggcu

SEQ ID NO: 1529257 - RNA, 19 nt, Artificial Sequence
  Description of Artificial Sequence: Synthetic oligonucleotide
gugacggaauagagugcuu

SEQ ID NO: 1529258 - RNA, 19 nt, Artificial Sequence
  Description of Artificial Sequence: Synthetic oligonucleotide
cuacugcuccugugcucau

SEQ ID NO: 1529259 - RNA, 19 nt, Artificial Sequence
  Description of Artificial Sequence: Synthetic oligonucleotide
cggugccagcacugaacuc

SEQ ID NO: 1529260 - RNA, 19 nt, Artificial Sequence
  Description of Artificial Sequence: Synthetic oligonucleotide
cugcauagacaggguucau

SEQ ID NO: 1529261 - RNA, 19 nt, Artificial Sequence
  Description of Artificial Sequence: Synthetic oligonucleotide
ccgggcuacucaguucacu

SEQ ID NO: 1529262 - RNA, 19 nt, Artificial Sequence
  Description of Artificial Sequence: Synthetic oligonucleotide
cccacgucuugcagguguu

SEQ ID NO: 1529263 - RNA, 19 nt, Artificial Sequence
  Description of Artificial Sequence: Synthetic oligonucleotide
ugaaaugaaaaucagaggc

SEQ ID NO: 1529264 - RNA, 19 nt, Artificial Sequence
  Description of Artificial Sequence: Synthetic oligonucleotide
agugaaauaaccucaaacc

SEQ ID NO: 1529265 - RNA, 19 nt, Artificial Sequence
  Description of Artificial Sequence: Synthetic oligonucleotide
auacaaauaugcuagaggc

SEQ ID NO: 1529266 - RNA, 19 nt, Artificial Sequence
  Description of Artificial Sequence: Synthetic oligonucleotide
aauuuaaguaaguguacac

SEQ ID NO: 1529267 - RNA, 19 nt, Artificial Sequence
  Description of Artificial Sequence: Synthetic oligonucleotide
agagucaauacaaauaugc

SEQ ID NO: 1529268 - RNA, 19 nt, Artificial Sequence
  Description of Artificial Sequence: Synthetic oligonucleotide
aaguuauuaacacggggcg

SEQ ID NO: 1529269 - RNA, 19 nt, Artificial Sequence
  Description of Artificial Sequence: Synthetic oligonucleotide
uggacaaacucuuucagcg

SEQ ID NO: 1529270 - RNA, 19 nt, Artificial Sequence
  Description of Artificial Sequence: Synthetic oligonucleotide
gaugggaaagguuaguggg

SEQ ID NO: 1529271 - RNA, 19 nt, Artificial Sequence
  Description of Artificial Sequence: Synthetic oligonucleotide
agaaguaaggcccagguug

SEQ ID NO: 1529272 - RNA, 19 nt, Artificial Sequence
  Description of Artificial Sequence: Synthetic oligonucleotide
cacaaguaaacgaaaaggg

SEQ ID NO: 1529273 - RNA, 19 nt, Artificial Sequence
  Description of Artificial Sequence: Synthetic oligonucleotide
aacuaaugagagucaauac

SEQ ID NO: 1529274 - RNA, 19 nt, Artificial Sequence
  Description of Artificial Sequence: Synthetic oligonucleotide
uuuaaguaaguguacaccu

SEQ ID NO: 1529275 - RNA, 19 nt, Artificial Sequence
  Description of Artificial Sequence: Synthetic oligonucleotide
auuuaaguaaguguacacc

SEQ ID NO: 1529276 - RNA, 19 nt, Artificial Sequence
  Description of Artificial Sequence: Synthetic oligonucleotide
uacaaguuuucacagaaca

SEQ ID NO: 1529277 - RNA, 19 nt, Artificial Sequence
  Description of Artificial Sequence: Synthetic oligonucleotide
aacacaaguaaacgaaaag

SEQ ID NO: 1529278 - RNA, 19 nt, Artificial Sequence
  Description of Artificial Sequence: Synthetic oligonucleotide
acaaauaugcuagaggcac

SEQ ID NO: 1529279 - RNA, 19 nt, Artificial Sequence
  Description of Artificial Sequence: Synthetic oligonucleotide
caaguuauuaacacggggc

SEQ ID NO: 1529280 - RNA, 19 nt, Artificial Sequence
  Description of Artificial Sequence: Synthetic oligonucleotide
auaaccucaaaccuaagcu

SEQ ID NO: 1529281 - RNA, 19 nt, Artificial Sequence
  Description of Artificial Sequence: Synthetic oligonucleotide
aagggauacaaguuuaaca

SEQ ID NO: 1529282 - RNA, 19 nt, Artificial Sequence
  Description of Artificial Sequence: Synthetic oligonucleotide
ugagagucaauacaaauau

SEQ ID NO: 1529283 - RNA, 19 nt, Artificial Sequence
  Description of Artificial Sequence: Synthetic oligonucleotide
accaauuacaaguuuucac

SEQ ID NO: 1529284 - RNA, 19 nt, Artificial Sequence
  Description of Artificial Sequence: Synthetic oligonucleotide
auaugcuagaggcacaggg

SEQ ID NO: 1529285 - RNA, 19 nt, Artificial Sequence
  Description of Artificial Sequence: Synthetic oligonucleotide
ucuuccuaagggcuaaugg

SEQ ID NO: 1529286 - RNA, 19 nt, Artificial Sequence
  Description of Artificial Sequence: Synthetic oligonucleotide
gaccaaguuauuaacacgg

SEQ ID NO: 1529287 - RNA, 19 nt, Artificial Sequence
  Description of Artificial Sequence: Synthetic oligonucleotide
acugaauuuaaguaagugu

SEQ ID NO: 1529288 - RNA, 19 nt, Artificial Sequence
  Description of Artificial Sequence: Synthetic oligonucleotide
aaaaggguaacuaaugaga

SEQ ID NO: 1529289 - RNA, 19 nt, Artificial Sequence
  Description of Artificial Sequence: Synthetic oligonucleotide
uuaauauuaguauuuguuu

SEQ ID NO: 1529290 - RNA, 19 nt, Artificial Sequence
  Description of Artificial Sequence: Synthetic oligonucleotide
agauacugaagacagccgg

SEQ ID NO: 1529291 - RNA, 19 nt, Artificial Sequence
  Description of Artificial Sequence: Synthetic oligonucleotide
acacaaguaaacgaaaagg

SEQ ID NO: 1529292 - RNA, 19 nt, Artificial Sequence
  Description of Artificial Sequence: Synthetic oligonucleotide
acuaaugagagucaauaca

SEQ ID NO: 1529293 - RNA, 19 nt, Artificial Sequence
  Description of Artificial Sequence: Synthetic oligonucleotide
acugaagacagccggaagg

SEQ ID NO: 1529294 - RNA, 19 nt, Artificial Sequence
  Description of Artificial Sequence: Synthetic oligonucleotide
uaaguaaguguacaccucc

SEQ ID NO: 1529295 - RNA, 19 nt, Artificial Sequence
  Description of Artificial Sequence: Synthetic oligonucleotide
aaaucagaggcacucugag

SEQ ID NO: 1529296 - RNA, 19 nt, Artificial Sequence
  Description of Artificial Sequence: Synthetic oligonucleotide
aaugagagucaauacaaau

SEQ ID NO: 1529297 - RNA, 19 nt, Artificial Sequence
  Description of Artificial Sequence: Synthetic oligonucleotide
aaagguuagugggaggggc

SEQ ID NO: 1529298 - RNA, 19 nt, Artificial Sequence
  Description of Artificial Sequence: Synthetic oligonucleotide
uuuaaagggauacaaguuu

SEQ ID NO: 1529299 - RNA, 19 nt, Artificial Sequence
  Description of Artificial Sequence: Synthetic oligonucleotide
aggguaacuaaugagaguc

SEQ ID NO: 1529300 - RNA, 19 nt, Artificial Sequence
  Description of Artificial Sequence: Synthetic oligonucleotide
uguaaugacaggucgguga

SEQ ID NO: 1529301 - RNA, 19 nt, Artificial Sequence
  Description of Artificial Sequence: Synthetic oligonucleotide
uaugcuagaggcacagggg

SEQ ID NO: 1529302 - RNA, 19 nt, Artificial Sequence
  Description of Artificial Sequence: Synthetic oligonucleotide
cuuccuaagggcuaauggg

SEQ ID NO: 1529303 - RNA, 19 nt, Artificial Sequence
  Description of Artificial Sequence: Synthetic oligonucleotide
ugugugaugggaaagguua

SEQ ID NO: 1529304 - RNA, 19 nt, Artificial Sequence
  Description of Artificial Sequence: Synthetic oligonucleotide
agggauacaaguuuaacaa

SEQ ID NO: 1529305 - RNA, 19 nt, Artificial Sequence
  Description of Artificial Sequence: Synthetic oligonucleotide
uucguuucacaauaggucu

SEQ ID NO: 1529306 - RNA, 19 nt, Artificial Sequence
  Description of Artificial Sequence: Synthetic oligonucleotide
caagauacugaagacagcc

SEQ ID NO: 1529307 - RNA, 19 nt, Artificial Sequence
  Description of Artificial Sequence: Synthetic oligonucleotide
ugaauuuaaguaaguguac

SEQ ID NO: 1529308 - RNA, 19 nt, Artificial Sequence
  Description of Artificial Sequence: Synthetic oligonucleotide
aaagaaggaagcauggacu

SEQ ID NO: 1529309 - RNA, 19 nt, Artificial Sequence
  Description of Artificial Sequence: Synthetic oligonucleotide
aauuacaaguuuucacaga

SEQ ID NO: 1529310 - RNA, 19 nt, Artificial Sequence
  Description of Artificial Sequence: Synthetic oligonucleotide
augaaaaucagaggcacuc

SEQ ID NO: 1529311 - RNA, 19 nt, Artificial Sequence
  Description of Artificial Sequence: Synthetic oligonucleotide
uugggauugaggaagccca

SEQ ID NO: 1529312 - RNA, 19 nt, Artificial Sequence
  Description of Artificial Sequence: Synthetic oligonucleotide
uaaccucaaaccuaagcug

SEQ ID NO: 1529313 - RNA, 19 nt, Artificial Sequence
  Description of Artificial Sequence: Synthetic oligonucleotide
agaccaaguuauuaacacg

SEQ ID NO: 1529314 - RNA, 19 nt, Artificial Sequence
  Description of Artificial Sequence: Synthetic oligonucleotide
aaacgaaaaggguaacuaa

SEQ ID NO: 1529315 - RNA, 19 nt, Artificial Sequence
  Description of Artificial Sequence: Synthetic oligonucleotide
cugaauuuaaguaagugua

SEQ ID NO: 1529316 - RNA, 19 nt, Artificial Sequence
  Description of Artificial Sequence: Synthetic oligonucleotide
uuaaagggauacaaguuua

SEQ ID NO: 1529317 - RNA, 19 nt, Artificial Sequence
  Description of Artificial Sequence: Synthetic oligonucleotide
uucacaauaggucucuuuu

SEQ ID NO: 1529318 - RNA, 19 nt, Artificial Sequence
  Description of Artificial Sequence: Synthetic oligonucleotide
accuaagcugacaagaaac

SEQ ID NO: 1529319 - RNA, 19 nt, Artificial Sequence
  Description of Artificial Sequence: Synthetic oligonucleotide
ucaaccaauuacaaguuuu

SEQ ID NO: 1529320 - RNA, 19 nt, Artificial Sequence
  Description of Artificial Sequence: Synthetic oligonucleotide
ugagaaguaaggcccaggu

SEQ ID NO: 1529321 - RNA, 19 nt, Artificial Sequence
  Description of Artificial Sequence: Synthetic oligonucleotide
gaaaaucagaggcacucug

SEQ ID NO: 1529322 - RNA, 19 nt, Artificial Sequence
  Description of Artificial Sequence: Synthetic oligonucleotide
uuucagaccaaguuauuaa

SEQ ID NO: 1529323 - RNA, 19 nt, Artificial Sequence
  Description of Artificial Sequence: Synthetic oligonucleotide
uuccuaagggcuaauggga

SEQ ID NO: 1529324 - RNA, 19 nt, Artificial Sequence
  Description of Artificial Sequence: Synthetic oligonucleotide
agucaauacaaauaugcua

SEQ ID NO: 1529325 - RNA, 19 nt, Artificial Sequence
  Description of Artificial Sequence: Synthetic oligonucleotide
auuaacacggggcguuucg

SEQ ID NO: 1529326 - RNA, 19 nt, Artificial Sequence
  Description of Artificial Sequence: Synthetic oligonucleotide
uaacuaaugagagucaaua

SEQ ID NO: 1529327 - RNA, 19 nt, Artificial Sequence
  Description of Artificial Sequence: Synthetic oligonucleotide
uccuguaaugacaggucgg

SEQ ID NO: 1529328 - RNA, 19 nt, Artificial Sequence
  Description of Artificial Sequence: Synthetic oligonucleotide
cuaaugagagucaauacaa

SEQ ID NO: 1529329 - RNA, 19 nt, Artificial Sequence
  Description of Artificial Sequence: Synthetic oligonucleotide
cuuccauugggauugagga

SEQ ID NO: 1529330 - RNA, 19 nt, Artificial Sequence
  Description of Artificial Sequence: Synthetic oligonucleotide
aaguggagagucgauggcg

SEQ ID NO: 1529331 - RNA, 19 nt, Artificial Sequence
  Description of Artificial Sequence: Synthetic oligonucleotide
agacacguaauacugaauu

SEQ ID NO: 1529332 - RNA, 19 nt, Artificial Sequence
  Description of Artificial Sequence: Synthetic oligonucleotide
cugggugugagaaguaagg

SEQ ID NO: 1529333 - RNA, 19 nt, Artificial Sequence
  Description of Artificial Sequence: Synthetic oligonucleotide
ucaugugugaugggaaagg

SEQ ID NO: 1529334 - RNA, 19 nt, Artificial Sequence
  Description of Artificial Sequence: Synthetic oligonucleotide
acugcuuccauugggauug

SEQ ID NO: 1529335 - RNA, 19 nt, Artificial Sequence
  Description of Artificial Sequence: Synthetic oligonucleotide
aauggguugugcaccuugc

SEQ ID NO: 1529336 - RNA, 19 nt, Artificial Sequence
  Description of Artificial Sequence: Synthetic oligonucleotide
cagaccaaguuauuaacac

SEQ ID NO: 1529337 - RNA, 19 nt, Artificial Sequence
  Description of Artificial Sequence: Synthetic oligonucleotide
guaaguguacaccuccaag

SEQ ID NO: 1529338 - RNA, 19 nt, Artificial Sequence
  Description of Artificial Sequence: Synthetic oligonucleotide
uucagaccaaguuauuaac

SEQ ID NO: 1529339 - RNA, 19 nt, Artificial Sequence
  Description of Artificial Sequence: Synthetic oligonucleotide
aaguguacaccuccaagau

SEQ ID NO: 1529340 - RNA, 19 nt, Artificial Sequence
  Description of Artificial Sequence: Synthetic oligonucleotide
ugugaaugcuguucccagg

SEQ ID NO: 1529341 - RNA, 19 nt, Artificial Sequence
  Description of Artificial Sequence: Synthetic oligonucleotide
uuaaguaaguguacaccuc

SEQ ID NO: 1529342 - RNA, 19 nt, Artificial Sequence
  Description of Artificial Sequence: Synthetic oligonucleotide
cuaagcugacaagaaaccg

SEQ ID NO: 1529343 - RNA, 19 nt, Artificial Sequence
  Description of Artificial Sequence: Synthetic oligonucleotide
acagaguucgcguucucag

SEQ ID NO: 1529344 - RNA, 19 nt, Artificial Sequence
  Description of Artificial Sequence: Synthetic oligonucleotide
guguacaccuccaagauac

SEQ ID NO: 1529345 - RNA, 19 nt, Artificial Sequence
  Description of Artificial Sequence: Synthetic oligonucleotide
aaguaaacgaaaaggguaa

SEQ ID NO: 1529346 - RNA, 19 nt, Artificial Sequence
  Description of Artificial Sequence: Synthetic oligonucleotide
gaaaccggacuucucagac

SEQ ID NO: 1529347 - RNA, 19 nt, Artificial Sequence
  Description of Artificial Sequence: Synthetic oligonucleotide
gaauuuaaguaaguguaca

SEQ ID NO: 1529348 - RNA, 19 nt, Artificial Sequence
  Description of Artificial Sequence: Synthetic oligonucleotide
uguuggaaaguggagaguc

SEQ ID NO: 1529349 - RNA, 19 nt, Artificial Sequence
  Description of Artificial Sequence: Synthetic oligonucleotide
gcaacauugggguagggag

SEQ ID NO: 1529350 - RNA, 19 nt, Artificial Sequence
  Description of Artificial Sequence: Synthetic oligonucleotide
ugcacauaugucaaacaaa

SEQ ID NO: 1529351 - RNA, 19 nt, Artificial Sequence
  Description of Artificial Sequence: Synthetic oligonucleotide
gagucgauggcguugcgug

SEQ ID NO: 1529352 - RNA, 19 nt, Artificial Sequence
  Description of Artificial Sequence: Synthetic oligonucleotide
ucaaaccuaagcugacaag

SEQ ID NO: 1529353 - RNA, 19 nt, Artificial Sequence
  Description of Artificial Sequence: Synthetic oligonucleotide
uauuaguauuuguuuauuu

SEQ ID NO: 1529354 - RNA, 19 nt, Artificial Sequence
  Description of Artificial Sequence: Synthetic oligonucleotide
caaguaaacgaaaagggua

SEQ ID NO: 1529355 - RNA, 19 nt, Artificial Sequence
  Description of Artificial Sequence: Synthetic oligonucleotide
guaaggcccagguugcugg

SEQ ID NO: 1529356 - RNA, 19 nt, Artificial Sequence
  Description of Artificial Sequence: Synthetic oligonucleotide
aagauacugaagacagccg

SEQ ID NO: 1529357 - RNA, 19 nt, Artificial Sequence
  Description of Artificial Sequence: Synthetic oligonucleotide
aacgaaaaggguaacuaau

SEQ ID NO: 1529358 - RNA, 19 nt, Artificial Sequence
  Description of Artificial Sequence: Synthetic oligonucleotide
aaggguaacuaaugagagu

SEQ ID NO: 1529359 - RNA, 19 nt, Artificial Sequence
  Description of Artificial Sequence: Synthetic oligonucleotide
agaaaccgaaggcagaaaa

SEQ ID NO: 1529360 - RNA, 19 nt, Artificial Sequence
  Description of Artificial Sequence: Synthetic oligonucleotide
uugcguguggacuugcucu

SEQ ID NO: 1529361 - RNA, 19 nt, Artificial Sequence
  Description of Artificial Sequence: Synthetic oligonucleotide
agaguucgcguucucagug

SEQ ID NO: 1529362 - RNA, 19 nt, Artificial Sequence
  Description of Artificial Sequence: Synthetic oligonucleotide
ugagggugguagcggaugg

SEQ ID NO: 1529363 - RNA, 19 nt, Artificial Sequence
  Description of Artificial Sequence: Synthetic oligonucleotide
ucuguugaugugguugggg

SEQ ID NO: 1529364 - RNA, 19 nt, Artificial Sequence
  Description of Artificial Sequence: Synthetic oligonucleotide
ggugugagaaguaaggccc

SEQ ID NO: 1529365 - RNA, 19 nt, Artificial Sequence
  Description of Artificial Sequence: Synthetic oligonucleotide
gaguccagcagagucacag

SEQ ID NO: 1529366 - RNA, 19 nt, Artificial Sequence
  Description of Artificial Sequence: Synthetic oligonucleotide
aaccggacuucucagacuu

SEQ ID NO: 1529367 - RNA, 19 nt, Artificial Sequence
  Description of Artificial Sequence: Synthetic oligonucleotide
ugaggaagcccaccugucc

SEQ ID NO: 1529368 - RNA, 19 nt, Artificial Sequence
  Description of Artificial Sequence: Synthetic oligonucleotide
uaaagggauacaaguuuaa

SEQ ID NO: 1529369 - RNA, 19 nt, Artificial Sequence
  Description of Artificial Sequence: Synthetic oligonucleotide
caaccaauuacaaguuuuc

SEQ ID NO: 1529370 - RNA, 19 nt, Artificial Sequence
  Description of Artificial Sequence: Synthetic oligonucleotide
acaaguaaacgaaaagggu

SEQ ID NO: 1529371 - RNA, 19 nt, Artificial Sequence
  Description of Artificial Sequence: Synthetic oligonucleotide
ggaaagguuagugggaggg

SEQ ID NO: 1529372 - RNA, 19 nt, Artificial Sequence
  Description of Artificial Sequence: Synthetic oligonucleotide
gaauggguugugcaccuug

SEQ ID NO: 1529373 - RNA, 19 nt, Artificial Sequence
  Description of Artificial Sequence: Synthetic oligonucleotide
aguaaacgaaaaggguaac

SEQ ID NO: 1529374 - RNA, 19 nt, Artificial Sequence
  Description of Artificial Sequence: Synthetic oligonucleotide
aagggcuaaugggaccugc

SEQ ID NO: 1529375 - RNA, 19 nt, Artificial Sequence
  Description of Artificial Sequence: Synthetic oligonucleotide
agggagaagaggucuagca

SEQ ID NO: 1529376 - RNA, 19 nt, Artificial Sequence
  Description of Artificial Sequence: Synthetic oligonucleotide
augccuaacauggccagac

SEQ ID NO: 1529377 - RNA, 19 nt, Artificial Sequence
  Description of Artificial Sequence: Synthetic oligonucleotide
aaccaauuacaaguuuuca

SEQ ID NO: 1529378 - RNA, 19 nt, Artificial Sequence
  Description of Artificial Sequence: Synthetic oligonucleotide
gugaaauaaccucaaaccu

SEQ ID NO: 1529379 - RNA, 19 nt, Artificial Sequence
  Description of Artificial Sequence: Synthetic oligonucleotide
caaaccuaagcugacaaga

SEQ ID NO: 1529380 - RNA, 19 nt, Artificial Sequence
  Description of Artificial Sequence: Synthetic oligonucleotide
uccuaagggcuaaugggac

SEQ ID NO: 1529381 - RNA, 19 nt, Artificial Sequence
  Description of Artificial Sequence: Synthetic oligonucleotide
aauaugcuagaggcacagg

SEQ ID NO: 1529382 - RNA, 19 nt, Artificial Sequence
  Description of Artificial Sequence: Synthetic oligonucleotide
gaaguaaggcccagguugc

SEQ ID NO: 1529383 - RNA, 19 nt, Artificial Sequence
  Description of Artificial Sequence: Synthetic oligonucleotide
cuuucagcgucuccugagg

SEQ ID NO: 1529384 - RNA, 19 nt, Artificial Sequence
  Description of Artificial Sequence: Synthetic oligonucleotide
gaagcauggacuuagccuu

SEQ ID NO: 1529385 - RNA, 19 nt, Artificial Sequence
  Description of Artificial Sequence: Synthetic oligonucleotide
cuggguccuguaaugacag

SEQ ID NO: 1529386 - RNA, 19 nt, Artificial Sequence
  Description of Artificial Sequence: Synthetic oligonucleotide
agggcagacaagcuggaca

SEQ ID NO: 1529387 - RNA, 19 nt, Artificial Sequence
  Description of Artificial Sequence: Synthetic oligonucleotide
uacugaagacagccggaag

SEQ ID NO: 1529388 - RNA, 19 nt, Artificial Sequence
  Description of Artificial Sequence: Synthetic oligonucleotide
uuggaaaguggagagucga

SEQ ID NO: 1529389 - RNA, 19 nt, Artificial Sequence
  Description of Artificial Sequence: Synthetic oligonucleotide
ggcuaaugggaccugcugg

SEQ ID NO: 1529390 - RNA, 19 nt, Artificial Sequence
  Description of Artificial Sequence: Synthetic oligonucleotide
acaugccuaacauggccag

SEQ ID NO: 1529391 - RNA, 19 nt, Artificial Sequence
  Description of Artificial Sequence: Synthetic oligonucleotide
aggucggugaugcugugug

SEQ ID NO: 1529392 - RNA, 19 nt, Artificial Sequence
  Description of Artificial Sequence: Synthetic oligonucleotide
aaaccggacuucucagacu

SEQ ID NO: 1529393 - RNA, 19 nt, Artificial Sequence
  Description of Artificial Sequence: Synthetic oligonucleotide
cacugcaugucuagucugg

SEQ ID NO: 1529394 - RNA, 19 nt, Artificial Sequence
  Description of Artificial Sequence: Synthetic oligonucleotide
cugaaaccggacuucucag

SEQ ID NO: 1529395 - RNA, 19 nt, Artificial Sequence
  Description of Artificial Sequence: Synthetic oligonucleotide
ugcaccuugccuugacugc

SEQ ID NO: 1529396 - RNA, 19 nt, Artificial Sequence
  Description of Artificial Sequence: Synthetic oligonucleotide
uucgcguucucagugaaau

SEQ ID NO: 1529397 - RNA, 19 nt, Artificial Sequence
  Description of Artificial Sequence: Synthetic oligonucleotide
uagugcacauaugucaaac

SEQ ID NO: 1529398 - RNA, 19 nt, Artificial Sequence
  Description of Artificial Sequence: Synthetic oligonucleotide
uaaugggaccugcuggcac

SEQ ID NO: 1529399 - RNA, 19 nt, Artificial Sequence
  Description of Artificial Sequence: Synthetic oligonucleotide
acgaaaaggguaacuaaug

SEQ ID NO: 1529400 - RNA, 19 nt, Artificial Sequence
  Description of Artificial Sequence: Synthetic oligonucleotide
gaggaggucugcgaagggg

SEQ ID NO: 1529401 - RNA, 19 nt, Artificial Sequence
  Description of Artificial Sequence: Synthetic oligonucleotide
ucuagucuggcuggcaugu

SEQ ID NO: 1529402 - RNA, 19 nt, Artificial Sequence
  Description of Artificial Sequence: Synthetic oligonucleotide
ccuaacauggccagacacg

SEQ ID NO: 1529403 - RNA, 19 nt, Artificial Sequence
  Description of Artificial Sequence: Synthetic oligonucleotide
ucugcgaaggggaggggcu

SEQ ID NO: 1529404 - RNA, 19 nt, Artificial Sequence
  Description of Artificial Sequence: Synthetic oligonucleotide
acugcaugucuagucuggc

SEQ ID NO: 1529405 - RNA, 19 nt, Artificial Sequence
  Description of Artificial Sequence: Synthetic oligonucleotide
ugggugugagaaguaaggc

SEQ ID NO: 1529406 - RNA, 19 nt, Artificial Sequence
  Description of Artificial Sequence: Synthetic oligonucleotide
ugaaaaucagaggcacucu

SEQ ID NO: 1529407 - RNA, 19 nt, Artificial Sequence
  Description of Artificial Sequence: Synthetic oligonucleotide
ugucuagucuggcuggcau

SEQ ID NO: 1529408 - RNA, 19 nt, Artificial Sequence
  Description of Artificial Sequence: Synthetic oligonucleotide
ccuaagcugacaagaaacc

SEQ ID NO: 1529409 - RNA, 19 nt, Artificial Sequence
  Description of Artificial Sequence: Synthetic oligonucleotide
ugcucuggguccuguaaug

SEQ ID NO: 1529410 - RNA, 19 nt, Artificial Sequence
  Description of Artificial Sequence: Synthetic oligonucleotide
guuggaaaguggagagucg

SEQ ID NO: 1529411 - RNA, 19 nt, Artificial Sequence
  Description of Artificial Sequence: Synthetic oligonucleotide
aggucugcgaaggggaggg

SEQ ID NO: 1529412 - RNA, 19 nt, Artificial Sequence
  Description of Artificial Sequence: Synthetic oligonucleotide
acacguaauacugaauuua

SEQ ID NO: 1529413 - RNA, 19 nt, Artificial Sequence
  Description of Artificial Sequence: Synthetic oligonucleotide
augagagucaauacaaaua

SEQ ID NO: 1529414 - RNA, 19 nt, Artificial Sequence
  Description of Artificial Sequence: Synthetic oligonucleotide
gaacacaaguaaacgaaaa

SEQ ID NO: 1529415 - RNA, 19 nt, Artificial Sequence
  Description of Artificial Sequence: Synthetic oligonucleotide
aacacggggcguuucguuu

SEQ ID NO: 1529416 - RNA, 19 nt, Artificial Sequence
  Description of Artificial Sequence: Synthetic oligonucleotide
ucguuucacaauaggucuc

SEQ ID NO: 1529417 - RNA, 19 nt, Artificial Sequence
  Description of Artificial Sequence: Synthetic oligonucleotide
agccggaaggaagacagag

SEQ ID NO: 1529418 - RNA, 19 nt, Artificial Sequence
  Description of Artificial Sequence: Synthetic oligonucleotide
ggcaaagaaggaagcaugg

SEQ ID NO: 1529419 - RNA, 19 nt, Artificial Sequence
  Description of Artificial Sequence: Synthetic oligonucleotide
ggugaugcugugugaaugc

SEQ ID NO: 1529420 - RNA, 19 nt, Artificial Sequence
  Description of Artificial Sequence: Synthetic oligonucleotide
gauacugaagacagccgga

SEQ ID NO: 1529421 - RNA, 19 nt, Artificial Sequence
  Description of Artificial Sequence: Synthetic oligonucleotide
acacggggcguuucguuuc

SEQ ID NO: 1529422 - RNA, 19 nt, Artificial Sequence
  Description of Artificial Sequence: Synthetic oligonucleotide
accaaguuauuaacacggg

SEQ ID NO: 1529423 - RNA, 19 nt, Artificial Sequence
  Description of Artificial Sequence: Synthetic oligonucleotide
gcuaaugggaccugcuggc

SEQ ID NO: 1529424 - RNA, 19 nt, Artificial Sequence
  Description of Artificial Sequence: Synthetic oligonucleotide
cacguaauacugaauuuaa

SEQ ID NO: 1529425 - RNA, 19 nt, Artificial Sequence
  Description of Artificial Sequence: Synthetic oligonucleotide
ugcguguggacuugcucug

SEQ ID NO: 1529426 - RNA, 19 nt, Artificial Sequence
  Description of Artificial Sequence: Synthetic oligonucleotide
gacagguuuucauguguga

SEQ ID NO: 1529427 - RNA, 19 nt, Artificial Sequence
  Description of Artificial Sequence: Synthetic oligonucleotide
aguuauuaacacggggcgu

SEQ ID NO: 1529428 - RNA, 19 nt, Artificial Sequence
  Description of Artificial Sequence: Synthetic oligonucleotide
acguaauacugaauuuaag

SEQ ID NO: 1529429 - RNA, 19 nt, Artificial Sequence
  Description of Artificial Sequence: Synthetic oligonucleotide
uuagugcacauaugucaaa

SEQ ID NO: 1529430 - RNA, 19 nt, Artificial Sequence
  Description of Artificial Sequence: Synthetic oligonucleotide
ugugaugggaaagguuagu

SEQ ID NO: 1529431 - RNA, 19 nt, Artificial Sequence
  Description of Artificial Sequence: Synthetic oligonucleotide
guuucguuucacaauaggu

SEQ ID NO: 1529432 - RNA, 19 nt, Artificial Sequence
  Description of Artificial Sequence: Synthetic oligonucleotide
ggaggggcugcugaaaccg

SEQ ID NO: 1529433 - RNA, 19 nt, Artificial Sequence
  Description of Artificial Sequence: Synthetic oligonucleotide
auauuaguauuuguuuauu

SEQ ID NO: 1529434 - RNA, 19 nt, Artificial Sequence
  Description of Artificial Sequence: Synthetic oligonucleotide
gguggcggcaacauugggg

SEQ ID NO: 1529435 - RNA, 19 nt, Artificial Sequence
  Description of Artificial Sequence: Synthetic oligonucleotide
caccuguccagcuugcuga

SEQ ID NO: 1529436 - RNA, 19 nt, Artificial Sequence
  Description of Artificial Sequence: Synthetic oligonucleotide
uggaaaguggagagucgau

SEQ ID NO: 1529437 - RNA, 19 nt, Artificial Sequence
  Description of Artificial Sequence: Synthetic oligonucleotide
cacaugccuaacauggcca

SEQ ID NO: 1529438 - RNA, 19 nt, Artificial Sequence
  Description of Artificial Sequence: Synthetic oligonucleotide
ggaggaauggguugugcac

SEQ ID NO: 1529439 - RNA, 19 nt, Artificial Sequence
  Description of Artificial Sequence: Synthetic oligonucleotide
gauggcguugcguguggac

SEQ ID NO: 1529440 - RNA, 19 nt, Artificial Sequence
  Description of Artificial Sequence: Synthetic oligonucleotide
gcacauaugucaaacaaaa

SEQ ID NO: 1529441 - RNA, 19 nt, Artificial Sequence
  Description of Artificial Sequence: Synthetic oligonucleotide
uggcacugcaugucuaguc

SEQ ID NO: 1529442 - RNA, 19 nt, Artificial Sequence
  Description of Artificial Sequence: Synthetic oligonucleotide
ggaagcauggacuuagccu

SEQ ID NO: 1529443 - RNA, 19 nt, Artificial Sequence
  Description of Artificial Sequence: Synthetic oligonucleotide
uccugagggugguagcgga

SEQ ID NO: 1529444 - RNA, 19 nt, Artificial Sequence
  Description of Artificial Sequence: Synthetic oligonucleotide
aguguacaccuccaagaua

SEQ ID NO: 1529445 - RNA, 19 nt, Artificial Sequence
  Description of Artificial Sequence: Synthetic oligonucleotide
ggauacaaguuuaacaaua

SEQ ID NO: 1529446 - RNA, 19 nt, Artificial Sequence
  Description of Artificial Sequence: Synthetic oligonucleotide
ugggauugaggaagcccac

SEQ ID NO: 1529447 - RNA, 19 nt, Artificial Sequence
  Description of Artificial Sequence: Synthetic oligonucleotide
uguacaccuccaagauacu

SEQ ID NO: 1529448 - RNA, 19 nt, Artificial Sequence
  Description of Artificial Sequence: Synthetic oligonucleotide
guacaccuccaagauacug

SEQ ID NO: 1529449 - RNA, 19 nt, Artificial Sequence
  Description of Artificial Sequence: Synthetic oligonucleotide
cuggcauguuggcagcaag

SEQ ID NO: 1529450 - RNA, 19 nt, Artificial Sequence
  Description of Artificial Sequence: Synthetic oligonucleotide
cucagugaaauaaccucaa

SEQ ID NO: 1529451 - RNA, 19 nt, Artificial Sequence
  Description of Artificial Sequence: Synthetic oligonucleotide
accucaaaccuaagcugac

SEQ ID NO: 1529452 - RNA, 19 nt, Artificial Sequence
  Description of Artificial Sequence: Synthetic oligonucleotide
cuagcagcucccucacaug

SEQ ID NO: 1529453 - RNA, 19 nt, Artificial Sequence
  Description of Artificial Sequence: Synthetic oligonucleotide
cugaguccagcagagucac

SEQ ID NO: 1529454 - RNA, 19 nt, Artificial Sequence
  Description of Artificial Sequence: Synthetic oligonucleotide
uuaacacggggcguuucgu

SEQ ID NO: 1529455 - RNA, 19 nt, Artificial Sequence
  Description of Artificial Sequence: Synthetic oligonucleotide
gucuagucuggcuggcaug

SEQ ID NO: 1529456 - RNA, 19 nt, Artificial Sequence
  Description of Artificial Sequence: Synthetic oligonucleotide
ugccuaacauggccagaca

SEQ ID NO: 1529457 - RNA, 19 nt, Artificial Sequence
  Description of Artificial Sequence: Synthetic oligonucleotide
auacugaauuuaaguaagu

SEQ ID NO: 1529458 - RNA, 19 nt, Artificial Sequence
  Description of Artificial Sequence: Synthetic oligonucleotide
gugugaugggaaagguuag

SEQ ID NO: 1529459 - RNA, 19 nt, Artificial Sequence
  Description of Artificial Sequence: Synthetic oligonucleotide
auacugaagacagccggaa

SEQ ID NO: 1529460 - RNA, 19 nt, Artificial Sequence
  Description of Artificial Sequence: Synthetic oligonucleotide
gaaggaagacagaguucgc

SEQ ID NO: 1529461 - RNA, 19 nt, Artificial Sequence
  Description of Artificial Sequence: Synthetic oligonucleotide
guugcguguggacuugcuc

SEQ ID NO: 1529462 - RNA, 19 nt, Artificial Sequence
  Description of Artificial Sequence: Synthetic oligonucleotide
aguggagagucgauggcgu

SEQ ID NO: 1529463 - RNA, 19 nt, Artificial Sequence
  Description of Artificial Sequence: Synthetic oligonucleotide
auggcguugcguguggacu

SEQ ID NO: 1529464 - RNA, 19 nt, Artificial Sequence
  Description of Artificial Sequence: Synthetic oligonucleotide
aguucgcguucucagugaa

SEQ ID NO: 1529465 - RNA, 19 nt, Artificial Sequence
  Description of Artificial Sequence: Synthetic oligonucleotide
cuggccauuggugguggcg

SEQ ID NO: 1529466 - RNA, 19 nt, Artificial Sequence
  Description of Artificial Sequence: Synthetic oligonucleotide
guggcggcaacauuggggu

SEQ ID NO: 1529467 - RNA, 19 nt, Artificial Sequence
  Description of Artificial Sequence: Synthetic oligonucleotide
ugcugaccggcaucagggc

SEQ ID NO: 1529468 - RNA, 19 nt, Artificial Sequence
  Description of Artificial Sequence: Synthetic oligonucleotide
aagaaaccgaaggcagaaa

SEQ ID NO: 1529469 - RNA, 19 nt, Artificial Sequence
  Description of Artificial Sequence: Synthetic oligonucleotide
gaguucgcguucucaguga

SEQ ID NO: 1529470 - RNA, 19 nt, Artificial Sequence
  Description of Artificial Sequence: Synthetic oligonucleotide
gacagaguucgcguucuca

SEQ ID NO: 1529471 - RNA, 19 nt, Artificial Sequence
  Description of Artificial Sequence: Synthetic oligonucleotide
uugugcaccuugccuugac

SEQ ID NO: 1529472 - RNA, 19 nt, Artificial Sequence
  Description of Artificial Sequence: Synthetic oligonucleotide
ggcauguuggcagcaaggc

SEQ ID NO: 1529473 - RNA, 19 nt, Artificial Sequence
  Description of Artificial Sequence: Synthetic oligonucleotide
gccuaacauggccagacac

SEQ ID NO: 1529474 - RNA, 19 nt, Artificial Sequence
  Description of Artificial Sequence: Synthetic oligonucleotide
uauuaacacggggcguuuc

SEQ ID NO: 1529475 - RNA, 19 nt, Artificial Sequence
  Description of Artificial Sequence: Synthetic oligonucleotide
gacacguaauacugaauuu

SEQ ID NO: 1529476 - RNA, 19 nt, Artificial Sequence
  Description of Artificial Sequence: Synthetic oligonucleotide
aggaggucugcgaagggga

SEQ ID NO: 1529477 - RNA, 19 nt, Artificial Sequence
  Description of Artificial Sequence: Synthetic oligonucleotide
ggcguuucguuucacaaua

SEQ ID NO: 1529478 - RNA, 19 nt, Artificial Sequence
  Description of Artificial Sequence: Synthetic oligonucleotide
agacagaguucgcguucuc

SEQ ID NO: 1529479 - RNA, 19 nt, Artificial Sequence
  Description of Artificial Sequence: Synthetic oligonucleotide
gggaaagguuagugggagg

SEQ ID NO: 1529480 - RNA, 19 nt, Artificial Sequence
  Description of Artificial Sequence: Synthetic oligonucleotide
ccuaagggcuaaugggacc

SEQ ID NO: 1529481 - RNA, 19 nt, Artificial Sequence
  Description of Artificial Sequence: Synthetic oligonucleotide
cuaacauggccagacacgu

SEQ ID NO: 1529482 - RNA, 19 nt, Artificial Sequence
  Description of Artificial Sequence: Synthetic oligonucleotide
ggcggcaacauugggguag

SEQ ID NO: 1529483 - RNA, 19 nt, Artificial Sequence
  Description of Artificial Sequence: Synthetic oligonucleotide
caugucuagucuggcuggc

SEQ ID NO: 1529484 - RNA, 19 nt, Artificial Sequence
  Description of Artificial Sequence: Synthetic oligonucleotide
ugcugaaaccggacuucuc

SEQ ID NO: 1529485 - RNA, 19 nt, Artificial Sequence
  Description of Artificial Sequence: Synthetic oligonucleotide
guaaacgaaaaggguaacu

SEQ ID NO: 1529486 - RNA, 19 nt, Artificial Sequence
  Description of Artificial Sequence: Synthetic oligonucleotide
acaggggcccggcucauaa

SEQ ID NO: 1529487 - RNA, 19 nt, Artificial Sequence
  Description of Artificial Sequence: Synthetic oligonucleotide
guaaugacaggucggugau

SEQ ID NO: 1529488 - RNA, 19 nt, Artificial Sequence
  Description of Artificial Sequence: Synthetic oligonucleotide
agacagccggaaggaagac

SEQ ID NO: 1529489 - RNA, 19 nt, Artificial Sequence
  Description of Artificial Sequence: Synthetic oligonucleotide
uaacacggggcguuucguu

SEQ ID NO: 1529490 - RNA, 19 nt, Artificial Sequence
  Description of Artificial Sequence: Synthetic oligonucleotide
ugcaccuccuucuguugau

SEQ ID NO: 1529491 - RNA, 19 nt, Artificial Sequence
  Description of Artificial Sequence: Synthetic oligonucleotide
gguaacuaaugagagucaa

SEQ ID NO: 1529492 - RNA, 19 nt, Artificial Sequence
  Description of Artificial Sequence: Synthetic oligonucleotide
agagucgauggcguugcgu

SEQ ID NO: 1529493 - RNA, 19 nt, Artificial Sequence
  Description of Artificial Sequence: Synthetic oligonucleotide
uuauuaacacggggcguuu

SEQ ID NO: 1529494 - RNA, 19 nt, Artificial Sequence
  Description of Artificial Sequence: Synthetic oligonucleotide
gucugcgaaggggaggggc

SEQ ID NO: 1529495 - RNA, 19 nt, Artificial Sequence
  Description of Artificial Sequence: Synthetic oligonucleotide
ucggugaugcugugugaau

SEQ ID NO: 1529496 - RNA, 19 nt, Artificial Sequence
  Description of Artificial Sequence: Synthetic oligonucleotide
agguugcuggaugaugggu

SEQ ID NO: 1529497 - RNA, 19 nt, Artificial Sequence
  Description of Artificial Sequence: Synthetic oligonucleotide
uaacauggccagacacgua

SEQ ID NO: 1529498 - RNA, 19 nt, Artificial Sequence
  Description of Artificial Sequence: Synthetic oligonucleotide
guuauuaacacggggcguu

SEQ ID NO: 1529499 - RNA, 19 nt, Artificial Sequence
  Description of Artificial Sequence: Synthetic oligonucleotide
agcucccucacaugccuaa

SEQ ID NO: 1529500 - RNA, 19 nt, Artificial Sequence
  Description of Artificial Sequence: Synthetic oligonucleotide
cuguaaugacaggucggug

SEQ ID NO: 1529501 - RNA, 19 nt, Artificial Sequence
  Description of Artificial Sequence: Synthetic oligonucleotide
gauggcaugccuggcucga

SEQ ID NO: 1529502 - RNA, 19 nt, Artificial Sequence
  Description of Artificial Sequence: Synthetic oligonucleotide
gugguagcggauggcuggg

SEQ ID NO: 1529503 - RNA, 19 nt, Artificial Sequence
  Description of Artificial Sequence: Synthetic oligonucleotide
cagcgucuccugagggugg

SEQ ID NO: 1529504 - RNA, 19 nt, Artificial Sequence
  Description of Artificial Sequence: Synthetic oligonucleotide
augaugggugauguuggaa

SEQ ID NO: 1529505 - RNA, 19 nt, Artificial Sequence
  Description of Artificial Sequence: Synthetic oligonucleotide
cauggacuuagccuugacu

SEQ ID NO: 1529506 - RNA, 19 nt, Artificial Sequence
  Description of Artificial Sequence: Synthetic oligonucleotide
uggcguugcguguggacuu

SEQ ID NO: 1529507 - RNA, 19 nt, Artificial Sequence
  Description of Artificial Sequence: Synthetic oligonucleotide
uaagggcuaaugggaccug

SEQ ID NO: 1529508 - RNA, 19 nt, Artificial Sequence
  Description of Artificial Sequence: Synthetic oligonucleotide
uagccuugacugucuuccu

SEQ ID NO: 1529509 - RNA, 19 nt, Artificial Sequence
  Description of Artificial Sequence: Synthetic oligonucleotide
gacaggucggugaugcugu

SEQ ID NO: 1529510 - RNA, 19 nt, Artificial Sequence
  Description of Artificial Sequence: Synthetic oligonucleotide
gggcuaaugggaccugcug

SEQ ID NO: 1529511 - RNA, 19 nt, Artificial Sequence
  Description of Artificial Sequence: Synthetic oligonucleotide
cuaagggcuaaugggaccu

SEQ ID NO: 1529512 - RNA, 19 nt, Artificial Sequence
  Description of Artificial Sequence: Synthetic oligonucleotide
cuagaggcacaggggcccg

SEQ ID NO: 1529513 - RNA, 19 nt, Artificial Sequence
  Description of Artificial Sequence: Synthetic oligonucleotide
agccuugacugucuuccua

SEQ ID NO: 1529514 - RNA, 19 nt, Artificial Sequence
  Description of Artificial Sequence: Synthetic oligonucleotide
gacagccggaaggaagaca

SEQ ID NO: 1529515 - RNA, 19 nt, Artificial Sequence
  Description of Artificial Sequence: Synthetic oligonucleotide
ugcgaaggggaggggcugc

SEQ ID NO: 1529516 - RNA, 19 nt, Artificial Sequence
  Description of Artificial Sequence: Synthetic oligonucleotide
ccauugggauugaggaagc

SEQ ID NO: 1529517 - RNA, 19 nt, Artificial Sequence
  Description of Artificial Sequence: Synthetic oligonucleotide
cgaaaaggguaacuaauga

SEQ ID NO: 1529518 - RNA, 19 nt, Artificial Sequence
  Description of Artificial Sequence: Synthetic oligonucleotide
ggaggaggucugcgaaggg

SEQ ID NO: 1529519 - RNA, 19 nt, Artificial Sequence
  Description of Artificial Sequence: Synthetic oligonucleotide
accggcaucagggcagaca

SEQ ID NO: 1529520 - RNA, 19 nt, Artificial Sequence
  Description of Artificial Sequence: Synthetic oligonucleotide
gucggugaugcugugugaa

SEQ ID NO: 1529521 - RNA, 19 nt, Artificial Sequence
  Description of Artificial Sequence: Synthetic oligonucleotide
agcugacaagaaaccgaag

SEQ ID NO: 1529522 - RNA, 19 nt, Artificial Sequence
  Description of Artificial Sequence: Synthetic oligonucleotide
ggauugaggaagcccaccu

SEQ ID NO: 1529523 - RNA, 19 nt, Artificial Sequence
  Description of Artificial Sequence: Synthetic oligonucleotide
gccuggcucgacuucgugc

SEQ ID NO: 1529524 - RNA, 19 nt, Artificial Sequence
  Description of Artificial Sequence: Synthetic oligonucleotide
cagacaagcuggacaaacu

SEQ ID NO: 1529525 - RNA, 19 nt, Artificial Sequence
  Description of Artificial Sequence: Synthetic oligonucleotide
ggggcguuucguuucacaa

SEQ ID NO: 1529526 - RNA, 19 nt, Artificial Sequence
  Description of Artificial Sequence: Synthetic oligonucleotide
ggacuuagccuugacuguc

SEQ ID NO: 1529527 - RNA, 19 nt, Artificial Sequence
  Description of Artificial Sequence: Synthetic oligonucleotide
ggucuagcagcucccucac

SEQ ID NO: 1529528 - RNA, 19 nt, Artificial Sequence
  Description of Artificial Sequence: Synthetic oligonucleotide
acaggucggugaugcugug

SEQ ID NO: 1529529 - RNA, 19 nt, Artificial Sequence
  Description of Artificial Sequence: Synthetic oligonucleotide
guagggaggaauggguugu

SEQ ID NO: 1529530 - RNA, 19 nt, Artificial Sequence
  Description of Artificial Sequence: Synthetic oligonucleotide
gagaaguaaggcccagguu

SEQ ID NO: 1529531 - RNA, 19 nt, Artificial Sequence
  Description of Artificial Sequence: Synthetic oligonucleotide
cugcaccuccuucuguuga

SEQ ID NO: 1529532 - RNA, 19 nt, Artificial Sequence
  Description of Artificial Sequence: Synthetic oligonucleotide
ggcacugcaugucuagucu

SEQ ID NO: 1529533 - RNA, 19 nt, Artificial Sequence
  Description of Artificial Sequence: Synthetic oligonucleotide
ucgcguucucagugaaaua

SEQ ID NO: 1529534 - RNA, 19 nt, Artificial Sequence
  Description of Artificial Sequence: Synthetic oligonucleotide
gacugcuuccauugggauu

SEQ ID NO: 1529535 - RNA, 19 nt, Artificial Sequence
  Description of Artificial Sequence: Synthetic oligonucleotide
gggcccggcucauaaaaca

SEQ ID NO: 1529536 - RNA, 19 nt, Artificial Sequence
  Description of Artificial Sequence: Synthetic oligonucleotide
agguuagugggaggggcaa

SEQ ID NO: 1529537 - RNA, 19 nt, Artificial Sequence
  Description of Artificial Sequence: Synthetic oligonucleotide
ggggaggggcugcugaaac

SEQ ID NO: 1529538 - RNA, 19 nt, Artificial Sequence
  Description of Artificial Sequence: Synthetic oligonucleotide
ggcaacauugggguaggga

SEQ ID NO: 1529539 - RNA, 19 nt, Artificial Sequence
  Description of Artificial Sequence: Synthetic oligonucleotide
cuaaugggaccugcuggca

SEQ ID NO: 1529540 - RNA, 19 nt, Artificial Sequence
  Description of Artificial Sequence: Synthetic oligonucleotide
gggauugaggaagcccacc

SEQ ID NO: 1529541 - RNA, 19 nt, Artificial Sequence
  Description of Artificial Sequence: Synthetic oligonucleotide
agggcuaaugggaccugcu

SEQ ID NO: 1529542 - RNA, 19 nt, Artificial Sequence
  Description of Artificial Sequence: Synthetic oligonucleotide
guaacuaaugagagucaau

SEQ ID NO: 1529543 - RNA, 19 nt, Artificial Sequence
  Description of Artificial Sequence: Synthetic oligonucleotide
ugaccggcaucagggcaga

SEQ ID NO: 1529544 - RNA, 19 nt, Artificial Sequence
  Description of Artificial Sequence: Synthetic oligonucleotide
cugagcagacagguuuuca

SEQ ID NO: 1529545 - RNA, 19 nt, Artificial Sequence
  Description of Artificial Sequence: Synthetic oligonucleotide
gcugaccggcaucagggca

SEQ ID NO: 1529546 - RNA, 19 nt, Artificial Sequence
  Description of Artificial Sequence: Synthetic oligonucleotide
cccucacaugccuaacaug

SEQ ID NO: 1529547 - RNA, 19 nt, Artificial Sequence
  Description of Artificial Sequence: Synthetic oligonucleotide
caugugugaugggaaaggu

SEQ ID NO: 1529548 - RNA, 19 nt, Artificial Sequence
  Description of Artificial Sequence: Synthetic oligonucleotide
gggauacaaguuuaacaau

SEQ ID NO: 1529549 - RNA, 19 nt, Artificial Sequence
  Description of Artificial Sequence: Synthetic oligonucleotide
ggaggucugcgaaggggag

SEQ ID NO: 1529550 - RNA, 19 nt, Artificial Sequence
  Description of Artificial Sequence: Synthetic oligonucleotide
ggagauggcaugccuggcu

SEQ ID NO: 1529551 - RNA, 19 nt, Artificial Sequence
  Description of Artificial Sequence: Synthetic oligonucleotide
gacuuagccuugacugucu

SEQ ID NO: 1529552 - RNA, 19 nt, Artificial Sequence
  Description of Artificial Sequence: Synthetic oligonucleotide
ggacaaacucuuucagcgu

SEQ ID NO: 1529553 - RNA, 19 nt, Artificial Sequence
  Description of Artificial Sequence: Synthetic oligonucleotide
gcguucucagugaaauaac

SEQ ID NO: 1529554 - RNA, 19 nt, Artificial Sequence
  Description of Artificial Sequence: Synthetic oligonucleotide
ggguaacuaaugagaguca

SEQ ID NO: 1529555 - RNA, 19 nt, Artificial Sequence
  Description of Artificial Sequence: Synthetic oligonucleotide
cugcgaaggggaggggcug

SEQ ID NO: 1529556 - RNA, 19 nt, Artificial Sequence
  Description of Artificial Sequence: Synthetic oligonucleotide
gggcuuggugucuggcaug

SEQ ID NO: 1529557 - RNA, 19 nt, Artificial Sequence
  Description of Artificial Sequence: Synthetic oligonucleotide
cagaguucgcguucucagu

SEQ ID NO: 1529558 - RNA, 19 nt, Artificial Sequence
  Description of Artificial Sequence: Synthetic oligonucleotide
cucaaccaauuacaaguuu

SEQ ID NO: 1529559 - RNA, 19 nt, Artificial Sequence
  Description of Artificial Sequence: Synthetic oligonucleotide
cugucuuccuaagggcuaa

SEQ ID NO: 1529560 - RNA, 19 nt, Artificial Sequence
  Description of Artificial Sequence: Synthetic oligonucleotide
cugcaugucuagucuggcu

SEQ ID NO: 1529561 - RNA, 19 nt, Artificial Sequence
  Description of Artificial Sequence: Synthetic oligonucleotide
ugucuuccuaagggcuaau

SEQ ID NO: 1529562 - RNA, 19 nt, Artificial Sequence
  Description of Artificial Sequence: Synthetic oligonucleotide
gcguuucguuucacaauag

SEQ ID NO: 1529563 - RNA, 19 nt, Artificial Sequence
  Description of Artificial Sequence: Synthetic oligonucleotide
ccggcaucagggcagacaa

SEQ ID NO: 1529564 - RNA, 19 nt, Artificial Sequence
  Description of Artificial Sequence: Synthetic oligonucleotide
ggguugugcaccuugccuu

SEQ ID NO: 1529565 - RNA, 19 nt, Artificial Sequence
  Description of Artificial Sequence: Synthetic oligonucleotide
agcgucuccugaggguggu

SEQ ID NO: 1529566 - RNA, 19 nt, Artificial Sequence
  Description of Artificial Sequence: Synthetic oligonucleotide
acauggccagacacguaau

SEQ ID NO: 1529567 - RNA, 19 nt, Artificial Sequence
  Description of Artificial Sequence: Synthetic oligonucleotide
gcggcaacauugggguagg

SEQ ID NO: 1529568 - RNA, 19 nt, Artificial Sequence
  Description of Artificial Sequence: Synthetic oligonucleotide
gcauggacuuagccuugac

SEQ ID NO: 1529569 - RNA, 19 nt, Artificial Sequence
  Description of Artificial Sequence: Synthetic oligonucleotide
acggggcguuucguuucac

SEQ ID NO: 1529570 - RNA, 19 nt, Artificial Sequence
  Description of Artificial Sequence: Synthetic oligonucleotide
cagacacguaauacugaau

SEQ ID NO: 1529571 - RNA, 19 nt, Artificial Sequence
  Description of Artificial Sequence: Synthetic oligonucleotide
ggggcaaagaaggaagcau

SEQ ID NO: 1529572 - RNA, 19 nt, Artificial Sequence
  Description of Artificial Sequence: Synthetic oligonucleotide
ggucggugaugcuguguga

SEQ ID NO: 1529573 - RNA, 19 nt, Artificial Sequence
  Description of Artificial Sequence: Synthetic oligonucleotide
cggugaugcugugugaaug

SEQ ID NO: 1529574 - RNA, 19 nt, Artificial Sequence
  Description of Artificial Sequence: Synthetic oligonucleotide
cgcguucucagugaaauaa

SEQ ID NO: 1529575 - RNA, 19 nt, Artificial Sequence
  Description of Artificial Sequence: Synthetic oligonucleotide
uggcggcaacauuggggua

SEQ ID NO: 1529576 - RNA, 19 nt, Artificial Sequence
  Description of Artificial Sequence: Synthetic oligonucleotide
cauugggguagggaggaau

SEQ ID NO: 1529577 - RNA, 19 nt, Artificial Sequence
  Description of Artificial Sequence: Synthetic oligonucleotide
gcguguggacuugcucugg

SEQ ID NO: 1529578 - RNA, 19 nt, Artificial Sequence
  Description of Artificial Sequence: Synthetic oligonucleotide
cacggggcguuucguuuca

SEQ ID NO: 1529579 - RNA, 19 nt, Artificial Sequence
  Description of Artificial Sequence: Synthetic oligonucleotide
ggggcugcugaaaccggac

SEQ ID NO: 1529580 - RNA, 19 nt, Artificial Sequence
  Description of Artificial Sequence: Synthetic oligonucleotide
gcagcucccucacaugccu

SEQ ID NO: 1529581 - RNA, 19 nt, Artificial Sequence
  Description of Artificial Sequence: Synthetic oligonucleotide
guucgcguucucagugaaa

SEQ ID NO: 1529582 - RNA, 19 nt, Artificial Sequence
  Description of Artificial Sequence: Synthetic oligonucleotide
cagccggaaggaagacaga

SEQ ID NO: 1529583 - RNA, 19 nt, Artificial Sequence
  Description of Artificial Sequence: Synthetic oligonucleotide
ggggcuuggugucuggcau

SEQ ID NO: 1529584 - RNA, 19 nt, Artificial Sequence
  Description of Artificial Sequence: Synthetic oligonucleotide
gccuggccauugguggugg

SEQ ID NO: 1529585 - RNA, 19 nt, Artificial Sequence
  Description of Artificial Sequence: Synthetic oligonucleotide
ggcguugcguguggacuug

SEQ ID NO: 1529586 - RNA, 19 nt, Artificial Sequence
  Description of Artificial Sequence: Synthetic oligonucleotide
cuggcucgacuucgugcca

SEQ ID NO: 1529587 - RNA, 19 nt, Artificial Sequence
  Description of Artificial Sequence: Synthetic oligonucleotide
ggcccggcucauaaaacaa

SEQ ID NO: 1529588 - RNA, 19 nt, Artificial Sequence
  Description of Artificial Sequence: Synthetic oligonucleotide
ccuguaaugacaggucggu

SEQ ID NO: 1529589 - RNA, 19 nt, Artificial Sequence
  Description of Artificial Sequence: Synthetic oligonucleotide
ccugagggagaagaggucu

SEQ ID NO: 1529590 - RNA, 19 nt, Artificial Sequence
  Description of Artificial Sequence: Synthetic oligonucleotide
augccuggcucgacuucgu

SEQ ID NO: 1529591 - RNA, 19 nt, Artificial Sequence
  Description of Artificial Sequence: Synthetic oligonucleotide
ggggcccggcucauaaaac

SEQ ID NO: 1529592 - RNA, 19 nt, Artificial Sequence
  Description of Artificial Sequence: Synthetic oligonucleotide
gggcguuucguuucacaau

SEQ ID NO: 1529593 - RNA, 19 nt, Artificial Sequence
  Description of Artificial Sequence: Synthetic oligonucleotide
ggucugcgaaggggagggg

SEQ ID NO: 1529594 - RNA, 19 nt, Artificial Sequence
  Description of Artificial Sequence: Synthetic oligonucleotide
gacuugcucuggguccugu

SEQ ID NO: 1529595 - RNA, 19 nt, Artificial Sequence
  Description of Artificial Sequence: Synthetic oligonucleotide
gcucccucacaugccuaac

SEQ ID NO: 1529596 - RNA, 19 nt, Artificial Sequence
  Description of Artificial Sequence: Synthetic oligonucleotide
ggcaugccuggcucgacuu

SEQ ID NO: 1529597 - RNA, 19 nt, Artificial Sequence
  Description of Artificial Sequence: Synthetic oligonucleotide
gaccggcaucagggcagac

SEQ ID NO: 1529598 - RNA, 19 nt, Artificial Sequence
  Description of Artificial Sequence: Synthetic oligonucleotide
gcguugcguguggacuugc

SEQ ID NO: 1529599 - RNA, 19 nt, Artificial Sequence
  Description of Artificial Sequence: Synthetic oligonucleotide
ccggcucauaaaacaauuu

SEQ ID NO: 1529600 - RNA, 19 nt, Artificial Sequence
  Description of Artificial Sequence: Synthetic oligonucleotide
ggcagacaagcuggacaaa

SEQ ID NO: 1529601 - RNA, 19 nt, Artificial Sequence
  Description of Artificial Sequence: Synthetic oligonucleotide
cguuucacaauaggucucu

SEQ ID NO: 1529602 - RNA, 19 nt, Artificial Sequence
  Description of Artificial Sequence: Synthetic oligonucleotide
caggucggugaugcugugu

SEQ ID NO: 1529603 - RNA, 19 nt, Artificial Sequence
  Description of Artificial Sequence: Synthetic oligonucleotide
cggcaucagggcagacaag

SEQ ID NO: 1529604 - RNA, 19 nt, Artificial Sequence
  Description of Artificial Sequence: Synthetic oligonucleotide
cggggcguuucguuucaca

SEQ ID NO: 1529605 - RNA, 19 nt, Artificial Sequence
  Description of Artificial Sequence: Synthetic oligonucleotide
gcccggcucauaaaacaau

SEQ ID NO: 1529606 - RNA, 19 nt, Artificial Sequence
  Description of Artificial Sequence: Synthetic oligonucleotide
ccugagggugguagcggau

SEQ ID NO: 1529607 - RNA, 19 nt, Artificial Sequence
  Description of Artificial Sequence: Synthetic oligonucleotide
cggcaacauugggguaggg

SEQ ID NO: 1529608 - RNA, 19 nt, Artificial Sequence
  Description of Artificial Sequence: Synthetic oligonucleotide
gcggugguggcggcaacau

SEQ ID NO: 1529609 - RNA, 19 nt, Artificial Sequence
  Description of Artificial Sequence: Synthetic oligonucleotide
cacaggggcccggcucaua

SEQ ID NO: 1529610 - RNA, 19 nt, Artificial Sequence
  Description of Artificial Sequence: Synthetic oligonucleotide
ggaauggguugugcaccuu

SEQ ID NO: 1529611 - RNA, 19 nt, Artificial Sequence
  Description of Artificial Sequence: Synthetic oligonucleotide
cguugcguguggacuugcu

SEQ ID NO: 1529612 - RNA, 19 nt, Artificial Sequence
  Description of Artificial Sequence: Synthetic oligonucleotide
gcgaaggggaggggcugcu

SEQ ID NO: 1529613 - RNA, 19 nt, Artificial Sequence
  Description of Artificial Sequence: Synthetic oligonucleotide
gcccagguugcuggaugau

SEQ ID NO: 1529614 - RNA, 19 nt, Artificial Sequence
  Description of Artificial Sequence: Synthetic oligonucleotide
cccaccuguccagcuugcu

SEQ ID NO: 1529615 - RNA, 19 nt, Artificial Sequence
  Description of Artificial Sequence: Synthetic oligonucleotide
uuuauagaaauaccgaugc

SEQ ID NO: 1529616 - RNA, 19 nt, Artificial Sequence
  Description of Artificial Sequence: Synthetic oligonucleotide
aaaauacaagagcagacuc

SEQ ID NO: 1529617 - RNA, 19 nt, Artificial Sequence
  Description of Artificial Sequence: Synthetic oligonucleotide
agaauucugaaugagaaac

SEQ ID NO: 1529618 - RNA, 19 nt, Artificial Sequence
  Description of Artificial Sequence: Synthetic oligonucleotide
uaagcuauaggagucaagg

SEQ ID NO: 1529619 - RNA, 19 nt, Artificial Sequence
  Description of Artificial Sequence: Synthetic oligonucleotide
aaucuuuacaucuuuugga

SEQ ID NO: 1529620 - RNA, 19 nt, Artificial Sequence
  Description of Artificial Sequence: Synthetic oligonucleotide
acuaucugaguucagcucg

SEQ ID NO: 1529621 - RNA, 19 nt, Artificial Sequence
  Description of Artificial Sequence: Synthetic oligonucleotide
aguuaauuaaaaugcucac

SEQ ID NO: 1529622 - RNA, 19 nt, Artificial Sequence
  Description of Artificial Sequence: Synthetic oligonucleotide
uggaguaucuucacaaggg

SEQ ID NO: 1529623 - RNA, 19 nt, Artificial Sequence
  Description of Artificial Sequence: Synthetic oligonucleotide
ugaacuuuauagaaauacc

SEQ ID NO: 1529624 - RNA, 19 nt, Artificial Sequence
  Description of Artificial Sequence: Synthetic oligonucleotide
aaaguuaauuaaaaugcuc

SEQ ID NO: 1529625 - RNA, 19 nt, Artificial Sequence
  Description of Artificial Sequence: Synthetic oligonucleotide
aaguuaauuaaaaugcuca

SEQ ID NO: 1529626 - RNA, 19 nt, Artificial Sequence
  Description of Artificial Sequence: Synthetic oligonucleotide
uauagaaauaccgaugcca

SEQ ID NO: 1529627 - RNA, 19 nt, Artificial Sequence
  Description of Artificial Sequence: Synthetic oligonucleotide
aaaggugucugagaucacc

SEQ ID NO: 1529628 - RNA, 19 nt, Artificial Sequence
  Description of Artificial Sequence: Synthetic oligonucleotide
aaaguccuucucccaaucc

SEQ ID NO: 1529629 - RNA, 19 nt, Artificial Sequence
  Description of Artificial Sequence: Synthetic oligonucleotide
ugcaaugccuucaagcucc

SEQ ID NO: 1529630 - RNA, 19 nt, Artificial Sequence
  Description of Artificial Sequence: Synthetic oligonucleotide
gguaaauucugucaggucc

SEQ ID NO: 1529631 - RNA, 19 nt, Artificial Sequence
  Description of Artificial Sequence: Synthetic oligonucleotide
uguguccuaagcuauagga

SEQ ID NO: 1529632 - RNA, 19 nt, Artificial Sequence
  Description of Artificial Sequence: Synthetic oligonucleotide
cuuuauagaaauaccgaug

SEQ ID NO: 1529633 - RNA, 19 nt, Artificial Sequence
  Description of Artificial Sequence: Synthetic oligonucleotide
uacaagagcagacucuugc

SEQ ID NO: 1529634 - RNA, 19 nt, Artificial Sequence
  Description of Artificial Sequence: Synthetic oligonucleotide
agucaagguaggcagcugc

SEQ ID NO: 1529635 - RNA, 19 nt, Artificial Sequence
  Description of Artificial Sequence: Synthetic oligonucleotide
aaugcucacagcuggcuug

SEQ ID NO: 1529636 - RNA, 19 nt, Artificial Sequence
  Description of Artificial Sequence: Synthetic oligonucleotide
aauucugucaggucccgcu

SEQ ID NO: 1529637 - RNA, 19 nt, Artificial Sequence
  Description of Artificial Sequence: Synthetic oligonucleotide
uguccuaagcuauaggagu

SEQ ID NO: 1529638 - RNA, 19 nt, Artificial Sequence
  Description of Artificial Sequence: Synthetic oligonucleotide
gaugguuuugucuggugag

SEQ ID NO: 1529639 - RNA, 19 nt, Artificial Sequence
  Description of Artificial Sequence: Synthetic oligonucleotide
acuuuauagaaauaccgau

SEQ ID NO: 1529640 - RNA, 19 nt, Artificial Sequence
  Description of Artificial Sequence: Synthetic oligonucleotide
ucagucauguccaagucaa

SEQ ID NO: 1529641 - RNA, 19 nt, Artificial Sequence
  Description of Artificial Sequence: Synthetic oligonucleotide
ugugacauacuuccaaggu

SEQ ID NO: 1529642 - RNA, 19 nt, Artificial Sequence
  Description of Artificial Sequence: Synthetic oligonucleotide
ugugcuugagccuuucuug

SEQ ID NO: 1529643 - RNA, 19 nt, Artificial Sequence
  Description of Artificial Sequence: Synthetic oligonucleotide
uauccaaccaggcaacaca

SEQ ID NO: 1529644 - RNA, 19 nt, Artificial Sequence
  Description of Artificial Sequence: Synthetic oligonucleotide
gauggcagaggccuuuugg

SEQ ID NO: 1529645 - RNA, 19 nt, Artificial Sequence
  Description of Artificial Sequence: Synthetic oligonucleotide
ucuucagucauguccaagu

SEQ ID NO: 1529646 - RNA, 19 nt, Artificial Sequence
  Description of Artificial Sequence: Synthetic oligonucleotide
aaggugucugagaucaccc

SEQ ID NO: 1529647 - RNA, 19 nt, Artificial Sequence
  Description of Artificial Sequence: Synthetic oligonucleotide
auuguuggaggguguagac

SEQ ID NO: 1529648 - RNA, 19 nt, Artificial Sequence
  Description of Artificial Sequence: Synthetic oligonucleotide
gugaacuuuauagaaauac

SEQ ID NO: 1529649 - RNA, 19 nt, Artificial Sequence
  Description of Artificial Sequence: Synthetic oligonucleotide
aguaucuucacaagggcuc

SEQ ID NO: 1529650 - RNA, 19 nt, Artificial Sequence
  Description of Artificial Sequence: Synthetic oligonucleotide
ugagauuagcgagcgaggg

SEQ ID NO: 1529651 - RNA, 19 nt, Artificial Sequence
  Description of Artificial Sequence: Synthetic oligonucleotide
uuauagaaauaccgaugcc

SEQ ID NO: 1529652 - RNA, 19 nt, Artificial Sequence
  Description of Artificial Sequence: Synthetic oligonucleotide
uggugcaaugccuucaagc

SEQ ID NO: 1529653 - RNA, 19 nt, Artificial Sequence
  Description of Artificial Sequence: Synthetic oligonucleotide
ugaaugagaaacagcugcu

SEQ ID NO: 1529654 - RNA, 19 nt, Artificial Sequence
  Description of Artificial Sequence: Synthetic oligonucleotide
aagagcagacucuugcagu

SEQ ID NO: 1529655 - RNA, 19 nt, Artificial Sequence
  Description of Artificial Sequence: Synthetic oligonucleotide
agauuagcgagcgagggag

SEQ ID NO: 1529656 - RNA, 19 nt, Artificial Sequence
  Description of Artificial Sequence: Synthetic oligonucleotide
acgauucucagugucuucc

SEQ ID NO: 1529657 - RNA, 19 nt, Artificial Sequence
  Description of Artificial Sequence: Synthetic oligonucleotide
gcugcuauggugcaggccg

SEQ ID NO: 1529658 - RNA, 19 nt, Artificial Sequence
  Description of Artificial Sequence: Synthetic oligonucleotide
gaacuccaaagcuucagug

SEQ ID NO: 1529659 - RNA, 19 nt, Artificial Sequence
  Description of Artificial Sequence: Synthetic oligonucleotide
acaaggagcucugagaucu

SEQ ID NO: 1529660 - RNA, 19 nt, Artificial Sequence
  Description of Artificial Sequence: Synthetic oligonucleotide
ucugaaugagaaacagcug

SEQ ID NO: 1529661 - RNA, 19 nt, Artificial Sequence
  Description of Artificial Sequence: Synthetic oligonucleotide
aaauacaagagcagacucu

SEQ ID NO: 1529662 - RNA, 19 nt, Artificial Sequence
  Description of Artificial Sequence: Synthetic oligonucleotide
augugacauacuuccaagg

SEQ ID NO: 1529663 - RNA, 19 nt, Artificial Sequence
  Description of Artificial Sequence: Synthetic oligonucleotide
ucggguucguugcaguacg

SEQ ID NO: 1529664 - RNA, 19 nt, Artificial Sequence
  Description of Artificial Sequence: Synthetic oligonucleotide
aaucuguaccaaguucugg

SEQ ID NO: 1529665 - RNA, 19 nt, Artificial Sequence
  Description of Artificial Sequence: Synthetic oligonucleotide
aauacaagagcagacucuu

SEQ ID NO: 1529666 - RNA, 19 nt, Artificial Sequence
  Description of Artificial Sequence: Synthetic oligonucleotide
uucagucauguccaaguca

SEQ ID NO: 1529667 - RNA, 19 nt, Artificial Sequence
  Description of Artificial Sequence: Synthetic oligonucleotide
caugugacauacuuccaag

SEQ ID NO: 1529668 - RNA, 19 nt, Artificial Sequence
  Description of Artificial Sequence: Synthetic oligonucleotide
ugcuguaccaccuggguaa

SEQ ID NO: 1529669 - RNA, 19 nt, Artificial Sequence
  Description of Artificial Sequence: Synthetic oligonucleotide
ucguacuggaguaucuuca

SEQ ID NO: 1529670 - RNA, 19 nt, Artificial Sequence
  Description of Artificial Sequence: Synthetic oligonucleotide
cuaggcuccucagagaugc

SEQ ID NO: 1529671 - RNA, 19 nt, Artificial Sequence
  Description of Artificial Sequence: Synthetic oligonucleotide
uucaugaacuccaaagcuu

SEQ ID NO: 1529672 - RNA, 19 nt, Artificial Sequence
  Description of Artificial Sequence: Synthetic oligonucleotide
ucucuuuuggaaucuuuac

SEQ ID NO: 1529673 - RNA, 19 nt, Artificial Sequence
  Description of Artificial Sequence: Synthetic oligonucleotide
auggagucaccucugcagg

SEQ ID NO: 1529674 - RNA, 19 nt, Artificial Sequence
  Description of Artificial Sequence: Synthetic oligonucleotide
cagucgaugguuuugucug

SEQ ID NO: 1529675 - RNA, 19 nt, Artificial Sequence
  Description of Artificial Sequence: Synthetic oligonucleotide
aaauaccgaugccagaauu

SEQ ID NO: 1529676 - RNA, 19 nt, Artificial Sequence
  Description of Artificial Sequence: Synthetic oligonucleotide
acuccaaagcuucagugga

SEQ ID NO: 1529677 - RNA, 19 nt, Artificial Sequence
  Description of Artificial Sequence: Synthetic oligonucleotide
guuggugaacuuuauagaa

SEQ ID NO: 1529678 - RNA, 19 nt, Artificial Sequence
  Description of Artificial Sequence: Synthetic oligonucleotide
uaaaaugcucacagcuggc

SEQ ID NO: 1529679 - RNA, 19 nt, Artificial Sequence
  Description of Artificial Sequence: Synthetic oligonucleotide
aaucugugucaugagggag

SEQ ID NO: 1529680 - RNA, 19 nt, Artificial Sequence
  Description of Artificial Sequence: Synthetic oligonucleotide
agcuauaggagucaaggua

SEQ ID NO: 1529681 - RNA, 19 nt, Artificial Sequence
  Description of Artificial Sequence: Synthetic oligonucleotide
aagcuauaggagucaaggu

SEQ ID NO: 1529682 - RNA, 19 nt, Artificial Sequence
  Description of Artificial Sequence: Synthetic oligonucleotide
gugacauacuuccaaggug

SEQ ID NO: 1529683 - RNA, 19 nt, Artificial Sequence
  Description of Artificial Sequence: Synthetic oligonucleotide
ugaggcauccacuuuggaa

SEQ ID NO: 1529684 - RNA, 19 nt, Artificial Sequence
  Description of Artificial Sequence: Synthetic oligonucleotide
agaaauaccgaugccagaa

SEQ ID NO: 1529685 - RNA, 19 nt, Artificial Sequence
  Description of Artificial Sequence: Synthetic oligonucleotide
uuguguccuaagcuauagg

SEQ ID NO: 1529686 - RNA, 19 nt, Artificial Sequence
  Description of Artificial Sequence: Synthetic oligonucleotide
aagagccuucaguagccag

SEQ ID NO: 1529687 - RNA, 19 nt, Artificial Sequence
  Description of Artificial Sequence: Synthetic oligonucleotide
gauguggagguuuuggucu

SEQ ID NO: 1529688 - RNA, 19 nt, Artificial Sequence
  Description of Artificial Sequence: Synthetic oligonucleotide
guuaauuaaaaugcucaca

SEQ ID NO: 1529689 - RNA, 19 nt, Artificial Sequence
  Description of Artificial Sequence: Synthetic oligonucleotide
aagucagauagccccuucu

SEQ ID NO: 1529690 - RNA, 19 nt, Artificial Sequence
  Description of Artificial Sequence: Synthetic oligonucleotide
cuauaggagucaagguagg

SEQ ID NO: 1529691 - RNA, 19 nt, Artificial Sequence
  Description of Artificial Sequence: Synthetic oligonucleotide
agagggugugcccaucagg

SEQ ID NO: 1529692 - RNA, 19 nt, Artificial Sequence
  Description of Artificial Sequence: Synthetic oligonucleotide
caggcaacacacagaaggg

SEQ ID NO: 1529693 - RNA, 19 nt, Artificial Sequence
  Description of Artificial Sequence: Synthetic oligonucleotide
uuuggaaucuuuacaucuu

SEQ ID NO: 1529694 - RNA, 19 nt, Artificial Sequence
  Description of Artificial Sequence: Synthetic oligonucleotide
aaaaugcucacagcuggcu

SEQ ID NO: 1529695 - RNA, 19 nt, Artificial Sequence
  Description of Artificial Sequence: Synthetic oligonucleotide
ucugauggagucaccucug

SEQ ID NO: 1529696 - RNA, 19 nt, Artificial Sequence
  Description of Artificial Sequence: Synthetic oligonucleotide
ugguuuugucuggugaggg

SEQ ID NO: 1529697 - RNA, 19 nt, Artificial Sequence
  Description of Artificial Sequence: Synthetic oligonucleotide
aaauucugucaggucccgc

SEQ ID NO: 1529698 - RNA, 19 nt, Artificial Sequence
  Description of Artificial Sequence: Synthetic oligonucleotide
agagccuucaguagccagc

SEQ ID NO: 1529699 - RNA, 19 nt, Artificial Sequence
  Description of Artificial Sequence: Synthetic oligonucleotide
gcuauaggagucaagguag

SEQ ID NO: 1529700 - RNA, 19 nt, Artificial Sequence
  Description of Artificial Sequence: Synthetic oligonucleotide
caucauauggcucagcugu

SEQ ID NO: 1529701 - RNA, 19 nt, Artificial Sequence
  Description of Artificial Sequence: Synthetic oligonucleotide
cugagauuagcgagcgagg

SEQ ID NO: 1529702 - RNA, 19 nt, Artificial Sequence
  Description of Artificial Sequence: Synthetic oligonucleotide
guagacuucccacuaucug

SEQ ID NO: 1529703 - RNA, 19 nt, Artificial Sequence
  Description of Artificial Sequence: Synthetic oligonucleotide
gcaaucugugucaugaggg

SEQ ID NO: 1529704 - RNA, 19 nt, Artificial Sequence
  Description of Artificial Sequence: Synthetic oligonucleotide
ucagagcagguauccaacc

SEQ ID NO: 1529705 - RNA, 19 nt, Artificial Sequence
  Description of Artificial Sequence: Synthetic oligonucleotide
uggagauggugcaaugccu

SEQ ID NO: 1529706 - RNA, 19 nt, Artificial Sequence
  Description of Artificial Sequence: Synthetic oligonucleotide
uagaggcgagccuuggugc

SEQ ID NO: 1529707 - RNA, 19 nt, Artificial Sequence
  Description of Artificial Sequence: Synthetic oligonucleotide
uggguaaauucugucaggu

SEQ ID NO: 1529708 - RNA, 19 nt, Artificial Sequence
  Description of Artificial Sequence: Synthetic oligonucleotide
cuggcugagauuagcgagc

SEQ ID NO: 1529709 - RNA, 19 nt, Artificial Sequence
  Description of Artificial Sequence: Synthetic oligonucleotide
uucagcucgccucgggugc

SEQ ID NO: 1529710 - RNA, 19 nt, Artificial Sequence
  Description of Artificial Sequence: Synthetic oligonucleotide
aggcaacacacagaagggc

SEQ ID NO: 1529711 - RNA, 19 nt, Artificial Sequence
  Description of Artificial Sequence: Synthetic oligonucleotide
gucaugcuguaccaccugg

SEQ ID NO: 1529712 - RNA, 19 nt, Artificial Sequence
  Description of Artificial Sequence: Synthetic oligonucleotide
uccuguucaaguuggugaa

SEQ ID NO: 1529713 - RNA, 19 nt, Artificial Sequence
  Description of Artificial Sequence: Synthetic oligonucleotide
uugggugcaugugacauac

SEQ ID NO: 1529714 - RNA, 19 nt, Artificial Sequence
  Description of Artificial Sequence: Synthetic oligonucleotide
uucguugcaguacguugcc

SEQ ID NO: 1529715 - RNA, 19 nt, Artificial Sequence
  Description of Artificial Sequence: Synthetic oligonucleotide
auaggagucaagguaggca

SEQ ID NO: 1529716 - RNA, 19 nt, Artificial Sequence
  Description of Artificial Sequence: Synthetic oligonucleotide
uuuacaucuuuuggagaug

SEQ ID NO: 1529717 - RNA, 19 nt, Artificial Sequence
  Description of Artificial Sequence: Synthetic oligonucleotide
gaaccaucuugguguagag

SEQ ID NO: 1529718 - RNA, 19 nt, Artificial Sequence
  Description of Artificial Sequence: Synthetic oligonucleotide
cuccuguucaaguugguga

SEQ ID NO: 1529719 - RNA, 19 nt, Artificial Sequence
  Description of Artificial Sequence: Synthetic oligonucleotide
gagcagguauccaaccagg

SEQ ID NO: 1529720 - RNA, 19 nt, Artificial Sequence
  Description of Artificial Sequence: Synthetic oligonucleotide
agucgaugguuuugucugg

SEQ ID NO: 1529721 - RNA, 19 nt, Artificial Sequence
  Description of Artificial Sequence: Synthetic oligonucleotide
guucguugcaguacguugc

SEQ ID NO: 1529722 - RNA, 19 nt, Artificial Sequence
  Description of Artificial Sequence: Synthetic oligonucleotide
cauauggcucagcugugcc

SEQ ID NO: 1529723 - RNA, 19 nt, Artificial Sequence
  Description of Artificial Sequence: Synthetic oligonucleotide
cuaagcuauaggagucaag

SEQ ID NO: 1529724 - RNA, 19 nt, Artificial Sequence
  Description of Artificial Sequence: Synthetic oligonucleotide
cuucccacuaucugaguuc

SEQ ID NO: 1529725 - RNA, 19 nt, Artificial Sequence
  Description of Artificial Sequence: Synthetic oligonucleotide
uucguacuggaguaucuuc

SEQ ID NO: 1529726 - RNA, 19 nt, Artificial Sequence
  Description of Artificial Sequence: Synthetic oligonucleotide
auccaaccaggcaacacac

SEQ ID NO: 1529727 - RNA, 19 nt, Artificial Sequence
  Description of Artificial Sequence: Synthetic oligonucleotide
gaauucugaaugagaaaca

SEQ ID NO: 1529728 - RNA, 19 nt, Artificial Sequence
  Description of Artificial Sequence: Synthetic oligonucleotide
gggaugugcggugagaggg

SEQ ID NO: 1529729 - RNA, 19 nt, Artificial Sequence
  Description of Artificial Sequence: Synthetic oligonucleotide
ugagccuuucuugccauug

SEQ ID NO: 1529730 - RNA, 19 nt, Artificial Sequence
  Description of Artificial Sequence: Synthetic oligonucleotide
guguccuaagcuauaggag

SEQ ID NO: 1529731 - RNA, 19 nt, Artificial Sequence
  Description of Artificial Sequence: Synthetic oligonucleotide
cuaucugaguucagcucgc

SEQ ID NO: 1529732 - RNA, 19 nt, Artificial Sequence
  Description of Artificial Sequence: Synthetic oligonucleotide
ggaguaucuucacaagggc

SEQ ID NO: 1529733 - RNA, 19 nt, Artificial Sequence
  Description of Artificial Sequence: Synthetic oligonucleotide
accuaggcuccucagagau

SEQ ID NO: 1529734 - RNA, 19 nt, Artificial Sequence
  Description of Artificial Sequence: Synthetic oligonucleotide
ucucccaauccucacugau

SEQ ID NO: 1529735 - RNA, 19 nt, Artificial Sequence
  Description of Artificial Sequence: Synthetic oligonucleotide
cuuuacaucuuuuggagau

SEQ ID NO: 1529736 - RNA, 19 nt, Artificial Sequence
  Description of Artificial Sequence: Synthetic oligonucleotide
augguuuugucuggugagg

SEQ ID NO: 1529737 - RNA, 19 nt, Artificial Sequence
  Description of Artificial Sequence: Synthetic oligonucleotide
gcuggcugagauuagcgag

SEQ ID NO: 1529738 - RNA, 19 nt, Artificial Sequence
  Description of Artificial Sequence: Synthetic oligonucleotide
cagggugaugacaucgcag

SEQ ID NO: 1529739 - RNA, 19 nt, Artificial Sequence
  Description of Artificial Sequence: Synthetic oligonucleotide
ucuguaccaaguucuggau

SEQ ID NO: 1529740 - RNA, 19 nt, Artificial Sequence
  Description of Artificial Sequence: Synthetic oligonucleotide
gguucguugcaguacguug

SEQ ID NO: 1529741 - RNA, 19 nt, Artificial Sequence
  Description of Artificial Sequence: Synthetic oligonucleotide
auguggagguuuuggucuc

SEQ ID NO: 1529742 - RNA, 19 nt, Artificial Sequence
  Description of Artificial Sequence: Synthetic oligonucleotide
uccaaagcuucaguggacu

SEQ ID NO: 1529743 - RNA, 19 nt, Artificial Sequence
  Description of Artificial Sequence: Synthetic oligonucleotide
acguugccggaucugacug

SEQ ID NO: 1529744 - RNA, 19 nt, Artificial Sequence
  Description of Artificial Sequence: Synthetic oligonucleotide
ucacagcuggcuugugucc

SEQ ID NO: 1529745 - RNA, 19 nt, Artificial Sequence
  Description of Artificial Sequence: Synthetic oligonucleotide
gugcuugagccuuucuugc

SEQ ID NO: 1529746 - RNA, 19 nt, Artificial Sequence
  Description of Artificial Sequence: Synthetic oligonucleotide
uugccauuguuggagggug

SEQ ID NO: 1529747 - RNA, 19 nt, Artificial Sequence
  Description of Artificial Sequence: Synthetic oligonucleotide
augaacuccaaagcuucag

SEQ ID NO: 1529748 - RNA, 19 nt, Artificial Sequence
  Description of Artificial Sequence: Synthetic oligonucleotide
uacguugccggaucugacu

SEQ ID NO: 1529749 - RNA, 19 nt, Artificial Sequence
  Description of Artificial Sequence: Synthetic oligonucleotide
auaccgaugccagaauucu

SEQ ID NO: 1529750 - RNA, 19 nt, Artificial Sequence
  Description of Artificial Sequence: Synthetic oligonucleotide
aucggguucguugcaguac

SEQ ID NO: 1529751 - RNA, 19 nt, Artificial Sequence
  Description of Artificial Sequence: Synthetic oligonucleotide
gaaagugccaucugcacuu

SEQ ID NO: 1529752 - RNA, 19 nt, Artificial Sequence
  Description of Artificial Sequence: Synthetic oligonucleotide
agugucuuccaaggcuggc

SEQ ID NO: 1529753 - RNA, 19 nt, Artificial Sequence
  Description of Artificial Sequence: Synthetic oligonucleotide
agacuucccacuaucugag

SEQ ID NO: 1529754 - RNA, 19 nt, Artificial Sequence
  Description of Artificial Sequence: Synthetic oligonucleotide
ucauauggcucagcugugc

SEQ ID NO: 1529755 - RNA, 19 nt, Artificial Sequence
  Description of Artificial Sequence: Synthetic oligonucleotide
ccaaggugugagcagaagg

SEQ ID NO: 1529756 - RNA, 19 nt, Artificial Sequence
  Description of Artificial Sequence: Synthetic oligonucleotide
ugcaguacguugccggauc

SEQ ID NO: 1529757 - RNA, 19 nt, Artificial Sequence
  Description of Artificial Sequence: Synthetic oligonucleotide
cacuaucugaguucagcuc

SEQ ID NO: 1529758 - RNA, 19 nt, Artificial Sequence
  Description of Artificial Sequence: Synthetic oligonucleotide
uggaaucuuuacaucuuuu

SEQ ID NO: 1529759 - RNA, 19 nt, Artificial Sequence
  Description of Artificial Sequence: Synthetic oligonucleotide
uugaccacacuggcugugg

SEQ ID NO: 1529760 - RNA, 19 nt, Artificial Sequence
  Description of Artificial Sequence: Synthetic oligonucleotide
agggaggugggaugugcgg

SEQ ID NO: 1529761 - RNA, 19 nt, Artificial Sequence
  Description of Artificial Sequence: Synthetic oligonucleotide
accagaaucuguaccaagu

SEQ ID NO: 1529762 - RNA, 19 nt, Artificial Sequence
  Description of Artificial Sequence: Synthetic oligonucleotide
gugaugacaucgcagucga

SEQ ID NO: 1529763 - RNA, 19 nt, Artificial Sequence
  Description of Artificial Sequence: Synthetic oligonucleotide
ugcaugugacauacuucca

SEQ ID NO: 1529764 - RNA, 19 nt, Artificial Sequence
  Description of Artificial Sequence: Synthetic oligonucleotide
acuucccacuaucugaguu

SEQ ID NO: 1529765 - RNA, 19 nt, Artificial Sequence
  Description of Artificial Sequence: Synthetic oligonucleotide
uaaggacuugggugcaugu

SEQ ID NO: 1529766 - RNA, 19 nt, Artificial Sequence
  Description of Artificial Sequence: Synthetic oligonucleotide
gcuggaaccaucuuggugu

SEQ ID NO: 1529767 - RNA, 19 nt, Artificial Sequence
  Description of Artificial Sequence: Synthetic oligonucleotide
auauggcucagcugugcca

SEQ ID NO: 1529768 - RNA, 19 nt, Artificial Sequence
  Description of Artificial Sequence: Synthetic oligonucleotide
gguuuugucuggugagggg

SEQ ID NO: 1529769 - RNA, 19 nt, Artificial Sequence
  Description of Artificial Sequence: Synthetic oligonucleotide
uuggugccaucauauggcu

SEQ ID NO: 1529770 - RNA, 19 nt, Artificial Sequence
  Description of Artificial Sequence: Synthetic oligonucleotide
aguacguugccggaucuga

SEQ ID NO: 1529771 - RNA, 19 nt, Artificial Sequence
  Description of Artificial Sequence: Synthetic oligonucleotide
agcugcucagagcagguau

SEQ ID NO: 1529772 - RNA, 19 nt, Artificial Sequence
  Description of Artificial Sequence: Synthetic oligonucleotide
cuucaugaacuccaaagcu

SEQ ID NO: 1529773 - RNA, 19 nt, Artificial Sequence
  Description of Artificial Sequence: Synthetic oligonucleotide
uguaccaccuggguaaauu

SEQ ID NO: 1529774 - RNA, 19 nt, Artificial Sequence
  Description of Artificial Sequence: Synthetic oligonucleotide
aaagugccaucugcacuuc

SEQ ID NO: 1529775 - RNA, 19 nt, Artificial Sequence
  Description of Artificial Sequence: Synthetic oligonucleotide
ccaaccaggcaacacacag

SEQ ID NO: 1529776 - RNA, 19 nt, Artificial Sequence
  Description of Artificial Sequence: Synthetic oligonucleotide
cuucagucauguccaaguc

SEQ ID NO: 1529777 - RNA, 19 nt, Artificial Sequence
  Description of Artificial Sequence: Synthetic oligonucleotide
gugcccaucagggugauga

SEQ ID NO: 1529778 - RNA, 19 nt, Artificial Sequence
  Description of Artificial Sequence: Synthetic oligonucleotide
aguucagcucgccucgggu

SEQ ID NO: 1529779 - RNA, 19 nt, Artificial Sequence
  Description of Artificial Sequence: Synthetic oligonucleotide
gagauuagcgagcgaggga

SEQ ID NO: 1529780 - RNA, 19 nt, Artificial Sequence
  Description of Artificial Sequence: Synthetic oligonucleotide
uaccgaugccagaauucug

SEQ ID NO: 1529781 - RNA, 19 nt, Artificial Sequence
  Description of Artificial Sequence: Synthetic oligonucleotide
accgaugccagaauucuga

SEQ ID NO: 1529782 - RNA, 19 nt, Artificial Sequence
  Description of Artificial Sequence: Synthetic oligonucleotide
acuugggugcaugugacau

SEQ ID NO: 1529783 - RNA, 19 nt, Artificial Sequence
  Description of Artificial Sequence: Synthetic oligonucleotide
ggcaacacacagaagggcc

SEQ ID NO: 1529784 - RNA, 19 nt, Artificial Sequence
  Description of Artificial Sequence: Synthetic oligonucleotide
cuuuggaaagugccaucug

SEQ ID NO: 1529785 - RNA, 19 nt, Artificial Sequence
  Description of Artificial Sequence: Synthetic oligonucleotide
uccuaagcuauaggaguca

SEQ ID NO: 1529786 - RNA, 19 nt, Artificial Sequence
  Description of Artificial Sequence: Synthetic oligonucleotide
gauuagcgagcgagggagg

SEQ ID NO: 1529787 - RNA, 19 nt, Artificial Sequence
  Description of Artificial Sequence: Synthetic oligonucleotide
ccugaauguggcuuccucc

SEQ ID NO: 1529788 - RNA, 19 nt, Artificial Sequence
  Description of Artificial Sequence: Synthetic oligonucleotide
gaguucagcucgccucggg

SEQ ID NO: 1529789 - RNA, 19 nt, Artificial Sequence
  Description of Artificial Sequence: Synthetic oligonucleotide
acugcagacuguagaggcg

SEQ ID NO: 1529790 - RNA, 19 nt, Artificial Sequence
  Description of Artificial Sequence: Synthetic oligonucleotide
ugcagacuguagaggcgag

SEQ ID NO: 1529791 - RNA, 19 nt, Artificial Sequence
  Description of Artificial Sequence: Synthetic oligonucleotide
ccagaauucugaaugagaa

SEQ ID NO: 1529792 - RNA, 19 nt, Artificial Sequence
  Description of Artificial Sequence: Synthetic oligonucleotide
guaccaccuggguaaauuc

SEQ ID NO: 1529793 - RNA, 19 nt, Artificial Sequence
  Description of Artificial Sequence: Synthetic oligonucleotide
gagggaggugggaugugcg

SEQ ID NO: 1529794 - RNA, 19 nt, Artificial Sequence
  Description of Artificial Sequence: Synthetic oligonucleotide
caaucugugucaugaggga

SEQ ID NO: 1529795 - RNA, 19 nt, Artificial Sequence
  Description of Artificial Sequence: Synthetic oligonucleotide
ucgaugguuuugucuggug

SEQ ID NO: 1529796 - RNA, 19 nt, Artificial Sequence
  Description of Artificial Sequence: Synthetic oligonucleotide
uguucaaguuggugaacuu

SEQ ID NO: 1529797 - RNA, 19 nt, Artificial Sequence
  Description of Artificial Sequence: Synthetic oligonucleotide
uuguuggaggguguagacu

SEQ ID NO: 1529798 - RNA, 19 nt, Artificial Sequence
  Description of Artificial Sequence: Synthetic oligonucleotide
ugcaggccgugucaugcug

SEQ ID NO: 1529799 - RNA, 19 nt, Artificial Sequence
  Description of Artificial Sequence: Synthetic oligonucleotide
ugugagcagaaggccagca

SEQ ID NO: 1529800 - RNA, 19 nt, Artificial Sequence
  Description of Artificial Sequence: Synthetic oligonucleotide
ccaagcagaacugggaaag

SEQ ID NO: 1529801 - RNA, 19 nt, Artificial Sequence
  Description of Artificial Sequence: Synthetic oligonucleotide
cagaacugggaaagccaag

SEQ ID NO: 1529802 - RNA, 19 nt, Artificial Sequence
  Description of Artificial Sequence: Synthetic oligonucleotide
ggugcaaugccuucaagcu

SEQ ID NO: 1529803 - RNA, 19 nt, Artificial Sequence
  Description of Artificial Sequence: Synthetic oligonucleotide
caaaguccuucucccaauc

SEQ ID NO: 1529804 - RNA, 19 nt, Artificial Sequence
  Description of Artificial Sequence: Synthetic oligonucleotide
ugacaucgcagucgauggu

SEQ ID NO: 1529805 - RNA, 19 nt, Artificial Sequence
  Description of Artificial Sequence: Synthetic oligonucleotide
aguagcagguuggcaaucu

SEQ ID NO: 1529806 - RNA, 19 nt, Artificial Sequence
  Description of Artificial Sequence: Synthetic oligonucleotide
ggccgugucaugcuguacc

SEQ ID NO: 1529807 - RNA, 19 nt, Artificial Sequence
  Description of Artificial Sequence: Synthetic oligonucleotide
cuuucuuggggaagggaaa

SEQ ID NO: 1529808 - RNA, 19 nt, Artificial Sequence
  Description of Artificial Sequence: Synthetic oligonucleotide
uccaaggugugagcagaag

SEQ ID NO: 1529809 - RNA, 19 nt, Artificial Sequence
  Description of Artificial Sequence: Synthetic oligonucleotide
gagauggugcaaugccuuc

SEQ ID NO: 1529810 - RNA, 19 nt, Artificial Sequence
  Description of Artificial Sequence: Synthetic oligonucleotide
gaagucagauagccccuuc

SEQ ID NO: 1529811 - RNA, 19 nt, Artificial Sequence
  Description of Artificial Sequence: Synthetic oligonucleotide
gagcagacucuugcagugg

SEQ ID NO: 1529812 - RNA, 19 nt, Artificial Sequence
  Description of Artificial Sequence: Synthetic oligonucleotide
ucugugucaugagggagau

SEQ ID NO: 1529813 - RNA, 19 nt, Artificial Sequence
  Description of Artificial Sequence: Synthetic oligonucleotide
gcagggagccaccagaauc

SEQ ID NO: 1529814 - RNA, 19 nt, Artificial Sequence
  Description of Artificial Sequence: Synthetic oligonucleotide
cuaaggacuugggugcaug

SEQ ID NO: 1529815 - RNA, 19 nt, Artificial Sequence
  Description of Artificial Sequence: Synthetic oligonucleotide
auuagcgagcgagggaggu

SEQ ID NO: 1529816 - RNA, 19 nt, Artificial Sequence
  Description of Artificial Sequence: Synthetic oligonucleotide
gguguagagggcccggaug

SEQ ID NO: 1529817 - RNA, 19 nt, Artificial Sequence
  Description of Artificial Sequence: Synthetic oligonucleotide
aagugccaucugcacuucu

SEQ ID NO: 1529818 - RNA, 19 nt, Artificial Sequence
  Description of Artificial Sequence: Synthetic oligonucleotide
guagcagguuggcaaucug

SEQ ID NO: 1529819 - RNA, 19 nt, Artificial Sequence
  Description of Artificial Sequence: Synthetic oligonucleotide
agauggugcaaugccuuca

SEQ ID NO: 1529820 - RNA, 19 nt, Artificial Sequence
  Description of Artificial Sequence: Synthetic oligonucleotide
cugcucagagcagguaucc

SEQ ID NO: 1529821 - RNA, 19 nt, Artificial Sequence
  Description of Artificial Sequence: Synthetic oligonucleotide
gacauacuuccaaggugug

SEQ ID NO: 1529822 - RNA, 19 nt, Artificial Sequence
  Description of Artificial Sequence: Synthetic oligonucleotide
agacucuugcaguggcaca

SEQ ID NO: 1529823 - RNA, 19 nt, Artificial Sequence
  Description of Artificial Sequence: Synthetic oligonucleotide
guugcaguacguugccgga

SEQ ID NO: 1529824 - RNA, 19 nt, Artificial Sequence
  Description of Artificial Sequence: Synthetic oligonucleotide
gauagccccuucuucauuu

SEQ ID NO: 1529825 - RNA, 19 nt, Artificial Sequence
  Description of Artificial Sequence: Synthetic oligonucleotide
cguugcaguacguugccgg

SEQ ID NO: 1529826 - RNA, 19 nt, Artificial Sequence
  Description of Artificial Sequence: Synthetic oligonucleotide
aggcuggcugagauuagcg

SEQ ID NO: 1529827 - RNA, 19 nt, Artificial Sequence
  Description of Artificial Sequence: Synthetic oligonucleotide
aucgcagucgaugguuuug

SEQ ID NO: 1529828 - RNA, 19 nt, Artificial Sequence
  Description of Artificial Sequence: Synthetic oligonucleotide
ucguugcaguacguugccg

SEQ ID NO: 1529829 - RNA, 19 nt, Artificial Sequence
  Description of Artificial Sequence: Synthetic oligonucleotide
ucgccucgggugcaguagc

SEQ ID NO: 1529830 - RNA, 19 nt, Artificial Sequence
  Description of Artificial Sequence: Synthetic oligonucleotide
cagaauucugaaugagaaa

SEQ ID NO: 1529831 - RNA, 19 nt, Artificial Sequence
  Description of Artificial Sequence: Synthetic oligonucleotide
agacuguagaggcgagccu

SEQ ID NO: 1529832 - RNA, 19 nt, Artificial Sequence
  Description of Artificial Sequence: Synthetic oligonucleotide
uuccaaggugugagcagaa

SEQ ID NO: 1529833 - RNA, 19 nt, Artificial Sequence
  Description of Artificial Sequence: Synthetic oligonucleotide
gacgauucucagugucuuc

SEQ ID NO: 1529834 - RNA, 19 nt, Artificial Sequence
  Description of Artificial Sequence: Synthetic oligonucleotide
ugaguucagcucgccucgg

SEQ ID NO: 1529835 - RNA, 19 nt, Artificial Sequence
  Description of Artificial Sequence: Synthetic oligonucleotide
cuauggugcaggccguguc

SEQ ID NO: 1529836 - RNA, 19 nt, Artificial Sequence
  Description of Artificial Sequence: Synthetic oligonucleotide
guacuggaguaucuucaca

SEQ ID NO: 1529837 - RNA, 19 nt, Artificial Sequence
  Description of Artificial Sequence: Synthetic oligonucleotide
uuagcgagcgagggaggug

SEQ ID NO: 1529838 - RNA, 19 nt, Artificial Sequence
  Description of Artificial Sequence: Synthetic oligonucleotide
uguucuggcuccccucauu

SEQ ID NO: 1529839 - RNA, 19 nt, Artificial Sequence
  Description of Artificial Sequence: Synthetic oligonucleotide
gaguaucuucacaagggcu

SEQ ID NO: 1529840 - RNA, 19 nt, Artificial Sequence
  Description of Artificial Sequence: Synthetic oligonucleotide
cuuccaaggugugagcaga

SEQ ID NO: 1529841 - RNA, 19 nt, Artificial Sequence
  Description of Artificial Sequence: Synthetic oligonucleotide
ccaccuaggcuccucagag

SEQ ID NO: 1529842 - RNA, 19 nt, Artificial Sequence
  Description of Artificial Sequence: Synthetic oligonucleotide
uucucccaauccucacuga

SEQ ID NO: 1529843 - RNA, 19 nt, Artificial Sequence
  Description of Artificial Sequence: Synthetic oligonucleotide
cugaauguggcuuccuccu

SEQ ID NO: 1529844 - RNA, 19 nt, Artificial Sequence
  Description of Artificial Sequence: Synthetic oligonucleotide
guauccaaccaggcaacac

SEQ ID NO: 1529845 - RNA, 19 nt, Artificial Sequence
  Description of Artificial Sequence: Synthetic oligonucleotide
gagcgagggaggugggaug

SEQ ID NO: 1529846 - RNA, 19 nt, Artificial Sequence
  Description of Artificial Sequence: Synthetic oligonucleotide
augcuguaccaccugggua

SEQ ID NO: 1529847 - RNA, 19 nt, Artificial Sequence
  Description of Artificial Sequence: Synthetic oligonucleotide
ggugcaggccgugucaugc

SEQ ID NO: 1529848 - RNA, 19 nt, Artificial Sequence
  Description of Artificial Sequence: Synthetic oligonucleotide
guagagggcccggauggag

SEQ ID NO: 1529849 - RNA, 19 nt, Artificial Sequence
  Description of Artificial Sequence: Synthetic oligonucleotide
ggggcugccuacaaggagc

SEQ ID NO: 1529850 - RNA, 19 nt, Artificial Sequence
  Description of Artificial Sequence: Synthetic oligonucleotide
cgugucaugcuguaccacc

SEQ ID NO: 1529851 - RNA, 19 nt, Artificial Sequence
  Description of Artificial Sequence: Synthetic oligonucleotide
caugaacuccaaagcuuca

SEQ ID NO: 1529852 - RNA, 19 nt, Artificial Sequence
  Description of Artificial Sequence: Synthetic oligonucleotide
uggugccaucauauggcuc

SEQ ID NO: 1529853 - RNA, 19 nt, Artificial Sequence
  Description of Artificial Sequence: Synthetic oligonucleotide
aguggcacagcugggcuaa

SEQ ID NO: 1529854 - RNA, 19 nt, Artificial Sequence
  Description of Artificial Sequence: Synthetic oligonucleotide
agccaagcaucaaacaauu

SEQ ID NO: 1529855 - RNA, 19 nt, Artificial Sequence
  Description of Artificial Sequence: Synthetic oligonucleotide
ggaaccaucuugguguaga

SEQ ID NO: 1529856 - RNA, 19 nt, Artificial Sequence
  Description of Artificial Sequence: Synthetic oligonucleotide
ugccuucaagcuccucuuc

SEQ ID NO: 1529857 - RNA, 19 nt, Artificial Sequence
  Description of Artificial Sequence: Synthetic oligonucleotide
agccuuggugccaucauau

SEQ ID NO: 1529858 - RNA, 19 nt, Artificial Sequence
  Description of Artificial Sequence: Synthetic oligonucleotide
gcaugugacauacuuccaa

SEQ ID NO: 1529859 - RNA, 19 nt, Artificial Sequence
  Description of Artificial Sequence: Synthetic oligonucleotide
ucccaccuaggcuccucag

SEQ ID NO: 1529860 - RNA, 19 nt, Artificial Sequence
  Description of Artificial Sequence: Synthetic oligonucleotide
gggcccaucggguucguug

SEQ ID NO: 1529861 - RNA, 19 nt, Artificial Sequence
  Description of Artificial Sequence: Synthetic oligonucleotide
ggcccaucggguucguugc

SEQ ID NO: 1529862 - RNA, 19 nt, Artificial Sequence
  Description of Artificial Sequence: Synthetic oligonucleotide
cccacuaucugaguucagc

SEQ ID NO: 1529863 - RNA, 19 nt, Artificial Sequence
  Description of Artificial Sequence: Synthetic oligonucleotide
aucauauggcucagcugug

SEQ ID NO: 1529864 - RNA, 19 nt, Artificial Sequence
  Description of Artificial Sequence: Synthetic oligonucleotide
acuguagaggcgagccuug

SEQ ID NO: 1529865 - RNA, 19 nt, Artificial Sequence
  Description of Artificial Sequence: Synthetic oligonucleotide
ucccacuaucugaguucag

SEQ ID NO: 1529866 - RNA, 19 nt, Artificial Sequence
  Description of Artificial Sequence: Synthetic oligonucleotide
gcagguauccaaccaggca

SEQ ID NO: 1529867 - RNA, 19 nt, Artificial Sequence
  Description of Artificial Sequence: Synthetic oligonucleotide
cagggagccaccagaaucu

SEQ ID NO: 1529868 - RNA, 19 nt, Artificial Sequence
  Description of Artificial Sequence: Synthetic oligonucleotide
agcgagggaggugggaugu

SEQ ID NO: 1529869 - RNA, 19 nt, Artificial Sequence
  Description of Artificial Sequence: Synthetic oligonucleotide
auacaagagcagacucuug

SEQ ID NO: 1529870 - RNA, 19 nt, Artificial Sequence
  Description of Artificial Sequence: Synthetic oligonucleotide
ugcucagagcagguaucca

SEQ ID NO: 1529871 - RNA, 19 nt, Artificial Sequence
  Description of Artificial Sequence: Synthetic oligonucleotide
caaguuggugaacuuuaua

SEQ ID NO: 1529872 - RNA, 19 nt, Artificial Sequence
  Description of Artificial Sequence: Synthetic oligonucleotide
gagaugcucucgcugcucu

SEQ ID NO: 1529873 - RNA, 19 nt, Artificial Sequence
  Description of Artificial Sequence: Synthetic oligonucleotide
guugccggaucugacugca

SEQ ID NO: 1529874 - RNA, 19 nt, Artificial Sequence
  Description of Artificial Sequence: Synthetic oligonucleotide
cagagggugugcccaucag

SEQ ID NO: 1529875 - RNA, 19 nt, Artificial Sequence
  Description of Artificial Sequence: Synthetic oligonucleotide
cugcagacuguagaggcga

SEQ ID NO: 1529876 - RNA, 19 nt, Artificial Sequence
  Description of Artificial Sequence: Synthetic oligonucleotide
uugguguagagggcccgga

SEQ ID NO: 1529877 - RNA, 19 nt, Artificial Sequence
  Description of Artificial Sequence: Synthetic oligonucleotide
gauggaggggcugccuaca

SEQ ID NO: 1529878 - RNA, 19 nt, Artificial Sequence
  Description of Artificial Sequence: Synthetic oligonucleotide
gagucaagguaggcagcug

SEQ ID NO: 1529879 - RNA, 19 nt, Artificial Sequence
  Description of Artificial Sequence: Synthetic oligonucleotide
uccaaggcuggcugagauu

SEQ ID NO: 1529880 - RNA, 19 nt, Artificial Sequence
  Description of Artificial Sequence: Synthetic oligonucleotide
ccaucauauggcucagcug

SEQ ID NO: 1529881 - RNA, 19 nt, Artificial Sequence
  Description of Artificial Sequence: Synthetic oligonucleotide
caggucccgcuucaugaac

SEQ ID NO: 1529882 - RNA, 19 nt, Artificial Sequence
  Description of Artificial Sequence: Synthetic oligonucleotide
aggugggaugugcggugag

SEQ ID NO: 1529883 - RNA, 19 nt, Artificial Sequence
  Description of Artificial Sequence: Synthetic oligonucleotide
ggguaaauucugucagguc

SEQ ID NO: 1529884 - RNA, 19 nt, Artificial Sequence
  Description of Artificial Sequence: Synthetic oligonucleotide
cucgccucgggugcaguag

SEQ ID NO: 1529885 - RNA, 19 nt, Artificial Sequence
  Description of Artificial Sequence: Synthetic oligonucleotide
ccuccuuucuuggggaagg

SEQ ID NO: 1529886 - RNA, 19 nt, Artificial Sequence
  Description of Artificial Sequence: Synthetic oligonucleotide
ggggacgauucucaguguc

SEQ ID NO: 1529887 - RNA, 19 nt, Artificial Sequence
  Description of Artificial Sequence: Synthetic oligonucleotide
uuguucuggcuccccucau

SEQ ID NO: 1529888 - RNA, 19 nt, Artificial Sequence
  Description of Artificial Sequence: Synthetic oligonucleotide
cucaucugaggcauccacu

SEQ ID NO: 1529889 - RNA, 19 nt, Artificial Sequence
  Description of Artificial Sequence: Synthetic oligonucleotide
gaagagccuucaguagcca

SEQ ID NO: 1529890 - RNA, 19 nt, Artificial Sequence
  Description of Artificial Sequence: Synthetic oligonucleotide
cugugccagagggugugcc

SEQ ID NO: 1529891 - RNA, 19 nt, Artificial Sequence
  Description of Artificial Sequence: Synthetic oligonucleotide
ugcuauggugcaggccgug

SEQ ID NO: 1529892 - RNA, 19 nt, Artificial Sequence
  Description of Artificial Sequence: Synthetic oligonucleotide
ggaugugcggugagagggg

SEQ ID NO: 1529893 - RNA, 19 nt, Artificial Sequence
  Description of Artificial Sequence: Synthetic oligonucleotide
gcucagagcagguauccaa

SEQ ID NO: 1529894 - RNA, 19 nt, Artificial Sequence
  Description of Artificial Sequence: Synthetic oligonucleotide
ggaggguguagacuuccca

SEQ ID NO: 1529895 - RNA, 19 nt, Artificial Sequence
  Description of Artificial Sequence: Synthetic oligonucleotide
uggcugcuauggugcaggc

SEQ ID NO: 1529896 - RNA, 19 nt, Artificial Sequence
  Description of Artificial Sequence: Synthetic oligonucleotide
gaugcucucgcugcucucu

SEQ ID NO: 1529897 - RNA, 19 nt, Artificial Sequence
  Description of Artificial Sequence: Synthetic oligonucleotide
agcuggcuuguguccuaag

SEQ ID NO: 1529898 - RNA, 19 nt, Artificial Sequence
  Description of Artificial Sequence: Synthetic oligonucleotide
uggugcaggccgugucaug

SEQ ID NO: 1529899 - RNA, 19 nt, Artificial Sequence
  Description of Artificial Sequence: Synthetic oligonucleotide
cuguucaaguuggugaacu

SEQ ID NO: 1529900 - RNA, 19 nt, Artificial Sequence
  Description of Artificial Sequence: Synthetic oligonucleotide
uggagguuuuggucucuuu

SEQ ID NO: 1529901 - RNA, 19 nt, Artificial Sequence
  Description of Artificial Sequence: Synthetic oligonucleotide
auagccccuucuucauuuu

SEQ ID NO: 1529902 - RNA, 19 nt, Artificial Sequence
  Description of Artificial Sequence: Synthetic oligonucleotide
gccagaauucugaaugaga

SEQ ID NO: 1529903 - RNA, 19 nt, Artificial Sequence
  Description of Artificial Sequence: Synthetic oligonucleotide
gccaucauauggcucagcu

SEQ ID NO: 1529904 - RNA, 19 nt, Artificial Sequence
  Description of Artificial Sequence: Synthetic oligonucleotide
ggcucagcugugccagagg

SEQ ID NO: 1529905 - RNA, 19 nt, Artificial Sequence
  Description of Artificial Sequence: Synthetic oligonucleotide
gacuguagaggcgagccuu

SEQ ID NO: 1529906 - RNA, 19 nt, Artificial Sequence
  Description of Artificial Sequence: Synthetic oligonucleotide
augcucacagcuggcuugu

SEQ ID NO: 1529907 - RNA, 19 nt, Artificial Sequence
  Description of Artificial Sequence: Synthetic oligonucleotide
gccggaucugacugcagac

SEQ ID NO: 1529908 - RNA, 19 nt, Artificial Sequence
  Description of Artificial Sequence: Synthetic oligonucleotide
ugaugacaucgcagucgau

SEQ ID NO: 1529909 - RNA, 19 nt, Artificial Sequence
  Description of Artificial Sequence: Synthetic oligonucleotide
guacguugccggaucugac

SEQ ID NO: 1529910 - RNA, 19 nt, Artificial Sequence
  Description of Artificial Sequence: Synthetic oligonucleotide
ggacuugggugcaugugac

SEQ ID NO: 1529911 - RNA, 19 nt, Artificial Sequence
  Description of Artificial Sequence: Synthetic oligonucleotide
cguacuggaguaucuucac

SEQ ID NO: 1529912 - RNA, 19 nt, Artificial Sequence
  Description of Artificial Sequence: Synthetic oligonucleotide
guaucuucacaagggcucu

SEQ ID NO: 1529913 - RNA, 19 nt, Artificial Sequence
  Description of Artificial Sequence: Synthetic oligonucleotide
cccucauucccaguccucc

SEQ ID NO: 1529914 - RNA, 19 nt, Artificial Sequence
  Description of Artificial Sequence: Synthetic oligonucleotide
auggaggggcugccuacaa

SEQ ID NO: 1529915 - RNA, 19 nt, Artificial Sequence
  Description of Artificial Sequence: Synthetic oligonucleotide
guucaaguuggugaacuuu

SEQ ID NO: 1529916 - RNA, 19 nt, Artificial Sequence
  Description of Artificial Sequence: Synthetic oligonucleotide
gacaucgcagucgaugguu

SEQ ID NO: 1529917 - RNA, 19 nt, Artificial Sequence
  Description of Artificial Sequence: Synthetic oligonucleotide
ugggugcaugugacauacu

SEQ ID NO: 1529918 - RNA, 19 nt, Artificial Sequence
  Description of Artificial Sequence: Synthetic oligonucleotide
ucagcucgccucgggugca

SEQ ID NO: 1529919 - RNA, 19 nt, Artificial Sequence
  Description of Artificial Sequence: Synthetic oligonucleotide
cucgggugcaguagcaggu

SEQ ID NO: 1529920 - RNA, 19 nt, Artificial Sequence
  Description of Artificial Sequence: Synthetic oligonucleotide
gagccuuucuugccauugu

SEQ ID NO: 1529921 - RNA, 19 nt, Artificial Sequence
  Description of Artificial Sequence: Synthetic oligonucleotide
cuugggugcaugugacaua

SEQ ID NO: 1529922 - RNA, 19 nt, Artificial Sequence
  Description of Artificial Sequence: Synthetic oligonucleotide
gcuccuguucaaguuggug

SEQ ID NO: 1529923 - RNA, 19 nt, Artificial Sequence
  Description of Artificial Sequence: Synthetic oligonucleotide
cggaucugacugcagacug

SEQ ID NO: 1529924 - RNA, 19 nt, Artificial Sequence
  Description of Artificial Sequence: Synthetic oligonucleotide
aggccgugucaugcuguac

SEQ ID NO: 1529925 - RNA, 19 nt, Artificial Sequence
  Description of Artificial Sequence: Synthetic oligonucleotide
uugagccuuucuugccauu

SEQ ID NO: 1529926 - RNA, 19 nt, Artificial Sequence
  Description of Artificial Sequence: Synthetic oligonucleotide
cucucugauggagucaccu

SEQ ID NO: 1529927 - RNA, 19 nt, Artificial Sequence
  Description of Artificial Sequence: Synthetic oligonucleotide
cuuuuggagauggugcaau

SEQ ID NO: 1529928 - RNA, 19 nt, Artificial Sequence
  Description of Artificial Sequence: Synthetic oligonucleotide
gaggugggaugugcgguga

SEQ ID NO: 1529929 - RNA, 19 nt, Artificial Sequence
  Description of Artificial Sequence: Synthetic oligonucleotide
gcagaacugggaaagccaa

SEQ ID NO: 1529930 - RNA, 19 nt, Artificial Sequence
  Description of Artificial Sequence: Synthetic oligonucleotide
gcugccuacaaggagcucu

SEQ ID NO: 1529931 - RNA, 19 nt, Artificial Sequence
  Description of Artificial Sequence: Synthetic oligonucleotide
caguacguugccggaucug

SEQ ID NO: 1529932 - RNA, 19 nt, Artificial Sequence
  Description of Artificial Sequence: Synthetic oligonucleotide
agggagccaccagaaucug

SEQ ID NO: 1529933 - RNA, 19 nt, Artificial Sequence
  Description of Artificial Sequence: Synthetic oligonucleotide
gagggcccggauggagggg

SEQ ID NO: 1529934 - RNA, 19 nt, Artificial Sequence
  Description of Artificial Sequence: Synthetic oligonucleotide
gggugaugacaucgcaguc

SEQ ID NO: 1529935 - RNA, 19 nt, Artificial Sequence
  Description of Artificial Sequence: Synthetic oligonucleotide
cucgcugcucucugaugga

SEQ ID NO: 1529936 - RNA, 19 nt, Artificial Sequence
  Description of Artificial Sequence: Synthetic oligonucleotide
ggugugcccaucaggguga

SEQ ID NO: 1529937 - RNA, 19 nt, Artificial Sequence
  Description of Artificial Sequence: Synthetic oligonucleotide
acaucgcagucgaugguuu

SEQ ID NO: 1529938 - RNA, 19 nt, Artificial Sequence
  Description of Artificial Sequence: Synthetic oligonucleotide
cuugccauuguuggagggu

SEQ ID NO: 1529939 - RNA, 19 nt, Artificial Sequence
  Description of Artificial Sequence: Synthetic oligonucleotide
ggauggcagaggccuuuug

SEQ ID NO: 1529940 - RNA, 19 nt, Artificial Sequence
  Description of Artificial Sequence: Synthetic oligonucleotide
gccugaauguggcuuccuc

SEQ ID NO: 1529941 - RNA, 19 nt, Artificial Sequence
  Description of Artificial Sequence: Synthetic oligonucleotide
cccacucagcaucuuccag

SEQ ID NO: 1529942 - RNA, 19 nt, Artificial Sequence
  Description of Artificial Sequence: Synthetic oligonucleotide
ugccuacaaggagcucuga

SEQ ID NO: 1529943 - RNA, 19 nt, Artificial Sequence
  Description of Artificial Sequence: Synthetic oligonucleotide
caucggguucguugcagua

SEQ ID NO: 1529944 - RNA, 19 nt, Artificial Sequence
  Description of Artificial Sequence: Synthetic oligonucleotide
ggguguagacuucccacua

SEQ ID NO: 1529945 - RNA, 19 nt, Artificial Sequence
  Description of Artificial Sequence: Synthetic oligonucleotide
gggugcaugugacauacuu

SEQ ID NO: 1529946 - RNA, 19 nt, Artificial Sequence
  Description of Artificial Sequence: Synthetic oligonucleotide
gugucaugcuguaccaccu

SEQ ID NO: 1529947 - RNA, 19 nt, Artificial Sequence
  Description of Artificial Sequence: Synthetic oligonucleotide
cugugcuugagccuuucuu

SEQ ID NO: 1529948 - RNA, 19 nt, Artificial Sequence
  Description of Artificial Sequence: Synthetic oligonucleotide
cgaugguuuugucugguga

SEQ ID NO: 1529949 - RNA, 19 nt, Artificial Sequence
  Description of Artificial Sequence: Synthetic oligonucleotide
gaggcgagccuuggugcca

SEQ ID NO: 1529950 - RNA, 19 nt, Artificial Sequence
  Description of Artificial Sequence: Synthetic oligonucleotide
cugcuuguucuggcucccc

SEQ ID NO: 1529951 - RNA, 19 nt, Artificial Sequence
  Description of Artificial Sequence: Synthetic oligonucleotide
ggagucaagguaggcagcu

SEQ ID NO: 1529952 - RNA, 19 nt, Artificial Sequence
  Description of Artificial Sequence: Synthetic oligonucleotide
gacuucccacuaucugagu

SEQ ID NO: 1529953 - RNA, 19 nt, Artificial Sequence
  Description of Artificial Sequence: Synthetic oligonucleotide
ggguucguacuggaguauc

SEQ ID NO: 1529954 - RNA, 19 nt, Artificial Sequence
  Description of Artificial Sequence: Synthetic oligonucleotide
ccacuaucugaguucagcu

SEQ ID NO: 1529955 - RNA, 19 nt, Artificial Sequence
  Description of Artificial Sequence: Synthetic oligonucleotide
ccuaggcuccucagagaug

SEQ ID NO: 1529956 - RNA, 19 nt, Artificial Sequence
  Description of Artificial Sequence: Synthetic oligonucleotide
ggcugcuauggugcaggcc

SEQ ID NO: 1529957 - RNA, 19 nt, Artificial Sequence
  Description of Artificial Sequence: Synthetic oligonucleotide
gucgaugguuuugucuggu

SEQ ID NO: 1529958 - RNA, 19 nt, Artificial Sequence
  Description of Artificial Sequence: Synthetic oligonucleotide
guucguacuggaguaucuu

SEQ ID NO: 1529959 - RNA, 19 nt, Artificial Sequence
  Description of Artificial Sequence: Synthetic oligonucleotide
ggugggaugugcggugaga

SEQ ID NO: 1529960 - RNA, 19 nt, Artificial Sequence
  Description of Artificial Sequence: Synthetic oligonucleotide
gguucguacuggaguaucu

SEQ ID NO: 1529961 - RNA, 19 nt, Artificial Sequence
  Description of Artificial Sequence: Synthetic oligonucleotide
cguugccggaucugacugc

SEQ ID NO: 1529962 - RNA, 19 nt, Artificial Sequence
  Description of Artificial Sequence: Synthetic oligonucleotide
cugugucaugagggagaug

SEQ ID NO: 1529963 - RNA, 19 nt, Artificial Sequence
  Description of Artificial Sequence: Synthetic oligonucleotide
gccucgggugcaguagcag

SEQ ID NO: 1529964 - RNA, 19 nt, Artificial Sequence
  Description of Artificial Sequence: Synthetic oligonucleotide
cccaucggguucguugcag

SEQ ID NO: 1529965 - RNA, 19 nt, Artificial Sequence
  Description of Artificial Sequence: Synthetic oligonucleotide
caggccgugucaugcugua

SEQ ID NO: 1529966 - RNA, 19 nt, Artificial Sequence
  Description of Artificial Sequence: Synthetic oligonucleotide
cacacagaagggccugaau

SEQ ID NO: 1529967 - RNA, 19 nt, Artificial Sequence
  Description of Artificial Sequence: Synthetic oligonucleotide
aggcgagccuuggugccau

SEQ ID NO: 1529968 - RNA, 19 nt, Artificial Sequence
  Description of Artificial Sequence: Synthetic oligonucleotide
agccuucaguagccagcuu

SEQ ID NO: 1529969 - RNA, 19 nt, Artificial Sequence
  Description of Artificial Sequence: Synthetic oligonucleotide
gcccaucagggugaugaca

SEQ ID NO: 1529970 - RNA, 19 nt, Artificial Sequence
  Description of Artificial Sequence: Synthetic oligonucleotide
ccagagggugugcccauca

SEQ ID NO: 1529971 - RNA, 19 nt, Artificial Sequence
  Description of Artificial Sequence: Synthetic oligonucleotide
ggcuuguguccuaagcuau

SEQ ID NO: 1529972 - RNA, 19 nt, Artificial Sequence
  Description of Artificial Sequence: Synthetic oligonucleotide
ccuaagcuauaggagucaa

SEQ ID NO: 1529973 - RNA, 19 nt, Artificial Sequence
  Description of Artificial Sequence: Synthetic oligonucleotide
cccaccuaggcuccucaga

SEQ ID NO: 1529974 - RNA, 19 nt, Artificial Sequence
  Description of Artificial Sequence: Synthetic oligonucleotide
cccaauccucacugauguc

SEQ ID NO: 1529975 - RNA, 19 nt, Artificial Sequence
  Description of Artificial Sequence: Synthetic oligonucleotide
gugcaggccgugucaugcu

SEQ ID NO: 1529976 - RNA, 19 nt, Artificial Sequence
  Description of Artificial Sequence: Synthetic oligonucleotide
gcaguacguugccggaucu

SEQ ID NO: 1529977 - RNA, 19 nt, Artificial Sequence
  Description of Artificial Sequence: Synthetic oligonucleotide
cugcuauggugcaggccgu

SEQ ID NO: 1529978 - RNA, 19 nt, Artificial Sequence
  Description of Artificial Sequence: Synthetic oligonucleotide
ggacgauucucagugucuu

SEQ ID NO: 1529979 - RNA, 19 nt, Artificial Sequence
  Description of Artificial Sequence: Synthetic oligonucleotide
ccagaaucuguaccaaguu

SEQ ID NO: 1529980 - RNA, 19 nt, Artificial Sequence
  Description of Artificial Sequence: Synthetic oligonucleotide
gcuuguguccuaagcuaua

SEQ ID NO: 1529981 - RNA, 19 nt, Artificial Sequence
  Description of Artificial Sequence: Synthetic oligonucleotide
gccauuguuggagggugua

SEQ ID NO: 1529982 - RNA, 19 nt, Artificial Sequence
  Description of Artificial Sequence: Synthetic oligonucleotide
caucgcagucgaugguuuu

SEQ ID NO: 1529983 - RNA, 19 nt, Artificial Sequence
  Description of Artificial Sequence: Synthetic oligonucleotide
agcucgccucgggugcagu

SEQ ID NO: 1529984 - RNA, 19 nt, Artificial Sequence
  Description of Artificial Sequence: Synthetic oligonucleotide
ccgugucaugcuguaccac

SEQ ID NO: 1529985 - RNA, 19 nt, Artificial Sequence
  Description of Artificial Sequence: Synthetic oligonucleotide
cagcuggcuuguguccuaa

SEQ ID NO: 1529986 - RNA, 19 nt, Artificial Sequence
  Description of Artificial Sequence: Synthetic oligonucleotide
cgcagucgaugguuuuguc

SEQ ID NO: 1529987 - RNA, 19 nt, Artificial Sequence
  Description of Artificial Sequence: Synthetic oligonucleotide
gcuauggugcaggccgugu

SEQ ID NO: 1529988 - RNA, 19 nt, Artificial Sequence
  Description of Artificial Sequence: Synthetic oligonucleotide
gcccaucggguucguugca

SEQ ID NO: 1529989 - RNA, 19 nt, Artificial Sequence
  Description of Artificial Sequence: Synthetic oligonucleotide
gggcugccuacaaggagcu

SEQ ID NO: 1529990 - RNA, 19 nt, Artificial Sequence
  Description of Artificial Sequence: Synthetic oligonucleotide
cagcugcucagagcaggua

SEQ ID NO: 1529991 - RNA, 19 nt, Artificial Sequence
  Description of Artificial Sequence: Synthetic oligonucleotide
ccaucggguucguugcagu

SEQ ID NO: 1529992 - RNA, 19 nt, Artificial Sequence
  Description of Artificial Sequence: Synthetic oligonucleotide
gggcaucccuccgggccug

SEQ ID NO: 1529993 - RNA, 19 nt, Artificial Sequence
  Description of Artificial Sequence: Synthetic oligonucleotide
gcucgccucgggugcagua

SEQ ID NO: 1529994 - RNA, 19 nt, Artificial Sequence
  Description of Artificial Sequence: Synthetic oligonucleotide
gcaggccgugucaugcugu

SEQ ID NO: 1529995 - RNA, 19 nt, Artificial Sequence
  Description of Artificial Sequence: Synthetic oligonucleotide
ccaaagcuucaguggacuu

SEQ ID NO: 1529996 - RNA, 19 nt, Artificial Sequence
  Description of Artificial Sequence: Synthetic oligonucleotide
ggguucguugcaguacguu

SEQ ID NO: 1529997 - RNA, 19 nt, Artificial Sequence
  Description of Artificial Sequence: Synthetic oligonucleotide
gccagagggugugcccauc

SEQ ID NO: 1529998 - RNA, 19 nt, Artificial Sequence
  Description of Artificial Sequence: Synthetic oligonucleotide
ccggaucugacugcagacu

SEQ ID NO: 1529999 - RNA, 19 nt, Artificial Sequence
  Description of Artificial Sequence: Synthetic oligonucleotide
gcgagcgagggagguggga

SEQ ID NO: 1530000 - RNA, 19 nt, Artificial Sequence
  Description of Artificial Sequence: Synthetic oligonucleotide
ggcugccuacaaggagcuc

SEQ ID NO: 1530001 - RNA, 19 nt, Artificial Sequence
  Description of Artificial Sequence: Synthetic oligonucleotide
cuguaccaccuggguaaau

SEQ ID NO: 1530002 - RNA, 19 nt, Artificial Sequence
  Description of Artificial Sequence: Synthetic oligonucleotide
gcaaugccuucaagcuccu

SEQ ID NO: 1530003 - RNA, 19 nt, Artificial Sequence
  Description of Artificial Sequence: Synthetic oligonucleotide
cugucaggucccgcuucau

SEQ ID NO: 1530004 - RNA, 19 nt, Artificial Sequence
  Description of Artificial Sequence: Synthetic oligonucleotide
ggccugaauguggcuuccu

SEQ ID NO: 1530005 - RNA, 19 nt, Artificial Sequence
  Description of Artificial Sequence: Synthetic oligonucleotide
cgccucgggugcaguagca

SEQ ID NO: 1530006 - RNA, 19 nt, Artificial Sequence
  Description of Artificial Sequence: Synthetic oligonucleotide
cggguucguugcaguacgu

SEQ ID NO: 1530007 - RNA, 19 nt, Artificial Sequence
  Description of Artificial Sequence: Synthetic oligonucleotide
ggggcccaucggguucguu

SEQ ID NO: 1530008 - RNA, 19 nt, Artificial Sequence
  Description of Artificial Sequence: Synthetic oligonucleotide
aaacauuaugcccuaaugc

SEQ ID NO: 1530009 - RNA, 19 nt, Artificial Sequence
  Description of Artificial Sequence: Synthetic oligonucleotide
uuauuuagcacuauuacag

SEQ ID NO: 1530010 - RNA, 19 nt, Artificial Sequence
  Description of Artificial Sequence: Synthetic oligonucleotide
aagguaaucggcuuacugc

SEQ ID NO: 1530011 - RNA, 19 nt, Artificial Sequence
  Description of Artificial Sequence: Synthetic oligonucleotide
uucauaggaaaacucaagg

SEQ ID NO: 1530012 - RNA, 19 nt, Artificial Sequence
  Description of Artificial Sequence: Synthetic oligonucleotide
uucaacuccaucauaaagc

SEQ ID NO: 1530013 - RNA, 19 nt, Artificial Sequence
  Description of Artificial Sequence: Synthetic oligonucleotide
aacauuaugcccuaaugca

SEQ ID NO: 1530014 - RNA, 19 nt, Artificial Sequence
  Description of Artificial Sequence: Synthetic oligonucleotide
aguacagauauauuucuac

SEQ ID NO: 1530015 - RNA, 19 nt, Artificial Sequence
  Description of Artificial Sequence: Synthetic oligonucleotide
ugcacauccaccaaggagc

SEQ ID NO: 1530016 - RNA, 19 nt, Artificial Sequence
  Description of Artificial Sequence: Synthetic oligonucleotide
uuuauuuagcacuauuaca

SEQ ID NO: 1530017 - RNA, 19 nt, Artificial Sequence
  Description of Artificial Sequence: Synthetic oligonucleotide
cauauaagcauauuugaug

SEQ ID NO: 1530018 - RNA, 19 nt, Artificial Sequence
  Description of Artificial Sequence: Synthetic oligonucleotide
guaaguccuauccagaucc

SEQ ID NO: 1530019 - RNA, 19 nt, Artificial Sequence
  Description of Artificial Sequence: Synthetic oligonucleotide
agaaggucggugcagaaac

SEQ ID NO: 1530020 - RNA, 19 nt, Artificial Sequence
  Description of Artificial Sequence: Synthetic oligonucleotide
aacaguacgagcuggaaaa

SEQ ID NO: 1530021 - RNA, 19 nt, Artificial Sequence
  Description of Artificial Sequence: Synthetic oligonucleotide
ucggcuuacugcaauaggg

SEQ ID NO: 1530022 - RNA, 19 nt, Artificial Sequence
  Description of Artificial Sequence: Synthetic oligonucleotide
uagggguuuuaucacaugg

SEQ ID NO: 1530023 - RNA, 19 nt, Artificial Sequence
  Description of Artificial Sequence: Synthetic oligonucleotide
ucaacagacacccagcuau

SEQ ID NO: 1530024 - RNA, 19 nt, Artificial Sequence
  Description of Artificial Sequence: Synthetic oligonucleotide
gaacugacuaugcacaucc

SEQ ID NO: 1530025 - RNA, 19 nt, Artificial Sequence
  Description of Artificial Sequence: Synthetic oligonucleotide
gauguguauaacuauggac

SEQ ID NO: 1530026 - RNA, 19 nt, Artificial Sequence
  Description of Artificial Sequence: Synthetic oligonucleotide
aaauguauguucucacuca

SEQ ID NO: 1530027 - RNA, 19 nt, Artificial Sequence
  Description of Artificial Sequence: Synthetic oligonucleotide
uuugacgguauucauuaag

SEQ ID NO: 1530028 - RNA, 19 nt, Artificial Sequence
  Description of Artificial Sequence: Synthetic oligonucleotide
acagauauauuucuaccag

SEQ ID NO: 1530029 - RNA, 19 nt, Artificial Sequence
  Description of Artificial Sequence: Synthetic oligonucleotide
guugauggaaacauuaugc

SEQ ID NO: 1530030 - RNA, 19 nt, Artificial Sequence
  Description of Artificial Sequence: Synthetic oligonucleotide
guaacagacuauuuucugg

SEQ ID NO: 1530031 - RNA, 19 nt, Artificial Sequence
  Description of Artificial Sequence: Synthetic oligonucleotide
uccauaacaucccagaaua

SEQ ID NO: 1530032 - RNA, 19 nt, Artificial Sequence
  Description of Artificial Sequence: Synthetic oligonucleotide
uacuugaucaggaauggca

SEQ ID NO: 1530033 - RNA, 19 nt, Artificial Sequence
  Description of Artificial Sequence: Synthetic oligonucleotide
uguugauggaaacauuaug

SEQ ID NO: 1530034 - RNA, 19 nt, Artificial Sequence
  Description of Artificial Sequence: Synthetic oligonucleotide
uaugaguuuccaagguucg

SEQ ID NO: 1530035 - RNA, 19 nt, Artificial Sequence
  Description of Artificial Sequence: Synthetic oligonucleotide
aagacuuuguccugcagcu

SEQ ID NO: 1530036 - RNA, 19 nt, Artificial Sequence
  Description of Artificial Sequence: Synthetic oligonucleotide
ugcaauagggacauucacc

SEQ ID NO: 1530037 - RNA, 19 nt, Artificial Sequence
  Description of Artificial Sequence: Synthetic oligonucleotide
aaaauggaacaggaaaguc

SEQ ID NO: 1530038 - RNA, 19 nt, Artificial Sequence
  Description of Artificial Sequence: Synthetic oligonucleotide
auuuagcacuauuacagag

SEQ ID NO: 1530039 - RNA, 19 nt, Artificial Sequence
  Description of Artificial Sequence: Synthetic oligonucleotide
uacgcuuuaaagcagcuuc

SEQ ID NO: 1530040 - RNA, 19 nt, Artificial Sequence
  Description of Artificial Sequence: Synthetic oligonucleotide
ucagugauuccaaugcugc

SEQ ID NO: 1530041 - RNA, 19 nt, Artificial Sequence
  Description of Artificial Sequence: Synthetic oligonucleotide
auauauuucuaccagugau

SEQ ID NO: 1530042 - RNA, 19 nt, Artificial Sequence
  Description of Artificial Sequence: Synthetic oligonucleotide
uauuugacgguauucauua

SEQ ID NO: 1530043 - RNA, 19 nt, Artificial Sequence
  Description of Artificial Sequence: Synthetic oligonucleotide
ucgucuacgcuuuaaagca

SEQ ID NO: 1530044 - RNA, 19 nt, Artificial Sequence
  Description of Artificial Sequence: Synthetic oligonucleotide
aucccauaaauguauguuc

SEQ ID NO: 1530045 - RNA, 19 nt, Artificial Sequence
  Description of Artificial Sequence: Synthetic oligonucleotide
ucuguuggacuauuugacg

SEQ ID NO: 1530046 - RNA, 19 nt, Artificial Sequence
  Description of Artificial Sequence: Synthetic oligonucleotide
cuacaacacaaucuggugg

SEQ ID NO: 1530047 - RNA, 19 nt, Artificial Sequence
  Description of Artificial Sequence: Synthetic oligonucleotide
caaaacucaggaagcaugg

SEQ ID NO: 1530048 - RNA, 19 nt, Artificial Sequence
  Description of Artificial Sequence: Synthetic oligonucleotide
uauggacucacuauauugu

SEQ ID NO: 1530049 - RNA, 19 nt, Artificial Sequence
  Description of Artificial Sequence: Synthetic oligonucleotide
uauguaugaguauucagau

SEQ ID NO: 1530050 - RNA, 19 nt, Artificial Sequence
  Description of Artificial Sequence: Synthetic oligonucleotide
ucuaccagaagcauccacu

SEQ ID NO: 1530051 - RNA, 19 nt, Artificial Sequence
  Description of Artificial Sequence: Synthetic oligonucleotide
agguucguauuguaagucc

SEQ ID NO: 1530052 - RNA, 19 nt, Artificial Sequence
  Description of Artificial Sequence: Synthetic oligonucleotide
acugagugaagacaugaag

SEQ ID NO: 1530053 - RNA, 19 nt, Artificial Sequence
  Description of Artificial Sequence: Synthetic oligonucleotide
uauuugauggaaaggcugu

SEQ ID NO: 1530054 - RNA, 19 nt, Artificial Sequence
  Description of Artificial Sequence: Synthetic oligonucleotide
ucccagaauaccuucagug

SEQ ID NO: 1530055 - RNA, 19 nt, Artificial Sequence
  Description of Artificial Sequence: Synthetic oligonucleotide
auguguauaacuauggacu

SEQ ID NO: 1530056 - RNA, 19 nt, Artificial Sequence
  Description of Artificial Sequence: Synthetic oligonucleotide
acuccuagggguuuuauca

SEQ ID NO: 1530057 - RNA, 19 nt, Artificial Sequence
  Description of Artificial Sequence: Synthetic oligonucleotide
cuauggacucacuauauug

SEQ ID NO: 1530058 - RNA, 19 nt, Artificial Sequence
  Description of Artificial Sequence: Synthetic oligonucleotide
cuguuggacuauuugacgg

SEQ ID NO: 1530059 - RNA, 19 nt, Artificial Sequence
  Description of Artificial Sequence: Synthetic oligonucleotide
cucgucuacgcuuuaaagc

SEQ ID NO: 1530060 - RNA, 19 nt, Artificial Sequence
  Description of Artificial Sequence: Synthetic oligonucleotide
ucagcuugacuccuagggg

SEQ ID NO: 1530061 - RNA, 19 nt, Artificial Sequence
  Description of Artificial Sequence: Synthetic oligonucleotide
aagaugacgggcguaacag

SEQ ID NO: 1530062 - RNA, 19 nt, Artificial Sequence
  Description of Artificial Sequence: Synthetic oligonucleotide
auaacuauggacucacuau

SEQ ID NO: 1530063 - RNA, 19 nt, Artificial Sequence
  Description of Artificial Sequence: Synthetic oligonucleotide
acugacuaugcacauccac

SEQ ID NO: 1530064 - RNA, 19 nt, Artificial Sequence
  Description of Artificial Sequence: Synthetic oligonucleotide
uauaacuauggacucacua

SEQ ID NO: 1530065 - RNA, 19 nt, Artificial Sequence
  Description of Artificial Sequence: Synthetic oligonucleotide
ucauauaagcauauuugau

SEQ ID NO: 1530066 - RNA, 19 nt, Artificial Sequence
  Description of Artificial Sequence: Synthetic oligonucleotide
agcacuauuacagaguaca

SEQ ID NO: 1530067 - RNA, 19 nt, Artificial Sequence
  Description of Artificial Sequence: Synthetic oligonucleotide
cugacuaugcacauccacc

SEQ ID NO: 1530068 - RNA, 19 nt, Artificial Sequence
  Description of Artificial Sequence: Synthetic oligonucleotide
aguuugccuagcuacacag

SEQ ID NO: 1530069 - RNA, 19 nt, Artificial Sequence
  Description of Artificial Sequence: Synthetic oligonucleotide
uugacgguauucauuaagu

SEQ ID NO: 1530070 - RNA, 19 nt, Artificial Sequence
  Description of Artificial Sequence: Synthetic oligonucleotide
auaugaguuuccaagguuc

SEQ ID NO: 1530071 - RNA, 19 nt, Artificial Sequence
  Description of Artificial Sequence: Synthetic oligonucleotide
guugguacuaguuugucuc

SEQ ID NO: 1530072 - RNA, 19 nt, Artificial Sequence
  Description of Artificial Sequence: Synthetic oligonucleotide
gcuaaagucagauucuucc

SEQ ID NO: 1530073 - RNA, 19 nt, Artificial Sequence
  Description of Artificial Sequence: Synthetic oligonucleotide
auaacucaaaucuaacaaa

SEQ ID NO: 1530074 - RNA, 19 nt, Artificial Sequence
  Description of Artificial Sequence: Synthetic oligonucleotide
cagauguguauaacuaugg

SEQ ID NO: 1530075 - RNA, 19 nt, Artificial Sequence
  Description of Artificial Sequence: Synthetic oligonucleotide
ucuauguugauggaaacau

SEQ ID NO: 1530076 - RNA, 19 nt, Artificial Sequence
  Description of Artificial Sequence: Synthetic oligonucleotide
uucagugauuccaaugcug

SEQ ID NO: 1530077 - RNA, 19 nt, Artificial Sequence
  Description of Artificial Sequence: Synthetic oligonucleotide
aggacguauccacacacac

SEQ ID NO: 1530078 - RNA, 19 nt, Artificial Sequence
  Description of Artificial Sequence: Synthetic oligonucleotide
cauaaauguauguucucac

SEQ ID NO: 1530079 - RNA, 19 nt, Artificial Sequence
  Description of Artificial Sequence: Synthetic oligonucleotide
gggauuaucacauacuuga

SEQ ID NO: 1530080 - RNA, 19 nt, Artificial Sequence
  Description of Artificial Sequence: Synthetic oligonucleotide
ucuucaacagacacccagc

SEQ ID NO: 1530081 - RNA, 19 nt, Artificial Sequence
  Description of Artificial Sequence: Synthetic oligonucleotide
cagucuucaacagacaccc

SEQ ID NO: 1530082 - RNA, 19 nt, Artificial Sequence
  Description of Artificial Sequence: Synthetic oligonucleotide
acucaaaucuaacaaacua

SEQ ID NO: 1530083 - RNA, 19 nt, Artificial Sequence
  Description of Artificial Sequence: Synthetic oligonucleotide
ugacuaugcacauccacca

SEQ ID NO: 1530084 - RNA, 19 nt, Artificial Sequence
  Description of Artificial Sequence: Synthetic oligonucleotide
gacguauccacacacacaa

SEQ ID NO: 1530085 - RNA, 19 nt, Artificial Sequence
  Description of Artificial Sequence: Synthetic oligonucleotide
uguauaacuauggacucac

SEQ ID NO: 1530086 - RNA, 19 nt, Artificial Sequence
  Description of Artificial Sequence: Synthetic oligonucleotide
aagguucguauuguaaguc

SEQ ID NO: 1530087 - RNA, 19 nt, Artificial Sequence
  Description of Artificial Sequence: Synthetic oligonucleotide
uucucuguuggacuauuug

SEQ ID NO: 1530088 - RNA, 19 nt, Artificial Sequence
  Description of Artificial Sequence: Synthetic oligonucleotide
cuccaagaaagcaaaacuc

SEQ ID NO: 1530089 - RNA, 19 nt, Artificial Sequence
  Description of Artificial Sequence: Synthetic oligonucleotide
accauuaagaugacgggcg

SEQ ID NO: 1530090 - RNA, 19 nt, Artificial Sequence
  Description of Artificial Sequence: Synthetic oligonucleotide
aaguuuaucccaaccaaca

SEQ ID NO: 1530091 - RNA, 19 nt, Artificial Sequence
  Description of Artificial Sequence: Synthetic oligonucleotide
uuuuaucacauggucagcu

SEQ ID NO: 1530092 - RNA, 19 nt, Artificial Sequence
  Description of Artificial Sequence: Synthetic oligonucleotide
agauauauuucuaccagug

SEQ ID NO: 1530093 - RNA, 19 nt, Artificial Sequence
  Description of Artificial Sequence: Synthetic oligonucleotide
gcuauaugaguuuccaagg

SEQ ID NO: 1530094 - RNA, 19 nt, Artificial Sequence
  Description of Artificial Sequence: Synthetic oligonucleotide
uauuuagcacuauuacaga

SEQ ID NO: 1530095 - RNA, 19 nt, Artificial Sequence
  Description of Artificial Sequence: Synthetic oligonucleotide
acauacuugaucaggaaug

SEQ ID NO: 1530096 - RNA, 19 nt, Artificial Sequence
  Description of Artificial Sequence: Synthetic oligonucleotide
uuugccuagcuacacagua

SEQ ID NO: 1530097 - RNA, 19 nt, Artificial Sequence
  Description of Artificial Sequence: Synthetic oligonucleotide
acaaucagaaagccaaggu

SEQ ID NO: 1530098 - RNA, 19 nt, Artificial Sequence
  Description of Artificial Sequence: Synthetic oligonucleotide
uguguauaacuauggacuc

SEQ ID NO: 1530099 - RNA, 19 nt, Artificial Sequence
  Description of Artificial Sequence: Synthetic oligonucleotide
uacacaauaaaugccugga

SEQ ID NO: 1530100 - RNA, 19 nt, Artificial Sequence
  Description of Artificial Sequence: Synthetic oligonucleotide
gucuucaacagacacccag

SEQ ID NO: 1530101 - RNA, 19 nt, Artificial Sequence
  Description of Artificial Sequence: Synthetic oligonucleotide
aaacaguacgagcuggaaa

SEQ ID NO: 1530102 - RNA, 19 nt, Artificial Sequence
  Description of Artificial Sequence: Synthetic oligonucleotide
uaagaugacgggcguaaca

SEQ ID NO: 1530103 - RNA, 19 nt, Artificial Sequence
  Description of Artificial Sequence: Synthetic oligonucleotide
ucucgucuacgcuuuaaag

SEQ ID NO: 1530104 - RNA, 19 nt, Artificial Sequence
  Description of Artificial Sequence: Synthetic oligonucleotide
uucauccauaacaucccag

SEQ ID NO: 1530105 - RNA, 19 nt, Artificial Sequence
  Description of Artificial Sequence: Synthetic oligonucleotide
uccacugcuuuuaacuuga

SEQ ID NO: 1530106 - RNA, 19 nt, Artificial Sequence
  Description of Artificial Sequence: Synthetic oligonucleotide
uccaaaacaguacgagcug

SEQ ID NO: 1530107 - RNA, 19 nt, Artificial Sequence
  Description of Artificial Sequence: Synthetic oligonucleotide
ucuaccagugaugugggug

SEQ ID NO: 1530108 - RNA, 19 nt, Artificial Sequence
  Description of Artificial Sequence: Synthetic oligonucleotide
aaacucaggaagcauggua

SEQ ID NO: 1530109 - RNA, 19 nt, Artificial Sequence
  Description of Artificial Sequence: Synthetic oligonucleotide
agaauaccuucagugauuc

SEQ ID NO: 1530110 - RNA, 19 nt, Artificial Sequence
  Description of Artificial Sequence: Synthetic oligonucleotide
agguaaucggcuuacugca

SEQ ID NO: 1530111 - RNA, 19 nt, Artificial Sequence
  Description of Artificial Sequence: Synthetic oligonucleotide
uuaacuugaugguacugaa

SEQ ID NO: 1530112 - RNA, 19 nt, Artificial Sequence
  Description of Artificial Sequence: Synthetic oligonucleotide
aaggcgguuguacacacaa

SEQ ID NO: 1530113 - RNA, 19 nt, Artificial Sequence
  Description of Artificial Sequence: Synthetic oligonucleotide
ugcccuaaugcaauccugc

SEQ ID NO: 1530114 - RNA, 19 nt, Artificial Sequence
  Description of Artificial Sequence: Synthetic oligonucleotide
auacuuugccuucaacuug

SEQ ID NO: 1530115 - RNA, 19 nt, Artificial Sequence
  Description of Artificial Sequence: Synthetic oligonucleotide
aggagaagaaauauguaug

SEQ ID NO: 1530116 - RNA, 19 nt, Artificial Sequence
  Description of Artificial Sequence: Synthetic oligonucleotide
uauaugaguuuccaagguu

SEQ ID NO: 1530117 - RNA, 19 nt, Artificial Sequence
  Description of Artificial Sequence: Synthetic oligonucleotide
caaguuuaucccaaccaac

SEQ ID NO: 1530118 - RNA, 19 nt, Artificial Sequence
  Description of Artificial Sequence: Synthetic oligonucleotide
auaggaaaacucaaggaga

SEQ ID NO: 1530119 - RNA, 19 nt, Artificial Sequence
  Description of Artificial Sequence: Synthetic oligonucleotide
caccaguagagauacaauc

SEQ ID NO: 1530120 - RNA, 19 nt, Artificial Sequence
  Description of Artificial Sequence: Synthetic oligonucleotide
uggauaacucaaaucuaac

SEQ ID NO: 1530121 - RNA, 19 nt, Artificial Sequence
  Description of Artificial Sequence: Synthetic oligonucleotide
uaugcccuaaugcaauccu

SEQ ID NO: 1530122 - RNA, 19 nt, Artificial Sequence
  Description of Artificial Sequence: Synthetic oligonucleotide
uaaaugccuggauaacuca

SEQ ID NO: 1530123 - RNA, 19 nt, Artificial Sequence
  Description of Artificial Sequence: Synthetic oligonucleotide
aguagagauacaaucagaa

SEQ ID NO: 1530124 - RNA, 19 nt, Artificial Sequence
  Description of Artificial Sequence: Synthetic oligonucleotide
caucauaaagcucacuaga

SEQ ID NO: 1530125 - RNA, 19 nt, Artificial Sequence
  Description of Artificial Sequence: Synthetic oligonucleotide
gagauacaaucagaaagcc

SEQ ID NO: 1530126 - RNA, 19 nt, Artificial Sequence
  Description of Artificial Sequence: Synthetic oligonucleotide
aaucggcuuacugcaauag

SEQ ID NO: 1530127 - RNA, 19 nt, Artificial Sequence
  Description of Artificial Sequence: Synthetic oligonucleotide
acgguauucauuaaguuau

SEQ ID NO: 1530128 - RNA, 19 nt, Artificial Sequence
  Description of Artificial Sequence: Synthetic oligonucleotide
caugguaggaugccugggg

SEQ ID NO: 1530129 - RNA, 19 nt, Artificial Sequence
  Description of Artificial Sequence: Synthetic oligonucleotide
agaaggcgguuguacacac

SEQ ID NO: 1530130 - RNA, 19 nt, Artificial Sequence
  Description of Artificial Sequence: Synthetic oligonucleotide
uggggauuaucacauacuu

SEQ ID NO: 1530131 - RNA, 19 nt, Artificial Sequence
  Description of Artificial Sequence: Synthetic oligonucleotide
gacgguauucauuaaguua

SEQ ID NO: 1530132 - RNA, 19 nt, Artificial Sequence
  Description of Artificial Sequence: Synthetic oligonucleotide
agauguguauaacuaugga

SEQ ID NO: 1530133 - RNA, 19 nt, Artificial Sequence
  Description of Artificial Sequence: Synthetic oligonucleotide
gacuauuugacgguauuca

SEQ ID NO: 1530134 - RNA, 19 nt, Artificial Sequence
  Description of Artificial Sequence: Synthetic oligonucleotide
uguugguacuaguuugucu

SEQ ID NO: 1530135 - RNA, 19 nt, Artificial Sequence
  Description of Artificial Sequence: Synthetic oligonucleotide
cguauuguaaguccuaucc

SEQ ID NO: 1530136 - RNA, 19 nt, Artificial Sequence
  Description of Artificial Sequence: Synthetic oligonucleotide
ugacgggcguaacagauuc

SEQ ID NO: 1530137 - RNA, 19 nt, Artificial Sequence
  Description of Artificial Sequence: Synthetic oligonucleotide
acucaggaagcaugguagg

SEQ ID NO: 1530138 - RNA, 19 nt, Artificial Sequence
  Description of Artificial Sequence: Synthetic oligonucleotide
uguaaguccuauccagauc

SEQ ID NO: 1530139 - RNA, 19 nt, Artificial Sequence
  Description of Artificial Sequence: Synthetic oligonucleotide
cagacacccagcuauauga

SEQ ID NO: 1530140 - RNA, 19 nt, Artificial Sequence
  Description of Artificial Sequence: Synthetic oligonucleotide
auggacucacuauauugug

SEQ ID NO: 1530141 - RNA, 19 nt, Artificial Sequence
  Description of Artificial Sequence: Synthetic oligonucleotide
uguuggacuauuugacggu

SEQ ID NO: 1530142 - RNA, 19 nt, Artificial Sequence
  Description of Artificial Sequence: Synthetic oligonucleotide
aguacgagcuggaaaauca

SEQ ID NO: 1530143 - RNA, 19 nt, Artificial Sequence
  Description of Artificial Sequence: Synthetic oligonucleotide
aucggcuuacugcaauagg

SEQ ID NO: 1530144 - RNA, 19 nt, Artificial Sequence
  Description of Artificial Sequence: Synthetic oligonucleotide
gcaauagggacauucacca

SEQ ID NO: 1530145 - RNA, 19 nt, Artificial Sequence
  Description of Artificial Sequence: Synthetic oligonucleotide
acaacucucgucuacgcuu

SEQ ID NO: 1530146 - RNA, 19 nt, Artificial Sequence
  Description of Artificial Sequence: Synthetic oligonucleotide
ggagaagaaauauguauga

SEQ ID NO: 1530147 - RNA, 19 nt, Artificial Sequence
  Description of Artificial Sequence: Synthetic oligonucleotide
agccaagguauccagcuca

SEQ ID NO: 1530148 - RNA, 19 nt, Artificial Sequence
  Description of Artificial Sequence: Synthetic oligonucleotide
caagguaaucggcuuacug

SEQ ID NO: 1530149 - RNA, 19 nt, Artificial Sequence
  Description of Artificial Sequence: Synthetic oligonucleotide
uguacacacaacucucguc

SEQ ID NO: 1530150 - RNA, 19 nt, Artificial Sequence
  Description of Artificial Sequence: Synthetic oligonucleotide
ccuaaugcaauccugcgug

SEQ ID NO: 1530151 - RNA, 19 nt, Artificial Sequence
  Description of Artificial Sequence: Synthetic oligonucleotide
auccauaacaucccagaau

SEQ ID NO: 1530152 - RNA, 19 nt, Artificial Sequence
  Description of Artificial Sequence: Synthetic oligonucleotide
gugaucacaugcuuucuac

SEQ ID NO: 1530153 - RNA, 19 nt, Artificial Sequence
  Description of Artificial Sequence: Synthetic oligonucleotide
ggcguaacagauuccacag

SEQ ID NO: 1530154 - RNA, 19 nt, Artificial Sequence
  Description of Artificial Sequence: Synthetic oligonucleotide
uuuaucacauggucagcuc

SEQ ID NO: 1530155 - RNA, 19 nt, Artificial Sequence
  Description of Artificial Sequence: Synthetic oligonucleotide
ggcucuacaggauacuuug

SEQ ID NO: 1530156 - RNA, 19 nt, Artificial Sequence
  Description of Artificial Sequence: Synthetic oligonucleotide
auacuugaucaggaauggc

SEQ ID NO: 1530157 - RNA, 19 nt, Artificial Sequence
  Description of Artificial Sequence: Synthetic oligonucleotide
aguccuauccagaucccac

SEQ ID NO: 1530158 - RNA, 19 nt, Artificial Sequence
  Description of Artificial Sequence: Synthetic oligonucleotide
uuugucucgcuuuguauuu

SEQ ID NO: 1530159 - RNA, 19 nt, Artificial Sequence
  Description of Artificial Sequence: Synthetic oligonucleotide
auccacugcuuuuaacuug

SEQ ID NO: 1530160 - RNA, 19 nt, Artificial Sequence
  Description of Artificial Sequence: Synthetic oligonucleotide
uuaugcccuaaugcaaucc

SEQ ID NO: 1530161 - RNA, 19 nt, Artificial Sequence
  Description of Artificial Sequence: Synthetic oligonucleotide
uccuauccagaucccacca

SEQ ID NO: 1530162 - RNA, 19 nt, Artificial Sequence
  Description of Artificial Sequence: Synthetic oligonucleotide
cuggauaacucaaaucuaa

SEQ ID NO: 1530163 - RNA, 19 nt, Artificial Sequence
  Description of Artificial Sequence: Synthetic oligonucleotide
auuaagaugacgggcguaa

SEQ ID NO: 1530164 - RNA, 19 nt, Artificial Sequence
  Description of Artificial Sequence: Synthetic oligonucleotide
uuaaagcagcuuccaaaau

SEQ ID NO: 1530165 - RNA, 19 nt, Artificial Sequence
  Description of Artificial Sequence: Synthetic oligonucleotide
caccauuaagaugacgggc

SEQ ID NO: 1530166 - RNA, 19 nt, Artificial Sequence
  Description of Artificial Sequence: Synthetic oligonucleotide
ccaagguucguauuguaag

SEQ ID NO: 1530167 - RNA, 19 nt, Artificial Sequence
  Description of Artificial Sequence: Synthetic oligonucleotide
agcauccacugcuuuuaac

SEQ ID NO: 1530168 - RNA, 19 nt, Artificial Sequence
  Description of Artificial Sequence: Synthetic oligonucleotide
guauuguaaguccuaucca

SEQ ID NO: 1530169 - RNA, 19 nt, Artificial Sequence
  Description of Artificial Sequence: Synthetic oligonucleotide
ggauaacucaaaucuaaca

SEQ ID NO: 1530170 - RNA, 19 nt, Artificial Sequence
  Description of Artificial Sequence: Synthetic oligonucleotide
ucacuagaucaggagacug

SEQ ID NO: 1530171 - RNA, 19 nt, Artificial Sequence
  Description of Artificial Sequence: Synthetic oligonucleotide
ucgagaaggcgguuguaca

SEQ ID NO: 1530172 - RNA, 19 nt, Artificial Sequence
  Description of Artificial Sequence: Synthetic oligonucleotide
guacacacaacucucgucu

SEQ ID NO: 1530173 - RNA, 19 nt, Artificial Sequence
  Description of Artificial Sequence: Synthetic oligonucleotide
ugccaagaacugacuaugc

SEQ ID NO: 1530174 - RNA, 19 nt, Artificial Sequence
  Description of Artificial Sequence: Synthetic oligonucleotide
acucacuauauugugccug

SEQ ID NO: 1530175 - RNA, 19 nt, Artificial Sequence
  Description of Artificial Sequence: Synthetic oligonucleotide
ucuacgcuuuaaagcagcu

SEQ ID NO: 1530176 - RNA, 19 nt, Artificial Sequence
  Description of Artificial Sequence: Synthetic oligonucleotide
acgcuuuaaagcagcuucc

SEQ ID NO: 1530177 - RNA, 19 nt, Artificial Sequence
  Description of Artificial Sequence: Synthetic oligonucleotide
acuagaucaggagacugcu

SEQ ID NO: 1530178 - RNA, 19 nt, Artificial Sequence
  Description of Artificial Sequence: Synthetic oligonucleotide
uaguuugccuagcuacaca

SEQ ID NO: 1530179 - RNA, 19 nt, Artificial Sequence
  Description of Artificial Sequence: Synthetic oligonucleotide
gauuccaaugcugccaaga

SEQ ID NO: 1530180 - RNA, 19 nt, Artificial Sequence
  Description of Artificial Sequence: Synthetic oligonucleotide
acagacacccagcuauaug

SEQ ID NO: 1530181 - RNA, 19 nt, Artificial Sequence
  Description of Artificial Sequence: Synthetic oligonucleotide
aaggucggugcagaaaccu

SEQ ID NO: 1530182 - RNA, 19 nt, Artificial Sequence
  Description of Artificial Sequence: Synthetic oligonucleotide
auuccaaugcugccaagaa

SEQ ID NO: 1530183 - RNA, 19 nt, Artificial Sequence
  Description of Artificial Sequence: Synthetic oligonucleotide
uccuagggguuuuaucaca

SEQ ID NO: 1530184 - RNA, 19 nt, Artificial Sequence
  Description of Artificial Sequence: Synthetic oligonucleotide
auguauguucucacucagc

SEQ ID NO: 1530185 - RNA, 19 nt, Artificial Sequence
  Description of Artificial Sequence: Synthetic oligonucleotide
uacaggauacuuugccuuc

SEQ ID NO: 1530186 - RNA, 19 nt, Artificial Sequence
  Description of Artificial Sequence: Synthetic oligonucleotide
cuaaugcaauccugcgugc

SEQ ID NO: 1530187 - RNA, 19 nt, Artificial Sequence
  Description of Artificial Sequence: Synthetic oligonucleotide
guauucauuaaguuauuau

SEQ ID NO: 1530188 - RNA, 19 nt, Artificial Sequence
  Description of Artificial Sequence: Synthetic oligonucleotide
aaaacaguacgagcuggaa

SEQ ID NO: 1530189 - RNA, 19 nt, Artificial Sequence
  Description of Artificial Sequence: Synthetic oligonucleotide
agaacugacuaugcacauc

SEQ ID NO: 1530190 - RNA, 19 nt, Artificial Sequence
  Description of Artificial Sequence: Synthetic oligonucleotide
ugcuaaagucagauucuuc

SEQ ID NO: 1530191 - RNA, 19 nt, Artificial Sequence
  Description of Artificial Sequence: Synthetic oligonucleotide
ucucaagguaaucggcuua

SEQ ID NO: 1530192 - RNA, 19 nt, Artificial Sequence
  Description of Artificial Sequence: Synthetic oligonucleotide
uaacaucccagaauaccuu

SEQ ID NO: 1530193 - RNA, 19 nt, Artificial Sequence
  Description of Artificial Sequence: Synthetic oligonucleotide
aacuauggacucacuauau

SEQ ID NO: 1530194 - RNA, 19 nt, Artificial Sequence
  Description of Artificial Sequence: Synthetic oligonucleotide
aguacacaauaaaugccug

SEQ ID NO: 1530195 - RNA, 19 nt, Artificial Sequence
  Description of Artificial Sequence: Synthetic oligonucleotide
agaucaggagacugcuuca

SEQ ID NO: 1530196 - RNA, 19 nt, Artificial Sequence
  Description of Artificial Sequence: Synthetic oligonucleotide
cugcaauagggacauucac

SEQ ID NO: 1530197 - RNA, 19 nt, Artificial Sequence
  Description of Artificial Sequence: Synthetic oligonucleotide
auuguaaguccuauccaga

SEQ ID NO: 1530198 - RNA, 19 nt, Artificial Sequence
  Description of Artificial Sequence: Synthetic oligonucleotide
aagcaugguaggaugccug

SEQ ID NO: 1530199 - RNA, 19 nt, Artificial Sequence
  Description of Artificial Sequence: Synthetic oligonucleotide
ugcgugcuguugcacuccg

SEQ ID NO: 1530200 - RNA, 19 nt, Artificial Sequence
  Description of Artificial Sequence: Synthetic oligonucleotide
gcuuuuaacuugaugguac

SEQ ID NO: 1530201 - RNA, 19 nt, Artificial Sequence
  Description of Artificial Sequence: Synthetic oligonucleotide
gccuggauaacucaaaucu

SEQ ID NO: 1530202 - RNA, 19 nt, Artificial Sequence
  Description of Artificial Sequence: Synthetic oligonucleotide
uggacuauuugacgguauu

SEQ ID NO: 1530203 - RNA, 19 nt, Artificial Sequence
  Description of Artificial Sequence: Synthetic oligonucleotide
uauccagaucccaccagua

SEQ ID NO: 1530204 - RNA, 19 nt, Artificial Sequence
  Description of Artificial Sequence: Synthetic oligonucleotide
guccuauccagaucccacc

SEQ ID NO: 1530205 - RNA, 19 nt, Artificial Sequence
  Description of Artificial Sequence: Synthetic oligonucleotide
ggauacuuugccuucaacu

SEQ ID NO: 1530206 - RNA, 19 nt, Artificial Sequence
  Description of Artificial Sequence: Synthetic oligonucleotide
ugccuggauaacucaaauc

SEQ ID NO: 1530207 - RNA, 19 nt, Artificial Sequence
  Description of Artificial Sequence: Synthetic oligonucleotide
aaugccuggauaacucaaa

SEQ ID NO: 1530208 - RNA, 19 nt, Artificial Sequence
  Description of Artificial Sequence: Synthetic oligonucleotide
uucguauuguaaguccuau

SEQ ID NO: 1530209 - RNA, 19 nt, Artificial Sequence
  Description of Artificial Sequence: Synthetic oligonucleotide
agugaucacaugcuuucua

SEQ ID NO: 1530210 - RNA, 19 nt, Artificial Sequence
  Description of Artificial Sequence: Synthetic oligonucleotide
gcaaaacucaggaagcaug

SEQ ID NO: 1530211 - RNA, 19 nt, Artificial Sequence
  Description of Artificial Sequence: Synthetic oligonucleotide
gugacaugcacagucuuca

SEQ ID NO: 1530212 - RNA, 19 nt, Artificial Sequence
  Description of Artificial Sequence: Synthetic oligonucleotide
gaauaccuucagugauucc

SEQ ID NO: 1530213 - RNA, 19 nt, Artificial Sequence
  Description of Artificial Sequence: Synthetic oligonucleotide
ucguauuguaaguccuauc

SEQ ID NO: 1530214 - RNA, 19 nt, Artificial Sequence
  Description of Artificial Sequence: Synthetic oligonucleotide
cuaguuugccuagcuacac

SEQ ID NO: 1530215 - RNA, 19 nt, Artificial Sequence
  Description of Artificial Sequence: Synthetic oligonucleotide
uccaagacuuuguccugca

SEQ ID NO: 1530216 - RNA, 19 nt, Artificial Sequence
  Description of Artificial Sequence: Synthetic oligonucleotide
cucaagguaaucggcuuac

SEQ ID NO: 1530217 - RNA, 19 nt, Artificial Sequence
  Description of Artificial Sequence: Synthetic oligonucleotide
aaccucgagaaggcgguug

SEQ ID NO: 1530218 - RNA, 19 nt, Artificial Sequence
  Description of Artificial Sequence: Synthetic oligonucleotide
cuccuagggguuuuaucac

SEQ ID NO: 1530219 - RNA, 19 nt, Artificial Sequence
  Description of Artificial Sequence: Synthetic oligonucleotide
aaguccuauccagauccca

SEQ ID NO: 1530220 - RNA, 19 nt, Artificial Sequence
  Description of Artificial Sequence: Synthetic oligonucleotide
cacacaaguuuaucccaac

SEQ ID NO: 1530221 - RNA, 19 nt, Artificial Sequence
  Description of Artificial Sequence: Synthetic oligonucleotide
ugugccuguugguacuagu

SEQ ID NO: 1530222 - RNA, 19 nt, Artificial Sequence
  Description of Artificial Sequence: Synthetic oligonucleotide
gggguuuuaucacaugguc

SEQ ID NO: 1530223 - RNA, 19 nt, Artificial Sequence
  Description of Artificial Sequence: Synthetic oligonucleotide
acauuaugcccuaaugcaa

SEQ ID NO: 1530224 - RNA, 19 nt, Artificial Sequence
  Description of Artificial Sequence: Synthetic oligonucleotide
uuggacuauuugacgguau

SEQ ID NO: 1530225 - RNA, 19 nt, Artificial Sequence
  Description of Artificial Sequence: Synthetic oligonucleotide
ggucggugcagaaaccucg

SEQ ID NO: 1530226 - RNA, 19 nt, Artificial Sequence
  Description of Artificial Sequence: Synthetic oligonucleotide
gucuacgcuuuaaagcagc

SEQ ID NO: 1530227 - RNA, 19 nt, Artificial Sequence
  Description of Artificial Sequence: Synthetic oligonucleotide
auguaugaguauucagauu

SEQ ID NO: 1530228 - RNA, 19 nt, Artificial Sequence
  Description of Artificial Sequence: Synthetic oligonucleotide
uaaucggcuuacugcaaua

SEQ ID NO: 1530229 - RNA, 19 nt, Artificial Sequence
  Description of Artificial Sequence: Synthetic oligonucleotide
gccuguugguacuaguuug

SEQ ID NO: 1530230 - RNA, 19 nt, Artificial Sequence
  Description of Artificial Sequence: Synthetic oligonucleotide
cuccuaucucauucagaag

SEQ ID NO: 1530231 - RNA, 19 nt, Artificial Sequence
  Description of Artificial Sequence: Synthetic oligonucleotide
ggggucuaccucuauguug

SEQ ID NO: 1530232 - RNA, 19 nt, Artificial Sequence
  Description of Artificial Sequence: Synthetic oligonucleotide
gacuauuuucuggauccca

SEQ ID NO: 1530233 - RNA, 19 nt, Artificial Sequence
  Description of Artificial Sequence: Synthetic oligonucleotide
cucgagaaggcgguuguac

SEQ ID NO: 1530234 - RNA, 19 nt, Artificial Sequence
  Description of Artificial Sequence: Synthetic oligonucleotide
accucuauguugauggaaa

SEQ ID NO: 1530235 - RNA, 19 nt, Artificial Sequence
  Description of Artificial Sequence: Synthetic oligonucleotide
ucggugcagaaaccucgag

SEQ ID NO: 1530236 - RNA, 19 nt, Artificial Sequence
  Description of Artificial Sequence: Synthetic oligonucleotide
caugcuaaagucagauucu

SEQ ID NO: 1530237 - RNA, 19 nt, Artificial Sequence
  Description of Artificial Sequence: Synthetic oligonucleotide
agaugacgggcguaacaga

SEQ ID NO: 1530238 - RNA, 19 nt, Artificial Sequence
  Description of Artificial Sequence: Synthetic oligonucleotide
ugugggugucacagacuug

SEQ ID NO: 1530239 - RNA, 19 nt, Artificial Sequence
  Description of Artificial Sequence: Synthetic oligonucleotide
auucagauuuucagaguga

SEQ ID NO: 1530240 - RNA, 19 nt, Artificial Sequence
  Description of Artificial Sequence: Synthetic oligonucleotide
aucccagaauaccuucagu

SEQ ID NO: 1530241 - RNA, 19 nt, Artificial Sequence
  Description of Artificial Sequence: Synthetic oligonucleotide
guuuuaucacauggucagc

SEQ ID NO: 1530242 - RNA, 19 nt, Artificial Sequence
  Description of Artificial Sequence: Synthetic oligonucleotide
acccagcuauaugaguuuc

SEQ ID NO: 1530243 - RNA, 19 nt, Artificial Sequence
  Description of Artificial Sequence: Synthetic oligonucleotide
ggcuuacugcaauagggac

SEQ ID NO: 1530244 - RNA, 19 nt, Artificial Sequence
  Description of Artificial Sequence: Synthetic oligonucleotide
ugauuccaaugcugccaag

SEQ ID NO: 1530245 - RNA, 19 nt, Artificial Sequence
  Description of Artificial Sequence: Synthetic oligonucleotide
uaccucuauguugauggaa

SEQ ID NO: 1530246 - RNA, 19 nt, Artificial Sequence
  Description of Artificial Sequence: Synthetic oligonucleotide
aacagacacccagcuauau

SEQ ID NO: 1530247 - RNA, 19 nt, Artificial Sequence
  Description of Artificial Sequence: Synthetic oligonucleotide
uuaagaugacgggcguaac

SEQ ID NO: 1530248 - RNA, 19 nt, Artificial Sequence
  Description of Artificial Sequence: Synthetic oligonucleotide
ugguaggaugccugggguc

SEQ ID NO: 1530249 - RNA, 19 nt, Artificial Sequence
  Description of Artificial Sequence: Synthetic oligonucleotide
acgggcguaacagauucca

SEQ ID NO: 1530250 - RNA, 19 nt, Artificial Sequence
  Description of Artificial Sequence: Synthetic oligonucleotide
gagaaggcgguuguacaca

SEQ ID NO: 1530251 - RNA, 19 nt, Artificial Sequence
  Description of Artificial Sequence: Synthetic oligonucleotide
uuaucccaaccaacagcuc

SEQ ID NO: 1530252 - RNA, 19 nt, Artificial Sequence
  Description of Artificial Sequence: Synthetic oligonucleotide
accucgagaaggcgguugu

SEQ ID NO: 1530253 - RNA, 19 nt, Artificial Sequence
  Description of Artificial Sequence: Synthetic oligonucleotide
gguuguacacacaacucuc

SEQ ID NO: 1530254 - RNA, 19 nt, Artificial Sequence
  Description of Artificial Sequence: Synthetic oligonucleotide
cucuauguugauggaaaca

SEQ ID NO: 1530255 - RNA, 19 nt, Artificial Sequence
  Description of Artificial Sequence: Synthetic oligonucleotide
acgagcuggaaaaucaauu

SEQ ID NO: 1530256 - RNA, 19 nt, Artificial Sequence
  Description of Artificial Sequence: Synthetic oligonucleotide
agggguuuuaucacauggu

SEQ ID NO: 1530257 - RNA, 19 nt, Artificial Sequence
  Description of Artificial Sequence: Synthetic oligonucleotide
augguacugaaggacguau

SEQ ID NO: 1530258 - RNA, 19 nt, Artificial Sequence
  Description of Artificial Sequence: Synthetic oligonucleotide
cauucaccaaagaggaugu

SEQ ID NO: 1530259 - RNA, 19 nt, Artificial Sequence
  Description of Artificial Sequence: Synthetic oligonucleotide
gcucacuagaucaggagac

SEQ ID NO: 1530260 - RNA, 19 nt, Artificial Sequence
  Description of Artificial Sequence: Synthetic oligonucleotide
gggcguaacagauuccaca

SEQ ID NO: 1530261 - RNA, 19 nt, Artificial Sequence
  Description of Artificial Sequence: Synthetic oligonucleotide
uguugcacuccggggaggu

SEQ ID NO: 1530262 - RNA, 19 nt, Artificial Sequence
  Description of Artificial Sequence: Synthetic oligonucleotide
auggaaacauuaugcccua

SEQ ID NO: 1530263 - RNA, 19 nt, Artificial Sequence
  Description of Artificial Sequence: Synthetic oligonucleotide
acugaaggacguauccaca

SEQ ID NO: 1530264 - RNA, 19 nt, Artificial Sequence
  Description of Artificial Sequence: Synthetic oligonucleotide
ccaaccaacagcuccuauc

SEQ ID NO: 1530265 - RNA, 19 nt, Artificial Sequence
  Description of Artificial Sequence: Synthetic oligonucleotide
uccaugcuaaagucagauu

SEQ ID NO: 1530266 - RNA, 19 nt, Artificial Sequence
  Description of Artificial Sequence: Synthetic oligonucleotide
gaaaccucgagaaggcggu

SEQ ID NO: 1530267 - RNA, 19 nt, Artificial Sequence
  Description of Artificial Sequence: Synthetic oligonucleotide
auuugacgguauucauuaa

SEQ ID NO: 1530268 - RNA, 19 nt, Artificial Sequence
  Description of Artificial Sequence: Synthetic oligonucleotide
cuuuuaacuugaugguacu

SEQ ID NO: 1530269 - RNA, 19 nt, Artificial Sequence
  Description of Artificial Sequence: Synthetic oligonucleotide
augcaauccugcgugcugu

SEQ ID NO: 1530270 - RNA, 19 nt, Artificial Sequence
  Description of Artificial Sequence: Synthetic oligonucleotide
gcccuaaugcaauccugcg

SEQ ID NO: 1530271 - RNA, 19 nt, Artificial Sequence
  Description of Artificial Sequence: Synthetic oligonucleotide
ugcuuucuaccagaagcau

SEQ ID NO: 1530272 - RNA, 19 nt, Artificial Sequence
  Description of Artificial Sequence: Synthetic oligonucleotide
caagguucguauuguaagu

SEQ ID NO: 1530273 - RNA, 19 nt, Artificial Sequence
  Description of Artificial Sequence: Synthetic oligonucleotide
uuccaagguucguauugua

SEQ ID NO: 1530274 - RNA, 19 nt, Artificial Sequence
  Description of Artificial Sequence: Synthetic oligonucleotide
guguauaacuauggacuca

SEQ ID NO: 1530275 - RNA, 19 nt, Artificial Sequence
  Description of Artificial Sequence: Synthetic oligonucleotide
aggcagauguguauaacua

SEQ ID NO: 1530276 - RNA, 19 nt, Artificial Sequence
  Description of Artificial Sequence: Synthetic oligonucleotide
ggcgguuguacacacaacu

SEQ ID NO: 1530277 - RNA, 19 nt, Artificial Sequence
  Description of Artificial Sequence: Synthetic oligonucleotide
gaugacgggcguaacagau

SEQ ID NO: 1530278 - RNA, 19 nt, Artificial Sequence
  Description of Artificial Sequence: Synthetic oligonucleotide
auaccuucagugauuccaa

SEQ ID NO: 1530279 - RNA, 19 nt, Artificial Sequence
  Description of Artificial Sequence: Synthetic oligonucleotide
gaucccaccaguagagaua

SEQ ID NO: 1530280 - RNA, 19 nt, Artificial Sequence
  Description of Artificial Sequence: Synthetic oligonucleotide
uggggucuaccucuauguu

SEQ ID NO: 1530281 - RNA, 19 nt, Artificial Sequence
  Description of Artificial Sequence: Synthetic oligonucleotide
cuauuugacgguauucauu

SEQ ID NO: 1530282 - RNA, 19 nt, Artificial Sequence
  Description of Artificial Sequence: Synthetic oligonucleotide
ggggauuaucacauacuug

SEQ ID NO: 1530283 - RNA, 19 nt, Artificial Sequence
  Description of Artificial Sequence: Synthetic oligonucleotide
gucuaccucuauguugaug

SEQ ID NO: 1530284 - RNA, 19 nt, Artificial Sequence
  Description of Artificial Sequence: Synthetic oligonucleotide
augaguuuccaagguucgu

SEQ ID NO: 1530285 - RNA, 19 nt, Artificial Sequence
  Description of Artificial Sequence: Synthetic oligonucleotide
aggucggugcagaaaccuc

SEQ ID NO: 1530286 - RNA, 19 nt, Artificial Sequence
  Description of Artificial Sequence: Synthetic oligonucleotide
aacugacuaugcacaucca

SEQ ID NO: 1530287 - RNA, 19 nt, Artificial Sequence
  Description of Artificial Sequence: Synthetic oligonucleotide
cucacuauauugugccugu

SEQ ID NO: 1530288 - RNA, 19 nt, Artificial Sequence
  Description of Artificial Sequence: Synthetic oligonucleotide
cagcuugacuccuaggggu

SEQ ID NO: 1530289 - RNA, 19 nt, Artificial Sequence
  Description of Artificial Sequence: Synthetic oligonucleotide
ucagagugacaugcacagu

SEQ ID NO: 1530290 - RNA, 19 nt, Artificial Sequence
  Description of Artificial Sequence: Synthetic oligonucleotide
gcuuacugcaauagggaca

SEQ ID NO: 1530291 - RNA, 19 nt, Artificial Sequence
  Description of Artificial Sequence: Synthetic oligonucleotide
cuucaacagacacccagcu

SEQ ID NO: 1530292 - RNA, 19 nt, Artificial Sequence
  Description of Artificial Sequence: Synthetic oligonucleotide
uaccuucagugauuccaau

SEQ ID NO: 1530293 - RNA, 19 nt, Artificial Sequence
  Description of Artificial Sequence: Synthetic oligonucleotide
uugcacuccggggagguuu

SEQ ID NO: 1530294 - RNA, 19 nt, Artificial Sequence
  Description of Artificial Sequence: Synthetic oligonucleotide
uucuaccagugaugugggu

SEQ ID NO: 1530295 - RNA, 19 nt, Artificial Sequence
  Description of Artificial Sequence: Synthetic oligonucleotide
augcuaaagucagauucuu

SEQ ID NO: 1530296 - RNA, 19 nt, Artificial Sequence
  Description of Artificial Sequence: Synthetic oligonucleotide
augcccuaaugcaauccug

SEQ ID NO: 1530297 - RNA, 19 nt, Artificial Sequence
  Description of Artificial Sequence: Synthetic oligonucleotide
gccaagaacugacuaugca

SEQ ID NO: 1530298 - RNA, 19 nt, Artificial Sequence
  Description of Artificial Sequence: Synthetic oligonucleotide
guaaucggcuuacugcaau

SEQ ID NO: 1530299 - RNA, 19 nt, Artificial Sequence
  Description of Artificial Sequence: Synthetic oligonucleotide
ggacuauuugacgguauuc

SEQ ID NO: 1530300 - RNA, 19 nt, Artificial Sequence
  Description of Artificial Sequence: Synthetic oligonucleotide
cuggggauuaucacauacu

SEQ ID NO: 1530301 - RNA, 19 nt, Artificial Sequence
  Description of Artificial Sequence: Synthetic oligonucleotide
uuccacaguccaugcuaaa

SEQ ID NO: 1530302 - RNA, 19 nt, Artificial Sequence
  Description of Artificial Sequence: Synthetic oligonucleotide
ccucuauguugauggaaac

SEQ ID NO: 1530303 - RNA, 19 nt, Artificial Sequence
  Description of Artificial Sequence: Synthetic oligonucleotide
cucucgucuacgcuuuaaa

SEQ ID NO: 1530304 - RNA, 19 nt, Artificial Sequence
  Description of Artificial Sequence: Synthetic oligonucleotide
agccacucauauaagcaua

SEQ ID NO: 1530305 - RNA, 19 nt, Artificial Sequence
  Description of Artificial Sequence: Synthetic oligonucleotide
ccauaacaucccagaauac

SEQ ID NO: 1530306 - RNA, 19 nt, Artificial Sequence
  Description of Artificial Sequence: Synthetic oligonucleotide
gacucacuauauugugccu

SEQ ID NO: 1530307 - RNA, 19 nt, Artificial Sequence
  Description of Artificial Sequence: Synthetic oligonucleotide
cauccaccaaggagcucug

SEQ ID NO: 1530308 - RNA, 19 nt, Artificial Sequence
  Description of Artificial Sequence: Synthetic oligonucleotide
gguauucauuaaguuauua

SEQ ID NO: 1530309 - RNA, 19 nt, Artificial Sequence
  Description of Artificial Sequence: Synthetic oligonucleotide
guuggacuauuugacggua

SEQ ID NO: 1530310 - RNA, 19 nt, Artificial Sequence
  Description of Artificial Sequence: Synthetic oligonucleotide
ugcacuccggggagguuuu

SEQ ID NO: 1530311 - RNA, 19 nt, Artificial Sequence
  Description of Artificial Sequence: Synthetic oligonucleotide
cccagcuauaugaguuucc

SEQ ID NO: 1530312 - RNA, 19 nt, Artificial Sequence
  Description of Artificial Sequence: Synthetic oligonucleotide
gcuuucuaccagaagcauc

SEQ ID NO: 1530313 - RNA, 19 nt, Artificial Sequence
  Description of Artificial Sequence: Synthetic oligonucleotide
gacgggcguaacagauucc

SEQ ID NO: 1530314 - RNA, 19 nt, Artificial Sequence
  Description of Artificial Sequence: Synthetic oligonucleotide
guacgagcuggaaaaucaa

SEQ ID NO: 1530315 - RNA, 19 nt, Artificial Sequence
  Description of Artificial Sequence: Synthetic oligonucleotide
guucguauuguaaguccua

SEQ ID NO: 1530316 - RNA, 19 nt, Artificial Sequence
  Description of Artificial Sequence: Synthetic oligonucleotide
uggaaacauuaugcccuaa

SEQ ID NO: 1530317 - RNA, 19 nt, Artificial Sequence
  Description of Artificial Sequence: Synthetic oligonucleotide
gcaugguaggaugccuggg

SEQ ID NO: 1530318 - RNA, 19 nt, Artificial Sequence
  Description of Artificial Sequence: Synthetic oligonucleotide
aacucucgucuacgcuuua

SEQ ID NO: 1530319 - RNA, 19 nt, Artificial Sequence
  Description of Artificial Sequence: Synthetic oligonucleotide
cagccacucauauaagcau

SEQ ID NO: 1530320 - RNA, 19 nt, Artificial Sequence
  Description of Artificial Sequence: Synthetic oligonucleotide
gcacccaugucuucucauc

SEQ ID NO: 1530321 - RNA, 19 nt, Artificial Sequence
  Description of Artificial Sequence: Synthetic oligonucleotide
ugacuccuagggguuuuau

SEQ ID NO: 1530322 - RNA, 19 nt, Artificial Sequence
  Description of Artificial Sequence: Synthetic oligonucleotide
cagaauaccuucagugauu

SEQ ID NO: 1530323 - RNA, 19 nt, Artificial Sequence
  Description of Artificial Sequence: Synthetic oligonucleotide
acguauccacacacacaag

SEQ ID NO: 1530324 - RNA, 19 nt, Artificial Sequence
  Description of Artificial Sequence: Synthetic oligonucleotide
ggcagauguguauaacuau

SEQ ID NO: 1530325 - RNA, 19 nt, Artificial Sequence
  Description of Artificial Sequence: Synthetic oligonucleotide
aguccaugcuaaagucaga

SEQ ID NO: 1530326 - RNA, 19 nt, Artificial Sequence
  Description of Artificial Sequence: Synthetic oligonucleotide
cacccaugucuucucaucu

SEQ ID NO: 1530327 - RNA, 19 nt, Artificial Sequence
  Description of Artificial Sequence: Synthetic oligonucleotide
gcacuauuacagaguacac

SEQ ID NO: 1530328 - RNA, 19 nt, Artificial Sequence
  Description of Artificial Sequence: Synthetic oligonucleotide
ggacguauccacacacaca

SEQ ID NO: 1530329 - RNA, 19 nt, Artificial Sequence
  Description of Artificial Sequence: Synthetic oligonucleotide
cccagugacacugagugaa

SEQ ID NO: 1530330 - RNA, 19 nt, Artificial Sequence
  Description of Artificial Sequence: Synthetic oligonucleotide
ucacuauauugugccuguu

SEQ ID NO: 1530331 - RNA, 19 nt, Artificial Sequence
  Description of Artificial Sequence: Synthetic oligonucleotide
acucucgucuacgcuuuaa

SEQ ID NO: 1530332 - RNA, 19 nt, Artificial Sequence
  Description of Artificial Sequence: Synthetic oligonucleotide
ccagcuauaugaguuucca

SEQ ID NO: 1530333 - RNA, 19 nt, Artificial Sequence
  Description of Artificial Sequence: Synthetic oligonucleotide
cauuaagaugacgggcgua

SEQ ID NO: 1530334 - RNA, 19 nt, Artificial Sequence
  Description of Artificial Sequence: Synthetic oligonucleotide
aaaccucgagaaggcgguu

SEQ ID NO: 1530335 - RNA, 19 nt, Artificial Sequence
  Description of Artificial Sequence: Synthetic oligonucleotide
gaaggcgguuguacacaca

SEQ ID NO: 1530336 - RNA, 19 nt, Artificial Sequence
  Description of Artificial Sequence: Synthetic oligonucleotide
ugguuccagcacccauguc

SEQ ID NO: 1530337 - RNA, 19 nt, Artificial Sequence
  Description of Artificial Sequence: Synthetic oligonucleotide
gucggugcagaaaccucga

SEQ ID NO: 1530338 - RNA, 19 nt, Artificial Sequence
  Description of Artificial Sequence: Synthetic oligonucleotide
caacagacacccagcuaua

SEQ ID NO: 1530339 - RNA, 19 nt, Artificial Sequence
  Description of Artificial Sequence: Synthetic oligonucleotide
uugacuccuagggguuuua

SEQ ID NO: 1530340 - RNA, 19 nt, Artificial Sequence
  Description of Artificial Sequence: Synthetic oligonucleotide
gguaggaugccuggggucu

SEQ ID NO: 1530341 - RNA, 19 nt, Artificial Sequence
  Description of Artificial Sequence: Synthetic oligonucleotide
cacaacucucgucuacgcu

SEQ ID NO: 1530342 - RNA, 19 nt, Artificial Sequence
  Description of Artificial Sequence: Synthetic oligonucleotide
cgucuacgcuuuaaagcag

SEQ ID NO: 1530343 - RNA, 19 nt, Artificial Sequence
  Description of Artificial Sequence: Synthetic oligonucleotide
gcgguuguacacacaacuc

SEQ ID NO: 1530344 - RNA, 19 nt, Artificial Sequence
  Description of Artificial Sequence: Synthetic oligonucleotide
gcucuacaggauacuuugc

SEQ ID NO: 1530345 - RNA, 19 nt, Artificial Sequence
  Description of Artificial Sequence: Synthetic oligonucleotide
ccugcgugcuguugcacuc

SEQ ID NO: 1530346 - RNA, 19 nt, Artificial Sequence
  Description of Artificial Sequence: Synthetic oligonucleotide
ccucagccacucauauaag

SEQ ID NO: 1530347 - RNA, 19 nt, Artificial Sequence
  Description of Artificial Sequence: Synthetic oligonucleotide
augacgggcguaacagauu

SEQ ID NO: 1530348 - RNA, 19 nt, Artificial Sequence
  Description of Artificial Sequence: Synthetic oligonucleotide
cucacuagaucaggagacu

SEQ ID NO: 1530349 - RNA, 19 nt, Artificial Sequence
  Description of Artificial Sequence: Synthetic oligonucleotide
cagugaugugggugucaca

SEQ ID NO: 1530350 - RNA, 19 nt, Artificial Sequence
  Description of Artificial Sequence: Synthetic oligonucleotide
guaugaguauucagauuuu

SEQ ID NO: 1530351 - RNA, 19 nt, Artificial Sequence
  Description of Artificial Sequence: Synthetic oligonucleotide
guuugccuagcuacacagu

SEQ ID NO: 1530352 - RNA, 19 nt, Artificial Sequence
  Description of Artificial Sequence: Synthetic oligonucleotide
guauaacuauggacucacu

SEQ ID NO: 1530353 - RNA, 19 nt, Artificial Sequence
  Description of Artificial Sequence: Synthetic oligonucleotide
cggcuuacugcaauaggga

SEQ ID NO: 1530354 - RNA, 19 nt, Artificial Sequence
  Description of Artificial Sequence: Synthetic oligonucleotide
cuaguuugucucgcuuugu

SEQ ID NO: 1530355 - RNA, 19 nt, Artificial Sequence
  Description of Artificial Sequence: Synthetic oligonucleotide
cuagaucaggagacugcuu

SEQ ID NO: 1530356 - RNA, 19 nt, Artificial Sequence
  Description of Artificial Sequence: Synthetic oligonucleotide
cugugguguccaggaaaca

SEQ ID NO: 1530357 - RNA, 19 nt, Artificial Sequence
  Description of Artificial Sequence: Synthetic oligonucleotide
gugccuguugguacuaguu

SEQ ID NO: 1530358 - RNA, 19 nt, Artificial Sequence
  Description of Artificial Sequence: Synthetic oligonucleotide
cggugcagaaaccucgaga

SEQ ID NO: 1530359 - RNA, 19 nt, Artificial Sequence
  Description of Artificial Sequence: Synthetic oligonucleotide
ggauuaucacauacuugau

SEQ ID NO: 1530360 - RNA, 19 nt, Artificial Sequence
  Description of Artificial Sequence: Synthetic oligonucleotide
ccaaggagcucuguggugu

SEQ ID NO: 1530361 - RNA, 19 nt, Artificial Sequence
  Description of Artificial Sequence: Synthetic oligonucleotide
ccuagggguuuuaucacau

SEQ ID NO: 1530362 - RNA, 19 nt, Artificial Sequence
  Description of Artificial Sequence: Synthetic oligonucleotide
cccuaaugcaauccugcgu

SEQ ID NO: 1530363 - RNA, 19 nt, Artificial Sequence
  Description of Artificial Sequence: Synthetic oligonucleotide
gcguaacagauuccacagu

SEQ ID NO: 1530364 - RNA, 19 nt, Artificial Sequence
  Description of Artificial Sequence: Synthetic oligonucleotide
cuacgcuuuaaagcagcuu

SEQ ID NO: 1530365 - RNA, 19 nt, Artificial Sequence
  Description of Artificial Sequence: Synthetic oligonucleotide
guaggaugccuggggucua

SEQ ID NO: 1530366 - RNA, 19 nt, Artificial Sequence
  Description of Artificial Sequence: Synthetic oligonucleotide
ccauuaagaugacgggcgu

SEQ ID NO: 1530367 - RNA, 19 nt, Artificial Sequence
  Description of Artificial Sequence: Synthetic oligonucleotide
cgggcguaacagauuccac

SEQ ID NO: 1530368 - RNA, 19 nt, Artificial Sequence
  Description of Artificial Sequence: Synthetic oligonucleotide
ggucuaccucuauguugau

SEQ ID NO: 1530369 - RNA, 19 nt, Artificial Sequence
  Description of Artificial Sequence: Synthetic oligonucleotide
cgguauucauuaaguuauu

SEQ ID NO: 1530370 - RNA, 19 nt, Artificial Sequence
  Description of Artificial Sequence: Synthetic oligonucleotide
ccucgagaaggcgguugua

SEQ ID NO: 1530371 - RNA, 19 nt, Artificial Sequence
  Description of Artificial Sequence: Synthetic oligonucleotide
  modified_base (3)..(3): a, c, u, g, unknown or other
uunuuuauuauuauaaaag

SEQ ID NO: 1530372 - RNA, 19 nt, Artificial Sequence
  Description of Artificial Sequence: Synthetic oligonucleotide
aaaguuaaaaggcuguugc

SEQ ID NO: 1530373 - RNA, 19 nt, Artificial Sequence
  Description of Artificial Sequence: Synthetic oligonucleotide
aaguaugacaaacaguggc

SEQ ID NO: 1530374 - RNA, 19 nt, Artificial Sequence
  Description of Artificial Sequence: Synthetic oligonucleotide
ucuaauucggccuugagag

SEQ ID NO: 1530375 - RNA, 19 nt, Artificial Sequence
  Description of Artificial Sequence: Synthetic oligonucleotide
uuuagaucaaagauagugg

SEQ ID NO: 1530376 - RNA, 19 nt, Artificial Sequence
  Description of Artificial Sequence: Synthetic oligonucleotide
agaaacacgauugacauac

SEQ ID NO: 1530377 - RNA, 19 nt, Artificial Sequence
  Description of Artificial Sequence: Synthetic oligonucleotide
uuguaacucauuuagauca

SEQ ID NO: 1530378 - RNA, 19 nt, Artificial Sequence
  Description of Artificial Sequence: Synthetic oligonucleotide
  modified_base (5)..(5): a, c, u, g, unknown or other
aaacncaauaggcugggac

SEQ ID NO: 1530379 - RNA, 19 nt, Artificial Sequence
  Description of Artificial Sequence: Synthetic oligonucleotide
  modified_base (2)..(2): a, c, u, g, unknown or other
unuuuauuauuauaaaagu

SEQ ID NO: 1530380 - RNA, 19 nt, Artificial Sequence
  Description of Artificial Sequence: Synthetic oligonucleotide
agguaaacaaaguagggag

SEQ ID NO: 1530381 - RNA, 19 nt, Artificial Sequence
  Description of Artificial Sequence: Synthetic oligonucleotide
  modified_base (4)..(4): a, c, u, g, unknown or other
aacncaauaggcugggacu

SEQ ID NO: 1530382 - RNA, 19 nt, Artificial Sequence
  Description of Artificial Sequence: Synthetic oligonucleotide
uguaacugaggcuucuugg

SEQ ID NO: 1530383 - RNA, 19 nt, Artificial Sequence
  Description of Artificial Sequence: Synthetic oligonucleotide
uaaaccaccagagagcucc

SEQ ID NO: 1530384 - RNA, 19 nt, Artificial Sequence
  Description of Artificial Sequence: Synthetic oligonucleotide
ggaauaaaccaccagagag

SEQ ID NO: 1530385 - RNA, 19 nt, Artificial Sequence
  Description of Artificial Sequence: Synthetic oligonucleotide
uugccuaccaucaccaggg

SEQ ID NO: 1530386 - RNA, 19 nt, Artificial Sequence
  Description of Artificial Sequence: Synthetic oligonucleotide
uccgguucggaucagauca

SEQ ID NO: 1530387 - RNA, 19 nt, Artificial Sequence
  Description of Artificial Sequence: Synthetic oligonucleotide
aagaagagaaguacacugc

SEQ ID NO: 1530388 - RNA, 19 nt, Artificial Sequence
  Description of Artificial Sequence: Synthetic oligonucleotide
gaucaaagauaguggaagg

SEQ ID NO: 1530389 - RNA, 19 nt, Artificial Sequence
  Description of Artificial Sequence: Synthetic oligonucleotide
acucauuuagaucaaagau

SEQ ID NO: 1530390 - RNA, 19 nt, Artificial Sequence
  Description of Artificial Sequence: Synthetic oligonucleotide
ucuuguaacucauuuagau

SEQ ID NO: 1530391 - RNA, 19 nt, Artificial Sequence
  Description of Artificial Sequence: Synthetic oligonucleotide
agaucaaagauaguggaag

SEQ ID NO: 1530392 - RNA, 19 nt, Artificial Sequence
  Description of Artificial Sequence: Synthetic oligonucleotide
uaaaugugguguaacugag

SEQ ID NO: 1530393 - RNA, 19 nt, Artificial Sequence
  Description of Artificial Sequence: Synthetic oligonucleotide
caaagauaguggaaggugc

SEQ ID NO: 1530394 - RNA, 19 nt, Artificial Sequence
  Description of Artificial Sequence: Synthetic oligonucleotide
aaaaguuaaaaggcuguug

SEQ ID NO: 1530395 - RNA, 19 nt, Artificial Sequence
  Description of Artificial Sequence: Synthetic oligonucleotide
aauuuaggucuuguaacuc

SEQ ID NO: 1530396 - RNA, 19 nt, Artificial Sequence
  Description of Artificial Sequence: Synthetic oligonucleotide
ucggaucagaucauaaaug

SEQ ID NO: 1530397 - RNA, 19 nt, Artificial Sequence
  Description of Artificial Sequence: Synthetic oligonucleotide
caagguaaacaaaguaggg

SEQ ID NO: 1530398 - RNA, 19 nt, Artificial Sequence
  Description of Artificial Sequence: Synthetic oligonucleotide
gaauaaaccaccagagagc

SEQ ID NO: 1530399 - RNA, 19 nt, Artificial Sequence
  Description of Artificial Sequence: Synthetic oligonucleotide
gauuauagacaugauggug

SEQ ID NO: 1530400 - RNA, 19 nt, Artificial Sequence
  Description of Artificial Sequence: Synthetic oligonucleotide
agauggaauaucuccgggg

SEQ ID NO: 1530401 - RNA, 19 nt, Artificial Sequence
  Description of Artificial Sequence: Synthetic oligonucleotide
agugggguacagcucagcc

SEQ ID NO: 1530402 - RNA, 19 nt, Artificial Sequence
  Description of Artificial Sequence: Synthetic oligonucleotide
ucaaagauaguggaaggug

SEQ ID NO: 1530403 - RNA, 19 nt, Artificial Sequence
  Description of Artificial Sequence: Synthetic oligonucleotide
agagauggaauaucuccgg

SEQ ID NO: 1530404 - RNA, 19 nt, Artificial Sequence
  Description of Artificial Sequence: Synthetic oligonucleotide
cagagauggaauaucuccg

SEQ ID NO: 1530405 - RNA, 19 nt, Artificial Sequence
  Description of Artificial Sequence: Synthetic oligonucleotide
aaggcaacggugcuccggg

SEQ ID NO: 1530406 - RNA, 19 nt, Artificial Sequence
  Description of Artificial Sequence: Synthetic oligonucleotide
aaacacgauugacauacca

SEQ ID NO: 1530407 - RNA, 19 nt, Artificial Sequence
  Description of Artificial Sequence: Synthetic oligonucleotide
acgucuuugcuguacuccc

SEQ ID NO: 1530408 - RNA, 19 nt, Artificial Sequence
  Description of Artificial Sequence: Synthetic oligonucleotide
auaccauugaagccauugg

SEQ ID NO: 1530409 - RNA, 19 nt, Artificial Sequence
  Description of Artificial Sequence: Synthetic oligonucleotide
  modified_base (11)..(11): a, c, u, g, unknown or other
caggccaaacncaauaggc

SEQ ID NO: 1530410 - RNA, 19 nt, Artificial Sequence
  Description of Artificial Sequence: Synthetic oligonucleotide
cacucggucacgauggugg

SEQ ID NO: 1530411 - RNA, 19 nt, Artificial Sequence
  Description of Artificial Sequence: Synthetic oligonucleotide
cacggugucaggcacaagg

SEQ ID NO: 1530412 - RNA, 19 nt, Artificial Sequence
  Description of Artificial Sequence: Synthetic oligonucleotide
auaggcugggacuucgaac

SEQ ID NO: 1530413 - RNA, 19 nt, Artificial Sequence
  Description of Artificial Sequence: Synthetic oligonucleotide
uuagcaucuggucaauggu

SEQ ID NO: 1530414 - RNA, 19 nt, Artificial Sequence
  Description of Artificial Sequence: Synthetic oligonucleotide
aaguagggagacaggauac

SEQ ID NO: 1530415 - RNA, 19 nt, Artificial Sequence
  Description of Artificial Sequence: Synthetic oligonucleotide
ucuagguccacauccacuc

SEQ ID NO: 1530416 - RNA, 19 nt, Artificial Sequence
  Description of Artificial Sequence: Synthetic oligonucleotide
uucaggaauaaaccaccag

SEQ ID NO: 1530417 - RNA, 19 nt, Artificial Sequence
  Description of Artificial Sequence: Synthetic oligonucleotide
aucauaaaugugguguaac

SEQ ID NO: 1530418 - RNA, 19 nt, Artificial Sequence
  Description of Artificial Sequence: Synthetic oligonucleotide
gauauuccgguucggauca

SEQ ID NO: 1530419 - RNA, 19 nt, Artificial Sequence
  Description of Artificial Sequence: Synthetic oligonucleotide
ugggguacagcucagccgu

SEQ ID NO: 1530420 - RNA, 19 nt, Artificial Sequence
  Description of Artificial Sequence: Synthetic oligonucleotide
ugauauuccgguucggauc

SEQ ID NO: 1530421 - RNA, 19 nt, Artificial Sequence
  Description of Artificial Sequence: Synthetic oligonucleotide
gauccuuagcaucugguca

SEQ ID NO: 1530422 - RNA, 19 nt, Artificial Sequence
  Description of Artificial Sequence: Synthetic oligonucleotide
cuuguaacucauuuagauc

SEQ ID NO: 1530423 - RNA, 19 nt, Artificial Sequence
  Description of Artificial Sequence: Synthetic oligonucleotide
aacaaucccauugguuugg

SEQ ID NO: 1530424 - RNA, 19 nt, Artificial Sequence
  Description of Artificial Sequence: Synthetic oligonucleotide
auaaaaguuaaaaggcugu

SEQ ID NO: 1530425 - RNA, 19 nt, Artificial Sequence
  Description of Artificial Sequence: Synthetic oligonucleotide
gcagagauggaauaucucc

SEQ ID NO: 1530426 - RNA, 19 nt, Artificial Sequence
  Description of Artificial Sequence: Synthetic oligonucleotide
uccaacgggauacuguggu

SEQ ID NO: 1530427 - RNA, 19 nt, Artificial Sequence
  Description of Artificial Sequence: Synthetic oligonucleotide
gauccugauauuccgguuc

SEQ ID NO: 1530428 - RNA, 19 nt, Artificial Sequence
  Description of Artificial Sequence: Synthetic oligonucleotide
aauaucuccggggcaagug

SEQ ID NO: 1530429 - RNA, 19 nt, Artificial Sequence
  Description of Artificial Sequence: Synthetic oligonucleotide
aacaauucugaaggcacca

SEQ ID NO: 1530430 - RNA, 19 nt, Artificial Sequence
  Description of Artificial Sequence: Synthetic oligonucleotide
cuaccauccuuuuagcauc

SEQ ID NO: 1530431 - RNA, 19 nt, Artificial Sequence
  Description of Artificial Sequence: Synthetic oligonucleotide
uagaucaaagauaguggaa

SEQ ID NO: 1530432 - RNA, 19 nt, Artificial Sequence
  Description of Artificial Sequence: Synthetic oligonucleotide
ggagcugaccccuacaccc

SEQ ID NO: 1530433 - RNA, 19 nt, Artificial Sequence
  Description of Artificial Sequence: Synthetic oligonucleotide
gauguaaggcagguagcgg

SEQ ID NO: 1530434 - RNA, 19 nt, Artificial Sequence
  Description of Artificial Sequence: Synthetic oligonucleotide
uccuucgucuccaacggga

SEQ ID NO: 1530435 - RNA, 19 nt, Artificial Sequence
  Description of Artificial Sequence: Synthetic oligonucleotide
gaauaggcagaggugauuc

SEQ ID NO: 1530436 - RNA, 19 nt, Artificial Sequence
  Description of Artificial Sequence: Synthetic oligonucleotide
ucgagguucacggugucag

SEQ ID NO: 1530437 - RNA, 19 nt, Artificial Sequence
  Description of Artificial Sequence: Synthetic oligonucleotide
uccuuugauccuuagcauc

SEQ ID NO: 1530438 - RNA, 19 nt, Artificial Sequence
  Description of Artificial Sequence: Synthetic oligonucleotide
gaggugauuccaaacuugc

SEQ ID NO: 1530439 - RNA, 19 nt, Artificial Sequence
  Description of Artificial Sequence: Synthetic oligonucleotide
ugugguugcgccacgcgcu

SEQ ID NO: 1530440 - RNA, 19 nt, Artificial Sequence
  Description of Artificial Sequence: Synthetic oligonucleotide
uucgucuccaacgggauac

SEQ ID NO: 1530441 - RNA, 19 nt, Artificial Sequence
  Description of Artificial Sequence: Synthetic oligonucleotide
gguaguagacauauaaaac

SEQ ID NO: 1530442 - RNA, 19 nt, Artificial Sequence
  Description of Artificial Sequence: Synthetic oligonucleotide
acgauugacauaccauuga

SEQ ID NO: 1530443 - RNA, 19 nt, Artificial Sequence
  Description of Artificial Sequence: Synthetic oligonucleotide
acguagaccauggaauagg

SEQ ID NO: 1530444 - RNA, 19 nt, Artificial Sequence
  Description of Artificial Sequence: Synthetic oligonucleotide
guaugacaaacaguggcag

SEQ ID NO: 1530445 - RNA, 19 nt, Artificial Sequence
  Description of Artificial Sequence: Synthetic oligonucleotide
aguaugacaaacaguggca

SEQ ID NO: 1530446 - RNA, 19 nt, Artificial Sequence
  Description of Artificial Sequence: Synthetic oligonucleotide
gaaguacacugccacccag

SEQ ID NO: 1530447 - RNA, 19 nt, Artificial Sequence
  Description of Artificial Sequence: Synthetic oligonucleotide
agcucagccguguacacgu

SEQ ID NO: 1530448 - RNA, 19 nt, Artificial Sequence
  Description of Artificial Sequence: Synthetic oligonucleotide
uguaacucauuuagaucaa

SEQ ID NO: 1530449 - RNA, 19 nt, Artificial Sequence
  Description of Artificial Sequence: Synthetic oligonucleotide
uaggcaccaagguaaacaa

SEQ ID NO: 1530450 - RNA, 19 nt, Artificial Sequence
  Description of Artificial Sequence: Synthetic oligonucleotide
uaauucggccuugagagau

SEQ ID NO: 1530451 - RNA, 19 nt, Artificial Sequence
  Description of Artificial Sequence: Synthetic oligonucleotide
auccuuuuagcauccuugu

SEQ ID NO: 1530452 - RNA, 19 nt, Artificial Sequence
  Description of Artificial Sequence: Synthetic oligonucleotide
uugagagaugagccaucgg

SEQ ID NO: 1530453 - RNA, 19 nt, Artificial Sequence
  Description of Artificial Sequence: Synthetic oligonucleotide
agguagcggucauaggcac

SEQ ID NO: 1530454 - RNA, 19 nt, Artificial Sequence
  Description of Artificial Sequence: Synthetic oligonucleotide
ggugaaugggccuuuccag

SEQ ID NO: 1530455 - RNA, 19 nt, Artificial Sequence
  Description of Artificial Sequence: Synthetic oligonucleotide
uguugggcuuucuucuacc

SEQ ID NO: 1530456 - RNA, 19 nt, Artificial Sequence
  Description of Artificial Sequence: Synthetic oligonucleotide
gacgucuuugcuguacucc

SEQ ID NO: 1530457 - RNA, 19 nt, Artificial Sequence
  Description of Artificial Sequence: Synthetic oligonucleotide
ucucuaauucggccuugag

SEQ ID NO: 1530458 - RNA, 19 nt, Artificial Sequence
  Description of Artificial Sequence: Synthetic oligonucleotide
ucagccguguacacguaga

SEQ ID NO: 1530459 - RNA, 19 nt, Artificial Sequence
  Description of Artificial Sequence: Synthetic oligonucleotide
cacaaggcaacggugcucc

SEQ ID NO: 1530460 - RNA, 19 nt, Artificial Sequence
  Description of Artificial Sequence: Synthetic oligonucleotide
ggguaguagacauauaaaa

SEQ ID NO: 1530461 - RNA, 19 nt, Artificial Sequence
  Description of Artificial Sequence: Synthetic oligonucleotide
agaucauaaauguggugua

SEQ ID NO: 1530462 - RNA, 19 nt, Artificial Sequence
  Description of Artificial Sequence: Synthetic oligonucleotide
ucguagucccgcaugcugu

SEQ ID NO: 1530463 - RNA, 19 nt, Artificial Sequence
  Description of Artificial Sequence: Synthetic oligonucleotide
caggguaguagacauauaa

SEQ ID NO: 1530464 - RNA, 19 nt, Artificial Sequence
  Description of Artificial Sequence: Synthetic oligonucleotide
aucaaagauaguggaaggu

SEQ ID NO: 1530465 - RNA, 19 nt, Artificial Sequence
  Description of Artificial Sequence: Synthetic oligonucleotide
  modified_base (9)..(9): a, c, u, g, unknown or other
ggccaaacncaauaggcug

SEQ ID NO: 1530466 - RNA, 19 nt, Artificial Sequence
  Description of Artificial Sequence: Synthetic oligonucleotide
ucgucguagucccgcaugc

SEQ ID NO: 1530467 - RNA, 19 nt, Artificial Sequence
  Description of Artificial Sequence: Synthetic oligonucleotide
uggccagucgguagcggcg

SEQ ID NO: 1530468 - RNA, 19 nt, Artificial Sequence
  Description of Artificial Sequence: Synthetic oligonucleotide
caaagcggagaaguuggcg

SEQ ID NO: 1530469 - RNA, 19 nt, Artificial Sequence
  Description of Artificial Sequence: Synthetic oligonucleotide
cucuaauucggccuugaga

SEQ ID NO: 1530470 - RNA, 19 nt, Artificial Sequence
  Description of Artificial Sequence: Synthetic oligonucleotide
acucggucacgaugguggc

SEQ ID NO: 1530471 - RNA, 19 nt, Artificial Sequence
  Description of Artificial Sequence: Synthetic oligonucleotide
uaccauccuuuuagcaucc

SEQ ID NO: 1530472 - RNA, 19 nt, Artificial Sequence
  Description of Artificial Sequence: Synthetic oligonucleotide
cccaaagcggagaaguugg

SEQ ID NO: 1530473 - RNA, 19 nt, Artificial Sequence
  Description of Artificial Sequence: Synthetic oligonucleotide
cacgaugguggccuggaag

SEQ ID NO: 1530474 - RNA, 19 nt, Artificial Sequence
  Description of Artificial Sequence: Synthetic oligonucleotide
ggggauucaggaauaaacc

SEQ ID NO: 1530475 - RNA, 19 nt, Artificial Sequence
  Description of Artificial Sequence: Synthetic oligonucleotide
agccguguacacguagacc

SEQ ID NO: 1530476 - RNA, 19 nt, Artificial Sequence
  Description of Artificial Sequence: Synthetic oligonucleotide
uaucuccggggcaagugcu

SEQ ID NO: 1530477 - RNA, 19 nt, Artificial Sequence
  Description of Artificial Sequence: Synthetic oligonucleotide
cuucgaacagccgccacag

SEQ ID NO: 1530478 - RNA, 19 nt, Artificial Sequence
  Description of Artificial Sequence: Synthetic oligonucleotide
aagcggagaaguuggcgau

SEQ ID NO: 1530479 - RNA, 19 nt, Artificial Sequence
  Description of Artificial Sequence: Synthetic oligonucleotide
ugcucgagguucacggugu

SEQ ID NO: 1530480 - RNA, 19 nt, Artificial Sequence
  Description of Artificial Sequence: Synthetic oligonucleotide
ggucaauggugucugggag

SEQ ID NO: 1530481 - RNA, 19 nt, Artificial Sequence
  Description of Artificial Sequence: Synthetic oligonucleotide
gccguguacacguagacca

SEQ ID NO: 1530482 - RNA, 19 nt, Artificial Sequence
  Description of Artificial Sequence: Synthetic oligonucleotide
uuuuaggacuguugggcuu

SEQ ID NO: 1530483 - RNA, 19 nt, Artificial Sequence
  Description of Artificial Sequence: Synthetic oligonucleotide
accuguaguccguccuucg

SEQ ID NO: 1530484 - RNA, 19 nt, Artificial Sequence
  Description of Artificial Sequence: Synthetic oligonucleotide
gucguagucccgcaugcug

SEQ ID NO: 1530485 - RNA, 19 nt, Artificial Sequence
  Description of Artificial Sequence: Synthetic oligonucleotide
uaguccguccuucgucucc

SEQ ID NO: 1530486 - RNA, 19 nt, Artificial Sequence
  Description of Artificial Sequence: Synthetic oligonucleotide
gaagacgucuuugcuguac

SEQ ID NO: 1530487 - RNA, 19 nt, Artificial Sequence
  Description of Artificial Sequence: Synthetic oligonucleotide
cugccucucuaauucggcc

SEQ ID NO: 1530488 - RNA, 19 nt, Artificial Sequence
  Description of Artificial Sequence: Synthetic oligonucleotide
uccaaucucugaugaagua

SEQ ID NO: 1530489 - RNA, 19 nt, Artificial Sequence
  Description of Artificial Sequence: Synthetic oligonucleotide
caaacuugccuaccaucac

SEQ ID NO: 1530490 - RNA, 19 nt, Artificial Sequence
  Description of Artificial Sequence: Synthetic oligonucleotide
auggaauaucuccggggca

SEQ ID NO: 1530491 - RNA, 19 nt, Artificial Sequence
  Description of Artificial Sequence: Synthetic oligonucleotide
uugcgccacgcgcugcucg

SEQ ID NO: 1530492 - RNA, 19 nt, Artificial Sequence
  Description of Artificial Sequence: Synthetic oligonucleotide
ugcggaugaucaccucugc

SEQ ID NO: 1530493 - RNA, 19 nt, Artificial Sequence
  Description of Artificial Sequence: Synthetic oligonucleotide
ggcgaugguggccagucgg

SEQ ID NO: 1530494 - RNA, 19 nt, Artificial Sequence
  Description of Artificial Sequence: Synthetic oligonucleotide
agcagagauggaauaucuc

SEQ ID NO: 1530495 - RNA, 19 nt, Artificial Sequence
  Description of Artificial Sequence: Synthetic oligonucleotide
gucaauggugucugggaga

SEQ ID NO: 1530496 - RNA, 19 nt, Artificial Sequence
  Description of Artificial Sequence: Synthetic oligonucleotide
agcggucauaggcaccaag

SEQ ID NO: 1530497 - RNA, 19 nt, Artificial Sequence
  Description of Artificial Sequence: Synthetic oligonucleotide
uaaggauagcugucaggau

SEQ ID NO: 1530498 - RNA, 19 nt, Artificial Sequence
  Description of Artificial Sequence: Synthetic oligonucleotide
uuagcauccuugucugguu

SEQ ID NO: 1530499 - RNA, 19 nt, Artificial Sequence
  Description of Artificial Sequence: Synthetic oligonucleotide
cccgccagaaacacgauug

SEQ ID NO: 1530500 - RNA, 19 nt, Artificial Sequence
  Description of Artificial Sequence: Synthetic oligonucleotide
cuguaguccguccuucguc

SEQ ID NO: 1530501 - RNA, 19 nt, Artificial Sequence
  Description of Artificial Sequence: Synthetic oligonucleotide
cuccaacgggauacugugg

SEQ ID NO: 1530502 - RNA, 19 nt, Artificial Sequence
  Description of Artificial Sequence: Synthetic oligonucleotide
gaucauaaaugugguguaa

SEQ ID NO: 1530503 - RNA, 19 nt, Artificial Sequence
  Description of Artificial Sequence: Synthetic oligonucleotide
  modified_base (8)..(8): a, c, u, g, unknown or other
gccaaacncaauaggcugg

SEQ ID NO: 1530504 - RNA, 19 nt, Artificial Sequence
  Description of Artificial Sequence: Synthetic oligonucleotide
ccaugaggauguaaggcag

SEQ ID NO: 1530505 - RNA, 19 nt, Artificial Sequence
  Description of Artificial Sequence: Synthetic oligonucleotide
acacaccaggucccacucg

SEQ ID NO: 1530506 - RNA, 19 nt, Artificial Sequence
  Description of Artificial Sequence: Synthetic oligonucleotide
guuuuauuccuuugauccu

SEQ ID NO: 1530507 - RNA, 19 nt, Artificial Sequence
  Description of Artificial Sequence: Synthetic oligonucleotide
agguucacggugucaggca

SEQ ID NO: 1530508 - RNA, 19 nt, Artificial Sequence
  Description of Artificial Sequence: Synthetic oligonucleotide
cugcucgagguucacggug

SEQ ID NO: 1530509 - RNA, 19 nt, Artificial Sequence
  Description of Artificial Sequence: Synthetic oligonucleotide
cagguagcggucauaggca

SEQ ID NO: 1530510 - RNA, 19 nt, Artificial Sequence
  Description of Artificial Sequence: Synthetic oligonucleotide
cacguagaccauggaauag

SEQ ID NO: 1530511 - RNA, 19 nt, Artificial Sequence
  Description of Artificial Sequence: Synthetic oligonucleotide
agucgguagcggcggcagc

SEQ ID NO: 1530512 - RNA, 19 nt, Artificial Sequence
  Description of Artificial Sequence: Synthetic oligonucleotide
cucagccguguacacguag

SEQ ID NO: 1530513 - RNA, 19 nt, Artificial Sequence
  Description of Artificial Sequence: Synthetic oligonucleotide
  modified_base (3)..(3): a, c, u, g, unknown or other
acncaauaggcugggacuu

SEQ ID NO: 1530514 - RNA, 19 nt, Artificial Sequence
  Description of Artificial Sequence: Synthetic oligonucleotide
aauucggccuugagagaug

SEQ ID NO: 1530515 - RNA, 19 nt, Artificial Sequence
  Description of Artificial Sequence: Synthetic oligonucleotide
gcuggcgcugaguaggaag

SEQ ID NO: 1530516 - RNA, 19 nt, Artificial Sequence
  Description of Artificial Sequence: Synthetic oligonucleotide
  modified_base (7)..(7): a, c, u, g, unknown or other
ccaaacncaauaggcuggg

SEQ ID NO: 1530517 - RNA, 19 nt, Artificial Sequence
  Description of Artificial Sequence: Synthetic oligonucleotide
ggaucagaucauaaaugug

SEQ ID NO: 1530518 - RNA, 19 nt, Artificial Sequence
  Description of Artificial Sequence: Synthetic oligonucleotide
cuguugggcuuucuucuac

SEQ ID NO: 1530519 - RNA, 19 nt, Artificial Sequence
  Description of Artificial Sequence: Synthetic oligonucleotide
aguagggagacaggauacu

SEQ ID NO: 1530520 - RNA, 19 nt, Artificial Sequence
  Description of Artificial Sequence: Synthetic oligonucleotide
gcggucauaggcaccaagg

SEQ ID NO: 1530521 - RNA, 19 nt, Artificial Sequence
  Description of Artificial Sequence: Synthetic oligonucleotide
caccaagguaaacaaagua

SEQ ID NO: 1530522 - RNA, 19 nt, Artificial Sequence
  Description of Artificial Sequence: Synthetic oligonucleotide
auaguggaaggugcaacaa

SEQ ID NO: 1530523 - RNA, 19 nt, Artificial Sequence
  Description of Artificial Sequence: Synthetic oligonucleotide
  modified_base (12)..(12): a, c, u, g, unknown or other
ccaggccaaacncaauagg

SEQ ID NO: 1530524 - RNA, 19 nt, Artificial Sequence
  Description of Artificial Sequence: Synthetic oligonucleotide
cuggcgcugaguaggaaga

SEQ ID NO: 1530525 - RNA, 19 nt, Artificial Sequence
  Description of Artificial Sequence: Synthetic oligonucleotide
aggguaguagacauauaaa

SEQ ID NO: 1530526 - RNA, 19 nt, Artificial Sequence
  Description of Artificial Sequence: Synthetic oligonucleotide
auacugugguugcgccacg

SEQ ID NO: 1530527 - RNA, 19 nt, Artificial Sequence
  Description of Artificial Sequence: Synthetic oligonucleotide
uccugauauuccgguucgg

SEQ ID NO: 1530528 - RNA, 19 nt, Artificial Sequence
  Description of Artificial Sequence: Synthetic oligonucleotide
gaaacacgauugacauacc

SEQ ID NO: 1530529 - RNA, 19 nt, Artificial Sequence
  Description of Artificial Sequence: Synthetic oligonucleotide
guacucccagccauccagg

SEQ ID NO: 1530530 - RNA, 19 nt, Artificial Sequence
  Description of Artificial Sequence: Synthetic oligonucleotide
uucacggugucaggcacaa

SEQ ID NO: 1530531 - RNA, 19 nt, Artificial Sequence
  Description of Artificial Sequence: Synthetic oligonucleotide
aggacuguugggcuuucuu

SEQ ID NO: 1530532 - RNA, 19 nt, Artificial Sequence
  Description of Artificial Sequence: Synthetic oligonucleotide
cacauccacucccgguucc

SEQ ID NO: 1530533 - RNA, 19 nt, Artificial Sequence
  Description of Artificial Sequence: Synthetic oligonucleotide
uauuccgguucggaucaga

SEQ ID NO: 1530534 - RNA, 19 nt, Artificial Sequence
  Description of Artificial Sequence: Synthetic oligonucleotide
gaccccuacacccauguuu

SEQ ID NO: 1530535 - RNA, 19 nt, Artificial Sequence
  Description of Artificial Sequence: Synthetic oligonucleotide
auacugccaaggcgggaug

SEQ ID NO: 1530536 - RNA, 19 nt, Artificial Sequence
  Description of Artificial Sequence: Synthetic oligonucleotide
aaggcgggaugcggugugg

SEQ ID NO: 1530537 - RNA, 19 nt, Artificial Sequence
  Description of Artificial Sequence: Synthetic oligonucleotide
cacagcaccccuggcacag

SEQ ID NO: 1530538 - RNA, 19 nt, Artificial Sequence
  Description of Artificial Sequence: Synthetic oligonucleotide
guccccgccagaaacacga

SEQ ID NO: 1530539 - RNA, 19 nt, Artificial Sequence
  Description of Artificial Sequence: Synthetic oligonucleotide
agucccgcaugcuguccuc

SEQ ID NO: 1530540 - RNA, 19 nt, Artificial Sequence
  Description of Artificial Sequence: Synthetic oligonucleotide
auucggccuugagagauga

SEQ ID NO: 1530541 - RNA, 19 nt, Artificial Sequence
  Description of Artificial Sequence: Synthetic oligonucleotide
cuaauucggccuugagaga

SEQ ID NO: 1530542 - RNA, 19 nt, Artificial Sequence
  Description of Artificial Sequence: Synthetic oligonucleotide
guccuucgucuccaacggg

SEQ ID NO: 1530543 - RNA, 19 nt, Artificial Sequence
  Description of Artificial Sequence: Synthetic oligonucleotide
cugggacuucgaacagccg

SEQ ID NO: 1530544 - RNA, 19 nt, Artificial Sequence
  Description of Artificial Sequence: Synthetic oligonucleotide
cagccguguacacguagac

SEQ ID NO: 1530545 - RNA, 19 nt, Artificial Sequence
  Description of Artificial Sequence: Synthetic oligonucleotide
gguucacggugucaggcac

SEQ ID NO: 1530546 - RNA, 19 nt, Artificial Sequence
  Description of Artificial Sequence: Synthetic oligonucleotide
uacugugguugcgccacgc

SEQ ID NO: 1530547 - RNA, 19 nt, Artificial Sequence
  Description of Artificial Sequence: Synthetic oligonucleotide
gggacuucgaacagccgcc

SEQ ID NO: 1530548 - RNA, 19 nt, Artificial Sequence
  Description of Artificial Sequence: Synthetic oligonucleotide
acaaggcaacggugcuccg

SEQ ID NO: 1530549 - RNA, 19 nt, Artificial Sequence
  Description of Artificial Sequence: Synthetic oligonucleotide
agccgccacaggauuauag

SEQ ID NO: 1530550 - RNA, 19 nt, Artificial Sequence
  Description of Artificial Sequence: Synthetic oligonucleotide
auaaaccaccagagagcuc

SEQ ID NO: 1530551 - RNA, 19 nt, Artificial Sequence
  Description of Artificial Sequence: Synthetic oligonucleotide
gacuucgaacagccgccac

SEQ ID NO: 1530552 - RNA, 19 nt, Artificial Sequence
  Description of Artificial Sequence: Synthetic oligonucleotide
gcggugugggagcugaccc

SEQ ID NO: 1530553 - RNA, 19 nt, Artificial Sequence
  Description of Artificial Sequence: Synthetic oligonucleotide
accauggaauaggcagagg

SEQ ID NO: 1530554 - RNA, 19 nt, Artificial Sequence
  Description of Artificial Sequence: Synthetic oligonucleotide
cacucccgguuccagcccc

SEQ ID NO: 1530555 - RNA, 19 nt, Artificial Sequence
  Description of Artificial Sequence: Synthetic oligonucleotide
caggauggucagacuuccc

SEQ ID NO: 1530556 - RNA, 19 nt, Artificial Sequence
  Description of Artificial Sequence: Synthetic oligonucleotide
guagaccauggaauaggca

SEQ ID NO: 1530557 - RNA, 19 nt, Artificial Sequence
  Description of Artificial Sequence: Synthetic oligonucleotide
cgcugcucgagguucacgg

SEQ ID NO: 1530558 - RNA, 19 nt, Artificial Sequence
  Description of Artificial Sequence: Synthetic oligonucleotide
cagcagagauggaauaucu

SEQ ID NO: 1530559 - RNA, 19 nt, Artificial Sequence
  Description of Artificial Sequence: Synthetic oligonucleotide
ugaggauguaaggcaggua

SEQ ID NO: 1530560 - RNA, 19 nt, Artificial Sequence
  Description of Artificial Sequence: Synthetic oligonucleotide
ugcgccacgcgcugcucga

SEQ ID NO: 1530561 - RNA, 19 nt, Artificial Sequence
  Description of Artificial Sequence: Synthetic oligonucleotide
ccuacacccauguuucuca

SEQ ID NO: 1530562 - RNA, 19 nt, Artificial Sequence
  Description of Artificial Sequence: Synthetic oligonucleotide
cauaggcaccaagguaaac

SEQ ID NO: 1530563 - RNA, 19 nt, Artificial Sequence
  Description of Artificial Sequence: Synthetic oligonucleotide
caccucgucguagucccgc

SEQ ID NO: 1530564 - RNA, 19 nt, Artificial Sequence
  Description of Artificial Sequence: Synthetic oligonucleotide
auuccgguucggaucagau

SEQ ID NO: 1530565 - RNA, 19 nt, Artificial Sequence
  Description of Artificial Sequence: Synthetic oligonucleotide
cugauauuccgguucggau

SEQ ID NO: 1530566 - RNA, 19 nt, Artificial Sequence
  Description of Artificial Sequence: Synthetic oligonucleotide
cguccuucgucuccaacgg

SEQ ID NO: 1530567 - RNA, 19 nt, Artificial Sequence
  Description of Artificial Sequence: Synthetic oligonucleotide
aggcaacggugcuccgggg

SEQ ID NO: 1530568 - RNA, 19 nt, Artificial Sequence
  Description of Artificial Sequence: Synthetic oligonucleotide
gcggaugaucaccucugcc

SEQ ID NO: 1530569 - RNA, 19 nt, Artificial Sequence
  Description of Artificial Sequence: Synthetic oligonucleotide
aguccguccuucgucucca

SEQ ID NO: 1530570 - RNA, 19 nt, Artificial Sequence
  Description of Artificial Sequence: Synthetic oligonucleotide
guaaggcagguagcgguca

SEQ ID NO: 1530571 - RNA, 19 nt, Artificial Sequence
  Description of Artificial Sequence: Synthetic oligonucleotide
gugguugcgccacgcgcug

SEQ ID NO: 1530572 - RNA, 19 nt, Artificial Sequence
  Description of Artificial Sequence: Synthetic oligonucleotide
aacagccgccacaggauua

SEQ ID NO: 1530573 - RNA, 19 nt, Artificial Sequence
  Description of Artificial Sequence: Synthetic oligonucleotide
  modified_base (2)..(2): a, c, u, g, unknown or other
cncaauaggcugggacuuc

SEQ ID NO: 1530574 - RNA, 19 nt, Artificial Sequence
  Description of Artificial Sequence: Synthetic oligonucleotide
caacggugcuccggggucc

SEQ ID NO: 1530575 - RNA, 19 nt, Artificial Sequence
  Description of Artificial Sequence: Synthetic oligonucleotide
agcggagaaguuggcgaug

SEQ ID NO: 1530576 - RNA, 19 nt, Artificial Sequence
  Description of Artificial Sequence: Synthetic oligonucleotide
gcuguacucccagccaucc

SEQ ID NO: 1530577 - RNA, 19 nt, Artificial Sequence
  Description of Artificial Sequence: Synthetic oligonucleotide
cagucgguagcggcggcag

SEQ ID NO: 1530578 - RNA, 19 nt, Artificial Sequence
  Description of Artificial Sequence: Synthetic oligonucleotide
gcagcucugcggaugauca

SEQ ID NO: 1530579 - RNA, 19 nt, Artificial Sequence
  Description of Artificial Sequence: Synthetic oligonucleotide
ggaauaucuccggggcaag

SEQ ID NO: 1530580 - RNA, 19 nt, Artificial Sequence
  Description of Artificial Sequence: Synthetic oligonucleotide
cuuggaauuuaggucuugu

SEQ ID NO: 1530581 - RNA, 19 nt, Artificial Sequence
  Description of Artificial Sequence: Synthetic oligonucleotide
acagccgccacaggauuau

SEQ ID NO: 1530582 - RNA, 19 nt, Artificial Sequence
  Description of Artificial Sequence: Synthetic oligonucleotide
cucggucacgaugguggcc

SEQ ID NO: 1530583 - RNA, 19 nt, Artificial Sequence
  Description of Artificial Sequence: Synthetic oligonucleotide
gccgccacaggauuauaga

SEQ ID NO: 1530584 - RNA, 19 nt, Artificial Sequence
  Description of Artificial Sequence: Synthetic oligonucleotide
cacgcgcugcucgagguuc

SEQ ID NO: 1530585 - RNA, 19 nt, Artificial Sequence
  Description of Artificial Sequence: Synthetic oligonucleotide
accucgucguagucccgca

SEQ ID NO: 1530586 - RNA, 19 nt, Artificial Sequence
  Description of Artificial Sequence: Synthetic oligonucleotide
caauaggcugggacuucga

SEQ ID NO: 1530587 - RNA, 19 nt, Artificial Sequence
  Description of Artificial Sequence: Synthetic oligonucleotide
guaguccguccuucgucuc

SEQ ID NO: 1530588 - RNA, 19 nt, Artificial Sequence
  Description of Artificial Sequence: Synthetic oligonucleotide
gucacgaugguggccugga

SEQ ID NO: 1530589 - RNA, 19 nt, Artificial Sequence
  Description of Artificial Sequence: Synthetic oligonucleotide
gaggcgcuggaaggguccc

SEQ ID NO: 1530590 - RNA, 19 nt, Artificial Sequence
  Description of Artificial Sequence: Synthetic oligonucleotide
cagcucugcggaugaucac

SEQ ID NO: 1530591 - RNA, 19 nt, Artificial Sequence
  Description of Artificial Sequence: Synthetic oligonucleotide
aaggcagguagcggucaua

SEQ ID NO: 1530592 - RNA, 19 nt, Artificial Sequence
  Description of Artificial Sequence: Synthetic oligonucleotide
uccuuagcaucuggucaau

SEQ ID NO: 1530593 - RNA, 19 nt, Artificial Sequence
  Description of Artificial Sequence: Synthetic oligonucleotide
cagaaacacgauugacaua

SEQ ID NO: 1530594 - RNA, 19 nt, Artificial Sequence
  Description of Artificial Sequence: Synthetic oligonucleotide
ucgucuccaacgggauacu

SEQ ID NO: 1530595 - RNA, 19 nt, Artificial Sequence
  Description of Artificial Sequence: Synthetic oligonucleotide
gacauaccauugaagccau

SEQ ID NO: 1530596 - RNA, 19 nt, Artificial Sequence
  Description of Artificial Sequence: Synthetic oligonucleotide
caccuguaguccguccuuc

SEQ ID NO: 1530597 - RNA, 19 nt, Artificial Sequence
  Description of Artificial Sequence: Synthetic oligonucleotide
gcaacggugcuccgggguc

SEQ ID NO: 1530598 - RNA, 19 nt, Artificial Sequence
  Description of Artificial Sequence: Synthetic oligonucleotide
cagugggguacagcucagc

SEQ ID NO: 1530599 - RNA, 19 nt, Artificial Sequence
  Description of Artificial Sequence: Synthetic oligonucleotide
gucuccaacgggauacugu

SEQ ID NO: 1530600 - RNA, 19 nt, Artificial Sequence
  Description of Artificial Sequence: Synthetic oligonucleotide
gaacagccgccacaggauu

SEQ ID NO: 1530601 - RNA, 19 nt, Artificial Sequence
  Description of Artificial Sequence: Synthetic oligonucleotide
gaauaucuccggggcaagu

SEQ ID NO: 1530602 - RNA, 19 nt, Artificial Sequence
  Description of Artificial Sequence: Synthetic oligonucleotide
auauuccgguucggaucag

SEQ ID NO: 1530603 - RNA, 19 nt, Artificial Sequence
  Description of Artificial Sequence: Synthetic oligonucleotide
cucugcggaugaucaccuc

SEQ ID NO: 1530604 - RNA, 19 nt, Artificial Sequence
  Description of Artificial Sequence: Synthetic oligonucleotide
ggucacgaugguggccugg

SEQ ID NO: 1530605 - RNA, 19 nt, Artificial Sequence
  Description of Artificial Sequence: Synthetic oligonucleotide
ggccagucgguagcggcgg

SEQ ID NO: 1530606 - RNA, 19 nt, Artificial Sequence
  Description of Artificial Sequence: Synthetic oligonucleotide
  modified_base (6)..(6): a, c, u, g, unknown or other
caaacncaauaggcuggga

SEQ ID NO: 1530607 - RNA, 19 nt, Artificial Sequence
  Description of Artificial Sequence: Synthetic oligonucleotide
aggcaccaagguaaacaaa

SEQ ID NO: 1530608 - RNA, 19 nt, Artificial Sequence
  Description of Artificial Sequence: Synthetic oligonucleotide
ggcggucaccucgucguag

SEQ ID NO: 1530609 - RNA, 19 nt, Artificial Sequence
  Description of Artificial Sequence: Synthetic oligonucleotide
cuucgucuccaacgggaua

SEQ ID NO: 1530610 - RNA, 19 nt, Artificial Sequence
  Description of Artificial Sequence: Synthetic oligonucleotide
uccccgccagaaacacgau

SEQ ID NO: 1530611 - RNA, 19 nt, Artificial Sequence
  Description of Artificial Sequence: Synthetic oligonucleotide
cgauugacauaccauugaa

SEQ ID NO: 1530612 - RNA, 19 nt, Artificial Sequence
  Description of Artificial Sequence: Synthetic oligonucleotide
gucgguagcggcggcagcu

SEQ ID NO: 1530613 - RNA, 19 nt, Artificial Sequence
  Description of Artificial Sequence: Synthetic oligonucleotide
accauccuuuuagcauccu

SEQ ID NO: 1530614 - RNA, 19 nt, Artificial Sequence
  Description of Artificial Sequence: Synthetic oligonucleotide
cucgagguucacgguguca

SEQ ID NO: 1530615 - RNA, 19 nt, Artificial Sequence
  Description of Artificial Sequence: Synthetic oligonucleotide
cggaugaucaccucugccu

SEQ ID NO: 1530616 - RNA, 19 nt, Artificial Sequence
  Description of Artificial Sequence: Synthetic oligonucleotide
ccacaggauuauagacaug

SEQ ID NO: 1530617 - RNA, 19 nt, Artificial Sequence
  Description of Artificial Sequence: Synthetic oligonucleotide
augcggugugggagcugac

SEQ ID NO: 1530618 - RNA, 19 nt, Artificial Sequence
  Description of Artificial Sequence: Synthetic oligonucleotide
cuccggggcaagugcugca

SEQ ID NO: 1530619 - RNA, 19 nt, Artificial Sequence
  Description of Artificial Sequence: Synthetic oligonucleotide
agggcgcccggccggggau

SEQ ID NO: 1530620 - RNA, 19 nt, Artificial Sequence
  Description of Artificial Sequence: Synthetic oligonucleotide
guccccacucgcccaggaa

SEQ ID NO: 1530621 - RNA, 19 nt, Artificial Sequence
  Description of Artificial Sequence: Synthetic oligonucleotide
ggcgggaugcgguguggga

SEQ ID NO: 1530622 - RNA, 19 nt, Artificial Sequence
  Description of Artificial Sequence: Synthetic oligonucleotide
aggcggucaccucgucgua

SEQ ID NO: 1530623 - RNA, 19 nt, Artificial Sequence
  Description of Artificial Sequence: Synthetic oligonucleotide
ggauacugccaaggcggga

SEQ ID NO: 1530624 - RNA, 19 nt, Artificial Sequence
  Description of Artificial Sequence: Synthetic oligonucleotide
gccuaccaucaccagggua

SEQ ID NO: 1530625 - RNA, 19 nt, Artificial Sequence
  Description of Artificial Sequence: Synthetic oligonucleotide
gcucgagguucacgguguc

SEQ ID NO: 1530626 - RNA, 19 nt, Artificial Sequence
  Description of Artificial Sequence: Synthetic oligonucleotide
gguugcgccacgcgcugcu

SEQ ID NO: 1530627 - RNA, 19 nt, Artificial Sequence
  Description of Artificial Sequence: Synthetic oligonucleotide
ccgccagaaacacgauuga

SEQ ID NO: 1530628 - RNA, 19 nt, Artificial Sequence
  Description of Artificial Sequence: Synthetic oligonucleotide
acgcgcugcucgagguuca

SEQ ID NO: 1530629 - RNA, 19 nt, Artificial Sequence
  Description of Artificial Sequence: Synthetic oligonucleotide
caccucugccucucuaauu

SEQ ID NO: 1530630 - RNA, 19 nt, Artificial Sequence
  Description of Artificial Sequence: Synthetic oligonucleotide
ggaagacgucuuugcugua

SEQ ID NO: 1530631 - RNA, 19 nt, Artificial Sequence
  Description of Artificial Sequence: Synthetic oligonucleotide
gccagucgguagcggcggc

SEQ ID NO: 1530632 - RNA, 19 nt, Artificial Sequence
  Description of Artificial Sequence: Synthetic oligonucleotide
gcugcucgagguucacggu

SEQ ID NO: 1530633 - RNA, 19 nt, Artificial Sequence
  Description of Artificial Sequence: Synthetic oligonucleotide
gcggucaccucgucguagu

SEQ ID NO: 1530634 - RNA, 19 nt, Artificial Sequence
  Description of Artificial Sequence: Synthetic oligonucleotide
gcucugcggaugaucaccu

SEQ ID NO: 1530635 - RNA, 19 nt, Artificial Sequence
  Description of Artificial Sequence: Synthetic oligonucleotide
gggguacagcucagccgug

SEQ ID NO: 1530636 - RNA, 19 nt, Artificial Sequence
  Description of Artificial Sequence: Synthetic oligonucleotide
gguguaacugaggcuucuu

SEQ ID NO: 1530637 - RNA, 19 nt, Artificial Sequence
  Description of Artificial Sequence: Synthetic oligonucleotide
ccauccuuuuagcauccuu

SEQ ID NO: 1530638 - RNA, 19 nt, Artificial Sequence
  Description of Artificial Sequence: Synthetic oligonucleotide
gccggggaucuggggacac

SEQ ID NO: 1530639 - RNA, 19 nt, Artificial Sequence
  Description of Artificial Sequence: Synthetic oligonucleotide
ccagucgguagcggcggca

SEQ ID NO: 1530640 - RNA, 19 nt, Artificial Sequence
  Description of Artificial Sequence: Synthetic oligonucleotide
cugggcgcugcaggcgucu

SEQ ID NO: 1530641 - RNA, 19 nt, Artificial Sequence
  Description of Artificial Sequence: Synthetic oligonucleotide
cacugcggcgcaggagacu

SEQ ID NO: 1530642 - RNA, 19 nt, Artificial Sequence
  Description of Artificial Sequence: Synthetic oligonucleotide
ccaacgggauacugugguu

SEQ ID NO: 1530643 - RNA, 19 nt, Artificial Sequence
  Description of Artificial Sequence: Synthetic oligonucleotide
ccguguacacguagaccau

SEQ ID NO: 1530644 - RNA, 19 nt, Artificial Sequence
  Description of Artificial Sequence: Synthetic oligonucleotide
ccgguucggaucagaucau

SEQ ID NO: 1530645 - RNA, 19 nt, Artificial Sequence
  Description of Artificial Sequence: Synthetic oligonucleotide
gcucagccguguacacgua

SEQ ID NO: 1530646 - RNA, 19 nt, Artificial Sequence
  Description of Artificial Sequence: Synthetic oligonucleotide
ccccgccagaaacacgauu

SEQ ID NO: 1530647 - RNA, 19 nt, Artificial Sequence
  Description of Artificial Sequence: Synthetic oligonucleotide
ccucgucguagucccgcau

SEQ ID NO: 1530648 - RNA, 19 nt, Artificial Sequence
  Description of Artificial Sequence: Synthetic oligonucleotide
ccacgcgcugcucgagguu

SEQ ID NO: 1530649 - RNA, 19 nt, Artificial Sequence
  Description of Artificial Sequence: Synthetic oligonucleotide
uuuggaguaacauagacag

SEQ ID NO: 1530650 - RNA, 19 nt, Artificial Sequence
  Description of Artificial Sequence: Synthetic oligonucleotide
aauacaacuccuaagggcg

SEQ ID NO: 1530651 - RNA, 19 nt, Artificial Sequence
  Description of Artificial Sequence: Synthetic oligonucleotide
uacaacaucaauucuaggc

SEQ ID NO: 1530652 - RNA, 19 nt, Artificial Sequence
  Description of Artificial Sequence: Synthetic oligonucleotide
aauucuaggcucuaggcug

SEQ ID NO: 1530653 - RNA, 19 nt, Artificial Sequence
  Description of Artificial Sequence: Synthetic oligonucleotide
uuuaauuuccuccccaccc

SEQ ID NO: 1530654 - RNA, 19 nt, Artificial Sequence
  Description of Artificial Sequence: Synthetic oligonucleotide
uguucuugcaaacacaagu

SEQ ID NO: 1530655 - RNA, 19 nt, Artificial Sequence
  Description of Artificial Sequence: Synthetic oligonucleotide
agcaaaacaccauaugaac

SEQ ID NO: 1530656 - RNA, 19 nt, Artificial Sequence
  Description of Artificial Sequence: Synthetic oligonucleotide
aagguggagaggcuaauac

SEQ ID NO: 1530657 - RNA, 19 nt, Artificial Sequence
  Description of Artificial Sequence: Synthetic oligonucleotide
uaauacaacuccuaagggc

SEQ ID NO: 1530658 - RNA, 19 nt, Artificial Sequence
  Description of Artificial Sequence: Synthetic oligonucleotide
aagggaacaaguuuaauuu

SEQ ID NO: 1530659 - RNA, 19 nt, Artificial Sequence
  Description of Artificial Sequence: Synthetic oligonucleotide
caaaacaccauaugaacgc

SEQ ID NO: 1530660 - RNA, 19 nt, Artificial Sequence
  Description of Artificial Sequence: Synthetic oligonucleotide
gcuaauacaacuccuaagg

SEQ ID NO: 1530661 - RNA, 19 nt, Artificial Sequence
  Description of Artificial Sequence: Synthetic oligonucleotide
ugagcagccccuuagagcc

SEQ ID NO: 1530662 - RNA, 19 nt, Artificial Sequence
  Description of Artificial Sequence: Synthetic oligonucleotide
aaagggaacaaguuuaauu

SEQ ID NO: 1530663 - RNA, 19 nt, Artificial Sequence
  Description of Artificial Sequence: Synthetic oligonucleotide
ugcaacauacugcucaugc

SEQ ID NO: 1530664 - RNA, 19 nt, Artificial Sequence
  Description of Artificial Sequence: Synthetic oligonucleotide
aaagagcaauguuuggcuc

SEQ ID NO: 1530665 - RNA, 19 nt, Artificial Sequence
  Description of Artificial Sequence: Synthetic oligonucleotide
aauaaagggaacaaguuua

SEQ ID NO: 1530666 - RNA, 19 nt, Artificial Sequence
  Description of Artificial Sequence: Synthetic oligonucleotide
acaacaucaauucuaggcu

SEQ ID NO: 1530667 - RNA, 19 nt, Artificial Sequence
  Description of Artificial Sequence: Synthetic oligonucleotide
uuuggcucugcauuuaggc

SEQ ID NO: 1530668 - RNA, 19 nt, Artificial Sequence
  Description of Artificial Sequence: Synthetic oligonucleotide
gauaccauuggcagaaccg

SEQ ID NO: 1530669 - RNA, 19 nt, Artificial Sequence
  Description of Artificial Sequence: Synthetic oligonucleotide
cuuaccauaccuguuaccc

SEQ ID NO: 1530670 - RNA, 19 nt, Artificial Sequence
  Description of Artificial Sequence: Synthetic oligonucleotide
gaagcugggucaaugaggg

SEQ ID NO: 1530671 - RNA, 19 nt, Artificial Sequence
  Description of Artificial Sequence: Synthetic oligonucleotide
uguaguuccgcccugggaa

SEQ ID NO: 1530672 - RNA, 19 nt, Artificial Sequence
  Description of Artificial Sequence: Synthetic oligonucleotide
aaaggagacaguucuggcu

SEQ ID NO: 1530673 - RNA, 19 nt, Artificial Sequence
  Description of Artificial Sequence: Synthetic oligonucleotide
cuuuuggucccuacuaugg

SEQ ID NO: 1530674 - RNA, 19 nt, Artificial Sequence
  Description of Artificial Sequence: Synthetic oligonucleotide
aagacacgaaccuccgugg

SEQ ID NO: 1530675 - RNA, 19 nt, Artificial Sequence
  Description of Artificial Sequence: Synthetic oligonucleotide
gaagacacgaaccuccgug

SEQ ID NO: 1530676 - RNA, 19 nt, Artificial Sequence
  Description of Artificial Sequence: Synthetic oligonucleotide
ucaauucuaggcucuaggc

SEQ ID NO: 1530677 - RNA, 19 nt, Artificial Sequence
  Description of Artificial Sequence: Synthetic oligonucleotide
auugcugauggucggaguc

SEQ ID NO: 1530678 - RNA, 19 nt, Artificial Sequence
  Description of Artificial Sequence: Synthetic oligonucleotide
cuaauacaacuccuaaggg

SEQ ID NO: 1530679 - RNA, 19 nt, Artificial Sequence
  Description of Artificial Sequence: Synthetic oligonucleotide
uuaauuuccuccccacccc

SEQ ID NO: 1530680 - RNA, 19 nt, Artificial Sequence
  Description of Artificial Sequence: Synthetic oligonucleotide
gaaccggaauugcugaugg

SEQ ID NO: 1530681 - RNA, 19 nt, Artificial Sequence
  Description of Artificial Sequence: Synthetic oligonucleotide
uuuuggucccuacuauggg

SEQ ID NO: 1530682 - RNA, 19 nt, Artificial Sequence
  Description of Artificial Sequence: Synthetic oligonucleotide
uuaugacuuaccauaccug

SEQ ID NO: 1530683 - RNA, 19 nt, Artificial Sequence
  Description of Artificial Sequence: Synthetic oligonucleotide
uuaguuccuaauccgugag

SEQ ID NO: 1530684 - RNA, 19 nt, Artificial Sequence
  Description of Artificial Sequence: Synthetic oligonucleotide
uguuaguuccuaauccgug

SEQ ID NO: 1530685 - RNA, 19 nt, Artificial Sequence
  Description of Artificial Sequence: Synthetic oligonucleotide
uucccagaaauaaagggaa

SEQ ID NO: 1530686 - RNA, 19 nt, Artificial Sequence
  Description of Artificial Sequence: Synthetic oligonucleotide
ucuggugugaauggggccg

SEQ ID NO: 1530687 - RNA, 19 nt, Artificial Sequence
  Description of Artificial Sequence: Synthetic oligonucleotide
aagagcaauguuuggcucu

SEQ ID NO: 1530688 - RNA, 19 nt, Artificial Sequence
  Description of Artificial Sequence: Synthetic oligonucleotide
ugguggauaccauuggcag

SEQ ID NO: 1530689 - RNA, 19 nt, Artificial Sequence
  Description of Artificial Sequence: Synthetic oligonucleotide
uacuaugggagccuuuggc

SEQ ID NO: 1530690 - RNA, 19 nt, Artificial Sequence
  Description of Artificial Sequence: Synthetic oligonucleotide
uuaggccacuacaacauca

SEQ ID NO: 1530691 - RNA, 19 nt, Artificial Sequence
  Description of Artificial Sequence: Synthetic oligonucleotide
auccuuaugacuuaccaua

SEQ ID NO: 1530692 - RNA, 19 nt, Artificial Sequence
  Description of Artificial Sequence: Synthetic oligonucleotide
ugcauuuaggccacuacaa

SEQ ID NO: 1530693 - RNA, 19 nt, Artificial Sequence
  Description of Artificial Sequence: Synthetic oligonucleotide
ugugcuggaaagagcaaug

SEQ ID NO: 1530694 - RNA, 19 nt, Artificial Sequence
  Description of Artificial Sequence: Synthetic oligonucleotide
acuccuaagggcgagagug

SEQ ID NO: 1530695 - RNA, 19 nt, Artificial Sequence
  Description of Artificial Sequence: Synthetic oligonucleotide
acuacaacaucaauucuag

SEQ ID NO: 1530696 - RNA, 19 nt, Artificial Sequence
  Description of Artificial Sequence: Synthetic oligonucleotide
gaucucaccacgccgcagg

SEQ ID NO: 1530697 - RNA, 19 nt, Artificial Sequence
  Description of Artificial Sequence: Synthetic oligonucleotide
uucuugcaaacacaagucu

SEQ ID NO: 1530698 - RNA, 19 nt, Artificial Sequence
  Description of Artificial Sequence: Synthetic oligonucleotide
agggaacaaguuuaauuuc

SEQ ID NO: 1530699 - RNA, 19 nt, Artificial Sequence
  Description of Artificial Sequence: Synthetic oligonucleotide
uucgaucucaccacgccgc

SEQ ID NO: 1530700 - RNA, 19 nt, Artificial Sequence
  Description of Artificial Sequence: Synthetic oligonucleotide
uuggucccuacuaugggag

SEQ ID NO: 1530701 - RNA, 19 nt, Artificial Sequence
  Description of Artificial Sequence: Synthetic oligonucleotide
acuuaccauaccuguuacc

SEQ ID NO: 1530702 - RNA, 19 nt, Artificial Sequence
  Description of Artificial Sequence: Synthetic oligonucleotide
ugguggugcucacagaggc

SEQ ID NO: 1530703 - RNA, 19 nt, Artificial Sequence
  Description of Artificial Sequence: Synthetic oligonucleotide
ucggaguccugucugagca

SEQ ID NO: 1530704 - RNA, 19 nt, Artificial Sequence
  Description of Artificial Sequence: Synthetic oligonucleotide
uguuguuaaaggcgagcgc

SEQ ID NO: 1530705 - RNA, 19 nt, Artificial Sequence
  Description of Artificial Sequence: Synthetic oligonucleotide
aagucucaucuccaaagga

SEQ ID NO: 1530706 - RNA, 19 nt, Artificial Sequence
  Description of Artificial Sequence: Synthetic oligonucleotide
ucuucgaucucaccacgcc

SEQ ID NO: 1530707 - RNA, 19 nt, Artificial Sequence
  Description of Artificial Sequence: Synthetic oligonucleotide
uuccuaauccgugagcugc

SEQ ID NO: 1530708 - RNA, 19 nt, Artificial Sequence
  Description of Artificial Sequence: Synthetic oligonucleotide
auaccauuggcagaaccgg

SEQ ID NO: 1530709 - RNA, 19 nt, Artificial Sequence
  Description of Artificial Sequence: Synthetic oligonucleotide
agcuucugcaacauacugc

SEQ ID NO: 1530710 - RNA, 19 nt, Artificial Sequence
  Description of Artificial Sequence: Synthetic oligonucleotide
ucuugcacaccuaccaggu

SEQ ID NO: 1530711 - RNA, 19 nt, Artificial Sequence
  Description of Artificial Sequence: Synthetic oligonucleotide
uuuggucccuacuauggga

SEQ ID NO: 1530712 - RNA, 19 nt, Artificial Sequence
  Description of Artificial Sequence: Synthetic oligonucleotide
acugugguuagcuccaagu

SEQ ID NO: 1530713 - RNA, 19 nt, Artificial Sequence
  Description of Artificial Sequence: Synthetic oligonucleotide
ugggccauccuuaugacuu

SEQ ID NO: 1530714 - RNA, 19 nt, Artificial Sequence
  Description of Artificial Sequence: Synthetic oligonucleotide
uguuacccacuguaguucc

SEQ ID NO: 1530715 - RNA, 19 nt, Artificial Sequence
  Description of Artificial Sequence: Synthetic oligonucleotide
cuugcaaacacaagucuca

SEQ ID NO: 1530716 - RNA, 19 nt, Artificial Sequence
  Description of Artificial Sequence: Synthetic oligonucleotide
ugauuggacaggucuaccu

SEQ ID NO: 1530717 - RNA, 19 nt, Artificial Sequence
  Description of Artificial Sequence: Synthetic oligonucleotide
gcuguuaguuccuaauccg

SEQ ID NO: 1530718 - RNA, 19 nt, Artificial Sequence
  Description of Artificial Sequence: Synthetic oligonucleotide
ucugcauuuaggccacuac

SEQ ID NO: 1530719 - RNA, 19 nt, Artificial Sequence
  Description of Artificial Sequence: Synthetic oligonucleotide
cauuuaggccacuacaaca

SEQ ID NO: 1530720 - RNA, 19 nt, Artificial Sequence
  Description of Artificial Sequence: Synthetic oligonucleotide
uccuuaugacuuaccauac

SEQ ID NO: 1530721 - RNA, 19 nt, Artificial Sequence
  Description of Artificial Sequence: Synthetic oligonucleotide
uuggaguaacauagacagg

SEQ ID NO: 1530722 - RNA, 19 nt, Artificial Sequence
  Description of Artificial Sequence: Synthetic oligonucleotide
aguuccuaauccgugagcu

SEQ ID NO: 1530723 - RNA, 19 nt, Artificial Sequence
  Description of Artificial Sequence: Synthetic oligonucleotide
accggaauugcugaugguc

SEQ ID NO: 1530724 - RNA, 19 nt, Artificial Sequence
  Description of Artificial Sequence: Synthetic oligonucleotide
uuggcucugcauuuaggcc

SEQ ID NO: 1530725 - RNA, 19 nt, Artificial Sequence
  Description of Artificial Sequence: Synthetic oligonucleotide
cuuuggaguaacauagaca

SEQ ID NO: 1530726 - RNA, 19 nt, Artificial Sequence
  Description of Artificial Sequence: Synthetic oligonucleotide
caugcugugccuucagcag

SEQ ID NO: 1530727 - RNA, 19 nt, Artificial Sequence
  Description of Artificial Sequence: Synthetic oligonucleotide
uguaccuguucuugcaaac

SEQ ID NO: 1530728 - RNA, 19 nt, Artificial Sequence
  Description of Artificial Sequence: Synthetic oligonucleotide
cagaaauaaagggaacaag

SEQ ID NO: 1530729 - RNA, 19 nt, Artificial Sequence
  Description of Artificial Sequence: Synthetic oligonucleotide
ugccgauugugcuggaaag

SEQ ID NO: 1530730 - RNA, 19 nt, Artificial Sequence
  Description of Artificial Sequence: Synthetic oligonucleotide
ucccacugugguuagcucc

SEQ ID NO: 1530731 - RNA, 19 nt, Artificial Sequence
  Description of Artificial Sequence: Synthetic oligonucleotide
aaugagggaguagcgucuc

SEQ ID NO: 1530732 - RNA, 19 nt, Artificial Sequence
  Description of Artificial Sequence: Synthetic oligonucleotide
uucuucuuccacucggaac

SEQ ID NO: 1530733 - RNA, 19 nt, Artificial Sequence
  Description of Artificial Sequence: Synthetic oligonucleotide
gccacuacaacaucaauuc

SEQ ID NO: 1530734 - RNA, 19 nt, Artificial Sequence
  Description of Artificial Sequence: Synthetic oligonucleotide
acguucucuaccagcaacc

SEQ ID NO: 1530735 - RNA, 19 nt, Artificial Sequence
  Description of Artificial Sequence: Synthetic oligonucleotide
uaccuguuacccacuguag

SEQ ID NO: 1530736 - RNA, 19 nt, Artificial Sequence
  Description of Artificial Sequence: Synthetic oligonucleotide
caaaggagacaguucuggc

SEQ ID NO: 1530737 - RNA, 19 nt, Artificial Sequence
  Description of Artificial Sequence: Synthetic oligonucleotide
aauugcugauggucggagu

SEQ ID NO: 1530738 - RNA, 19 nt, Artificial Sequence
  Description of Artificial Sequence: Synthetic oligonucleotide
uuuguaccuguucuugcaa

SEQ ID NO: 1530739 - RNA, 19 nt, Artificial Sequence
  Description of Artificial Sequence: Synthetic oligonucleotide
ugugaauggggccggucca

SEQ ID NO: 1530740 - RNA, 19 nt, Artificial Sequence
  Description of Artificial Sequence: Synthetic oligonucleotide
aggagacaguucuggcucc

SEQ ID NO: 1530741 - RNA, 19 nt, Artificial Sequence
  Description of Artificial Sequence: Synthetic oligonucleotide
cugagcagccccuuagagc

SEQ ID NO: 1530742 - RNA, 19 nt, Artificial Sequence
  Description of Artificial Sequence: Synthetic oligonucleotide
guuaguuccuaauccguga

SEQ ID NO: 1530743 - RNA, 19 nt, Artificial Sequence
  Description of Artificial Sequence: Synthetic oligonucleotide
uuaccauaccuguuaccca

SEQ ID NO: 1530744 - RNA, 19 nt, Artificial Sequence
  Description of Artificial Sequence: Synthetic oligonucleotide
accauaugaacgcuuuuaa

SEQ ID NO: 1530745 - RNA, 19 nt, Artificial Sequence
  Description of Artificial Sequence: Synthetic oligonucleotide
caacaucaauucuaggcuc

SEQ ID NO: 1530746 - RNA, 19 nt, Artificial Sequence
  Description of Artificial Sequence: Synthetic oligonucleotide
uccgugcucaccaacuggu

SEQ ID NO: 1530747 - RNA, 19 nt, Artificial Sequence
  Description of Artificial Sequence: Synthetic oligonucleotide
agucgcagcagcucgggug

SEQ ID NO: 1530748 - RNA, 19 nt, Artificial Sequence
  Description of Artificial Sequence: Synthetic oligonucleotide
ggcuguuaguuccuaaucc

SEQ ID NO: 1530749 - RNA, 19 nt, Artificial Sequence
  Description of Artificial Sequence: Synthetic oligonucleotide
acccacuguaguuccgccc

SEQ ID NO: 1530750 - RNA, 19 nt, Artificial Sequence
  Description of Artificial Sequence: Synthetic oligonucleotide
accuaccaggugcaagccc

SEQ ID NO: 1530751 - RNA, 19 nt, Artificial Sequence
  Description of Artificial Sequence: Synthetic oligonucleotide
uggucuucgaucucaccac

SEQ ID NO: 1530752 - RNA, 19 nt, Artificial Sequence
  Description of Artificial Sequence: Synthetic oligonucleotide
guucccagaaauaaaggga

SEQ ID NO: 1530753 - RNA, 19 nt, Artificial Sequence
  Description of Artificial Sequence: Synthetic oligonucleotide
gaauggggccgguccaugg

SEQ ID NO: 1530754 - RNA, 19 nt, Artificial Sequence
  Description of Artificial Sequence: Synthetic oligonucleotide
uccuuguccagccccguca

SEQ ID NO: 1530755 - RNA, 19 nt, Artificial Sequence
  Description of Artificial Sequence: Synthetic oligonucleotide
ucgagacuucccacugugg

SEQ ID NO: 1530756 - RNA, 19 nt, Artificial Sequence
  Description of Artificial Sequence: Synthetic oligonucleotide
aaaggcgagcgcuacccaa

SEQ ID NO: 1530757 - RNA, 19 nt, Artificial Sequence
  Description of Artificial Sequence: Synthetic oligonucleotide
acuggucuucgaucucacc

SEQ ID NO: 1530758 - RNA, 19 nt, Artificial Sequence
  Description of Artificial Sequence: Synthetic oligonucleotide
cuuaugacuuaccauaccu

SEQ ID NO: 1530759 - RNA, 19 nt, Artificial Sequence
  Description of Artificial Sequence: Synthetic oligonucleotide
ggcuaauacaacuccuaag

SEQ ID NO: 1530760 - RNA, 19 nt, Artificial Sequence
  Description of Artificial Sequence: Synthetic oligonucleotide
accaggugcaagcccacuc

SEQ ID NO: 1530761 - RNA, 19 nt, Artificial Sequence
  Description of Artificial Sequence: Synthetic oligonucleotide
agacacgaaccuccguggg

SEQ ID NO: 1530762 - RNA, 19 nt, Artificial Sequence
  Description of Artificial Sequence: Synthetic oligonucleotide
uaugggagccuuuggcugu

SEQ ID NO: 1530763 - RNA, 19 nt, Artificial Sequence
  Description of Artificial Sequence: Synthetic oligonucleotide
uccaaaggagacaguucug

SEQ ID NO: 1530764 - RNA, 19 nt, Artificial Sequence
  Description of Artificial Sequence: Synthetic oligonucleotide
cuacaacaucaauucuagg

SEQ ID NO: 1530765 - RNA, 19 nt, Artificial Sequence
  Description of Artificial Sequence: Synthetic oligonucleotide
guucuugcaaacacaaguc

SEQ ID NO: 1530766 - RNA, 19 nt, Artificial Sequence
  Description of Artificial Sequence: Synthetic oligonucleotide
cuggucuucgaucucacca

SEQ ID NO: 1530767 - RNA, 19 nt, Artificial Sequence
  Description of Artificial Sequence: Synthetic oligonucleotide
gacuuaccauaccuguuac

SEQ ID NO: 1530768 - RNA, 19 nt, Artificial Sequence
  Description of Artificial Sequence: Synthetic oligonucleotide
uguuuguccuccuguuugu

SEQ ID NO: 1530769 - RNA, 19 nt, Artificial Sequence
  Description of Artificial Sequence: Synthetic oligonucleotide
accuguuacccacuguagu

SEQ ID NO: 1530770 - RNA, 19 nt, Artificial Sequence
  Description of Artificial Sequence: Synthetic oligonucleotide
uuggcuguuaguuccuaau

SEQ ID NO: 1530771 - RNA, 19 nt, Artificial Sequence
  Description of Artificial Sequence: Synthetic oligonucleotide
gggaacaaguuuaauuucc

SEQ ID NO: 1530772 - RNA, 19 nt, Artificial Sequence
  Description of Artificial Sequence: Synthetic oligonucleotide
ggccuuagcuacuucagcc

SEQ ID NO: 1530773 - RNA, 19 nt, Artificial Sequence
  Description of Artificial Sequence: Synthetic oligonucleotide
agguggagaggcuaauaca

SEQ ID NO: 1530774 - RNA, 19 nt, Artificial Sequence
  Description of Artificial Sequence: Synthetic oligonucleotide
uggcuguuaguuccuaauc

SEQ ID NO: 1530775 - RNA, 19 nt, Artificial Sequence
  Description of Artificial Sequence: Synthetic oligonucleotide
cacuacaacaucaauucua

SEQ ID NO: 1530776 - RNA, 19 nt, Artificial Sequence
  Description of Artificial Sequence: Synthetic oligonucleotide
ucucuaccagcaaccgugc

SEQ ID NO: 1530777 - RNA, 19 nt, Artificial Sequence
  Description of Artificial Sequence: Synthetic oligonucleotide
ugacagggacuucuccuug

SEQ ID NO: 1530778 - RNA, 19 nt, Artificial Sequence
  Description of Artificial Sequence: Synthetic oligonucleotide
uuuaggccacuacaacauc

SEQ ID NO: 1530779 - RNA, 19 nt, Artificial Sequence
  Description of Artificial Sequence: Synthetic oligonucleotide
gacacgaaccuccgugggc

SEQ ID NO: 1530780 - RNA, 19 nt, Artificial Sequence
  Description of Artificial Sequence: Synthetic oligonucleotide
uccuaauccgugagcugcc

SEQ ID NO: 1530781 - RNA, 19 nt, Artificial Sequence
  Description of Artificial Sequence: Synthetic oligonucleotide
gugcaagcccacuccaggg

SEQ ID NO: 1530782 - RNA, 19 nt, Artificial Sequence
  Description of Artificial Sequence: Synthetic oligonucleotide
ggugcaagcccacuccagg

SEQ ID NO: 1530783 - RNA, 19 nt, Artificial Sequence
  Description of Artificial Sequence: Synthetic oligonucleotide
cacucggaacugcaggucc

SEQ ID NO: 1530784 - RNA, 19 nt, Artificial Sequence
  Description of Artificial Sequence: Synthetic oligonucleotide
ugcagucgcagcagcucgg

SEQ ID NO: 1530785 - RNA, 19 nt, Artificial Sequence
  Description of Artificial Sequence: Synthetic oligonucleotide
uaauccgugagcugccgau

SEQ ID NO: 1530786 - RNA, 19 nt, Artificial Sequence
  Description of Artificial Sequence: Synthetic oligonucleotide
aucucaccacgccgcaggc

SEQ ID NO: 1530787 - RNA, 19 nt, Artificial Sequence
  Description of Artificial Sequence: Synthetic oligonucleotide
ucuaggcugcuguuguuaa

SEQ ID NO: 1530788 - RNA, 19 nt, Artificial Sequence
  Description of Artificial Sequence: Synthetic oligonucleotide
guuguuaaaggcgagcgcu

SEQ ID NO: 1530789 - RNA, 19 nt, Artificial Sequence
  Description of Artificial Sequence: Synthetic oligonucleotide
cugugguuagcuccaaguc

SEQ ID NO: 1530790 - RNA, 19 nt, Artificial Sequence
  Description of Artificial Sequence: Synthetic oligonucleotide
gagugugagcgccaccuac

SEQ ID NO: 1530791 - RNA, 19 nt, Artificial Sequence
  Description of Artificial Sequence: Synthetic oligonucleotide
uuacccacuguaguuccgc

SEQ ID NO: 1530792 - RNA, 19 nt, Artificial Sequence
  Description of Artificial Sequence: Synthetic oligonucleotide
cucgagacuucccacugug

SEQ ID NO: 1530793 - RNA, 19 nt, Artificial Sequence
  Description of Artificial Sequence: Synthetic oligonucleotide
uccuccgugcucaccaacu

SEQ ID NO: 1530794 - RNA, 19 nt, Artificial Sequence
  Description of Artificial Sequence: Synthetic oligonucleotide
aggcuaauacaacuccuaa

SEQ ID NO: 1530795 - RNA, 19 nt, Artificial Sequence
  Description of Artificial Sequence: Synthetic oligonucleotide
ugcaagcccacuccagggu

SEQ ID NO: 1530796 - RNA, 19 nt, Artificial Sequence
  Description of Artificial Sequence: Synthetic oligonucleotide
ucacuggucuucgaucuca

SEQ ID NO: 1530797 - RNA, 19 nt, Artificial Sequence
  Description of Artificial Sequence: Synthetic oligonucleotide
ccggaauugcugauggucg

SEQ ID NO: 1530798 - RNA, 19 nt, Artificial Sequence
  Description of Artificial Sequence: Synthetic oligonucleotide
caacuggugcugcagucgc

SEQ ID NO: 1530799 - RNA, 19 nt, Artificial Sequence
  Description of Artificial Sequence: Synthetic oligonucleotide
cugcauuuaggccacuaca

SEQ ID NO: 1530800 - RNA, 19 nt, Artificial Sequence
  Description of Artificial Sequence: Synthetic oligonucleotide
agcccucuccaagucacgc

SEQ ID NO: 1530801 - RNA, 19 nt, Artificial Sequence
  Description of Artificial Sequence: Synthetic oligonucleotide
guaguuccgcccugggaag

SEQ ID NO: 1530802 - RNA, 19 nt, Artificial Sequence
  Description of Artificial Sequence: Synthetic oligonucleotide
gugguuagcuccaagucuc

SEQ ID NO: 1530803 - RNA, 19 nt, Artificial Sequence
  Description of Artificial Sequence: Synthetic oligonucleotide
gcgagcgcuacccaaaagc

SEQ ID NO: 1530804 - RNA, 19 nt, Artificial Sequence
  Description of Artificial Sequence: Synthetic oligonucleotide
gucgcagcagcucgggugc

SEQ ID NO: 1530805 - RNA, 19 nt, Artificial Sequence
  Description of Artificial Sequence: Synthetic oligonucleotide
uuguuaaaggcgagcgcua

SEQ ID NO: 1530806 - RNA, 19 nt, Artificial Sequence
  Description of Artificial Sequence: Synthetic oligonucleotide
aacuccuaagggcgagagu

SEQ ID NO: 1530807 - RNA, 19 nt, Artificial Sequence
  Description of Artificial Sequence: Synthetic oligonucleotide
ugguuagcuccaagucucc

SEQ ID NO: 1530808 - RNA, 19 nt, Artificial Sequence
  Description of Artificial Sequence: Synthetic oligonucleotide
cuccgugcucaccaacugg

SEQ ID NO: 1530809 - RNA, 19 nt, Artificial Sequence
  Description of Artificial Sequence: Synthetic oligonucleotide
guuuggcucugcauuuagg

SEQ ID NO: 1530810 - RNA, 19 nt, Artificial Sequence
  Description of Artificial Sequence: Synthetic oligonucleotide
uugcugauggucggagucc

SEQ ID NO: 1530811 - RNA, 19 nt, Artificial Sequence
  Description of Artificial Sequence: Synthetic oligonucleotide
augaacgcuuuuaaagagu

SEQ ID NO: 1530812 - RNA, 19 nt, Artificial Sequence
  Description of Artificial Sequence: Synthetic oligonucleotide
auaaagggaacaaguuuaa

SEQ ID NO: 1530813 - RNA, 19 nt, Artificial Sequence
  Description of Artificial Sequence: Synthetic oligonucleotide
acacgaaccuccgugggcu

SEQ ID NO: 1530814 - RNA, 19 nt, Artificial Sequence
  Description of Artificial Sequence: Synthetic oligonucleotide
uccuaagggcgagagugug

SEQ ID NO: 1530815 - RNA, 19 nt, Artificial Sequence
  Description of Artificial Sequence: Synthetic oligonucleotide
guuccuaauccgugagcug

SEQ ID NO: 1530816 - RNA, 19 nt, Artificial Sequence
  Description of Artificial Sequence: Synthetic oligonucleotide
caccagguaggcugagggg

SEQ ID NO: 1530817 - RNA, 19 nt, Artificial Sequence
  Description of Artificial Sequence: Synthetic oligonucleotide
cuaccuucucuuuccucac

SEQ ID NO: 1530818 - RNA, 19 nt, Artificial Sequence
  Description of Artificial Sequence: Synthetic oligonucleotide
agaggcuaauacaacuccu

SEQ ID NO: 1530819 - RNA, 19 nt, Artificial Sequence
  Description of Artificial Sequence: Synthetic oligonucleotide
uucaaaggccagugcuugu

SEQ ID NO: 1530820 - RNA, 19 nt, Artificial Sequence
  Description of Artificial Sequence: Synthetic oligonucleotide
gauucuucuuccacucgga

SEQ ID NO: 1530821 - RNA, 19 nt, Artificial Sequence
  Description of Artificial Sequence: Synthetic oligonucleotide
ggucuucgaucucaccacg

SEQ ID NO: 1530822 - RNA, 19 nt, Artificial Sequence
  Description of Artificial Sequence: Synthetic oligonucleotide
uaaagggaacaaguuuaau

SEQ ID NO: 1530823 - RNA, 19 nt, Artificial Sequence
  Description of Artificial Sequence: Synthetic oligonucleotide
cuguuacccacuguaguuc

SEQ ID NO: 1530824 - RNA, 19 nt, Artificial Sequence
  Description of Artificial Sequence: Synthetic oligonucleotide
agggaguagcgucucugcu

SEQ ID NO: 1530825 - RNA, 19 nt, Artificial Sequence
  Description of Artificial Sequence: Synthetic oligonucleotide
agcgcuacccaaaagccaa

SEQ ID NO: 1530826 - RNA, 19 nt, Artificial Sequence
  Description of Artificial Sequence: Synthetic oligonucleotide
aaccggaauugcugauggu

SEQ ID NO: 1530827 - RNA, 19 nt, Artificial Sequence
  Description of Artificial Sequence: Synthetic oligonucleotide
uuccgcccugggaagacac

SEQ ID NO: 1530828 - RNA, 19 nt, Artificial Sequence
  Description of Artificial Sequence: Synthetic oligonucleotide
cacucgagacuucccacug

SEQ ID NO: 1530829 - RNA, 19 nt, Artificial Sequence
  Description of Artificial Sequence: Synthetic oligonucleotide
caucaauucuaggcucuag

SEQ ID NO: 1530830 - RNA, 19 nt, Artificial Sequence
  Description of Artificial Sequence: Synthetic oligonucleotide
uacccacuguaguuccgcc

SEQ ID NO: 1530831 - RNA, 19 nt, Artificial Sequence
  Description of Artificial Sequence: Synthetic oligonucleotide
gucaguguuuguccuccug

SEQ ID NO: 1530832 - RNA, 19 nt, Artificial Sequence
  Description of Artificial Sequence: Synthetic oligonucleotide
agccccuuagagccuccac

SEQ ID NO: 1530833 - RNA, 19 nt, Artificial Sequence
  Description of Artificial Sequence: Synthetic oligonucleotide
ucgaucucaccacgccgca

SEQ ID NO: 1530834 - RNA, 19 nt, Artificial Sequence
  Description of Artificial Sequence: Synthetic oligonucleotide
gcauuuaggccacuacaac

SEQ ID NO: 1530835 - RNA, 19 nt, Artificial Sequence
  Description of Artificial Sequence: Synthetic oligonucleotide
gugcuuguggggaaauggc

SEQ ID NO: 1530836 - RNA, 19 nt, Artificial Sequence
  Description of Artificial Sequence: Synthetic oligonucleotide
uccgcccugggaagacacg

SEQ ID NO: 1530837 - RNA, 19 nt, Artificial Sequence
  Description of Artificial Sequence: Synthetic oligonucleotide
agcuagcagcugcucaaug

SEQ ID NO: 1530838 - RNA, 19 nt, Artificial Sequence
  Description of Artificial Sequence: Synthetic oligonucleotide
caauucuaggcucuaggcu

SEQ ID NO: 1530839 - RNA, 19 nt, Artificial Sequence
  Description of Artificial Sequence: Synthetic oligonucleotide
ggucaaugagggaguagcg

SEQ ID NO: 1530840 - RNA, 19 nt, Artificial Sequence
  Description of Artificial Sequence: Synthetic oligonucleotide
accccagcaaaacaccaua

SEQ ID NO: 1530841 - RNA, 19 nt, Artificial Sequence
  Description of Artificial Sequence: Synthetic oligonucleotide
uggcugguggccuuagcua

SEQ ID NO: 1530842 - RNA, 19 nt, Artificial Sequence
  Description of Artificial Sequence: Synthetic oligonucleotide
gggaaauggcuucuugcac

SEQ ID NO: 1530843 - RNA, 19 nt, Artificial Sequence
  Description of Artificial Sequence: Synthetic oligonucleotide
uggucccuacuaugggagc

SEQ ID NO: 1530844 - RNA, 19 nt, Artificial Sequence
  Description of Artificial Sequence: Synthetic oligonucleotide
aaacaccauaugaacgcuu

SEQ ID NO: 1530845 - RNA, 19 nt, Artificial Sequence
  Description of Artificial Sequence: Synthetic oligonucleotide
aguuccgcccugggaagac

SEQ ID NO: 1530846 - RNA, 19 nt, Artificial Sequence
  Description of Artificial Sequence: Synthetic oligonucleotide
cugauuggacaggucuacc

SEQ ID NO: 1530847 - RNA, 19 nt, Artificial Sequence
  Description of Artificial Sequence: Synthetic oligonucleotide
aguagcgucucugcucuga

SEQ ID NO: 1530848 - RNA, 19 nt, Artificial Sequence
  Description of Artificial Sequence: Synthetic oligonucleotide
gugugagcgccaccuacug

SEQ ID NO: 1530849 - RNA, 19 nt, Artificial Sequence
  Description of Artificial Sequence: Synthetic oligonucleotide
guuacccacuguaguuccg

SEQ ID NO: 1530850 - RNA, 19 nt, Artificial Sequence
  Description of Artificial Sequence: Synthetic oligonucleotide
ucacguucucuaccagcaa

SEQ ID NO: 1530851 - RNA, 19 nt, Artificial Sequence
  Description of Artificial Sequence: Synthetic oligonucleotide
agccccuuuuggucccuac

SEQ ID NO: 1530852 - RNA, 19 nt, Artificial Sequence
  Description of Artificial Sequence: Synthetic oligonucleotide
gaggcuaauacaacuccua

SEQ ID NO: 1530853 - RNA, 19 nt, Artificial Sequence
  Description of Artificial Sequence: Synthetic oligonucleotide
acgaaccuccgugggcugc

SEQ ID NO: 1530854 - RNA, 19 nt, Artificial Sequence
  Description of Artificial Sequence: Synthetic oligonucleotide
cacaccuaccaggugcaag

SEQ ID NO: 1530855 - RNA, 19 nt, Artificial Sequence
  Description of Artificial Sequence: Synthetic oligonucleotide
ugggucaaugagggaguag

SEQ ID NO: 1530856 - RNA, 19 nt, Artificial Sequence
  Description of Artificial Sequence: Synthetic oligonucleotide
gucggaguccugucugagc

SEQ ID NO: 1530857 - RNA, 19 nt, Artificial Sequence
  Description of Artificial Sequence: Synthetic oligonucleotide
cucagccccuuuugguccc

SEQ ID NO: 1530858 - RNA, 19 nt, Artificial Sequence
  Description of Artificial Sequence: Synthetic oligonucleotide
acucgagacuucccacugu

SEQ ID NO: 1530859 - RNA, 19 nt, Artificial Sequence
  Description of Artificial Sequence: Synthetic oligonucleotide
uggggucuuuggaguaaca

SEQ ID NO: 1530860 - RNA, 19 nt, Artificial Sequence
  Description of Artificial Sequence: Synthetic oligonucleotide
cuugguccagugcgucccg

SEQ ID NO: 1530861 - RNA, 19 nt, Artificial Sequence
  Description of Artificial Sequence: Synthetic oligonucleotide
uccgugagcugccgauugu

SEQ ID NO: 1530862 - RNA, 19 nt, Artificial Sequence
  Description of Artificial Sequence: Synthetic oligonucleotide
cacgccgcaggcucaacuc

SEQ ID NO: 1530863 - RNA, 19 nt, Artificial Sequence
  Description of Artificial Sequence: Synthetic oligonucleotide
ccuuuuggucccuacuaug

SEQ ID NO: 1530864 - RNA, 19 nt, Artificial Sequence
  Description of Artificial Sequence: Synthetic oligonucleotide
gauggucggaguccugucu

SEQ ID NO: 1530865 - RNA, 19 nt, Artificial Sequence
  Description of Artificial Sequence: Synthetic oligonucleotide
ccuuaugacuuaccauacc

SEQ ID NO: 1530866 - RNA, 19 nt, Artificial Sequence
  Description of Artificial Sequence: Synthetic oligonucleotide
ugaauggggccgguccaug

SEQ ID NO: 1530867 - RNA, 19 nt, Artificial Sequence
  Description of Artificial Sequence: Synthetic oligonucleotide
uggucggaguccugucuga

SEQ ID NO: 1530868 - RNA, 19 nt, Artificial Sequence
  Description of Artificial Sequence: Synthetic oligonucleotide
guaccuguucuugcaaaca

SEQ ID NO: 1530869 - RNA, 19 nt, Artificial Sequence
  Description of Artificial Sequence: Synthetic oligonucleotide
cccugggaagacacgaacc

SEQ ID NO: 1530870 - RNA, 19 nt, Artificial Sequence
  Description of Artificial Sequence: Synthetic oligonucleotide
gccccuuagagccuccacc

SEQ ID NO: 1530871 - RNA, 19 nt, Artificial Sequence
  Description of Artificial Sequence: Synthetic oligonucleotide
guagcgucucugcucugac

SEQ ID NO: 1530872 - RNA, 19 nt, Artificial Sequence
  Description of Artificial Sequence: Synthetic oligonucleotide
cgagcgcuacccaaaagcc

SEQ ID NO: 1530873 - RNA, 19 nt, Artificial Sequence
  Description of Artificial Sequence: Synthetic oligonucleotide
ccuacuaugggagccuuug

SEQ ID NO: 1530874 - RNA, 19 nt, Artificial Sequence
  Description of Artificial Sequence: Synthetic oligonucleotide
gguggauaccauuggcaga

SEQ ID NO: 1530875 - RNA, 19 nt, Artificial Sequence
  Description of Artificial Sequence: Synthetic oligonucleotide
ccgauugugcuggaaagag

SEQ ID NO: 1530876 - RNA, 19 nt, Artificial Sequence
  Description of Artificial Sequence: Synthetic oligonucleotide
cuguuaguuccuaauccgu

SEQ ID NO: 1530877 - RNA, 19 nt, Artificial Sequence
  Description of Artificial Sequence: Synthetic oligonucleotide
ugguccagugcgucccgca

SEQ ID NO: 1530878 - RNA, 19 nt, Artificial Sequence
  Description of Artificial Sequence: Synthetic oligonucleotide
gucuucgaucucaccacgc

SEQ ID NO: 1530879 - RNA, 19 nt, Artificial Sequence
  Description of Artificial Sequence: Synthetic oligonucleotide
guuuguccuccuguuugug

SEQ ID NO: 1530880 - RNA, 19 nt, Artificial Sequence
  Description of Artificial Sequence: Synthetic oligonucleotide
aauccgugagcugccgauu

SEQ ID NO: 1530881 - RNA, 19 nt, Artificial Sequence
  Description of Artificial Sequence: Synthetic oligonucleotide
cacuggucuucgaucucac

SEQ ID NO: 1530882 - RNA, 19 nt, Artificial Sequence
  Description of Artificial Sequence: Synthetic oligonucleotide
cuggugugaauggggccgg

SEQ ID NO: 1530883 - RNA, 19 nt, Artificial Sequence
  Description of Artificial Sequence: Synthetic oligonucleotide
gagcgcuacccaaaagcca

SEQ ID NO: 1530884 - RNA, 19 nt, Artificial Sequence
  Description of Artificial Sequence: Synthetic oligonucleotide
gagccuuuggcuguuaguu

SEQ ID NO: 1530885 - RNA, 19 nt, Artificial Sequence
  Description of Artificial Sequence: Synthetic oligonucleotide
ccauccuuaugacuuacca

SEQ ID NO: 1530886 - RNA, 19 nt, Artificial Sequence
  Description of Artificial Sequence: Synthetic oligonucleotide
ggucccuacuaugggagcc

SEQ ID NO: 1530887 - RNA, 19 nt, Artificial Sequence
  Description of Artificial Sequence: Synthetic oligonucleotide
acaccauaugaacgcuuuu

SEQ ID NO: 1530888 - RNA, 19 nt, Artificial Sequence
  Description of Artificial Sequence: Synthetic oligonucleotide
uuccuccccaccccagcaa

SEQ ID NO: 1530889 - RNA, 19 nt, Artificial Sequence
  Description of Artificial Sequence: Synthetic oligonucleotide
gggucuuuggaguaacaua

SEQ ID NO: 1530890 - RNA, 19 nt, Artificial Sequence
  Description of Artificial Sequence: Synthetic oligonucleotide
gcaagcccacuccagggug

SEQ ID NO: 1530891 - RNA, 19 nt, Artificial Sequence
  Description of Artificial Sequence: Synthetic oligonucleotide
gggaagacacgaaccuccg

SEQ ID NO: 1530892 - RNA, 19 nt, Artificial Sequence
  Description of Artificial Sequence: Synthetic oligonucleotide
ggaguagcgucucugcucu

SEQ ID NO: 1530893 - RNA, 19 nt, Artificial Sequence
  Description of Artificial Sequence: Synthetic oligonucleotide
uggggccgguccaugguau

SEQ ID NO: 1530894 - RNA, 19 nt, Artificial Sequence
  Description of Artificial Sequence: Synthetic oligonucleotide
ggucacuggucuucgaucu

SEQ ID NO: 1530895 - RNA, 19 nt, Artificial Sequence
  Description of Artificial Sequence: Synthetic oligonucleotide
cauccuuaugacuuaccau

SEQ ID NO: 1530896 - RNA, 19 nt, Artificial Sequence
  Description of Artificial Sequence: Synthetic oligonucleotide
auacaacuccuaagggcga

SEQ ID NO: 1530897 - RNA, 19 nt, Artificial Sequence
  Description of Artificial Sequence: Synthetic oligonucleotide
caccauaugaacgcuuuua

SEQ ID NO: 1530898 - RNA, 19 nt, Artificial Sequence
  Description of Artificial Sequence: Synthetic oligonucleotide
guggcugguggccuuagcu

SEQ ID NO: 1530899 - RNA, 19 nt, Artificial Sequence
  Description of Artificial Sequence: Synthetic oligonucleotide
cuaggcucuaggcugcugu

SEQ ID NO: 1530900 - RNA, 19 nt, Artificial Sequence
  Description of Artificial Sequence: Synthetic oligonucleotide
augacuuaccauaccuguu

SEQ ID NO: 1530901 - RNA, 19 nt, Artificial Sequence
  Description of Artificial Sequence: Synthetic oligonucleotide
gagcugcuaggaagccugg

SEQ ID NO: 1530902 - RNA, 19 nt, Artificial Sequence
  Description of Artificial Sequence: Synthetic oligonucleotide
cacaagucucaucuccaaa

SEQ ID NO: 1530903 - RNA, 19 nt, Artificial Sequence
  Description of Artificial Sequence: Synthetic oligonucleotide
cugccgauugugcuggaaa

SEQ ID NO: 1530904 - RNA, 19 nt, Artificial Sequence
  Description of Artificial Sequence: Synthetic oligonucleotide
ucuaggcucuaggcugcug

SEQ ID NO: 1530905 - RNA, 19 nt, Artificial Sequence
  Description of Artificial Sequence: Synthetic oligonucleotide
cuaauccgugagcugccga

SEQ ID NO: 1530906 - RNA, 19 nt, Artificial Sequence
  Description of Artificial Sequence: Synthetic oligonucleotide
gacagggacuucuccuugu

SEQ ID NO: 1530907 - RNA, 19 nt, Artificial Sequence
  Description of Artificial Sequence: Synthetic oligonucleotide
gggugcugaagcuggguca

SEQ ID NO: 1530908 - RNA, 19 nt, Artificial Sequence
  Description of Artificial Sequence: Synthetic oligonucleotide
uaggcucuaggcugcuguu

SEQ ID NO: 1530909 - RNA, 19 nt, Artificial Sequence
  Description of Artificial Sequence: Synthetic oligonucleotide
caccuaccaggugcaagcc

SEQ ID NO: 1530910 - RNA, 19 nt, Artificial Sequence
  Description of Artificial Sequence: Synthetic oligonucleotide
cuucuuccacucggaacug

SEQ ID NO: 1530911 - RNA, 19 nt, Artificial Sequence
  Description of Artificial Sequence: Synthetic oligonucleotide
gucuuuggaguaacauaga

SEQ ID NO: 1530912 - RNA, 19 nt, Artificial Sequence
  Description of Artificial Sequence: Synthetic oligonucleotide
cagcccucuccaagucacg

SEQ ID NO: 1530913 - RNA, 19 nt, Artificial Sequence
  Description of Artificial Sequence: Synthetic oligonucleotide
uaguuccgcccugggaaga

SEQ ID NO: 1530914 - RNA, 19 nt, Artificial Sequence
  Description of Artificial Sequence: Synthetic oligonucleotide
cuguaguuccgcccuggga

SEQ ID NO: 1530915 - RNA, 19 nt, Artificial Sequence
  Description of Artificial Sequence: Synthetic oligonucleotide
cccagaaauaaagggaaca

SEQ ID NO: 1530916 - RNA, 19 nt, Artificial Sequence
  Description of Artificial Sequence: Synthetic oligonucleotide
aggugcaagcccacuccag

SEQ ID NO: 1530917 - RNA, 19 nt, Artificial Sequence
  Description of Artificial Sequence: Synthetic oligonucleotide
cggaauugcugauggucgg

SEQ ID NO: 1530918 - RNA, 19 nt, Artificial Sequence
  Description of Artificial Sequence: Synthetic oligonucleotide
aacuggugcugcagucgca

SEQ ID NO: 1530919 - RNA, 19 nt, Artificial Sequence
  Description of Artificial Sequence: Synthetic oligonucleotide
guuagcuccaagucuccuu

SEQ ID NO: 1530920 - RNA, 19 nt, Artificial Sequence
  Description of Artificial Sequence: Synthetic oligonucleotide
cgauugugcuggaaagagc

SEQ ID NO: 1530921 - RNA, 19 nt, Artificial Sequence
  Description of Artificial Sequence: Synthetic oligonucleotide
acucggaacugcagguccu

SEQ ID NO: 1530922 - RNA, 19 nt, Artificial Sequence
  Description of Artificial Sequence: Synthetic oligonucleotide
auugugcuggaaagagcaa

SEQ ID NO: 1530923 - RNA, 19 nt, Artificial Sequence
  Description of Artificial Sequence: Synthetic oligonucleotide
auggggccgguccauggua

SEQ ID NO: 1530924 - RNA, 19 nt, Artificial Sequence
  Description of Artificial Sequence: Synthetic oligonucleotide
ggaacaaguuuaauuuccu

SEQ ID NO: 1530925 - RNA, 19 nt, Artificial Sequence
  Description of Artificial Sequence: Synthetic oligonucleotide
gggagccuuuggcuguuag

SEQ ID NO: 1530926 - RNA, 19 nt, Artificial Sequence
  Description of Artificial Sequence: Synthetic oligonucleotide
ucgggugcugaagcugggu

SEQ ID NO: 1530927 - RNA, 19 nt, Artificial Sequence
  Description of Artificial Sequence: Synthetic oligonucleotide
gccaccuacuggugccugg

SEQ ID NO: 1530928 - RNA, 19 nt, Artificial Sequence
  Description of Artificial Sequence: Synthetic oligonucleotide
gggccuucaaaggccagug

SEQ ID NO: 1530929 - RNA, 19 nt, Artificial Sequence
  Description of Artificial Sequence: Synthetic oligonucleotide
cagcaaccgugcccgcugc

SEQ ID NO: 1530930 - RNA, 19 nt, Artificial Sequence
  Description of Artificial Sequence: Synthetic oligonucleotide
aggcgagcgcuacccaaaa

SEQ ID NO: 1530931 - RNA, 19 nt, Artificial Sequence
  Description of Artificial Sequence: Synthetic oligonucleotide
cuucccacugugguuagcu

SEQ ID NO: 1530932 - RNA, 19 nt, Artificial Sequence
  Description of Artificial Sequence: Synthetic oligonucleotide
cacgaaccuccgugggcug

SEQ ID NO: 1530933 - RNA, 19 nt, Artificial Sequence
  Description of Artificial Sequence: Synthetic oligonucleotide
gcccugggaagacacgaac

SEQ ID NO: 1530934 - RNA, 19 nt, Artificial Sequence
  Description of Artificial Sequence: Synthetic oligonucleotide
cuaggcugcuguuguuaaa

SEQ ID NO: 1530935 - RNA, 19 nt, Artificial Sequence
  Description of Artificial Sequence: Synthetic oligonucleotide
gaguagcgucucugcucug

SEQ ID NO: 1530936 - RNA, 19 nt, Artificial Sequence
  Description of Artificial Sequence: Synthetic oligonucleotide
gcaacauacugcucaugcu

SEQ ID NO: 1530937 - RNA, 19 nt, Artificial Sequence
  Description of Artificial Sequence: Synthetic oligonucleotide
uucuaggcucuaggcugcu

SEQ ID NO: 1530938 - RNA, 19 nt, Artificial Sequence
  Description of Artificial Sequence: Synthetic oligonucleotide
ccccuuagagccuccacca

SEQ ID NO: 1530939 - RNA, 19 nt, Artificial Sequence
  Description of Artificial Sequence: Synthetic oligonucleotide
caccuacuggugccuggug

SEQ ID NO: 1530940 - RNA, 19 nt, Artificial Sequence
  Description of Artificial Sequence: Synthetic oligonucleotide
ggaauugcugauggucgga

SEQ ID NO: 1530941 - RNA, 19 nt, Artificial Sequence
  Description of Artificial Sequence: Synthetic oligonucleotide
cgugagcugccgauugugc

SEQ ID NO: 1530942 - RNA, 19 nt, Artificial Sequence
  Description of Artificial Sequence: Synthetic oligonucleotide
ccauaccuguuacccacug

SEQ ID NO: 1530943 - RNA, 19 nt, Artificial Sequence
  Description of Artificial Sequence: Synthetic oligonucleotide
cuccuuguccagccccguc

SEQ ID NO: 1530944 - RNA, 19 nt, Artificial Sequence
  Description of Artificial Sequence: Synthetic oligonucleotide
cucggaacugcagguccuc

SEQ ID NO: 1530945 - RNA, 19 nt, Artificial Sequence
  Description of Artificial Sequence: Synthetic oligonucleotide
gaagccuggcaggggcuuc

SEQ ID NO: 1530946 - RNA, 19 nt, Artificial Sequence
  Description of Artificial Sequence: Synthetic oligonucleotide
cguucucuaccagcaaccg

SEQ ID NO: 1530947 - RNA, 19 nt, Artificial Sequence
  Description of Artificial Sequence: Synthetic oligonucleotide
ggcgagcgcuacccaaaag

SEQ ID NO: 1530948 - RNA, 19 nt, Artificial Sequence
  Description of Artificial Sequence: Synthetic oligonucleotide
ggucggaguccugucugag

SEQ ID NO: 1530949 - RNA, 19 nt, Artificial Sequence
  Description of Artificial Sequence: Synthetic oligonucleotide
gucuccuuuggugauggau

SEQ ID NO: 1530950 - RNA, 19 nt, Artificial Sequence
  Description of Artificial Sequence: Synthetic oligonucleotide
ggccgguccaugguauucc

SEQ ID NO: 1530951 - RNA, 19 nt, Artificial Sequence
  Description of Artificial Sequence: Synthetic oligonucleotide
ccuaauccgugagcugccg

SEQ ID NO: 1530952 - RNA, 19 nt, Artificial Sequence
  Description of Artificial Sequence: Synthetic oligonucleotide
cugacagggacuucuccuu

SEQ ID NO: 1530953 - RNA, 19 nt, Artificial Sequence
  Description of Artificial Sequence: Synthetic oligonucleotide
cauaccuguuacccacugu

SEQ ID NO: 1530954 - RNA, 19 nt, Artificial Sequence
  Description of Artificial Sequence: Synthetic oligonucleotide
cuacuucagcccucuccaa

SEQ ID NO: 1530955 - RNA, 19 nt, Artificial Sequence
  Description of Artificial Sequence: Synthetic oligonucleotide
ggugcugaagcugggucaa

SEQ ID NO: 1530956 - RNA, 19 nt, Artificial Sequence
  Description of Artificial Sequence: Synthetic oligonucleotide
cuugucuggcugguggaua

SEQ ID NO: 1530957 - RNA, 19 nt, Artificial Sequence
  Description of Artificial Sequence: Synthetic oligonucleotide
gugcuggaaagagcaaugu

SEQ ID NO: 1530958 - RNA, 19 nt, Artificial Sequence
  Description of Artificial Sequence: Synthetic oligonucleotide
ccucuagcugcagcacucg

SEQ ID NO: 1530959 - RNA, 19 nt, Artificial Sequence
  Description of Artificial Sequence: Synthetic oligonucleotide
ggggucaguguuuguccuc

SEQ ID NO: 1530960 - RNA, 19 nt, Artificial Sequence
  Description of Artificial Sequence: Synthetic oligonucleotide
ucccuacuaugggagccuu

SEQ ID NO: 1530961 - RNA, 19 nt, Artificial Sequence
  Description of Artificial Sequence: Synthetic oligonucleotide
cuccuaagggcgagagugu

SEQ ID NO: 1530962 - RNA, 19 nt, Artificial Sequence
  Description of Artificial Sequence: Synthetic oligonucleotide
gccauccuuaugacuuacc

SEQ ID NO: 1530963 - RNA, 19 nt, Artificial Sequence
  Description of Artificial Sequence: Synthetic oligonucleotide
ccuccgugcucaccaacug

SEQ ID NO: 1530964 - RNA, 19 nt, Artificial Sequence
  Description of Artificial Sequence: Synthetic oligonucleotide
gaaccuccgugggcugcug

SEQ ID NO: 1530965 - RNA, 19 nt, Artificial Sequence
  Description of Artificial Sequence: Synthetic oligonucleotide
gccgauugugcuggaaaga

SEQ ID NO: 1530966 - RNA, 19 nt, Artificial Sequence
  Description of Artificial Sequence: Synthetic oligonucleotide
cccuuagagccuccaccag

SEQ ID NO: 1530967 - RNA, 19 nt, Artificial Sequence
  Description of Artificial Sequence: Synthetic oligonucleotide
ccuaagggcgagaguguga

SEQ ID NO: 1530968 - RNA, 19 nt, Artificial Sequence
  Description of Artificial Sequence: Synthetic oligonucleotide
ccaugguauuccuuggggu

SEQ ID NO: 1530969 - RNA, 19 nt, Artificial Sequence
  Description of Artificial Sequence: Synthetic oligonucleotide
uggugugaauggggccggu

SEQ ID NO: 1530970 - RNA, 19 nt, Artificial Sequence
  Description of Artificial Sequence: Synthetic oligonucleotide
gccuugucuggcuggugga

SEQ ID NO: 1530971 - RNA, 19 nt, Artificial Sequence
  Description of Artificial Sequence: Synthetic oligonucleotide
gcacucgagacuucccacu

SEQ ID NO: 1530972 - RNA, 19 nt, Artificial Sequence
  Description of Artificial Sequence: Synthetic oligonucleotide
gaacgcuuuuaaagaguuu

SEQ ID NO: 1530973 - RNA, 19 nt, Artificial Sequence
  Description of Artificial Sequence: Synthetic oligonucleotide
ccuguuacccacuguaguu

SEQ ID NO: 1530974 - RNA, 19 nt, Artificial Sequence
  Description of Artificial Sequence: Synthetic oligonucleotide
ggugugaauggggccgguc

SEQ ID NO: 1530975 - RNA, 19 nt, Artificial Sequence
  Description of Artificial Sequence: Synthetic oligonucleotide
cauccuccgugcucaccaa

SEQ ID NO: 1530976 - RNA, 19 nt, Artificial Sequence
  Description of Artificial Sequence: Synthetic oligonucleotide
ccgugcucaccaacuggug

SEQ ID NO: 1530977 - RNA, 19 nt, Artificial Sequence
  Description of Artificial Sequence: Synthetic oligonucleotide
caccccagcaaaacaccau

SEQ ID NO: 1530978 - RNA, 19 nt, Artificial Sequence
  Description of Artificial Sequence: Synthetic oligonucleotide
ccgugagcugccgauugug

SEQ ID NO: 1530979 - RNA, 19 nt, Artificial Sequence
  Description of Artificial Sequence: Synthetic oligonucleotide
ggaagacacgaaccuccgu

SEQ ID NO: 1530980 - RNA, 19 nt, Artificial Sequence
  Description of Artificial Sequence: Synthetic oligonucleotide
ccuacuggugccugguggu

SEQ ID NO: 1530981 - RNA, 19 nt, Artificial Sequence
  Description of Artificial Sequence: Synthetic oligonucleotide
ucgcagcagcucgggugcu

SEQ ID NO: 1530982 - RNA, 19 nt, Artificial Sequence
  Description of Artificial Sequence: Synthetic oligonucleotide
cugggucaaugagggagua

SEQ ID NO: 1530983 - RNA, 19 nt, Artificial Sequence
  Description of Artificial Sequence: Synthetic oligonucleotide
ccacucggaacugcagguc

SEQ ID NO: 1530984 - RNA, 19 nt, Artificial Sequence
  Description of Artificial Sequence: Synthetic oligonucleotide
gggccgguccaugguauuc

SEQ ID NO: 1530985 - RNA, 19 nt, Artificial Sequence
  Description of Artificial Sequence: Synthetic oligonucleotide
gggccauccuuaugacuua

SEQ ID NO: 1530986 - RNA, 19 nt, Artificial Sequence
  Description of Artificial Sequence: Synthetic oligonucleotide
gugaauggggccgguccau

SEQ ID NO: 1530987 - RNA, 19 nt, Artificial Sequence
  Description of Artificial Sequence: Synthetic oligonucleotide
cgagagugugagcgccacc

SEQ ID NO: 1530988 - RNA, 19 nt, Artificial Sequence
  Description of Artificial Sequence: Synthetic oligonucleotide
ggccagugcuuguggggaa

SEQ ID NO: 1530989 - RNA, 19 nt, Artificial Sequence
  Description of Artificial Sequence: Synthetic oligonucleotide
gccccuuuuggucccuacu

SEQ ID NO: 1530990 - RNA, 19 nt, Artificial Sequence
  Description of Artificial Sequence: Synthetic oligonucleotide
ugccuucagcagggcgauc

SEQ ID NO: 1530991 - RNA, 19 nt, Artificial Sequence
  Description of Artificial Sequence: Synthetic oligonucleotide
gugcgucccgcagggcauc

SEQ ID NO: 1530992 - RNA, 19 nt, Artificial Sequence
  Description of Artificial Sequence: Synthetic oligonucleotide
gcgcuacccaaaagccaac

SEQ ID NO: 1530993 - RNA, 19 nt, Artificial Sequence
  Description of Artificial Sequence: Synthetic oligonucleotide
ccgcccugggaagacacga

SEQ ID NO: 1530994 - RNA, 19 nt, Artificial Sequence
  Description of Artificial Sequence: Synthetic oligonucleotide
ggaagguggagaggcuaau

SEQ ID NO: 1530995 - RNA, 19 nt, Artificial Sequence
  Description of Artificial Sequence: Synthetic oligonucleotide
cagccccuuagagccucca

SEQ ID NO: 1530996 - RNA, 19 nt, Artificial Sequence
  Description of Artificial Sequence: Synthetic oligonucleotide
cgaucucaccacgccgcag

SEQ ID NO: 1530997 - RNA, 19 nt, Artificial Sequence
  Description of Artificial Sequence: Synthetic oligonucleotide
ccgugcccgcugcagcuuc

SEQ ID NO: 1530998 - RNA, 19 nt, Artificial Sequence
  Description of Artificial Sequence: Synthetic oligonucleotide
gcugccgauugugcuggaa

SEQ ID NO: 1530999 - RNA, 19 nt, Artificial Sequence
  Description of Artificial Sequence: Synthetic oligonucleotide
ccccagcaaaacaccauau

SEQ ID NO: 1531000 - RNA, 19 nt, Artificial Sequence
  Description of Artificial Sequence: Synthetic oligonucleotide
cagucgcagcagcucgggu

SEQ ID NO: 1531001 - RNA, 19 nt, Artificial Sequence
  Description of Artificial Sequence: Synthetic oligonucleotide
cugguggccuuagcuacuu

SEQ ID NO: 1531002 - RNA, 19 nt, Artificial Sequence
  Description of Artificial Sequence: Synthetic oligonucleotide
cgcuacccaaaagccaaca

SEQ ID NO: 1531003 - RNA, 19 nt, Artificial Sequence
  Description of Artificial Sequence: Synthetic oligonucleotide
gcucaaugugcugcuguuu

SEQ ID NO: 1531004 - RNA, 19 nt, Artificial Sequence
  Description of Artificial Sequence: Synthetic oligonucleotide
caccacgccgcaggcucaa

SEQ ID NO: 1531005 - RNA, 19 nt, Artificial Sequence
  Description of Artificial Sequence: Synthetic oligonucleotide
cagcuagcagcugcucaau

SEQ ID NO: 1531006 - RNA, 19 nt, Artificial Sequence
  Description of Artificial Sequence: Synthetic oligonucleotide
ccacgccgcaggcucaacu

SEQ ID NO: 1531007 - RNA, 19 nt, Artificial Sequence
  Description of Artificial Sequence: Synthetic oligonucleotide
ccaccuacuggugccuggu

SEQ ID NO: 1531008 - RNA, 19 nt, Artificial Sequence
  Description of Artificial Sequence: Synthetic oligonucleotide
cgccaccuacuggugccug

SEQ ID NO: 1531009 - RNA, 19 nt, Artificial Sequence
  Description of Artificial Sequence: Synthetic oligonucleotide
ggggccgguccaugguauu

SEQ ID NO: 1531010 - RNA, 19 nt, Artificial Sequence
  Description of Artificial Sequence: Synthetic oligonucleotide
ccuuggggucaguguuugu

SEQ ID NO: 1531011 - RNA, 19 nt, Artificial Sequence
  Description of Artificial Sequence: Synthetic oligonucleotide
cagccccuuuuggucccua

SEQ ID NO: 1531012 - RNA, 19 nt, Artificial Sequence
  Description of Artificial Sequence: Synthetic oligonucleotide
ccagugcuuguggggaaau

SEQ ID NO: 1531013 - RNA, 19 nt, Artificial Sequence
  Description of Artificial Sequence: Synthetic oligonucleotide
cccuacuaugggagccuuu

SEQ ID NO: 1531014 - RNA, 19 nt, Artificial Sequence
  Description of Artificial Sequence: Synthetic oligonucleotide
cccgcagggcauccuccgu

SEQ ID NO: 1531015 - RNA, 19 nt, Artificial Sequence
  Description of Artificial Sequence: Synthetic oligonucleotide
gcgucccgcagggcauccu

SEQ ID NO: 1531016 - RNA, 19 nt, Artificial Sequence
  Description of Artificial Sequence: Synthetic oligonucleotide
aguuaggaagccuagaucc

SEQ ID NO: 1531017 - RNA, 19 nt, Artificial Sequence
  Description of Artificial Sequence: Synthetic oligonucleotide
uacuaaaauacucaugugg

SEQ ID NO: 1531018 - RNA, 19 nt, Artificial Sequence
  Description of Artificial Sequence: Synthetic oligonucleotide
agugcugugguguugaucc

SEQ ID NO: 1531019 - RNA, 19 nt, Artificial Sequence
  Description of Artificial Sequence: Synthetic oligonucleotide
aaaaugaggauaucgagga

SEQ ID NO: 1531020 - RNA, 19 nt, Artificial Sequence
  Description of Artificial Sequence: Synthetic oligonucleotide
uccucuauggcacaggugg

SEQ ID NO: 1531021 - RNA, 19 nt, Artificial Sequence
  Description of Artificial Sequence: Synthetic oligonucleotide
uuuaacacaaaauacuacu

SEQ ID NO: 1531022 - RNA, 19 nt, Artificial Sequence
  Description of Artificial Sequence: Synthetic oligonucleotide
aagagaacacauugcaggc

SEQ ID NO: 1531023 - RNA, 19 nt, Artificial Sequence
  Description of Artificial Sequence: Synthetic oligonucleotide
uuuugguacaaaauaaaug

SEQ ID NO: 1531024 - RNA, 19 nt, Artificial Sequence
  Description of Artificial Sequence: Synthetic oligonucleotide
auaucgaggacaaacaccc

SEQ ID NO: 1531025 - RNA, 19 nt, Artificial Sequence
  Description of Artificial Sequence: Synthetic oligonucleotide
aguagaaggcaccugaagg

SEQ ID NO: 1531026 - RNA, 19 nt, Artificial Sequence
  Description of Artificial Sequence: Synthetic oligonucleotide
aggacaaacacccauucac

SEQ ID NO: 1531027 - RNA, 19 nt, Artificial Sequence
  Description of Artificial Sequence: Synthetic oligonucleotide
aaaguugccaaccaccaca

SEQ ID NO: 1531028 - RNA, 19 nt, Artificial Sequence
  Description of Artificial Sequence: Synthetic oligonucleotide
caaaauacuacucuggguc

SEQ ID NO: 1531029 - RNA, 19 nt, Artificial Sequence
  Description of Artificial Sequence: Synthetic oligonucleotide
gaaaaugaggauaucgagg

SEQ ID NO: 1531030 - RNA, 19 nt, Artificial Sequence
  Description of Artificial Sequence: Synthetic oligonucleotide
uuagaauucuuuuaauaga

SEQ ID NO: 1531031 - RNA, 19 nt, Artificial Sequence
  Description of Artificial Sequence: Synthetic oligonucleotide
aauuagaauucuuuuaaua

SEQ ID NO: 1531032 - RNA, 19 nt, Artificial Sequence
  Description of Artificial Sequence: Synthetic oligonucleotide
gaagacuccacuaaggacc

SEQ ID NO: 1531033 - RNA, 19 nt, Artificial Sequence
  Description of Artificial Sequence: Synthetic oligonucleotide
ugaccuuuaacacaaaaua

SEQ ID NO: 1531034 - RNA, 19 nt, Artificial Sequence
  Description of Artificial Sequence: Synthetic oligonucleotide
ugcaaagaagguaaaaggu

SEQ ID NO: 1531035 - RNA, 19 nt, Artificial Sequence
  Description of Artificial Sequence: Synthetic oligonucleotide
uagaaaaugaggauaucga

SEQ ID NO: 1531036 - RNA, 19 nt, Artificial Sequence
  Description of Artificial Sequence: Synthetic oligonucleotide
guagaaaaugaggauaucg

SEQ ID NO: 1531037 - RNA, 19 nt, Artificial Sequence
  Description of Artificial Sequence: Synthetic oligonucleotide
ugaagaacccaaaugcagc

SEQ ID NO: 1531038 - RNA, 19 nt, Artificial Sequence
  Description of Artificial Sequence: Synthetic oligonucleotide
aacucauagcugaaggugc

SEQ ID NO: 1531039 - RNA, 19 nt, Artificial Sequence
  Description of Artificial Sequence: Synthetic oligonucleotide
aaaauacucaugugguucu

SEQ ID NO: 1531040 - RNA, 19 nt, Artificial Sequence
  Description of Artificial Sequence: Synthetic oligonucleotide
uccgauguaguguagagac

SEQ ID NO: 1531041 - RNA, 19 nt, Artificial Sequence
  Description of Artificial Sequence: Synthetic oligonucleotide
auucacacagggcagcccc

SEQ ID NO: 1531042 - RNA, 19 nt, Artificial Sequence
  Description of Artificial Sequence: Synthetic oligonucleotide
uaacacaaaauacuacucu

SEQ ID NO: 1531043 - RNA, 19 nt, Artificial Sequence
  Description of Artificial Sequence: Synthetic oligonucleotide
uaccgaagaaggcagauca

SEQ ID NO: 1531044 - RNA, 19 nt, Artificial Sequence
  Description of Artificial Sequence: Synthetic oligonucleotide
auauguuccacacuugcug

SEQ ID NO: 1531045 - RNA, 19 nt, Artificial Sequence
  Description of Artificial Sequence: Synthetic oligonucleotide
gaagguaggccauagccag

SEQ ID NO: 1531046 - RNA, 19 nt, Artificial Sequence
  Description of Artificial Sequence: Synthetic oligonucleotide
uuaggcuaaggcaugcucc

SEQ ID NO: 1531047 - RNA, 19 nt, Artificial Sequence
  Description of Artificial Sequence: Synthetic oligonucleotide
gaggggaacaucaucaagg

SEQ ID NO: 1531048 - RNA, 19 nt, Artificial Sequence
  Description of Artificial Sequence: Synthetic oligonucleotide
guagaaggcaccugaaggg

SEQ ID NO: 1531049 - RNA, 19 nt, Artificial Sequence
  Description of Artificial Sequence: Synthetic oligonucleotide
aaugaggauaucgaggaca

SEQ ID NO: 1531050 - RNA, 19 nt, Artificial Sequence
  Description of Artificial Sequence: Synthetic oligonucleotide
agguaaaaggugugggugc

SEQ ID NO: 1531051 - RNA, 19 nt, Artificial Sequence
  Description of Artificial Sequence: Synthetic oligonucleotide
ugggguaaggacaacaggu

SEQ ID NO: 1531052 - RNA, 19 nt, Artificial Sequence
  Description of Artificial Sequence: Synthetic oligonucleotide
aacaucaucaaggguacag

SEQ ID NO: 1531053 - RNA, 19 nt, Artificial Sequence
  Description of Artificial Sequence: Synthetic oligonucleotide
agagugaagaacccaaaug

SEQ ID NO: 1531054 - RNA, 19 nt, Artificial Sequence
  Description of Artificial Sequence: Synthetic oligonucleotide
aauacucaugugguucugc

SEQ ID NO: 1531055 - RNA, 19 nt, Artificial Sequence
  Description of Artificial Sequence: Synthetic oligonucleotide
auacacuguccauaugccc

SEQ ID NO: 1531056 - RNA, 19 nt, Artificial Sequence
  Description of Artificial Sequence: Synthetic oligonucleotide
uaaaauacucaugugguuc

SEQ ID NO: 1531057 - RNA, 19 nt, Artificial Sequence
  Description of Artificial Sequence: Synthetic oligonucleotide
cauuguaggaccaauucuc

SEQ ID NO: 1531058 - RNA, 19 nt, Artificial Sequence
  Description of Artificial Sequence: Synthetic oligonucleotide
caucauccagacuuaaggg

SEQ ID NO: 1531059 - RNA, 19 nt, Artificial Sequence
  Description of Artificial Sequence: Synthetic oligonucleotide
aagguaaaaggugugggug

SEQ ID NO: 1531060 - RNA, 19 nt, Artificial Sequence
  Description of Artificial Sequence: Synthetic oligonucleotide
aagaccguccucuauggca

SEQ ID NO: 1531061 - RNA, 19 nt, Artificial Sequence
  Description of Artificial Sequence: Synthetic oligonucleotide
auaaaugcaaagaagguaa

SEQ ID NO: 1531062 - RNA, 19 nt, Artificial Sequence
  Description of Artificial Sequence: Synthetic oligonucleotide
guccauaugcccgugaugg

SEQ ID NO: 1531063 - RNA, 19 nt, Artificial Sequence
  Description of Artificial Sequence: Synthetic oligonucleotide
uggcaauacucucaggagc

SEQ ID NO: 1531064 - RNA, 19 nt, Artificial Sequence
  Description of Artificial Sequence: Synthetic oligonucleotide
uguugauccaggagugccg

SEQ ID NO: 1531065 - RNA, 19 nt, Artificial Sequence
  Description of Artificial Sequence: Synthetic oligonucleotide
gauaucgaggacaaacacc

SEQ ID NO: 1531066 - RNA, 19 nt, Artificial Sequence
  Description of Artificial Sequence: Synthetic oligonucleotide
uucaucacggccauggcau

SEQ ID NO: 1531067 - RNA, 19 nt, Artificial Sequence
  Description of Artificial Sequence: Synthetic oligonucleotide
accauaaaagcacccaugu

SEQ ID NO: 1531068 - RNA, 19 nt, Artificial Sequence
  Description of Artificial Sequence: Synthetic oligonucleotide
gaggauaucgaggacaaac

SEQ ID NO: 1531069 - RNA, 19 nt, Artificial Sequence
  Description of Artificial Sequence: Synthetic oligonucleotide
uguaggaccaauucuccac

SEQ ID NO: 1531070 - RNA, 19 nt, Artificial Sequence
  Description of Artificial Sequence: Synthetic oligonucleotide
uugcccuaaaggaagugag

SEQ ID NO: 1531071 - RNA, 19 nt, Artificial Sequence
  Description of Artificial Sequence: Synthetic oligonucleotide
acucagaucauggcaauac

SEQ ID NO: 1531072 - RNA, 19 nt, Artificial Sequence
  Description of Artificial Sequence: Synthetic oligonucleotide
aggagcacaguugaggugg

SEQ ID NO: 1531073 - RNA, 19 nt, Artificial Sequence
  Description of Artificial Sequence: Synthetic oligonucleotide
agaucauggcaauacucuc

SEQ ID NO: 1531074 - RNA, 19 nt, Artificial Sequence
  Description of Artificial Sequence: Synthetic oligonucleotide
aggacuuacaggcccugcc

SEQ ID NO: 1531075 - RNA, 19 nt, Artificial Sequence
  Description of Artificial Sequence: Synthetic oligonucleotide
uugggguaaggacaacagg

SEQ ID NO: 1531076 - RNA, 19 nt, Artificial Sequence
  Description of Artificial Sequence: Synthetic oligonucleotide
aggggaacaucaucaaggg

SEQ ID NO: 1531077 - RNA, 19 nt, Artificial Sequence
  Description of Artificial Sequence: Synthetic oligonucleotide
gaugaggggaacaucauca

SEQ ID NO: 1531078 - RNA, 19 nt, Artificial Sequence
  Description of Artificial Sequence: Synthetic oligonucleotide
gaaggugccguagaaaaug

SEQ ID NO: 1531079 - RNA, 19 nt, Artificial Sequence
  Description of Artificial Sequence: Synthetic oligonucleotide
aaaaggugugggugcuucg

SEQ ID NO: 1531080 - RNA, 19 nt, Artificial Sequence
  Description of Artificial Sequence: Synthetic oligonucleotide
aucauggcaauacucucag

SEQ ID NO: 1531081 - RNA, 19 nt, Artificial Sequence
  Description of Artificial Sequence: Synthetic oligonucleotide
uucccuuaggcuaaggcau

SEQ ID NO: 1531082 - RNA, 19 nt, Artificial Sequence
  Description of Artificial Sequence: Synthetic oligonucleotide
cauacacuguccauaugcc

SEQ ID NO: 1531083 - RNA, 19 nt, Artificial Sequence
  Description of Artificial Sequence: Synthetic oligonucleotide
aggggcagagugaagaacc

SEQ ID NO: 1531084 - RNA, 19 nt, Artificial Sequence
  Description of Artificial Sequence: Synthetic oligonucleotide
aauacuacucugggucugg

SEQ ID NO: 1531085 - RNA, 19 nt, Artificial Sequence
  Description of Artificial Sequence: Synthetic oligonucleotide
aucauccagacuuaagggu

SEQ ID NO: 1531086 - RNA, 19 nt, Artificial Sequence
  Description of Artificial Sequence: Synthetic oligonucleotide
acacaaaauacuacucugg

SEQ ID NO: 1531087 - RNA, 19 nt, Artificial Sequence
  Description of Artificial Sequence: Synthetic oligonucleotide
aaaggugugggugcuucgg

SEQ ID NO: 1531088 - RNA, 19 nt, Artificial Sequence
  Description of Artificial Sequence: Synthetic oligonucleotide
agggccaccauaaaagcac

SEQ ID NO: 1531089 - RNA, 19 nt, Artificial Sequence
  Description of Artificial Sequence: Synthetic oligonucleotide
auuccugcagcaggaaacc

SEQ ID NO: 1531090 - RNA, 19 nt, Artificial Sequence
  Description of Artificial Sequence: Synthetic oligonucleotide
ugcccuaaaggaagugagg

SEQ ID NO: 1531091 - RNA, 19 nt, Artificial Sequence
  Description of Artificial Sequence: Synthetic oligonucleotide
uagaucccaacaauacucu

SEQ ID NO: 1531092 - RNA, 19 nt, Artificial Sequence
  Description of Artificial Sequence: Synthetic oligonucleotide
guagguagggaagaggggc

SEQ ID NO: 1531093 - RNA, 19 nt, Artificial Sequence
  Description of Artificial Sequence: Synthetic oligonucleotide
cucucauggaggaagaaga

SEQ ID NO: 1531094 - RNA, 19 nt, Artificial Sequence
  Description of Artificial Sequence: Synthetic oligonucleotide
aaguacuaaaauacucaug

SEQ ID NO: 1531095 - RNA, 19 nt, Artificial Sequence
  Description of Artificial Sequence: Synthetic oligonucleotide
cuuucccuuaggcuaaggc

SEQ ID NO: 1531096 - RNA, 19 nt, Artificial Sequence
  Description of Artificial Sequence: Synthetic oligonucleotide
uccacacuugcugaugagg

SEQ ID NO: 1531097 - RNA, 19 nt, Artificial Sequence
  Description of Artificial Sequence: Synthetic oligonucleotide
acccuccagacucagauca

SEQ ID NO: 1531098 - RNA, 19 nt, Artificial Sequence
  Description of Artificial Sequence: Synthetic oligonucleotide
ugacagccagcacacuccg

SEQ ID NO: 1531099 - RNA, 19 nt, Artificial Sequence
  Description of Artificial Sequence: Synthetic oligonucleotide
guaggccauagccaggucc

SEQ ID NO: 1531100 - RNA, 19 nt, Artificial Sequence
  Description of Artificial Sequence: Synthetic oligonucleotide
aaauacuacucugggucug

SEQ ID NO: 1531101 - RNA, 19 nt, Artificial Sequence
  Description of Artificial Sequence: Synthetic oligonucleotide
guaguguagagacuuggca

SEQ ID NO: 1531102 - RNA, 19 nt, Artificial Sequence
  Description of Artificial Sequence: Synthetic oligonucleotide
uuugcccuaaaggaaguga

SEQ ID NO: 1531103 - RNA, 19 nt, Artificial Sequence
  Description of Artificial Sequence: Synthetic oligonucleotide
aaaugcaaagaagguaaaa

SEQ ID NO: 1531104 - RNA, 19 nt, Artificial Sequence
  Description of Artificial Sequence: Synthetic oligonucleotide
gaagccuagaucccaacaa

SEQ ID NO: 1531105 - RNA, 19 nt, Artificial Sequence
  Description of Artificial Sequence: Synthetic oligonucleotide
guagcugagagcucucaug

SEQ ID NO: 1531106 - RNA, 19 nt, Artificial Sequence
  Description of Artificial Sequence: Synthetic oligonucleotide
aggaccaauucuccacugg

SEQ ID NO: 1531107 - RNA, 19 nt, Artificial Sequence
  Description of Artificial Sequence: Synthetic oligonucleotide
cacagguggauguuggaug

SEQ ID NO: 1531108 - RNA, 19 nt, Artificial Sequence
  Description of Artificial Sequence: Synthetic oligonucleotide
gacuuacaggcccugccag

SEQ ID NO: 1531109 - RNA, 19 nt, Artificial Sequence
  Description of Artificial Sequence: Synthetic oligonucleotide
cacccauucacacagggca

SEQ ID NO: 1531110 - RNA, 19 nt, Artificial Sequence
  Description of Artificial Sequence: Synthetic oligonucleotide
guacuaaaauacucaugug

SEQ ID NO: 1531111 - RNA, 19 nt, Artificial Sequence
  Description of Artificial Sequence: Synthetic oligonucleotide
uauuugcccuaaaggaagu

SEQ ID NO: 1531112 - RNA, 19 nt, Artificial Sequence
  Description of Artificial Sequence: Synthetic oligonucleotide
guagaggugcugcugcucc

SEQ ID NO: 1531113 - RNA, 19 nt, Artificial Sequence
  Description of Artificial Sequence: Synthetic oligonucleotide
gaguuaggaagccuagauc

SEQ ID NO: 1531114 - RNA, 19 nt, Artificial Sequence
  Description of Artificial Sequence: Synthetic oligonucleotide
acccauguugccaaugagg

SEQ ID NO: 1531115 - RNA, 19 nt, Artificial Sequence
  Description of Artificial Sequence: Synthetic oligonucleotide
acuuacaggcccugccagg

SEQ ID NO: 1531116 - RNA, 19 nt, Artificial Sequence
  Description of Artificial Sequence: Synthetic oligonucleotide
acccaaaugcagcugggug

SEQ ID NO: 1531117 - RNA, 19 nt, Artificial Sequence
  Description of Artificial Sequence: Synthetic oligonucleotide
gguaaggacaacagguagg

SEQ ID NO: 1531118 - RNA, 19 nt, Artificial Sequence
  Description of Artificial Sequence: Synthetic oligonucleotide
guuggauggccacuucucc

SEQ ID NO: 1531119 - RNA, 19 nt, Artificial Sequence
  Description of Artificial Sequence: Synthetic oligonucleotide
uuaggaagccuagauccca

SEQ ID NO: 1531120 - RNA, 19 nt, Artificial Sequence
  Description of Artificial Sequence: Synthetic oligonucleotide
caccauaaaagcacccaug

SEQ ID NO: 1531121 - RNA, 19 nt, Artificial Sequence
  Description of Artificial Sequence: Synthetic oligonucleotide
uaaggcaugcuccucccau

SEQ ID NO: 1531122 - RNA, 19 nt, Artificial Sequence
  Description of Artificial Sequence: Synthetic oligonucleotide
auacucaugugguucugcu

SEQ ID NO: 1531123 - RNA, 19 nt, Artificial Sequence
  Description of Artificial Sequence: Synthetic oligonucleotide
uccagacucagaucauggc

SEQ ID NO: 1531124 - RNA, 19 nt, Artificial Sequence
  Description of Artificial Sequence: Synthetic oligonucleotide
ccaggaguugcccauaccg

SEQ ID NO: 1531125 - RNA, 19 nt, Artificial Sequence
  Description of Artificial Sequence: Synthetic oligonucleotide
uuggauggccacuucucca

SEQ ID NO: 1531126 - RNA, 19 nt, Artificial Sequence
  Description of Artificial Sequence: Synthetic oligonucleotide
uacuacucugggucugggg

SEQ ID NO: 1531127 - RNA, 19 nt, Artificial Sequence
  Description of Artificial Sequence: Synthetic oligonucleotide
cuuacaggcccugccaggg

SEQ ID NO: 1531128 - RNA, 19 nt, Artificial Sequence
  Description of Artificial Sequence: Synthetic oligonucleotide
uggcgguucaucacggcca

SEQ ID NO: 1531129 - RNA, 19 nt, Artificial Sequence
  Description of Artificial Sequence: Synthetic oligonucleotide
uguccauaugcccgugaug

SEQ ID NO: 1531130 - RNA, 19 nt, Artificial Sequence
  Description of Artificial Sequence: Synthetic oligonucleotide
cugaaggugccguagaaaa

SEQ ID NO: 1531131 - RNA, 19 nt, Artificial Sequence
  Description of Artificial Sequence: Synthetic oligonucleotide
ugugucugaggagacugcc

SEQ ID NO: 1531132 - RNA, 19 nt, Artificial Sequence
  Description of Artificial Sequence: Synthetic oligonucleotide
aggaccggugaccuuuaac

SEQ ID NO: 1531133 - RNA, 19 nt, Artificial Sequence
  Description of Artificial Sequence: Synthetic oligonucleotide
agaccguccucuauggcac

SEQ ID NO: 1531134 - RNA, 19 nt, Artificial Sequence
  Description of Artificial Sequence: Synthetic oligonucleotide
aucgaggacaaacacccau

SEQ ID NO: 1531135 - RNA, 19 nt, Artificial Sequence
  Description of Artificial Sequence: Synthetic oligonucleotide
caugcuguagcugagagcu

SEQ ID NO: 1531136 - RNA, 19 nt, Artificial Sequence
  Description of Artificial Sequence: Synthetic oligonucleotide
ugccccaaacucauagcug

SEQ ID NO: 1531137 - RNA, 19 nt, Artificial Sequence
  Description of Artificial Sequence: Synthetic oligonucleotide
cuuaggcuaaggcaugcuc

SEQ ID NO: 1531138 - RNA, 19 nt, Artificial Sequence
  Description of Artificial Sequence: Synthetic oligonucleotide
augcccgugauggagaaug

SEQ ID NO: 1531139 - RNA, 19 nt, Artificial Sequence
  Description of Artificial Sequence: Synthetic oligonucleotide
cacguggcgguucaucacg

SEQ ID NO: 1531140 - RNA, 19 nt, Artificial Sequence
  Description of Artificial Sequence: Synthetic oligonucleotide
cacacuugcugaugagggg

SEQ ID NO: 1531141 - RNA, 19 nt, Artificial Sequence
  Description of Artificial Sequence: Synthetic oligonucleotide
guugauccaggagugccgg

SEQ ID NO: 1531142 - RNA, 19 nt, Artificial Sequence
  Description of Artificial Sequence: Synthetic oligonucleotide
cagcacacuccgaagguag

SEQ ID NO: 1531143 - RNA, 19 nt, Artificial Sequence
  Description of Artificial Sequence: Synthetic oligonucleotide
ggaccggugaccuuuaaca

SEQ ID NO: 1531144 - RNA, 19 nt, Artificial Sequence
  Description of Artificial Sequence: Synthetic oligonucleotide
ucuauggcacagguggaug

SEQ ID NO: 1531145 - RNA, 19 nt, Artificial Sequence
  Description of Artificial Sequence: Synthetic oligonucleotide
gaaaguugccaaccaccac

SEQ ID NO: 1531146 - RNA, 19 nt, Artificial Sequence
  Description of Artificial Sequence: Synthetic oligonucleotide
uacucaugugguucugcug

SEQ ID NO: 1531147 - RNA, 19 nt, Artificial Sequence
  Description of Artificial Sequence: Synthetic oligonucleotide
gcugagagcucucauggag

SEQ ID NO: 1531148 - RNA, 19 nt, Artificial Sequence
  Description of Artificial Sequence: Synthetic oligonucleotide
aaggguacagcaggucuug

SEQ ID NO: 1531149 - RNA, 19 nt, Artificial Sequence
  Description of Artificial Sequence: Synthetic oligonucleotide
aucaucaaggguacagcag

SEQ ID NO: 1531150 - RNA, 19 nt, Artificial Sequence
  Description of Artificial Sequence: Synthetic oligonucleotide
accggugaccuuuaacaca

SEQ ID NO: 1531151 - RNA, 19 nt, Artificial Sequence
  Description of Artificial Sequence: Synthetic oligonucleotide
gaccggugaccuuuaacac

SEQ ID NO: 1531152 - RNA, 19 nt, Artificial Sequence
  Description of Artificial Sequence: Synthetic oligonucleotide
gaagguaaaaggugugggu

SEQ ID NO: 1531153 - RNA, 19 nt, Artificial Sequence
  Description of Artificial Sequence: Synthetic oligonucleotide
ggguaaggacaacagguag

SEQ ID NO: 1531154 - RNA, 19 nt, Artificial Sequence
  Description of Artificial Sequence: Synthetic oligonucleotide
aaauacucaugugguucug

SEQ ID NO: 1531155 - RNA, 19 nt, Artificial Sequence
  Description of Artificial Sequence: Synthetic oligonucleotide
acacguggcgguucaucac

SEQ ID NO: 1531156 - RNA, 19 nt, Artificial Sequence
  Description of Artificial Sequence: Synthetic oligonucleotide
ugaaggugccguagaaaau

SEQ ID NO: 1531157 - RNA, 19 nt, Artificial Sequence
  Description of Artificial Sequence: Synthetic oligonucleotide
agcggggaaggccacacca

SEQ ID NO: 1531158 - RNA, 19 nt, Artificial Sequence
  Description of Artificial Sequence: Synthetic oligonucleotide
ccgaagguaggccauagcc

SEQ ID NO: 1531159 - RNA, 19 nt, Artificial Sequence
  Description of Artificial Sequence: Synthetic oligonucleotide
uguagcugagagcucucau

SEQ ID NO: 1531160 - RNA, 19 nt, Artificial Sequence
  Description of Artificial Sequence: Synthetic oligonucleotide
aaggugugggugcuucgga

SEQ ID NO: 1531161 - RNA, 19 nt, Artificial Sequence
  Description of Artificial Sequence: Synthetic oligonucleotide
aagugaggaccggugaccu

SEQ ID NO: 1531162 - RNA, 19 nt, Artificial Sequence
  Description of Artificial Sequence: Synthetic oligonucleotide
gugccguagaaaaugagga

SEQ ID NO: 1531163 - RNA, 19 nt, Artificial Sequence
  Description of Artificial Sequence: Synthetic oligonucleotide
aggaagccuagaucccaac

SEQ ID NO: 1531164 - RNA, 19 nt, Artificial Sequence
  Description of Artificial Sequence: Synthetic oligonucleotide
gcccuaaaggaagugaggg

SEQ ID NO: 1531165 - RNA, 19 nt, Artificial Sequence
  Description of Artificial Sequence: Synthetic oligonucleotide
ggauaucgaggacaaacac

SEQ ID NO: 1531166 - RNA, 19 nt, Artificial Sequence
  Description of Artificial Sequence: Synthetic oligonucleotide
auaccgaagaaggcagauc

SEQ ID NO: 1531167 - RNA, 19 nt, Artificial Sequence
  Description of Artificial Sequence: Synthetic oligonucleotide
aagacuccacuaaggacca

SEQ ID NO: 1531168 - RNA, 19 nt, Artificial Sequence
  Description of Artificial Sequence: Synthetic oligonucleotide
aggauaucgaggacaaaca

SEQ ID NO: 1531169 - RNA, 19 nt, Artificial Sequence
  Description of Artificial Sequence: Synthetic oligonucleotide
guguugauccaggagugcc

SEQ ID NO: 1531170 - RNA, 19 nt, Artificial Sequence
  Description of Artificial Sequence: Synthetic oligonucleotide
acacccauucacacagggc

SEQ ID NO: 1531171 - RNA, 19 nt, Artificial Sequence
  Description of Artificial Sequence: Synthetic oligonucleotide
caagugaggaccggugacc

SEQ ID NO: 1531172 - RNA, 19 nt, Artificial Sequence
  Description of Artificial Sequence: Synthetic oligonucleotide
caggaguuaggaagccuag

SEQ ID NO: 1531173 - RNA, 19 nt, Artificial Sequence
  Description of Artificial Sequence: Synthetic oligonucleotide
ucgaggacaaacacccauu

SEQ ID NO: 1531174 - RNA, 19 nt, Artificial Sequence
  Description of Artificial Sequence: Synthetic oligonucleotide
guuaggaagccuagauccc

SEQ ID NO: 1531175 - RNA, 19 nt, Artificial Sequence
  Description of Artificial Sequence: Synthetic oligonucleotide
guucaucacggccauggca

SEQ ID NO: 1531176 - RNA, 19 nt, Artificial Sequence
  Description of Artificial Sequence: Synthetic oligonucleotide
cucucaggagcacaguuga

SEQ ID NO: 1531177 - RNA, 19 nt, Artificial Sequence
  Description of Artificial Sequence: Synthetic oligonucleotide
guagagacuuggcaugguc

SEQ ID NO: 1531178 - RNA, 19 nt, Artificial Sequence
  Description of Artificial Sequence: Synthetic oligonucleotide
gcaagaccguccucuaugg

SEQ ID NO: 1531179 - RNA, 19 nt, Artificial Sequence
  Description of Artificial Sequence: Synthetic oligonucleotide
ucccuuaggcuaaggcaug

SEQ ID NO: 1531180 - RNA, 19 nt, Artificial Sequence
  Description of Artificial Sequence: Synthetic oligonucleotide
ccaaccaccacaaggccag

SEQ ID NO: 1531181 - RNA, 19 nt, Artificial Sequence
  Description of Artificial Sequence: Synthetic oligonucleotide
ugccguagaaaaugaggau

SEQ ID NO: 1531182 - RNA, 19 nt, Artificial Sequence
  Description of Artificial Sequence: Synthetic oligonucleotide
aucaaggguacagcagguc

SEQ ID NO: 1531183 - RNA, 19 nt, Artificial Sequence
  Description of Artificial Sequence: Synthetic oligonucleotide
ggcaagaccguccucuaug

SEQ ID NO: 1531184 - RNA, 19 nt, Artificial Sequence
  Description of Artificial Sequence: Synthetic oligonucleotide
guggcgguucaucacggcc

SEQ ID NO: 1531185 - RNA, 19 nt, Artificial Sequence
  Description of Artificial Sequence: Synthetic oligonucleotide
cacuggacacacguggcgg

SEQ ID NO: 1531186 - RNA, 19 nt, Artificial Sequence
  Description of Artificial Sequence: Synthetic oligonucleotide
caccugaaaguugccaacc

SEQ ID NO: 1531187 - RNA, 19 nt, Artificial Sequence
  Description of Artificial Sequence: Synthetic oligonucleotide
agugcagccaccagugugu

SEQ ID NO: 1531188 - RNA, 19 nt, Artificial Sequence
  Description of Artificial Sequence: Synthetic oligonucleotide
uagcugaaggugccguaga

SEQ ID NO: 1531189 - RNA, 19 nt, Artificial Sequence
  Description of Artificial Sequence: Synthetic oligonucleotide
gagaaugcugacaggcuga

SEQ ID NO: 1531190 - RNA, 19 nt, Artificial Sequence
  Description of Artificial Sequence: Synthetic oligonucleotide
aaggugccguagaaaauga

SEQ ID NO: 1531191 - RNA, 19 nt, Artificial Sequence
  Description of Artificial Sequence: Synthetic oligonucleotide
cagugcagccaccagugug

SEQ ID NO: 1531192 - RNA, 19 nt, Artificial Sequence
  Description of Artificial Sequence: Synthetic oligonucleotide
uccgaagguaggccauagc

SEQ ID NO: 1531193 - RNA, 19 nt, Artificial Sequence
  Description of Artificial Sequence: Synthetic oligonucleotide
guggauguuggauggccac

SEQ ID NO: 1531194 - RNA, 19 nt, Artificial Sequence
  Description of Artificial Sequence: Synthetic oligonucleotide
cauugcaggcacacaaaga

SEQ ID NO: 1531195 - RNA, 19 nt, Artificial Sequence
  Description of Artificial Sequence: Synthetic oligonucleotide
uaucgaggacaaacaccca

SEQ ID NO: 1531196 - RNA, 19 nt, Artificial Sequence
  Description of Artificial Sequence: Synthetic oligonucleotide
cauaugcccgugauggaga

SEQ ID NO: 1531197 - RNA, 19 nt, Artificial Sequence
  Description of Artificial Sequence: Synthetic oligonucleotide
auccagacuuaaggguccc

SEQ ID NO: 1531198 - RNA, 19 nt, Artificial Sequence
  Description of Artificial Sequence: Synthetic oligonucleotide
uccaggaguugcccauacc

SEQ ID NO: 1531199 - RNA, 19 nt, Artificial Sequence
  Description of Artificial Sequence: Synthetic oligonucleotide
cacacuccgaagguaggcc

SEQ ID NO: 1531200 - RNA, 19 nt, Artificial Sequence
  Description of Artificial Sequence: Synthetic oligonucleotide
aggcaugcuccucccauca

SEQ ID NO: 1531201 - RNA, 19 nt, Artificial Sequence
  Description of Artificial Sequence: Synthetic oligonucleotide
gggaguagaaggcaccuga

SEQ ID NO: 1531202 - RNA, 19 nt, Artificial Sequence
  Description of Artificial Sequence: Synthetic oligonucleotide
ggcuaaggcaugcuccucc

SEQ ID NO: 1531203 - RNA, 19 nt, Artificial Sequence
  Description of Artificial Sequence: Synthetic oligonucleotide
ccagaggacuuacaggccc

SEQ ID NO: 1531204 - RNA, 19 nt, Artificial Sequence
  Description of Artificial Sequence: Synthetic oligonucleotide
gaugagugcugugguguug

SEQ ID NO: 1531205 - RNA, 19 nt, Artificial Sequence
  Description of Artificial Sequence: Synthetic oligonucleotide
cccauaccgaagaaggcag

SEQ ID NO: 1531206 - RNA, 19 nt, Artificial Sequence
  Description of Artificial Sequence: Synthetic oligonucleotide
augagugcugugguguuga

SEQ ID NO: 1531207 - RNA, 19 nt, Artificial Sequence
  Description of Artificial Sequence: Synthetic oligonucleotide
uccauaugcccgugaugga

SEQ ID NO: 1531208 - RNA, 19 nt, Artificial Sequence
  Description of Artificial Sequence: Synthetic oligonucleotide
caggguggugguaguuugg

SEQ ID NO: 1531209 - RNA, 19 nt, Artificial Sequence
  Description of Artificial Sequence: Synthetic oligonucleotide
augaggauaucgaggacaa

SEQ ID NO: 1531210 - RNA, 19 nt, Artificial Sequence
  Description of Artificial Sequence: Synthetic oligonucleotide
gauauguuccacacuugcu

SEQ ID NO: 1531211 - RNA, 19 nt, Artificial Sequence
  Description of Artificial Sequence: Synthetic oligonucleotide
ccaacaauacucucuaaaa

SEQ ID NO: 1531212 - RNA, 19 nt, Artificial Sequence
  Description of Artificial Sequence: Synthetic oligonucleotide
ggugaugaaggcgaugaca

SEQ ID NO: 1531213 - RNA, 19 nt, Artificial Sequence
  Description of Artificial Sequence: Synthetic oligonucleotide
acacacguggcgguucauc

SEQ ID NO: 1531214 - RNA, 19 nt, Artificial Sequence
  Description of Artificial Sequence: Synthetic oligonucleotide
cacacguggcgguucauca

SEQ ID NO: 1531215 - RNA, 19 nt, Artificial Sequence
  Description of Artificial Sequence: Synthetic oligonucleotide
guugccaaugaggcugaag

SEQ ID NO: 1531216 - RNA, 19 nt, Artificial Sequence
  Description of Artificial Sequence: Synthetic oligonucleotide
agacucagaucauggcaau

SEQ ID NO: 1531217 - RNA, 19 nt, Artificial Sequence
  Description of Artificial Sequence: Synthetic oligonucleotide
ucacggccauggcauacac

SEQ ID NO: 1531218 - RNA, 19 nt, Artificial Sequence
  Description of Artificial Sequence: Synthetic oligonucleotide
gaaaccccaguggucuggc

SEQ ID NO: 1531219 - RNA, 19 nt, Artificial Sequence
  Description of Artificial Sequence: Synthetic oligonucleotide
gcuccgauguaguguagag

SEQ ID NO: 1531220 - RNA, 19 nt, Artificial Sequence
  Description of Artificial Sequence: Synthetic oligonucleotide
gguugugguggccccgugg

SEQ ID NO: 1531221 - RNA, 19 nt, Artificial Sequence
  Description of Artificial Sequence: Synthetic oligonucleotide
ggaccaauucuccacugga

SEQ ID NO: 1531222 - RNA, 19 nt, Artificial Sequence
  Description of Artificial Sequence: Synthetic oligonucleotide
auacuacucugggucuggg

SEQ ID NO: 1531223 - RNA, 19 nt, Artificial Sequence
  Description of Artificial Sequence: Synthetic oligonucleotide
uggauguuggauggccacu

SEQ ID NO: 1531224 - RNA, 19 nt, Artificial Sequence
  Description of Artificial Sequence: Synthetic oligonucleotide
auaugcccgugauggagaa

SEQ ID NO: 1531225 - RNA, 19 nt, Artificial Sequence
  Description of Artificial Sequence: Synthetic oligonucleotide
ugcccgugauggagaaugc

SEQ ID NO: 1531226 - RNA, 19 nt, Artificial Sequence
  Description of Artificial Sequence: Synthetic oligonucleotide
gccccaaacucauagcuga

SEQ ID NO: 1531227 - RNA, 19 nt, Artificial Sequence
  Description of Artificial Sequence: Synthetic oligonucleotide
gugcuucggaggcugggcc

SEQ ID NO: 1531228 - RNA, 19 nt, Artificial Sequence
  Description of Artificial Sequence: Synthetic oligonucleotide
gauccaggagugccggcuc

SEQ ID NO: 1531229 - RNA, 19 nt, Artificial Sequence
  Description of Artificial Sequence: Synthetic oligonucleotide
caagaccguccucuauggc

SEQ ID NO: 1531230 - RNA, 19 nt, Artificial Sequence
  Description of Artificial Sequence: Synthetic oligonucleotide
agcuaccuugagauauuuc

SEQ ID NO: 1531231 - RNA, 19 nt, Artificial Sequence
  Description of Artificial Sequence: Synthetic oligonucleotide
uugcugaugaggggaacau

SEQ ID NO: 1531232 - RNA, 19 nt, Artificial Sequence
  Description of Artificial Sequence: Synthetic oligonucleotide
acuguccauaugcccguga

SEQ ID NO: 1531233 - RNA, 19 nt, Artificial Sequence
  Description of Artificial Sequence: Synthetic oligonucleotide
caggagcacaguugaggug

SEQ ID NO: 1531234 - RNA, 19 nt, Artificial Sequence
  Description of Artificial Sequence: Synthetic oligonucleotide
uccaggaguuaggaagccu

SEQ ID NO: 1531235 - RNA, 19 nt, Artificial Sequence
  Description of Artificial Sequence: Synthetic oligonucleotide
cauucacacagggcagccc

SEQ ID NO: 1531236 - RNA, 19 nt, Artificial Sequence
  Description of Artificial Sequence: Synthetic oligonucleotide
cccgugauggagaaugcug

SEQ ID NO: 1531237 - RNA, 19 nt, Artificial Sequence
  Description of Artificial Sequence: Synthetic oligonucleotide
ggaagccuagaucccaaca

SEQ ID NO: 1531238 - RNA, 19 nt, Artificial Sequence
  Description of Artificial Sequence: Synthetic oligonucleotide
agcagcauuggugcagccu

SEQ ID NO: 1531239 - RNA, 19 nt, Artificial Sequence
  Description of Artificial Sequence: Synthetic oligonucleotide
ggugaccuuuaacacaaaa

SEQ ID NO: 1531240 - RNA, 19 nt, Artificial Sequence
  Description of Artificial Sequence: Synthetic oligonucleotide
agcacaguugaggugggua

SEQ ID NO: 1531241 - RNA, 19 nt, Artificial Sequence
  Description of Artificial Sequence: Synthetic oligonucleotide
acccauucacacagggcag

SEQ ID NO: 1531242 - RNA, 19 nt, Artificial Sequence
  Description of Artificial Sequence: Synthetic oligonucleotide
gccuagaucccaacaauac

SEQ ID NO: 1531243 - RNA, 19 nt, Artificial Sequence
  Description of Artificial Sequence: Synthetic oligonucleotide
ugcucccagaggacuuaca

SEQ ID NO: 1531244 - RNA, 19 nt, Artificial Sequence
  Description of Artificial Sequence: Synthetic oligonucleotide
ggccacaccagcuccgaug

SEQ ID NO: 1531245 - RNA, 19 nt, Artificial Sequence
  Description of Artificial Sequence: Synthetic oligonucleotide
cuaaaauacucaugugguu

SEQ ID NO: 1531246 - RNA, 19 nt, Artificial Sequence
  Description of Artificial Sequence: Synthetic oligonucleotide
gugaccuuuaacacaaaau

SEQ ID NO: 1531247 - RNA, 19 nt, Artificial Sequence
  Description of Artificial Sequence: Synthetic oligonucleotide
gugaugagugcuguggugu

SEQ ID NO: 1531248 - RNA, 19 nt, Artificial Sequence
  Description of Artificial Sequence: Synthetic oligonucleotide
gcuaaggcaugcuccuccc

SEQ ID NO: 1531249 - RNA, 19 nt, Artificial Sequence
  Description of Artificial Sequence: Synthetic oligonucleotide
ggaguugcccauaccgaag

SEQ ID NO: 1531250 - RNA, 19 nt, Artificial Sequence
  Description of Artificial Sequence: Synthetic oligonucleotide
ggaaaccccaguggucugg

SEQ ID NO: 1531251 - RNA, 19 nt, Artificial Sequence
  Description of Artificial Sequence: Synthetic oligonucleotide
agaucagggccaccauaaa

SEQ ID NO: 1531252 - RNA, 19 nt, Artificial Sequence
  Description of Artificial Sequence: Synthetic oligonucleotide
agcuccgauguaguguaga

SEQ ID NO: 1531253 - RNA, 19 nt, Artificial Sequence
  Description of Artificial Sequence: Synthetic oligonucleotide
ggacuuacaggcccugcca

SEQ ID NO: 1531254 - RNA, 19 nt, Artificial Sequence
  Description of Artificial Sequence: Synthetic oligonucleotide
caauacucucaggagcaca

SEQ ID NO: 1531255 - RNA, 19 nt, Artificial Sequence
  Description of Artificial Sequence: Synthetic oligonucleotide
aggacucauuguaggacca

SEQ ID NO: 1531256 - RNA, 19 nt, Artificial Sequence
  Description of Artificial Sequence: Synthetic oligonucleotide
ccauaugcccgugauggag

SEQ ID NO: 1531257 - RNA, 19 nt, Artificial Sequence
  Description of Artificial Sequence: Synthetic oligonucleotide
guggccccgugguagaaga

SEQ ID NO: 1531258 - RNA, 19 nt, Artificial Sequence
  Description of Artificial Sequence: Synthetic oligonucleotide
cuccaggaguugcccauac

SEQ ID NO: 1531259 - RNA, 19 nt, Artificial Sequence
  Description of Artificial Sequence: Synthetic oligonucleotide
ggaguuaggaagccuagau

SEQ ID NO: 1531260 - RNA, 19 nt, Artificial Sequence
  Description of Artificial Sequence: Synthetic oligonucleotide
ugcugaugaggggaacauc

SEQ ID NO: 1531261 - RNA, 19 nt, Artificial Sequence
  Description of Artificial Sequence: Synthetic oligonucleotide
caauuccugcagcaggaaa

SEQ ID NO: 1531262 - RNA, 19 nt, Artificial Sequence
  Description of Artificial Sequence: Synthetic oligonucleotide
uggcagggcaagugaggac

SEQ ID NO: 1531263 - RNA, 19 nt, Artificial Sequence
  Description of Artificial Sequence: Synthetic oligonucleotide
uggcaagaccguccucuau

SEQ ID NO: 1531264 - RNA, 19 nt, Artificial Sequence
  Description of Artificial Sequence: Synthetic oligonucleotide
ucccaacaauacucucuaa

SEQ ID NO: 1531265 - RNA, 19 nt, Artificial Sequence
  Description of Artificial Sequence: Synthetic oligonucleotide
gagacuuggcaugguccac

SEQ ID NO: 1531266 - RNA, 19 nt, Artificial Sequence
  Description of Artificial Sequence: Synthetic oligonucleotide
uaaggaccagggugaugaa

SEQ ID NO: 1531267 - RNA, 19 nt, Artificial Sequence
  Description of Artificial Sequence: Synthetic oligonucleotide
cuccgaagguaggccauag

SEQ ID NO: 1531268 - RNA, 19 nt, Artificial Sequence
  Description of Artificial Sequence: Synthetic oligonucleotide
cuauggcacagguggaugu

SEQ ID NO: 1531269 - RNA, 19 nt, Artificial Sequence
  Description of Artificial Sequence: Synthetic oligonucleotide
ggcaagugaggaccgguga

SEQ ID NO: 1531270 - RNA, 19 nt, Artificial Sequence
  Description of Artificial Sequence: Synthetic oligonucleotide
agccuagaucccaacaaua

SEQ ID NO: 1531271 - RNA, 19 nt, Artificial Sequence
  Description of Artificial Sequence: Synthetic oligonucleotide
aucacggccauggcauaca

SEQ ID NO: 1531272 - RNA, 19 nt, Artificial Sequence
  Description of Artificial Sequence: Synthetic oligonucleotide
uucggaggcugggccagcc

SEQ ID NO: 1531273 - RNA, 19 nt, Artificial Sequence
  Description of Artificial Sequence: Synthetic oligonucleotide
aggugccguagaaaaugag

SEQ ID NO: 1531274 - RNA, 19 nt, Artificial Sequence
  Description of Artificial Sequence: Synthetic oligonucleotide
cuggcagggcaagugagga

SEQ ID NO: 1531275 - RNA, 19 nt, Artificial Sequence
  Description of Artificial Sequence: Synthetic oligonucleotide
uggugguaguuugggguaa

SEQ ID NO: 1531276 - RNA, 19 nt, Artificial Sequence
  Description of Artificial Sequence: Synthetic oligonucleotide
uggcucuggcacugggagu

SEQ ID NO: 1531277 - RNA, 19 nt, Artificial Sequence
  Description of Artificial Sequence: Synthetic oligonucleotide
acguggcgguucaucacgg

SEQ ID NO: 1531278 - RNA, 19 nt, Artificial Sequence
  Description of Artificial Sequence: Synthetic oligonucleotide
gguucaucacggccauggc

SEQ ID NO: 1531279 - RNA, 19 nt, Artificial Sequence
  Description of Artificial Sequence: Synthetic oligonucleotide
ugaggaccggugaccuuua

SEQ ID NO: 1531280 - RNA, 19 nt, Artificial Sequence
  Description of Artificial Sequence: Synthetic oligonucleotide
caccagcuccgauguagug

SEQ ID NO: 1531281 - RNA, 19 nt, Artificial Sequence
  Description of Artificial Sequence: Synthetic oligonucleotide
gugugucugaggagacugc

SEQ ID NO: 1531282 - RNA, 19 nt, Artificial Sequence
  Description of Artificial Sequence: Synthetic oligonucleotide
ccaccugaaaguugccaac

SEQ ID NO: 1531283 - RNA, 19 nt, Artificial Sequence
  Description of Artificial Sequence: Synthetic oligonucleotide
ucaucacggccauggcaua

SEQ ID NO: 1531284 - RNA, 19 nt, Artificial Sequence
  Description of Artificial Sequence: Synthetic oligonucleotide
ggcagagugaagaacccaa

SEQ ID NO: 1531285 - RNA, 19 nt, Artificial Sequence
  Description of Artificial Sequence: Synthetic oligonucleotide
gccguagaaaaugaggaua

SEQ ID NO: 1531286 - RNA, 19 nt, Artificial Sequence
  Description of Artificial Sequence: Synthetic oligonucleotide
agaacacauugcaggcaca

SEQ ID NO: 1531287 - RNA, 19 nt, Artificial Sequence
  Description of Artificial Sequence: Synthetic oligonucleotide
uccucccaucauccagacu

SEQ ID NO: 1531288 - RNA, 19 nt, Artificial Sequence
  Description of Artificial Sequence: Synthetic oligonucleotide
gcaugguccaccugaaagu

SEQ ID NO: 1531289 - RNA, 19 nt, Artificial Sequence
  Description of Artificial Sequence: Synthetic oligonucleotide
ccgugauggagaaugcuga

SEQ ID NO: 1531290 - RNA, 19 nt, Artificial Sequence
  Description of Artificial Sequence: Synthetic oligonucleotide
cucagaucauggcaauacu

SEQ ID NO: 1531291 - RNA, 19 nt, Artificial Sequence
  Description of Artificial Sequence: Synthetic oligonucleotide
gagcucucauggaggaaga

SEQ ID NO: 1531292 - RNA, 19 nt, Artificial Sequence
  Description of Artificial Sequence: Synthetic oligonucleotide
cauagcugaaggugccgua

SEQ ID NO: 1531293 - RNA, 19 nt, Artificial Sequence
  Description of Artificial Sequence: Synthetic oligonucleotide
cuucuccaggaguuaggaa

SEQ ID NO: 1531294 - RNA, 19 nt, Artificial Sequence
  Description of Artificial Sequence: Synthetic oligonucleotide
acaccagcuccgauguagu

SEQ ID NO: 1531295 - RNA, 19 nt, Artificial Sequence
  Description of Artificial Sequence: Synthetic oligonucleotide
uccagacuuaagggucccu

SEQ ID NO: 1531296 - RNA, 19 nt, Artificial Sequence
  Description of Artificial Sequence: Synthetic oligonucleotide
cccgugguagaagagaaca

SEQ ID NO: 1531297 - RNA, 19 nt, Artificial Sequence
  Description of Artificial Sequence: Synthetic oligonucleotide
ugaggauaucgaggacaaa

SEQ ID NO: 1531298 - RNA, 19 nt, Artificial Sequence
  Description of Artificial Sequence: Synthetic oligonucleotide
uugugguggccccguggua

SEQ ID NO: 1531299 - RNA, 19 nt, Artificial Sequence
  Description of Artificial Sequence: Synthetic oligonucleotide
ccgugguagaagagaacac

SEQ ID NO: 1531300 - RNA, 19 nt, Artificial Sequence
  Description of Artificial Sequence: Synthetic oligonucleotide
caucaaggguacagcaggu

SEQ ID NO: 1531301 - RNA, 19 nt, Artificial Sequence
  Description of Artificial Sequence: Synthetic oligonucleotide
guccucuauggcacaggug

SEQ ID NO: 1531302 - RNA, 19 nt, Artificial Sequence
  Description of Artificial Sequence: Synthetic oligonucleotide
cacaguugagguggguaga

SEQ ID NO: 1531303 - RNA, 19 nt, Artificial Sequence
  Description of Artificial Sequence: Synthetic oligonucleotide
cacuugcugaugaggggaa

SEQ ID NO: 1531304 - RNA, 19 nt, Artificial Sequence
  Description of Artificial Sequence: Synthetic oligonucleotide
gaggauccaggcggucaug

SEQ ID NO: 1531305 - RNA, 19 nt, Artificial Sequence
  Description of Artificial Sequence: Synthetic oligonucleotide
caguggucuggcucuggca

SEQ ID NO: 1531306 - RNA, 19 nt, Artificial Sequence
  Description of Artificial Sequence: Synthetic oligonucleotide
ggugguaguuugggguaag

SEQ ID NO: 1531307 - RNA, 19 nt, Artificial Sequence
  Description of Artificial Sequence: Synthetic oligonucleotide
ggcauacacuguccauaug

SEQ ID NO: 1531308 - RNA, 19 nt, Artificial Sequence
  Description of Artificial Sequence: Synthetic oligonucleotide
gcacacuccgaagguaggc

SEQ ID NO: 1531309 - RNA, 19 nt, Artificial Sequence
  Description of Artificial Sequence: Synthetic oligonucleotide
gacucagaucauggcaaua

SEQ ID NO: 1531310 - RNA, 19 nt, Artificial Sequence
  Description of Artificial Sequence: Synthetic oligonucleotide
aggaagugaggggcagagu

SEQ ID NO: 1531311 - RNA, 19 nt, Artificial Sequence
  Description of Artificial Sequence: Synthetic oligonucleotide
cgugauggagaaugcugac

SEQ ID NO: 1531312 - RNA, 19 nt, Artificial Sequence
  Description of Artificial Sequence: Synthetic oligonucleotide
cauggcauacacuguccau

SEQ ID NO: 1531313 - RNA, 19 nt, Artificial Sequence
  Description of Artificial Sequence: Synthetic oligonucleotide
aggguugugguggccccgu

SEQ ID NO: 1531314 - RNA, 19 nt, Artificial Sequence
  Description of Artificial Sequence: Synthetic oligonucleotide
gguaaaaggugugggugcu

SEQ ID NO: 1531315 - RNA, 19 nt, Artificial Sequence
  Description of Artificial Sequence: Synthetic oligonucleotide
gcuggcaagaccguccucu

SEQ ID NO: 1531316 - RNA, 19 nt, Artificial Sequence
  Description of Artificial Sequence: Synthetic oligonucleotide
cagcuccgauguaguguag

SEQ ID NO: 1531317 - RNA, 19 nt, Artificial Sequence
  Description of Artificial Sequence: Synthetic oligonucleotide
gaccguccucuauggcaca

SEQ ID NO: 1531318 - RNA, 19 nt, Artificial Sequence
  Description of Artificial Sequence: Synthetic oligonucleotide
cugcuguguuauuugcccu

SEQ ID NO: 1531319 - RNA, 19 nt, Artificial Sequence
  Description of Artificial Sequence: Synthetic oligonucleotide
cuguagcugagagcucuca

SEQ ID NO: 1531320 - RNA, 19 nt, Artificial Sequence
  Description of Artificial Sequence: Synthetic oligonucleotide
ccguagaaaaugaggauau

SEQ ID NO: 1531321 - RNA, 19 nt, Artificial Sequence
  Description of Artificial Sequence: Synthetic oligonucleotide
ccuagaucccaacaauacu

SEQ ID NO: 1531322 - RNA, 19 nt, Artificial Sequence
  Description of Artificial Sequence: Synthetic oligonucleotide
uaugcccgugauggagaau

SEQ ID NO: 1531323 - RNA, 19 nt, Artificial Sequence
  Description of Artificial Sequence: Synthetic oligonucleotide
gcagaucagggccaccaua

SEQ ID NO: 1531324 - RNA, 19 nt, Artificial Sequence
  Description of Artificial Sequence: Synthetic oligonucleotide
ccccuuguucagcaggguc

SEQ ID NO: 1531325 - RNA, 19 nt, Artificial Sequence
  Description of Artificial Sequence: Synthetic oligonucleotide
gugaggaccggugaccuuu

SEQ ID NO: 1531326 - RNA, 19 nt, Artificial Sequence
  Description of Artificial Sequence: Synthetic oligonucleotide
cuguccauaugcccgugau

SEQ ID NO: 1531327 - RNA, 19 nt, Artificial Sequence
  Description of Artificial Sequence: Synthetic oligonucleotide
ggaguagaaggcaccugaa

SEQ ID NO: 1531328 - RNA, 19 nt, Artificial Sequence
  Description of Artificial Sequence: Synthetic oligonucleotide
gcaauacucucaggagcac

SEQ ID NO: 1531329 - RNA, 19 nt, Artificial Sequence
  Description of Artificial Sequence: Synthetic oligonucleotide
acuccgaagguaggccaua

SEQ ID NO: 1531330 - RNA, 19 nt, Artificial Sequence
  Description of Artificial Sequence: Synthetic oligonucleotide
cuggcaagaccguccucua

SEQ ID NO: 1531331 - RNA, 19 nt, Artificial Sequence
  Description of Artificial Sequence: Synthetic oligonucleotide
gcggggaaggccacaccag

SEQ ID NO: 1531332 - RNA, 19 nt, Artificial Sequence
  Description of Artificial Sequence: Synthetic oligonucleotide
gaggaccggugaccuuuaa

SEQ ID NO: 1531333 - RNA, 19 nt, Artificial Sequence
  Description of Artificial Sequence: Synthetic oligonucleotide
aggccacaccagcuccgau

SEQ ID NO: 1531334 - RNA, 19 nt, Artificial Sequence
  Description of Artificial Sequence: Synthetic oligonucleotide
ggggaacaucaucaagggu

SEQ ID NO: 1531335 - RNA, 19 nt, Artificial Sequence
  Description of Artificial Sequence: Synthetic oligonucleotide
cucuauggcacagguggau

SEQ ID NO: 1531336 - RNA, 19 nt, Artificial Sequence
  Description of Artificial Sequence: Synthetic oligonucleotide
ccauaccgaagaaggcaga

SEQ ID NO: 1531337 - RNA, 19 nt, Artificial Sequence
  Description of Artificial Sequence: Synthetic oligonucleotide
ggaggauccaggcggucau

SEQ ID NO: 1531338 - RNA, 19 nt, Artificial Sequence
  Description of Artificial Sequence: Synthetic oligonucleotide
ccucuauggcacaggugga

SEQ ID NO: 1531339 - RNA, 19 nt, Artificial Sequence
  Description of Artificial Sequence: Synthetic oligonucleotide
ccccgugguagaagagaac

SEQ ID NO: 1531340 - RNA, 19 nt, Artificial Sequence
  Description of Artificial Sequence: Synthetic oligonucleotide
cacuccgaagguaggccau

SEQ ID NO: 1531341 - RNA, 19 nt, Artificial Sequence
  Description of Artificial Sequence: Synthetic oligonucleotide
ccagcggggaaggccacac

SEQ ID NO: 1531342 - RNA, 19 nt, Artificial Sequence
  Description of Artificial Sequence: Synthetic oligonucleotide
ccacccuccagacucagau

SEQ ID NO: 1531343 - RNA, 19 nt, Artificial Sequence
  Description of Artificial Sequence: Synthetic oligonucleotide
cccagcuaccuugagauau

SEQ ID NO: 1531344 - RNA, 19 nt, Artificial Sequence
  Description of Artificial Sequence: Synthetic oligonucleotide
gccccgugguagaagagaa

SEQ ID NO: 1531345 - RNA, 19 nt, Artificial Sequence
  Description of Artificial Sequence: Synthetic oligonucleotide
gggcuuucccuuaggcuaa

SEQ ID NO: 1531346 - RNA, 19 nt, Artificial Sequence
  Description of Artificial Sequence: Synthetic oligonucleotide
ggacucauuguaggaccaa

SEQ ID NO: 1531347 - RNA, 19 nt, Artificial Sequence
  Description of Artificial Sequence: Synthetic oligonucleotide
ccguccucuauggcacagg

SEQ ID NO: 1531348 - RNA, 19 nt, Artificial Sequence
  Description of Artificial Sequence: Synthetic oligonucleotide
cacggccauggcauacacu

SEQ ID NO: 1531349 - RNA, 19 nt, Artificial Sequence
  Description of Artificial Sequence: Synthetic oligonucleotide
cguggcgguucaucacggc

SEQ ID NO: 1531350 - RNA, 19 nt, Artificial Sequence
  Description of Artificial Sequence: Synthetic oligonucleotide
ggguugugguggccccgug

SEQ ID NO: 1531351 - RNA, 19 nt, Artificial Sequence
  Description of Artificial Sequence: Synthetic oligonucleotide
ggcgguucaucacggccau

SEQ ID NO: 1531352 - RNA, 19 nt, Artificial Sequence
  Description of Artificial Sequence: Synthetic oligonucleotide
cccaguggucuggcucugg

SEQ ID NO: 1531353 - RNA, 19 nt, Artificial Sequence
  Description of Artificial Sequence: Synthetic oligonucleotide
cugggccagccacccucca

SEQ ID NO: 1531354 - RNA, 19 nt, Artificial Sequence
  Description of Artificial Sequence: Synthetic oligonucleotide
agacugccccaaacucaua

SEQ ID NO: 1531355 - RNA, 19 nt, Artificial Sequence
  Description of Artificial Sequence: Synthetic oligonucleotide
ccgauguaguguagagacu

SEQ ID NO: 1531356 - RNA, 19 nt, Artificial Sequence
  Description of Artificial Sequence: Synthetic oligonucleotide
cacuaaggaccagggugau

SEQ ID NO: 1531357 - RNA, 19 nt, Artificial Sequence
  Description of Artificial Sequence: Synthetic oligonucleotide
cagcuaccuugagauauuu

SEQ ID NO: 1531358 - RNA, 19 nt, Artificial Sequence
  Description of Artificial Sequence: Synthetic oligonucleotide
gcccgugauggagaaugcu

SEQ ID NO: 1531359 - RNA, 19 nt, Artificial Sequence
  Description of Artificial Sequence: Synthetic oligonucleotide
gcccagcuaccuugagaua

SEQ ID NO: 1531360 - RNA, 19 nt, Artificial Sequence
  Description of Artificial Sequence: Synthetic oligonucleotide
ggcaugcuccucccaucau

SEQ ID NO: 1531361 - RNA, 19 nt, Artificial Sequence
  Description of Artificial Sequence: Synthetic oligonucleotide
ccagcuaccuugagauauu

SEQ ID NO: 1531362 - RNA, 19 nt, Artificial Sequence
  Description of Artificial Sequence: Synthetic oligonucleotide
ccuuaggcuaaggcaugcu

SEQ ID NO: 1531363 - RNA, 19 nt, Artificial Sequence
  Description of Artificial Sequence: Synthetic oligonucleotide
gcccagcggggaaggccac

SEQ ID NO: 1531364 - RNA, 19 nt, Artificial Sequence
  Description of Artificial Sequence: Synthetic oligonucleotide
ccacaccagcuccgaugua

SEQ ID NO: 1531365 - RNA, 19 nt, Artificial Sequence
  Description of Artificial Sequence: Synthetic oligonucleotide
cggugaccuuuaacacaaa

SEQ ID NO: 1531366 - RNA, 19 nt, Artificial Sequence
  Description of Artificial Sequence: Synthetic oligonucleotide
aaaauuucgucuuaaauca

SEQ ID NO: 1531367 - RNA, 19 nt, Artificial Sequence
  Description of Artificial Sequence: Synthetic oligonucleotide
uggucauuaauucuuaagg

SEQ ID NO: 1531368 - RNA, 19 nt, Artificial Sequence
  Description of Artificial Sequence: Synthetic oligonucleotide
auuccgaugaaccuggagc

SEQ ID NO: 1531369 - RNA, 19 nt, Artificial Sequence
  Description of Artificial Sequence: Synthetic oligonucleotide
ucauuaauucuuaagguca

SEQ ID NO: 1531370 - RNA, 19 nt, Artificial Sequence
  Description of Artificial Sequence: Synthetic oligonucleotide
aauaaauaagggcauaaaa

SEQ ID NO: 1531371 - RNA, 19 nt, Artificial Sequence
  Description of Artificial Sequence: Synthetic oligonucleotide
aaucaugacacuuggaagu

SEQ ID NO: 1531372 - RNA, 19 nt, Artificial Sequence
  Description of Artificial Sequence: Synthetic oligonucleotide
aauaagggcauaaaauuuc

SEQ ID NO: 1531373 - RNA, 19 nt, Artificial Sequence
  Description of Artificial Sequence: Synthetic oligonucleotide
ucgucuuaaaucaugacac

SEQ ID NO: 1531374 - RNA, 19 nt, Artificial Sequence
  Description of Artificial Sequence: Synthetic oligonucleotide
cuaggaauaaauaagggca

SEQ ID NO: 1531375 - RNA, 19 nt, Artificial Sequence
  Description of Artificial Sequence: Synthetic oligonucleotide
aauauaaagcuaguggcug

SEQ ID NO: 1531376 - RNA, 19 nt, Artificial Sequence
  Description of Artificial Sequence: Synthetic oligonucleotide
uccauauccauuucugacg

SEQ ID NO: 1531377 - RNA, 19 nt, Artificial Sequence
  Description of Artificial Sequence: Synthetic oligonucleotide
aaaucuugguuagucuucc

SEQ ID NO: 1531378 - RNA, 19 nt, Artificial Sequence
  Description of Artificial Sequence: Synthetic oligonucleotide
auauaaagcuaguggcugc

SEQ ID NO: 1531379 - RNA, 19 nt, Artificial Sequence
  Description of Artificial Sequence: Synthetic oligonucleotide
cauuucgauuuauaaaucc

SEQ ID NO: 1531380 - RNA, 19 nt, Artificial Sequence
  Description of Artificial Sequence: Synthetic oligonucleotide
cauccuaggaauaaauaag

SEQ ID NO: 1531381 - RNA, 19 nt, Artificial Sequence
  Description of Artificial Sequence: Synthetic oligonucleotide
ucauauuaccaaaacagua

SEQ ID NO: 1531382 - RNA, 19 nt, Artificial Sequence
  Description of Artificial Sequence: Synthetic oligonucleotide
uccuaggaauaaauaaggg

SEQ ID NO: 1531383 - RNA, 19 nt, Artificial Sequence
  Description of Artificial Sequence: Synthetic oligonucleotide
auaaaauuucgucuuaaau

SEQ ID NO: 1531384 - RNA, 19 nt, Artificial Sequence
  Description of Artificial Sequence: Synthetic oligonucleotide
uucauauuaccaaaacagu

SEQ ID NO: 1531385 - RNA, 19 nt, Artificial Sequence
  Description of Artificial Sequence: Synthetic oligonucleotide
uuucguagagaauagcagu

SEQ ID NO: 1531386 - RNA, 19 nt, Artificial Sequence
  Description of Artificial Sequence: Synthetic oligonucleotide
acguugaaccauuugacag

SEQ ID NO: 1531387 - RNA, 19 nt, Artificial Sequence
  Description of Artificial Sequence: Synthetic oligonucleotide
aauguccaaaucuugguua

SEQ ID NO: 1531388 - RNA, 19 nt, Artificial Sequence
  Description of Artificial Sequence: Synthetic oligonucleotide
ugaauggucauuaauucuu

SEQ ID NO: 1531389 - RNA, 19 nt, Artificial Sequence
  Description of Artificial Sequence: Synthetic oligonucleotide
uuugguuggggcaaucccc

SEQ ID NO: 1531390 - RNA, 19 nt, Artificial Sequence
  Description of Artificial Sequence: Synthetic oligonucleotide
uggauuccgaugaaccugg

SEQ ID NO: 1531391 - RNA, 19 nt, Artificial Sequence
  Description of Artificial Sequence: Synthetic oligonucleotide
ugucauuucgauuuauaaa

SEQ ID NO: 1531392 - RNA, 19 nt, Artificial Sequence
  Description of Artificial Sequence: Synthetic oligonucleotide
uuucgauuuauaaauccau

SEQ ID NO: 1531393 - RNA, 19 nt, Artificial Sequence
  Description of Artificial Sequence: Synthetic oligonucleotide
agggcauaaaauuucgucu

SEQ ID NO: 1531394 - RNA, 19 nt, Artificial Sequence
  Description of Artificial Sequence: Synthetic oligonucleotide
aacauucuaauguccaaau

SEQ ID NO: 1531395 - RNA, 19 nt, Artificial Sequence
  Description of Artificial Sequence: Synthetic oligonucleotide
ucgauuuauaaauccauau

SEQ ID NO: 1531396 - RNA, 19 nt, Artificial Sequence
  Description of Artificial Sequence: Synthetic oligonucleotide
agagcuauguaagaaagca

SEQ ID NO: 1531397 - RNA, 19 nt, Artificial Sequence
  Description of Artificial Sequence: Synthetic oligonucleotide
agcguaacggcucccuucc

SEQ ID NO: 1531398 - RNA, 19 nt, Artificial Sequence
  Description of Artificial Sequence: Synthetic oligonucleotide
auuacggggagguccacgg

SEQ ID NO: 1531399 - RNA, 19 nt, Artificial Sequence
  Description of Artificial Sequence: Synthetic oligonucleotide
gucauuaauucuuaagguc

SEQ ID NO: 1531400 - RNA, 19 nt, Artificial Sequence
  Description of Artificial Sequence: Synthetic oligonucleotide
gaaguuuagcaccagcauc

SEQ ID NO: 1531401 - RNA, 19 nt, Artificial Sequence
  Description of Artificial Sequence: Synthetic oligonucleotide
ugguauuaauauuucuucu

SEQ ID NO: 1531402 - RNA, 19 nt, Artificial Sequence
  Description of Artificial Sequence: Synthetic oligonucleotide
uguacaaacacaucuucuu

SEQ ID NO: 1531403 - RNA, 19 nt, Artificial Sequence
  Description of Artificial Sequence: Synthetic oligonucleotide
uucuaauguccaaaucuug

SEQ ID NO: 1531404 - RNA, 19 nt, Artificial Sequence
  Description of Artificial Sequence: Synthetic oligonucleotide
auucuuaaggucacccugc

SEQ ID NO: 1531405 - RNA, 19 nt, Artificial Sequence
  Description of Artificial Sequence: Synthetic oligonucleotide
ugacguugaaccauuugac

SEQ ID NO: 1531406 - RNA, 19 nt, Artificial Sequence
  Description of Artificial Sequence: Synthetic oligonucleotide
ugaggaacuuguuacugca

SEQ ID NO: 1531407 - RNA, 19 nt, Artificial Sequence
  Description of Artificial Sequence: Synthetic oligonucleotide
ugcgcagauacuugcgugg

SEQ ID NO: 1531408 - RNA, 19 nt, Artificial Sequence
  Description of Artificial Sequence: Synthetic oligonucleotide
gugguuguugguuucguag

SEQ ID NO: 1531409 - RNA, 19 nt, Artificial Sequence
  Description of Artificial Sequence: Synthetic oligonucleotide
auaagggcauaaaauuucg

SEQ ID NO: 1531410 - RNA, 19 nt, Artificial Sequence
  Description of Artificial Sequence: Synthetic oligonucleotide
uuugaggaacuuguuacug

SEQ ID NO: 1531411 - RNA, 19 nt, Artificial Sequence
  Description of Artificial Sequence: Synthetic oligonucleotide
cauuaauucuuaaggucac

SEQ ID NO: 1531412 - RNA, 19 nt, Artificial Sequence
  Description of Artificial Sequence: Synthetic oligonucleotide
uaaagcuaguggcugcuga

SEQ ID NO: 1531413 - RNA, 19 nt, Artificial Sequence
  Description of Artificial Sequence: Synthetic oligonucleotide
auauccauuucugacguug

SEQ ID NO: 1531414 - RNA, 19 nt, Artificial Sequence
  Description of Artificial Sequence: Synthetic oligonucleotide
uacggggagguccacggcg

SEQ ID NO: 1531415 - RNA, 19 nt, Artificial Sequence
  Description of Artificial Sequence: Synthetic oligonucleotide
uugaggaacuuguuacugc

SEQ ID NO: 1531416 - RNA, 19 nt, Artificial Sequence
  Description of Artificial Sequence: Synthetic oligonucleotide
uuaaaucaugacacuugga

SEQ ID NO: 1531417 - RNA, 19 nt, Artificial Sequence
  Description of Artificial Sequence: Synthetic oligonucleotide
guuucguagagaauagcag

SEQ ID NO: 1531418 - RNA, 19 nt, Artificial Sequence
  Description of Artificial Sequence: Synthetic oligonucleotide
agagagcuauguaagaaag

SEQ ID NO: 1531419 - RNA, 19 nt, Artificial Sequence
  Description of Artificial Sequence: Synthetic oligonucleotide
uucgauuuauaaauccaua

SEQ ID NO: 1531420 - RNA, 19 nt, Artificial Sequence
  Description of Artificial Sequence: Synthetic oligonucleotide
ucagauuucuuugguuggg

SEQ ID NO: 1531421 - RNA, 19 nt, Artificial Sequence
  Description of Artificial Sequence: Synthetic oligonucleotide
ccauuucugacguugaacc

SEQ ID NO: 1531422 - RNA, 19 nt, Artificial Sequence
  Description of Artificial Sequence: Synthetic oligonucleotide
cauucuaauguccaaaucu

SEQ ID NO: 1531423 - RNA, 19 nt, Artificial Sequence
  Description of Artificial Sequence: Synthetic oligonucleotide
ucucaguuggugcuucacc

SEQ ID NO: 1531424 - RNA, 19 nt, Artificial Sequence
  Description of Artificial Sequence: Synthetic oligonucleotide
uucguagagaauagcagua

SEQ ID NO: 1531425 - RNA, 19 nt, Artificial Sequence
  Description of Artificial Sequence: Synthetic oligonucleotide
ugggcgguaaguuggauuc

SEQ ID NO: 1531426 - RNA, 19 nt, Artificial Sequence
  Description of Artificial Sequence: Synthetic oligonucleotide
ucucaccagcauuacgggg

SEQ ID NO: 1531427 - RNA, 19 nt, Artificial Sequence
  Description of Artificial Sequence: Synthetic oligonucleotide
uuggauuccgaugaaccug

SEQ ID NO: 1531428 - RNA, 19 nt, Artificial Sequence
  Description of Artificial Sequence: Synthetic oligonucleotide
ucugacguugaaccauuug

SEQ ID NO: 1531429 - RNA, 19 nt, Artificial Sequence
  Description of Artificial Sequence: Synthetic oligonucleotide
agucacauuagcugcuuca

SEQ ID NO: 1531430 - RNA, 19 nt, Artificial Sequence
  Description of Artificial Sequence: Synthetic oligonucleotide
aauggucauuaauucuuaa

SEQ ID NO: 1531431 - RNA, 19 nt, Artificial Sequence
  Description of Artificial Sequence: Synthetic oligonucleotide
gauaguuguaggggcgucg

SEQ ID NO: 1531432 - RNA, 19 nt, Artificial Sequence
  Description of Artificial Sequence: Synthetic oligonucleotide
cauuagcugcuucagcgcc

SEQ ID NO: 1531433 - RNA, 19 nt, Artificial Sequence
  Description of Artificial Sequence: Synthetic oligonucleotide
auagcaguaaacauucuaa

SEQ ID NO: 1531434 - RNA, 19 nt, Artificial Sequence
  Description of Artificial Sequence: Synthetic oligonucleotide
cugacguugaaccauuuga

SEQ ID NO: 1531435 - RNA, 19 nt, Artificial Sequence
  Description of Artificial Sequence: Synthetic oligonucleotide
ucacauuagcugcuucagc

SEQ ID NO: 1531436 - RNA, 19 nt, Artificial Sequence
  Description of Artificial Sequence: Synthetic oligonucleotide
guugguuucguagagaaua

SEQ ID NO: 1531437 - RNA, 19 nt, Artificial Sequence
  Description of Artificial Sequence: Synthetic oligonucleotide
gaugcagcuugauggacac

SEQ ID NO: 1531438 - RNA, 19 nt, Artificial Sequence
  Description of Artificial Sequence: Synthetic oligonucleotide
aaagcuaguggcugcugaa

SEQ ID NO: 1531439 - RNA, 19 nt, Artificial Sequence
  Description of Artificial Sequence: Synthetic oligonucleotide
aaccuugggcgguaaguug

SEQ ID NO: 1531440 - RNA, 19 nt, Artificial Sequence
  Description of Artificial Sequence: Synthetic oligonucleotide
caugugguauuaauauuuc

SEQ ID NO: 1531441 - RNA, 19 nt, Artificial Sequence
  Description of Artificial Sequence: Synthetic oligonucleotide
auuggccgcuugcugauuc

SEQ ID NO: 1531442 - RNA, 19 nt, Artificial Sequence
  Description of Artificial Sequence: Synthetic oligonucleotide
guagagaauagcaguaaac

SEQ ID NO: 1531443 - RNA, 19 nt, Artificial Sequence
  Description of Artificial Sequence: Synthetic oligonucleotide
aguagccgcgccuguagcg

SEQ ID NO: 1531444 - RNA, 19 nt, Artificial Sequence
  Description of Artificial Sequence: Synthetic oligonucleotide
gguaaguuggauuccgaug

SEQ ID NO: 1531445 - RNA, 19 nt, Artificial Sequence
  Description of Artificial Sequence: Synthetic oligonucleotide
ccgggaugcagcuugaugg

SEQ ID NO: 1531446 - RNA, 19 nt, Artificial Sequence
  Description of Artificial Sequence: Synthetic oligonucleotide
gauuccgaugaaccuggag

SEQ ID NO: 1531447 - RNA, 19 nt, Artificial Sequence
  Description of Artificial Sequence: Synthetic oligonucleotide
ucagcagcguaacggcucc

SEQ ID NO: 1531448 - RNA, 19 nt, Artificial Sequence
  Description of Artificial Sequence: Synthetic oligonucleotide
auuucgucuuaaaucauga

SEQ ID NO: 1531449 - RNA, 19 nt, Artificial Sequence
  Description of Artificial Sequence: Synthetic oligonucleotide
aacggcucccuuccacagg

SEQ ID NO: 1531450 - RNA, 19 nt, Artificial Sequence
  Description of Artificial Sequence: Synthetic oligonucleotide
agggacuccguccuucauc

SEQ ID NO: 1531451 - RNA, 19 nt, Artificial Sequence
  Description of Artificial Sequence: Synthetic oligonucleotide
gagagagcuauguaagaaa

SEQ ID NO: 1531452 - RNA, 19 nt, Artificial Sequence
  Description of Artificial Sequence: Synthetic oligonucleotide
ucggaauccacggcgagca

SEQ ID NO: 1531453 - RNA, 19 nt, Artificial Sequence
  Description of Artificial Sequence: Synthetic oligonucleotide
uggaccauuggccgcuugc

SEQ ID NO: 1531454 - RNA, 19 nt, Artificial Sequence
  Description of Artificial Sequence: Synthetic oligonucleotide
accauuggccgcuugcuga

SEQ ID NO: 1531455 - RNA, 19 nt, Artificial Sequence
  Description of Artificial Sequence: Synthetic oligonucleotide
ucaguuggugcuucaccug

SEQ ID NO: 1531456 - RNA, 19 nt, Artificial Sequence
  Description of Artificial Sequence: Synthetic oligonucleotide
uuacugcacauuucagaga

SEQ ID NO: 1531457 - RNA, 19 nt, Artificial Sequence
  Description of Artificial Sequence: Synthetic oligonucleotide
cagauacuugcguggauug

SEQ ID NO: 1531458 - RNA, 19 nt, Artificial Sequence
  Description of Artificial Sequence: Synthetic oligonucleotide
auuagcugcuucagcgccc

SEQ ID NO: 1531459 - RNA, 19 nt, Artificial Sequence
  Description of Artificial Sequence: Synthetic oligonucleotide
aauagcaggggcaggucgu

SEQ ID NO: 1531460 - RNA, 19 nt, Artificial Sequence
  Description of Artificial Sequence: Synthetic oligonucleotide
acggcgagcagacggcugg

SEQ ID NO: 1531461 - RNA, 19 nt, Artificial Sequence
  Description of Artificial Sequence: Synthetic oligonucleotide
uguugguaaggucgugggu

SEQ ID NO: 1531462 - RNA, 19 nt, Artificial Sequence
  Description of Artificial Sequence: Synthetic oligonucleotide
ucuuugguuggggcaaucc

SEQ ID NO: 1531463 - RNA, 19 nt, Artificial Sequence
  Description of Artificial Sequence: Synthetic oligonucleotide
gucgauaguuguaggggcg

SEQ ID NO: 1531464 - RNA, 19 nt, Artificial Sequence
  Description of Artificial Sequence: Synthetic oligonucleotide
uguaggggcgucggaaucc

SEQ ID NO: 1531465 - RNA, 19 nt, Artificial Sequence
  Description of Artificial Sequence: Synthetic oligonucleotide
uguagcggcgccgaucagc

SEQ ID NO: 1531466 - RNA, 19 nt, Artificial Sequence
  Description of Artificial Sequence: Synthetic oligonucleotide
cagcauuacggggaggucc

SEQ ID NO: 1531467 - RNA, 19 nt, Artificial Sequence
  Description of Artificial Sequence: Synthetic oligonucleotide
uaacggcucccuuccacag

SEQ ID NO: 1531468 - RNA, 19 nt, Artificial Sequence
  Description of Artificial Sequence: Synthetic oligonucleotide
aucuugugaaacaguguuc

SEQ ID NO: 1531469 - RNA, 19 nt, Artificial Sequence
  Description of Artificial Sequence: Synthetic oligonucleotide
uucagcgcccuuuucuccu

SEQ ID NO: 1531470 - RNA, 19 nt, Artificial Sequence
  Description of Artificial Sequence: Synthetic oligonucleotide
agauguuucuuugguguug

SEQ ID NO: 1531471 - RNA, 19 nt, Artificial Sequence
  Description of Artificial Sequence: Synthetic oligonucleotide
cacuugcuggcucauuccc

SEQ ID NO: 1531472 - RNA, 19 nt, Artificial Sequence
  Description of Artificial Sequence: Synthetic oligonucleotide
acugcgcagauacuugcgu

SEQ ID NO: 1531473 - RNA, 19 nt, Artificial Sequence
  Description of Artificial Sequence: Synthetic oligonucleotide
ggcgucgauaguuguaggg

SEQ ID NO: 1531474 - RNA, 19 nt, Artificial Sequence
  Description of Artificial Sequence: Synthetic oligonucleotide
ggcgucggaauccacggcg

SEQ ID NO: 1531475 - RNA, 19 nt, Artificial Sequence
  Description of Artificial Sequence: Synthetic oligonucleotide
ucuggcccagucacauuag

SEQ ID NO: 1531476 - RNA, 19 nt, Artificial Sequence
  Description of Artificial Sequence: Synthetic oligonucleotide
auacuugcguggauuguuc

SEQ ID NO: 1531477 - RNA, 19 nt, Artificial Sequence
  Description of Artificial Sequence: Synthetic oligonucleotide
uaaguuggauuccgaugaa

SEQ ID NO: 1531478 - RNA, 19 nt, Artificial Sequence
  Description of Artificial Sequence: Synthetic oligonucleotide
gguuucguagagaauagca

SEQ ID NO: 1531479 - RNA, 19 nt, Artificial Sequence
  Description of Artificial Sequence: Synthetic oligonucleotide
aaagagcauuuacuauaua

SEQ ID NO: 1531480 - RNA, 19 nt, Artificial Sequence
  Description of Artificial Sequence: Synthetic oligonucleotide
cacugcgcagauacuugcg

SEQ ID NO: 1531481 - RNA, 19 nt, Artificial Sequence
  Description of Artificial Sequence: Synthetic oligonucleotide
uccacggcgucugccauag

SEQ ID NO: 1531482 - RNA, 19 nt, Artificial Sequence
  Description of Artificial Sequence: Synthetic oligonucleotide
uggagcgggguucucaguu

SEQ ID NO: 1531483 - RNA, 19 nt, Artificial Sequence
  Description of Artificial Sequence: Synthetic oligonucleotide
caggucgugggcgagcagg

SEQ ID NO: 1531484 - RNA, 19 nt, Artificial Sequence
  Description of Artificial Sequence: Synthetic oligonucleotide
aaauuucgucuuaaaucau

SEQ ID NO: 1531485 - RNA, 19 nt, Artificial Sequence
  Description of Artificial Sequence: Synthetic oligonucleotide
ggucauuaauucuuaaggu

SEQ ID NO: 1531486 - RNA, 19 nt, Artificial Sequence
  Description of Artificial Sequence: Synthetic oligonucleotide
cucuccaauagcaggggca

SEQ ID NO: 1531487 - RNA, 19 nt, Artificial Sequence
  Description of Artificial Sequence: Synthetic oligonucleotide
aaggucgugggugugcuuu

SEQ ID NO: 1531488 - RNA, 19 nt, Artificial Sequence
  Description of Artificial Sequence: Synthetic oligonucleotide
uacuugcguggauuguucu

SEQ ID NO: 1531489 - RNA, 19 nt, Artificial Sequence
  Description of Artificial Sequence: Synthetic oligonucleotide
agacggcugguuuggacca

SEQ ID NO: 1531490 - RNA, 19 nt, Artificial Sequence
  Description of Artificial Sequence: Synthetic oligonucleotide
uaguagccgcgccuguagc

SEQ ID NO: 1531491 - RNA, 19 nt, Artificial Sequence
  Description of Artificial Sequence: Synthetic oligonucleotide
ggagcugcgcuccuucagg

SEQ ID NO: 1531492 - RNA, 19 nt, Artificial Sequence
  Description of Artificial Sequence: Synthetic oligonucleotide
aggacuuugguggcgagaa

SEQ ID NO: 1531493 - RNA, 19 nt, Artificial Sequence
  Description of Artificial Sequence: Synthetic oligonucleotide
accauuugacagugccaag

SEQ ID NO: 1531494 - RNA, 19 nt, Artificial Sequence
  Description of Artificial Sequence: Synthetic oligonucleotide
acggcucccuuccacagga

SEQ ID NO: 1531495 - RNA, 19 nt, Artificial Sequence
  Description of Artificial Sequence: Synthetic oligonucleotide
uguugguuucguagagaau

SEQ ID NO: 1531496 - RNA, 19 nt, Artificial Sequence
  Description of Artificial Sequence: Synthetic oligonucleotide
ucguagagaauagcaguaa

SEQ ID NO: 1531497 - RNA, 19 nt, Artificial Sequence
  Description of Artificial Sequence: Synthetic oligonucleotide
caugacacuuggaaguuua

SEQ ID NO: 1531498 - RNA, 19 nt, Artificial Sequence
  Description of Artificial Sequence: Synthetic oligonucleotide
gagcagacggcugguuugg

SEQ ID NO: 1531499 - RNA, 19 nt, Artificial Sequence
  Description of Artificial Sequence: Synthetic oligonucleotide
guaacggcucccuuccaca

SEQ ID NO: 1531500 - RNA, 19 nt, Artificial Sequence
  Description of Artificial Sequence: Synthetic oligonucleotide
uugguuagucuuccauuuu

SEQ ID NO: 1531501 - RNA, 19 nt, Artificial Sequence
  Description of Artificial Sequence: Synthetic oligonucleotide
auccccaugugguauuaau

SEQ ID NO: 1531502 - RNA, 19 nt, Artificial Sequence
  Description of Artificial Sequence: Synthetic oligonucleotide
cucggcacugcucugcuca

SEQ ID NO: 1531503 - RNA, 19 nt, Artificial Sequence
  Description of Artificial Sequence: Synthetic oligonucleotide
ucgauaguuguaggggcgu

SEQ ID NO: 1531504 - RNA, 19 nt, Artificial Sequence
  Description of Artificial Sequence: Synthetic oligonucleotide
agcagguccccugcggaac

SEQ ID NO: 1531505 - RNA, 19 nt, Artificial Sequence
  Description of Artificial Sequence: Synthetic oligonucleotide
cauuacggggagguccacg

SEQ ID NO: 1531506 - RNA, 19 nt, Artificial Sequence
  Description of Artificial Sequence: Synthetic oligonucleotide
guagccgcgccuguagcgg

SEQ ID NO: 1531507 - RNA, 19 nt, Artificial Sequence
  Description of Artificial Sequence: Synthetic oligonucleotide
cucauccuaggaauaaaua

SEQ ID NO: 1531508 - RNA, 19 nt, Artificial Sequence
  Description of Artificial Sequence: Synthetic oligonucleotide
gcgucgauaguuguagggg

SEQ ID NO: 1531509 - RNA, 19 nt, Artificial Sequence
  Description of Artificial Sequence: Synthetic oligonucleotide
uugggcgguaaguuggauu

SEQ ID NO: 1531510 - RNA, 19 nt, Artificial Sequence
  Description of Artificial Sequence: Synthetic oligonucleotide
uugcguggauuguucuucu

SEQ ID NO: 1531511 - RNA, 19 nt, Artificial Sequence
  Description of Artificial Sequence: Synthetic oligonucleotide
uuacggggagguccacggc

SEQ ID NO: 1531512 - RNA, 19 nt, Artificial Sequence
  Description of Artificial Sequence: Synthetic oligonucleotide
ucacucggcacugcucugc

SEQ ID NO: 1531513 - RNA, 19 nt, Artificial Sequence
  Description of Artificial Sequence: Synthetic oligonucleotide
ggggcgucggaauccacgg

SEQ ID NO: 1531514 - RNA, 19 nt, Artificial Sequence
  Description of Artificial Sequence: Synthetic oligonucleotide
guuggggcaauccccaugu

SEQ ID NO: 1531515 - RNA, 19 nt, Artificial Sequence
  Description of Artificial Sequence: Synthetic oligonucleotide
cucaguuggugcuucaccu

SEQ ID NO: 1531516 - RNA, 19 nt, Artificial Sequence
  Description of Artificial Sequence: Synthetic oligonucleotide
aggggcgucggaauccacg

SEQ ID NO: 1531517 - RNA, 19 nt, Artificial Sequence
  Description of Artificial Sequence: Synthetic oligonucleotide
ucucccacacugcgcagau

SEQ ID NO: 1531518 - RNA, 19 nt, Artificial Sequence
  Description of Artificial Sequence: Synthetic oligonucleotide
gcgucugccauaguagccg

SEQ ID NO: 1531519 - RNA, 19 nt, Artificial Sequence
  Description of Artificial Sequence: Synthetic oligonucleotide
gaauggucauuaauucuua

SEQ ID NO: 1531520 - RNA, 19 nt, Artificial Sequence
  Description of Artificial Sequence: Synthetic oligonucleotide
cuugguuagucuuccauuu

SEQ ID NO: 1531521 - RNA, 19 nt, Artificial Sequence
  Description of Artificial Sequence: Synthetic oligonucleotide
auaaagcuaguggcugcug

SEQ ID NO: 1531522 - RNA, 19 nt, Artificial Sequence
  Description of Artificial Sequence: Synthetic oligonucleotide
aauccacggcgagcagacg

SEQ ID NO: 1531523 - RNA, 19 nt, Artificial Sequence
  Description of Artificial Sequence: Synthetic oligonucleotide
cagcguaacggcucccuuc

SEQ ID NO: 1531524 - RNA, 19 nt, Artificial Sequence
  Description of Artificial Sequence: Synthetic oligonucleotide
gguuuggaccauuggccgc

SEQ ID NO: 1531525 - RNA, 19 nt, Artificial Sequence
  Description of Artificial Sequence: Synthetic oligonucleotide
agcauuacggggaggucca

SEQ ID NO: 1531526 - RNA, 19 nt, Artificial Sequence
  Description of Artificial Sequence: Synthetic oligonucleotide
cuuggaaguuuagcaccag

SEQ ID NO: 1531527 - RNA, 19 nt, Artificial Sequence
  Description of Artificial Sequence: Synthetic oligonucleotide
agauacuugcguggauugu

SEQ ID NO: 1531528 - RNA, 19 nt, Artificial Sequence
  Description of Artificial Sequence: Synthetic oligonucleotide
cucgcggucucgcuggguc

SEQ ID NO: 1531529 - RNA, 19 nt, Artificial Sequence
  Description of Artificial Sequence: Synthetic oligonucleotide
augacacuuggaaguuuag

SEQ ID NO: 1531530 - RNA, 19 nt, Artificial Sequence
  Description of Artificial Sequence: Synthetic oligonucleotide
caaggacuuugguggcgag

SEQ ID NO: 1531531 - RNA, 19 nt, Artificial Sequence
  Description of Artificial Sequence: Synthetic oligonucleotide
cugccauaguagccgcgcc

SEQ ID NO: 1531532 - RNA, 19 nt, Artificial Sequence
  Description of Artificial Sequence: Synthetic oligonucleotide
cgucgauaguuguaggggc

SEQ ID NO: 1531533 - RNA, 19 nt, Artificial Sequence
  Description of Artificial Sequence: Synthetic oligonucleotide
gucggaauccacggcgagc

SEQ ID NO: 1531534 - RNA, 19 nt, Artificial Sequence
  Description of Artificial Sequence: Synthetic oligonucleotide
guagcggcgccgaucagca

SEQ ID NO: 1531535 - RNA, 19 nt, Artificial Sequence
  Description of Artificial Sequence: Synthetic oligonucleotide
uccccucauccuaggaaua

SEQ ID NO: 1531536 - RNA, 19 nt, Artificial Sequence
  Description of Artificial Sequence: Synthetic oligonucleotide
gguaaggucgugggugugc

SEQ ID NO: 1531537 - RNA, 19 nt, Artificial Sequence
  Description of Artificial Sequence: Synthetic oligonucleotide
gcugcgcuccuucagggac

SEQ ID NO: 1531538 - RNA, 19 nt, Artificial Sequence
  Description of Artificial Sequence: Synthetic oligonucleotide
cucgcugggucuccccggc

SEQ ID NO: 1531539 - RNA, 19 nt, Artificial Sequence
  Description of Artificial Sequence: Synthetic oligonucleotide
uuggaccauuggccgcuug

SEQ ID NO: 1531540 - RNA, 19 nt, Artificial Sequence
  Description of Artificial Sequence: Synthetic oligonucleotide
gguuggggcaauccccaug

SEQ ID NO: 1531541 - RNA, 19 nt, Artificial Sequence
  Description of Artificial Sequence: Synthetic oligonucleotide
uuggccgcuugcugauucu

SEQ ID NO: 1531542 - RNA, 19 nt, Artificial Sequence
  Description of Artificial Sequence: Synthetic oligonucleotide
uuggggcaauccccaugug

SEQ ID NO: 1531543 - RNA, 19 nt, Artificial Sequence
  Description of Artificial Sequence: Synthetic oligonucleotide
uucugacguugaaccauuu

SEQ ID NO: 1531544 - RNA, 19 nt, Artificial Sequence
  Description of Artificial Sequence: Synthetic oligonucleotide
gcggcgucgauaguuguag

SEQ ID NO: 1531545 - RNA, 19 nt, Artificial Sequence
  Description of Artificial Sequence: Synthetic oligonucleotide
guuagucuuccauuuuauu

SEQ ID NO: 1531546 - RNA, 19 nt, Artificial Sequence
  Description of Artificial Sequence: Synthetic oligonucleotide
cacggcgucugccauagua

SEQ ID NO: 1531547 - RNA, 19 nt, Artificial Sequence
  Description of Artificial Sequence: Synthetic oligonucleotide
uagccgcgccuguagcggc

SEQ ID NO: 1531548 - RNA, 19 nt, Artificial Sequence
  Description of Artificial Sequence: Synthetic oligonucleotide
uggcgagaacuuucuucuc

SEQ ID NO: 1531549 - RNA, 19 nt, Artificial Sequence
  Description of Artificial Sequence: Synthetic oligonucleotide
uggugucauuucgauuuau

SEQ ID NO: 1531550 - RNA, 19 nt, Artificial Sequence
  Description of Artificial Sequence: Synthetic oligonucleotide
ggagcgggguucucaguug

SEQ ID NO: 1531551 - RNA, 19 nt, Artificial Sequence
  Description of Artificial Sequence: Synthetic oligonucleotide
gucugccauaguagccgcg

SEQ ID NO: 1531552 - RNA, 19 nt, Artificial Sequence
  Description of Artificial Sequence: Synthetic oligonucleotide
ugguaaggucgugggugug

SEQ ID NO: 1531553 - RNA, 19 nt, Artificial Sequence
  Description of Artificial Sequence: Synthetic oligonucleotide
ggcauaaaauuucgucuua

SEQ ID NO: 1531554 - RNA, 19 nt, Artificial Sequence
  Description of Artificial Sequence: Synthetic oligonucleotide
gcauaaaauuucgucuuaa

SEQ ID NO: 1531555 - RNA, 19 nt, Artificial Sequence
  Description of Artificial Sequence: Synthetic oligonucleotide
ccaugugguauuaauauuu

SEQ ID NO: 1531556 - RNA, 19 nt, Artificial Sequence
  Description of Artificial Sequence: Synthetic oligonucleotide
ugcgucugugcagguuccc

SEQ ID NO: 1531557 - RNA, 19 nt, Artificial Sequence
  Description of Artificial Sequence: Synthetic oligonucleotide
gcugacgaggccggggcgg

SEQ ID NO: 1531558 - RNA, 19 nt, Artificial Sequence
  Description of Artificial Sequence: Synthetic oligonucleotide
gccauaguagccgcgccug

SEQ ID NO: 1531559 - RNA, 19 nt, Artificial Sequence
  Description of Artificial Sequence: Synthetic oligonucleotide
gaaccuugggcgguaaguu

SEQ ID NO: 1531560 - RNA, 19 nt, Artificial Sequence
  Description of Artificial Sequence: Synthetic oligonucleotide
guuuggaccauuggccgcu

SEQ ID NO: 1531561 - RNA, 19 nt, Artificial Sequence
  Description of Artificial Sequence: Synthetic oligonucleotide
ccuguagcggcgccgauca

SEQ ID NO: 1531562 - RNA, 19 nt, Artificial Sequence
  Description of Artificial Sequence: Synthetic oligonucleotide
gccgaucagcagcguaacg

SEQ ID NO: 1531563 - RNA, 19 nt, Artificial Sequence
  Description of Artificial Sequence: Synthetic oligonucleotide
ggaacuuguuacugcacau

SEQ ID NO: 1531564 - RNA, 19 nt, Artificial Sequence
  Description of Artificial Sequence: Synthetic oligonucleotide
ggcgucugccauaguagcc

SEQ ID NO: 1531565 - RNA, 19 nt, Artificial Sequence
  Description of Artificial Sequence: Synthetic oligonucleotide
gcagacggcugguuuggac

SEQ ID NO: 1531566 - RNA, 19 nt, Artificial Sequence
  Description of Artificial Sequence: Synthetic oligonucleotide
cgggguucucaguuggugc

SEQ ID NO: 1531567 - RNA, 19 nt, Artificial Sequence
  Description of Artificial Sequence: Synthetic oligonucleotide
gccaaggacuuugguggcg

SEQ ID NO: 1531568 - RNA, 19 nt, Artificial Sequence
  Description of Artificial Sequence: Synthetic oligonucleotide
ggggcaauccccauguggu

SEQ ID NO: 1531569 - RNA, 19 nt, Artificial Sequence
  Description of Artificial Sequence: Synthetic oligonucleotide
guaggggcgucggaaucca

SEQ ID NO: 1531570 - RNA, 19 nt, Artificial Sequence
  Description of Artificial Sequence: Synthetic oligonucleotide
guaaggucgugggugugcu

SEQ ID NO: 1531571 - RNA, 19 nt, Artificial Sequence
  Description of Artificial Sequence: Synthetic oligonucleotide
ggggccgcgucuccgccgg

SEQ ID NO: 1531572 - RNA, 19 nt, Artificial Sequence
  Description of Artificial Sequence: Synthetic oligonucleotide
uaaggucgugggugugcuu

SEQ ID NO: 1531573 - RNA, 19 nt, Artificial Sequence
  Description of Artificial Sequence: Synthetic oligonucleotide
uaggggcgucggaauccac

SEQ ID NO: 1531574 - RNA, 19 nt, Artificial Sequence
  Description of Artificial Sequence: Synthetic oligonucleotide
gggguucucaguuggugcu

SEQ ID NO: 1531575 - RNA, 19 nt, Artificial Sequence
  Description of Artificial Sequence: Synthetic oligonucleotide
cguaacggcucccuuccac

SEQ ID NO: 1531576 - RNA, 19 nt, Artificial Sequence
  Description of Artificial Sequence: Synthetic oligonucleotide
cccgggaugcagcuugaug

SEQ ID NO: 1531577 - RNA, 19 nt, Artificial Sequence
  Description of Artificial Sequence: Synthetic oligonucleotide
cguagagaauagcaguaaa

SEQ ID NO: 1531578 - RNA, 19 nt, Artificial Sequence
  Description of Artificial Sequence: Synthetic oligonucleotide
ggacuuugguggcgagaac

SEQ ID NO: 1531579 - RNA, 19 nt, Artificial Sequence
  Description of Artificial Sequence: Synthetic oligonucleotide
caccagcauuacggggagg

SEQ ID NO: 1531580 - RNA, 19 nt, Artificial Sequence
  Description of Artificial Sequence: Synthetic oligonucleotide
agccgcgccuguagcggcg

SEQ ID NO: 1531581 - RNA, 19 nt, Artificial Sequence
  Description of Artificial Sequence: Synthetic oligonucleotide
gacgcgcgcgcucgcgguc

SEQ ID NO: 1531582 - RNA, 19 nt, Artificial Sequence
  Description of Artificial Sequence: Synthetic oligonucleotide
uuuggaccauuggccgcuu

SEQ ID NO: 1531583 - RNA, 19 nt, Artificial Sequence
  Description of Artificial Sequence: Synthetic oligonucleotide
ggggcggcgucgauaguug

SEQ ID NO: 1531584 - RNA, 19 nt, Artificial Sequence
  Description of Artificial Sequence: Synthetic oligonucleotide
cgucugccauaguagccgc

SEQ ID NO: 1531585 - RNA, 19 nt, Artificial Sequence
  Description of Artificial Sequence: Synthetic oligonucleotide
gggcgucggaauccacggc

SEQ ID NO: 1531586 - RNA, 19 nt, Artificial Sequence
  Description of Artificial Sequence: Synthetic oligonucleotide
cuggggcgcgccgcggcgg

SEQ ID NO: 1531587 - RNA, 19 nt, Artificial Sequence
  Description of Artificial Sequence: Synthetic oligonucleotide
gguccccugcggaaccuug

SEQ ID NO: 1531588 - RNA, 19 nt, Artificial Sequence
  Description of Artificial Sequence: Synthetic oligonucleotide
gggcgguaaguuggauucc

SEQ ID NO: 1531589 - RNA, 19 nt, Artificial Sequence
  Description of Artificial Sequence: Synthetic oligonucleotide
ccuuggucucuuugccauc

SEQ ID NO: 1531590 - RNA, 19 nt, Artificial Sequence
  Description of Artificial Sequence: Synthetic oligonucleotide
ccccugcggaaccuugggc

SEQ ID NO: 1531591 - RNA, 19 nt, Artificial Sequence
  Description of Artificial Sequence: Synthetic oligonucleotide
gcucccuuccacaggaacu

SEQ ID NO: 1531592 - RNA, 19 nt, Artificial Sequence
  Description of Artificial Sequence: Synthetic oligonucleotide
caauccccaugugguauua

SEQ ID NO: 1531593 - RNA, 19 nt, Artificial Sequence
  Description of Artificial Sequence: Synthetic oligonucleotide
acggcugguuuggaccauu

SEQ ID NO: 1531594 - RNA, 19 nt, Artificial Sequence
  Description of Artificial Sequence: Synthetic oligonucleotide
cagcagcguaacggcuccc

SEQ ID NO: 1531595 - RNA, 19 nt, Artificial Sequence
  Description of Artificial Sequence: Synthetic oligonucleotide
cuccgccggggcuccccgc

SEQ ID NO: 1531596 - RNA, 19 nt, Artificial Sequence
  Description of Artificial Sequence: Synthetic oligonucleotide
cugcgcuccuucagggacu

SEQ ID NO: 1531597 - RNA, 19 nt, Artificial Sequence
  Description of Artificial Sequence: Synthetic oligonucleotide
gcgcagauacuugcgugga

SEQ ID NO: 1531598 - RNA, 19 nt, Artificial Sequence
  Description of Artificial Sequence: Synthetic oligonucleotide
cugugcagguucccgggau

SEQ ID NO: 1531599 - RNA, 19 nt, Artificial Sequence
  Description of Artificial Sequence: Synthetic oligonucleotide
ucccgggaugcagcuugau

SEQ ID NO: 1531600 - RNA, 19 nt, Artificial Sequence
  Description of Artificial Sequence: Synthetic oligonucleotide
gcgccgaucagcagcguaa

SEQ ID NO: 1531601 - RNA, 19 nt, Artificial Sequence
  Description of Artificial Sequence: Synthetic oligonucleotide
cgucggaauccacggcgag

SEQ ID NO: 1531602 - RNA, 19 nt, Artificial Sequence
  Description of Artificial Sequence: Synthetic oligonucleotide
cuuugguggcgagaacuuu

SEQ ID NO: 1531603 - RNA, 19 nt, Artificial Sequence
  Description of Artificial Sequence: Synthetic oligonucleotide
gccgcgucuccgccggggc

SEQ ID NO: 1531604 - RNA, 19 nt, Artificial Sequence
  Description of Artificial Sequence: Synthetic oligonucleotide
ccuggggcgcgccgcggcg

SEQ ID NO: 1531605 - RNA, 19 nt, Artificial Sequence
  Description of Artificial Sequence: Synthetic oligonucleotide
cggcgucgauaguuguagg

SEQ ID NO: 1531606 - RNA, 19 nt, Artificial Sequence
  Description of Artificial Sequence: Synthetic oligonucleotide
cauauccauuucugacguu

SEQ ID NO: 1531607 - RNA, 19 nt, Artificial Sequence
  Description of Artificial Sequence: Synthetic oligonucleotide
gcgguaaguuggauuccga

SEQ ID NO: 1531608 - RNA, 19 nt, Artificial Sequence
  Description of Artificial Sequence: Synthetic oligonucleotide
cagugccaaggacuuuggu

SEQ ID NO: 1531609 - RNA, 19 nt, Artificial Sequence
  Description of Artificial Sequence: Synthetic oligonucleotide
ggcgccgaucagcagcgua

SEQ ID NO: 1531610 - RNA, 19 nt, Artificial Sequence
  Description of Artificial Sequence: Synthetic oligonucleotide
gcaggucgugggcgagcag

SEQ ID NO: 1531611 - RNA, 19 nt, Artificial Sequence
  Description of Artificial Sequence: Synthetic oligonucleotide
gccuguagcggcgccgauc

SEQ ID NO: 1531612 - RNA, 19 nt, Artificial Sequence
  Description of Artificial Sequence: Synthetic oligonucleotide
gcaauccccaugugguauu

SEQ ID NO: 1531613 - RNA, 19 nt, Artificial Sequence
  Description of Artificial Sequence: Synthetic oligonucleotide
ggacuccguccuucaucuc

SEQ ID NO: 1531614 - RNA, 19 nt, Artificial Sequence
  Description of Artificial Sequence: Synthetic oligonucleotide
agguccccugcggaaccuu

SEQ ID NO: 1531615 - RNA, 19 nt, Artificial Sequence
  Description of Artificial Sequence: Synthetic oligonucleotide
cgauaguuguaggggcguc

SEQ ID NO: 1531616 - RNA, 19 nt, Artificial Sequence
  Description of Artificial Sequence: Synthetic oligonucleotide
ggauuccgaugaaccugga

SEQ ID NO: 1531617 - RNA, 19 nt, Artificial Sequence
  Description of Artificial Sequence: Synthetic oligonucleotide
cggaaccuugggcgguaag

SEQ ID NO: 1531618 - RNA, 19 nt, Artificial Sequence
  Description of Artificial Sequence: Synthetic oligonucleotide
ggucgugggcgagcagguc

SEQ ID NO: 1531619 - RNA, 19 nt, Artificial Sequence
  Description of Artificial Sequence: Synthetic oligonucleotide
ccccucauccuaggaauaa

SEQ ID NO: 1531620 - RNA, 19 nt, Artificial Sequence
  Description of Artificial Sequence: Synthetic oligonucleotide
gcguaacggcucccuucca

SEQ ID NO: 1531621 - RNA, 19 nt, Artificial Sequence
  Description of Artificial Sequence: Synthetic oligonucleotide
cuugggcgguaaguuggau

SEQ ID NO: 1531622 - RNA, 19 nt, Artificial Sequence
  Description of Artificial Sequence: Synthetic oligonucleotide
cgccgaucagcagcguaac

SEQ ID NO: 1531623 - RNA, 19 nt, Artificial Sequence
  Description of Artificial Sequence: Synthetic oligonucleotide
cgguaaguuggauuccgau

SEQ ID NO: 1531624 - RNA, 19 nt, Artificial Sequence
  Description of Artificial Sequence: Synthetic oligonucleotide
gcgccuguagcggcgccga

SEQ ID NO: 1531625 - RNA, 19 nt, Artificial Sequence
  Description of Artificial Sequence: Synthetic oligonucleotide
cugcggaaccuugggcggu

SEQ ID NO: 1531626 - RNA, 19 nt, Artificial Sequence
  Description of Artificial Sequence: Synthetic oligonucleotide
gacggcugguuuggaccau

SEQ ID NO: 1531627 - RNA, 19 nt, Artificial Sequence
  Description of Artificial Sequence: Synthetic oligonucleotide
ccauuggccgcuugcugau

SEQ ID NO: 1531628 - RNA, 19 nt, Artificial Sequence
  Description of Artificial Sequence: Synthetic oligonucleotide
ggacgcgcgcgcucgcggu

SEQ ID NO: 1531629 - RNA, 19 nt, Artificial Sequence
  Description of Artificial Sequence: Synthetic oligonucleotide
gugggcgagcagguccccu

SEQ ID NO: 1531630 - RNA, 19 nt, Artificial Sequence
  Description of Artificial Sequence: Synthetic oligonucleotide
cagggacuccguccuucau

SEQ ID NO: 1531631 - RNA, 19 nt, Artificial Sequence
  Description of Artificial Sequence: Synthetic oligonucleotide
gcagcguaacggcucccuu

SEQ ID NO: 1531632 - RNA, 19 nt, Artificial Sequence
  Description of Artificial Sequence: Synthetic oligonucleotide
gggcggcgucgauaguugu

SEQ ID NO: 1531633 - RNA, 19 nt, Artificial Sequence
  Description of Artificial Sequence: Synthetic oligonucleotide
cgcgucuccgccggggcuc

SEQ ID NO: 1531634 - RNA, 19 nt, Artificial Sequence
  Description of Artificial Sequence: Synthetic oligonucleotide
cuccugcgucugugcaggu

SEQ ID NO: 1531635 - RNA, 19 nt, Artificial Sequence
  Description of Artificial Sequence: Synthetic oligonucleotide
gggccgcgucuccgccggg

SEQ ID NO: 1531636 - RNA, 19 nt, Artificial Sequence
  Description of Artificial Sequence: Synthetic oligonucleotide
ggguucucaguuggugcuu

SEQ ID NO: 1531637 - RNA, 19 nt, Artificial Sequence
  Description of Artificial Sequence: Synthetic oligonucleotide
cgcggucucgcugggucuc

SEQ ID NO: 1531638 - RNA, 19 nt, Artificial Sequence
  Description of Artificial Sequence: Synthetic oligonucleotide
cagguccccugcggaaccu

SEQ ID NO: 1531639 - RNA, 19 nt, Artificial Sequence
  Description of Artificial Sequence: Synthetic oligonucleotide
cauuggccgcuugcugauu

SEQ ID NO: 1531640 - RNA, 19 nt, Artificial Sequence
  Description of Artificial Sequence: Synthetic oligonucleotide
cgugggcgagcaggucccc

SEQ ID NO: 1531641 - RNA, 19 nt, Artificial Sequence
  Description of Artificial Sequence: Synthetic oligonucleotide
gcggaaccuugggcgguaa

SEQ ID NO: 1531642 - RNA, 19 nt, Artificial Sequence
  Description of Artificial Sequence: Synthetic oligonucleotide
ggacacuugcuggcucauu

SEQ ID NO: 1531643 - RNA, 19 nt, Artificial Sequence
  Description of Artificial Sequence: Synthetic oligonucleotide
gguucccgggaugcagcuu

SEQ ID NO: 1531644 - RNA, 19 nt, Artificial Sequence
  Description of Artificial Sequence: Synthetic oligonucleotide
caccugccuuggucucuuu

SEQ ID NO: 1531645 - RNA, 19 nt, Artificial Sequence
  Description of Artificial Sequence: Synthetic oligonucleotide
cggcggcucgagggcgggg

SEQ ID NO: 1531646 - RNA, 19 nt, Artificial Sequence
  Description of Artificial Sequence: Synthetic oligonucleotide
ccgcgucuccgccggggcu

SEQ ID NO: 1531647 - RNA, 19 nt, Artificial Sequence
  Description of Artificial Sequence: Synthetic oligonucleotide
gcgcgccgcggcggcucga

SEQ ID NO: 1531648 - RNA, 19 nt, Artificial Sequence
  Description of Artificial Sequence: Synthetic oligonucleotide
ccacggcgucugccauagu

SEQ ID NO: 1531649 - RNA, 19 nt, Artificial Sequence
  Description of Artificial Sequence: Synthetic oligonucleotide
cgccuguagcggcgccgau

SEQ ID NO: 1531650 - RNA, 19 nt, Artificial Sequence
  Description of Artificial Sequence: Synthetic oligonucleotide
aauauauauauauauauau

SEQ ID NO: 1531651 - RNA, 19 nt, Artificial Sequence
  Description of Artificial Sequence: Synthetic oligonucleotide
ucuucuauggaucugaacc

SEQ ID NO: 1531652 - RNA, 19 nt, Artificial Sequence
  Description of Artificial Sequence: Synthetic oligonucleotide
auauauauauauuugucuc

SEQ ID NO: 1531653 - RNA, 19 nt, Artificial Sequence
  Description of Artificial Sequence: Synthetic oligonucleotide
agaugaaauggacacaucc

SEQ ID NO: 1531654 - RNA, 19 nt, Artificial Sequence
  Description of Artificial Sequence: Synthetic oligonucleotide
uauauauauauauauauau

SEQ ID NO: 1531655 - RNA, 19 nt, Artificial Sequence
  Description of Artificial Sequence: Synthetic oligonucleotide
uauuuaaggaaauauauau

SEQ ID NO: 1531656 - RNA, 19 nt, Artificial Sequence
  Description of Artificial Sequence: Synthetic oligonucleotide
uauauauauauauauauuu

SEQ ID NO: 1531657 - RNA, 19 nt, Artificial Sequence
  Description of Artificial Sequence: Synthetic oligonucleotide
gagagaacuguuuauauag

SEQ ID NO: 1531658 - RNA, 19 nt, Artificial Sequence
  Description of Artificial Sequence: Synthetic oligonucleotide
uauauauauauauuugucu

SEQ ID NO: 1531659 - RNA, 19 nt, Artificial Sequence
  Description of Artificial Sequence: Synthetic oligonucleotide
uauauauauauauauuugu

SEQ ID NO: 1531660 - RNA, 19 nt, Artificial Sequence
  Description of Artificial Sequence: Synthetic oligonucleotide
cuugcauaaacauggaagg

SEQ ID NO: 1531661 - RNA, 19 nt, Artificial Sequence
  Description of Artificial Sequence: Synthetic oligonucleotide
uaaggaaauauauauauau

SEQ ID NO: 1531662 - RNA, 19 nt, Artificial Sequence
  Description of Artificial Sequence: Synthetic oligonucleotide
uauauagacauaucaaaga

SEQ ID NO: 1531663 - RNA, 19 nt, Artificial Sequence
  Description of Artificial Sequence: Synthetic oligonucleotide
auaccuuuuaaugaaacac

SEQ ID NO: 1531664 - RNA, 19 nt, Artificial Sequence
  Description of Artificial Sequence: Synthetic oligonucleotide
auuuaauaccuuuuaauga

SEQ ID NO: 1531665 - RNA, 19 nt, Artificial Sequence
  Description of Artificial Sequence: Synthetic oligonucleotide
aaagaacucaaauauuuaa

SEQ ID NO: 1531666 - RNA, 19 nt, Artificial Sequence
  Description of Artificial Sequence: Synthetic oligonucleotide
aaucaagugucacaggaca

SEQ ID NO: 1531667 - RNA, 19 nt, Artificial Sequence
  Description of Artificial Sequence: Synthetic oligonucleotide
uuucuuagugcacagugcc

SEQ ID NO: 1531668 - RNA, 19 nt, Artificial Sequence
  Description of Artificial Sequence: Synthetic oligonucleotide
aggaaauauauauauauau

SEQ ID NO: 1531669 - RNA, 19 nt, Artificial Sequence
  Description of Artificial Sequence: Synthetic oligonucleotide
uggagauuaaggcugcagg

SEQ ID NO: 1531670 - RNA, 19 nt, Artificial Sequence
  Description of Artificial Sequence: Synthetic oligonucleotide
ugaggcacaggaaaguuag

SEQ ID NO: 1531671 - RNA, 19 nt, Artificial Sequence
  Description of Artificial Sequence: Synthetic oligonucleotide
ucuuccuuggagcugcucg

SEQ ID NO: 1531672 - RNA, 19 nt, Artificial Sequence
  Description of Artificial Sequence: Synthetic oligonucleotide
gaaauauauauauauauau

SEQ ID NO: 1531673 - RNA, 19 nt, Artificial Sequence
  Description of Artificial Sequence: Synthetic oligonucleotide
aaucagaggcuuuuggucu

SEQ ID NO: 1531674 - RNA, 19 nt, Artificial Sequence
  Description of Artificial Sequence: Synthetic oligonucleotide
auauauauauauauuuguc

SEQ ID NO: 1531675 - RNA, 19 nt, Artificial Sequence
  Description of Artificial Sequence: Synthetic oligonucleotide
ugcaccaaagaguagagac

SEQ ID NO: 1531676 - RNA, 19 nt, Artificial Sequence
  Description of Artificial Sequence: Synthetic oligonucleotide
ucaugugucucacucaagc

SEQ ID NO: 1531677 - RNA, 19 nt, Artificial Sequence
  Description of Artificial Sequence: Synthetic oligonucleotide
ugagagauuguguuccugg

SEQ ID NO: 1531678 - RNA, 19 nt, Artificial Sequence
  Description of Artificial Sequence: Synthetic oligonucleotide
auagacauaucaaagaacu

SEQ ID NO: 1531679 - RNA, 19 nt, Artificial Sequence
  Description of Artificial Sequence: Synthetic oligonucleotide
gaggacaugcaccaaagag

SEQ ID NO: 1531680 - RNA, 19 nt, Artificial Sequence
  Description of Artificial Sequence: Synthetic oligonucleotide
aagaacucaaauauuuaag

SEQ ID NO: 1531681 - RNA, 19 nt, Artificial Sequence
  Description of Artificial Sequence: Synthetic oligonucleotide
uggggaaacaagcagagaa

SEQ ID NO: 1531682 - RNA, 19 nt, Artificial Sequence
  Description of Artificial Sequence: Synthetic oligonucleotide
uuugucaugugucucacuc

SEQ ID NO: 1531683 - RNA, 19 nt, Artificial Sequence
  Description of Artificial Sequence: Synthetic oligonucleotide
uauagacauaucaaagaac

SEQ ID NO: 1531684 - RNA, 19 nt, Artificial Sequence
  Description of Artificial Sequence: Synthetic oligonucleotide
gacaaagagagguuguccc

SEQ ID NO: 1531685 - RNA, 19 nt, Artificial Sequence
  Description of Artificial Sequence: Synthetic oligonucleotide
auauagacauaucaaagaa

SEQ ID NO: 1531686 - RNA, 19 nt, Artificial Sequence
  Description of Artificial Sequence: Synthetic oligonucleotide
uuaagauucuccuuucuuc

SEQ ID NO: 1531687 - RNA, 19 nt, Artificial Sequence
  Description of Artificial Sequence: Synthetic oligonucleotide
auauauauauauauauuug

SEQ ID NO: 1531688 - RNA, 19 nt, Artificial Sequence
  Description of Artificial Sequence: Synthetic oligonucleotide
aagcuuauuuaccccagag

SEQ ID NO: 1531689 - RNA, 19 nt, Artificial Sequence
  Description of Artificial Sequence: Synthetic oligonucleotide
cucuguaccagccagcugc

SEQ ID NO: 1531690 - RNA, 19 nt, Artificial Sequence
  Description of Artificial Sequence: Synthetic oligonucleotide
uuauuuaccccagaggaca

SEQ ID NO: 1531691 - RNA, 19 nt, Artificial Sequence
  Description of Artificial Sequence: Synthetic oligonucleotide
aaauggacacaucccauga

SEQ ID NO: 1531692 - RNA, 19 nt, Artificial Sequence
  Description of Artificial Sequence: Synthetic oligonucleotide
aaguuagccccaucuguac

SEQ ID NO: 1531693 - RNA, 19 nt, Artificial Sequence
  Description of Artificial Sequence: Synthetic oligonucleotide
agacauaucaaagaacuca

SEQ ID NO: 1531694 - RNA, 19 nt, Artificial Sequence
  Description of Artificial Sequence: Synthetic oligonucleotide
uauaaggaggagcaccuga

SEQ ID NO: 1531695 - RNA, 19 nt, Artificial Sequence
  Description of Artificial Sequence: Synthetic oligonucleotide
aaauauauauauauauaua

SEQ ID NO: 1531696 - RNA, 19 nt, Artificial Sequence
  Description of Artificial Sequence: Synthetic oligonucleotide
ucuccguuuacacaggguc

SEQ ID NO: 1531697 - RNA, 19 nt, Artificial Sequence
  Description of Artificial Sequence: Synthetic oligonucleotide
aaaugcuccggaguucagc

SEQ ID NO: 1531698 - RNA, 19 nt, Artificial Sequence
  Description of Artificial Sequence: Synthetic oligonucleotide
gauuguguuccugggaugg

SEQ ID NO: 1531699 - RNA, 19 nt, Artificial Sequence
  Description of Artificial Sequence: Synthetic oligonucleotide
gaugaaauggacacauccc

SEQ ID NO: 1531700 - RNA, 19 nt, Artificial Sequence
  Description of Artificial Sequence: Synthetic oligonucleotide
gucagacaaagaaugaggg

SEQ ID NO: 1531701 - RNA, 19 nt, Artificial Sequence
  Description of Artificial Sequence: Synthetic oligonucleotide
gaggcuuuuggucucuccg

SEQ ID NO: 1531702 - RNA, 19 nt, Artificial Sequence
  Description of Artificial Sequence: Synthetic oligonucleotide
gagggacucccacagaggg

SEQ ID NO: 1531703 - RNA, 19 nt, Artificial Sequence
  Description of Artificial Sequence: Synthetic oligonucleotide
ucuauggaucugaaccagg

SEQ ID NO: 1531704 - RNA, 19 nt, Artificial Sequence
  Description of Artificial Sequence: Synthetic oligonucleotide
ugagggagcccguuggugg

SEQ ID NO: 1531705 - RNA, 19 nt, Artificial Sequence
  Description of Artificial Sequence: Synthetic oligonucleotide
aguuagccccaucuguacc

SEQ ID NO: 1531706 - RNA, 19 nt, Artificial Sequence
  Description of Artificial Sequence: Synthetic oligonucleotide
ucuuaggcuguguuugccg

SEQ ID NO: 1531707 - RNA, 19 nt, Artificial Sequence
  Description of Artificial Sequence: Synthetic oligonucleotide
aggaaaguuagccccaucu

SEQ ID NO: 1531708 - RNA, 19 nt, Artificial Sequence
  Description of Artificial Sequence: Synthetic oligonucleotide
ugcauaaacauggaaggcu

SEQ ID NO: 1531709 - RNA, 19 nt, Artificial Sequence
  Description of Artificial Sequence: Synthetic oligonucleotide
ugugucucacucaagcuuc

SEQ ID NO: 1531710 - RNA, 19 nt, Artificial Sequence
  Description of Artificial Sequence: Synthetic oligonucleotide
aacauggaaggcuguggag

SEQ ID NO: 1531711 - RNA, 19 nt, Artificial Sequence
  Description of Artificial Sequence: Synthetic oligonucleotide
aaacccaaucaagugucac

SEQ ID NO: 1531712 - RNA, 19 nt, Artificial Sequence
  Description of Artificial Sequence: Synthetic oligonucleotide
gagagauuguguuccuggg

SEQ ID NO: 1531713 - RNA, 19 nt, Artificial Sequence
  Description of Artificial Sequence: Synthetic oligonucleotide
ucaagcuuauuuaccccag

SEQ ID NO: 1531714 - RNA, 19 nt, Artificial Sequence
  Description of Artificial Sequence: Synthetic oligonucleotide
aguucagccaccagauucc

SEQ ID NO: 1531715 - RNA, 19 nt, Artificial Sequence
  Description of Artificial Sequence: Synthetic oligonucleotide
aaguaaggcccugccaggc

SEQ ID NO: 1531716 - RNA, 19 nt, Artificial Sequence
  Description of Artificial Sequence: Synthetic oligonucleotide
aacccaaucaagugucaca

SEQ ID NO: 1531717 - RNA, 19 nt, Artificial Sequence
  Description of Artificial Sequence: Synthetic oligonucleotide
gacacaucccaugagcucc

SEQ ID NO: 1531718 - RNA, 19 nt, Artificial Sequence
  Description of Artificial Sequence: Synthetic oligonucleotide
cuuauuuaccccagaggac

SEQ ID NO: 1531719 - RNA, 19 nt, Artificial Sequence
  Description of Artificial Sequence: Synthetic oligonucleotide
uccaguuggcuucccaucc

SEQ ID NO: 1531720 - RNA, 19 nt, Artificial Sequence
  Description of Artificial Sequence: Synthetic oligonucleotide
agagacaggucagacaaag

SEQ ID NO: 1531721 - RNA, 19 nt, Artificial Sequence
  Description of Artificial Sequence: Synthetic oligonucleotide
aagaguagagacaggucag

SEQ ID NO: 1531722 - RNA, 19 nt, Artificial Sequence
  Description of Artificial Sequence: Synthetic oligonucleotide
ucugagccugugauggccg

SEQ ID NO: 1531723 - RNA, 19 nt, Artificial Sequence
  Description of Artificial Sequence: Synthetic oligonucleotide
gcuugcauaaacauggaag

SEQ ID NO: 1531724 - RNA, 19 nt, Artificial Sequence
  Description of Artificial Sequence: Synthetic oligonucleotide
gugcuuuggaauuccacag

SEQ ID NO: 1531725 - RNA, 19 nt, Artificial Sequence
  Description of Artificial Sequence: Synthetic oligonucleotide
uuuaccccagaggacaaag

SEQ ID NO: 1531726 - RNA, 19 nt, Artificial Sequence
  Description of Artificial Sequence: Synthetic oligonucleotide
aguauucccugccaagaug

SEQ ID NO: 1531727 - RNA, 19 nt, Artificial Sequence
  Description of Artificial Sequence: Synthetic oligonucleotide
gaagaucccaagucagggc

SEQ ID NO: 1531728 - RNA, 19 nt, Artificial Sequence
  Description of Artificial Sequence: Synthetic oligonucleotide
caggcauccuuucuuaggc

SEQ ID NO: 1531729 - RNA, 19 nt, Artificial Sequence
  Description of Artificial Sequence: Synthetic oligonucleotide
ugaaaugcuccggaguuca

SEQ ID NO: 1531730 - RNA, 19 nt, Artificial Sequence
  Description of Artificial Sequence: Synthetic oligonucleotide
acagguacccagcaggcca

SEQ ID NO: 1531731 - RNA, 19 nt, Artificial Sequence
  Description of Artificial Sequence: Synthetic oligonucleotide
aguagagacaggucagaca

SEQ ID NO: 1531732 - RNA, 19 nt, Artificial Sequence
  Description of Artificial Sequence: Synthetic oligonucleotide
guggcuggagcacuaagag

SEQ ID NO: 1531733 - RNA, 19 nt, Artificial Sequence
  Description of Artificial Sequence: Synthetic oligonucleotide
ugaaauggacacaucccau

SEQ ID NO: 1531734 - RNA, 19 nt, Artificial Sequence
  Description of Artificial Sequence: Synthetic oligonucleotide
auauauauauauauauaua

SEQ ID NO: 1531735 - RNA, 19 nt, Artificial Sequence
  Description of Artificial Sequence: Synthetic oligonucleotide
auauauauauauauauauu

SEQ ID NO: 1531736 - RNA, 19 nt, Artificial Sequence
  Description of Artificial Sequence: Synthetic oligonucleotide
ucucuccguuuacacaggg

SEQ ID NO: 1531737 - RNA, 19 nt, Artificial Sequence
  Description of Artificial Sequence: Synthetic oligonucleotide
ugcucugaaaugcuccgga

SEQ ID NO: 1531738 - RNA, 19 nt, Artificial Sequence
  Description of Artificial Sequence: Synthetic oligonucleotide
acccagcaggccaagaucc

SEQ ID NO: 1531739 - RNA, 19 nt, Artificial Sequence
  Description of Artificial Sequence: Synthetic oligonucleotide
uaagagacucagcccuagg

SEQ ID NO: 1531740 - RNA, 19 nt, Artificial Sequence
  Description of Artificial Sequence: Synthetic oligonucleotide
auaaggaggagcaccugac

SEQ ID NO: 1531741 - RNA, 19 nt, Artificial Sequence
  Description of Artificial Sequence: Synthetic oligonucleotide
aaggaaauauauauauaua

SEQ ID NO: 1531742 - RNA, 19 nt, Artificial Sequence
  Description of Artificial Sequence: Synthetic oligonucleotide
uuuguacucuggcccaccc

SEQ ID NO: 1531743 - RNA, 19 nt, Artificial Sequence
  Description of Artificial Sequence: Synthetic oligonucleotide
acccaaucaagugucacag

SEQ ID NO: 1531744 - RNA, 19 nt, Artificial Sequence
  Description of Artificial Sequence: Synthetic oligonucleotide
uucuauggaucugaaccag

SEQ ID NO: 1531745 - RNA, 19 nt, Artificial Sequence
  Description of Artificial Sequence: Synthetic oligonucleotide
uucuuagugcacagugccc

SEQ ID NO: 1531746 - RNA, 19 nt, Artificial Sequence
  Description of Artificial Sequence: Synthetic oligonucleotide
ggagauuaaggcugcaggc

SEQ ID NO: 1531747 - RNA, 19 nt, Artificial Sequence
  Description of Artificial Sequence: Synthetic oligonucleotide
agggucaagcuuauuuacc

SEQ ID NO: 1531748 - RNA, 19 nt, Artificial Sequence
  Description of Artificial Sequence: Synthetic oligonucleotide
accagauuccgcuggaggu

SEQ ID NO: 1531749 - RNA, 19 nt, Artificial Sequence
  Description of Artificial Sequence: Synthetic oligonucleotide
aguuucaaucauuuauuua

SEQ ID NO: 1531750 - RNA, 19 nt, Artificial Sequence
  Description of Artificial Sequence: Synthetic oligonucleotide
uaccuuuugugcuuuggaa

SEQ ID NO: 1531751 - RNA, 19 nt, Artificial Sequence
  Description of Artificial Sequence: Synthetic oligonucleotide
aggucagacaaagaaugag

SEQ ID NO: 1531752 - RNA, 19 nt, Artificial Sequence
  Description of Artificial Sequence: Synthetic oligonucleotide
uugcauaaacauggaaggc

SEQ ID NO: 1531753 - RNA, 19 nt, Artificial Sequence
  Description of Artificial Sequence: Synthetic oligonucleotide
acccaaacccaaucaagug

SEQ ID NO: 1531754 - RNA, 19 nt, Artificial Sequence
  Description of Artificial Sequence: Synthetic oligonucleotide
acaaagagagguugucccu

SEQ ID NO: 1531755 - RNA, 19 nt, Artificial Sequence
  Description of Artificial Sequence: Synthetic oligonucleotide
gggucaagcuuauuuaccc

SEQ ID NO: 1531756 - RNA, 19 nt, Artificial Sequence
  Description of Artificial Sequence: Synthetic oligonucleotide
aagaucccagauggcuucc

SEQ ID NO: 1531757 - RNA, 19 nt, Artificial Sequence
  Description of Artificial Sequence: Synthetic oligonucleotide
aucagaggcuuuuggucuc

SEQ ID NO: 1531758 - RNA, 19 nt, Artificial Sequence
  Description of Artificial Sequence: Synthetic oligonucleotide
uguguuugccguauccuuu

SEQ ID NO: 1531759 - RNA, 19 nt, Artificial Sequence
  Description of Artificial Sequence: Synthetic oligonucleotide
aaaguuagccccaucugua

SEQ ID NO: 1531760 - RNA, 19 nt, Artificial Sequence
  Description of Artificial Sequence: Synthetic oligonucleotide
agagauuguguuccuggga

SEQ ID NO: 1531761 - RNA, 19 nt, Artificial Sequence
  Description of Artificial Sequence: Synthetic oligonucleotide
auuccgcuggaggucagcc

SEQ ID NO: 1531762 - RNA, 19 nt, Artificial Sequence
  Description of Artificial Sequence: Synthetic oligonucleotide
auuugucucuucuaauguu

SEQ ID NO: 1531763 - RNA, 19 nt, Artificial Sequence
  Description of Artificial Sequence: Synthetic oligonucleotide
ggcuggagcacuaagagac

SEQ ID NO: 1531764 - RNA, 19 nt, Artificial Sequence
  Description of Artificial Sequence: Synthetic oligonucleotide
uccacccaaacccaaucaa

SEQ ID NO: 1531765 - RNA, 19 nt, Artificial Sequence
  Description of Artificial Sequence: Synthetic oligonucleotide
gagcaccugacagaacugg

SEQ ID NO: 1531766 - RNA, 19 nt, Artificial Sequence
  Description of Artificial Sequence: Synthetic oligonucleotide
cagggucaagcuuauuuac

SEQ ID NO: 1531767 - RNA, 19 nt, Artificial Sequence
  Description of Artificial Sequence: Synthetic oligonucleotide
cagcccuaggaaaacuggg

SEQ ID NO: 1531768 - RNA, 19 nt, Artificial Sequence
  Description of Artificial Sequence: Synthetic oligonucleotide
caaagaguagagacagguc

SEQ ID NO: 1531769 - RNA, 19 nt, Artificial Sequence
  Description of Artificial Sequence: Synthetic oligonucleotide
uugccguauccuuucuucc

SEQ ID NO: 1531770 - RNA, 19 nt, Artificial Sequence
  Description of Artificial Sequence: Synthetic oligonucleotide
cucagcgugagggagcccg

SEQ ID NO: 1531771 - RNA, 19 nt, Artificial Sequence
  Description of Artificial Sequence: Synthetic oligonucleotide
ccaaguaaggcccugccag

SEQ ID NO: 1531772 - RNA, 19 nt, Artificial Sequence
  Description of Artificial Sequence: Synthetic oligonucleotide
aagaugaaauggacacauc

SEQ ID NO: 1531773 - RNA, 19 nt, Artificial Sequence
  Description of Artificial Sequence: Synthetic oligonucleotide
ugcuccggaguucagccac

SEQ ID NO: 1531774 - RNA, 19 nt, Artificial Sequence
  Description of Artificial Sequence: Synthetic oligonucleotide
guuucuuagugcacagugc

SEQ ID NO: 1531775 - RNA, 19 nt, Artificial Sequence
  Description of Artificial Sequence: Synthetic oligonucleotide
uuggcaguauucccugcca

SEQ ID NO: 1531776 - RNA, 19 nt, Artificial Sequence
  Description of Artificial Sequence: Synthetic oligonucleotide
uggagcacuaagagacuca

SEQ ID NO: 1531777 - RNA, 19 nt, Artificial Sequence
  Description of Artificial Sequence: Synthetic oligonucleotide
agagugguuggugguaagg

SEQ ID NO: 1531778 - RNA, 19 nt, Artificial Sequence
  Description of Artificial Sequence: Synthetic oligonucleotide
caccagauuccgcuggagg

SEQ ID NO: 1531779 - RNA, 19 nt, Artificial Sequence
  Description of Artificial Sequence: Synthetic oligonucleotide
guauucccugccaagauga

SEQ ID NO: 1531780 - RNA, 19 nt, Artificial Sequence
  Description of Artificial Sequence: Synthetic oligonucleotide
guaccagccagcugcacac

SEQ ID NO: 1531781 - RNA, 19 nt, Artificial Sequence
  Description of Artificial Sequence: Synthetic oligonucleotide
agauuguguuccugggaug

SEQ ID NO: 1531782 - RNA, 19 nt, Artificial Sequence
  Description of Artificial Sequence: Synthetic oligonucleotide
ucccaagucagggcaagag

SEQ ID NO: 1531783 - RNA, 19 nt, Artificial Sequence
  Description of Artificial Sequence: Synthetic oligonucleotide
cuuauaaggaggagcaccu

SEQ ID NO: 1531784 - RNA, 19 nt, Artificial Sequence
  Description of Artificial Sequence: Synthetic oligonucleotide
agacaccggccgcucaagc

SEQ ID NO: 1531785 - RNA, 19 nt, Artificial Sequence
  Description of Artificial Sequence: Synthetic oligonucleotide
uuaccccagaggacaaaga

SEQ ID NO: 1531786 - RNA, 19 nt, Artificial Sequence
  Description of Artificial Sequence: Synthetic oligonucleotide
acaccggccgcucaagcug

SEQ ID NO: 1531787 - RNA, 19 nt, Artificial Sequence
  Description of Artificial Sequence: Synthetic oligonucleotide
ccuuauaaggaggagcacc

SEQ ID NO: 1531788 - RNA, 19 nt, Artificial Sequence
  Description of Artificial Sequence: Synthetic oligonucleotide
ggaaaguuagccccaucug

SEQ ID NO: 1531789 - RNA, 19 nt, Artificial Sequence
  Description of Artificial Sequence: Synthetic oligonucleotide
uacccagcaggccaagauc

SEQ ID NO: 1531790 - RNA, 19 nt, Artificial Sequence
  Description of Artificial Sequence: Synthetic oligonucleotide
gagauuguguuccugggau

SEQ ID NO: 1531791 - RNA, 19 nt, Artificial Sequence
  Description of Artificial Sequence: Synthetic oligonucleotide
agcccuaggaaaacugggg

SEQ ID NO: 1531792 - RNA, 19 nt, Artificial Sequence
  Description of Artificial Sequence: Synthetic oligonucleotide
ggaggagggacucccacag

SEQ ID NO: 1531793 - RNA, 19 nt, Artificial Sequence
  Description of Artificial Sequence: Synthetic oligonucleotide
gcuuuugguuucuuagugc

SEQ ID NO: 1531794 - RNA, 19 nt, Artificial Sequence
  Description of Artificial Sequence: Synthetic oligonucleotide
ggaaauauauauauauaua

SEQ ID NO: 1531795 - RNA, 19 nt, Artificial Sequence
  Description of Artificial Sequence: Synthetic oligonucleotide
uccuacucuggucuggcuu

SEQ ID NO: 1531796 - RNA, 19 nt, Artificial Sequence
  Description of Artificial Sequence: Synthetic oligonucleotide
ugccguauccuuucuuccu

SEQ ID NO: 1531797 - RNA, 19 nt, Artificial Sequence
  Description of Artificial Sequence: Synthetic oligonucleotide
uggugguaaggugaggcac

SEQ ID NO: 1531798 - RNA, 19 nt, Artificial Sequence
  Description of Artificial Sequence: Synthetic oligonucleotide
uuuuggucucuccguuuac

SEQ ID NO: 1531799 - RNA, 19 nt, Artificial Sequence
  Description of Artificial Sequence: Synthetic oligonucleotide
ucgggucccugagagauug

SEQ ID NO: 1531800 - RNA, 19 nt, Artificial Sequence
  Description of Artificial Sequence: Synthetic oligonucleotide
ucuguaccagccagcugca

SEQ ID NO: 1531801 - RNA, 19 nt, Artificial Sequence
  Description of Artificial Sequence: Synthetic oligonucleotide
aucaagugucacaggacag

SEQ ID NO: 1531802 - RNA, 19 nt, Artificial Sequence
  Description of Artificial Sequence: Synthetic oligonucleotide
uucuuaggcuguguuugcc

SEQ ID NO: 1531803 - RNA, 19 nt, Artificial Sequence
  Description of Artificial Sequence: Synthetic oligonucleotide
auccacccaaacccaauca

SEQ ID NO: 1531804 - RNA, 19 nt, Artificial Sequence
  Description of Artificial Sequence: Synthetic oligonucleotide
acaucccaugagcuccugg

SEQ ID NO: 1531805 - RNA, 19 nt, Artificial Sequence
  Description of Artificial Sequence: Synthetic oligonucleotide
gggcaagagcuccaguugg

SEQ ID NO: 1531806 - RNA, 19 nt, Artificial Sequence
  Description of Artificial Sequence: Synthetic oligonucleotide
guuuacacagggucaagcu

SEQ ID NO: 1531807 - RNA, 19 nt, Artificial Sequence
  Description of Artificial Sequence: Synthetic oligonucleotide
cuguggagauuaaggcugc

SEQ ID NO: 1531808 - RNA, 19 nt, Artificial Sequence
  Description of Artificial Sequence: Synthetic oligonucleotide
caggccaagaucccagaug

SEQ ID NO: 1531809 - RNA, 19 nt, Artificial Sequence
  Description of Artificial Sequence: Synthetic oligonucleotide
cagaccagucucuucuaug

SEQ ID NO: 1531810 - RNA, 19 nt, Artificial Sequence
  Description of Artificial Sequence: Synthetic oligonucleotide
uuauaaggaggagcaccug

SEQ ID NO: 1531811 - RNA, 19 nt, Artificial Sequence
  Description of Artificial Sequence: Synthetic oligonucleotide
guaccuuuugugcuuugga

SEQ ID NO: 1531812 - RNA, 19 nt, Artificial Sequence
  Description of Artificial Sequence: Synthetic oligonucleotide
cacccaguggggaaacaag

SEQ ID NO: 1531813 - RNA, 19 nt, Artificial Sequence
  Description of Artificial Sequence: Synthetic oligonucleotide
ugugauggccgcugcucug

SEQ ID NO: 1531814 - RNA, 19 nt, Artificial Sequence
  Description of Artificial Sequence: Synthetic oligonucleotide
agacaaagaaugagggcca

SEQ ID NO: 1531815 - RNA, 19 nt, Artificial Sequence
  Description of Artificial Sequence: Synthetic oligonucleotide
acucuggcccacccagugg

SEQ ID NO: 1531816 - RNA, 19 nt, Artificial Sequence
  Description of Artificial Sequence: Synthetic oligonucleotide
aagcuugugggagggguga

SEQ ID NO: 1531817 - RNA, 19 nt, Artificial Sequence
  Description of Artificial Sequence: Synthetic oligonucleotide
uccguuuacacagggucaa

SEQ ID NO: 1531818 - RNA, 19 nt, Artificial Sequence
  Description of Artificial Sequence: Synthetic oligonucleotide
gcaggcauccuuucuuagg

SEQ ID NO: 1531819 - RNA, 19 nt, Artificial Sequence
  Description of Artificial Sequence: Synthetic oligonucleotide
cugcucgggucccugagag

SEQ ID NO: 1531820 - RNA, 19 nt, Artificial Sequence
  Description of Artificial Sequence: Synthetic oligonucleotide
agaggacaugcaccaaaga

SEQ ID NO: 1531821 - RNA, 19 nt, Artificial Sequence
  Description of Artificial Sequence: Synthetic oligonucleotide
agaaugagggccaggccug

SEQ ID NO: 1531822 - RNA, 19 nt, Artificial Sequence
  Description of Artificial Sequence: Synthetic oligonucleotide
ggucaagcuuauuuacccc

SEQ ID NO: 1531823 - RNA, 19 nt, Artificial Sequence
  Description of Artificial Sequence: Synthetic oligonucleotide
uuguacucuggcccaccca

SEQ ID NO: 1531824 - RNA, 19 nt, Artificial Sequence
  Description of Artificial Sequence: Synthetic oligonucleotide
aggcuuuuggucucuccgu

SEQ ID NO: 1531825 - RNA, 19 nt, Artificial Sequence
  Description of Artificial Sequence: Synthetic oligonucleotide
cuaagagacucagcccuag

SEQ ID NO: 1531826 - RNA, 19 nt, Artificial Sequence
  Description of Artificial Sequence: Synthetic oligonucleotide
caaagagagguugucccuc

SEQ ID NO: 1531827 - RNA, 19 nt, Artificial Sequence
  Description of Artificial Sequence: Synthetic oligonucleotide
gaucccaagucagggcaag

SEQ ID NO: 1531828 - RNA, 19 nt, Artificial Sequence
  Description of Artificial Sequence: Synthetic oligonucleotide
gaagcuugugggaggggug

SEQ ID NO: 1531829 - RNA, 19 nt, Artificial Sequence
  Description of Artificial Sequence: Synthetic oligonucleotide
gagagugguuggugguaag

SEQ ID NO: 1531830 - RNA, 19 nt, Artificial Sequence
  Description of Artificial Sequence: Synthetic oligonucleotide
guggagauuaaggcugcag

SEQ ID NO: 1531831 - RNA, 19 nt, Artificial Sequence
  Description of Artificial Sequence: Synthetic oligonucleotide
ggugacuuggaggaugggc

SEQ ID NO: 1531832 - RNA, 19 nt, Artificial Sequence
  Description of Artificial Sequence: Synthetic oligonucleotide
aacuggaaggcaggagagu

SEQ ID NO: 1531833 - RNA, 19 nt, Artificial Sequence
  Description of Artificial Sequence: Synthetic oligonucleotide
cugcagaggacaugcacca

SEQ ID NO: 1531834 - RNA, 19 nt, Artificial Sequence
  Description of Artificial Sequence: Synthetic oligonucleotide
uggcaguauucccugccaa

SEQ ID NO: 1531835 - RNA, 19 nt, Artificial Sequence
  Description of Artificial Sequence: Synthetic oligonucleotide
ucucuguaccagccagcug

SEQ ID NO: 1531836 - RNA, 19 nt, Artificial Sequence
  Description of Artificial Sequence: Synthetic oligonucleotide
ucccugccaagaugaaaug

SEQ ID NO: 1531837 - RNA, 19 nt, Artificial Sequence
  Description of Artificial Sequence: Synthetic oligonucleotide
aguaaggcccugccaggcu

SEQ ID NO: 1531838 - RNA, 19 nt, Artificial Sequence
  Description of Artificial Sequence: Synthetic oligonucleotide
guguuugccguauccuuuc

SEQ ID NO: 1531839 - RNA, 19 nt, Artificial Sequence
  Description of Artificial Sequence: Synthetic oligonucleotide
acucccacagagggcuugc

SEQ ID NO: 1531840 - RNA, 19 nt, Artificial Sequence
  Description of Artificial Sequence: Synthetic oligonucleotide
ucccugagagauuguguuc

SEQ ID NO: 1531841 - RNA, 19 nt, Artificial Sequence
  Description of Artificial Sequence: Synthetic oligonucleotide
cuuccuacucuggucuggc

SEQ ID NO: 1531842 - RNA, 19 nt, Artificial Sequence
  Description of Artificial Sequence: Synthetic oligonucleotide
ggacaaagagagguugucc

SEQ ID NO: 1531843 - RNA, 19 nt, Artificial Sequence
  Description of Artificial Sequence: Synthetic oligonucleotide
agaguagagacaggucaga

SEQ ID NO: 1531844 - RNA, 19 nt, Artificial Sequence
  Description of Artificial Sequence: Synthetic oligonucleotide
gggaaacaagcagagaaga

SEQ ID NO: 1531845 - RNA, 19 nt, Artificial Sequence
  Description of Artificial Sequence: Synthetic oligonucleotide
cuccguuuacacaggguca

SEQ ID NO: 1531846 - RNA, 19 nt, Artificial Sequence
  Description of Artificial Sequence: Synthetic oligonucleotide
cuuccuccccucauccaug

SEQ ID NO: 1531847 - RNA, 19 nt, Artificial Sequence
  Description of Artificial Sequence: Synthetic oligonucleotide
ugcccuuggagaagaugaa

SEQ ID NO: 1531848 - RNA, 19 nt, Artificial Sequence
  Description of Artificial Sequence: Synthetic oligonucleotide
guaaggcccugccaggcuc

SEQ ID NO: 1531849 - RNA, 19 nt, Artificial Sequence
  Description of Artificial Sequence: Synthetic oligonucleotide
caagaugaaauggacacau

SEQ ID NO: 1531850 - RNA, 19 nt, Artificial Sequence
  Description of Artificial Sequence: Synthetic oligonucleotide
cucaggagacaccggccgc

SEQ ID NO: 1531851 - RNA, 19 nt, Artificial Sequence
  Description of Artificial Sequence: Synthetic oligonucleotide
uauucccugccaagaugaa

SEQ ID NO: 1531852 - RNA, 19 nt, Artificial Sequence
  Description of Artificial Sequence: Synthetic oligonucleotide
agagagguugucccucuua

SEQ ID NO: 1531853 - RNA, 19 nt, Artificial Sequence
  Description of Artificial Sequence: Synthetic oligonucleotide
guauccuuucuuccuugga

SEQ ID NO: 1531854 - RNA, 19 nt, Artificial Sequence
  Description of Artificial Sequence: Synthetic oligonucleotide
agggacucccacagagggc

SEQ ID NO: 1531855 - RNA, 19 nt, Artificial Sequence
  Description of Artificial Sequence: Synthetic oligonucleotide
gacagguacccagcaggcc

SEQ ID NO: 1531856 - RNA, 19 nt, Artificial Sequence
  Description of Artificial Sequence: Synthetic oligonucleotide
ugucucacucaagcuucag

SEQ ID NO: 1531857 - RNA, 19 nt, Artificial Sequence
  Description of Artificial Sequence: Synthetic oligonucleotide
agcgugagggagcccguug

SEQ ID NO: 1531858 - RNA, 19 nt, Artificial Sequence
  Description of Artificial Sequence: Synthetic oligonucleotide
cuggagcacuaagagacuc

SEQ ID NO: 1531859 - RNA, 19 nt, Artificial Sequence
  Description of Artificial Sequence: Synthetic oligonucleotide
ggcuguguuugccguaucc

SEQ ID NO: 1531860 - RNA, 19 nt, Artificial Sequence
  Description of Artificial Sequence: Synthetic oligonucleotide
cuuuguacucuggcccacc

SEQ ID NO: 1531861 - RNA, 19 nt, Artificial Sequence
  Description of Artificial Sequence: Synthetic oligonucleotide
gccaguugaaggucagacc

SEQ ID NO: 1531862 - RNA, 19 nt, Artificial Sequence
  Description of Artificial Sequence: Synthetic oligonucleotide
ccaggcuugcauaaacaug

SEQ ID NO: 1531863 - RNA, 19 nt, Artificial Sequence
  Description of Artificial Sequence: Synthetic oligonucleotide
aggcauccuuucuuaggcu

SEQ ID NO: 1531864 - RNA, 19 nt, Artificial Sequence
  Description of Artificial Sequence: Synthetic oligonucleotide
ccucaggagacaccggccg

SEQ ID NO: 1531865 - RNA, 19 nt, Artificial Sequence
  Description of Artificial Sequence: Synthetic oligonucleotide
accaaagaguagagacagg

SEQ ID NO: 1531866 - RNA, 19 nt, Artificial Sequence
  Description of Artificial Sequence: Synthetic oligonucleotide
uuaggcuguguuugccgua

SEQ ID NO: 1531867 - RNA, 19 nt, Artificial Sequence
  Description of Artificial Sequence: Synthetic oligonucleotide
ggagagaacuguuuauaua

SEQ ID NO: 1531868 - RNA, 19 nt, Artificial Sequence
  Description of Artificial Sequence: Synthetic oligonucleotide
ugggcaacaccaggcuugc

SEQ ID NO: 1531869 - RNA, 19 nt, Artificial Sequence
  Description of Artificial Sequence: Synthetic oligonucleotide
cacccaaacccaaucaagu

SEQ ID NO: 1531870 - RNA, 19 nt, Artificial Sequence
  Description of Artificial Sequence: Synthetic oligonucleotide
ugggucagcagugccaguu

SEQ ID NO: 1531871 - RNA, 19 nt, Artificial Sequence
  Description of Artificial Sequence: Synthetic oligonucleotide
gugguaaggugaggcacag

SEQ ID NO: 1531872 - RNA, 19 nt, Artificial Sequence
  Description of Artificial Sequence: Synthetic oligonucleotide
ggacaugcaccaaagagua

SEQ ID NO: 1531873 - RNA, 19 nt, Artificial Sequence
  Description of Artificial Sequence: Synthetic oligonucleotide
guggggagagaacuguuua

SEQ ID NO: 1531874 - RNA, 19 nt, Artificial Sequence
  Description of Artificial Sequence: Synthetic oligonucleotide
uugugggaggggugacuug

SEQ ID NO: 1531875 - RNA, 19 nt, Artificial Sequence
  Description of Artificial Sequence: Synthetic oligonucleotide
gacucagcccuaggaaaac

SEQ ID NO: 1531876 - RNA, 19 nt, Artificial Sequence
  Description of Artificial Sequence: Synthetic oligonucleotide
uaggcuguguuugccguau

SEQ ID NO: 1531877 - RNA, 19 nt, Artificial Sequence
  Description of Artificial Sequence: Synthetic oligonucleotide
agugccaguugaaggucag

SEQ ID NO: 1531878 - RNA, 19 nt, Artificial Sequence
  Description of Artificial Sequence: Synthetic oligonucleotide
agacucagcccuaggaaaa

SEQ ID NO: 1531879 - RNA, 19 nt, Artificial Sequence
  Description of Artificial Sequence: Synthetic oligonucleotide
cugcucugaaaugcuccgg

SEQ ID NO: 1531880 - RNA, 19 nt, Artificial Sequence
  Description of Artificial Sequence: Synthetic oligonucleotide
ucuguaccuuuugugcuuu

SEQ ID NO: 1531881 - RNA, 19 nt, Artificial Sequence
  Description of Artificial Sequence: Synthetic oligonucleotide
gaaaugcuccggaguucag

SEQ ID NO: 1531882 - RNA, 19 nt, Artificial Sequence
  Description of Artificial Sequence: Synthetic oligonucleotide
ugguuucuuagugcacagu

SEQ ID NO: 1531883 - RNA, 19 nt, Artificial Sequence
  Description of Artificial Sequence: Synthetic oligonucleotide
ugguaaggugaggcacagg

SEQ ID NO: 1531884 - RNA, 19 nt, Artificial Sequence
  Description of Artificial Sequence: Synthetic oligonucleotide
aaggucagaccagucucuu

SEQ ID NO: 1531885 - RNA, 19 nt, Artificial Sequence
  Description of Artificial Sequence: Synthetic oligonucleotide
ccccuuauaaggaggagca

SEQ ID NO: 1531886 - RNA, 19 nt, Artificial Sequence
  Description of Artificial Sequence: Synthetic oligonucleotide
caaacccaaucaaguguca

SEQ ID NO: 1531887 - RNA, 19 nt, Artificial Sequence
  Description of Artificial Sequence: Synthetic oligonucleotide
agauggcuuccuacucugg

SEQ ID NO: 1531888 - RNA, 19 nt, Artificial Sequence
  Description of Artificial Sequence: Synthetic oligonucleotide
gagcacuaagagacucagc

SEQ ID NO: 1531889 - RNA, 19 nt, Artificial Sequence
  Description of Artificial Sequence: Synthetic oligonucleotide
cccaagucagggcaagagc

SEQ ID NO: 1531890 - RNA, 19 nt, Artificial Sequence
  Description of Artificial Sequence: Synthetic oligonucleotide
cugaaaugcuccggaguuc

SEQ ID NO: 1531891 - RNA, 19 nt, Artificial Sequence
  Description of Artificial Sequence: Synthetic oligonucleotide
cugagccugugauggccgc

SEQ ID NO: 1531892 - RNA, 19 nt, Artificial Sequence
  Description of Artificial Sequence: Synthetic oligonucleotide
uuccgcuggaggucagccu

SEQ ID NO: 1531893 - RNA, 19 nt, Artificial Sequence
  Description of Artificial Sequence: Synthetic oligonucleotide
gacuuggaggaugggcaac

SEQ ID NO: 1531894 - RNA, 19 nt, Artificial Sequence
  Description of Artificial Sequence: Synthetic oligonucleotide
caagcuuauuuaccccaga

SEQ ID NO: 1531895 - RNA, 19 nt, Artificial Sequence
  Description of Artificial Sequence: Synthetic oligonucleotide
uguggagauuaaggcugca

SEQ ID NO: 1531896 - RNA, 19 nt, Artificial Sequence
  Description of Artificial Sequence: Synthetic oligonucleotide
cacagagggcuugcgggcc

SEQ ID NO: 1531897 - RNA, 19 nt, Artificial Sequence
  Description of Artificial Sequence: Synthetic oligonucleotide
caugugucucacucaagcu

SEQ ID NO: 1531898 - RNA, 19 nt, Artificial Sequence
  Description of Artificial Sequence: Synthetic oligonucleotide
cacagggucaagcuuauuu

SEQ ID NO: 1531899 - RNA, 19 nt, Artificial Sequence
  Description of Artificial Sequence: Synthetic oligonucleotide
caccggccgcucaagcugc

SEQ ID NO: 1531900 - RNA, 19 nt, Artificial Sequence
  Description of Artificial Sequence: Synthetic oligonucleotide
auucccugccaagaugaaa

SEQ ID NO: 1531901 - RNA, 19 nt, Artificial Sequence
  Description of Artificial Sequence: Synthetic oligonucleotide
gucucuccguuuacacagg

SEQ ID NO: 1531902 - RNA, 19 nt, Artificial Sequence
  Description of Artificial Sequence: Synthetic oligonucleotide
gauuccgcuggaggucagc

SEQ ID NO: 1531903 - RNA, 19 nt, Artificial Sequence
  Description of Artificial Sequence: Synthetic oligonucleotide
uuccuacucuggucuggcu

SEQ ID NO: 1531904 - RNA, 19 nt, Artificial Sequence
  Description of Artificial Sequence: Synthetic oligonucleotide
gagacaccggccgcucaag

SEQ ID NO: 1531905 - RNA, 19 nt, Artificial Sequence
  Description of Artificial Sequence: Synthetic oligonucleotide
gagacaggucagacaaaga

SEQ ID NO: 1531906 - RNA, 19 nt, Artificial Sequence
  Description of Artificial Sequence: Synthetic oligonucleotide
acucagcccuaggaaaacu

SEQ ID NO: 1531907 - RNA, 19 nt, Artificial Sequence
  Description of Artificial Sequence: Synthetic oligonucleotide
gagugguuggugguaaggu

SEQ ID NO: 1531908 - RNA, 19 nt, Artificial Sequence
  Description of Artificial Sequence: Synthetic oligonucleotide
cucugaaaugcuccggagu

SEQ ID NO: 1531909 - RNA, 19 nt, Artificial Sequence
  Description of Artificial Sequence: Synthetic oligonucleotide
gucaugugucucacucaag

SEQ ID NO: 1531910 - RNA, 19 nt, Artificial Sequence
  Description of Artificial Sequence: Synthetic oligonucleotide
ggacacaucccaugagcuc

SEQ ID NO: 1531911 - RNA, 19 nt, Artificial Sequence
  Description of Artificial Sequence: Synthetic oligonucleotide
cuuggaggaugggcaacac

SEQ ID NO: 1531912 - RNA, 19 nt, Artificial Sequence
  Description of Artificial Sequence: Synthetic oligonucleotide
ggagggacucccacagagg

SEQ ID NO: 1531913 - RNA, 19 nt, Artificial Sequence
  Description of Artificial Sequence: Synthetic oligonucleotide
ccuccccucauccaugaac

SEQ ID NO: 1531914 - RNA, 19 nt, Artificial Sequence
  Description of Artificial Sequence: Synthetic oligonucleotide
gacaccggccgcucaagcu

SEQ ID NO: 1531915 - RNA, 19 nt, Artificial Sequence
  Description of Artificial Sequence: Synthetic oligonucleotide
ccaagucagggcaagagcu

SEQ ID NO: 1531916 - RNA, 19 nt, Artificial Sequence
  Description of Artificial Sequence: Synthetic oligonucleotide
cccugccaagaugaaaugg

SEQ ID NO: 1531917 - RNA, 19 nt, Artificial Sequence
  Description of Artificial Sequence: Synthetic oligonucleotide
aggcuguguuugccguauc

SEQ ID NO: 1531918 - RNA, 19 nt, Artificial Sequence
  Description of Artificial Sequence: Synthetic oligonucleotide
ggaggagcaccugacagaa

SEQ ID NO: 1531919 - RNA, 19 nt, Artificial Sequence
  Description of Artificial Sequence: Synthetic oligonucleotide
cguauccuuucuuccuugg

SEQ ID NO: 1531920 - RNA, 19 nt, Artificial Sequence
  Description of Artificial Sequence: Synthetic oligonucleotide
uccuggcucugaagcugug

SEQ ID NO: 1531921 - RNA, 19 nt, Artificial Sequence
  Description of Artificial Sequence: Synthetic oligonucleotide
ggccgcugcucugaaaugc

SEQ ID NO: 1531922 - RNA, 19 nt, Artificial Sequence
  Description of Artificial Sequence: Synthetic oligonucleotide
ggugguaaggugaggcaca

SEQ ID NO: 1531923 - RNA, 19 nt, Artificial Sequence
  Description of Artificial Sequence: Synthetic oligonucleotide
ugcucgggucccugagaga

SEQ ID NO: 1531924 - RNA, 19 nt, Artificial Sequence
  Description of Artificial Sequence: Synthetic oligonucleotide
cguuuacacagggucaagc

SEQ ID NO: 1531925 - RNA, 19 nt, Artificial Sequence
  Description of Artificial Sequence: Synthetic oligonucleotide
cuguaccuuuugugcuuug

SEQ ID NO: 1531926 - RNA, 19 nt, Artificial Sequence
  Description of Artificial Sequence: Synthetic oligonucleotide
ucccauccuugccgcucag

SEQ ID NO: 1531927 - RNA, 19 nt, Artificial Sequence
  Description of Artificial Sequence: Synthetic oligonucleotide
gcaacaccaggcuugcaua

SEQ ID NO: 1531928 - RNA, 19 nt, Artificial Sequence
  Description of Artificial Sequence: Synthetic oligonucleotide
guacccagcaggccaagau

SEQ ID NO: 1531929 - RNA, 19 nt, Artificial Sequence
  Description of Artificial Sequence: Synthetic oligonucleotide
ccaaagaguagagacaggu

SEQ ID NO: 1531930 - RNA, 19 nt, Artificial Sequence
  Description of Artificial Sequence: Synthetic oligonucleotide
uuagccccaucuguaccuu

SEQ ID NO: 1531931 - RNA, 19 nt, Artificial Sequence
  Description of Artificial Sequence: Synthetic oligonucleotide
ggcuugcauaaacauggaa

SEQ ID NO: 1531932 - RNA, 19 nt, Artificial Sequence
  Description of Artificial Sequence: Synthetic oligonucleotide
ggcaagagcuccaguuggc

SEQ ID NO: 1531933 - RNA, 19 nt, Artificial Sequence
  Description of Artificial Sequence: Synthetic oligonucleotide
gggucagcagugccaguug

SEQ ID NO: 1531934 - RNA, 19 nt, Artificial Sequence
  Description of Artificial Sequence: Synthetic oligonucleotide
gcccaaguaaggcccugcc

SEQ ID NO: 1531935 - RNA, 19 nt, Artificial Sequence
  Description of Artificial Sequence: Synthetic oligonucleotide
gaggagggacucccacaga

SEQ ID NO: 1531936 - RNA, 19 nt, Artificial Sequence
  Description of Artificial Sequence: Synthetic oligonucleotide
aggagagugguugguggua

SEQ ID NO: 1531937 - RNA, 19 nt, Artificial Sequence
  Description of Artificial Sequence: Synthetic oligonucleotide
ccggaguucagccaccaga

SEQ ID NO: 1531938 - RNA, 19 nt, Artificial Sequence
  Description of Artificial Sequence: Synthetic oligonucleotide
ggcaacaccaggcuugcau

SEQ ID NO: 1531939 - RNA, 19 nt, Artificial Sequence
  Description of Artificial Sequence: Synthetic oligonucleotide
auccuuucuuaggcugugu

SEQ ID NO: 1531940 - RNA, 19 nt, Artificial Sequence
  Description of Artificial Sequence: Synthetic oligonucleotide
cugcaggcauccuuucuua

SEQ ID NO: 1531941 - RNA, 19 nt, Artificial Sequence
  Description of Artificial Sequence: Synthetic oligonucleotide
ggagcaccugacagaacug

SEQ ID NO: 1531942 - RNA, 19 nt, Artificial Sequence
  Description of Artificial Sequence: Synthetic oligonucleotide
agaucccaagucagggcaa

SEQ ID NO: 1531943 - RNA, 19 nt, Artificial Sequence
  Description of Artificial Sequence: Synthetic oligonucleotide
agaucccagauggcuuccu

SEQ ID NO: 1531944 - RNA, 19 nt, Artificial Sequence
  Description of Artificial Sequence: Synthetic oligonucleotide
acacaucccaugagcuccu

SEQ ID NO: 1531945 - RNA, 19 nt, Artificial Sequence
  Description of Artificial Sequence: Synthetic oligonucleotide
cuguguuugccguauccuu

SEQ ID NO: 1531946 - RNA, 19 nt, Artificial Sequence
  Description of Artificial Sequence: Synthetic oligonucleotide
uugguggcuggagcacuaa

SEQ ID NO: 1531947 - RNA, 19 nt, Artificial Sequence
  Description of Artificial Sequence: Synthetic oligonucleotide
gggacucccacagagggcu

SEQ ID NO: 1531948 - RNA, 19 nt, Artificial Sequence
  Description of Artificial Sequence: Synthetic oligonucleotide
cucccacagagggcuugcg

SEQ ID NO: 1531949 - RNA, 19 nt, Artificial Sequence
  Description of Artificial Sequence: Synthetic oligonucleotide
gucagaccagucucuucua

SEQ ID NO: 1531950 - RNA, 19 nt, Artificial Sequence
  Description of Artificial Sequence: Synthetic oligonucleotide
gccaagaucccagauggcu

SEQ ID NO: 1531951 - RNA, 19 nt, Artificial Sequence
  Description of Artificial Sequence: Synthetic oligonucleotide
aggcuugcauaaacaugga

SEQ ID NO: 1531952 - RNA, 19 nt, Artificial Sequence
  Description of Artificial Sequence: Synthetic oligonucleotide
cccagauggcuuccuacuc

SEQ ID NO: 1531953 - RNA, 19 nt, Artificial Sequence
  Description of Artificial Sequence: Synthetic oligonucleotide
uccuccccucauccaugaa

SEQ ID NO: 1531954 - RNA, 19 nt, Artificial Sequence
  Description of Artificial Sequence: Synthetic oligonucleotide
ccagauuccgcuggagguc

SEQ ID NO: 1531955 - RNA, 19 nt, Artificial Sequence
  Description of Artificial Sequence: Synthetic oligonucleotide
ggagacaccggccgcucaa

SEQ ID NO: 1531956 - RNA, 19 nt, Artificial Sequence
  Description of Artificial Sequence: Synthetic oligonucleotide
cccuuaguccuguccucag

SEQ ID NO: 1531957 - RNA, 19 nt, Artificial Sequence
  Description of Artificial Sequence: Synthetic oligonucleotide
gcccacugcccaaguaagg

SEQ ID NO: 1531958 - RNA, 19 nt, Artificial Sequence
  Description of Artificial Sequence: Synthetic oligonucleotide
ggagagugguuggugguaa

SEQ ID NO: 1531959 - RNA, 19 nt, Artificial Sequence
  Description of Artificial Sequence: Synthetic oligonucleotide
cugugauggccgcugcucu

SEQ ID NO: 1531960 - RNA, 19 nt, Artificial Sequence
  Description of Artificial Sequence: Synthetic oligonucleotide
caguauucccugccaagau

SEQ ID NO: 1531961 - RNA, 19 nt, Artificial Sequence
  Description of Artificial Sequence: Synthetic oligonucleotide
cucuccguuuacacagggu

SEQ ID NO: 1531962 - RNA, 19 nt, Artificial Sequence
  Description of Artificial Sequence: Synthetic oligonucleotide
agauuccgcuggaggucag

SEQ ID NO: 1531963 - RNA, 19 nt, Artificial Sequence
  Description of Artificial Sequence: Synthetic oligonucleotide
agccccaucuguaccuuuu

SEQ ID NO: 1531964 - RNA, 19 nt, Artificial Sequence
  Description of Artificial Sequence: Synthetic oligonucleotide
ggagcccguugguggcugg

SEQ ID NO: 1531965 - RNA, 19 nt, Artificial Sequence
  Description of Artificial Sequence: Synthetic oligonucleotide
cccguugguggcuggagca

SEQ ID NO: 1531966 - RNA, 19 nt, Artificial Sequence
  Description of Artificial Sequence: Synthetic oligonucleotide
guugguggcuggagcacua

SEQ ID NO: 1531967 - RNA, 19 nt, Artificial Sequence
  Description of Artificial Sequence: Synthetic oligonucleotide
cuugugggaggggugacuu

SEQ ID NO: 1531968 - RNA, 19 nt, Artificial Sequence
  Description of Artificial Sequence: Synthetic oligonucleotide
cuguaccagccagcugcac

SEQ ID NO: 1531969 - RNA, 19 nt, Artificial Sequence
  Description of Artificial Sequence: Synthetic oligonucleotide
gcuguguuugccguauccu

SEQ ID NO: 1531970 - RNA, 19 nt, Artificial Sequence
  Description of Artificial Sequence: Synthetic oligonucleotide
cccaaguaaggcccugcca

SEQ ID NO: 1531971 - RNA, 19 nt, Artificial Sequence
  Description of Artificial Sequence: Synthetic oligonucleotide
cacaucccaugagcuccug

SEQ ID NO: 1531972 - RNA, 19 nt, Artificial Sequence
  Description of Artificial Sequence: Synthetic oligonucleotide
uccucccaucuuggcagua

SEQ ID NO: 1531973 - RNA, 19 nt, Artificial Sequence
  Description of Artificial Sequence: Synthetic oligonucleotide
cccuuauaaggaggagcac

SEQ ID NO: 1531974 - RNA, 19 nt, Artificial Sequence
  Description of Artificial Sequence: Synthetic oligonucleotide
gcucgggucccugagagau

SEQ ID NO: 1531975 - RNA, 19 nt, Artificial Sequence
  Description of Artificial Sequence: Synthetic oligonucleotide
cuccggaguucagccacca

SEQ ID NO: 1531976 - RNA, 19 nt, Artificial Sequence
  Description of Artificial Sequence: Synthetic oligonucleotide
gugggaggggugacuugga

SEQ ID NO: 1531977 - RNA, 19 nt, Artificial Sequence
  Description of Artificial Sequence: Synthetic oligonucleotide
ggugaggcacaggaaaguu

SEQ ID NO: 1531978 - RNA, 19 nt, Artificial Sequence
  Description of Artificial Sequence: Synthetic oligonucleotide
ccaagaucccagauggcuu

SEQ ID NO: 1531979 - RNA, 19 nt, Artificial Sequence
  Description of Artificial Sequence: Synthetic oligonucleotide
ccgcugcucugaaaugcuc

SEQ ID NO: 1531980 - RNA, 19 nt, Artificial Sequence
  Description of Artificial Sequence: Synthetic oligonucleotide
ccguuuacacagggucaag

SEQ ID NO: 1531981 - RNA, 19 nt, Artificial Sequence
  Description of Artificial Sequence: Synthetic oligonucleotide
ccaccagauuccgcuggag

SEQ ID NO: 1531982 - RNA, 19 nt, Artificial Sequence
  Description of Artificial Sequence: Synthetic oligonucleotide
ccuuucuuaggcuguguuu

SEQ ID NO: 1531983 - RNA, 19 nt, Artificial Sequence
  Description of Artificial Sequence: Synthetic oligonucleotide
ccuacucuggucuggcuuu

SEQ ID NO: 1531984 - RNA, 19 nt, Artificial Sequence
  Description of Artificial Sequence: Synthetic oligonucleotide
gggguggggagagaacugu

SEQ ID NO: 1531985 - RNA, 19 nt, Artificial Sequence
  Description of Artificial Sequence: Synthetic oligonucleotide
gcccauccacccaaaccca

SEQ ID NO: 1531986 - RNA, 19 nt, Artificial Sequence
  Description of Artificial Sequence: Synthetic oligonucleotide
ccguugguggcuggagcac

SEQ ID NO: 1531987 - RNA, 19 nt, Artificial Sequence
  Description of Artificial Sequence: Synthetic oligonucleotide
cccauccacccaaacccaa

SEQ ID NO: 1531988 - RNA, 19 nt, Artificial Sequence
  Description of Artificial Sequence: Synthetic oligonucleotide
cccauccuugccgcucagc

SEQ ID NO: 1531989 - RNA, 19 nt, Artificial Sequence
  Description of Artificial Sequence: Synthetic oligonucleotide
ccccuuaguccuguccuca

SEQ ID NO: 1531990 - RNA, 19 nt, Artificial Sequence
  Description of Artificial Sequence: Synthetic oligonucleotide
ccacccaguggggaaacaa

SEQ ID NO: 1531991 - RNA, 19 nt, Artificial Sequence
  Description of Artificial Sequence: Synthetic oligonucleotide
cccucuuaagauucuccuu

SEQ ID NO: 1531992 - RNA, 19 nt, Artificial Sequence
  Description of Artificial Sequence: Synthetic oligonucleotide
ggggcccaucuucucugua

SEQ ID NO: 1531993 - RNA, 19 nt, Artificial Sequence
  Description of Artificial Sequence: Synthetic oligonucleotide
ggcccacccaguggggaaa

SEQ ID NO: 1531994 - RNA, 19 nt, Artificial Sequence
  Description of Artificial Sequence: Synthetic oligonucleotide
gcccacccaguggggaaac

SEQ ID NO: 1531995 - RNA, 19 nt, Artificial Sequence
  Description of Artificial Sequence: Synthetic oligonucleotide
cucgggucccugagagauu

SEQ ID NO: 1531996 - RNA, 19 nt, Artificial Sequence
  Description of Artificial Sequence: Synthetic oligonucleotide
cuacucuggucuggcuuuu

SEQ ID NO: 1531997 - RNA, 19 nt, Artificial Sequence
  Description of Artificial Sequence: Synthetic oligonucleotide
gccugggcccacugcccaa

SEQ ID NO: 1531998 - RNA, 19 nt, Artificial Sequence
  Description of Artificial Sequence: Synthetic oligonucleotide
ccgcucaagcugcaguuuu

SEQ ID NO: 1531999 - RNA, 19 nt, Artificial Sequence
  Description of Artificial Sequence: Synthetic oligonucleotide
ccucagcgugagggagccc

SEQ ID NO: 1532000 - RNA, 19 nt, Artificial Sequence
  Description of Artificial Sequence: Synthetic oligonucleotide
cgugagggagcccguuggu

SEQ ID NO: 1532001 - RNA, 19 nt, Artificial Sequence
  Description of Artificial Sequence: Synthetic oligonucleotide
cccacccaguggggaaaca

SEQ ID NO: 1532002 - RNA, 19 nt, Artificial Sequence
  Description of Artificial Sequence: Synthetic oligonucleotide
cagcgugagggagcccguu

SEQ ID NO: 1532003 - RNA, 19 nt, Artificial Sequence
  Description of Artificial Sequence: Synthetic oligonucleotide
ggacucccacagagggcuu

SEQ ID NO: 1532004 - RNA, 19 nt, Artificial Sequence
  Description of Artificial Sequence: Synthetic oligonucleotide
cgggucccugagagauugu

SEQ ID NO: 1532005 - RNA, 19 nt, Artificial Sequence
  Description of Artificial Sequence: Synthetic oligonucleotide
auuaaauuggaccaggcag

SEQ ID NO: 1532006 - RNA, 19 nt, Artificial Sequence
  Description of Artificial Sequence: Synthetic oligonucleotide
uuuaauacagcucaguuau

SEQ ID NO: 1532007 - RNA, 19 nt, Artificial Sequence
  Description of Artificial Sequence: Synthetic oligonucleotide
uucuagaucagacuuaugc

SEQ ID NO: 1532008 - RNA, 19 nt, Artificial Sequence
  Description of Artificial Sequence: Synthetic oligonucleotide
agaucuagaaaacuagagc

SEQ ID NO: 1532009 - RNA, 19 nt, Artificial Sequence
  Description of Artificial Sequence: Synthetic oligonucleotide
cuaggauugguauagaccc

SEQ ID NO: 1532010 - RNA, 19 nt, Artificial Sequence
  Description of Artificial Sequence: Synthetic oligonucleotide
augaacaagcuuuuaauac

SEQ ID NO: 1532011 - RNA, 19 nt, Artificial Sequence
  Description of Artificial Sequence: Synthetic oligonucleotide
uuggguauuaaauuggacc

SEQ ID NO: 1532012 - RNA, 19 nt, Artificial Sequence
  Description of Artificial Sequence: Synthetic oligonucleotide
ugaauuaaccccuuccagg

SEQ ID NO: 1532013 - RNA, 19 nt, Artificial Sequence
  Description of Artificial Sequence: Synthetic oligonucleotide
acuaaugccaguuccaauc

SEQ ID NO: 1532014 - RNA, 19 nt, Artificial Sequence
  Description of Artificial Sequence: Synthetic oligonucleotide
uaggagaugacuuuaauuc

SEQ ID NO: 1532015 - RNA, 19 nt, Artificial Sequence
  Description of Artificial Sequence: Synthetic oligonucleotide
aaguagaguacaaaacugc

SEQ ID NO: 1532016 - RNA, 19 nt, Artificial Sequence
  Description of Artificial Sequence: Synthetic oligonucleotide
ucuugucuauaucagaggc

SEQ ID NO: 1532017 - RNA, 19 nt, Artificial Sequence
  Description of Artificial Sequence: Synthetic oligonucleotide
ucauuggguauuaaauugg

SEQ ID NO: 1532018 - RNA, 19 nt, Artificial Sequence
  Description of Artificial Sequence: Synthetic oligonucleotide
aaaugaacaagcuuuuaau

SEQ ID NO: 1532019 - RNA, 19 nt, Artificial Sequence
  Description of Artificial Sequence: Synthetic oligonucleotide
uagaguacaaaacugcaac

SEQ ID NO: 1532020 - RNA, 19 nt, Artificial Sequence
  Description of Artificial Sequence: Synthetic oligonucleotide
guaucaaacagccagcaug

SEQ ID NO: 1532021 - RNA, 19 nt, Artificial Sequence
  Description of Artificial Sequence: Synthetic oligonucleotide
ucuaggucccaucacauug

SEQ ID NO: 1532022 - RNA, 19 nt, Artificial Sequence
  Description of Artificial Sequence: Synthetic oligonucleotide
uggguauuaaauuggacca

SEQ ID NO: 1532023 - RNA, 19 nt, Artificial Sequence
  Description of Artificial Sequence: Synthetic oligonucleotide
aauuggaccaggcagcaga

SEQ ID NO: 1532024 - RNA, 19 nt, Artificial Sequence
  Description of Artificial Sequence: Synthetic oligonucleotide
uguaaaagaucuagaaaac

SEQ ID NO: 1532025 - RNA, 19 nt, Artificial Sequence
  Description of Artificial Sequence: Synthetic oligonucleotide
ugaacaagcuuuuaauaca

SEQ ID NO: 1532026 - RNA, 19 nt, Artificial Sequence
  Description of Artificial Sequence: Synthetic oligonucleotide
aaguaaaugaacaagcuuu

SEQ ID NO: 1532027 - RNA, 19 nt, Artificial Sequence
  Description of Artificial Sequence: Synthetic oligonucleotide
aaaguggugucguccaccg

SEQ ID NO: 1532028 - RNA, 19 nt, Artificial Sequence
  Description of Artificial Sequence: Synthetic oligonucleotide
gaucuagaaaacuagagcu

SEQ ID NO: 1532029 - RNA, 19 nt, Artificial Sequence
  Description of Artificial Sequence: Synthetic oligonucleotide
uagauaagcauguccagcc

SEQ ID NO: 1532030 - RNA, 19 nt, Artificial Sequence
  Description of Artificial Sequence: Synthetic oligonucleotide
aaaaucuugucuauaucag

SEQ ID NO: 1532031 - RNA, 19 nt, Artificial Sequence
  Description of Artificial Sequence: Synthetic oligonucleotide
aaacacauccacaggaagg

SEQ ID NO: 1532032 - RNA, 19 nt, Artificial Sequence
  Description of Artificial Sequence: Synthetic oligonucleotide
uauuaaauuggaccaggca

SEQ ID NO: 1532033 - RNA, 19 nt, Artificial Sequence
  Description of Artificial Sequence: Synthetic oligonucleotide
aauggcaaguaaaugaaca

SEQ ID NO: 1532034 - RNA, 19 nt, Artificial Sequence
  Description of Artificial Sequence: Synthetic oligonucleotide
uauugguacuuccugggag

SEQ ID NO: 1532035 - RNA, 19 nt, Artificial Sequence
  Description of Artificial Sequence: Synthetic oligonucleotide
aacaccgcgacccaauucu

SEQ ID NO: 1532036 - RNA, 19 nt, Artificial Sequence
  Description of Artificial Sequence: Synthetic oligonucleotide
acuaggauugguauagacc

SEQ ID NO: 1532037 - RNA, 19 nt, Artificial Sequence
  Description of Artificial Sequence: Synthetic oligonucleotide
gaucucauaugucagucgc

SEQ ID NO: 1532038 - RNA, 19 nt, Artificial Sequence
  Description of Artificial Sequence: Synthetic oligonucleotide
aguacaaaacugcaacaag

SEQ ID NO: 1532039 - RNA, 19 nt, Artificial Sequence
  Description of Artificial Sequence: Synthetic oligonucleotide
ugcagaugaaccauuuagc

SEQ ID NO: 1532040 - RNA, 19 nt, Artificial Sequence
  Description of Artificial Sequence: Synthetic oligonucleotide
aaccaaguagaguacaaaa

SEQ ID NO: 1532041 - RNA, 19 nt, Artificial Sequence
  Description of Artificial Sequence: Synthetic oligonucleotide
ucuagaucagacuuaugcu

SEQ ID NO: 1532042 - RNA, 19 nt, Artificial Sequence
  Description of Artificial Sequence: Synthetic oligonucleotide
ucucucauaacuucagugu

SEQ ID NO: 1532043 - RNA, 19 nt, Artificial Sequence
  Description of Artificial Sequence: Synthetic oligonucleotide
uagaucagacuuaugcuug

SEQ ID NO: 1532044 - RNA, 19 nt, Artificial Sequence
  Description of Artificial Sequence: Synthetic oligonucleotide
cuugucuucauggagacac

SEQ ID NO: 1532045 - RNA, 19 nt, Artificial Sequence
  Description of Artificial Sequence: Synthetic oligonucleotide
auggacaagauucuugucu

SEQ ID NO: 1532046 - RNA, 19 nt, Artificial Sequence
  Description of Artificial Sequence: Synthetic oligonucleotide
ucauaugucagucgcuuga

SEQ ID NO: 1532047 - RNA, 19 nt, Artificial Sequence
  Description of Artificial Sequence: Synthetic oligonucleotide
uuguggagaucucauaugu

SEQ ID NO: 1532048 - RNA, 19 nt, Artificial Sequence
  Description of Artificial Sequence: Synthetic oligonucleotide
agggccauaagcucaauug

SEQ ID NO: 1532049 - RNA, 19 nt, Artificial Sequence
  Description of Artificial Sequence: Synthetic oligonucleotide
agcacauucugauauccag

SEQ ID NO: 1532050 - RNA, 19 nt, Artificial Sequence
  Description of Artificial Sequence: Synthetic oligonucleotide
ugaaccauuuagcuggccu

SEQ ID NO: 1532051 - RNA, 19 nt, Artificial Sequence
  Description of Artificial Sequence: Synthetic oligonucleotide
ggauguguaacacacuuag

SEQ ID NO: 1532052 - RNA, 19 nt, Artificial Sequence
  Description of Artificial Sequence: Synthetic oligonucleotide
gaauuaaccccuuccagga

SEQ ID NO: 1532053 - RNA, 19 nt, Artificial Sequence
  Description of Artificial Sequence: Synthetic oligonucleotide
cugcagaugaaccauuuag

SEQ ID NO: 1532054 - RNA, 19 nt, Artificial Sequence
  Description of Artificial Sequence: Synthetic oligonucleotide
uguagauaagcauguccag

SEQ ID NO: 1532055 - RNA, 19 nt, Artificial Sequence
  Description of Artificial Sequence: Synthetic oligonucleotide
uuuucaagcuuggaaguag

SEQ ID NO: 1532056 - RNA, 19 nt, Artificial Sequence
  Description of Artificial Sequence: Synthetic oligonucleotide
uucgcgucugcuccaaacg

SEQ ID NO: 1532057 - RNA, 19 nt, Artificial Sequence
  Description of Artificial Sequence: Synthetic oligonucleotide
auaucuaggucccaucaca

SEQ ID NO: 1532058 - RNA, 19 nt, Artificial Sequence
  Description of Artificial Sequence: Synthetic oligonucleotide
ucuagaaaacuagagcuuc

SEQ ID NO: 1532059 - RNA, 19 nt, Artificial Sequence
  Description of Artificial Sequence: Synthetic oligonucleotide
aguucucgagguuucuugg

SEQ ID NO: 1532060 - RNA, 19 nt, Artificial Sequence
  Description of Artificial Sequence: Synthetic oligonucleotide
ucuuauuuccccgugugcu

SEQ ID NO: 1532061 - RNA, 19 nt, Artificial Sequence
  Description of Artificial Sequence: Synthetic oligonucleotide
gucgcuugaaauauucugg

SEQ ID NO: 1532062 - RNA, 19 nt, Artificial Sequence
  Description of Artificial Sequence: Synthetic oligonucleotide
uuucaagcuuggaaguagc

SEQ ID NO: 1532063 - RNA, 19 nt, Artificial Sequence
  Description of Artificial Sequence: Synthetic oligonucleotide
uggucugcuguguagauaa

SEQ ID NO: 1532064 - RNA, 19 nt, Artificial Sequence
  Description of Artificial Sequence: Synthetic oligonucleotide
ucuugguuuucaagcuugg

SEQ ID NO: 1532065 - RNA, 19 nt, Artificial Sequence
  Description of Artificial Sequence: Synthetic oligonucleotide
agcaaggccugaauuaacc

SEQ ID NO: 1532066 - RNA, 19 nt, Artificial Sequence
  Description of Artificial Sequence: Synthetic oligonucleotide
ugucauuggguauuaaauu

SEQ ID NO: 1532067 - RNA, 19 nt, Artificial Sequence
  Description of Artificial Sequence: Synthetic oligonucleotide
cucucucauaacuucagug

SEQ ID NO: 1532068 - RNA, 19 nt, Artificial Sequence
  Description of Artificial Sequence: Synthetic oligonucleotide
accgcgacccaauucuacc

SEQ ID NO: 1532069 - RNA, 19 nt, Artificial Sequence
  Description of Artificial Sequence: Synthetic oligonucleotide
aacauggacaagauucuug

SEQ ID NO: 1532070 - RNA, 19 nt, Artificial Sequence
  Description of Artificial Sequence: Synthetic oligonucleotide
gcaacaagagcccacacug

SEQ ID NO: 1532071 - RNA, 19 nt, Artificial Sequence
  Description of Artificial Sequence: Synthetic oligonucleotide
ggcaacauggacaagauuc

SEQ ID NO: 1532072 - RNA, 19 nt, Artificial Sequence
  Description of Artificial Sequence: Synthetic oligonucleotide
ucauagaguuucugaaucu

SEQ ID NO: 1532073 - RNA, 19 nt, Artificial Sequence
  Description of Artificial Sequence: Synthetic oligonucleotide
uguacuacagccucuuauu

SEQ ID NO: 1532074 - RNA, 19 nt, Artificial Sequence
  Description of Artificial Sequence: Synthetic oligonucleotide
agaguacaaaacugcaaca

SEQ ID NO: 1532075 - RNA, 19 nt, Artificial Sequence
  Description of Artificial Sequence: Synthetic oligonucleotide
guagguaggggcugcauug

SEQ ID NO: 1532076 - RNA, 19 nt, Artificial Sequence
  Description of Artificial Sequence: Synthetic oligonucleotide
gaaggugcaacaccgcgac

SEQ ID NO: 1532077 - RNA, 19 nt, Artificial Sequence
  Description of Artificial Sequence: Synthetic oligonucleotide
auaggagaugacuuuaauu

SEQ ID NO: 1532078 - RNA, 19 nt, Artificial Sequence
  Description of Artificial Sequence: Synthetic oligonucleotide
gucuauaucagaggccugg

SEQ ID NO: 1532079 - RNA, 19 nt, Artificial Sequence
  Description of Artificial Sequence: Synthetic oligonucleotide
cugaaugaggucaugggca

SEQ ID NO: 1532080 - RNA, 19 nt, Artificial Sequence
  Description of Artificial Sequence: Synthetic oligonucleotide
ugcaacaagagcccacacu

SEQ ID NO: 1532081 - RNA, 19 nt, Artificial Sequence
  Description of Artificial Sequence: Synthetic oligonucleotide
cagcaugaagggaaggugc

SEQ ID NO: 1532082 - RNA, 19 nt, Artificial Sequence
  Description of Artificial Sequence: Synthetic oligonucleotide
ucucauaacuucaguguuc

SEQ ID NO: 1532083 - RNA, 19 nt, Artificial Sequence
  Description of Artificial Sequence: Synthetic oligonucleotide
guauguuugcuuguuaaac

SEQ ID NO: 1532084 - RNA, 19 nt, Artificial Sequence
  Description of Artificial Sequence: Synthetic oligonucleotide
ucuacaucuccucuccgaa

SEQ ID NO: 1532085 - RNA, 19 nt, Artificial Sequence
  Description of Artificial Sequence: Synthetic oligonucleotide
ugguauagaccccauggau

SEQ ID NO: 1532086 - RNA, 19 nt, Artificial Sequence
  Description of Artificial Sequence: Synthetic oligonucleotide
ucgcuugaaauauucugga

SEQ ID NO: 1532087 - RNA, 19 nt, Artificial Sequence
  Description of Artificial Sequence: Synthetic oligonucleotide
uggaggacaaugccacuag

SEQ ID NO: 1532088 - RNA, 19 nt, Artificial Sequence
  Description of Artificial Sequence: Synthetic oligonucleotide
cuaggucccaucacauugg

SEQ ID NO: 1532089 - RNA, 19 nt, Artificial Sequence
  Description of Artificial Sequence: Synthetic oligonucleotide
auggauguguaacacacuu

SEQ ID NO: 1532090 - RNA, 19 nt, Artificial Sequence
  Description of Artificial Sequence: Synthetic oligonucleotide
cagcauguuuucucgaagc

SEQ ID NO: 1532091 - RNA, 19 nt, Artificial Sequence
  Description of Artificial Sequence: Synthetic oligonucleotide
uuuagcuggccuucucuug

SEQ ID NO: 1532092 - RNA, 19 nt, Artificial Sequence
  Description of Artificial Sequence: Synthetic oligonucleotide
caagagcccacacugacuc

SEQ ID NO: 1532093 - RNA, 19 nt, Artificial Sequence
  Description of Artificial Sequence: Synthetic oligonucleotide
uaugcuugacagccucuag

SEQ ID NO: 1532094 - RNA, 19 nt, Artificial Sequence
  Description of Artificial Sequence: Synthetic oligonucleotide
gguauuaaauuggaccagg

SEQ ID NO: 1532095 - RNA, 19 nt, Artificial Sequence
  Description of Artificial Sequence: Synthetic oligonucleotide
cuguacacuguaaaagauc

SEQ ID NO: 1532096 - RNA, 19 nt, Artificial Sequence
  Description of Artificial Sequence: Synthetic oligonucleotide
guagauaagcauguccagc

SEQ ID NO: 1532097 - RNA, 19 nt, Artificial Sequence
  Description of Artificial Sequence: Synthetic oligonucleotide
auuggguauuaaauuggac

SEQ ID NO: 1532098 - RNA, 19 nt, Artificial Sequence
  Description of Artificial Sequence: Synthetic oligonucleotide
aggacaaugccacuaggau

SEQ ID NO: 1532099 - RNA, 19 nt, Artificial Sequence
  Description of Artificial Sequence: Synthetic oligonucleotide
cuugcggugcaacugcagc

SEQ ID NO: 1532100 - RNA, 19 nt, Artificial Sequence
  Description of Artificial Sequence: Synthetic oligonucleotide
auggcaaguaaaugaacaa

SEQ ID NO: 1532101 - RNA, 19 nt, Artificial Sequence
  Description of Artificial Sequence: Synthetic oligonucleotide
cagacuuaugcuugacagc

SEQ ID NO: 1532102 - RNA, 19 nt, Artificial Sequence
  Description of Artificial Sequence: Synthetic oligonucleotide
agaucagcauagucauuuc

SEQ ID NO: 1532103 - RNA, 19 nt, Artificial Sequence
  Description of Artificial Sequence: Synthetic oligonucleotide
ugaaugaggucaugggcaa

SEQ ID NO: 1532104 - RNA, 19 nt, Artificial Sequence
  Description of Artificial Sequence: Synthetic oligonucleotide
aguagaguacaaaacugca

SEQ ID NO: 1532105 - RNA, 19 nt, Artificial Sequence
  Description of Artificial Sequence: Synthetic oligonucleotide
uacuacagccucuuauuuc

SEQ ID NO: 1532106 - RNA, 19 nt, Artificial Sequence
  Description of Artificial Sequence: Synthetic oligonucleotide
gauugguauagaccccaug

SEQ ID NO: 1532107 - RNA, 19 nt, Artificial Sequence
  Description of Artificial Sequence: Synthetic oligonucleotide
uaucuaggucccaucacau

SEQ ID NO: 1532108 - RNA, 19 nt, Artificial Sequence
  Description of Artificial Sequence: Synthetic oligonucleotide
uggaaguagcuuccugggc

SEQ ID NO: 1532109 - RNA, 19 nt, Artificial Sequence
  Description of Artificial Sequence: Synthetic oligonucleotide
uaggauugguauagacccc

SEQ ID NO: 1532110 - RNA, 19 nt, Artificial Sequence
  Description of Artificial Sequence: Synthetic oligonucleotide
aucagacuuaugcuugaca

SEQ ID NO: 1532111 - RNA, 19 nt, Artificial Sequence
  Description of Artificial Sequence: Synthetic oligonucleotide
cagcacuaaugccaguucc

SEQ ID NO: 1532112 - RNA, 19 nt, Artificial Sequence
  Description of Artificial Sequence: Synthetic oligonucleotide
augucauuggguauuaaau

SEQ ID NO: 1532113 - RNA, 19 nt, Artificial Sequence
  Description of Artificial Sequence: Synthetic oligonucleotide
aaaccaaguagaguacaaa

SEQ ID NO: 1532114 - RNA, 19 nt, Artificial Sequence
  Description of Artificial Sequence: Synthetic oligonucleotide
aaggugcaacaccgcgacc

SEQ ID NO: 1532115 - RNA, 19 nt, Artificial Sequence
  Description of Artificial Sequence: Synthetic oligonucleotide
gaaaguggugucguccacc

SEQ ID NO: 1532116 - RNA, 19 nt, Artificial Sequence
  Description of Artificial Sequence: Synthetic oligonucleotide
auuaaccccuuccaggauu

SEQ ID NO: 1532117 - RNA, 19 nt, Artificial Sequence
  Description of Artificial Sequence: Synthetic oligonucleotide
aucuacaucuccucuccga

SEQ ID NO: 1532118 - RNA, 19 nt, Artificial Sequence
  Description of Artificial Sequence: Synthetic oligonucleotide
guauuaaauuggaccaggc

SEQ ID NO: 1532119 - RNA, 19 nt, Artificial Sequence
  Description of Artificial Sequence: Synthetic oligonucleotide
aauuaaccccuuccaggau

SEQ ID NO: 1532120 - RNA, 19 nt, Artificial Sequence
  Description of Artificial Sequence: Synthetic oligonucleotide
aaugccacuaggauuggua

SEQ ID NO: 1532121 - RNA, 19 nt, Artificial Sequence
  Description of Artificial Sequence: Synthetic oligonucleotide
ugucagucgcuugaaauau

SEQ ID NO: 1532122 - RNA, 19 nt, Artificial Sequence
  Description of Artificial Sequence: Synthetic oligonucleotide
uuucgcgucugcuccaaac

SEQ ID NO: 1532123 - RNA, 19 nt, Artificial Sequence
  Description of Artificial Sequence: Synthetic oligonucleotide
cacuaggauugguauagac

SEQ ID NO: 1532124 - RNA, 19 nt, Artificial Sequence
  Description of Artificial Sequence: Synthetic oligonucleotide
gagaucucauaugucaguc

SEQ ID NO: 1532125 - RNA, 19 nt, Artificial Sequence
  Description of Artificial Sequence: Synthetic oligonucleotide
uguggagaucucauauguc

SEQ ID NO: 1532126 - RNA, 19 nt, Artificial Sequence
  Description of Artificial Sequence: Synthetic oligonucleotide
cauaucuaggucccaucac

SEQ ID NO: 1532127 - RNA, 19 nt, Artificial Sequence
  Description of Artificial Sequence: Synthetic oligonucleotide
ucgcgucugcuccaaacgc

SEQ ID NO: 1532128 - RNA, 19 nt, Artificial Sequence
  Description of Artificial Sequence: Synthetic oligonucleotide
augucagucgcuugaaaua

SEQ ID NO: 1532129 - RNA, 19 nt, Artificial Sequence
  Description of Artificial Sequence: Synthetic oligonucleotide
acaacccaagaaaagaaau

SEQ ID NO: 1532130 - RNA, 19 nt, Artificial Sequence
  Description of Artificial Sequence: Synthetic oligonucleotide
ucuccgaaccagcaugaaa

SEQ ID NO: 1532131 - RNA, 19 nt, Artificial Sequence
  Description of Artificial Sequence: Synthetic oligonucleotide
acucaucuacaucuccucu

SEQ ID NO: 1532132 - RNA, 19 nt, Artificial Sequence
  Description of Artificial Sequence: Synthetic oligonucleotide
aagcaaggccugaauuaac

SEQ ID NO: 1532133 - RNA, 19 nt, Artificial Sequence
  Description of Artificial Sequence: Synthetic oligonucleotide
uccgaaccagcaugaaaug

SEQ ID NO: 1532134 - RNA, 19 nt, Artificial Sequence
  Description of Artificial Sequence: Synthetic oligonucleotide
cucuuauuuccccgugugc

SEQ ID NO: 1532135 - RNA, 19 nt, Artificial Sequence
  Description of Artificial Sequence: Synthetic oligonucleotide
gauguguaacacacuuagc

SEQ ID NO: 1532136 - RNA, 19 nt, Artificial Sequence
  Description of Artificial Sequence: Synthetic oligonucleotide
cauuggguauuaaauugga

SEQ ID NO: 1532137 - RNA, 19 nt, Artificial Sequence
  Description of Artificial Sequence: Synthetic oligonucleotide
ucucauaugucagucgcuu

SEQ ID NO: 1532138 - RNA, 19 nt, Artificial Sequence
  Description of Artificial Sequence: Synthetic oligonucleotide
uagaaaacuagagcuucaa

SEQ ID NO: 1532139 - RNA, 19 nt, Artificial Sequence
  Description of Artificial Sequence: Synthetic oligonucleotide
uuaaccccuuccaggauuu

SEQ ID NO: 1532140 - RNA, 19 nt, Artificial Sequence
  Description of Artificial Sequence: Synthetic oligonucleotide
auaagcauguccagccuug

SEQ ID NO: 1532141 - RNA, 19 nt, Artificial Sequence
  Description of Artificial Sequence: Synthetic oligonucleotide
gaccccauggauguguaac

SEQ ID NO: 1532142 - RNA, 19 nt, Artificial Sequence
  Description of Artificial Sequence: Synthetic oligonucleotide
acauucugauauccagcug

SEQ ID NO: 1532143 - RNA, 19 nt, Artificial Sequence
  Description of Artificial Sequence: Synthetic oligonucleotide
gaggacaaugccacuagga

SEQ ID NO: 1532144 - RNA, 19 nt, Artificial Sequence
  Description of Artificial Sequence: Synthetic oligonucleotide
uggauguguaacacacuua

SEQ ID NO: 1532145 - RNA, 19 nt, Artificial Sequence
  Description of Artificial Sequence: Synthetic oligonucleotide
aguaaaugaacaagcuuuu

SEQ ID NO: 1532146 - RNA, 19 nt, Artificial Sequence
  Description of Artificial Sequence: Synthetic oligonucleotide
uagguaggggcugcauugg

SEQ ID NO: 1532147 - RNA, 19 nt, Artificial Sequence
  Description of Artificial Sequence: Synthetic oligonucleotide
gccacuaggauugguauag

SEQ ID NO: 1532148 - RNA, 19 nt, Artificial Sequence
  Description of Artificial Sequence: Synthetic oligonucleotide
aguaucaaacagccagcau

SEQ ID NO: 1532149 - RNA, 19 nt, Artificial Sequence
  Description of Artificial Sequence: Synthetic oligonucleotide
cacaaguucucgagguuuc

SEQ ID NO: 1532150 - RNA, 19 nt, Artificial Sequence
  Description of Artificial Sequence: Synthetic oligonucleotide
augccacuaggauugguau

SEQ ID NO: 1532151 - RNA, 19 nt, Artificial Sequence
  Description of Artificial Sequence: Synthetic oligonucleotide
aggauugguauagacccca

SEQ ID NO: 1532152 - RNA, 19 nt, Artificial Sequence
  Description of Artificial Sequence: Synthetic oligonucleotide
aaaagggccauaagcucaa

SEQ ID NO: 1532153 - RNA, 19 nt, Artificial Sequence
  Description of Artificial Sequence: Synthetic oligonucleotide
aaauuggaccaggcagcag

SEQ ID NO: 1532154 - RNA, 19 nt, Artificial Sequence
  Description of Artificial Sequence: Synthetic oligonucleotide
cucauaugucagucgcuug

SEQ ID NO: 1532155 - RNA, 19 nt, Artificial Sequence
  Description of Artificial Sequence: Synthetic oligonucleotide
cucgaagcuucuugaacuc

SEQ ID NO: 1532156 - RNA, 19 nt, Artificial Sequence
  Description of Artificial Sequence: Synthetic oligonucleotide
auagaccccauggaugugu

SEQ ID NO: 1532157 - RNA, 19 nt, Artificial Sequence
  Description of Artificial Sequence: Synthetic oligonucleotide
ucucgagguuucuugguuu

SEQ ID NO: 1532158 - RNA, 19 nt, Artificial Sequence
  Description of Artificial Sequence: Synthetic oligonucleotide
gccugaauuaaccccuucc

SEQ ID NO: 1532159 - RNA, 19 nt, Artificial Sequence
  Description of Artificial Sequence: Synthetic oligonucleotide
cuccgaaccagcaugaaau

SEQ ID NO: 1532160 - RNA, 19 nt, Artificial Sequence
  Description of Artificial Sequence: Synthetic oligonucleotide
aaccccuuccaggauuuca

SEQ ID NO: 1532161 - RNA, 19 nt, Artificial Sequence
  Description of Artificial Sequence: Synthetic oligonucleotide
accccauggauguguaaca

SEQ ID NO: 1532162 - RNA, 19 nt, Artificial Sequence
  Description of Artificial Sequence: Synthetic oligonucleotide
ccaguuucgcgucugcucc

SEQ ID NO: 1532163 - RNA, 19 nt, Artificial Sequence
  Description of Artificial Sequence: Synthetic oligonucleotide
ugcaacaccgcgacccaau

SEQ ID NO: 1532164 - RNA, 19 nt, Artificial Sequence
  Description of Artificial Sequence: Synthetic oligonucleotide
cacauucugauauccagcu

SEQ ID NO: 1532165 - RNA, 19 nt, Artificial Sequence
  Description of Artificial Sequence: Synthetic oligonucleotide
ucuuguauguuugcuuguu

SEQ ID NO: 1532166 - RNA, 19 nt, Artificial Sequence
  Description of Artificial Sequence: Synthetic oligonucleotide
cuagaucagacuuaugcuu

SEQ ID NO: 1532167 - RNA, 19 nt, Artificial Sequence
  Description of Artificial Sequence: Synthetic oligonucleotide
cacaacccaagaaaagaaa

SEQ ID NO: 1532168 - RNA, 19 nt, Artificial Sequence
  Description of Artificial Sequence: Synthetic oligonucleotide
gcaaggccugaauuaaccc

SEQ ID NO: 1532169 - RNA, 19 nt, Artificial Sequence
  Description of Artificial Sequence: Synthetic oligonucleotide
guauugguacuuccuggga

SEQ ID NO: 1532170 - RNA, 19 nt, Artificial Sequence
  Description of Artificial Sequence: Synthetic oligonucleotide
guagaguacaaaacugcaa

SEQ ID NO: 1532171 - RNA, 19 nt, Artificial Sequence
  Description of Artificial Sequence: Synthetic oligonucleotide
gguucgccaucauugaaga

SEQ ID NO: 1532172 - RNA, 19 nt, Artificial Sequence
  Description of Artificial Sequence: Synthetic oligonucleotide
agagcccacacugacucca

SEQ ID NO: 1532173 - RNA, 19 nt, Artificial Sequence
  Description of Artificial Sequence: Synthetic oligonucleotide
aucuagaaaacuagagcuu

SEQ ID NO: 1532174 - RNA, 19 nt, Artificial Sequence
  Description of Artificial Sequence: Synthetic oligonucleotide
ggaaguagcuuccugggcu

SEQ ID NO: 1532175 - RNA, 19 nt, Artificial Sequence
  Description of Artificial Sequence: Synthetic oligonucleotide
caugacuucuugcucccca

SEQ ID NO: 1532176 - RNA, 19 nt, Artificial Sequence
  Description of Artificial Sequence: Synthetic oligonucleotide
gcagaugaaccauuuagcu

SEQ ID NO: 1532177 - RNA, 19 nt, Artificial Sequence
  Description of Artificial Sequence: Synthetic oligonucleotide
caccguccagccacaaccc

SEQ ID NO: 1532178 - RNA, 19 nt, Artificial Sequence
  Description of Artificial Sequence: Synthetic oligonucleotide
ggguucgccaucauugaag

SEQ ID NO: 1532179 - RNA, 19 nt, Artificial Sequence
  Description of Artificial Sequence: Synthetic oligonucleotide
cuugcuccccaaguccugc

SEQ ID NO: 1532180 - RNA, 19 nt, Artificial Sequence
  Description of Artificial Sequence: Synthetic oligonucleotide
agcaugaagggaaggugca

SEQ ID NO: 1532181 - RNA, 19 nt, Artificial Sequence
  Description of Artificial Sequence: Synthetic oligonucleotide
gaucagacuuaugcuugac

SEQ ID NO: 1532182 - RNA, 19 nt, Artificial Sequence
  Description of Artificial Sequence: Synthetic oligonucleotide
caguuauguaaaauacugu

SEQ ID NO: 1532183 - RNA, 19 nt, Artificial Sequence
  Description of Artificial Sequence: Synthetic oligonucleotide
uauuuccccgugugcugca

SEQ ID NO: 1532184 - RNA, 19 nt, Artificial Sequence
  Description of Artificial Sequence: Synthetic oligonucleotide
ugcguggucuaauggugau

SEQ ID NO: 1532185 - RNA, 19 nt, Artificial Sequence
  Description of Artificial Sequence: Synthetic oligonucleotide
ugccacuaggauugguaua

SEQ ID NO: 1532186 - RNA, 19 nt, Artificial Sequence
  Description of Artificial Sequence: Synthetic oligonucleotide
ugcauugggcccugauguc

SEQ ID NO: 1532187 - RNA, 19 nt, Artificial Sequence
  Description of Artificial Sequence: Synthetic oligonucleotide
ccuggucugccucuugugg

SEQ ID NO: 1532188 - RNA, 19 nt, Artificial Sequence
  Description of Artificial Sequence: Synthetic oligonucleotide
agccucuuauuuccccgug

SEQ ID NO: 1532189 - RNA, 19 nt, Artificial Sequence
  Description of Artificial Sequence: Synthetic oligonucleotide
gaccaggcagcagaguauc

SEQ ID NO: 1532190 - RNA, 19 nt, Artificial Sequence
  Description of Artificial Sequence: Synthetic oligonucleotide
gaaccauuuagcuggccuu

SEQ ID NO: 1532191 - RNA, 19 nt, Artificial Sequence
  Description of Artificial Sequence: Synthetic oligonucleotide
gggccauaagcucaauuga

SEQ ID NO: 1532192 - RNA, 19 nt, Artificial Sequence
  Description of Artificial Sequence: Synthetic oligonucleotide
caaacgccaccgcuccagc

SEQ ID NO: 1532193 - RNA, 19 nt, Artificial Sequence
  Description of Artificial Sequence: Synthetic oligonucleotide
cuuccaggauuucagggcu

SEQ ID NO: 1532194 - RNA, 19 nt, Artificial Sequence
  Description of Artificial Sequence: Synthetic oligonucleotide
cuucaacuuguggguauug

SEQ ID NO: 1532195 - RNA, 19 nt, Artificial Sequence
  Description of Artificial Sequence: Synthetic oligonucleotide
aucuaggucccaucacauu

SEQ ID NO: 1532196 - RNA, 19 nt, Artificial Sequence
  Description of Artificial Sequence: Synthetic oligonucleotide
uuccccgugugcugcagau

SEQ ID NO: 1532197 - RNA, 19 nt, Artificial Sequence
  Description of Artificial Sequence: Synthetic oligonucleotide
aaguggugucguccaccgu

SEQ ID NO: 1532198 - RNA, 19 nt, Artificial Sequence
  Description of Artificial Sequence: Synthetic oligonucleotide
caccgcgacccaauucuac

SEQ ID NO: 1532199 - RNA, 19 nt, Artificial Sequence
  Description of Artificial Sequence: Synthetic oligonucleotide
acaaugccacuaggauugg

SEQ ID NO: 1532200 - RNA, 19 nt, Artificial Sequence
  Description of Artificial Sequence: Synthetic oligonucleotide
gagcacauucugauaucca

SEQ ID NO: 1532201 - RNA, 19 nt, Artificial Sequence
  Description of Artificial Sequence: Synthetic oligonucleotide
acuagagcuucaagucaug

SEQ ID NO: 1532202 - RNA, 19 nt, Artificial Sequence
  Description of Artificial Sequence: Synthetic oligonucleotide
aucucauaugucagucgcu

SEQ ID NO: 1532203 - RNA, 19 nt, Artificial Sequence
  Description of Artificial Sequence: Synthetic oligonucleotide
ccagcauguuuucucgaag

SEQ ID NO: 1532204 - RNA, 19 nt, Artificial Sequence
  Description of Artificial Sequence: Synthetic oligonucleotide
caacaccgcgacccaauuc

SEQ ID NO: 1532205 - RNA, 19 nt, Artificial Sequence
  Description of Artificial Sequence: Synthetic oligonucleotide
uccaaacgccaccgcucca

SEQ ID NO: 1532206 - RNA, 19 nt, Artificial Sequence
  Description of Artificial Sequence: Synthetic oligonucleotide
cgugugcugcagaugaacc

SEQ ID NO: 1532207 - RNA, 19 nt, Artificial Sequence
  Description of Artificial Sequence: Synthetic oligonucleotide
uuguggguauugguacuuc

SEQ ID NO: 1532208 - RNA, 19 nt, Artificial Sequence
  Description of Artificial Sequence: Synthetic oligonucleotide
cugcguggucuaaugguga

SEQ ID NO: 1532209 - RNA, 19 nt, Artificial Sequence
  Description of Artificial Sequence: Synthetic oligonucleotide
gauauccagcuggguggag

SEQ ID NO: 1532210 - RNA, 19 nt, Artificial Sequence
  Description of Artificial Sequence: Synthetic oligonucleotide
agccauaucuaggucccau

SEQ ID NO: 1532211 - RNA, 19 nt, Artificial Sequence
  Description of Artificial Sequence: Synthetic oligonucleotide
acuugcggugcaacugcag

SEQ ID NO: 1532212 - RNA, 19 nt, Artificial Sequence
  Description of Artificial Sequence: Synthetic oligonucleotide
uuggucugcuguguagaua

SEQ ID NO: 1532213 - RNA, 19 nt, Artificial Sequence
  Description of Artificial Sequence: Synthetic oligonucleotide
cugagcccacuccaggaca

SEQ ID NO: 1532214 - RNA, 19 nt, Artificial Sequence
  Description of Artificial Sequence: Synthetic oligonucleotide
ccauaucuaggucccauca

SEQ ID NO: 1532215 - RNA, 19 nt, Artificial Sequence
  Description of Artificial Sequence: Synthetic oligonucleotide
gcuggguggaggacaaugc

SEQ ID NO: 1532216 - RNA, 19 nt, Artificial Sequence
  Description of Artificial Sequence: Synthetic oligonucleotide
cacugcguggucuaauggu

SEQ ID NO: 1532217 - RNA, 19 nt, Artificial Sequence
  Description of Artificial Sequence: Synthetic oligonucleotide
ggugucguccaccguccag

SEQ ID NO: 1532218 - RNA, 19 nt, Artificial Sequence
  Description of Artificial Sequence: Synthetic oligonucleotide
gaaguagcuuccugggcuu

SEQ ID NO: 1532219 - RNA, 19 nt, Artificial Sequence
  Description of Artificial Sequence: Synthetic oligonucleotide
ugguacuuccugggagcug

SEQ ID NO: 1532220 - RNA, 19 nt, Artificial Sequence
  Description of Artificial Sequence: Synthetic oligonucleotide
cauaugucagucgcuugaa

SEQ ID NO: 1532221 - RNA, 19 nt, Artificial Sequence
  Description of Artificial Sequence: Synthetic oligonucleotide
ccagcaugaagggaaggug

SEQ ID NO: 1532222 - RNA, 19 nt, Artificial Sequence
  Description of Artificial Sequence: Synthetic oligonucleotide
ccacugcguggucuaaugg

SEQ ID NO: 1532223 - RNA, 19 nt, Artificial Sequence
  Description of Artificial Sequence: Synthetic oligonucleotide
guucucgagguuucuuggu

SEQ ID NO: 1532224 - RNA, 19 nt, Artificial Sequence
  Description of Artificial Sequence: Synthetic oligonucleotide
ggccuggaaaguggugucg

SEQ ID NO: 1532225 - RNA, 19 nt, Artificial Sequence
  Description of Artificial Sequence: Synthetic oligonucleotide
cauaggagaugacuuuaau

SEQ ID NO: 1532226 - RNA, 19 nt, Artificial Sequence
  Description of Artificial Sequence: Synthetic oligonucleotide
cugcagccauaucuagguc

SEQ ID NO: 1532227 - RNA, 19 nt, Artificial Sequence
  Description of Artificial Sequence: Synthetic oligonucleotide
gguacuuccugggagcugu

SEQ ID NO: 1532228 - RNA, 19 nt, Artificial Sequence
  Description of Artificial Sequence: Synthetic oligonucleotide
gccauaagcucaauugaaa

SEQ ID NO: 1532229 - RNA, 19 nt, Artificial Sequence
  Description of Artificial Sequence: Synthetic oligonucleotide
ccgcgacccaauucuaccc

SEQ ID NO: 1532230 - RNA, 19 nt, Artificial Sequence
  Description of Artificial Sequence: Synthetic oligonucleotide
ggacaaugccacuaggauu

SEQ ID NO: 1532231 - RNA, 19 nt, Artificial Sequence
  Description of Artificial Sequence: Synthetic oligonucleotide
gccauaucuaggucccauc

SEQ ID NO: 1532232 - RNA, 19 nt, Artificial Sequence
  Description of Artificial Sequence: Synthetic oligonucleotide
gcccugaugucauugggua

SEQ ID NO: 1532233 - RNA, 19 nt, Artificial Sequence
  Description of Artificial Sequence: Synthetic oligonucleotide
cccacugcguggucuaaug

SEQ ID NO: 1532234 - RNA, 19 nt, Artificial Sequence
  Description of Artificial Sequence: Synthetic oligonucleotide
aaagggccauaagcucaau

SEQ ID NO: 1532235 - RNA, 19 nt, Artificial Sequence
  Description of Artificial Sequence: Synthetic oligonucleotide
cacauuggucugcugugua

SEQ ID NO: 1532236 - RNA, 19 nt, Artificial Sequence
  Description of Artificial Sequence: Synthetic oligonucleotide
agaccccauggauguguaa

SEQ ID NO: 1532237 - RNA, 19 nt, Artificial Sequence
  Description of Artificial Sequence: Synthetic oligonucleotide
aguuucgcgucugcuccaa

SEQ ID NO: 1532238 - RNA, 19 nt, Artificial Sequence
  Description of Artificial Sequence: Synthetic oligonucleotide
ccugagcccacuccaggac

SEQ ID NO: 1532239 - RNA, 19 nt, Artificial Sequence
  Description of Artificial Sequence: Synthetic oligonucleotide
aguagcuuccugggcuuuu

SEQ ID NO: 1532240 - RNA, 19 nt, Artificial Sequence
  Description of Artificial Sequence: Synthetic oligonucleotide
guucgccaucauugaagaa

SEQ ID NO: 1532241 - RNA, 19 nt, Artificial Sequence
  Description of Artificial Sequence: Synthetic oligonucleotide
cgcgucugcuccaaacgcc

SEQ ID NO: 1532242 - RNA, 19 nt, Artificial Sequence
  Description of Artificial Sequence: Synthetic oligonucleotide
caguuucgcgucugcucca

SEQ ID NO: 1532243 - RNA, 19 nt, Artificial Sequence
  Description of Artificial Sequence: Synthetic oligonucleotide
cacuaaugccaguuccaau

SEQ ID NO: 1532244 - RNA, 19 nt, Artificial Sequence
  Description of Artificial Sequence: Synthetic oligonucleotide
cauguacuacagccucuua

SEQ ID NO: 1532245 - RNA, 19 nt, Artificial Sequence
  Description of Artificial Sequence: Synthetic oligonucleotide
uccagccuugggguaggua

SEQ ID NO: 1532246 - RNA, 19 nt, Artificial Sequence
  Description of Artificial Sequence: Synthetic oligonucleotide
ccgugugcugcagaugaac

SEQ ID NO: 1532247 - RNA, 19 nt, Artificial Sequence
  Description of Artificial Sequence: Synthetic oligonucleotide
ccccauggauguguaacac

SEQ ID NO: 1532248 - RNA, 19 nt, Artificial Sequence
  Description of Artificial Sequence: Synthetic oligonucleotide
gguagguaggggcugcauu

SEQ ID NO: 1532249 - RNA, 19 nt, Artificial Sequence
  Description of Artificial Sequence: Synthetic oligonucleotide
gcgucugcuccaaacgcca

SEQ ID NO: 1532250 - RNA, 19 nt, Artificial Sequence
  Description of Artificial Sequence: Synthetic oligonucleotide
ggccugaauuaaccccuuc

SEQ ID NO: 1532251 - RNA, 19 nt, Artificial Sequence
  Description of Artificial Sequence: Synthetic oligonucleotide
cuuguggguauugguacuu

SEQ ID NO: 1532252 - RNA, 19 nt, Artificial Sequence
  Description of Artificial Sequence: Synthetic oligonucleotide
cgaaccagcaugaaauguu

SEQ ID NO: 1532253 - RNA, 19 nt, Artificial Sequence
  Description of Artificial Sequence: Synthetic oligonucleotide
gcaugaagggaaggugcaa

SEQ ID NO: 1532254 - RNA, 19 nt, Artificial Sequence
  Description of Artificial Sequence: Synthetic oligonucleotide
gugcaacugcagcacuaau

SEQ ID NO: 1532255 - RNA, 19 nt, Artificial Sequence
  Description of Artificial Sequence: Synthetic oligonucleotide
acaccgcgacccaauucua

SEQ ID NO: 1532256 - RNA, 19 nt, Artificial Sequence
  Description of Artificial Sequence: Synthetic oligonucleotide
caaguucucgagguuucuu

SEQ ID NO: 1532257 - RNA, 19 nt, Artificial Sequence
  Description of Artificial Sequence: Synthetic oligonucleotide
guggucuaauggugauuuu

SEQ ID NO: 1532258 - RNA, 19 nt, Artificial Sequence
  Description of Artificial Sequence: Synthetic oligonucleotide
gugcaacaccgcgacccaa

SEQ ID NO: 1532259 - RNA, 19 nt, Artificial Sequence
  Description of Artificial Sequence: Synthetic oligonucleotide
cucuccgaaccagcaugaa

SEQ ID NO: 1532260 - RNA, 19 nt, Artificial Sequence
  Description of Artificial Sequence: Synthetic oligonucleotide
ccugaugucauuggguauu

SEQ ID NO: 1532261 - RNA, 19 nt, Artificial Sequence
  Description of Artificial Sequence: Synthetic oligonucleotide
caaugccacuaggauuggu

SEQ ID NO: 1532262 - RNA, 19 nt, Artificial Sequence
  Description of Artificial Sequence: Synthetic oligonucleotide
cagccauaucuagguccca

SEQ ID NO: 1532263 - RNA, 19 nt, Artificial Sequence
  Description of Artificial Sequence: Synthetic oligonucleotide
ggaccaggcagcagaguau

SEQ ID NO: 1532264 - RNA, 19 nt, Artificial Sequence
  Description of Artificial Sequence: Synthetic oligonucleotide
cguggucuaauggugauuu

SEQ ID NO: 1532265 - RNA, 19 nt, Artificial Sequence
  Description of Artificial Sequence: Synthetic oligonucleotide
ccgaaccagcaugaaaugu

SEQ ID NO: 1532266 - RNA, 19 nt, Artificial Sequence
  Description of Artificial Sequence: Synthetic oligonucleotide
gcaacaccgcgacccaauu

SEQ ID NO: 1532267 - RNA, 19 nt, Artificial Sequence
  Description of Artificial Sequence: Synthetic oligonucleotide
gggcaacauggacaagauu

SEQ ID NO: 1532268 - RNA, 19 nt, Artificial Sequence
  Description of Artificial Sequence: Synthetic oligonucleotide
gcggugcaacugcagcacu

SEQ ID NO: 1532269 - RNA, 19 nt, Artificial Sequence
  Description of Artificial Sequence: Synthetic oligonucleotide
ccacuaggauugguauaga

SEQ ID NO: 1532270 - RNA, 19 nt, Artificial Sequence
  Description of Artificial Sequence: Synthetic oligonucleotide
cggugcaacugcagcacua

SEQ ID NO: 1532271 - RNA, 19 nt, Artificial Sequence
  Description of Artificial Sequence: Synthetic oligonucleotide
ggagcugugcugaguucuu

SEQ ID NO: 1532272 - RNA, 19 nt, Artificial Sequence
  Description of Artificial Sequence: Synthetic oligonucleotide
caguguuccugagcacauu

SEQ ID NO: 1532273 - RNA, 19 nt, Artificial Sequence
  Description of Artificial Sequence: Synthetic oligonucleotide
ggguagguaggggcugcau

SEQ ID NO: 1532274 - RNA, 19 nt, Artificial Sequence
  Description of Artificial Sequence: Synthetic oligonucleotide
cguccaccguccagccaca

SEQ ID NO: 1532275 - RNA, 19 nt, Artificial Sequence
  Description of Artificial Sequence: Synthetic oligonucleotide
gcguggucuaauggugauu

SEQ ID NO: 1532276 - RNA, 19 nt, Artificial Sequence
  Description of Artificial Sequence: Synthetic oligonucleotide
guccagccuugggguaggu

SEQ ID NO: 1532277 - RNA, 19 nt, Artificial Sequence
  Description of Artificial Sequence: Synthetic oligonucleotide
gccccacugcguggucuaa

SEQ ID NO: 1532278 - RNA, 19 nt, Artificial Sequence
  Description of Artificial Sequence: Synthetic oligonucleotide
uuugcaauaaggcucaggg

SEQ ID NO: 1532279 - RNA, 19 nt, Artificial Sequence
  Description of Artificial Sequence: Synthetic oligonucleotide
ugcaauaaggcucaggggc

SEQ ID NO: 1532280 - RNA, 19 nt, Artificial Sequence
  Description of Artificial Sequence: Synthetic oligonucleotide
uauaaguccaagaagcagc

SEQ ID NO: 1532281 - RNA, 19 nt, Artificial Sequence
  Description of Artificial Sequence: Synthetic oligonucleotide
aaugucaaagcccuaggcu

SEQ ID NO: 1532282 - RNA, 19 nt, Artificial Sequence
  Description of Artificial Sequence: Synthetic oligonucleotide
uauucugacagcaccaggc

SEQ ID NO: 1532283 - RNA, 19 nt, Artificial Sequence
  Description of Artificial Sequence: Synthetic oligonucleotide
ucuagcaccacacucugag

SEQ ID NO: 1532284 - RNA, 19 nt, Artificial Sequence
  Description of Artificial Sequence: Synthetic oligonucleotide
auacaugccgcucaggcuc

SEQ ID NO: 1532285 - RNA, 19 nt, Artificial Sequence
  Description of Artificial Sequence: Synthetic oligonucleotide
gaggauaggagcugaaucc

SEQ ID NO: 1532286 - RNA, 19 nt, Artificial Sequence
  Description of Artificial Sequence: Synthetic oligonucleotide
aaagcccuaggcuagggug

SEQ ID NO: 1532287 - RNA, 19 nt, Artificial Sequence
  Description of Artificial Sequence: Synthetic oligonucleotide
agcaacuucagcccugucg

SEQ ID NO: 1532288 - RNA, 19 nt, Artificial Sequence
  Description of Artificial Sequence: Synthetic oligonucleotide
agaagugagagggagcccc

SEQ ID NO: 1532289 - RNA, 19 nt, Artificial Sequence
  Description of Artificial Sequence: Synthetic oligonucleotide
uccuuuaggggagugaggg

SEQ ID NO: 1532290 - RNA, 19 nt, Artificial Sequence
  Description of Artificial Sequence: Synthetic oligonucleotide
agcaugcaaugucaaagcc

SEQ ID NO: 1532291 - RNA, 19 nt, Artificial Sequence
  Description of Artificial Sequence: Synthetic oligonucleotide
agagaaguccucucauggc

SEQ ID NO: 1532292 - RNA, 19 nt, Artificial Sequence
  Description of Artificial Sequence: Synthetic oligonucleotide
ugcguauucugacagcacc

SEQ ID NO: 1532293 - RNA, 19 nt, Artificial Sequence
  Description of Artificial Sequence: Synthetic oligonucleotide
aguggaugcguauucugac

SEQ ID NO: 1532294 - RNA, 19 nt, Artificial Sequence
  Description of Artificial Sequence: Synthetic oligonucleotide
uucaggggcacucucuccg

SEQ ID NO: 1532295 - RNA, 19 nt, Artificial Sequence
  Description of Artificial Sequence: Synthetic oligonucleotide
ugggauaaauggcugaggu

SEQ ID NO: 1532296 - RNA, 19 nt, Artificial Sequence
  Description of Artificial Sequence: Synthetic oligonucleotide
auaccuugugcacuugugg

SEQ ID NO: 1532297 - RNA, 19 nt, Artificial Sequence
  Description of Artificial Sequence: Synthetic oligonucleotide
uguauaggguuucccaccc

SEQ ID NO: 1532298 - RNA, 19 nt, Artificial Sequence
  Description of Artificial Sequence: Synthetic oligonucleotide
agcccugucgccuggacgc

SEQ ID NO: 1532299 - RNA, 19 nt, Artificial Sequence
  Description of Artificial Sequence: Synthetic oligonucleotide
cagaucggggauaaguugg

SEQ ID NO: 1532300 - RNA, 19 nt, Artificial Sequence
  Description of Artificial Sequence: Synthetic oligonucleotide
guagcacagggauagcugg

SEQ ID NO: 1532301 - RNA, 19 nt, Artificial Sequence
  Description of Artificial Sequence: Synthetic oligonucleotide
agacuugcaggggugaugc

SEQ ID NO: 1532302 - RNA, 19 nt, Artificial Sequence
  Description of Artificial Sequence: Synthetic oligonucleotide
cagagaaguccucucaugg

SEQ ID NO: 1532303 - RNA, 19 nt, Artificial Sequence
  Description of Artificial Sequence: Synthetic oligonucleotide
gguuguagcggugagaagg

SEQ ID NO: 1532304 - RNA, 19 nt, Artificial Sequence
  Description of Artificial Sequence: Synthetic oligonucleotide
ugucaaagcccuaggcuag

SEQ ID NO: 1532305 - RNA, 19 nt, Artificial Sequence
  Description of Artificial Sequence: Synthetic oligonucleotide
uguagcggugagaaggagc

SEQ ID NO: 1532306 - RNA, 19 nt, Artificial Sequence
  Description of Artificial Sequence: Synthetic oligonucleotide
cuugucuauaccuugugca

SEQ ID NO: 1532307 - RNA, 19 nt, Artificial Sequence
  Description of Artificial Sequence: Synthetic oligonucleotide
uauaccuugugcacuugug

SEQ ID NO: 1532308 - RNA, 19 nt, Artificial Sequence
  Description of Artificial Sequence: Synthetic oligonucleotide
uguccuggcauccacucca

SEQ ID NO: 1532309 - RNA, 19 nt, Artificial Sequence
  Description of Artificial Sequence: Synthetic oligonucleotide
uggcauccacuccagaucc

SEQ ID NO: 1532310 - RNA, 19 nt, Artificial Sequence
  Description of Artificial Sequence: Synthetic oligonucleotide
ucucuugcugggauaaaug

SEQ ID NO: 1532311 - RNA, 19 nt, Artificial Sequence
  Description of Artificial Sequence: Synthetic oligonucleotide
uugcaauaaggcucagggg

SEQ ID NO: 1532312 - RNA, 19 nt, Artificial Sequence
  Description of Artificial Sequence: Synthetic oligonucleotide
acucucuccgcucucauca

SEQ ID NO: 1532313 - RNA, 19 nt, Artificial Sequence
  Description of Artificial Sequence: Synthetic oligonucleotide
aggauaggagcugaauccc

SEQ ID NO: 1532314 - RNA, 19 nt, Artificial Sequence
  Description of Artificial Sequence: Synthetic oligonucleotide
auagagggcaugaaggcuc

SEQ ID NO: 1532315 - RNA, 19 nt, Artificial Sequence
  Description of Artificial Sequence: Synthetic oligonucleotide
aguguuggcaccucccuug

SEQ ID NO: 1532316 - RNA, 19 nt, Artificial Sequence
  Description of Artificial Sequence: Synthetic oligonucleotide
uaucaagcuguauaggguu

SEQ ID NO: 1532317 - RNA, 19 nt, Artificial Sequence
  Description of Artificial Sequence: Synthetic oligonucleotide
aaacgguuggcagggcagc

SEQ ID NO: 1532318 - RNA, 19 nt, Artificial Sequence
  Description of Artificial Sequence: Synthetic oligonucleotide
auagcuggcagaucgggga

SEQ ID NO: 1532319 - RNA, 19 nt, Artificial Sequence
  Description of Artificial Sequence: Synthetic oligonucleotide
cauuaucccuccauccucc

SEQ ID NO: 1532320 - RNA, 19 nt, Artificial Sequence
  Description of Artificial Sequence: Synthetic oligonucleotide
ggauaaauggcugagguca

SEQ ID NO: 1532321 - RNA, 19 nt, Artificial Sequence
  Description of Artificial Sequence: Synthetic oligonucleotide
aggguuucccacccuauuc

SEQ ID NO: 1532322 - RNA, 19 nt, Artificial Sequence
  Description of Artificial Sequence: Synthetic oligonucleotide
cuagagaagugagagggag

SEQ ID NO: 1532323 - RNA, 19 nt, Artificial Sequence
  Description of Artificial Sequence: Synthetic oligonucleotide
uucggcauaguuugccucc

SEQ ID NO: 1532324 - RNA, 19 nt, Artificial Sequence
  Description of Artificial Sequence: Synthetic oligonucleotide
ugagccaagggaguccugg

SEQ ID NO: 1532325 - RNA, 19 nt, Artificial Sequence
  Description of Artificial Sequence: Synthetic oligonucleotide
guauaaguccaagaagcag

SEQ ID NO: 1532326 - RNA, 19 nt, Artificial Sequence
  Description of Artificial Sequence: Synthetic oligonucleotide
uauggcaagcccaguguug

SEQ ID NO: 1532327 - RNA, 19 nt, Artificial Sequence
  Description of Artificial Sequence: Synthetic oligonucleotide
ucagacucagacuguuaag

SEQ ID NO: 1532328 - RNA, 19 nt, Artificial Sequence
  Description of Artificial Sequence: Synthetic oligonucleotide
cuguauaggguuucccacc

SEQ ID NO: 1532329 - RNA, 19 nt, Artificial Sequence
  Description of Artificial Sequence: Synthetic oligonucleotide
gagaaguccucucauggca

SEQ ID NO: 1532330 - RNA, 19 nt, Artificial Sequence
  Description of Artificial Sequence: Synthetic oligonucleotide
aagcuguauaggguuuccc

SEQ ID NO: 1532331 - RNA, 19 nt, Artificial Sequence
  Description of Artificial Sequence: Synthetic oligonucleotide
uucugugguaggaagcccu

SEQ ID NO: 1532332 - RNA, 19 nt, Artificial Sequence
  Description of Artificial Sequence: Synthetic oligonucleotide
agaagcagcggcuaggcuu

SEQ ID NO: 1532333 - RNA, 19 nt, Artificial Sequence
  Description of Artificial Sequence: Synthetic oligonucleotide
ugcccauccucccaggggc

SEQ ID NO: 1532334 - RNA, 19 nt, Artificial Sequence
  Description of Artificial Sequence: Synthetic oligonucleotide
gaaggcucaucucagugga

SEQ ID NO: 1532335 - RNA, 19 nt, Artificial Sequence
  Description of Artificial Sequence: Synthetic oligonucleotide
accuugugcacuugugggg

SEQ ID NO: 1532336 - RNA, 19 nt, Artificial Sequence
  Description of Artificial Sequence: Synthetic oligonucleotide
agggcaugaaggcucaucu

SEQ ID NO: 1532337 - RNA, 19 nt, Artificial Sequence
  Description of Artificial Sequence: Synthetic oligonucleotide
acaccacacacguggggcc

SEQ ID NO: 1532338 - RNA, 19 nt, Artificial Sequence
  Description of Artificial Sequence: Synthetic oligonucleotide
gugcaggugguauaagucc

SEQ ID NO: 1532339 - RNA, 19 nt, Artificial Sequence
  Description of Artificial Sequence: Synthetic oligonucleotide
uugggcuauggcaagccca

SEQ ID NO: 1532340 - RNA, 19 nt, Artificial Sequence
  Description of Artificial Sequence: Synthetic oligonucleotide
caggcaaacgguuggcagg

SEQ ID NO: 1532341 - RNA, 19 nt, Artificial Sequence
  Description of Artificial Sequence: Synthetic oligonucleotide
gaugcaaagauggcaguac

SEQ ID NO: 1532342 - RNA, 19 nt, Artificial Sequence
  Description of Artificial Sequence: Synthetic oligonucleotide
aggagcgaagggcggaagc

SEQ ID NO: 1532343 - RNA, 19 nt, Artificial Sequence
  Description of Artificial Sequence: Synthetic oligonucleotide
cagcaugcaaugucaaagc

SEQ ID NO: 1532344 - RNA, 19 nt, Artificial Sequence
  Description of Artificial Sequence: Synthetic oligonucleotide
ggcaggaugagccagcuac

SEQ ID NO: 1532345 - RNA, 19 nt, Artificial Sequence
  Description of Artificial Sequence: Synthetic oligonucleotide
guuggcaccucccuuggcc

SEQ ID NO: 1532346 - RNA, 19 nt, Artificial Sequence
  Description of Artificial Sequence: Synthetic oligonucleotide
gauaggagcugaaucccag

SEQ ID NO: 1532347 - RNA, 19 nt, Artificial Sequence
  Description of Artificial Sequence: Synthetic oligonucleotide
ucaguggaugcguauucug

SEQ ID NO: 1532348 - RNA, 19 nt, Artificial Sequence
  Description of Artificial Sequence: Synthetic oligonucleotide
gaugcguauucugacagca

SEQ ID NO: 1532349 - RNA, 19 nt, Artificial Sequence
  Description of Artificial Sequence: Synthetic oligonucleotide
uccaagaagcagcggcuag

SEQ ID NO: 1532350 - RNA, 19 nt, Artificial Sequence
  Description of Artificial Sequence: Synthetic oligonucleotide
uauagagggcaugaaggcu

SEQ ID NO: 1532351 - RNA, 19 nt, Artificial Sequence
  Description of Artificial Sequence: Synthetic oligonucleotide
gcaacuucagcccugucgc

SEQ ID NO: 1532352 - RNA, 19 nt, Artificial Sequence
  Description of Artificial Sequence: Synthetic oligonucleotide
gaaggucucguggacagug

SEQ ID NO: 1532353 - RNA, 19 nt, Artificial Sequence
  Description of Artificial Sequence: Synthetic oligonucleotide
guauucugacagcaccagg

SEQ ID NO: 1532354 - RNA, 19 nt, Artificial Sequence
  Description of Artificial Sequence: Synthetic oligonucleotide
gauagcuggcagaucgggg

SEQ ID NO: 1532355 - RNA, 19 nt, Artificial Sequence
  Description of Artificial Sequence: Synthetic oligonucleotide
uaucccuccauccuccuuu

SEQ ID NO: 1532356 - RNA, 19 nt, Artificial Sequence
  Description of Artificial Sequence: Synthetic oligonucleotide
cagccuagagaagugagag

SEQ ID NO: 1532357 - RNA, 19 nt, Artificial Sequence
  Description of Artificial Sequence: Synthetic oligonucleotide
caaacgguuggcagggcag

SEQ ID NO: 1532358 - RNA, 19 nt, Artificial Sequence
  Description of Artificial Sequence: Synthetic oligonucleotide
ucuugaugcuggcugccca

SEQ ID NO: 1532359 - RNA, 19 nt, Artificial Sequence
  Description of Artificial Sequence: Synthetic oligonucleotide
cacaaucaugcccugucag

SEQ ID NO: 1532360 - RNA, 19 nt, Artificial Sequence
  Description of Artificial Sequence: Synthetic oligonucleotide
accaguuucuagcaccaca

SEQ ID NO: 1532361 - RNA, 19 nt, Artificial Sequence
  Description of Artificial Sequence: Synthetic oligonucleotide
ggcggugccauacaugccg

SEQ ID NO: 1532362 - RNA, 19 nt, Artificial Sequence
  Description of Artificial Sequence: Synthetic oligonucleotide
gcauauagagggcaugaag

SEQ ID NO: 1532363 - RNA, 19 nt, Artificial Sequence
  Description of Artificial Sequence: Synthetic oligonucleotide
guaggaagcccucuggaga

SEQ ID NO: 1532364 - RNA, 19 nt, Artificial Sequence
  Description of Artificial Sequence: Synthetic oligonucleotide
auuugcaauaaggcucagg

SEQ ID NO: 1532365 - RNA, 19 nt, Artificial Sequence
  Description of Artificial Sequence: Synthetic oligonucleotide
accuucggcauaguuugcc

SEQ ID NO: 1532366 - RNA, 19 nt, Artificial Sequence
  Description of Artificial Sequence: Synthetic oligonucleotide
gagugagggaugcagggca

SEQ ID NO: 1532367 - RNA, 19 nt, Artificial Sequence
  Description of Artificial Sequence: Synthetic oligonucleotide
aggaugagccagcuaccac

SEQ ID NO: 1532368 - RNA, 19 nt, Artificial Sequence
  Description of Artificial Sequence: Synthetic oligonucleotide
ugugccccuagucccgagg

SEQ ID NO: 1532369 - RNA, 19 nt, Artificial Sequence
  Description of Artificial Sequence: Synthetic oligonucleotide
ucucaguggaugcguauuc

SEQ ID NO: 1532370 - RNA, 19 nt, Artificial Sequence
  Description of Artificial Sequence: Synthetic oligonucleotide
agcggcuaggcuucagggg

SEQ ID NO: 1532371 - RNA, 19 nt, Artificial Sequence
  Description of Artificial Sequence: Synthetic oligonucleotide
ggcagggacacacaaacac

SEQ ID NO: 1532372 - RNA, 19 nt, Artificial Sequence
  Description of Artificial Sequence: Synthetic oligonucleotide
gcagcuguugccuccaucc

SEQ ID NO: 1532373 - RNA, 19 nt, Artificial Sequence
  Description of Artificial Sequence: Synthetic oligonucleotide
acauuugcaauaaggcuca

SEQ ID NO: 1532374 - RNA, 19 nt, Artificial Sequence
  Description of Artificial Sequence: Synthetic oligonucleotide
agugagagggagccccggg

SEQ ID NO: 1532375 - RNA, 19 nt, Artificial Sequence
  Description of Artificial Sequence: Synthetic oligonucleotide
agccccggggcacugugcc

SEQ ID NO: 1532376 - RNA, 19 nt, Artificial Sequence
  Description of Artificial Sequence: Synthetic oligonucleotide
aagggcggaagcaacuuca

SEQ ID NO: 1532377 - RNA, 19 nt, Artificial Sequence
  Description of Artificial Sequence: Synthetic oligonucleotide
uggggacgaggcuagaguc

SEQ ID NO: 1532378 - RNA, 19 nt, Artificial Sequence
  Description of Artificial Sequence: Synthetic oligonucleotide
uuaggggagugagggaugc

SEQ ID NO: 1532379 - RNA, 19 nt, Artificial Sequence
  Description of Artificial Sequence: Synthetic oligonucleotide
ugcugggauaaauggcuga

SEQ ID NO: 1532380 - RNA, 19 nt, Artificial Sequence
  Description of Artificial Sequence: Synthetic oligonucleotide
uggcagaucggggauaagu

SEQ ID NO: 1532381 - RNA, 19 nt, Artificial Sequence
  Description of Artificial Sequence: Synthetic oligonucleotide
ggaggauaggagcugaauc

SEQ ID NO: 1532382 - RNA, 19 nt, Artificial Sequence
  Description of Artificial Sequence: Synthetic oligonucleotide
aggcaaacgguuggcaggg

SEQ ID NO: 1532383 - RNA, 19 nt, Artificial Sequence
  Description of Artificial Sequence: Synthetic oligonucleotide
ggcaugaaggcucaucuca

SEQ ID NO: 1532384 - RNA, 19 nt, Artificial Sequence
  Description of Artificial Sequence: Synthetic oligonucleotide
caaucaugcccugucaguc

SEQ ID NO: 1532385 - RNA, 19 nt, Artificial Sequence
  Description of Artificial Sequence: Synthetic oligonucleotide
aggugguauaaguccaaga

SEQ ID NO: 1532386 - RNA, 19 nt, Artificial Sequence
  Description of Artificial Sequence: Synthetic oligonucleotide
ugccauacaugccgcucag

SEQ ID NO: 1532387 - RNA, 19 nt, Artificial Sequence
  Description of Artificial Sequence: Synthetic oligonucleotide
gguaggaagcccucuggag

SEQ ID NO: 1532388 - RNA, 19 nt, Artificial Sequence
  Description of Artificial Sequence: Synthetic oligonucleotide
gcaacacucagagaagucc

SEQ ID NO: 1532389 - RNA, 19 nt, Artificial Sequence
  Description of Artificial Sequence: Synthetic oligonucleotide
ugggucugcugcuugugga

SEQ ID NO: 1532390 - RNA, 19 nt, Artificial Sequence
  Description of Artificial Sequence: Synthetic oligonucleotide
caagaagcagcggcuaggc

SEQ ID NO: 1532391 - RNA, 19 nt, Artificial Sequence
  Description of Artificial Sequence: Synthetic oligonucleotide
cacugugccaggaucugug

SEQ ID NO: 1532392 - RNA, 19 nt, Artificial Sequence
  Description of Artificial Sequence: Synthetic oligonucleotide
gauaaauggcugaggucac

SEQ ID NO: 1532393 - RNA, 19 nt, Artificial Sequence
  Description of Artificial Sequence: Synthetic oligonucleotide
auaguuugccucccacagu

SEQ ID NO: 1532394 - RNA, 19 nt, Artificial Sequence
  Description of Artificial Sequence: Synthetic oligonucleotide
ggguguagcacagggauag

SEQ ID NO: 1532395 - RNA, 19 nt, Artificial Sequence
  Description of Artificial Sequence: Synthetic oligonucleotide
ccaccuucggcauaguuug

SEQ ID NO: 1532396 - RNA, 19 nt, Artificial Sequence
  Description of Artificial Sequence: Synthetic oligonucleotide
uggggaccaguuucuagca

SEQ ID NO: 1532397 - RNA, 19 nt, Artificial Sequence
  Description of Artificial Sequence: Synthetic oligonucleotide
ccauacaugccgcucaggc

SEQ ID NO: 1532398 - RNA, 19 nt, Artificial Sequence
  Description of Artificial Sequence: Synthetic oligonucleotide
cuggcauccacuccagauc

SEQ ID NO: 1532399 - RNA, 19 nt, Artificial Sequence
  Description of Artificial Sequence: Synthetic oligonucleotide
cagcggcuaggcuucaggg

SEQ ID NO: 1532400 - RNA, 19 nt, Artificial Sequence
  Description of Artificial Sequence: Synthetic oligonucleotide
aagaagcagcggcuaggcu

SEQ ID NO: 1532401 - RNA, 19 nt, Artificial Sequence
  Description of Artificial Sequence: Synthetic oligonucleotide
cugaggucacaaucaugcc

SEQ ID NO: 1532402 - RNA, 19 nt, Artificial Sequence
  Description of Artificial Sequence: Synthetic oligonucleotide
agaaguccucucauggcag

SEQ ID NO: 1532403 - RNA, 19 nt, Artificial Sequence
  Description of Artificial Sequence: Synthetic oligonucleotide
caggcaacacucagagaag

SEQ ID NO: 1532404 - RNA, 19 nt, Artificial Sequence
  Description of Artificial Sequence: Synthetic oligonucleotide
guuugccucccacaguuga

SEQ ID NO: 1532405 - RNA, 19 nt, Artificial Sequence
  Description of Artificial Sequence: Synthetic oligonucleotide
gaggucacaaucaugcccu

SEQ ID NO: 1532406 - RNA, 19 nt, Artificial Sequence
  Description of Artificial Sequence: Synthetic oligonucleotide
cuucccacacacugcuccc

SEQ ID NO: 1532407 - RNA, 19 nt, Artificial Sequence
  Description of Artificial Sequence: Synthetic oligonucleotide
ucaucacucucccggcggu

SEQ ID NO: 1532408 - RNA, 19 nt, Artificial Sequence
  Description of Artificial Sequence: Synthetic oligonucleotide
cucagacucagacuguuaa

SEQ ID NO: 1532409 - RNA, 19 nt, Artificial Sequence
  Description of Artificial Sequence: Synthetic oligonucleotide
aaggucucguggacagugg

SEQ ID NO: 1532410 - RNA, 19 nt, Artificial Sequence
  Description of Artificial Sequence: Synthetic oligonucleotide
gcuguauaggguuucccac

SEQ ID NO: 1532411 - RNA, 19 nt, Artificial Sequence
  Description of Artificial Sequence: Synthetic oligonucleotide
ucugagccaagggaguccu

SEQ ID NO: 1532412 - RNA, 19 nt, Artificial Sequence
  Description of Artificial Sequence: Synthetic oligonucleotide
gaagcagcggcuaggcuuc

SEQ ID NO: 1532413 - RNA, 19 nt, Artificial Sequence
  Description of Artificial Sequence: Synthetic oligonucleotide
gaucggggauaaguugggg

SEQ ID NO: 1532414 - RNA, 19 nt, Artificial Sequence
  Description of Artificial Sequence: Synthetic oligonucleotide
acucugagccaagggaguc

SEQ ID NO: 1532415 - RNA, 19 nt, Artificial Sequence
  Description of Artificial Sequence: Synthetic oligonucleotide
cugggauaaauggcugagg

SEQ ID NO: 1532416 - RNA, 19 nt, Artificial Sequence
  Description of Artificial Sequence: Synthetic oligonucleotide
ucugugguaggaagcccuc

SEQ ID NO: 1532417 - RNA, 19 nt, Artificial Sequence
  Description of Artificial Sequence: Synthetic oligonucleotide
cuugggcuauggcaagccc

SEQ ID NO: 1532418 - RNA, 19 nt, Artificial Sequence
  Description of Artificial Sequence: Synthetic oligonucleotide
cuucggcauaguuugccuc

SEQ ID NO: 1532419 - RNA, 19 nt, Artificial Sequence
  Description of Artificial Sequence: Synthetic oligonucleotide
cuucugcccauccucccag

SEQ ID NO: 1532420 - RNA, 19 nt, Artificial Sequence
  Description of Artificial Sequence: Synthetic oligonucleotide
aggcucaucucaguggaug

SEQ ID NO: 1532421 - RNA, 19 nt, Artificial Sequence
  Description of Artificial Sequence: Synthetic oligonucleotide
uugccucccacaguugagc

SEQ ID NO: 1532422 - RNA, 19 nt, Artificial Sequence
  Description of Artificial Sequence: Synthetic oligonucleotide
ggcucaggggcucagacuc

SEQ ID NO: 1532423 - RNA, 19 nt, Artificial Sequence
  Description of Artificial Sequence: Synthetic oligonucleotide
agaucggggauaaguuggg

SEQ ID NO: 1532424 - RNA, 19 nt, Artificial Sequence
  Description of Artificial Sequence: Synthetic oligonucleotide
ucccgaggccuccaagucu

SEQ ID NO: 1532425 - RNA, 19 nt, Artificial Sequence
  Description of Artificial Sequence: Synthetic oligonucleotide
ucaucucaguggaugcgua

SEQ ID NO: 1532426 - RNA, 19 nt, Artificial Sequence
  Description of Artificial Sequence: Synthetic oligonucleotide
gcaugcaaugucaaagccc

SEQ ID NO: 1532427 - RNA, 19 nt, Artificial Sequence
  Description of Artificial Sequence: Synthetic oligonucleotide
cugggucugcugcuugugg

SEQ ID NO: 1532428 - RNA, 19 nt, Artificial Sequence
  Description of Artificial Sequence: Synthetic oligonucleotide
gaagggcggaagcaacuuc

SEQ ID NO: 1532429 - RNA, 19 nt, Artificial Sequence
  Description of Artificial Sequence: Synthetic oligonucleotide
aagcccuaggcuaggguga

SEQ ID NO: 1532430 - RNA, 19 nt, Artificial Sequence
  Description of Artificial Sequence: Synthetic oligonucleotide
aggggcagccuagagaagu

SEQ ID NO: 1532431 - RNA, 19 nt, Artificial Sequence
  Description of Artificial Sequence: Synthetic oligonucleotide
caggggugaugcaaagaug

SEQ ID NO: 1532432 - RNA, 19 nt, Artificial Sequence
  Description of Artificial Sequence: Synthetic oligonucleotide
agcgaagggcggaagcaac

SEQ ID NO: 1532433 - RNA, 19 nt, Artificial Sequence
  Description of Artificial Sequence: Synthetic oligonucleotide
agggcgguggucucaggug

SEQ ID NO: 1532434 - RNA, 19 nt, Artificial Sequence
  Description of Artificial Sequence: Synthetic oligonucleotide
agcuaccacauuugcaaua

SEQ ID NO: 1532435 - RNA, 19 nt, Artificial Sequence
  Description of Artificial Sequence: Synthetic oligonucleotide
uggugcauauagagggcau

SEQ ID NO: 1532436 - RNA, 19 nt, Artificial Sequence
  Description of Artificial Sequence: Synthetic oligonucleotide
uggacugggacagcagagu

SEQ ID NO: 1532437 - RNA, 19 nt, Artificial Sequence
  Description of Artificial Sequence: Synthetic oligonucleotide
caguggaugcguauucuga

SEQ ID NO: 1532438 - RNA, 19 nt, Artificial Sequence
  Description of Artificial Sequence: Synthetic oligonucleotide
gcggaagcaacuucagccc

SEQ ID NO: 1532439 - RNA, 19 nt, Artificial Sequence
  Description of Artificial Sequence: Synthetic oligonucleotide
gagacuugcaggggugaug

SEQ ID NO: 1532440 - RNA, 19 nt, Artificial Sequence
  Description of Artificial Sequence: Synthetic oligonucleotide
ugccucccacaguugagca

SEQ ID NO: 1532441 - RNA, 19 nt, Artificial Sequence
  Description of Artificial Sequence: Synthetic oligonucleotide
ccagcuaccacauuugcaa

SEQ ID NO: 1532442 - RNA, 19 nt, Artificial Sequence
  Description of Artificial Sequence: Synthetic oligonucleotide
guccccggcaggaugagcc

SEQ ID NO: 1532443 - RNA, 19 nt, Artificial Sequence
  Description of Artificial Sequence: Synthetic oligonucleotide
guggaugcguauucugaca

SEQ ID NO: 1532444 - RNA, 19 nt, Artificial Sequence
  Description of Artificial Sequence: Synthetic oligonucleotide
caagcuguauaggguuucc

SEQ ID NO: 1532445 - RNA, 19 nt, Artificial Sequence
  Description of Artificial Sequence: Synthetic oligonucleotide
ggugaguccauuaucccuc

SEQ ID NO: 1532446 - RNA, 19 nt, Artificial Sequence
  Description of Artificial Sequence: Synthetic oligonucleotide
ugcauauagagggcaugaa

SEQ ID NO: 1532447 - RNA, 19 nt, Artificial Sequence
  Description of Artificial Sequence: Synthetic oligonucleotide
gugaguccauuaucccucc

SEQ ID NO: 1532448 - RNA, 19 nt, Artificial Sequence
  Description of Artificial Sequence: Synthetic oligonucleotide
ccggcggugccauacaugc

SEQ ID NO: 1532449 - RNA, 19 nt, Artificial Sequence
  Description of Artificial Sequence: Synthetic oligonucleotide
cuaggcuagggugagucca

SEQ ID NO: 1532450 - RNA, 19 nt, Artificial Sequence
  Description of Artificial Sequence: Synthetic oligonucleotide
ggauagcuggcagaucggg

SEQ ID NO: 1532451 - RNA, 19 nt, Artificial Sequence
  Description of Artificial Sequence: Synthetic oligonucleotide
ucaggggcacucucuccgc

SEQ ID NO: 1532452 - RNA, 19 nt, Artificial Sequence
  Description of Artificial Sequence: Synthetic oligonucleotide
aggcaacacucagagaagu

SEQ ID NO: 1532453 - RNA, 19 nt, Artificial Sequence
  Description of Artificial Sequence: Synthetic oligonucleotide
aggagcugaaucccagcau

SEQ ID NO: 1532454 - RNA, 19 nt, Artificial Sequence
  Description of Artificial Sequence: Synthetic oligonucleotide
ccuugucuauaccuugugc

SEQ ID NO: 1532455 - RNA, 19 nt, Artificial Sequence
  Description of Artificial Sequence: Synthetic oligonucleotide
cacuccacgguuggcacag

SEQ ID NO: 1532456 - RNA, 19 nt, Artificial Sequence
  Description of Artificial Sequence: Synthetic oligonucleotide
uaggguuucccacccuauu

SEQ ID NO: 1532457 - RNA, 19 nt, Artificial Sequence
  Description of Artificial Sequence: Synthetic oligonucleotide
gguauaaguccaagaagca

SEQ ID NO: 1532458 - RNA, 19 nt, Artificial Sequence
  Description of Artificial Sequence: Synthetic oligonucleotide
cagguuguagcggugagaa

SEQ ID NO: 1532459 - RNA, 19 nt, Artificial Sequence
  Description of Artificial Sequence: Synthetic oligonucleotide
gcuucugugguaggaagcc

SEQ ID NO: 1532460 - RNA, 19 nt, Artificial Sequence
  Description of Artificial Sequence: Synthetic oligonucleotide
cuaccacauuugcaauaag

SEQ ID NO: 1532461 - RNA, 19 nt, Artificial Sequence
  Description of Artificial Sequence: Synthetic oligonucleotide
uuguggagcuggugcauau

SEQ ID NO: 1532462 - RNA, 19 nt, Artificial Sequence
  Description of Artificial Sequence: Synthetic oligonucleotide
uagcgccucuggaagcccc

SEQ ID NO: 1532463 - RNA, 19 nt, Artificial Sequence
  Description of Artificial Sequence: Synthetic oligonucleotide
augcguauucugacagcac

SEQ ID NO: 1532464 - RNA, 19 nt, Artificial Sequence
  Description of Artificial Sequence: Synthetic oligonucleotide
agcggugagaaggagcgaa

SEQ ID NO: 1532465 - RNA, 19 nt, Artificial Sequence
  Description of Artificial Sequence: Synthetic oligonucleotide
caagcccaguguuggcacc

SEQ ID NO: 1532466 - RNA, 19 nt, Artificial Sequence
  Description of Artificial Sequence: Synthetic oligonucleotide
auaaauggcugaggucaca

SEQ ID NO: 1532467 - RNA, 19 nt, Artificial Sequence
  Description of Artificial Sequence: Synthetic oligonucleotide
gagcccuccucugggacag

SEQ ID NO: 1532468 - RNA, 19 nt, Artificial Sequence
  Description of Artificial Sequence: Synthetic oligonucleotide
guuguagcggugagaagga

SEQ ID NO: 1532469 - RNA, 19 nt, Artificial Sequence
  Description of Artificial Sequence: Synthetic oligonucleotide
uuguagcggugagaaggag

SEQ ID NO: 1532470 - RNA, 19 nt, Artificial Sequence
  Description of Artificial Sequence: Synthetic oligonucleotide
uaggcuagggugaguccau

SEQ ID NO: 1532471 - RNA, 19 nt, Artificial Sequence
  Description of Artificial Sequence: Synthetic oligonucleotide
agagccggggaagggagug

SEQ ID NO: 1532472 - RNA, 19 nt, Artificial Sequence
  Description of Artificial Sequence: Synthetic oligonucleotide
caacuucagcccugucgcc

SEQ ID NO: 1532473 - RNA, 19 nt, Artificial Sequence
  Description of Artificial Sequence: Synthetic oligonucleotide
gguuucccacccuauucug

SEQ ID NO: 1532474 - RNA, 19 nt, Artificial Sequence
  Description of Artificial Sequence: Synthetic oligonucleotide
gucaaagcccuaggcuagg

SEQ ID NO: 1532475 - RNA, 19 nt, Artificial Sequence
  Description of Artificial Sequence: Synthetic oligonucleotide
gcugggauaaauggcugag

SEQ ID NO: 1532476 - RNA, 19 nt, Artificial Sequence
  Description of Artificial Sequence: Synthetic oligonucleotide
agaaggagcgaagggcgga

SEQ ID NO: 1532477 - RNA, 19 nt, Artificial Sequence
  Description of Artificial Sequence: Synthetic oligonucleotide
uccacgguuggcacagguu

SEQ ID NO: 1532478 - RNA, 19 nt, Artificial Sequence
  Description of Artificial Sequence: Synthetic oligonucleotide
agguuguagcggugagaag

SEQ ID NO: 1532479 - RNA, 19 nt, Artificial Sequence
  Description of Artificial Sequence: Synthetic oligonucleotide
uucccacccuauucugcug

SEQ ID NO: 1532480 - RNA, 19 nt, Artificial Sequence
  Description of Artificial Sequence: Synthetic oligonucleotide
acacguggggccaggcaac

SEQ ID NO: 1532481 - RNA, 19 nt, Artificial Sequence
  Description of Artificial Sequence: Synthetic oligonucleotide
ccuauucugcuguggacug

SEQ ID NO: 1532482 - RNA, 19 nt, Artificial Sequence
  Description of Artificial Sequence: Synthetic oligonucleotide
gggauaaauggcugagguc

SEQ ID NO: 1532483 - RNA, 19 nt, Artificial Sequence
  Description of Artificial Sequence: Synthetic oligonucleotide
ucggcauaguuugccuccc

SEQ ID NO: 1532484 - RNA, 19 nt, Artificial Sequence
  Description of Artificial Sequence: Synthetic oligonucleotide
uggagacuugcagggguga

SEQ ID NO: 1532485 - RNA, 19 nt, Artificial Sequence
  Description of Artificial Sequence: Synthetic oligonucleotide
aacgguuggcagggcagcu

SEQ ID NO: 1532486 - RNA, 19 nt, Artificial Sequence
  Description of Artificial Sequence: Synthetic oligonucleotide
cugaaucccagcaugcaau

SEQ ID NO: 1532487 - RNA, 19 nt, Artificial Sequence
  Description of Artificial Sequence: Synthetic oligonucleotide
uagagucuugugugccccu

SEQ ID NO: 1532488 - RNA, 19 nt, Artificial Sequence
  Description of Artificial Sequence: Synthetic oligonucleotide
gacugggacagcagaguuc

SEQ ID NO: 1532489 - RNA, 19 nt, Artificial Sequence
  Description of Artificial Sequence: Synthetic oligonucleotide
gccaggaucugugaugccc

SEQ ID NO: 1532490 - RNA, 19 nt, Artificial Sequence
  Description of Artificial Sequence: Synthetic oligonucleotide
cacccuauucugcugugga

SEQ ID NO: 1532491 - RNA, 19 nt, Artificial Sequence
  Description of Artificial Sequence: Synthetic oligonucleotide
ccacgguuggcacagguuc

SEQ ID NO: 1532492 - RNA, 19 nt, Artificial Sequence
  Description of Artificial Sequence: Synthetic oligonucleotide
cacacguggggccaggcaa

SEQ ID NO: 1532493 - RNA, 19 nt, Artificial Sequence
  Description of Artificial Sequence: Synthetic oligonucleotide
agcugaaucccagcaugca

SEQ ID NO: 1532494 - RNA, 19 nt, Artificial Sequence
  Description of Artificial Sequence: Synthetic oligonucleotide
gggguugagggcucaggcc

SEQ ID NO: 1532495 - RNA, 19 nt, Artificial Sequence
  Description of Artificial Sequence: Synthetic oligonucleotide
gcagcggcuaggcuucagg

SEQ ID NO: 1532496 - RNA, 19 nt, Artificial Sequence
  Description of Artificial Sequence: Synthetic oligonucleotide
ggaugcguauucugacagc

SEQ ID NO: 1532497 - RNA, 19 nt, Artificial Sequence
  Description of Artificial Sequence: Synthetic oligonucleotide
acacacguggggccaggca

SEQ ID NO: 1532498 - RNA, 19 nt, Artificial Sequence
  Description of Artificial Sequence: Synthetic oligonucleotide
uuaucccuccauccuccuu

SEQ ID NO: 1532499 - RNA, 19 nt, Artificial Sequence
  Description of Artificial Sequence: Synthetic oligonucleotide
gcaugaaggcucaucucag

SEQ ID NO: 1532500 - RNA, 19 nt, Artificial Sequence
  Description of Artificial Sequence: Synthetic oligonucleotide
guugagcagagccggggaa

SEQ ID NO: 1532501 - RNA, 19 nt, Artificial Sequence
  Description of Artificial Sequence: Synthetic oligonucleotide
cuuuaggggagugagggau

SEQ ID NO: 1532502 - RNA, 19 nt, Artificial Sequence
  Description of Artificial Sequence: Synthetic oligonucleotide
acgaggcuagagucuugug

SEQ ID NO: 1532503 - RNA, 19 nt, Artificial Sequence
  Description of Artificial Sequence: Synthetic oligonucleotide
caauaaggcucaggggcuc

SEQ ID NO: 1532504 - RNA, 19 nt, Artificial Sequence
  Description of Artificial Sequence: Synthetic oligonucleotide
caggccggguguagcacag

SEQ ID NO: 1532505 - RNA, 19 nt, Artificial Sequence
  Description of Artificial Sequence: Synthetic oligonucleotide
aucucaguggaugcguauu

SEQ ID NO: 1532506 - RNA, 19 nt, Artificial Sequence
  Description of Artificial Sequence: Synthetic oligonucleotide
gcauaguuugccucccaca

SEQ ID NO: 1532507 - RNA, 19 nt, Artificial Sequence
  Description of Artificial Sequence: Synthetic oligonucleotide
ggcagccuagagaagugag

SEQ ID NO: 1532508 - RNA, 19 nt, Artificial Sequence
  Description of Artificial Sequence: Synthetic oligonucleotide
ccauuaucccuccauccuc

SEQ ID NO: 1532509 - RNA, 19 nt, Artificial Sequence
  Description of Artificial Sequence: Synthetic oligonucleotide
ggggagccuguccagguug

SEQ ID NO: 1532510 - RNA, 19 nt, Artificial Sequence
  Description of Artificial Sequence: Synthetic oligonucleotide
gggugaugcaaagauggca

SEQ ID NO: 1532511 - RNA, 19 nt, Artificial Sequence
  Description of Artificial Sequence: Synthetic oligonucleotide
ccaagaagcagcggcuagg

SEQ ID NO: 1532512 - RNA, 19 nt, Artificial Sequence
  Description of Artificial Sequence: Synthetic oligonucleotide
cuggugcauauagagggca

SEQ ID NO: 1532513 - RNA, 19 nt, Artificial Sequence
  Description of Artificial Sequence: Synthetic oligonucleotide
cauacaugccgcucaggcu

SEQ ID NO: 1532514 - RNA, 19 nt, Artificial Sequence
  Description of Artificial Sequence: Synthetic oligonucleotide
agcccggccuuggggagcc

SEQ ID NO: 1532515 - RNA, 19 nt, Artificial Sequence
  Description of Artificial Sequence: Synthetic oligonucleotide
uggcaagcccaguguuggc

SEQ ID NO: 1532516 - RNA, 19 nt, Artificial Sequence
  Description of Artificial Sequence: Synthetic oligonucleotide
gcucaucucaguggaugcg

SEQ ID NO: 1532517 - RNA, 19 nt, Artificial Sequence
  Description of Artificial Sequence: Synthetic oligonucleotide
auggugcugggagcccggc

SEQ ID NO: 1532518 - RNA, 19 nt, Artificial Sequence
  Description of Artificial Sequence: Synthetic oligonucleotide
uccuggcauccacuccaga

SEQ ID NO: 1532519 - RNA, 19 nt, Artificial Sequence
  Description of Artificial Sequence: Synthetic oligonucleotide
gcuaccacauuugcaauaa

SEQ ID NO: 1532520 - RNA, 19 nt, Artificial Sequence
  Description of Artificial Sequence: Synthetic oligonucleotide
gcugaaucccagcaugcaa

SEQ ID NO: 1532521 - RNA, 19 nt, Artificial Sequence
  Description of Artificial Sequence: Synthetic oligonucleotide
gcaagcccaguguuggcac

SEQ ID NO: 1532522 - RNA, 19 nt, Artificial Sequence
  Description of Artificial Sequence: Synthetic oligonucleotide
gucccgaggccuccaaguc

SEQ ID NO: 1532523 - RNA, 19 nt, Artificial Sequence
  Description of Artificial Sequence: Synthetic oligonucleotide
acgcccugaaggucucgug

SEQ ID NO: 1532524 - RNA, 19 nt, Artificial Sequence
  Description of Artificial Sequence: Synthetic oligonucleotide
gcaaacgguuggcagggca

SEQ ID NO: 1532525 - RNA, 19 nt, Artificial Sequence
  Description of Artificial Sequence: Synthetic oligonucleotide
auaggguuucccacccuau

SEQ ID NO: 1532526 - RNA, 19 nt, Artificial Sequence
  Description of Artificial Sequence: Synthetic oligonucleotide
caugcagggcgguggucuc

SEQ ID NO: 1532527 - RNA, 19 nt, Artificial Sequence
  Description of Artificial Sequence: Synthetic oligonucleotide
cuggacgcccugaaggucu

SEQ ID NO: 1532528 - RNA, 19 nt, Artificial Sequence
  Description of Artificial Sequence: Synthetic oligonucleotide
caccuucggcauaguuugc

SEQ ID NO: 1532529 - RNA, 19 nt, Artificial Sequence
  Description of Artificial Sequence: Synthetic oligonucleotide
agcccuaggcuagggugag

SEQ ID NO: 1532530 - RNA, 19 nt, Artificial Sequence
  Description of Artificial Sequence: Synthetic oligonucleotide
gaagcaacuucagcccugu

SEQ ID NO: 1532531 - RNA, 19 nt, Artificial Sequence
  Description of Artificial Sequence: Synthetic oligonucleotide
ugugugccccuagucccga

SEQ ID NO: 1532532 - RNA, 19 nt, Artificial Sequence
  Description of Artificial Sequence: Synthetic oligonucleotide
cccuuggccaggcagggac

SEQ ID NO: 1532533 - RNA, 19 nt, Artificial Sequence
  Description of Artificial Sequence: Synthetic oligonucleotide
cuauaccuugugcacuugu

SEQ ID NO: 1532534 - RNA, 19 nt, Artificial Sequence
  Description of Artificial Sequence: Synthetic oligonucleotide
gaaggagcgaagggcggaa

SEQ ID NO: 1532535 - RNA, 19 nt, Artificial Sequence
  Description of Artificial Sequence: Synthetic oligonucleotide
uucagggguugagggcuca

SEQ ID NO: 1532536 - RNA, 19 nt, Artificial Sequence
  Description of Artificial Sequence: Synthetic oligonucleotide
uguggagcuggugcauaua

SEQ ID NO: 1532537 - RNA, 19 nt, Artificial Sequence
  Description of Artificial Sequence: Synthetic oligonucleotide
gggauagcuggcagaucgg

SEQ ID NO: 1532538 - RNA, 19 nt, Artificial Sequence
  Description of Artificial Sequence: Synthetic oligonucleotide
uccaggccggguguagcac

SEQ ID NO: 1532539 - RNA, 19 nt, Artificial Sequence
  Description of Artificial Sequence: Synthetic oligonucleotide
aguuugccucccacaguug

SEQ ID NO: 1532540 - RNA, 19 nt, Artificial Sequence
  Description of Artificial Sequence: Synthetic oligonucleotide
caugaaggcucaucucagu

SEQ ID NO: 1532541 - RNA, 19 nt, Artificial Sequence
  Description of Artificial Sequence: Synthetic oligonucleotide
gagcgaagggcggaagcaa

SEQ ID NO: 1532542 - RNA, 19 nt, Artificial Sequence
  Description of Artificial Sequence: Synthetic oligonucleotide
ccuaggcuagggugagucc

SEQ ID NO: 1532543 - RNA, 19 nt, Artificial Sequence
  Description of Artificial Sequence: Synthetic oligonucleotide
uggacgcccugaaggucuc

SEQ ID NO: 1532544 - RNA, 19 nt, Artificial Sequence
  Description of Artificial Sequence: Synthetic oligonucleotide
gggugaguccauuaucccu

SEQ ID NO: 1532545 - RNA, 19 nt, Artificial Sequence
  Description of Artificial Sequence: Synthetic oligonucleotide
gggcggaagcaacuucagc

SEQ ID NO: 1532546 - RNA, 19 nt, Artificial Sequence
  Description of Artificial Sequence: Synthetic oligonucleotide
cauuugcaauaaggcucag

SEQ ID NO: 1532547 - RNA, 19 nt, Artificial Sequence
  Description of Artificial Sequence: Synthetic oligonucleotide
acgguuggcagggcagcug

SEQ ID NO: 1532548 - RNA, 19 nt, Artificial Sequence
  Description of Artificial Sequence: Synthetic oligonucleotide
uccugucauggugcuggga

SEQ ID NO: 1532549 - RNA, 19 nt, Artificial Sequence
  Description of Artificial Sequence: Synthetic oligonucleotide
aggcucagccugggucugc

SEQ ID NO: 1532550 - RNA, 19 nt, Artificial Sequence
  Description of Artificial Sequence: Synthetic oligonucleotide
ggguuucccacccuauucu

SEQ ID NO: 1532551 - RNA, 19 nt, Artificial Sequence
  Description of Artificial Sequence: Synthetic oligonucleotide
ggcaguacugggagugggc

SEQ ID NO: 1532552 - RNA, 19 nt, Artificial Sequence
  Description of Artificial Sequence: Synthetic oligonucleotide
gaccaguuucuagcaccac

SEQ ID NO: 1532553 - RNA, 19 nt, Artificial Sequence
  Description of Artificial Sequence: Synthetic oligonucleotide
ggauaggagcugaauccca

SEQ ID NO: 1532554 - RNA, 19 nt, Artificial Sequence
  Description of Artificial Sequence: Synthetic oligonucleotide
gcguauucugacagcacca

SEQ ID NO: 1532555 - RNA, 19 nt, Artificial Sequence
  Description of Artificial Sequence: Synthetic oligonucleotide
ugucgccuggacgcccuga

SEQ ID NO: 1532556 - RNA, 19 nt, Artificial Sequence
  Description of Artificial Sequence: Synthetic oligonucleotide
acguggggccaggcaacac

SEQ ID NO: 1532557 - RNA, 19 nt, Artificial Sequence
  Description of Artificial Sequence: Synthetic oligonucleotide
aaggcucaucucaguggau

SEQ ID NO: 1532558 - RNA, 19 nt, Artificial Sequence
  Description of Artificial Sequence: Synthetic oligonucleotide
gaugcagggcagagcucuc

SEQ ID NO: 1532559 - RNA, 19 nt, Artificial Sequence
  Description of Artificial Sequence: Synthetic oligonucleotide
ccggggaagggaguguggg

SEQ ID NO: 1532560 - RNA, 19 nt, Artificial Sequence
  Description of Artificial Sequence: Synthetic oligonucleotide
aucccuccauccuccuuua

SEQ ID NO: 1532561 - RNA, 19 nt, Artificial Sequence
  Description of Artificial Sequence: Synthetic oligonucleotide
agagucuugugugccccua

SEQ ID NO: 1532562 - RNA, 19 nt, Artificial Sequence
  Description of Artificial Sequence: Synthetic oligonucleotide
gcggcuaggcuucaggggu

SEQ ID NO: 1532563 - RNA, 19 nt, Artificial Sequence
  Description of Artificial Sequence: Synthetic oligonucleotide
cucaucucaguggaugcgu

SEQ ID NO: 1532564 - RNA, 19 nt, Artificial Sequence
  Description of Artificial Sequence: Synthetic oligonucleotide
cacacacguggggccaggc

SEQ ID NO: 1532565 - RNA, 19 nt, Artificial Sequence
  Description of Artificial Sequence: Synthetic oligonucleotide
gggaguccuggggacgagg

SEQ ID NO: 1532566 - RNA, 19 nt, Artificial Sequence
  Description of Artificial Sequence: Synthetic oligonucleotide
uaggggagugagggaugca

SEQ ID NO: 1532567 - RNA, 19 nt, Artificial Sequence
  Description of Artificial Sequence: Synthetic oligonucleotide
ggggaccaguuucuagcac

SEQ ID NO: 1532568 - RNA, 19 nt, Artificial Sequence
  Description of Artificial Sequence: Synthetic oligonucleotide
uagcggugagaaggagcga

SEQ ID NO: 1532569 - RNA, 19 nt, Artificial Sequence
  Description of Artificial Sequence: Synthetic oligonucleotide
ggcagcuucugugguagga

SEQ ID NO: 1532570 - RNA, 19 nt, Artificial Sequence
  Description of Artificial Sequence: Synthetic oligonucleotide
cccuaggcuagggugaguc

SEQ ID NO: 1532571 - RNA, 19 nt, Artificial Sequence
  Description of Artificial Sequence: Synthetic oligonucleotide
gucgccuggacgcccugaa

SEQ ID NO: 1532572 - RNA, 19 nt, Artificial Sequence
  Description of Artificial Sequence: Synthetic oligonucleotide
cacgguuggcacagguucu

SEQ ID NO: 1532573 - RNA, 19 nt, Artificial Sequence
  Description of Artificial Sequence: Synthetic oligonucleotide
caaagcccuaggcuagggu

SEQ ID NO: 1532574 - RNA, 19 nt, Artificial Sequence
  Description of Artificial Sequence: Synthetic oligonucleotide
gcaauaaggcucaggggcu

SEQ ID NO: 1532575 - RNA, 19 nt, Artificial Sequence
  Description of Artificial Sequence: Synthetic oligonucleotide
gccagcuaccacauuugca

SEQ ID NO: 1532576 - RNA, 19 nt, Artificial Sequence
  Description of Artificial Sequence: Synthetic oligonucleotide
gagcccggccuuggggagc

SEQ ID NO: 1532577 - RNA, 19 nt, Artificial Sequence
  Description of Artificial Sequence: Synthetic oligonucleotide
guauaggguuucccacccu

SEQ ID NO: 1532578 - RNA, 19 nt, Artificial Sequence
  Description of Artificial Sequence: Synthetic oligonucleotide
gugugccccuagucccgag

SEQ ID NO: 1532579 - RNA, 19 nt, Artificial Sequence
  Description of Artificial Sequence: Synthetic oligonucleotide
cucaguggaugcguauucu

SEQ ID NO: 1532580 - RNA, 19 nt, Artificial Sequence
  Description of Artificial Sequence: Synthetic oligonucleotide
gcggugagaaggagcgaag

SEQ ID NO: 1532581 - RNA, 19 nt, Artificial Sequence
  Description of Artificial Sequence: Synthetic oligonucleotide
ccgcucucaucacucuccc

SEQ ID NO: 1532582 - RNA, 19 nt, Artificial Sequence
  Description of Artificial Sequence: Synthetic oligonucleotide
ccguagcgccucuggaagc

SEQ ID NO: 1532583 - RNA, 19 nt, Artificial Sequence
  Description of Artificial Sequence: Synthetic oligonucleotide
ccacccuauucugcugugg

SEQ ID NO: 1532584 - RNA, 19 nt, Artificial Sequence
  Description of Artificial Sequence: Synthetic oligonucleotide
gguguagcacagggauagc

SEQ ID NO: 1532585 - RNA, 19 nt, Artificial Sequence
  Description of Artificial Sequence: Synthetic oligonucleotide
caucucaguggaugcguau

SEQ ID NO: 1532586 - RNA, 19 nt, Artificial Sequence
  Description of Artificial Sequence: Synthetic oligonucleotide
cguagcgccucuggaagcc

SEQ ID NO: 1532587 - RNA, 19 nt, Artificial Sequence
  Description of Artificial Sequence: Synthetic oligonucleotide
caggcucagccugggucug

SEQ ID NO: 1532588 - RNA, 19 nt, Artificial Sequence
  Description of Artificial Sequence: Synthetic oligonucleotide
ggcuaggcuucagggguug

SEQ ID NO: 1532589 - RNA, 19 nt, Artificial Sequence
  Description of Artificial Sequence: Synthetic oligonucleotide
guucaccaccuucggcaua

SEQ ID NO: 1532590 - RNA, 19 nt, Artificial Sequence
  Description of Artificial Sequence: Synthetic oligonucleotide
gacgcccugaaggucucgu

SEQ ID NO: 1532591 - RNA, 19 nt, Artificial Sequence
  Description of Artificial Sequence: Synthetic oligonucleotide
cagggcgguggucucaggu

SEQ ID NO: 1532592 - RNA, 19 nt, Artificial Sequence
  Description of Artificial Sequence: Synthetic oligonucleotide
agcccucuggagacuugca

SEQ ID NO: 1532593 - RNA, 19 nt, Artificial Sequence
  Description of Artificial Sequence: Synthetic oligonucleotide
ccugaaggucucguggaca

SEQ ID NO: 1532594 - RNA, 19 nt, Artificial Sequence
  Description of Artificial Sequence: Synthetic oligonucleotide
acucucccggcggugccau

SEQ ID NO: 1532595 - RNA, 19 nt, Artificial Sequence
  Description of Artificial Sequence: Synthetic oligonucleotide
ggcagaucggggauaaguu

SEQ ID NO: 1532596 - RNA, 19 nt, Artificial Sequence
  Description of Artificial Sequence: Synthetic oligonucleotide
cuggagcauggggacccuc

SEQ ID NO: 1532597 - RNA, 19 nt, Artificial Sequence
  Description of Artificial Sequence: Synthetic oligonucleotide
cccggcggugccauacaug

SEQ ID NO: 1532598 - RNA, 19 nt, Artificial Sequence
  Description of Artificial Sequence: Synthetic oligonucleotide
cugugccaggaucugugau

SEQ ID NO: 1532599 - RNA, 19 nt, Artificial Sequence
  Description of Artificial Sequence: Synthetic oligonucleotide
ucaccaccuucggcauagu

SEQ ID NO: 1532600 - RNA, 19 nt, Artificial Sequence
  Description of Artificial Sequence: Synthetic oligonucleotide
cgaggcuagagucuugugu

SEQ ID NO: 1532601 - RNA, 19 nt, Artificial Sequence
  Description of Artificial Sequence: Synthetic oligonucleotide
cuccacgguuggcacaggu

SEQ ID NO: 1532602 - RNA, 19 nt, Artificial Sequence
  Description of Artificial Sequence: Synthetic oligonucleotide
ccggguguagcacagggau

SEQ ID NO: 1532603 - RNA, 19 nt, Artificial Sequence
  Description of Artificial Sequence: Synthetic oligonucleotide
cccacccuauucugcugug

SEQ ID NO: 1532604 - RNA, 19 nt, Artificial Sequence
  Description of Artificial Sequence: Synthetic oligonucleotide
ccgagcccuccucugggac

SEQ ID NO: 1532605 - RNA, 19 nt, Artificial Sequence
  Description of Artificial Sequence: Synthetic oligonucleotide
cugucgccuggacgcccug

SEQ ID NO: 1532606 - RNA, 19 nt, Artificial Sequence
  Description of Artificial Sequence: Synthetic oligonucleotide
cacguggggccaggcaaca

SEQ ID NO: 1532607 - RNA, 19 nt, Artificial Sequence
  Description of Artificial Sequence: Synthetic oligonucleotide
gccuggacgcccugaaggu

SEQ ID NO: 1532608 - RNA, 19 nt, Artificial Sequence
  Description of Artificial Sequence: Synthetic oligonucleotide
cgcucucaucacucucccg

SEQ ID NO: 1532609 - RNA, 19 nt, Artificial Sequence
  Description of Artificial Sequence: Synthetic oligonucleotide
cccagcaugcaaugucaaa

SEQ ID NO: 1532610 - RNA, 19 nt, Artificial Sequence
  Description of Artificial Sequence: Synthetic oligonucleotide
aggcuagggugaguccauu

SEQ ID NO: 1532611 - RNA, 19 nt, Artificial Sequence
  Description of Artificial Sequence: Synthetic oligonucleotide
ccaggcagggacacacaaa

SEQ ID NO: 1532612 - RNA, 19 nt, Artificial Sequence
  Description of Artificial Sequence: Synthetic oligonucleotide
ccaggccggguguagcaca

SEQ ID NO: 1532613 - RNA, 19 nt, Artificial Sequence
  Description of Artificial Sequence: Synthetic oligonucleotide
ccuggacgcccugaagguc

SEQ ID NO: 1532614 - RNA, 19 nt, Artificial Sequence
  Description of Artificial Sequence: Synthetic oligonucleotide
ggacgcccugaaggucucg

SEQ ID NO: 1532615 - RNA, 19 nt, Artificial Sequence
  Description of Artificial Sequence: Synthetic oligonucleotide
ggcaaacgguuggcagggc

SEQ ID NO: 1532616 - RNA, 19 nt, Artificial Sequence
  Description of Artificial Sequence: Synthetic oligonucleotide
augcaaugucaaagcccua

SEQ ID NO: 1532617 - RNA, 19 nt, Artificial Sequence
  Description of Artificial Sequence: Synthetic oligonucleotide
ccgugcaggugguauaagu

SEQ ID NO: 1532618 - RNA, 19 nt, Artificial Sequence
  Description of Artificial Sequence: Synthetic oligonucleotide
ccuucggcauaguuugccu

SEQ ID NO: 1532619 - RNA, 19 nt, Artificial Sequence
  Description of Artificial Sequence: Synthetic oligonucleotide
cugugguaggaagcccucu

SEQ ID NO: 1532620 - RNA, 19 nt, Artificial Sequence
  Description of Artificial Sequence: Synthetic oligonucleotide
caguguuggcaccucccuu

SEQ ID NO: 1532621 - RNA, 19 nt, Artificial Sequence
  Description of Artificial Sequence: Synthetic oligonucleotide
ggggacgaggcuagagucu

SEQ ID NO: 1532622 - RNA, 19 nt, Artificial Sequence
  Description of Artificial Sequence: Synthetic oligonucleotide
gguccccggcaggaugagc

SEQ ID NO: 1532623 - RNA, 19 nt, Artificial Sequence
  Description of Artificial Sequence: Synthetic oligonucleotide
gggaggauaggagcugaau

SEQ ID NO: 1532624 - RNA, 19 nt, Artificial Sequence
  Description of Artificial Sequence: Synthetic oligonucleotide
ccccuagucccgaggccuc

SEQ ID NO: 1532625 - RNA, 19 nt, Artificial Sequence
  Description of Artificial Sequence: Synthetic oligonucleotide
cagagccggggaagggagu

SEQ ID NO: 1532626 - RNA, 19 nt, Artificial Sequence
  Description of Artificial Sequence: Synthetic oligonucleotide
gccccuagucccgaggccu

SEQ ID NO: 1532627 - RNA, 19 nt, Artificial Sequence
  Description of Artificial Sequence: Synthetic oligonucleotide
ccacacacguggggccagg

SEQ ID NO: 1532628 - RNA, 19 nt, Artificial Sequence
  Description of Artificial Sequence: Synthetic oligonucleotide
gggacgaggcuagagucuu

SEQ ID NO: 1532629 - RNA, 19 nt, Artificial Sequence
  Description of Artificial Sequence: Synthetic oligonucleotide
cccuagucccgaggccucc

SEQ ID NO: 1532630 - RNA, 19 nt, Artificial Sequence
  Description of Artificial Sequence: Synthetic oligonucleotide
ccaugcagggcgguggucu

SEQ ID NO: 1532631 - RNA, 19 nt, Artificial Sequence
  Description of Artificial Sequence: Synthetic oligonucleotide
gcgaagggcggaagcaacu

SEQ ID NO: 1532632 - RNA, 19 nt, Artificial Sequence
  Description of Artificial Sequence: Synthetic oligonucleotide
caccaccuucggcauaguu

SEQ ID NO: 1532633 - RNA, 19 nt, Artificial Sequence
  Description of Artificial Sequence: Synthetic oligonucleotide
cccgugcaggugguauaag

SEQ ID NO: 1532634 - RNA, 19 nt, Artificial Sequence
  Description of Artificial Sequence: Synthetic oligonucleotide
ggguccccggcaggaugag

SEQ ID NO: 1532635 - RNA, 19 nt, Artificial Sequence
  Description of Artificial Sequence: Synthetic oligonucleotide
cgagcccuccucugggaca

SEQ ID NO: 1532636 - RNA, 19 nt, Artificial Sequence
  Description of Artificial Sequence: Synthetic oligonucleotide
cccugucgccuggacgccc

SEQ ID NO: 1532637 - RNA, 19 nt, Artificial Sequence
  Description of Artificial Sequence: Synthetic oligonucleotide
cggcggugccauacaugcc

SEQ ID NO: 1532638 - RNA, 19 nt, Artificial Sequence
  Description of Artificial Sequence: Synthetic oligonucleotide
ggagacuugcaggggugau

SEQ ID NO: 1532639 - RNA, 19 nt, Artificial Sequence
  Description of Artificial Sequence: Synthetic oligonucleotide
gcccugucgccuggacgcc

SEQ ID NO: 1532640 - RNA, 19 nt, Artificial Sequence
  Description of Artificial Sequence: Synthetic oligonucleotide
ggacccucuucugccuugu

SEQ ID NO: 1532641 - RNA, 19 nt, Artificial Sequence
  Description of Artificial Sequence: Synthetic oligonucleotide
cggaagcaacuucagcccu

SEQ ID NO: 1532642 - RNA, 19 nt, Artificial Sequence
  Description of Artificial Sequence: Synthetic oligonucleotide
ccccgugcaggugguauaa

SEQ ID NO: 1532643 - RNA, 19 nt, Artificial Sequence
  Description of Artificial Sequence: Synthetic oligonucleotide
ccuagucccgaggccucca

SEQ ID NO: 1532644 - RNA, 19 nt, Artificial Sequence
  Description of Artificial Sequence: Synthetic oligonucleotide
ggcuggggaccaguuucua

SEQ ID NO: 1532645 - RNA, 19 nt, Artificial Sequence
  Description of Artificial Sequence: Synthetic oligonucleotide
ccugucgccuggacgcccu

SEQ ID NO: 1532646 - RNA, 19 nt, Artificial Sequence
  Description of Artificial Sequence: Synthetic oligonucleotide
cggguguagcacagggaua

SEQ ID NO: 1532647 - RNA, 19 nt, Artificial Sequence
  Description of Artificial Sequence: Synthetic oligonucleotide
cccaugcagggcggugguc

SEQ ID NO: 1532648 - RNA, 19 nt, Artificial Sequence
  Description of Artificial Sequence: Synthetic oligonucleotide
ccaagucuucuugggcuau

SEQ ID NO: 1532649 - RNA, 19 nt, Artificial Sequence
  Description of Artificial Sequence: Synthetic oligonucleotide
cucucccggcggugccaua

SEQ ID NO: 1532650 - RNA, 19 nt, Artificial Sequence
  Description of Artificial Sequence: Synthetic oligonucleotide
cggcauaguuugccuccca

SEQ ID NO: 1532651 - RNA, 19 nt, Artificial Sequence
  Description of Artificial Sequence: Synthetic oligonucleotide
caggugcuccaggccgggu

SEQ ID NO: 1532652 - RNA, 19 nt, Artificial Sequence
  Description of Artificial Sequence: Synthetic oligonucleotide
ccccaugcagggcgguggu

SEQ ID NO: 1532653 - RNA, 19 nt, Artificial Sequence
  Description of Artificial Sequence: Synthetic oligonucleotide
ccggcaggaugagccagcu

SEQ ID NO: 1532654 - RNA, 19 nt, Artificial Sequence
  Description of Artificial Sequence: Synthetic oligonucleotide
gcccuaggcuagggugagu

SEQ ID NO: 1532655 - RNA, 19 nt, Artificial Sequence
  Description of Artificial Sequence: Synthetic oligonucleotide
uuuauuugcaccaaugugg

SEQ ID NO: 1532656 - RNA, 19 nt, Artificial Sequence
  Description of Artificial Sequence: Synthetic oligonucleotide
aaauuuaaauucuagcaac

SEQ ID NO: 1532657 - RNA, 19 nt, Artificial Sequence
  Description of Artificial Sequence: Synthetic oligonucleotide
auuauaauauucuacaguc

SEQ ID NO: 1532658 - RNA, 19 nt, Artificial Sequence
  Description of Artificial Sequence: Synthetic oligonucleotide
auguuuauaguuuuaaagc

SEQ ID NO: 1532659 - RNA, 19 nt, Artificial Sequence
  Description of Artificial Sequence: Synthetic oligonucleotide
aaccagaaaauucuaaucg

SEQ ID NO: 1532660 - RNA, 19 nt, Artificial Sequence
  Description of Artificial Sequence: Synthetic oligonucleotide
cauguuauaauucaguugc

SEQ ID NO: 1532661 - RNA, 19 nt, Artificial Sequence
  Description of Artificial Sequence: Synthetic oligonucleotide
auaaacaugaggccuaugc

SEQ ID NO: 1532662 - RNA, 19 nt, Artificial Sequence
  Description of Artificial Sequence: Synthetic oligonucleotide
aaucggagaagcuugauag

SEQ ID NO: 1532663 - RNA, 19 nt, Artificial Sequence
  Description of Artificial Sequence: Synthetic oligonucleotide
aaagguaugggagucagcc

SEQ ID NO: 1532664 - RNA, 19 nt, Artificial Sequence
  Description of Artificial Sequence: Synthetic oligonucleotide
aaaggaauaccaaaggccc

SEQ ID NO: 1532665 - RNA, 19 nt, Artificial Sequence
  Description of Artificial Sequence: Synthetic oligonucleotide
uauuauaagagaaaccaga

SEQ ID NO: 1532666 - RNA, 19 nt, Artificial Sequence
  Description of Artificial Sequence: Synthetic oligonucleotide
aaauucuaaucggagaagc

SEQ ID NO: 1532667 - RNA, 19 nt, Artificial Sequence
  Description of Artificial Sequence: Synthetic oligonucleotide
ugagauaccaauuuccaag

SEQ ID NO: 1532668 - RNA, 19 nt, Artificial Sequence
  Description of Artificial Sequence: Synthetic oligonucleotide
aagccuaccauuuuguaag

SEQ ID NO: 1532669 - RNA, 19 nt, Artificial Sequence
  Description of Artificial Sequence: Synthetic oligonucleotide
auuuaagaauuccugaguc

SEQ ID NO: 1532670 - RNA, 19 nt, Artificial Sequence
  Description of Artificial Sequence: Synthetic oligonucleotide
aauugagaaaacuucacau

SEQ ID NO: 1532671 - RNA, 19 nt, Artificial Sequence
  Description of Artificial Sequence: Synthetic oligonucleotide
uuuguuaauauuauguuua

SEQ ID NO: 1532672 - RNA, 19 nt, Artificial Sequence
  Description of Artificial Sequence: Synthetic oligonucleotide
ucucuccucauuuaaaugg

SEQ ID NO: 1532673 - RNA, 19 nt, Artificial Sequence
  Description of Artificial Sequence: Synthetic oligonucleotide
gauaacggcacucaguuug

SEQ ID NO: 1532674 - RNA, 19 nt, Artificial Sequence
  Description of Artificial Sequence: Synthetic oligonucleotide
uggaguaucguucagcgcc

SEQ ID NO: 1532675 - RNA, 19 nt, Artificial Sequence
  Description of Artificial Sequence: Synthetic oligonucleotide
uuuugacuaaacaaggcca

SEQ ID NO: 1532676 - RNA, 19 nt, Artificial Sequence
  Description of Artificial Sequence: Synthetic oligonucleotide
uaugcuuauaacaaucugu

SEQ ID NO: 1532677 - RNA, 19 nt, Artificial Sequence
  Description of Artificial Sequence: Synthetic oligonucleotide
uguuuauaguuuuaaagcu

SEQ ID NO: 1532678 - RNA, 19 nt, Artificial Sequence
  Description of Artificial Sequence: Synthetic oligonucleotide
ugaccauuaaaauauauau

SEQ ID NO: 1532679 - RNA, 19 nt, Artificial Sequence
  Description of Artificial Sequence: Synthetic oligonucleotide
aaucgaaaacacugcauuc

SEQ ID NO: 1532680 - RNA, 19 nt, Artificial Sequence
  Description of Artificial Sequence: Synthetic oligonucleotide
agucuaauaacacagcaga

SEQ ID NO: 1532681 - RNA, 19 nt, Artificial Sequence
  Description of Artificial Sequence: Synthetic oligonucleotide
uuauuauaagagaaaccag

SEQ ID NO: 1532682 - RNA, 19 nt, Artificial Sequence
  Description of Artificial Sequence: Synthetic oligonucleotide
aaacagucuaauaacacag

SEQ ID NO: 1532683 - RNA, 19 nt, Artificial Sequence
  Description of Artificial Sequence: Synthetic oligonucleotide
uguaccauguuauaauuca

SEQ ID NO: 1532684 - RNA, 19 nt, Artificial Sequence
  Description of Artificial Sequence: Synthetic oligonucleotide
uguuaguaaacacaaugcu

SEQ ID NO: 1532685 - RNA, 19 nt, Artificial Sequence
  Description of Artificial Sequence: Synthetic oligonucleotide
gauaacacaaacaugggca

SEQ ID NO: 1532686 - RNA, 19 nt, Artificial Sequence
  Description of Artificial Sequence: Synthetic oligonucleotide
caaaaucucagcaccaagg

SEQ ID NO: 1532687 - RNA, 19 nt, Artificial Sequence
  Description of Artificial Sequence: Synthetic oligonucleotide
uuuauuugaacuccugagu

SEQ ID NO: 1532688 - RNA, 19 nt, Artificial Sequence
  Description of Artificial Sequence: Synthetic oligonucleotide
aggccaucaaccuaguuac

SEQ ID NO: 1532689 - RNA, 19 nt, Artificial Sequence
  Description of Artificial Sequence: Synthetic oligonucleotide
uuuaaauucuagcaacuuc

SEQ ID NO: 1532690 - RNA, 19 nt, Artificial Sequence
  Description of Artificial Sequence: Synthetic oligonucleotide
uuaauauuauguuuauagu

SEQ ID NO: 1532691 - RNA, 19 nt, Artificial Sequence
  Description of Artificial Sequence: Synthetic oligonucleotide
uauggggacaaauacauaa

SEQ ID NO: 1532692 - RNA, 19 nt, Artificial Sequence
  Description of Artificial Sequence: Synthetic oligonucleotide
ucuacaguccuaaagugcu

SEQ ID NO: 1532693 - RNA, 19 nt, Artificial Sequence
  Description of Artificial Sequence: Synthetic oligonucleotide
uuggauuauaauauucuac

SEQ ID NO: 1532694 - RNA, 19 nt, Artificial Sequence
  Description of Artificial Sequence: Synthetic oligonucleotide
uuauuugcaccaauguggc

SEQ ID NO: 1532695 - RNA, 19 nt, Artificial Sequence
  Description of Artificial Sequence: Synthetic oligonucleotide
uccaucguccgcaaggugg

SEQ ID NO: 1532696 - RNA, 19 nt, Artificial Sequence
  Description of Artificial Sequence: Synthetic oligonucleotide
auuugcaccaauguggcac

SEQ ID NO: 1532697 - RNA, 19 nt, Artificial Sequence
  Description of Artificial Sequence: Synthetic oligonucleotide
cuguuaguaaacacaaugc

SEQ ID NO: 1532698 - RNA, 19 nt, Artificial Sequence
  Description of Artificial Sequence: Synthetic oligonucleotide
uuauaauauucuacagucc

SEQ ID NO: 1532699 - RNA, 19 nt, Artificial Sequence
  Description of Artificial Sequence: Synthetic oligonucleotide
guuuugacuaaacaaggcc

SEQ ID NO: 1532700 - RNA, 19 nt, Artificial Sequence
  Description of Artificial Sequence: Synthetic oligonucleotide
uauuaauauaaaaugccuu

SEQ ID NO: 1532701 - RNA, 19 nt, Artificial Sequence
  Description of Artificial Sequence: Synthetic oligonucleotide
accagaaaauucuaaucgg

SEQ ID NO: 1532702 - RNA, 19 nt, Artificial Sequence
  Description of Artificial Sequence: Synthetic oligonucleotide
auaauucaguugcaaaguc

SEQ ID NO: 1532703 - RNA, 19 nt, Artificial Sequence
  Description of Artificial Sequence: Synthetic oligonucleotide
uucuaaucggagaagcuug

SEQ ID NO: 1532704 - RNA, 19 nt, Artificial Sequence
  Description of Artificial Sequence: Synthetic oligonucleotide
guaaggauuuauuugcacc

SEQ ID NO: 1532705 - RNA, 19 nt, Artificial Sequence
  Description of Artificial Sequence: Synthetic oligonucleotide
uguaccgcuucacuguugg

SEQ ID NO: 1532706 - RNA, 19 nt, Artificial Sequence
  Description of Artificial Sequence: Synthetic oligonucleotide
uuaacaaggcguuuugacu

SEQ ID NO: 1532707 - RNA, 19 nt, Artificial Sequence
  Description of Artificial Sequence: Synthetic oligonucleotide
aacuucagagaugguaagc

SEQ ID NO: 1532708 - RNA, 19 nt, Artificial Sequence
  Description of Artificial Sequence: Synthetic oligonucleotide
gugaauggcacacauuucc

SEQ ID NO: 1532709 - RNA, 19 nt, Artificial Sequence
  Description of Artificial Sequence: Synthetic oligonucleotide
agguaugggagucagccgg

SEQ ID NO: 1532710 - RNA, 19 nt, Artificial Sequence
  Description of Artificial Sequence: Synthetic oligonucleotide
aaccuaguuacaauuguuc

SEQ ID NO: 1532711 - RNA, 19 nt, Artificial Sequence
  Description of Artificial Sequence: Synthetic oligonucleotide
gauaguuggguaaggaaag

SEQ ID NO: 1532712 - RNA, 19 nt, Artificial Sequence
  Description of Artificial Sequence: Synthetic oligonucleotide
uuugacuaaacaaggccac

SEQ ID NO: 1532713 - RNA, 19 nt, Artificial Sequence
  Description of Artificial Sequence: Synthetic oligonucleotide
uucaguuccaucucacaag

SEQ ID NO: 1532714 - RNA, 19 nt, Artificial Sequence
  Description of Artificial Sequence: Synthetic oligonucleotide
uaaauaucccaugagagua

SEQ ID NO: 1532715 - RNA, 19 nt, Artificial Sequence
  Description of Artificial Sequence: Synthetic oligonucleotide
aaggccaucaaccuaguua

SEQ ID NO: 1532716 - RNA, 19 nt, Artificial Sequence
  Description of Artificial Sequence: Synthetic oligonucleotide
aaaauucuaaucggagaag

SEQ ID NO: 1532717 - RNA, 19 nt, Artificial Sequence
  Description of Artificial Sequence: Synthetic oligonucleotide
ugugaguuuauuugaacuc

SEQ ID NO: 1532718 - RNA, 19 nt, Artificial Sequence
  Description of Artificial Sequence: Synthetic oligonucleotide
uucagauguaccauguuau

SEQ ID NO: 1532719 - RNA, 19 nt, Artificial Sequence
  Description of Artificial Sequence: Synthetic oligonucleotide
uccacgacacggauaacgg

SEQ ID NO: 1532720 - RNA, 19 nt, Artificial Sequence
  Description of Artificial Sequence: Synthetic oligonucleotide
ucaauuccacuugagcucg

SEQ ID NO: 1532721 - RNA, 19 nt, Artificial Sequence
  Description of Artificial Sequence: Synthetic oligonucleotide
agcucgauggacuacauaa

SEQ ID NO: 1532722 - RNA, 19 nt, Artificial Sequence
  Description of Artificial Sequence: Synthetic oligonucleotide
augugaguuuauuugaacu

SEQ ID NO: 1532723 - RNA, 19 nt, Artificial Sequence
  Description of Artificial Sequence: Synthetic oligonucleotide
uacuuuaauggaacuauaa

SEQ ID NO: 1532724 - RNA, 19 nt, Artificial Sequence
  Description of Artificial Sequence: Synthetic oligonucleotide
aguauuacauggaguaucg

SEQ ID NO: 1532725 - RNA, 19 nt, Artificial Sequence
  Description of Artificial Sequence: Synthetic oligonucleotide
uuauaagagaaaccagaaa

SEQ ID NO: 1532726 - RNA, 19 nt, Artificial Sequence
  Description of Artificial Sequence: Synthetic oligonucleotide
ugauaguauuacauggagu

SEQ ID NO: 1532727 - RNA, 19 nt, Artificial Sequence
  Description of Artificial Sequence: Synthetic oligonucleotide
cuaauaacacagcagauaa

SEQ ID NO: 1532728 - RNA, 19 nt, Artificial Sequence
  Description of Artificial Sequence: Synthetic oligonucleotide
ucccaugagaguaauuucu

SEQ ID NO: 1532729 - RNA, 19 nt, Artificial Sequence
  Description of Artificial Sequence: Synthetic oligonucleotide
ucaaccuaguuacaauugu

SEQ ID NO: 1532730 - RNA, 19 nt, Artificial Sequence
  Description of Artificial Sequence: Synthetic oligonucleotide
gaauugagaaaacuucaca

SEQ ID NO: 1532731 - RNA, 19 nt, Artificial Sequence
  Description of Artificial Sequence: Synthetic oligonucleotide
augauuuuaaagcuuguuu

SEQ ID NO: 1532732 - RNA, 19 nt, Artificial Sequence
  Description of Artificial Sequence: Synthetic oligonucleotide
acagucuaauaacacagca

SEQ ID NO: 1532733 - RNA, 19 nt, Artificial Sequence
  Description of Artificial Sequence: Synthetic oligonucleotide
uaacaaggcguuuugacua

SEQ ID NO: 1532734 - RNA, 19 nt, Artificial Sequence
  Description of Artificial Sequence: Synthetic oligonucleotide
gcuguuaguaaacacaaug

SEQ ID NO: 1532735 - RNA, 19 nt, Artificial Sequence
  Description of Artificial Sequence: Synthetic oligonucleotide
acggcacucaguuugucac

SEQ ID NO: 1532736 - RNA, 19 nt, Artificial Sequence
  Description of Artificial Sequence: Synthetic oligonucleotide
aaggcguuuugacuaaaca

SEQ ID NO: 1532737 - RNA, 19 nt, Artificial Sequence
  Description of Artificial Sequence: Synthetic oligonucleotide
ucgauggacuacauaaaca

SEQ ID NO: 1532738 - RNA, 19 nt, Artificial Sequence
  Description of Artificial Sequence: Synthetic oligonucleotide
caauguggcacacaccuag

SEQ ID NO: 1532739 - RNA, 19 nt, Artificial Sequence
  Description of Artificial Sequence: Synthetic oligonucleotide
agcaaugaccauuaaaaua

SEQ ID NO: 1532740 - RNA, 19 nt, Artificial Sequence
  Description of Artificial Sequence: Synthetic oligonucleotide
aacuccugaguuuuaaaua

SEQ ID NO: 1532741 - RNA, 19 nt, Artificial Sequence
  Description of Artificial Sequence: Synthetic oligonucleotide
uucccauacaguaaggauu

SEQ ID NO: 1532742 - RNA, 19 nt, Artificial Sequence
  Description of Artificial Sequence: Synthetic oligonucleotide
ucugcaguucagauguacc

SEQ ID NO: 1532743 - RNA, 19 nt, Artificial Sequence
  Description of Artificial Sequence: Synthetic oligonucleotide
uggacuacauaaacaugag

SEQ ID NO: 1532744 - RNA, 19 nt, Artificial Sequence
  Description of Artificial Sequence: Synthetic oligonucleotide
caaauuuaaauucuagcaa

SEQ ID NO: 1532745 - RNA, 19 nt, Artificial Sequence
  Description of Artificial Sequence: Synthetic oligonucleotide
aagguaugggagucagccg

SEQ ID NO: 1532746 - RNA, 19 nt, Artificial Sequence
  Description of Artificial Sequence: Synthetic oligonucleotide
uguucaauaugugaguuua

SEQ ID NO: 1532747 - RNA, 19 nt, Artificial Sequence
  Description of Artificial Sequence: Synthetic oligonucleotide
auggacuacauaaacauga

SEQ ID NO: 1532748 - RNA, 19 nt, Artificial Sequence
  Description of Artificial Sequence: Synthetic oligonucleotide
agaguuuggauuauaauau

SEQ ID NO: 1532749 - RNA, 19 nt, Artificial Sequence
  Description of Artificial Sequence: Synthetic oligonucleotide
auauauccaaaauaccuua

SEQ ID NO: 1532750 - RNA, 19 nt, Artificial Sequence
  Description of Artificial Sequence: Synthetic oligonucleotide
uuuucagcuuaaagcaaug

SEQ ID NO: 1532751 - RNA, 19 nt, Artificial Sequence
  Description of Artificial Sequence: Synthetic oligonucleotide
agauguaccauguuauaau

SEQ ID NO: 1532752 - RNA, 19 nt, Artificial Sequence
  Description of Artificial Sequence: Synthetic oligonucleotide
uuacauggaguaucguuca

SEQ ID NO: 1532753 - RNA, 19 nt, Artificial Sequence
  Description of Artificial Sequence: Synthetic oligonucleotide
uuccaucucacaagcuacg

SEQ ID NO: 1532754 - RNA, 19 nt, Artificial Sequence
  Description of Artificial Sequence: Synthetic oligonucleotide
ucacaagcuacgauagcug

SEQ ID NO: 1532755 - RNA, 19 nt, Artificial Sequence
  Description of Artificial Sequence: Synthetic oligonucleotide
aagacauuguaccgcuuca

SEQ ID NO: 1532756 - RNA, 19 nt, Artificial Sequence
  Description of Artificial Sequence: Synthetic oligonucleotide
gaugugagauaccaauuuc

SEQ ID NO: 1532757 - RNA, 19 nt, Artificial Sequence
  Description of Artificial Sequence: Synthetic oligonucleotide
aacugaagacgccauuaga

SEQ ID NO: 1532758 - RNA, 19 nt, Artificial Sequence
  Description of Artificial Sequence: Synthetic oligonucleotide
aacaaaccucuuucucuuc

SEQ ID NO: 1532759 - RNA, 19 nt, Artificial Sequence
  Description of Artificial Sequence: Synthetic oligonucleotide
uucaaagccuaauuauuaa

SEQ ID NO: 1532760 - RNA, 19 nt, Artificial Sequence
  Description of Artificial Sequence: Synthetic oligonucleotide
guuggguaaggaaagauca

SEQ ID NO: 1532761 - RNA, 19 nt, Artificial Sequence
  Description of Artificial Sequence: Synthetic oligonucleotide
uaagccuaccauuuuguaa

SEQ ID NO: 1532762 - RNA, 19 nt, Artificial Sequence
  Description of Artificial Sequence: Synthetic oligonucleotide
uggaacuauaaacaugauu

SEQ ID NO: 1532763 - RNA, 19 nt, Artificial Sequence
  Description of Artificial Sequence: Synthetic oligonucleotide
auaccaauuuccaagacau

SEQ ID NO: 1532764 - RNA, 19 nt, Artificial Sequence
  Description of Artificial Sequence: Synthetic oligonucleotide
accuaguuacaauuguucu

SEQ ID NO: 1532765 - RNA, 19 nt, Artificial Sequence
  Description of Artificial Sequence: Synthetic oligonucleotide
agauaccaauuuccaagac

SEQ ID NO: 1532766 - RNA, 19 nt, Artificial Sequence
  Description of Artificial Sequence: Synthetic oligonucleotide
ggauuauaauauucuacag

SEQ ID NO: 1532767 - RNA, 19 nt, Artificial Sequence
  Description of Artificial Sequence: Synthetic oligonucleotide
uaucccaugagaguaauuu

SEQ ID NO: 1532768 - RNA, 19 nt, Artificial Sequence
  Description of Artificial Sequence: Synthetic oligonucleotide
uuggguaaggaaagaucag

SEQ ID NO: 1532769 - RNA, 19 nt, Artificial Sequence
  Description of Artificial Sequence: Synthetic oligonucleotide
uacauaaacaugaggccua

SEQ ID NO: 1532770 - RNA, 19 nt, Artificial Sequence
  Description of Artificial Sequence: Synthetic oligonucleotide
ucaaagccuaauuauuaau

SEQ ID NO: 1532771 - RNA, 19 nt, Artificial Sequence
  Description of Artificial Sequence: Synthetic oligonucleotide
aagccuaauuauuaauaua

SEQ ID NO: 1532772 - RNA, 19 nt, Artificial Sequence
  Description of Artificial Sequence: Synthetic oligonucleotide
uuagauaguuggguaagga

SEQ ID NO: 1532773 - RNA, 19 nt, Artificial Sequence
  Description of Artificial Sequence: Synthetic oligonucleotide
agcaguccaacugaagacg

SEQ ID NO: 1532774 - RNA, 19 nt, Artificial Sequence
  Description of Artificial Sequence: Synthetic oligonucleotide
uagauaguuggguaaggaa

SEQ ID NO: 1532775 - RNA, 19 nt, Artificial Sequence
  Description of Artificial Sequence: Synthetic oligonucleotide
agugcuguuaguaaacaca

SEQ ID NO: 1532776 - RNA, 19 nt, Artificial Sequence
  Description of Artificial Sequence: Synthetic oligonucleotide
uauauccaaaauaccuuau

SEQ ID NO: 1532777 - RNA, 19 nt, Artificial Sequence
  Description of Artificial Sequence: Synthetic oligonucleotide
gagauaccaauuuccaaga

SEQ ID NO: 1532778 - RNA, 19 nt, Artificial Sequence
  Description of Artificial Sequence: Synthetic oligonucleotide
gugaguuuauuugaacucc

SEQ ID NO: 1532779 - RNA, 19 nt, Artificial Sequence
  Description of Artificial Sequence: Synthetic oligonucleotide
gaagcuugauaguauuaca

SEQ ID NO: 1532780 - RNA, 19 nt, Artificial Sequence
  Description of Artificial Sequence: Synthetic oligonucleotide
aauguggcacacaccuagc

SEQ ID NO: 1532781 - RNA, 19 nt, Artificial Sequence
  Description of Artificial Sequence: Synthetic oligonucleotide
cacaagcuacgauagcugc

SEQ ID NO: 1532782 - RNA, 19 nt, Artificial Sequence
  Description of Artificial Sequence: Synthetic oligonucleotide
auuauaagagaaaccagaa

SEQ ID NO: 1532783 - RNA, 19 nt, Artificial Sequence
  Description of Artificial Sequence: Synthetic oligonucleotide
ggaacuauaaacaugauuu

SEQ ID NO: 1532784 - RNA, 19 nt, Artificial Sequence
  Description of Artificial Sequence: Synthetic oligonucleotide
auaccuuauuauaagagaa

SEQ ID NO: 1532785 - RNA, 19 nt, Artificial Sequence
  Description of Artificial Sequence: Synthetic oligonucleotide
ugcuccuuuucugugaaug

SEQ ID NO: 1532786 - RNA, 19 nt, Artificial Sequence
  Description of Artificial Sequence: Synthetic oligonucleotide
ucuaaucggagaagcuuga

SEQ ID NO: 1532787 - RNA, 19 nt, Artificial Sequence
  Description of Artificial Sequence: Synthetic oligonucleotide
uguuauaauucaguugcaa

SEQ ID NO: 1532788 - RNA, 19 nt, Artificial Sequence
  Description of Artificial Sequence: Synthetic oligonucleotide
aaugcuccuuuucugugaa

SEQ ID NO: 1532789 - RNA, 19 nt, Artificial Sequence
  Description of Artificial Sequence: Synthetic oligonucleotide
agcaaucgaaaacacugca

SEQ ID NO: 1532790 - RNA, 19 nt, Artificial Sequence
  Description of Artificial Sequence: Synthetic oligonucleotide
ucccauacaguaaggauuu

SEQ ID NO: 1532791 - RNA, 19 nt, Artificial Sequence
  Description of Artificial Sequence: Synthetic oligonucleotide
auuagauaguuggguaagg

SEQ ID NO: 1532792 - RNA, 19 nt, Artificial Sequence
  Description of Artificial Sequence: Synthetic oligonucleotide
aacacaaacaugggcauuu

SEQ ID NO: 1532793 - RNA, 19 nt, Artificial Sequence
  Description of Artificial Sequence: Synthetic oligonucleotide
guggcacacaccuagcagc

SEQ ID NO: 1532794 - RNA, 19 nt, Artificial Sequence
  Description of Artificial Sequence: Synthetic oligonucleotide
ggcguuuugacuaaacaag

SEQ ID NO: 1532795 - RNA, 19 nt, Artificial Sequence
  Description of Artificial Sequence: Synthetic oligonucleotide
aaaagguaugggagucagc

SEQ ID NO: 1532796 - RNA, 19 nt, Artificial Sequence
  Description of Artificial Sequence: Synthetic oligonucleotide
cucgauggacuacauaaac

SEQ ID NO: 1532797 - RNA, 19 nt, Artificial Sequence
  Description of Artificial Sequence: Synthetic oligonucleotide
uccaagacauuguaccgcu

SEQ ID NO: 1532798 - RNA, 19 nt, Artificial Sequence
  Description of Artificial Sequence: Synthetic oligonucleotide
aauucuaaucggagaagcu

SEQ ID NO: 1532799 - RNA, 19 nt, Artificial Sequence
  Description of Artificial Sequence: Synthetic oligonucleotide
cauuagauaguuggguaag

SEQ ID NO: 1532800 - RNA, 19 nt, Artificial Sequence
  Description of Artificial Sequence: Synthetic oligonucleotide
aggcguuuugacuaaacaa

SEQ ID NO: 1532801 - RNA, 19 nt, Artificial Sequence
  Description of Artificial Sequence: Synthetic oligonucleotide
aagcuugauaguauuacau

SEQ ID NO: 1532802 - RNA, 19 nt, Artificial Sequence
  Description of Artificial Sequence: Synthetic oligonucleotide
aacggcacucaguuuguca

SEQ ID NO: 1532803 - RNA, 19 nt, Artificial Sequence
  Description of Artificial Sequence: Synthetic oligonucleotide
auggaguaucguucagcgc

SEQ ID NO: 1532804 - RNA, 19 nt, Artificial Sequence
  Description of Artificial Sequence: Synthetic oligonucleotide
aguaauuucucuccucauu

SEQ ID NO: 1532805 - RNA, 19 nt, Artificial Sequence
  Description of Artificial Sequence: Synthetic oligonucleotide
agauaguuggguaaggaaa

SEQ ID NO: 1532806 - RNA, 19 nt, Artificial Sequence
  Description of Artificial Sequence: Synthetic oligonucleotide
gacuaaacaaggccaccug

SEQ ID NO: 1532807 - RNA, 19 nt, Artificial Sequence
  Description of Artificial Sequence: Synthetic oligonucleotide
uaaucggagaagcuugaua

SEQ ID NO: 1532808 - RNA, 19 nt, Artificial Sequence
  Description of Artificial Sequence: Synthetic oligonucleotide
uucugaagcccaaaaggua

SEQ ID NO: 1532809 - RNA, 19 nt, Artificial Sequence
  Description of Artificial Sequence: Synthetic oligonucleotide
aucgaaaacacugcauucu

SEQ ID NO: 1532810 - RNA, 19 nt, Artificial Sequence
  Description of Artificial Sequence: Synthetic oligonucleotide
ucacuguuggaauugucua

SEQ ID NO: 1532811 - RNA, 19 nt, Artificial Sequence
  Description of Artificial Sequence: Synthetic oligonucleotide
cuccacgacacggauaacg

SEQ ID NO: 1532812 - RNA, 19 nt, Artificial Sequence
  Description of Artificial Sequence: Synthetic oligonucleotide
acaagcuacgauagcugcc

SEQ ID NO: 1532813 - RNA, 19 nt, Artificial Sequence
  Description of Artificial Sequence: Synthetic oligonucleotide
uauuugaacuccugaguuu

SEQ ID NO: 1532814 - RNA, 19 nt, Artificial Sequence
  Description of Artificial Sequence: Synthetic oligonucleotide
cagcaaucgaaaacacugc

SEQ ID NO: 1532815 - RNA, 19 nt, Artificial Sequence
  Description of Artificial Sequence: Synthetic oligonucleotide
gauggacuacauaaacaug

SEQ ID NO: 1532816 - RNA, 19 nt, Artificial Sequence
  Description of Artificial Sequence: Synthetic oligonucleotide
auauccaaaauaccuuauu

SEQ ID NO: 1532817 - RNA, 19 nt, Artificial Sequence
  Description of Artificial Sequence: Synthetic oligonucleotide
caaaagguaugggagucag

SEQ ID NO: 1532818 - RNA, 19 nt, Artificial Sequence
  Description of Artificial Sequence: Synthetic oligonucleotide
uacgauagcugccuucaau

SEQ ID NO: 1532819 - RNA, 19 nt, Artificial Sequence
  Description of Artificial Sequence: Synthetic oligonucleotide
uggcacacauuucccauac

SEQ ID NO: 1532820 - RNA, 19 nt, Artificial Sequence
  Description of Artificial Sequence: Synthetic oligonucleotide
auguaccauguuauaauuc

SEQ ID NO: 1532821 - RNA, 19 nt, Artificial Sequence
  Description of Artificial Sequence: Synthetic oligonucleotide
ggacuacauaaacaugagg

SEQ ID NO: 1532822 - RNA, 19 nt, Artificial Sequence
  Description of Artificial Sequence: Synthetic oligonucleotide
gacaacuucagagauggua

SEQ ID NO: 1532823 - RNA, 19 nt, Artificial Sequence
  Description of Artificial Sequence: Synthetic oligonucleotide
cacgagugaugugagauac

SEQ ID NO: 1532824 - RNA, 19 nt, Artificial Sequence
  Description of Artificial Sequence: Synthetic oligonucleotide
uacauggaguaucguucag

SEQ ID NO: 1532825 - RNA, 19 nt, Artificial Sequence
  Description of Artificial Sequence: Synthetic oligonucleotide
guaucguucagcgccuggg

SEQ ID NO: 1532826 - RNA, 19 nt, Artificial Sequence
  Description of Artificial Sequence: Synthetic oligonucleotide
agaugguaagccuaccauu

SEQ ID NO: 1532827 - RNA, 19 nt, Artificial Sequence
  Description of Artificial Sequence: Synthetic oligonucleotide
acacaaugcuacaagaaaa

SEQ ID NO: 1532828 - RNA, 19 nt, Artificial Sequence
  Description of Artificial Sequence: Synthetic oligonucleotide
aacaaggcguuuugacuaa

SEQ ID NO: 1532829 - RNA, 19 nt, Artificial Sequence
  Description of Artificial Sequence: Synthetic oligonucleotide
agcuacgauagcugccuuc

SEQ ID NO: 1532830 - RNA, 19 nt, Artificial Sequence
  Description of Artificial Sequence: Synthetic oligonucleotide
cacgacacggauaacggca

SEQ ID NO: 1532831 - RNA, 19 nt, Artificial Sequence
  Description of Artificial Sequence: Synthetic oligonucleotide
caaggugguacccagguaa

SEQ ID NO: 1532832 - RNA, 19 nt, Artificial Sequence
  Description of Artificial Sequence: Synthetic oligonucleotide
uccgcaaggugguacccag

SEQ ID NO: 1532833 - RNA, 19 nt, Artificial Sequence
  Description of Artificial Sequence: Synthetic oligonucleotide
guucagauguaccauguua

SEQ ID NO: 1532834 - RNA, 19 nt, Artificial Sequence
  Description of Artificial Sequence: Synthetic oligonucleotide
uaucguucagcgccuggga

SEQ ID NO: 1532835 - RNA, 19 nt, Artificial Sequence
  Description of Artificial Sequence: Synthetic oligonucleotide
acagcagauaacacaaaca

SEQ ID NO: 1532836 - RNA, 19 nt, Artificial Sequence
  Description of Artificial Sequence: Synthetic oligonucleotide
aguaucguucagcgccugg

SEQ ID NO: 1532837 - RNA, 19 nt, Artificial Sequence
  Description of Artificial Sequence: Synthetic oligonucleotide
agugggaagcaguccaacu

SEQ ID NO: 1532838 - RNA, 19 nt, Artificial Sequence
  Description of Artificial Sequence: Synthetic oligonucleotide
ucucacaagcuacgauagc

SEQ ID NO: 1532839 - RNA, 19 nt, Artificial Sequence
  Description of Artificial Sequence: Synthetic oligonucleotide
aucguucagcgccugggag

SEQ ID NO: 1532840 - RNA, 19 nt, Artificial Sequence
  Description of Artificial Sequence: Synthetic oligonucleotide
cuggacaacaaauuuaaau

SEQ ID NO: 1532841 - RNA, 19 nt, Artificial Sequence
  Description of Artificial Sequence: Synthetic oligonucleotide
auucuaaucggagaagcuu

SEQ ID NO: 1532842 - RNA, 19 nt, Artificial Sequence
  Description of Artificial Sequence: Synthetic oligonucleotide
uugagcucgauggacuaca

SEQ ID NO: 1532843 - RNA, 19 nt, Artificial Sequence
  Description of Artificial Sequence: Synthetic oligonucleotide
ucccaaccaccuuugagaa

SEQ ID NO: 1532844 - RNA, 19 nt, Artificial Sequence
  Description of Artificial Sequence: Synthetic oligonucleotide
gagaguaauuucucuccuc

SEQ ID NO: 1532845 - RNA, 19 nt, Artificial Sequence
  Description of Artificial Sequence: Synthetic oligonucleotide
gacuauggggacaaauaca

SEQ ID NO: 1532846 - RNA, 19 nt, Artificial Sequence
  Description of Artificial Sequence: Synthetic oligonucleotide
caucucacaagcuacgaua

SEQ ID NO: 1532847 - RNA, 19 nt, Artificial Sequence
  Description of Artificial Sequence: Synthetic oligonucleotide
uugacuaaacaaggccacc

SEQ ID NO: 1532848 - RNA, 19 nt, Artificial Sequence
  Description of Artificial Sequence: Synthetic oligonucleotide
ggauuuauuugcaccaaug

SEQ ID NO: 1532849 - RNA, 19 nt, Artificial Sequence
  Description of Artificial Sequence: Synthetic oligonucleotide
gcuugcagcaaucacucug

SEQ ID NO: 1532850 - RNA, 19 nt, Artificial Sequence
  Description of Artificial Sequence: Synthetic oligonucleotide
ggaaagauagucuccugga

SEQ ID NO: 1532851 - RNA, 19 nt, Artificial Sequence
  Description of Artificial Sequence: Synthetic oligonucleotide
cuaguuacaauuguucucu

SEQ ID NO: 1532852 - RNA, 19 nt, Artificial Sequence
  Description of Artificial Sequence: Synthetic oligonucleotide
ugaacuccugaguuuuaaa

SEQ ID NO: 1532853 - RNA, 19 nt, Artificial Sequence
  Description of Artificial Sequence: Synthetic oligonucleotide
agcagauaacacaaacaug

SEQ ID NO: 1532854 - RNA, 19 nt, Artificial Sequence
  Description of Artificial Sequence: Synthetic oligonucleotide
ugggcauuuuguuaauauu

SEQ ID NO: 1532855 - RNA, 19 nt, Artificial Sequence
  Description of Artificial Sequence: Synthetic oligonucleotide
ucggagaagcuugauagua

SEQ ID NO: 1532856 - RNA, 19 nt, Artificial Sequence
  Description of Artificial Sequence: Synthetic oligonucleotide
cuucaggccgcuuccuccc

SEQ ID NO: 1532857 - RNA, 19 nt, Artificial Sequence
  Description of Artificial Sequence: Synthetic oligonucleotide
agcuuucaagaacuggaaa

SEQ ID NO: 1532858 - RNA, 19 nt, Artificial Sequence
  Description of Artificial Sequence: Synthetic oligonucleotide
guaccauguuauaauucag

SEQ ID NO: 1532859 - RNA, 19 nt, Artificial Sequence
  Description of Artificial Sequence: Synthetic oligonucleotide
aaauaucccaugagaguaa

SEQ ID NO: 1532860 - RNA, 19 nt, Artificial Sequence
  Description of Artificial Sequence: Synthetic oligonucleotide
gcguuuugacuaaacaagg

SEQ ID NO: 1532861 - RNA, 19 nt, Artificial Sequence
  Description of Artificial Sequence: Synthetic oligonucleotide
aguccaacugaagacgcca

SEQ ID NO: 1532862 - RNA, 19 nt, Artificial Sequence
  Description of Artificial Sequence: Synthetic oligonucleotide
ucguucagcgccugggagu

SEQ ID NO: 1532863 - RNA, 19 nt, Artificial Sequence
  Description of Artificial Sequence: Synthetic oligonucleotide
aggaaagaucagcaaucga

SEQ ID NO: 1532864 - RNA, 19 nt, Artificial Sequence
  Description of Artificial Sequence: Synthetic oligonucleotide
aggauuuauuugcaccaau

SEQ ID NO: 1532865 - RNA, 19 nt, Artificial Sequence
  Description of Artificial Sequence: Synthetic oligonucleotide
ugucuacuguaaaucccaa

SEQ ID NO: 1532866 - RNA, 19 nt, Artificial Sequence
  Description of Artificial Sequence: Synthetic oligonucleotide
uaccgcuucacuguuggaa

SEQ ID NO: 1532867 - RNA, 19 nt, Artificial Sequence
  Description of Artificial Sequence: Synthetic oligonucleotide
uaguuacaauuguucucug

SEQ ID NO: 1532868 - RNA, 19 nt, Artificial Sequence
  Description of Artificial Sequence: Synthetic oligonucleotide
aucguccgcaaggugguac

SEQ ID NO: 1532869 - RNA, 19 nt, Artificial Sequence
  Description of Artificial Sequence: Synthetic oligonucleotide
augaggccuaugcuuauaa

SEQ ID NO: 1532870 - RNA, 19 nt, Artificial Sequence
  Description of Artificial Sequence: Synthetic oligonucleotide
ggugguacccagguaagag

SEQ ID NO: 1532871 - RNA, 19 nt, Artificial Sequence
  Description of Artificial Sequence: Synthetic oligonucleotide
ucugugaauggcacacauu

SEQ ID NO: 1532872 - RNA, 19 nt, Artificial Sequence
  Description of Artificial Sequence: Synthetic oligonucleotide
caaggcguuuugacuaaac

SEQ ID NO: 1532873 - RNA, 19 nt, Artificial Sequence
  Description of Artificial Sequence: Synthetic oligonucleotide
aucggagaagcuugauagu

SEQ ID NO: 1532874 - RNA, 19 nt, Artificial Sequence
  Description of Artificial Sequence: Synthetic oligonucleotide
uugaacuccugaguuuuaa

SEQ ID NO: 1532875 - RNA, 19 nt, Artificial Sequence
  Description of Artificial Sequence: Synthetic oligonucleotide
acacugcauucugaagccc

SEQ ID NO: 1532876 - RNA, 19 nt, Artificial Sequence
  Description of Artificial Sequence: Synthetic oligonucleotide
cagcagauaacacaaacau

SEQ ID NO: 1532877 - RNA, 19 nt, Artificial Sequence
  Description of Artificial Sequence: Synthetic oligonucleotide
ccuaguuacaauuguucuc

SEQ ID NO: 1532878 - RNA, 19 nt, Artificial Sequence
  Description of Artificial Sequence: Synthetic oligonucleotide
ucguccgcaaggugguacc

SEQ ID NO: 1532879 - RNA, 19 nt, Artificial Sequence
  Description of Artificial Sequence: Synthetic oligonucleotide
auaguauuacauggaguau

SEQ ID NO: 1532880 - RNA, 19 nt, Artificial Sequence
  Description of Artificial Sequence: Synthetic oligonucleotide
agcaaucacucugcaguuc

SEQ ID NO: 1532881 - RNA, 19 nt, Artificial Sequence
  Description of Artificial Sequence: Synthetic oligonucleotide
cuguaaaucccaaccaccu

SEQ ID NO: 1532882 - RNA, 19 nt, Artificial Sequence
  Description of Artificial Sequence: Synthetic oligonucleotide
gguaagaguucagaagcug

SEQ ID NO: 1532883 - RNA, 19 nt, Artificial Sequence
  Description of Artificial Sequence: Synthetic oligonucleotide
acgacacggauaacggcac

SEQ ID NO: 1532884 - RNA, 19 nt, Artificial Sequence
  Description of Artificial Sequence: Synthetic oligonucleotide
cuacauaaacaugaggccu

SEQ ID NO: 1532885 - RNA, 19 nt, Artificial Sequence
  Description of Artificial Sequence: Synthetic oligonucleotide
cauuguaccgcuucacugu

SEQ ID NO: 1532886 - RNA, 19 nt, Artificial Sequence
  Description of Artificial Sequence: Synthetic oligonucleotide
ugcuguuaguaaacacaau

SEQ ID NO: 1532887 - RNA, 19 nt, Artificial Sequence
  Description of Artificial Sequence: Synthetic oligonucleotide
auuguaccgcuucacuguu

SEQ ID NO: 1532888 - RNA, 19 nt, Artificial Sequence
  Description of Artificial Sequence: Synthetic oligonucleotide
aagacgccauuagauaguu

SEQ ID NO: 1532889 - RNA, 19 nt, Artificial Sequence
  Description of Artificial Sequence: Synthetic oligonucleotide
gugagauaccaauuuccaa

SEQ ID NO: 1532890 - RNA, 19 nt, Artificial Sequence
  Description of Artificial Sequence: Synthetic oligonucleotide
cuacaguccuaaagugcug

SEQ ID NO: 1532891 - RNA, 19 nt, Artificial Sequence
  Description of Artificial Sequence: Synthetic oligonucleotide
gagaugguaagccuaccau

SEQ ID NO: 1532892 - RNA, 19 nt, Artificial Sequence
  Description of Artificial Sequence: Synthetic oligonucleotide
caguccaacugaagacgcc

SEQ ID NO: 1532893 - RNA, 19 nt, Artificial Sequence
  Description of Artificial Sequence: Synthetic oligonucleotide
gugcuguuaguaaacacaa

SEQ ID NO: 1532894 - RNA, 19 nt, Artificial Sequence
  Description of Artificial Sequence: Synthetic oligonucleotide
auaguuggguaaggaaaga

SEQ ID NO: 1532895 - RNA, 19 nt, Artificial Sequence
  Description of Artificial Sequence: Synthetic oligonucleotide
uuguaccgcuucacuguug

SEQ ID NO: 1532896 - RNA, 19 nt, Artificial Sequence
  Description of Artificial Sequence: Synthetic oligonucleotide
cguuuugacuaaacaaggc

SEQ ID NO: 1532897 - RNA, 19 nt, Artificial Sequence
  Description of Artificial Sequence: Synthetic oligonucleotide
agugucuguucaauaugug

SEQ ID NO: 1532898 - RNA, 19 nt, Artificial Sequence
  Description of Artificial Sequence: Synthetic oligonucleotide
acgagugaugugagauacc

SEQ ID NO: 1532899 - RNA, 19 nt, Artificial Sequence
  Description of Artificial Sequence: Synthetic oligonucleotide
acgccauuagauaguuggg

SEQ ID NO: 1532900 - RNA, 19 nt, Artificial Sequence
  Description of Artificial Sequence: Synthetic oligonucleotide
cacggauaacggcacucag

SEQ ID NO: 1532901 - RNA, 19 nt, Artificial Sequence
  Description of Artificial Sequence: Synthetic oligonucleotide
caaucgaaaacacugcauu

SEQ ID NO: 1532902 - RNA, 19 nt, Artificial Sequence
  Description of Artificial Sequence: Synthetic oligonucleotide
auaauauucuacaguccua

SEQ ID NO: 1532903 - RNA, 19 nt, Artificial Sequence
  Description of Artificial Sequence: Synthetic oligonucleotide
gacacggauaacggcacuc

SEQ ID NO: 1532904 - RNA, 19 nt, Artificial Sequence
  Description of Artificial Sequence: Synthetic oligonucleotide
uugcagcaaucacucugca

SEQ ID NO: 1532905 - RNA, 19 nt, Artificial Sequence
  Description of Artificial Sequence: Synthetic oligonucleotide
uuccaucguccgcaaggug

SEQ ID NO: 1532906 - RNA, 19 nt, Artificial Sequence
  Description of Artificial Sequence: Synthetic oligonucleotide
cacuaacacuuuguucugc

SEQ ID NO: 1532907 - RNA, 19 nt, Artificial Sequence
  Description of Artificial Sequence: Synthetic oligonucleotide
aauuccacuugagcucgau

SEQ ID NO: 1532908 - RNA, 19 nt, Artificial Sequence
  Description of Artificial Sequence: Synthetic oligonucleotide
cucacaagcuacgauagcu

SEQ ID NO: 1532909 - RNA, 19 nt, Artificial Sequence
  Description of Artificial Sequence: Synthetic oligonucleotide
aguucagauguaccauguu

SEQ ID NO: 1532910 - RNA, 19 nt, Artificial Sequence
  Description of Artificial Sequence: Synthetic oligonucleotide
caccaauguggcacacacc

SEQ ID NO: 1532911 - RNA, 19 nt, Artificial Sequence
  Description of Artificial Sequence: Synthetic oligonucleotide
cagauguaccauguuauaa

SEQ ID NO: 1532912 - RNA, 19 nt, Artificial Sequence
  Description of Artificial Sequence: Synthetic oligonucleotide
acacggauaacggcacuca

SEQ ID NO: 1532913 - RNA, 19 nt, Artificial Sequence
  Description of Artificial Sequence: Synthetic oligonucleotide
gcaacuuccccaggaagag

SEQ ID NO: 1532914 - RNA, 19 nt, Artificial Sequence
  Description of Artificial Sequence: Synthetic oligonucleotide
acacgagugaugugagaua

SEQ ID NO: 1532915 - RNA, 19 nt, Artificial Sequence
  Description of Artificial Sequence: Synthetic oligonucleotide
acggauaacggcacucagu

SEQ ID NO: 1532916 - RNA, 19 nt, Artificial Sequence
  Description of Artificial Sequence: Synthetic oligonucleotide
caucaaccuaguuacaauu

SEQ ID NO: 1532917 - RNA, 19 nt, Artificial Sequence
  Description of Artificial Sequence: Synthetic oligonucleotide
agccuaccauuuuguaaga

SEQ ID NO: 1532918 - RNA, 19 nt, Artificial Sequence
  Description of Artificial Sequence: Synthetic oligonucleotide
ggaagaguuuggauuauaa

SEQ ID NO: 1532919 - RNA, 19 nt, Artificial Sequence
  Description of Artificial Sequence: Synthetic oligonucleotide
cacacaccuagcagcuuuc

SEQ ID NO: 1532920 - RNA, 19 nt, Artificial Sequence
  Description of Artificial Sequence: Synthetic oligonucleotide
cugaagacuauggggacaa

SEQ ID NO: 1532921 - RNA, 19 nt, Artificial Sequence
  Description of Artificial Sequence: Synthetic oligonucleotide
gagaagcuugauaguauua

SEQ ID NO: 1532922 - RNA, 19 nt, Artificial Sequence
  Description of Artificial Sequence: Synthetic oligonucleotide
uaacacaaacaugggcauu

SEQ ID NO: 1532923 - RNA, 19 nt, Artificial Sequence
  Description of Artificial Sequence: Synthetic oligonucleotide
acccagguaagaguucaga

SEQ ID NO: 1532924 - RNA, 19 nt, Artificial Sequence
  Description of Artificial Sequence: Synthetic oligonucleotide
gaagacgccauuagauagu

SEQ ID NO: 1532925 - RNA, 19 nt, Artificial Sequence
  Description of Artificial Sequence: Synthetic oligonucleotide
auaacggcacucaguuugu

SEQ ID NO: 1532926 - RNA, 19 nt, Artificial Sequence
  Description of Artificial Sequence: Synthetic oligonucleotide
gagugggaagcaguccaac

SEQ ID NO: 1532927 - RNA, 19 nt, Artificial Sequence
  Description of Artificial Sequence: Synthetic oligonucleotide
cuugagcucgauggacuac

SEQ ID NO: 1532928 - RNA, 19 nt, Artificial Sequence
  Description of Artificial Sequence: Synthetic oligonucleotide
ccuaaagugcuguuaguaa

SEQ ID NO: 1532929 - RNA, 19 nt, Artificial Sequence
  Description of Artificial Sequence: Synthetic oligonucleotide
cuucagagaugguaagccu

SEQ ID NO: 1532930 - RNA, 19 nt, Artificial Sequence
  Description of Artificial Sequence: Synthetic oligonucleotide
gccauuagauaguugggua

SEQ ID NO: 1532931 - RNA, 19 nt, Artificial Sequence
  Description of Artificial Sequence: Synthetic oligonucleotide
gcuacgauagcugccuuca

SEQ ID NO: 1532932 - RNA, 19 nt, Artificial Sequence
  Description of Artificial Sequence: Synthetic oligonucleotide
gguaugggagucagccggg

SEQ ID NO: 1532933 - RNA, 19 nt, Artificial Sequence
  Description of Artificial Sequence: Synthetic oligonucleotide
ugacaacuucagagauggu

SEQ ID NO: 1532934 - RNA, 19 nt, Artificial Sequence
  Description of Artificial Sequence: Synthetic oligonucleotide
cccaugagaguaauuucuc

SEQ ID NO: 1532935 - RNA, 19 nt, Artificial Sequence
  Description of Artificial Sequence: Synthetic oligonucleotide
auagucuccuggacaacaa

SEQ ID NO: 1532936 - RNA, 19 nt, Artificial Sequence
  Description of Artificial Sequence: Synthetic oligonucleotide
gcaguccaacugaagacgc

SEQ ID NO: 1532937 - RNA, 19 nt, Artificial Sequence
  Description of Artificial Sequence: Synthetic oligonucleotide
caaugaccauuaaaauaua

SEQ ID NO: 1532938 - RNA, 19 nt, Artificial Sequence
  Description of Artificial Sequence: Synthetic oligonucleotide
caagcuacgauagcugccu

SEQ ID NO: 1532939 - RNA, 19 nt, Artificial Sequence
  Description of Artificial Sequence: Synthetic oligonucleotide
aagcuacgauagcugccuu

SEQ ID NO: 1532940 - RNA, 19 nt, Artificial Sequence
  Description of Artificial Sequence: Synthetic oligonucleotide
gugguacccagguaagagu

SEQ ID NO: 1532941 - RNA, 19 nt, Artificial Sequence
  Description of Artificial Sequence: Synthetic oligonucleotide
caguucagauguaccaugu

SEQ ID NO: 1532942 - RNA, 19 nt, Artificial Sequence
  Description of Artificial Sequence: Synthetic oligonucleotide
ugagaacagcuugcagcaa

SEQ ID NO: 1532943 - RNA, 19 nt, Artificial Sequence
  Description of Artificial Sequence: Synthetic oligonucleotide
uucaggccgcuuccucccu

SEQ ID NO: 1532944 - RNA, 19 nt, Artificial Sequence
  Description of Artificial Sequence: Synthetic oligonucleotide
guaugggagucagccgggc

SEQ ID NO: 1532945 - RNA, 19 nt, Artificial Sequence
  Description of Artificial Sequence: Synthetic oligonucleotide
cacacgagugaugugagau

SEQ ID NO: 1532946 - RNA, 19 nt, Artificial Sequence
  Description of Artificial Sequence: Synthetic oligonucleotide
ggagucagccgggccagcg

SEQ ID NO: 1532947 - RNA, 19 nt, Artificial Sequence
  Description of Artificial Sequence: Synthetic oligonucleotide
cuauggggacaaauacaua

SEQ ID NO: 1532948 - RNA, 19 nt, Artificial Sequence
  Description of Artificial Sequence: Synthetic oligonucleotide
ccacgacacggauaacggc

SEQ ID NO: 1532949 - RNA, 19 nt, Artificial Sequence
  Description of Artificial Sequence: Synthetic oligonucleotide
caaccuaguuacaauuguu

SEQ ID NO: 1532950 - RNA, 19 nt, Artificial Sequence
  Description of Artificial Sequence: Synthetic oligonucleotide
ucccuccacgacacggaua

SEQ ID NO: 1532951 - RNA, 19 nt, Artificial Sequence
  Description of Artificial Sequence: Synthetic oligonucleotide
gaguaucguucagcgccug

SEQ ID NO: 1532952 - RNA, 19 nt, Artificial Sequence
  Description of Artificial Sequence: Synthetic oligonucleotide
gguaagccuaccauuuugu

SEQ ID NO: 1532953 - RNA, 19 nt, Artificial Sequence
  Description of Artificial Sequence: Synthetic oligonucleotide
gccaucaaccuaguuacaa

SEQ ID NO: 1532954 - RNA, 19 nt, Artificial Sequence
  Description of Artificial Sequence: Synthetic oligonucleotide
uaacggcacucaguuuguc

SEQ ID NO: 1532955 - RNA, 19 nt, Artificial Sequence
  Description of Artificial Sequence: Synthetic oligonucleotide
ccugucagggaaaaggaau

SEQ ID NO: 1532956 - RNA, 19 nt, Artificial Sequence
  Description of Artificial Sequence: Synthetic oligonucleotide
cgagugaugugagauacca

SEQ ID NO: 1532957 - RNA, 19 nt, Artificial Sequence
  Description of Artificial Sequence: Synthetic oligonucleotide
guccuaaagugcuguuagu

SEQ ID NO: 1532958 - RNA, 19 nt, Artificial Sequence
  Description of Artificial Sequence: Synthetic oligonucleotide
cuguucaauaugugaguuu

SEQ ID NO: 1532959 - RNA, 19 nt, Artificial Sequence
  Description of Artificial Sequence: Synthetic oligonucleotide
acaaggcguuuugacuaaa

SEQ ID NO: 1532960 - RNA, 19 nt, Artificial Sequence
  Description of Artificial Sequence: Synthetic oligonucleotide
agacgccauuagauaguug

SEQ ID NO: 1532961 - RNA, 19 nt, Artificial Sequence
  Description of Artificial Sequence: Synthetic oligonucleotide
caguccuaaagugcuguua

SEQ ID NO: 1532962 - RNA, 19 nt, Artificial Sequence
  Description of Artificial Sequence: Synthetic oligonucleotide
augcuccuuuucugugaau

SEQ ID NO: 1532963 - RNA, 19 nt, Artificial Sequence
  Description of Artificial Sequence: Synthetic oligonucleotide
cuuccaucguccgcaaggu

SEQ ID NO: 1532964 - RNA, 19 nt, Artificial Sequence
  Description of Artificial Sequence: Synthetic oligonucleotide
guauuacauggaguaucgu

SEQ ID NO: 1532965 - RNA, 19 nt, Artificial Sequence
  Description of Artificial Sequence: Synthetic oligonucleotide
guaccgcuucacuguugga

SEQ ID NO: 1532966 - RNA, 19 nt, Artificial Sequence
  Description of Artificial Sequence: Synthetic oligonucleotide
ccaacugaagacgccauua

SEQ ID NO: 1532967 - RNA, 19 nt, Artificial Sequence
  Description of Artificial Sequence: Synthetic oligonucleotide
ccuuuaaccagggagguuu

SEQ ID NO: 1532968 - RNA, 19 nt, Artificial Sequence
  Description of Artificial Sequence: Synthetic oligonucleotide
cuacgauagcugccuucaa

SEQ ID NO: 1532969 - RNA, 19 nt, Artificial Sequence
  Description of Artificial Sequence: Synthetic oligonucleotide
guucaauaugugaguuuau

SEQ ID NO: 1532970 - RNA, 19 nt, Artificial Sequence
  Description of Artificial Sequence: Synthetic oligonucleotide
gcucgauggacuacauaaa

SEQ ID NO: 1532971 - RNA, 19 nt, Artificial Sequence
  Description of Artificial Sequence: Synthetic oligonucleotide
ccgcaaggugguacccagg

SEQ ID NO: 1532972 - RNA, 19 nt, Artificial Sequence
  Description of Artificial Sequence: Synthetic oligonucleotide
cccaaccaccuuugagaac

SEQ ID NO: 1532973 - RNA, 19 nt, Artificial Sequence
  Description of Artificial Sequence: Synthetic oligonucleotide
ggcacacauuucccauaca

SEQ ID NO: 1532974 - RNA, 19 nt, Artificial Sequence
  Description of Artificial Sequence: Synthetic oligonucleotide
caugaggccuaugcuuaua

SEQ ID NO: 1532975 - RNA, 19 nt, Artificial Sequence
  Description of Artificial Sequence: Synthetic oligonucleotide
ccaucaaccuaguuacaau

SEQ ID NO: 1532976 - RNA, 19 nt, Artificial Sequence
  Description of Artificial Sequence: Synthetic oligonucleotide
cuaaucggagaagcuugau

SEQ ID NO: 1532977 - RNA, 19 nt, Artificial Sequence
  Description of Artificial Sequence: Synthetic oligonucleotide
ggaguaucguucagcgccu

SEQ ID NO: 1532978 - RNA, 19 nt, Artificial Sequence
  Description of Artificial Sequence: Synthetic oligonucleotide
ccucccuccacgacacgga

SEQ ID NO: 1532979 - RNA, 19 nt, Artificial Sequence
  Description of Artificial Sequence: Synthetic oligonucleotide
ccccuaaaacagucuaaua

SEQ ID NO: 1532980 - RNA, 19 nt, Artificial Sequence
  Description of Artificial Sequence: Synthetic oligonucleotide
cggauaacggcacucaguu

SEQ ID NO: 1532981 - RNA, 19 nt, Artificial Sequence
  Description of Artificial Sequence: Synthetic oligonucleotide
caacuuccccaggaagagu

SEQ ID NO: 1532982 - RNA, 19 nt, Artificial Sequence
  Description of Artificial Sequence: Synthetic oligonucleotide
ggauaacggcacucaguuu

SEQ ID NO: 1532983 - RNA, 19 nt, Artificial Sequence
  Description of Artificial Sequence: Synthetic oligonucleotide
ccaauguggcacacaccua

SEQ ID NO: 1532984 - RNA, 19 nt, Artificial Sequence
  Description of Artificial Sequence: Synthetic oligonucleotide
ggccaucaaccuaguuaca

SEQ ID NO: 1532985 - RNA, 19 nt, Artificial Sequence
  Description of Artificial Sequence: Synthetic oligonucleotide
cucccuccacgacacggau

SEQ ID NO: 1532986 - RNA, 19 nt, Artificial Sequence
  Description of Artificial Sequence: Synthetic oligonucleotide
acucugcaguucagaugua

SEQ ID NO: 1532987 - RNA, 19 nt, Artificial Sequence
  Description of Artificial Sequence: Synthetic oligonucleotide
ccaucucacaagcuacgau

SEQ ID NO: 1532988 - RNA, 19 nt, Artificial Sequence
  Description of Artificial Sequence: Synthetic oligonucleotide
cguccgcaaggugguaccc

SEQ ID NO: 1532989 - RNA, 19 nt, Artificial Sequence
  Description of Artificial Sequence: Synthetic oligonucleotide
cggagaagcuugauaguau

SEQ ID NO: 1532990 - RNA, 19 nt, Artificial Sequence
  Description of Artificial Sequence: Synthetic oligonucleotide
cguucagcgccugggagua

SEQ ID NO: 1532991 - RNA, 19 nt, Artificial Sequence
  Description of Artificial Sequence: Synthetic oligonucleotide
caucguccgcaagguggua

SEQ ID NO: 1532992 - RNA, 19 nt, Artificial Sequence
  Description of Artificial Sequence: Synthetic oligonucleotide
gcgccugggaguagccugu

SEQ ID NO: 1532993 - RNA, 19 nt, Artificial Sequence
  Description of Artificial Sequence: Synthetic oligonucleotide
gccuuuaaccagggagguu

SEQ ID NO: 1532994 - RNA, 19 nt, Artificial Sequence
  Description of Artificial Sequence: Synthetic oligonucleotide
ccgcuucacuguuggaauu

SEQ ID NO: 1532995 - RNA, 19 nt, Artificial Sequence
  Description of Artificial Sequence: Synthetic oligonucleotide
cgccugggaguagccugug

SEQ ID NO: 1532996 - RNA, 19 nt, Artificial Sequence
  Description of Artificial Sequence: Synthetic oligonucleotide
aauaaggcaaaccauauca

SEQ ID NO: 1532997 - RNA, 19 nt, Artificial Sequence
  Description of Artificial Sequence: Synthetic oligonucleotide
auacauauccuuuauacac

SEQ ID NO: 1532998 - RNA, 19 nt, Artificial Sequence
  Description of Artificial Sequence: Synthetic oligonucleotide
acaauuuacacuuacguag

SEQ ID NO: 1532999 - RNA, 19 nt, Artificial Sequence
  Description of Artificial Sequence: Synthetic oligonucleotide
ugugaagucuccaauaagg

SEQ ID NO: 1533000 - RNA, 19 nt, Artificial Sequence
  Description of Artificial Sequence: Synthetic oligonucleotide
aaccauaucacuugguauc

SEQ ID NO: 1533001 - RNA, 19 nt, Artificial Sequence
  Description of Artificial Sequence: Synthetic oligonucleotide
acaucacagauauaggugc

SEQ ID NO: 1533002 - RNA, 19 nt, Artificial Sequence
  Description of Artificial Sequence: Synthetic oligonucleotide
uuuacacuuacguagacuc

SEQ ID NO: 1533003 - RNA, 19 nt, Artificial Sequence
  Description of Artificial Sequence: Synthetic oligonucleotide
uuuucuauauugauugaug

SEQ ID NO: 1533004 - RNA, 19 nt, Artificial Sequence
  Description of Artificial Sequence: Synthetic oligonucleotide
caacaaauugucuauuucc

SEQ ID NO: 1533005 - RNA, 19 nt, Artificial Sequence
  Description of Artificial Sequence: Synthetic oligonucleotide
gacuuauuaaucuugccac

SEQ ID NO: 1533006 - RNA, 19 nt, Artificial Sequence
  Description of Artificial Sequence: Synthetic oligonucleotide
aaaacgacacugcacuguc

SEQ ID NO: 1533007 - RNA, 19 nt, Artificial Sequence
  Description of Artificial Sequence: Synthetic oligonucleotide
aacgacacugcacugucgg

SEQ ID NO: 1533008 - RNA, 19 nt, Artificial Sequence
  Description of Artificial Sequence: Synthetic oligonucleotide
ucagaaagauuaaauagaa

SEQ ID NO: 1533009 - RNA, 19 nt, Artificial Sequence
  Description of Artificial Sequence: Synthetic oligonucleotide
uguauuaggagaaucgaau

SEQ ID NO: 1533010 - RNA, 19 nt, Artificial Sequence
  Description of Artificial Sequence: Synthetic oligonucleotide
aguacuaacaguuguguga

SEQ ID NO: 1533011 - RNA, 19 nt, Artificial Sequence
  Description of Artificial Sequence: Synthetic oligonucleotide
uggucaaccauccaguugu

SEQ ID NO: 1533012 - RNA, 19 nt, Artificial Sequence
  Description of Artificial Sequence: Synthetic oligonucleotide
aaaugguucugauaccgug

SEQ ID NO: 1533013 - RNA, 19 nt, Artificial Sequence
  Description of Artificial Sequence: Synthetic oligonucleotide
guagagcacaaccagaacc

SEQ ID NO: 1533014 - RNA, 19 nt, Artificial Sequence
  Description of Artificial Sequence: Synthetic oligonucleotide
gaaaugcuaagacugcuug

SEQ ID NO: 1533015 - RNA, 19 nt, Artificial Sequence
  Description of Artificial Sequence: Synthetic oligonucleotide
ugaugcaucuuucuuguca

SEQ ID NO: 1533016 - RNA, 19 nt, Artificial Sequence
  Description of Artificial Sequence: Synthetic oligonucleotide
acaaauugucuauuuccac

SEQ ID NO: 1533017 - RNA, 19 nt, Artificial Sequence
  Description of Artificial Sequence: Synthetic oligonucleotide
acgaagauuuccuugggag

SEQ ID NO: 1533018 - RNA, 19 nt, Artificial Sequence
  Description of Artificial Sequence: Synthetic oligonucleotide
acuuacguagacuccuacc

SEQ ID NO: 1533019 - RNA, 19 nt, Artificial Sequence
  Description of Artificial Sequence: Synthetic oligonucleotide
aguuguauuaggagaaucg

SEQ ID NO: 1533020 - RNA, 19 nt, Artificial Sequence
  Description of Artificial Sequence: Synthetic oligonucleotide
ugacaucacagauauaggu

SEQ ID NO: 1533021 - RNA, 19 nt, Artificial Sequence
  Description of Artificial Sequence: Synthetic oligonucleotide
ugacucggucuuuaaaugg

SEQ ID NO: 1533022 - RNA, 19 nt, Artificial Sequence
  Description of Artificial Sequence: Synthetic oligonucleotide
aaaccauaucacuugguau

SEQ ID NO: 1533023 - RNA, 19 nt, Artificial Sequence
  Description of Artificial Sequence: Synthetic oligonucleotide
uugacaucacagauauagg

SEQ ID NO: 1533024 - RNA, 19 nt, Artificial Sequence
  Description of Artificial Sequence: Synthetic oligonucleotide
agaguggucuaacugugcg

SEQ ID NO: 1533025 - RNA, 19 nt, Artificial Sequence
  Description of Artificial Sequence: Synthetic oligonucleotide
aguauguaccuccagggcu

SEQ ID NO: 1533026 - RNA, 19 nt, Artificial Sequence
  Description of Artificial Sequence: Synthetic oligonucleotide
gagucaaggccacacgugg

SEQ ID NO: 1533027 - RNA, 19 nt, Artificial Sequence
  Description of Artificial Sequence: Synthetic oligonucleotide
uucuauauugauugaugca

SEQ ID NO: 1533028 - RNA, 19 nt, Artificial Sequence
  Description of Artificial Sequence: Synthetic oligonucleotide
uucaggucagaggacaugg

SEQ ID NO: 1533029 - RNA, 19 nt, Artificial Sequence
  Description of Artificial Sequence: Synthetic oligonucleotide
aaguacuaacaguugugug

SEQ ID NO: 1533030 - RNA, 19 nt, Artificial Sequence
  Description of Artificial Sequence: Synthetic oligonucleotide
uggaaguacuaacaguugu

SEQ ID NO: 1533031 - RNA, 19 nt, Artificial Sequence
  Description of Artificial Sequence: Synthetic oligonucleotide
cuugggaguauguaccucc

SEQ ID NO: 1533032 - RNA, 19 nt, Artificial Sequence
  Description of Artificial Sequence: Synthetic oligonucleotide
agauauaggugccauugug

SEQ ID NO: 1533033 - RNA, 19 nt, Artificial Sequence
  Description of Artificial Sequence: Synthetic oligonucleotide
uucaccacgaagauuuccu

SEQ ID NO: 1533034 - RNA, 19 nt, Artificial Sequence
  Description of Artificial Sequence: Synthetic oligonucleotide
aacugugcguauaugacug

SEQ ID NO: 1533035 - RNA, 19 nt, Artificial Sequence
  Description of Artificial Sequence: Synthetic oligonucleotide
agccuaauguguccgggcc

SEQ ID NO: 1533036 - RNA, 19 nt, Artificial Sequence
  Description of Artificial Sequence: Synthetic oligonucleotide
uaagauauguuuggggucu

SEQ ID NO: 1533037 - RNA, 19 nt, Artificial Sequence
  Description of Artificial Sequence: Synthetic oligonucleotide
cuaacugugcguauaugac

SEQ ID NO: 1533038 - RNA, 19 nt, Artificial Sequence
  Description of Artificial Sequence: Synthetic oligonucleotide
uuaagauauguuugggguc

SEQ ID NO: 1533039 - RNA, 19 nt, Artificial Sequence
  Description of Artificial Sequence: Synthetic oligonucleotide
ugugugaagucuccaauaa

SEQ ID NO: 1533040 - RNA, 19 nt, Artificial Sequence
  Description of Artificial Sequence: Synthetic oligonucleotide
aacaguugugugaagucuc

SEQ ID NO: 1533041 - RNA, 19 nt, Artificial Sequence
  Description of Artificial Sequence: Synthetic oligonucleotide
uccgacuuauuaaucuugc

SEQ ID NO: 1533042 - RNA, 19 nt, Artificial Sequence
  Description of Artificial Sequence: Synthetic oligonucleotide
uuauuaaucuugccacugu

SEQ ID NO: 1533043 - RNA, 19 nt, Artificial Sequence
  Description of Artificial Sequence: Synthetic oligonucleotide
aaaugcuaagacugcuuga

SEQ ID NO: 1533044 - RNA, 19 nt, Artificial Sequence
  Description of Artificial Sequence: Synthetic oligonucleotide
uggauaguccccaauguau

SEQ ID NO: 1533045 - RNA, 19 nt, Artificial Sequence
  Description of Artificial Sequence: Synthetic oligonucleotide
uguuggaaguacuaacagu

SEQ ID NO: 1533046 - RNA, 19 nt, Artificial Sequence
  Description of Artificial Sequence: Synthetic oligonucleotide
auaucacuugguaucaggg

SEQ ID NO: 1533047 - RNA, 19 nt, Artificial Sequence
  Description of Artificial Sequence: Synthetic oligonucleotide
uuguauuaggagaaucgaa

SEQ ID NO: 1533048 - RNA, 19 nt, Artificial Sequence
  Description of Artificial Sequence: Synthetic oligonucleotide
acaacaagaaaugcuaaga

SEQ ID NO: 1533049 - RNA, 19 nt, Artificial Sequence
  Description of Artificial Sequence: Synthetic oligonucleotide
auacaccacagauuccgac

SEQ ID NO: 1533050 - RNA, 19 nt, Artificial Sequence
  Description of Artificial Sequence: Synthetic oligonucleotide
uuaucuguagccaggccuc

SEQ ID NO: 1533051 - RNA, 19 nt, Artificial Sequence
  Description of Artificial Sequence: Synthetic oligonucleotide
uuccgacuuauuaaucuug

SEQ ID NO: 1533052 - RNA, 19 nt, Artificial Sequence
  Description of Artificial Sequence: Synthetic oligonucleotide
agcccuuaggugaaaaggc

SEQ ID NO: 1533053 - RNA, 19 nt, Artificial Sequence
  Description of Artificial Sequence: Synthetic oligonucleotide
ugguggauaguccccaaug

SEQ ID NO: 1533054 - RNA, 19 nt, Artificial Sequence
  Description of Artificial Sequence: Synthetic oligonucleotide
uucugauaccgugagagac

SEQ ID NO: 1533055 - RNA, 19 nt, Artificial Sequence
  Description of Artificial Sequence: Synthetic oligonucleotide
auugauugaugcaucuuuc

SEQ ID NO: 1533056 - RNA, 19 nt, Artificial Sequence
  Description of Artificial Sequence: Synthetic oligonucleotide
cuuaagauauguuuggggu

SEQ ID NO: 1533057 - RNA, 19 nt, Artificial Sequence
  Description of Artificial Sequence: Synthetic oligonucleotide
cuuacguagacuccuacca

SEQ ID NO: 1533058 - RNA, 19 nt, Artificial Sequence
  Description of Artificial Sequence: Synthetic oligonucleotide
accacguggagccuaaugu

SEQ ID NO: 1533059 - RNA, 19 nt, Artificial Sequence
  Description of Artificial Sequence: Synthetic oligonucleotide
uuggaaguacuaacaguug

SEQ ID NO: 1533060 - RNA, 19 nt, Artificial Sequence
  Description of Artificial Sequence: Synthetic oligonucleotide
gcuuaagauauguuugggg

SEQ ID NO: 1533061 - RNA, 19 nt, Artificial Sequence
  Description of Artificial Sequence: Synthetic oligonucleotide
uccaguuuggauugguuuc

SEQ ID NO: 1533062 - RNA, 19 nt, Artificial Sequence
  Description of Artificial Sequence: Synthetic oligonucleotide
auguuuggggucuucucuc

SEQ ID NO: 1533063 - RNA, 19 nt, Artificial Sequence
  Description of Artificial Sequence: Synthetic oligonucleotide
auauaggugccauugugaa

SEQ ID NO: 1533064 - RNA, 19 nt, Artificial Sequence
  Description of Artificial Sequence: Synthetic oligonucleotide
cuuauuaaucuugccacug

SEQ ID NO: 1533065 - RNA, 19 nt, Artificial Sequence
  Description of Artificial Sequence: Synthetic oligonucleotide
aggaccacggcaguaacgg

SEQ ID NO: 1533066 - RNA, 19 nt, Artificial Sequence
  Description of Artificial Sequence: Synthetic oligonucleotide
auaaggcaaaccauaucac

SEQ ID NO: 1533067 - RNA, 19 nt, Artificial Sequence
  Description of Artificial Sequence: Synthetic oligonucleotide
uccaugcguauacaugugc

SEQ ID NO: 1533068 - RNA, 19 nt, Artificial Sequence
  Description of Artificial Sequence: Synthetic oligonucleotide
cuauauugauugaugcauc

SEQ ID NO: 1533069 - RNA, 19 nt, Artificial Sequence
  Description of Artificial Sequence: Synthetic oligonucleotide
uugauugaugcaucuuucu

SEQ ID NO: 1533070 - RNA, 19 nt, Artificial Sequence
  Description of Artificial Sequence: Synthetic oligonucleotide
aacuuuccaauuagaaaug

SEQ ID NO: 1533071 - RNA, 19 nt, Artificial Sequence
  Description of Artificial Sequence: Synthetic oligonucleotide
ugugcguauaugacugggc

SEQ ID NO: 1533072 - RNA, 19 nt, Artificial Sequence
  Description of Artificial Sequence: Synthetic oligonucleotide
acuaacaguugugugaagu

SEQ ID NO: 1533073 - RNA, 19 nt, Artificial Sequence
  Description of Artificial Sequence: Synthetic oligonucleotide
aggucugccaucuggacgu

SEQ ID NO: 1533074 - RNA, 19 nt, Artificial Sequence
  Description of Artificial Sequence: Synthetic oligonucleotide
gauaguccccaauguauac

SEQ ID NO: 1533075 - RNA, 19 nt, Artificial Sequence
  Description of Artificial Sequence: Synthetic oligonucleotide
ucaaccauccaguuguauu

SEQ ID NO: 1533076 - RNA, 19 nt, Artificial Sequence
  Description of Artificial Sequence: Synthetic oligonucleotide
acuuauuaaucuugccacu

SEQ ID NO: 1533077 - RNA, 19 nt, Artificial Sequence
  Description of Artificial Sequence: Synthetic oligonucleotide
gauauaggugccauuguga

SEQ ID NO: 1533078 - RNA, 19 nt, Artificial Sequence
  Description of Artificial Sequence: Synthetic oligonucleotide
aaugugcacgucagcuucc

SEQ ID NO: 1533079 - RNA, 19 nt, Artificial Sequence
  Description of Artificial Sequence: Synthetic oligonucleotide
cuaacaguugugugaaguc

SEQ ID NO: 1533080 - RNA, 19 nt, Artificial Sequence
  Description of Artificial Sequence: Synthetic oligonucleotide
gauuccgacuuauuaaucu

SEQ ID NO: 1533081 - RNA, 19 nt, Artificial Sequence
  Description of Artificial Sequence: Synthetic oligonucleotide
ucgagucaaggccacacgu

SEQ ID NO: 1533082 - RNA, 19 nt, Artificial Sequence
  Description of Artificial Sequence: Synthetic oligonucleotide
gaguauguaccuccagggc

SEQ ID NO: 1533083 - RNA, 19 nt, Artificial Sequence
  Description of Artificial Sequence: Synthetic oligonucleotide
aaugguucugauaccguga

SEQ ID NO: 1533084 - RNA, 19 nt, Artificial Sequence
  Description of Artificial Sequence: Synthetic oligonucleotide
gugcguauaugacugggcc

SEQ ID NO: 1533085 - RNA, 19 nt, Artificial Sequence
  Description of Artificial Sequence: Synthetic oligonucleotide
ugcguauaugacugggccc

SEQ ID NO: 1533086 - RNA, 19 nt, Artificial Sequence
  Description of Artificial Sequence: Synthetic oligonucleotide
caauguauacuuguccuug

SEQ ID NO: 1533087 - RNA, 19 nt, Artificial Sequence
  Description of Artificial Sequence: Synthetic oligonucleotide
ucggucuuuaaauggugga

SEQ ID NO: 1533088 - RNA, 19 nt, Artificial Sequence
  Description of Artificial Sequence: Synthetic oligonucleotide
acuccuaccauuucuucau

SEQ ID NO: 1533089 - RNA, 19 nt, Artificial Sequence
  Description of Artificial Sequence: Synthetic oligonucleotide
caaucagagccaaggcucc

SEQ ID NO: 1533090 - RNA, 19 nt, Artificial Sequence
  Description of Artificial Sequence: Synthetic oligonucleotide
uguuaucuguagccaggcc

SEQ ID NO: 1533091 - RNA, 19 nt, Artificial Sequence
  Description of Artificial Sequence: Synthetic oligonucleotide
gucuguuggaaguacuaac

SEQ ID NO: 1533092 - RNA, 19 nt, Artificial Sequence
  Description of Artificial Sequence: Synthetic oligonucleotide
gugacucggucuuuaaaug

SEQ ID NO: 1533093 - RNA, 19 nt, Artificial Sequence
  Description of Artificial Sequence: Synthetic oligonucleotide
acaguugugugaagucucc

SEQ ID NO: 1533094 - RNA, 19 nt, Artificial Sequence
  Description of Artificial Sequence: Synthetic oligonucleotide
guuaucuguagccaggccu

SEQ ID NO: 1533095 - RNA, 19 nt, Artificial Sequence
  Description of Artificial Sequence: Synthetic oligonucleotide
ugcacgucagcuucccuug

SEQ ID NO: 1533096 - RNA, 19 nt, Artificial Sequence
  Description of Artificial Sequence: Synthetic oligonucleotide
gguuaugggcauuuucugc

SEQ ID NO: 1533097 - RNA, 19 nt, Artificial Sequence
  Description of Artificial Sequence: Synthetic oligonucleotide
ugucuauuuccaccacgug

SEQ ID NO: 1533098 - RNA, 19 nt, Artificial Sequence
  Description of Artificial Sequence: Synthetic oligonucleotide
aggugguguaaaaugguuc

SEQ ID NO: 1533099 - RNA, 19 nt, Artificial Sequence
  Description of Artificial Sequence: Synthetic oligonucleotide
ucccuugugucccauucac

SEQ ID NO: 1533100 - RNA, 19 nt, Artificial Sequence
  Description of Artificial Sequence: Synthetic oligonucleotide
gacuccuaccauuucuuca

SEQ ID NO: 1533101 - RNA, 19 nt, Artificial Sequence
  Description of Artificial Sequence: Synthetic oligonucleotide
uaccgugagagacucacuu

SEQ ID NO: 1533102 - RNA, 19 nt, Artificial Sequence
  Description of Artificial Sequence: Synthetic oligonucleotide
uugugugaagucuccaaua

SEQ ID NO: 1533103 - RNA, 19 nt, Artificial Sequence
  Description of Artificial Sequence: Synthetic oligonucleotide
uuacguagacuccuaccau

SEQ ID NO: 1533104 - RNA, 19 nt, Artificial Sequence
  Description of Artificial Sequence: Synthetic oligonucleotide
ugcguauacaugugcuugu

SEQ ID NO: 1533105 - RNA, 19 nt, Artificial Sequence
  Description of Artificial Sequence: Synthetic oligonucleotide
aguugugugaagucuccaa

SEQ ID NO: 1533106 - RNA, 19 nt, Artificial Sequence
  Description of Artificial Sequence: Synthetic oligonucleotide
cuugcucgagucaaggcca

SEQ ID NO: 1533107 - RNA, 19 nt, Artificial Sequence
  Description of Artificial Sequence: Synthetic oligonucleotide
uuaugggcauuuucugcac

SEQ ID NO: 1533108 - RNA, 19 nt, Artificial Sequence
  Description of Artificial Sequence: Synthetic oligonucleotide
cuccguucggccugggucc

SEQ ID NO: 1533109 - RNA, 19 nt, Artificial Sequence
  Description of Artificial Sequence: Synthetic oligonucleotide
accaacaaauugucuauuu

SEQ ID NO: 1533110 - RNA, 19 nt, Artificial Sequence
  Description of Artificial Sequence: Synthetic oligonucleotide
uuccaugcguauacaugug

SEQ ID NO: 1533111 - RNA, 19 nt, Artificial Sequence
  Description of Artificial Sequence: Synthetic oligonucleotide
aaggaccacggcaguaacg

SEQ ID NO: 1533112 - RNA, 19 nt, Artificial Sequence
  Description of Artificial Sequence: Synthetic oligonucleotide
gucaacagcccgagcaucg

SEQ ID NO: 1533113 - RNA, 19 nt, Artificial Sequence
  Description of Artificial Sequence: Synthetic oligonucleotide
guauguaccuccagggcug

SEQ ID NO: 1533114 - RNA, 19 nt, Artificial Sequence
  Description of Artificial Sequence: Synthetic oligonucleotide
uauacaugugcuuguccuu

SEQ ID NO: 1533115 - RNA, 19 nt, Artificial Sequence
  Description of Artificial Sequence: Synthetic oligonucleotide
acugugcguauaugacugg

SEQ ID NO: 1533116 - RNA, 19 nt, Artificial Sequence
  Description of Artificial Sequence: Synthetic oligonucleotide
auuccgacuuauuaaucuu

SEQ ID NO: 1533117 - RNA, 19 nt, Artificial Sequence
  Description of Artificial Sequence: Synthetic oligonucleotide
ccuaaucccguuucgagug

SEQ ID NO: 1533118 - RNA, 19 nt, Artificial Sequence
  Description of Artificial Sequence: Synthetic oligonucleotide
uacguagacuccuaccauu

SEQ ID NO: 1533119 - RNA, 19 nt, Artificial Sequence
  Description of Artificial Sequence: Synthetic oligonucleotide
uucgaguguuuccuccugu

SEQ ID NO: 1533120 - RNA, 19 nt, Artificial Sequence
  Description of Artificial Sequence: Synthetic oligonucleotide
uugggaguauguaccucca

SEQ ID NO: 1533121 - RNA, 19 nt, Artificial Sequence
  Description of Artificial Sequence: Synthetic oligonucleotide
ugugucccauucaccacga

SEQ ID NO: 1533122 - RNA, 19 nt, Artificial Sequence
  Description of Artificial Sequence: Synthetic oligonucleotide
gagccuaauguguccgggc

SEQ ID NO: 1533123 - RNA, 19 nt, Artificial Sequence
  Description of Artificial Sequence: Synthetic oligonucleotide
agauuccgacuuauuaauc

SEQ ID NO: 1533124 - RNA, 19 nt, Artificial Sequence
  Description of Artificial Sequence: Synthetic oligonucleotide
gaccacggcaguaacggug

SEQ ID NO: 1533125 - RNA, 19 nt, Artificial Sequence
  Description of Artificial Sequence: Synthetic oligonucleotide
aaacgacacugcacugucg

SEQ ID NO: 1533126 - RNA, 19 nt, Artificial Sequence
  Description of Artificial Sequence: Synthetic oligonucleotide
ccuccuguagagcacaacc

SEQ ID NO: 1533127 - RNA, 19 nt, Artificial Sequence
  Description of Artificial Sequence: Synthetic oligonucleotide
uggagccuaauguguccgg

SEQ ID NO: 1533128 - RNA, 19 nt, Artificial Sequence
  Description of Artificial Sequence: Synthetic oligonucleotide
ccggaugucagcauacacc

SEQ ID NO: 1533129 - RNA, 19 nt, Artificial Sequence
  Description of Artificial Sequence: Synthetic oligonucleotide
gaaguacuaacaguugugu

SEQ ID NO: 1533130 - RNA, 19 nt, Artificial Sequence
  Description of Artificial Sequence: Synthetic oligonucleotide
gagcaucgcggccagcacc

SEQ ID NO: 1533131 - RNA, 19 nt, Artificial Sequence
  Description of Artificial Sequence: Synthetic oligonucleotide
ggugaaaaggccacgucug

SEQ ID NO: 1533132 - RNA, 19 nt, Artificial Sequence
  Description of Artificial Sequence: Synthetic oligonucleotide
cucgagucaaggccacacg

SEQ ID NO: 1533133 - RNA, 19 nt, Artificial Sequence
  Description of Artificial Sequence: Synthetic oligonucleotide
uaggugaaaaggccacguc

SEQ ID NO: 1533134 - RNA, 19 nt, Artificial Sequence
  Description of Artificial Sequence: Synthetic oligonucleotide
uucccuugugucccauuca

SEQ ID NO: 1533135 - RNA, 19 nt, Artificial Sequence
  Description of Artificial Sequence: Synthetic oligonucleotide
cugcuugagcccuuaggug

SEQ ID NO: 1533136 - RNA, 19 nt, Artificial Sequence
  Description of Artificial Sequence: Synthetic oligonucleotide
aaugguggauaguccccaa

SEQ ID NO: 1533137 - RNA, 19 nt, Artificial Sequence
  Description of Artificial Sequence: Synthetic oligonucleotide
ggaaguacuaacaguugug

SEQ ID NO: 1533138 - RNA, 19 nt, Artificial Sequence
  Description of Artificial Sequence: Synthetic oligonucleotide
ugcacugucggugccgucu

SEQ ID NO: 1533139 - RNA, 19 nt, Artificial Sequence
  Description of Artificial Sequence: Synthetic oligonucleotide
cugugcguauaugacuggg

SEQ ID NO: 1533140 - RNA, 19 nt, Artificial Sequence
  Description of Artificial Sequence: Synthetic oligonucleotide
aucgcggccagcaccgacc

SEQ ID NO: 1533141 - RNA, 19 nt, Artificial Sequence
  Description of Artificial Sequence: Synthetic oligonucleotide
gacgugaucucacuguuau

SEQ ID NO: 1533142 - RNA, 19 nt, Artificial Sequence
  Description of Artificial Sequence: Synthetic oligonucleotide
aguggucuaacugugcgua

SEQ ID NO: 1533143 - RNA, 19 nt, Artificial Sequence
  Description of Artificial Sequence: Synthetic oligonucleotide
accauaucacuugguauca

SEQ ID NO: 1533144 - RNA, 19 nt, Artificial Sequence
  Description of Artificial Sequence: Synthetic oligonucleotide
guggucaaccauccaguug

SEQ ID NO: 1533145 - RNA, 19 nt, Artificial Sequence
  Description of Artificial Sequence: Synthetic oligonucleotide
cacagauuccgacuuauua

SEQ ID NO: 1533146 - RNA, 19 nt, Artificial Sequence
  Description of Artificial Sequence: Synthetic oligonucleotide
guacuaacaguugugugaa

SEQ ID NO: 1533147 - RNA, 19 nt, Artificial Sequence
  Description of Artificial Sequence: Synthetic oligonucleotide
guggagccuaauguguccg

SEQ ID NO: 1533148 - RNA, 19 nt, Artificial Sequence
  Description of Artificial Sequence: Synthetic oligonucleotide
ccggacaacaauaucagga

SEQ ID NO: 1533149 - RNA, 19 nt, Artificial Sequence
  Description of Artificial Sequence: Synthetic oligonucleotide
guagacuccuaccauuucu

SEQ ID NO: 1533150 - RNA, 19 nt, Artificial Sequence
  Description of Artificial Sequence: Synthetic oligonucleotide
agcauacaccacagauucc

SEQ ID NO: 1533151 - RNA, 19 nt, Artificial Sequence
  Description of Artificial Sequence: Synthetic oligonucleotide
cucagaaugcacaguugca

SEQ ID NO: 1533152 - RNA, 19 nt, Artificial Sequence
  Description of Artificial Sequence: Synthetic oligonucleotide
ugggcccuaaucccguuuc

SEQ ID NO: 1533153 - RNA, 19 nt, Artificial Sequence
  Description of Artificial Sequence: Synthetic oligonucleotide
agaaucgaaugugcacguc

SEQ ID NO: 1533154 - RNA, 19 nt, Artificial Sequence
  Description of Artificial Sequence: Synthetic oligonucleotide
acgucagcuucccuugugu

SEQ ID NO: 1533155 - RNA, 19 nt, Artificial Sequence
  Description of Artificial Sequence: Synthetic oligonucleotide
ccgugagagacucacuucc

SEQ ID NO: 1533156 - RNA, 19 nt, Artificial Sequence
  Description of Artificial Sequence: Synthetic oligonucleotide
augugcacgucagcuuccc

SEQ ID NO: 1533157 - RNA, 19 nt, Artificial Sequence
  Description of Artificial Sequence: Synthetic oligonucleotide
uucuggcugucaacagccc

SEQ ID NO: 1533158 - RNA, 19 nt, Artificial Sequence
  Description of Artificial Sequence: Synthetic oligonucleotide
uguggucaaccauccaguu

SEQ ID NO: 1533159 - RNA, 19 nt, Artificial Sequence
  Description of Artificial Sequence: Synthetic oligonucleotide
uccuugugaguaguggaaa

SEQ ID NO: 1533160 - RNA, 19 nt, Artificial Sequence
  Description of Artificial Sequence: Synthetic oligonucleotide
caguuguauuaggagaauc

SEQ ID NO: 1533161 - RNA, 19 nt, Artificial Sequence
  Description of Artificial Sequence: Synthetic oligonucleotide
cuauuuccaccacguggag

SEQ ID NO: 1533162 - RNA, 19 nt, Artificial Sequence
  Description of Artificial Sequence: Synthetic oligonucleotide
aagauuuccuugggaguau

SEQ ID NO: 1533163 - RNA, 19 nt, Artificial Sequence
  Description of Artificial Sequence: Synthetic oligonucleotide
ggugguguaaaaugguucu

SEQ ID NO: 1533164 - RNA, 19 nt, Artificial Sequence
  Description of Artificial Sequence: Synthetic oligonucleotide
ugggcauuuucugcacaag

SEQ ID NO: 1533165 - RNA, 19 nt, Artificial Sequence
  Description of Artificial Sequence: Synthetic oligonucleotide
aucccguuucgaguguuuc

SEQ ID NO: 1533166 - RNA, 19 nt, Artificial Sequence
  Description of Artificial Sequence: Synthetic oligonucleotide
ugauguccgccagaguggu

SEQ ID NO: 1533167 - RNA, 19 nt, Artificial Sequence
  Description of Artificial Sequence: Synthetic oligonucleotide
gcucgcuggcuucagaccc

SEQ ID NO: 1533168 - RNA, 19 nt, Artificial Sequence
  Description of Artificial Sequence: Synthetic oligonucleotide
aucagggauguuucugaaa

SEQ ID NO: 1533169 - RNA, 19 nt, Artificial Sequence
  Description of Artificial Sequence: Synthetic oligonucleotide
caacagcccgagcaucgcg

SEQ ID NO: 1533170 - RNA, 19 nt, Artificial Sequence
  Description of Artificial Sequence: Synthetic oligonucleotide
ugguaucagggauguuucu

SEQ ID NO: 1533171 - RNA, 19 nt, Artificial Sequence
  Description of Artificial Sequence: Synthetic oligonucleotide
gugguuaugggcauuuucu

SEQ ID NO: 1533172 - RNA, 19 nt, Artificial Sequence
  Description of Artificial Sequence: Synthetic oligonucleotide
ccaacaaauugucuauuuc

SEQ ID NO: 1533173 - RNA, 19 nt, Artificial Sequence
  Description of Artificial Sequence: Synthetic oligonucleotide
guguaaaaugguucugaua

SEQ ID NO: 1533174 - RNA, 19 nt, Artificial Sequence
  Description of Artificial Sequence: Synthetic oligonucleotide
uccacgccacugcuccccg

SEQ ID NO: 1533175 - RNA, 19 nt, Artificial Sequence
  Description of Artificial Sequence: Synthetic oligonucleotide
uccgggccggacaacaaua

SEQ ID NO: 1533176 - RNA, 19 nt, Artificial Sequence
  Description of Artificial Sequence: Synthetic oligonucleotide
ccuuaggugaaaaggccac

SEQ ID NO: 1533177 - RNA, 19 nt, Artificial Sequence
  Description of Artificial Sequence: Synthetic oligonucleotide
acguggagccuaauguguc

SEQ ID NO: 1533178 - RNA, 19 nt, Artificial Sequence
  Description of Artificial Sequence: Synthetic oligonucleotide
gauauguuuggggucuucu

SEQ ID NO: 1533179 - RNA, 19 nt, Artificial Sequence
  Description of Artificial Sequence: Synthetic oligonucleotide
ugcacaguugcaggaaaua

SEQ ID NO: 1533180 - RNA, 19 nt, Artificial Sequence
  Description of Artificial Sequence: Synthetic oligonucleotide
cggacaacaauaucaggag

SEQ ID NO: 1533181 - RNA, 19 nt, Artificial Sequence
  Description of Artificial Sequence: Synthetic oligonucleotide
agcgcgaggacagcuccac

SEQ ID NO: 1533182 - RNA, 19 nt, Artificial Sequence
  Description of Artificial Sequence: Synthetic oligonucleotide
aagucuccaauaaggcaaa

SEQ ID NO: 1533183 - RNA, 19 nt, Artificial Sequence
  Description of Artificial Sequence: Synthetic oligonucleotide
cacuuacguagacuccuac

SEQ ID NO: 1533184 - RNA, 19 nt, Artificial Sequence
  Description of Artificial Sequence: Synthetic oligonucleotide
cagagccaaggcuccgacg

SEQ ID NO: 1533185 - RNA, 19 nt, Artificial Sequence
  Description of Artificial Sequence: Synthetic oligonucleotide
ucgaguguuuccuccugua

SEQ ID NO: 1533186 - RNA, 19 nt, Artificial Sequence
  Description of Artificial Sequence: Synthetic oligonucleotide
gagaaucgaaugugcacgu

SEQ ID NO: 1533187 - RNA, 19 nt, Artificial Sequence
  Description of Artificial Sequence: Synthetic oligonucleotide
ucaacagcccgagcaucgc

SEQ ID NO: 1533188 - RNA, 19 nt, Artificial Sequence
  Description of Artificial Sequence: Synthetic oligonucleotide
aggagacuguggucaacca

SEQ ID NO: 1533189 - RNA, 19 nt, Artificial Sequence
  Description of Artificial Sequence: Synthetic oligonucleotide
cuggcugucaacagcccga

SEQ ID NO: 1533190 - RNA, 19 nt, Artificial Sequence
  Description of Artificial Sequence: Synthetic oligonucleotide
auauugauugaugcaucuu

SEQ ID NO: 1533191 - RNA, 19 nt, Artificial Sequence
  Description of Artificial Sequence: Synthetic oligonucleotide
ccccaauguauacuugucc

SEQ ID NO: 1533192 - RNA, 19 nt, Artificial Sequence
  Description of Artificial Sequence: Synthetic oligonucleotide
cagcaagacaauuuacacu

SEQ ID NO: 1533193 - RNA, 19 nt, Artificial Sequence
  Description of Artificial Sequence: Synthetic oligonucleotide
ggugacucggucuuuaaau

SEQ ID NO: 1533194 - RNA, 19 nt, Artificial Sequence
  Description of Artificial Sequence: Synthetic oligonucleotide
acucggucuuuaaauggug

SEQ ID NO: 1533195 - RNA, 19 nt, Artificial Sequence
  Description of Artificial Sequence: Synthetic oligonucleotide
gagccggggcuacaaucag

SEQ ID NO: 1533196 - RNA, 19 nt, Artificial Sequence
  Description of Artificial Sequence: Synthetic oligonucleotide
agauuuccuugggaguaug

SEQ ID NO: 1533197 - RNA, 19 nt, Artificial Sequence
  Description of Artificial Sequence: Synthetic oligonucleotide
caaggaccacggcaguaac

SEQ ID NO: 1533198 - RNA, 19 nt, Artificial Sequence
  Description of Artificial Sequence: Synthetic oligonucleotide
gaggacagcuccacgccac

SEQ ID NO: 1533199 - RNA, 19 nt, Artificial Sequence
  Description of Artificial Sequence: Synthetic oligonucleotide
aggugacucggucuuuaaa

SEQ ID NO: 1533200 - RNA, 19 nt, Artificial Sequence
  Description of Artificial Sequence: Synthetic oligonucleotide
gcccuaaucccguuucgag

SEQ ID NO: 1533201 - RNA, 19 nt, Artificial Sequence
  Description of Artificial Sequence: Synthetic oligonucleotide
uggucuaacugugcguaua

SEQ ID NO: 1533202 - RNA, 19 nt, Artificial Sequence
  Description of Artificial Sequence: Synthetic oligonucleotide
gcagcgguccgcucgcugg

SEQ ID NO: 1533203 - RNA, 19 nt, Artificial Sequence
  Description of Artificial Sequence: Synthetic oligonucleotide
gggccggacaacaauauca

SEQ ID NO: 1533204 - RNA, 19 nt, Artificial Sequence
  Description of Artificial Sequence: Synthetic oligonucleotide
uggcugucaacagcccgag

SEQ ID NO: 1533205 - RNA, 19 nt, Artificial Sequence
  Description of Artificial Sequence: Synthetic oligonucleotide
gccuaauguguccgggccg

SEQ ID NO: 1533206 - RNA, 19 nt, Artificial Sequence
  Description of Artificial Sequence: Synthetic oligonucleotide
gugguguaaaaugguucug

SEQ ID NO: 1533207 - RNA, 19 nt, Artificial Sequence
  Description of Artificial Sequence: Synthetic oligonucleotide
caccacguggagccuaaug

SEQ ID NO: 1533208 - RNA, 19 nt, Artificial Sequence
  Description of Artificial Sequence: Synthetic oligonucleotide
gggcauuuucugcacaaga

SEQ ID NO: 1533209 - RNA, 19 nt, Artificial Sequence
  Description of Artificial Sequence: Synthetic oligonucleotide
ggagccuaauguguccggg

SEQ ID NO: 1533210 - RNA, 19 nt, Artificial Sequence
  Description of Artificial Sequence: Synthetic oligonucleotide
ugauaccgugagagacuca

SEQ ID NO: 1533211 - RNA, 19 nt, Artificial Sequence
  Description of Artificial Sequence: Synthetic oligonucleotide
uaauguguccgggccggac

SEQ ID NO: 1533212 - RNA, 19 nt, Artificial Sequence
  Description of Artificial Sequence: Synthetic oligonucleotide
agaggacaugggaagggca

SEQ ID NO: 1533213 - RNA, 19 nt, Artificial Sequence
  Description of Artificial Sequence: Synthetic oligonucleotide
ggccggacaacaauaucag

SEQ ID NO: 1533214 - RNA, 19 nt, Artificial Sequence
  Description of Artificial Sequence: Synthetic oligonucleotide
ccuaauguguccgggccgg

SEQ ID NO: 1533215 - RNA, 19 nt, Artificial Sequence
  Description of Artificial Sequence: Synthetic oligonucleotide
uccaccacguggagccuaa

SEQ ID NO: 1533216 - RNA, 19 nt, Artificial Sequence
  Description of Artificial Sequence: Synthetic oligonucleotide
augguggauaguccccaau

SEQ ID NO: 1533217 - RNA, 19 nt, Artificial Sequence
  Description of Artificial Sequence: Synthetic oligonucleotide
ccgacuuauuaaucuugcc

SEQ ID NO: 1533218 - RNA, 19 nt, Artificial Sequence
  Description of Artificial Sequence: Synthetic oligonucleotide
agacugcuugagcccuuag

SEQ ID NO: 1533219 - RNA, 19 nt, Artificial Sequence
  Description of Artificial Sequence: Synthetic oligonucleotide
auguguccgggccggacaa

SEQ ID NO: 1533220 - RNA, 19 nt, Artificial Sequence
  Description of Artificial Sequence: Synthetic oligonucleotide
gcaguaacggugcccacca

SEQ ID NO: 1533221 - RNA, 19 nt, Artificial Sequence
  Description of Artificial Sequence: Synthetic oligonucleotide
uaacggugcccaccaccac

SEQ ID NO: 1533222 - RNA, 19 nt, Artificial Sequence
  Description of Artificial Sequence: Synthetic oligonucleotide
cacugcuccccgcucccgg

SEQ ID NO: 1533223 - RNA, 19 nt, Artificial Sequence
  Description of Artificial Sequence: Synthetic oligonucleotide
gccggacaacaauaucagg

SEQ ID NO: 1533224 - RNA, 19 nt, Artificial Sequence
  Description of Artificial Sequence: Synthetic oligonucleotide
gucuaacugugcguauaug

SEQ ID NO: 1533225 - RNA, 19 nt, Artificial Sequence
  Description of Artificial Sequence: Synthetic oligonucleotide
cagccaacgccggcgagcc

SEQ ID NO: 1533226 - RNA, 19 nt, Artificial Sequence
  Description of Artificial Sequence: Synthetic oligonucleotide
cauucaccacgaagauuuc

SEQ ID NO: 1533227 - RNA, 19 nt, Artificial Sequence
  Description of Artificial Sequence: Synthetic oligonucleotide
gccggggcuacaaucagag

SEQ ID NO: 1533228 - RNA, 19 nt, Artificial Sequence
  Description of Artificial Sequence: Synthetic oligonucleotide
caguugcaggaaauagaca

SEQ ID NO: 1533229 - RNA, 19 nt, Artificial Sequence
  Description of Artificial Sequence: Synthetic oligonucleotide
gccacacgugguuaugggc

SEQ ID NO: 1533230 - RNA, 19 nt, Artificial Sequence
  Description of Artificial Sequence: Synthetic oligonucleotide
ggucuuuaaaugguggaua

SEQ ID NO: 1533231 - RNA, 19 nt, Artificial Sequence
  Description of Artificial Sequence: Synthetic oligonucleotide
ccacguggagccuaaugug

SEQ ID NO: 1533232 - RNA, 19 nt, Artificial Sequence
  Description of Artificial Sequence: Synthetic oligonucleotide
uccgccagaguggucuaac

SEQ ID NO: 1533233 - RNA, 19 nt, Artificial Sequence
  Description of Artificial Sequence: Synthetic oligonucleotide
cacugcacugucggugccg

SEQ ID NO: 1533234 - RNA, 19 nt, Artificial Sequence
  Description of Artificial Sequence: Synthetic oligonucleotide
agcaccgaccacagccaac

SEQ ID NO: 1533235 - RNA, 19 nt, Artificial Sequence
  Description of Artificial Sequence: Synthetic oligonucleotide
cuggacgugaucucacugu

SEQ ID NO: 1533236 - RNA, 19 nt, Artificial Sequence
  Description of Artificial Sequence: Synthetic oligonucleotide
uaagacugcuugagcccuu

SEQ ID NO: 1533237 - RNA, 19 nt, Artificial Sequence
  Description of Artificial Sequence: Synthetic oligonucleotide
gccaacgccggcgagccgg

SEQ ID NO: 1533238 - RNA, 19 nt, Artificial Sequence
  Description of Artificial Sequence: Synthetic oligonucleotide
gcugcgagcgcgaggacag

SEQ ID NO: 1533239 - RNA, 19 nt, Artificial Sequence
  Description of Artificial Sequence: Synthetic oligonucleotide
acgacacugcacugucggu

SEQ ID NO: 1533240 - RNA, 19 nt, Artificial Sequence
  Description of Artificial Sequence: Synthetic oligonucleotide
aucagagccaaggcuccga

SEQ ID NO: 1533241 - RNA, 19 nt, Artificial Sequence
  Description of Artificial Sequence: Synthetic oligonucleotide
cacggcaguaacggugccc

SEQ ID NO: 1533242 - RNA, 19 nt, Artificial Sequence
  Description of Artificial Sequence: Synthetic oligonucleotide
cucgagucagaaagauuaa

SEQ ID NO: 1533243 - RNA, 19 nt, Artificial Sequence
  Description of Artificial Sequence: Synthetic oligonucleotide
gaguggucuaacugugcgu

SEQ ID NO: 1533244 - RNA, 19 nt, Artificial Sequence
  Description of Artificial Sequence: Synthetic oligonucleotide
gguggauaguccccaaugu

SEQ ID NO: 1533245 - RNA, 19 nt, Artificial Sequence
  Description of Artificial Sequence: Synthetic oligonucleotide
aagacugcuugagcccuua

SEQ ID NO: 1533246 - RNA, 19 nt, Artificial Sequence
  Description of Artificial Sequence: Synthetic oligonucleotide
gcccuuaggugaaaaggcc

SEQ ID NO: 1533247 - RNA, 19 nt, Artificial Sequence
  Description of Artificial Sequence: Synthetic oligonucleotide
agucaaggccacacguggu

SEQ ID NO: 1533248 - RNA, 19 nt, Artificial Sequence
  Description of Artificial Sequence: Synthetic oligonucleotide
aguccccaauguauacuug

SEQ ID NO: 1533249 - RNA, 19 nt, Artificial Sequence
  Description of Artificial Sequence: Synthetic oligonucleotide
cuucaugcaccgcuggccu

SEQ ID NO: 1533250 - RNA, 19 nt, Artificial Sequence
  Description of Artificial Sequence: Synthetic oligonucleotide
acguagacuccuaccauuu

SEQ ID NO: 1533251 - RNA, 19 nt, Artificial Sequence
  Description of Artificial Sequence: Synthetic oligonucleotide
gcgaggacagcuccacgcc

SEQ ID NO: 1533252 - RNA, 19 nt, Artificial Sequence
  Description of Artificial Sequence: Synthetic oligonucleotide
aagauauguuuggggucuu

SEQ ID NO: 1533253 - RNA, 19 nt, Artificial Sequence
  Description of Artificial Sequence: Synthetic oligonucleotide
agcccgagcaucgcggcca

SEQ ID NO: 1533254 - RNA, 19 nt, Artificial Sequence
  Description of Artificial Sequence: Synthetic oligonucleotide
cuaagacugcuugagcccu

SEQ ID NO: 1533255 - RNA, 19 nt, Artificial Sequence
  Description of Artificial Sequence: Synthetic oligonucleotide
uaaucccguuucgaguguu

SEQ ID NO: 1533256 - RNA, 19 nt, Artificial Sequence
  Description of Artificial Sequence: Synthetic oligonucleotide
gguguaaaaugguucugau

SEQ ID NO: 1533257 - RNA, 19 nt, Artificial Sequence
  Description of Artificial Sequence: Synthetic oligonucleotide
aaucccguuucgaguguuu

SEQ ID NO: 1533258 - RNA, 19 nt, Artificial Sequence
  Description of Artificial Sequence: Synthetic oligonucleotide
cccuuaggugaaaaggcca

SEQ ID NO: 1533259 - RNA, 19 nt, Artificial Sequence
  Description of Artificial Sequence: Synthetic oligonucleotide
gggcccuaaucccguuucg

SEQ ID NO: 1533260 - RNA, 19 nt, Artificial Sequence
  Description of Artificial Sequence: Synthetic oligonucleotide
acgucuguuggaaguacua

SEQ ID NO: 1533261 - RNA, 19 nt, Artificial Sequence
  Description of Artificial Sequence: Synthetic oligonucleotide
caucgcggccagcaccgac

SEQ ID NO: 1533262 - RNA, 19 nt, Artificial Sequence
  Description of Artificial Sequence: Synthetic oligonucleotide
ggauaguccccaauguaua

SEQ ID NO: 1533263 - RNA, 19 nt, Artificial Sequence
  Description of Artificial Sequence: Synthetic oligonucleotide
cguggagccuaaugugucc

SEQ ID NO: 1533264 - RNA, 19 nt, Artificial Sequence
  Description of Artificial Sequence: Synthetic oligonucleotide
auacuccaaaggagguggu

SEQ ID NO: 1533265 - RNA, 19 nt, Artificial Sequence
  Description of Artificial Sequence: Synthetic oligonucleotide
cacugucggugccgucugg

SEQ ID NO: 1533266 - RNA, 19 nt, Artificial Sequence
  Description of Artificial Sequence: Synthetic oligonucleotide
caugcguauacaugugcuu

SEQ ID NO: 1533267 - RNA, 19 nt, Artificial Sequence
  Description of Artificial Sequence: Synthetic oligonucleotide
cugccaucuggacgugauc

SEQ ID NO: 1533268 - RNA, 19 nt, Artificial Sequence
  Description of Artificial Sequence: Synthetic oligonucleotide
ucgcuggcuucagacccca

SEQ ID NO: 1533269 - RNA, 19 nt, Artificial Sequence
  Description of Artificial Sequence: Synthetic oligonucleotide
cagcgguccgcucgcuggc

SEQ ID NO: 1533270 - RNA, 19 nt, Artificial Sequence
  Description of Artificial Sequence: Synthetic oligonucleotide
gcucgagucaaggccacac

SEQ ID NO: 1533271 - RNA, 19 nt, Artificial Sequence
  Description of Artificial Sequence: Synthetic oligonucleotide
cgagucaaggccacacgug

SEQ ID NO: 1533272 - RNA, 19 nt, Artificial Sequence
  Description of Artificial Sequence: Synthetic oligonucleotide
auaccgugagagacucacu

SEQ ID NO: 1533273 - RNA, 19 nt, Artificial Sequence
  Description of Artificial Sequence: Synthetic oligonucleotide
cgugguuaugggcauuuuc

SEQ ID NO: 1533274 - RNA, 19 nt, Artificial Sequence
  Description of Artificial Sequence: Synthetic oligonucleotide
uuuccaccacguggagccu

SEQ ID NO: 1533275 - RNA, 19 nt, Artificial Sequence
  Description of Artificial Sequence: Synthetic oligonucleotide
uccguucggccuggguccc

SEQ ID NO: 1533276 - RNA, 19 nt, Artificial Sequence
  Description of Artificial Sequence: Synthetic oligonucleotide
guauaugacugggcccuaa

SEQ ID NO: 1533277 - RNA, 19 nt, Artificial Sequence
  Description of Artificial Sequence: Synthetic oligonucleotide
gcguauaugacugggcccu

SEQ ID NO: 1533278 - RNA, 19 nt, Artificial Sequence
  Description of Artificial Sequence: Synthetic oligonucleotide
augcaccgcuggccucucg

SEQ ID NO: 1533279 - RNA, 19 nt, Artificial Sequence
  Description of Artificial Sequence: Synthetic oligonucleotide
cagcccgagcaucgcggcc

SEQ ID NO: 1533280 - RNA, 19 nt, Artificial Sequence
  Description of Artificial Sequence: Synthetic oligonucleotide
caccgaccacagccaacgc

SEQ ID NO: 1533281 - RNA, 19 nt, Artificial Sequence
  Description of Artificial Sequence: Synthetic oligonucleotide
ugcucgagucaaggccaca

SEQ ID NO: 1533282 - RNA, 19 nt, Artificial Sequence
  Description of Artificial Sequence: Synthetic oligonucleotide
gcgagccggggcuacaauc

SEQ ID NO: 1533283 - RNA, 19 nt, Artificial Sequence
  Description of Artificial Sequence: Synthetic oligonucleotide
ccgcucgcuggcuucagac

SEQ ID NO: 1533284 - RNA, 19 nt, Artificial Sequence
  Description of Artificial Sequence: Synthetic oligonucleotide
ggucuaacugugcguauau

SEQ ID NO: 1533285 - RNA, 19 nt, Artificial Sequence
  Description of Artificial Sequence: Synthetic oligonucleotide
acacuuacguagacuccua

SEQ ID NO: 1533286 - RNA, 19 nt, Artificial Sequence
  Description of Artificial Sequence: Synthetic oligonucleotide
uguguccgggccggacaac

SEQ ID NO: 1533287 - RNA, 19 nt, Artificial Sequence
  Description of Artificial Sequence: Synthetic oligonucleotide
agccaacgccggcgagccg

SEQ ID NO: 1533288 - RNA, 19 nt, Artificial Sequence
  Description of Artificial Sequence: Synthetic oligonucleotide
cgccagaguggucuaacug

SEQ ID NO: 1533289 - RNA, 19 nt, Artificial Sequence
  Description of Artificial Sequence: Synthetic oligonucleotide
cgagcgcgaggacagcucc

SEQ ID NO: 1533290 - RNA, 19 nt, Artificial Sequence
  Description of Artificial Sequence: Synthetic oligonucleotide
ccgacggccucugccaucc

SEQ ID NO: 1533291 - RNA, 19 nt, Artificial Sequence
  Description of Artificial Sequence: Synthetic oligonucleotide
cuaaucccguuucgagugu

SEQ ID NO: 1533292 - RNA, 19 nt, Artificial Sequence
  Description of Artificial Sequence: Synthetic oligonucleotide
cgacacugcacugucggug

SEQ ID NO: 1533293 - RNA, 19 nt, Artificial Sequence
  Description of Artificial Sequence: Synthetic oligonucleotide
agccggggcuacaaucaga

SEQ ID NO: 1533294 - RNA, 19 nt, Artificial Sequence
  Description of Artificial Sequence: Synthetic oligonucleotide
caggugacucggucuuuaa

SEQ ID NO: 1533295 - RNA, 19 nt, Artificial Sequence
  Description of Artificial Sequence: Synthetic oligonucleotide
gcguauacaugugcuuguc

SEQ ID NO: 1533296 - RNA, 19 nt, Artificial Sequence
  Description of Artificial Sequence: Synthetic oligonucleotide
cgagccggggcuacaauca

SEQ ID NO: 1533297 - RNA, 19 nt, Artificial Sequence
  Description of Artificial Sequence: Synthetic oligonucleotide
caaggccacacgugguuau

SEQ ID NO: 1533298 - RNA, 19 nt, Artificial Sequence
  Description of Artificial Sequence: Synthetic oligonucleotide
ggcccuaaucccguuucga

SEQ ID NO: 1533299 - RNA, 19 nt, Artificial Sequence
  Description of Artificial Sequence: Synthetic oligonucleotide
cacacgugguuaugggcau

SEQ ID NO: 1533300 - RNA, 19 nt, Artificial Sequence
  Description of Artificial Sequence: Synthetic oligonucleotide
guucggccuggguccccgc

SEQ ID NO: 1533301 - RNA, 19 nt, Artificial Sequence
  Description of Artificial Sequence: Synthetic oligonucleotide
gcgcgaggacagcuccacg

SEQ ID NO: 1533302 - RNA, 19 nt, Artificial Sequence
  Description of Artificial Sequence: Synthetic oligonucleotide
gagcgcgaggacagcucca

SEQ ID NO: 1533303 - RNA, 19 nt, Artificial Sequence
  Description of Artificial Sequence: Synthetic oligonucleotide
ggcugucaacagcccgagc

SEQ ID NO: 1533304 - RNA, 19 nt, Artificial Sequence
  Description of Artificial Sequence: Synthetic oligonucleotide
gugccauugugaacagccu

SEQ ID NO: 1533305 - RNA, 19 nt, Artificial Sequence
  Description of Artificial Sequence: Synthetic oligonucleotide
guggucuaacugugcguau

SEQ ID NO: 1533306 - RNA, 19 nt, Artificial Sequence
  Description of Artificial Sequence: Synthetic oligonucleotide
ccacgucuguuggaaguac

SEQ ID NO: 1533307 - RNA, 19 nt, Artificial Sequence
  Description of Artificial Sequence: Synthetic oligonucleotide
cccuaaucccguuucgagu

SEQ ID NO: 1533308 - RNA, 19 nt, Artificial Sequence
  Description of Artificial Sequence: Synthetic oligonucleotide
cguagacuccuaccauuuc

SEQ ID NO: 1533309 - RNA, 19 nt, Artificial Sequence
  Description of Artificial Sequence: Synthetic oligonucleotide
cacgccacugcuccccgcu

SEQ ID NO: 1533310 - RNA, 19 nt, Artificial Sequence
  Description of Artificial Sequence: Synthetic oligonucleotide
cuaauguguccgggccgga

SEQ ID NO: 1533311 - RNA, 19 nt, Artificial Sequence
  Description of Artificial Sequence: Synthetic oligonucleotide
acacgugguuaugggcauu

SEQ ID NO: 1533312 - RNA, 19 nt, Artificial Sequence
  Description of Artificial Sequence: Synthetic oligonucleotide
agcgguccgcucgcuggcu

SEQ ID NO: 1533313 - RNA, 19 nt, Artificial Sequence
  Description of Artificial Sequence: Synthetic oligonucleotide
ccggcugcgagcgcgagga

SEQ ID NO: 1533314 - RNA, 19 nt, Artificial Sequence
  Description of Artificial Sequence: Synthetic oligonucleotide
ccggggcuacaaucagagc

SEQ ID NO: 1533315 - RNA, 19 nt, Artificial Sequence
  Description of Artificial Sequence: Synthetic oligonucleotide
gucaaccauccaguuguau

SEQ ID NO: 1533316 - RNA, 19 nt, Artificial Sequence
  Description of Artificial Sequence: Synthetic oligonucleotide
cugcacugucggugccguc

SEQ ID NO: 1533317 - RNA, 19 nt, Artificial Sequence
  Description of Artificial Sequence: Synthetic oligonucleotide
acgugguuaugggcauuuu

SEQ ID NO: 1533318 - RNA, 19 nt, Artificial Sequence
  Description of Artificial Sequence: Synthetic oligonucleotide
cugcgagcgcgaggacagc

SEQ ID NO: 1533319 - RNA, 19 nt, Artificial Sequence
  Description of Artificial Sequence: Synthetic oligonucleotide
guccgggccggacaacaau

SEQ ID NO: 1533320 - RNA, 19 nt, Artificial Sequence
  Description of Artificial Sequence: Synthetic oligonucleotide
ccgagcaucgcggccagca

SEQ ID NO: 1533321 - RNA, 19 nt, Artificial Sequence
  Description of Artificial Sequence: Synthetic oligonucleotide
gccucucgagucagaaaga

SEQ ID NO: 1533322 - RNA, 19 nt, Artificial Sequence
  Description of Artificial Sequence: Synthetic oligonucleotide
cuugagcccuuaggugaaa

SEQ ID NO: 1533323 - RNA, 19 nt, Artificial Sequence
  Description of Artificial Sequence: Synthetic oligonucleotide
agcuucccuugugucccau

SEQ ID NO: 1533324 - RNA, 19 nt, Artificial Sequence
  Description of Artificial Sequence: Synthetic oligonucleotide
gcaagacaauuuacacuua

SEQ ID NO: 1533325 - RNA, 19 nt, Artificial Sequence
  Description of Artificial Sequence: Synthetic oligonucleotide
caugcaccgcuggccucuc

SEQ ID NO: 1533326 - RNA, 19 nt, Artificial Sequence
  Description of Artificial Sequence: Synthetic oligonucleotide
guccgcucgcuggcuucag

SEQ ID NO: 1533327 - RNA, 19 nt, Artificial Sequence
  Description of Artificial Sequence: Synthetic oligonucleotide
ggacgugaucucacuguua

SEQ ID NO: 1533328 - RNA, 19 nt, Artificial Sequence
  Description of Artificial Sequence: Synthetic oligonucleotide
cccguuucgaguguuuccu

SEQ ID NO: 1533329 - RNA, 19 nt, Artificial Sequence
  Description of Artificial Sequence: Synthetic oligonucleotide
caacgccggcgagccgggg

SEQ ID NO: 1533330 - RNA, 19 nt, Artificial Sequence
  Description of Artificial Sequence: Synthetic oligonucleotide
cacgugguuaugggcauuu

SEQ ID NO: 1533331 - RNA, 19 nt, Artificial Sequence
  Description of Artificial Sequence: Synthetic oligonucleotide
gcccgagcaucgcggccag

SEQ ID NO: 1533332 - RNA, 19 nt, Artificial Sequence
  Description of Artificial Sequence: Synthetic oligonucleotide
caccgcuggccucucgagu

SEQ ID NO: 1533333 - RNA, 19 nt, Artificial Sequence
  Description of Artificial Sequence: Synthetic oligonucleotide
cccggcugcgagcgcgagg

SEQ ID NO: 1533334 - RNA, 19 nt, Artificial Sequence
  Description of Artificial Sequence: Synthetic oligonucleotide
gguccgcucgcuggcuuca

SEQ ID NO: 1533335 - RNA, 19 nt, Artificial Sequence
  Description of Artificial Sequence: Synthetic oligonucleotide
cgucuguuggaaguacuaa

SEQ ID NO: 1533336 - RNA, 19 nt, Artificial Sequence
  Description of Artificial Sequence: Synthetic oligonucleotide
uccccgcagcgguccgcuc

SEQ ID NO: 1533337 - RNA, 19 nt, Artificial Sequence
  Description of Artificial Sequence: Synthetic oligonucleotide
cgagcaucgcggccagcac

SEQ ID NO: 1533338 - RNA, 19 nt, Artificial Sequence
  Description of Artificial Sequence: Synthetic oligonucleotide
cgaggacagcuccacgcca

SEQ ID NO: 1533339 - RNA, 19 nt, Artificial Sequence
  Description of Artificial Sequence: Synthetic oligonucleotide
ggaccacggcaguaacggu

SEQ ID NO: 1533340 - RNA, 19 nt, Artificial Sequence
  Description of Artificial Sequence: Synthetic oligonucleotide
gccgucuggcuggaagcuc

SEQ ID NO: 1533341 - RNA, 19 nt, Artificial Sequence
  Description of Artificial Sequence: Synthetic oligonucleotide
ggucaaccauccaguugua

SEQ ID NO: 1533342 - RNA, 19 nt, Artificial Sequence
  Description of Artificial Sequence: Synthetic oligonucleotide
cugggcccuaaucccguuu

SEQ ID NO: 1533343 - RNA, 19 nt, Artificial Sequence
  Description of Artificial Sequence: Synthetic oligonucleotide
ccaggugacucggucuuua

SEQ ID NO: 1533344 - RNA, 19 nt, Artificial Sequence
  Description of Artificial Sequence: Synthetic oligonucleotide
cgaaugugcacgucagcuu

SEQ ID NO: 1533345 - RNA, 19 nt, Artificial Sequence
  Description of Artificial Sequence: Synthetic oligonucleotide
cuccgacggccucugccau

SEQ ID NO: 1533346 - RNA, 19 nt, Artificial Sequence
  Description of Artificial Sequence: Synthetic oligonucleotide
caaccagaaccaggcugau

SEQ ID NO: 1533347 - RNA, 19 nt, Artificial Sequence
  Description of Artificial Sequence: Synthetic oligonucleotide
gcacgucagcuucccuugu

SEQ ID NO: 1533348 - RNA, 19 nt, Artificial Sequence
  Description of Artificial Sequence: Synthetic oligonucleotide
cgcagcgguccgcucgcug

SEQ ID NO: 1533349 - RNA, 19 nt, Artificial Sequence
  Description of Artificial Sequence: Synthetic oligonucleotide
ccaguuguauuaggagaau

SEQ ID NO: 1533350 - RNA, 19 nt, Artificial Sequence
  Description of Artificial Sequence: Synthetic oligonucleotide
cggucuuuaaaugguggau

SEQ ID NO: 1533351 - RNA, 19 nt, Artificial Sequence
  Description of Artificial Sequence: Synthetic oligonucleotide
ccgccagaguggucuaacu

SEQ ID NO: 1533352 - RNA, 19 nt, Artificial Sequence
  Description of Artificial Sequence: Synthetic oligonucleotide
ccgggccggacaacaauau

SEQ ID NO: 1533353 - RNA, 19 nt, Artificial Sequence
  Description of Artificial Sequence: Synthetic oligonucleotide
ccacagauuccgacuuauu

SEQ ID NO: 1533354 - RNA, 19 nt, Artificial Sequence
  Description of Artificial Sequence: Synthetic oligonucleotide
gccggcgagccggggcuac

SEQ ID NO: 1533355 - RNA, 19 nt, Artificial Sequence
  Description of Artificial Sequence: Synthetic oligonucleotide
ggcgagccggggcuacaau

SEQ ID NO: 1533356 - RNA, 19 nt, Artificial Sequence
  Description of Artificial Sequence: Synthetic oligonucleotide
ccguucggccugggucccc

SEQ ID NO: 1533357 - RNA, 19 nt, Artificial Sequence
  Description of Artificial Sequence: Synthetic oligonucleotide
gcaucgcggccagcaccga

SEQ ID NO: 1533358 - RNA, 19 nt, Artificial Sequence
  Description of Artificial Sequence: Synthetic oligonucleotide
cguauaugacugggcccua

SEQ ID NO: 1533359 - RNA, 19 nt, Artificial Sequence
  Description of Artificial Sequence: Synthetic oligonucleotide
ccgccgcuccguucggccu

SEQ ID NO: 1533360 - RNA, 19 nt, Artificial Sequence
  Description of Artificial Sequence: Synthetic oligonucleotide
cggcugcgagcgcgaggac

SEQ ID NO: 1533361 - RNA, 19 nt, Artificial Sequence
  Description of Artificial Sequence: Synthetic oligonucleotide
ccgcuccguucggccuggg

SEQ ID NO: 1533362 - RNA, 19 nt, Artificial Sequence
  Description of Artificial Sequence: Synthetic oligonucleotide
ccggcgagccggggcuaca

SEQ ID NO: 1533363 - RNA, 19 nt, Artificial Sequence
  Description of Artificial Sequence: Synthetic oligonucleotide
cgcuccguucggccugggu

SEQ ID NO: 1533364 - RNA, 19 nt, Artificial Sequence
  Description of Artificial Sequence: Synthetic oligonucleotide
ccaccacguggagccuaau

SEQ ID NO: 1533365 - RNA, 19 nt, Artificial Sequence
  Description of Artificial Sequence: Synthetic oligonucleotide
cgccggcgagccggggcua

SEQ ID NO: 1533366 - RNA, 19 nt, Artificial Sequence
  Description of Artificial Sequence: Synthetic oligonucleotide
aaaguauuucguuaggguc

SEQ ID NO: 1533367 - RNA, 19 nt, Artificial Sequence
  Description of Artificial Sequence: Synthetic oligonucleotide
uauugugaccaguagaggg

SEQ ID NO: 1533368 - RNA, 19 nt, Artificial Sequence
  Description of Artificial Sequence: Synthetic oligonucleotide
auuaggaccagaauugacc

SEQ ID NO: 1533369 - RNA, 19 nt, Artificial Sequence
  Description of Artificial Sequence: Synthetic oligonucleotide
auuuauggaagcugcugcc

SEQ ID NO: 1533370 - RNA, 19 nt, Artificial Sequence
  Description of Artificial Sequence: Synthetic oligonucleotide
ucugagugaaccaaggcac

SEQ ID NO: 1533371 - RNA, 19 nt, Artificial Sequence
  Description of Artificial Sequence: Synthetic oligonucleotide
aggagaucagacaacaucc

SEQ ID NO: 1533372 - RNA, 19 nt, Artificial Sequence
  Description of Artificial Sequence: Synthetic oligonucleotide
uccucggcaaaguagacgg

SEQ ID NO: 1533373 - RNA, 19 nt, Artificial Sequence
  Description of Artificial Sequence: Synthetic oligonucleotide
ugcaauagaucucuucucc

SEQ ID NO: 1533374 - RNA, 19 nt, Artificial Sequence
  Description of Artificial Sequence: Synthetic oligonucleotide
cucaaguccaacauuagug

SEQ ID NO: 1533375 - RNA, 19 nt, Artificial Sequence
  Description of Artificial Sequence: Synthetic oligonucleotide
ucuaaaaggaugacagaug

SEQ ID NO: 1533376 - RNA, 19 nt, Artificial Sequence
  Description of Artificial Sequence: Synthetic oligonucleotide
aacuauuaggaguggcuag

SEQ ID NO: 1533377 - RNA, 19 nt, Artificial Sequence
  Description of Artificial Sequence: Synthetic oligonucleotide
aauagaucucuucuccaug

SEQ ID NO: 1533378 - RNA, 19 nt, Artificial Sequence
  Description of Artificial Sequence: Synthetic oligonucleotide
ucaaaguauuucguuaggg

SEQ ID NO: 1533379 - RNA, 19 nt, Artificial Sequence
  Description of Artificial Sequence: Synthetic oligonucleotide
uuugggcaaacuuggaugc

SEQ ID NO: 1533380 - RNA, 19 nt, Artificial Sequence
  Description of Artificial Sequence: Synthetic oligonucleotide
ucaaguccaacauuaguga

SEQ ID NO: 1533381 - RNA, 19 nt, Artificial Sequence
  Description of Artificial Sequence: Synthetic oligonucleotide
ugaacuauuaggaguggcu

SEQ ID NO: 1533382 - RNA, 19 nt, Artificial Sequence
  Description of Artificial Sequence: Synthetic oligonucleotide
uuaggaccagaauugacca

SEQ ID NO: 1533383 - RNA, 19 nt, Artificial Sequence
  Description of Artificial Sequence: Synthetic oligonucleotide
ugcuugacuacucugggcu

SEQ ID NO: 1533384 - RNA, 19 nt, Artificial Sequence
  Description of Artificial Sequence: Synthetic oligonucleotide
cuaaaccaaaagaagccag

SEQ ID NO: 1533385 - RNA, 19 nt, Artificial Sequence
  Description of Artificial Sequence: Synthetic oligonucleotide
auuucguuagggucuuccc

SEQ ID NO: 1533386 - RNA, 19 nt, Artificial Sequence
  Description of Artificial Sequence: Synthetic oligonucleotide
uagaggguggacauucggg

SEQ ID NO: 1533387 - RNA, 19 nt, Artificial Sequence
  Description of Artificial Sequence: Synthetic oligonucleotide
agauauugugaccaguaga

SEQ ID NO: 1533388 - RNA, 19 nt, Artificial Sequence
  Description of Artificial Sequence: Synthetic oligonucleotide
acuauuaggaguggcuagc

SEQ ID NO: 1533389 - RNA, 19 nt, Artificial Sequence
  Description of Artificial Sequence: Synthetic oligonucleotide
aggguggucgacucaaggc

SEQ ID NO: 1533390 - RNA, 19 nt, Artificial Sequence
  Description of Artificial Sequence: Synthetic oligonucleotide
caggauuuauggaagcugc

SEQ ID NO: 1533391 - RNA, 19 nt, Artificial Sequence
  Description of Artificial Sequence: Synthetic oligonucleotide
ucgaccacugauaaaugug

SEQ ID NO: 1533392 - RNA, 19 nt, Artificial Sequence
  Description of Artificial Sequence: Synthetic oligonucleotide
aaguauuucguuagggucu

SEQ ID NO: 1533393 - RNA, 19 nt, Artificial Sequence
  Description of Artificial Sequence: Synthetic oligonucleotide
acuacucugggcuccaaag

SEQ ID NO: 1533394 - RNA, 19 nt, Artificial Sequence
  Description of Artificial Sequence: Synthetic oligonucleotide
acggucuuuuggcacaccc

SEQ ID NO: 1533395 - RNA, 19 nt, Artificial Sequence
  Description of Artificial Sequence: Synthetic oligonucleotide
uggcauagcauccuuugca

SEQ ID NO: 1533396 - RNA, 19 nt, Artificial Sequence
  Description of Artificial Sequence: Synthetic oligonucleotide
agaugaacuauuaggagug

SEQ ID NO: 1533397 - RNA, 19 nt, Artificial Sequence
  Description of Artificial Sequence: Synthetic oligonucleotide
agggauugaugacagaaga

SEQ ID NO: 1533398 - RNA, 19 nt, Artificial Sequence
  Description of Artificial Sequence: Synthetic oligonucleotide
ugguucuccauucccaaug

SEQ ID NO: 1533399 - RNA, 19 nt, Artificial Sequence
  Description of Artificial Sequence: Synthetic oligonucleotide
aguuuggcauucuggcagc

SEQ ID NO: 1533400 - RNA, 19 nt, Artificial Sequence
  Description of Artificial Sequence: Synthetic oligonucleotide
uggcccauacuucuugccg

SEQ ID NO: 1533401 - RNA, 19 nt, Artificial Sequence
  Description of Artificial Sequence: Synthetic oligonucleotide
aggccuuugccacauuugg

SEQ ID NO: 1533402 - RNA, 19 nt, Artificial Sequence
  Description of Artificial Sequence: Synthetic oligonucleotide
agaaacuguccaucccagc

SEQ ID NO: 1533403 - RNA, 19 nt, Artificial Sequence
  Description of Artificial Sequence: Synthetic oligonucleotide
gagaucagacaacauccag

SEQ ID NO: 1533404 - RNA, 19 nt, Artificial Sequence
  Description of Artificial Sequence: Synthetic oligonucleotide
accagaauugaccacucca

SEQ ID NO: 1533405 - RNA, 19 nt, Artificial Sequence
  Description of Artificial Sequence: Synthetic oligonucleotide
uuucguuagggucuucccu

SEQ ID NO: 1533406 - RNA, 19 nt, Artificial Sequence
  Description of Artificial Sequence: Synthetic oligonucleotide
augggacgauaccaguucc

SEQ ID NO: 1533407 - RNA, 19 nt, Artificial Sequence
  Description of Artificial Sequence: Synthetic oligonucleotide
augaacuauuaggaguggc

SEQ ID NO: 1533408 - RNA, 19 nt, Artificial Sequence
  Description of Artificial Sequence: Synthetic oligonucleotide
aggauuaggaccagaauug

SEQ ID NO: 1533409 - RNA, 19 nt, Artificial Sequence
  Description of Artificial Sequence: Synthetic oligonucleotide
aaagacuugggcucagaua

SEQ ID NO: 1533410 - RNA, 19 nt, Artificial Sequence
  Description of Artificial Sequence: Synthetic oligonucleotide
aggucuguugcuugacuac

SEQ ID NO: 1533411 - RNA, 19 nt, Artificial Sequence
  Description of Artificial Sequence: Synthetic oligonucleotide
augccuaaggagaucagac

SEQ ID NO: 1533412 - RNA, 19 nt, Artificial Sequence
  Description of Artificial Sequence: Synthetic oligonucleotide
aguccaacauuagugaugu

SEQ ID NO: 1533413 - RNA, 19 nt, Artificial Sequence
  Description of Artificial Sequence: Synthetic oligonucleotide
uauuucguuagggucuucc

SEQ ID NO: 1533414 - RNA, 19 nt, Artificial Sequence
  Description of Artificial Sequence: Synthetic oligonucleotide
guaucaaaugccaggcagg

SEQ ID NO: 1533415 - RNA, 19 nt, Artificial Sequence
  Description of Artificial Sequence: Synthetic oligonucleotide
gaggaggcgggguacacag

SEQ ID NO: 1533416 - RNA, 19 nt, Artificial Sequence
  Description of Artificial Sequence: Synthetic oligonucleotide
ugcucagugugccugcgcc

SEQ ID NO: 1533417 - RNA, 19 nt, Artificial Sequence
  Description of Artificial Sequence: Synthetic oligonucleotide
auugaccacuccaagaucu

SEQ ID NO: 1533418 - RNA, 19 nt, Artificial Sequence
  Description of Artificial Sequence: Synthetic oligonucleotide
aaguccaacauuagugaug

SEQ ID NO: 1533419 - RNA, 19 nt, Artificial Sequence
  Description of Artificial Sequence: Synthetic oligonucleotide
cacauucaaaggcaagagc

SEQ ID NO: 1533420 - RNA, 19 nt, Artificial Sequence
  Description of Artificial Sequence: Synthetic oligonucleotide
aagggauugaugacagaag

SEQ ID NO: 1533421 - RNA, 19 nt, Artificial Sequence
  Description of Artificial Sequence: Synthetic oligonucleotide
auucccaaugggacgauac

SEQ ID NO: 1533422 - RNA, 19 nt, Artificial Sequence
  Description of Artificial Sequence: Synthetic oligonucleotide
gaagccagauacucaaguc

SEQ ID NO: 1533423 - RNA, 19 nt, Artificial Sequence
  Description of Artificial Sequence: Synthetic oligonucleotide
ggggacagcgcucagagcc

SEQ ID NO: 1533424 - RNA, 19 nt, Artificial Sequence
  Description of Artificial Sequence: Synthetic oligonucleotide
ggacauucgggucuguagg

SEQ ID NO: 1533425 - RNA, 19 nt, Artificial Sequence
  Description of Artificial Sequence: Synthetic oligonucleotide
cuuaugccaggacuugccg

SEQ ID NO: 1533426 - RNA, 19 nt, Artificial Sequence
  Description of Artificial Sequence: Synthetic oligonucleotide
ugggcucagauauugugac

SEQ ID NO: 1533427 - RNA, 19 nt, Artificial Sequence
  Description of Artificial Sequence: Synthetic oligonucleotide
acauuagugaugugagcca

SEQ ID NO: 1533428 - RNA, 19 nt, Artificial Sequence
  Description of Artificial Sequence: Synthetic oligonucleotide
uaucaaaugccaggcagga

SEQ ID NO: 1533429 - RNA, 19 nt, Artificial Sequence
  Description of Artificial Sequence: Synthetic oligonucleotide
agccuuuuggcccauacuu

SEQ ID NO: 1533430 - RNA, 19 nt, Artificial Sequence
  Description of Artificial Sequence: Synthetic oligonucleotide
acucaaguccaacauuagu

SEQ ID NO: 1533431 - RNA, 19 nt, Artificial Sequence
  Description of Artificial Sequence: Synthetic oligonucleotide
cacucugagugaaccaagg

SEQ ID NO: 1533432 - RNA, 19 nt, Artificial Sequence
  Description of Artificial Sequence: Synthetic oligonucleotide
ucgacucaaggccuuugcc

SEQ ID NO: 1533433 - RNA, 19 nt, Artificial Sequence
  Description of Artificial Sequence: Synthetic oligonucleotide
guagaggguggacauucgg

SEQ ID NO: 1533434 - RNA, 19 nt, Artificial Sequence
  Description of Artificial Sequence: Synthetic oligonucleotide
gaagccgugacuggcugcg

SEQ ID NO: 1533435 - RNA, 19 nt, Artificial Sequence
  Description of Artificial Sequence: Synthetic oligonucleotide
auauugugaccaguagagg

SEQ ID NO: 1533436 - RNA, 19 nt, Artificial Sequence
  Description of Artificial Sequence: Synthetic oligonucleotide
aaccaaaagaagccagaua

SEQ ID NO: 1533437 - RNA, 19 nt, Artificial Sequence
  Description of Artificial Sequence: Synthetic oligonucleotide
gacgauaccaguuccacau

SEQ ID NO: 1533438 - RNA, 19 nt, Artificial Sequence
  Description of Artificial Sequence: Synthetic oligonucleotide
uucccaaugggacgauacc

SEQ ID NO: 1533439 - RNA, 19 nt, Artificial Sequence
  Description of Artificial Sequence: Synthetic oligonucleotide
ugggguaggagcucaggca

SEQ ID NO: 1533440 - RNA, 19 nt, Artificial Sequence
  Description of Artificial Sequence: Synthetic oligonucleotide
gaugaacuauuaggagugg

SEQ ID NO: 1533441 - RNA, 19 nt, Artificial Sequence
  Description of Artificial Sequence: Synthetic oligonucleotide
cagauauugugaccaguag

SEQ ID NO: 1533442 - RNA, 19 nt, Artificial Sequence
  Description of Artificial Sequence: Synthetic oligonucleotide
cagaauugaccacuccaag

SEQ ID NO: 1533443 - RNA, 19 nt, Artificial Sequence
  Description of Artificial Sequence: Synthetic oligonucleotide
uuuggcccauacuucuugc

SEQ ID NO: 1533444 - RNA, 19 nt, Artificial Sequence
  Description of Artificial Sequence: Synthetic oligonucleotide
augacuugcaauagaucuc

SEQ ID NO: 1533445 - RNA, 19 nt, Artificial Sequence
  Description of Artificial Sequence: Synthetic oligonucleotide
uccuuugcaguagaucuca

SEQ ID NO: 1533446 - RNA, 19 nt, Artificial Sequence
  Description of Artificial Sequence: Synthetic oligonucleotide
uuccuguggucuacaaccc

SEQ ID NO: 1533447 - RNA, 19 nt, Artificial Sequence
  Description of Artificial Sequence: Synthetic oligonucleotide
ucggcaaaguagacggucu

SEQ ID NO: 1533448 - RNA, 19 nt, Artificial Sequence
  Description of Artificial Sequence: Synthetic oligonucleotide
aaguccuuagugggguagg

SEQ ID NO: 1533449 - RNA, 19 nt, Artificial Sequence
  Description of Artificial Sequence: Synthetic oligonucleotide
uagacggucuuuuggcaca

SEQ ID NO: 1533450 - RNA, 19 nt, Artificial Sequence
  Description of Artificial Sequence: Synthetic oligonucleotide
cuuggaugcguugggauug

SEQ ID NO: 1533451 - RNA, 19 nt, Artificial Sequence
  Description of Artificial Sequence: Synthetic oligonucleotide
ugaccacuccaagaucucg

SEQ ID NO: 1533452 - RNA, 19 nt, Artificial Sequence
  Description of Artificial Sequence: Synthetic oligonucleotide
cauuagugaugugagccag

SEQ ID NO: 1533453 - RNA, 19 nt, Artificial Sequence
  Description of Artificial Sequence: Synthetic oligonucleotide
ucccaaugggacgauacca

SEQ ID NO: 1533454 - RNA, 19 nt, Artificial Sequence
  Description of Artificial Sequence: Synthetic oligonucleotide
uucguuagggucuucccuu

SEQ ID NO: 1533455 - RNA, 19 nt, Artificial Sequence
  Description of Artificial Sequence: Synthetic oligonucleotide
cauuucuugccuccucccc

SEQ ID NO: 1533456 - RNA, 19 nt, Artificial Sequence
  Description of Artificial Sequence: Synthetic oligonucleotide
cugagugaaccaaggcacc

SEQ ID NO: 1533457 - RNA, 19 nt, Artificial Sequence
  Description of Artificial Sequence: Synthetic oligonucleotide
ucuugccguagcaugacuu

SEQ ID NO: 1533458 - RNA, 19 nt, Artificial Sequence
  Description of Artificial Sequence: Synthetic oligonucleotide
cuaaggagaucagacaaca

SEQ ID NO: 1533459 - RNA, 19 nt, Artificial Sequence
  Description of Artificial Sequence: Synthetic oligonucleotide
ggcuacaucggggacagcg

SEQ ID NO: 1533460 - RNA, 19 nt, Artificial Sequence
  Description of Artificial Sequence: Synthetic oligonucleotide
auagcauccuuugcaguag

SEQ ID NO: 1533461 - RNA, 19 nt, Artificial Sequence
  Description of Artificial Sequence: Synthetic oligonucleotide
aggaccagaauugaccacu

SEQ ID NO: 1533462 - RNA, 19 nt, Artificial Sequence
  Description of Artificial Sequence: Synthetic oligonucleotide
guagacggucuuuuggcac

SEQ ID NO: 1533463 - RNA, 19 nt, Artificial Sequence
  Description of Artificial Sequence: Synthetic oligonucleotide
gauuaggaccagaauugac

SEQ ID NO: 1533464 - RNA, 19 nt, Artificial Sequence
  Description of Artificial Sequence: Synthetic oligonucleotide
uucgggucuguagggaggg

SEQ ID NO: 1533465 - RNA, 19 nt, Artificial Sequence
  Description of Artificial Sequence: Synthetic oligonucleotide
ucucgaccacugauaaaug

SEQ ID NO: 1533466 - RNA, 19 nt, Artificial Sequence
  Description of Artificial Sequence: Synthetic oligonucleotide
agccgugacuggcugcgcc

SEQ ID NO: 1533467 - RNA, 19 nt, Artificial Sequence
  Description of Artificial Sequence: Synthetic oligonucleotide
agaggaagcaggauuuaug

SEQ ID NO: 1533468 - RNA, 19 nt, Artificial Sequence
  Description of Artificial Sequence: Synthetic oligonucleotide
ugcguugggauugguagug

SEQ ID NO: 1533469 - RNA, 19 nt, Artificial Sequence
  Description of Artificial Sequence: Synthetic oligonucleotide
ggcauagcauccuuugcag

SEQ ID NO: 1533470 - RNA, 19 nt, Artificial Sequence
  Description of Artificial Sequence: Synthetic oligonucleotide
auugugaccaguagagggu

SEQ ID NO: 1533471 - RNA, 19 nt, Artificial Sequence
  Description of Artificial Sequence: Synthetic oligonucleotide
aggguggacauucgggucu

SEQ ID NO: 1533472 - RNA, 19 nt, Artificial Sequence
  Description of Artificial Sequence: Synthetic oligonucleotide
cagaugaacuauuaggagu

SEQ ID NO: 1533473 - RNA, 19 nt, Artificial Sequence
  Description of Artificial Sequence: Synthetic oligonucleotide
accacugauaaaugugaau

SEQ ID NO: 1533474 - RNA, 19 nt, Artificial Sequence
  Description of Artificial Sequence: Synthetic oligonucleotide
accaaucacuuucucugca

SEQ ID NO: 1533475 - RNA, 19 nt, Artificial Sequence
  Description of Artificial Sequence: Synthetic oligonucleotide
cagauacucaaguccaaca

SEQ ID NO: 1533476 - RNA, 19 nt, Artificial Sequence
  Description of Artificial Sequence: Synthetic oligonucleotide
guagggagggugaagugug

SEQ ID NO: 1533477 - RNA, 19 nt, Artificial Sequence
  Description of Artificial Sequence: Synthetic oligonucleotide
auaccaguuccacauucaa

SEQ ID NO: 1533478 - RNA, 19 nt, Artificial Sequence
  Description of Artificial Sequence: Synthetic oligonucleotide
cauagcauccuuugcagua

SEQ ID NO: 1533479 - RNA, 19 nt, Artificial Sequence
  Description of Artificial Sequence: Synthetic oligonucleotide
gaugccuaaggagaucaga

SEQ ID NO: 1533480 - RNA, 19 nt, Artificial Sequence
  Description of Artificial Sequence: Synthetic oligonucleotide
ggguggucgacucaaggcc

SEQ ID NO: 1533481 - RNA, 19 nt, Artificial Sequence
  Description of Artificial Sequence: Synthetic oligonucleotide
aagaucucgaccacugaua

SEQ ID NO: 1533482 - RNA, 19 nt, Artificial Sequence
  Description of Artificial Sequence: Synthetic oligonucleotide
gaccaugcagaggaagcag

SEQ ID NO: 1533483 - RNA, 19 nt, Artificial Sequence
  Description of Artificial Sequence: Synthetic oligonucleotide
cuuguccgugcucagugug

SEQ ID NO: 1533484 - RNA, 19 nt, Artificial Sequence
  Description of Artificial Sequence: Synthetic oligonucleotide
agcaugacuugcaauagau

SEQ ID NO: 1533485 - RNA, 19 nt, Artificial Sequence
  Description of Artificial Sequence: Synthetic oligonucleotide
uuggcccauacuucuugcc

SEQ ID NO: 1533486 - RNA, 19 nt, Artificial Sequence
  Description of Artificial Sequence: Synthetic oligonucleotide
agcauagacugccuggcua

SEQ ID NO: 1533487 - RNA, 19 nt, Artificial Sequence
  Description of Artificial Sequence: Synthetic oligonucleotide
gaacuauuaggaguggcua

SEQ ID NO: 1533488 - RNA, 19 nt, Artificial Sequence
  Description of Artificial Sequence: Synthetic oligonucleotide
gauaccaguuccacauuca

SEQ ID NO: 1533489 - RNA, 19 nt, Artificial Sequence
  Description of Artificial Sequence: Synthetic oligonucleotide
acuugccggcaccaaucac

SEQ ID NO: 1533490 - RNA, 19 nt, Artificial Sequence
  Description of Artificial Sequence: Synthetic oligonucleotide
caggguggucgacucaagg

SEQ ID NO: 1533491 - RNA, 19 nt, Artificial Sequence
  Description of Artificial Sequence: Synthetic oligonucleotide
gacuuaugccaggacuugc

SEQ ID NO: 1533492 - RNA, 19 nt, Artificial Sequence
  Description of Artificial Sequence: Synthetic oligonucleotide
cuggcugcgcccgagugcg

SEQ ID NO: 1533493 - RNA, 19 nt, Artificial Sequence
  Description of Artificial Sequence: Synthetic oligonucleotide
cacauuuggcacaacggaa

SEQ ID NO: 1533494 - RNA, 19 nt, Artificial Sequence
  Description of Artificial Sequence: Synthetic oligonucleotide
uugggcaaacuuggaugcg

SEQ ID NO: 1533495 - RNA, 19 nt, Artificial Sequence
  Description of Artificial Sequence: Synthetic oligonucleotide
uguccgugcucagugugcc

SEQ ID NO: 1533496 - RNA, 19 nt, Artificial Sequence
  Description of Artificial Sequence: Synthetic oligonucleotide
gccacauuuggcacaacgg

SEQ ID NO: 1533497 - RNA, 19 nt, Artificial Sequence
  Description of Artificial Sequence: Synthetic oligonucleotide
aacccugucugcaccucuc

SEQ ID NO: 1533498 - RNA, 19 nt, Artificial Sequence
  Description of Artificial Sequence: Synthetic oligonucleotide
uccgugcucagugugccug

SEQ ID NO: 1533499 - RNA, 19 nt, Artificial Sequence
  Description of Artificial Sequence: Synthetic oligonucleotide
ugggcaaacuuggaugcgu

SEQ ID NO: 1533500 - RNA, 19 nt, Artificial Sequence
  Description of Artificial Sequence: Synthetic oligonucleotide
uagggucuucccuucccca

SEQ ID NO: 1533501 - RNA, 19 nt, Artificial Sequence
  Description of Artificial Sequence: Synthetic oligonucleotide
uccccaguuuggcauucug

SEQ ID NO: 1533502 - RNA, 19 nt, Artificial Sequence
  Description of Artificial Sequence: Synthetic oligonucleotide
agcaggauuuauggaagcu

SEQ ID NO: 1533503 - RNA, 19 nt, Artificial Sequence
  Description of Artificial Sequence: Synthetic oligonucleotide
uucuugccguagcaugacu

SEQ ID NO: 1533504 - RNA, 19 nt, Artificial Sequence
  Description of Artificial Sequence: Synthetic oligonucleotide
uugaccacuccaagaucuc

SEQ ID NO: 1533505 - RNA, 19 nt, Artificial Sequence
  Description of Artificial Sequence: Synthetic oligonucleotide
cauguucaaaguauuucgu

SEQ ID NO: 1533506 - RNA, 19 nt, Artificial Sequence
  Description of Artificial Sequence: Synthetic oligonucleotide
uaggaccagaauugaccac

SEQ ID NO: 1533507 - RNA, 19 nt, Artificial Sequence
  Description of Artificial Sequence: Synthetic oligonucleotide
uagcacucugggcuaugca

SEQ ID NO: 1533508 - RNA, 19 nt, Artificial Sequence
  Description of Artificial Sequence: Synthetic oligonucleotide
agaccaugcagaggaagca

SEQ ID NO: 1533509 - RNA, 19 nt, Artificial Sequence
  Description of Artificial Sequence: Synthetic oligonucleotide
uuggaugcguugggauugg

SEQ ID NO: 1533510 - RNA, 19 nt, Artificial Sequence
  Description of Artificial Sequence: Synthetic oligonucleotide
gccuaaggagaucagacaa

SEQ ID NO: 1533511 - RNA, 19 nt, Artificial Sequence
  Description of Artificial Sequence: Synthetic oligonucleotide
cucggcaaaguagacgguc

SEQ ID NO: 1533512 - RNA, 19 nt, Artificial Sequence
  Description of Artificial Sequence: Synthetic oligonucleotide
cuugccggcaccaaucacu

SEQ ID NO: 1533513 - RNA, 19 nt, Artificial Sequence
  Description of Artificial Sequence: Synthetic oligonucleotide
gacuugccggcaccaauca

SEQ ID NO: 1533514 - RNA, 19 nt, Artificial Sequence
  Description of Artificial Sequence: Synthetic oligonucleotide
gcaggauuuauggaagcug

SEQ ID NO: 1533515 - RNA, 19 nt, Artificial Sequence
  Description of Artificial Sequence: Synthetic oligonucleotide
gcauagacugccuggcuac

SEQ ID NO: 1533516 - RNA, 19 nt, Artificial Sequence
  Description of Artificial Sequence: Synthetic oligonucleotide
aggagcucaggcagacccc

SEQ ID NO: 1533517 - RNA, 19 nt, Artificial Sequence
  Description of Artificial Sequence: Synthetic oligonucleotide
uacaucggggacagcgcuc

SEQ ID NO: 1533518 - RNA, 19 nt, Artificial Sequence
  Description of Artificial Sequence: Synthetic oligonucleotide
cccaaugggacgauaccag

SEQ ID NO: 1533519 - RNA, 19 nt, Artificial Sequence
  Description of Artificial Sequence: Synthetic oligonucleotide
uugccggcaccaaucacuu

SEQ ID NO: 1533520 - RNA, 19 nt, Artificial Sequence
  Description of Artificial Sequence: Synthetic oligonucleotide
cuguagggagggugaagug

SEQ ID NO: 1533521 - RNA, 19 nt, Artificial Sequence
  Description of Artificial Sequence: Synthetic oligonucleotide
cucccauggauuccugguc

SEQ ID NO: 1533522 - RNA, 19 nt, Artificial Sequence
  Description of Artificial Sequence: Synthetic oligonucleotide
cuccgggaagccgugacug

SEQ ID NO: 1533523 - RNA, 19 nt, Artificial Sequence
  Description of Artificial Sequence: Synthetic oligonucleotide
agacggucuuuuggcacac

SEQ ID NO: 1533524 - RNA, 19 nt, Artificial Sequence
  Description of Artificial Sequence: Synthetic oligonucleotide
gccggcaccaaucacuuuc

SEQ ID NO: 1533525 - RNA, 19 nt, Artificial Sequence
  Description of Artificial Sequence: Synthetic oligonucleotide
acuugaugccuaaggagau

SEQ ID NO: 1533526 - RNA, 19 nt, Artificial Sequence
  Description of Artificial Sequence: Synthetic oligonucleotide
gguacuguccagauucuuc

SEQ ID NO: 1533527 - RNA, 19 nt, Artificial Sequence
  Description of Artificial Sequence: Synthetic oligonucleotide
ucguuagggucuucccuuc

SEQ ID NO: 1533528 - RNA, 19 nt, Artificial Sequence
  Description of Artificial Sequence: Synthetic oligonucleotide
gcaauagaucucuucucca

SEQ ID NO: 1533529 - RNA, 19 nt, Artificial Sequence
  Description of Artificial Sequence: Synthetic oligonucleotide
acaucggggacagcgcuca

SEQ ID NO: 1533530 - RNA, 19 nt, Artificial Sequence
  Description of Artificial Sequence: Synthetic oligonucleotide
uagugggguaggagcucag

SEQ ID NO: 1533531 - RNA, 19 nt, Artificial Sequence
  Description of Artificial Sequence: Synthetic oligonucleotide
gucucuuaaaggugguggu

SEQ ID NO: 1533532 - RNA, 19 nt, Artificial Sequence
  Description of Artificial Sequence: Synthetic oligonucleotide
cuaugcaggccacggagaa

SEQ ID NO: 1533533 - RNA, 19 nt, Artificial Sequence
  Description of Artificial Sequence: Synthetic oligonucleotide
caggacuuaugccaggacu

SEQ ID NO: 1533534 - RNA, 19 nt, Artificial Sequence
  Description of Artificial Sequence: Synthetic oligonucleotide
cuucuugccguagcaugac

SEQ ID NO: 1533535 - RNA, 19 nt, Artificial Sequence
  Description of Artificial Sequence: Synthetic oligonucleotide
acauucgggucuguaggga

SEQ ID NO: 1533536 - RNA, 19 nt, Artificial Sequence
  Description of Artificial Sequence: Synthetic oligonucleotide
aggauuuauggaagcugcu

SEQ ID NO: 1533537 - RNA, 19 nt, Artificial Sequence
  Description of Artificial Sequence: Synthetic oligonucleotide
guggucuacaacccugucu

SEQ ID NO: 1533538 - RNA, 19 nt, Artificial Sequence
  Description of Artificial Sequence: Synthetic oligonucleotide
cuauuaggaguggcuagca

SEQ ID NO: 1533539 - RNA, 19 nt, Artificial Sequence
  Description of Artificial Sequence: Synthetic oligonucleotide
ugaccaguagaggguggac

SEQ ID NO: 1533540 - RNA, 19 nt, Artificial Sequence
  Description of Artificial Sequence: Synthetic oligonucleotide
cucgaccacugauaaaugu

SEQ ID NO: 1533541 - RNA, 19 nt, Artificial Sequence
  Description of Artificial Sequence: Synthetic oligonucleotide
gaccacugauaaaugugaa

SEQ ID NO: 1533542 - RNA, 19 nt, Artificial Sequence
  Description of Artificial Sequence: Synthetic oligonucleotide
gcucagauauugugaccag

SEQ ID NO: 1533543 - RNA, 19 nt, Artificial Sequence
  Description of Artificial Sequence: Synthetic oligonucleotide
gguccugcuuccucccucc

SEQ ID NO: 1533544 - RNA, 19 nt, Artificial Sequence
  Description of Artificial Sequence: Synthetic oligonucleotide
caagaucucgaccacugau

SEQ ID NO: 1533545 - RNA, 19 nt, Artificial Sequence
  Description of Artificial Sequence: Synthetic oligonucleotide
uccuuccuguggucuacaa

SEQ ID NO: 1533546 - RNA, 19 nt, Artificial Sequence
  Description of Artificial Sequence: Synthetic oligonucleotide
cacuccgggaagccgugac

SEQ ID NO: 1533547 - RNA, 19 nt, Artificial Sequence
  Description of Artificial Sequence: Synthetic oligonucleotide
ugacuggcugcgcccgagu

SEQ ID NO: 1533548 - RNA, 19 nt, Artificial Sequence
  Description of Artificial Sequence: Synthetic oligonucleotide
gauugguagugggccugug

SEQ ID NO: 1533549 - RNA, 19 nt, Artificial Sequence
  Description of Artificial Sequence: Synthetic oligonucleotide
ggaccuguucucucuaaaa

SEQ ID NO: 1533550 - RNA, 19 nt, Artificial Sequence
  Description of Artificial Sequence: Synthetic oligonucleotide
ggacuuaugccaggacuug

SEQ ID NO: 1533551 - RNA, 19 nt, Artificial Sequence
  Description of Artificial Sequence: Synthetic oligonucleotide
caccucucugccucccaug

SEQ ID NO: 1533552 - RNA, 19 nt, Artificial Sequence
  Description of Artificial Sequence: Synthetic oligonucleotide
ggauuaggaccagaauuga

SEQ ID NO: 1533553 - RNA, 19 nt, Artificial Sequence
  Description of Artificial Sequence: Synthetic oligonucleotide
gcgacugcacuccgggaag

SEQ ID NO: 1533554 - RNA, 19 nt, Artificial Sequence
  Description of Artificial Sequence: Synthetic oligonucleotide
auagacugccuggcuacau

SEQ ID NO: 1533555 - RNA, 19 nt, Artificial Sequence
  Description of Artificial Sequence: Synthetic oligonucleotide
gggacgauaccaguuccac

SEQ ID NO: 1533556 - RNA, 19 nt, Artificial Sequence
  Description of Artificial Sequence: Synthetic oligonucleotide
gugaccaguagagggugga

SEQ ID NO: 1533557 - RNA, 19 nt, Artificial Sequence
  Description of Artificial Sequence: Synthetic oligonucleotide
cucuuaaagguggugguau

SEQ ID NO: 1533558 - RNA, 19 nt, Artificial Sequence
  Description of Artificial Sequence: Synthetic oligonucleotide
ggagaucagacaacaucca

SEQ ID NO: 1533559 - RNA, 19 nt, Artificial Sequence
  Description of Artificial Sequence: Synthetic oligonucleotide
agcugcugggaggcgcacg

SEQ ID NO: 1533560 - RNA, 19 nt, Artificial Sequence
  Description of Artificial Sequence: Synthetic oligonucleotide
ggcaccaaucacuuucucu

SEQ ID NO: 1533561 - RNA, 19 nt, Artificial Sequence
  Description of Artificial Sequence: Synthetic oligonucleotide
ggcacaacggaagcaggac

SEQ ID NO: 1533562 - RNA, 19 nt, Artificial Sequence
  Description of Artificial Sequence: Synthetic oligonucleotide
gcuacaucggggacagcgc

SEQ ID NO: 1533563 - RNA, 19 nt, Artificial Sequence
  Description of Artificial Sequence: Synthetic oligonucleotide
cacaacggaagcaggacuu

SEQ ID NO: 1533564 - RNA, 19 nt, Artificial Sequence
  Description of Artificial Sequence: Synthetic oligonucleotide
acgauaccaguuccacauu

SEQ ID NO: 1533565 - RNA, 19 nt, Artificial Sequence
  Description of Artificial Sequence: Synthetic oligonucleotide
ggacgauaccaguuccaca

SEQ ID NO: 1533566 - RNA, 19 nt, Artificial Sequence
  Description of Artificial Sequence: Synthetic oligonucleotide
ggaagccgugacuggcugc

SEQ ID NO: 1533567 - RNA, 19 nt, Artificial Sequence
  Description of Artificial Sequence: Synthetic oligonucleotide
ggcgacugcacuccgggaa

SEQ ID NO: 1533568 - RNA, 19 nt, Artificial Sequence
  Description of Artificial Sequence: Synthetic oligonucleotide
cugggcuaugcaggccacg

SEQ ID NO: 1533569 - RNA, 19 nt, Artificial Sequence
  Description of Artificial Sequence: Synthetic oligonucleotide
gggauugaugacagaagaa

SEQ ID NO: 1533570 - RNA, 19 nt, Artificial Sequence
  Description of Artificial Sequence: Synthetic oligonucleotide
ugcgcccugcccguagcca

SEQ ID NO: 1533571 - RNA, 19 nt, Artificial Sequence
  Description of Artificial Sequence: Synthetic oligonucleotide
cuacaucggggacagcgcu

SEQ ID NO: 1533572 - RNA, 19 nt, Artificial Sequence
  Description of Artificial Sequence: Synthetic oligonucleotide
gugacuggcugcgcccgag

SEQ ID NO: 1533573 - RNA, 19 nt, Artificial Sequence
  Description of Artificial Sequence: Synthetic oligonucleotide
guaggagcucaggcagacc

SEQ ID NO: 1533574 - RNA, 19 nt, Artificial Sequence
  Description of Artificial Sequence: Synthetic oligonucleotide
gcuugacuacucugggcuc

SEQ ID NO: 1533575 - RNA, 19 nt, Artificial Sequence
  Description of Artificial Sequence: Synthetic oligonucleotide
gagggaccuguucucucua

SEQ ID NO: 1533576 - RNA, 19 nt, Artificial Sequence
  Description of Artificial Sequence: Synthetic oligonucleotide
cccaggauuaggaccagaa

SEQ ID NO: 1533577 - RNA, 19 nt, Artificial Sequence
  Description of Artificial Sequence: Synthetic oligonucleotide
gcaggacuuaugccaggac

SEQ ID NO: 1533578 - RNA, 19 nt, Artificial Sequence
  Description of Artificial Sequence: Synthetic oligonucleotide
gacggucuuuuggcacacc

SEQ ID NO: 1533579 - RNA, 19 nt, Artificial Sequence
  Description of Artificial Sequence: Synthetic oligonucleotide
cggucuuuuggcacacccc

SEQ ID NO: 1533580 - RNA, 19 nt, Artificial Sequence
  Description of Artificial Sequence: Synthetic oligonucleotide
gccgugacuggcugcgccc

SEQ ID NO: 1533581 - RNA, 19 nt, Artificial Sequence
  Description of Artificial Sequence: Synthetic oligonucleotide
cugcgcccugcccguagcc

SEQ ID NO: 1533582 - RNA, 19 nt, Artificial Sequence
  Description of Artificial Sequence: Synthetic oligonucleotide
cucagauauugugaccagu

SEQ ID NO: 1533583 - RNA, 19 nt, Artificial Sequence
  Description of Artificial Sequence: Synthetic oligonucleotide
gaggcgcacgggcgacugc

SEQ ID NO: 1533584 - RNA, 19 nt, Artificial Sequence
  Description of Artificial Sequence: Synthetic oligonucleotide
cauagacugccuggcuaca

SEQ ID NO: 1533585 - RNA, 19 nt, Artificial Sequence
  Description of Artificial Sequence: Synthetic oligonucleotide
ugcugcccucgcacuggac

SEQ ID NO: 1533586 - RNA, 19 nt, Artificial Sequence
  Description of Artificial Sequence: Synthetic oligonucleotide
ggcccauacuucuugccgu

SEQ ID NO: 1533587 - RNA, 19 nt, Artificial Sequence
  Description of Artificial Sequence: Synthetic oligonucleotide
gcacaacggaagcaggacu

SEQ ID NO: 1533588 - RNA, 19 nt, Artificial Sequence
  Description of Artificial Sequence: Synthetic oligonucleotide
caaggccuuugccacauuu

SEQ ID NO: 1533589 - RNA, 19 nt, Artificial Sequence
  Description of Artificial Sequence: Synthetic oligonucleotide
gcguugggauugguagugg

SEQ ID NO: 1533590 - RNA, 19 nt, Artificial Sequence
  Description of Artificial Sequence: Synthetic oligonucleotide
gcacuggaccuccucggca

SEQ ID NO: 1533591 - RNA, 19 nt, Artificial Sequence
  Description of Artificial Sequence: Synthetic oligonucleotide
cuuccccaucaaacaggga

SEQ ID NO: 1533592 - RNA, 19 nt, Artificial Sequence
  Description of Artificial Sequence: Synthetic oligonucleotide
uggaugcguugggauuggu

SEQ ID NO: 1533593 - RNA, 19 nt, Artificial Sequence
  Description of Artificial Sequence: Synthetic oligonucleotide
ggucgacucaaggccuuug

SEQ ID NO: 1533594 - RNA, 19 nt, Artificial Sequence
  Description of Artificial Sequence: Synthetic oligonucleotide
cgggcgacugcacuccggg

SEQ ID NO: 1533595 - RNA, 19 nt, Artificial Sequence
  Description of Artificial Sequence: Synthetic oligonucleotide
cugcccucgcacuggaccu

SEQ ID NO: 1533596 - RNA, 19 nt, Artificial Sequence
  Description of Artificial Sequence: Synthetic oligonucleotide
ggucuguugcuugacuacu

SEQ ID NO: 1533597 - RNA, 19 nt, Artificial Sequence
  Description of Artificial Sequence: Synthetic oligonucleotide
gcauagcauccuuugcagu

SEQ ID NO: 1533598 - RNA, 19 nt, Artificial Sequence
  Description of Artificial Sequence: Synthetic oligonucleotide
gcacgggcgacugcacucc

SEQ ID NO: 1533599 - RNA, 19 nt, Artificial Sequence
  Description of Artificial Sequence: Synthetic oligonucleotide
caucggggacagcgcucag

SEQ ID NO: 1533600 - RNA, 19 nt, Artificial Sequence
  Description of Artificial Sequence: Synthetic oligonucleotide
gccguagcaugacuugcaa

SEQ ID NO: 1533601 - RNA, 19 nt, Artificial Sequence
  Description of Artificial Sequence: Synthetic oligonucleotide
ccgggaagccgugacuggc

SEQ ID NO: 1533602 - RNA, 19 nt, Artificial Sequence
  Description of Artificial Sequence: Synthetic oligonucleotide
cugcgcccgagugcgcgcc

SEQ ID NO: 1533603 - RNA, 19 nt, Artificial Sequence
  Description of Artificial Sequence: Synthetic oligonucleotide
guggacauucgggucugua

SEQ ID NO: 1533604 - RNA, 19 nt, Artificial Sequence
  Description of Artificial Sequence: Synthetic oligonucleotide
gcuucugggaagggauuga

SEQ ID NO: 1533605 - RNA, 19 nt, Artificial Sequence
  Description of Artificial Sequence: Synthetic oligonucleotide
ggcgggguacacaggcagc

SEQ ID NO: 1533606 - RNA, 19 nt, Artificial Sequence
  Description of Artificial Sequence: Synthetic oligonucleotide
aggcaagagcccagagaaa

SEQ ID NO: 1533607 - RNA, 19 nt, Artificial Sequence
  Description of Artificial Sequence: Synthetic oligonucleotide
gguggucgacucaaggccu

SEQ ID NO: 1533608 - RNA, 19 nt, Artificial Sequence
  Description of Artificial Sequence: Synthetic oligonucleotide
cguuagggucuucccuucc

SEQ ID NO: 1533609 - RNA, 19 nt, Artificial Sequence
  Description of Artificial Sequence: Synthetic oligonucleotide
gcgggguacacaggcagca

SEQ ID NO: 1533610 - RNA, 19 nt, Artificial Sequence
  Description of Artificial Sequence: Synthetic oligonucleotide
ucgggucuguagggagggu

SEQ ID NO: 1533611 - RNA, 19 nt, Artificial Sequence
  Description of Artificial Sequence: Synthetic oligonucleotide
ggaggcgcacgggcgacug

SEQ ID NO: 1533612 - RNA, 19 nt, Artificial Sequence
  Description of Artificial Sequence: Synthetic oligonucleotide
gcgcucagagccaccaauc

SEQ ID NO: 1533613 - RNA, 19 nt, Artificial Sequence
  Description of Artificial Sequence: Synthetic oligonucleotide
ggacagcgcucagagccac

SEQ ID NO: 1533614 - RNA, 19 nt, Artificial Sequence
  Description of Artificial Sequence: Synthetic oligonucleotide
guauuucguuagggucuuc

SEQ ID NO: 1533615 - RNA, 19 nt, Artificial Sequence
  Description of Artificial Sequence: Synthetic oligonucleotide
uggcugcgcccgagugcgc

SEQ ID NO: 1533616 - RNA, 19 nt, Artificial Sequence
  Description of Artificial Sequence: Synthetic oligonucleotide
caacccugucugcaccucu

SEQ ID NO: 1533617 - RNA, 19 nt, Artificial Sequence
  Description of Artificial Sequence: Synthetic oligonucleotide
gggcuaugcaggccacgga

SEQ ID NO: 1533618 - RNA, 19 nt, Artificial Sequence
  Description of Artificial Sequence: Synthetic oligonucleotide
ccgugacuggcugcgcccg

SEQ ID NO: 1533619 - RNA, 19 nt, Artificial Sequence
  Description of Artificial Sequence: Synthetic oligonucleotide
ugccggcaccaaucacuuu

SEQ ID NO: 1533620 - RNA, 19 nt, Artificial Sequence
  Description of Artificial Sequence: Synthetic oligonucleotide
ccaaugggacgauaccagu

SEQ ID NO: 1533621 - RNA, 19 nt, Artificial Sequence
  Description of Artificial Sequence: Synthetic oligonucleotide
uccagacugugggguccuc

SEQ ID NO: 1533622 - RNA, 19 nt, Artificial Sequence
  Description of Artificial Sequence: Synthetic oligonucleotide
gcugcgcccgagugcgcgc

SEQ ID NO: 1533623 - RNA, 19 nt, Artificial Sequence
  Description of Artificial Sequence: Synthetic oligonucleotide
ggcagaccccuaaaccaaa

SEQ ID NO: 1533624 - RNA, 19 nt, Artificial Sequence
  Description of Artificial Sequence: Synthetic oligonucleotide
cgcacgggcgacugcacuc

SEQ ID NO: 1533625 - RNA, 19 nt, Artificial Sequence
  Description of Artificial Sequence: Synthetic oligonucleotide
caacggaagcaggacuuau

SEQ ID NO: 1533626 - RNA, 19 nt, Artificial Sequence
  Description of Artificial Sequence: Synthetic oligonucleotide
gccagauacucaaguccaa

SEQ ID NO: 1533627 - RNA, 19 nt, Artificial Sequence
  Description of Artificial Sequence: Synthetic oligonucleotide
cugccucccauggauuccu

SEQ ID NO: 1533628 - RNA, 19 nt, Artificial Sequence
  Description of Artificial Sequence: Synthetic oligonucleotide
gcccucgcacuggaccucc

SEQ ID NO: 1533629 - RNA, 19 nt, Artificial Sequence
  Description of Artificial Sequence: Synthetic oligonucleotide
ccgccaggguggucgacuc

SEQ ID NO: 1533630 - RNA, 19 nt, Artificial Sequence
  Description of Artificial Sequence: Synthetic oligonucleotide
gggcgacugcacuccggga

SEQ ID NO: 1533631 - RNA, 19 nt, Artificial Sequence
  Description of Artificial Sequence: Synthetic oligonucleotide
caggacuugccggcaccaa

SEQ ID NO: 1533632 - RNA, 19 nt, Artificial Sequence
  Description of Artificial Sequence: Synthetic oligonucleotide
guccgugcucagugugccu

SEQ ID NO: 1533633 - RNA, 19 nt, Artificial Sequence
  Description of Artificial Sequence: Synthetic oligonucleotide
cagcgcucagagccaccaa

SEQ ID NO: 1533634 - RNA, 19 nt, Artificial Sequence
  Description of Artificial Sequence: Synthetic oligonucleotide
cagugguacuguccagauu

SEQ ID NO: 1533635 - RNA, 19 nt, Artificial Sequence
  Description of Artificial Sequence: Synthetic oligonucleotide
ccaggacuugccggcacca

SEQ ID NO: 1533636 - RNA, 19 nt, Artificial Sequence
  Description of Artificial Sequence: Synthetic oligonucleotide
ccggcaccaaucacuuucu

SEQ ID NO: 1533637 - RNA, 19 nt, Artificial Sequence
  Description of Artificial Sequence: Synthetic oligonucleotide
ggcgcacgggcgacugcac

SEQ ID NO: 1533638 - RNA, 19 nt, Artificial Sequence
  Description of Artificial Sequence: Synthetic oligonucleotide
cgcucagagccaccaaucu

SEQ ID NO: 1533639 - RNA, 19 nt, Artificial Sequence
  Description of Artificial Sequence: Synthetic oligonucleotide
ccguagcaugacuugcaau

SEQ ID NO: 1533640 - RNA, 19 nt, Artificial Sequence
  Description of Artificial Sequence: Synthetic oligonucleotide
gcgcacgggcgacugcacu

SEQ ID NO: 1533641 - RNA, 19 nt, Artificial Sequence
  Description of Artificial Sequence: Synthetic oligonucleotide
cggcaccaaucacuuucuc

SEQ ID NO: 1533642 - RNA, 19 nt, Artificial Sequence
  Description of Artificial Sequence: Synthetic oligonucleotide
gcgcccugcccguagccau

SEQ ID NO: 1533643 - RNA, 19 nt, Artificial Sequence
  Description of Artificial Sequence: Synthetic oligonucleotide
gcacuccgggaagccguga

SEQ ID NO: 1533644 - RNA, 19 nt, Artificial Sequence
  Description of Artificial Sequence: Synthetic oligonucleotide
ccucggcaaaguagacggu

SEQ ID NO: 1533645 - RNA, 19 nt, Artificial Sequence
  Description of Artificial Sequence: Synthetic oligonucleotide
cgugacuggcugcgcccga

SEQ ID NO: 1533646 - RNA, 19 nt, Artificial Sequence
  Description of Artificial Sequence: Synthetic oligonucleotide
cccgagugcgcgccguuuu

SEQ ID NO: 1533647 - RNA, 19 nt, Artificial Sequence
  Description of Artificial Sequence: Synthetic oligonucleotide
ccccuuguccgugcucagu

SEQ ID NO: 1533648 - RNA, 19 nt, Artificial Sequence
  Description of Artificial Sequence: Synthetic oligonucleotide
cgcccugcccguagccaua

SEQ ID NO: 1533649 - RNA, 19 nt, Artificial Sequence
  Description of Artificial Sequence: Synthetic oligonucleotide
gcccgagugcgcgccguuu

SEQ ID NO: 1533650 - RNA, 19 nt, Artificial Sequence
  Description of Artificial Sequence: Synthetic oligonucleotide
gcgcccgagugcgcgccgu

SEQ ID NO: 1533651 - RNA, 19 nt, Artificial Sequence
  Description of Artificial Sequence: Synthetic oligonucleotide
cccucgcacuggaccuccu

SEQ ID NO: 1533652 - RNA, 19 nt, Artificial Sequence
  Description of Artificial Sequence: Synthetic oligonucleotide
cgcccgagugcgcgccguu

SEQ ID NO: 1533653 - RNA, 19 nt, Artificial Sequence
  Description of Artificial Sequence: Synthetic oligonucleotide
ucuuuuaugacuaugaugu

SEQ ID NO: 1533654 - RNA, 19 nt, Artificial Sequence
  Description of Artificial Sequence: Synthetic oligonucleotide
aauuauaaaauguguaagg

SEQ ID NO: 1533655 - RNA, 19 nt, Artificial Sequence
  Description of Artificial Sequence: Synthetic oligonucleotide
  modified_base (6)..(6): a, c, u, g, unknown or other
uauuanacgaucauaacag

SEQ ID NO: 1533656 - RNA, 19 nt, Artificial Sequence
  Description of Artificial Sequence: Synthetic oligonucleotide
  modified_base (16)..(16): a, c, u, g, unknown or other
uuaaaaugaguauuanacg

SEQ ID NO: 1533657 - RNA, 19 nt, Artificial Sequence
  Description of Artificial Sequence: Synthetic oligonucleotide
ugacuugagaaccagaucg

SEQ ID NO: 1533658 - RNA, 19 nt, Artificial Sequence
  Description of Artificial Sequence: Synthetic oligonucleotide
aaagauuauaauuaaacau

SEQ ID NO: 1533659 - RNA, 19 nt, Artificial Sequence
  Description of Artificial Sequence: Synthetic oligonucleotide
uaaggucacaaacagaucg

SEQ ID NO: 1533660 - RNA, 19 nt, Artificial Sequence
  Description of Artificial Sequence: Synthetic oligonucleotide
aaaagauuauaauuaaaca

SEQ ID NO: 1533661 - RNA, 19 nt, Artificial Sequence
  Description of Artificial Sequence: Synthetic oligonucleotide
aaugagaauguuuucaugu

SEQ ID NO: 1533662 - RNA, 19 nt, Artificial Sequence
  Description of Artificial Sequence: Synthetic oligonucleotide
aaucauaaagggcaagacg

SEQ ID NO: 1533663 - RNA, 19 nt, Artificial Sequence
  Description of Artificial Sequence: Synthetic oligonucleotide
aggauugugcauuucaucc

SEQ ID NO: 1533664 - RNA, 19 nt, Artificial Sequence
  Description of Artificial Sequence: Synthetic oligonucleotide
aaagugauaaauuacugaa

SEQ ID NO: 1533665 - RNA, 19 nt, Artificial Sequence
  Description of Artificial Sequence: Synthetic oligonucleotide
  modified_base (15)..(15): a, c, u, g, unknown or other
uaaaaugaguauuanacga

SEQ ID NO: 1533666 - RNA, 19 nt, Artificial Sequence
  Description of Artificial Sequence: Synthetic oligonucleotide
gaaucauaagggcauaucg

SEQ ID NO: 1533667 - RNA, 19 nt, Artificial Sequence
  Description of Artificial Sequence: Synthetic oligonucleotide
uauucuauaagcauuaauu

SEQ ID NO: 1533668 - RNA, 19 nt, Artificial Sequence
  Description of Artificial Sequence: Synthetic oligonucleotide
guuauaugaacauucuugg

SEQ ID NO: 1533669 - RNA, 19 nt, Artificial Sequence
  Description of Artificial Sequence: Synthetic oligonucleotide
aagaauacauucuuggacu

SEQ ID NO: 1533670 - RNA, 19 nt, Artificial Sequence
  Description of Artificial Sequence: Synthetic oligonucleotide
uauaugaacauucuuggcu

SEQ ID NO: 1533671 - RNA, 19 nt, Artificial Sequence
  Description of Artificial Sequence: Synthetic oligonucleotide
ucguuugugauucagagga

SEQ ID NO: 1533672 - RNA, 19 nt, Artificial Sequence
  Description of Artificial Sequence: Synthetic oligonucleotide
ugauuuaggcauaugauga

SEQ ID NO: 1533673 - RNA, 19 nt, Artificial Sequence
  Description of Artificial Sequence: Synthetic oligonucleotide
aaaagugauaaauuacuga

SEQ ID NO: 1533674 - RNA, 19 nt, Artificial Sequence
  Description of Artificial Sequence: Synthetic oligonucleotide
  modified_base (4)..(4): a, c, u, g, unknown or other
uuanacgaucauaacagcc

SEQ ID NO: 1533675 - RNA, 19 nt, Artificial Sequence
  Description of Artificial Sequence: Synthetic oligonucleotide
uuuggcauaacccagcuuc

SEQ ID NO: 1533676 - RNA, 19 nt, Artificial Sequence
  Description of Artificial Sequence: Synthetic oligonucleotide
auaauuuacccauuugaag

SEQ ID NO: 1533677 - RNA, 19 nt, Artificial Sequence
  Description of Artificial Sequence: Synthetic oligonucleotide
acuucuuacaaugagaaug

SEQ ID NO: 1533678 - RNA, 19 nt, Artificial Sequence
  Description of Artificial Sequence: Synthetic oligonucleotide
ugaauuuuccacauccaag

SEQ ID NO: 1533679 - RNA, 19 nt, Artificial Sequence
  Description of Artificial Sequence: Synthetic oligonucleotide
acuauaacaauccccaucu

SEQ ID NO: 1533680 - RNA, 19 nt, Artificial Sequence
  Description of Artificial Sequence: Synthetic oligonucleotide
uggacuauaacaaucccca

SEQ ID NO: 1533681 - RNA, 19 nt, Artificial Sequence
  Description of Artificial Sequence: Synthetic oligonucleotide
  modified_base (3)..(3): a, c, u, g, unknown or other
uanacgaucauaacagcca

SEQ ID NO: 1533682 - RNA, 19 nt, Artificial Sequence
  Description of Artificial Sequence: Synthetic oligonucleotide
auaugaacauucuuggcuc

SEQ ID NO: 1533683 - RNA, 19 nt, Artificial Sequence
  Description of Artificial Sequence: Synthetic oligonucleotide
  modified_base (5)..(5): a, c, u, g, unknown or other
auuanacgaucauaacagc

SEQ ID NO: 1533684 - RNA, 19 nt, Artificial Sequence
  Description of Artificial Sequence: Synthetic oligonucleotide
aacagaucguuugugauuc

SEQ ID NO: 1533685 - RNA, 19 nt, Artificial Sequence
  Description of Artificial Sequence: Synthetic oligonucleotide
  modified_base (7)..(7): a, c, u, g, unknown or other
guauuanacgaucauaaca

SEQ ID NO: 1533686 - RNA, 19 nt, Artificial Sequence
  Description of Artificial Sequence: Synthetic oligonucleotide
uccucaaucugcaagauuc

SEQ ID NO: 1533687 - RNA, 19 nt, Artificial Sequence
  Description of Artificial Sequence: Synthetic oligonucleotide
aaaucauaaagggcaagac

SEQ ID NO: 1533688 - RNA, 19 nt, Artificial Sequence
  Description of Artificial Sequence: Synthetic oligonucleotide
aacaauccccaucuuuccc

SEQ ID NO: 1533689 - RNA, 19 nt, Artificial Sequence
  Description of Artificial Sequence: Synthetic oligonucleotide
ucuacaaacagaucgcugu

SEQ ID NO: 1533690 - RNA, 19 nt, Artificial Sequence
  Description of Artificial Sequence: Synthetic oligonucleotide
  modified_base (8)..(8): a, c, u, g, unknown or other
aguauuanacgaucauaac

SEQ ID NO: 1533691 - RNA, 19 nt, Artificial Sequence
  Description of Artificial Sequence: Synthetic oligonucleotide
uuauaaaauguguaagggu

SEQ ID NO: 1533692 - RNA, 19 nt, Artificial Sequence
  Description of Artificial Sequence: Synthetic oligonucleotide
gaucguuugugauucagag

SEQ ID NO: 1533693 - RNA, 19 nt, Artificial Sequence
  Description of Artificial Sequence: Synthetic oligonucleotide
ucuacgaacucacucaacu

SEQ ID NO: 1533694 - RNA, 19 nt, Artificial Sequence
  Description of Artificial Sequence: Synthetic oligonucleotide
augauuuaggcauaugaug

SEQ ID NO: 1533695 - RNA, 19 nt, Artificial Sequence
  Description of Artificial Sequence: Synthetic oligonucleotide
  modified_base (13)..(13): a, c, u, g, unknown or other
aaaugaguauuanacgauc

SEQ ID NO: 1533696 - RNA, 19 nt, Artificial Sequence
  Description of Artificial Sequence: Synthetic oligonucleotide
agggguagaaucuagccuc

SEQ ID NO: 1533697 - RNA, 19 nt, Artificial Sequence
  Description of Artificial Sequence: Synthetic oligonucleotide
auuccauaugcuuugcuag

SEQ ID NO: 1533698 - RNA, 19 nt, Artificial Sequence
  Description of Artificial Sequence: Synthetic oligonucleotide
uuauucaaaguaacugaag

SEQ ID NO: 1533699 - RNA, 19 nt, Artificial Sequence
  Description of Artificial Sequence: Synthetic oligonucleotide
ugacaaaaucauaaagggc

SEQ ID NO: 1533700 - RNA, 19 nt, Artificial Sequence
  Description of Artificial Sequence: Synthetic oligonucleotide
augauuggaaucauaaggg

SEQ ID NO: 1533701 - RNA, 19 nt, Artificial Sequence
  Description of Artificial Sequence: Synthetic oligonucleotide
ugaaguacugauuugugaa

SEQ ID NO: 1533702 - RNA, 19 nt, Artificial Sequence
  Description of Artificial Sequence: Synthetic oligonucleotide
guauaauuuacccauuuga

SEQ ID NO: 1533703 - RNA, 19 nt, Artificial Sequence
  Description of Artificial Sequence: Synthetic oligonucleotide
aauauuaaggaaaauuaua

SEQ ID NO: 1533704 - RNA, 19 nt, Artificial Sequence
  Description of Artificial Sequence: Synthetic oligonucleotide
agucuaccgaagcugaucg

SEQ ID NO: 1533705 - RNA, 19 nt, Artificial Sequence
  Description of Artificial Sequence: Synthetic oligonucleotide
uguaaucucucacuucugc

SEQ ID NO: 1533706 - RNA, 19 nt, Artificial Sequence
  Description of Artificial Sequence: Synthetic oligonucleotide
uuggacuauaacaaucccc

SEQ ID NO: 1533707 - RNA, 19 nt, Artificial Sequence
  Description of Artificial Sequence: Synthetic oligonucleotide
  modified_base (18)..(18): a, c, u, g, unknown or other
uauuaaaaugaguauuana

SEQ ID NO: 1533708 - RNA, 19 nt, Artificial Sequence
  Description of Artificial Sequence: Synthetic oligonucleotide
auaacaauccccaucuuuc

SEQ ID NO: 1533709 - RNA, 19 nt, Artificial Sequence
  Description of Artificial Sequence: Synthetic oligonucleotide
uguaaggguacaauuuuga

SEQ ID NO: 1533710 - RNA, 19 nt, Artificial Sequence
  Description of Artificial Sequence: Synthetic oligonucleotide
aauguguaaggguacaauu

SEQ ID NO: 1533711 - RNA, 19 nt, Artificial Sequence
  Description of Artificial Sequence: Synthetic oligonucleotide
aucauaagggcauaucgug

SEQ ID NO: 1533712 - RNA, 19 nt, Artificial Sequence
  Description of Artificial Sequence: Synthetic oligonucleotide
uucauguauaauuuaccca

SEQ ID NO: 1533713 - RNA, 19 nt, Artificial Sequence
  Description of Artificial Sequence: Synthetic oligonucleotide
uccuuauucaaaguaacug

SEQ ID NO: 1533714 - RNA, 19 nt, Artificial Sequence
  Description of Artificial Sequence: Synthetic oligonucleotide
uuuucggcuauuaucuuga

SEQ ID NO: 1533715 - RNA, 19 nt, Artificial Sequence
  Description of Artificial Sequence: Synthetic oligonucleotide
acuaugaugucuuucucca

SEQ ID NO: 1533716 - RNA, 19 nt, Artificial Sequence
  Description of Artificial Sequence: Synthetic oligonucleotide
uuuaugacuaugaugucuu

SEQ ID NO: 1533717 - RNA, 19 nt, Artificial Sequence
  Description of Artificial Sequence: Synthetic oligonucleotide
acugaaggaaucuucaaau

SEQ ID NO: 1533718 - RNA, 19 nt, Artificial Sequence
  Description of Artificial Sequence: Synthetic oligonucleotide
uuugaaguacugauuugug

SEQ ID NO: 1533719 - RNA, 19 nt, Artificial Sequence
  Description of Artificial Sequence: Synthetic oligonucleotide
uuuuaugacuaugaugucu

SEQ ID NO: 1533720 - RNA, 19 nt, Artificial Sequence
  Description of Artificial Sequence: Synthetic oligonucleotide
auucuauaagcauuaauua

SEQ ID NO: 1533721 - RNA, 19 nt, Artificial Sequence
  Description of Artificial Sequence: Synthetic oligonucleotide
gacuaugaugucuuucucc

SEQ ID NO: 1533722 - RNA, 19 nt, Artificial Sequence
  Description of Artificial Sequence: Synthetic oligonucleotide
aauuacugcaguucacuau

SEQ ID NO: 1533723 - RNA, 19 nt, Artificial Sequence
  Description of Artificial Sequence: Synthetic oligonucleotide
uuaggcauaugaugauugg

SEQ ID NO: 1533724 - RNA, 19 nt, Artificial Sequence
  Description of Artificial Sequence: Synthetic oligonucleotide
augacuaugaugucuuucu

SEQ ID NO: 1533725 - RNA, 19 nt, Artificial Sequence
  Description of Artificial Sequence: Synthetic oligonucleotide
aggaaaagugauaaauuac

SEQ ID NO: 1533726 - RNA, 19 nt, Artificial Sequence
  Description of Artificial Sequence: Synthetic oligonucleotide
ugauuggaaucauaagggc

SEQ ID NO: 1533727 - RNA, 19 nt, Artificial Sequence
  Description of Artificial Sequence: Synthetic oligonucleotide
aagacgaucugcuugggua

SEQ ID NO: 1533728 - RNA, 19 nt, Artificial Sequence
  Description of Artificial Sequence: Synthetic oligonucleotide
auagacaguagucacugcu

SEQ ID NO: 1533729 - RNA, 19 nt, Artificial Sequence
  Description of Artificial Sequence: Synthetic oligonucleotide
uuauaugaacauucuuggc

SEQ ID NO: 1533730 - RNA, 19 nt, Artificial Sequence
  Description of Artificial Sequence: Synthetic oligonucleotide
auuguguuccccuauuaca

SEQ ID NO: 1533731 - RNA, 19 nt, Artificial Sequence
  Description of Artificial Sequence: Synthetic oligonucleotide
aauuuacccauuugaagua

SEQ ID NO: 1533732 - RNA, 19 nt, Artificial Sequence
  Description of Artificial Sequence: Synthetic oligonucleotide
uuuaucacaucccgaauua

SEQ ID NO: 1533733 - RNA, 19 nt, Artificial Sequence
  Description of Artificial Sequence: Synthetic oligonucleotide
uuugugauucagaggaacu

SEQ ID NO: 1533734 - RNA, 19 nt, Artificial Sequence
  Description of Artificial Sequence: Synthetic oligonucleotide
aacugugaguccuuauuca

SEQ ID NO: 1533735 - RNA, 19 nt, Artificial Sequence
  Description of Artificial Sequence: Synthetic oligonucleotide
uauaacaauccccaucuuu

SEQ ID NO: 1533736 - RNA, 19 nt, Artificial Sequence
  Description of Artificial Sequence: Synthetic oligonucleotide
cauccaaguaacuuccacc

SEQ ID NO: 1533737 - RNA, 19 nt, Artificial Sequence
  Description of Artificial Sequence: Synthetic oligonucleotide
agauuauaauuaaacauca

SEQ ID NO: 1533738 - RNA, 19 nt, Artificial Sequence
  Description of Artificial Sequence: Synthetic oligonucleotide
uuaauuacugcaguucacu

SEQ ID NO: 1533739 - RNA, 19 nt, Artificial Sequence
  Description of Artificial Sequence: Synthetic oligonucleotide
aacaucagcaaacuuuauu

SEQ ID NO: 1533740 - RNA, 19 nt, Artificial Sequence
  Description of Artificial Sequence: Synthetic oligonucleotide
aagcauuaauuacugcagu

SEQ ID NO: 1533741 - RNA, 19 nt, Artificial Sequence
  Description of Artificial Sequence: Synthetic oligonucleotide
cuuggguaaggucacaaac

SEQ ID NO: 1533742 - RNA, 19 nt, Artificial Sequence
  Description of Artificial Sequence: Synthetic oligonucleotide
uugaaguacugauuuguga

SEQ ID NO: 1533743 - RNA, 19 nt, Artificial Sequence
  Description of Artificial Sequence: Synthetic oligonucleotide
agacaaucagauuguguuc

SEQ ID NO: 1533744 - RNA, 19 nt, Artificial Sequence
  Description of Artificial Sequence: Synthetic oligonucleotide
cauaacagccaaaagauua

SEQ ID NO: 1533745 - RNA, 19 nt, Artificial Sequence
  Description of Artificial Sequence: Synthetic oligonucleotide
aaucauaagggcauaucgu

SEQ ID NO: 1533746 - RNA, 19 nt, Artificial Sequence
  Description of Artificial Sequence: Synthetic oligonucleotide
  modified_base (2)..(2): a, c, u, g, unknown or other
anacgaucauaacagccaa

SEQ ID NO: 1533747 - RNA, 19 nt, Artificial Sequence
  Description of Artificial Sequence: Synthetic oligonucleotide
uucuuggacuauaacaauc

SEQ ID NO: 1533748 - RNA, 19 nt, Artificial Sequence
  Description of Artificial Sequence: Synthetic oligonucleotide
agaaggauagacaguaguc

SEQ ID NO: 1533749 - RNA, 19 nt, Artificial Sequence
  Description of Artificial Sequence: Synthetic oligonucleotide
ucauaagggcauaucguga

SEQ ID NO: 1533750 - RNA, 19 nt, Artificial Sequence
  Description of Artificial Sequence: Synthetic oligonucleotide
uaauuaucuggaacuguga

SEQ ID NO: 1533751 - RNA, 19 nt, Artificial Sequence
  Description of Artificial Sequence: Synthetic oligonucleotide
  modified_base (9)..(9): a, c, u, g, unknown or other
gaguauuanacgaucauaa

SEQ ID NO: 1533752 - RNA, 19 nt, Artificial Sequence
  Description of Artificial Sequence: Synthetic oligonucleotide
ugugugggcuccuacuccg

SEQ ID NO: 1533753 - RNA, 19 nt, Artificial Sequence
  Description of Artificial Sequence: Synthetic oligonucleotide
uuguguuccccuauuacaa

SEQ ID NO: 1533754 - RNA, 19 nt, Artificial Sequence
  Description of Artificial Sequence: Synthetic oligonucleotide
uguguaaggguacaauuuu

SEQ ID NO: 1533755 - RNA, 19 nt, Artificial Sequence
  Description of Artificial Sequence: Synthetic oligonucleotide
  modified_base (10)..(10): a, c, u, g, unknown or other
ugaguauuanacgaucaua

SEQ ID NO: 1533756 - RNA, 19 nt, Artificial Sequence
  Description of Artificial Sequence: Synthetic oligonucleotide
uccccuauuacaacuccag

SEQ ID NO: 1533757 - RNA, 19 nt, Artificial Sequence
  Description of Artificial Sequence: Synthetic oligonucleotide
ugcaccuuuaucacauccc

SEQ ID NO: 1533758 - RNA, 19 nt, Artificial Sequence
  Description of Artificial Sequence: Synthetic oligonucleotide
uaaggguacaauuuugauu

SEQ ID NO: 1533759 - RNA, 19 nt, Artificial Sequence
  Description of Artificial Sequence: Synthetic oligonucleotide
gacuauaacaauccccauc

SEQ ID NO: 1533760 - RNA, 19 nt, Artificial Sequence
  Description of Artificial Sequence: Synthetic oligonucleotide
acaaacagaucguuuguga

SEQ ID NO: 1533761 - RNA, 19 nt, Artificial Sequence
  Description of Artificial Sequence: Synthetic oligonucleotide
auaucgugacuucauccuc

SEQ ID NO: 1533762 - RNA, 19 nt, Artificial Sequence
  Description of Artificial Sequence: Synthetic oligonucleotide
gauuguguuccccuauuac

SEQ ID NO: 1533763 - RNA, 19 nt, Artificial Sequence
  Description of Artificial Sequence: Synthetic oligonucleotide
aucguuugugauucagagg

SEQ ID NO: 1533764 - RNA, 19 nt, Artificial Sequence
  Description of Artificial Sequence: Synthetic oligonucleotide
ucguuuucaaugacuugag

SEQ ID NO: 1533765 - RNA, 19 nt, Artificial Sequence
  Description of Artificial Sequence: Synthetic oligonucleotide
aagcugaucgccguucuuc

SEQ ID NO: 1533766 - RNA, 19 nt, Artificial Sequence
  Description of Artificial Sequence: Synthetic oligonucleotide
agacaguagucacugcuag

SEQ ID NO: 1533767 - RNA, 19 nt, Artificial Sequence
  Description of Artificial Sequence: Synthetic oligonucleotide
auuaauuacugcaguucac

SEQ ID NO: 1533768 - RNA, 19 nt, Artificial Sequence
  Description of Artificial Sequence: Synthetic oligonucleotide
caaguaacuuccaccagac

SEQ ID NO: 1533769 - RNA, 19 nt, Artificial Sequence
  Description of Artificial Sequence: Synthetic oligonucleotide
ucuaccgaagcugaucgcc

SEQ ID NO: 1533770 - RNA, 19 nt, Artificial Sequence
  Description of Artificial Sequence: Synthetic oligonucleotide
gauucauggucugaaagca

SEQ ID NO: 1533771 - RNA, 19 nt, Artificial Sequence
  Description of Artificial Sequence: Synthetic oligonucleotide
gaaggauagacaguaguca

SEQ ID NO: 1533772 - RNA, 19 nt, Artificial Sequence
  Description of Artificial Sequence: Synthetic oligonucleotide
cauuaauuacugcaguuca

SEQ ID NO: 1533773 - RNA, 19 nt, Artificial Sequence
  Description of Artificial Sequence: Synthetic oligonucleotide
uagggguagaaucuagccu

SEQ ID NO: 1533774 - RNA, 19 nt, Artificial Sequence
  Description of Artificial Sequence: Synthetic oligonucleotide
aagggcauaucgugacuuc

SEQ ID NO: 1533775 - RNA, 19 nt, Artificial Sequence
  Description of Artificial Sequence: Synthetic oligonucleotide
uuacccauuugaaguacug

SEQ ID NO: 1533776 - RNA, 19 nt, Artificial Sequence
  Description of Artificial Sequence: Synthetic oligonucleotide
uaacaauccccaucuuucc

SEQ ID NO: 1533777 - RNA, 19 nt, Artificial Sequence
  Description of Artificial Sequence: Synthetic oligonucleotide
ccuauuacaacuccaguag

SEQ ID NO: 1533778 - RNA, 19 nt, Artificial Sequence
  Description of Artificial Sequence: Synthetic oligonucleotide
gauuggaaucauaagggca

SEQ ID NO: 1533779 - RNA, 19 nt, Artificial Sequence
  Description of Artificial Sequence: Synthetic oligonucleotide
uugacuuuagcagccaagu

SEQ ID NO: 1533780 - RNA, 19 nt, Artificial Sequence
  Description of Artificial Sequence: Synthetic oligonucleotide
ccaguagaaggauagacag

SEQ ID NO: 1533781 - RNA, 19 nt, Artificial Sequence
  Description of Artificial Sequence: Synthetic oligonucleotide
aaacagaucgcugucguuu

SEQ ID NO: 1533782 - RNA, 19 nt, Artificial Sequence
  Description of Artificial Sequence: Synthetic oligonucleotide
uuugugugggcuccuacuc

SEQ ID NO: 1533783 - RNA, 19 nt, Artificial Sequence
  Description of Artificial Sequence: Synthetic oligonucleotide
uuuacccauuugaaguacu

SEQ ID NO: 1533784 - RNA, 19 nt, Artificial Sequence
  Description of Artificial Sequence: Synthetic oligonucleotide
gauuccauaugcuuugcua

SEQ ID NO: 1533785 - RNA, 19 nt, Artificial Sequence
  Description of Artificial Sequence: Synthetic oligonucleotide
ucccgaauuaccucagugu

SEQ ID NO: 1533786 - RNA, 19 nt, Artificial Sequence
  Description of Artificial Sequence: Synthetic oligonucleotide
gucguuuucaaugacuuga

SEQ ID NO: 1533787 - RNA, 19 nt, Artificial Sequence
  Description of Artificial Sequence: Synthetic oligonucleotide
cuuggacuauaacaauccc

SEQ ID NO: 1533788 - RNA, 19 nt, Artificial Sequence
  Description of Artificial Sequence: Synthetic oligonucleotide
ucgagucuaccgaagcuga

SEQ ID NO: 1533789 - RNA, 19 nt, Artificial Sequence
  Description of Artificial Sequence: Synthetic oligonucleotide
acaauccccaucuuuccca

SEQ ID NO: 1533790 - RNA, 19 nt, Artificial Sequence
  Description of Artificial Sequence: Synthetic oligonucleotide
guagaaucuagccucaccu

SEQ ID NO: 1533791 - RNA, 19 nt, Artificial Sequence
  Description of Artificial Sequence: Synthetic oligonucleotide
ggcaagacgaucugcuugg

SEQ ID NO: 1533792 - RNA, 19 nt, Artificial Sequence
  Description of Artificial Sequence: Synthetic oligonucleotide
cacugcuagggguagaauc

SEQ ID NO: 1533793 - RNA, 19 nt, Artificial Sequence
  Description of Artificial Sequence: Synthetic oligonucleotide
ucuagccucaccugugacu

SEQ ID NO: 1533794 - RNA, 19 nt, Artificial Sequence
  Description of Artificial Sequence: Synthetic oligonucleotide
uuaccucaguguaugacuu

SEQ ID NO: 1533795 - RNA, 19 nt, Artificial Sequence
  Description of Artificial Sequence: Synthetic oligonucleotide
uuggcauaacccagcuucc

SEQ ID NO: 1533796 - RNA, 19 nt, Artificial Sequence
  Description of Artificial Sequence: Synthetic oligonucleotide
uccuucucgacucggaauu

SEQ ID NO: 1533797 - RNA, 19 nt, Artificial Sequence
  Description of Artificial Sequence: Synthetic oligonucleotide
agugguuacugaguucuuc

SEQ ID NO: 1533798 - RNA, 19 nt, Artificial Sequence
  Description of Artificial Sequence: Synthetic oligonucleotide
aucccgaauuaccucagug

SEQ ID NO: 1533799 - RNA, 19 nt, Artificial Sequence
  Description of Artificial Sequence: Synthetic oligonucleotide
cuaccgaagcugaucgccg

SEQ ID NO: 1533800 - RNA, 19 nt, Artificial Sequence
  Description of Artificial Sequence: Synthetic oligonucleotide
uaauuacugcaguucacua

SEQ ID NO: 1533801 - RNA, 19 nt, Artificial Sequence
  Description of Artificial Sequence: Synthetic oligonucleotide
acugccucgagucuaccga

SEQ ID NO: 1533802 - RNA, 19 nt, Artificial Sequence
  Description of Artificial Sequence: Synthetic oligonucleotide
uggucugaaagcauuuauu

SEQ ID NO: 1533803 - RNA, 19 nt, Artificial Sequence
  Description of Artificial Sequence: Synthetic oligonucleotide
uaugaacauucuuggcucu

SEQ ID NO: 1533804 - RNA, 19 nt, Artificial Sequence
  Description of Artificial Sequence: Synthetic oligonucleotide
acuuuauucuauaagcauu

SEQ ID NO: 1533805 - RNA, 19 nt, Artificial Sequence
  Description of Artificial Sequence: Synthetic oligonucleotide
uugugugggcuccuacucc

SEQ ID NO: 1533806 - RNA, 19 nt, Artificial Sequence
  Description of Artificial Sequence: Synthetic oligonucleotide
uaugacuaugaugucuuuc

SEQ ID NO: 1533807 - RNA, 19 nt, Artificial Sequence
  Description of Artificial Sequence: Synthetic oligonucleotide
ucucuacgaacucacucaa

SEQ ID NO: 1533808 - RNA, 19 nt, Artificial Sequence
  Description of Artificial Sequence: Synthetic oligonucleotide
guaacugaaggaaucuuca

SEQ ID NO: 1533809 - RNA, 19 nt, Artificial Sequence
  Description of Artificial Sequence: Synthetic oligonucleotide
cucucuacgaacucacuca

SEQ ID NO: 1533810 - RNA, 19 nt, Artificial Sequence
  Description of Artificial Sequence: Synthetic oligonucleotide
aagugauaaauuacugaaa

SEQ ID NO: 1533811 - RNA, 19 nt, Artificial Sequence
  Description of Artificial Sequence: Synthetic oligonucleotide
ugcuagggguagaaucuag

SEQ ID NO: 1533812 - RNA, 19 nt, Artificial Sequence
  Description of Artificial Sequence: Synthetic oligonucleotide
uuuucguuugugugggcuc

SEQ ID NO: 1533813 - RNA, 19 nt, Artificial Sequence
  Description of Artificial Sequence: Synthetic oligonucleotide
aaagcaggauugugcauuu

SEQ ID NO: 1533814 - RNA, 19 nt, Artificial Sequence
  Description of Artificial Sequence: Synthetic oligonucleotide
uguuccccuauuacaacuc

SEQ ID NO: 1533815 - RNA, 19 nt, Artificial Sequence
  Description of Artificial Sequence: Synthetic oligonucleotide
uuccauaugcuuugcuagu

SEQ ID NO: 1533816 - RNA, 19 nt, Artificial Sequence
  Description of Artificial Sequence: Synthetic oligonucleotide
gacugccucgagucuaccg

SEQ ID NO: 1533817 - RNA, 19 nt, Artificial Sequence
  Description of Artificial Sequence: Synthetic oligonucleotide
uuucguuugugugggcucc

SEQ ID NO: 1533818 - RNA, 19 nt, Artificial Sequence
  Description of Artificial Sequence: Synthetic oligonucleotide
ugucguuuucaaugacuug

SEQ ID NO: 1533819 - RNA, 19 nt, Artificial Sequence
  Description of Artificial Sequence: Synthetic oligonucleotide
uuguaaucucucacuucug

SEQ ID NO: 1533820 - RNA, 19 nt, Artificial Sequence
  Description of Artificial Sequence: Synthetic oligonucleotide
aucgugacuucauccucgg

SEQ ID NO: 1533821 - RNA, 19 nt, Artificial Sequence
  Description of Artificial Sequence: Synthetic oligonucleotide
ugguuauaugaacauucuu

SEQ ID NO: 1533822 - RNA, 19 nt, Artificial Sequence
  Description of Artificial Sequence: Synthetic oligonucleotide
ccauuccccauucagaaag

SEQ ID NO: 1533823 - RNA, 19 nt, Artificial Sequence
  Description of Artificial Sequence: Synthetic oligonucleotide
aguacugauuugugaaaau

SEQ ID NO: 1533824 - RNA, 19 nt, Artificial Sequence
  Description of Artificial Sequence: Synthetic oligonucleotide
ugaucgccguucuucauuc

SEQ ID NO: 1533825 - RNA, 19 nt, Artificial Sequence
  Description of Artificial Sequence: Synthetic oligonucleotide
uguguuccccuauuacaac

SEQ ID NO: 1533826 - RNA, 19 nt, Artificial Sequence
  Description of Artificial Sequence: Synthetic oligonucleotide
gauagacaguagucacugc

SEQ ID NO: 1533827 - RNA, 19 nt, Artificial Sequence
  Description of Artificial Sequence: Synthetic oligonucleotide
uuccccuauuacaacucca

SEQ ID NO: 1533828 - RNA, 19 nt, Artificial Sequence
  Description of Artificial Sequence: Synthetic oligonucleotide
aacagaucgcugucguuuu

SEQ ID NO: 1533829 - RNA, 19 nt, Artificial Sequence
  Description of Artificial Sequence: Synthetic oligonucleotide
aagaaucuauuaaaauauu

SEQ ID NO: 1533830 - RNA, 19 nt, Artificial Sequence
  Description of Artificial Sequence: Synthetic oligonucleotide
ugacuuuagcagccaaguc

SEQ ID NO: 1533831 - RNA, 19 nt, Artificial Sequence
  Description of Artificial Sequence: Synthetic oligonucleotide
augagaauguuuucaugua

SEQ ID NO: 1533832 - RNA, 19 nt, Artificial Sequence
  Description of Artificial Sequence: Synthetic oligonucleotide
gugcaccuuuaucacaucc

SEQ ID NO: 1533833 - RNA, 19 nt, Artificial Sequence
  Description of Artificial Sequence: Synthetic oligonucleotide
gaaucuagccucaccugug

SEQ ID NO: 1533834 - RNA, 19 nt, Artificial Sequence
  Description of Artificial Sequence: Synthetic oligonucleotide
ggauagacaguagucacug

SEQ ID NO: 1533835 - RNA, 19 nt, Artificial Sequence
  Description of Artificial Sequence: Synthetic oligonucleotide
ugacuaugaugucuuucuc

SEQ ID NO: 1533836 - RNA, 19 nt, Artificial Sequence
  Description of Artificial Sequence: Synthetic oligonucleotide
agaauacauucuuggacua

SEQ ID NO: 1533837 - RNA, 19 nt, Artificial Sequence
  Description of Artificial Sequence: Synthetic oligonucleotide
cuacgaacucacucaacuc

SEQ ID NO: 1533838 - RNA, 19 nt, Artificial Sequence
  Description of Artificial Sequence: Synthetic oligonucleotide
ugugggcuccuacuccgag

SEQ ID NO: 1533839 - RNA, 19 nt, Artificial Sequence
  Description of Artificial Sequence: Synthetic oligonucleotide
ccuuauucaaaguaacuga

SEQ ID NO: 1533840 - RNA, 19 nt, Artificial Sequence
  Description of Artificial Sequence: Synthetic oligonucleotide
uguaggauuggcgccuucu

SEQ ID NO: 1533841 - RNA, 19 nt, Artificial Sequence
  Description of Artificial Sequence: Synthetic oligonucleotide
uuuauucuauaagcauuaa

SEQ ID NO: 1533842 - RNA, 19 nt, Artificial Sequence
  Description of Artificial Sequence: Synthetic oligonucleotide
gcauaugaugauuggaauc

SEQ ID NO: 1533843 - RNA, 19 nt, Artificial Sequence
  Description of Artificial Sequence: Synthetic oligonucleotide
cacaucccgaauuaccuca

SEQ ID NO: 1533844 - RNA, 19 nt, Artificial Sequence
  Description of Artificial Sequence: Synthetic oligonucleotide
ucgcugucguuuucaauga

SEQ ID NO: 1533845 - RNA, 19 nt, Artificial Sequence
  Description of Artificial Sequence: Synthetic oligonucleotide
cucgagucuaccgaagcug

SEQ ID NO: 1533846 - RNA, 19 nt, Artificial Sequence
  Description of Artificial Sequence: Synthetic oligonucleotide
cuuuuaugacuaugauguc

SEQ ID NO: 1533847 - RNA, 19 nt, Artificial Sequence
  Description of Artificial Sequence: Synthetic oligonucleotide
auaagggcauaucgugacu

SEQ ID NO: 1533848 - RNA, 19 nt, Artificial Sequence
  Description of Artificial Sequence: Synthetic oligonucleotide
gaguccuuauucaaaguaa

SEQ ID NO: 1533849 - RNA, 19 nt, Artificial Sequence
  Description of Artificial Sequence: Synthetic oligonucleotide
uacccauuugaaguacuga

SEQ ID NO: 1533850 - RNA, 19 nt, Artificial Sequence
  Description of Artificial Sequence: Synthetic oligonucleotide
gguagaaucuagccucacc

SEQ ID NO: 1533851 - RNA, 19 nt, Artificial Sequence
  Description of Artificial Sequence: Synthetic oligonucleotide
ccacauccaaguaacuucc

SEQ ID NO: 1533852 - RNA, 19 nt, Artificial Sequence
  Description of Artificial Sequence: Synthetic oligonucleotide
uuaucacaucccgaauuac

SEQ ID NO: 1533853 - RNA, 19 nt, Artificial Sequence
  Description of Artificial Sequence: Synthetic oligonucleotide
aggcauaugaugauuggaa

SEQ ID NO: 1533854 - RNA, 19 nt, Artificial Sequence
  Description of Artificial Sequence: Synthetic oligonucleotide
agacgaucugcuuggguaa

SEQ ID NO: 1533855 - RNA, 19 nt, Artificial Sequence
  Description of Artificial Sequence: Synthetic oligonucleotide
cauaucgugacuucauccu

SEQ ID NO: 1533856 - RNA, 19 nt, Artificial Sequence
  Description of Artificial Sequence: Synthetic oligonucleotide
agucuacaaacagaucgcu

SEQ ID NO: 1533857 - RNA, 19 nt, Artificial Sequence
  Description of Artificial Sequence: Synthetic oligonucleotide
gacgccgucaccuccucca

SEQ ID NO: 1533858 - RNA, 19 nt, Artificial Sequence
  Description of Artificial Sequence: Synthetic oligonucleotide
ugcuuugcuagugaugauu

SEQ ID NO: 1533859 - RNA, 19 nt, Artificial Sequence
  Description of Artificial Sequence: Synthetic oligonucleotide
uugugauucagaggaacuu

SEQ ID NO: 1533860 - RNA, 19 nt, Artificial Sequence
  Description of Artificial Sequence: Synthetic oligonucleotide
uaacuuccaccagacugcc

SEQ ID NO: 1533861 - RNA, 19 nt, Artificial Sequence
  Description of Artificial Sequence: Synthetic oligonucleotide
agcugaucgccguucuuca

SEQ ID NO: 1533862 - RNA, 19 nt, Artificial Sequence
  Description of Artificial Sequence: Synthetic oligonucleotide
uaggauuggcgccuucuuu

SEQ ID NO: 1533863 - RNA, 19 nt, Artificial Sequence
  Description of Artificial Sequence: Synthetic oligonucleotide
auguguaaggguacaauuu

SEQ ID NO: 1533864 - RNA, 19 nt, Artificial Sequence
  Description of Artificial Sequence: Synthetic oligonucleotide
acagaucgcugucguuuuc

SEQ ID NO: 1533865 - RNA, 19 nt, Artificial Sequence
  Description of Artificial Sequence: Synthetic oligonucleotide
agauuguguuccccuauua

SEQ ID NO: 1533866 - RNA, 19 nt, Artificial Sequence
  Description of Artificial Sequence: Synthetic oligonucleotide
ugccucgagucuaccgaag

SEQ ID NO: 1533867 - RNA, 19 nt, Artificial Sequence
  Description of Artificial Sequence: Synthetic oligonucleotide
ugauugacuuuagcagcca

SEQ ID NO: 1533868 - RNA, 19 nt, Artificial Sequence
  Description of Artificial Sequence: Synthetic oligonucleotide
cagaucguuugugauucag

SEQ ID NO: 1533869 - RNA, 19 nt, Artificial Sequence
  Description of Artificial Sequence: Synthetic oligonucleotide
uccgagcccuucuaugccu

SEQ ID NO: 1533870 - RNA, 19 nt, Artificial Sequence
  Description of Artificial Sequence: Synthetic oligonucleotide
ccagguaagauuuuggacu

SEQ ID NO: 1533871 - RNA, 19 nt, Artificial Sequence
  Description of Artificial Sequence: Synthetic oligonucleotide
acaacuccaguagaaggau

SEQ ID NO: 1533872 - RNA, 19 nt, Artificial Sequence
  Description of Artificial Sequence: Synthetic oligonucleotide
gggcaagacgaucugcuug

SEQ ID NO: 1533873 - RNA, 19 nt, Artificial Sequence
  Description of Artificial Sequence: Synthetic oligonucleotide
aucagauuguguuccccua

SEQ ID NO: 1533874 - RNA, 19 nt, Artificial Sequence
  Description of Artificial Sequence: Synthetic oligonucleotide
gagucuaccgaagcugauc

SEQ ID NO: 1533875 - RNA, 19 nt, Artificial Sequence
  Description of Artificial Sequence: Synthetic oligonucleotide
agugaugauuuaggcauau

SEQ ID NO: 1533876 - RNA, 19 nt, Artificial Sequence
  Description of Artificial Sequence: Synthetic oligonucleotide
uagcagccaagucuacaaa

SEQ ID NO: 1533877 - RNA, 19 nt, Artificial Sequence
  Description of Artificial Sequence: Synthetic oligonucleotide
aggauagacaguagucacu

SEQ ID NO: 1533878 - RNA, 19 nt, Artificial Sequence
  Description of Artificial Sequence: Synthetic oligonucleotide
agaucguuugugauucaga

SEQ ID NO: 1533879 - RNA, 19 nt, Artificial Sequence
  Description of Artificial Sequence: Synthetic oligonucleotide
cuaugccuugaauuuucca

SEQ ID NO: 1533880 - RNA, 19 nt, Artificial Sequence
  Description of Artificial Sequence: Synthetic oligonucleotide
uaacagccaaaagauuaua

SEQ ID NO: 1533881 - RNA, 19 nt, Artificial Sequence
  Description of Artificial Sequence: Synthetic oligonucleotide
cuuuaucacaucccgaauu

SEQ ID NO: 1533882 - RNA, 19 nt, Artificial Sequence
  Description of Artificial Sequence: Synthetic oligonucleotide
uaccgaagcugaucgccgu

SEQ ID NO: 1533883 - RNA, 19 nt, Artificial Sequence
  Description of Artificial Sequence: Synthetic oligonucleotide
ucgccguucuucauucuuu

SEQ ID NO: 1533884 - RNA, 19 nt, Artificial Sequence
  Description of Artificial Sequence: Synthetic oligonucleotide
augaacauucuuggcucug

SEQ ID NO: 1533885 - RNA, 19 nt, Artificial Sequence
  Description of Artificial Sequence: Synthetic oligonucleotide
cucuacgaacucacucaac

SEQ ID NO: 1533886 - RNA, 19 nt, Artificial Sequence
  Description of Artificial Sequence: Synthetic oligonucleotide
aagcaggauugugcauuuc

SEQ ID NO: 1533887 - RNA, 19 nt, Artificial Sequence
  Description of Artificial Sequence: Synthetic oligonucleotide
uuaugacuaugaugucuuu

SEQ ID NO: 1533888 - RNA, 19 nt, Artificial Sequence
  Description of Artificial Sequence: Synthetic oligonucleotide
acuugagaaccagaucgau

SEQ ID NO: 1533889 - RNA, 19 nt, Artificial Sequence
  Description of Artificial Sequence: Synthetic oligonucleotide
gcucucuacgaacucacuc

SEQ ID NO: 1533890 - RNA, 19 nt, Artificial Sequence
  Description of Artificial Sequence: Synthetic oligonucleotide
gccgucaccuccuccagag

SEQ ID NO: 1533891 - RNA, 19 nt, Artificial Sequence
  Description of Artificial Sequence: Synthetic oligonucleotide
guaaggguacaauuuugau

SEQ ID NO: 1533892 - RNA, 19 nt, Artificial Sequence
  Description of Artificial Sequence: Synthetic oligonucleotide
agggcauaucgugacuuca

SEQ ID NO: 1533893 - RNA, 19 nt, Artificial Sequence
  Description of Artificial Sequence: Synthetic oligonucleotide
cagacugccucgagucuac

SEQ ID NO: 1533894 - RNA, 19 nt, Artificial Sequence
  Description of Artificial Sequence: Synthetic oligonucleotide
cuuaauuaucuggaacugu

SEQ ID NO: 1533895 - RNA, 19 nt, Artificial Sequence
  Description of Artificial Sequence: Synthetic oligonucleotide
agaucgcugucguuuucaa

SEQ ID NO: 1533896 - RNA, 19 nt, Artificial Sequence
  Description of Artificial Sequence: Synthetic oligonucleotide
gaacauucuuggcucugua

SEQ ID NO: 1533897 - RNA, 19 nt, Artificial Sequence
  Description of Artificial Sequence: Synthetic oligonucleotide
gcuauuaucuugauugacu

SEQ ID NO: 1533898 - RNA, 19 nt, Artificial Sequence
  Description of Artificial Sequence: Synthetic oligonucleotide
ccucaaucugcaagauucc

SEQ ID NO: 1533899 - RNA, 19 nt, Artificial Sequence
  Description of Artificial Sequence: Synthetic oligonucleotide
ggccauuccccauucagaa

SEQ ID NO: 1533900 - RNA, 19 nt, Artificial Sequence
  Description of Artificial Sequence: Synthetic oligonucleotide
cgaauuaccucaguguaug

SEQ ID NO: 1533901 - RNA, 19 nt, Artificial Sequence
  Description of Artificial Sequence: Synthetic oligonucleotide
ggauuggcgccuucuuuug

SEQ ID NO: 1533902 - RNA, 19 nt, Artificial Sequence
  Description of Artificial Sequence: Synthetic oligonucleotide
cucaaucugcaagauucca

SEQ ID NO: 1533903 - RNA, 19 nt, Artificial Sequence
  Description of Artificial Sequence: Synthetic oligonucleotide
guguuccccuauuacaacu

SEQ ID NO: 1533904 - RNA, 19 nt, Artificial Sequence
  Description of Artificial Sequence: Synthetic oligonucleotide
gucuaccgaagcugaucgc

SEQ ID NO: 1533905 - RNA, 19 nt, Artificial Sequence
  Description of Artificial Sequence: Synthetic oligonucleotide
ggcuauuaucuugauugac

SEQ ID NO: 1533906 - RNA, 19 nt, Artificial Sequence
  Description of Artificial Sequence: Synthetic oligonucleotide
cccauucagaaagacaauc

SEQ ID NO: 1533907 - RNA, 19 nt, Artificial Sequence
  Description of Artificial Sequence: Synthetic oligonucleotide
uggcauaacccagcuuccu

SEQ ID NO: 1533908 - RNA, 19 nt, Artificial Sequence
  Description of Artificial Sequence: Synthetic oligonucleotide
ugugcaccuuuaucacauc

SEQ ID NO: 1533909 - RNA, 19 nt, Artificial Sequence
  Description of Artificial Sequence: Synthetic oligonucleotide
ggcgccuucuuuuguaauc

SEQ ID NO: 1533910 - RNA, 19 nt, Artificial Sequence
  Description of Artificial Sequence: Synthetic oligonucleotide
ggcauaucgugacuucauc

SEQ ID NO: 1533911 - RNA, 19 nt, Artificial Sequence
  Description of Artificial Sequence: Synthetic oligonucleotide
caccuuuaucacaucccga

SEQ ID NO: 1533912 - RNA, 19 nt, Artificial Sequence
  Description of Artificial Sequence: Synthetic oligonucleotide
cauuccccauucagaaaga

SEQ ID NO: 1533913 - RNA, 19 nt, Artificial Sequence
  Description of Artificial Sequence: Synthetic oligonucleotide
cccuauuacaacuccagua

SEQ ID NO: 1533914 - RNA, 19 nt, Artificial Sequence
  Description of Artificial Sequence: Synthetic oligonucleotide
cagggacgccgucaccucc

SEQ ID NO: 1533915 - RNA, 19 nt, Artificial Sequence
  Description of Artificial Sequence: Synthetic oligonucleotide
agacugccucgagucuacc

SEQ ID NO: 1533916 - RNA, 19 nt, Artificial Sequence
  Description of Artificial Sequence: Synthetic oligonucleotide
agcccuucuaugccuugaa

SEQ ID NO: 1533917 - RNA, 19 nt, Artificial Sequence
  Description of Artificial Sequence: Synthetic oligonucleotide
aggucacaaacagaucguu

SEQ ID NO: 1533918 - RNA, 19 nt, Artificial Sequence
  Description of Artificial Sequence: Synthetic oligonucleotide
agggcaagacgaucugcuu

SEQ ID NO: 1533919 - RNA, 19 nt, Artificial Sequence
  Description of Artificial Sequence: Synthetic oligonucleotide
gccucgagucuaccgaagc

SEQ ID NO: 1533920 - RNA, 19 nt, Artificial Sequence
  Description of Artificial Sequence: Synthetic oligonucleotide
guccuuauucaaaguaacu

SEQ ID NO: 1533921 - RNA, 19 nt, Artificial Sequence
  Description of Artificial Sequence: Synthetic oligonucleotide
ggcauaugaugauuggaau

SEQ ID NO: 1533922 - RNA, 19 nt, Artificial Sequence
  Description of Artificial Sequence: Synthetic oligonucleotide
gccaggauuuccagguaag

SEQ ID NO: 1533923 - RNA, 19 nt, Artificial Sequence
  Description of Artificial Sequence: Synthetic oligonucleotide
cagaucgcugucguuuuca

SEQ ID NO: 1533924 - RNA, 19 nt, Artificial Sequence
  Description of Artificial Sequence: Synthetic oligonucleotide
gauuggcgccuucuuuugu

SEQ ID NO: 1533925 - RNA, 19 nt, Artificial Sequence
  Description of Artificial Sequence: Synthetic oligonucleotide
gugaguccuuauucaaagu

SEQ ID NO: 1533926 - RNA, 19 nt, Artificial Sequence
  Description of Artificial Sequence: Synthetic oligonucleotide
ggaacugugaguccuuauu

SEQ ID NO: 1533927 - RNA, 19 nt, Artificial Sequence
  Description of Artificial Sequence: Synthetic oligonucleotide
uucguuugugugggcuccu

SEQ ID NO: 1533928 - RNA, 19 nt, Artificial Sequence
  Description of Artificial Sequence: Synthetic oligonucleotide
caguagaaggauagacagu

SEQ ID NO: 1533929 - RNA, 19 nt, Artificial Sequence
  Description of Artificial Sequence: Synthetic oligonucleotide
ccaagucuacaaacagauc

SEQ ID NO: 1533930 - RNA, 19 nt, Artificial Sequence
  Description of Artificial Sequence: Synthetic oligonucleotide
accgaagcugaucgccguu

SEQ ID NO: 1533931 - RNA, 19 nt, Artificial Sequence
  Description of Artificial Sequence: Synthetic oligonucleotide
cuagccucaccugugacuu

SEQ ID NO: 1533932 - RNA, 19 nt, Artificial Sequence
  Description of Artificial Sequence: Synthetic oligonucleotide
gaucgcugucguuuucaau

SEQ ID NO: 1533933 - RNA, 19 nt, Artificial Sequence
  Description of Artificial Sequence: Synthetic oligonucleotide
gaguccggcagcagcucuc

SEQ ID NO: 1533934 - RNA, 19 nt, Artificial Sequence
  Description of Artificial Sequence: Synthetic oligonucleotide
cugccucgagucuaccgaa

SEQ ID NO: 1533935 - RNA, 19 nt, Artificial Sequence
  Description of Artificial Sequence: Synthetic oligonucleotide
caucccagggacgccguca

SEQ ID NO: 1533936 - RNA, 19 nt, Artificial Sequence
  Description of Artificial Sequence: Synthetic oligonucleotide
agcucucuacgaacucacu

SEQ ID NO: 1533937 - RNA, 19 nt, Artificial Sequence
  Description of Artificial Sequence: Synthetic oligonucleotide
gcaagacgaucugcuuggg

SEQ ID NO: 1533938 - RNA, 19 nt, Artificial Sequence
  Description of Artificial Sequence: Synthetic oligonucleotide
guaggauuggcgccuucuu

SEQ ID NO: 1533939 - RNA, 19 nt, Artificial Sequence
  Description of Artificial Sequence: Synthetic oligonucleotide
caagacgaucugcuugggu

SEQ ID NO: 1533940 - RNA, 19 nt, Artificial Sequence
  Description of Artificial Sequence: Synthetic oligonucleotide
ggguaaggucacaaacaga

SEQ ID NO: 1533941 - RNA, 19 nt, Artificial Sequence
  Description of Artificial Sequence: Synthetic oligonucleotide
ucguuugugugggcuccua

SEQ ID NO: 1533942 - RNA, 19 nt, Artificial Sequence
  Description of Artificial Sequence: Synthetic oligonucleotide
aggcuccaucccagggacg

SEQ ID NO: 1533943 - RNA, 19 nt, Artificial Sequence
  Description of Artificial Sequence: Synthetic oligonucleotide
cuucuaugccuugaauuuu

SEQ ID NO: 1533944 - RNA, 19 nt, Artificial Sequence
  Description of Artificial Sequence: Synthetic oligonucleotide
gaagcugaucgccguucuu

SEQ ID NO: 1533945 - RNA, 19 nt, Artificial Sequence
  Description of Artificial Sequence: Synthetic oligonucleotide
gaucgccguucuucauucu

SEQ ID NO: 1533946 - RNA, 19 nt, Artificial Sequence
  Description of Artificial Sequence: Synthetic oligonucleotide
cuccagaguccggcagcag

SEQ ID NO: 1533947 - RNA, 19 nt, Artificial Sequence
  Description of Artificial Sequence: Synthetic oligonucleotide
cagauuguguuccccuauu

SEQ ID NO: 1533948 - RNA, 19 nt, Artificial Sequence
  Description of Artificial Sequence: Synthetic oligonucleotide
cguuugugugggcuccuac

SEQ ID NO: 1533949 - RNA, 19 nt, Artificial Sequence
  Description of Artificial Sequence: Synthetic oligonucleotide
cguuuucaaugacuugaga

SEQ ID NO: 1533950 - RNA, 19 nt, Artificial Sequence
  Description of Artificial Sequence: Synthetic oligonucleotide
ggacgccgucaccuccucc

SEQ ID NO: 1533951 - RNA, 19 nt, Artificial Sequence
  Description of Artificial Sequence: Synthetic oligonucleotide
ggacuauaacaauccccau

SEQ ID NO: 1533952 - RNA, 19 nt, Artificial Sequence
  Description of Artificial Sequence: Synthetic oligonucleotide
cuauaacaauccccaucuu

SEQ ID NO: 1533953 - RNA, 19 nt, Artificial Sequence
  Description of Artificial Sequence: Synthetic oligonucleotide
ccaggauuuccagguaaga

SEQ ID NO: 1533954 - RNA, 19 nt, Artificial Sequence
  Description of Artificial Sequence: Synthetic oligonucleotide
cuuccucaaucugcaagau

SEQ ID NO: 1533955 - RNA, 19 nt, Artificial Sequence
  Description of Artificial Sequence: Synthetic oligonucleotide
ggcuccuacuccgagcccu

SEQ ID NO: 1533956 - RNA, 19 nt, Artificial Sequence
  Description of Artificial Sequence: Synthetic oligonucleotide
ccgaagcugaucgccguuc

SEQ ID NO: 1533957 - RNA, 19 nt, Artificial Sequence
  Description of Artificial Sequence: Synthetic oligonucleotide
ggguacaauuuugauucau

SEQ ID NO: 1533958 - RNA, 19 nt, Artificial Sequence
  Description of Artificial Sequence: Synthetic oligonucleotide
caucccgaauuaccucagu

SEQ ID NO: 1533959 - RNA, 19 nt, Artificial Sequence
  Description of Artificial Sequence: Synthetic oligonucleotide
cuacuccgagcccuucuau

SEQ ID NO: 1533960 - RNA, 19 nt, Artificial Sequence
  Description of Artificial Sequence: Synthetic oligonucleotide
cuuuggcauaacccagcuu

SEQ ID NO: 1533961 - RNA, 19 nt, Artificial Sequence
  Description of Artificial Sequence: Synthetic oligonucleotide
gugugggcuccuacuccga

SEQ ID NO: 1533962 - RNA, 19 nt, Artificial Sequence
  Description of Artificial Sequence: Synthetic oligonucleotide
cggcuauuaucuugauuga

SEQ ID NO: 1533963 - RNA, 19 nt, Artificial Sequence
  Description of Artificial Sequence: Synthetic oligonucleotide
gggcuccuacuccgagccc

SEQ ID NO: 1533964 - RNA, 19 nt, Artificial Sequence
  Description of Artificial Sequence: Synthetic oligonucleotide
ccgaauuaccucaguguau

SEQ ID NO: 1533965 - RNA, 19 nt, Artificial Sequence
  Description of Artificial Sequence: Synthetic oligonucleotide
cuucucgacucggaauuuu

SEQ ID NO: 1533966 - RNA, 19 nt, Artificial Sequence
  Description of Artificial Sequence: Synthetic oligonucleotide
ccucgagucuaccgaagcu

SEQ ID NO: 1533967 - RNA, 19 nt, Artificial Sequence
  Description of Artificial Sequence: Synthetic oligonucleotide
gggcauaucgugacuucau

SEQ ID NO: 1533968 - RNA, 19 nt, Artificial Sequence
  Description of Artificial Sequence: Synthetic oligonucleotide
ccccuauuacaacuccagu

SEQ ID NO: 1533969 - RNA, 19 nt, Artificial Sequence
  Description of Artificial Sequence: Synthetic oligonucleotide
gggacgccgucaccuccuc

SEQ ID NO: 1533970 - RNA, 19 nt, Artificial Sequence
  Description of Artificial Sequence: Synthetic oligonucleotide
gcccuucuaugccuugaau

SEQ ID NO: 1533971 - RNA, 19 nt, Artificial Sequence
  Description of Artificial Sequence: Synthetic oligonucleotide
ccaccagacugccucgagu

SEQ ID NO: 1533972 - RNA, 19 nt, Artificial Sequence
  Description of Artificial Sequence: Synthetic oligonucleotide
ccaucccagggacgccguc

SEQ ID NO: 1533973 - RNA, 19 nt, Artificial Sequence
  Description of Artificial Sequence: Synthetic oligonucleotide
cgaagcugaucgccguucu

SEQ ID NO: 1533974 - RNA, 19 nt, Artificial Sequence
  Description of Artificial Sequence: Synthetic oligonucleotide
cgccguucuucauucuuuu

SEQ ID NO: 1533975 - RNA, 19 nt, Artificial Sequence
  Description of Artificial Sequence: Synthetic oligonucleotide
ccgagcccuucuaugccuu

SEQ ID NO: 1533976 - RNA, 19 nt, Artificial Sequence
  Description of Artificial Sequence: Synthetic oligonucleotide
cgccgucaccuccuccaga

SEQ ID NO: 1533977 - RNA, 19 nt, Artificial Sequence
  Description of Artificial Sequence: Synthetic oligonucleotide
ccuucucgacucggaauuu

SEQ ID NO: 1533978 - RNA, 19 nt, Artificial Sequence
  Description of Artificial Sequence: Synthetic oligonucleotide
  modified_base (1)..(1): a, c, u, g, unknown or other
nacgaucauaacagccaaa

SEQ ID NO: 1533979 - RNA, 19 nt, Artificial Sequence
  Description of Artificial Sequence: Synthetic oligonucleotide
uguagcuggaucaucauag

SEQ ID NO: 1533980 - RNA, 19 nt, Artificial Sequence
  Description of Artificial Sequence: Synthetic oligonucleotide
uugaauucgaggaaggcca

SEQ ID NO: 1533981 - RNA, 19 nt, Artificial Sequence
  Description of Artificial Sequence: Synthetic oligonucleotide
aacguagcaauuguucucc

SEQ ID NO: 1533982 - RNA, 19 nt, Artificial Sequence
  Description of Artificial Sequence: Synthetic oligonucleotide
uucaaaagaucauugacau

SEQ ID NO: 1533983 - RNA, 19 nt, Artificial Sequence
  Description of Artificial Sequence: Synthetic oligonucleotide
aacuaccuaagcuccauag

SEQ ID NO: 1533984 - RNA, 19 nt, Artificial Sequence
  Description of Artificial Sequence: Synthetic oligonucleotide
agugaaaugggccagcccu

SEQ ID NO: 1533985 - RNA, 19 nt, Artificial Sequence
  Description of Artificial Sequence: Synthetic oligonucleotide
aucauaggaugccacaaac

SEQ ID NO: 1533986 - RNA, 19 nt, Artificial Sequence
  Description of Artificial Sequence: Synthetic oligonucleotide
uuuuaggaaaacagggaca

SEQ ID NO: 1533987 - RNA, 19 nt, Artificial Sequence
  Description of Artificial Sequence: Synthetic oligonucleotide
aguggucucgauuugcggg

SEQ ID NO: 1533988 - RNA, 19 nt, Artificial Sequence
  Description of Artificial Sequence: Synthetic oligonucleotide
acuaccuaagcuccauagc

SEQ ID NO: 1533989 - RNA, 19 nt, Artificial Sequence
  Description of Artificial Sequence: Synthetic oligonucleotide
agaucauugacaucuccag

SEQ ID NO: 1533990 - RNA, 19 nt, Artificial Sequence
  Description of Artificial Sequence: Synthetic oligonucleotide
uucuucgagggauacagcc

SEQ ID NO: 1533991 - RNA, 19 nt, Artificial Sequence
  Description of Artificial Sequence: Synthetic oligonucleotide
agcccuaauaaccuugagg

SEQ ID NO: 1533992 - RNA, 19 nt, Artificial Sequence
  Description of Artificial Sequence: Synthetic oligonucleotide
aaggacgcagauuggauca

SEQ ID NO: 1533993 - RNA, 19 nt, Artificial Sequence
  Description of Artificial Sequence: Synthetic oligonucleotide
acaaacacccagcugucac

SEQ ID NO: 1533994 - RNA, 19 nt, Artificial Sequence
  Description of Artificial Sequence: Synthetic oligonucleotide
aagugaaaugggccagccc

SEQ ID NO: 1533995 - RNA, 19 nt, Artificial Sequence
  Description of Artificial Sequence: Synthetic oligonucleotide
aaggcuaguuccuuggcgu

SEQ ID NO: 1533996 - RNA, 19 nt, Artificial Sequence
  Description of Artificial Sequence: Synthetic oligonucleotide
uuguugaauucgaggaagg

SEQ ID NO: 1533997 - RNA, 19 nt, Artificial Sequence
  Description of Artificial Sequence: Synthetic oligonucleotide
aauuguugaauucgaggaa

SEQ ID NO: 1533998 - RNA, 19 nt, Artificial Sequence
  Description of Artificial Sequence: Synthetic oligonucleotide
gcccuaauaaccuugaggc

SEQ ID NO: 1533999 - RNA, 19 nt, Artificial Sequence
  Description of Artificial Sequence: Synthetic oligonucleotide
uguauuggggcaagggagc

SEQ ID NO: 1534000 - RNA, 19 nt, Artificial Sequence
  Description of Artificial Sequence: Synthetic oligonucleotide
gugacuaggauccaggaga

SEQ ID NO: 1534001 - RNA, 19 nt, Artificial Sequence
  Description of Artificial Sequence: Synthetic oligonucleotide
cacuaggguaccuucaugc

SEQ ID NO: 1534002 - RNA, 19 nt, Artificial Sequence
  Description of Artificial Sequence: Synthetic oligonucleotide
gaaggcuaguuccuuggcg

SEQ ID NO: 1534003 - RNA, 19 nt, Artificial Sequence
  Description of Artificial Sequence: Synthetic oligonucleotide
aaacagggacacaacuacc

SEQ ID NO: 1534004 - RNA, 19 nt, Artificial Sequence
  Description of Artificial Sequence: Synthetic oligonucleotide
auuggaucagggauuuucc

SEQ ID NO: 1534005 - RNA, 19 nt, Artificial Sequence
  Description of Artificial Sequence: Synthetic oligonucleotide
uggaacguagcaauuguuc

SEQ ID NO: 1534006 - RNA, 19 nt, Artificial Sequence
  Description of Artificial Sequence: Synthetic oligonucleotide
ugaccauucggaaggcuag

SEQ ID NO: 1534007 - RNA, 19 nt, Artificial Sequence
  Description of Artificial Sequence: Synthetic oligonucleotide
gucacggaaggcuaguucc

SEQ ID NO: 1534008 - RNA, 19 nt, Artificial Sequence
  Description of Artificial Sequence: Synthetic oligonucleotide
uuuccaguggucucgauuu

SEQ ID NO: 1534009 - RNA, 19 nt, Artificial Sequence
  Description of Artificial Sequence: Synthetic oligonucleotide
guugaauucgaggaaggcc

SEQ ID NO: 1534010 - RNA, 19 nt, Artificial Sequence
  Description of Artificial Sequence: Synthetic oligonucleotide
ugacuaggauccaggagag

SEQ ID NO: 1534011 - RNA, 19 nt, Artificial Sequence
  Description of Artificial Sequence: Synthetic oligonucleotide
cagucuggcuaacagaagc

SEQ ID NO: 1534012 - RNA, 19 nt, Artificial Sequence
  Description of Artificial Sequence: Synthetic oligonucleotide
gaucauugacaucuccagc

SEQ ID NO: 1534013 - RNA, 19 nt, Artificial Sequence
  Description of Artificial Sequence: Synthetic oligonucleotide
cuugacgcugcucaugagc

SEQ ID NO: 1534014 - RNA, 19 nt, Artificial Sequence
  Description of Artificial Sequence: Synthetic oligonucleotide
aaaggggcucuuguucugc

SEQ ID NO: 1534015 - RNA, 19 nt, Artificial Sequence
  Description of Artificial Sequence: Synthetic oligonucleotide
uuuggaaacccgucgcggc

SEQ ID NO: 1534016 - RNA, 19 nt, Artificial Sequence
  Description of Artificial Sequence: Synthetic oligonucleotide
acuguuuggggaccguggg

SEQ ID NO: 1534017 - RNA, 19 nt, Artificial Sequence
  Description of Artificial Sequence: Synthetic oligonucleotide
cuggcuaacagaagccucc

SEQ ID NO: 1534018 - RNA, 19 nt, Artificial Sequence
  Description of Artificial Sequence: Synthetic oligonucleotide
cccauagugaugauuaggg

SEQ ID NO: 1534019 - RNA, 19 nt, Artificial Sequence
  Description of Artificial Sequence: Synthetic oligonucleotide
aagaauuguugaauucgag

SEQ ID NO: 1534020 - RNA, 19 nt, Artificial Sequence
  Description of Artificial Sequence: Synthetic oligonucleotide
ugggcaugggacaaggccu

SEQ ID NO: 1534021 - RNA, 19 nt, Artificial Sequence
  Description of Artificial Sequence: Synthetic oligonucleotide
uaaccuugaggccacuuuc

SEQ ID NO: 1534022 - RNA, 19 nt, Artificial Sequence
  Description of Artificial Sequence: Synthetic oligonucleotide
ucaugcaguggccggauga

SEQ ID NO: 1534023 - RNA, 19 nt, Artificial Sequence
  Description of Artificial Sequence: Synthetic oligonucleotide
gaugacauuggcagccccg

SEQ ID NO: 1534024 - RNA, 19 nt, Artificial Sequence
  Description of Artificial Sequence: Synthetic oligonucleotide
agaucuugggcccgaugac

SEQ ID NO: 1534025 - RNA, 19 nt, Artificial Sequence
  Description of Artificial Sequence: Synthetic oligonucleotide
aacacuaggguaccuucau

SEQ ID NO: 1534026 - RNA, 19 nt, Artificial Sequence
  Description of Artificial Sequence: Synthetic oligonucleotide
ugcagcccuaauaaccuug

SEQ ID NO: 1534027 - RNA, 19 nt, Artificial Sequence
  Description of Artificial Sequence: Synthetic oligonucleotide
cuaauaaccuugaggccac

SEQ ID NO: 1534028 - RNA, 19 nt, Artificial Sequence
  Description of Artificial Sequence: Synthetic oligonucleotide
cuucacccuacacuggugc

SEQ ID NO: 1534029 - RNA, 19 nt, Artificial Sequence
  Description of Artificial Sequence: Synthetic oligonucleotide
ugacuguggaaucaauuuu

SEQ ID NO: 1534030 - RNA, 19 nt, Artificial Sequence
  Description of Artificial Sequence: Synthetic oligonucleotide
gaacguagcaauuguucuc

SEQ ID NO: 1534031 - RNA, 19 nt, Artificial Sequence
  Description of Artificial Sequence: Synthetic oligonucleotide
gaagaauuguugaauucga

SEQ ID NO: 1534032 - RNA, 19 nt, Artificial Sequence
  Description of Artificial Sequence: Synthetic oligonucleotide
ggcccgaugacauuggcag

SEQ ID NO: 1534033 - RNA, 19 nt, Artificial Sequence
  Description of Artificial Sequence: Synthetic oligonucleotide
gagagacccauagugauga

SEQ ID NO: 1534034 - RNA, 19 nt, Artificial Sequence
  Description of Artificial Sequence: Synthetic oligonucleotide
caaacacuaggguaccuuc

SEQ ID NO: 1534035 - RNA, 19 nt, Artificial Sequence
  Description of Artificial Sequence: Synthetic oligonucleotide
cuggaucaucauaggaugc

SEQ ID NO: 1534036 - RNA, 19 nt, Artificial Sequence
  Description of Artificial Sequence: Synthetic oligonucleotide
guccuguugaggcugccgg

SEQ ID NO: 1534037 - RNA, 19 nt, Artificial Sequence
  Description of Artificial Sequence: Synthetic oligonucleotide
uccaggacuggaacguagc

SEQ ID NO: 1534038 - RNA, 19 nt, Artificial Sequence
  Description of Artificial Sequence: Synthetic oligonucleotide
cuuuggaaacccgucgcgg

SEQ ID NO: 1534039 - RNA, 19 nt, Artificial Sequence
  Description of Artificial Sequence: Synthetic oligonucleotide
agcgauguucagcccacgg

SEQ ID NO: 1534040 - RNA, 19 nt, Artificial Sequence
  Description of Artificial Sequence: Synthetic oligonucleotide
ucuggcuaacagaagccuc

SEQ ID NO: 1534041 - RNA, 19 nt, Artificial Sequence
  Description of Artificial Sequence: Synthetic oligonucleotide
cacuguuuggggaccgugg

SEQ ID NO: 1534042 - RNA, 19 nt, Artificial Sequence
  Description of Artificial Sequence: Synthetic oligonucleotide
gacgcagauuggaucaggg

SEQ ID NO: 1534043 - RNA, 19 nt, Artificial Sequence
  Description of Artificial Sequence: Synthetic oligonucleotide
uuggaucagggauuuucca

SEQ ID NO: 1534044 - RNA, 19 nt, Artificial Sequence
  Description of Artificial Sequence: Synthetic oligonucleotide
uaccuaagcuccauagcaa

SEQ ID NO: 1534045 - RNA, 19 nt, Artificial Sequence
  Description of Artificial Sequence: Synthetic oligonucleotide
acuuguuccuccagacacc

SEQ ID NO: 1534046 - RNA, 19 nt, Artificial Sequence
  Description of Artificial Sequence: Synthetic oligonucleotide
gaguagguugggugguggg

SEQ ID NO: 1534047 - RNA, 19 nt, Artificial Sequence
  Description of Artificial Sequence: Synthetic oligonucleotide
acuaggguaccuucaugca

SEQ ID NO: 1534048 - RNA, 19 nt, Artificial Sequence
  Description of Artificial Sequence: Synthetic oligonucleotide
acuggguugggaccuccgg

SEQ ID NO: 1534049 - RNA, 19 nt, Artificial Sequence
  Description of Artificial Sequence: Synthetic oligonucleotide
ugucacggaaggcuaguuc

SEQ ID NO: 1534050 - RNA, 19 nt, Artificial Sequence
  Description of Artificial Sequence: Synthetic oligonucleotide
ucaaaagaucauugacauc

SEQ ID NO: 1534051 - RNA, 19 nt, Artificial Sequence
  Description of Artificial Sequence: Synthetic oligonucleotide
uagcaauuguucucccuga

SEQ ID NO: 1534052 - RNA, 19 nt, Artificial Sequence
  Description of Artificial Sequence: Synthetic oligonucleotide
uuccucgugagcacuggga

SEQ ID NO: 1534053 - RNA, 19 nt, Artificial Sequence
  Description of Artificial Sequence: Synthetic oligonucleotide
uggguugggaccuccggca

SEQ ID NO: 1534054 - RNA, 19 nt, Artificial Sequence
  Description of Artificial Sequence: Synthetic oligonucleotide
aucgggucgguccuguuga

SEQ ID NO: 1534055 - RNA, 19 nt, Artificial Sequence
  Description of Artificial Sequence: Synthetic oligonucleotide
aaccucauguccacuucuc

SEQ ID NO: 1534056 - RNA, 19 nt, Artificial Sequence
  Description of Artificial Sequence: Synthetic oligonucleotide
ugaauucgaggaaggccac

SEQ ID NO: 1534057 - RNA, 19 nt, Artificial Sequence
  Description of Artificial Sequence: Synthetic oligonucleotide
agcccugcagcccuaauaa

SEQ ID NO: 1534058 - RNA, 19 nt, Artificial Sequence
  Description of Artificial Sequence: Synthetic oligonucleotide
agacccauagugaugauua

SEQ ID NO: 1534059 - RNA, 19 nt, Artificial Sequence
  Description of Artificial Sequence: Synthetic oligonucleotide
aaacacuaggguaccuuca

SEQ ID NO: 1534060 - RNA, 19 nt, Artificial Sequence
  Description of Artificial Sequence: Synthetic oligonucleotide
auucgaggaaggccaccac

SEQ ID NO: 1534061 - RNA, 19 nt, Artificial Sequence
  Description of Artificial Sequence: Synthetic oligonucleotide
cagaucuugggcccgauga

SEQ ID NO: 1534062 - RNA, 19 nt, Artificial Sequence
  Description of Artificial Sequence: Synthetic oligonucleotide
gaucgggucgguccuguug

SEQ ID NO: 1534063 - RNA, 19 nt, Artificial Sequence
  Description of Artificial Sequence: Synthetic oligonucleotide
guggucucgauuugcgggc

SEQ ID NO: 1534064 - RNA, 19 nt, Artificial Sequence
  Description of Artificial Sequence: Synthetic oligonucleotide
accuaagcuccauagcaaa

SEQ ID NO: 1534065 - RNA, 19 nt, Artificial Sequence
  Description of Artificial Sequence: Synthetic oligonucleotide
gaaggcuaggugcuccuca

SEQ ID NO: 1534066 - RNA, 19 nt, Artificial Sequence
  Description of Artificial Sequence: Synthetic oligonucleotide
acuuccuagccagcagggc

SEQ ID NO: 1534067 - RNA, 19 nt, Artificial Sequence
  Description of Artificial Sequence: Synthetic oligonucleotide
uggugacuaggauccagga

SEQ ID NO: 1534068 - RNA, 19 nt, Artificial Sequence
  Description of Artificial Sequence: Synthetic oligonucleotide
ugggaccuccggcaggugc

SEQ ID NO: 1534069 - RNA, 19 nt, Artificial Sequence
  Description of Artificial Sequence: Synthetic oligonucleotide
gacccauagugaugauuag

SEQ ID NO: 1534070 - RNA, 19 nt, Artificial Sequence
  Description of Artificial Sequence: Synthetic oligonucleotide
caugcuugggcaugggaca

SEQ ID NO: 1534071 - RNA, 19 nt, Artificial Sequence
  Description of Artificial Sequence: Synthetic oligonucleotide
acauuggcagccccgcuga

SEQ ID NO: 1534072 - RNA, 19 nt, Artificial Sequence
  Description of Artificial Sequence: Synthetic oligonucleotide
ucgauuugcgggcgaggug

SEQ ID NO: 1534073 - RNA, 19 nt, Artificial Sequence
  Description of Artificial Sequence: Synthetic oligonucleotide
gacuguggaaucaauuuua

SEQ ID NO: 1534074 - RNA, 19 nt, Artificial Sequence
  Description of Artificial Sequence: Synthetic oligonucleotide
agagcgauguucagcccac

SEQ ID NO: 1534075 - RNA, 19 nt, Artificial Sequence
  Description of Artificial Sequence: Synthetic oligonucleotide
cuggguugggaccuccggc

SEQ ID NO: 1534076 - RNA, 19 nt, Artificial Sequence
  Description of Artificial Sequence: Synthetic oligonucleotide
caguggucucgauuugcgg

SEQ ID NO: 1534077 - RNA, 19 nt, Artificial Sequence
  Description of Artificial Sequence: Synthetic oligonucleotide
aggccgcacuuguacuucc

SEQ ID NO: 1534078 - RNA, 19 nt, Artificial Sequence
  Description of Artificial Sequence: Synthetic oligonucleotide
gugcuuacuguucuucaca

SEQ ID NO: 1534079 - RNA, 19 nt, Artificial Sequence
  Description of Artificial Sequence: Synthetic oligonucleotide
agcccaccaugcuucuucg

SEQ ID NO: 1534080 - RNA, 19 nt, Artificial Sequence
  Description of Artificial Sequence: Synthetic oligonucleotide
cuccaggacuggaacguag

SEQ ID NO: 1534081 - RNA, 19 nt, Artificial Sequence
  Description of Artificial Sequence: Synthetic oligonucleotide
agccccgcugaccauucgg

SEQ ID NO: 1534082 - RNA, 19 nt, Artificial Sequence
  Description of Artificial Sequence: Synthetic oligonucleotide
gcuuuggaaacccgucgcg

SEQ ID NO: 1534083 - RNA, 19 nt, Artificial Sequence
  Description of Artificial Sequence: Synthetic oligonucleotide
ggcgaggugaagcaaacga

SEQ ID NO: 1534084 - RNA, 19 nt, Artificial Sequence
  Description of Artificial Sequence: Synthetic oligonucleotide
guagaaggacgcagauugg

SEQ ID NO: 1534085 - RNA, 19 nt, Artificial Sequence
  Description of Artificial Sequence: Synthetic oligonucleotide
cccugcagcccuaauaacc

SEQ ID NO: 1534086 - RNA, 19 nt, Artificial Sequence
  Description of Artificial Sequence: Synthetic oligonucleotide
ccuaauaaccuugaggcca

SEQ ID NO: 1534087 - RNA, 19 nt, Artificial Sequence
  Description of Artificial Sequence: Synthetic oligonucleotide
caugggacaaggccuucac

SEQ ID NO: 1534088 - RNA, 19 nt, Artificial Sequence
  Description of Artificial Sequence: Synthetic oligonucleotide
guuccucgugagcacuggg

SEQ ID NO: 1534089 - RNA, 19 nt, Artificial Sequence
  Description of Artificial Sequence: Synthetic oligonucleotide
acggaaggcuaguuccuug

SEQ ID NO: 1534090 - RNA, 19 nt, Artificial Sequence
  Description of Artificial Sequence: Synthetic oligonucleotide
gggucgguccuguugaggc

SEQ ID NO: 1534091 - RNA, 19 nt, Artificial Sequence
  Description of Artificial Sequence: Synthetic oligonucleotide
ucucgauuugcgggcgagg

SEQ ID NO: 1534092 - RNA, 19 nt, Artificial Sequence
  Description of Artificial Sequence: Synthetic oligonucleotide
gaccauucggaaggcuagg

SEQ ID NO: 1534093 - RNA, 19 nt, Artificial Sequence
  Description of Artificial Sequence: Synthetic oligonucleotide
aauaaccuugaggccacuu

SEQ ID NO: 1534094 - RNA, 19 nt, Artificial Sequence
  Description of Artificial Sequence: Synthetic oligonucleotide
cuccagacaccagaccagg

SEQ ID NO: 1534095 - RNA, 19 nt, Artificial Sequence
  Description of Artificial Sequence: Synthetic oligonucleotide
ucacccuacacuggugcca

SEQ ID NO: 1534096 - RNA, 19 nt, Artificial Sequence
  Description of Artificial Sequence: Synthetic oligonucleotide
aacccgucgcggcucucag

SEQ ID NO: 1534097 - RNA, 19 nt, Artificial Sequence
  Description of Artificial Sequence: Synthetic oligonucleotide
caggagagacccauaguga

SEQ ID NO: 1534098 - RNA, 19 nt, Artificial Sequence
  Description of Artificial Sequence: Synthetic oligonucleotide
ucccgugcuaggcccgggg

SEQ ID NO: 1534099 - RNA, 19 nt, Artificial Sequence
  Description of Artificial Sequence: Synthetic oligonucleotide
cuacaacuuguuccuccag

SEQ ID NO: 1534100 - RNA, 19 nt, Artificial Sequence
  Description of Artificial Sequence: Synthetic oligonucleotide
ucgagggauacagccuucc

SEQ ID NO: 1534101 - RNA, 19 nt, Artificial Sequence
  Description of Artificial Sequence: Synthetic oligonucleotide
ggcuuuggaaacccgucgc

SEQ ID NO: 1534102 - RNA, 19 nt, Artificial Sequence
  Description of Artificial Sequence: Synthetic oligonucleotide
gaauucgaggaaggccacc

SEQ ID NO: 1534103 - RNA, 19 nt, Artificial Sequence
  Description of Artificial Sequence: Synthetic oligonucleotide
ucggugcuacaacuuguuc

SEQ ID NO: 1534104 - RNA, 19 nt, Artificial Sequence
  Description of Artificial Sequence: Synthetic oligonucleotide
cuguuuggggaccgugggc

SEQ ID NO: 1534105 - RNA, 19 nt, Artificial Sequence
  Description of Artificial Sequence: Synthetic oligonucleotide
acuuucaagcccugaugua

SEQ ID NO: 1534106 - RNA, 19 nt, Artificial Sequence
  Description of Artificial Sequence: Synthetic oligonucleotide
caaugacgcugccugggug

SEQ ID NO: 1534107 - RNA, 19 nt, Artificial Sequence
  Description of Artificial Sequence: Synthetic oligonucleotide
uaggugcuccucaggacau

SEQ ID NO: 1534108 - RNA, 19 nt, Artificial Sequence
  Description of Artificial Sequence: Synthetic oligonucleotide
ccgcugaccauucggaagg

SEQ ID NO: 1534109 - RNA, 19 nt, Artificial Sequence
  Description of Artificial Sequence: Synthetic oligonucleotide
cagagcgauguucagccca

SEQ ID NO: 1534110 - RNA, 19 nt, Artificial Sequence
  Description of Artificial Sequence: Synthetic oligonucleotide
acaaacacuaggguaccuu

SEQ ID NO: 1534111 - RNA, 19 nt, Artificial Sequence
  Description of Artificial Sequence: Synthetic oligonucleotide
guauuggggcaagggagcc

SEQ ID NO: 1534112 - RNA, 19 nt, Artificial Sequence
  Description of Artificial Sequence: Synthetic oligonucleotide
ggaacguagcaauuguucu

SEQ ID NO: 1534113 - RNA, 19 nt, Artificial Sequence
  Description of Artificial Sequence: Synthetic oligonucleotide
cugaccauucggaaggcua

SEQ ID NO: 1534114 - RNA, 19 nt, Artificial Sequence
  Description of Artificial Sequence: Synthetic oligonucleotide
ggaaucaauuuuaggaaaa

SEQ ID NO: 1534115 - RNA, 19 nt, Artificial Sequence
  Description of Artificial Sequence: Synthetic oligonucleotide
caccagagcgauguucagc

SEQ ID NO: 1534116 - RNA, 19 nt, Artificial Sequence
  Description of Artificial Sequence: Synthetic oligonucleotide
cagggacacaacuaccuaa

SEQ ID NO: 1534117 - RNA, 19 nt, Artificial Sequence
  Description of Artificial Sequence: Synthetic oligonucleotide
auguucagcccacggccca

SEQ ID NO: 1534118 - RNA, 19 nt, Artificial Sequence
  Description of Artificial Sequence: Synthetic oligonucleotide
ccuaagcuccauagcaaag

SEQ ID NO: 1534119 - RNA, 19 nt, Artificial Sequence
  Description of Artificial Sequence: Synthetic oligonucleotide
ggugcuccucaggacaugg

SEQ ID NO: 1534120 - RNA, 19 nt, Artificial Sequence
  Description of Artificial Sequence: Synthetic oligonucleotide
cugccaaccucauguccac

SEQ ID NO: 1534121 - RNA, 19 nt, Artificial Sequence
  Description of Artificial Sequence: Synthetic oligonucleotide
uucgagggauacagccuuc

SEQ ID NO: 1534122 - RNA, 19 nt, Artificial Sequence
  Description of Artificial Sequence: Synthetic oligonucleotide
gcgauguucagcccacggc

SEQ ID NO: 1534123 - RNA, 19 nt, Artificial Sequence
  Description of Artificial Sequence: Synthetic oligonucleotide
caccacugaccccauucac

SEQ ID NO: 1534124 - RNA, 19 nt, Artificial Sequence
  Description of Artificial Sequence: Synthetic oligonucleotide
gugaaaugggccagcccug

SEQ ID NO: 1534125 - RNA, 19 nt, Artificial Sequence
  Description of Artificial Sequence: Synthetic oligonucleotide
cccuaauaaccuugaggcc

SEQ ID NO: 1534126 - RNA, 19 nt, Artificial Sequence
  Description of Artificial Sequence: Synthetic oligonucleotide
cccggcaggccaaugacgc

SEQ ID NO: 1534127 - RNA, 19 nt, Artificial Sequence
  Description of Artificial Sequence: Synthetic oligonucleotide
cccaccaugcuucuucgag

SEQ ID NO: 1534128 - RNA, 19 nt, Artificial Sequence
  Description of Artificial Sequence: Synthetic oligonucleotide
cuuggcguuccugcugccc

SEQ ID NO: 1534129 - RNA, 19 nt, Artificial Sequence
  Description of Artificial Sequence: Synthetic oligonucleotide
gcgaggugaagcaaacgag

SEQ ID NO: 1534130 - RNA, 19 nt, Artificial Sequence
  Description of Artificial Sequence: Synthetic oligonucleotide
cuaagcuccauagcaaagu

SEQ ID NO: 1534131 - RNA, 19 nt, Artificial Sequence
  Description of Artificial Sequence: Synthetic oligonucleotide
ccgcacuuguacuuccugg

SEQ ID NO: 1534132 - RNA, 19 nt, Artificial Sequence
  Description of Artificial Sequence: Synthetic oligonucleotide
ggaacugacuguggaauca

SEQ ID NO: 1534133 - RNA, 19 nt, Artificial Sequence
  Description of Artificial Sequence: Synthetic oligonucleotide
ggcuaggugcuccucagga

SEQ ID NO: 1534134 - RNA, 19 nt, Artificial Sequence
  Description of Artificial Sequence: Synthetic oligonucleotide
cacuggguugggaccuccg

SEQ ID NO: 1534135 - RNA, 19 nt, Artificial Sequence
  Description of Artificial Sequence: Synthetic oligonucleotide
uauuggggcaagggagccu

SEQ ID NO: 1534136 - RNA, 19 nt, Artificial Sequence
  Description of Artificial Sequence: Synthetic oligonucleotide
gaaaugggccagcccugca

SEQ ID NO: 1534137 - RNA, 19 nt, Artificial Sequence
  Description of Artificial Sequence: Synthetic oligonucleotide
aacugacuguggaaucaau

SEQ ID NO: 1534138 - RNA, 19 nt, Artificial Sequence
  Description of Artificial Sequence: Synthetic oligonucleotide
cuuucaagcccugauguau

SEQ ID NO: 1534139 - RNA, 19 nt, Artificial Sequence
  Description of Artificial Sequence: Synthetic oligonucleotide
cccgaugacauuggcagcc

SEQ ID NO: 1534140 - RNA, 19 nt, Artificial Sequence
  Description of Artificial Sequence: Synthetic oligonucleotide
guucucugggcuggugaag

SEQ ID NO: 1534141 - RNA, 19 nt, Artificial Sequence
  Description of Artificial Sequence: Synthetic oligonucleotide
gguugggaccuccggcagg

SEQ ID NO: 1534142 - RNA, 19 nt, Artificial Sequence
  Description of Artificial Sequence: Synthetic oligonucleotide
gggauuuuccaguggucuc

SEQ ID NO: 1534143 - RNA, 19 nt, Artificial Sequence
  Description of Artificial Sequence: Synthetic oligonucleotide
accauucggaaggcuaggu

SEQ ID NO: 1534144 - RNA, 19 nt, Artificial Sequence
  Description of Artificial Sequence: Synthetic oligonucleotide
aguggccggaugaacuuca

SEQ ID NO: 1534145 - RNA, 19 nt, Artificial Sequence
  Description of Artificial Sequence: Synthetic oligonucleotide
gccaaugacgcugccuggg

SEQ ID NO: 1534146 - RNA, 19 nt, Artificial Sequence
  Description of Artificial Sequence: Synthetic oligonucleotide
gcuugggcaugggacaagg

SEQ ID NO: 1534147 - RNA, 19 nt, Artificial Sequence
  Description of Artificial Sequence: Synthetic oligonucleotide
gggacacaacuaccuaagc

SEQ ID NO: 1534148 - RNA, 19 nt, Artificial Sequence
  Description of Artificial Sequence: Synthetic oligonucleotide
gucucgauuugcgggcgag

SEQ ID NO: 1534149 - RNA, 19 nt, Artificial Sequence
  Description of Artificial Sequence: Synthetic oligonucleotide
cacaacuaccuaagcucca

SEQ ID NO: 1534150 - RNA, 19 nt, Artificial Sequence
  Description of Artificial Sequence: Synthetic oligonucleotide
gugggguagggacaagucu

SEQ ID NO: 1534151 - RNA, 19 nt, Artificial Sequence
  Description of Artificial Sequence: Synthetic oligonucleotide
gcuuacuguucuucacaug

SEQ ID NO: 1534152 - RNA, 19 nt, Artificial Sequence
  Description of Artificial Sequence: Synthetic oligonucleotide
gcagagacccggcaggcca

SEQ ID NO: 1534153 - RNA, 19 nt, Artificial Sequence
  Description of Artificial Sequence: Synthetic oligonucleotide
gacucgggccccucccgug

SEQ ID NO: 1534154 - RNA, 19 nt, Artificial Sequence
  Description of Artificial Sequence: Synthetic oligonucleotide
cagcccuaauaaccuugag

SEQ ID NO: 1534155 - RNA, 19 nt, Artificial Sequence
  Description of Artificial Sequence: Synthetic oligonucleotide
cucugcugugcuagcccac

SEQ ID NO: 1534156 - RNA, 19 nt, Artificial Sequence
  Description of Artificial Sequence: Synthetic oligonucleotide
ucgggucgguccuguugag

SEQ ID NO: 1534157 - RNA, 19 nt, Artificial Sequence
  Description of Artificial Sequence: Synthetic oligonucleotide
cacgaucggugcuacaacu

SEQ ID NO: 1534158 - RNA, 19 nt, Artificial Sequence
  Description of Artificial Sequence: Synthetic oligonucleotide
aggacgcagauuggaucag

SEQ ID NO: 1534159 - RNA, 19 nt, Artificial Sequence
  Description of Artificial Sequence: Synthetic oligonucleotide
guggaacugacuguggaau

SEQ ID NO: 1534160 - RNA, 19 nt, Artificial Sequence
  Description of Artificial Sequence: Synthetic oligonucleotide
ugacgcugcucaugagcau

SEQ ID NO: 1534161 - RNA, 19 nt, Artificial Sequence
  Description of Artificial Sequence: Synthetic oligonucleotide
gagcgauguucagcccacg

SEQ ID NO: 1534162 - RNA, 19 nt, Artificial Sequence
  Description of Artificial Sequence: Synthetic oligonucleotide
ggcucaguuccucgugagc

SEQ ID NO: 1534163 - RNA, 19 nt, Artificial Sequence
  Description of Artificial Sequence: Synthetic oligonucleotide
ccauucggaaggcuaggug

SEQ ID NO: 1534164 - RNA, 19 nt, Artificial Sequence
  Description of Artificial Sequence: Synthetic oligonucleotide
ggacgcagauuggaucagg

SEQ ID NO: 1534165 - RNA, 19 nt, Artificial Sequence
  Description of Artificial Sequence: Synthetic oligonucleotide
aggcuaguuccuuggcguu

SEQ ID NO: 1534166 - RNA, 19 nt, Artificial Sequence
  Description of Artificial Sequence: Synthetic oligonucleotide
auuuuccaguggucucgau

SEQ ID NO: 1534167 - RNA, 19 nt, Artificial Sequence
  Description of Artificial Sequence: Synthetic oligonucleotide
caggcucaguuccucguga

SEQ ID NO: 1534168 - RNA, 19 nt, Artificial Sequence
  Description of Artificial Sequence: Synthetic oligonucleotide
auuugcgggcgaggugaag

SEQ ID NO: 1534169 - RNA, 19 nt, Artificial Sequence
  Description of Artificial Sequence: Synthetic oligonucleotide
cuucgagggauacagccuu

SEQ ID NO: 1534170 - RNA, 19 nt, Artificial Sequence
  Description of Artificial Sequence: Synthetic oligonucleotide
caugcugcucaaaggggcu

SEQ ID NO: 1534171 - RNA, 19 nt, Artificial Sequence
  Description of Artificial Sequence: Synthetic oligonucleotide
gccugccaaccucaugucc

SEQ ID NO: 1534172 - RNA, 19 nt, Artificial Sequence
  Description of Artificial Sequence: Synthetic oligonucleotide
ggugcacuguuuggggacc

SEQ ID NO: 1534173 - RNA, 19 nt, Artificial Sequence
  Description of Artificial Sequence: Synthetic oligonucleotide
ggagcucaccacugacccc

SEQ ID NO: 1534174 - RNA, 19 nt, Artificial Sequence
  Description of Artificial Sequence: Synthetic oligonucleotide
aucggugcuacaacuuguu

SEQ ID NO: 1534175 - RNA, 19 nt, Artificial Sequence
  Description of Artificial Sequence: Synthetic oligonucleotide
uucagcccacggcccacau

SEQ ID NO: 1534176 - RNA, 19 nt, Artificial Sequence
  Description of Artificial Sequence: Synthetic oligonucleotide
ggcacgaucggugcuacaa

SEQ ID NO: 1534177 - RNA, 19 nt, Artificial Sequence
  Description of Artificial Sequence: Synthetic oligonucleotide
ucgugagcacugggagaag

SEQ ID NO: 1534178 - RNA, 19 nt, Artificial Sequence
  Description of Artificial Sequence: Synthetic oligonucleotide
gcccugauguauuggggca

SEQ ID NO: 1534179 - RNA, 19 nt, Artificial Sequence
  Description of Artificial Sequence: Synthetic oligonucleotide
caaccucauguccacuucu

SEQ ID NO: 1534180 - RNA, 19 nt, Artificial Sequence
  Description of Artificial Sequence: Synthetic oligonucleotide
auacagccuuccaucucca

SEQ ID NO: 1534181 - RNA, 19 nt, Artificial Sequence
  Description of Artificial Sequence: Synthetic oligonucleotide
augcuugggcaugggacaa

SEQ ID NO: 1534182 - RNA, 19 nt, Artificial Sequence
  Description of Artificial Sequence: Synthetic oligonucleotide
ugggcacgaucggugcuac

SEQ ID NO: 1534183 - RNA, 19 nt, Artificial Sequence
  Description of Artificial Sequence: Synthetic oligonucleotide
ugacgcugccuggguguag

SEQ ID NO: 1534184 - RNA, 19 nt, Artificial Sequence
  Description of Artificial Sequence: Synthetic oligonucleotide
ugcacuguuuggggaccgu

SEQ ID NO: 1534185 - RNA, 19 nt, Artificial Sequence
  Description of Artificial Sequence: Synthetic oligonucleotide
gucuggcuaacagaagccu

SEQ ID NO: 1534186 - RNA, 19 nt, Artificial Sequence
  Description of Artificial Sequence: Synthetic oligonucleotide
gcacgaucggugcuacaac

SEQ ID NO: 1534187 - RNA, 19 nt, Artificial Sequence
  Description of Artificial Sequence: Synthetic oligonucleotide
acgaucggugcuacaacuu

SEQ ID NO: 1534188 - RNA, 19 nt, Artificial Sequence
  Description of Artificial Sequence: Synthetic oligonucleotide
ucuuguccucgaggcagau

SEQ ID NO: 1534189 - RNA, 19 nt, Artificial Sequence
  Description of Artificial Sequence: Synthetic oligonucleotide
cccgucgcggcucucaguc

SEQ ID NO: 1534190 - RNA, 19 nt, Artificial Sequence
  Description of Artificial Sequence: Synthetic oligonucleotide
caggccgcacuuguacuuc

SEQ ID NO: 1534191 - RNA, 19 nt, Artificial Sequence
  Description of Artificial Sequence: Synthetic oligonucleotide
caugcaguggccggaugaa

SEQ ID NO: 1534192 - RNA, 19 nt, Artificial Sequence
  Description of Artificial Sequence: Synthetic oligonucleotide
gcggcucucagucuggcua

SEQ ID NO: 1534193 - RNA, 19 nt, Artificial Sequence
  Description of Artificial Sequence: Synthetic oligonucleotide
ccggcaggugcacuguuug

SEQ ID NO: 1534194 - RNA, 19 nt, Artificial Sequence
  Description of Artificial Sequence: Synthetic oligonucleotide
caguggccggaugaacuuc

SEQ ID NO: 1534195 - RNA, 19 nt, Artificial Sequence
  Description of Artificial Sequence: Synthetic oligonucleotide
ggggcaagggagccucaug

SEQ ID NO: 1534196 - RNA, 19 nt, Artificial Sequence
  Description of Artificial Sequence: Synthetic oligonucleotide
gacuaggauccaggagaga

SEQ ID NO: 1534197 - RNA, 19 nt, Artificial Sequence
  Description of Artificial Sequence: Synthetic oligonucleotide
cauuggcagccccgcugac

SEQ ID NO: 1534198 - RNA, 19 nt, Artificial Sequence
  Description of Artificial Sequence: Synthetic oligonucleotide
cucgauuugcgggcgaggu

SEQ ID NO: 1534199 - RNA, 19 nt, Artificial Sequence
  Description of Artificial Sequence: Synthetic oligonucleotide
gagacccauagugaugauu

SEQ ID NO: 1534200 - RNA, 19 nt, Artificial Sequence
  Description of Artificial Sequence: Synthetic oligonucleotide
ucgcggcucucagucuggc

SEQ ID NO: 1534201 - RNA, 19 nt, Artificial Sequence
  Description of Artificial Sequence: Synthetic oligonucleotide
caacuaccuaagcuccaua

SEQ ID NO: 1534202 - RNA, 19 nt, Artificial Sequence
  Description of Artificial Sequence: Synthetic oligonucleotide
gcuaggcccggggaucggg

SEQ ID NO: 1534203 - RNA, 19 nt, Artificial Sequence
  Description of Artificial Sequence: Synthetic oligonucleotide
cgauuugcgggcgagguga

SEQ ID NO: 1534204 - RNA, 19 nt, Artificial Sequence
  Description of Artificial Sequence: Synthetic oligonucleotide
gauuugcgggcgaggugaa

SEQ ID NO: 1534205 - RNA, 19 nt, Artificial Sequence
  Description of Artificial Sequence: Synthetic oligonucleotide
gcccgaugacauuggcagc

SEQ ID NO: 1534206 - RNA, 19 nt, Artificial Sequence
  Description of Artificial Sequence: Synthetic oligonucleotide
cuggaacguagcaauuguu

SEQ ID NO: 1534207 - RNA, 19 nt, Artificial Sequence
  Description of Artificial Sequence: Synthetic oligonucleotide
gcacuguuuggggaccgug

SEQ ID NO: 1534208 - RNA, 19 nt, Artificial Sequence
  Description of Artificial Sequence: Synthetic oligonucleotide
gcagcccuaauaaccuuga

SEQ ID NO: 1534209 - RNA, 19 nt, Artificial Sequence
  Description of Artificial Sequence: Synthetic oligonucleotide
acccgucgcggcucucagu

SEQ ID NO: 1534210 - RNA, 19 nt, Artificial Sequence
  Description of Artificial Sequence: Synthetic oligonucleotide
ggcuaguuccuuggcguuc

SEQ ID NO: 1534211 - RNA, 19 nt, Artificial Sequence
  Description of Artificial Sequence: Synthetic oligonucleotide
ccccucccgugcuaggccc

SEQ ID NO: 1534212 - RNA, 19 nt, Artificial Sequence
  Description of Artificial Sequence: Synthetic oligonucleotide
cagccccgcugaccauucg

SEQ ID NO: 1534213 - RNA, 19 nt, Artificial Sequence
  Description of Artificial Sequence: Synthetic oligonucleotide
cagagacccggcaggccaa

SEQ ID NO: 1534214 - RNA, 19 nt, Artificial Sequence
  Description of Artificial Sequence: Synthetic oligonucleotide
cagauuggaucagggauuu

SEQ ID NO: 1534215 - RNA, 19 nt, Artificial Sequence
  Description of Artificial Sequence: Synthetic oligonucleotide
ggguagggacaagucugug

SEQ ID NO: 1534216 - RNA, 19 nt, Artificial Sequence
  Description of Artificial Sequence: Synthetic oligonucleotide
cgcagauuggaucagggau

SEQ ID NO: 1534217 - RNA, 19 nt, Artificial Sequence
  Description of Artificial Sequence: Synthetic oligonucleotide
gcagauuggaucagggauu

SEQ ID NO: 1534218 - RNA, 19 nt, Artificial Sequence
  Description of Artificial Sequence: Synthetic oligonucleotide
gugcuagcccaccaugcuu

SEQ ID NO: 1534219 - RNA, 19 nt, Artificial Sequence
  Description of Artificial Sequence: Synthetic oligonucleotide
gggccacgaugcgaagggg

SEQ ID NO: 1534220 - RNA, 19 nt, Artificial Sequence
  Description of Artificial Sequence: Synthetic oligonucleotide
gccccucccgugcuaggcc

SEQ ID NO: 1534221 - RNA, 19 nt, Artificial Sequence
  Description of Artificial Sequence: Synthetic oligonucleotide
gcccugcagcccuaauaac

SEQ ID NO: 1534222 - RNA, 19 nt, Artificial Sequence
  Description of Artificial Sequence: Synthetic oligonucleotide
ggccugccaaccucauguc

SEQ ID NO: 1534223 - RNA, 19 nt, Artificial Sequence
  Description of Artificial Sequence: Synthetic oligonucleotide
cugggcacgaucggugcua

SEQ ID NO: 1534224 - RNA, 19 nt, Artificial Sequence
  Description of Artificial Sequence: Synthetic oligonucleotide
gcaugggacaaggccuuca

SEQ ID NO: 1534225 - RNA, 19 nt, Artificial Sequence
  Description of Artificial Sequence: Synthetic oligonucleotide
ggucucgauuugcgggcga

SEQ ID NO: 1534226 - RNA, 19 nt, Artificial Sequence
  Description of Artificial Sequence: Synthetic oligonucleotide
cuaggcccggggaucgggu

SEQ ID NO: 1534227 - RNA, 19 nt, Artificial Sequence
  Description of Artificial Sequence: Synthetic oligonucleotide
ggggaccgugggcucugag

SEQ ID NO: 1534228 - RNA, 19 nt, Artificial Sequence
  Description of Artificial Sequence: Synthetic oligonucleotide
gaaacccgucgcggcucuc

SEQ ID NO: 1534229 - RNA, 19 nt, Artificial Sequence
  Description of Artificial Sequence: Synthetic oligonucleotide
cggcaggccaaugacgcug

SEQ ID NO: 1534230 - RNA, 19 nt, Artificial Sequence
  Description of Artificial Sequence: Synthetic oligonucleotide
cacaaacacuaggguaccu

SEQ ID NO: 1534231 - RNA, 19 nt, Artificial Sequence
  Description of Artificial Sequence: Synthetic oligonucleotide
ggucgguccuguugaggcu

SEQ ID NO: 1534232 - RNA, 19 nt, Artificial Sequence
  Description of Artificial Sequence: Synthetic oligonucleotide
gccccgcugaccauucgga

SEQ ID NO: 1534233 - RNA, 19 nt, Artificial Sequence
  Description of Artificial Sequence: Synthetic oligonucleotide
cgugcuaggcccggggauc

SEQ ID NO: 1534234 - RNA, 19 nt, Artificial Sequence
  Description of Artificial Sequence: Synthetic oligonucleotide
gcaguggccggaugaacuu

SEQ ID NO: 1534235 - RNA, 19 nt, Artificial Sequence
  Description of Artificial Sequence: Synthetic oligonucleotide
gggguagggacaagucugu

SEQ ID NO: 1534236 - RNA, 19 nt, Artificial Sequence
  Description of Artificial Sequence: Synthetic oligonucleotide
gcgggcgaggugaagcaaa

SEQ ID NO: 1534237 - RNA, 19 nt, Artificial Sequence
  Description of Artificial Sequence: Synthetic oligonucleotide
cacccuacacuggugccau

SEQ ID NO: 1534238 - RNA, 19 nt, Artificial Sequence
  Description of Artificial Sequence: Synthetic oligonucleotide
ggaccuccggcaggugcac

SEQ ID NO: 1534239 - RNA, 19 nt, Artificial Sequence
  Description of Artificial Sequence: Synthetic oligonucleotide
guggccggaugaacuucaa

SEQ ID NO: 1534240 - RNA, 19 nt, Artificial Sequence
  Description of Artificial Sequence: Synthetic oligonucleotide
gcaggccgcacuuguacuu

SEQ ID NO: 1534241 - RNA, 19 nt, Artificial Sequence
  Description of Artificial Sequence: Synthetic oligonucleotide
gcuagcccaccaugcuucu

SEQ ID NO: 1534242 - RNA, 19 nt, Artificial Sequence
  Description of Artificial Sequence: Synthetic oligonucleotide
gcugucacggaaggcuagu

SEQ ID NO: 1534243 - RNA, 19 nt, Artificial Sequence
  Description of Artificial Sequence: Synthetic oligonucleotide
ggggaucgggucgguccug

SEQ ID NO: 1534244 - RNA, 19 nt, Artificial Sequence
  Description of Artificial Sequence: Synthetic oligonucleotide
gcacacccuuggcucccac

SEQ ID NO: 1534245 - RNA, 19 nt, Artificial Sequence
  Description of Artificial Sequence: Synthetic oligonucleotide
ccacauuguccuugacgcu

SEQ ID NO: 1534246 - RNA, 19 nt, Artificial Sequence
  Description of Artificial Sequence: Synthetic oligonucleotide
cugucacggaaggcuaguu

SEQ ID NO: 1534247 - RNA, 19 nt, Artificial Sequence
  Description of Artificial Sequence: Synthetic oligonucleotide
ccccgcugaccauucggaa

SEQ ID NO: 1534248 - RNA, 19 nt, Artificial Sequence
  Description of Artificial Sequence: Synthetic oligonucleotide
gggcacgaucggugcuaca

SEQ ID NO: 1534249 - RNA, 19 nt, Artificial Sequence
  Description of Artificial Sequence: Synthetic oligonucleotide
ggacuggaacguagcaauu

SEQ ID NO: 1534250 - RNA, 19 nt, Artificial Sequence
  Description of Artificial Sequence: Synthetic oligonucleotide
gaccuccggcaggugcacu

SEQ ID NO: 1534251 - RNA, 19 nt, Artificial Sequence
  Description of Artificial Sequence: Synthetic oligonucleotide
cucgggccccucccgugcu

SEQ ID NO: 1534252 - RNA, 19 nt, Artificial Sequence
  Description of Artificial Sequence: Synthetic oligonucleotide
cggcucucagucuggcuaa

SEQ ID NO: 1534253 - RNA, 19 nt, Artificial Sequence
  Description of Artificial Sequence: Synthetic oligonucleotide
gggaucgggucgguccugu

SEQ ID NO: 1534254 - RNA, 19 nt, Artificial Sequence
  Description of Artificial Sequence: Synthetic oligonucleotide
ccuagccagcagggcuuug

SEQ ID NO: 1534255 - RNA, 19 nt, Artificial Sequence
  Description of Artificial Sequence: Synthetic oligonucleotide
ggcagccccgcugaccauu

SEQ ID NO: 1534256 - RNA, 19 nt, Artificial Sequence
  Description of Artificial Sequence: Synthetic oligonucleotide
cuagcccaccaugcuucuu

SEQ ID NO: 1534257 - RNA, 19 nt, Artificial Sequence
  Description of Artificial Sequence: Synthetic oligonucleotide
ccgugcuaggcccggggau

SEQ ID NO: 1534258 - RNA, 19 nt, Artificial Sequence
  Description of Artificial Sequence: Synthetic oligonucleotide
cacggcccacauuguccuu

SEQ ID NO: 1534259 - RNA, 19 nt, Artificial Sequence
  Description of Artificial Sequence: Synthetic oligonucleotide
ggaucgggucgguccuguu

SEQ ID NO: 1534260 - RNA, 19 nt, Artificial Sequence
  Description of Artificial Sequence: Synthetic oligonucleotide
cccggggaucgggucgguc

SEQ ID NO: 1534261 - RNA, 19 nt, Artificial Sequence
  Description of Artificial Sequence: Synthetic oligonucleotide
gccagcccugcagcccuaa

SEQ ID NO: 1534262 - RNA, 19 nt, Artificial Sequence
  Description of Artificial Sequence: Synthetic oligonucleotide
ccggcaggccaaugacgcu

SEQ ID NO: 1534263 - RNA, 19 nt, Artificial Sequence
  Description of Artificial Sequence: Synthetic oligonucleotide
cggggaucgggucgguccu

SEQ ID NO: 1534264 - RNA, 19 nt, Artificial Sequence
  Description of Artificial Sequence: Synthetic oligonucleotide
ccgugggcucugagaggaa

SEQ ID NO: 1534265 - RNA, 19 nt, Artificial Sequence
  Description of Artificial Sequence: Synthetic oligonucleotide
gcucaccacugaccccauu

SEQ ID NO: 1534266 - RNA, 19 nt, Artificial Sequence
  Description of Artificial Sequence: Synthetic oligonucleotide
cgcggcucucagucuggcu

SEQ ID NO: 1534267 - RNA, 19 nt, Artificial Sequence
  Description of Artificial Sequence: Synthetic oligonucleotide
aacagaaacacuuugaagu

SEQ ID NO: 1534268 - RNA, 19 nt, Artificial Sequence
  Description of Artificial Sequence: Synthetic oligonucleotide
auuaauaugaauaugcauc

SEQ ID NO: 1534269 - RNA, 19 nt, Artificial Sequence
  Description of Artificial Sequence: Synthetic oligonucleotide
aacaaagaagucuaaaaug

SEQ ID NO: 1534270 - RNA, 19 nt, Artificial Sequence
  Description of Artificial Sequence: Synthetic oligonucleotide
aauggaaagaucuacuaug

SEQ ID NO: 1534271 - RNA, 19 nt, Artificial Sequence
  Description of Artificial Sequence: Synthetic oligonucleotide
ucuacuaugaaccuauagc

SEQ ID NO: 1534272 - RNA, 19 nt, Artificial Sequence
  Description of Artificial Sequence: Synthetic oligonucleotide
uaaucuacaaaucuaauaa

SEQ ID NO: 1534273 - RNA, 19 nt, Artificial Sequence
  Description of Artificial Sequence: Synthetic oligonucleotide
aggguuuacaaacagaaac

SEQ ID NO: 1534274 - RNA, 19 nt, Artificial Sequence
  Description of Artificial Sequence: Synthetic oligonucleotide
aaaaguuaccucuaaagga

SEQ ID NO: 1534275 - RNA, 19 nt, Artificial Sequence
  Description of Artificial Sequence: Synthetic oligonucleotide
aacacuuugaaguuaauau

SEQ ID NO: 1534276 - RNA, 19 nt, Artificial Sequence
  Description of Artificial Sequence: Synthetic oligonucleotide
gaaagaucuacuaugaacc

SEQ ID NO: 1534277 - RNA, 19 nt, Artificial Sequence
  Description of Artificial Sequence: Synthetic oligonucleotide
uucacuuaaagcaugguca

SEQ ID NO: 1534278 - RNA, 19 nt, Artificial Sequence
  Description of Artificial Sequence: Synthetic oligonucleotide
aaguuagaauaguaagugc

SEQ ID NO: 1534279 - RNA, 19 nt, Artificial Sequence
  Description of Artificial Sequence: Synthetic oligonucleotide
uuucauaggaauaaauaug

SEQ ID NO: 1534280 - RNA, 19 nt, Artificial Sequence
  Description of Artificial Sequence: Synthetic oligonucleotide
aaaguuagaauaguaagug

SEQ ID NO: 1534281 - RNA, 19 nt, Artificial Sequence
  Description of Artificial Sequence: Synthetic oligonucleotide
aaauugauuugacuauugg

SEQ ID NO: 1534282 - RNA, 19 nt, Artificial Sequence
  Description of Artificial Sequence: Synthetic oligonucleotide
ugaauggggauuaauauga

SEQ ID NO: 1534283 - RNA, 19 nt, Artificial Sequence
  Description of Artificial Sequence: Synthetic oligonucleotide
aaauaccacauauguaugg

SEQ ID NO: 1534284 - RNA, 19 nt, Artificial Sequence
  Description of Artificial Sequence: Synthetic oligonucleotide
agaaaaguuaccucuaaag

SEQ ID NO: 1534285 - RNA, 19 nt, Artificial Sequence
  Description of Artificial Sequence: Synthetic oligonucleotide
aauagugugucugacgugg

SEQ ID NO: 1534286 - RNA, 19 nt, Artificial Sequence
  Description of Artificial Sequence: Synthetic oligonucleotide
uuaaaaguuagaauaguaa

SEQ ID NO: 1534287 - RNA, 19 nt, Artificial Sequence
  Description of Artificial Sequence: Synthetic oligonucleotide
uucacuuccaauaaucuac

SEQ ID NO: 1534288 - RNA, 19 nt, Artificial Sequence
  Description of Artificial Sequence: Synthetic oligonucleotide
aaacuuacccucccaaaac

SEQ ID NO: 1534289 - RNA, 19 nt, Artificial Sequence
  Description of Artificial Sequence: Synthetic oligonucleotide
uuaauauuacuguagauuu

SEQ ID NO: 1534290 - RNA, 19 nt, Artificial Sequence
  Description of Artificial Sequence: Synthetic oligonucleotide
gaauaugcaucuuaccagg

SEQ ID NO: 1534291 - RNA, 19 nt, Artificial Sequence
  Description of Artificial Sequence: Synthetic oligonucleotide
gaaccuauagccaacaacc

SEQ ID NO: 1534292 - RNA, 19 nt, Artificial Sequence
  Description of Artificial Sequence: Synthetic oligonucleotide
ugaguuuuaagagaaauac

SEQ ID NO: 1534293 - RNA, 19 nt, Artificial Sequence
  Description of Artificial Sequence: Synthetic oligonucleotide
aaaaugguaaauaaauuga

SEQ ID NO: 1534294 - RNA, 19 nt, Artificial Sequence
  Description of Artificial Sequence: Synthetic oligonucleotide
ugaauaugcaucuuaccag

SEQ ID NO: 1534295 - RNA, 19 nt, Artificial Sequence
  Description of Artificial Sequence: Synthetic oligonucleotide
aaaagauaggcuuaucaaa

SEQ ID NO: 1534296 - RNA, 19 nt, Artificial Sequence
  Description of Artificial Sequence: Synthetic oligonucleotide
aaaguuguuaaguuuaauu

SEQ ID NO: 1534297 - RNA, 19 nt, Artificial Sequence
  Description of Artificial Sequence: Synthetic oligonucleotide
uaucuaaauuuucauagga

SEQ ID NO: 1534298 - RNA, 19 nt, Artificial Sequence
  Description of Artificial Sequence: Synthetic oligonucleotide
uacaaugauagccaaaauc

SEQ ID NO: 1534299 - RNA, 19 nt, Artificial Sequence
  Description of Artificial Sequence: Synthetic oligonucleotide
ucaacugugguucugaaua

SEQ ID NO: 1534300 - RNA, 19 nt, Artificial Sequence
  Description of Artificial Sequence: Synthetic oligonucleotide
augaauaugcaucuuacca

SEQ ID NO: 1534301 - RNA, 19 nt, Artificial Sequence
  Description of Artificial Sequence: Synthetic oligonucleotide
guagagucaugucagaagg

SEQ ID NO: 1534302 - RNA, 19 nt, Artificial Sequence
  Description of Artificial Sequence: Synthetic oligonucleotide
auaaaagauaggcuuauca

SEQ ID NO: 1534303 - RNA, 19 nt, Artificial Sequence
  Description of Artificial Sequence: Synthetic oligonucleotide
aauagcacaauucauccuu

SEQ ID NO: 1534304 - RNA, 19 nt, Artificial Sequence
  Description of Artificial Sequence: Synthetic oligonucleotide
ucugaauauccauucacag

SEQ ID NO: 1534305 - RNA, 19 nt, Artificial Sequence
  Description of Artificial Sequence: Synthetic oligonucleotide
agcauggucaucuacacug

SEQ ID NO: 1534306 - RNA, 19 nt, Artificial Sequence
  Description of Artificial Sequence: Synthetic oligonucleotide
acuuauagaaaacucaaau

SEQ ID NO: 1534307 - RNA, 19 nt, Artificial Sequence
  Description of Artificial Sequence: Synthetic oligonucleotide
ucagauuuuaccuuaggaa

SEQ ID NO: 1534308 - RNA, 19 nt, Artificial Sequence
  Description of Artificial Sequence: Synthetic oligonucleotide
uuuacauacugcuccacag

SEQ ID NO: 1534309 - RNA, 19 nt, Artificial Sequence
  Description of Artificial Sequence: Synthetic oligonucleotide
uguguaagaauuuccacac

SEQ ID NO: 1534310 - RNA, 19 nt, Artificial Sequence
  Description of Artificial Sequence: Synthetic oligonucleotide
uuuaccuuaggaacaaaga

SEQ ID NO: 1534311 - RNA, 19 nt, Artificial Sequence
  Description of Artificial Sequence: Synthetic oligonucleotide
acagaaauugauuugacua

SEQ ID NO: 1534312 - RNA, 19 nt, Artificial Sequence
  Description of Artificial Sequence: Synthetic oligonucleotide
uacauacugcuccacaggg

SEQ ID NO: 1534313 - RNA, 19 nt, Artificial Sequence
  Description of Artificial Sequence: Synthetic oligonucleotide
uguaagaauuuccacacaa

SEQ ID NO: 1534314 - RNA, 19 nt, Artificial Sequence
  Description of Artificial Sequence: Synthetic oligonucleotide
ugcauaacugauaaaagau

SEQ ID NO: 1534315 - RNA, 19 nt, Artificial Sequence
  Description of Artificial Sequence: Synthetic oligonucleotide
aaaaguuagaauaguaagu

SEQ ID NO: 1534316 - RNA, 19 nt, Artificial Sequence
  Description of Artificial Sequence: Synthetic oligonucleotide
acaaugauagccaaaauca

SEQ ID NO: 1534317 - RNA, 19 nt, Artificial Sequence
  Description of Artificial Sequence: Synthetic oligonucleotide
cagauuuuaccuuaggaac

SEQ ID NO: 1534318 - RNA, 19 nt, Artificial Sequence
  Description of Artificial Sequence: Synthetic oligonucleotide
aauucacagauaaaugguc

SEQ ID NO: 1534319 - RNA, 19 nt, Artificial Sequence
  Description of Artificial Sequence: Synthetic oligonucleotide
ucacaacgagcacugaugg

SEQ ID NO: 1534320 - RNA, 19 nt, Artificial Sequence
  Description of Artificial Sequence: Synthetic oligonucleotide
uagcuuacaauuaaaaguu

SEQ ID NO: 1534321 - RNA, 19 nt, Artificial Sequence
  Description of Artificial Sequence: Synthetic oligonucleotide
uuuacaaugauagccaaaa

SEQ ID NO: 1534322 - RNA, 19 nt, Artificial Sequence
  Description of Artificial Sequence: Synthetic oligonucleotide
aagcgcuaaggguagaguc

SEQ ID NO: 1534323 - RNA, 19 nt, Artificial Sequence
  Description of Artificial Sequence: Synthetic oligonucleotide
uuaccuuaggaacaaagaa

SEQ ID NO: 1534324 - RNA, 19 nt, Artificial Sequence
  Description of Artificial Sequence: Synthetic oligonucleotide
aucuguaccagaaugcacc

SEQ ID NO: 1534325 - RNA, 19 nt, Artificial Sequence
  Description of Artificial Sequence: Synthetic oligonucleotide
uauguuuacuaccagggau

SEQ ID NO: 1534326 - RNA, 19 nt, Artificial Sequence
  Description of Artificial Sequence: Synthetic oligonucleotide
uuaggaacaaagaagucua

SEQ ID NO: 1534327 - RNA, 19 nt, Artificial Sequence
  Description of Artificial Sequence: Synthetic oligonucleotide
uauagucucaacugaaaac

SEQ ID NO: 1534328 - RNA, 19 nt, Artificial Sequence
  Description of Artificial Sequence: Synthetic oligonucleotide
ucuagaguuucugacaaag

SEQ ID NO: 1534329 - RNA, 19 nt, Artificial Sequence
  Description of Artificial Sequence: Synthetic oligonucleotide
aacagaaauugauuugacu

SEQ ID NO: 1534330 - RNA, 19 nt, Artificial Sequence
  Description of Artificial Sequence: Synthetic oligonucleotide
uuacauacugcuccacagg

SEQ ID NO: 1534331 - RNA, 19 nt, Artificial Sequence
  Description of Artificial Sequence: Synthetic oligonucleotide
uuuaacagugucugaaacu

SEQ ID NO: 1534332 - RNA, 19 nt, Artificial Sequence
  Description of Artificial Sequence: Synthetic oligonucleotide
guaucuaaauuuucauagg

SEQ ID NO: 1534333 - RNA, 19 nt, Artificial Sequence
  Description of Artificial Sequence: Synthetic oligonucleotide
guagcuuacaauuaaaagu

SEQ ID NO: 1534334 - RNA, 19 nt, Artificial Sequence
  Description of Artificial Sequence: Synthetic oligonucleotide
ugaaccuauagccaacaac

SEQ ID NO: 1534335 - RNA, 19 nt, Artificial Sequence
  Description of Artificial Sequence: Synthetic oligonucleotide
auaugaauaugcaucuuac

SEQ ID NO: 1534336 - RNA, 19 nt, Artificial Sequence
  Description of Artificial Sequence: Synthetic oligonucleotide
uucugaauauccauucaca

SEQ ID NO: 1534337 - RNA, 19 nt, Artificial Sequence
  Description of Artificial Sequence: Synthetic oligonucleotide
auagucucaacugaaaaca

SEQ ID NO: 1534338 - RNA, 19 nt, Artificial Sequence
  Description of Artificial Sequence: Synthetic oligonucleotide
aacuuguuauauuucacuu

SEQ ID NO: 1534339 - RNA, 19 nt, Artificial Sequence
  Description of Artificial Sequence: Synthetic oligonucleotide
acaaccaaaaguuguuaag

SEQ ID NO: 1534340 - RNA, 19 nt, Artificial Sequence
  Description of Artificial Sequence: Synthetic oligonucleotide
aauauccauucacagcuga

SEQ ID NO: 1534341 - RNA, 19 nt, Artificial Sequence
  Description of Artificial Sequence: Synthetic oligonucleotide
aacgagcacugauggaagc

SEQ ID NO: 1534342 - RNA, 19 nt, Artificial Sequence
  Description of Artificial Sequence: Synthetic oligonucleotide
uuaagagaaauacuucuuu

SEQ ID NO: 1534343 - RNA, 19 nt, Artificial Sequence
  Description of Artificial Sequence: Synthetic oligonucleotide
aaaguuaccucuaaaggaa

SEQ ID NO: 1534344 - RNA, 19 nt, Artificial Sequence
  Description of Artificial Sequence: Synthetic oligonucleotide
aaugauagccaaaaucaca

SEQ ID NO: 1534345 - RNA, 19 nt, Artificial Sequence
  Description of Artificial Sequence: Synthetic oligonucleotide
aaagaucuacuaugaaccu

SEQ ID NO: 1534346 - RNA, 19 nt, Artificial Sequence
  Description of Artificial Sequence: Synthetic oligonucleotide
auccauucacagcugaccg

SEQ ID NO: 1534347 - RNA, 19 nt, Artificial Sequence
  Description of Artificial Sequence: Synthetic oligonucleotide
aaagauaggcuuaucaaaa

SEQ ID NO: 1534348 - RNA, 19 nt, Artificial Sequence
  Description of Artificial Sequence: Synthetic oligonucleotide
augaauggggauuaauaug

SEQ ID NO: 1534349 - RNA, 19 nt, Artificial Sequence
  Description of Artificial Sequence: Synthetic oligonucleotide
aauaauggucgcacagccc

SEQ ID NO: 1534350 - RNA, 19 nt, Artificial Sequence
  Description of Artificial Sequence: Synthetic oligonucleotide
agggaugucuuaucaauuc

SEQ ID NO: 1534351 - RNA, 19 nt, Artificial Sequence
  Description of Artificial Sequence: Synthetic oligonucleotide
cagaauacugaguucauuc

SEQ ID NO: 1534352 - RNA, 19 nt, Artificial Sequence
  Description of Artificial Sequence: Synthetic oligonucleotide
uuacccucccaaaacagug

SEQ ID NO: 1534353 - RNA, 19 nt, Artificial Sequence
  Description of Artificial Sequence: Synthetic oligonucleotide
aguuuuaagagaaauacuu

SEQ ID NO: 1534354 - RNA, 19 nt, Artificial Sequence
  Description of Artificial Sequence: Synthetic oligonucleotide
uuaguaucuaaauuuucau

SEQ ID NO: 1534355 - RNA, 19 nt, Artificial Sequence
  Description of Artificial Sequence: Synthetic oligonucleotide
agauuucgcaguuaggaga

SEQ ID NO: 1534356 - RNA, 19 nt, Artificial Sequence
  Description of Artificial Sequence: Synthetic oligonucleotide
aguuagaauaguaagugca

SEQ ID NO: 1534357 - RNA, 19 nt, Artificial Sequence
  Description of Artificial Sequence: Synthetic oligonucleotide
aauaaauagcacaauucau

SEQ ID NO: 1534358 - RNA, 19 nt, Artificial Sequence
  Description of Artificial Sequence: Synthetic oligonucleotide
aacuuacccucccaaaaca

SEQ ID NO: 1534359 - RNA, 19 nt, Artificial Sequence
  Description of Artificial Sequence: Synthetic oligonucleotide
gggauuaauaugaauaugc

SEQ ID NO: 1534360 - RNA, 19 nt, Artificial Sequence
  Description of Artificial Sequence: Synthetic oligonucleotide
auucacagauaaauggucg

SEQ ID NO: 1534361 - RNA, 19 nt, Artificial Sequence
  Description of Artificial Sequence: Synthetic oligonucleotide
ugucuguguaagaauuucc

SEQ ID NO: 1534362 - RNA, 19 nt, Artificial Sequence
  Description of Artificial Sequence: Synthetic oligonucleotide
uagauuucgcaguuaggag

SEQ ID NO: 1534363 - RNA, 19 nt, Artificial Sequence
  Description of Artificial Sequence: Synthetic oligonucleotide
acuaugaaccuauagccaa

SEQ ID NO: 1534364 - RNA, 19 nt, Artificial Sequence
  Description of Artificial Sequence: Synthetic oligonucleotide
uuuaugcuucuucaaauuu

SEQ ID NO: 1534365 - RNA, 19 nt, Artificial Sequence
  Description of Artificial Sequence: Synthetic oligonucleotide
ggaaagaucuacuaugaac

SEQ ID NO: 1534366 - RNA, 19 nt, Artificial Sequence
  Description of Artificial Sequence: Synthetic oligonucleotide
gucaauauaacuguuguaa

SEQ ID NO: 1534367 - RNA, 19 nt, Artificial Sequence
  Description of Artificial Sequence: Synthetic oligonucleotide
gaucgaaaguguuuguuga

SEQ ID NO: 1534368 - RNA, 19 nt, Artificial Sequence
  Description of Artificial Sequence: Synthetic oligonucleotide
aaucacaacgagcacugau

SEQ ID NO: 1534369 - RNA, 19 nt, Artificial Sequence
  Description of Artificial Sequence: Synthetic oligonucleotide
aaaugguaaauaaauugau

SEQ ID NO: 1534370 - RNA, 19 nt, Artificial Sequence
  Description of Artificial Sequence: Synthetic oligonucleotide
cuuuaacagugucugaaac

SEQ ID NO: 1534371 - RNA, 19 nt, Artificial Sequence
  Description of Artificial Sequence: Synthetic oligonucleotide
aaguguagcuuacaauuaa

SEQ ID NO: 1534372 - RNA, 19 nt, Artificial Sequence
  Description of Artificial Sequence: Synthetic oligonucleotide
uuaacagugucugaaacuu

SEQ ID NO: 1534373 - RNA, 19 nt, Artificial Sequence
  Description of Artificial Sequence: Synthetic oligonucleotide
aaguggaagcgcuaagggu

SEQ ID NO: 1534374 - RNA, 19 nt, Artificial Sequence
  Description of Artificial Sequence: Synthetic oligonucleotide
caaguggaagcgcuaaggg

SEQ ID NO: 1534375 - RNA, 19 nt, Artificial Sequence
  Description of Artificial Sequence: Synthetic oligonucleotide
caugucagaaggcuucacg

SEQ ID NO: 1534376 - RNA, 19 nt, Artificial Sequence
  Description of Artificial Sequence: Synthetic oligonucleotide
auauagucucaacugaaaa

SEQ ID NO: 1534377 - RNA, 19 nt, Artificial Sequence
  Description of Artificial Sequence: Synthetic oligonucleotide
uuagaaaaguuaccucuaa

SEQ ID NO: 1534378 - RNA, 19 nt, Artificial Sequence
  Description of Artificial Sequence: Synthetic oligonucleotide
uuaaugucuguguaagaau

SEQ ID NO: 1534379 - RNA, 19 nt, Artificial Sequence
  Description of Artificial Sequence: Synthetic oligonucleotide
aauggggauuaauaugaau

SEQ ID NO: 1534380 - RNA, 19 nt, Artificial Sequence
  Description of Artificial Sequence: Synthetic oligonucleotide
guagauuucgcaguuagga

SEQ ID NO: 1534381 - RNA, 19 nt, Artificial Sequence
  Description of Artificial Sequence: Synthetic oligonucleotide
auggaauuaaggcagcuuu

SEQ ID NO: 1534382 - RNA, 19 nt, Artificial Sequence
  Description of Artificial Sequence: Synthetic oligonucleotide
uuaugcuucuucaaauuuu

SEQ ID NO: 1534383 - RNA, 19 nt, Artificial Sequence
  Description of Artificial Sequence: Synthetic oligonucleotide
cuacacuuauagaaaacuc

SEQ ID NO: 1534384 - RNA, 19 nt, Artificial Sequence
  Description of Artificial Sequence: Synthetic oligonucleotide
aacugauaaaagauaggcu

SEQ ID NO: 1534385 - RNA, 19 nt, Artificial Sequence
  Description of Artificial Sequence: Synthetic oligonucleotide
uguaugggaucgaaagugu

SEQ ID NO: 1534386 - RNA, 19 nt, Artificial Sequence
  Description of Artificial Sequence: Synthetic oligonucleotide
cuccgugacaggcagaagc

SEQ ID NO: 1534387 - RNA, 19 nt, Artificial Sequence
  Description of Artificial Sequence: Synthetic oligonucleotide
uaauauuacuguagauuuc

SEQ ID NO: 1534388 - RNA, 19 nt, Artificial Sequence
  Description of Artificial Sequence: Synthetic oligonucleotide
uuguguggggucuuguuca

SEQ ID NO: 1534389 - RNA, 19 nt, Artificial Sequence
  Description of Artificial Sequence: Synthetic oligonucleotide
gaaauugauuugacuauug

SEQ ID NO: 1534390 - RNA, 19 nt, Artificial Sequence
  Description of Artificial Sequence: Synthetic oligonucleotide
gaaacuuacccucccaaaa

SEQ ID NO: 1534391 - RNA, 19 nt, Artificial Sequence
  Description of Artificial Sequence: Synthetic oligonucleotide
accuuaggaacaaagaagu

SEQ ID NO: 1534392 - RNA, 19 nt, Artificial Sequence
  Description of Artificial Sequence: Synthetic oligonucleotide
gaacaaagaagucuaaaau

SEQ ID NO: 1534393 - RNA, 19 nt, Artificial Sequence
  Description of Artificial Sequence: Synthetic oligonucleotide
gaauaguaagugcauaacu

SEQ ID NO: 1534394 - RNA, 19 nt, Artificial Sequence
  Description of Artificial Sequence: Synthetic oligonucleotide
uaguaucuaaauuuucaua

SEQ ID NO: 1534395 - RNA, 19 nt, Artificial Sequence
  Description of Artificial Sequence: Synthetic oligonucleotide
uucacagauaaauggucgu

SEQ ID NO: 1534396 - RNA, 19 nt, Artificial Sequence
  Description of Artificial Sequence: Synthetic oligonucleotide
cuguguaagaauuuccaca

SEQ ID NO: 1534397 - RNA, 19 nt, Artificial Sequence
  Description of Artificial Sequence: Synthetic oligonucleotide
caaugauagccaaaaucac

SEQ ID NO: 1534398 - RNA, 19 nt, Artificial Sequence
  Description of Artificial Sequence: Synthetic oligonucleotide
cuguaugggaucgaaagug

SEQ ID NO: 1534399 - RNA, 19 nt, Artificial Sequence
  Description of Artificial Sequence: Synthetic oligonucleotide
gaugaauggggauuaauau

SEQ ID NO: 1534400 - RNA, 19 nt, Artificial Sequence
  Description of Artificial Sequence: Synthetic oligonucleotide
caaauaccacauauguaug

SEQ ID NO: 1534401 - RNA, 19 nt, Artificial Sequence
  Description of Artificial Sequence: Synthetic oligonucleotide
agccaaaaucacaacgagc

SEQ ID NO: 1534402 - RNA, 19 nt, Artificial Sequence
  Description of Artificial Sequence: Synthetic oligonucleotide
cuggaguuuuaucuguacc

SEQ ID NO: 1534403 - RNA, 19 nt, Artificial Sequence
  Description of Artificial Sequence: Synthetic oligonucleotide
aauauagucucaacugaaa

SEQ ID NO: 1534404 - RNA, 19 nt, Artificial Sequence
  Description of Artificial Sequence: Synthetic oligonucleotide
uagaaaaguuaccucuaaa

SEQ ID NO: 1534405 - RNA, 19 nt, Artificial Sequence
  Description of Artificial Sequence: Synthetic oligonucleotide
uccuuaguaucuaaauuuu

SEQ ID NO: 1534406 - RNA, 19 nt, Artificial Sequence
  Description of Artificial Sequence: Synthetic oligonucleotide
aguuaauauuacuguagau

SEQ ID NO: 1534407 - RNA, 19 nt, Artificial Sequence
  Description of Artificial Sequence: Synthetic oligonucleotide
ucgcaguuaggagagaaca

SEQ ID NO: 1534408 - RNA, 19 nt, Artificial Sequence
  Description of Artificial Sequence: Synthetic oligonucleotide
ucugaaacuuacccuccca

SEQ ID NO: 1534409 - RNA, 19 nt, Artificial Sequence
  Description of Artificial Sequence: Synthetic oligonucleotide
uuugacuuccaugaaugaa

SEQ ID NO: 1534410 - RNA, 19 nt, Artificial Sequence
  Description of Artificial Sequence: Synthetic oligonucleotide
ucgaaaguguuuguugagc

SEQ ID NO: 1534411 - RNA, 19 nt, Artificial Sequence
  Description of Artificial Sequence: Synthetic oligonucleotide
aacugaaaacagaaauuga

SEQ ID NO: 1534412 - RNA, 19 nt, Artificial Sequence
  Description of Artificial Sequence: Synthetic oligonucleotide
aucgaaaguguuuguugag

SEQ ID NO: 1534413 - RNA, 19 nt, Artificial Sequence
  Description of Artificial Sequence: Synthetic oligonucleotide
uaucuguaccagaaugcac

SEQ ID NO: 1534414 - RNA, 19 nt, Artificial Sequence
  Description of Artificial Sequence: Synthetic oligonucleotide
cacgucuagaguuucugac

SEQ ID NO: 1534415 - RNA, 19 nt, Artificial Sequence
  Description of Artificial Sequence: Synthetic oligonucleotide
agauuuuaccuuaggaaca

SEQ ID NO: 1534416 - RNA, 19 nt, Artificial Sequence
  Description of Artificial Sequence: Synthetic oligonucleotide
uaugggaucgaaaguguuu

SEQ ID NO: 1534417 - RNA, 19 nt, Artificial Sequence
  Description of Artificial Sequence: Synthetic oligonucleotide
ugaaacuuacccucccaaa

SEQ ID NO: 1534418 - RNA, 19 nt, Artificial Sequence
  Description of Artificial Sequence: Synthetic oligonucleotide
auggggauuaauaugaaua

SEQ ID NO: 1534419 - RNA, 19 nt, Artificial Sequence
  Description of Artificial Sequence: Synthetic oligonucleotide
auauuacuguagauuucgc

SEQ ID NO: 1534420 - RNA, 19 nt, Artificial Sequence
  Description of Artificial Sequence: Synthetic oligonucleotide
acaacgagcacugauggaa

SEQ ID NO: 1534421 - RNA, 19 nt, Artificial Sequence
  Description of Artificial Sequence: Synthetic oligonucleotide
guuuguugagcucuccuga

SEQ ID NO: 1534422 - RNA, 19 nt, Artificial Sequence
  Description of Artificial Sequence: Synthetic oligonucleotide
augggaucgaaaguguuug

SEQ ID NO: 1534423 - RNA, 19 nt, Artificial Sequence
  Description of Artificial Sequence: Synthetic oligonucleotide
auguuuacuaccagggaug

SEQ ID NO: 1534424 - RNA, 19 nt, Artificial Sequence
  Description of Artificial Sequence: Synthetic oligonucleotide
ggauguuuauguuuacuac

SEQ ID NO: 1534425 - RNA, 19 nt, Artificial Sequence
  Description of Artificial Sequence: Synthetic oligonucleotide
auaugcaucuuaccaggga

SEQ ID NO: 1534426 - RNA, 19 nt, Artificial Sequence
  Description of Artificial Sequence: Synthetic oligonucleotide
ugauaaaagauaggcuuau

SEQ ID NO: 1534427 - RNA, 19 nt, Artificial Sequence
  Description of Artificial Sequence: Synthetic oligonucleotide
ugucugacgugggagacug

SEQ ID NO: 1534428 - RNA, 19 nt, Artificial Sequence
  Description of Artificial Sequence: Synthetic oligonucleotide
uaugaaccuauagccaaca

SEQ ID NO: 1534429 - RNA, 19 nt, Artificial Sequence
  Description of Artificial Sequence: Synthetic oligonucleotide
guuaauauuacuguagauu

SEQ ID NO: 1534430 - RNA, 19 nt, Artificial Sequence
  Description of Artificial Sequence: Synthetic oligonucleotide
uuuucaccuguauguuucc

SEQ ID NO: 1534431 - RNA, 19 nt, Artificial Sequence
  Description of Artificial Sequence: Synthetic oligonucleotide
uuagaauaguaagugcaua

SEQ ID NO: 1534432 - RNA, 19 nt, Artificial Sequence
  Description of Artificial Sequence: Synthetic oligonucleotide
ggaucgaaaguguuuguug

SEQ ID NO: 1534433 - RNA, 19 nt, Artificial Sequence
  Description of Artificial Sequence: Synthetic oligonucleotide
aucacaacgagcacugaug

SEQ ID NO: 1534434 - RNA, 19 nt, Artificial Sequence
  Description of Artificial Sequence: Synthetic oligonucleotide
agguuaggugcuuugacuu

SEQ ID NO: 1534435 - RNA, 19 nt, Artificial Sequence
  Description of Artificial Sequence: Synthetic oligonucleotide
ugauuugacuauugguuuu

SEQ ID NO: 1534436 - RNA, 19 nt, Artificial Sequence
  Description of Artificial Sequence: Synthetic oligonucleotide
acgucuagaguuucugaca

SEQ ID NO: 1534437 - RNA, 19 nt, Artificial Sequence
  Description of Artificial Sequence: Synthetic oligonucleotide
cuaugaaccuauagccaac

SEQ ID NO: 1534438 - RNA, 19 nt, Artificial Sequence
  Description of Artificial Sequence: Synthetic oligonucleotide
ugcaucuuaccagggaugu

SEQ ID NO: 1534439 - RNA, 19 nt, Artificial Sequence
  Description of Artificial Sequence: Synthetic oligonucleotide
acacuuauagaaaacucaa

SEQ ID NO: 1534440 - RNA, 19 nt, Artificial Sequence
  Description of Artificial Sequence: Synthetic oligonucleotide
guuuacauacugcuccaca

SEQ ID NO: 1534441 - RNA, 19 nt, Artificial Sequence
  Description of Artificial Sequence: Synthetic oligonucleotide
uggaauuaaggcagcuuua

SEQ ID NO: 1534442 - RNA, 19 nt, Artificial Sequence
  Description of Artificial Sequence: Synthetic oligonucleotide
uucacgucuagaguuucug

SEQ ID NO: 1534443 - RNA, 19 nt, Artificial Sequence
  Description of Artificial Sequence: Synthetic oligonucleotide
cucaacugaaaacagaaau

SEQ ID NO: 1534444 - RNA, 19 nt, Artificial Sequence
  Description of Artificial Sequence: Synthetic oligonucleotide
aguguuuguugagcucucc

SEQ ID NO: 1534445 - RNA, 19 nt, Artificial Sequence
  Description of Artificial Sequence: Synthetic oligonucleotide
uacccucccaaaacagugc

SEQ ID NO: 1534446 - RNA, 19 nt, Artificial Sequence
  Description of Artificial Sequence: Synthetic oligonucleotide
uggaaagaucuacuaugaa

SEQ ID NO: 1534447 - RNA, 19 nt, Artificial Sequence
  Description of Artificial Sequence: Synthetic oligonucleotide
uuacaaugauagccaaaau

SEQ ID NO: 1534448 - RNA, 19 nt, Artificial Sequence
  Description of Artificial Sequence: Synthetic oligonucleotide
aaucaacugugguucugaa

SEQ ID NO: 1534449 - RNA, 19 nt, Artificial Sequence
  Description of Artificial Sequence: Synthetic oligonucleotide
aagcagguuaggugcuuug

SEQ ID NO: 1534450 - RNA, 19 nt, Artificial Sequence
  Description of Artificial Sequence: Synthetic oligonucleotide
aguggaagcgcuaagggua

SEQ ID NO: 1534451 - RNA, 19 nt, Artificial Sequence
  Description of Artificial Sequence: Synthetic oligonucleotide
aggacuucuuugugugggg

SEQ ID NO: 1534452 - RNA, 19 nt, Artificial Sequence
  Description of Artificial Sequence: Synthetic oligonucleotide
uguuuacuaccagggaugu

SEQ ID NO: 1534453 - RNA, 19 nt, Artificial Sequence
  Description of Artificial Sequence: Synthetic oligonucleotide
uccauucacagcugaccgc

SEQ ID NO: 1534454 - RNA, 19 nt, Artificial Sequence
  Description of Artificial Sequence: Synthetic oligonucleotide
ugauagccaaaaucacaac

SEQ ID NO: 1534455 - RNA, 19 nt, Artificial Sequence
  Description of Artificial Sequence: Synthetic oligonucleotide
gaguuucugacaaaggacu

SEQ ID NO: 1534456 - RNA, 19 nt, Artificial Sequence
  Description of Artificial Sequence: Synthetic oligonucleotide
uucgcaguuaggagagaac

SEQ ID NO: 1534457 - RNA, 19 nt, Artificial Sequence
  Description of Artificial Sequence: Synthetic oligonucleotide
ucacgucuagaguuucuga

SEQ ID NO: 1534458 - RNA, 19 nt, Artificial Sequence
  Description of Artificial Sequence: Synthetic oligonucleotide
agaugaauggggauuaaua

SEQ ID NO: 1534459 - RNA, 19 nt, Artificial Sequence
  Description of Artificial Sequence: Synthetic oligonucleotide
aguuuacauacugcuccac

SEQ ID NO: 1534460 - RNA, 19 nt, Artificial Sequence
  Description of Artificial Sequence: Synthetic oligonucleotide
ucugacgugggagacuggu

SEQ ID NO: 1534461 - RNA, 19 nt, Artificial Sequence
  Description of Artificial Sequence: Synthetic oligonucleotide
uacuguagauuucgcaguu

SEQ ID NO: 1534462 - RNA, 19 nt, Artificial Sequence
  Description of Artificial Sequence: Synthetic oligonucleotide
aggcuucacgucuagaguu

SEQ ID NO: 1534463 - RNA, 19 nt, Artificial Sequence
  Description of Artificial Sequence: Synthetic oligonucleotide
caacgagcacugauggaag

SEQ ID NO: 1534464 - RNA, 19 nt, Artificial Sequence
  Description of Artificial Sequence: Synthetic oligonucleotide
accuauagccaacaaccaa

SEQ ID NO: 1534465 - RNA, 19 nt, Artificial Sequence
  Description of Artificial Sequence: Synthetic oligonucleotide
uaauggucgcacagcccag

SEQ ID NO: 1534466 - RNA, 19 nt, Artificial Sequence
  Description of Artificial Sequence: Synthetic oligonucleotide
gaauggaaagaucuacuau

SEQ ID NO: 1534467 - RNA, 19 nt, Artificial Sequence
  Description of Artificial Sequence: Synthetic oligonucleotide
caguuaggagagaacaaca

SEQ ID NO: 1534468 - RNA, 19 nt, Artificial Sequence
  Description of Artificial Sequence: Synthetic oligonucleotide
agaaauugauuugacuauu

SEQ ID NO: 1534469 - RNA, 19 nt, Artificial Sequence
  Description of Artificial Sequence: Synthetic oligonucleotide
uuucgcaguuaggagagaa

SEQ ID NO: 1534470 - RNA, 19 nt, Artificial Sequence
  Description of Artificial Sequence: Synthetic oligonucleotide
ucccaaaacagugcugcca

SEQ ID NO: 1534471 - RNA, 19 nt, Artificial Sequence
  Description of Artificial Sequence: Synthetic oligonucleotide
uaccagaaugcaccuuugu

SEQ ID NO: 1534472 - RNA, 19 nt, Artificial Sequence
  Description of Artificial Sequence: Synthetic oligonucleotide
acuuacccucccaaaacag

SEQ ID NO: 1534473 - RNA, 19 nt, Artificial Sequence
  Description of Artificial Sequence: Synthetic oligonucleotide
accgcaauagugugucuga

SEQ ID NO: 1534474 - RNA, 19 nt, Artificial Sequence
  Description of Artificial Sequence: Synthetic oligonucleotide
cuaaggguagagucauguc

SEQ ID NO: 1534475 - RNA, 19 nt, Artificial Sequence
  Description of Artificial Sequence: Synthetic oligonucleotide
aguuccaaguggaagcgcu

SEQ ID NO: 1534476 - RNA, 19 nt, Artificial Sequence
  Description of Artificial Sequence: Synthetic oligonucleotide
auuagaaaaguuaccucua

SEQ ID NO: 1534477 - RNA, 19 nt, Artificial Sequence
  Description of Artificial Sequence: Synthetic oligonucleotide
uccacaggucagauuuuac

SEQ ID NO: 1534478 - RNA, 19 nt, Artificial Sequence
  Description of Artificial Sequence: Synthetic oligonucleotide
auuaaaaccuacacuuaua

SEQ ID NO: 1534479 - RNA, 19 nt, Artificial Sequence
  Description of Artificial Sequence: Synthetic oligonucleotide
gauaaaagauaggcuuauc

SEQ ID NO: 1534480 - RNA, 19 nt, Artificial Sequence
  Description of Artificial Sequence: Synthetic oligonucleotide
aguuaggagagaacaacaa

SEQ ID NO: 1534481 - RNA, 19 nt, Artificial Sequence
  Description of Artificial Sequence: Synthetic oligonucleotide
gagacugguucuccgugac

SEQ ID NO: 1534482 - RNA, 19 nt, Artificial Sequence
  Description of Artificial Sequence: Synthetic oligonucleotide
gaauauccauucacagcug

SEQ ID NO: 1534483 - RNA, 19 nt, Artificial Sequence
  Description of Artificial Sequence: Synthetic oligonucleotide
ccacaggucagauuuuacc

SEQ ID NO: 1534484 - RNA, 19 nt, Artificial Sequence
  Description of Artificial Sequence: Synthetic oligonucleotide
auaccacauauguaugguu

SEQ ID NO: 1534485 - RNA, 19 nt, Artificial Sequence
  Description of Artificial Sequence: Synthetic oligonucleotide
uucuccgugacaggcagaa

SEQ ID NO: 1534486 - RNA, 19 nt, Artificial Sequence
  Description of Artificial Sequence: Synthetic oligonucleotide
gugggagacugguucuccg

SEQ ID NO: 1534487 - RNA, 19 nt, Artificial Sequence
  Description of Artificial Sequence: Synthetic oligonucleotide
cacaggucagauuuuaccu

SEQ ID NO: 1534488 - RNA, 19 nt, Artificial Sequence
  Description of Artificial Sequence: Synthetic oligonucleotide
aucaacugugguucugaau

SEQ ID NO: 1534489 - RNA, 19 nt, Artificial Sequence
  Description of Artificial Sequence: Synthetic oligonucleotide
uccagaauacugaguucau

SEQ ID NO: 1534490 - RNA, 19 nt, Artificial Sequence
  Description of Artificial Sequence: Synthetic oligonucleotide
ugugucugacgugggagac

SEQ ID NO: 1534491 - RNA, 19 nt, Artificial Sequence
  Description of Artificial Sequence: Synthetic oligonucleotide
caauagugugucugacgug

SEQ ID NO: 1534492 - RNA, 19 nt, Artificial Sequence
  Description of Artificial Sequence: Synthetic oligonucleotide
acccucccaaaacagugcu

SEQ ID NO: 1534493 - RNA, 19 nt, Artificial Sequence
  Description of Artificial Sequence: Synthetic oligonucleotide
gcaauagugugucugacgu

SEQ ID NO: 1534494 - RNA, 19 nt, Artificial Sequence
  Description of Artificial Sequence: Synthetic oligonucleotide
cacaauucauccuuaguau

SEQ ID NO: 1534495 - RNA, 19 nt, Artificial Sequence
  Description of Artificial Sequence: Synthetic oligonucleotide
aaguuaccucuaaaggaau

SEQ ID NO: 1534496 - RNA, 19 nt, Artificial Sequence
  Description of Artificial Sequence: Synthetic oligonucleotide
gcagucuggaguuuuaucu

SEQ ID NO: 1534497 - RNA, 19 nt, Artificial Sequence
  Description of Artificial Sequence: Synthetic oligonucleotide
agggauguuuauguuuacu

SEQ ID NO: 1534498 - RNA, 19 nt, Artificial Sequence
  Description of Artificial Sequence: Synthetic oligonucleotide
gcaguuaggagagaacaac

SEQ ID NO: 1534499 - RNA, 19 nt, Artificial Sequence
  Description of Artificial Sequence: Synthetic oligonucleotide
ccucccaaaacagugcugc

SEQ ID NO: 1534500 - RNA, 19 nt, Artificial Sequence
  Description of Artificial Sequence: Synthetic oligonucleotide
guguagcuuacaauuaaaa

SEQ ID NO: 1534501 - RNA, 19 nt, Artificial Sequence
  Description of Artificial Sequence: Synthetic oligonucleotide
ccuauagccaacaaccaaa

SEQ ID NO: 1534502 - RNA, 19 nt, Artificial Sequence
  Description of Artificial Sequence: Synthetic oligonucleotide
agcgcuaaggguagaguca

SEQ ID NO: 1534503 - RNA, 19 nt, Artificial Sequence
  Description of Artificial Sequence: Synthetic oligonucleotide
uuccaaguggaagcgcuaa

SEQ ID NO: 1534504 - RNA, 19 nt, Artificial Sequence
  Description of Artificial Sequence: Synthetic oligonucleotide
aguguagcuuacaauuaaa

SEQ ID NO: 1534505 - RNA, 19 nt, Artificial Sequence
  Description of Artificial Sequence: Synthetic oligonucleotide
uguguggggucuuguucac

SEQ ID NO: 1534506 - RNA, 19 nt, Artificial Sequence
  Description of Artificial Sequence: Synthetic oligonucleotide
ccaauaaucuacaaaucua

SEQ ID NO: 1534507 - RNA, 19 nt, Artificial Sequence
  Description of Artificial Sequence: Synthetic oligonucleotide
accagggaugucuuaucaa

SEQ ID NO: 1534508 - RNA, 19 nt, Artificial Sequence
  Description of Artificial Sequence: Synthetic oligonucleotide
uggucgcacagcccagaug

SEQ ID NO: 1534509 - RNA, 19 nt, Artificial Sequence
  Description of Artificial Sequence: Synthetic oligonucleotide
cugaaacuuacccucccaa

SEQ ID NO: 1534510 - RNA, 19 nt, Artificial Sequence
  Description of Artificial Sequence: Synthetic oligonucleotide
ugggaucgaaaguguuugu

SEQ ID NO: 1534511 - RNA, 19 nt, Artificial Sequence
  Description of Artificial Sequence: Synthetic oligonucleotide
cuaccagggaugucuuauc

SEQ ID NO: 1534512 - RNA, 19 nt, Artificial Sequence
  Description of Artificial Sequence: Synthetic oligonucleotide
auagugugucugacguggg

SEQ ID NO: 1534513 - RNA, 19 nt, Artificial Sequence
  Description of Artificial Sequence: Synthetic oligonucleotide
ucuuaccagggauguuuau

SEQ ID NO: 1534514 - RNA, 19 nt, Artificial Sequence
  Description of Artificial Sequence: Synthetic oligonucleotide
augaaccuauagccaacaa

SEQ ID NO: 1534515 - RNA, 19 nt, Artificial Sequence
  Description of Artificial Sequence: Synthetic oligonucleotide
guuagaauaguaagugcau

SEQ ID NO: 1534516 - RNA, 19 nt, Artificial Sequence
  Description of Artificial Sequence: Synthetic oligonucleotide
agcacugauggaagcaggu

SEQ ID NO: 1534517 - RNA, 19 nt, Artificial Sequence
  Description of Artificial Sequence: Synthetic oligonucleotide
acgagcacugauggaagca

SEQ ID NO: 1534518 - RNA, 19 nt, Artificial Sequence
  Description of Artificial Sequence: Synthetic oligonucleotide
ggcuucauuagaaaaguua

SEQ ID NO: 1534519 - RNA, 19 nt, Artificial Sequence
  Description of Artificial Sequence: Synthetic oligonucleotide
cauguccucaaagucaaua

SEQ ID NO: 1534520 - RNA, 19 nt, Artificial Sequence
  Description of Artificial Sequence: Synthetic oligonucleotide
aggguagagucaugucaga

SEQ ID NO: 1534521 - RNA, 19 nt, Artificial Sequence
  Description of Artificial Sequence: Synthetic oligonucleotide
agcagguuaggugcuuuga

SEQ ID NO: 1534522 - RNA, 19 nt, Artificial Sequence
  Description of Artificial Sequence: Synthetic oligonucleotide
acugucuuuugaccacuua

SEQ ID NO: 1534523 - RNA, 19 nt, Artificial Sequence
  Description of Artificial Sequence: Synthetic oligonucleotide
gcagguuaggugcuuugac

SEQ ID NO: 1534524 - RNA, 19 nt, Artificial Sequence
  Description of Artificial Sequence: Synthetic oligonucleotide
guuaccucuaaaggaauau

SEQ ID NO: 1534525 - RNA, 19 nt, Artificial Sequence
  Description of Artificial Sequence: Synthetic oligonucleotide
cuuacccucccaaaacagu

SEQ ID NO: 1534526 - RNA, 19 nt, Artificial Sequence
  Description of Artificial Sequence: Synthetic oligonucleotide
cauccuuaguaucuaaauu

SEQ ID NO: 1534527 - RNA, 19 nt, Artificial Sequence
  Description of Artificial Sequence: Synthetic oligonucleotide
cauaugcucuucaguucca

SEQ ID NO: 1534528 - RNA, 19 nt, Artificial Sequence
  Description of Artificial Sequence: Synthetic oligonucleotide
cagggauguuuauguuuac

SEQ ID NO: 1534529 - RNA, 19 nt, Artificial Sequence
  Description of Artificial Sequence: Synthetic oligonucleotide
ucaugucagaaggcuucac

SEQ ID NO: 1534530 - RNA, 19 nt, Artificial Sequence
  Description of Artificial Sequence: Synthetic oligonucleotide
aguuaccucuaaaggaaua

SEQ ID NO: 1534531 - RNA, 19 nt, Artificial Sequence
  Description of Artificial Sequence: Synthetic oligonucleotide
gguuaggugcuuugacuuc

SEQ ID NO: 1534532 - RNA, 19 nt, Artificial Sequence
  Description of Artificial Sequence: Synthetic oligonucleotide
cagguuaggugcuuugacu

SEQ ID NO: 1534533 - RNA, 19 nt, Artificial Sequence
  Description of Artificial Sequence: Synthetic oligonucleotide
gggagacugguucuccgug

SEQ ID NO: 1534534 - RNA, 19 nt, Artificial Sequence
  Description of Artificial Sequence: Synthetic oligonucleotide
gaaugcaccuuuguuuuau

SEQ ID NO: 1534535 - RNA, 19 nt, Artificial Sequence
  Description of Artificial Sequence: Synthetic oligonucleotide
gacgugggagacugguucu

SEQ ID NO: 1534536 - RNA, 19 nt, Artificial Sequence
  Description of Artificial Sequence: Synthetic oligonucleotide
ucgcacagcccagaugaau

SEQ ID NO: 1534537 - RNA, 19 nt, Artificial Sequence
  Description of Artificial Sequence: Synthetic oligonucleotide
agcuuacaauuaaaaguua

SEQ ID NO: 1534538 - RNA, 19 nt, Artificial Sequence
  Description of Artificial Sequence: Synthetic oligonucleotide
auggucgcacagcccagau

SEQ ID NO: 1534539 - RNA, 19 nt, Artificial Sequence
  Description of Artificial Sequence: Synthetic oligonucleotide
uacuaccagggaugucuua

SEQ ID NO: 1534540 - RNA, 19 nt, Artificial Sequence
  Description of Artificial Sequence: Synthetic oligonucleotide
cacaacgagcacugaugga

SEQ ID NO: 1534541 - RNA, 19 nt, Artificial Sequence
  Description of Artificial Sequence: Synthetic oligonucleotide
ucuccgugacaggcagaag

SEQ ID NO: 1534542 - RNA, 19 nt, Artificial Sequence
  Description of Artificial Sequence: Synthetic oligonucleotide
gaagcgcuaaggguagagu

SEQ ID NO: 1534543 - RNA, 19 nt, Artificial Sequence
  Description of Artificial Sequence: Synthetic oligonucleotide
gcuaaggguagagucaugu

SEQ ID NO: 1534544 - RNA, 19 nt, Artificial Sequence
  Description of Artificial Sequence: Synthetic oligonucleotide
gucuagaguuucugacaaa

SEQ ID NO: 1534545 - RNA, 19 nt, Artificial Sequence
  Description of Artificial Sequence: Synthetic oligonucleotide
aucuuaccagggauguuua

SEQ ID NO: 1534546 - RNA, 19 nt, Artificial Sequence
  Description of Artificial Sequence: Synthetic oligonucleotide
ugcugccauaguggaaguc

SEQ ID NO: 1534547 - RNA, 19 nt, Artificial Sequence
  Description of Artificial Sequence: Synthetic oligonucleotide
ccuacacuuauagaaaacu

SEQ ID NO: 1534548 - RNA, 19 nt, Artificial Sequence
  Description of Artificial Sequence: Synthetic oligonucleotide
guuuacuaccagggauguc

SEQ ID NO: 1534549 - RNA, 19 nt, Artificial Sequence
  Description of Artificial Sequence: Synthetic oligonucleotide
auuucgcaguuaggagaga

SEQ ID NO: 1534550 - RNA, 19 nt, Artificial Sequence
  Description of Artificial Sequence: Synthetic oligonucleotide
uggaagcgcuaaggguaga

SEQ ID NO: 1534551 - RNA, 19 nt, Artificial Sequence
  Description of Artificial Sequence: Synthetic oligonucleotide
gaucuacuaugaaccuaua

SEQ ID NO: 1534552 - RNA, 19 nt, Artificial Sequence
  Description of Artificial Sequence: Synthetic oligonucleotide
cuucacgucuagaguuucu

SEQ ID NO: 1534553 - RNA, 19 nt, Artificial Sequence
  Description of Artificial Sequence: Synthetic oligonucleotide
cgagcacugauggaagcag

SEQ ID NO: 1534554 - RNA, 19 nt, Artificial Sequence
  Description of Artificial Sequence: Synthetic oligonucleotide
cuuuguguggggucuuguu

SEQ ID NO: 1534555 - RNA, 19 nt, Artificial Sequence
  Description of Artificial Sequence: Synthetic oligonucleotide
cauucacagcugaccgcaa

SEQ ID NO: 1534556 - RNA, 19 nt, Artificial Sequence
  Description of Artificial Sequence: Synthetic oligonucleotide
cgaaaguguuuguugagcu

SEQ ID NO: 1534557 - RNA, 19 nt, Artificial Sequence
  Description of Artificial Sequence: Synthetic oligonucleotide
gcuucacgucuagaguuuc

SEQ ID NO: 1534558 - RNA, 19 nt, Artificial Sequence
  Description of Artificial Sequence: Synthetic oligonucleotide
cccucccaaaacagugcug

SEQ ID NO: 1534559 - RNA, 19 nt, Artificial Sequence
  Description of Artificial Sequence: Synthetic oligonucleotide
ccgcaauagugugucugac

SEQ ID NO: 1534560 - RNA, 19 nt, Artificial Sequence
  Description of Artificial Sequence: Synthetic oligonucleotide
ggacuucuuuguguggggu

SEQ ID NO: 1534561 - RNA, 19 nt, Artificial Sequence
  Description of Artificial Sequence: Synthetic oligonucleotide
cgcaguuaggagagaacaa

SEQ ID NO: 1534562 - RNA, 19 nt, Artificial Sequence
  Description of Artificial Sequence: Synthetic oligonucleotide
gggaucgaaaguguuuguu

SEQ ID NO: 1534563 - RNA, 19 nt, Artificial Sequence
  Description of Artificial Sequence: Synthetic oligonucleotide
cccagaugaauggggauua

SEQ ID NO: 1534564 - RNA, 19 nt, Artificial Sequence
  Description of Artificial Sequence: Synthetic oligonucleotide
cugacgugggagacugguu

SEQ ID NO: 1534565 - RNA, 19 nt, Artificial Sequence
  Description of Artificial Sequence: Synthetic oligonucleotide
gcgcuaaggguagagucau

SEQ ID NO: 1534566 - RNA, 19 nt, Artificial Sequence
  Description of Artificial Sequence: Synthetic oligonucleotide
ccaaaacagugcugccaua

SEQ ID NO: 1534567 - RNA, 19 nt, Artificial Sequence
  Description of Artificial Sequence: Synthetic oligonucleotide
cgcuaaggguagagucaug

SEQ ID NO: 1534568 - RNA, 19 nt, Artificial Sequence
  Description of Artificial Sequence: Synthetic oligonucleotide
ggcuucacgucuagaguuu

SEQ ID NO: 1534569 - RNA, 19 nt, Artificial Sequence
  Description of Artificial Sequence: Synthetic oligonucleotide
ccagaauacugaguucauu

SEQ ID NO: 1534570 - RNA, 19 nt, Artificial Sequence
  Description of Artificial Sequence: Synthetic oligonucleotide
gcaucuuaccagggauguu

SEQ ID NO: 1534571 - RNA, 19 nt, Artificial Sequence
  Description of Artificial Sequence: Synthetic oligonucleotide
aagaaagacaaacaggugc

SEQ ID NO: 1534572 - RNA, 19 nt, Artificial Sequence
  Description of Artificial Sequence: Synthetic oligonucleotide
aacaagaccauuucugggc

SEQ ID NO: 1534573 - RNA, 19 nt, Artificial Sequence
  Description of Artificial Sequence: Synthetic oligonucleotide
aaaggguucuccuugcagg

SEQ ID NO: 1534574 - RNA, 19 nt, Artificial Sequence
  Description of Artificial Sequence: Synthetic oligonucleotide
aauuaaugcagcuuuuccu

SEQ ID NO: 1534575 - RNA, 19 nt, Artificial Sequence
  Description of Artificial Sequence: Synthetic oligonucleotide
  modified_base (11)..(11): a, c, u, g, unknown or other
aacaccacggnguccaggc

SEQ ID NO: 1534576 - RNA, 19 nt, Artificial Sequence
  Description of Artificial Sequence: Synthetic oligonucleotide
aguaguggguaacaaacgc

SEQ ID NO: 1534577 - RNA, 19 nt, Artificial Sequence
  Description of Artificial Sequence: Synthetic oligonucleotide
ucguggauaagcuugaacc

SEQ ID NO: 1534578 - RNA, 19 nt, Artificial Sequence
  Description of Artificial Sequence: Synthetic oligonucleotide
auacuggucagccuggacc

SEQ ID NO: 1534579 - RNA, 19 nt, Artificial Sequence
  Description of Artificial Sequence: Synthetic oligonucleotide
uaauagguguuucucgugg

SEQ ID NO: 1534580 - RNA, 19 nt, Artificial Sequence
  Description of Artificial Sequence: Synthetic oligonucleotide
auaagcuugaaccagucca

SEQ ID NO: 1534581 - RNA, 19 nt, Artificial Sequence
  Description of Artificial Sequence: Synthetic oligonucleotide
uucaaauuaaugcagcuuu

SEQ ID NO: 1534582 - RNA, 19 nt, Artificial Sequence
  Description of Artificial Sequence: Synthetic oligonucleotide
uugacaauggcauugcgcu

SEQ ID NO: 1534583 - RNA, 19 nt, Artificial Sequence
  Description of Artificial Sequence: Synthetic oligonucleotide
aaggcaccgaaguucaaac

SEQ ID NO: 1534584 - RNA, 19 nt, Artificial Sequence
  Description of Artificial Sequence: Synthetic oligonucleotide
ucaacugcuuaucuucccg

SEQ ID NO: 1534585 - RNA, 19 nt, Artificial Sequence
  Description of Artificial Sequence: Synthetic oligonucleotide
  modified_base (16)..(16): a, c, u, g, unknown or other
agcaaaacaccacggnguc

SEQ ID NO: 1534586 - RNA, 19 nt, Artificial Sequence
  Description of Artificial Sequence: Synthetic oligonucleotide
acaauucaagccucaggcc

SEQ ID NO: 1534587 - RNA, 19 nt, Artificial Sequence
  Description of Artificial Sequence: Synthetic oligonucleotide
aaaaggguucuccuugcag

SEQ ID NO: 1534588 - RNA, 19 nt, Artificial Sequence
  Description of Artificial Sequence: Synthetic oligonucleotide
caucucaccauagauaucc

SEQ ID NO: 1534589 - RNA, 19 nt, Artificial Sequence
  Description of Artificial Sequence: Synthetic oligonucleotide
acaagaccauuucugggcc

SEQ ID NO: 1534590 - RNA, 19 nt, Artificial Sequence
  Description of Artificial Sequence: Synthetic oligonucleotide
aaacgaagacuucaaacau

SEQ ID NO: 1534591 - RNA, 19 nt, Artificial Sequence
  Description of Artificial Sequence: Synthetic oligonucleotide
cuuacccucagacucagcc

SEQ ID NO: 1534592 - RNA, 19 nt, Artificial Sequence
  Description of Artificial Sequence: Synthetic oligonucleotide
ucuauucccaggaggagcc

SEQ ID NO: 1534593 - RNA, 19 nt, Artificial Sequence
  Description of Artificial Sequence: Synthetic oligonucleotide
cauagaggaacggaaaagg

SEQ ID NO: 1534594 - RNA, 19 nt, Artificial Sequence
  Description of Artificial Sequence: Synthetic oligonucleotide
aagaaugugagcgcuccac

SEQ ID NO: 1534595 - RNA, 19 nt, Artificial Sequence
  Description of Artificial Sequence: Synthetic oligonucleotide
ucgauaagggucaugaauu

SEQ ID NO: 1534596 - RNA, 19 nt, Artificial Sequence
  Description of Artificial Sequence: Synthetic oligonucleotide
ucaggggauauacugguca

SEQ ID NO: 1534597 - RNA, 19 nt, Artificial Sequence
  Description of Artificial Sequence: Synthetic oligonucleotide
aaacgcaggcaggugaccc

SEQ ID NO: 1534598 - RNA, 19 nt, Artificial Sequence
  Description of Artificial Sequence: Synthetic oligonucleotide
acuaauagguguuucucgu

SEQ ID NO: 1534599 - RNA, 19 nt, Artificial Sequence
  Description of Artificial Sequence: Synthetic oligonucleotide
cacuaauagguguuucucg

SEQ ID NO: 1534600 - RNA, 19 nt, Artificial Sequence
  Description of Artificial Sequence: Synthetic oligonucleotide
aucuuugccaaugggaagg

SEQ ID NO: 1534601 - RNA, 19 nt, Artificial Sequence
  Description of Artificial Sequence: Synthetic oligonucleotide
acugcuuaucuucccggcc

SEQ ID NO: 1534602 - RNA, 19 nt, Artificial Sequence
  Description of Artificial Sequence: Synthetic oligonucleotide
accuuaacaagaccauuuc

SEQ ID NO: 1534603 - RNA, 19 nt, Artificial Sequence
  Description of Artificial Sequence: Synthetic oligonucleotide
aacgaagacuucaaacauc

SEQ ID NO: 1534604 - RNA, 19 nt, Artificial Sequence
  Description of Artificial Sequence: Synthetic oligonucleotide
agcuggaccgguuugaaga

SEQ ID NO: 1534605 - RNA, 19 nt, Artificial Sequence
  Description of Artificial Sequence: Synthetic oligonucleotide
acucucgccgcacuaauag

SEQ ID NO: 1534606 - RNA, 19 nt, Artificial Sequence
  Description of Artificial Sequence: Synthetic oligonucleotide
uuugaagaaugugagcgcu

SEQ ID NO: 1534607 - RNA, 19 nt, Artificial Sequence
  Description of Artificial Sequence: Synthetic oligonucleotide
gaaaagggcuccucauggg

SEQ ID NO: 1534608 - RNA, 19 nt, Artificial Sequence
  Description of Artificial Sequence: Synthetic oligonucleotide
ccuaaucccagaaagacac

SEQ ID NO: 1534609 - RNA, 19 nt, Artificial Sequence
  Description of Artificial Sequence: Synthetic oligonucleotide
aauagguguuucucgugga

SEQ ID NO: 1534610 - RNA, 19 nt, Artificial Sequence
  Description of Artificial Sequence: Synthetic oligonucleotide
uuugguggccuuccuuacg

SEQ ID NO: 1534611 - RNA, 19 nt, Artificial Sequence
  Description of Artificial Sequence: Synthetic oligonucleotide
ugucaacugcuuaucuucc

SEQ ID NO: 1534612 - RNA, 19 nt, Artificial Sequence
  Description of Artificial Sequence: Synthetic oligonucleotide
guggguaacaaacgcaggc

SEQ ID NO: 1534613 - RNA, 19 nt, Artificial Sequence
  Description of Artificial Sequence: Synthetic oligonucleotide
ugaagaaugugagcgcucc

SEQ ID NO: 1534614 - RNA, 19 nt, Artificial Sequence
  Description of Artificial Sequence: Synthetic oligonucleotide
ugcagugcgacccaacauc

SEQ ID NO: 1534615 - RNA, 19 nt, Artificial Sequence
  Description of Artificial Sequence: Synthetic oligonucleotide
cugaucauagcuuccaaca

SEQ ID NO: 1534616 - RNA, 19 nt, Artificial Sequence
  Description of Artificial Sequence: Synthetic oligonucleotide
gauaagcuugaaccagucc

SEQ ID NO: 1534617 - RNA, 19 nt, Artificial Sequence
  Description of Artificial Sequence: Synthetic oligonucleotide
gaucauagcuuccaacauc

SEQ ID NO: 1534618 - RNA, 19 nt, Artificial Sequence
  Description of Artificial Sequence: Synthetic oligonucleotide
ggauauacuggucagccug

SEQ ID NO: 1534619 - RNA, 19 nt, Artificial Sequence
  Description of Artificial Sequence: Synthetic oligonucleotide
caguaugugaccagcuuag

SEQ ID NO: 1534620 - RNA, 19 nt, Artificial Sequence
  Description of Artificial Sequence: Synthetic oligonucleotide
ugaaaaggguucuccuugc

SEQ ID NO: 1534621 - RNA, 19 nt, Artificial Sequence
  Description of Artificial Sequence: Synthetic oligonucleotide
auagaggaacggaaaaggg

SEQ ID NO: 1534622 - RNA, 19 nt, Artificial Sequence
  Description of Artificial Sequence: Synthetic oligonucleotide
uggucgauaagggucauga

SEQ ID NO: 1534623 - RNA, 19 nt, Artificial Sequence
  Description of Artificial Sequence: Synthetic oligonucleotide
agugcgacccaacauccag

SEQ ID NO: 1534624 - RNA, 19 nt, Artificial Sequence
  Description of Artificial Sequence: Synthetic oligonucleotide
uuacgguuggagaugcgga

SEQ ID NO: 1534625 - RNA, 19 nt, Artificial Sequence
  Description of Artificial Sequence: Synthetic oligonucleotide
agaggaacggaaaagggcu

SEQ ID NO: 1534626 - RNA, 19 nt, Artificial Sequence
  Description of Artificial Sequence: Synthetic oligonucleotide
guaugugaccagcuuaggc

SEQ ID NO: 1534627 - RNA, 19 nt, Artificial Sequence
  Description of Artificial Sequence: Synthetic oligonucleotide
guuugaagaaugugagcgc

SEQ ID NO: 1534628 - RNA, 19 nt, Artificial Sequence
  Description of Artificial Sequence: Synthetic oligonucleotide
uggaccgguuugaagaaug

SEQ ID NO: 1534629 - RNA, 19 nt, Artificial Sequence
  Description of Artificial Sequence: Synthetic oligonucleotide
ucuucccggccccucaacg

SEQ ID NO: 1534630 - RNA, 19 nt, Artificial Sequence
  Description of Artificial Sequence: Synthetic oligonucleotide
ucucgccgcacuaauaggu

SEQ ID NO: 1534631 - RNA, 19 nt, Artificial Sequence
  Description of Artificial Sequence: Synthetic oligonucleotide
cuuacgguuggagaugcgg

SEQ ID NO: 1534632 - RNA, 19 nt, Artificial Sequence
  Description of Artificial Sequence: Synthetic oligonucleotide
guuugaugaguggaaagcc

SEQ ID NO: 1534633 - RNA, 19 nt, Artificial Sequence
  Description of Artificial Sequence: Synthetic oligonucleotide
uucuauucccaggaggagc

SEQ ID NO: 1534634 - RNA, 19 nt, Artificial Sequence
  Description of Artificial Sequence: Synthetic oligonucleotide
gauaagggucaugaauucc

SEQ ID NO: 1534635 - RNA, 19 nt, Artificial Sequence
  Description of Artificial Sequence: Synthetic oligonucleotide
caguaguggguaacaaacg

SEQ ID NO: 1534636 - RNA, 19 nt, Artificial Sequence
  Description of Artificial Sequence: Synthetic oligonucleotide
cuugcuuuuggugucgcgc

SEQ ID NO: 1534637 - RNA, 19 nt, Artificial Sequence
  Description of Artificial Sequence: Synthetic oligonucleotide
uggauaagcuugaaccagu

SEQ ID NO: 1534638 - RNA, 19 nt, Artificial Sequence
  Description of Artificial Sequence: Synthetic oligonucleotide
aucauagcuuccaacaucu

SEQ ID NO: 1534639 - RNA, 19 nt, Artificial Sequence
  Description of Artificial Sequence: Synthetic oligonucleotide
aaggacauagaggaacgga

SEQ ID NO: 1534640 - RNA, 19 nt, Artificial Sequence
  Description of Artificial Sequence: Synthetic oligonucleotide
acggcuuccgguugaaaag

SEQ ID NO: 1534641 - RNA, 19 nt, Artificial Sequence
  Description of Artificial Sequence: Synthetic oligonucleotide
  modified_base (14)..(14): a, c, u, g, unknown or other
caaaacaccacggngucca

SEQ ID NO: 1534642 - RNA, 19 nt, Artificial Sequence
  Description of Artificial Sequence: Synthetic oligonucleotide
agauauccuccucagggga

SEQ ID NO: 1534643 - RNA, 19 nt, Artificial Sequence
  Description of Artificial Sequence: Synthetic oligonucleotide
ucaaauuaaugcagcuuuu

SEQ ID NO: 1534644 - RNA, 19 nt, Artificial Sequence
  Description of Artificial Sequence: Synthetic oligonucleotide
acguccauuuccucugcac

SEQ ID NO: 1534645 - RNA, 19 nt, Artificial Sequence
  Description of Artificial Sequence: Synthetic oligonucleotide
aggaacggaaaagggcucc

SEQ ID NO: 1534646 - RNA, 19 nt, Artificial Sequence
  Description of Artificial Sequence: Synthetic oligonucleotide
ccaguaguggguaacaaac

SEQ ID NO: 1534647 - RNA, 19 nt, Artificial Sequence
  Description of Artificial Sequence: Synthetic oligonucleotide
ugcgacccaacauccagcc

SEQ ID NO: 1534648 - RNA, 19 nt, Artificial Sequence
  Description of Artificial Sequence: Synthetic oligonucleotide
uuucaaauuaaugcagcuu

SEQ ID NO: 1534649 - RNA, 19 nt, Artificial Sequence
  Description of Artificial Sequence: Synthetic oligonucleotide
cuaauagguguuucucgug

SEQ ID NO: 1534650 - RNA, 19 nt, Artificial Sequence
  Description of Artificial Sequence: Synthetic oligonucleotide
cuuccaagaagccggcuac

SEQ ID NO: 1534651 - RNA, 19 nt, Artificial Sequence
  Description of Artificial Sequence: Synthetic oligonucleotide
cugcuuaucuucccggccc

SEQ ID NO: 1534652 - RNA, 19 nt, Artificial Sequence
  Description of Artificial Sequence: Synthetic oligonucleotide
uagucuuaaacuugccuuu

SEQ ID NO: 1534653 - RNA, 19 nt, Artificial Sequence
  Description of Artificial Sequence: Synthetic oligonucleotide
uuccgguugaaaaggguuc

SEQ ID NO: 1534654 - RNA, 19 nt, Artificial Sequence
  Description of Artificial Sequence: Synthetic oligonucleotide
cugcugcuugacaacauag

SEQ ID NO: 1534655 - RNA, 19 nt, Artificial Sequence
  Description of Artificial Sequence: Synthetic oligonucleotide
uacccucagacucagccuc

SEQ ID NO: 1534656 - RNA, 19 nt, Artificial Sequence
  Description of Artificial Sequence: Synthetic oligonucleotide
ugugagcgcuccacaagag

SEQ ID NO: 1534657 - RNA, 19 nt, Artificial Sequence
  Description of Artificial Sequence: Synthetic oligonucleotide
  modified_base (5)..(5): a, c, u, g, unknown or other
acggnguccaggcauccag

SEQ ID NO: 1534658 - RNA, 19 nt, Artificial Sequence
  Description of Artificial Sequence: Synthetic oligonucleotide
uaaucccagaaagacacau

SEQ ID NO: 1534659 - RNA, 19 nt, Artificial Sequence
  Description of Artificial Sequence: Synthetic oligonucleotide
accgguuugaagaauguga

SEQ ID NO: 1534660 - RNA, 19 nt, Artificial Sequence
  Description of Artificial Sequence: Synthetic oligonucleotide
caucuuugccaaugggaag

SEQ ID NO: 1534661 - RNA, 19 nt, Artificial Sequence
  Description of Artificial Sequence: Synthetic oligonucleotide
ucccagaaagacacauggc

SEQ ID NO: 1534662 - RNA, 19 nt, Artificial Sequence
  Description of Artificial Sequence: Synthetic oligonucleotide
cugcaccuuaacaagacca

SEQ ID NO: 1534663 - RNA, 19 nt, Artificial Sequence
  Description of Artificial Sequence: Synthetic oligonucleotide
uccaguaguggguaacaaa

SEQ ID NO: 1534664 - RNA, 19 nt, Artificial Sequence
  Description of Artificial Sequence: Synthetic oligonucleotide
uggguaacaaacgcaggca

SEQ ID NO: 1534665 - RNA, 19 nt, Artificial Sequence
  Description of Artificial Sequence: Synthetic oligonucleotide
agucuuaaacuugccuuuc

SEQ ID NO: 1534666 - RNA, 19 nt, Artificial Sequence
  Description of Artificial Sequence: Synthetic oligonucleotide
uugcuuuuggugucgcgcu

SEQ ID NO: 1534667 - RNA, 19 nt, Artificial Sequence
  Description of Artificial Sequence: Synthetic oligonucleotide
uacagccgcgaacaauuca

SEQ ID NO: 1534668 - RNA, 19 nt, Artificial Sequence
  Description of Artificial Sequence: Synthetic oligonucleotide
ggaagacuugaucuguagc

SEQ ID NO: 1534669 - RNA, 19 nt, Artificial Sequence
  Description of Artificial Sequence: Synthetic oligonucleotide
agcuuaggcuaggugcucc

SEQ ID NO: 1534670 - RNA, 19 nt, Artificial Sequence
  Description of Artificial Sequence: Synthetic oligonucleotide
uccuccacgcagcuucucc

SEQ ID NO: 1534671 - RNA, 19 nt, Artificial Sequence
  Description of Artificial Sequence: Synthetic oligonucleotide
uuacccucagacucagccu

SEQ ID NO: 1534672 - RNA, 19 nt, Artificial Sequence
  Description of Artificial Sequence: Synthetic oligonucleotide
acaaacgcaggcaggugac

SEQ ID NO: 1534673 - RNA, 19 nt, Artificial Sequence
  Description of Artificial Sequence: Synthetic oligonucleotide
ucuggcccgauccuccucu

SEQ ID NO: 1534674 - RNA, 19 nt, Artificial Sequence
  Description of Artificial Sequence: Synthetic oligonucleotide
gugagcgcuccacaagagg

SEQ ID NO: 1534675 - RNA, 19 nt, Artificial Sequence
  Description of Artificial Sequence: Synthetic oligonucleotide
agaaagacacauggcuguc

SEQ ID NO: 1534676 - RNA, 19 nt, Artificial Sequence
  Description of Artificial Sequence: Synthetic oligonucleotide
cuuccugaucauagcuucc

SEQ ID NO: 1534677 - RNA, 19 nt, Artificial Sequence
  Description of Artificial Sequence: Synthetic oligonucleotide
uauacuggucagccuggac

SEQ ID NO: 1534678 - RNA, 19 nt, Artificial Sequence
  Description of Artificial Sequence: Synthetic oligonucleotide
uccaagaagccggcuacag

SEQ ID NO: 1534679 - RNA, 19 nt, Artificial Sequence
  Description of Artificial Sequence: Synthetic oligonucleotide
gacggcuuccgguugaaaa

SEQ ID NO: 1534680 - RNA, 19 nt, Artificial Sequence
  Description of Artificial Sequence: Synthetic oligonucleotide
cuggcuacccacucccacc

SEQ ID NO: 1534681 - RNA, 19 nt, Artificial Sequence
  Description of Artificial Sequence: Synthetic oligonucleotide
aggagaucuggagaaggag

SEQ ID NO: 1534682 - RNA, 19 nt, Artificial Sequence
  Description of Artificial Sequence: Synthetic oligonucleotide
ggguaacaaacgcaggcag

SEQ ID NO: 1534683 - RNA, 19 nt, Artificial Sequence
  Description of Artificial Sequence: Synthetic oligonucleotide
uugcguuugaugaguggaa

SEQ ID NO: 1534684 - RNA, 19 nt, Artificial Sequence
  Description of Artificial Sequence: Synthetic oligonucleotide
uugaagaaugugagcgcuc

SEQ ID NO: 1534685 - RNA, 19 nt, Artificial Sequence
  Description of Artificial Sequence: Synthetic oligonucleotide
uccuauggcuguuuucaaa

SEQ ID NO: 1534686 - RNA, 19 nt, Artificial Sequence
  Description of Artificial Sequence: Synthetic oligonucleotide
gaaugugagcgcuccacaa

SEQ ID NO: 1534687 - RNA, 19 nt, Artificial Sequence
  Description of Artificial Sequence: Synthetic oligonucleotide
caauaguguccaucucacc

SEQ ID NO: 1534688 - RNA, 19 nt, Artificial Sequence
  Description of Artificial Sequence: Synthetic oligonucleotide
caggggauauacuggucag

SEQ ID NO: 1534689 - RNA, 19 nt, Artificial Sequence
  Description of Artificial Sequence: Synthetic oligonucleotide
ugacaauggcauugcgcug

SEQ ID NO: 1534690 - RNA, 19 nt, Artificial Sequence
  Description of Artificial Sequence: Synthetic oligonucleotide
agccaauggggcauacagc

SEQ ID NO: 1534691 - RNA, 19 nt, Artificial Sequence
  Description of Artificial Sequence: Synthetic oligonucleotide
cuugcguuugaugagugga

SEQ ID NO: 1534692 - RNA, 19 nt, Artificial Sequence
  Description of Artificial Sequence: Synthetic oligonucleotide
caggcaguugacaauggca

SEQ ID NO: 1534693 - RNA, 19 nt, Artificial Sequence
  Description of Artificial Sequence: Synthetic oligonucleotide
  modified_base (18)..(18): a, c, u, g, unknown or other
ccagcaaaacaccacggng

SEQ ID NO: 1534694 - RNA, 19 nt, Artificial Sequence
  Description of Artificial Sequence: Synthetic oligonucleotide
uccuuacgguuggagaugc

SEQ ID NO: 1534695 - RNA, 19 nt, Artificial Sequence
  Description of Artificial Sequence: Synthetic oligonucleotide
uucuggggucauagcagcc

SEQ ID NO: 1534696 - RNA, 19 nt, Artificial Sequence
  Description of Artificial Sequence: Synthetic oligonucleotide
ccgguuugaagaaugugag

SEQ ID NO: 1534697 - RNA, 19 nt, Artificial Sequence
  Description of Artificial Sequence: Synthetic oligonucleotide
ggcaccgaaguucaaacuc

SEQ ID NO: 1534698 - RNA, 19 nt, Artificial Sequence
  Description of Artificial Sequence: Synthetic oligonucleotide
cucguggauaagcuugaac

SEQ ID NO: 1534699 - RNA, 19 nt, Artificial Sequence
  Description of Artificial Sequence: Synthetic oligonucleotide
ggggauauacuggucagcc

SEQ ID NO: 1534700 - RNA, 19 nt, Artificial Sequence
  Description of Artificial Sequence: Synthetic oligonucleotide
aggacauagaggaacggaa

SEQ ID NO: 1534701 - RNA, 19 nt, Artificial Sequence
  Description of Artificial Sequence: Synthetic oligonucleotide
auagguguuucucguggau

SEQ ID NO: 1534702 - RNA, 19 nt, Artificial Sequence
  Description of Artificial Sequence: Synthetic oligonucleotide
uuccuuacgguuggagaug

SEQ ID NO: 1534703 - RNA, 19 nt, Artificial Sequence
  Description of Artificial Sequence: Synthetic oligonucleotide
ugcgcuggucgauaagggu

SEQ ID NO: 1534704 - RNA, 19 nt, Artificial Sequence
  Description of Artificial Sequence: Synthetic oligonucleotide
cucucgccgcacuaauagg

SEQ ID NO: 1534705 - RNA, 19 nt, Artificial Sequence
  Description of Artificial Sequence: Synthetic oligonucleotide
uccgguugaaaaggguucu

SEQ ID NO: 1534706 - RNA, 19 nt, Artificial Sequence
  Description of Artificial Sequence: Synthetic oligonucleotide
guaguggguaacaaacgca

SEQ ID NO: 1534707 - RNA, 19 nt, Artificial Sequence
  Description of Artificial Sequence: Synthetic oligonucleotide
ugucaagccaauggggcau

SEQ ID NO: 1534708 - RNA, 19 nt, Artificial Sequence
  Description of Artificial Sequence: Synthetic oligonucleotide
uacaggagaucuggagaag

SEQ ID NO: 1534709 - RNA, 19 nt, Artificial Sequence
  Description of Artificial Sequence: Synthetic oligonucleotide
ugucuucuggggucauagc

SEQ ID NO: 1534710 - RNA, 19 nt, Artificial Sequence
  Description of Artificial Sequence: Synthetic oligonucleotide
cagcucccgagcuggaccg

SEQ ID NO: 1534711 - RNA, 19 nt, Artificial Sequence
  Description of Artificial Sequence: Synthetic oligonucleotide
acgguuggagaugcggagg

SEQ ID NO: 1534712 - RNA, 19 nt, Artificial Sequence
  Description of Artificial Sequence: Synthetic oligonucleotide
caagaccauuucugggccc

SEQ ID NO: 1534713 - RNA, 19 nt, Artificial Sequence
  Description of Artificial Sequence: Synthetic oligonucleotide
uuaggcuaggugcucccuu

SEQ ID NO: 1534714 - RNA, 19 nt, Artificial Sequence
  Description of Artificial Sequence: Synthetic oligonucleotide
cauuccaguaguggguaac

SEQ ID NO: 1534715 - RNA, 19 nt, Artificial Sequence
  Description of Artificial Sequence: Synthetic oligonucleotide
  modified_base (2)..(2): a, c, u, g, unknown or other
gnguccaggcauccagcug

SEQ ID NO: 1534716 - RNA, 19 nt, Artificial Sequence
  Description of Artificial Sequence: Synthetic oligonucleotide
ugcguuugaugaguggaaa

SEQ ID NO: 1534717 - RNA, 19 nt, Artificial Sequence
  Description of Artificial Sequence: Synthetic oligonucleotide
uaacaaacgcaggcaggug

SEQ ID NO: 1534718 - RNA, 19 nt, Artificial Sequence
  Description of Artificial Sequence: Synthetic oligonucleotide
uggcgcucaauagugucca

SEQ ID NO: 1534719 - RNA, 19 nt, Artificial Sequence
  Description of Artificial Sequence: Synthetic oligonucleotide
cuucuauucccaggaggag

SEQ ID NO: 1534720 - RNA, 19 nt, Artificial Sequence
  Description of Artificial Sequence: Synthetic oligonucleotide
ggguucuccuuccaagaag

SEQ ID NO: 1534721 - RNA, 19 nt, Artificial Sequence
  Description of Artificial Sequence: Synthetic oligonucleotide
cauacagccgcgaacaauu

SEQ ID NO: 1534722 - RNA, 19 nt, Artificial Sequence
  Description of Artificial Sequence: Synthetic oligonucleotide
auuccaguaguggguaaca

SEQ ID NO: 1534723 - RNA, 19 nt, Artificial Sequence
  Description of Artificial Sequence: Synthetic oligonucleotide
gagcuggaccgguuugaag

SEQ ID NO: 1534724 - RNA, 19 nt, Artificial Sequence
  Description of Artificial Sequence: Synthetic oligonucleotide
acggaaaagggcuccucau

SEQ ID NO: 1534725 - RNA, 19 nt, Artificial Sequence
  Description of Artificial Sequence: Synthetic oligonucleotide
ccauagauauccuccucag

SEQ ID NO: 1534726 - RNA, 19 nt, Artificial Sequence
  Description of Artificial Sequence: Synthetic oligonucleotide
cucgccgcacuaauaggug

SEQ ID NO: 1534727 - RNA, 19 nt, Artificial Sequence
  Description of Artificial Sequence: Synthetic oligonucleotide
gaccagcuuaggcuaggug

SEQ ID NO: 1534728 - RNA, 19 nt, Artificial Sequence
  Description of Artificial Sequence: Synthetic oligonucleotide
ucgccgcacuaauaggugu

SEQ ID NO: 1534729 - RNA, 19 nt, Artificial Sequence
  Description of Artificial Sequence: Synthetic oligonucleotide
  modified_base (17)..(17): a, c, u, g, unknown or other
cagcaaaacaccacggngu

SEQ ID NO: 1534730 - RNA, 19 nt, Artificial Sequence
  Description of Artificial Sequence: Synthetic oligonucleotide
gaccgguuugaagaaugug

SEQ ID NO: 1534731 - RNA, 19 nt, Artificial Sequence
  Description of Artificial Sequence: Synthetic oligonucleotide
guaacaaacgcaggcaggu

SEQ ID NO: 1534732 - RNA, 19 nt, Artificial Sequence
  Description of Artificial Sequence: Synthetic oligonucleotide
gugucaagccaauggggca

SEQ ID NO: 1534733 - RNA, 19 nt, Artificial Sequence
  Description of Artificial Sequence: Synthetic oligonucleotide
acagccgcgaacaauucaa

SEQ ID NO: 1534734 - RNA, 19 nt, Artificial Sequence
  Description of Artificial Sequence: Synthetic oligonucleotide
gcguuugaugaguggaaag

SEQ ID NO: 1534735 - RNA, 19 nt, Artificial Sequence
  Description of Artificial Sequence: Synthetic oligonucleotide
gaagaaugugagcgcucca

SEQ ID NO: 1534736 - RNA, 19 nt, Artificial Sequence
  Description of Artificial Sequence: Synthetic oligonucleotide
gaaggcaccgaaguucaaa

SEQ ID NO: 1534737 - RNA, 19 nt, Artificial Sequence
  Description of Artificial Sequence: Synthetic oligonucleotide
ucugggcccuacaggagau

SEQ ID NO: 1534738 - RNA, 19 nt, Artificial Sequence
  Description of Artificial Sequence: Synthetic oligonucleotide
aggcaccgaaguucaaacu

SEQ ID NO: 1534739 - RNA, 19 nt, Artificial Sequence
  Description of Artificial Sequence: Synthetic oligonucleotide
ugcggagggagacggcuuc

SEQ ID NO: 1534740 - RNA, 19 nt, Artificial Sequence
  Description of Artificial Sequence: Synthetic oligonucleotide
gcuuguugagaaggcaccg

SEQ ID NO: 1534741 - RNA, 19 nt, Artificial Sequence
  Description of Artificial Sequence: Synthetic oligonucleotide
ugaauuccugcagcagcac

SEQ ID NO: 1534742 - RNA, 19 nt, Artificial Sequence
  Description of Artificial Sequence: Synthetic oligonucleotide
uccccggggaccuugcuuu

SEQ ID NO: 1534743 - RNA, 19 nt, Artificial Sequence
  Description of Artificial Sequence: Synthetic oligonucleotide
gagcgcuccacaagaggag

SEQ ID NO: 1534744 - RNA, 19 nt, Artificial Sequence
  Description of Artificial Sequence: Synthetic oligonucleotide
ccugaucauagcuuccaac

SEQ ID NO: 1534745 - RNA, 19 nt, Artificial Sequence
  Description of Artificial Sequence: Synthetic oligonucleotide
agggagacggcuuccgguu

SEQ ID NO: 1534746 - RNA, 19 nt, Artificial Sequence
  Description of Artificial Sequence: Synthetic oligonucleotide
ugacccucuuuaucuuccu

SEQ ID NO: 1534747 - RNA, 19 nt, Artificial Sequence
  Description of Artificial Sequence: Synthetic oligonucleotide
gcgcuuguugcccagcagc

SEQ ID NO: 1534748 - RNA, 19 nt, Artificial Sequence
  Description of Artificial Sequence: Synthetic oligonucleotide
ggagaucuggagaaggaga

SEQ ID NO: 1534749 - RNA, 19 nt, Artificial Sequence
  Description of Artificial Sequence: Synthetic oligonucleotide
uggugucgcgcuuguugcc

SEQ ID NO: 1534750 - RNA, 19 nt, Artificial Sequence
  Description of Artificial Sequence: Synthetic oligonucleotide
ucccggccccucaacgucc

SEQ ID NO: 1534751 - RNA, 19 nt, Artificial Sequence
  Description of Artificial Sequence: Synthetic oligonucleotide
guugaaaaggguucuccuu

SEQ ID NO: 1534752 - RNA, 19 nt, Artificial Sequence
  Description of Artificial Sequence: Synthetic oligonucleotide
agaugagcucugacucucg

SEQ ID NO: 1534753 - RNA, 19 nt, Artificial Sequence
  Description of Artificial Sequence: Synthetic oligonucleotide
ucuuacccucagacucagc

SEQ ID NO: 1534754 - RNA, 19 nt, Artificial Sequence
  Description of Artificial Sequence: Synthetic oligonucleotide
cagccgcgaacaauucaag

SEQ ID NO: 1534755 - RNA, 19 nt, Artificial Sequence
  Description of Artificial Sequence: Synthetic oligonucleotide
  modified_base (10)..(10): a, c, u, g, unknown or other
acaccacggnguccaggca

SEQ ID NO: 1534756 - RNA, 19 nt, Artificial Sequence
  Description of Artificial Sequence: Synthetic oligonucleotide
ccccucaacguccauuucc

SEQ ID NO: 1534757 - RNA, 19 nt, Artificial Sequence
  Description of Artificial Sequence: Synthetic oligonucleotide
ggcuuguugagaaggcacc

SEQ ID NO: 1534758 - RNA, 19 nt, Artificial Sequence
  Description of Artificial Sequence: Synthetic oligonucleotide
uuccaguaguggguaacaa

SEQ ID NO: 1534759 - RNA, 19 nt, Artificial Sequence
  Description of Artificial Sequence: Synthetic oligonucleotide
ccuacaggagaucuggaga

SEQ ID NO: 1534760 - RNA, 19 nt, Artificial Sequence
  Description of Artificial Sequence: Synthetic oligonucleotide
cgacccaacauccagccac

SEQ ID NO: 1534761 - RNA, 19 nt, Artificial Sequence
  Description of Artificial Sequence: Synthetic oligonucleotide
gucgcuucccuugccauca

SEQ ID NO: 1534762 - RNA, 19 nt, Artificial Sequence
  Description of Artificial Sequence: Synthetic oligonucleotide
cccuacaggagaucuggag

SEQ ID NO: 1534763 - RNA, 19 nt, Artificial Sequence
  Description of Artificial Sequence: Synthetic oligonucleotide
  modified_base (8)..(8): a, c, u, g, unknown or other
accacggnguccaggcauc

SEQ ID NO: 1534764 - RNA, 19 nt, Artificial Sequence
  Description of Artificial Sequence: Synthetic oligonucleotide
caccgaaguucaaacucca

SEQ ID NO: 1534765 - RNA, 19 nt, Artificial Sequence
  Description of Artificial Sequence: Synthetic oligonucleotide
gaggaacggaaaagggcuc

SEQ ID NO: 1534766 - RNA, 19 nt, Artificial Sequence
  Description of Artificial Sequence: Synthetic oligonucleotide
gugaccagcuuaggcuagg

SEQ ID NO: 1534767 - RNA, 19 nt, Artificial Sequence
  Description of Artificial Sequence: Synthetic oligonucleotide
ugucgcgcuuguugcccag

SEQ ID NO: 1534768 - RNA, 19 nt, Artificial Sequence
  Description of Artificial Sequence: Synthetic oligonucleotide
aucuuccuauggcuguuuu

SEQ ID NO: 1534769 - RNA, 19 nt, Artificial Sequence
  Description of Artificial Sequence: Synthetic oligonucleotide
gccggcuacagccaccuac

SEQ ID NO: 1534770 - RNA, 19 nt, Artificial Sequence
  Description of Artificial Sequence: Synthetic oligonucleotide
auauacuggucagccugga

SEQ ID NO: 1534771 - RNA, 19 nt, Artificial Sequence
  Description of Artificial Sequence: Synthetic oligonucleotide
ccaauggggcauacagccg

SEQ ID NO: 1534772 - RNA, 19 nt, Artificial Sequence
  Description of Artificial Sequence: Synthetic oligonucleotide
accauuccaguagugggua

SEQ ID NO: 1534773 - RNA, 19 nt, Artificial Sequence
  Description of Artificial Sequence: Synthetic oligonucleotide
cuuguugagaaggcaccga

SEQ ID NO: 1534774 - RNA, 19 nt, Artificial Sequence
  Description of Artificial Sequence: Synthetic oligonucleotide
ugcuuuuggugucgcgcuu

SEQ ID NO: 1534775 - RNA, 19 nt, Artificial Sequence
  Description of Artificial Sequence: Synthetic oligonucleotide
caaacgcaggcaggugacc

SEQ ID NO: 1534776 - RNA, 19 nt, Artificial Sequence
  Description of Artificial Sequence: Synthetic oligonucleotide
ggcuacagccaccuaccug

SEQ ID NO: 1534777 - RNA, 19 nt, Artificial Sequence
  Description of Artificial Sequence: Synthetic oligonucleotide
agcgcuccacaagaggaga

SEQ ID NO: 1534778 - RNA, 19 nt, Artificial Sequence
  Description of Artificial Sequence: Synthetic oligonucleotide
ccggcuacagccaccuacc

SEQ ID NO: 1534779 - RNA, 19 nt, Artificial Sequence
  Description of Artificial Sequence: Synthetic oligonucleotide
ucauagcuuccaacaucuu

SEQ ID NO: 1534780 - RNA, 19 nt, Artificial Sequence
  Description of Artificial Sequence: Synthetic oligonucleotide
cuuaucuucccggccccuc

SEQ ID NO: 1534781 - RNA, 19 nt, Artificial Sequence
  Description of Artificial Sequence: Synthetic oligonucleotide
gcacuaauagguguuucuc

SEQ ID NO: 1534782 - RNA, 19 nt, Artificial Sequence
  Description of Artificial Sequence: Synthetic oligonucleotide
gcagugcgacccaacaucc

SEQ ID NO: 1534783 - RNA, 19 nt, Artificial Sequence
  Description of Artificial Sequence: Synthetic oligonucleotide
ccuugcguuugaugagugg

SEQ ID NO: 1534784 - RNA, 19 nt, Artificial Sequence
  Description of Artificial Sequence: Synthetic oligonucleotide
aggcuaggugcucccuucu

SEQ ID NO: 1534785 - RNA, 19 nt, Artificial Sequence
  Description of Artificial Sequence: Synthetic oligonucleotide
ugaccagcuuaggcuaggu

SEQ ID NO: 1534786 - RNA, 19 nt, Artificial Sequence
  Description of Artificial Sequence: Synthetic oligonucleotide
gugcgacccaacauccagc

SEQ ID NO: 1534787 - RNA, 19 nt, Artificial Sequence
  Description of Artificial Sequence: Synthetic oligonucleotide
cccagaaagacacauggcu

SEQ ID NO: 1534788 - RNA, 19 nt, Artificial Sequence
  Description of Artificial Sequence: Synthetic oligonucleotide
ggggcauacagccgcgaac

SEQ ID NO: 1534789 - RNA, 19 nt, Artificial Sequence
  Description of Artificial Sequence: Synthetic oligonucleotide
cuuugccaaugggaaggac

SEQ ID NO: 1534790 - RNA, 19 nt, Artificial Sequence
  Description of Artificial Sequence: Synthetic oligonucleotide
ucaagccaauggggcauac

SEQ ID NO: 1534791 - RNA, 19 nt, Artificial Sequence
  Description of Artificial Sequence: Synthetic oligonucleotide
aagccucaggccaccagua

SEQ ID NO: 1534792 - RNA, 19 nt, Artificial Sequence
  Description of Artificial Sequence: Synthetic oligonucleotide
ccagcucccgagcuggacc

SEQ ID NO: 1534793 - RNA, 19 nt, Artificial Sequence
  Description of Artificial Sequence: Synthetic oligonucleotide
gacccaacauccagccaca

SEQ ID NO: 1534794 - RNA, 19 nt, Artificial Sequence
  Description of Artificial Sequence: Synthetic oligonucleotide
ggauaagcuugaaccaguc

SEQ ID NO: 1534795 - RNA, 19 nt, Artificial Sequence
  Description of Artificial Sequence: Synthetic oligonucleotide
ggugucgcgcuuguugccc

SEQ ID NO: 1534796 - RNA, 19 nt, Artificial Sequence
  Description of Artificial Sequence: Synthetic oligonucleotide
caccauuccaguagugggu

SEQ ID NO: 1534797 - RNA, 19 nt, Artificial Sequence
  Description of Artificial Sequence: Synthetic oligonucleotide
gcuuaggcuaggugcuccc

SEQ ID NO: 1534798 - RNA, 19 nt, Artificial Sequence
  Description of Artificial Sequence: Synthetic oligonucleotide
ugguggccuuccuuacggu

SEQ ID NO: 1534799 - RNA, 19 nt, Artificial Sequence
  Description of Artificial Sequence: Synthetic oligonucleotide
cccaccuccggccugcgag

SEQ ID NO: 1534800 - RNA, 19 nt, Artificial Sequence
  Description of Artificial Sequence: Synthetic oligonucleotide
ucccgagcuggaccgguuu

SEQ ID NO: 1534801 - RNA, 19 nt, Artificial Sequence
  Description of Artificial Sequence: Synthetic oligonucleotide
ucgcuucccuugccaucag

SEQ ID NO: 1534802 - RNA, 19 nt, Artificial Sequence
  Description of Artificial Sequence: Synthetic oligonucleotide
gaccuugcguuugaugagu

SEQ ID NO: 1534803 - RNA, 19 nt, Artificial Sequence
  Description of Artificial Sequence: Synthetic oligonucleotide
accuugcguuugaugagug

SEQ ID NO: 1534804 - RNA, 19 nt, Artificial Sequence
  Description of Artificial Sequence: Synthetic oligonucleotide
cgauaagggucaugaauuc

SEQ ID NO: 1534805 - RNA, 19 nt, Artificial Sequence
  Description of Artificial Sequence: Synthetic oligonucleotide
agccucaggccaccaguau

SEQ ID NO: 1534806 - RNA, 19 nt, Artificial Sequence
  Description of Artificial Sequence: Synthetic oligonucleotide
uggcccgauccuccucugu

SEQ ID NO: 1534807 - RNA, 19 nt, Artificial Sequence
  Description of Artificial Sequence: Synthetic oligonucleotide
ucucguggauaagcuugaa

SEQ ID NO: 1534808 - RNA, 19 nt, Artificial Sequence
  Description of Artificial Sequence: Synthetic oligonucleotide
cgguuggagaugcggaggg

SEQ ID NO: 1534809 - RNA, 19 nt, Artificial Sequence
  Description of Artificial Sequence: Synthetic oligonucleotide
ccaccaguaugugaccagc

SEQ ID NO: 1534810 - RNA, 19 nt, Artificial Sequence
  Description of Artificial Sequence: Synthetic oligonucleotide
cagcucuuguccccgggga

SEQ ID NO: 1534811 - RNA, 19 nt, Artificial Sequence
  Description of Artificial Sequence: Synthetic oligonucleotide
gcgcuggucgauaaggguc

SEQ ID NO: 1534812 - RNA, 19 nt, Artificial Sequence
  Description of Artificial Sequence: Synthetic oligonucleotide
agccuggaccuugcguuug

SEQ ID NO: 1534813 - RNA, 19 nt, Artificial Sequence
  Description of Artificial Sequence: Synthetic oligonucleotide
ccggggaccuugcuuuugg

SEQ ID NO: 1534814 - RNA, 19 nt, Artificial Sequence
  Description of Artificial Sequence: Synthetic oligonucleotide
ccuauggcuguuuucaaau

SEQ ID NO: 1534815 - RNA, 19 nt, Artificial Sequence
  Description of Artificial Sequence: Synthetic oligonucleotide
ggcuaggugcucccuucug

SEQ ID NO: 1534816 - RNA, 19 nt, Artificial Sequence
  Description of Artificial Sequence: Synthetic oligonucleotide
cgaaguucaaacuccacau

SEQ ID NO: 1534817 - RNA, 19 nt, Artificial Sequence
  Description of Artificial Sequence: Synthetic oligonucleotide
ggcugcaagaggacccagc

SEQ ID NO: 1534818 - RNA, 19 nt, Artificial Sequence
  Description of Artificial Sequence: Synthetic oligonucleotide
ggugcucccuucugucuuc

SEQ ID NO: 1534819 - RNA, 19 nt, Artificial Sequence
  Description of Artificial Sequence: Synthetic oligonucleotide
gggagacggcuuccgguug

SEQ ID NO: 1534820 - RNA, 19 nt, Artificial Sequence
  Description of Artificial Sequence: Synthetic oligonucleotide
cuggucgauaagggucaug

SEQ ID NO: 1534821 - RNA, 19 nt, Artificial Sequence
  Description of Artificial Sequence: Synthetic oligonucleotide
  modified_base (3)..(3): a, c, u, g, unknown or other
ggnguccaggcauccagcu

SEQ ID NO: 1534822 - RNA, 19 nt, Artificial Sequence
  Description of Artificial Sequence: Synthetic oligonucleotide
cagugcgacccaacaucca

SEQ ID NO: 1534823 - RNA, 19 nt, Artificial Sequence
  Description of Artificial Sequence: Synthetic oligonucleotide
uuuuggugucgcgcuuguu

SEQ ID NO: 1534824 - RNA, 19 nt, Artificial Sequence
  Description of Artificial Sequence: Synthetic oligonucleotide
caccuaccugccucccauc

SEQ ID NO: 1534825 - RNA, 19 nt, Artificial Sequence
  Description of Artificial Sequence: Synthetic oligonucleotide
ggucgauaagggucaugaa

SEQ ID NO: 1534826 - RNA, 19 nt, Artificial Sequence
  Description of Artificial Sequence: Synthetic oligonucleotide
agcuggcgcucaauagugu

SEQ ID NO: 1534827 - RNA, 19 nt, Artificial Sequence
  Description of Artificial Sequence: Synthetic oligonucleotide
caccaguaugugaccagcu

SEQ ID NO: 1534828 - RNA, 19 nt, Artificial Sequence
  Description of Artificial Sequence: Synthetic oligonucleotide
  modified_base (4)..(4): a, c, u, g, unknown or other
cggnguccaggcauccagc

SEQ ID NO: 1534829 - RNA, 19 nt, Artificial Sequence
  Description of Artificial Sequence: Synthetic oligonucleotide
gcuugacaacauagaugag

SEQ ID NO: 1534830 - RNA, 19 nt, Artificial Sequence
  Description of Artificial Sequence: Synthetic oligonucleotide
cgagcaugugucaagccaa

SEQ ID NO: 1534831 - RNA, 19 nt, Artificial Sequence
  Description of Artificial Sequence: Synthetic oligonucleotide
ugccaaugggaaggacaua

SEQ ID NO: 1534832 - RNA, 19 nt, Artificial Sequence
  Description of Artificial Sequence: Synthetic oligonucleotide
cuucccggccccucaacgu

SEQ ID NO: 1534833 - RNA, 19 nt, Artificial Sequence
  Description of Artificial Sequence: Synthetic oligonucleotide
ccuuacgguuggagaugcg

SEQ ID NO: 1534834 - RNA, 19 nt, Artificial Sequence
  Description of Artificial Sequence: Synthetic oligonucleotide
cugccccugcagugcgacc

SEQ ID NO: 1534835 - RNA, 19 nt, Artificial Sequence
  Description of Artificial Sequence: Synthetic oligonucleotide
cgcgaacaauucaagccuc

SEQ ID NO: 1534836 - RNA, 19 nt, Artificial Sequence
  Description of Artificial Sequence: Synthetic oligonucleotide
cuuuuggugucgcgcuugu

SEQ ID NO: 1534837 - RNA, 19 nt, Artificial Sequence
  Description of Artificial Sequence: Synthetic oligonucleotide
gacucucgccgcacuaaua

SEQ ID NO: 1534838 - RNA, 19 nt, Artificial Sequence
  Description of Artificial Sequence: Synthetic oligonucleotide
cggcuuccgguugaaaagg

SEQ ID NO: 1534839 - RNA, 19 nt, Artificial Sequence
  Description of Artificial Sequence: Synthetic oligonucleotide
agccugggacagacagcac

SEQ ID NO: 1534840 - RNA, 19 nt, Artificial Sequence
  Description of Artificial Sequence: Synthetic oligonucleotide
  modified_base (9)..(9): a, c, u, g, unknown or other
caccacggnguccaggcau

SEQ ID NO: 1534841 - RNA, 19 nt, Artificial Sequence
  Description of Artificial Sequence: Synthetic oligonucleotide
gggauauacuggucagccu

SEQ ID NO: 1534842 - RNA, 19 nt, Artificial Sequence
  Description of Artificial Sequence: Synthetic oligonucleotide
ccgcgaacaauucaagccu

SEQ ID NO: 1534843 - RNA, 19 nt, Artificial Sequence
  Description of Artificial Sequence: Synthetic oligonucleotide
gcgaacaauucaagccuca

SEQ ID NO: 1534844 - RNA, 19 nt, Artificial Sequence
  Description of Artificial Sequence: Synthetic oligonucleotide
gcgcucaauaguguccauc

SEQ ID NO: 1534845 - RNA, 19 nt, Artificial Sequence
  Description of Artificial Sequence: Synthetic oligonucleotide
ccaccuccggccugcgagc

SEQ ID NO: 1534846 - RNA, 19 nt, Artificial Sequence
  Description of Artificial Sequence: Synthetic oligonucleotide
ucccucugccggucuucau

SEQ ID NO: 1534847 - RNA, 19 nt, Artificial Sequence
  Description of Artificial Sequence: Synthetic oligonucleotide
gcauugcgcuggucgauaa

SEQ ID NO: 1534848 - RNA, 19 nt, Artificial Sequence
  Description of Artificial Sequence: Synthetic oligonucleotide
ccagcuggcgcucaauagu

SEQ ID NO: 1534849 - RNA, 19 nt, Artificial Sequence
  Description of Artificial Sequence: Synthetic oligonucleotide
  modified_base (7)..(7): a, c, u, g, unknown or other
ccacggnguccaggcaucc

SEQ ID NO: 1534850 - RNA, 19 nt, Artificial Sequence
  Description of Artificial Sequence: Synthetic oligonucleotide
cgcuggucgauaaggguca

SEQ ID NO: 1534851 - RNA, 19 nt, Artificial Sequence
  Description of Artificial Sequence: Synthetic oligonucleotide
gagcaugugucaagccaau

SEQ ID NO: 1534852 - RNA, 19 nt, Artificial Sequence
  Description of Artificial Sequence: Synthetic oligonucleotide
cccucaacguccauuuccu

SEQ ID NO: 1534853 - RNA, 19 nt, Artificial Sequence
  Description of Artificial Sequence: Synthetic oligonucleotide
uccggccugcgagcaugug

SEQ ID NO: 1534854 - RNA, 19 nt, Artificial Sequence
  Description of Artificial Sequence: Synthetic oligonucleotide
cugcagugcgacccaacau

SEQ ID NO: 1534855 - RNA, 19 nt, Artificial Sequence
  Description of Artificial Sequence: Synthetic oligonucleotide
ccgauccuccucuguccag

SEQ ID NO: 1534856 - RNA, 19 nt, Artificial Sequence
  Description of Artificial Sequence: Synthetic oligonucleotide
cccgagcuggaccgguuug

SEQ ID NO: 1534857 - RNA, 19 nt, Artificial Sequence
  Description of Artificial Sequence: Synthetic oligonucleotide
agaaggcaccgaaguucaa

SEQ ID NO: 1534858 - RNA, 19 nt, Artificial Sequence
  Description of Artificial Sequence: Synthetic oligonucleotide
ggcauacagccgcgaacaa

SEQ ID NO: 1534859 - RNA, 19 nt, Artificial Sequence
  Description of Artificial Sequence: Synthetic oligonucleotide
gucaagccaauggggcaua

SEQ ID NO: 1534860 - RNA, 19 nt, Artificial Sequence
  Description of Artificial Sequence: Synthetic oligonucleotide
cuuaggcuaggugcucccu

SEQ ID NO: 1534861 - RNA, 19 nt, Artificial Sequence
  Description of Artificial Sequence: Synthetic oligonucleotide
augcggagggagacggcuu

SEQ ID NO: 1534862 - RNA, 19 nt, Artificial Sequence
  Description of Artificial Sequence: Synthetic oligonucleotide
ggccccucaacguccauuu

SEQ ID NO: 1534863 - RNA, 19 nt, Artificial Sequence
  Description of Artificial Sequence: Synthetic oligonucleotide
  modified_base (6)..(6): a, c, u, g, unknown or other
cacggnguccaggcaucca

SEQ ID NO: 1534864 - RNA, 19 nt, Artificial Sequence
  Description of Artificial Sequence: Synthetic oligonucleotide
ccuccggccugcgagcaug

SEQ ID NO: 1534865 - RNA, 19 nt, Artificial Sequence
  Description of Artificial Sequence: Synthetic oligonucleotide
agaccauuucugggcccua

SEQ ID NO: 1534866 - RNA, 19 nt, Artificial Sequence
  Description of Artificial Sequence: Synthetic oligonucleotide
accuccggccugcgagcau

SEQ ID NO: 1534867 - RNA, 19 nt, Artificial Sequence
  Description of Artificial Sequence: Synthetic oligonucleotide
gggcccuacaggagaucug

SEQ ID NO: 1534868 - RNA, 19 nt, Artificial Sequence
  Description of Artificial Sequence: Synthetic oligonucleotide
cgcacuaauagguguuucu

SEQ ID NO: 1534869 - RNA, 19 nt, Artificial Sequence
  Description of Artificial Sequence: Synthetic oligonucleotide
ccgcacuaauagguguuuc

SEQ ID NO: 1534870 - RNA, 19 nt, Artificial Sequence
  Description of Artificial Sequence: Synthetic oligonucleotide
ggcauugcgcuggucgaua

SEQ ID NO: 1534871 - RNA, 19 nt, Artificial Sequence
  Description of Artificial Sequence: Synthetic oligonucleotide
ggaccgguuugaagaaugu

SEQ ID NO: 1534872 - RNA, 19 nt, Artificial Sequence
  Description of Artificial Sequence: Synthetic oligonucleotide
gcgacccaacauccagcca

SEQ ID NO: 1534873 - RNA, 19 nt, Artificial Sequence
  Description of Artificial Sequence: Synthetic oligonucleotide
ggccugcgagcauguguca

SEQ ID NO: 1534874 - RNA, 19 nt, Artificial Sequence
  Description of Artificial Sequence: Synthetic oligonucleotide
gcauacagccgcgaacaau

SEQ ID NO: 1534875 - RNA, 19 nt, Artificial Sequence
  Description of Artificial Sequence: Synthetic oligonucleotide
ccgguugaaaaggguucuc

SEQ ID NO: 1534876 - RNA, 19 nt, Artificial Sequence
  Description of Artificial Sequence: Synthetic oligonucleotide
caccuccggccugcgagca

SEQ ID NO: 1534877 - RNA, 19 nt, Artificial Sequence
  Description of Artificial Sequence: Synthetic oligonucleotide
cagccacagggguucuccu

SEQ ID NO: 1534878 - RNA, 19 nt, Artificial Sequence
  Description of Artificial Sequence: Synthetic oligonucleotide
ggcuacccacucccaccuc

SEQ ID NO: 1534879 - RNA, 19 nt, Artificial Sequence
  Description of Artificial Sequence: Synthetic oligonucleotide
ccuccacgcagcuucuccu

SEQ ID NO: 1534880 - RNA, 19 nt, Artificial Sequence
  Description of Artificial Sequence: Synthetic oligonucleotide
cagccuggaccuugcguuu

SEQ ID NO: 1534881 - RNA, 19 nt, Artificial Sequence
  Description of Artificial Sequence: Synthetic oligonucleotide
cuggaccgguuugaagaau

SEQ ID NO: 1534882 - RNA, 19 nt, Artificial Sequence
  Description of Artificial Sequence: Synthetic oligonucleotide
ccgagcuggaccgguuuga

SEQ ID NO: 1534883 - RNA, 19 nt, Artificial Sequence
  Description of Artificial Sequence: Synthetic oligonucleotide
gcccuacaggagaucugga

SEQ ID NO: 1534884 - RNA, 19 nt, Artificial Sequence
  Description of Artificial Sequence: Synthetic oligonucleotide
cuccggccugcgagcaugu

SEQ ID NO: 1534885 - RNA, 19 nt, Artificial Sequence
  Description of Artificial Sequence: Synthetic oligonucleotide
cccggggaccuugcuuuug

SEQ ID NO: 1534886 - RNA, 19 nt, Artificial Sequence
  Description of Artificial Sequence: Synthetic oligonucleotide
gcuuaucuucccggccccu

SEQ ID NO: 1534887 - RNA, 19 nt, Artificial Sequence
  Description of Artificial Sequence: Synthetic oligonucleotide
cucccgagcuggaccgguu

SEQ ID NO: 1534888 - RNA, 19 nt, Artificial Sequence
  Description of Artificial Sequence: Synthetic oligonucleotide
gccgcacuaauagguguuu

SEQ ID NO: 1534889 - RNA, 19 nt, Artificial Sequence
  Description of Artificial Sequence: Synthetic oligonucleotide
ggcgcucaauaguguccau

SEQ ID NO: 1534890 - RNA, 19 nt, Artificial Sequence
  Description of Artificial Sequence: Synthetic oligonucleotide
ggccuuccuuacgguugga

SEQ ID NO: 1534891 - RNA, 19 nt, Artificial Sequence
  Description of Artificial Sequence: Synthetic oligonucleotide
cgccgcacuaauagguguu

SEQ ID NO: 1534892 - RNA, 19 nt, Artificial Sequence
  Description of Artificial Sequence: Synthetic oligonucleotide
gcuggucgauaagggucau

SEQ ID NO: 1534893 - RNA, 19 nt, Artificial Sequence
  Description of Artificial Sequence: Synthetic oligonucleotide
cggggaccuugcuuuuggu

SEQ ID NO: 1534894 - RNA, 19 nt, Artificial Sequence
  Description of Artificial Sequence: Synthetic oligonucleotide
ccggccccucaacguccau

SEQ ID NO: 1534895 - RNA, 19 nt, Artificial Sequence
  Description of Artificial Sequence: Synthetic oligonucleotide
aacaucagauaauauaggc

SEQ ID NO: 1534896 - RNA, 19 nt, Artificial Sequence
  Description of Artificial Sequence: Synthetic oligonucleotide
aacagaaucuaucuuacuc

SEQ ID NO: 1534897 - RNA, 19 nt, Artificial Sequence
  Description of Artificial Sequence: Synthetic oligonucleotide
uuuuguuaauccuagauug

SEQ ID NO: 1534898 - RNA, 19 nt, Artificial Sequence
  Description of Artificial Sequence: Synthetic oligonucleotide
cauuuuguaaacuagcugc

SEQ ID NO: 1534899 - RNA, 19 nt, Artificial Sequence
  Description of Artificial Sequence: Synthetic oligonucleotide
aauuuugacauacacauuu

SEQ ID NO: 1534900 - RNA, 19 nt, Artificial Sequence
  Description of Artificial Sequence: Synthetic oligonucleotide
uguauacuaguauuaaagg

SEQ ID NO: 1534901 - RNA, 19 nt, Artificial Sequence
  Description of Artificial Sequence: Synthetic oligonucleotide
uauaauguucuccuaagcc

SEQ ID NO: 1534902 - RNA, 19 nt, Artificial Sequence
  Description of Artificial Sequence: Synthetic oligonucleotide
aaugcauuacuuuagacua

SEQ ID NO: 1534903 - RNA, 19 nt, Artificial Sequence
  Description of Artificial Sequence: Synthetic oligonucleotide
uaaguucucaauuucagcc

SEQ ID NO: 1534904 - RNA, 19 nt, Artificial Sequence
  Description of Artificial Sequence: Synthetic oligonucleotide
uauucauaaauauacuggc

SEQ ID NO: 1534905 - RNA, 19 nt, Artificial Sequence
  Description of Artificial Sequence: Synthetic oligonucleotide
uuuguaaaaugugagacag

SEQ ID NO: 1534906 - RNA, 19 nt, Artificial Sequence
  Description of Artificial Sequence: Synthetic oligonucleotide
aauguuaacagcaacagaa

SEQ ID NO: 1534907 - RNA, 19 nt, Artificial Sequence
  Description of Artificial Sequence: Synthetic oligonucleotide
uguaaaaugugagacagag

SEQ ID NO: 1534908 - RNA, 19 nt, Artificial Sequence
  Description of Artificial Sequence: Synthetic oligonucleotide
uauacuaguauuaaaggau

SEQ ID NO: 1534909 - RNA, 19 nt, Artificial Sequence
  Description of Artificial Sequence: Synthetic oligonucleotide
uguaguaucucaauuggug

SEQ ID NO: 1534910 - RNA, 19 nt, Artificial Sequence
  Description of Artificial Sequence: Synthetic oligonucleotide
uauuaaaggauucuuugga

SEQ ID NO: 1534911 - RNA, 19 nt, Artificial Sequence
  Description of Artificial Sequence: Synthetic oligonucleotide
uguuguuucuaaauuaaca

SEQ ID NO: 1534912 - RNA, 19 nt, Artificial Sequence
  Description of Artificial Sequence: Synthetic oligonucleotide
acuccuuuaucauuuauuc

SEQ ID NO: 1534913 - RNA, 19 nt, Artificial Sequence
  Description of Artificial Sequence: Synthetic oligonucleotide
aauuauaauguucuccuaa

SEQ ID NO: 1534914 - RNA, 19 nt, Artificial Sequence
  Description of Artificial Sequence: Synthetic oligonucleotide
aaagcuaucuugcucauaa

SEQ ID NO: 1534915 - RNA, 19 nt, Artificial Sequence
  Description of Artificial Sequence: Synthetic oligonucleotide
uucagaauggcucugcaug

SEQ ID NO: 1534916 - RNA, 19 nt, Artificial Sequence
  Description of Artificial Sequence: Synthetic oligonucleotide
auaaguucucaauuucagc

SEQ ID NO: 1534917 - RNA, 19 nt, Artificial Sequence
  Description of Artificial Sequence: Synthetic oligonucleotide
uaaugcauuacuuuagacu

SEQ ID NO: 1534918 - RNA, 19 nt, Artificial Sequence
  Description of Artificial Sequence: Synthetic oligonucleotide
uucaccaacuacaauagga

SEQ ID NO: 1534919 - RNA, 19 nt, Artificial Sequence
  Description of Artificial Sequence: Synthetic oligonucleotide
aacagcguucuucauuccc

SEQ ID NO: 1534920 - RNA, 19 nt, Artificial Sequence
  Description of Artificial Sequence: Synthetic oligonucleotide
ucuugucaaaacauuaaug

SEQ ID NO: 1534921 - RNA, 19 nt, Artificial Sequence
  Description of Artificial Sequence: Synthetic oligonucleotide
ugucaaaacauuaaugcau

SEQ ID NO: 1534922 - RNA, 19 nt, Artificial Sequence
  Description of Artificial Sequence: Synthetic oligonucleotide
uuuguuaauccuagauugg

SEQ ID NO: 1534923 - RNA, 19 nt, Artificial Sequence
  Description of Artificial Sequence: Synthetic oligonucleotide
cuuuagacuaucuuuguug

SEQ ID NO: 1534924 - RNA, 19 nt, Artificial Sequence
  Description of Artificial Sequence: Synthetic oligonucleotide
uguuuguaaaaugugagac

SEQ ID NO: 1534925 - RNA, 19 nt, Artificial Sequence
  Description of Artificial Sequence: Synthetic oligonucleotide
auuauaauguucuccuaag

SEQ ID NO: 1534926 - RNA, 19 nt, Artificial Sequence
  Description of Artificial Sequence: Synthetic oligonucleotide
uuugcaaugacuagguuua

SEQ ID NO: 1534927 - RNA, 19 nt, Artificial Sequence
  Description of Artificial Sequence: Synthetic oligonucleotide
aaaugugagacagagcucu

SEQ ID NO: 1534928 - RNA, 19 nt, Artificial Sequence
  Description of Artificial Sequence: Synthetic oligonucleotide
agucugaaauguuaacagc

SEQ ID NO: 1534929 - RNA, 19 nt, Artificial Sequence
  Description of Artificial Sequence: Synthetic oligonucleotide
cuuguaguaucucaauugg

SEQ ID NO: 1534930 - RNA, 19 nt, Artificial Sequence
  Description of Artificial Sequence: Synthetic oligonucleotide
guauuaaaggauucuuugg

SEQ ID NO: 1534931 - RNA, 19 nt, Artificial Sequence
  Description of Artificial Sequence: Synthetic oligonucleotide
guaauuugcaaugacuagg

SEQ ID NO: 1534932 - RNA, 19 nt, Artificial Sequence
  Description of Artificial Sequence: Synthetic oligonucleotide
ugagacagagcucuuagcu

SEQ ID NO: 1534933 - RNA, 19 nt, Artificial Sequence
  Description of Artificial Sequence: Synthetic oligonucleotide
aaauuccagaauuuugaca

SEQ ID NO: 1534934 - RNA, 19 nt, Artificial Sequence
  Description of Artificial Sequence: Synthetic oligonucleotide
auaauguucuccuaagcca

SEQ ID NO: 1534935 - RNA, 19 nt, Artificial Sequence
  Description of Artificial Sequence: Synthetic oligonucleotide
aauauaggcaaagcuaucu

SEQ ID NO: 1534936 - RNA, 19 nt, Artificial Sequence
  Description of Artificial Sequence: Synthetic oligonucleotide
aauaucaucacaguauuuu

SEQ ID NO: 1534937 - RNA, 19 nt, Artificial Sequence
  Description of Artificial Sequence: Synthetic oligonucleotide
aacauuaaugcauuacuuu

SEQ ID NO: 1534938 - RNA, 19 nt, Artificial Sequence
  Description of Artificial Sequence: Synthetic oligonucleotide
uuuagacuaucuuuguuga

SEQ ID NO: 1534939 - RNA, 19 nt, Artificial Sequence
  Description of Artificial Sequence: Synthetic oligonucleotide
auguauacuaguauuaaag

SEQ ID NO: 1534940 - RNA, 19 nt, Artificial Sequence
  Description of Artificial Sequence: Synthetic oligonucleotide
aauggcucugcauguacuc

SEQ ID NO: 1534941 - RNA, 19 nt, Artificial Sequence
  Description of Artificial Sequence: Synthetic oligonucleotide
uguuuuguuaauccuagau

SEQ ID NO: 1534942 - RNA, 19 nt, Artificial Sequence
  Description of Artificial Sequence: Synthetic oligonucleotide
aaugacuagguuuaauauu

SEQ ID NO: 1534943 - RNA, 19 nt, Artificial Sequence
  Description of Artificial Sequence: Synthetic oligonucleotide
uguaacauuuuguaaacua

SEQ ID NO: 1534944 - RNA, 19 nt, Artificial Sequence
  Description of Artificial Sequence: Synthetic oligonucleotide
uuauaauguucuccuaagc

SEQ ID NO: 1534945 - RNA, 19 nt, Artificial Sequence
  Description of Artificial Sequence: Synthetic oligonucleotide
uaauuugcaaugacuaggu

SEQ ID NO: 1534946 - RNA, 19 nt, Artificial Sequence
  Description of Artificial Sequence: Synthetic oligonucleotide
ugaauuauguuguuucuaa

SEQ ID NO: 1534947 - RNA, 19 nt, Artificial Sequence
  Description of Artificial Sequence: Synthetic oligonucleotide
ucuuagcucaagcugaccu

SEQ ID NO: 1534948 - RNA, 19 nt, Artificial Sequence
  Description of Artificial Sequence: Synthetic oligonucleotide
aaauucuuggcugaagaca

SEQ ID NO: 1534949 - RNA, 19 nt, Artificial Sequence
  Description of Artificial Sequence: Synthetic oligonucleotide
auaggcaaagcuaucuugc

SEQ ID NO: 1534950 - RNA, 19 nt, Artificial Sequence
  Description of Artificial Sequence: Synthetic oligonucleotide
aacagcaacagaaucuauc

SEQ ID NO: 1534951 - RNA, 19 nt, Artificial Sequence
  Description of Artificial Sequence: Synthetic oligonucleotide
gauaaguucucaauuucag

SEQ ID NO: 1534952 - RNA, 19 nt, Artificial Sequence
  Description of Artificial Sequence: Synthetic oligonucleotide
ugugagacagagcucuuag

SEQ ID NO: 1534953 - RNA, 19 nt, Artificial Sequence
  Description of Artificial Sequence: Synthetic oligonucleotide
auuuucaguagcugaguuc

SEQ ID NO: 1534954 - RNA, 19 nt, Artificial Sequence
  Description of Artificial Sequence: Synthetic oligonucleotide
ugauucucaaguaccaagu

SEQ ID NO: 1534955 - RNA, 19 nt, Artificial Sequence
  Description of Artificial Sequence: Synthetic oligonucleotide
ugguugauucucaaguacc

SEQ ID NO: 1534956 - RNA, 19 nt, Artificial Sequence
  Description of Artificial Sequence: Synthetic oligonucleotide
acuaucuuuguugaaaaug

SEQ ID NO: 1534957 - RNA, 19 nt, Artificial Sequence
  Description of Artificial Sequence: Synthetic oligonucleotide
uggaguauacauauuuccu

SEQ ID NO: 1534958 - RNA, 19 nt, Artificial Sequence
  Description of Artificial Sequence: Synthetic oligonucleotide
uugacauacacauuuccaa

SEQ ID NO: 1534959 - RNA, 19 nt, Artificial Sequence
  Description of Artificial Sequence: Synthetic oligonucleotide
guauacuaguauuaaagga

SEQ ID NO: 1534960 - RNA, 19 nt, Artificial Sequence
  Description of Artificial Sequence: Synthetic oligonucleotide
aauggcaggaagucuucag

SEQ ID NO: 1534961 - RNA, 19 nt, Artificial Sequence
  Description of Artificial Sequence: Synthetic oligonucleotide
agcuauucuuucuucccgc

SEQ ID NO: 1534962 - RNA, 19 nt, Artificial Sequence
  Description of Artificial Sequence: Synthetic oligonucleotide
uccuaagccauaugcaugc

SEQ ID NO: 1534963 - RNA, 19 nt, Artificial Sequence
  Description of Artificial Sequence: Synthetic oligonucleotide
aucauuuauucuuuuggca

SEQ ID NO: 1534964 - RNA, 19 nt, Artificial Sequence
  Description of Artificial Sequence: Synthetic oligonucleotide
acauuuuguaaacuagcug

SEQ ID NO: 1534965 - RNA, 19 nt, Artificial Sequence
  Description of Artificial Sequence: Synthetic oligonucleotide
agguuuaauauuuuguuuu

SEQ ID NO: 1534966 - RNA, 19 nt, Artificial Sequence
  Description of Artificial Sequence: Synthetic oligonucleotide
uguuaauccuagauuggca

SEQ ID NO: 1534967 - RNA, 19 nt, Artificial Sequence
  Description of Artificial Sequence: Synthetic oligonucleotide
aacauuuuguaaacuagcu

SEQ ID NO: 1534968 - RNA, 19 nt, Artificial Sequence
  Description of Artificial Sequence: Synthetic oligonucleotide
uagaaguuggccauucacu

SEQ ID NO: 1534969 - RNA, 19 nt, Artificial Sequence
  Description of Artificial Sequence: Synthetic oligonucleotide
aguaccaagucugaaaugu

SEQ ID NO: 1534970 - RNA, 19 nt, Artificial Sequence
  Description of Artificial Sequence: Synthetic oligonucleotide
caucagauaauauaggcaa

SEQ ID NO: 1534971 - RNA, 19 nt, Artificial Sequence
  Description of Artificial Sequence: Synthetic oligonucleotide
uuacucuccuucaaaguca

SEQ ID NO: 1534972 - RNA, 19 nt, Artificial Sequence
  Description of Artificial Sequence: Synthetic oligonucleotide
aaggauucuuuggauacuc

SEQ ID NO: 1534973 - RNA, 19 nt, Artificial Sequence
  Description of Artificial Sequence: Synthetic oligonucleotide
uuccaaauucuucuggagu

SEQ ID NO: 1534974 - RNA, 19 nt, Artificial Sequence
  Description of Artificial Sequence: Synthetic oligonucleotide
aucuuacucuccuucaaag

SEQ ID NO: 1534975 - RNA, 19 nt, Artificial Sequence
  Description of Artificial Sequence: Synthetic oligonucleotide
cuuacucuccuucaaaguc

SEQ ID NO: 1534976 - RNA, 19 nt, Artificial Sequence
  Description of Artificial Sequence: Synthetic oligonucleotide
uuuguaaacuagcugcaau

SEQ ID NO: 1534977 - RNA, 19 nt, Artificial Sequence
  Description of Artificial Sequence: Synthetic oligonucleotide
uauaaaccauauguaagug

SEQ ID NO: 1534978 - RNA, 19 nt, Artificial Sequence
  Description of Artificial Sequence: Synthetic oligonucleotide
uaagccauaugcaugccuc

SEQ ID NO: 1534979 - RNA, 19 nt, Artificial Sequence
  Description of Artificial Sequence: Synthetic oligonucleotide
uuaaaggauucuuuggaua

SEQ ID NO: 1534980 - RNA, 19 nt, Artificial Sequence
  Description of Artificial Sequence: Synthetic oligonucleotide
ucaaguaccaagucugaaa

SEQ ID NO: 1534981 - RNA, 19 nt, Artificial Sequence
  Description of Artificial Sequence: Synthetic oligonucleotide
ugacagaauuauaauguuc

SEQ ID NO: 1534982 - RNA, 19 nt, Artificial Sequence
  Description of Artificial Sequence: Synthetic oligonucleotide
auucucaaguaccaagucu

SEQ ID NO: 1534983 - RNA, 19 nt, Artificial Sequence
  Description of Artificial Sequence: Synthetic oligonucleotide
uuuacaggcuauaaaccau

SEQ ID NO: 1534984 - RNA, 19 nt, Artificial Sequence
  Description of Artificial Sequence: Synthetic oligonucleotide
auaugcaugccucauguau

SEQ ID NO: 1534985 - RNA, 19 nt, Artificial Sequence
  Description of Artificial Sequence: Synthetic oligonucleotide
aauucuuggcugaagacaa

SEQ ID NO: 1534986 - RNA, 19 nt, Artificial Sequence
  Description of Artificial Sequence: Synthetic oligonucleotide
uuauucuuuuggcaaacau

SEQ ID NO: 1534987 - RNA, 19 nt, Artificial Sequence
  Description of Artificial Sequence: Synthetic oligonucleotide
ugcuuaauuuccaauucuc

SEQ ID NO: 1534988 - RNA, 19 nt, Artificial Sequence
  Description of Artificial Sequence: Synthetic oligonucleotide
ucuaucuuacucuccuuca

SEQ ID NO: 1534989 - RNA, 19 nt, Artificial Sequence
  Description of Artificial Sequence: Synthetic oligonucleotide
auuaaaggauucuuuggau

SEQ ID NO: 1534990 - RNA, 19 nt, Artificial Sequence
  Description of Artificial Sequence: Synthetic oligonucleotide
uuggauacucuucaccaac

SEQ ID NO: 1534991 - RNA, 19 nt, Artificial Sequence
  Description of Artificial Sequence: Synthetic oligonucleotide
agcaacagaaucuaucuua

SEQ ID NO: 1534992 - RNA, 19 nt, Artificial Sequence
  Description of Artificial Sequence: Synthetic oligonucleotide
uccaaauucuucuggagua

SEQ ID NO: 1534993 - RNA, 19 nt, Artificial Sequence
  Description of Artificial Sequence: Synthetic oligonucleotide
ucugcuuguaguaucucaa

SEQ ID NO: 1534994 - RNA, 19 nt, Artificial Sequence
  Description of Artificial Sequence: Synthetic oligonucleotide
aauucuugucaaaacauua

SEQ ID NO: 1534995 - RNA, 19 nt, Artificial Sequence
  Description of Artificial Sequence: Synthetic oligonucleotide
uuguuaauccuagauuggc

SEQ ID NO: 1534996 - RNA, 19 nt, Artificial Sequence
  Description of Artificial Sequence: Synthetic oligonucleotide
auugguguuuguaaaaugu

SEQ ID NO: 1534997 - RNA, 19 nt, Artificial Sequence
  Description of Artificial Sequence: Synthetic oligonucleotide
uaucuugcucauaauaguu

SEQ ID NO: 1534998 - RNA, 19 nt, Artificial Sequence
  Description of Artificial Sequence: Synthetic oligonucleotide
aauauacuggccauuuuaa

SEQ ID NO: 1534999 - RNA, 19 nt, Artificial Sequence
  Description of Artificial Sequence: Synthetic oligonucleotide
aaguuggccauucacuuua

SEQ ID NO: 1535000 - RNA, 19 nt, Artificial Sequence
  Description of Artificial Sequence: Synthetic oligonucleotide
aaguacauuuaaauucuug

SEQ ID NO: 1535001 - RNA, 19 nt, Artificial Sequence
  Description of Artificial Sequence: Synthetic oligonucleotide
gacauacacauuuccaauc

SEQ ID NO: 1535002 - RNA, 19 nt, Artificial Sequence
  Description of Artificial Sequence: Synthetic oligonucleotide
aaaaugugagacagagcuc

SEQ ID NO: 1535003 - RNA, 19 nt, Artificial Sequence
  Description of Artificial Sequence: Synthetic oligonucleotide
aacuagcugcaauuuucag

SEQ ID NO: 1535004 - RNA, 19 nt, Artificial Sequence
  Description of Artificial Sequence: Synthetic oligonucleotide
ucacucucuacaugucugg

SEQ ID NO: 1535005 - RNA, 19 nt, Artificial Sequence
  Description of Artificial Sequence: Synthetic oligonucleotide
gacagaauuauaauguucu

SEQ ID NO: 1535006 - RNA, 19 nt, Artificial Sequence
  Description of Artificial Sequence: Synthetic oligonucleotide
aauucuucuggaguauaca

SEQ ID NO: 1535007 - RNA, 19 nt, Artificial Sequence
  Description of Artificial Sequence: Synthetic oligonucleotide
aacuacaauaggaggagca

SEQ ID NO: 1535008 - RNA, 19 nt, Artificial Sequence
  Description of Artificial Sequence: Synthetic oligonucleotide
uuaacagcaacagaaucua

SEQ ID NO: 1535009 - RNA, 19 nt, Artificial Sequence
  Description of Artificial Sequence: Synthetic oligonucleotide
aguauacauauuuccugug

SEQ ID NO: 1535010 - RNA, 19 nt, Artificial Sequence
  Description of Artificial Sequence: Synthetic oligonucleotide
ggaguauacauauuuccug

SEQ ID NO: 1535011 - RNA, 19 nt, Artificial Sequence
  Description of Artificial Sequence: Synthetic oligonucleotide
acuagguuuaauauuuugu

SEQ ID NO: 1535012 - RNA, 19 nt, Artificial Sequence
  Description of Artificial Sequence: Synthetic oligonucleotide
cuugcgaugccuucucacc

SEQ ID NO: 1535013 - RNA, 19 nt, Artificial Sequence
  Description of Artificial Sequence: Synthetic oligonucleotide
gagcucuuagcucaagcug

SEQ ID NO: 1535014 - RNA, 19 nt, Artificial Sequence
  Description of Artificial Sequence: Synthetic oligonucleotide
uuagcucaagcugaccucc

SEQ ID NO: 1535015 - RNA, 19 nt, Artificial Sequence
  Description of Artificial Sequence: Synthetic oligonucleotide
ucugagcaaguuuucacuc

SEQ ID NO: 1535016 - RNA, 19 nt, Artificial Sequence
  Description of Artificial Sequence: Synthetic oligonucleotide
cuucauucccugaauuuug

SEQ ID NO: 1535017 - RNA, 19 nt, Artificial Sequence
  Description of Artificial Sequence: Synthetic oligonucleotide
uuguaaacuagcugcaauu

SEQ ID NO: 1535018 - RNA, 19 nt, Artificial Sequence
  Description of Artificial Sequence: Synthetic oligonucleotide
cucuucaccaacuacaaua

SEQ ID NO: 1535019 - RNA, 19 nt, Artificial Sequence
  Description of Artificial Sequence: Synthetic oligonucleotide
ugacauacacauuuccaau

SEQ ID NO: 1535020 - RNA, 19 nt, Artificial Sequence
  Description of Artificial Sequence: Synthetic oligonucleotide
uacuaguauuaaaggauuc

SEQ ID NO: 1535021 - RNA, 19 nt, Artificial Sequence
  Description of Artificial Sequence: Synthetic oligonucleotide
gcuuguaguaucucaauug

SEQ ID NO: 1535022 - RNA, 19 nt, Artificial Sequence
  Description of Artificial Sequence: Synthetic oligonucleotide
acuaguauuaaaggauucu

SEQ ID NO: 1535023 - RNA, 19 nt, Artificial Sequence
  Description of Artificial Sequence: Synthetic oligonucleotide
caugccucauguauacuag

SEQ ID NO: 1535024 - RNA, 19 nt, Artificial Sequence
  Description of Artificial Sequence: Synthetic oligonucleotide
agaaucuaucuuacucucc

SEQ ID NO: 1535025 - RNA, 19 nt, Artificial Sequence
  Description of Artificial Sequence: Synthetic oligonucleotide
ucugcauauuuaaaagguu

SEQ ID NO: 1535026 - RNA, 19 nt, Artificial Sequence
  Description of Artificial Sequence: Synthetic oligonucleotide
agugaguuguuuccuccuc

SEQ ID NO: 1535027 - RNA, 19 nt, Artificial Sequence
  Description of Artificial Sequence: Synthetic oligonucleotide
agaaguuggccauucacuu

SEQ ID NO: 1535028 - RNA, 19 nt, Artificial Sequence
  Description of Artificial Sequence: Synthetic oligonucleotide
gcuauaaaccauauguaag

SEQ ID NO: 1535029 - RNA, 19 nt, Artificial Sequence
  Description of Artificial Sequence: Synthetic oligonucleotide
ucagaauggcucugcaugu

SEQ ID NO: 1535030 - RNA, 19 nt, Artificial Sequence
  Description of Artificial Sequence: Synthetic oligonucleotide
uaucuuacucuccuucaaa

SEQ ID NO: 1535031 - RNA, 19 nt, Artificial Sequence
  Description of Artificial Sequence: Synthetic oligonucleotide
cuauaaaccauauguaagu

SEQ ID NO: 1535032 - RNA, 19 nt, Artificial Sequence
  Description of Artificial Sequence: Synthetic oligonucleotide
uaguuacacauuucuuuug

SEQ ID NO: 1535033 - RNA, 19 nt, Artificial Sequence
  Description of Artificial Sequence: Synthetic oligonucleotide
accauauguaaguggauaa

SEQ ID NO: 1535034 - RNA, 19 nt, Artificial Sequence
  Description of Artificial Sequence: Synthetic oligonucleotide
uaauccuagauuggcacac

SEQ ID NO: 1535035 - RNA, 19 nt, Artificial Sequence
  Description of Artificial Sequence: Synthetic oligonucleotide
ucauguauacuaguauuaa

SEQ ID NO: 1535036 - RNA, 19 nt, Artificial Sequence
  Description of Artificial Sequence: Synthetic oligonucleotide
aggcaaagcuaucuugcuc

SEQ ID NO: 1535037 - RNA, 19 nt, Artificial Sequence
  Description of Artificial Sequence: Synthetic oligonucleotide
gcuaucuugcucauaauag

SEQ ID NO: 1535038 - RNA, 19 nt, Artificial Sequence
  Description of Artificial Sequence: Synthetic oligonucleotide
uuacaggcuauaaaccaua

SEQ ID NO: 1535039 - RNA, 19 nt, Artificial Sequence
  Description of Artificial Sequence: Synthetic oligonucleotide
accaacuacaauaggagga

SEQ ID NO: 1535040 - RNA, 19 nt, Artificial Sequence
  Description of Artificial Sequence: Synthetic oligonucleotide
caagcugaccuccccaugc

SEQ ID NO: 1535041 - RNA, 19 nt, Artificial Sequence
  Description of Artificial Sequence: Synthetic oligonucleotide
uagcugaguucaccaaccg

SEQ ID NO: 1535042 - RNA, 19 nt, Artificial Sequence
  Description of Artificial Sequence: Synthetic oligonucleotide
aaccauauguaaguggaua

SEQ ID NO: 1535043 - RNA, 19 nt, Artificial Sequence
  Description of Artificial Sequence: Synthetic oligonucleotide
uaauauaggcaaagcuauc

SEQ ID NO: 1535044 - RNA, 19 nt, Artificial Sequence
  Description of Artificial Sequence: Synthetic oligonucleotide
aaccgugugacagaauuau

SEQ ID NO: 1535045 - RNA, 19 nt, Artificial Sequence
  Description of Artificial Sequence: Synthetic oligonucleotide
agacuaucuuuguugaaaa

SEQ ID NO: 1535046 - RNA, 19 nt, Artificial Sequence
  Description of Artificial Sequence: Synthetic oligonucleotide
gauucucaaguaccaaguc

SEQ ID NO: 1535047 - RNA, 19 nt, Artificial Sequence
  Description of Artificial Sequence: Synthetic oligonucleotide
acaucagauaauauaggca

SEQ ID NO: 1535048 - RNA, 19 nt, Artificial Sequence
  Description of Artificial Sequence: Synthetic oligonucleotide
cagaaucuaucuuacucuc

SEQ ID NO: 1535049 - RNA, 19 nt, Artificial Sequence
  Description of Artificial Sequence: Synthetic oligonucleotide
auguaauuugcaaugacua

SEQ ID NO: 1535050 - RNA, 19 nt, Artificial Sequence
  Description of Artificial Sequence: Synthetic oligonucleotide
uaccaagucugaaauguua

SEQ ID NO: 1535051 - RNA, 19 nt, Artificial Sequence
  Description of Artificial Sequence: Synthetic oligonucleotide
gaguauacauauuuccugu

SEQ ID NO: 1535052 - RNA, 19 nt, Artificial Sequence
  Description of Artificial Sequence: Synthetic oligonucleotide
uacuuuagacuaucuuugu

SEQ ID NO: 1535053 - RNA, 19 nt, Artificial Sequence
  Description of Artificial Sequence: Synthetic oligonucleotide
agcuaucuugcucauaaua

SEQ ID NO: 1535054 - RNA, 19 nt, Artificial Sequence
  Description of Artificial Sequence: Synthetic oligonucleotide
cagcuauucuuucuucccg

SEQ ID NO: 1535055 - RNA, 19 nt, Artificial Sequence
  Description of Artificial Sequence: Synthetic oligonucleotide
agauaaguucucaauuuca

SEQ ID NO: 1535056 - RNA, 19 nt, Artificial Sequence
  Description of Artificial Sequence: Synthetic oligonucleotide
auguuguuucuaaauuaac

SEQ ID NO: 1535057 - RNA, 19 nt, Artificial Sequence
  Description of Artificial Sequence: Synthetic oligonucleotide
uuuggauacucuucaccaa

SEQ ID NO: 1535058 - RNA, 19 nt, Artificial Sequence
  Description of Artificial Sequence: Synthetic oligonucleotide
uugcgaugccuucucacca

SEQ ID NO: 1535059 - RNA, 19 nt, Artificial Sequence
  Description of Artificial Sequence: Synthetic oligonucleotide
uucuucuggaguauacaua

SEQ ID NO: 1535060 - RNA, 19 nt, Artificial Sequence
  Description of Artificial Sequence: Synthetic oligonucleotide
auccuagauuggcacacuc

SEQ ID NO: 1535061 - RNA, 19 nt, Artificial Sequence
  Description of Artificial Sequence: Synthetic oligonucleotide
cugccaauaucugagcaag

SEQ ID NO: 1535062 - RNA, 19 nt, Artificial Sequence
  Description of Artificial Sequence: Synthetic oligonucleotide
ucucaaguaccaagucuga

SEQ ID NO: 1535063 - RNA, 19 nt, Artificial Sequence
  Description of Artificial Sequence: Synthetic oligonucleotide
accaucagacggaauuugc

SEQ ID NO: 1535064 - RNA, 19 nt, Artificial Sequence
  Description of Artificial Sequence: Synthetic oligonucleotide
uucucgcuccaacuuagcu

SEQ ID NO: 1535065 - RNA, 19 nt, Artificial Sequence
  Description of Artificial Sequence: Synthetic oligonucleotide
uuguaaaaugugagacaga

SEQ ID NO: 1535066 - RNA, 19 nt, Artificial Sequence
  Description of Artificial Sequence: Synthetic oligonucleotide
uucuaccaaggccuccucc

SEQ ID NO: 1535067 - RNA, 19 nt, Artificial Sequence
  Description of Artificial Sequence: Synthetic oligonucleotide
gugguugauucucaaguac

SEQ ID NO: 1535068 - RNA, 19 nt, Artificial Sequence
  Description of Artificial Sequence: Synthetic oligonucleotide
guguuuguaaaaugugaga

SEQ ID NO: 1535069 - RNA, 19 nt, Artificial Sequence
  Description of Artificial Sequence: Synthetic oligonucleotide
caagucugaaauguuaaca

SEQ ID NO: 1535070 - RNA, 19 nt, Artificial Sequence
  Description of Artificial Sequence: Synthetic oligonucleotide
ucucgcuccaacuuagcua

SEQ ID NO: 1535071 - RNA, 19 nt, Artificial Sequence
  Description of Artificial Sequence: Synthetic oligonucleotide
gaguucaccaaccguguga

SEQ ID NO: 1535072 - RNA, 19 nt, Artificial Sequence
  Description of Artificial Sequence: Synthetic oligonucleotide
aucagacggaauuugcuua

SEQ ID NO: 1535073 - RNA, 19 nt, Artificial Sequence
  Description of Artificial Sequence: Synthetic oligonucleotide
uaguaucucaauugguguu

SEQ ID NO: 1535074 - RNA, 19 nt, Artificial Sequence
  Description of Artificial Sequence: Synthetic oligonucleotide
ucagacggaauuugcuuaa

SEQ ID NO: 1535075 - RNA, 19 nt, Artificial Sequence
  Description of Artificial Sequence: Synthetic oligonucleotide
auuuuguaaacuagcugca

SEQ ID NO: 1535076 - RNA, 19 nt, Artificial Sequence
  Description of Artificial Sequence: Synthetic oligonucleotide
cuuagcucaagcugaccuc

SEQ ID NO: 1535077 - RNA, 19 nt, Artificial Sequence
  Description of Artificial Sequence: Synthetic oligonucleotide
cacaguguaacauuuugua

SEQ ID NO: 1535078 - RNA, 19 nt, Artificial Sequence
  Description of Artificial Sequence: Synthetic oligonucleotide
auggcaggaagucuucaga

SEQ ID NO: 1535079 - RNA, 19 nt, Artificial Sequence
  Description of Artificial Sequence: Synthetic oligonucleotide
uuuuccaacgcaguccuuu

SEQ ID NO: 1535080 - RNA, 19 nt, Artificial Sequence
  Description of Artificial Sequence: Synthetic oligonucleotide
ugaguucaccaaccgugug

SEQ ID NO: 1535081 - RNA, 19 nt, Artificial Sequence
  Description of Artificial Sequence: Synthetic oligonucleotide
ucuucuaccaaggccuccu

SEQ ID NO: 1535082 - RNA, 19 nt, Artificial Sequence
  Description of Artificial Sequence: Synthetic oligonucleotide
uaaauauacuggccauuuu

SEQ ID NO: 1535083 - RNA, 19 nt, Artificial Sequence
  Description of Artificial Sequence: Synthetic oligonucleotide
acaggcuauaaaccauaug

SEQ ID NO: 1535084 - RNA, 19 nt, Artificial Sequence
  Description of Artificial Sequence: Synthetic oligonucleotide
auuucucgcuccaacuuag

SEQ ID NO: 1535085 - RNA, 19 nt, Artificial Sequence
  Description of Artificial Sequence: Synthetic oligonucleotide
agcagcaaauuuaauuuga

SEQ ID NO: 1535086 - RNA, 19 nt, Artificial Sequence
  Description of Artificial Sequence: Synthetic oligonucleotide
auauaggcaaagcuaucuu

SEQ ID NO: 1535087 - RNA, 19 nt, Artificial Sequence
  Description of Artificial Sequence: Synthetic oligonucleotide
cggaauuugcuuaauuucc

SEQ ID NO: 1535088 - RNA, 19 nt, Artificial Sequence
  Description of Artificial Sequence: Synthetic oligonucleotide
ggcuauaaaccauauguaa

SEQ ID NO: 1535089 - RNA, 19 nt, Artificial Sequence
  Description of Artificial Sequence: Synthetic oligonucleotide
uguucuccuaagccauaug

SEQ ID NO: 1535090 - RNA, 19 nt, Artificial Sequence
  Description of Artificial Sequence: Synthetic oligonucleotide
acuuuagacuaucuuuguu

SEQ ID NO: 1535091 - RNA, 19 nt, Artificial Sequence
  Description of Artificial Sequence: Synthetic oligonucleotide
cuucaccaacuacaauagg

SEQ ID NO: 1535092 - RNA, 19 nt, Artificial Sequence
  Description of Artificial Sequence: Synthetic oligonucleotide
cucauguauacuaguauua

SEQ ID NO: 1535093 - RNA, 19 nt, Artificial Sequence
  Description of Artificial Sequence: Synthetic oligonucleotide
guaguaucucaauuggugu

SEQ ID NO: 1535094 - RNA, 19 nt, Artificial Sequence
  Description of Artificial Sequence: Synthetic oligonucleotide
auaucugagcaaguuuuca

SEQ ID NO: 1535095 - RNA, 19 nt, Artificial Sequence
  Description of Artificial Sequence: Synthetic oligonucleotide
ucucuacaugucuggcucc

SEQ ID NO: 1535096 - RNA, 19 nt, Artificial Sequence
  Description of Artificial Sequence: Synthetic oligonucleotide
uucagugaguuguuuccuc

SEQ ID NO: 1535097 - RNA, 19 nt, Artificial Sequence
  Description of Artificial Sequence: Synthetic oligonucleotide
uggcaaacaucagauaaua

SEQ ID NO: 1535098 - RNA, 19 nt, Artificial Sequence
  Description of Artificial Sequence: Synthetic oligonucleotide
agcucuuagcucaagcuga

SEQ ID NO: 1535099 - RNA, 19 nt, Artificial Sequence
  Description of Artificial Sequence: Synthetic oligonucleotide
uuagacuaucuuuguugaa

SEQ ID NO: 1535100 - RNA, 19 nt, Artificial Sequence
  Description of Artificial Sequence: Synthetic oligonucleotide
cauguauacuaguauuaaa

SEQ ID NO: 1535101 - RNA, 19 nt, Artificial Sequence
  Description of Artificial Sequence: Synthetic oligonucleotide
acuuagcuacaucuucagu

SEQ ID NO: 1535102 - RNA, 19 nt, Artificial Sequence
  Description of Artificial Sequence: Synthetic oligonucleotide
uaacuccuuuaucauuuau

SEQ ID NO: 1535103 - RNA, 19 nt, Artificial Sequence
  Description of Artificial Sequence: Synthetic oligonucleotide
cuagguuuaauauuuuguu

SEQ ID NO: 1535104 - RNA, 19 nt, Artificial Sequence
  Description of Artificial Sequence: Synthetic oligonucleotide
caugacgaccagguggccg

SEQ ID NO: 1535105 - RNA, 19 nt, Artificial Sequence
  Description of Artificial Sequence: Synthetic oligonucleotide
gaauuauaauguucuccua

SEQ ID NO: 1535106 - RNA, 19 nt, Artificial Sequence
  Description of Artificial Sequence: Synthetic oligonucleotide
cuacaauaggaggagcauc

SEQ ID NO: 1535107 - RNA, 19 nt, Artificial Sequence
  Description of Artificial Sequence: Synthetic oligonucleotide
aaauggcaggaagucuuca

SEQ ID NO: 1535108 - RNA, 19 nt, Artificial Sequence
  Description of Artificial Sequence: Synthetic oligonucleotide
agcugaccuccccaugccg

SEQ ID NO: 1535109 - RNA, 19 nt, Artificial Sequence
  Description of Artificial Sequence: Synthetic oligonucleotide
ucaccaaccgugugacaga

SEQ ID NO: 1535110 - RNA, 19 nt, Artificial Sequence
  Description of Artificial Sequence: Synthetic oligonucleotide
acuacaauaggaggagcau

SEQ ID NO: 1535111 - RNA, 19 nt, Artificial Sequence
  Description of Artificial Sequence: Synthetic oligonucleotide
aguaucucaauugguguuu

SEQ ID NO: 1535112 - RNA, 19 nt, Artificial Sequence
  Description of Artificial Sequence: Synthetic oligonucleotide
agcugaguucaccaaccgu

SEQ ID NO: 1535113 - RNA, 19 nt, Artificial Sequence
  Description of Artificial Sequence: Synthetic oligonucleotide
cuccaacuuagcuacaucu

SEQ ID NO: 1535114 - RNA, 19 nt, Artificial Sequence
  Description of Artificial Sequence: Synthetic oligonucleotide
ugccgcuguguuuacaaua

SEQ ID NO: 1535115 - RNA, 19 nt, Artificial Sequence
  Description of Artificial Sequence: Synthetic oligonucleotide
cuaucuugcucauaauagu

SEQ ID NO: 1535116 - RNA, 19 nt, Artificial Sequence
  Description of Artificial Sequence: Synthetic oligonucleotide
cagguggccgggcacacgc

SEQ ID NO: 1535117 - RNA, 19 nt, Artificial Sequence
  Description of Artificial Sequence: Synthetic oligonucleotide
uaucucaauugguguuugu

SEQ ID NO: 1535118 - RNA, 19 nt, Artificial Sequence
  Description of Artificial Sequence: Synthetic oligonucleotide
cauucccugaauuuuggcu

SEQ ID NO: 1535119 - RNA, 19 nt, Artificial Sequence
  Description of Artificial Sequence: Synthetic oligonucleotide
aauccuagauuggcacacu

SEQ ID NO: 1535120 - RNA, 19 nt, Artificial Sequence
  Description of Artificial Sequence: Synthetic oligonucleotide
cuugcucauaauaguuaca

SEQ ID NO: 1535121 - RNA, 19 nt, Artificial Sequence
  Description of Artificial Sequence: Synthetic oligonucleotide
caaguaccaagucugaaau

SEQ ID NO: 1535122 - RNA, 19 nt, Artificial Sequence
  Description of Artificial Sequence: Synthetic oligonucleotide
aagcuaucuugcucauaau

SEQ ID NO: 1535123 - RNA, 19 nt, Artificial Sequence
  Description of Artificial Sequence: Synthetic oligonucleotide
aaauccgaggugguugauu

SEQ ID NO: 1535124 - RNA, 19 nt, Artificial Sequence
  Description of Artificial Sequence: Synthetic oligonucleotide
uccgaggugguugauucuc

SEQ ID NO: 1535125 - RNA, 19 nt, Artificial Sequence
  Description of Artificial Sequence: Synthetic oligonucleotide
aucucaauugguguuugua

SEQ ID NO: 1535126 - RNA, 19 nt, Artificial Sequence
  Description of Artificial Sequence: Synthetic oligonucleotide
ccaacuacaauaggaggag

SEQ ID NO: 1535127 - RNA, 19 nt, Artificial Sequence
  Description of Artificial Sequence: Synthetic oligonucleotide
agacggaauuugcuuaauu

SEQ ID NO: 1535128 - RNA, 19 nt, Artificial Sequence
  Description of Artificial Sequence: Synthetic oligonucleotide
caacuacaauaggaggagc

SEQ ID NO: 1535129 - RNA, 19 nt, Artificial Sequence
  Description of Artificial Sequence: Synthetic oligonucleotide
gaacagcguucuucauucc

SEQ ID NO: 1535130 - RNA, 19 nt, Artificial Sequence
  Description of Artificial Sequence: Synthetic oligonucleotide
gcaacagaaucuaucuuac

SEQ ID NO: 1535131 - RNA, 19 nt, Artificial Sequence
  Description of Artificial Sequence: Synthetic oligonucleotide
ugcaaugacuagguuuaau

SEQ ID NO: 1535132 - RNA, 19 nt, Artificial Sequence
  Description of Artificial Sequence: Synthetic oligonucleotide
cugcaauuuucaguagcug

SEQ ID NO: 1535133 - RNA, 19 nt, Artificial Sequence
  Description of Artificial Sequence: Synthetic oligonucleotide
caugccgcuguguuuacaa

SEQ ID NO: 1535134 - RNA, 19 nt, Artificial Sequence
  Description of Artificial Sequence: Synthetic oligonucleotide
caaaacacaguguaacauu

SEQ ID NO: 1535135 - RNA, 19 nt, Artificial Sequence
  Description of Artificial Sequence: Synthetic oligonucleotide
ucuacaugucuggcuccag

SEQ ID NO: 1535136 - RNA, 19 nt, Artificial Sequence
  Description of Artificial Sequence: Synthetic oligonucleotide
cugcauguacucagcagga

SEQ ID NO: 1535137 - RNA, 19 nt, Artificial Sequence
  Description of Artificial Sequence: Synthetic oligonucleotide
cuaucuuacucuccuucaa

SEQ ID NO: 1535138 - RNA, 19 nt, Artificial Sequence
  Description of Artificial Sequence: Synthetic oligonucleotide
auuuccaaucaggacuaaa

SEQ ID NO: 1535139 - RNA, 19 nt, Artificial Sequence
  Description of Artificial Sequence: Synthetic oligonucleotide
acucuacaaaacacagugu

SEQ ID NO: 1535140 - RNA, 19 nt, Artificial Sequence
  Description of Artificial Sequence: Synthetic oligonucleotide
cagcguucuucauucccug

SEQ ID NO: 1535141 - RNA, 19 nt, Artificial Sequence
  Description of Artificial Sequence: Synthetic oligonucleotide
gguugauucucaaguacca

SEQ ID NO: 1535142 - RNA, 19 nt, Artificial Sequence
  Description of Artificial Sequence: Synthetic oligonucleotide
cacucucuacaugucuggc

SEQ ID NO: 1535143 - RNA, 19 nt, Artificial Sequence
  Description of Artificial Sequence: Synthetic oligonucleotide
acaugucuggcuccagaua

SEQ ID NO: 1535144 - RNA, 19 nt, Artificial Sequence
  Description of Artificial Sequence: Synthetic oligonucleotide
aucagauaauauaggcaaa

SEQ ID NO: 1535145 - RNA, 19 nt, Artificial Sequence
  Description of Artificial Sequence: Synthetic oligonucleotide
agcguucuucauucccuga

SEQ ID NO: 1535146 - RNA, 19 nt, Artificial Sequence
  Description of Artificial Sequence: Synthetic oligonucleotide
cuacaugucuggcuccaga

SEQ ID NO: 1535147 - RNA, 19 nt, Artificial Sequence
  Description of Artificial Sequence: Synthetic oligonucleotide
uguguugggguugguuaaa

SEQ ID NO: 1535148 - RNA, 19 nt, Artificial Sequence
  Description of Artificial Sequence: Synthetic oligonucleotide
agcaggaccaucagacgga

SEQ ID NO: 1535149 - RNA, 19 nt, Artificial Sequence
  Description of Artificial Sequence: Synthetic oligonucleotide
cauuacuuuagacuaucuu

SEQ ID NO: 1535150 - RNA, 19 nt, Artificial Sequence
  Description of Artificial Sequence: Synthetic oligonucleotide
ccgugugacagaauuauaa

SEQ ID NO: 1535151 - RNA, 19 nt, Artificial Sequence
  Description of Artificial Sequence: Synthetic oligonucleotide
gugacagaauuauaauguu

SEQ ID NO: 1535152 - RNA, 19 nt, Artificial Sequence
  Description of Artificial Sequence: Synthetic oligonucleotide
ggugguugauucucaagua

SEQ ID NO: 1535153 - RNA, 19 nt, Artificial Sequence
  Description of Artificial Sequence: Synthetic oligonucleotide
gcaugccucauguauacua

SEQ ID NO: 1535154 - RNA, 19 nt, Artificial Sequence
  Description of Artificial Sequence: Synthetic oligonucleotide
cucuuagcucaagcugacc

SEQ ID NO: 1535155 - RNA, 19 nt, Artificial Sequence
  Description of Artificial Sequence: Synthetic oligonucleotide
augucuggcuccagauaag

SEQ ID NO: 1535156 - RNA, 19 nt, Artificial Sequence
  Description of Artificial Sequence: Synthetic oligonucleotide
gugaguuguuuccuccucu

SEQ ID NO: 1535157 - RNA, 19 nt, Artificial Sequence
  Description of Artificial Sequence: Synthetic oligonucleotide
gccauaugcaugccucaug

SEQ ID NO: 1535158 - RNA, 19 nt, Artificial Sequence
  Description of Artificial Sequence: Synthetic oligonucleotide
caucagacggaauuugcuu

SEQ ID NO: 1535159 - RNA, 19 nt, Artificial Sequence
  Description of Artificial Sequence: Synthetic oligonucleotide
cgcuguguuuacaauauca

SEQ ID NO: 1535160 - RNA, 19 nt, Artificial Sequence
  Description of Artificial Sequence: Synthetic oligonucleotide
uuuugggaacagcguucuu

SEQ ID NO: 1535161 - RNA, 19 nt, Artificial Sequence
  Description of Artificial Sequence: Synthetic oligonucleotide
cuccuugcgaugccuucuc

SEQ ID NO: 1535162 - RNA, 19 nt, Artificial Sequence
  Description of Artificial Sequence: Synthetic oligonucleotide
cuaagccauaugcaugccu

SEQ ID NO: 1535163 - RNA, 19 nt, Artificial Sequence
  Description of Artificial Sequence: Synthetic oligonucleotide
gaauggcucugcauguacu

SEQ ID NO: 1535164 - RNA, 19 nt, Artificial Sequence
  Description of Artificial Sequence: Synthetic oligonucleotide
ccuugcgaugccuucucac

SEQ ID NO: 1535165 - RNA, 19 nt, Artificial Sequence
  Description of Artificial Sequence: Synthetic oligonucleotide
caauugguguuuguaaaau

SEQ ID NO: 1535166 - RNA, 19 nt, Artificial Sequence
  Description of Artificial Sequence: Synthetic oligonucleotide
augcauuacuuuagacuau

SEQ ID NO: 1535167 - RNA, 19 nt, Artificial Sequence
  Description of Artificial Sequence: Synthetic oligonucleotide
ugcaugccucauguauacu

SEQ ID NO: 1535168 - RNA, 19 nt, Artificial Sequence
  Description of Artificial Sequence: Synthetic oligonucleotide
agccauaugcaugccucau

SEQ ID NO: 1535169 - RNA, 19 nt, Artificial Sequence
  Description of Artificial Sequence: Synthetic oligonucleotide
gcuuaauuuccaauucucu

SEQ ID NO: 1535170 - RNA, 19 nt, Artificial Sequence
  Description of Artificial Sequence: Synthetic oligonucleotide
ugacgaccagguggccggg

SEQ ID NO: 1535171 - RNA, 19 nt, Artificial Sequence
  Description of Artificial Sequence: Synthetic oligonucleotide
caaccgugugacagaauua

SEQ ID NO: 1535172 - RNA, 19 nt, Artificial Sequence
  Description of Artificial Sequence: Synthetic oligonucleotide
cucaaguaccaagucugaa

SEQ ID NO: 1535173 - RNA, 19 nt, Artificial Sequence
  Description of Artificial Sequence: Synthetic oligonucleotide
augugagacagagcucuua

SEQ ID NO: 1535174 - RNA, 19 nt, Artificial Sequence
  Description of Artificial Sequence: Synthetic oligonucleotide
augccgcuguguuuacaau

SEQ ID NO: 1535175 - RNA, 19 nt, Artificial Sequence
  Description of Artificial Sequence: Synthetic oligonucleotide
gcugaccuccccaugccgc

SEQ ID NO: 1535176 - RNA, 19 nt, Artificial Sequence
  Description of Artificial Sequence: Synthetic oligonucleotide
cauaugcaugccucaugua

SEQ ID NO: 1535177 - RNA, 19 nt, Artificial Sequence
  Description of Artificial Sequence: Synthetic oligonucleotide
uugcaaugacuagguuuaa

SEQ ID NO: 1535178 - RNA, 19 nt, Artificial Sequence
  Description of Artificial Sequence: Synthetic oligonucleotide
ggauacucuucaccaacua

SEQ ID NO: 1535179 - RNA, 19 nt, Artificial Sequence
  Description of Artificial Sequence: Synthetic oligonucleotide
gaauuuugacauacacauu

SEQ ID NO: 1535180 - RNA, 19 nt, Artificial Sequence
  Description of Artificial Sequence: Synthetic oligonucleotide
gguggccgggcacacgcgc

SEQ ID NO: 1535181 - RNA, 19 nt, Artificial Sequence
  Description of Artificial Sequence: Synthetic oligonucleotide
cuucagaauggcucugcau

SEQ ID NO: 1535182 - RNA, 19 nt, Artificial Sequence
  Description of Artificial Sequence: Synthetic oligonucleotide
caacagaaucuaucuuacu

SEQ ID NO: 1535183 - RNA, 19 nt, Artificial Sequence
  Description of Artificial Sequence: Synthetic oligonucleotide
gcuacaucuucagugaguu

SEQ ID NO: 1535184 - RNA, 19 nt, Artificial Sequence
  Description of Artificial Sequence: Synthetic oligonucleotide
cagugaguuguuuccuccu

SEQ ID NO: 1535185 - RNA, 19 nt, Artificial Sequence
  Description of Artificial Sequence: Synthetic oligonucleotide
cuucagugaguuguuuccu

SEQ ID NO: 1535186 - RNA, 19 nt, Artificial Sequence
  Description of Artificial Sequence: Synthetic oligonucleotide
gcgaugccuucucaccagc

SEQ ID NO: 1535187 - RNA, 19 nt, Artificial Sequence
  Description of Artificial Sequence: Synthetic oligonucleotide
ggcucugcauguacucagc

SEQ ID NO: 1535188 - RNA, 19 nt, Artificial Sequence
  Description of Artificial Sequence: Synthetic oligonucleotide
auucuuggcugaagacaaa

SEQ ID NO: 1535189 - RNA, 19 nt, Artificial Sequence
  Description of Artificial Sequence: Synthetic oligonucleotide
augguagaaguuggccauu

SEQ ID NO: 1535190 - RNA, 19 nt, Artificial Sequence
  Description of Artificial Sequence: Synthetic oligonucleotide
ccucauguauacuaguauu

SEQ ID NO: 1535191 - RNA, 19 nt, Artificial Sequence
  Description of Artificial Sequence: Synthetic oligonucleotide
gccucauguauacuaguau

SEQ ID NO: 1535192 - RNA, 19 nt, Artificial Sequence
  Description of Artificial Sequence: Synthetic oligonucleotide
ggcuccagauaaguucuca

SEQ ID NO: 1535193 - RNA, 19 nt, Artificial Sequence
  Description of Artificial Sequence: Synthetic oligonucleotide
cugcuuguaguaucucaau

SEQ ID NO: 1535194 - RNA, 19 nt, Artificial Sequence
  Description of Artificial Sequence: Synthetic oligonucleotide
gacgaccagguggccgggc

SEQ ID NO: 1535195 - RNA, 19 nt, Artificial Sequence
  Description of Artificial Sequence: Synthetic oligonucleotide
ccaaccgugugacagaauu

SEQ ID NO: 1535196 - RNA, 19 nt, Artificial Sequence
  Description of Artificial Sequence: Synthetic oligonucleotide
caccaaccgugugacagaa

SEQ ID NO: 1535197 - RNA, 19 nt, Artificial Sequence
  Description of Artificial Sequence: Synthetic oligonucleotide
ccaucagacggaauuugcu

SEQ ID NO: 1535198 - RNA, 19 nt, Artificial Sequence
  Description of Artificial Sequence: Synthetic oligonucleotide
accgugugacagaauuaua

SEQ ID NO: 1535199 - RNA, 19 nt, Artificial Sequence
  Description of Artificial Sequence: Synthetic oligonucleotide
ccuaagccauaugcaugcc

SEQ ID NO: 1535200 - RNA, 19 nt, Artificial Sequence
  Description of Artificial Sequence: Synthetic oligonucleotide
agguggccgggcacacgcg

SEQ ID NO: 1535201 - RNA, 19 nt, Artificial Sequence
  Description of Artificial Sequence: Synthetic oligonucleotide
ccaauucucuggcugccaa

SEQ ID NO: 1535202 - RNA, 19 nt, Artificial Sequence
  Description of Artificial Sequence: Synthetic oligonucleotide
ccaauaucugagcaaguuu

SEQ ID NO: 1535203 - RNA, 19 nt, Artificial Sequence
  Description of Artificial Sequence: Synthetic oligonucleotide
cagaauggcucugcaugua

SEQ ID NO: 1535204 - RNA, 19 nt, Artificial Sequence
  Description of Artificial Sequence: Synthetic oligonucleotide
caaagcuaucuugcucaua

SEQ ID NO: 1535205 - RNA, 19 nt, Artificial Sequence
  Description of Artificial Sequence: Synthetic oligonucleotide
ggcaaacaucagauaauau

SEQ ID NO: 1535206 - RNA, 19 nt, Artificial Sequence
  Description of Artificial Sequence: Synthetic oligonucleotide
cgugugacagaauuauaau

SEQ ID NO: 1535207 - RNA, 19 nt, Artificial Sequence
  Description of Artificial Sequence: Synthetic oligonucleotide
gccgcuguguuuacaauau

SEQ ID NO: 1535208 - RNA, 19 nt, Artificial Sequence
  Description of Artificial Sequence: Synthetic oligonucleotide
gcauuacuuuagacuaucu

SEQ ID NO: 1535209 - RNA, 19 nt, Artificial Sequence
  Description of Artificial Sequence: Synthetic oligonucleotide
cuccccaugccgcuguguu

SEQ ID NO: 1535210 - RNA, 19 nt, Artificial Sequence
  Description of Artificial Sequence: Synthetic oligonucleotide
gaaauccgaggugguugau

SEQ ID NO: 1535211 - RNA, 19 nt, Artificial Sequence
  Description of Artificial Sequence: Synthetic oligonucleotide
ccgaggugguugauucuca

SEQ ID NO: 1535212 - RNA, 19 nt, Artificial Sequence
  Description of Artificial Sequence: Synthetic oligonucleotide
uuccuguguugggguuggu

SEQ ID NO: 1535213 - RNA, 19 nt, Artificial Sequence
  Description of Artificial Sequence: Synthetic oligonucleotide
ccgcuguguuuacaauauc

SEQ ID NO: 1535214 - RNA, 19 nt, Artificial Sequence
  Description of Artificial Sequence: Synthetic oligonucleotide
gcaggaccaucagacggaa

SEQ ID NO: 1535215 - RNA, 19 nt, Artificial Sequence
  Description of Artificial Sequence: Synthetic oligonucleotide
accaaccgugugacagaau

SEQ ID NO: 1535216 - RNA, 19 nt, Artificial Sequence
  Description of Artificial Sequence: Synthetic oligonucleotide
ccauuucucgcuccaacuu

SEQ ID NO: 1535217 - RNA, 19 nt, Artificial Sequence
  Description of Artificial Sequence: Synthetic oligonucleotide
ggaggagcaucugcuugua

SEQ ID NO: 1535218 - RNA, 19 nt, Artificial Sequence
  Description of Artificial Sequence: Synthetic oligonucleotide
cgucucuuuugugcuuuug

SEQ ID NO: 1535219 - RNA, 19 nt, Artificial Sequence
  Description of Artificial Sequence: Synthetic oligonucleotide
ccccaugccgcuguguuua

SEQ ID NO: 1535220 - RNA, 19 nt, Artificial Sequence
  Description of Artificial Sequence: Synthetic oligonucleotide
cgaggugguugauucucaa

SEQ ID NO: 1535221 - RNA, 19 nt, Artificial Sequence
  Description of Artificial Sequence: Synthetic oligonucleotide
cagacggaauuugcuuaau

SEQ ID NO: 1535222 - RNA, 19 nt, Artificial Sequence
  Description of Artificial Sequence: Synthetic oligonucleotide
cgaccagguggccgggcac

SEQ ID NO: 1535223 - RNA, 19 nt, Artificial Sequence
  Description of Artificial Sequence: Synthetic oligonucleotide
caggaccaucagacggaau

SEQ ID NO: 1535224 - RNA, 19 nt, Artificial Sequence
  Description of Artificial Sequence: Synthetic oligonucleotide
cgaugccuucucaccagcu

SEQ ID NO: 1535225 - RNA, 19 nt, Artificial Sequence
  Description of Artificial Sequence: Synthetic oligonucleotide
cgcuccaacuuagcuacau

SEQ ID NO: 1535226 - RNA, 19 nt, Artificial Sequence
  Description of Artificial Sequence: Synthetic oligonucleotide
ccgucucuuuugugcuuuu

SEQ ID NO: 1535227 - RNA, 19 nt, Artificial Sequence
  Description of Artificial Sequence: Synthetic oligonucleotide
aagaacucagaggcgagcc

SEQ ID NO: 1535228 - RNA, 19 nt, Artificial Sequence
  Description of Artificial Sequence: Synthetic oligonucleotide
ucagaggcgagccacgucc

SEQ ID NO: 1535229 - RNA, 19 nt, Artificial Sequence
  Description of Artificial Sequence: Synthetic oligonucleotide
uccaugacaaccugcucug

SEQ ID NO: 1535230 - RNA, 19 nt, Artificial Sequence
  Description of Artificial Sequence: Synthetic oligonucleotide
gaacucagaggcgagccac

SEQ ID NO: 1535231 - RNA, 19 nt, Artificial Sequence
  Description of Artificial Sequence: Synthetic oligonucleotide
aacucagaggcgagccacg

SEQ ID NO: 1535232 - RNA, 19 nt, Artificial Sequence
  Description of Artificial Sequence: Synthetic oligonucleotide
guccaugacaaccugcucu

SEQ ID NO: 1535233 - RNA, 19 nt, Artificial Sequence
  Description of Artificial Sequence: Synthetic oligonucleotide
cacguccaugacaaccugc

SEQ ID NO: 1535234 - RNA, 19 nt, Artificial Sequence
  Description of Artificial Sequence: Synthetic oligonucleotide
agaacucagaggcgagcca

SEQ ID NO: 1535235 - RNA, 19 nt, Artificial Sequence
  Description of Artificial Sequence: Synthetic oligonucleotide
aggcgagccacguccauga

SEQ ID NO: 1535236 - RNA, 19 nt, Artificial Sequence
  Description of Artificial Sequence: Synthetic oligonucleotide
acguccaugacaaccugcu

SEQ ID NO: 1535237 - RNA, 19 nt, Artificial Sequence
  Description of Artificial Sequence: Synthetic oligonucleotide
gaggcgagccacguccaug

SEQ ID NO: 1535238 - RNA, 19 nt, Artificial Sequence
  Description of Artificial Sequence: Synthetic oligonucleotide
acucagaggcgagccacgu

SEQ ID NO: 1535239 - RNA, 19 nt, Artificial Sequence
  Description of Artificial Sequence: Synthetic oligonucleotide
cucagaggcgagccacguc

SEQ ID NO: 1535240 - RNA, 19 nt, Artificial Sequence
  Description of Artificial Sequence: Synthetic oligonucleotide
cgagccacguccaugacaa

SEQ ID NO: 1535241 - RNA, 19 nt, Artificial Sequence
  Description of Artificial Sequence: Synthetic oligonucleotide
agaggcgagccacguccau

SEQ ID NO: 1535242 - RNA, 19 nt, Artificial Sequence
  Description of Artificial Sequence: Synthetic oligonucleotide
cagaggcgagccacgucca

SEQ ID NO: 1535243 - RNA, 19 nt, Artificial Sequence
  Description of Artificial Sequence: Synthetic oligonucleotide
gcgagccacguccaugaca

SEQ ID NO: 1535244 - RNA, 19 nt, Artificial Sequence
  Description of Artificial Sequence: Synthetic oligonucleotide
gagccacguccaugacaac

SEQ ID NO: 1535245 - RNA, 19 nt, Artificial Sequence
  Description of Artificial Sequence: Synthetic oligonucleotide
ccacguccaugacaaccug

SEQ ID NO: 1535246 - RNA, 19 nt, Artificial Sequence
  Description of Artificial Sequence: Synthetic oligonucleotide
ggcgagccacguccaugac

SEQ ID NO: 1535247 - RNA, 19 nt, Artificial Sequence
  Description of Artificial Sequence: Synthetic oligonucleotide
cguccaugacaaccugcuc

SEQ ID NO: 1535248 - RNA, 19 nt, Artificial Sequence
  Description of Artificial Sequence: Synthetic oligonucleotide
ccaugacaaccugcucugu

SEQ ID NO: 1535249 - RNA, 19 nt, Artificial Sequence
  Description of Artificial Sequence: Synthetic oligonucleotide
aaacuuugaacuuuuaaac

SEQ ID NO: 1535250 - RNA, 19 nt, Artificial Sequence
  Description of Artificial Sequence: Synthetic oligonucleotide
uguguuguuauuuagaagc

SEQ ID NO: 1535251 - RNA, 19 nt, Artificial Sequence
  Description of Artificial Sequence: Synthetic oligonucleotide
aaauauauuugcuagagau

SEQ ID NO: 1535252 - RNA, 19 nt, Artificial Sequence
  Description of Artificial Sequence: Synthetic oligonucleotide
aagacaaauaaaucuauag

SEQ ID NO: 1535253 - RNA, 19 nt, Artificial Sequence
  Description of Artificial Sequence: Synthetic oligonucleotide
acuaauuuaacuauauacc

SEQ ID NO: 1535254 - RNA, 19 nt, Artificial Sequence
  Description of Artificial Sequence: Synthetic oligonucleotide
aaaggaaucgaucaggacu

SEQ ID NO: 1535255 - RNA, 19 nt, Artificial Sequence
  Description of Artificial Sequence: Synthetic oligonucleotide
aagccgucaacucagacac

SEQ ID NO: 1535256 - RNA, 19 nt, Artificial Sequence
  Description of Artificial Sequence: Synthetic oligonucleotide
aaaggaguuagcucagacc

SEQ ID NO: 1535257 - RNA, 19 nt, Artificial Sequence
  Description of Artificial Sequence: Synthetic oligonucleotide
uucagugaaacuuugaacu

SEQ ID NO: 1535258 - RNA, 19 nt, Artificial Sequence
  Description of Artificial Sequence: Synthetic oligonucleotide
aagcauauguucuacuaac

SEQ ID NO: 1535259 - RNA, 19 nt, Artificial Sequence
  Description of Artificial Sequence: Synthetic oligonucleotide
aaggaguuagcucagaccu

SEQ ID NO: 1535260 - RNA, 19 nt, Artificial Sequence
  Description of Artificial Sequence: Synthetic oligonucleotide
auagauacucuuuuccacc

SEQ ID NO: 1535261 - RNA, 19 nt, Artificial Sequence
  Description of Artificial Sequence: Synthetic oligonucleotide
aauuuggugucauucauca

SEQ ID NO: 1535262 - RNA, 19 nt, Artificial Sequence
  Description of Artificial Sequence: Synthetic oligonucleotide
gauaucaugguucaccuug

SEQ ID NO: 1535263 - RNA, 19 nt, Artificial Sequence
  Description of Artificial Sequence: Synthetic oligonucleotide
aauaugcccucauuucugc

SEQ ID NO: 1535264 - RNA, 19 nt, Artificial Sequence
  Description of Artificial Sequence: Synthetic oligonucleotide
uuaaaaugagucauaguga

SEQ ID NO: 1535265 - RNA, 19 nt, Artificial Sequence
  Description of Artificial Sequence: Synthetic oligonucleotide
uuuuauuccaacacgucca

SEQ ID NO: 1535266 - RNA, 19 nt, Artificial Sequence
  Description of Artificial Sequence: Synthetic oligonucleotide
gaaaugacugcauuguuug

SEQ ID NO: 1535267 - RNA, 19 nt, Artificial Sequence
  Description of Artificial Sequence: Synthetic oligonucleotide
ugauugacaguacaguacc

SEQ ID NO: 1535268 - RNA, 19 nt, Artificial Sequence
  Description of Artificial Sequence: Synthetic oligonucleotide
ucauuuaggaaauauuuaa

SEQ ID NO: 1535269 - RNA, 19 nt, Artificial Sequence
  Description of Artificial Sequence: Synthetic oligonucleotide
uuuaagcuguguuuugugg

SEQ ID NO: 1535270 - RNA, 19 nt, Artificial Sequence
  Description of Artificial Sequence: Synthetic oligonucleotide
ucgagcauaauaaauacau

SEQ ID NO: 1535271 - RNA, 19 nt, Artificial Sequence
  Description of Artificial Sequence: Synthetic oligonucleotide
auauuugcuagagaugugc

SEQ ID NO: 1535272 - RNA, 19 nt, Artificial Sequence
  Description of Artificial Sequence: Synthetic oligonucleotide
ugguauauggcacuuuaag

SEQ ID NO: 1535273 - RNA, 19 nt, Artificial Sequence
  Description of Artificial Sequence: Synthetic oligonucleotide
aggauaaugacuuggucag

SEQ ID NO: 1535274 - RNA, 19 nt, Artificial Sequence
  Description of Artificial Sequence: Synthetic oligonucleotide
gacaacgguauuuuaaagc

SEQ ID NO: 1535275 - RNA, 19 nt, Artificial Sequence
  Description of Artificial Sequence: Synthetic oligonucleotide
acucgagcauaauaaauac

SEQ ID NO: 1535276 - RNA, 19 nt, Artificial Sequence
  Description of Artificial Sequence: Synthetic oligonucleotide
aguuagcucagaccuaacc

SEQ ID NO: 1535277 - RNA, 19 nt, Artificial Sequence
  Description of Artificial Sequence: Synthetic oligonucleotide
cuaacuuccaucugguccc

SEQ ID NO: 1535278 - RNA, 19 nt, Artificial Sequence
  Description of Artificial Sequence: Synthetic oligonucleotide
cuaauuuaacuauauacca

SEQ ID NO: 1535279 - RNA, 19 nt, Artificial Sequence
  Description of Artificial Sequence: Synthetic oligonucleotide
agacaaauaaaucuauaga

SEQ ID NO: 1535280 - RNA, 19 nt, Artificial Sequence
  Description of Artificial Sequence: Synthetic oligonucleotide
acaacgguauuuuaaagcu

SEQ ID NO: 1535281 - RNA, 19 nt, Artificial Sequence
  Description of Artificial Sequence: Synthetic oligonucleotide
cacuuuaaggacaggaagg

SEQ ID NO: 1535282 - RNA, 19 nt, Artificial Sequence
  Description of Artificial Sequence: Synthetic oligonucleotide
acucaagugcaaaauaacc

SEQ ID NO: 1535283 - RNA, 19 nt, Artificial Sequence
  Description of Artificial Sequence: Synthetic oligonucleotide
ucuuaggauaaugacuugg

SEQ ID NO: 1535284 - RNA, 19 nt, Artificial Sequence
  Description of Artificial Sequence: Synthetic oligonucleotide
aaaauauauuugcuagaga

SEQ ID NO: 1535285 - RNA, 19 nt, Artificial Sequence
  Description of Artificial Sequence: Synthetic oligonucleotide
uuuaauauuguaaguggua

SEQ ID NO: 1535286 - RNA, 19 nt, Artificial Sequence
  Description of Artificial Sequence: Synthetic oligonucleotide
ucagaccuaaccaaccaag

SEQ ID NO: 1535287 - RNA, 19 nt, Artificial Sequence
  Description of Artificial Sequence: Synthetic oligonucleotide
uucuguaacuacucgagca

SEQ ID NO: 1535288 - RNA, 19 nt, Artificial Sequence
  Description of Artificial Sequence: Synthetic oligonucleotide
ugucacaucaagucuuagg

SEQ ID NO: 1535289 - RNA, 19 nt, Artificial Sequence
  Description of Artificial Sequence: Synthetic oligonucleotide
aacucaugaaggugucagc

SEQ ID NO: 1535290 - RNA, 19 nt, Artificial Sequence
  Description of Artificial Sequence: Synthetic oligonucleotide
ucuacaaacucaugaaggu

SEQ ID NO: 1535291 - RNA, 19 nt, Artificial Sequence
  Description of Artificial Sequence: Synthetic oligonucleotide
guauccaaaacccaugaac

SEQ ID NO: 1535292 - RNA, 19 nt, Artificial Sequence
  Description of Artificial Sequence: Synthetic oligonucleotide
uguucuacuaacuuccauc

SEQ ID NO: 1535293 - RNA, 19 nt, Artificial Sequence
  Description of Artificial Sequence: Synthetic oligonucleotide
uauagauacucuuuuccac

SEQ ID NO: 1535294 - RNA, 19 nt, Artificial Sequence
  Description of Artificial Sequence: Synthetic oligonucleotide
agaaguaagccgucaacuc

SEQ ID NO: 1535295 - RNA, 19 nt, Artificial Sequence
  Description of Artificial Sequence: Synthetic oligonucleotide
aaaggugaacacgaagccg

SEQ ID NO: 1535296 - RNA, 19 nt, Artificial Sequence
  Description of Artificial Sequence: Synthetic oligonucleotide
uguucaguagucaguaaca

SEQ ID NO: 1535297 - RNA, 19 nt, Artificial Sequence
  Description of Artificial Sequence: Synthetic oligonucleotide
uauaccauaugcauauaaa

SEQ ID NO: 1535298 - RNA, 19 nt, Artificial Sequence
  Description of Artificial Sequence: Synthetic oligonucleotide
ugagucauagugauugaca

SEQ ID NO: 1535299 - RNA, 19 nt, Artificial Sequence
  Description of Artificial Sequence: Synthetic oligonucleotide
aaucuauagauacucuuuu

SEQ ID NO: 1535300 - RNA, 19 nt, Artificial Sequence
  Description of Artificial Sequence: Synthetic oligonucleotide
gagcauaauaaauacaucu

SEQ ID NO: 1535301 - RNA, 19 nt, Artificial Sequence
  Description of Artificial Sequence: Synthetic oligonucleotide
agacacgugacucaggaca

SEQ ID NO: 1535302 - RNA, 19 nt, Artificial Sequence
  Description of Artificial Sequence: Synthetic oligonucleotide
uggcugaagaaguaagccg

SEQ ID NO: 1535303 - RNA, 19 nt, Artificial Sequence
  Description of Artificial Sequence: Synthetic oligonucleotide
cauauguucuacuaacuuc

SEQ ID NO: 1535304 - RNA, 19 nt, Artificial Sequence
  Description of Artificial Sequence: Synthetic oligonucleotide
ucgcuuugcacugagaacc

SEQ ID NO: 1535305 - RNA, 19 nt, Artificial Sequence
  Description of Artificial Sequence: Synthetic oligonucleotide
cacaugcuuacauucauag

SEQ ID NO: 1535306 - RNA, 19 nt, Artificial Sequence
  Description of Artificial Sequence: Synthetic oligonucleotide
cucaggacagagcagaccc

SEQ ID NO: 1535307 - RNA, 19 nt, Artificial Sequence
  Description of Artificial Sequence: Synthetic oligonucleotide
aagucuacaaacucaugaa

SEQ ID NO: 1535308 - RNA, 19 nt, Artificial Sequence
  Description of Artificial Sequence: Synthetic oligonucleotide
gaagccguauccaaaaccc

SEQ ID NO: 1535309 - RNA, 19 nt, Artificial Sequence
  Description of Artificial Sequence: Synthetic oligonucleotide
aagaaguaagccgucaacu

SEQ ID NO: 1535310 - RNA, 19 nt, Artificial Sequence
  Description of Artificial Sequence: Synthetic oligonucleotide
gaagcauaugcauuggcca

SEQ ID NO: 1535311 - RNA, 19 nt, Artificial Sequence
  Description of Artificial Sequence: Synthetic oligonucleotide
aacgguauuuuaaagcuca

SEQ ID NO: 1535312 - RNA, 19 nt, Artificial Sequence
  Description of Artificial Sequence: Synthetic oligonucleotide
ugagacaacgguauuuuaa

SEQ ID NO: 1535313 - RNA, 19 nt, Artificial Sequence
  Description of Artificial Sequence: Synthetic oligonucleotide
agucuacaaacucaugaag

SEQ ID NO: 1535314 - RNA, 19 nt, Artificial Sequence
  Description of Artificial Sequence: Synthetic oligonucleotide
caguuacaaauccacaugc

SEQ ID NO: 1535315 - RNA, 19 nt, Artificial Sequence
  Description of Artificial Sequence: Synthetic oligonucleotide
ugcuuaacuguuuccauca

SEQ ID NO: 1535316 - RNA, 19 nt, Artificial Sequence
  Description of Artificial Sequence: Synthetic oligonucleotide
cugagaacccaauauuuag

SEQ ID NO: 1535317 - RNA, 19 nt, Artificial Sequence
  Description of Artificial Sequence: Synthetic oligonucleotide
ucagacacgugacucagga

SEQ ID NO: 1535318 - RNA, 19 nt, Artificial Sequence
  Description of Artificial Sequence: Synthetic oligonucleotide
auaccauaugcauauaaaa

SEQ ID NO: 1535319 - RNA, 19 nt, Artificial Sequence
  Description of Artificial Sequence: Synthetic oligonucleotide
aguagagaaaaggugaaca

SEQ ID NO: 1535320 - RNA, 19 nt, Artificial Sequence
  Description of Artificial Sequence: Synthetic oligonucleotide
auaagcuuguggcugaaga

SEQ ID NO: 1535321 - RNA, 19 nt, Artificial Sequence
  Description of Artificial Sequence: Synthetic oligonucleotide
uacaaauccacaugcuuac

SEQ ID NO: 1535322 - RNA, 19 nt, Artificial Sequence
  Description of Artificial Sequence: Synthetic oligonucleotide
cagcucauaagcuuguggc

SEQ ID NO: 1535323 - RNA, 19 nt, Artificial Sequence
  Description of Artificial Sequence: Synthetic oligonucleotide
uacucgagcauaauaaaua

SEQ ID NO: 1535324 - RNA, 19 nt, Artificial Sequence
  Description of Artificial Sequence: Synthetic oligonucleotide
ugaacacgaagccguaucc

SEQ ID NO: 1535325 - RNA, 19 nt, Artificial Sequence
  Description of Artificial Sequence: Synthetic oligonucleotide
gucacaucaagucuuagga

SEQ ID NO: 1535326 - RNA, 19 nt, Artificial Sequence
  Description of Artificial Sequence: Synthetic oligonucleotide
ucgaucaggacuguaaaca

SEQ ID NO: 1535327 - RNA, 19 nt, Artificial Sequence
  Description of Artificial Sequence: Synthetic oligonucleotide
uaaaucuauagauacucuu

SEQ ID NO: 1535328 - RNA, 19 nt, Artificial Sequence
  Description of Artificial Sequence: Synthetic oligonucleotide
caagucuuaggauaaugac

SEQ ID NO: 1535329 - RNA, 19 nt, Artificial Sequence
  Description of Artificial Sequence: Synthetic oligonucleotide
auugacaguacaguaccac

SEQ ID NO: 1535330 - RNA, 19 nt, Artificial Sequence
  Description of Artificial Sequence: Synthetic oligonucleotide
ugcacugagaacccaauau

SEQ ID NO: 1535331 - RNA, 19 nt, Artificial Sequence
  Description of Artificial Sequence: Synthetic oligonucleotide
aacuacucgagcauaauaa

SEQ ID NO: 1535332 - RNA, 19 nt, Artificial Sequence
  Description of Artificial Sequence: Synthetic oligonucleotide
acguccacugugcaugucc

SEQ ID NO: 1535333 - RNA, 19 nt, Artificial Sequence
  Description of Artificial Sequence: Synthetic oligonucleotide
cuucaagacaaauaaaucu

SEQ ID NO: 1535334 - RNA, 19 nt, Artificial Sequence
  Description of Artificial Sequence: Synthetic oligonucleotide
ugccaguagagaaaaggug

SEQ ID NO: 1535335 - RNA, 19 nt, Artificial Sequence
  Description of Artificial Sequence: Synthetic oligonucleotide
uuagcucagaccuaaccaa

SEQ ID NO: 1535336 - RNA, 19 nt, Artificial Sequence
  Description of Artificial Sequence: Synthetic oligonucleotide
uacccuuagacccuggcaa

SEQ ID NO: 1535337 - RNA, 19 nt, Artificial Sequence
  Description of Artificial Sequence: Synthetic oligonucleotide
aaucgaucaggacuguaaa

SEQ ID NO: 1535338 - RNA, 19 nt, Artificial Sequence
  Description of Artificial Sequence: Synthetic oligonucleotide
ucaacgcucacaguaaaca

SEQ ID NO: 1535339 - RNA, 19 nt, Artificial Sequence
  Description of Artificial Sequence: Synthetic oligonucleotide
ugugaguucugcuuccuac

SEQ ID NO: 1535340 - RNA, 19 nt, Artificial Sequence
  Description of Artificial Sequence: Synthetic oligonucleotide
gagcagaccccaaagagag

SEQ ID NO: 1535341 - RNA, 19 nt, Artificial Sequence
  Description of Artificial Sequence: Synthetic oligonucleotide
uauuugcuagagaugugca

SEQ ID NO: 1535342 - RNA, 19 nt, Artificial Sequence
  Description of Artificial Sequence: Synthetic oligonucleotide
agaccuaaccaaccaagag

SEQ ID NO: 1535343 - RNA, 19 nt, Artificial Sequence
  Description of Artificial Sequence: Synthetic oligonucleotide
aucgaucaggacuguaaac

SEQ ID NO: 1535344 - RNA, 19 nt, Artificial Sequence
  Description of Artificial Sequence: Synthetic oligonucleotide
aguguguguguguaguaag

SEQ ID NO: 1535345 - RNA, 19 nt, Artificial Sequence
  Description of Artificial Sequence: Synthetic oligonucleotide
cuugagacccguucauugg

SEQ ID NO: 1535346 - RNA, 19 nt, Artificial Sequence
  Description of Artificial Sequence: Synthetic oligonucleotide
aaguaagccgucaacucag

SEQ ID NO: 1535347 - RNA, 19 nt, Artificial Sequence
  Description of Artificial Sequence: Synthetic oligonucleotide
aaaucuauagauacucuuu

SEQ ID NO: 1535348 - RNA, 19 nt, Artificial Sequence
  Description of Artificial Sequence: Synthetic oligonucleotide
augauaucaugguucaccu

SEQ ID NO: 1535349 - RNA, 19 nt, Artificial Sequence
  Description of Artificial Sequence: Synthetic oligonucleotide
aaggugaacacgaagccgu

SEQ ID NO: 1535350 - RNA, 19 nt, Artificial Sequence
  Description of Artificial Sequence: Synthetic oligonucleotide
guagagaaaaggugaacac

SEQ ID NO: 1535351 - RNA, 19 nt, Artificial Sequence
  Description of Artificial Sequence: Synthetic oligonucleotide
guuagcucagaccuaacca

SEQ ID NO: 1535352 - RNA, 19 nt, Artificial Sequence
  Description of Artificial Sequence: Synthetic oligonucleotide
uguagaugucuccucccag

SEQ ID NO: 1535353 - RNA, 19 nt, Artificial Sequence
  Description of Artificial Sequence: Synthetic oligonucleotide
uguaacuacucgagcauaa

SEQ ID NO: 1535354 - RNA, 19 nt, Artificial Sequence
  Description of Artificial Sequence: Synthetic oligonucleotide
aggucacuuaaaaugaguc

SEQ ID NO: 1535355 - RNA, 19 nt, Artificial Sequence
  Description of Artificial Sequence: Synthetic oligonucleotide
uggccaaucagcucauaag

SEQ ID NO: 1535356 - RNA, 19 nt, Artificial Sequence
  Description of Artificial Sequence: Synthetic oligonucleotide
gaagaaguaagccgucaac

SEQ ID NO: 1535357 - RNA, 19 nt, Artificial Sequence
  Description of Artificial Sequence: Synthetic oligonucleotide
ugacaguacaguaccacuc

SEQ ID NO: 1535358 - RNA, 19 nt, Artificial Sequence
  Description of Artificial Sequence: Synthetic oligonucleotide
uuaggauaaugacuugguc

SEQ ID NO: 1535359 - RNA, 19 nt, Artificial Sequence
  Description of Artificial Sequence: Synthetic oligonucleotide
cagucaguuacaaauccac

SEQ ID NO: 1535360 - RNA, 19 nt, Artificial Sequence
  Description of Artificial Sequence: Synthetic oligonucleotide
uccaacacguccacugugc

SEQ ID NO: 1535361 - RNA, 19 nt, Artificial Sequence
  Description of Artificial Sequence: Synthetic oligonucleotide
acaugcuuacauucauagg

SEQ ID NO: 1535362 - RNA, 19 nt, Artificial Sequence
  Description of Artificial Sequence: Synthetic oligonucleotide
aacucagacacgugacuca

SEQ ID NO: 1535363 - RNA, 19 nt, Artificial Sequence
  Description of Artificial Sequence: Synthetic oligonucleotide
cucaguguucaguagucag

SEQ ID NO: 1535364 - RNA, 19 nt, Artificial Sequence
  Description of Artificial Sequence: Synthetic oligonucleotide
agugauugacaguacagua

SEQ ID NO: 1535365 - RNA, 19 nt, Artificial Sequence
  Description of Artificial Sequence: Synthetic oligonucleotide
auagugauugacaguacag

SEQ ID NO: 1535366 - RNA, 19 nt, Artificial Sequence
  Description of Artificial Sequence: Synthetic oligonucleotide
uucaccuugagacccguuc

SEQ ID NO: 1535367 - RNA, 19 nt, Artificial Sequence
  Description of Artificial Sequence: Synthetic oligonucleotide
uugacaguacaguaccacu

SEQ ID NO: 1535368 - RNA, 19 nt, Artificial Sequence
  Description of Artificial Sequence: Synthetic oligonucleotide
agucuuaggauaaugacuu

SEQ ID NO: 1535369 - RNA, 19 nt, Artificial Sequence
  Description of Artificial Sequence: Synthetic oligonucleotide
uuacauucauagguggggc

SEQ ID NO: 1535370 - RNA, 19 nt, Artificial Sequence
  Description of Artificial Sequence: Synthetic oligonucleotide
aaugacuuggucagauucu

SEQ ID NO: 1535371 - RNA, 19 nt, Artificial Sequence
  Description of Artificial Sequence: Synthetic oligonucleotide
agcaccgagccguuacugc

SEQ ID NO: 1535372 - RNA, 19 nt, Artificial Sequence
  Description of Artificial Sequence: Synthetic oligonucleotide
agaagcauauguucuacua

SEQ ID NO: 1535373 - RNA, 19 nt, Artificial Sequence
  Description of Artificial Sequence: Synthetic oligonucleotide
guguucaguagucaguaac

SEQ ID NO: 1535374 - RNA, 19 nt, Artificial Sequence
  Description of Artificial Sequence: Synthetic oligonucleotide
aagaguguguguguguagu

SEQ ID NO: 1535375 - RNA, 19 nt, Artificial Sequence
  Description of Artificial Sequence: Synthetic oligonucleotide
agcucaaaaggcuggaaau

SEQ ID NO: 1535376 - RNA, 19 nt, Artificial Sequence
  Description of Artificial Sequence: Synthetic oligonucleotide
uagauacucuuuuccaccu

SEQ ID NO: 1535377 - RNA, 19 nt, Artificial Sequence
  Description of Artificial Sequence: Synthetic oligonucleotide
ugacucaggacagagcaga

SEQ ID NO: 1535378 - RNA, 19 nt, Artificial Sequence
  Description of Artificial Sequence: Synthetic oligonucleotide
uaacuacucgagcauaaua

SEQ ID NO: 1535379 - RNA, 19 nt, Artificial Sequence
  Description of Artificial Sequence: Synthetic oligonucleotide
cacucaagugcaaaauaac

SEQ ID NO: 1535380 - RNA, 19 nt, Artificial Sequence
  Description of Artificial Sequence: Synthetic oligonucleotide
ucaccuugagacccguuca

SEQ ID NO: 1535381 - RNA, 19 nt, Artificial Sequence
  Description of Artificial Sequence: Synthetic oligonucleotide
gaagcauauguucuacuaa

SEQ ID NO: 1535382 - RNA, 19 nt, Artificial Sequence
  Description of Artificial Sequence: Synthetic oligonucleotide
caugguucaccuugagacc

SEQ ID NO: 1535383 - RNA, 19 nt, Artificial Sequence
  Description of Artificial Sequence: Synthetic oligonucleotide
aagugugugugugugugug

SEQ ID NO: 1535384 - RNA, 19 nt, Artificial Sequence
  Description of Artificial Sequence: Synthetic oligonucleotide
aacccaugaaccaggccac

SEQ ID NO: 1535385 - RNA, 19 nt, Artificial Sequence
  Description of Artificial Sequence: Synthetic oligonucleotide
augagucauagugauugac

SEQ ID NO: 1535386 - RNA, 19 nt, Artificial Sequence
  Description of Artificial Sequence: Synthetic oligonucleotide
guucauuggccugacuugg

SEQ ID NO: 1535387 - RNA, 19 nt, Artificial Sequence
  Description of Artificial Sequence: Synthetic oligonucleotide
caaagagaguugugguucc

SEQ ID NO: 1535388 - RNA, 19 nt, Artificial Sequence
  Description of Artificial Sequence: Synthetic oligonucleotide
auuggccugacuuggugug

SEQ ID NO: 1535389 - RNA, 19 nt, Artificial Sequence
  Description of Artificial Sequence: Synthetic oligonucleotide
guaagugugugugugugug

SEQ ID NO: 1535390 - RNA, 19 nt, Artificial Sequence
  Description of Artificial Sequence: Synthetic oligonucleotide
uagugauugacaguacagu

SEQ ID NO: 1535391 - RNA, 19 nt, Artificial Sequence
  Description of Artificial Sequence: Synthetic oligonucleotide
acauucauagguggggcuc

SEQ ID NO: 1535392 - RNA, 19 nt, Artificial Sequence
  Description of Artificial Sequence: Synthetic oligonucleotide
ucccacuucacuucuguaa

SEQ ID NO: 1535393 - RNA, 19 nt, Artificial Sequence
  Description of Artificial Sequence: Synthetic oligonucleotide
uaguaagugugugugugug

SEQ ID NO: 1535394 - RNA, 19 nt, Artificial Sequence
  Description of Artificial Sequence: Synthetic oligonucleotide
ggugaagcuagacauccag

SEQ ID NO: 1535395 - RNA, 19 nt, Artificial Sequence
  Description of Artificial Sequence: Synthetic oligonucleotide
gucauagugauugacagua

SEQ ID NO: 1535396 - RNA, 19 nt, Artificial Sequence
  Description of Artificial Sequence: Synthetic oligonucleotide
gaguugaaaggucacuuaa

SEQ ID NO: 1535397 - RNA, 19 nt, Artificial Sequence
  Description of Artificial Sequence: Synthetic oligonucleotide
agaacuaauuuaacuauau

SEQ ID NO: 1535398 - RNA, 19 nt, Artificial Sequence
  Description of Artificial Sequence: Synthetic oligonucleotide
uuggccaaucagcucauaa

SEQ ID NO: 1535399 - RNA, 19 nt, Artificial Sequence
  Description of Artificial Sequence: Synthetic oligonucleotide
acuacucgagcauaauaaa

SEQ ID NO: 1535400 - RNA, 19 nt, Artificial Sequence
  Description of Artificial Sequence: Synthetic oligonucleotide
ugagacccguucauuggcc

SEQ ID NO: 1535401 - RNA, 19 nt, Artificial Sequence
  Description of Artificial Sequence: Synthetic oligonucleotide
uucuuugaaauaugcccuc

SEQ ID NO: 1535402 - RNA, 19 nt, Artificial Sequence
  Description of Artificial Sequence: Synthetic oligonucleotide
gaguugugguuccauucag

SEQ ID NO: 1535403 - RNA, 19 nt, Artificial Sequence
  Description of Artificial Sequence: Synthetic oligonucleotide
caaaggaguuagcucagac

SEQ ID NO: 1535404 - RNA, 19 nt, Artificial Sequence
  Description of Artificial Sequence: Synthetic oligonucleotide
acucaugaaggugucagcu

SEQ ID NO: 1535405 - RNA, 19 nt, Artificial Sequence
  Description of Artificial Sequence: Synthetic oligonucleotide
gaugugcaaaguucaguga

SEQ ID NO: 1535406 - RNA, 19 nt, Artificial Sequence
  Description of Artificial Sequence: Synthetic oligonucleotide
cuucuguaacuacucgagc

SEQ ID NO: 1535407 - RNA, 19 nt, Artificial Sequence
  Description of Artificial Sequence: Synthetic oligonucleotide
aguagucaguaacaguuuu

SEQ ID NO: 1535408 - RNA, 19 nt, Artificial Sequence
  Description of Artificial Sequence: Synthetic oligonucleotide
aagaacuaauuuaacuaua

SEQ ID NO: 1535409 - RNA, 19 nt, Artificial Sequence
  Description of Artificial Sequence: Synthetic oligonucleotide
ucagugaaacuuugaacuu

SEQ ID NO: 1535410 - RNA, 19 nt, Artificial Sequence
  Description of Artificial Sequence: Synthetic oligonucleotide
uguguguguguguuguuau

SEQ ID NO: 1535411 - RNA, 19 nt, Artificial Sequence
  Description of Artificial Sequence: Synthetic oligonucleotide
cuuuaauauuguaaguggu

SEQ ID NO: 1535412 - RNA, 19 nt, Artificial Sequence
  Description of Artificial Sequence: Synthetic oligonucleotide
aggaaaagucacaaagucu

SEQ ID NO: 1535413 - RNA, 19 nt, Artificial Sequence
  Description of Artificial Sequence: Synthetic oligonucleotide
gugauugacaguacaguac

SEQ ID NO: 1535414 - RNA, 19 nt, Artificial Sequence
  Description of Artificial Sequence: Synthetic oligonucleotide
ggaaaagucacaaagucua

SEQ ID NO: 1535415 - RNA, 19 nt, Artificial Sequence
  Description of Artificial Sequence: Synthetic oligonucleotide
ugaguugaaaggucacuua

SEQ ID NO: 1535416 - RNA, 19 nt, Artificial Sequence
  Description of Artificial Sequence: Synthetic oligonucleotide
ucugcuuaacuguuuccau

SEQ ID NO: 1535417 - RNA, 19 nt, Artificial Sequence
  Description of Artificial Sequence: Synthetic oligonucleotide
agcucauaagcuuguggcu

SEQ ID NO: 1535418 - RNA, 19 nt, Artificial Sequence
  Description of Artificial Sequence: Synthetic oligonucleotide
cuacaaacucaugaaggug

SEQ ID NO: 1535419 - RNA, 19 nt, Artificial Sequence
  Description of Artificial Sequence: Synthetic oligonucleotide
auaaaucuauagauacucu

SEQ ID NO: 1535420 - RNA, 19 nt, Artificial Sequence
  Description of Artificial Sequence: Synthetic oligonucleotide
caguacaguaccacucaag

SEQ ID NO: 1535421 - RNA, 19 nt, Artificial Sequence
  Description of Artificial Sequence: Synthetic oligonucleotide
gagccguuacugcacacug

SEQ ID NO: 1535422 - RNA, 19 nt, Artificial Sequence
  Description of Artificial Sequence: Synthetic oligonucleotide
uguggugaagcuagacauc

SEQ ID NO: 1535423 - RNA, 19 nt, Artificial Sequence
  Description of Artificial Sequence: Synthetic oligonucleotide
aaccaagagugugugugug

SEQ ID NO: 1535424 - RNA, 19 nt, Artificial Sequence
  Description of Artificial Sequence: Synthetic oligonucleotide
auuugcuagagaugugcaa

SEQ ID NO: 1535425 - RNA, 19 nt, Artificial Sequence
  Description of Artificial Sequence: Synthetic oligonucleotide
uuccaccucgcuuugcacu

SEQ ID NO: 1535426 - RNA, 19 nt, Artificial Sequence
  Description of Artificial Sequence: Synthetic oligonucleotide
ugcuuccuacccuuagacc

SEQ ID NO: 1535427 - RNA, 19 nt, Artificial Sequence
  Description of Artificial Sequence: Synthetic oligonucleotide
acgaagccguauccaaaac

SEQ ID NO: 1535428 - RNA, 19 nt, Artificial Sequence
  Description of Artificial Sequence: Synthetic oligonucleotide
gacacgugacucaggacag

SEQ ID NO: 1535429 - RNA, 19 nt, Artificial Sequence
  Description of Artificial Sequence: Synthetic oligonucleotide
guucuacuaacuuccaucu

SEQ ID NO: 1535430 - RNA, 19 nt, Artificial Sequence
  Description of Artificial Sequence: Synthetic oligonucleotide
ucauagugauugacaguac

SEQ ID NO: 1535431 - RNA, 19 nt, Artificial Sequence
  Description of Artificial Sequence: Synthetic oligonucleotide
aguaacaguuuugcugcuc

SEQ ID NO: 1535432 - RNA, 19 nt, Artificial Sequence
  Description of Artificial Sequence: Synthetic oligonucleotide
gggcuuuucaaaggaaucg

SEQ ID NO: 1535433 - RNA, 19 nt, Artificial Sequence
  Description of Artificial Sequence: Synthetic oligonucleotide
caaaggaaucgaucaggac

SEQ ID NO: 1535434 - RNA, 19 nt, Artificial Sequence
  Description of Artificial Sequence: Synthetic oligonucleotide
uguuguuauuuagaagcau

SEQ ID NO: 1535435 - RNA, 19 nt, Artificial Sequence
  Description of Artificial Sequence: Synthetic oligonucleotide
aucaggacuguaaacacaa

SEQ ID NO: 1535436 - RNA, 19 nt, Artificial Sequence
  Description of Artificial Sequence: Synthetic oligonucleotide
aguaagugugugugugugu

SEQ ID NO: 1535437 - RNA, 19 nt, Artificial Sequence
  Description of Artificial Sequence: Synthetic oligonucleotide
gaaucgaucaggacuguaa

SEQ ID NO: 1535438 - RNA, 19 nt, Artificial Sequence
  Description of Artificial Sequence: Synthetic oligonucleotide
auacucuuuuccaccucgc

SEQ ID NO: 1535439 - RNA, 19 nt, Artificial Sequence
  Description of Artificial Sequence: Synthetic oligonucleotide
guagaugucuccucccaga

SEQ ID NO: 1535440 - RNA, 19 nt, Artificial Sequence
  Description of Artificial Sequence: Synthetic oligonucleotide
aacaguuuugcugcuccaa

SEQ ID NO: 1535441 - RNA, 19 nt, Artificial Sequence
  Description of Artificial Sequence: Synthetic oligonucleotide
acaaacucaugaagguguc

SEQ ID NO: 1535442 - RNA, 19 nt, Artificial Sequence
  Description of Artificial Sequence: Synthetic oligonucleotide
gcucccuacagucaguuac

SEQ ID NO: 1535443 - RNA, 19 nt, Artificial Sequence
  Description of Artificial Sequence: Synthetic oligonucleotide
aucaacgcucacaguaaac

SEQ ID NO: 1535444 - RNA, 19 nt, Artificial Sequence
  Description of Artificial Sequence: Synthetic oligonucleotide
uguguguguguguguguug

SEQ ID NO: 1535445 - RNA, 19 nt, Artificial Sequence
  Description of Artificial Sequence: Synthetic oligonucleotide
cucgcuuugcacugagaac

SEQ ID NO: 1535446 - RNA, 19 nt, Artificial Sequence
  Description of Artificial Sequence: Synthetic oligonucleotide
augcccucauuucugcuca

SEQ ID NO: 1535447 - RNA, 19 nt, Artificial Sequence
  Description of Artificial Sequence: Synthetic oligonucleotide
ggucacuuaaaaugaguca

SEQ ID NO: 1535448 - RNA, 19 nt, Artificial Sequence
  Description of Artificial Sequence: Synthetic oligonucleotide
caacgguauuuuaaagcuc

SEQ ID NO: 1535449 - RNA, 19 nt, Artificial Sequence
  Description of Artificial Sequence: Synthetic oligonucleotide
uggaaaugacugcauuguu

SEQ ID NO: 1535450 - RNA, 19 nt, Artificial Sequence
  Description of Artificial Sequence: Synthetic oligonucleotide
aacgcucacaguaaacauu

SEQ ID NO: 1535451 - RNA, 19 nt, Artificial Sequence
  Description of Artificial Sequence: Synthetic oligonucleotide
uaacaguuuugcugcucca

SEQ ID NO: 1535452 - RNA, 19 nt, Artificial Sequence
  Description of Artificial Sequence: Synthetic oligonucleotide
caagaguguguguguguag

SEQ ID NO: 1535453 - RNA, 19 nt, Artificial Sequence
  Description of Artificial Sequence: Synthetic oligonucleotide
cucaacucaguguucagua

SEQ ID NO: 1535454 - RNA, 19 nt, Artificial Sequence
  Description of Artificial Sequence: Synthetic oligonucleotide
agagcagaccccaaagaga

SEQ ID NO: 1535455 - RNA, 19 nt, Artificial Sequence
  Description of Artificial Sequence: Synthetic oligonucleotide
cacuucuguaacuacucga

SEQ ID NO: 1535456 - RNA, 19 nt, Artificial Sequence
  Description of Artificial Sequence: Synthetic oligonucleotide
uaagugugugugugugugu

SEQ ID NO: 1535457 - RNA, 19 nt, Artificial Sequence
  Description of Artificial Sequence: Synthetic oligonucleotide
gaucaggacuguaaacaca

SEQ ID NO: 1535458 - RNA, 19 nt, Artificial Sequence
  Description of Artificial Sequence: Synthetic oligonucleotide
cuuaggauaaugacuuggu

SEQ ID NO: 1535459 - RNA, 19 nt, Artificial Sequence
  Description of Artificial Sequence: Synthetic oligonucleotide
gauaaugacuuggucagau

SEQ ID NO: 1535460 - RNA, 19 nt, Artificial Sequence
  Description of Artificial Sequence: Synthetic oligonucleotide
cucgagcauaauaaauaca

SEQ ID NO: 1535461 - RNA, 19 nt, Artificial Sequence
  Description of Artificial Sequence: Synthetic oligonucleotide
uucauuggccugacuuggu

SEQ ID NO: 1535462 - RNA, 19 nt, Artificial Sequence
  Description of Artificial Sequence: Synthetic oligonucleotide
gacuuggugugaguucugc

SEQ ID NO: 1535463 - RNA, 19 nt, Artificial Sequence
  Description of Artificial Sequence: Synthetic oligonucleotide
uucacuuguuuggucacau

SEQ ID NO: 1535464 - RNA, 19 nt, Artificial Sequence
  Description of Artificial Sequence: Synthetic oligonucleotide
agaugauaucaugguucac

SEQ ID NO: 1535465 - RNA, 19 nt, Artificial Sequence
  Description of Artificial Sequence: Synthetic oligonucleotide
ugugugugugugugugugu

SEQ ID NO: 1535466 - RNA, 19 nt, Artificial Sequence
  Description of Artificial Sequence: Synthetic oligonucleotide
gaucaacgcucacaguaaa

SEQ ID NO: 1535467 - RNA, 19 nt, Artificial Sequence
  Description of Artificial Sequence: Synthetic oligonucleotide
accaagagugugugugugu

SEQ ID NO: 1535468 - RNA, 19 nt, Artificial Sequence
  Description of Artificial Sequence: Synthetic oligonucleotide
cuuggucagauucuuugaa

SEQ ID NO: 1535469 - RNA, 19 nt, Artificial Sequence
  Description of Artificial Sequence: Synthetic oligonucleotide
agagaguugugguuccauu

SEQ ID NO: 1535470 - RNA, 19 nt, Artificial Sequence
  Description of Artificial Sequence: Synthetic oligonucleotide
ugcauuggccaaucagcuc

SEQ ID NO: 1535471 - RNA, 19 nt, Artificial Sequence
  Description of Artificial Sequence: Synthetic oligonucleotide
uuuccaccucgcuuugcac

SEQ ID NO: 1535472 - RNA, 19 nt, Artificial Sequence
  Description of Artificial Sequence: Synthetic oligonucleotide
cacgugacucaggacagag

SEQ ID NO: 1535473 - RNA, 19 nt, Artificial Sequence
  Description of Artificial Sequence: Synthetic oligonucleotide
gugugugugugugugugug

SEQ ID NO: 1535474 - RNA, 19 nt, Artificial Sequence
  Description of Artificial Sequence: Synthetic oligonucleotide
uggugaagcuagacaucca

SEQ ID NO: 1535475 - RNA, 19 nt, Artificial Sequence
  Description of Artificial Sequence: Synthetic oligonucleotide
agugugugugugugugugu

SEQ ID NO: 1535476 - RNA, 19 nt, Artificial Sequence
  Description of Artificial Sequence: Synthetic oligonucleotide
acugagaacccaauauuua

SEQ ID NO: 1535477 - RNA, 19 nt, Artificial Sequence
  Description of Artificial Sequence: Synthetic oligonucleotide
ccuugagacccguucauug

SEQ ID NO: 1535478 - RNA, 19 nt, Artificial Sequence
  Description of Artificial Sequence: Synthetic oligonucleotide
cagaccuaaccaaccaaga

SEQ ID NO: 1535479 - RNA, 19 nt, Artificial Sequence
  Description of Artificial Sequence: Synthetic oligonucleotide
aguugaaaggucacuuaaa

SEQ ID NO: 1535480 - RNA, 19 nt, Artificial Sequence
  Description of Artificial Sequence: Synthetic oligonucleotide
uugagacaacgguauuuua

SEQ ID NO: 1535481 - RNA, 19 nt, Artificial Sequence
  Description of Artificial Sequence: Synthetic oligonucleotide
cuuugcacugagaacccaa

SEQ ID NO: 1535482 - RNA, 19 nt, Artificial Sequence
  Description of Artificial Sequence: Synthetic oligonucleotide
uacuaacuuccaucugguc

SEQ ID NO: 1535483 - RNA, 19 nt, Artificial Sequence
  Description of Artificial Sequence: Synthetic oligonucleotide
gucuuaggauaaugacuug

SEQ ID NO: 1535484 - RNA, 19 nt, Artificial Sequence
  Description of Artificial Sequence: Synthetic oligonucleotide
ccaaagagaguugugguuc

SEQ ID NO: 1535485 - RNA, 19 nt, Artificial Sequence
  Description of Artificial Sequence: Synthetic oligonucleotide
guguuguuauuuagaagca

SEQ ID NO: 1535486 - RNA, 19 nt, Artificial Sequence
  Description of Artificial Sequence: Synthetic oligonucleotide
gagcaguggauuuucacuu

SEQ ID NO: 1535487 - RNA, 19 nt, Artificial Sequence
  Description of Artificial Sequence: Synthetic oligonucleotide
uguuuggaucaacgcucac

SEQ ID NO: 1535488 - RNA, 19 nt, Artificial Sequence
  Description of Artificial Sequence: Synthetic oligonucleotide
uaacuguuuccaucacuuu

SEQ ID NO: 1535489 - RNA, 19 nt, Artificial Sequence
  Description of Artificial Sequence: Synthetic oligonucleotide
gaacacgaagccguaucca

SEQ ID NO: 1535490 - RNA, 19 nt, Artificial Sequence
  Description of Artificial Sequence: Synthetic oligonucleotide
guguagaugucuccuccca

SEQ ID NO: 1535491 - RNA, 19 nt, Artificial Sequence
  Description of Artificial Sequence: Synthetic oligonucleotide
agccguuacugcacacugc

SEQ ID NO: 1535492 - RNA, 19 nt, Artificial Sequence
  Description of Artificial Sequence: Synthetic oligonucleotide
agacccguucauuggccug

SEQ ID NO: 1535493 - RNA, 19 nt, Artificial Sequence
  Description of Artificial Sequence: Synthetic oligonucleotide
gauugacaguacaguacca

SEQ ID NO: 1535494 - RNA, 19 nt, Artificial Sequence
  Description of Artificial Sequence: Synthetic oligonucleotide
acgugacucaggacagagc

SEQ ID NO: 1535495 - RNA, 19 nt, Artificial Sequence
  Description of Artificial Sequence: Synthetic oligonucleotide
aagccguauccaaaaccca

SEQ ID NO: 1535496 - RNA, 19 nt, Artificial Sequence
  Description of Artificial Sequence: Synthetic oligonucleotide
auaucaugguucaccuuga

SEQ ID NO: 1535497 - RNA, 19 nt, Artificial Sequence
  Description of Artificial Sequence: Synthetic oligonucleotide
cacgaagccguauccaaaa

SEQ ID NO: 1535498 - RNA, 19 nt, Artificial Sequence
  Description of Artificial Sequence: Synthetic oligonucleotide
aguguucaguagucaguaa

SEQ ID NO: 1535499 - RNA, 19 nt, Artificial Sequence
  Description of Artificial Sequence: Synthetic oligonucleotide
ugauaucaugguucaccuu

SEQ ID NO: 1535500 - RNA, 19 nt, Artificial Sequence
  Description of Artificial Sequence: Synthetic oligonucleotide
gaguguguguguguaguaa

SEQ ID NO: 1535501 - RNA, 19 nt, Artificial Sequence
  Description of Artificial Sequence: Synthetic oligonucleotide
gagcugucacaucaagucu

SEQ ID NO: 1535502 - RNA, 19 nt, Artificial Sequence
  Description of Artificial Sequence: Synthetic oligonucleotide
cuacccuuagacccuggca

SEQ ID NO: 1535503 - RNA, 19 nt, Artificial Sequence
  Description of Artificial Sequence: Synthetic oligonucleotide
agaguguguguguguagua

SEQ ID NO: 1535504 - RNA, 19 nt, Artificial Sequence
  Description of Artificial Sequence: Synthetic oligonucleotide
aguugugguuccauucaga

SEQ ID NO: 1535505 - RNA, 19 nt, Artificial Sequence
  Description of Artificial Sequence: Synthetic oligonucleotide
agcugucacaucaagucuu

SEQ ID NO: 1535506 - RNA, 19 nt, Artificial Sequence
  Description of Artificial Sequence: Synthetic oligonucleotide
uucucacagcccguugaga

SEQ ID NO: 1535507 - RNA, 19 nt, Artificial Sequence
  Description of Artificial Sequence: Synthetic oligonucleotide
caucugguccccuuuuaaa

SEQ ID NO: 1535508 - RNA, 19 nt, Artificial Sequence
  Description of Artificial Sequence: Synthetic oligonucleotide
cuacucgagcauaauaaau

SEQ ID NO: 1535509 - RNA, 19 nt, Artificial Sequence
  Description of Artificial Sequence: Synthetic oligonucleotide
cuacuaacuuccaucuggu

SEQ ID NO: 1535510 - RNA, 19 nt, Artificial Sequence
  Description of Artificial Sequence: Synthetic oligonucleotide
acucaguguucaguaguca

SEQ ID NO: 1535511 - RNA, 19 nt, Artificial Sequence
  Description of Artificial Sequence: Synthetic oligonucleotide
gccguuacugcacacugca

SEQ ID NO: 1535512 - RNA, 19 nt, Artificial Sequence
  Description of Artificial Sequence: Synthetic oligonucleotide
accaaccaagagugugugu

SEQ ID NO: 1535513 - RNA, 19 nt, Artificial Sequence
  Description of Artificial Sequence: Synthetic oligonucleotide
cauguugaauuugguguca

SEQ ID NO: 1535514 - RNA, 19 nt, Artificial Sequence
  Description of Artificial Sequence: Synthetic oligonucleotide
gagaaaaggugaacacgaa

SEQ ID NO: 1535515 - RNA, 19 nt, Artificial Sequence
  Description of Artificial Sequence: Synthetic oligonucleotide
cauaagcuuguggcugaag

SEQ ID NO: 1535516 - RNA, 19 nt, Artificial Sequence
  Description of Artificial Sequence: Synthetic oligonucleotide
guaguaagugugugugugu

SEQ ID NO: 1535517 - RNA, 19 nt, Artificial Sequence
  Description of Artificial Sequence: Synthetic oligonucleotide
agccguauccaaaacccau

SEQ ID NO: 1535518 - RNA, 19 nt, Artificial Sequence
  Description of Artificial Sequence: Synthetic oligonucleotide
gugacucaggacagagcag

SEQ ID NO: 1535519 - RNA, 19 nt, Artificial Sequence
  Description of Artificial Sequence: Synthetic oligonucleotide
cucagaccuaaccaaccaa

SEQ ID NO: 1535520 - RNA, 19 nt, Artificial Sequence
  Description of Artificial Sequence: Synthetic oligonucleotide
cacugagaacccaauauuu

SEQ ID NO: 1535521 - RNA, 19 nt, Artificial Sequence
  Description of Artificial Sequence: Synthetic oligonucleotide
auucauagguggggcucag

SEQ ID NO: 1535522 - RNA, 19 nt, Artificial Sequence
  Description of Artificial Sequence: Synthetic oligonucleotide
caccgagccguuacugcac

SEQ ID NO: 1535523 - RNA, 19 nt, Artificial Sequence
  Description of Artificial Sequence: Synthetic oligonucleotide
ucacagagcaguggauuuu

SEQ ID NO: 1535524 - RNA, 19 nt, Artificial Sequence
  Description of Artificial Sequence: Synthetic oligonucleotide
cucacagcccguugagaca

SEQ ID NO: 1535525 - RNA, 19 nt, Artificial Sequence
  Description of Artificial Sequence: Synthetic oligonucleotide
accgagccguuacugcaca

SEQ ID NO: 1535526 - RNA, 19 nt, Artificial Sequence
  Description of Artificial Sequence: Synthetic oligonucleotide
cguucauuggccugacuug

SEQ ID NO: 1535527 - RNA, 19 nt, Artificial Sequence
  Description of Artificial Sequence: Synthetic oligonucleotide
cauucauagguggggcuca

SEQ ID NO: 1535528 - RNA, 19 nt, Artificial Sequence
  Description of Artificial Sequence: Synthetic oligonucleotide
auguugaauuuggugucau

SEQ ID NO: 1535529 - RNA, 19 nt, Artificial Sequence
  Description of Artificial Sequence: Synthetic oligonucleotide
gacccguucauuggccuga

SEQ ID NO: 1535530 - RNA, 19 nt, Artificial Sequence
  Description of Artificial Sequence: Synthetic oligonucleotide
gucauucaucacagagcag

SEQ ID NO: 1535531 - RNA, 19 nt, Artificial Sequence
  Description of Artificial Sequence: Synthetic oligonucleotide
cauaugcauuggccaauca

SEQ ID NO: 1535532 - RNA, 19 nt, Artificial Sequence
  Description of Artificial Sequence: Synthetic oligonucleotide
caguguucaguagucagua

SEQ ID NO: 1535533 - RNA, 19 nt, Artificial Sequence
  Description of Artificial Sequence: Synthetic oligonucleotide
aagugguauauggcacuuu

SEQ ID NO: 1535534 - RNA, 19 nt, Artificial Sequence
  Description of Artificial Sequence: Synthetic oligonucleotide
gcucagaccuaaccaacca

SEQ ID NO: 1535535 - RNA, 19 nt, Artificial Sequence
  Description of Artificial Sequence: Synthetic oligonucleotide
ucauaagcuuguggcugaa

SEQ ID NO: 1535536 - RNA, 19 nt, Artificial Sequence
  Description of Artificial Sequence: Synthetic oligonucleotide
uguguguguguguguuguu

SEQ ID NO: 1535537 - RNA, 19 nt, Artificial Sequence
  Description of Artificial Sequence: Synthetic oligonucleotide
ccuuagacccuggcaaagg

SEQ ID NO: 1535538 - RNA, 19 nt, Artificial Sequence
  Description of Artificial Sequence: Synthetic oligonucleotide
uuggccugacuugguguga

SEQ ID NO: 1535539 - RNA, 19 nt, Artificial Sequence
  Description of Artificial Sequence: Synthetic oligonucleotide
gaguucugcuuccuacccu

SEQ ID NO: 1535540 - RNA, 19 nt, Artificial Sequence
  Description of Artificial Sequence: Synthetic oligonucleotide
cgagcauaauaaauacauc

SEQ ID NO: 1535541 - RNA, 19 nt, Artificial Sequence
  Description of Artificial Sequence: Synthetic oligonucleotide
ggcacuuuaaggacaggaa

SEQ ID NO: 1535542 - RNA, 19 nt, Artificial Sequence
  Description of Artificial Sequence: Synthetic oligonucleotide
caaacucaugaagguguca

SEQ ID NO: 1535543 - RNA, 19 nt, Artificial Sequence
  Description of Artificial Sequence: Synthetic oligonucleotide
cuuccuacccuuagacccu

SEQ ID NO: 1535544 - RNA, 19 nt, Artificial Sequence
  Description of Artificial Sequence: Synthetic oligonucleotide
cagcuugaucaagucccag

SEQ ID NO: 1535545 - RNA, 19 nt, Artificial Sequence
  Description of Artificial Sequence: Synthetic oligonucleotide
guguguguguguguguugu

SEQ ID NO: 1535546 - RNA, 19 nt, Artificial Sequence
  Description of Artificial Sequence: Synthetic oligonucleotide
guguguguguguguuguua

SEQ ID NO: 1535547 - RNA, 19 nt, Artificial Sequence
  Description of Artificial Sequence: Synthetic oligonucleotide
gccguauccaaaacccaug

SEQ ID NO: 1535548 - RNA, 19 nt, Artificial Sequence
  Description of Artificial Sequence: Synthetic oligonucleotide
cucccagaugcaggggcag

SEQ ID NO: 1535549 - RNA, 19 nt, Artificial Sequence
  Description of Artificial Sequence: Synthetic oligonucleotide
ccucgcuuugcacugagaa

SEQ ID NO: 1535550 - RNA, 19 nt, Artificial Sequence
  Description of Artificial Sequence: Synthetic oligonucleotide
ccuacccuuagacccuggc

SEQ ID NO: 1535551 - RNA, 19 nt, Artificial Sequence
  Description of Artificial Sequence: Synthetic oligonucleotide
gcaccgagccguuacugca

SEQ ID NO: 1535552 - RNA, 19 nt, Artificial Sequence
  Description of Artificial Sequence: Synthetic oligonucleotide
gaguuagcucagaccuaac

SEQ ID NO: 1535553 - RNA, 19 nt, Artificial Sequence
  Description of Artificial Sequence: Synthetic oligonucleotide
ggaucaacgcucacaguaa

SEQ ID NO: 1535554 - RNA, 19 nt, Artificial Sequence
  Description of Artificial Sequence: Synthetic oligonucleotide
agcuagacauccaggugua

SEQ ID NO: 1535555 - RNA, 19 nt, Artificial Sequence
  Description of Artificial Sequence: Synthetic oligonucleotide
caaccaagagugugugugu

SEQ ID NO: 1535556 - RNA, 19 nt, Artificial Sequence
  Description of Artificial Sequence: Synthetic oligonucleotide
ggaaaugacugcauuguuu

SEQ ID NO: 1535557 - RNA, 19 nt, Artificial Sequence
  Description of Artificial Sequence: Synthetic oligonucleotide
cugaguugaaaggucacuu

SEQ ID NO: 1535558 - RNA, 19 nt, Artificial Sequence
  Description of Artificial Sequence: Synthetic oligonucleotide
guguguguguguaguaagu

SEQ ID NO: 1535559 - RNA, 19 nt, Artificial Sequence
  Description of Artificial Sequence: Synthetic oligonucleotide
cuguaacuacucgagcaua

SEQ ID NO: 1535560 - RNA, 19 nt, Artificial Sequence
  Description of Artificial Sequence: Synthetic oligonucleotide
gcuguguuuuguggugaag

SEQ ID NO: 1535561 - RNA, 19 nt, Artificial Sequence
  Description of Artificial Sequence: Synthetic oligonucleotide
ccguauccaaaacccauga

SEQ ID NO: 1535562 - RNA, 19 nt, Artificial Sequence
  Description of Artificial Sequence: Synthetic oligonucleotide
accuugagacccguucauu

SEQ ID NO: 1535563 - RNA, 19 nt, Artificial Sequence
  Description of Artificial Sequence: Synthetic oligonucleotide
aggaaucgaucaggacugu

SEQ ID NO: 1535564 - RNA, 19 nt, Artificial Sequence
  Description of Artificial Sequence: Synthetic oligonucleotide
acacgugacucaggacaga

SEQ ID NO: 1535565 - RNA, 19 nt, Artificial Sequence
  Description of Artificial Sequence: Synthetic oligonucleotide
gcacugagaacccaauauu

SEQ ID NO: 1535566 - RNA, 19 nt, Artificial Sequence
  Description of Artificial Sequence: Synthetic oligonucleotide
gugugaguucugcuuccua

SEQ ID NO: 1535567 - RNA, 19 nt, Artificial Sequence
  Description of Artificial Sequence: Synthetic oligonucleotide
guaacuacucgagcauaau

SEQ ID NO: 1535568 - RNA, 19 nt, Artificial Sequence
  Description of Artificial Sequence: Synthetic oligonucleotide
cgcuuugcacugagaaccc

SEQ ID NO: 1535569 - RNA, 19 nt, Artificial Sequence
  Description of Artificial Sequence: Synthetic oligonucleotide
agccgucaacucagacacg

SEQ ID NO: 1535570 - RNA, 19 nt, Artificial Sequence
  Description of Artificial Sequence: Synthetic oligonucleotide
cgguauuuuaaagcucaac

SEQ ID NO: 1535571 - RNA, 19 nt, Artificial Sequence
  Description of Artificial Sequence: Synthetic oligonucleotide
aggaguuagcucagaccua

SEQ ID NO: 1535572 - RNA, 19 nt, Artificial Sequence
  Description of Artificial Sequence: Synthetic oligonucleotide
cagugaaacuuugaacuuu

SEQ ID NO: 1535573 - RNA, 19 nt, Artificial Sequence
  Description of Artificial Sequence: Synthetic oligonucleotide
ggauaaugacuuggucaga

SEQ ID NO: 1535574 - RNA, 19 nt, Artificial Sequence
  Description of Artificial Sequence: Synthetic oligonucleotide
gccaaucagcucauaagcu

SEQ ID NO: 1535575 - RNA, 19 nt, Artificial Sequence
  Description of Artificial Sequence: Synthetic oligonucleotide
gguccccuuuuaaauaugu

SEQ ID NO: 1535576 - RNA, 19 nt, Artificial Sequence
  Description of Artificial Sequence: Synthetic oligonucleotide
acccaugaaccaggccaca

SEQ ID NO: 1535577 - RNA, 19 nt, Artificial Sequence
  Description of Artificial Sequence: Synthetic oligonucleotide
gcuagacauccagguguag

SEQ ID NO: 1535578 - RNA, 19 nt, Artificial Sequence
  Description of Artificial Sequence: Synthetic oligonucleotide
agcagaccccaaagagagu

SEQ ID NO: 1535579 - RNA, 19 nt, Artificial Sequence
  Description of Artificial Sequence: Synthetic oligonucleotide
gccgucaacucagacacgu

SEQ ID NO: 1535580 - RNA, 19 nt, Artificial Sequence
  Description of Artificial Sequence: Synthetic oligonucleotide
guguguguguguguguguu

SEQ ID NO: 1535581 - RNA, 19 nt, Artificial Sequence
  Description of Artificial Sequence: Synthetic oligonucleotide
guguguguguguuguuauu

SEQ ID NO: 1535582 - RNA, 19 nt, Artificial Sequence
  Description of Artificial Sequence: Synthetic oligonucleotide
caacacguccacugugcau

SEQ ID NO: 1535583 - RNA, 19 nt, Artificial Sequence
  Description of Artificial Sequence: Synthetic oligonucleotide
cccguugagacaacgguau

SEQ ID NO: 1535584 - RNA, 19 nt, Artificial Sequence
  Description of Artificial Sequence: Synthetic oligonucleotide
ccguuacugcacacugcac

SEQ ID NO: 1535585 - RNA, 19 nt, Artificial Sequence
  Description of Artificial Sequence: Synthetic oligonucleotide
gcagcuugaucaaguccca

SEQ ID NO: 1535586 - RNA, 19 nt, Artificial Sequence
  Description of Artificial Sequence: Synthetic oligonucleotide
aggacagagcagaccccaa

SEQ ID NO: 1535587 - RNA, 19 nt, Artificial Sequence
  Description of Artificial Sequence: Synthetic oligonucleotide
ccaacacguccacugugca

SEQ ID NO: 1535588 - RNA, 19 nt, Artificial Sequence
  Description of Artificial Sequence: Synthetic oligonucleotide
aggugaacacgaagccgua

SEQ ID NO: 1535589 - RNA, 19 nt, Artificial Sequence
  Description of Artificial Sequence: Synthetic oligonucleotide
ccaagagugugugugugua

SEQ ID NO: 1535590 - RNA, 19 nt, Artificial Sequence
  Description of Artificial Sequence: Synthetic oligonucleotide
ccgucaacucagacacgug

SEQ ID NO: 1535591 - RNA, 19 nt, Artificial Sequence
  Description of Artificial Sequence: Synthetic oligonucleotide
ccaucugguccccuuuuaa

SEQ ID NO: 1535592 - RNA, 19 nt, Artificial Sequence
  Description of Artificial Sequence: Synthetic oligonucleotide
cauuggccaaucagcucau

SEQ ID NO: 1535593 - RNA, 19 nt, Artificial Sequence
  Description of Artificial Sequence: Synthetic oligonucleotide
auuggccaaucagcucaua

SEQ ID NO: 1535594 - RNA, 19 nt, Artificial Sequence
  Description of Artificial Sequence: Synthetic oligonucleotide
caccuugagacccguucau

SEQ ID NO: 1535595 - RNA, 19 nt, Artificial Sequence
  Description of Artificial Sequence: Synthetic oligonucleotide
ggaaucgaucaggacugua

SEQ ID NO: 1535596 - RNA, 19 nt, Artificial Sequence
  Description of Artificial Sequence: Synthetic oligonucleotide
gcugucacaucaagucuua

SEQ ID NO: 1535597 - RNA, 19 nt, Artificial Sequence
  Description of Artificial Sequence: Synthetic oligonucleotide
cucauucucacagcccguu

SEQ ID NO: 1535598 - RNA, 19 nt, Artificial Sequence
  Description of Artificial Sequence: Synthetic oligonucleotide
gcuuguggcugaagaagua

SEQ ID NO: 1535599 - RNA, 19 nt, Artificial Sequence
  Description of Artificial Sequence: Synthetic oligonucleotide
gcccguugagacaacggua

SEQ ID NO: 1535600 - RNA, 19 nt, Artificial Sequence
  Description of Artificial Sequence: Synthetic oligonucleotide
caucaagucuuaggauaau

SEQ ID NO: 1535601 - RNA, 19 nt, Artificial Sequence
  Description of Artificial Sequence: Synthetic oligonucleotide
cccuacagucaguuacaaa

SEQ ID NO: 1535602 - RNA, 19 nt, Artificial Sequence
  Description of Artificial Sequence: Synthetic oligonucleotide
ccgagccguuacugcacac

SEQ ID NO: 1535603 - RNA, 19 nt, Artificial Sequence
  Description of Artificial Sequence: Synthetic oligonucleotide
ggugaacacgaagccguau

SEQ ID NO: 1535604 - RNA, 19 nt, Artificial Sequence
  Description of Artificial Sequence: Synthetic oligonucleotide
ggcucccuacagucaguua

SEQ ID NO: 1535605 - RNA, 19 nt, Artificial Sequence
  Description of Artificial Sequence: Synthetic oligonucleotide
gccugacuuggugugaguu

SEQ ID NO: 1535606 - RNA, 19 nt, Artificial Sequence
  Description of Artificial Sequence: Synthetic oligonucleotide
cacaagguucuggcucccu

SEQ ID NO: 1535607 - RNA, 19 nt, Artificial Sequence
  Description of Artificial Sequence: Synthetic oligonucleotide
gcucauucucacagcccgu

SEQ ID NO: 1535608 - RNA, 19 nt, Artificial Sequence
  Description of Artificial Sequence: Synthetic oligonucleotide
cgagccguuacugcacacu

SEQ ID NO: 1535609 - RNA, 19 nt, Artificial Sequence
  Description of Artificial Sequence: Synthetic oligonucleotide
ccguugagacaacgguauu

SEQ ID NO: 1535610 - RNA, 19 nt, Artificial Sequence
  Description of Artificial Sequence: Synthetic oligonucleotide
ccaaaacagcagggcuuuu

SEQ ID NO: 1535611 - RNA, 19 nt, Artificial Sequence
  Description of Artificial Sequence: Synthetic oligonucleotide
uauauucuggaacugaugg

SEQ ID NO: 1535612 - RNA, 19 nt, Artificial Sequence
  Description of Artificial Sequence: Synthetic oligonucleotide
guauguauaacucugagag

SEQ ID NO: 1535613 - RNA, 19 nt, Artificial Sequence
  Description of Artificial Sequence: Synthetic oligonucleotide
aaagauaucaaguuuauuu

SEQ ID NO: 1535614 - RNA, 19 nt, Artificial Sequence
  Description of Artificial Sequence: Synthetic oligonucleotide
agcaaaacaagauagagcu

SEQ ID NO: 1535615 - RNA, 19 nt, Artificial Sequence
  Description of Artificial Sequence: Synthetic oligonucleotide
ugaacuuuugguaaaaugu

SEQ ID NO: 1535616 - RNA, 19 nt, Artificial Sequence
  Description of Artificial Sequence: Synthetic oligonucleotide
aguucauauaaucauagag

SEQ ID NO: 1535617 - RNA, 19 nt, Artificial Sequence
  Description of Artificial Sequence: Synthetic oligonucleotide
agcauuauggauuacuggg

SEQ ID NO: 1535618 - RNA, 19 nt, Artificial Sequence
  Description of Artificial Sequence: Synthetic oligonucleotide
uauagcuaaaagaacauac

SEQ ID NO: 1535619 - RNA, 19 nt, Artificial Sequence
  Description of Artificial Sequence: Synthetic oligonucleotide
caagguuagaucaauaacc

SEQ ID NO: 1535620 - RNA, 19 nt, Artificial Sequence
  Description of Artificial Sequence: Synthetic oligonucleotide
uuuuacuuauuccauagga

SEQ ID NO: 1535621 - RNA, 19 nt, Artificial Sequence
  Description of Artificial Sequence: Synthetic oligonucleotide
aucaauaaccuacagaugu

SEQ ID NO: 1535622 - RNA, 19 nt, Artificial Sequence
  Description of Artificial Sequence: Synthetic oligonucleotide
uuauauaaacauauugcug

SEQ ID NO: 1535623 - RNA, 19 nt, Artificial Sequence
  Description of Artificial Sequence: Synthetic oligonucleotide
auaaucuauagcuaaaaga

SEQ ID NO: 1535624 - RNA, 19 nt, Artificial Sequence
  Description of Artificial Sequence: Synthetic oligonucleotide
ucuuaaguaaccauuuuac

SEQ ID NO: 1535625 - RNA, 19 nt, Artificial Sequence
  Description of Artificial Sequence: Synthetic oligonucleotide
uuugguauguaaaagguau

SEQ ID NO: 1535626 - RNA, 19 nt, Artificial Sequence
  Description of Artificial Sequence: Synthetic oligonucleotide
guucauauaaucauagagg

SEQ ID NO: 1535627 - RNA, 19 nt, Artificial Sequence
  Description of Artificial Sequence: Synthetic oligonucleotide
ucugugagaaauauauucc

SEQ ID NO: 1535628 - RNA, 19 nt, Artificial Sequence
  Description of Artificial Sequence: Synthetic oligonucleotide
aaaauauggcguuuuccuc

SEQ ID NO: 1535629 - RNA, 19 nt, Artificial Sequence
  Description of Artificial Sequence: Synthetic oligonucleotide
uuauaagcaaacucuaaug

SEQ ID NO: 1535630 - RNA, 19 nt, Artificial Sequence
  Description of Artificial Sequence: Synthetic oligonucleotide
agauguagaacucucagcu

SEQ ID NO: 1535631 - RNA, 19 nt, Artificial Sequence
  Description of Artificial Sequence: Synthetic oligonucleotide
auaaauaaucuauagcuaa

SEQ ID NO: 1535632 - RNA, 19 nt, Artificial Sequence
  Description of Artificial Sequence: Synthetic oligonucleotide
aguauuacuggaaaauggc

SEQ ID NO: 1535633 - RNA, 19 nt, Artificial Sequence
  Description of Artificial Sequence: Synthetic oligonucleotide
uuccauaggaaaaugacaa

SEQ ID NO: 1535634 - RNA, 19 nt, Artificial Sequence
  Description of Artificial Sequence: Synthetic oligonucleotide
uuuauaagcaaacucuaau

SEQ ID NO: 1535635 - RNA, 19 nt, Artificial Sequence
  Description of Artificial Sequence: Synthetic oligonucleotide
uucugugagaaauauauuc

SEQ ID NO: 1535636 - RNA, 19 nt, Artificial Sequence
  Description of Artificial Sequence: Synthetic oligonucleotide
aaaguacuagguucugaac

SEQ ID NO: 1535637 - RNA, 19 nt, Artificial Sequence
  Description of Artificial Sequence: Synthetic oligonucleotide
uguugauugaaguagcuaa

SEQ ID NO: 1535638 - RNA, 19 nt, Artificial Sequence
  Description of Artificial Sequence: Synthetic oligonucleotide
cuaaaagaacauaccaucc

SEQ ID NO: 1535639 - RNA, 19 nt, Artificial Sequence
  Description of Artificial Sequence: Synthetic oligonucleotide
uagaggucuucaaauaccg

SEQ ID NO: 1535640 - RNA, 19 nt, Artificial Sequence
  Description of Artificial Sequence: Synthetic oligonucleotide
aagaaucuguucuucucgg

SEQ ID NO: 1535641 - RNA, 19 nt, Artificial Sequence
  Description of Artificial Sequence: Synthetic oligonucleotide
ugugcaaauuuuauuauuc

SEQ ID NO: 1535642 - RNA, 19 nt, Artificial Sequence
  Description of Artificial Sequence: Synthetic oligonucleotide
aacuaaaguacagcuuucc

SEQ ID NO: 1535643 - RNA, 19 nt, Artificial Sequence
  Description of Artificial Sequence: Synthetic oligonucleotide
uagagcuucacucaucuga

SEQ ID NO: 1535644 - RNA, 19 nt, Artificial Sequence
  Description of Artificial Sequence: Synthetic oligonucleotide
uccuauaauuucuucuugg

SEQ ID NO: 1535645 - RNA, 19 nt, Artificial Sequence
  Description of Artificial Sequence: Synthetic oligonucleotide
uuugauagucucuauaaau

SEQ ID NO: 1535646 - RNA, 19 nt, Artificial Sequence
  Description of Artificial Sequence: Synthetic oligonucleotide
aaucccacauuugauaguc

SEQ ID NO: 1535647 - RNA, 19 nt, Artificial Sequence
  Description of Artificial Sequence: Synthetic oligonucleotide
uaaguaaccauuuuacuua

SEQ ID NO: 1535648 - RNA, 19 nt, Artificial Sequence
  Description of Artificial Sequence: Synthetic oligonucleotide
uagcuaaaagaacauacca

SEQ ID NO: 1535649 - RNA, 19 nt, Artificial Sequence
  Description of Artificial Sequence: Synthetic oligonucleotide
uaguguuuaauccauuacu

SEQ ID NO: 1535650 - RNA, 19 nt, Artificial Sequence
  Description of Artificial Sequence: Synthetic oligonucleotide
uaaaauugauagaaacaug

SEQ ID NO: 1535651 - RNA, 19 nt, Artificial Sequence
  Description of Artificial Sequence: Synthetic oligonucleotide
ucuccuaggauacaauccc

SEQ ID NO: 1535652 - RNA, 19 nt, Artificial Sequence
  Description of Artificial Sequence: Synthetic oligonucleotide
acucuaauguaguaacugg

SEQ ID NO: 1535653 - RNA, 19 nt, Artificial Sequence
  Description of Artificial Sequence: Synthetic oligonucleotide
uuuuaaugcaauagguagu

SEQ ID NO: 1535654 - RNA, 19 nt, Artificial Sequence
  Description of Artificial Sequence: Synthetic oligonucleotide
aaucuauagcuaaaagaac

SEQ ID NO: 1535655 - RNA, 19 nt, Artificial Sequence
  Description of Artificial Sequence: Synthetic oligonucleotide
acuaggauuucuuggauug

SEQ ID NO: 1535656 - RNA, 19 nt, Artificial Sequence
  Description of Artificial Sequence: Synthetic oligonucleotide
caguauuacuggaaaaugg

SEQ ID NO: 1535657 - RNA, 19 nt, Artificial Sequence
  Description of Artificial Sequence: Synthetic oligonucleotide
aauaccguuguuccuucuc

SEQ ID NO: 1535658 - RNA, 19 nt, Artificial Sequence
  Description of Artificial Sequence: Synthetic oligonucleotide
uuuacuuauuccauaggaa

SEQ ID NO: 1535659 - RNA, 19 nt, Artificial Sequence
  Description of Artificial Sequence: Synthetic oligonucleotide
uuauucuuaaguaaccauu

SEQ ID NO: 1535660 - RNA, 19 nt, Artificial Sequence
  Description of Artificial Sequence: Synthetic oligonucleotide
auuuucacaaguucaguca

SEQ ID NO: 1535661 - RNA, 19 nt, Artificial Sequence
  Description of Artificial Sequence: Synthetic oligonucleotide
cuaaaguacagcuuuccac

SEQ ID NO: 1535662 - RNA, 19 nt, Artificial Sequence
  Description of Artificial Sequence: Synthetic oligonucleotide
guaaaagguauacaaagga

SEQ ID NO: 1535663 - RNA, 19 nt, Artificial Sequence
  Description of Artificial Sequence: Synthetic oligonucleotide
aacucuaauguaguaacug

SEQ ID NO: 1535664 - RNA, 19 nt, Artificial Sequence
  Description of Artificial Sequence: Synthetic oligonucleotide
auuguauguaaauucucug

SEQ ID NO: 1535665 - RNA, 19 nt, Artificial Sequence
  Description of Artificial Sequence: Synthetic oligonucleotide
uguauaacucugagagugg

SEQ ID NO: 1535666 - RNA, 19 nt, Artificial Sequence
  Description of Artificial Sequence: Synthetic oligonucleotide
uaggauacaauccccagaa

SEQ ID NO: 1535667 - RNA, 19 nt, Artificial Sequence
  Description of Artificial Sequence: Synthetic oligonucleotide
uugauagucucuauaaaua

SEQ ID NO: 1535668 - RNA, 19 nt, Artificial Sequence
  Description of Artificial Sequence: Synthetic oligonucleotide
auaccguuguuccuucucc

SEQ ID NO: 1535669 - RNA, 19 nt, Artificial Sequence
  Description of Artificial Sequence: Synthetic oligonucleotide
ugguaaaauguuccaaggc

SEQ ID NO: 1535670 - RNA, 19 nt, Artificial Sequence
  Description of Artificial Sequence: Synthetic oligonucleotide
aaccuacagauguacaaug

SEQ ID NO: 1535671 - RNA, 19 nt, Artificial Sequence
  Description of Artificial Sequence: Synthetic oligonucleotide
agugaguucauauaaucau

SEQ ID NO: 1535672 - RNA, 19 nt, Artificial Sequence
  Description of Artificial Sequence: Synthetic oligonucleotide
aguucagucaccguaaaug

SEQ ID NO: 1535673 - RNA, 19 nt, Artificial Sequence
  Description of Artificial Sequence: Synthetic oligonucleotide
caauccccagaaaauaugg

SEQ ID NO: 1535674 - RNA, 19 nt, Artificial Sequence
  Description of Artificial Sequence: Synthetic oligonucleotide
aguuaucacggauuaauga

SEQ ID NO: 1535675 - RNA, 19 nt, Artificial Sequence
  Description of Artificial Sequence: Synthetic oligonucleotide
aacauauugcuguucucca

SEQ ID NO: 1535676 - RNA, 19 nt, Artificial Sequence
  Description of Artificial Sequence: Synthetic oligonucleotide
uccuggauauauaauauua

SEQ ID NO: 1535677 - RNA, 19 nt, Artificial Sequence
  Description of Artificial Sequence: Synthetic oligonucleotide
aaguagcuaaagaaaacag

SEQ ID NO: 1535678 - RNA, 19 nt, Artificial Sequence
  Description of Artificial Sequence: Synthetic oligonucleotide
auagguaguguuuaaucca

SEQ ID NO: 1535679 - RNA, 19 nt, Artificial Sequence
  Description of Artificial Sequence: Synthetic oligonucleotide
ugauagucucuauaaauaa

SEQ ID NO: 1535680 - RNA, 19 nt, Artificial Sequence
  Description of Artificial Sequence: Synthetic oligonucleotide
aacaguauuacuggaaaau

SEQ ID NO: 1535681 - RNA, 19 nt, Artificial Sequence
  Description of Artificial Sequence: Synthetic oligonucleotide
uauuauucuuaaguaacca

SEQ ID NO: 1535682 - RNA, 19 nt, Artificial Sequence
  Description of Artificial Sequence: Synthetic oligonucleotide
accagguacguguuagugc

SEQ ID NO: 1535683 - RNA, 19 nt, Artificial Sequence
  Description of Artificial Sequence: Synthetic oligonucleotide
auaacucugagaguggcuc

SEQ ID NO: 1535684 - RNA, 19 nt, Artificial Sequence
  Description of Artificial Sequence: Synthetic oligonucleotide
uuagaucaauaaccuacag

SEQ ID NO: 1535685 - RNA, 19 nt, Artificial Sequence
  Description of Artificial Sequence: Synthetic oligonucleotide
uucuuaaguaaccauuuua

SEQ ID NO: 1535686 - RNA, 19 nt, Artificial Sequence
  Description of Artificial Sequence: Synthetic oligonucleotide
ugacaaaguacuagguucu

SEQ ID NO: 1535687 - RNA, 19 nt, Artificial Sequence
  Description of Artificial Sequence: Synthetic oligonucleotide
accugcaugccacaaugcc

SEQ ID NO: 1535688 - RNA, 19 nt, Artificial Sequence
  Description of Artificial Sequence: Synthetic oligonucleotide
ugcuuuaagcagcugauau

SEQ ID NO: 1535689 - RNA, 19 nt, Artificial Sequence
  Description of Artificial Sequence: Synthetic oligonucleotide
cauuauggauuacugggcc

SEQ ID NO: 1535690 - RNA, 19 nt, Artificial Sequence
  Description of Artificial Sequence: Synthetic oligonucleotide
acggauuaaugaaagaauc

SEQ ID NO: 1535691 - RNA, 19 nt, Artificial Sequence
  Description of Artificial Sequence: Synthetic oligonucleotide
uaagcagcugauauauucu

SEQ ID NO: 1535692 - RNA, 19 nt, Artificial Sequence
  Description of Artificial Sequence: Synthetic oligonucleotide
uaaagccauauggucaucg

SEQ ID NO: 1535693 - RNA, 19 nt, Artificial Sequence
  Description of Artificial Sequence: Synthetic oligonucleotide
uacuuauuccauaggaaaa

SEQ ID NO: 1535694 - RNA, 19 nt, Artificial Sequence
  Description of Artificial Sequence: Synthetic oligonucleotide
uuaucacggauuaaugaaa

SEQ ID NO: 1535695 - RNA, 19 nt, Artificial Sequence
  Description of Artificial Sequence: Synthetic oligonucleotide
aagguuagaucaauaaccu

SEQ ID NO: 1535696 - RNA, 19 nt, Artificial Sequence
  Description of Artificial Sequence: Synthetic oligonucleotide
gaaguagcuaaagaaaaca

SEQ ID NO: 1535697 - RNA, 19 nt, Artificial Sequence
  Description of Artificial Sequence: Synthetic oligonucleotide
auuauucuuaaguaaccau

SEQ ID NO: 1535698 - RNA, 19 nt, Artificial Sequence
  Description of Artificial Sequence: Synthetic oligonucleotide
uacagauguacaauguaau

SEQ ID NO: 1535699 - RNA, 19 nt, Artificial Sequence
  Description of Artificial Sequence: Synthetic oligonucleotide
cauagaggucuucaaauac

SEQ ID NO: 1535700 - RNA, 19 nt, Artificial Sequence
  Description of Artificial Sequence: Synthetic oligonucleotide
aguguuuaauccauuacug

SEQ ID NO: 1535701 - RNA, 19 nt, Artificial Sequence
  Description of Artificial Sequence: Synthetic oligonucleotide
aaguacagcuuuccacuuc

SEQ ID NO: 1535702 - RNA, 19 nt, Artificial Sequence
  Description of Artificial Sequence: Synthetic oligonucleotide
uugauagaaacaugaaaua

SEQ ID NO: 1535703 - RNA, 19 nt, Artificial Sequence
  Description of Artificial Sequence: Synthetic oligonucleotide
uuuagugaguucauauaau

SEQ ID NO: 1535704 - RNA, 19 nt, Artificial Sequence
  Description of Artificial Sequence: Synthetic oligonucleotide
aagcagcugauauauucug

SEQ ID NO: 1535705 - RNA, 19 nt, Artificial Sequence
  Description of Artificial Sequence: Synthetic oligonucleotide
ucggucuuaaucaauucuc

SEQ ID NO: 1535706 - RNA, 19 nt, Artificial Sequence
  Description of Artificial Sequence: Synthetic oligonucleotide
ucuacuaugccuccagcau

SEQ ID NO: 1535707 - RNA, 19 nt, Artificial Sequence
  Description of Artificial Sequence: Synthetic oligonucleotide
auaucuacuaugccuccag

SEQ ID NO: 1535708 - RNA, 19 nt, Artificial Sequence
  Description of Artificial Sequence: Synthetic oligonucleotide
acaugaaauaaauuuggua

SEQ ID NO: 1535709 - RNA, 19 nt, Artificial Sequence
  Description of Artificial Sequence: Synthetic oligonucleotide
agcuaaagaaaacaguauu

SEQ ID NO: 1535710 - RNA, 19 nt, Artificial Sequence
  Description of Artificial Sequence: Synthetic oligonucleotide
ucacggauuaaugaaagaa

SEQ ID NO: 1535711 - RNA, 19 nt, Artificial Sequence
  Description of Artificial Sequence: Synthetic oligonucleotide
guuaucacggauuaaugaa

SEQ ID NO: 1535712 - RNA, 19 nt, Artificial Sequence
  Description of Artificial Sequence: Synthetic oligonucleotide
uuucacaaauaucuacuau

SEQ ID NO: 1535713 - RNA, 19 nt, Artificial Sequence
  Description of Artificial Sequence: Synthetic oligonucleotide
uguaguaacugguuugaau

SEQ ID NO: 1535714 - RNA, 19 nt, Artificial Sequence
  Description of Artificial Sequence: Synthetic oligonucleotide
ucugagaguggcucccucg

SEQ ID NO: 1535715 - RNA, 19 nt, Artificial Sequence
  Description of Artificial Sequence: Synthetic oligonucleotide
aaagaacauaccauccucu

SEQ ID NO: 1535716 - RNA, 19 nt, Artificial Sequence
  Description of Artificial Sequence: Synthetic oligonucleotide
uuccuauaauuucuucuug

SEQ ID NO: 1535717 - RNA, 19 nt, Artificial Sequence
  Description of Artificial Sequence: Synthetic oligonucleotide
ugauauauucuggaacuga

SEQ ID NO: 1535718 - RNA, 19 nt, Artificial Sequence
  Description of Artificial Sequence: Synthetic oligonucleotide
aacacgcgcacuuacccga

SEQ ID NO: 1535719 - RNA, 19 nt, Artificial Sequence
  Description of Artificial Sequence: Synthetic oligonucleotide
ucagucaccguaaaugauu

SEQ ID NO: 1535720 - RNA, 19 nt, Artificial Sequence
  Description of Artificial Sequence: Synthetic oligonucleotide
auugcugugucaaauucag

SEQ ID NO: 1535721 - RNA, 19 nt, Artificial Sequence
  Description of Artificial Sequence: Synthetic oligonucleotide
aaugaggauucuccugcug

SEQ ID NO: 1535722 - RNA, 19 nt, Artificial Sequence
  Description of Artificial Sequence: Synthetic oligonucleotide
aucgcagugccaaugaguc

SEQ ID NO: 1535723 - RNA, 19 nt, Artificial Sequence
  Description of Artificial Sequence: Synthetic oligonucleotide
aguacagcuuuccacuucu

SEQ ID NO: 1535724 - RNA, 19 nt, Artificial Sequence
  Description of Artificial Sequence: Synthetic oligonucleotide
guuacagcccaacacgcgc

SEQ ID NO: 1535725 - RNA, 19 nt, Artificial Sequence
  Description of Artificial Sequence: Synthetic oligonucleotide
ugcuguugauugaaguagc

SEQ ID NO: 1535726 - RNA, 19 nt, Artificial Sequence
  Description of Artificial Sequence: Synthetic oligonucleotide
auaaucauagaggucuuca

SEQ ID NO: 1535727 - RNA, 19 nt, Artificial Sequence
  Description of Artificial Sequence: Synthetic oligonucleotide
ucggcuauuucugugagaa

SEQ ID NO: 1535728 - RNA, 19 nt, Artificial Sequence
  Description of Artificial Sequence: Synthetic oligonucleotide
cagcauuauggauuacugg

SEQ ID NO: 1535729 - RNA, 19 nt, Artificial Sequence
  Description of Artificial Sequence: Synthetic oligonucleotide
acuaaaguacagcuuucca

SEQ ID NO: 1535730 - RNA, 19 nt, Artificial Sequence
  Description of Artificial Sequence: Synthetic oligonucleotide
uucagcauuauggauuacu

SEQ ID NO: 1535731 - RNA, 19 nt, Artificial Sequence
  Description of Artificial Sequence: Synthetic oligonucleotide
auaccauccucuaaaagca

SEQ ID NO: 1535732 - RNA, 19 nt, Artificial Sequence
  Description of Artificial Sequence: Synthetic oligonucleotide
uauguauaacucugagagu

SEQ ID NO: 1535733 - RNA, 19 nt, Artificial Sequence
  Description of Artificial Sequence: Synthetic oligonucleotide
uccuaggauacaaucccca

SEQ ID NO: 1535734 - RNA, 19 nt, Artificial Sequence
  Description of Artificial Sequence: Synthetic oligonucleotide
aaguuaucacggauuaaug

SEQ ID NO: 1535735 - RNA, 19 nt, Artificial Sequence
  Description of Artificial Sequence: Synthetic oligonucleotide
aacauaccauccucuaaaa

SEQ ID NO: 1535736 - RNA, 19 nt, Artificial Sequence
  Description of Artificial Sequence: Synthetic oligonucleotide
gggguuacagcccaacacg

SEQ ID NO: 1535737 - RNA, 19 nt, Artificial Sequence
  Description of Artificial Sequence: Synthetic oligonucleotide
aagaacauaccauccucua

SEQ ID NO: 1535738 - RNA, 19 nt, Artificial Sequence
  Description of Artificial Sequence: Synthetic oligonucleotide
uauaacucugagaguggcu

SEQ ID NO: 1535739 - RNA, 19 nt, Artificial Sequence
  Description of Artificial Sequence: Synthetic oligonucleotide
aaauugauagaaacaugaa

SEQ ID NO: 1535740 - RNA, 19 nt, Artificial Sequence
  Description of Artificial Sequence: Synthetic oligonucleotide
auuugauagucucuauaaa

SEQ ID NO: 1535741 - RNA, 19 nt, Artificial Sequence
  Description of Artificial Sequence: Synthetic oligonucleotide
ucaaauaccguuguuccuu

SEQ ID NO: 1535742 - RNA, 19 nt, Artificial Sequence
  Description of Artificial Sequence: Synthetic oligonucleotide
aucuacuaugccuccagca

SEQ ID NO: 1535743 - RNA, 19 nt, Artificial Sequence
  Description of Artificial Sequence: Synthetic oligonucleotide
auauggucaucgguguggc

SEQ ID NO: 1535744 - RNA, 19 nt, Artificial Sequence
  Description of Artificial Sequence: Synthetic oligonucleotide
ggauuugugauguaaaaua

SEQ ID NO: 1535745 - RNA, 19 nt, Artificial Sequence
  Description of Artificial Sequence: Synthetic oligonucleotide
uagguaguguuuaauccau

SEQ ID NO: 1535746 - RNA, 19 nt, Artificial Sequence
  Description of Artificial Sequence: Synthetic oligonucleotide
ucuugucaggauuugugau

SEQ ID NO: 1535747 - RNA, 19 nt, Artificial Sequence
  Description of Artificial Sequence: Synthetic oligonucleotide
cuggaaaauggcugccugg

SEQ ID NO: 1535748 - RNA, 19 nt, Artificial Sequence
  Description of Artificial Sequence: Synthetic oligonucleotide
auuauggauuacugggcca

SEQ ID NO: 1535749 - RNA, 19 nt, Artificial Sequence
  Description of Artificial Sequence: Synthetic oligonucleotide
caaggccaagguuagauca

SEQ ID NO: 1535750 - RNA, 19 nt, Artificial Sequence
  Description of Artificial Sequence: Synthetic oligonucleotide
ucaauaaccuacagaugua

SEQ ID NO: 1535751 - RNA, 19 nt, Artificial Sequence
  Description of Artificial Sequence: Synthetic oligonucleotide
uacgcucugccauuguaug

SEQ ID NO: 1535752 - RNA, 19 nt, Artificial Sequence
  Description of Artificial Sequence: Synthetic oligonucleotide
agugccaaugagucacuag

SEQ ID NO: 1535753 - RNA, 19 nt, Artificial Sequence
  Description of Artificial Sequence: Synthetic oligonucleotide
uaucuacuaugccuccagc

SEQ ID NO: 1535754 - RNA, 19 nt, Artificial Sequence
  Description of Artificial Sequence: Synthetic oligonucleotide
cuacagauguacaauguaa

SEQ ID NO: 1535755 - RNA, 19 nt, Artificial Sequence
  Description of Artificial Sequence: Synthetic oligonucleotide
uucaaauaccguuguuccu

SEQ ID NO: 1535756 - RNA, 19 nt, Artificial Sequence
  Description of Artificial Sequence: Synthetic oligonucleotide
ucucggcuauuucugugag

SEQ ID NO: 1535757 - RNA, 19 nt, Artificial Sequence
  Description of Artificial Sequence: Synthetic oligonucleotide
agucucuauaaauaaucua

SEQ ID NO: 1535758 - RNA, 19 nt, Artificial Sequence
  Description of Artificial Sequence: Synthetic oligonucleotide
aauauggcguuuuccucuu

SEQ ID NO: 1535759 - RNA, 19 nt, Artificial Sequence
  Description of Artificial Sequence: Synthetic oligonucleotide
uggggaucaagauguagaa

SEQ ID NO: 1535760 - RNA, 19 nt, Artificial Sequence
  Description of Artificial Sequence: Synthetic oligonucleotide
gaucaauaaccuacagaug

SEQ ID NO: 1535761 - RNA, 19 nt, Artificial Sequence
  Description of Artificial Sequence: Synthetic oligonucleotide
caaaguacuagguucugaa

SEQ ID NO: 1535762 - RNA, 19 nt, Artificial Sequence
  Description of Artificial Sequence: Synthetic oligonucleotide
ccagguacguguuagugcc

SEQ ID NO: 1535763 - RNA, 19 nt, Artificial Sequence
  Description of Artificial Sequence: Synthetic oligonucleotide
uuacgcucugccauuguau

SEQ ID NO: 1535764 - RNA, 19 nt, Artificial Sequence
  Description of Artificial Sequence: Synthetic oligonucleotide
guguuuaauccauuacuga

SEQ ID NO: 1535765 - RNA, 19 nt, Artificial Sequence
  Description of Artificial Sequence: Synthetic oligonucleotide
ggaguaaagccauaugguc

SEQ ID NO: 1535766 - RNA, 19 nt, Artificial Sequence
  Description of Artificial Sequence: Synthetic oligonucleotide
ucccacauuugauagucuc

SEQ ID NO: 1535767 - RNA, 19 nt, Artificial Sequence
  Description of Artificial Sequence: Synthetic oligonucleotide
ugaucgcagugccaaugag

SEQ ID NO: 1535768 - RNA, 19 nt, Artificial Sequence
  Description of Artificial Sequence: Synthetic oligonucleotide
cuacuaugccuccagcaug

SEQ ID NO: 1535769 - RNA, 19 nt, Artificial Sequence
  Description of Artificial Sequence: Synthetic oligonucleotide
aaacucuaauguaguaacu

SEQ ID NO: 1535770 - RNA, 19 nt, Artificial Sequence
  Description of Artificial Sequence: Synthetic oligonucleotide
agccauauggucaucggug

SEQ ID NO: 1535771 - RNA, 19 nt, Artificial Sequence
  Description of Artificial Sequence: Synthetic oligonucleotide
ggauacaauccccagaaaa

SEQ ID NO: 1535772 - RNA, 19 nt, Artificial Sequence
  Description of Artificial Sequence: Synthetic oligonucleotide
acguguuagugccuugcag

SEQ ID NO: 1535773 - RNA, 19 nt, Artificial Sequence
  Description of Artificial Sequence: Synthetic oligonucleotide
aggaguaaagccauauggu

SEQ ID NO: 1535774 - RNA, 19 nt, Artificial Sequence
  Description of Artificial Sequence: Synthetic oligonucleotide
guuugaauugugcaaauuu

SEQ ID NO: 1535775 - RNA, 19 nt, Artificial Sequence
  Description of Artificial Sequence: Synthetic oligonucleotide
ggauuacugggccaugucc

SEQ ID NO: 1535776 - RNA, 19 nt, Artificial Sequence
  Description of Artificial Sequence: Synthetic oligonucleotide
guauaacucugagaguggc

SEQ ID NO: 1535777 - RNA, 19 nt, Artificial Sequence
  Description of Artificial Sequence: Synthetic oligonucleotide
uguucuucucggcuauuuc

SEQ ID NO: 1535778 - RNA, 19 nt, Artificial Sequence
  Description of Artificial Sequence: Synthetic oligonucleotide
uaaccuacagauguacaau

SEQ ID NO: 1535779 - RNA, 19 nt, Artificial Sequence
  Description of Artificial Sequence: Synthetic oligonucleotide
agcuaaaagaacauaccau

SEQ ID NO: 1535780 - RNA, 19 nt, Artificial Sequence
  Description of Artificial Sequence: Synthetic oligonucleotide
ggauauauaauauuagcuu

SEQ ID NO: 1535781 - RNA, 19 nt, Artificial Sequence
  Description of Artificial Sequence: Synthetic oligonucleotide
guuagaucaauaaccuaca

SEQ ID NO: 1535782 - RNA, 19 nt, Artificial Sequence
  Description of Artificial Sequence: Synthetic oligonucleotide
auggucaucgguguggcca

SEQ ID NO: 1535783 - RNA, 19 nt, Artificial Sequence
  Description of Artificial Sequence: Synthetic oligonucleotide
ccauaggaaaaugacaaag

SEQ ID NO: 1535784 - RNA, 19 nt, Artificial Sequence
  Description of Artificial Sequence: Synthetic oligonucleotide
caacacgcgcacuuacccg

SEQ ID NO: 1535785 - RNA, 19 nt, Artificial Sequence
  Description of Artificial Sequence: Synthetic oligonucleotide
auauauucuggaacugaug

SEQ ID NO: 1535786 - RNA, 19 nt, Artificial Sequence
  Description of Artificial Sequence: Synthetic oligonucleotide
ugcagggucauggggaccc

SEQ ID NO: 1535787 - RNA, 19 nt, Artificial Sequence
  Description of Artificial Sequence: Synthetic oligonucleotide
uccauaggaaaaugacaaa

SEQ ID NO: 1535788 - RNA, 19 nt, Artificial Sequence
  Description of Artificial Sequence: Synthetic oligonucleotide
cauaggaaaaugacaaagu

SEQ ID NO: 1535789 - RNA, 19 nt, Artificial Sequence
  Description of Artificial Sequence: Synthetic oligonucleotide
aaguucagucaccguaaau

SEQ ID NO: 1535790 - RNA, 19 nt, Artificial Sequence
  Description of Artificial Sequence: Synthetic oligonucleotide
augaucgcagugccaauga

SEQ ID NO: 1535791 - RNA, 19 nt, Artificial Sequence
  Description of Artificial Sequence: Synthetic oligonucleotide
gguucugaacuuuugguaa

SEQ ID NO: 1535792 - RNA, 19 nt, Artificial Sequence
  Description of Artificial Sequence: Synthetic oligonucleotide
uacguguuagugccuugca

SEQ ID NO: 1535793 - RNA, 19 nt, Artificial Sequence
  Description of Artificial Sequence: Synthetic oligonucleotide
aaauaccguuguuccuucu

SEQ ID NO: 1535794 - RNA, 19 nt, Artificial Sequence
  Description of Artificial Sequence: Synthetic oligonucleotide
ucacuaggauuucuuggau

SEQ ID NO: 1535795 - RNA, 19 nt, Artificial Sequence
  Description of Artificial Sequence: Synthetic oligonucleotide
ugcaauagguaguguuuaa

SEQ ID NO: 1535796 - RNA, 19 nt, Artificial Sequence
  Description of Artificial Sequence: Synthetic oligonucleotide
gauuugugauguaaaauau

SEQ ID NO: 1535797 - RNA, 19 nt, Artificial Sequence
  Description of Artificial Sequence: Synthetic oligonucleotide
ucuaccugcaugccacaau

SEQ ID NO: 1535798 - RNA, 19 nt, Artificial Sequence
  Description of Artificial Sequence: Synthetic oligonucleotide
ugccggucccaccagguac

SEQ ID NO: 1535799 - RNA, 19 nt, Artificial Sequence
  Description of Artificial Sequence: Synthetic oligonucleotide
caaugagucacuaggauuu

SEQ ID NO: 1535800 - RNA, 19 nt, Artificial Sequence
  Description of Artificial Sequence: Synthetic oligonucleotide
cacaaguucagucaccgua

SEQ ID NO: 1535801 - RNA, 19 nt, Artificial Sequence
  Description of Artificial Sequence: Synthetic oligonucleotide
gaggauucuccugcugccg

SEQ ID NO: 1535802 - RNA, 19 nt, Artificial Sequence
  Description of Artificial Sequence: Synthetic oligonucleotide
ugaggaauccgugggaguu

SEQ ID NO: 1535803 - RNA, 19 nt, Artificial Sequence
  Description of Artificial Sequence: Synthetic oligonucleotide
cuaggauacaauccccaga

SEQ ID NO: 1535804 - RNA, 19 nt, Artificial Sequence
  Description of Artificial Sequence: Synthetic oligonucleotide
cuucuuggugaggaauccg

SEQ ID NO: 1535805 - RNA, 19 nt, Artificial Sequence
  Description of Artificial Sequence: Synthetic oligonucleotide
uggauuacugggccauguc

SEQ ID NO: 1535806 - RNA, 19 nt, Artificial Sequence
  Description of Artificial Sequence: Synthetic oligonucleotide
agauagagcuucacucauc

SEQ ID NO: 1535807 - RNA, 19 nt, Artificial Sequence
  Description of Artificial Sequence: Synthetic oligonucleotide
uuagugccuugcaggguca

SEQ ID NO: 1535808 - RNA, 19 nt, Artificial Sequence
  Description of Artificial Sequence: Synthetic oligonucleotide
caugaucgcagugccaaug

SEQ ID NO: 1535809 - RNA, 19 nt, Artificial Sequence
  Description of Artificial Sequence: Synthetic oligonucleotide
gauuacugggccauguccu

SEQ ID NO: 1535810 - RNA, 19 nt, Artificial Sequence
  Description of Artificial Sequence: Synthetic oligonucleotide
uuaaugcaauagguagugu

SEQ ID NO: 1535811 - RNA, 19 nt, Artificial Sequence
  Description of Artificial Sequence: Synthetic oligonucleotide
cugauauauucuggaacug

SEQ ID NO: 1535812 - RNA, 19 nt, Artificial Sequence
  Description of Artificial Sequence: Synthetic oligonucleotide
uuuaagcagcugauauauu

SEQ ID NO: 1535813 - RNA, 19 nt, Artificial Sequence
  Description of Artificial Sequence: Synthetic oligonucleotide
augccacaaugccacccac

SEQ ID NO: 1535814 - RNA, 19 nt, Artificial Sequence
  Description of Artificial Sequence: Synthetic oligonucleotide
agcaaacucuaauguagua

SEQ ID NO: 1535815 - RNA, 19 nt, Artificial Sequence
  Description of Artificial Sequence: Synthetic oligonucleotide
auuugugauguaaaauauu

SEQ ID NO: 1535816 - RNA, 19 nt, Artificial Sequence
  Description of Artificial Sequence: Synthetic oligonucleotide
uucuuggauugcuguguca

SEQ ID NO: 1535817 - RNA, 19 nt, Artificial Sequence
  Description of Artificial Sequence: Synthetic oligonucleotide
ggauugcugugucaaauuc

SEQ ID NO: 1535818 - RNA, 19 nt, Artificial Sequence
  Description of Artificial Sequence: Synthetic oligonucleotide
acaaguucagucaccguaa

SEQ ID NO: 1535819 - RNA, 19 nt, Artificial Sequence
  Description of Artificial Sequence: Synthetic oligonucleotide
cucuaauguaguaacuggu

SEQ ID NO: 1535820 - RNA, 19 nt, Artificial Sequence
  Description of Artificial Sequence: Synthetic oligonucleotide
gcucccucggucuuaauca

SEQ ID NO: 1535821 - RNA, 19 nt, Artificial Sequence
  Description of Artificial Sequence: Synthetic oligonucleotide
gcauuauggauuacugggc

SEQ ID NO: 1535822 - RNA, 19 nt, Artificial Sequence
  Description of Artificial Sequence: Synthetic oligonucleotide
auggcguuuuccucuucca

SEQ ID NO: 1535823 - RNA, 19 nt, Artificial Sequence
  Description of Artificial Sequence: Synthetic oligonucleotide
gguauguaaaagguauaca

SEQ ID NO: 1535824 - RNA, 19 nt, Artificial Sequence
  Description of Artificial Sequence: Synthetic oligonucleotide
agguuagaucaauaaccua

SEQ ID NO: 1535825 - RNA, 19 nt, Artificial Sequence
  Description of Artificial Sequence: Synthetic oligonucleotide
ccaacacgcgcacuuaccc

SEQ ID NO: 1535826 - RNA, 19 nt, Artificial Sequence
  Description of Artificial Sequence: Synthetic oligonucleotide
accuacagauguacaaugu

SEQ ID NO: 1535827 - RNA, 19 nt, Artificial Sequence
  Description of Artificial Sequence: Synthetic oligonucleotide
uauggauuacugggccaug

SEQ ID NO: 1535828 - RNA, 19 nt, Artificial Sequence
  Description of Artificial Sequence: Synthetic oligonucleotide
guauuacuggaaaauggcu

SEQ ID NO: 1535829 - RNA, 19 nt, Artificial Sequence
  Description of Artificial Sequence: Synthetic oligonucleotide
agauuacgcucugccauug

SEQ ID NO: 1535830 - RNA, 19 nt, Artificial Sequence
  Description of Artificial Sequence: Synthetic oligonucleotide
auggauuacugggccaugu

SEQ ID NO: 1535831 - RNA, 19 nt, Artificial Sequence
  Description of Artificial Sequence: Synthetic oligonucleotide
ucacaaguucagucaccgu

SEQ ID NO: 1535832 - RNA, 19 nt, Artificial Sequence
  Description of Artificial Sequence: Synthetic oligonucleotide
cacggauuaaugaaagaau

SEQ ID NO: 1535833 - RNA, 19 nt, Artificial Sequence
  Description of Artificial Sequence: Synthetic oligonucleotide
uauggucaucgguguggcc

SEQ ID NO: 1535834 - RNA, 19 nt, Artificial Sequence
  Description of Artificial Sequence: Synthetic oligonucleotide
ggaguaugcagacaucugu

SEQ ID NO: 1535835 - RNA, 19 nt, Artificial Sequence
  Description of Artificial Sequence: Synthetic oligonucleotide
acgcgcacuuacccgacug

SEQ ID NO: 1535836 - RNA, 19 nt, Artificial Sequence
  Description of Artificial Sequence: Synthetic oligonucleotide
auauggcguuuuccucuuc

SEQ ID NO: 1535837 - RNA, 19 nt, Artificial Sequence
  Description of Artificial Sequence: Synthetic oligonucleotide
gguuacagcccaacacgcg

SEQ ID NO: 1535838 - RNA, 19 nt, Artificial Sequence
  Description of Artificial Sequence: Synthetic oligonucleotide
gccaagguuagaucaauaa

SEQ ID NO: 1535839 - RNA, 19 nt, Artificial Sequence
  Description of Artificial Sequence: Synthetic oligonucleotide
ccagcaugaucgcagugcc

SEQ ID NO: 1535840 - RNA, 19 nt, Artificial Sequence
  Description of Artificial Sequence: Synthetic oligonucleotide
gugaguucauauaaucaua

SEQ ID NO: 1535841 - RNA, 19 nt, Artificial Sequence
  Description of Artificial Sequence: Synthetic oligonucleotide
aucgguguggccaggagua

SEQ ID NO: 1535842 - RNA, 19 nt, Artificial Sequence
  Description of Artificial Sequence: Synthetic oligonucleotide
aggaguaugcagacaucug

SEQ ID NO: 1535843 - RNA, 19 nt, Artificial Sequence
  Description of Artificial Sequence: Synthetic oligonucleotide
ggagauuacgcucugccau

SEQ ID NO: 1535844 - RNA, 19 nt, Artificial Sequence
  Description of Artificial Sequence: Synthetic oligonucleotide
cuaugccuccagcaugauc

SEQ ID NO: 1535845 - RNA, 19 nt, Artificial Sequence
  Description of Artificial Sequence: Synthetic oligonucleotide
cucggucuuaaucaauucu

SEQ ID NO: 1535846 - RNA, 19 nt, Artificial Sequence
  Description of Artificial Sequence: Synthetic oligonucleotide
cuauagcuaaaagaacaua

SEQ ID NO: 1535847 - RNA, 19 nt, Artificial Sequence
  Description of Artificial Sequence: Synthetic oligonucleotide
gaucgcagugccaaugagu

SEQ ID NO: 1535848 - RNA, 19 nt, Artificial Sequence
  Description of Artificial Sequence: Synthetic oligonucleotide
ucgcagugccaaugaguca

SEQ ID NO: 1535849 - RNA, 19 nt, Artificial Sequence
  Description of Artificial Sequence: Synthetic oligonucleotide
ugcaugccacaaugccacc

SEQ ID NO: 1535850 - RNA, 19 nt, Artificial Sequence
  Description of Artificial Sequence: Synthetic oligonucleotide
gcguuuuccucuuccagga

SEQ ID NO: 1535851 - RNA, 19 nt, Artificial Sequence
  Description of Artificial Sequence: Synthetic oligonucleotide
ggcuauuucugugagaaau

SEQ ID NO: 1535852 - RNA, 19 nt, Artificial Sequence
  Description of Artificial Sequence: Synthetic oligonucleotide
ggguuacagcccaacacgc

SEQ ID NO: 1535853 - RNA, 19 nt, Artificial Sequence
  Description of Artificial Sequence: Synthetic oligonucleotide
gcuucagcauuauggauua

SEQ ID NO: 1535854 - RNA, 19 nt, Artificial Sequence
  Description of Artificial Sequence: Synthetic oligonucleotide
ccuuuauaagcaaacucua

SEQ ID NO: 1535855 - RNA, 19 nt, Artificial Sequence
  Description of Artificial Sequence: Synthetic oligonucleotide
ggaguauguauaacucuga

SEQ ID NO: 1535856 - RNA, 19 nt, Artificial Sequence
  Description of Artificial Sequence: Synthetic oligonucleotide
ggcucccucggucuuaauc

SEQ ID NO: 1535857 - RNA, 19 nt, Artificial Sequence
  Description of Artificial Sequence: Synthetic oligonucleotide
gagauuacgcucugccauu

SEQ ID NO: 1535858 - RNA, 19 nt, Artificial Sequence
  Description of Artificial Sequence: Synthetic oligonucleotide
cuguugauugaaguagcua

SEQ ID NO: 1535859 - RNA, 19 nt, Artificial Sequence
  Description of Artificial Sequence: Synthetic oligonucleotide
cgcagugccaaugagucac

SEQ ID NO: 1535860 - RNA, 19 nt, Artificial Sequence
  Description of Artificial Sequence: Synthetic oligonucleotide
gguacguguuagugccuug

SEQ ID NO: 1535861 - RNA, 19 nt, Artificial Sequence
  Description of Artificial Sequence: Synthetic oligonucleotide
cccaacacgcgcacuuacc

SEQ ID NO: 1535862 - RNA, 19 nt, Artificial Sequence
  Description of Artificial Sequence: Synthetic oligonucleotide
agucaccguaaaugauuuu

SEQ ID NO: 1535863 - RNA, 19 nt, Artificial Sequence
  Description of Artificial Sequence: Synthetic oligonucleotide
gccauuguauguaaauucu

SEQ ID NO: 1535864 - RNA, 19 nt, Artificial Sequence
  Description of Artificial Sequence: Synthetic oligonucleotide
agguacguguuagugccuu

SEQ ID NO: 1535865 - RNA, 19 nt, Artificial Sequence
  Description of Artificial Sequence: Synthetic oligonucleotide
acacgcgcacuuacccgac

SEQ ID NO: 1535866 - RNA, 19 nt, Artificial Sequence
  Description of Artificial Sequence: Synthetic oligonucleotide
guagaacucucagcuaccu

SEQ ID NO: 1535867 - RNA, 19 nt, Artificial Sequence
  Description of Artificial Sequence: Synthetic oligonucleotide
agugccuugcagggucaug

SEQ ID NO: 1535868 - RNA, 19 nt, Artificial Sequence
  Description of Artificial Sequence: Synthetic oligonucleotide
aggaauccgugggaguuuu

SEQ ID NO: 1535869 - RNA, 19 nt, Artificial Sequence
  Description of Artificial Sequence: Synthetic oligonucleotide
aggccaagguuagaucaau

SEQ ID NO: 1535870 - RNA, 19 nt, Artificial Sequence
  Description of Artificial Sequence: Synthetic oligonucleotide
gauuacgcucugccauugu

SEQ ID NO: 1535871 - RNA, 19 nt, Artificial Sequence
  Description of Artificial Sequence: Synthetic oligonucleotide
gucuuuuagugaguucaua

SEQ ID NO: 1535872 - RNA, 19 nt, Artificial Sequence
  Description of Artificial Sequence: Synthetic oligonucleotide
guccuggauauauaauauu

SEQ ID NO: 1535873 - RNA, 19 nt, Artificial Sequence
  Description of Artificial Sequence: Synthetic oligonucleotide
cucggcuauuucugugaga

SEQ ID NO: 1535874 - RNA, 19 nt, Artificial Sequence
  Description of Artificial Sequence: Synthetic oligonucleotide
cagucaccguaaaugauuu

SEQ ID NO: 1535875 - RNA, 19 nt, Artificial Sequence
  Description of Artificial Sequence: Synthetic oligonucleotide
cgggguuacagcccaacac

SEQ ID NO: 1535876 - RNA, 19 nt, Artificial Sequence
  Description of Artificial Sequence: Synthetic oligonucleotide
cagggucauggggacccgg

SEQ ID NO: 1535877 - RNA, 19 nt, Artificial Sequence
  Description of Artificial Sequence: Synthetic oligonucleotide
caucgguguggccaggagu

SEQ ID NO: 1535878 - RNA, 19 nt, Artificial Sequence
  Description of Artificial Sequence: Synthetic oligonucleotide
ccauauggucaucggugug

SEQ ID NO: 1535879 - RNA, 19 nt, Artificial Sequence
  Description of Artificial Sequence: Synthetic oligonucleotide
cucccucggucuuaaucaa

SEQ ID NO: 1535880 - RNA, 19 nt, Artificial Sequence
  Description of Artificial Sequence: Synthetic oligonucleotide
cauggggacccgggguuac

SEQ ID NO: 1535881 - RNA, 19 nt, Artificial Sequence
  Description of Artificial Sequence: Synthetic oligonucleotide
gccauauggucaucggugu

SEQ ID NO: 1535882 - RNA, 19 nt, Artificial Sequence
  Description of Artificial Sequence: Synthetic oligonucleotide
agguaguguuuaauccauu

SEQ ID NO: 1535883 - RNA, 19 nt, Artificial Sequence
  Description of Artificial Sequence: Synthetic oligonucleotide
cugccauuguauguaaauu

SEQ ID NO: 1535884 - RNA, 19 nt, Artificial Sequence
  Description of Artificial Sequence: Synthetic oligonucleotide
gcccaacacgcgcacuuac

SEQ ID NO: 1535885 - RNA, 19 nt, Artificial Sequence
  Description of Artificial Sequence: Synthetic oligonucleotide
cuggaacauucuuguaaau

SEQ ID NO: 1535886 - RNA, 19 nt, Artificial Sequence
  Description of Artificial Sequence: Synthetic oligonucleotide
ucgguguggccaggaguau

SEQ ID NO: 1535887 - RNA, 19 nt, Artificial Sequence
  Description of Artificial Sequence: Synthetic oligonucleotide
gcaggagauuacgcucugc

SEQ ID NO: 1535888 - RNA, 19 nt, Artificial Sequence
  Description of Artificial Sequence: Synthetic oligonucleotide
ugcagacaucugugcuguu

SEQ ID NO: 1535889 - RNA, 19 nt, Artificial Sequence
  Description of Artificial Sequence: Synthetic oligonucleotide
acuaugccuccagcaugau

SEQ ID NO: 1535890 - RNA, 19 nt, Artificial Sequence
  Description of Artificial Sequence: Synthetic oligonucleotide
gcuguugauugaaguagcu

SEQ ID NO: 1535891 - RNA, 19 nt, Artificial Sequence
  Description of Artificial Sequence: Synthetic oligonucleotide
gaggaauccgugggaguuu

SEQ ID NO: 1535892 - RNA, 19 nt, Artificial Sequence
  Description of Artificial Sequence: Synthetic oligonucleotide
gguuugaauugugcaaauu

SEQ ID NO: 1535893 - RNA, 19 nt, Artificial Sequence
  Description of Artificial Sequence: Synthetic oligonucleotide
cagcccaacacgcgcacuu

SEQ ID NO: 1535894 - RNA, 19 nt, Artificial Sequence
  Description of Artificial Sequence: Synthetic oligonucleotide
cagguacguguuagugccu

SEQ ID NO: 1535895 - RNA, 19 nt, Artificial Sequence
  Description of Artificial Sequence: Synthetic oligonucleotide
ggccaagguuagaucaaua

SEQ ID NO: 1535896 - RNA, 19 nt, Artificial Sequence
  Description of Artificial Sequence: Synthetic oligonucleotide
ccgggguuacagcccaaca

SEQ ID NO: 1535897 - RNA, 19 nt, Artificial Sequence
  Description of Artificial Sequence: Synthetic oligonucleotide
cccgggguuacagcccaac

SEQ ID NO: 1535898 - RNA, 19 nt, Artificial Sequence
  Description of Artificial Sequence: Synthetic oligonucleotide
uggcucccucggucuuaau

SEQ ID NO: 1535899 - RNA, 19 nt, Artificial Sequence
  Description of Artificial Sequence: Synthetic oligonucleotide
ccuucuccuaggauacaau

SEQ ID NO: 1535900 - RNA, 19 nt, Artificial Sequence
  Description of Artificial Sequence: Synthetic oligonucleotide
ccccagaaaauauggcguu

SEQ ID NO: 1535901 - RNA, 19 nt, Artificial Sequence
  Description of Artificial Sequence: Synthetic oligonucleotide
gcaugaucgcagugccaau

SEQ ID NO: 1535902 - RNA, 19 nt, Artificial Sequence
  Description of Artificial Sequence: Synthetic oligonucleotide
cacgcgcacuuacccgacu

SEQ ID NO: 1535903 - RNA, 19 nt, Artificial Sequence
  Description of Artificial Sequence: Synthetic oligonucleotide
gucccaccagguacguguu

SEQ ID NO: 1535904 - RNA, 19 nt, Artificial Sequence
  Description of Artificial Sequence: Synthetic oligonucleotide
gcagugccaaugagucacu

SEQ ID NO: 1535905 - RNA, 19 nt, Artificial Sequence
  Description of Artificial Sequence: Synthetic oligonucleotide
cggcuauuucugugagaaa

SEQ ID NO: 1535906 - RNA, 19 nt, Artificial Sequence
  Description of Artificial Sequence: Synthetic oligonucleotide
cggucccaccagguacgug

SEQ ID NO: 1535907 - RNA, 19 nt, Artificial Sequence
  Description of Artificial Sequence: Synthetic oligonucleotide
ccggucccaccagguacgu

SEQ ID NO: 1535908 - RNA, 19 nt, Artificial Sequence
  Description of Artificial Sequence: Synthetic oligonucleotide
uuuauauuaacucaucccc

SEQ ID NO: 1535909 - RNA, 19 nt, Artificial Sequence
  Description of Artificial Sequence: Synthetic oligonucleotide
uuuguuaucagcacuauug

SEQ ID NO: 1535910 - RNA, 19 nt, Artificial Sequence
  Description of Artificial Sequence: Synthetic oligonucleotide
uccagaucaaaguagaugc

SEQ ID NO: 1535911 - RNA, 19 nt, Artificial Sequence
  Description of Artificial Sequence: Synthetic oligonucleotide
uggacuaaaggcuauacag

SEQ ID NO: 1535912 - RNA, 19 nt, Artificial Sequence
  Description of Artificial Sequence: Synthetic oligonucleotide
uauuggucaagauacagga

SEQ ID NO: 1535913 - RNA, 19 nt, Artificial Sequence
  Description of Artificial Sequence: Synthetic oligonucleotide
uauuaacucauccccacag

SEQ ID NO: 1535914 - RNA, 19 nt, Artificial Sequence
  Description of Artificial Sequence: Synthetic oligonucleotide
cauucgaagaacaggaacc

SEQ ID NO: 1535915 - RNA, 19 nt, Artificial Sequence
  Description of Artificial Sequence: Synthetic oligonucleotide
aagcuaggaggucaggggc

SEQ ID NO: 1535916 - RNA, 19 nt, Artificial Sequence
  Description of Artificial Sequence: Synthetic oligonucleotide
uuggucaagauacaggaac

SEQ ID NO: 1535917 - RNA, 19 nt, Artificial Sequence
  Description of Artificial Sequence: Synthetic oligonucleotide
cuggauguggaaaagacac

SEQ ID NO: 1535918 - RNA, 19 nt, Artificial Sequence
  Description of Artificial Sequence: Synthetic oligonucleotide
uguaaauccgccgaguuug

SEQ ID NO: 1535919 - RNA, 19 nt, Artificial Sequence
  Description of Artificial Sequence: Synthetic oligonucleotide
uauacaggagaugaugccg

SEQ ID NO: 1535920 - RNA, 19 nt, Artificial Sequence
  Description of Artificial Sequence: Synthetic oligonucleotide
uugccacucacuaagaacu

SEQ ID NO: 1535921 - RNA, 19 nt, Artificial Sequence
  Description of Artificial Sequence: Synthetic oligonucleotide
uuauauuaacucaucccca

SEQ ID NO: 1535922 - RNA, 19 nt, Artificial Sequence
  Description of Artificial Sequence: Synthetic oligonucleotide
cagcaguaaucauagaugg

SEQ ID NO: 1535923 - RNA, 19 nt, Artificial Sequence
  Description of Artificial Sequence: Synthetic oligonucleotide
agaguugggaaccauccgg

SEQ ID NO: 1535924 - RNA, 19 nt, Artificial Sequence
  Description of Artificial Sequence: Synthetic oligonucleotide
gaagccgccauucaggaug

SEQ ID NO: 1535925 - RNA, 19 nt, Artificial Sequence
  Description of Artificial Sequence: Synthetic oligonucleotide
uaguguacggccauaggag

SEQ ID NO: 1535926 - RNA, 19 nt, Artificial Sequence
  Description of Artificial Sequence: Synthetic oligonucleotide
cuaagaacugcccacucgg

SEQ ID NO: 1535927 - RNA, 19 nt, Artificial Sequence
  Description of Artificial Sequence: Synthetic oligonucleotide
auuaacucauccccacagc

SEQ ID NO: 1535928 - RNA, 19 nt, Artificial Sequence
  Description of Artificial Sequence: Synthetic oligonucleotide
agaaucuguggcuaccugg

SEQ ID NO: 1535929 - RNA, 19 nt, Artificial Sequence
  Description of Artificial Sequence: Synthetic oligonucleotide
aaguucggcauccuuucgg

SEQ ID NO: 1535930 - RNA, 19 nt, Artificial Sequence
  Description of Artificial Sequence: Synthetic oligonucleotide
aagagagacuguccgggac

SEQ ID NO: 1535931 - RNA, 19 nt, Artificial Sequence
  Description of Artificial Sequence: Synthetic oligonucleotide
uggaacacaaccgagccag

SEQ ID NO: 1535932 - RNA, 19 nt, Artificial Sequence
  Description of Artificial Sequence: Synthetic oligonucleotide
uauauuaacucauccccac

SEQ ID NO: 1535933 - RNA, 19 nt, Artificial Sequence
  Description of Artificial Sequence: Synthetic oligonucleotide
aagcaaaggugggugauac

SEQ ID NO: 1535934 - RNA, 19 nt, Artificial Sequence
  Description of Artificial Sequence: Synthetic oligonucleotide
aagaguugggaaccauccg

SEQ ID NO: 1535935 - RNA, 19 nt, Artificial Sequence
  Description of Artificial Sequence: Synthetic oligonucleotide
acuaagaacugcccacucg

SEQ ID NO: 1535936 - RNA, 19 nt, Artificial Sequence
  Description of Artificial Sequence: Synthetic oligonucleotide
aauucguccaggugguugu

SEQ ID NO: 1535937 - RNA, 19 nt, Artificial Sequence
  Description of Artificial Sequence: Synthetic oligonucleotide
uggucaagauacaggaacc

SEQ ID NO: 1535938 - RNA, 19 nt, Artificial Sequence
  Description of Artificial Sequence: Synthetic oligonucleotide
auucuguagagcaagcuag

SEQ ID NO: 1535939 - RNA, 19 nt, Artificial Sequence
  Description of Artificial Sequence: Synthetic oligonucleotide
gaagagguugccaucgggg

SEQ ID NO: 1535940 - RNA, 19 nt, Artificial Sequence
  Description of Artificial Sequence: Synthetic oligonucleotide
agaacugcccacucggguc

SEQ ID NO: 1535941 - RNA, 19 nt, Artificial Sequence
  Description of Artificial Sequence: Synthetic oligonucleotide
gacgucuucauucuguaga

SEQ ID NO: 1535942 - RNA, 19 nt, Artificial Sequence
  Description of Artificial Sequence: Synthetic oligonucleotide
aaggccucguugcaccggc

SEQ ID NO: 1535943 - RNA, 19 nt, Artificial Sequence
  Description of Artificial Sequence: Synthetic oligonucleotide
uuguaagcgcggaaggaag

SEQ ID NO: 1535944 - RNA, 19 nt, Artificial Sequence
  Description of Artificial Sequence: Synthetic oligonucleotide
ugguuguaagcgcggaagg

SEQ ID NO: 1535945 - RNA, 19 nt, Artificial Sequence
  Description of Artificial Sequence: Synthetic oligonucleotide
cuguccgggacuaagaguc

SEQ ID NO: 1535946 - RNA, 19 nt, Artificial Sequence
  Description of Artificial Sequence: Synthetic oligonucleotide
accagcaguaaucauagau

SEQ ID NO: 1535947 - RNA, 19 nt, Artificial Sequence
  Description of Artificial Sequence: Synthetic oligonucleotide
uggaaacaugcgcuggccg

SEQ ID NO: 1535948 - RNA, 19 nt, Artificial Sequence
  Description of Artificial Sequence: Synthetic oligonucleotide
acacaaccgagccagccac

SEQ ID NO: 1535949 - RNA, 19 nt, Artificial Sequence
  Description of Artificial Sequence: Synthetic oligonucleotide
cuauacaggagaugaugcc

SEQ ID NO: 1535950 - RNA, 19 nt, Artificial Sequence
  Description of Artificial Sequence: Synthetic oligonucleotide
uggauguggaaaagacacg

SEQ ID NO: 1535951 - RNA, 19 nt, Artificial Sequence
  Description of Artificial Sequence: Synthetic oligonucleotide
caagcuaggaggucagggg

SEQ ID NO: 1535952 - RNA, 19 nt, Artificial Sequence
  Description of Artificial Sequence: Synthetic oligonucleotide
ucuuugcaaauguggcucg

SEQ ID NO: 1535953 - RNA, 19 nt, Artificial Sequence
  Description of Artificial Sequence: Synthetic oligonucleotide
gucacuucccgacucaaag

SEQ ID NO: 1535954 - RNA, 19 nt, Artificial Sequence
  Description of Artificial Sequence: Synthetic oligonucleotide
ggaaaagacacgcacaguc

SEQ ID NO: 1535955 - RNA, 19 nt, Artificial Sequence
  Description of Artificial Sequence: Synthetic oligonucleotide
agucuguauuuucauccac

SEQ ID NO: 1535956 - RNA, 19 nt, Artificial Sequence
  Description of Artificial Sequence: Synthetic oligonucleotide
aguucggcauccuuucggg

SEQ ID NO: 1535957 - RNA, 19 nt, Artificial Sequence
  Description of Artificial Sequence: Synthetic oligonucleotide
aagagguugccaucggggu

SEQ ID NO: 1535958 - RNA, 19 nt, Artificial Sequence
  Description of Artificial Sequence: Synthetic oligonucleotide
uccaccauucgaagaacag

SEQ ID NO: 1535959 - RNA, 19 nt, Artificial Sequence
  Description of Artificial Sequence: Synthetic oligonucleotide
aacacaaccgagccagcca

SEQ ID NO: 1535960 - RNA, 19 nt, Artificial Sequence
  Description of Artificial Sequence: Synthetic oligonucleotide
cucacuaagaacugcccac

SEQ ID NO: 1535961 - RNA, 19 nt, Artificial Sequence
  Description of Artificial Sequence: Synthetic oligonucleotide
acuauuggucaagauacag

SEQ ID NO: 1535962 - RNA, 19 nt, Artificial Sequence
  Description of Artificial Sequence: Synthetic oligonucleotide
agcacuauuggucaagaua

SEQ ID NO: 1535963 - RNA, 19 nt, Artificial Sequence
  Description of Artificial Sequence: Synthetic oligonucleotide
uaagaacugcccacucggg

SEQ ID NO: 1535964 - RNA, 19 nt, Artificial Sequence
  Description of Artificial Sequence: Synthetic oligonucleotide
aauccgccgaguuuguuau

SEQ ID NO: 1535965 - RNA, 19 nt, Artificial Sequence
  Description of Artificial Sequence: Synthetic oligonucleotide
uucuuugcaaauguggcuc

SEQ ID NO: 1535966 - RNA, 19 nt, Artificial Sequence
  Description of Artificial Sequence: Synthetic oligonucleotide
uccuggaacacaaccgagc

SEQ ID NO: 1535967 - RNA, 19 nt, Artificial Sequence
  Description of Artificial Sequence: Synthetic oligonucleotide
uguaagcgcggaaggaagc

SEQ ID NO: 1535968 - RNA, 19 nt, Artificial Sequence
  Description of Artificial Sequence: Synthetic oligonucleotide
uagaugcgcugauuggugg

SEQ ID NO: 1535969 - RNA, 19 nt, Artificial Sequence
  Description of Artificial Sequence: Synthetic oligonucleotide
uguuaucagcacuauuggu

SEQ ID NO: 1535970 - RNA, 19 nt, Artificial Sequence
  Description of Artificial Sequence: Synthetic oligonucleotide
aguagaggcaagcuagggu

SEQ ID NO: 1535971 - RNA, 19 nt, Artificial Sequence
  Description of Artificial Sequence: Synthetic oligonucleotide
aaauccgccgaguuuguua

SEQ ID NO: 1535972 - RNA, 19 nt, Artificial Sequence
  Description of Artificial Sequence: Synthetic oligonucleotide
ucggggugaaagcaaaggu

SEQ ID NO: 1535973 - RNA, 19 nt, Artificial Sequence
  Description of Artificial Sequence: Synthetic oligonucleotide
acuaagagucgcuccuccg

SEQ ID NO: 1535974 - RNA, 19 nt, Artificial Sequence
  Description of Artificial Sequence: Synthetic oligonucleotide
ugcaaauguggcucgcacc

SEQ ID NO: 1535975 - RNA, 19 nt, Artificial Sequence
  Description of Artificial Sequence: Synthetic oligonucleotide
cucgcagucucuaccaggc

SEQ ID NO: 1535976 - RNA, 19 nt, Artificial Sequence
  Description of Artificial Sequence: Synthetic oligonucleotide
gugaaugcaucccagaugu

SEQ ID NO: 1535977 - RNA, 19 nt, Artificial Sequence
  Description of Artificial Sequence: Synthetic oligonucleotide
acgucuucauucuguagag

SEQ ID NO: 1535978 - RNA, 19 nt, Artificial Sequence
  Description of Artificial Sequence: Synthetic oligonucleotide
aggagaaccaucaucccag

SEQ ID NO: 1535979 - RNA, 19 nt, Artificial Sequence
  Description of Artificial Sequence: Synthetic oligonucleotide
cuaguguacggccauagga

SEQ ID NO: 1535980 - RNA, 19 nt, Artificial Sequence
  Description of Artificial Sequence: Synthetic oligonucleotide
agaauaccagcaguaauca

SEQ ID NO: 1535981 - RNA, 19 nt, Artificial Sequence
  Description of Artificial Sequence: Synthetic oligonucleotide
agagaauaccagcaguaau

SEQ ID NO: 1535982 - RNA, 19 nt, Artificial Sequence
  Description of Artificial Sequence: Synthetic oligonucleotide
aaagacacgcacaguccgg

SEQ ID NO: 1535983 - RNA, 19 nt, Artificial Sequence
  Description of Artificial Sequence: Synthetic oligonucleotide
gcaguaaucauagauggug

SEQ ID NO: 1535984 - RNA, 19 nt, Artificial Sequence
  Description of Artificial Sequence: Synthetic oligonucleotide
acucacuaagaacugccca

SEQ ID NO: 1535985 - RNA, 19 nt, Artificial Sequence
  Description of Artificial Sequence: Synthetic oligonucleotide
cauaggaggugucuggcug

SEQ ID NO: 1535986 - RNA, 19 nt, Artificial Sequence
  Description of Artificial Sequence: Synthetic oligonucleotide
caccauucgaagaacagga

SEQ ID NO: 1535987 - RNA, 19 nt, Artificial Sequence
  Description of Artificial Sequence: Synthetic oligonucleotide
gcacuauuggucaagauac

SEQ ID NO: 1535988 - RNA, 19 nt, Artificial Sequence
  Description of Artificial Sequence: Synthetic oligonucleotide
ucacccuccaccauucgaa

SEQ ID NO: 1535989 - RNA, 19 nt, Artificial Sequence
  Description of Artificial Sequence: Synthetic oligonucleotide
cauacaggccuaguguacg

SEQ ID NO: 1535990 - RNA, 19 nt, Artificial Sequence
  Description of Artificial Sequence: Synthetic oligonucleotide
gaguugggaaccauccggg

SEQ ID NO: 1535991 - RNA, 19 nt, Artificial Sequence
  Description of Artificial Sequence: Synthetic oligonucleotide
uaagagucgcuccuccgac

SEQ ID NO: 1535992 - RNA, 19 nt, Artificial Sequence
  Description of Artificial Sequence: Synthetic oligonucleotide
cacagagaccauuccauug

SEQ ID NO: 1535993 - RNA, 19 nt, Artificial Sequence
  Description of Artificial Sequence: Synthetic oligonucleotide
uguugcggauccuggaaca

SEQ ID NO: 1535994 - RNA, 19 nt, Artificial Sequence
  Description of Artificial Sequence: Synthetic oligonucleotide
aggcauacaggccuagugu

SEQ ID NO: 1535995 - RNA, 19 nt, Artificial Sequence
  Description of Artificial Sequence: Synthetic oligonucleotide
gagaccauuccauuggugu

SEQ ID NO: 1535996 - RNA, 19 nt, Artificial Sequence
  Description of Artificial Sequence: Synthetic oligonucleotide
ggaaacaugcgcuggccgg

SEQ ID NO: 1535997 - RNA, 19 nt, Artificial Sequence
  Description of Artificial Sequence: Synthetic oligonucleotide
ucccuuggggcacuggagc

SEQ ID NO: 1535998 - RNA, 19 nt, Artificial Sequence
  Description of Artificial Sequence: Synthetic oligonucleotide
auauuaacucauccccaca

SEQ ID NO: 1535999 - RNA, 19 nt, Artificial Sequence
  Description of Artificial Sequence: Synthetic oligonucleotide
uugcaaauguggcucgcac

SEQ ID NO: 1536000 - RNA, 19 nt, Artificial Sequence
  Description of Artificial Sequence: Synthetic oligonucleotide
gaaguucggcauccuuucg

SEQ ID NO: 1536001 - RNA, 19 nt, Artificial Sequence
  Description of Artificial Sequence: Synthetic oligonucleotide
aagcaguagccaguagagg

SEQ ID NO: 1536002 - RNA, 19 nt, Artificial Sequence
  Description of Artificial Sequence: Synthetic oligonucleotide
ugagccgcugucaauucgu

SEQ ID NO: 1536003 - RNA, 19 nt, Artificial Sequence
  Description of Artificial Sequence: Synthetic oligonucleotide
auggacuaaaggcuauaca

SEQ ID NO: 1536004 - RNA, 19 nt, Artificial Sequence
  Description of Artificial Sequence: Synthetic oligonucleotide
auacaggccuaguguacgg

SEQ ID NO: 1536005 - RNA, 19 nt, Artificial Sequence
  Description of Artificial Sequence: Synthetic oligonucleotide
uccgacgucuucauucugu

SEQ ID NO: 1536006 - RNA, 19 nt, Artificial Sequence
  Description of Artificial Sequence: Synthetic oligonucleotide
ggacuaaaggcuauacagg

SEQ ID NO: 1536007 - RNA, 19 nt, Artificial Sequence
  Description of Artificial Sequence: Synthetic oligonucleotide
ggucauuagggcuggcugg

SEQ ID NO: 1536008 - RNA, 19 nt, Artificial Sequence
  Description of Artificial Sequence: Synthetic oligonucleotide
gggucggucaucuccaccg

SEQ ID NO: 1536009 - RNA, 19 nt, Artificial Sequence
  Description of Artificial Sequence: Synthetic oligonucleotide
aggcaagcuagggugaagg

SEQ ID NO: 1536010 - RNA, 19 nt, Artificial Sequence
  Description of Artificial Sequence: Synthetic oligonucleotide
gauggacuaaaggcuauac

SEQ ID NO: 1536011 - RNA, 19 nt, Artificial Sequence
  Description of Artificial Sequence: Synthetic oligonucleotide
agagagacuguccgggacu

SEQ ID NO: 1536012 - RNA, 19 nt, Artificial Sequence
  Description of Artificial Sequence: Synthetic oligonucleotide
ucaaaguagaugcgcugau

SEQ ID NO: 1536013 - RNA, 19 nt, Artificial Sequence
  Description of Artificial Sequence: Synthetic oligonucleotide
uggccucccagcaaggcga

SEQ ID NO: 1536014 - RNA, 19 nt, Artificial Sequence
  Description of Artificial Sequence: Synthetic oligonucleotide
guggcauagggagagcagg

SEQ ID NO: 1536015 - RNA, 19 nt, Artificial Sequence
  Description of Artificial Sequence: Synthetic oligonucleotide
uguugccacucacuaagaa

SEQ ID NO: 1536016 - RNA, 19 nt, Artificial Sequence
  Description of Artificial Sequence: Synthetic oligonucleotide
ucacuucccgacucaaaga

SEQ ID NO: 1536017 - RNA, 19 nt, Artificial Sequence
  Description of Artificial Sequence: Synthetic oligonucleotide
agccgcugucaauucgucc

SEQ ID NO: 1536018 - RNA, 19 nt, Artificial Sequence
  Description of Artificial Sequence: Synthetic oligonucleotide
ugcggauccuggaacacaa

SEQ ID NO: 1536019 - RNA, 19 nt, Artificial Sequence
  Description of Artificial Sequence: Synthetic oligonucleotide
ccagcaguaaucauagaug

SEQ ID NO: 1536020 - RNA, 19 nt, Artificial Sequence
  Description of Artificial Sequence: Synthetic oligonucleotide
cacucacuaagaacugccc

SEQ ID NO: 1536021 - RNA, 19 nt, Artificial Sequence
  Description of Artificial Sequence: Synthetic oligonucleotide
gugguuguaagcgcggaag

SEQ ID NO: 1536022 - RNA, 19 nt, Artificial Sequence
  Description of Artificial Sequence: Synthetic oligonucleotide
uuguaaauccgccgaguuu

SEQ ID NO: 1536023 - RNA, 19 nt, Artificial Sequence
  Description of Artificial Sequence: Synthetic oligonucleotide
ucggguccagaucaaagua

SEQ ID NO: 1536024 - RNA, 19 nt, Artificial Sequence
  Description of Artificial Sequence: Synthetic oligonucleotide
agguuguaaauccgccgag

SEQ ID NO: 1536025 - RNA, 19 nt, Artificial Sequence
  Description of Artificial Sequence: Synthetic oligonucleotide
aagcgcggaaggaagcccg

SEQ ID NO: 1536026 - RNA, 19 nt, Artificial Sequence
  Description of Artificial Sequence: Synthetic oligonucleotide
uguccgggacuaagagucg

SEQ ID NO: 1536027 - RNA, 19 nt, Artificial Sequence
  Description of Artificial Sequence: Synthetic oligonucleotide
agugagccgcugucaauuc

SEQ ID NO: 1536028 - RNA, 19 nt, Artificial Sequence
  Description of Artificial Sequence: Synthetic oligonucleotide
gcuauacaggagaugaugc

SEQ ID NO: 1536029 - RNA, 19 nt, Artificial Sequence
  Description of Artificial Sequence: Synthetic oligonucleotide
ugccggagaucccagcaca

SEQ ID NO: 1536030 - RNA, 19 nt, Artificial Sequence
  Description of Artificial Sequence: Synthetic oligonucleotide
auccacaggggucccuugg

SEQ ID NO: 1536031 - RNA, 19 nt, Artificial Sequence
  Description of Artificial Sequence: Synthetic oligonucleotide
gugaaggcucacuccauug

SEQ ID NO: 1536032 - RNA, 19 nt, Artificial Sequence
  Description of Artificial Sequence: Synthetic oligonucleotide
ucacuaagaacugcccacu

SEQ ID NO: 1536033 - RNA, 19 nt, Artificial Sequence
  Description of Artificial Sequence: Synthetic oligonucleotide
ccagaugugaacuggguuc

SEQ ID NO: 1536034 - RNA, 19 nt, Artificial Sequence
  Description of Artificial Sequence: Synthetic oligonucleotide
caggcauacaggccuagug

SEQ ID NO: 1536035 - RNA, 19 nt, Artificial Sequence
  Description of Artificial Sequence: Synthetic oligonucleotide
gccaguagaggcaagcuag

SEQ ID NO: 1536036 - RNA, 19 nt, Artificial Sequence
  Description of Artificial Sequence: Synthetic oligonucleotide
uccgccgaguuuguuauca

SEQ ID NO: 1536037 - RNA, 19 nt, Artificial Sequence
  Description of Artificial Sequence: Synthetic oligonucleotide
agagucgcuccuccgacgu

SEQ ID NO: 1536038 - RNA, 19 nt, Artificial Sequence
  Description of Artificial Sequence: Synthetic oligonucleotide
uguacggccauaggagcca

SEQ ID NO: 1536039 - RNA, 19 nt, Artificial Sequence
  Description of Artificial Sequence: Synthetic oligonucleotide
acuguccgggacuaagagu

SEQ ID NO: 1536040 - RNA, 19 nt, Artificial Sequence
  Description of Artificial Sequence: Synthetic oligonucleotide
aaggcucacuccauuggug

SEQ ID NO: 1536041 - RNA, 19 nt, Artificial Sequence
  Description of Artificial Sequence: Synthetic oligonucleotide
ucagcacuauuggucaaga

SEQ ID NO: 1536042 - RNA, 19 nt, Artificial Sequence
  Description of Artificial Sequence: Synthetic oligonucleotide
acaggcguaaaggggcugg

SEQ ID NO: 1536043 - RNA, 19 nt, Artificial Sequence
  Description of Artificial Sequence: Synthetic oligonucleotide
cagguuguaaauccgccga

SEQ ID NO: 1536044 - RNA, 19 nt, Artificial Sequence
  Description of Artificial Sequence: Synthetic oligonucleotide
acauaggaggugucuggcu

SEQ ID NO: 1536045 - RNA, 19 nt, Artificial Sequence
  Description of Artificial Sequence: Synthetic oligonucleotide
guagccaguagaggcaagc

SEQ ID NO: 1536046 - RNA, 19 nt, Artificial Sequence
  Description of Artificial Sequence: Synthetic oligonucleotide
caauucguccaggugguug

SEQ ID NO: 1536047 - RNA, 19 nt, Artificial Sequence
  Description of Artificial Sequence: Synthetic oligonucleotide
ggcuauacaggagaugaug

SEQ ID NO: 1536048 - RNA, 19 nt, Artificial Sequence
  Description of Artificial Sequence: Synthetic oligonucleotide
ucccagaugugaacugggu

SEQ ID NO: 1536049 - RNA, 19 nt, Artificial Sequence
  Description of Artificial Sequence: Synthetic oligonucleotide
cuaagagucgcuccuccga

SEQ ID NO: 1536050 - RNA, 19 nt, Artificial Sequence
  Description of Artificial Sequence: Synthetic oligonucleotide
cuuucgggcuccugagaag

SEQ ID NO: 1536051 - RNA, 19 nt, Artificial Sequence
  Description of Artificial Sequence: Synthetic oligonucleotide
ccgccauucaggaugggcg

SEQ ID NO: 1536052 - RNA, 19 nt, Artificial Sequence
  Description of Artificial Sequence: Synthetic oligonucleotide
aacaugcgcuggccggaag

SEQ ID NO: 1536053 - RNA, 19 nt, Artificial Sequence
  Description of Artificial Sequence: Synthetic oligonucleotide
uaagcgcggaaggaagccc

SEQ ID NO: 1536054 - RNA, 19 nt, Artificial Sequence
  Description of Artificial Sequence: Synthetic oligonucleotide
ugucacccuccaccauucg

SEQ ID NO: 1536055 - RNA, 19 nt, Artificial Sequence
  Description of Artificial Sequence: Synthetic oligonucleotide
agaugcgcugauugguggu

SEQ ID NO: 1536056 - RNA, 19 nt, Artificial Sequence
  Description of Artificial Sequence: Synthetic oligonucleotide
accgcauggcgguggcacc

SEQ ID NO: 1536057 - RNA, 19 nt, Artificial Sequence
  Description of Artificial Sequence: Synthetic oligonucleotide
guaagcgcggaaggaagcc

SEQ ID NO: 1536058 - RNA, 19 nt, Artificial Sequence
  Description of Artificial Sequence: Synthetic oligonucleotide
gcaagcuaggaggucaggg

SEQ ID NO: 1536059 - RNA, 19 nt, Artificial Sequence
  Description of Artificial Sequence: Synthetic oligonucleotide
cuccauugaugucccacac

SEQ ID NO: 1536060 - RNA, 19 nt, Artificial Sequence
  Description of Artificial Sequence: Synthetic oligonucleotide
ccacucacuaagaacugcc

SEQ ID NO: 1536061 - RNA, 19 nt, Artificial Sequence
  Description of Artificial Sequence: Synthetic oligonucleotide
aaagcaaaggugggugaua

SEQ ID NO: 1536062 - RNA, 19 nt, Artificial Sequence
  Description of Artificial Sequence: Synthetic oligonucleotide
caggugguuguaagcgcgg

SEQ ID NO: 1536063 - RNA, 19 nt, Artificial Sequence
  Description of Artificial Sequence: Synthetic oligonucleotide
ucuggcccugcuucuuugc

SEQ ID NO: 1536064 - RNA, 19 nt, Artificial Sequence
  Description of Artificial Sequence: Synthetic oligonucleotide
gagguugccaucgggguga

SEQ ID NO: 1536065 - RNA, 19 nt, Artificial Sequence
  Description of Artificial Sequence: Synthetic oligonucleotide
cauagggagagcaggggaa

SEQ ID NO: 1536066 - RNA, 19 nt, Artificial Sequence
  Description of Artificial Sequence: Synthetic oligonucleotide
acaaccgagccagccacag

SEQ ID NO: 1536067 - RNA, 19 nt, Artificial Sequence
  Description of Artificial Sequence: Synthetic oligonucleotide
guuguaagcgcggaaggaa

SEQ ID NO: 1536068 - RNA, 19 nt, Artificial Sequence
  Description of Artificial Sequence: Synthetic oligonucleotide
ccagaucaaaguagaugcg

SEQ ID NO: 1536069 - RNA, 19 nt, Artificial Sequence
  Description of Artificial Sequence: Synthetic oligonucleotide
cuggaaacaugcgcuggcc

SEQ ID NO: 1536070 - RNA, 19 nt, Artificial Sequence
  Description of Artificial Sequence: Synthetic oligonucleotide
uccauuggugcaguccuuc

SEQ ID NO: 1536071 - RNA, 19 nt, Artificial Sequence
  Description of Artificial Sequence: Synthetic oligonucleotide
uccgggacuaagagucgcu

SEQ ID NO: 1536072 - RNA, 19 nt, Artificial Sequence
  Description of Artificial Sequence: Synthetic oligonucleotide
gaaacaugcgcuggccgga

SEQ ID NO: 1536073 - RNA, 19 nt, Artificial Sequence
  Description of Artificial Sequence: Synthetic oligonucleotide
uacaggccuaguguacggc

SEQ ID NO: 1536074 - RNA, 19 nt, Artificial Sequence
  Description of Artificial Sequence: Synthetic oligonucleotide
gaaggcucacuccauuggu

SEQ ID NO: 1536075 - RNA, 19 nt, Artificial Sequence
  Description of Artificial Sequence: Synthetic oligonucleotide
acagaaguucggcauccuu

SEQ ID NO: 1536076 - RNA, 19 nt, Artificial Sequence
  Description of Artificial Sequence: Synthetic oligonucleotide
ugggcguggcauagggaga

SEQ ID NO: 1536077 - RNA, 19 nt, Artificial Sequence
  Description of Artificial Sequence: Synthetic oligonucleotide
agagagugagccgcuguca

SEQ ID NO: 1536078 - RNA, 19 nt, Artificial Sequence
  Description of Artificial Sequence: Synthetic oligonucleotide
uaucagcacuauuggucaa

SEQ ID NO: 1536079 - RNA, 19 nt, Artificial Sequence
  Description of Artificial Sequence: Synthetic oligonucleotide
ugguguugccacucacuaa

SEQ ID NO: 1536080 - RNA, 19 nt, Artificial Sequence
  Description of Artificial Sequence: Synthetic oligonucleotide
accgguucagagucuguau

SEQ ID NO: 1536081 - RNA, 19 nt, Artificial Sequence
  Description of Artificial Sequence: Synthetic oligonucleotide
gccgcugucaauucgucca

SEQ ID NO: 1536082 - RNA, 19 nt, Artificial Sequence
  Description of Artificial Sequence: Synthetic oligonucleotide
agucgcuccuccgacgucu

SEQ ID NO: 1536083 - RNA, 19 nt, Artificial Sequence
  Description of Artificial Sequence: Synthetic oligonucleotide
ugguggucacuucccgacu

SEQ ID NO: 1536084 - RNA, 19 nt, Artificial Sequence
  Description of Artificial Sequence: Synthetic oligonucleotide
gagcaagcuaggaggucag

SEQ ID NO: 1536085 - RNA, 19 nt, Artificial Sequence
  Description of Artificial Sequence: Synthetic oligonucleotide
cacuaagaacugcccacuc

SEQ ID NO: 1536086 - RNA, 19 nt, Artificial Sequence
  Description of Artificial Sequence: Synthetic oligonucleotide
gaaggaagcccggagcucu

SEQ ID NO: 1536087 - RNA, 19 nt, Artificial Sequence
  Description of Artificial Sequence: Synthetic oligonucleotide
ggucagaagagagacuguc

SEQ ID NO: 1536088 - RNA, 19 nt, Artificial Sequence
  Description of Artificial Sequence: Synthetic oligonucleotide
ucgcagucucuaccaggcc

SEQ ID NO: 1536089 - RNA, 19 nt, Artificial Sequence
  Description of Artificial Sequence: Synthetic oligonucleotide
auccuggaacacaaccgag

SEQ ID NO: 1536090 - RNA, 19 nt, Artificial Sequence
  Description of Artificial Sequence: Synthetic oligonucleotide
ucguugcaccggcugccag

SEQ ID NO: 1536091 - RNA, 19 nt, Artificial Sequence
  Description of Artificial Sequence: Synthetic oligonucleotide
accucgcagucucuaccag

SEQ ID NO: 1536092 - RNA, 19 nt, Artificial Sequence
  Description of Artificial Sequence: Synthetic oligonucleotide
aggaagcccggagcucucc

SEQ ID NO: 1536093 - RNA, 19 nt, Artificial Sequence
  Description of Artificial Sequence: Synthetic oligonucleotide
acaguccgguugaagccac

SEQ ID NO: 1536094 - RNA, 19 nt, Artificial Sequence
  Description of Artificial Sequence: Synthetic oligonucleotide
uccaccgcauggcgguggc

SEQ ID NO: 1536095 - RNA, 19 nt, Artificial Sequence
  Description of Artificial Sequence: Synthetic oligonucleotide
guuguaaauccgccgaguu

SEQ ID NO: 1536096 - RNA, 19 nt, Artificial Sequence
  Description of Artificial Sequence: Synthetic oligonucleotide
cacuauuggucaagauaca

SEQ ID NO: 1536097 - RNA, 19 nt, Artificial Sequence
  Description of Artificial Sequence: Synthetic oligonucleotide
gucacccuccaccauucga

SEQ ID NO: 1536098 - RNA, 19 nt, Artificial Sequence
  Description of Artificial Sequence: Synthetic oligonucleotide
ggcauagggagagcagggg

SEQ ID NO: 1536099 - RNA, 19 nt, Artificial Sequence
  Description of Artificial Sequence: Synthetic oligonucleotide
ugcgcugauugguggucac

SEQ ID NO: 1536100 - RNA, 19 nt, Artificial Sequence
  Description of Artificial Sequence: Synthetic oligonucleotide
ggcaagcuagggugaaggc

SEQ ID NO: 1536101 - RNA, 19 nt, Artificial Sequence
  Description of Artificial Sequence: Synthetic oligonucleotide
caggaugggcguggcauag

SEQ ID NO: 1536102 - RNA, 19 nt, Artificial Sequence
  Description of Artificial Sequence: Synthetic oligonucleotide
agcaagcuaggaggucagg

SEQ ID NO: 1536103 - RNA, 19 nt, Artificial Sequence
  Description of Artificial Sequence: Synthetic oligonucleotide
agaugugaacuggguucuc

SEQ ID NO: 1536104 - RNA, 19 nt, Artificial Sequence
  Description of Artificial Sequence: Synthetic oligonucleotide
caccgcauggcgguggcac

SEQ ID NO: 1536105 - RNA, 19 nt, Artificial Sequence
  Description of Artificial Sequence: Synthetic oligonucleotide
cggggugaaagcaaaggug

SEQ ID NO: 1536106 - RNA, 19 nt, Artificial Sequence
  Description of Artificial Sequence: Synthetic oligonucleotide
cauucaggaugggcguggc

SEQ ID NO: 1536107 - RNA, 19 nt, Artificial Sequence
  Description of Artificial Sequence: Synthetic oligonucleotide
gaaagcaaaggugggugau

SEQ ID NO: 1536108 - RNA, 19 nt, Artificial Sequence
  Description of Artificial Sequence: Synthetic oligonucleotide
cucggguccagaucaaagu

SEQ ID NO: 1536109 - RNA, 19 nt, Artificial Sequence
  Description of Artificial Sequence: Synthetic oligonucleotide
aaacaugcgcuggccggaa

SEQ ID NO: 1536110 - RNA, 19 nt, Artificial Sequence
  Description of Artificial Sequence: Synthetic oligonucleotide
cugccggagaucccagcac

SEQ ID NO: 1536111 - RNA, 19 nt, Artificial Sequence
  Description of Artificial Sequence: Synthetic oligonucleotide
ccucgcagucucuaccagg

SEQ ID NO: 1536112 - RNA, 19 nt, Artificial Sequence
  Description of Artificial Sequence: Synthetic oligonucleotide
uucgggcuccugagaagaa

SEQ ID NO: 1536113 - RNA, 19 nt, Artificial Sequence
  Description of Artificial Sequence: Synthetic oligonucleotide
gcaaggcgagaggagaacc

SEQ ID NO: 1536114 - RNA, 19 nt, Artificial Sequence
  Description of Artificial Sequence: Synthetic oligonucleotide
uagagcaagcuaggagguc

SEQ ID NO: 1536115 - RNA, 19 nt, Artificial Sequence
  Description of Artificial Sequence: Synthetic oligonucleotide
accauccggggagaagcag

SEQ ID NO: 1536116 - RNA, 19 nt, Artificial Sequence
  Description of Artificial Sequence: Synthetic oligonucleotide
gccuggauguggaaaagac

SEQ ID NO: 1536117 - RNA, 19 nt, Artificial Sequence
  Description of Artificial Sequence: Synthetic oligonucleotide
ggaaccaucaggcccuugu

SEQ ID NO: 1536118 - RNA, 19 nt, Artificial Sequence
  Description of Artificial Sequence: Synthetic oligonucleotide
guugcggauccuggaacac

SEQ ID NO: 1536119 - RNA, 19 nt, Artificial Sequence
  Description of Artificial Sequence: Synthetic oligonucleotide
uggcucgcaccucgcaguc

SEQ ID NO: 1536120 - RNA, 19 nt, Artificial Sequence
  Description of Artificial Sequence: Synthetic oligonucleotide
cuguggcuaccuggggucg

SEQ ID NO: 1536121 - RNA, 19 nt, Artificial Sequence
  Description of Artificial Sequence: Synthetic oligonucleotide
gcaccucgcagucucuacc

SEQ ID NO: 1536122 - RNA, 19 nt, Artificial Sequence
  Description of Artificial Sequence: Synthetic oligonucleotide
ccgguugaagccacagaag

SEQ ID NO: 1536123 - RNA, 19 nt, Artificial Sequence
  Description of Artificial Sequence: Synthetic oligonucleotide
uaccagcaguaaucauaga

SEQ ID NO: 1536124 - RNA, 19 nt, Artificial Sequence
  Description of Artificial Sequence: Synthetic oligonucleotide
gcaucccagaugugaacug

SEQ ID NO: 1536125 - RNA, 19 nt, Artificial Sequence
  Description of Artificial Sequence: Synthetic oligonucleotide
ccgggcaaggccucguugc

SEQ ID NO: 1536126 - RNA, 19 nt, Artificial Sequence
  Description of Artificial Sequence: Synthetic oligonucleotide
ccaucaggcccuuguugcg

SEQ ID NO: 1536127 - RNA, 19 nt, Artificial Sequence
  Description of Artificial Sequence: Synthetic oligonucleotide
cccuuguugcggauccugg

SEQ ID NO: 1536128 - RNA, 19 nt, Artificial Sequence
  Description of Artificial Sequence: Synthetic oligonucleotide
cccacucggguccagauca

SEQ ID NO: 1536129 - RNA, 19 nt, Artificial Sequence
  Description of Artificial Sequence: Synthetic oligonucleotide
gcuggccggaagcaguagc

SEQ ID NO: 1536130 - RNA, 19 nt, Artificial Sequence
  Description of Artificial Sequence: Synthetic oligonucleotide
guccgggacuaagagucgc

SEQ ID NO: 1536131 - RNA, 19 nt, Artificial Sequence
  Description of Artificial Sequence: Synthetic oligonucleotide
cgagaggagaaccaucauc

SEQ ID NO: 1536132 - RNA, 19 nt, Artificial Sequence
  Description of Artificial Sequence: Synthetic oligonucleotide
uccggcucgccuucaucuc

SEQ ID NO: 1536133 - RNA, 19 nt, Artificial Sequence
  Description of Artificial Sequence: Synthetic oligonucleotide
agaccacaggagguggcca

SEQ ID NO: 1536134 - RNA, 19 nt, Artificial Sequence
  Description of Artificial Sequence: Synthetic oligonucleotide
auccgccgaguuuguuauc

SEQ ID NO: 1536135 - RNA, 19 nt, Artificial Sequence
  Description of Artificial Sequence: Synthetic oligonucleotide
ccuggauguggaaaagaca

SEQ ID NO: 1536136 - RNA, 19 nt, Artificial Sequence
  Description of Artificial Sequence: Synthetic oligonucleotide
gguuguaagcgcggaagga

SEQ ID NO: 1536137 - RNA, 19 nt, Artificial Sequence
  Description of Artificial Sequence: Synthetic oligonucleotide
uggcgguggcaccgguuca

SEQ ID NO: 1536138 - RNA, 19 nt, Artificial Sequence
  Description of Artificial Sequence: Synthetic oligonucleotide
gucaauucguccagguggu

SEQ ID NO: 1536139 - RNA, 19 nt, Artificial Sequence
  Description of Artificial Sequence: Synthetic oligonucleotide
cagucucuaccaggccugg

SEQ ID NO: 1536140 - RNA, 19 nt, Artificial Sequence
  Description of Artificial Sequence: Synthetic oligonucleotide
gucucuaccaggccuggau

SEQ ID NO: 1536141 - RNA, 19 nt, Artificial Sequence
  Description of Artificial Sequence: Synthetic oligonucleotide
gggacuaagagucgcuccu

SEQ ID NO: 1536142 - RNA, 19 nt, Artificial Sequence
  Description of Artificial Sequence: Synthetic oligonucleotide
gaugggcguggcauaggga

SEQ ID NO: 1536143 - RNA, 19 nt, Artificial Sequence
  Description of Artificial Sequence: Synthetic oligonucleotide
agcuagggugaaggcucac

SEQ ID NO: 1536144 - RNA, 19 nt, Artificial Sequence
  Description of Artificial Sequence: Synthetic oligonucleotide
gggcagguuguaaauccgc

SEQ ID NO: 1536145 - RNA, 19 nt, Artificial Sequence
  Description of Artificial Sequence: Synthetic oligonucleotide
gagugagccgcugucaauu

SEQ ID NO: 1536146 - RNA, 19 nt, Artificial Sequence
  Description of Artificial Sequence: Synthetic oligonucleotide
ccauucaggaugggcgugg

SEQ ID NO: 1536147 - RNA, 19 nt, Artificial Sequence
  Description of Artificial Sequence: Synthetic oligonucleotide
gccuaguguacggccauag

SEQ ID NO: 1536148 - RNA, 19 nt, Artificial Sequence
  Description of Artificial Sequence: Synthetic oligonucleotide
guccgguugaagccacaga

SEQ ID NO: 1536149 - RNA, 19 nt, Artificial Sequence
  Description of Artificial Sequence: Synthetic oligonucleotide
aggugguuguaagcgcgga

SEQ ID NO: 1536150 - RNA, 19 nt, Artificial Sequence
  Description of Artificial Sequence: Synthetic oligonucleotide
gugucacccuccaccauuc

SEQ ID NO: 1536151 - RNA, 19 nt, Artificial Sequence
  Description of Artificial Sequence: Synthetic oligonucleotide
gagagacuguccgggacua

SEQ ID NO: 1536152 - RNA, 19 nt, Artificial Sequence
  Description of Artificial Sequence: Synthetic oligonucleotide
gcugccggagaucccagca

SEQ ID NO: 1536153 - RNA, 19 nt, Artificial Sequence
  Description of Artificial Sequence: Synthetic oligonucleotide
caaauguggcucgcaccuc

SEQ ID NO: 1536154 - RNA, 19 nt, Artificial Sequence
  Description of Artificial Sequence: Synthetic oligonucleotide
uaaauccgccgaguuuguu

SEQ ID NO: 1536155 - RNA, 19 nt, Artificial Sequence
  Description of Artificial Sequence: Synthetic oligonucleotide
gcauacaggccuaguguac

SEQ ID NO: 1536156 - RNA, 19 nt, Artificial Sequence
  Description of Artificial Sequence: Synthetic oligonucleotide
gucaagauacaggaaccau

SEQ ID NO: 1536157 - RNA, 19 nt, Artificial Sequence
  Description of Artificial Sequence: Synthetic oligonucleotide
agcgcggaaggaagcccgg

SEQ ID NO: 1536158 - RNA, 19 nt, Artificial Sequence
  Description of Artificial Sequence: Synthetic oligonucleotide
ucacuccauuggugcaguc

SEQ ID NO: 1536159 - RNA, 19 nt, Artificial Sequence
  Description of Artificial Sequence: Synthetic oligonucleotide
gcucgcaccucgcagucuc

SEQ ID NO: 1536160 - RNA, 19 nt, Artificial Sequence
  Description of Artificial Sequence: Synthetic oligonucleotide
ggucggucaucuccaccgc

SEQ ID NO: 1536161 - RNA, 19 nt, Artificial Sequence
  Description of Artificial Sequence: Synthetic oligonucleotide
ggugaaagcaaaggugggu

SEQ ID NO: 1536162 - RNA, 19 nt, Artificial Sequence
  Description of Artificial Sequence: Synthetic oligonucleotide
cagaugugaacuggguucu

SEQ ID NO: 1536163 - RNA, 19 nt, Artificial Sequence
  Description of Artificial Sequence: Synthetic oligonucleotide
cuccgacgucuucauucug

SEQ ID NO: 1536164 - RNA, 19 nt, Artificial Sequence
  Description of Artificial Sequence: Synthetic oligonucleotide
agacacgcacaguccgguu

SEQ ID NO: 1536165 - RNA, 19 nt, Artificial Sequence
  Description of Artificial Sequence: Synthetic oligonucleotide
cgggacuaagagucgcucc

SEQ ID NO: 1536166 - RNA, 19 nt, Artificial Sequence
  Description of Artificial Sequence: Synthetic oligonucleotide
ggccucguugcaccggcug

SEQ ID NO: 1536167 - RNA, 19 nt, Artificial Sequence
  Description of Artificial Sequence: Synthetic oligonucleotide
uggcaccgguucagagucu

SEQ ID NO: 1536168 - RNA, 19 nt, Artificial Sequence
  Description of Artificial Sequence: Synthetic oligonucleotide
ggcaccgguucagagucug

SEQ ID NO: 1536169 - RNA, 19 nt, Artificial Sequence
  Description of Artificial Sequence: Synthetic oligonucleotide
guggcucgcaccucgcagu

SEQ ID NO: 1536170 - RNA, 19 nt, Artificial Sequence
  Description of Artificial Sequence: Synthetic oligonucleotide
ggcccugcuucuuugcaaa

SEQ ID NO: 1536171 - RNA, 19 nt, Artificial Sequence
  Description of Artificial Sequence: Synthetic oligonucleotide
cguccaggugguuguaagc

SEQ ID NO: 1536172 - RNA, 19 nt, Artificial Sequence
  Description of Artificial Sequence: Synthetic oligonucleotide
ggugguuguaagcgcggaa

SEQ ID NO: 1536173 - RNA, 19 nt, Artificial Sequence
  Description of Artificial Sequence: Synthetic oligonucleotide
cguggcauagggagagcag

SEQ ID NO: 1536174 - RNA, 19 nt, Artificial Sequence
  Description of Artificial Sequence: Synthetic oligonucleotide
ggcguaaaggggcugggau

SEQ ID NO: 1536175 - RNA, 19 nt, Artificial Sequence
  Description of Artificial Sequence: Synthetic oligonucleotide
gccgccauucaggaugggc

SEQ ID NO: 1536176 - RNA, 19 nt, Artificial Sequence
  Description of Artificial Sequence: Synthetic oligonucleotide
cacaaccgagccagccaca

SEQ ID NO: 1536177 - RNA, 19 nt, Artificial Sequence
  Description of Artificial Sequence: Synthetic oligonucleotide
ucaauucguccaggugguu

SEQ ID NO: 1536178 - RNA, 19 nt, Artificial Sequence
  Description of Artificial Sequence: Synthetic oligonucleotide
gaacuggguucucccggcu

SEQ ID NO: 1536179 - RNA, 19 nt, Artificial Sequence
  Description of Artificial Sequence: Synthetic oligonucleotide
gagucgcuccuccgacguc

SEQ ID NO: 1536180 - RNA, 19 nt, Artificial Sequence
  Description of Artificial Sequence: Synthetic oligonucleotide
cguugcaccggcugccagc

SEQ ID NO: 1536181 - RNA, 19 nt, Artificial Sequence
  Description of Artificial Sequence: Synthetic oligonucleotide
ccauccggggagaagcaga

SEQ ID NO: 1536182 - RNA, 19 nt, Artificial Sequence
  Description of Artificial Sequence: Synthetic oligonucleotide
cagagaccauuccauuggu

SEQ ID NO: 1536183 - RNA, 19 nt, Artificial Sequence
  Description of Artificial Sequence: Synthetic oligonucleotide
ggugucacccuccaccauu

SEQ ID NO: 1536184 - RNA, 19 nt, Artificial Sequence
  Description of Artificial Sequence: Synthetic oligonucleotide
uugcaccggcugccagcug

SEQ ID NO: 1536185 - RNA, 19 nt, Artificial Sequence
  Description of Artificial Sequence: Synthetic oligonucleotide
ggcgguggcaccgguucag

SEQ ID NO: 1536186 - RNA, 19 nt, Artificial Sequence
  Description of Artificial Sequence: Synthetic oligonucleotide
guacggccauaggagccac

SEQ ID NO: 1536187 - RNA, 19 nt, Artificial Sequence
  Description of Artificial Sequence: Synthetic oligonucleotide
ccgcugucaauucguccag

SEQ ID NO: 1536188 - RNA, 19 nt, Artificial Sequence
  Description of Artificial Sequence: Synthetic oligonucleotide
ggaacacaaccgagccagc

SEQ ID NO: 1536189 - RNA, 19 nt, Artificial Sequence
  Description of Artificial Sequence: Synthetic oligonucleotide
caccgguucagagucugua

SEQ ID NO: 1536190 - RNA, 19 nt, Artificial Sequence
  Description of Artificial Sequence: Synthetic oligonucleotide
gccggagaucccagcacag

SEQ ID NO: 1536191 - RNA, 19 nt, Artificial Sequence
  Description of Artificial Sequence: Synthetic oligonucleotide
guaaauccgccgaguuugu

SEQ ID NO: 1536192 - RNA, 19 nt, Artificial Sequence
  Description of Artificial Sequence: Synthetic oligonucleotide
guaaaggggcugggaugga

SEQ ID NO: 1536193 - RNA, 19 nt, Artificial Sequence
  Description of Artificial Sequence: Synthetic oligonucleotide
ccaucggggugaaagcaaa

SEQ ID NO: 1536194 - RNA, 19 nt, Artificial Sequence
  Description of Artificial Sequence: Synthetic oligonucleotide
gcguggcauagggagagca

SEQ ID NO: 1536195 - RNA, 19 nt, Artificial Sequence
  Description of Artificial Sequence: Synthetic oligonucleotide
cucguugcaccggcugcca

SEQ ID NO: 1536196 - RNA, 19 nt, Artificial Sequence
  Description of Artificial Sequence: Synthetic oligonucleotide
aggaaccaucaggcccuug

SEQ ID NO: 1536197 - RNA, 19 nt, Artificial Sequence
  Description of Artificial Sequence: Synthetic oligonucleotide
auucguccaggugguugua

SEQ ID NO: 1536198 - RNA, 19 nt, Artificial Sequence
  Description of Artificial Sequence: Synthetic oligonucleotide
cgaguuuguuaucagcacu

SEQ ID NO: 1536199 - RNA, 19 nt, Artificial Sequence
  Description of Artificial Sequence: Synthetic oligonucleotide
gguucagagucuguauuuu

SEQ ID NO: 1536200 - RNA, 19 nt, Artificial Sequence
  Description of Artificial Sequence: Synthetic oligonucleotide
ccgccgaguuuguuaucag

SEQ ID NO: 1536201 - RNA, 19 nt, Artificial Sequence
  Description of Artificial Sequence: Synthetic oligonucleotide
ccgcauggcgguggcaccg

SEQ ID NO: 1536202 - RNA, 19 nt, Artificial Sequence
  Description of Artificial Sequence: Synthetic oligonucleotide
accgagccagccacagaau

SEQ ID NO: 1536203 - RNA, 19 nt, Artificial Sequence
  Description of Artificial Sequence: Synthetic oligonucleotide
gccaucggggugaaagcaa

SEQ ID NO: 1536204 - RNA, 19 nt, Artificial Sequence
  Description of Artificial Sequence: Synthetic oligonucleotide
ccauuccauugguguugcc

SEQ ID NO: 1536205 - RNA, 19 nt, Artificial Sequence
  Description of Artificial Sequence: Synthetic oligonucleotide
caguccgguugaagccaca

SEQ ID NO: 1536206 - RNA, 19 nt, Artificial Sequence
  Description of Artificial Sequence: Synthetic oligonucleotide
gcccacucggguccagauc

SEQ ID NO: 1536207 - RNA, 19 nt, Artificial Sequence
  Description of Artificial Sequence: Synthetic oligonucleotide
ccgggacuaagagucgcuc

SEQ ID NO: 1536208 - RNA, 19 nt, Artificial Sequence
  Description of Artificial Sequence: Synthetic oligonucleotide
ggucacuucccgacucaaa

SEQ ID NO: 1536209 - RNA, 19 nt, Artificial Sequence
  Description of Artificial Sequence: Synthetic oligonucleotide
cacucggguccagaucaaa

SEQ ID NO: 1536210 - RNA, 19 nt, Artificial Sequence
  Description of Artificial Sequence: Synthetic oligonucleotide
agccgccauucaggauggg

SEQ ID NO: 1536211 - RNA, 19 nt, Artificial Sequence
  Description of Artificial Sequence: Synthetic oligonucleotide
gcuagggugaaggcucacu

SEQ ID NO: 1536212 - RNA, 19 nt, Artificial Sequence
  Description of Artificial Sequence: Synthetic oligonucleotide
ccgacgucuucauucugua

SEQ ID NO: 1536213 - RNA, 19 nt, Artificial Sequence
  Description of Artificial Sequence: Synthetic oligonucleotide
cgcaccucgcagucucuac

SEQ ID NO: 1536214 - RNA, 19 nt, Artificial Sequence
  Description of Artificial Sequence: Synthetic oligonucleotide
ccuccgacgucuucauucu

SEQ ID NO: 1536215 - RNA, 19 nt, Artificial Sequence
  Description of Artificial Sequence: Synthetic oligonucleotide
cgcugucaauucguccagg

SEQ ID NO: 1536216 - RNA, 19 nt, Artificial Sequence
  Description of Artificial Sequence: Synthetic oligonucleotide
gguccagaucaaaguagau

SEQ ID NO: 1536217 - RNA, 19 nt, Artificial Sequence
  Description of Artificial Sequence: Synthetic oligonucleotide
cgcagucucuaccaggccu

SEQ ID NO: 1536218 - RNA, 19 nt, Artificial Sequence
  Description of Artificial Sequence: Synthetic oligonucleotide
cccagaugugaacuggguu

SEQ ID NO: 1536219 - RNA, 19 nt, Artificial Sequence
  Description of Artificial Sequence: Synthetic oligonucleotide
gccggaagcaguagccagu

SEQ ID NO: 1536220 - RNA, 19 nt, Artificial Sequence
  Description of Artificial Sequence: Synthetic oligonucleotide
cucgcaccucgcagucucu

SEQ ID NO: 1536221 - RNA, 19 nt, Artificial Sequence
  Description of Artificial Sequence: Synthetic oligonucleotide
gcagagagagugagccgcu

SEQ ID NO: 1536222 - RNA, 19 nt, Artificial Sequence
  Description of Artificial Sequence: Synthetic oligonucleotide
ccgguucagagucuguauu

SEQ ID NO: 1536223 - RNA, 19 nt, Artificial Sequence
  Description of Artificial Sequence: Synthetic oligonucleotide
gcucgccuucaucuccacu

SEQ ID NO: 1536224 - RNA, 19 nt, Artificial Sequence
  Description of Artificial Sequence: Synthetic oligonucleotide
ggcuggggucuuggucccc

SEQ ID NO: 1536225 - RNA, 19 nt, Artificial Sequence
  Description of Artificial Sequence: Synthetic oligonucleotide
cggcucgccuucaucucca

SEQ ID NO: 1536226 - RNA, 19 nt, Artificial Sequence
  Description of Artificial Sequence: Synthetic oligonucleotide
gcgcggaaggaagcccgga

SEQ ID NO: 1536227 - RNA, 19 nt, Artificial Sequence
  Description of Artificial Sequence: Synthetic oligonucleotide
gcgcuggccggaagcagua

SEQ ID NO: 1536228 - RNA, 19 nt, Artificial Sequence
  Description of Artificial Sequence: Synthetic oligonucleotide
cggcauccuuucgggcucc

SEQ ID NO: 1536229 - RNA, 19 nt, Artificial Sequence
  Description of Artificial Sequence: Synthetic oligonucleotide
cgcugauugguggucacuu

SEQ ID NO: 1536230 - RNA, 19 nt, Artificial Sequence
  Description of Artificial Sequence: Synthetic oligonucleotide
ggcucgcaccucgcagucu

SEQ ID NO: 1536231 - RNA, 19 nt, Artificial Sequence
  Description of Artificial Sequence: Synthetic oligonucleotide
ccggagcucuccagugaau

SEQ ID NO: 1536232 - RNA, 19 nt, Artificial Sequence
  Description of Artificial Sequence: Synthetic oligonucleotide
ccaccgcauggcgguggca

SEQ ID NO: 1536233 - RNA, 19 nt, Artificial Sequence
  Description of Artificial Sequence: Synthetic oligonucleotide
aauccaaggaucugaaagg

SEQ ID NO: 1536234 - RNA, 19 nt, Artificial Sequence
  Description of Artificial Sequence: Synthetic oligonucleotide
uuguuauagaguaugauac

SEQ ID NO: 1536235 - RNA, 19 nt, Artificial Sequence
  Description of Artificial Sequence: Synthetic oligonucleotide
ucauggguaaacaucauag

SEQ ID NO: 1536236 - RNA, 19 nt, Artificial Sequence
  Description of Artificial Sequence: Synthetic oligonucleotide
uauugggucaucaccaugg

SEQ ID NO: 1536237 - RNA, 19 nt, Artificial Sequence
  Description of Artificial Sequence: Synthetic oligonucleotide
aacuaaugcagaaagcccc

SEQ ID NO: 1536238 - RNA, 19 nt, Artificial Sequence
  Description of Artificial Sequence: Synthetic oligonucleotide
gacaucaugauuaucagag

SEQ ID NO: 1536239 - RNA, 19 nt, Artificial Sequence
  Description of Artificial Sequence: Synthetic oligonucleotide
gauauauugggucaucacc

SEQ ID NO: 1536240 - RNA, 19 nt, Artificial Sequence
  Description of Artificial Sequence: Synthetic oligonucleotide
gacaauaagaaagagggcc

SEQ ID NO: 1536241 - RNA, 19 nt, Artificial Sequence
  Description of Artificial Sequence: Synthetic oligonucleotide
gaagcaaugaacuaaugca

SEQ ID NO: 1536242 - RNA, 19 nt, Artificial Sequence
  Description of Artificial Sequence: Synthetic oligonucleotide
aaacauggcacccgauucc

SEQ ID NO: 1536243 - RNA, 19 nt, Artificial Sequence
  Description of Artificial Sequence: Synthetic oligonucleotide
uuuacuuugcauaucugga

SEQ ID NO: 1536244 - RNA, 19 nt, Artificial Sequence
  Description of Artificial Sequence: Synthetic oligonucleotide
gaggacaaugaguaaaggg

SEQ ID NO: 1536245 - RNA, 19 nt, Artificial Sequence
  Description of Artificial Sequence: Synthetic oligonucleotide
ugauuaggaaagcugagga

SEQ ID NO: 1536246 - RNA, 19 nt, Artificial Sequence
  Description of Artificial Sequence: Synthetic oligonucleotide
aacaacuucagggaaauga

SEQ ID NO: 1536247 - RNA, 19 nt, Artificial Sequence
  Description of Artificial Sequence: Synthetic oligonucleotide
uuuguuauagaguaugaua

SEQ ID NO: 1536248 - RNA, 19 nt, Artificial Sequence
  Description of Artificial Sequence: Synthetic oligonucleotide
auggguaaacaucauagag

SEQ ID NO: 1536249 - RNA, 19 nt, Artificial Sequence
  Description of Artificial Sequence: Synthetic oligonucleotide
ucagaaugcacacgaagag

SEQ ID NO: 1536250 - RNA, 19 nt, Artificial Sequence
  Description of Artificial Sequence: Synthetic oligonucleotide
aacuuuagccaaagaaucc

SEQ ID NO: 1536251 - RNA, 19 nt, Artificial Sequence
  Description of Artificial Sequence: Synthetic oligonucleotide
agcaaaagcuaguaagugg

SEQ ID NO: 1536252 - RNA, 19 nt, Artificial Sequence
  Description of Artificial Sequence: Synthetic oligonucleotide
uugacauagcgaaaucacg

SEQ ID NO: 1536253 - RNA, 19 nt, Artificial Sequence
  Description of Artificial Sequence: Synthetic oligonucleotide
uguccauggaucuugaagu

SEQ ID NO: 1536254 - RNA, 19 nt, Artificial Sequence
  Description of Artificial Sequence: Synthetic oligonucleotide
ugucauaacggagauuucg

SEQ ID NO: 1536255 - RNA, 19 nt, Artificial Sequence
  Description of Artificial Sequence: Synthetic oligonucleotide
gaugccucuugacauagcg

SEQ ID NO: 1536256 - RNA, 19 nt, Artificial Sequence
  Description of Artificial Sequence: Synthetic oligonucleotide
aauacaucucgauguagcu

SEQ ID NO: 1536257 - RNA, 19 nt, Artificial Sequence
  Description of Artificial Sequence: Synthetic oligonucleotide
caucaugauuaucagagag

SEQ ID NO: 1536258 - RNA, 19 nt, Artificial Sequence
  Description of Artificial Sequence: Synthetic oligonucleotide
ugggucaucaccauggcgu

SEQ ID NO: 1536259 - RNA, 19 nt, Artificial Sequence
  Description of Artificial Sequence: Synthetic oligonucleotide
aguagaagcguuuucggcu

SEQ ID NO: 1536260 - RNA, 19 nt, Artificial Sequence
  Description of Artificial Sequence: Synthetic oligonucleotide
aagugccgaaguaauagcc

SEQ ID NO: 1536261 - RNA, 19 nt, Artificial Sequence
  Description of Artificial Sequence: Synthetic oligonucleotide
cuugacauagcgaaaucac

SEQ ID NO: 1536262 - RNA, 19 nt, Artificial Sequence
  Description of Artificial Sequence: Synthetic oligonucleotide
uguuauagaguaugauacc

SEQ ID NO: 1536263 - RNA, 19 nt, Artificial Sequence
  Description of Artificial Sequence: Synthetic oligonucleotide
auccagauugccaaggagc

SEQ ID NO: 1536264 - RNA, 19 nt, Artificial Sequence
  Description of Artificial Sequence: Synthetic oligonucleotide
auaggugucuacaacacuc

SEQ ID NO: 1536265 - RNA, 19 nt, Artificial Sequence
  Description of Artificial Sequence: Synthetic oligonucleotide
auaacggagauuucggaca

SEQ ID NO: 1536266 - RNA, 19 nt, Artificial Sequence
  Description of Artificial Sequence: Synthetic oligonucleotide
aagaacugcucguucccac

SEQ ID NO: 1536267 - RNA, 19 nt, Artificial Sequence
  Description of Artificial Sequence: Synthetic oligonucleotide
agcgaaaucacgaggaagg

SEQ ID NO: 1536268 - RNA, 19 nt, Artificial Sequence
  Description of Artificial Sequence: Synthetic oligonucleotide
acaaugaguaaagggagac

SEQ ID NO: 1536269 - RNA, 19 nt, Artificial Sequence
  Description of Artificial Sequence: Synthetic oligonucleotide
uuguguaccagauugccaa

SEQ ID NO: 1536270 - RNA, 19 nt, Artificial Sequence
  Description of Artificial Sequence: Synthetic oligonucleotide
ucuacaacacucccagccc

SEQ ID NO: 1536271 - RNA, 19 nt, Artificial Sequence
  Description of Artificial Sequence: Synthetic oligonucleotide
acauagcgaaaucacgagg

SEQ ID NO: 1536272 - RNA, 19 nt, Artificial Sequence
  Description of Artificial Sequence: Synthetic oligonucleotide
acaauggcugugcacgccc

SEQ ID NO: 1536273 - RNA, 19 nt, Artificial Sequence
  Description of Artificial Sequence: Synthetic oligonucleotide
gagugaggcggauauauug

SEQ ID NO: 1536274 - RNA, 19 nt, Artificial Sequence
  Description of Artificial Sequence: Synthetic oligonucleotide
acugcucguucccacaccc

SEQ ID NO: 1536275 - RNA, 19 nt, Artificial Sequence
  Description of Artificial Sequence: Synthetic oligonucleotide
gauuccacaaggcacccug

SEQ ID NO: 1536276 - RNA, 19 nt, Artificial Sequence
  Description of Artificial Sequence: Synthetic oligonucleotide
aauaagaaagagggccagg

SEQ ID NO: 1536277 - RNA, 19 nt, Artificial Sequence
  Description of Artificial Sequence: Synthetic oligonucleotide
ucaugauuaucagagagau

SEQ ID NO: 1536278 - RNA, 19 nt, Artificial Sequence
  Description of Artificial Sequence: Synthetic oligonucleotide
accaaugacaauggcaaac

SEQ ID NO: 1536279 - RNA, 19 nt, Artificial Sequence
  Description of Artificial Sequence: Synthetic oligonucleotide
aaugcagucccuccacuca

SEQ ID NO: 1536280 - RNA, 19 nt, Artificial Sequence
  Description of Artificial Sequence: Synthetic oligonucleotide
auuaucgucagaugccucu

SEQ ID NO: 1536281 - RNA, 19 nt, Artificial Sequence
  Description of Artificial Sequence: Synthetic oligonucleotide
uguaccagauugccaagcc

SEQ ID NO: 1536282 - RNA, 19 nt, Artificial Sequence
  Description of Artificial Sequence: Synthetic oligonucleotide
gaaacauggcacccgauuc

SEQ ID NO: 1536283 - RNA, 19 nt, Artificial Sequence
  Description of Artificial Sequence: Synthetic oligonucleotide
auucgauccuuuguguacc

SEQ ID NO: 1536284 - RNA, 19 nt, Artificial Sequence
  Description of Artificial Sequence: Synthetic oligonucleotide
cauaacggagauuucggac

SEQ ID NO: 1536285 - RNA, 19 nt, Artificial Sequence
  Description of Artificial Sequence: Synthetic oligonucleotide
uuauagaguaugauaccaa

SEQ ID NO: 1536286 - RNA, 19 nt, Artificial Sequence
  Description of Artificial Sequence: Synthetic oligonucleotide
uccagauugccaaggagcu

SEQ ID NO: 1536287 - RNA, 19 nt, Artificial Sequence
  Description of Artificial Sequence: Synthetic oligonucleotide
auauauugggucaucacca

SEQ ID NO: 1536288 - RNA, 19 nt, Artificial Sequence
  Description of Artificial Sequence: Synthetic oligonucleotide
aagcaaaagcuaguaagug

SEQ ID NO: 1536289 - RNA, 19 nt, Artificial Sequence
  Description of Artificial Sequence: Synthetic oligonucleotide
gaacuaaugcagaaagccc

SEQ ID NO: 1536290 - RNA, 19 nt, Artificial Sequence
  Description of Artificial Sequence: Synthetic oligonucleotide
agggaauacccgcucuugc

SEQ ID NO: 1536291 - RNA, 19 nt, Artificial Sequence
  Description of Artificial Sequence: Synthetic oligonucleotide
ugacaauggcaaacaacag

SEQ ID NO: 1536292 - RNA, 19 nt, Artificial Sequence
  Description of Artificial Sequence: Synthetic oligonucleotide
aaugcacacgaagaggaca

SEQ ID NO: 1536293 - RNA, 19 nt, Artificial Sequence
  Description of Artificial Sequence: Synthetic oligonucleotide
aacugcucguucccacacc

SEQ ID NO: 1536294 - RNA, 19 nt, Artificial Sequence
  Description of Artificial Sequence: Synthetic oligonucleotide
cauagcgaaaucacgagga

SEQ ID NO: 1536295 - RNA, 19 nt, Artificial Sequence
  Description of Artificial Sequence: Synthetic oligonucleotide
caaguagaaagaggcaugg

SEQ ID NO: 1536296 - RNA, 19 nt, Artificial Sequence
  Description of Artificial Sequence: Synthetic oligonucleotide
guacugucaucucaggcag

SEQ ID NO: 1536297 - RNA, 19 nt, Artificial Sequence
  Description of Artificial Sequence: Synthetic oligonucleotide
agugccgaaguaauagccc

SEQ ID NO: 1536298 - RNA, 19 nt, Artificial Sequence
  Description of Artificial Sequence: Synthetic oligonucleotide
guuauagaguaugauacca

SEQ ID NO: 1536299 - RNA, 19 nt, Artificial Sequence
  Description of Artificial Sequence: Synthetic oligonucleotide
ggagauuucggacaauggc

SEQ ID NO: 1536300 - RNA, 19 nt, Artificial Sequence
  Description of Artificial Sequence: Synthetic oligonucleotide
ucccguuucaaguacucca

SEQ ID NO: 1536301 - RNA, 19 nt, Artificial Sequence
  Description of Artificial Sequence: Synthetic oligonucleotide
agagacugauggcagcagg

SEQ ID NO: 1536302 - RNA, 19 nt, Artificial Sequence
  Description of Artificial Sequence: Synthetic oligonucleotide
gaaaucacgaggaaggugu

SEQ ID NO: 1536303 - RNA, 19 nt, Artificial Sequence
  Description of Artificial Sequence: Synthetic oligonucleotide
gaagugccgaaguaauagc

SEQ ID NO: 1536304 - RNA, 19 nt, Artificial Sequence
  Description of Artificial Sequence: Synthetic oligonucleotide
gagauguagggaauacccg

SEQ ID NO: 1536305 - RNA, 19 nt, Artificial Sequence
  Description of Artificial Sequence: Synthetic oligonucleotide
gucauaacggagauuucgg

SEQ ID NO: 1536306 - RNA, 19 nt, Artificial Sequence
  Description of Artificial Sequence: Synthetic oligonucleotide
ugguacugucaucucaggc

SEQ ID NO: 1536307 - RNA, 19 nt, Artificial Sequence
  Description of Artificial Sequence: Synthetic oligonucleotide
cuuuguguaccagauugcc

SEQ ID NO: 1536308 - RNA, 19 nt, Artificial Sequence
  Description of Artificial Sequence: Synthetic oligonucleotide
aggacacggggacagacag

SEQ ID NO: 1536309 - RNA, 19 nt, Artificial Sequence
  Description of Artificial Sequence: Synthetic oligonucleotide
gaagugcaccuguaguucc

SEQ ID NO: 1536310 - RNA, 19 nt, Artificial Sequence
  Description of Artificial Sequence: Synthetic oligonucleotide
auagcugagagagccauug

SEQ ID NO: 1536311 - RNA, 19 nt, Artificial Sequence
  Description of Artificial Sequence: Synthetic oligonucleotide
gaauacccgcucuugcugc

SEQ ID NO: 1536312 - RNA, 19 nt, Artificial Sequence
  Description of Artificial Sequence: Synthetic oligonucleotide
agugaggcggauauauugg

SEQ ID NO: 1536313 - RNA, 19 nt, Artificial Sequence
  Description of Artificial Sequence: Synthetic oligonucleotide
gaugggagcagcaaacuuc

SEQ ID NO: 1536314 - RNA, 19 nt, Artificial Sequence
  Description of Artificial Sequence: Synthetic oligonucleotide
agacaauaagaaagagggc

SEQ ID NO: 1536315 - RNA, 19 nt, Artificial Sequence
  Description of Artificial Sequence: Synthetic oligonucleotide
gaggcggauauauuggguc

SEQ ID NO: 1536316 - RNA, 19 nt, Artificial Sequence
  Description of Artificial Sequence: Synthetic oligonucleotide
augauaccaaugacaaugg

SEQ ID NO: 1536317 - RNA, 19 nt, Artificial Sequence
  Description of Artificial Sequence: Synthetic oligonucleotide
agucccuccacucauguuu

SEQ ID NO: 1536318 - RNA, 19 nt, Artificial Sequence
  Description of Artificial Sequence: Synthetic oligonucleotide
uguagggaauacccgcucu

SEQ ID NO: 1536319 - RNA, 19 nt, Artificial Sequence
  Description of Artificial Sequence: Synthetic oligonucleotide
ucauuaucgucagaugccu

SEQ ID NO: 1536320 - RNA, 19 nt, Artificial Sequence
  Description of Artificial Sequence: Synthetic oligonucleotide
caaggagcuccucaaguag

SEQ ID NO: 1536321 - RNA, 19 nt, Artificial Sequence
  Description of Artificial Sequence: Synthetic oligonucleotide
cagcaaacuucuuuccuag

SEQ ID NO: 1536322 - RNA, 19 nt, Artificial Sequence
  Description of Artificial Sequence: Synthetic oligonucleotide
cagggaaaugacaucauga

SEQ ID NO: 1536323 - RNA, 19 nt, Artificial Sequence
  Description of Artificial Sequence: Synthetic oligonucleotide
cauguuugccaucaauauc

SEQ ID NO: 1536324 - RNA, 19 nt, Artificial Sequence
  Description of Artificial Sequence: Synthetic oligonucleotide
gugaggcggauauauuggg

SEQ ID NO: 1536325 - RNA, 19 nt, Artificial Sequence
  Description of Artificial Sequence: Synthetic oligonucleotide
auagaguaugauaccaaug

SEQ ID NO: 1536326 - RNA, 19 nt, Artificial Sequence
  Description of Artificial Sequence: Synthetic oligonucleotide
cugcauucgauccuuugug

SEQ ID NO: 1536327 - RNA, 19 nt, Artificial Sequence
  Description of Artificial Sequence: Synthetic oligonucleotide
uggugguacugucaucuca

SEQ ID NO: 1536328 - RNA, 19 nt, Artificial Sequence
  Description of Artificial Sequence: Synthetic oligonucleotide
uagcgaaaucacgaggaag

SEQ ID NO: 1536329 - RNA, 19 nt, Artificial Sequence
  Description of Artificial Sequence: Synthetic oligonucleotide
aggcaucucaaugcagucc

SEQ ID NO: 1536330 - RNA, 19 nt, Artificial Sequence
  Description of Artificial Sequence: Synthetic oligonucleotide
aacaccucauggguaaaca

SEQ ID NO: 1536331 - RNA, 19 nt, Artificial Sequence
  Description of Artificial Sequence: Synthetic oligonucleotide
cuacaacacucccagcccc

SEQ ID NO: 1536332 - RNA, 19 nt, Artificial Sequence
  Description of Artificial Sequence: Synthetic oligonucleotide
gugccgaaguaauagcccc

SEQ ID NO: 1536333 - RNA, 19 nt, Artificial Sequence
  Description of Artificial Sequence: Synthetic oligonucleotide
uuugagugguuaacaacuu

SEQ ID NO: 1536334 - RNA, 19 nt, Artificial Sequence
  Description of Artificial Sequence: Synthetic oligonucleotide
acagcgaagaacugcucgu

SEQ ID NO: 1536335 - RNA, 19 nt, Artificial Sequence
  Description of Artificial Sequence: Synthetic oligonucleotide
auguagggaauacccgcuc

SEQ ID NO: 1536336 - RNA, 19 nt, Artificial Sequence
  Description of Artificial Sequence: Synthetic oligonucleotide
uucaggaaacauggcaccc

SEQ ID NO: 1536337 - RNA, 19 nt, Artificial Sequence
  Description of Artificial Sequence: Synthetic oligonucleotide
uaacggagauuucggacaa

SEQ ID NO: 1536338 - RNA, 19 nt, Artificial Sequence
  Description of Artificial Sequence: Synthetic oligonucleotide
aaagaggcaugggcaaaag

SEQ ID NO: 1536339 - RNA, 19 nt, Artificial Sequence
  Description of Artificial Sequence: Synthetic oligonucleotide
acccgauuccacaaggcac

SEQ ID NO: 1536340 - RNA, 19 nt, Artificial Sequence
  Description of Artificial Sequence: Synthetic oligonucleotide
agggcuucgacagcgagug

SEQ ID NO: 1536341 - RNA, 19 nt, Artificial Sequence
  Description of Artificial Sequence: Synthetic oligonucleotide
auauugggucaucaccaug

SEQ ID NO: 1536342 - RNA, 19 nt, Artificial Sequence
  Description of Artificial Sequence: Synthetic oligonucleotide
gaccccaggcaucucaaug

SEQ ID NO: 1536343 - RNA, 19 nt, Artificial Sequence
  Description of Artificial Sequence: Synthetic oligonucleotide
uauauugggucaucaccau

SEQ ID NO: 1536344 - RNA, 19 nt, Artificial Sequence
  Description of Artificial Sequence: Synthetic oligonucleotide
cacacgaagaggacaauga

SEQ ID NO: 1536345 - RNA, 19 nt, Artificial Sequence
  Description of Artificial Sequence: Synthetic oligonucleotide
ugaggcggauauauugggu

SEQ ID NO: 1536346 - RNA, 19 nt, Artificial Sequence
  Description of Artificial Sequence: Synthetic oligonucleotide
auuuguuauagaguaugau

SEQ ID NO: 1536347 - RNA, 19 nt, Artificial Sequence
  Description of Artificial Sequence: Synthetic oligonucleotide
gagacugauggcagcaggc

SEQ ID NO: 1536348 - RNA, 19 nt, Artificial Sequence
  Description of Artificial Sequence: Synthetic oligonucleotide
uuucggacaauggcugugc

SEQ ID NO: 1536349 - RNA, 19 nt, Artificial Sequence
  Description of Artificial Sequence: Synthetic oligonucleotide
cauuuguuauagaguauga

SEQ ID NO: 1536350 - RNA, 19 nt, Artificial Sequence
  Description of Artificial Sequence: Synthetic oligonucleotide
cauccagauugccaaggag

SEQ ID NO: 1536351 - RNA, 19 nt, Artificial Sequence
  Description of Artificial Sequence: Synthetic oligonucleotide
uccaguccaacaccucaug

SEQ ID NO: 1536352 - RNA, 19 nt, Artificial Sequence
  Description of Artificial Sequence: Synthetic oligonucleotide
aauacccgcucuugcugcu

SEQ ID NO: 1536353 - RNA, 19 nt, Artificial Sequence
  Description of Artificial Sequence: Synthetic oligonucleotide
acaucaugauuaucagaga

SEQ ID NO: 1536354 - RNA, 19 nt, Artificial Sequence
  Description of Artificial Sequence: Synthetic oligonucleotide
guagaagcguuuucggcuc

SEQ ID NO: 1536355 - RNA, 19 nt, Artificial Sequence
  Description of Artificial Sequence: Synthetic oligonucleotide
uugggauaggugucuacaa

SEQ ID NO: 1536356 - RNA, 19 nt, Artificial Sequence
  Description of Artificial Sequence: Synthetic oligonucleotide
aaaucacgaggaagguguc

SEQ ID NO: 1536357 - RNA, 19 nt, Artificial Sequence
  Description of Artificial Sequence: Synthetic oligonucleotide
aacaagguuugcccagcaa

SEQ ID NO: 1536358 - RNA, 19 nt, Artificial Sequence
  Description of Artificial Sequence: Synthetic oligonucleotide
agaggccgaagcaaugaac

SEQ ID NO: 1536359 - RNA, 19 nt, Artificial Sequence
  Description of Artificial Sequence: Synthetic oligonucleotide
cgaagcaaugaacuaaugc

SEQ ID NO: 1536360 - RNA, 19 nt, Artificial Sequence
  Description of Artificial Sequence: Synthetic oligonucleotide
aagguuugcccagcaaaga

SEQ ID NO: 1536361 - RNA, 19 nt, Artificial Sequence
  Description of Artificial Sequence: Synthetic oligonucleotide
agguuugcccagcaaagaa

SEQ ID NO: 1536362 - RNA, 19 nt, Artificial Sequence
  Description of Artificial Sequence: Synthetic oligonucleotide
ucauagcugagagagccau

SEQ ID NO: 1536363 - RNA, 19 nt, Artificial Sequence
  Description of Artificial Sequence: Synthetic oligonucleotide
gcucagaaugcacacgaag

SEQ ID NO: 1536364 - RNA, 19 nt, Artificial Sequence
  Description of Artificial Sequence: Synthetic oligonucleotide
acggagauuucggacaaug

SEQ ID NO: 1536365 - RNA, 19 nt, Artificial Sequence
  Description of Artificial Sequence: Synthetic oligonucleotide
aucgucagaugccucuuga

SEQ ID NO: 1536366 - RNA, 19 nt, Artificial Sequence
  Description of Artificial Sequence: Synthetic oligonucleotide
aggcggauauauuggguca

SEQ ID NO: 1536367 - RNA, 19 nt, Artificial Sequence
  Description of Artificial Sequence: Synthetic oligonucleotide
gaacugcucguucccacac

SEQ ID NO: 1536368 - RNA, 19 nt, Artificial Sequence
  Description of Artificial Sequence: Synthetic oligonucleotide
aaucacgaggaagguguca

SEQ ID NO: 1536369 - RNA, 19 nt, Artificial Sequence
  Description of Artificial Sequence: Synthetic oligonucleotide
ucccagucuuucaggaaac

SEQ ID NO: 1536370 - RNA, 19 nt, Artificial Sequence
  Description of Artificial Sequence: Synthetic oligonucleotide
agugcucccguuucaagua

SEQ ID NO: 1536371 - RNA, 19 nt, Artificial Sequence
  Description of Artificial Sequence: Synthetic oligonucleotide
uucgacagcgagugcuccc

SEQ ID NO: 1536372 - RNA, 19 nt, Artificial Sequence
  Description of Artificial Sequence: Synthetic oligonucleotide
auagcgaaaucacgaggaa

SEQ ID NO: 1536373 - RNA, 19 nt, Artificial Sequence
  Description of Artificial Sequence: Synthetic oligonucleotide
uagggcuucgacagcgagu

SEQ ID NO: 1536374 - RNA, 19 nt, Artificial Sequence
  Description of Artificial Sequence: Synthetic oligonucleotide
ggaauacccgcucuugcug

SEQ ID NO: 1536375 - RNA, 19 nt, Artificial Sequence
  Description of Artificial Sequence: Synthetic oligonucleotide
uaggaaagcugaggacacg

SEQ ID NO: 1536376 - RNA, 19 nt, Artificial Sequence
  Description of Artificial Sequence: Synthetic oligonucleotide
guuguaugaguucugguuu

SEQ ID NO: 1536377 - RNA, 19 nt, Artificial Sequence
  Description of Artificial Sequence: Synthetic oligonucleotide
gaagcguuuucggcucugg

SEQ ID NO: 1536378 - RNA, 19 nt, Artificial Sequence
  Description of Artificial Sequence: Synthetic oligonucleotide
agagagauccccagugaug

SEQ ID NO: 1536379 - RNA, 19 nt, Artificial Sequence
  Description of Artificial Sequence: Synthetic oligonucleotide
cguuucaaguacuccaccg

SEQ ID NO: 1536380 - RNA, 19 nt, Artificial Sequence
  Description of Artificial Sequence: Synthetic oligonucleotide
guagggcuucgacagcgag

SEQ ID NO: 1536381 - RNA, 19 nt, Artificial Sequence
  Description of Artificial Sequence: Synthetic oligonucleotide
agguuguaugaguucuggu

SEQ ID NO: 1536382 - RNA, 19 nt, Artificial Sequence
  Description of Artificial Sequence: Synthetic oligonucleotide
ugauggaggaagugccgaa

SEQ ID NO: 1536383 - RNA, 19 nt, Artificial Sequence
  Description of Artificial Sequence: Synthetic oligonucleotide
ucggacaauggcugugcac

SEQ ID NO: 1536384 - RNA, 19 nt, Artificial Sequence
  Description of Artificial Sequence: Synthetic oligonucleotide
acaccucauggguaaacau

SEQ ID NO: 1536385 - RNA, 19 nt, Artificial Sequence
  Description of Artificial Sequence: Synthetic oligonucleotide
acuaaugcagaaagccccu

SEQ ID NO: 1536386 - RNA, 19 nt, Artificial Sequence
  Description of Artificial Sequence: Synthetic oligonucleotide
ucgucagaugccucuugac

SEQ ID NO: 1536387 - RNA, 19 nt, Artificial Sequence
  Description of Artificial Sequence: Synthetic oligonucleotide
uucgauccuuuguguacca

SEQ ID NO: 1536388 - RNA, 19 nt, Artificial Sequence
  Description of Artificial Sequence: Synthetic oligonucleotide
gaggccgaagcaaugaacu

SEQ ID NO: 1536389 - RNA, 19 nt, Artificial Sequence
  Description of Artificial Sequence: Synthetic oligonucleotide
cgaaguaauagccccgggg

SEQ ID NO: 1536390 - RNA, 19 nt, Artificial Sequence
  Description of Artificial Sequence: Synthetic oligonucleotide
cccgauuccacaaggcacc

SEQ ID NO: 1536391 - RNA, 19 nt, Artificial Sequence
  Description of Artificial Sequence: Synthetic oligonucleotide
agacaggaacaagguuugc

SEQ ID NO: 1536392 - RNA, 19 nt, Artificial Sequence
  Description of Artificial Sequence: Synthetic oligonucleotide
ugucuacaacacucccagc

SEQ ID NO: 1536393 - RNA, 19 nt, Artificial Sequence
  Description of Artificial Sequence: Synthetic oligonucleotide
gauaggugucuacaacacu

SEQ ID NO: 1536394 - RNA, 19 nt, Artificial Sequence
  Description of Artificial Sequence: Synthetic oligonucleotide
agcuccucaaguagaaaga

SEQ ID NO: 1536395 - RNA, 19 nt, Artificial Sequence
  Description of Artificial Sequence: Synthetic oligonucleotide
guaccagauugccaagcca

SEQ ID NO: 1536396 - RNA, 19 nt, Artificial Sequence
  Description of Artificial Sequence: Synthetic oligonucleotide
gcauaucuggagugaggcg

SEQ ID NO: 1536397 - RNA, 19 nt, Artificial Sequence
  Description of Artificial Sequence: Synthetic oligonucleotide
uacugucaucucaggcagc

SEQ ID NO: 1536398 - RNA, 19 nt, Artificial Sequence
  Description of Artificial Sequence: Synthetic oligonucleotide
gacaauggcugugcacgcc

SEQ ID NO: 1536399 - RNA, 19 nt, Artificial Sequence
  Description of Artificial Sequence: Synthetic oligonucleotide
cauuaucgucagaugccuc

SEQ ID NO: 1536400 - RNA, 19 nt, Artificial Sequence
  Description of Artificial Sequence: Synthetic oligonucleotide
ggcguugcccaucagguuc

SEQ ID NO: 1536401 - RNA, 19 nt, Artificial Sequence
  Description of Artificial Sequence: Synthetic oligonucleotide
gguuccacagcgaagaacu

SEQ ID NO: 1536402 - RNA, 19 nt, Artificial Sequence
  Description of Artificial Sequence: Synthetic oligonucleotide
gcucugauuaggaaagcug

SEQ ID NO: 1536403 - RNA, 19 nt, Artificial Sequence
  Description of Artificial Sequence: Synthetic oligonucleotide
auggcacccgauuccacaa

SEQ ID NO: 1536404 - RNA, 19 nt, Artificial Sequence
  Description of Artificial Sequence: Synthetic oligonucleotide
caauggcugugcacgcccc

SEQ ID NO: 1536405 - RNA, 19 nt, Artificial Sequence
  Description of Artificial Sequence: Synthetic oligonucleotide
cggacaauggcugugcacg

SEQ ID NO: 1536406 - RNA, 19 nt, Artificial Sequence
  Description of Artificial Sequence: Synthetic oligonucleotide
guguaccagauugccaagc

SEQ ID NO: 1536407 - RNA, 19 nt, Artificial Sequence
  Description of Artificial Sequence: Synthetic oligonucleotide
caggcaucucaaugcaguc

SEQ ID NO: 1536408 - RNA, 19 nt, Artificial Sequence
  Description of Artificial Sequence: Synthetic oligonucleotide
uuccacaaggcacccuguu

SEQ ID NO: 1536409 - RNA, 19 nt, Artificial Sequence
  Description of Artificial Sequence: Synthetic oligonucleotide
cuuugcauaucuggaguga

SEQ ID NO: 1536410 - RNA, 19 nt, Artificial Sequence
  Description of Artificial Sequence: Synthetic oligonucleotide
acucaagggugcugguggu

SEQ ID NO: 1536411 - RNA, 19 nt, Artificial Sequence
  Description of Artificial Sequence: Synthetic oligonucleotide
ccuuuguguaccagauugc

SEQ ID NO: 1536412 - RNA, 19 nt, Artificial Sequence
  Description of Artificial Sequence: Synthetic oligonucleotide
ggggagacggaccccaggc

SEQ ID NO: 1536413 - RNA, 19 nt, Artificial Sequence
  Description of Artificial Sequence: Synthetic oligonucleotide
gauguagggaauacccgcu

SEQ ID NO: 1536414 - RNA, 19 nt, Artificial Sequence
  Description of Artificial Sequence: Synthetic oligonucleotide
cucaaguagaaagaggcau

SEQ ID NO: 1536415 - RNA, 19 nt, Artificial Sequence
  Description of Artificial Sequence: Synthetic oligonucleotide
gcaaaagcuaguaaguggu

SEQ ID NO: 1536416 - RNA, 19 nt, Artificial Sequence
  Description of Artificial Sequence: Synthetic oligonucleotide
gguuguaugaguucugguu

SEQ ID NO: 1536417 - RNA, 19 nt, Artificial Sequence
  Description of Artificial Sequence: Synthetic oligonucleotide
gcugagagagccauuguuc

SEQ ID NO: 1536418 - RNA, 19 nt, Artificial Sequence
  Description of Artificial Sequence: Synthetic oligonucleotide
acagcgagugcucccguuu

SEQ ID NO: 1536419 - RNA, 19 nt, Artificial Sequence
  Description of Artificial Sequence: Synthetic oligonucleotide
ucgauccuuuguguaccag

SEQ ID NO: 1536420 - RNA, 19 nt, Artificial Sequence
  Description of Artificial Sequence: Synthetic oligonucleotide
cuucgacagcgagugcucc

SEQ ID NO: 1536421 - RNA, 19 nt, Artificial Sequence
  Description of Artificial Sequence: Synthetic oligonucleotide
cucccguuucaaguacucc

SEQ ID NO: 1536422 - RNA, 19 nt, Artificial Sequence
  Description of Artificial Sequence: Synthetic oligonucleotide
cacccgauuccacaaggca

SEQ ID NO: 1536423 - RNA, 19 nt, Artificial Sequence
  Description of Artificial Sequence: Synthetic oligonucleotide
auaucuggagugaggcgga

SEQ ID NO: 1536424 - RNA, 19 nt, Artificial Sequence
  Description of Artificial Sequence: Synthetic oligonucleotide
uuaucgucagaugccucuu

SEQ ID NO: 1536425 - RNA, 19 nt, Artificial Sequence
  Description of Artificial Sequence: Synthetic oligonucleotide
gaucugaaaggcucugauu

SEQ ID NO: 1536426 - RNA, 19 nt, Artificial Sequence
  Description of Artificial Sequence: Synthetic oligonucleotide
caaugaguaaagggagaca

SEQ ID NO: 1536427 - RNA, 19 nt, Artificial Sequence
  Description of Artificial Sequence: Synthetic oligonucleotide
agcgagugcucccguuuca

SEQ ID NO: 1536428 - RNA, 19 nt, Artificial Sequence
  Description of Artificial Sequence: Synthetic oligonucleotide
agagauccccagugaugga

SEQ ID NO: 1536429 - RNA, 19 nt, Artificial Sequence
  Description of Artificial Sequence: Synthetic oligonucleotide
ggacaauggcugugcacgc

SEQ ID NO: 1536430 - RNA, 19 nt, Artificial Sequence
  Description of Artificial Sequence: Synthetic oligonucleotide
gccgaaguaauagccccgg

SEQ ID NO: 1536431 - RNA, 19 nt, Artificial Sequence
  Description of Artificial Sequence: Synthetic oligonucleotide
cccguuucaaguacuccac

SEQ ID NO: 1536432 - RNA, 19 nt, Artificial Sequence
  Description of Artificial Sequence: Synthetic oligonucleotide
aggaucugaaaggcucuga

SEQ ID NO: 1536433 - RNA, 19 nt, Artificial Sequence
  Description of Artificial Sequence: Synthetic oligonucleotide
caaggaucugaaaggcucu

SEQ ID NO: 1536434 - RNA, 19 nt, Artificial Sequence
  Description of Artificial Sequence: Synthetic oligonucleotide
cugguagggcuucgacagc

SEQ ID NO: 1536435 - RNA, 19 nt, Artificial Sequence
  Description of Artificial Sequence: Synthetic oligonucleotide
gugcucccguuucaaguac

SEQ ID NO: 1536436 - RNA, 19 nt, Artificial Sequence
  Description of Artificial Sequence: Synthetic oligonucleotide
acaaggcacccuguuuacu

SEQ ID NO: 1536437 - RNA, 19 nt, Artificial Sequence
  Description of Artificial Sequence: Synthetic oligonucleotide
aggccgaagcaaugaacua

SEQ ID NO: 1536438 - RNA, 19 nt, Artificial Sequence
  Description of Artificial Sequence: Synthetic oligonucleotide
cggagauuucggacaaugg

SEQ ID NO: 1536439 - RNA, 19 nt, Artificial Sequence
  Description of Artificial Sequence: Synthetic oligonucleotide
aucauagcugagagagcca

SEQ ID NO: 1536440 - RNA, 19 nt, Artificial Sequence
  Description of Artificial Sequence: Synthetic oligonucleotide
ggucuugccauuuguuaua

SEQ ID NO: 1536441 - RNA, 19 nt, Artificial Sequence
  Description of Artificial Sequence: Synthetic oligonucleotide
gcuggugguacugucaucu

SEQ ID NO: 1536442 - RNA, 19 nt, Artificial Sequence
  Description of Artificial Sequence: Synthetic oligonucleotide
uguccacugagggcaggaa

SEQ ID NO: 1536443 - RNA, 19 nt, Artificial Sequence
  Description of Artificial Sequence: Synthetic oligonucleotide
cucuguggggccguccauc

SEQ ID NO: 1536444 - RNA, 19 nt, Artificial Sequence
  Description of Artificial Sequence: Synthetic oligonucleotide
caaggcacccuguuuacuu

SEQ ID NO: 1536445 - RNA, 19 nt, Artificial Sequence
  Description of Artificial Sequence: Synthetic oligonucleotide
ggaaacauggcacccgauu

SEQ ID NO: 1536446 - RNA, 19 nt, Artificial Sequence
  Description of Artificial Sequence: Synthetic oligonucleotide
ccguuucaaguacuccacc

SEQ ID NO: 1536447 - RNA, 19 nt, Artificial Sequence
  Description of Artificial Sequence: Synthetic oligonucleotide
aacggagauuucggacaau

SEQ ID NO: 1536448 - RNA, 19 nt, Artificial Sequence
  Description of Artificial Sequence: Synthetic oligonucleotide
agugguuuuccagguugua

SEQ ID NO: 1536449 - RNA, 19 nt, Artificial Sequence
  Description of Artificial Sequence: Synthetic oligonucleotide
ggccgaagcaaugaacuaa

SEQ ID NO: 1536450 - RNA, 19 nt, Artificial Sequence
  Description of Artificial Sequence: Synthetic oligonucleotide
uggcguugcccaucagguu

SEQ ID NO: 1536451 - RNA, 19 nt, Artificial Sequence
  Description of Artificial Sequence: Synthetic oligonucleotide
caucaauauccaucauuau

SEQ ID NO: 1536452 - RNA, 19 nt, Artificial Sequence
  Description of Artificial Sequence: Synthetic oligonucleotide
gccaucaauauccaucauu

SEQ ID NO: 1536453 - RNA, 19 nt, Artificial Sequence
  Description of Artificial Sequence: Synthetic oligonucleotide
cuguggggccguccauccc

SEQ ID NO: 1536454 - RNA, 19 nt, Artificial Sequence
  Description of Artificial Sequence: Synthetic oligonucleotide
aggaagugccgaaguaaua

SEQ ID NO: 1536455 - RNA, 19 nt, Artificial Sequence
  Description of Artificial Sequence: Synthetic oligonucleotide
cgcucaugaucauagcuga

SEQ ID NO: 1536456 - RNA, 19 nt, Artificial Sequence
  Description of Artificial Sequence: Synthetic oligonucleotide
guagggaauacccgcucuu

SEQ ID NO: 1536457 - RNA, 19 nt, Artificial Sequence
  Description of Artificial Sequence: Synthetic oligonucleotide
gcaaagaacagaggccgaa

SEQ ID NO: 1536458 - RNA, 19 nt, Artificial Sequence
  Description of Artificial Sequence: Synthetic oligonucleotide
ccgaagcaaugaacuaaug

SEQ ID NO: 1536459 - RNA, 19 nt, Artificial Sequence
  Description of Artificial Sequence: Synthetic oligonucleotide
uaucuggagugaggcggau

SEQ ID NO: 1536460 - RNA, 19 nt, Artificial Sequence
  Description of Artificial Sequence: Synthetic oligonucleotide
gggccguccaucccgcuca

SEQ ID NO: 1536461 - RNA, 19 nt, Artificial Sequence
  Description of Artificial Sequence: Synthetic oligonucleotide
gauugccaaggagcuccuc

SEQ ID NO: 1536462 - RNA, 19 nt, Artificial Sequence
  Description of Artificial Sequence: Synthetic oligonucleotide
guaagugguuuuccagguu

SEQ ID NO: 1536463 - RNA, 19 nt, Artificial Sequence
  Description of Artificial Sequence: Synthetic oligonucleotide
ucguucccacacccuggua

SEQ ID NO: 1536464 - RNA, 19 nt, Artificial Sequence
  Description of Artificial Sequence: Synthetic oligonucleotide
ggcaggaauacaucucgau

SEQ ID NO: 1536465 - RNA, 19 nt, Artificial Sequence
  Description of Artificial Sequence: Synthetic oligonucleotide
ccccagucagcucaaacaa

SEQ ID NO: 1536466 - RNA, 19 nt, Artificial Sequence
  Description of Artificial Sequence: Synthetic oligonucleotide
ccaaggagcuccucaagua

SEQ ID NO: 1536467 - RNA, 19 nt, Artificial Sequence
  Description of Artificial Sequence: Synthetic oligonucleotide
ccuguuuacuuugcauauc

SEQ ID NO: 1536468 - RNA, 19 nt, Artificial Sequence
  Description of Artificial Sequence: Synthetic oligonucleotide
ggcuucgacagcgagugcu

SEQ ID NO: 1536469 - RNA, 19 nt, Artificial Sequence
  Description of Artificial Sequence: Synthetic oligonucleotide
gcacccgauuccacaaggc

SEQ ID NO: 1536470 - RNA, 19 nt, Artificial Sequence
  Description of Artificial Sequence: Synthetic oligonucleotide
ggagacggaccccaggcau

SEQ ID NO: 1536471 - RNA, 19 nt, Artificial Sequence
  Description of Artificial Sequence: Synthetic oligonucleotide
cccuccacucauguuugcc

SEQ ID NO: 1536472 - RNA, 19 nt, Artificial Sequence
  Description of Artificial Sequence: Synthetic oligonucleotide
aggccacucaagggugcug

SEQ ID NO: 1536473 - RNA, 19 nt, Artificial Sequence
  Description of Artificial Sequence: Synthetic oligonucleotide
caacacucccagccccaca

SEQ ID NO: 1536474 - RNA, 19 nt, Artificial Sequence
  Description of Artificial Sequence: Synthetic oligonucleotide
aggaaacauggcacccgau

SEQ ID NO: 1536475 - RNA, 19 nt, Artificial Sequence
  Description of Artificial Sequence: Synthetic oligonucleotide
uggcugcauucgauccuuu

SEQ ID NO: 1536476 - RNA, 19 nt, Artificial Sequence
  Description of Artificial Sequence: Synthetic oligonucleotide
gcuucgacagcgagugcuc

SEQ ID NO: 1536477 - RNA, 19 nt, Artificial Sequence
  Description of Artificial Sequence: Synthetic oligonucleotide
ccauccagauugccaagga

SEQ ID NO: 1536478 - RNA, 19 nt, Artificial Sequence
  Description of Artificial Sequence: Synthetic oligonucleotide
cacugagggcaggaauaca

SEQ ID NO: 1536479 - RNA, 19 nt, Artificial Sequence
  Description of Artificial Sequence: Synthetic oligonucleotide
cgagugcucccguuucaag

SEQ ID NO: 1536480 - RNA, 19 nt, Artificial Sequence
  Description of Artificial Sequence: Synthetic oligonucleotide
aggugucauaacggagauu

SEQ ID NO: 1536481 - RNA, 19 nt, Artificial Sequence
  Description of Artificial Sequence: Synthetic oligonucleotide
gacagcgagugcucccguu

SEQ ID NO: 1536482 - RNA, 19 nt, Artificial Sequence
  Description of Artificial Sequence: Synthetic oligonucleotide
ccgauuccacaaggcaccc

SEQ ID NO: 1536483 - RNA, 19 nt, Artificial Sequence
  Description of Artificial Sequence: Synthetic oligonucleotide
gguccucaccccagucagc

SEQ ID NO: 1536484 - RNA, 19 nt, Artificial Sequence
  Description of Artificial Sequence: Synthetic oligonucleotide
caccuguaguucccagucu

SEQ ID NO: 1536485 - RNA, 19 nt, Artificial Sequence
  Description of Artificial Sequence: Synthetic oligonucleotide
ucaccccagucagcucaaa

SEQ ID NO: 1536486 - RNA, 19 nt, Artificial Sequence
  Description of Artificial Sequence: Synthetic oligonucleotide
gcggauauauugggucauc

SEQ ID NO: 1536487 - RNA, 19 nt, Artificial Sequence
  Description of Artificial Sequence: Synthetic oligonucleotide
uggggccguccaucccgcu

SEQ ID NO: 1536488 - RNA, 19 nt, Artificial Sequence
  Description of Artificial Sequence: Synthetic oligonucleotide
ggggccguccaucccgcuc

SEQ ID NO: 1536489 - RNA, 19 nt, Artificial Sequence
  Description of Artificial Sequence: Synthetic oligonucleotide
ggcugagauguagggaaua

SEQ ID NO: 1536490 - RNA, 19 nt, Artificial Sequence
  Description of Artificial Sequence: Synthetic oligonucleotide
gccgaagcaaugaacuaau

SEQ ID NO: 1536491 - RNA, 19 nt, Artificial Sequence
  Description of Artificial Sequence: Synthetic oligonucleotide
auacccgcucuugcugcuu

SEQ ID NO: 1536492 - RNA, 19 nt, Artificial Sequence
  Description of Artificial Sequence: Synthetic oligonucleotide
caggcucaguagaagcguu

SEQ ID NO: 1536493 - RNA, 19 nt, Artificial Sequence
  Description of Artificial Sequence: Synthetic oligonucleotide
cggauauauugggucauca

SEQ ID NO: 1536494 - RNA, 19 nt, Artificial Sequence
  Description of Artificial Sequence: Synthetic oligonucleotide
ccagauugccaagccaucu

SEQ ID NO: 1536495 - RNA, 19 nt, Artificial Sequence
  Description of Artificial Sequence: Synthetic oligonucleotide
gggcuucgacagcgagugc

SEQ ID NO: 1536496 - RNA, 19 nt, Artificial Sequence
  Description of Artificial Sequence: Synthetic oligonucleotide
ggcggauauauugggucau

SEQ ID NO: 1536497 - RNA, 19 nt, Artificial Sequence
  Description of Artificial Sequence: Synthetic oligonucleotide
gacggaccccaggcaucuc

SEQ ID NO: 1536498 - RNA, 19 nt, Artificial Sequence
  Description of Artificial Sequence: Synthetic oligonucleotide
gccauuuguuauagaguau

SEQ ID NO: 1536499 - RNA, 19 nt, Artificial Sequence
  Description of Artificial Sequence: Synthetic oligonucleotide
gcgagugcucccguuucaa

SEQ ID NO: 1536500 - RNA, 19 nt, Artificial Sequence
  Description of Artificial Sequence: Synthetic oligonucleotide
cugggguccucaccccagu

SEQ ID NO: 1536501 - RNA, 19 nt, Artificial Sequence
  Description of Artificial Sequence: Synthetic oligonucleotide
cccagucuuucaggaaaca

SEQ ID NO: 1536502 - RNA, 19 nt, Artificial Sequence
  Description of Artificial Sequence: Synthetic oligonucleotide
cagcgaagaacugcucguu

SEQ ID NO: 1536503 - RNA, 19 nt, Artificial Sequence
  Description of Artificial Sequence: Synthetic oligonucleotide
cagucccuccacucauguu

SEQ ID NO: 1536504 - RNA, 19 nt, Artificial Sequence
  Description of Artificial Sequence: Synthetic oligonucleotide
ccaacaccucauggguaaa

SEQ ID NO: 1536505 - RNA, 19 nt, Artificial Sequence
  Description of Artificial Sequence: Synthetic oligonucleotide
cguccaucccgcucaugau

SEQ ID NO: 1536506 - RNA, 19 nt, Artificial Sequence
  Description of Artificial Sequence: Synthetic oligonucleotide
ccaucccgcucaugaucau

SEQ ID NO: 1536507 - RNA, 19 nt, Artificial Sequence
  Description of Artificial Sequence: Synthetic oligonucleotide
cgacagcgagugcucccgu

SEQ ID NO: 1536508 - RNA, 19 nt, Artificial Sequence
  Description of Artificial Sequence: Synthetic oligonucleotide
uuuucauugaguuuacucg

SEQ ID NO: 1536509 - RNA, 19 nt, Artificial Sequence
  Description of Artificial Sequence: Synthetic oligonucleotide
uuaaaucacgaucagagag

SEQ ID NO: 1536510 - RNA, 19 nt, Artificial Sequence
  Description of Artificial Sequence: Synthetic oligonucleotide
uguugaaauacucaaaagc

SEQ ID NO: 1536511 - RNA, 19 nt, Artificial Sequence
  Description of Artificial Sequence: Synthetic oligonucleotide
cuggaauucauuuugaugc

SEQ ID NO: 1536512 - RNA, 19 nt, Artificial Sequence
  Description of Artificial Sequence: Synthetic oligonucleotide
aacuagaagaaucauccgg

SEQ ID NO: 1536513 - RNA, 19 nt, Artificial Sequence
  Description of Artificial Sequence: Synthetic oligonucleotide
acaacuagaagaaucaucc

SEQ ID NO: 1536514 - RNA, 19 nt, Artificial Sequence
  Description of Artificial Sequence: Synthetic oligonucleotide
uacuuuaacagcaacauuc

SEQ ID NO: 1536515 - RNA, 19 nt, Artificial Sequence
  Description of Artificial Sequence: Synthetic oligonucleotide
aaaaccaugacauuuucau

SEQ ID NO: 1536516 - RNA, 19 nt, Artificial Sequence
  Description of Artificial Sequence: Synthetic oligonucleotide
ucuugguucaaucucagca

SEQ ID NO: 1536517 - RNA, 19 nt, Artificial Sequence
  Description of Artificial Sequence: Synthetic oligonucleotide
uuuccuaugagacuugucu

SEQ ID NO: 1536518 - RNA, 19 nt, Artificial Sequence
  Description of Artificial Sequence: Synthetic oligonucleotide
uuguccauuaaccuguucc

SEQ ID NO: 1536519 - RNA, 19 nt, Artificial Sequence
  Description of Artificial Sequence: Synthetic oligonucleotide
caguucaucuaaaagacgg

SEQ ID NO: 1536520 - RNA, 19 nt, Artificial Sequence
  Description of Artificial Sequence: Synthetic oligonucleotide
uauuuaucuccuuuugagg

SEQ ID NO: 1536521 - RNA, 19 nt, Artificial Sequence
  Description of Artificial Sequence: Synthetic oligonucleotide
uuuuacgauauuuacugug

SEQ ID NO: 1536522 - RNA, 19 nt, Artificial Sequence
  Description of Artificial Sequence: Synthetic oligonucleotide
agaagaaucauccggucuc

SEQ ID NO: 1536523 - RNA, 19 nt, Artificial Sequence
  Description of Artificial Sequence: Synthetic oligonucleotide
ucuaaaugcuuguugaugu

SEQ ID NO: 1536524 - RNA, 19 nt, Artificial Sequence
  Description of Artificial Sequence: Synthetic oligonucleotide
augaaucugauucugagga

SEQ ID NO: 1536525 - RNA, 19 nt, Artificial Sequence
  Description of Artificial Sequence: Synthetic oligonucleotide
gacaagacacuuuagaguc

SEQ ID NO: 1536526 - RNA, 19 nt, Artificial Sequence
  Description of Artificial Sequence: Synthetic oligonucleotide
uaccaguucaucuaaaaga

SEQ ID NO: 1536527 - RNA, 19 nt, Artificial Sequence
  Description of Artificial Sequence: Synthetic oligonucleotide
uucaaucucagcacuuucg

SEQ ID NO: 1536528 - RNA, 19 nt, Artificial Sequence
  Description of Artificial Sequence: Synthetic oligonucleotide
ugaaauacucaaaagcaaa

SEQ ID NO: 1536529 - RNA, 19 nt, Artificial Sequence
  Description of Artificial Sequence: Synthetic oligonucleotide
uuuacgauauuuacuguga

SEQ ID NO: 1536530 - RNA, 19 nt, Artificial Sequence
  Description of Artificial Sequence: Synthetic oligonucleotide
aagacgguuauuucucagg

SEQ ID NO: 1536531 - RNA, 19 nt, Artificial Sequence
  Description of Artificial Sequence: Synthetic oligonucleotide
uaaaucacgaucagagagc

SEQ ID NO: 1536532 - RNA, 19 nt, Artificial Sequence
  Description of Artificial Sequence: Synthetic oligonucleotide
uauauucuugugacgacag

SEQ ID NO: 1536533 - RNA, 19 nt, Artificial Sequence
  Description of Artificial Sequence: Synthetic oligonucleotide
cagagagcaaguuauauac

SEQ ID NO: 1536534 - RNA, 19 nt, Artificial Sequence
  Description of Artificial Sequence: Synthetic oligonucleotide
uuuuccuauuacuauagcu

SEQ ID NO: 1536535 - RNA, 19 nt, Artificial Sequence
  Description of Artificial Sequence: Synthetic oligonucleotide
auacacaaccaccaguuuc

SEQ ID NO: 1536536 - RNA, 19 nt, Artificial Sequence
  Description of Artificial Sequence: Synthetic oligonucleotide
uuuccuauuacuauagcuu

SEQ ID NO: 1536537 - RNA, 19 nt, Artificial Sequence
  Description of Artificial Sequence: Synthetic oligonucleotide
gaccauuagcaucugaaag

SEQ ID NO: 1536538 - RNA, 19 nt, Artificial Sequence
  Description of Artificial Sequence: Synthetic oligonucleotide
uggguggugacucuaaggc

SEQ ID NO: 1536539 - RNA, 19 nt, Artificial Sequence
  Description of Artificial Sequence: Synthetic oligonucleotide
uuucgauggcucuagugcg

SEQ ID NO: 1536540 - RNA, 19 nt, Artificial Sequence
  Description of Artificial Sequence: Synthetic oligonucleotide
aggaacuuguccauuaacc

SEQ ID NO: 1536541 - RNA, 19 nt, Artificial Sequence
  Description of Artificial Sequence: Synthetic oligonucleotide
uguacaaauucuuggugcc

SEQ ID NO: 1536542 - RNA, 19 nt, Artificial Sequence
  Description of Artificial Sequence: Synthetic oligonucleotide
gugagcagaacuucuaagg

SEQ ID NO: 1536543 - RNA, 19 nt, Artificial Sequence
  Description of Artificial Sequence: Synthetic oligonucleotide
guuacugagacuguauccg

SEQ ID NO: 1536544 - RNA, 19 nt, Artificial Sequence
  Description of Artificial Sequence: Synthetic oligonucleotide
ugcaauguugaaauacuca

SEQ ID NO: 1536545 - RNA, 19 nt, Artificial Sequence
  Description of Artificial Sequence: Synthetic oligonucleotide
auuauauucuugugacgac

SEQ ID NO: 1536546 - RNA, 19 nt, Artificial Sequence
  Description of Artificial Sequence: Synthetic oligonucleotide
uguuacugagacuguaucc

SEQ ID NO: 1536547 - RNA, 19 nt, Artificial Sequence
  Description of Artificial Sequence: Synthetic oligonucleotide
acaagcaacugucuaaaug

SEQ ID NO: 1536548 - RNA, 19 nt, Artificial Sequence
  Description of Artificial Sequence: Synthetic oligonucleotide
ugcaaagcgucacacuggg

SEQ ID NO: 1536549 - RNA, 19 nt, Artificial Sequence
  Description of Artificial Sequence: Synthetic oligonucleotide
acgguuauuucucaggucu

SEQ ID NO: 1536550 - RNA, 19 nt, Artificial Sequence
  Description of Artificial Sequence: Synthetic oligonucleotide
ucuuugagguggaagacac

SEQ ID NO: 1536551 - RNA, 19 nt, Artificial Sequence
  Description of Artificial Sequence: Synthetic oligonucleotide
auaucaguacaacuagaag

SEQ ID NO: 1536552 - RNA, 19 nt, Artificial Sequence
  Description of Artificial Sequence: Synthetic oligonucleotide
aucacgaucagagagcaag

SEQ ID NO: 1536553 - RNA, 19 nt, Artificial Sequence
  Description of Artificial Sequence: Synthetic oligonucleotide
uacacaaccaccaguuucu

SEQ ID NO: 1536554 - RNA, 19 nt, Artificial Sequence
  Description of Artificial Sequence: Synthetic oligonucleotide
uucuuggacgauuucagca

SEQ ID NO: 1536555 - RNA, 19 nt, Artificial Sequence
  Description of Artificial Sequence: Synthetic oligonucleotide
auuuacugugaauuucauc

SEQ ID NO: 1536556 - RNA, 19 nt, Artificial Sequence
  Description of Artificial Sequence: Synthetic oligonucleotide
aaagacgguuauuucucag

SEQ ID NO: 1536557 - RNA, 19 nt, Artificial Sequence
  Description of Artificial Sequence: Synthetic oligonucleotide
cacaaacaggacaagacac

SEQ ID NO: 1536558 - RNA, 19 nt, Artificial Sequence
  Description of Artificial Sequence: Synthetic oligonucleotide
agugcggugauucuguugu

SEQ ID NO: 1536559 - RNA, 19 nt, Artificial Sequence
  Description of Artificial Sequence: Synthetic oligonucleotide
aauaucaguacaacuagaa

SEQ ID NO: 1536560 - RNA, 19 nt, Artificial Sequence
  Description of Artificial Sequence: Synthetic oligonucleotide
guguacaaauucuuggugc

SEQ ID NO: 1536561 - RNA, 19 nt, Artificial Sequence
  Description of Artificial Sequence: Synthetic oligonucleotide
ugauacacaaccaccaguu

SEQ ID NO: 1536562 - RNA, 19 nt, Artificial Sequence
  Description of Artificial Sequence: Synthetic oligonucleotide
uuuaggaugcaaagcguca

SEQ ID NO: 1536563 - RNA, 19 nt, Artificial Sequence
  Description of Artificial Sequence: Synthetic oligonucleotide
gaaucauccggucucucag

SEQ ID NO: 1536564 - RNA, 19 nt, Artificial Sequence
  Description of Artificial Sequence: Synthetic oligonucleotide
uauuccgcuuguuucuugg

SEQ ID NO: 1536565 - RNA, 19 nt, Artificial Sequence
  Description of Artificial Sequence: Synthetic oligonucleotide
uacaacuagaagaaucauc

SEQ ID NO: 1536566 - RNA, 19 nt, Artificial Sequence
  Description of Artificial Sequence: Synthetic oligonucleotide
ugaguuuacucgcuucaag

SEQ ID NO: 1536567 - RNA, 19 nt, Artificial Sequence
  Description of Artificial Sequence: Synthetic oligonucleotide
acugucuaaaugcuuguug

SEQ ID NO: 1536568 - RNA, 19 nt, Artificial Sequence
  Description of Artificial Sequence: Synthetic oligonucleotide
aaucauccggucucucagg

SEQ ID NO: 1536569 - RNA, 19 nt, Artificial Sequence
  Description of Artificial Sequence: Synthetic oligonucleotide
uagacauuaugccaguuuu

SEQ ID NO: 1536570 - RNA, 19 nt, Artificial Sequence
  Description of Artificial Sequence: Synthetic oligonucleotide
cacacaacaaguugggcac

SEQ ID NO: 1536571 - RNA, 19 nt, Artificial Sequence
  Description of Artificial Sequence: Synthetic oligonucleotide
agaacuucuaaggcucucc

SEQ ID NO: 1536572 - RNA, 19 nt, Artificial Sequence
  Description of Artificial Sequence: Synthetic oligonucleotide
ugaucguuucuauugcaug

SEQ ID NO: 1536573 - RNA, 19 nt, Artificial Sequence
  Description of Artificial Sequence: Synthetic oligonucleotide
uuuugagggcugaauuucc

SEQ ID NO: 1536574 - RNA, 19 nt, Artificial Sequence
  Description of Artificial Sequence: Synthetic oligonucleotide
agacacaggagauaugggu

SEQ ID NO: 1536575 - RNA, 19 nt, Artificial Sequence
  Description of Artificial Sequence: Synthetic oligonucleotide
ucugauucugaggagagaa

SEQ ID NO: 1536576 - RNA, 19 nt, Artificial Sequence
  Description of Artificial Sequence: Synthetic oligonucleotide
uucugaucguuucuauugc

SEQ ID NO: 1536577 - RNA, 19 nt, Artificial Sequence
  Description of Artificial Sequence: Synthetic oligonucleotide
aguuucaugguggauguag

SEQ ID NO: 1536578 - RNA, 19 nt, Artificial Sequence
  Description of Artificial Sequence: Synthetic oligonucleotide
ugauucugaggagagaaga

SEQ ID NO: 1536579 - RNA, 19 nt, Artificial Sequence
  Description of Artificial Sequence: Synthetic oligonucleotide
agcuuuagacauuaugcca

SEQ ID NO: 1536580 - RNA, 19 nt, Artificial Sequence
  Description of Artificial Sequence: Synthetic oligonucleotide
aaaagacgguuauuucuca

SEQ ID NO: 1536581 - RNA, 19 nt, Artificial Sequence
  Description of Artificial Sequence: Synthetic oligonucleotide
auuuaggaugcaaagcguc

SEQ ID NO: 1536582 - RNA, 19 nt, Artificial Sequence
  Description of Artificial Sequence: Synthetic oligonucleotide
aucauccggucucucaggc

SEQ ID NO: 1536583 - RNA, 19 nt, Artificial Sequence
  Description of Artificial Sequence: Synthetic oligonucleotide
auauucuugugacgacagc

SEQ ID NO: 1536584 - RNA, 19 nt, Artificial Sequence
  Description of Artificial Sequence: Synthetic oligonucleotide
aaaucacgaucagagagca

SEQ ID NO: 1536585 - RNA, 19 nt, Artificial Sequence
  Description of Artificial Sequence: Synthetic oligonucleotide
ucuaaaagacgguuauuuc

SEQ ID NO: 1536586 - RNA, 19 nt, Artificial Sequence
  Description of Artificial Sequence: Synthetic oligonucleotide
auuaucacugcaauguuga

SEQ ID NO: 1536587 - RNA, 19 nt, Artificial Sequence
  Description of Artificial Sequence: Synthetic oligonucleotide
caguacaacuagaagaauc

SEQ ID NO: 1536588 - RNA, 19 nt, Artificial Sequence
  Description of Artificial Sequence: Synthetic oligonucleotide
uuauauucuugugacgaca

SEQ ID NO: 1536589 - RNA, 19 nt, Artificial Sequence
  Description of Artificial Sequence: Synthetic oligonucleotide
cauuauauucuugugacga

SEQ ID NO: 1536590 - RNA, 19 nt, Artificial Sequence
  Description of Artificial Sequence: Synthetic oligonucleotide
uagaagaaucauccggucu

SEQ ID NO: 1536591 - RNA, 19 nt, Artificial Sequence
  Description of Artificial Sequence: Synthetic oligonucleotide
gaucguuucuauugcauga

SEQ ID NO: 1536592 - RNA, 19 nt, Artificial Sequence
  Description of Artificial Sequence: Synthetic oligonucleotide
auguguacaaauucuuggu

SEQ ID NO: 1536593 - RNA, 19 nt, Artificial Sequence
  Description of Artificial Sequence: Synthetic oligonucleotide
cacuuuagaguccaguuuc

SEQ ID NO: 1536594 - RNA, 19 nt, Artificial Sequence
  Description of Artificial Sequence: Synthetic oligonucleotide
ugcuguuuguuuccgugag

SEQ ID NO: 1536595 - RNA, 19 nt, Artificial Sequence
  Description of Artificial Sequence: Synthetic oligonucleotide
ucuagugcggugauucugu

SEQ ID NO: 1536596 - RNA, 19 nt, Artificial Sequence
  Description of Artificial Sequence: Synthetic oligonucleotide
uuuguuuccgugaguagau

SEQ ID NO: 1536597 - RNA, 19 nt, Artificial Sequence
  Description of Artificial Sequence: Synthetic oligonucleotide
uucaucuaaaagacgguua

SEQ ID NO: 1536598 - RNA, 19 nt, Artificial Sequence
  Description of Artificial Sequence: Synthetic oligonucleotide
acagagagaacaauaguug

SEQ ID NO: 1536599 - RNA, 19 nt, Artificial Sequence
  Description of Artificial Sequence: Synthetic oligonucleotide
ucugaggagagaagaauau

SEQ ID NO: 1536600 - RNA, 19 nt, Artificial Sequence
  Description of Artificial Sequence: Synthetic oligonucleotide
uccgugaguagauaagcca

SEQ ID NO: 1536601 - RNA, 19 nt, Artificial Sequence
  Description of Artificial Sequence: Synthetic oligonucleotide
accaguuucucuaaccagg

SEQ ID NO: 1536602 - RNA, 19 nt, Artificial Sequence
  Description of Artificial Sequence: Synthetic oligonucleotide
uguggguuuauuucucugu

SEQ ID NO: 1536603 - RNA, 19 nt, Artificial Sequence
  Description of Artificial Sequence: Synthetic oligonucleotide
uuuccgugaguagauaagc

SEQ ID NO: 1536604 - RNA, 19 nt, Artificial Sequence
  Description of Artificial Sequence: Synthetic oligonucleotide
ucacgugacaagcaacugu

SEQ ID NO: 1536605 - RNA, 19 nt, Artificial Sequence
  Description of Artificial Sequence: Synthetic oligonucleotide
uuagacauuaugccaguuu

SEQ ID NO: 1536606 - RNA, 19 nt, Artificial Sequence
  Description of Artificial Sequence: Synthetic oligonucleotide
aaucugauucugaggagag

SEQ ID NO: 1536607 - RNA, 19 nt, Artificial Sequence
  Description of Artificial Sequence: Synthetic oligonucleotide
ucuauugcaugaaucugau

SEQ ID NO: 1536608 - RNA, 19 nt, Artificial Sequence
  Description of Artificial Sequence: Synthetic oligonucleotide
ugaccccacaaacaggaca

SEQ ID NO: 1536609 - RNA, 19 nt, Artificial Sequence
  Description of Artificial Sequence: Synthetic oligonucleotide
gagagaacaauaguuguga

SEQ ID NO: 1536610 - RNA, 19 nt, Artificial Sequence
  Description of Artificial Sequence: Synthetic oligonucleotide
uccuaugagacuugucucu

SEQ ID NO: 1536611 - RNA, 19 nt, Artificial Sequence
  Description of Artificial Sequence: Synthetic oligonucleotide
acaaccaccaguuucucua

SEQ ID NO: 1536612 - RNA, 19 nt, Artificial Sequence
  Description of Artificial Sequence: Synthetic oligonucleotide
uuccgugaguagauaagcc

SEQ ID NO: 1536613 - RNA, 19 nt, Artificial Sequence
  Description of Artificial Sequence: Synthetic oligonucleotide
agcgaagcaaaucaucuau

SEQ ID NO: 1536614 - RNA, 19 nt, Artificial Sequence
  Description of Artificial Sequence: Synthetic oligonucleotide
uguuuaacaggauguuuaa

SEQ ID NO: 1536615 - RNA, 19 nt, Artificial Sequence
  Description of Artificial Sequence: Synthetic oligonucleotide
uuguuacugagacuguauc

SEQ ID NO: 1536616 - RNA, 19 nt, Artificial Sequence
  Description of Artificial Sequence: Synthetic oligonucleotide
uccccuguuuaacaggaug

SEQ ID NO: 1536617 - RNA, 19 nt, Artificial Sequence
  Description of Artificial Sequence: Synthetic oligonucleotide
gacgacagcuucuccacag

SEQ ID NO: 1536618 - RNA, 19 nt, Artificial Sequence
  Description of Artificial Sequence: Synthetic oligonucleotide
uucgauggcucuagugcgg

SEQ ID NO: 1536619 - RNA, 19 nt, Artificial Sequence
  Description of Artificial Sequence: Synthetic oligonucleotide
cugauuuaggaugcaaagc

SEQ ID NO: 1536620 - RNA, 19 nt, Artificial Sequence
  Description of Artificial Sequence: Synthetic oligonucleotide
uacugagacuguauccgag

SEQ ID NO: 1536621 - RNA, 19 nt, Artificial Sequence
  Description of Artificial Sequence: Synthetic oligonucleotide
agcggcuuccuuuugugag

SEQ ID NO: 1536622 - RNA, 19 nt, Artificial Sequence
  Description of Artificial Sequence: Synthetic oligonucleotide
acuagaagaaucauccggu

SEQ ID NO: 1536623 - RNA, 19 nt, Artificial Sequence
  Description of Artificial Sequence: Synthetic oligonucleotide
uccauuaaccuguuccccu

SEQ ID NO: 1536624 - RNA, 19 nt, Artificial Sequence
  Description of Artificial Sequence: Synthetic oligonucleotide
uaugccaguuuucuuguau

SEQ ID NO: 1536625 - RNA, 19 nt, Artificial Sequence
  Description of Artificial Sequence: Synthetic oligonucleotide
uuauguacuuuaacagcaa

SEQ ID NO: 1536626 - RNA, 19 nt, Artificial Sequence
  Description of Artificial Sequence: Synthetic oligonucleotide
cuucaaggcgcauccgugg

SEQ ID NO: 1536627 - RNA, 19 nt, Artificial Sequence
  Description of Artificial Sequence: Synthetic oligonucleotide
agacgguuauuucucaggu

SEQ ID NO: 1536628 - RNA, 19 nt, Artificial Sequence
  Description of Artificial Sequence: Synthetic oligonucleotide
uguuuccgugaguagauaa

SEQ ID NO: 1536629 - RNA, 19 nt, Artificial Sequence
  Description of Artificial Sequence: Synthetic oligonucleotide
ggagcuggaauucauuuug

SEQ ID NO: 1536630 - RNA, 19 nt, Artificial Sequence
  Description of Artificial Sequence: Synthetic oligonucleotide
cuaaaagacgguuauuucu

SEQ ID NO: 1536631 - RNA, 19 nt, Artificial Sequence
  Description of Artificial Sequence: Synthetic oligonucleotide
ugagggcugaauuuccugu

SEQ ID NO: 1536632 - RNA, 19 nt, Artificial Sequence
  Description of Artificial Sequence: Synthetic oligonucleotide
ucuucacgugacaagcaac

SEQ ID NO: 1536633 - RNA, 19 nt, Artificial Sequence
  Description of Artificial Sequence: Synthetic oligonucleotide
caacuagaagaaucauccg

SEQ ID NO: 1536634 - RNA, 19 nt, Artificial Sequence
  Description of Artificial Sequence: Synthetic oligonucleotide
uuacgauauuuacugugaa

SEQ ID NO: 1536635 - RNA, 19 nt, Artificial Sequence
  Description of Artificial Sequence: Synthetic oligonucleotide
uccuauuccgcuuguuucu

SEQ ID NO: 1536636 - RNA, 19 nt, Artificial Sequence
  Description of Artificial Sequence: Synthetic oligonucleotide
cugucuaaaugcuuguuga

SEQ ID NO: 1536637 - RNA, 19 nt, Artificial Sequence
  Description of Artificial Sequence: Synthetic oligonucleotide
acucaaaagcaaaucccac

SEQ ID NO: 1536638 - RNA, 19 nt, Artificial Sequence
  Description of Artificial Sequence: Synthetic oligonucleotide
auauacaguuuugggcagc

SEQ ID NO: 1536639 - RNA, 19 nt, Artificial Sequence
  Description of Artificial Sequence: Synthetic oligonucleotide
aguugugagagcacugggg

SEQ ID NO: 1536640 - RNA, 19 nt, Artificial Sequence
  Description of Artificial Sequence: Synthetic oligonucleotide
cucgcuucaaggcgcaucc

SEQ ID NO: 1536641 - RNA, 19 nt, Artificial Sequence
  Description of Artificial Sequence: Synthetic oligonucleotide
gaaucugauucugaggaga

SEQ ID NO: 1536642 - RNA, 19 nt, Artificial Sequence
  Description of Artificial Sequence: Synthetic oligonucleotide
aaaccaugacauuuucauu

SEQ ID NO: 1536643 - RNA, 19 nt, Artificial Sequence
  Description of Artificial Sequence: Synthetic oligonucleotide
uuugugagcagaacuucua

SEQ ID NO: 1536644 - RNA, 19 nt, Artificial Sequence
  Description of Artificial Sequence: Synthetic oligonucleotide
agcaacauucuuugaggug

SEQ ID NO: 1536645 - RNA, 19 nt, Artificial Sequence
  Description of Artificial Sequence: Synthetic oligonucleotide
uccuuuugagggcugaauu

SEQ ID NO: 1536646 - RNA, 19 nt, Artificial Sequence
  Description of Artificial Sequence: Synthetic oligonucleotide
uggaauucauuuugaugcu

SEQ ID NO: 1536647 - RNA, 19 nt, Artificial Sequence
  Description of Artificial Sequence: Synthetic oligonucleotide
cacugcaauguugaaauac

SEQ ID NO: 1536648 - RNA, 19 nt, Artificial Sequence
  Description of Artificial Sequence: Synthetic oligonucleotide
aggaugcaaagcgucacac

SEQ ID NO: 1536649 - RNA, 19 nt, Artificial Sequence
  Description of Artificial Sequence: Synthetic oligonucleotide
aaagcgucacacugggcau

SEQ ID NO: 1536650 - RNA, 19 nt, Artificial Sequence
  Description of Artificial Sequence: Synthetic oligonucleotide
agaaucauccggucucuca

SEQ ID NO: 1536651 - RNA, 19 nt, Artificial Sequence
  Description of Artificial Sequence: Synthetic oligonucleotide
uacgauauuuacugugaau

SEQ ID NO: 1536652 - RNA, 19 nt, Artificial Sequence
  Description of Artificial Sequence: Synthetic oligonucleotide
uguuguggguuuauuucuc

SEQ ID NO: 1536653 - RNA, 19 nt, Artificial Sequence
  Description of Artificial Sequence: Synthetic oligonucleotide
cuuuugagggcugaauuuc

SEQ ID NO: 1536654 - RNA, 19 nt, Artificial Sequence
  Description of Artificial Sequence: Synthetic oligonucleotide
uuacugagacuguauccga

SEQ ID NO: 1536655 - RNA, 19 nt, Artificial Sequence
  Description of Artificial Sequence: Synthetic oligonucleotide
uugugagcagaacuucuaa

SEQ ID NO: 1536656 - RNA, 19 nt, Artificial Sequence
  Description of Artificial Sequence: Synthetic oligonucleotide
uccgcuuguuucuugguuc

SEQ ID NO: 1536657 - RNA, 19 nt, Artificial Sequence
  Description of Artificial Sequence: Synthetic oligonucleotide
acagcgaagcaaaucaucu

SEQ ID NO: 1536658 - RNA, 19 nt, Artificial Sequence
  Description of Artificial Sequence: Synthetic oligonucleotide
ugcggugauucuguugugg

SEQ ID NO: 1536659 - RNA, 19 nt, Artificial Sequence
  Description of Artificial Sequence: Synthetic oligonucleotide
aucaucgccagccccggag

SEQ ID NO: 1536660 - RNA, 19 nt, Artificial Sequence
  Description of Artificial Sequence: Synthetic oligonucleotide
auccgagaaguucacauua

SEQ ID NO: 1536661 - RNA, 19 nt, Artificial Sequence
  Description of Artificial Sequence: Synthetic oligonucleotide
uuaucuccuuuugagggcu

SEQ ID NO: 1536662 - RNA, 19 nt, Artificial Sequence
  Description of Artificial Sequence: Synthetic oligonucleotide
cuuggacgauuucagcagc

SEQ ID NO: 1536663 - RNA, 19 nt, Artificial Sequence
  Description of Artificial Sequence: Synthetic oligonucleotide
gcuggaauucauuuugaug

SEQ ID NO: 1536664 - RNA, 19 nt, Artificial Sequence
  Description of Artificial Sequence: Synthetic oligonucleotide
ucucuucacgugacaagca

SEQ ID NO: 1536665 - RNA, 19 nt, Artificial Sequence
  Description of Artificial Sequence: Synthetic oligonucleotide
gagauauggguggugacuc

SEQ ID NO: 1536666 - RNA, 19 nt, Artificial Sequence
  Description of Artificial Sequence: Synthetic oligonucleotide
cuagaagaaucauccgguc

SEQ ID NO: 1536667 - RNA, 19 nt, Artificial Sequence
  Description of Artificial Sequence: Synthetic oligonucleotide
acuuuaacagcaacauucu

SEQ ID NO: 1536668 - RNA, 19 nt, Artificial Sequence
  Description of Artificial Sequence: Synthetic oligonucleotide
ugucuaaaugcuuguugau

SEQ ID NO: 1536669 - RNA, 19 nt, Artificial Sequence
  Description of Artificial Sequence: Synthetic oligonucleotide
caacaaguugggcacugag

SEQ ID NO: 1536670 - RNA, 19 nt, Artificial Sequence
  Description of Artificial Sequence: Synthetic oligonucleotide
acaauaguugugagagcac

SEQ ID NO: 1536671 - RNA, 19 nt, Artificial Sequence
  Description of Artificial Sequence: Synthetic oligonucleotide
aaaucccacagcgaagcaa

SEQ ID NO: 1536672 - RNA, 19 nt, Artificial Sequence
  Description of Artificial Sequence: Synthetic oligonucleotide
cauuagcaucugaaagacc

SEQ ID NO: 1536673 - RNA, 19 nt, Artificial Sequence
  Description of Artificial Sequence: Synthetic oligonucleotide
cugcaauguugaaauacuc

SEQ ID NO: 1536674 - RNA, 19 nt, Artificial Sequence
  Description of Artificial Sequence: Synthetic oligonucleotide
ucacgaucagagagcaagu

SEQ ID NO: 1536675 - RNA, 19 nt, Artificial Sequence
  Description of Artificial Sequence: Synthetic oligonucleotide
acacuuuagaguccaguuu

SEQ ID NO: 1536676 - RNA, 19 nt, Artificial Sequence
  Description of Artificial Sequence: Synthetic oligonucleotide
gcaacugucuaaaugcuug

SEQ ID NO: 1536677 - RNA, 19 nt, Artificial Sequence
  Description of Artificial Sequence: Synthetic oligonucleotide
uucaaggcgcauccguggu

SEQ ID NO: 1536678 - RNA, 19 nt, Artificial Sequence
  Description of Artificial Sequence: Synthetic oligonucleotide
gaccaaguacagucuuucc

SEQ ID NO: 1536679 - RNA, 19 nt, Artificial Sequence
  Description of Artificial Sequence: Synthetic oligonucleotide
cuuuugugagcagaacuuc

SEQ ID NO: 1536680 - RNA, 19 nt, Artificial Sequence
  Description of Artificial Sequence: Synthetic oligonucleotide
agacauuaugccaguuuuc

SEQ ID NO: 1536681 - RNA, 19 nt, Artificial Sequence
  Description of Artificial Sequence: Synthetic oligonucleotide
uccuauuacuauagcuuua

SEQ ID NO: 1536682 - RNA, 19 nt, Artificial Sequence
  Description of Artificial Sequence: Synthetic oligonucleotide
ggugccuuuugauaagcug

SEQ ID NO: 1536683 - RNA, 19 nt, Artificial Sequence
  Description of Artificial Sequence: Synthetic oligonucleotide
uguucugaucguuucuauu

SEQ ID NO: 1536684 - RNA, 19 nt, Artificial Sequence
  Description of Artificial Sequence: Synthetic oligonucleotide
uuggacgauuucagcagcu

SEQ ID NO: 1536685 - RNA, 19 nt, Artificial Sequence
  Description of Artificial Sequence: Synthetic oligonucleotide
uggcuucagcauuauguac

SEQ ID NO: 1536686 - RNA, 19 nt, Artificial Sequence
  Description of Artificial Sequence: Synthetic oligonucleotide
uucucuguuugguccuuug

SEQ ID NO: 1536687 - RNA, 19 nt, Artificial Sequence
  Description of Artificial Sequence: Synthetic oligonucleotide
uucuugguucaaucucagc

SEQ ID NO: 1536688 - RNA, 19 nt, Artificial Sequence
  Description of Artificial Sequence: Synthetic oligonucleotide
aagcaacugucuaaaugcu

SEQ ID NO: 1536689 - RNA, 19 nt, Artificial Sequence
  Description of Artificial Sequence: Synthetic oligonucleotide
acuugucucuuuaaucuca

SEQ ID NO: 1536690 - RNA, 19 nt, Artificial Sequence
  Description of Artificial Sequence: Synthetic oligonucleotide
acgaucagagagcaaguua

SEQ ID NO: 1536691 - RNA, 19 nt, Artificial Sequence
  Description of Artificial Sequence: Synthetic oligonucleotide
caauguugaaauacucaaa

SEQ ID NO: 1536692 - RNA, 19 nt, Artificial Sequence
  Description of Artificial Sequence: Synthetic oligonucleotide
gauggcucuagugcgguga

SEQ ID NO: 1536693 - RNA, 19 nt, Artificial Sequence
  Description of Artificial Sequence: Synthetic oligonucleotide
ucguuucuauugcaugaau

SEQ ID NO: 1536694 - RNA, 19 nt, Artificial Sequence
  Description of Artificial Sequence: Synthetic oligonucleotide
ucaucaucgccagccccgg

SEQ ID NO: 1536695 - RNA, 19 nt, Artificial Sequence
  Description of Artificial Sequence: Synthetic oligonucleotide
uuacucgcuucaaggcgca

SEQ ID NO: 1536696 - RNA, 19 nt, Artificial Sequence
  Description of Artificial Sequence: Synthetic oligonucleotide
gauucugaggagagaagaa

SEQ ID NO: 1536697 - RNA, 19 nt, Artificial Sequence
  Description of Artificial Sequence: Synthetic oligonucleotide
agacacuuuagaguccagu

SEQ ID NO: 1536698 - RNA, 19 nt, Artificial Sequence
  Description of Artificial Sequence: Synthetic oligonucleotide
uagugcggugauucuguug

SEQ ID NO: 1536699 - RNA, 19 nt, Artificial Sequence
  Description of Artificial Sequence: Synthetic oligonucleotide
gauaagccaugcuguuuca

SEQ ID NO: 1536700 - RNA, 19 nt, Artificial Sequence
  Description of Artificial Sequence: Synthetic oligonucleotide
guauccgagaaguucacau

SEQ ID NO: 1536701 - RNA, 19 nt, Artificial Sequence
  Description of Artificial Sequence: Synthetic oligonucleotide
gagggcugaauuuccuguc

SEQ ID NO: 1536702 - RNA, 19 nt, Artificial Sequence
  Description of Artificial Sequence: Synthetic oligonucleotide
aguucaucuaaaagacggu

SEQ ID NO: 1536703 - RNA, 19 nt, Artificial Sequence
  Description of Artificial Sequence: Synthetic oligonucleotide
gaccccacaaacaggacaa

SEQ ID NO: 1536704 - RNA, 19 nt, Artificial Sequence
  Description of Artificial Sequence: Synthetic oligonucleotide
uggugccuuuugauaagcu

SEQ ID NO: 1536705 - RNA, 19 nt, Artificial Sequence
  Description of Artificial Sequence: Synthetic oligonucleotide
acaguuuugggcagcggcu

SEQ ID NO: 1536706 - RNA, 19 nt, Artificial Sequence
  Description of Artificial Sequence: Synthetic oligonucleotide
cuucacgugacaagcaacu

SEQ ID NO: 1536707 - RNA, 19 nt, Artificial Sequence
  Description of Artificial Sequence: Synthetic oligonucleotide
uuccgcuuguuucuugguu

SEQ ID NO: 1536708 - RNA, 19 nt, Artificial Sequence
  Description of Artificial Sequence: Synthetic oligonucleotide
gcggugauucuguuguggg

SEQ ID NO: 1536709 - RNA, 19 nt, Artificial Sequence
  Description of Artificial Sequence: Synthetic oligonucleotide
uggacgauuucagcagcug

SEQ ID NO: 1536710 - RNA, 19 nt, Artificial Sequence
  Description of Artificial Sequence: Synthetic oligonucleotide
ccaguucaucuaaaagacg

SEQ ID NO: 1536711 - RNA, 19 nt, Artificial Sequence
  Description of Artificial Sequence: Synthetic oligonucleotide
acauuaugccaguuuucuu

SEQ ID NO: 1536712 - RNA, 19 nt, Artificial Sequence
  Description of Artificial Sequence: Synthetic oligonucleotide
cugaggagagaagaauauc

SEQ ID NO: 1536713 - RNA, 19 nt, Artificial Sequence
  Description of Artificial Sequence: Synthetic oligonucleotide
ggauguuuaauggcuucag

SEQ ID NO: 1536714 - RNA, 19 nt, Artificial Sequence
  Description of Artificial Sequence: Synthetic oligonucleotide
gauuuaggaugcaaagcgu

SEQ ID NO: 1536715 - RNA, 19 nt, Artificial Sequence
  Description of Artificial Sequence: Synthetic oligonucleotide
gggcacugaguuuauagga

SEQ ID NO: 1536716 - RNA, 19 nt, Artificial Sequence
  Description of Artificial Sequence: Synthetic oligonucleotide
uugaguuuacucgcuucaa

SEQ ID NO: 1536717 - RNA, 19 nt, Artificial Sequence
  Description of Artificial Sequence: Synthetic oligonucleotide
agcugauuuaggaugcaaa

SEQ ID NO: 1536718 - RNA, 19 nt, Artificial Sequence
  Description of Artificial Sequence: Synthetic oligonucleotide
ggggauuaucacugcaaug

SEQ ID NO: 1536719 - RNA, 19 nt, Artificial Sequence
  Description of Artificial Sequence: Synthetic oligonucleotide
aacugucuaaaugcuuguu

SEQ ID NO: 1536720 - RNA, 19 nt, Artificial Sequence
  Description of Artificial Sequence: Synthetic oligonucleotide
ggaauguugaccccacaaa

SEQ ID NO: 1536721 - RNA, 19 nt, Artificial Sequence
  Description of Artificial Sequence: Synthetic oligonucleotide
augagacuugucucuuuaa

SEQ ID NO: 1536722 - RNA, 19 nt, Artificial Sequence
  Description of Artificial Sequence: Synthetic oligonucleotide
cuauuccgcuuguuucuug

SEQ ID NO: 1536723 - RNA, 19 nt, Artificial Sequence
  Description of Artificial Sequence: Synthetic oligonucleotide
agagagcaaguuauauaca

SEQ ID NO: 1536724 - RNA, 19 nt, Artificial Sequence
  Description of Artificial Sequence: Synthetic oligonucleotide
auuccgcuuguuucuuggu

SEQ ID NO: 1536725 - RNA, 19 nt, Artificial Sequence
  Description of Artificial Sequence: Synthetic oligonucleotide
caucuuuuccuauuacuau

SEQ ID NO: 1536726 - RNA, 19 nt, Artificial Sequence
  Description of Artificial Sequence: Synthetic oligonucleotide
aucguuucuauugcaugaa

SEQ ID NO: 1536727 - RNA, 19 nt, Artificial Sequence
  Description of Artificial Sequence: Synthetic oligonucleotide
ucauccggucucucaggcu

SEQ ID NO: 1536728 - RNA, 19 nt, Artificial Sequence
  Description of Artificial Sequence: Synthetic oligonucleotide
uuucaauuucuuggacgau

SEQ ID NO: 1536729 - RNA, 19 nt, Artificial Sequence
  Description of Artificial Sequence: Synthetic oligonucleotide
cguuucuauugcaugaauc

SEQ ID NO: 1536730 - RNA, 19 nt, Artificial Sequence
  Description of Artificial Sequence: Synthetic oligonucleotide
aggccaccgcgguucggcc

SEQ ID NO: 1536731 - RNA, 19 nt, Artificial Sequence
  Description of Artificial Sequence: Synthetic oligonucleotide
ggcacugaguuuauaggac

SEQ ID NO: 1536732 - RNA, 19 nt, Artificial Sequence
  Description of Artificial Sequence: Synthetic oligonucleotide
cacaacaaguugggcacug

SEQ ID NO: 1536733 - RNA, 19 nt, Artificial Sequence
  Description of Artificial Sequence: Synthetic oligonucleotide
aguuuggacugaggaaagu

SEQ ID NO: 1536734 - RNA, 19 nt, Artificial Sequence
  Description of Artificial Sequence: Synthetic oligonucleotide
ggcucuagugcggugauuc

SEQ ID NO: 1536735 - RNA, 19 nt, Artificial Sequence
  Description of Artificial Sequence: Synthetic oligonucleotide
cucuucacgugacaagcaa

SEQ ID NO: 1536736 - RNA, 19 nt, Artificial Sequence
  Description of Artificial Sequence: Synthetic oligonucleotide
caacaggcgaguccgugca

SEQ ID NO: 1536737 - RNA, 19 nt, Artificial Sequence
  Description of Artificial Sequence: Synthetic oligonucleotide
cugggcauuguacaugugu

SEQ ID NO: 1536738 - RNA, 19 nt, Artificial Sequence
  Description of Artificial Sequence: Synthetic oligonucleotide
gauauggguggugacucua

SEQ ID NO: 1536739 - RNA, 19 nt, Artificial Sequence
  Description of Artificial Sequence: Synthetic oligonucleotide
accgcgguucggccagggc

SEQ ID NO: 1536740 - RNA, 19 nt, Artificial Sequence
  Description of Artificial Sequence: Synthetic oligonucleotide
guuuguuacugagacugua

SEQ ID NO: 1536741 - RNA, 19 nt, Artificial Sequence
  Description of Artificial Sequence: Synthetic oligonucleotide
cugcuguuuguuuccguga

SEQ ID NO: 1536742 - RNA, 19 nt, Artificial Sequence
  Description of Artificial Sequence: Synthetic oligonucleotide
cugauacacaaccaccagu

SEQ ID NO: 1536743 - RNA, 19 nt, Artificial Sequence
  Description of Artificial Sequence: Synthetic oligonucleotide
gcauuguacauguguacaa

SEQ ID NO: 1536744 - RNA, 19 nt, Artificial Sequence
  Description of Artificial Sequence: Synthetic oligonucleotide
auccggucucucaggcucc

SEQ ID NO: 1536745 - RNA, 19 nt, Artificial Sequence
  Description of Artificial Sequence: Synthetic oligonucleotide
uuaugccaguuuucuugua

SEQ ID NO: 1536746 - RNA, 19 nt, Artificial Sequence
  Description of Artificial Sequence: Synthetic oligonucleotide
ucgauggcucuagugcggu

SEQ ID NO: 1536747 - RNA, 19 nt, Artificial Sequence
  Description of Artificial Sequence: Synthetic oligonucleotide
aacauucuuugagguggaa

SEQ ID NO: 1536748 - RNA, 19 nt, Artificial Sequence
  Description of Artificial Sequence: Synthetic oligonucleotide
gacgauuucagcagcugau

SEQ ID NO: 1536749 - RNA, 19 nt, Artificial Sequence
  Description of Artificial Sequence: Synthetic oligonucleotide
aacaggcgaguccgugcaa

SEQ ID NO: 1536750 - RNA, 19 nt, Artificial Sequence
  Description of Artificial Sequence: Synthetic oligonucleotide
auaagccaugcuguuucau

SEQ ID NO: 1536751 - RNA, 19 nt, Artificial Sequence
  Description of Artificial Sequence: Synthetic oligonucleotide
agcacuuucgauggcucua

SEQ ID NO: 1536752 - RNA, 19 nt, Artificial Sequence
  Description of Artificial Sequence: Synthetic oligonucleotide
ucccaacaacucugauaca

SEQ ID NO: 1536753 - RNA, 19 nt, Artificial Sequence
  Description of Artificial Sequence: Synthetic oligonucleotide
guucuguuacugccacaca

SEQ ID NO: 1536754 - RNA, 19 nt, Artificial Sequence
  Description of Artificial Sequence: Synthetic oligonucleotide
uccggucucucaggcuccg

SEQ ID NO: 1536755 - RNA, 19 nt, Artificial Sequence
  Description of Artificial Sequence: Synthetic oligonucleotide
cagcaacauucuuugaggu

SEQ ID NO: 1536756 - RNA, 19 nt, Artificial Sequence
  Description of Artificial Sequence: Synthetic oligonucleotide
gcggcuuccuuuugugagc

SEQ ID NO: 1536757 - RNA, 19 nt, Artificial Sequence
  Description of Artificial Sequence: Synthetic oligonucleotide
guuauuucucaggucuggu

SEQ ID NO: 1536758 - RNA, 19 nt, Artificial Sequence
  Description of Artificial Sequence: Synthetic oligonucleotide
gucacaggaccauuagcau

SEQ ID NO: 1536759 - RNA, 19 nt, Artificial Sequence
  Description of Artificial Sequence: Synthetic oligonucleotide
acaggcgaguccgugcaaa

SEQ ID NO: 1536760 - RNA, 19 nt, Artificial Sequence
  Description of Artificial Sequence: Synthetic oligonucleotide
cucaggucugguucuguua

SEQ ID NO: 1536761 - RNA, 19 nt, Artificial Sequence
  Description of Artificial Sequence: Synthetic oligonucleotide
uuguuuccgugaguagaua

SEQ ID NO: 1536762 - RNA, 19 nt, Artificial Sequence
  Description of Artificial Sequence: Synthetic oligonucleotide
caaaucccacagcgaagca

SEQ ID NO: 1536763 - RNA, 19 nt, Artificial Sequence
  Description of Artificial Sequence: Synthetic oligonucleotide
caacugucuaaaugcuugu

SEQ ID NO: 1536764 - RNA, 19 nt, Artificial Sequence
  Description of Artificial Sequence: Synthetic oligonucleotide
aaucacgaucagagagcaa

SEQ ID NO: 1536765 - RNA, 19 nt, Artificial Sequence
  Description of Artificial Sequence: Synthetic oligonucleotide
cagcgaagcaaaucaucua

SEQ ID NO: 1536766 - RNA, 19 nt, Artificial Sequence
  Description of Artificial Sequence: Synthetic oligonucleotide
gacaagcaacugucuaaau

SEQ ID NO: 1536767 - RNA, 19 nt, Artificial Sequence
  Description of Artificial Sequence: Synthetic oligonucleotide
caggagcuggaauucauuu

SEQ ID NO: 1536768 - RNA, 19 nt, Artificial Sequence
  Description of Artificial Sequence: Synthetic oligonucleotide
ggagauauggguggugacu

SEQ ID NO: 1536769 - RNA, 19 nt, Artificial Sequence
  Description of Artificial Sequence: Synthetic oligonucleotide
acgugacaagcaacugucu

SEQ ID NO: 1536770 - RNA, 19 nt, Artificial Sequence
  Description of Artificial Sequence: Synthetic oligonucleotide
ccuuuugauaagcugcugu

SEQ ID NO: 1536771 - RNA, 19 nt, Artificial Sequence
  Description of Artificial Sequence: Synthetic oligonucleotide
guuuaacaggauguuuaau

SEQ ID NO: 1536772 - RNA, 19 nt, Artificial Sequence
  Description of Artificial Sequence: Synthetic oligonucleotide
guggaagacacaggagaua

SEQ ID NO: 1536773 - RNA, 19 nt, Artificial Sequence
  Description of Artificial Sequence: Synthetic oligonucleotide
gugcggugauucuguugug

SEQ ID NO: 1536774 - RNA, 19 nt, Artificial Sequence
  Description of Artificial Sequence: Synthetic oligonucleotide
cucagcacuuucgauggcu

SEQ ID NO: 1536775 - RNA, 19 nt, Artificial Sequence
  Description of Artificial Sequence: Synthetic oligonucleotide
cacacugggcauuguacau

SEQ ID NO: 1536776 - RNA, 19 nt, Artificial Sequence
  Description of Artificial Sequence: Synthetic oligonucleotide
cagcggcuuccuuuuguga

SEQ ID NO: 1536777 - RNA, 19 nt, Artificial Sequence
  Description of Artificial Sequence: Synthetic oligonucleotide
aggcgaguccgugcaaaau

SEQ ID NO: 1536778 - RNA, 19 nt, Artificial Sequence
  Description of Artificial Sequence: Synthetic oligonucleotide
ccuuuugugagcagaacuu

SEQ ID NO: 1536779 - RNA, 19 nt, Artificial Sequence
  Description of Artificial Sequence: Synthetic oligonucleotide
cuguucugaucguuucuau

SEQ ID NO: 1536780 - RNA, 19 nt, Artificial Sequence
  Description of Artificial Sequence: Synthetic oligonucleotide
ggcgaguccgugcaaaauu

SEQ ID NO: 1536781 - RNA, 19 nt, Artificial Sequence
  Description of Artificial Sequence: Synthetic oligonucleotide
caggcgaguccgugcaaaa

SEQ ID NO: 1536782 - RNA, 19 nt, Artificial Sequence
  Description of Artificial Sequence: Synthetic oligonucleotide
cuaugagacuugucucuuu

SEQ ID NO: 1536783 - RNA, 19 nt, Artificial Sequence
  Description of Artificial Sequence: Synthetic oligonucleotide
ccgugaguagauaagccau

SEQ ID NO: 1536784 - RNA, 19 nt, Artificial Sequence
  Description of Artificial Sequence: Synthetic oligonucleotide
ccgcuuguuucuugguuca

SEQ ID NO: 1536785 - RNA, 19 nt, Artificial Sequence
  Description of Artificial Sequence: Synthetic oligonucleotide
caccgcgguucggccaggg

SEQ ID NO: 1536786 - RNA, 19 nt, Artificial Sequence
  Description of Artificial Sequence: Synthetic oligonucleotide
uacucgcuucaaggcgcau

SEQ ID NO: 1536787 - RNA, 19 nt, Artificial Sequence
  Description of Artificial Sequence: Synthetic oligonucleotide
guugggcacugaguuuaua

SEQ ID NO: 1536788 - RNA, 19 nt, Artificial Sequence
  Description of Artificial Sequence: Synthetic oligonucleotide
cugaggaaagugguuuguu

SEQ ID NO: 1536789 - RNA, 19 nt, Artificial Sequence
  Description of Artificial Sequence: Synthetic oligonucleotide
gguuuguuacugagacugu

SEQ ID NO: 1536790 - RNA, 19 nt, Artificial Sequence
  Description of Artificial Sequence: Synthetic oligonucleotide
cgaguccgugcaaaauuca

SEQ ID NO: 1536791 - RNA, 19 nt, Artificial Sequence
  Description of Artificial Sequence: Synthetic oligonucleotide
cacgaucagagagcaaguu

SEQ ID NO: 1536792 - RNA, 19 nt, Artificial Sequence
  Description of Artificial Sequence: Synthetic oligonucleotide
uggcucuagugcggugauu

SEQ ID NO: 1536793 - RNA, 19 nt, Artificial Sequence
  Description of Artificial Sequence: Synthetic oligonucleotide
cgauauuuacugugaauuu

SEQ ID NO: 1536794 - RNA, 19 nt, Artificial Sequence
  Description of Artificial Sequence: Synthetic oligonucleotide
caucaucgccagccccgga

SEQ ID NO: 1536795 - RNA, 19 nt, Artificial Sequence
  Description of Artificial Sequence: Synthetic oligonucleotide
cuagugcggugauucuguu

SEQ ID NO: 1536796 - RNA, 19 nt, Artificial Sequence
  Description of Artificial Sequence: Synthetic oligonucleotide
cacuuucgauggcucuagu

SEQ ID NO: 1536797 - RNA, 19 nt, Artificial Sequence
  Description of Artificial Sequence: Synthetic oligonucleotide
gcgaagcaaaucaucuauu

SEQ ID NO: 1536798 - RNA, 19 nt, Artificial Sequence
  Description of Artificial Sequence: Synthetic oligonucleotide
caguuucaugguggaugua

SEQ ID NO: 1536799 - RNA, 19 nt, Artificial Sequence
  Description of Artificial Sequence: Synthetic oligonucleotide
cugcaacaggcgaguccgu

SEQ ID NO: 1536800 - RNA, 19 nt, Artificial Sequence
  Description of Artificial Sequence: Synthetic oligonucleotide
ccuauuccgcuuguuucuu

SEQ ID NO: 1536801 - RNA, 19 nt, Artificial Sequence
  Description of Artificial Sequence: Synthetic oligonucleotide
gcgguucggccagggccuc

SEQ ID NO: 1536802 - RNA, 19 nt, Artificial Sequence
  Description of Artificial Sequence: Synthetic oligonucleotide
cgacugcccuggggagucc

SEQ ID NO: 1536803 - RNA, 19 nt, Artificial Sequence
  Description of Artificial Sequence: Synthetic oligonucleotide
gcgucacacugggcauugu

SEQ ID NO: 1536804 - RNA, 19 nt, Artificial Sequence
  Description of Artificial Sequence: Synthetic oligonucleotide
aaugucgacagacagggcg

SEQ ID NO: 1536805 - RNA, 19 nt, Artificial Sequence
  Description of Artificial Sequence: Synthetic oligonucleotide
agugcagugggauauaugg

SEQ ID NO: 1536806 - RNA, 19 nt, Artificial Sequence
  Description of Artificial Sequence: Synthetic oligonucleotide
cuagguauggauaugaaug

SEQ ID NO: 1536807 - RNA, 19 nt, Artificial Sequence
  Description of Artificial Sequence: Synthetic oligonucleotide
aaugugcccucacugaacc

SEQ ID NO: 1536808 - RNA, 19 nt, Artificial Sequence
  Description of Artificial Sequence: Synthetic oligonucleotide
gaaaugucgacagacaggg

SEQ ID NO: 1536809 - RNA, 19 nt, Artificial Sequence
  Description of Artificial Sequence: Synthetic oligonucleotide
gaagccauaagagugaaag

SEQ ID NO: 1536810 - RNA, 19 nt, Artificial Sequence
  Description of Artificial Sequence: Synthetic oligonucleotide
aguauguacaucaaugcgc

SEQ ID NO: 1536811 - RNA, 19 nt, Artificial Sequence
  Description of Artificial Sequence: Synthetic oligonucleotide
uccauugugguucuaaccc

SEQ ID NO: 1536812 - RNA, 19 nt, Artificial Sequence
  Description of Artificial Sequence: Synthetic oligonucleotide
aauuccagccagcuugagc

SEQ ID NO: 1536813 - RNA, 19 nt, Artificial Sequence
  Description of Artificial Sequence: Synthetic oligonucleotide
ugagaaaggacucaacagu

SEQ ID NO: 1536814 - RNA, 19 nt, Artificial Sequence
  Description of Artificial Sequence: Synthetic oligonucleotide
ugauagaaggcacaguugu

SEQ ID NO: 1536815 - RNA, 19 nt, Artificial Sequence
  Description of Artificial Sequence: Synthetic oligonucleotide
ugaaaugucgacagacagg

SEQ ID NO: 1536816 - RNA, 19 nt, Artificial Sequence
  Description of Artificial Sequence: Synthetic oligonucleotide
gaguauguacaucaaugcg

SEQ ID NO: 1536817 - RNA, 19 nt, Artificial Sequence
  Description of Artificial Sequence: Synthetic oligonucleotide
uuuaacuagguauggauau

SEQ ID NO: 1536818 - RNA, 19 nt, Artificial Sequence
  Description of Artificial Sequence: Synthetic oligonucleotide
ugguucuaacccaagaccc

SEQ ID NO: 1536819 - RNA, 19 nt, Artificial Sequence
  Description of Artificial Sequence: Synthetic oligonucleotide
cauguagugcguuaggccc

SEQ ID NO: 1536820 - RNA, 19 nt, Artificial Sequence
  Description of Artificial Sequence: Synthetic oligonucleotide
cacggagucucuaacaugg

SEQ ID NO: 1536821 - RNA, 19 nt, Artificial Sequence
  Description of Artificial Sequence: Synthetic oligonucleotide
cucacagaagccauaagag

SEQ ID NO: 1536822 - RNA, 19 nt, Artificial Sequence
  Description of Artificial Sequence: Synthetic oligonucleotide
aaaaccaacccacuguuuu

SEQ ID NO: 1536823 - RNA, 19 nt, Artificial Sequence
  Description of Artificial Sequence: Synthetic oligonucleotide
agugcguuaggcccggugc

SEQ ID NO: 1536824 - RNA, 19 nt, Artificial Sequence
  Description of Artificial Sequence: Synthetic oligonucleotide
auguacaucaaugcgcacc

SEQ ID NO: 1536825 - RNA, 19 nt, Artificial Sequence
  Description of Artificial Sequence: Synthetic oligonucleotide
uaccucaaauccauugugg

SEQ ID NO: 1536826 - RNA, 19 nt, Artificial Sequence
  Description of Artificial Sequence: Synthetic oligonucleotide
uguacaucaaugcgcacca

SEQ ID NO: 1536827 - RNA, 19 nt, Artificial Sequence
  Description of Artificial Sequence: Synthetic oligonucleotide
uuuagguucucaggcaucg

SEQ ID NO: 1536828 - RNA, 19 nt, Artificial Sequence
  Description of Artificial Sequence: Synthetic oligonucleotide
auccauugugguucuaacc

SEQ ID NO: 1536829 - RNA, 19 nt, Artificial Sequence
  Description of Artificial Sequence: Synthetic oligonucleotide
acuagggacaucaugcggc

SEQ ID NO: 1536830 - RNA, 19 nt, Artificial Sequence
  Description of Artificial Sequence: Synthetic oligonucleotide
ucucuaacauggcuguagg

SEQ ID NO: 1536831 - RNA, 19 nt, Artificial Sequence
  Description of Artificial Sequence: Synthetic oligonucleotide
gaaaguaggccucacagaa

SEQ ID NO: 1536832 - RNA, 19 nt, Artificial Sequence
  Description of Artificial Sequence: Synthetic oligonucleotide
cuacuuuuaacuagguaug

SEQ ID NO: 1536833 - RNA, 19 nt, Artificial Sequence
  Description of Artificial Sequence: Synthetic oligonucleotide
auagaguguguccagucuc

SEQ ID NO: 1536834 - RNA, 19 nt, Artificial Sequence
  Description of Artificial Sequence: Synthetic oligonucleotide
aaaacuaccucaaauccau

SEQ ID NO: 1536835 - RNA, 19 nt, Artificial Sequence
  Description of Artificial Sequence: Synthetic oligonucleotide
agggguuuggggcacaggg

SEQ ID NO: 1536836 - RNA, 19 nt, Artificial Sequence
  Description of Artificial Sequence: Synthetic oligonucleotide
auauagaguguguccaguc

SEQ ID NO: 1536837 - RNA, 19 nt, Artificial Sequence
  Description of Artificial Sequence: Synthetic oligonucleotide
uucaucaugaaaugucgac

SEQ ID NO: 1536838 - RNA, 19 nt, Artificial Sequence
  Description of Artificial Sequence: Synthetic oligonucleotide
uaaauuagucugcuucucu

SEQ ID NO: 1536839 - RNA, 19 nt, Artificial Sequence
  Description of Artificial Sequence: Synthetic oligonucleotide
gaugacuagggacaucaug

SEQ ID NO: 1536840 - RNA, 19 nt, Artificial Sequence
  Description of Artificial Sequence: Synthetic oligonucleotide
aagccucgcagacaggguc

SEQ ID NO: 1536841 - RNA, 19 nt, Artificial Sequence
  Description of Artificial Sequence: Synthetic oligonucleotide
agggugaccagcuuuaggu

SEQ ID NO: 1536842 - RNA, 19 nt, Artificial Sequence
  Description of Artificial Sequence: Synthetic oligonucleotide
agaacucaauuccagccag

SEQ ID NO: 1536843 - RNA, 19 nt, Artificial Sequence
  Description of Artificial Sequence: Synthetic oligonucleotide
agugggauauaugguaccc

SEQ ID NO: 1536844 - RNA, 19 nt, Artificial Sequence
  Description of Artificial Sequence: Synthetic oligonucleotide
ugugcaauuggagagcaga

SEQ ID NO: 1536845 - RNA, 19 nt, Artificial Sequence
  Description of Artificial Sequence: Synthetic oligonucleotide
cucaaauccauugugguuc

SEQ ID NO: 1536846 - RNA, 19 nt, Artificial Sequence
  Description of Artificial Sequence: Synthetic oligonucleotide
caggaacccaaccaggugg

SEQ ID NO: 1536847 - RNA, 19 nt, Artificial Sequence
  Description of Artificial Sequence: Synthetic oligonucleotide
uauagaguguguccagucu

SEQ ID NO: 1536848 - RNA, 19 nt, Artificial Sequence
  Description of Artificial Sequence: Synthetic oligonucleotide
guccauaugggguaaggag

SEQ ID NO: 1536849 - RNA, 19 nt, Artificial Sequence
  Description of Artificial Sequence: Synthetic oligonucleotide
ugaaucuacccgagaagcc

SEQ ID NO: 1536850 - RNA, 19 nt, Artificial Sequence
  Description of Artificial Sequence: Synthetic oligonucleotide
ugacuagggacaucaugcg

SEQ ID NO: 1536851 - RNA, 19 nt, Artificial Sequence
  Description of Artificial Sequence: Synthetic oligonucleotide
cugaaucuacccgagaagc

SEQ ID NO: 1536852 - RNA, 19 nt, Artificial Sequence
  Description of Artificial Sequence: Synthetic oligonucleotide
agccauaagagugaaagga

SEQ ID NO: 1536853 - RNA, 19 nt, Artificial Sequence
  Description of Artificial Sequence: Synthetic oligonucleotide
gacaucaugcggccggugg

SEQ ID NO: 1536854 - RNA, 19 nt, Artificial Sequence
  Description of Artificial Sequence: Synthetic oligonucleotide
ucgaugacuagggacauca

SEQ ID NO: 1536855 - RNA, 19 nt, Artificial Sequence
  Description of Artificial Sequence: Synthetic oligonucleotide
uauggauaugaaugugccc

SEQ ID NO: 1536856 - RNA, 19 nt, Artificial Sequence
  Description of Artificial Sequence: Synthetic oligonucleotide
gauaaugagcuuggcuugg

SEQ ID NO: 1536857 - RNA, 19 nt, Artificial Sequence
  Description of Artificial Sequence: Synthetic oligonucleotide
ggaguauguacaucaaugc

SEQ ID NO: 1536858 - RNA, 19 nt, Artificial Sequence
  Description of Artificial Sequence: Synthetic oligonucleotide
agagggugguuccagaacu

SEQ ID NO: 1536859 - RNA, 19 nt, Artificial Sequence
  Description of Artificial Sequence: Synthetic oligonucleotide
ugggauauaugguaccccu

SEQ ID NO: 1536860 - RNA, 19 nt, Artificial Sequence
  Description of Artificial Sequence: Synthetic oligonucleotide
gacuagggacaucaugcgg

SEQ ID NO: 1536861 - RNA, 19 nt, Artificial Sequence
  Description of Artificial Sequence: Synthetic oligonucleotide
ugcaauuggagagcagagg

SEQ ID NO: 1536862 - RNA, 19 nt, Artificial Sequence
  Description of Artificial Sequence: Synthetic oligonucleotide
uaacuagguauggauauga

SEQ ID NO: 1536863 - RNA, 19 nt, Artificial Sequence
  Description of Artificial Sequence: Synthetic oligonucleotide
uuggguacuaacaguugca

SEQ ID NO: 1536864 - RNA, 19 nt, Artificial Sequence
  Description of Artificial Sequence: Synthetic oligonucleotide
uacaucaaugcgcaccagu

SEQ ID NO: 1536865 - RNA, 19 nt, Artificial Sequence
  Description of Artificial Sequence: Synthetic oligonucleotide
ucggggcuaauacuggaag

SEQ ID NO: 1536866 - RNA, 19 nt, Artificial Sequence
  Description of Artificial Sequence: Synthetic oligonucleotide
cauaagagugaaaggagca

SEQ ID NO: 1536867 - RNA, 19 nt, Artificial Sequence
  Description of Artificial Sequence: Synthetic oligonucleotide
guauggauaugaaugugcc

SEQ ID NO: 1536868 - RNA, 19 nt, Artificial Sequence
  Description of Artificial Sequence: Synthetic oligonucleotide
aaggggauaaugagcuugg

SEQ ID NO: 1536869 - RNA, 19 nt, Artificial Sequence
  Description of Artificial Sequence: Synthetic oligonucleotide
uuuccuaagugcaggugac

SEQ ID NO: 1536870 - RNA, 19 nt, Artificial Sequence
  Description of Artificial Sequence: Synthetic oligonucleotide
uacccgagaagccucgcag

SEQ ID NO: 1536871 - RNA, 19 nt, Artificial Sequence
  Description of Artificial Sequence: Synthetic oligonucleotide
auaugguaccccucaucac

SEQ ID NO: 1536872 - RNA, 19 nt, Artificial Sequence
  Description of Artificial Sequence: Synthetic oligonucleotide
aacagugacuggcccauga

SEQ ID NO: 1536873 - RNA, 19 nt, Artificial Sequence
  Description of Artificial Sequence: Synthetic oligonucleotide
ugaaugugcccucacugaa

SEQ ID NO: 1536874 - RNA, 19 nt, Artificial Sequence
  Description of Artificial Sequence: Synthetic oligonucleotide
acauaucuccuccaugacu

SEQ ID NO: 1536875 - RNA, 19 nt, Artificial Sequence
  Description of Artificial Sequence: Synthetic oligonucleotide
aucaaugcgcaccagugau

SEQ ID NO: 1536876 - RNA, 19 nt, Artificial Sequence
  Description of Artificial Sequence: Synthetic oligonucleotide
aaucuacccgagaagccuc

SEQ ID NO: 1536877 - RNA, 19 nt, Artificial Sequence
  Description of Artificial Sequence: Synthetic oligonucleotide
gcuacuuuuaacuagguau

SEQ ID NO: 1536878 - RNA, 19 nt, Artificial Sequence
  Description of Artificial Sequence: Synthetic oligonucleotide
ccuucaucaugaaaugucg

SEQ ID NO: 1536879 - RNA, 19 nt, Artificial Sequence
  Description of Artificial Sequence: Synthetic oligonucleotide
uugugguucuaacccaaga

SEQ ID NO: 1536880 - RNA, 19 nt, Artificial Sequence
  Description of Artificial Sequence: Synthetic oligonucleotide
agggcgguuggacauaucu

SEQ ID NO: 1536881 - RNA, 19 nt, Artificial Sequence
  Description of Artificial Sequence: Synthetic oligonucleotide
gaccacgguguucaugagg

SEQ ID NO: 1536882 - RNA, 19 nt, Artificial Sequence
  Description of Artificial Sequence: Synthetic oligonucleotide
ugcauguagugcguuaggc

SEQ ID NO: 1536883 - RNA, 19 nt, Artificial Sequence
  Description of Artificial Sequence: Synthetic oligonucleotide
ucaauuccagccagcuuga

SEQ ID NO: 1536884 - RNA, 19 nt, Artificial Sequence
  Description of Artificial Sequence: Synthetic oligonucleotide
uguucucguagcgacagcu

SEQ ID NO: 1536885 - RNA, 19 nt, Artificial Sequence
  Description of Artificial Sequence: Synthetic oligonucleotide
uuaacuagguauggauaug

SEQ ID NO: 1536886 - RNA, 19 nt, Artificial Sequence
  Description of Artificial Sequence: Synthetic oligonucleotide
cuaccucaaauccauugug

SEQ ID NO: 1536887 - RNA, 19 nt, Artificial Sequence
  Description of Artificial Sequence: Synthetic oligonucleotide
caagaguggccuaacgcug

SEQ ID NO: 1536888 - RNA, 19 nt, Artificial Sequence
  Description of Artificial Sequence: Synthetic oligonucleotide
cacgguguucaugaggugg

SEQ ID NO: 1536889 - RNA, 19 nt, Artificial Sequence
  Description of Artificial Sequence: Synthetic oligonucleotide
ucucacggagucucuaaca

SEQ ID NO: 1536890 - RNA, 19 nt, Artificial Sequence
  Description of Artificial Sequence: Synthetic oligonucleotide
ucucguagcgacagcugcc

SEQ ID NO: 1536891 - RNA, 19 nt, Artificial Sequence
  Description of Artificial Sequence: Synthetic oligonucleotide
gauaugaaugugcccucac

SEQ ID NO: 1536892 - RNA, 19 nt, Artificial Sequence
  Description of Artificial Sequence: Synthetic oligonucleotide
uccuaagugcaggugacca

SEQ ID NO: 1536893 - RNA, 19 nt, Artificial Sequence
  Description of Artificial Sequence: Synthetic oligonucleotide
uucaugaggugguggaccu

SEQ ID NO: 1536894 - RNA, 19 nt, Artificial Sequence
  Description of Artificial Sequence: Synthetic oligonucleotide
ucuaacccaagacccugca

SEQ ID NO: 1536895 - RNA, 19 nt, Artificial Sequence
  Description of Artificial Sequence: Synthetic oligonucleotide
gggaguauguacaucaaug

SEQ ID NO: 1536896 - RNA, 19 nt, Artificial Sequence
  Description of Artificial Sequence: Synthetic oligonucleotide
uggcagacccacaaagacu

SEQ ID NO: 1536897 - RNA, 19 nt, Artificial Sequence
  Description of Artificial Sequence: Synthetic oligonucleotide
caaggggauaaugagcuug

SEQ ID NO: 1536898 - RNA, 19 nt, Artificial Sequence
  Description of Artificial Sequence: Synthetic oligonucleotide
agugcauguagugcguuag

SEQ ID NO: 1536899 - RNA, 19 nt, Artificial Sequence
  Description of Artificial Sequence: Synthetic oligonucleotide
ugugcccucacugaaccug

SEQ ID NO: 1536900 - RNA, 19 nt, Artificial Sequence
  Description of Artificial Sequence: Synthetic oligonucleotide
ccagcuacuuuuaacuagg

SEQ ID NO: 1536901 - RNA, 19 nt, Artificial Sequence
  Description of Artificial Sequence: Synthetic oligonucleotide
uucuaacccaagacccugc

SEQ ID NO: 1536902 - RNA, 19 nt, Artificial Sequence
  Description of Artificial Sequence: Synthetic oligonucleotide
augguaccccucaucaccc

SEQ ID NO: 1536903 - RNA, 19 nt, Artificial Sequence
  Description of Artificial Sequence: Synthetic oligonucleotide
cuagggacaucaugcggcc

SEQ ID NO: 1536904 - RNA, 19 nt, Artificial Sequence
  Description of Artificial Sequence: Synthetic oligonucleotide
ccauaagagugaaaggagc

SEQ ID NO: 1536905 - RNA, 19 nt, Artificial Sequence
  Description of Artificial Sequence: Synthetic oligonucleotide
caacugaugccaagacagg

SEQ ID NO: 1536906 - RNA, 19 nt, Artificial Sequence
  Description of Artificial Sequence: Synthetic oligonucleotide
uccagcauauagagugugu

SEQ ID NO: 1536907 - RNA, 19 nt, Artificial Sequence
  Description of Artificial Sequence: Synthetic oligonucleotide
guucaugaggugguggacc

SEQ ID NO: 1536908 - RNA, 19 nt, Artificial Sequence
  Description of Artificial Sequence: Synthetic oligonucleotide
aaaugucgacagacagggc

SEQ ID NO: 1536909 - RNA, 19 nt, Artificial Sequence
  Description of Artificial Sequence: Synthetic oligonucleotide
cuaacauggcuguaggcaa

SEQ ID NO: 1536910 - RNA, 19 nt, Artificial Sequence
  Description of Artificial Sequence: Synthetic oligonucleotide
ucacggagucucuaacaug

SEQ ID NO: 1536911 - RNA, 19 nt, Artificial Sequence
  Description of Artificial Sequence: Synthetic oligonucleotide
uuggacauaucuccuccau

SEQ ID NO: 1536912 - RNA, 19 nt, Artificial Sequence
  Description of Artificial Sequence: Synthetic oligonucleotide
auaugggguaaggagcaag

SEQ ID NO: 1536913 - RNA, 19 nt, Artificial Sequence
  Description of Artificial Sequence: Synthetic oligonucleotide
gguuggacauaucuccucc

SEQ ID NO: 1536914 - RNA, 19 nt, Artificial Sequence
  Description of Artificial Sequence: Synthetic oligonucleotide
caggcaucggggcuaauac

SEQ ID NO: 1536915 - RNA, 19 nt, Artificial Sequence
  Description of Artificial Sequence: Synthetic oligonucleotide
cuuuuaacuagguauggau

SEQ ID NO: 1536916 - RNA, 19 nt, Artificial Sequence
  Description of Artificial Sequence: Synthetic oligonucleotide
acccacaaagacuugggua

SEQ ID NO: 1536917 - RNA, 19 nt, Artificial Sequence
  Description of Artificial Sequence: Synthetic oligonucleotide
ggauauaugguaccccuca

SEQ ID NO: 1536918 - RNA, 19 nt, Artificial Sequence
  Description of Artificial Sequence: Synthetic oligonucleotide
acuuuuaacuagguaugga

SEQ ID NO: 1536919 - RNA, 19 nt, Artificial Sequence
  Description of Artificial Sequence: Synthetic oligonucleotide
ggcaagaguggccuaacgc

SEQ ID NO: 1536920 - RNA, 19 nt, Artificial Sequence
  Description of Artificial Sequence: Synthetic oligonucleotide
gacucaacagugacuggcc

SEQ ID NO: 1536921 - RNA, 19 nt, Artificial Sequence
  Description of Artificial Sequence: Synthetic oligonucleotide
cuccugcugaaucuacccg

SEQ ID NO: 1536922 - RNA, 19 nt, Artificial Sequence
  Description of Artificial Sequence: Synthetic oligonucleotide
uaagugcaggugaccaaac

SEQ ID NO: 1536923 - RNA, 19 nt, Artificial Sequence
  Description of Artificial Sequence: Synthetic oligonucleotide
uccgccagcuacuuuuaac

SEQ ID NO: 1536924 - RNA, 19 nt, Artificial Sequence
  Description of Artificial Sequence: Synthetic oligonucleotide
ugcgcccgggcuaaguuga

SEQ ID NO: 1536925 - RNA, 19 nt, Artificial Sequence
  Description of Artificial Sequence: Synthetic oligonucleotide
ggagucucuaacauggcug

SEQ ID NO: 1536926 - RNA, 19 nt, Artificial Sequence
  Description of Artificial Sequence: Synthetic oligonucleotide
uccgacaggggugcgggcg

SEQ ID NO: 1536927 - RNA, 19 nt, Artificial Sequence
  Description of Artificial Sequence: Synthetic oligonucleotide
augucgacagacagggcgg

SEQ ID NO: 1536928 - RNA, 19 nt, Artificial Sequence
  Description of Artificial Sequence: Synthetic oligonucleotide
caaaagugaagccagccgu

SEQ ID NO: 1536929 - RNA, 19 nt, Artificial Sequence
  Description of Artificial Sequence: Synthetic oligonucleotide
caauuggagagcagagguc

SEQ ID NO: 1536930 - RNA, 19 nt, Artificial Sequence
  Description of Artificial Sequence: Synthetic oligonucleotide
ucgacagacagggcgguug

SEQ ID NO: 1536931 - RNA, 19 nt, Artificial Sequence
  Description of Artificial Sequence: Synthetic oligonucleotide
ucaaugcgcaccagugauc

SEQ ID NO: 1536932 - RNA, 19 nt, Artificial Sequence
  Description of Artificial Sequence: Synthetic oligonucleotide
uguagugcguuaggcccgg

SEQ ID NO: 1536933 - RNA, 19 nt, Artificial Sequence
  Description of Artificial Sequence: Synthetic oligonucleotide
gcugaaucuacccgagaag

SEQ ID NO: 1536934 - RNA, 19 nt, Artificial Sequence
  Description of Artificial Sequence: Synthetic oligonucleotide
gcauguagugcguuaggcc

SEQ ID NO: 1536935 - RNA, 19 nt, Artificial Sequence
  Description of Artificial Sequence: Synthetic oligonucleotide
guucuaacccaagacccug

SEQ ID NO: 1536936 - RNA, 19 nt, Artificial Sequence
  Description of Artificial Sequence: Synthetic oligonucleotide
aaugcgcaccagugaucag

SEQ ID NO: 1536937 - RNA, 19 nt, Artificial Sequence
  Description of Artificial Sequence: Synthetic oligonucleotide
cuggaggggaguauguaca

SEQ ID NO: 1536938 - RNA, 19 nt, Artificial Sequence
  Description of Artificial Sequence: Synthetic oligonucleotide
gugcguuaggcccggugcg

SEQ ID NO: 1536939 - RNA, 19 nt, Artificial Sequence
  Description of Artificial Sequence: Synthetic oligonucleotide
ugcgcaccagugaucagaa

SEQ ID NO: 1536940 - RNA, 19 nt, Artificial Sequence
  Description of Artificial Sequence: Synthetic oligonucleotide
acaggguccauauggggua

SEQ ID NO: 1536941 - RNA, 19 nt, Artificial Sequence
  Description of Artificial Sequence: Synthetic oligonucleotide
cagaacucaauuccagcca

SEQ ID NO: 1536942 - RNA, 19 nt, Artificial Sequence
  Description of Artificial Sequence: Synthetic oligonucleotide
ggacucaacagugacuggc

SEQ ID NO: 1536943 - RNA, 19 nt, Artificial Sequence
  Description of Artificial Sequence: Synthetic oligonucleotide
ugguuuccuaagugcaggu

SEQ ID NO: 1536944 - RNA, 19 nt, Artificial Sequence
  Description of Artificial Sequence: Synthetic oligonucleotide
acccugcacaaaaccaacc

SEQ ID NO: 1536945 - RNA, 19 nt, Artificial Sequence
  Description of Artificial Sequence: Synthetic oligonucleotide
auguagugcguuaggcccg

SEQ ID NO: 1536946 - RNA, 19 nt, Artificial Sequence
  Description of Artificial Sequence: Synthetic oligonucleotide
ugcaguccgacaggggugc

SEQ ID NO: 1536947 - RNA, 19 nt, Artificial Sequence
  Description of Artificial Sequence: Synthetic oligonucleotide
agggcgaaucuccucacaa

SEQ ID NO: 1536948 - RNA, 19 nt, Artificial Sequence
  Description of Artificial Sequence: Synthetic oligonucleotide
uggccuaacgcugcaggcc

SEQ ID NO: 1536949 - RNA, 19 nt, Artificial Sequence
  Description of Artificial Sequence: Synthetic oligonucleotide
gaacgauguccacugccca

SEQ ID NO: 1536950 - RNA, 19 nt, Artificial Sequence
  Description of Artificial Sequence: Synthetic oligonucleotide
uagugcguuaggcccggug

SEQ ID NO: 1536951 - RNA, 19 nt, Artificial Sequence
  Description of Artificial Sequence: Synthetic oligonucleotide
gccauaagagugaaaggag

SEQ ID NO: 1536952 - RNA, 19 nt, Artificial Sequence
  Description of Artificial Sequence: Synthetic oligonucleotide
gugcauguagugcguuagg

SEQ ID NO: 1536953 - RNA, 19 nt, Artificial Sequence
  Description of Artificial Sequence: Synthetic oligonucleotide
gugcaauuggagagcagag

SEQ ID NO: 1536954 - RNA, 19 nt, Artificial Sequence
  Description of Artificial Sequence: Synthetic oligonucleotide
agcuacuuuuaacuaggua

SEQ ID NO: 1536955 - RNA, 19 nt, Artificial Sequence
  Description of Artificial Sequence: Synthetic oligonucleotide
ugaaccuggcagacccaca

SEQ ID NO: 1536956 - RNA, 19 nt, Artificial Sequence
  Description of Artificial Sequence: Synthetic oligonucleotide
uaacgcugcaggccucccc

SEQ ID NO: 1536957 - RNA, 19 nt, Artificial Sequence
  Description of Artificial Sequence: Synthetic oligonucleotide
agacagggcgguuggacau

SEQ ID NO: 1536958 - RNA, 19 nt, Artificial Sequence
  Description of Artificial Sequence: Synthetic oligonucleotide
aggaacccaaccagguggg

SEQ ID NO: 1536959 - RNA, 19 nt, Artificial Sequence
  Description of Artificial Sequence: Synthetic oligonucleotide
ggcaucggggcuaauacug

SEQ ID NO: 1536960 - RNA, 19 nt, Artificial Sequence
  Description of Artificial Sequence: Synthetic oligonucleotide
gggaacgauguccacugcc

SEQ ID NO: 1536961 - RNA, 19 nt, Artificial Sequence
  Description of Artificial Sequence: Synthetic oligonucleotide
ggaacgauguccacugccc

SEQ ID NO: 1536962 - RNA, 19 nt, Artificial Sequence
  Description of Artificial Sequence: Synthetic oligonucleotide
ugaugccaagacaggggaa

SEQ ID NO: 1536963 - RNA, 19 nt, Artificial Sequence
  Description of Artificial Sequence: Synthetic oligonucleotide
ggugauagaaggcacaguu

SEQ ID NO: 1536964 - RNA, 19 nt, Artificial Sequence
  Description of Artificial Sequence: Synthetic oligonucleotide
ugguggaccucggugguca

SEQ ID NO: 1536965 - RNA, 19 nt, Artificial Sequence
  Description of Artificial Sequence: Synthetic oligonucleotide
cacagggcgaaucuccuca

SEQ ID NO: 1536966 - RNA, 19 nt, Artificial Sequence
  Description of Artificial Sequence: Synthetic oligonucleotide
ugaccaaacucaguuccau

SEQ ID NO: 1536967 - RNA, 19 nt, Artificial Sequence
  Description of Artificial Sequence: Synthetic oligonucleotide
caaugcgcaccagugauca

SEQ ID NO: 1536968 - RNA, 19 nt, Artificial Sequence
  Description of Artificial Sequence: Synthetic oligonucleotide
ucgcagacaggguccauau

SEQ ID NO: 1536969 - RNA, 19 nt, Artificial Sequence
  Description of Artificial Sequence: Synthetic oligonucleotide
aacuagguauggauaugaa

SEQ ID NO: 1536970 - RNA, 19 nt, Artificial Sequence
  Description of Artificial Sequence: Synthetic oligonucleotide
gaacucaauuccagccagc

SEQ ID NO: 1536971 - RNA, 19 nt, Artificial Sequence
  Description of Artificial Sequence: Synthetic oligonucleotide
ggaaaguaggccucacaga

SEQ ID NO: 1536972 - RNA, 19 nt, Artificial Sequence
  Description of Artificial Sequence: Synthetic oligonucleotide
gugggauauaugguacccc

SEQ ID NO: 1536973 - RNA, 19 nt, Artificial Sequence
  Description of Artificial Sequence: Synthetic oligonucleotide
aagggguuuggggcacagg

SEQ ID NO: 1536974 - RNA, 19 nt, Artificial Sequence
  Description of Artificial Sequence: Synthetic oligonucleotide
uuccuaagugcaggugacc

SEQ ID NO: 1536975 - RNA, 19 nt, Artificial Sequence
  Description of Artificial Sequence: Synthetic oligonucleotide
uuguucucguagcgacagc

SEQ ID NO: 1536976 - RNA, 19 nt, Artificial Sequence
  Description of Artificial Sequence: Synthetic oligonucleotide
ucucagcaguccagcauau

SEQ ID NO: 1536977 - RNA, 19 nt, Artificial Sequence
  Description of Artificial Sequence: Synthetic oligonucleotide
gucucacggagucucuaac

SEQ ID NO: 1536978 - RNA, 19 nt, Artificial Sequence
  Description of Artificial Sequence: Synthetic oligonucleotide
ucaggcaucggggcuaaua

SEQ ID NO: 1536979 - RNA, 19 nt, Artificial Sequence
  Description of Artificial Sequence: Synthetic oligonucleotide
aggcaucggggcuaauacu

SEQ ID NO: 1536980 - RNA, 19 nt, Artificial Sequence
  Description of Artificial Sequence: Synthetic oligonucleotide
gggcuaauacuggaagggg

SEQ ID NO: 1536981 - RNA, 19 nt, Artificial Sequence
  Description of Artificial Sequence: Synthetic oligonucleotide
ggcgaaucuccucacaaaa

SEQ ID NO: 1536982 - RNA, 19 nt, Artificial Sequence
  Description of Artificial Sequence: Synthetic oligonucleotide
caucaugcggccgguggcc

SEQ ID NO: 1536983 - RNA, 19 nt, Artificial Sequence
  Description of Artificial Sequence: Synthetic oligonucleotide
gacaggguccauauggggu

SEQ ID NO: 1536984 - RNA, 19 nt, Artificial Sequence
  Description of Artificial Sequence: Synthetic oligonucleotide
agcccacucccaaaggcag

SEQ ID NO: 1536985 - RNA, 19 nt, Artificial Sequence
  Description of Artificial Sequence: Synthetic oligonucleotide
ugggaacgauguccacugc

SEQ ID NO: 1536986 - RNA, 19 nt, Artificial Sequence
  Description of Artificial Sequence: Synthetic oligonucleotide
gcaagaguggccuaacgcu

SEQ ID NO: 1536987 - RNA, 19 nt, Artificial Sequence
  Description of Artificial Sequence: Synthetic oligonucleotide
cagugcagugggauauaug

SEQ ID NO: 1536988 - RNA, 19 nt, Artificial Sequence
  Description of Artificial Sequence: Synthetic oligonucleotide
acccgagaagccucgcaga

SEQ ID NO: 1536989 - RNA, 19 nt, Artificial Sequence
  Description of Artificial Sequence: Synthetic oligonucleotide
acaaagacuuggguacuaa

SEQ ID NO: 1536990 - RNA, 19 nt, Artificial Sequence
  Description of Artificial Sequence: Synthetic oligonucleotide
aucuacccgagaagccucg

SEQ ID NO: 1536991 - RNA, 19 nt, Artificial Sequence
  Description of Artificial Sequence: Synthetic oligonucleotide
cccaugaggggcacaagag

SEQ ID NO: 1536992 - RNA, 19 nt, Artificial Sequence
  Description of Artificial Sequence: Synthetic oligonucleotide
agaaaacaacugaugccaa

SEQ ID NO: 1536993 - RNA, 19 nt, Artificial Sequence
  Description of Artificial Sequence: Synthetic oligonucleotide
caugugcaauuggagagca

SEQ ID NO: 1536994 - RNA, 19 nt, Artificial Sequence
  Description of Artificial Sequence: Synthetic oligonucleotide
acggagucucuaacauggc

SEQ ID NO: 1536995 - RNA, 19 nt, Artificial Sequence
  Description of Artificial Sequence: Synthetic oligonucleotide
gauauaugguaccccucau

SEQ ID NO: 1536996 - RNA, 19 nt, Artificial Sequence
  Description of Artificial Sequence: Synthetic oligonucleotide
ggccucgaugacuagggac

SEQ ID NO: 1536997 - RNA, 19 nt, Artificial Sequence
  Description of Artificial Sequence: Synthetic oligonucleotide
guuaggcccggugcgcccg

SEQ ID NO: 1536998 - RNA, 19 nt, Artificial Sequence
  Description of Artificial Sequence: Synthetic oligonucleotide
ggcuguaggcaagaguggc

SEQ ID NO: 1536999 - RNA, 19 nt, Artificial Sequence
  Description of Artificial Sequence: Synthetic oligonucleotide
gaagggguuuggggcacag

SEQ ID NO: 1537000 - RNA, 19 nt, Artificial Sequence
  Description of Artificial Sequence: Synthetic oligonucleotide
ugcguuaggcccggugcgc

SEQ ID NO: 1537001 - RNA, 19 nt, Artificial Sequence
  Description of Artificial Sequence: Synthetic oligonucleotide
gagaggacuggggcggggc

SEQ ID NO: 1537002 - RNA, 19 nt, Artificial Sequence
  Description of Artificial Sequence: Synthetic oligonucleotide
ggcgauguccaccaccaga

SEQ ID NO: 1537003 - RNA, 19 nt, Artificial Sequence
  Description of Artificial Sequence: Synthetic oligonucleotide
guucucguagcgacagcug

SEQ ID NO: 1537004 - RNA, 19 nt, Artificial Sequence
  Description of Artificial Sequence: Synthetic oligonucleotide
guagcgacagcugcccuuc

SEQ ID NO: 1537005 - RNA, 19 nt, Artificial Sequence
  Description of Artificial Sequence: Synthetic oligonucleotide
ccauaugggguaaggagca

SEQ ID NO: 1537006 - RNA, 19 nt, Artificial Sequence
  Description of Artificial Sequence: Synthetic oligonucleotide
gccaagacaggggaaggag

SEQ ID NO: 1537007 - RNA, 19 nt, Artificial Sequence
  Description of Artificial Sequence: Synthetic oligonucleotide
agggugguuccagaacuca

SEQ ID NO: 1537008 - RNA, 19 nt, Artificial Sequence
  Description of Artificial Sequence: Synthetic oligonucleotide
aguuguucucguagcgaca

SEQ ID NO: 1537009 - RNA, 19 nt, Artificial Sequence
  Description of Artificial Sequence: Synthetic oligonucleotide
uguaggcaagaguggccua

SEQ ID NO: 1537010 - RNA, 19 nt, Artificial Sequence
  Description of Artificial Sequence: Synthetic oligonucleotide
ggcuaaguugaugaaagcu

SEQ ID NO: 1537011 - RNA, 19 nt, Artificial Sequence
  Description of Artificial Sequence: Synthetic oligonucleotide
gguggucauggccucgaug

SEQ ID NO: 1537012 - RNA, 19 nt, Artificial Sequence
  Description of Artificial Sequence: Synthetic oligonucleotide
gcgaaucuccucacaaaag

SEQ ID NO: 1537013 - RNA, 19 nt, Artificial Sequence
  Description of Artificial Sequence: Synthetic oligonucleotide
acgguguucaugagguggu

SEQ ID NO: 1537014 - RNA, 19 nt, Artificial Sequence
  Description of Artificial Sequence: Synthetic oligonucleotide
gcaagcccacucccaaagg

SEQ ID NO: 1537015 - RNA, 19 nt, Artificial Sequence
  Description of Artificial Sequence: Synthetic oligonucleotide
gggcuaaguugaugaaagc

SEQ ID NO: 1537016 - RNA, 19 nt, Artificial Sequence
  Description of Artificial Sequence: Synthetic oligonucleotide
caucggggcuaauacugga

SEQ ID NO: 1537017 - RNA, 19 nt, Artificial Sequence
  Description of Artificial Sequence: Synthetic oligonucleotide
uaggcaagaguggccuaac

SEQ ID NO: 1537018 - RNA, 19 nt, Artificial Sequence
  Description of Artificial Sequence: Synthetic oligonucleotide
gacccacaaagacuugggu

SEQ ID NO: 1537019 - RNA, 19 nt, Artificial Sequence
  Description of Artificial Sequence: Synthetic oligonucleotide
ucuacccgagaagccucgc

SEQ ID NO: 1537020 - RNA, 19 nt, Artificial Sequence
  Description of Artificial Sequence: Synthetic oligonucleotide
ugucgacagacagggcggu

SEQ ID NO: 1537021 - RNA, 19 nt, Artificial Sequence
  Description of Artificial Sequence: Synthetic oligonucleotide
ugcccucacugaaccuggc

SEQ ID NO: 1537022 - RNA, 19 nt, Artificial Sequence
  Description of Artificial Sequence: Synthetic oligonucleotide
ucguagcgacagcugcccu

SEQ ID NO: 1537023 - RNA, 19 nt, Artificial Sequence
  Description of Artificial Sequence: Synthetic oligonucleotide
guaggcaagaguggccuaa

SEQ ID NO: 1537024 - RNA, 19 nt, Artificial Sequence
  Description of Artificial Sequence: Synthetic oligonucleotide
cccaaggggauaaugagcu

SEQ ID NO: 1537025 - RNA, 19 nt, Artificial Sequence
  Description of Artificial Sequence: Synthetic oligonucleotide
gcaucggggcuaauacugg

SEQ ID NO: 1537026 - RNA, 19 nt, Artificial Sequence
  Description of Artificial Sequence: Synthetic oligonucleotide
cucacggagucucuaacau

SEQ ID NO: 1537027 - RNA, 19 nt, Artificial Sequence
  Description of Artificial Sequence: Synthetic oligonucleotide
augugcccucacugaaccu

SEQ ID NO: 1537028 - RNA, 19 nt, Artificial Sequence
  Description of Artificial Sequence: Synthetic oligonucleotide
agcgacagcugcccuucau

SEQ ID NO: 1537029 - RNA, 19 nt, Artificial Sequence
  Description of Artificial Sequence: Synthetic oligonucleotide
gaguggccuaacgcugcag

SEQ ID NO: 1537030 - RNA, 19 nt, Artificial Sequence
  Description of Artificial Sequence: Synthetic oligonucleotide
gcugcaguccgacaggggu

SEQ ID NO: 1537031 - RNA, 19 nt, Artificial Sequence
  Description of Artificial Sequence: Synthetic oligonucleotide
gcuggucucacggagucuc

SEQ ID NO: 1537032 - RNA, 19 nt, Artificial Sequence
  Description of Artificial Sequence: Synthetic oligonucleotide
gcccaugaggggcacaaga

SEQ ID NO: 1537033 - RNA, 19 nt, Artificial Sequence
  Description of Artificial Sequence: Synthetic oligonucleotide
cauauagaguguguccagu

SEQ ID NO: 1537034 - RNA, 19 nt, Artificial Sequence
  Description of Artificial Sequence: Synthetic oligonucleotide
caugggaacgauguccacu

SEQ ID NO: 1537035 - RNA, 19 nt, Artificial Sequence
  Description of Artificial Sequence: Synthetic oligonucleotide
gguccauaugggguaagga

SEQ ID NO: 1537036 - RNA, 19 nt, Artificial Sequence
  Description of Artificial Sequence: Synthetic oligonucleotide
guacaucaaugcgcaccag

SEQ ID NO: 1537037 - RNA, 19 nt, Artificial Sequence
  Description of Artificial Sequence: Synthetic oligonucleotide
gagcaagcccacucccaaa

SEQ ID NO: 1537038 - RNA, 19 nt, Artificial Sequence
  Description of Artificial Sequence: Synthetic oligonucleotide
caguccgacaggggugcgg

SEQ ID NO: 1537039 - RNA, 19 nt, Artificial Sequence
  Description of Artificial Sequence: Synthetic oligonucleotide
aucggggcuaauacuggaa

SEQ ID NO: 1537040 - RNA, 19 nt, Artificial Sequence
  Description of Artificial Sequence: Synthetic oligonucleotide
cuaacgcugcaggccuccc

SEQ ID NO: 1537041 - RNA, 19 nt, Artificial Sequence
  Description of Artificial Sequence: Synthetic oligonucleotide
agccgucucagcaguccag

SEQ ID NO: 1537042 - RNA, 19 nt, Artificial Sequence
  Description of Artificial Sequence: Synthetic oligonucleotide
cugcaggccuccccuccgc

SEQ ID NO: 1537043 - RNA, 19 nt, Artificial Sequence
  Description of Artificial Sequence: Synthetic oligonucleotide
gcgacagcugcccuucauc

SEQ ID NO: 1537044 - RNA, 19 nt, Artificial Sequence
  Description of Artificial Sequence: Synthetic oligonucleotide
cccgagaagccucgcagac

SEQ ID NO: 1537045 - RNA, 19 nt, Artificial Sequence
  Description of Artificial Sequence: Synthetic oligonucleotide
uggucucacggagucucua

SEQ ID NO: 1537046 - RNA, 19 nt, Artificial Sequence
  Description of Artificial Sequence: Synthetic oligonucleotide
ggcagacccacaaagacuu

SEQ ID NO: 1537047 - RNA, 19 nt, Artificial Sequence
  Description of Artificial Sequence: Synthetic oligonucleotide
cccaagacccugcacaaaa

SEQ ID NO: 1537048 - RNA, 19 nt, Artificial Sequence
  Description of Artificial Sequence: Synthetic oligonucleotide
uagcgacagcugcccuuca

SEQ ID NO: 1537049 - RNA, 19 nt, Artificial Sequence
  Description of Artificial Sequence: Synthetic oligonucleotide
ggcuaauacuggaaggggu

SEQ ID NO: 1537050 - RNA, 19 nt, Artificial Sequence
  Description of Artificial Sequence: Synthetic oligonucleotide
aggguccauaugggguaag

SEQ ID NO: 1537051 - RNA, 19 nt, Artificial Sequence
  Description of Artificial Sequence: Synthetic oligonucleotide
agaagccauaagagugaaa

SEQ ID NO: 1537052 - RNA, 19 nt, Artificial Sequence
  Description of Artificial Sequence: Synthetic oligonucleotide
acagggcgguuggacauau

SEQ ID NO: 1537053 - RNA, 19 nt, Artificial Sequence
  Description of Artificial Sequence: Synthetic oligonucleotide
ucaugcggccgguggccau

SEQ ID NO: 1537054 - RNA, 19 nt, Artificial Sequence
  Description of Artificial Sequence: Synthetic oligonucleotide
gggauauaugguaccccuc

SEQ ID NO: 1537055 - RNA, 19 nt, Artificial Sequence
  Description of Artificial Sequence: Synthetic oligonucleotide
caugcggccgguggccaug

SEQ ID NO: 1537056 - RNA, 19 nt, Artificial Sequence
  Description of Artificial Sequence: Synthetic oligonucleotide
cagugcauguagugcguua

SEQ ID NO: 1537057 - RNA, 19 nt, Artificial Sequence
  Description of Artificial Sequence: Synthetic oligonucleotide
acugaaccuggcagaccca

SEQ ID NO: 1537058 - RNA, 19 nt, Artificial Sequence
  Description of Artificial Sequence: Synthetic oligonucleotide
gcuugagcccucagugcag

SEQ ID NO: 1537059 - RNA, 19 nt, Artificial Sequence
  Description of Artificial Sequence: Synthetic oligonucleotide
gcuuggcuugguuuccuaa

SEQ ID NO: 1537060 - RNA, 19 nt, Artificial Sequence
  Description of Artificial Sequence: Synthetic oligonucleotide
cgaaucuccucacaaaagu

SEQ ID NO: 1537061 - RNA, 19 nt, Artificial Sequence
  Description of Artificial Sequence: Synthetic oligonucleotide
cucgaugacuagggacauc

SEQ ID NO: 1537062 - RNA, 19 nt, Artificial Sequence
  Description of Artificial Sequence: Synthetic oligonucleotide
gccgucucagcaguccagc

SEQ ID NO: 1537063 - RNA, 19 nt, Artificial Sequence
  Description of Artificial Sequence: Synthetic oligonucleotide
cagccgucucagcagucca

SEQ ID NO: 1537064 - RNA, 19 nt, Artificial Sequence
  Description of Artificial Sequence: Synthetic oligonucleotide
ccuaacgcugcaggccucc

SEQ ID NO: 1537065 - RNA, 19 nt, Artificial Sequence
  Description of Artificial Sequence: Synthetic oligonucleotide
gggcgaaucuccucacaaa

SEQ ID NO: 1537066 - RNA, 19 nt, Artificial Sequence
  Description of Artificial Sequence: Synthetic oligonucleotide
gacagacagggcgguugga

SEQ ID NO: 1537067 - RNA, 19 nt, Artificial Sequence
  Description of Artificial Sequence: Synthetic oligonucleotide
ggccuaacgcugcaggccu

SEQ ID NO: 1537068 - RNA, 19 nt, Artificial Sequence
  Description of Artificial Sequence: Synthetic oligonucleotide
ccgccagcuacuuuuaacu

SEQ ID NO: 1537069 - RNA, 19 nt, Artificial Sequence
  Description of Artificial Sequence: Synthetic oligonucleotide
gccggccuacggcagcggg

SEQ ID NO: 1537070 - RNA, 19 nt, Artificial Sequence
  Description of Artificial Sequence: Synthetic oligonucleotide
ccggccuacggcagcgggg

SEQ ID NO: 1537071 - RNA, 19 nt, Artificial Sequence
  Description of Artificial Sequence: Synthetic oligonucleotide
gguucuaacccaagacccu

SEQ ID NO: 1537072 - RNA, 19 nt, Artificial Sequence
  Description of Artificial Sequence: Synthetic oligonucleotide
cacaaagacuuggguacua

SEQ ID NO: 1537073 - RNA, 19 nt, Artificial Sequence
  Description of Artificial Sequence: Synthetic oligonucleotide
ccuccccuccgccagcuac

SEQ ID NO: 1537074 - RNA, 19 nt, Artificial Sequence
  Description of Artificial Sequence: Synthetic oligonucleotide
agucucuaacauggcugua

SEQ ID NO: 1537075 - RNA, 19 nt, Artificial Sequence
  Description of Artificial Sequence: Synthetic oligonucleotide
guccgacaggggugcgggc

SEQ ID NO: 1537076 - RNA, 19 nt, Artificial Sequence
  Description of Artificial Sequence: Synthetic oligonucleotide
ggguggggccggccuacgg

SEQ ID NO: 1537077 - RNA, 19 nt, Artificial Sequence
  Description of Artificial Sequence: Synthetic oligonucleotide
gggcgguuggacauaucuc

SEQ ID NO: 1537078 - RNA, 19 nt, Artificial Sequence
  Description of Artificial Sequence: Synthetic oligonucleotide
cagcuacuuuuaacuaggu

SEQ ID NO: 1537079 - RNA, 19 nt, Artificial Sequence
  Description of Artificial Sequence: Synthetic oligonucleotide
caacagugacuggcccaug

SEQ ID NO: 1537080 - RNA, 19 nt, Artificial Sequence
  Description of Artificial Sequence: Synthetic oligonucleotide
ccuaagugcaggugaccaa

SEQ ID NO: 1537081 - RNA, 19 nt, Artificial Sequence
  Description of Artificial Sequence: Synthetic oligonucleotide
cuugagcccucagugcagu

SEQ ID NO: 1537082 - RNA, 19 nt, Artificial Sequence
  Description of Artificial Sequence: Synthetic oligonucleotide
gacagggcgguuggacaua

SEQ ID NO: 1537083 - RNA, 19 nt, Artificial Sequence
  Description of Artificial Sequence: Synthetic oligonucleotide
gguuuggggcacagggcga

SEQ ID NO: 1537084 - RNA, 19 nt, Artificial Sequence
  Description of Artificial Sequence: Synthetic oligonucleotide
cgguuggacauaucuccuc

SEQ ID NO: 1537085 - RNA, 19 nt, Artificial Sequence
  Description of Artificial Sequence: Synthetic oligonucleotide
gcguuaggcccggugcgcc

SEQ ID NO: 1537086 - RNA, 19 nt, Artificial Sequence
  Description of Artificial Sequence: Synthetic oligonucleotide
gggcgauguccaccaccag

SEQ ID NO: 1537087 - RNA, 19 nt, Artificial Sequence
  Description of Artificial Sequence: Synthetic oligonucleotide
cccaaccaggugggaacgg

SEQ ID NO: 1537088 - RNA, 19 nt, Artificial Sequence
  Description of Artificial Sequence: Synthetic oligonucleotide
uccccuccgccagcuacuu

SEQ ID NO: 1537089 - RNA, 19 nt, Artificial Sequence
  Description of Artificial Sequence: Synthetic oligonucleotide
cagggcgguuggacauauc

SEQ ID NO: 1537090 - RNA, 19 nt, Artificial Sequence
  Description of Artificial Sequence: Synthetic oligonucleotide
ccacgguguucaugaggug

SEQ ID NO: 1537091 - RNA, 19 nt, Artificial Sequence
  Description of Artificial Sequence: Synthetic oligonucleotide
cguuaggcccggugcgccc

SEQ ID NO: 1537092 - RNA, 19 nt, Artificial Sequence
  Description of Artificial Sequence: Synthetic oligonucleotide
caggguccauaugggguaa

SEQ ID NO: 1537093 - RNA, 19 nt, Artificial Sequence
  Description of Artificial Sequence: Synthetic oligonucleotide
ccccgggugauagaaggca

SEQ ID NO: 1537094 - RNA, 19 nt, Artificial Sequence
  Description of Artificial Sequence: Synthetic oligonucleotide
ccgggccuucaugggaacg

SEQ ID NO: 1537095 - RNA, 19 nt, Artificial Sequence
  Description of Artificial Sequence: Synthetic oligonucleotide
gguaaggagcaagcccacu

SEQ ID NO: 1537096 - RNA, 19 nt, Artificial Sequence
  Description of Artificial Sequence: Synthetic oligonucleotide
ccgggcuaaguugaugaaa

SEQ ID NO: 1537097 - RNA, 19 nt, Artificial Sequence
  Description of Artificial Sequence: Synthetic oligonucleotide
ccgucucagcaguccagca

SEQ ID NO: 1537098 - RNA, 19 nt, Artificial Sequence
  Description of Artificial Sequence: Synthetic oligonucleotide
gcaguccgacaggggugcg

SEQ ID NO: 1537099 - RNA, 19 nt, Artificial Sequence
  Description of Artificial Sequence: Synthetic oligonucleotide
ggcagugcauguagugcgu

SEQ ID NO: 1537100 - RNA, 19 nt, Artificial Sequence
  Description of Artificial Sequence: Synthetic oligonucleotide
gcgguuggacauaucuccu

SEQ ID NO: 1537101 - RNA, 19 nt, Artificial Sequence
  Description of Artificial Sequence: Synthetic oligonucleotide
cgcagacaggguccauaug

SEQ ID NO: 1537102 - RNA, 19 nt, Artificial Sequence
  Description of Artificial Sequence: Synthetic oligonucleotide
gggguggggccggccuacg

SEQ ID NO: 1537103 - RNA, 19 nt, Artificial Sequence
  Description of Artificial Sequence: Synthetic oligonucleotide
cggagucucuaacauggcu

SEQ ID NO: 1537104 - RNA, 19 nt, Artificial Sequence
  Description of Artificial Sequence: Synthetic oligonucleotide
cccgggccuucaugggaac

SEQ ID NO: 1537105 - RNA, 19 nt, Artificial Sequence
  Description of Artificial Sequence: Synthetic oligonucleotide
cgccagcuacuuuuaacua

SEQ ID NO: 1537106 - RNA, 19 nt, Artificial Sequence
  Description of Artificial Sequence: Synthetic oligonucleotide
cccgggcuaaguugaugaa

SEQ ID NO: 1537107 - RNA, 19 nt, Artificial Sequence
  Description of Artificial Sequence: Synthetic oligonucleotide
cgggccuucaugggaacga

SEQ ID NO: 1537108 - RNA, 19 nt, Artificial Sequence
  Description of Artificial Sequence: Synthetic oligonucleotide
gccuaacgcugcaggccuc

SEQ ID NO: 1537109 - RNA, 19 nt, Artificial Sequence
  Description of Artificial Sequence: Synthetic oligonucleotide
gccagccgucucagcaguc

SEQ ID NO: 1537110 - RNA, 19 nt, Artificial Sequence
  Description of Artificial Sequence: Synthetic oligonucleotide
gucgacagacagggcgguu

SEQ ID NO: 1537111 - RNA, 19 nt, Artificial Sequence
  Description of Artificial Sequence: Synthetic oligonucleotide
gcccggugcgcccgggcua

SEQ ID NO: 1537112 - RNA, 19 nt, Artificial Sequence
  Description of Artificial Sequence: Synthetic oligonucleotide
gguggaccucgguggucau

SEQ ID NO: 1537113 - RNA, 19 nt, Artificial Sequence
  Description of Artificial Sequence: Synthetic oligonucleotide
ccaaggggauaaugagcuu

SEQ ID NO: 1537114 - RNA, 19 nt, Artificial Sequence
  Description of Artificial Sequence: Synthetic oligonucleotide
ggggccacuccugcugaau

SEQ ID NO: 1537115 - RNA, 19 nt, Artificial Sequence
  Description of Artificial Sequence: Synthetic oligonucleotide
cgcccgggcuaaguugaug

SEQ ID NO: 1537116 - RNA, 19 nt, Artificial Sequence
  Description of Artificial Sequence: Synthetic oligonucleotide
guagugcguuaggcccggu

SEQ ID NO: 1537117 - RNA, 19 nt, Artificial Sequence
  Description of Artificial Sequence: Synthetic oligonucleotide
cccggugcgcccgggcuaa

SEQ ID NO: 1537118 - RNA, 19 nt, Artificial Sequence
  Description of Artificial Sequence: Synthetic oligonucleotide
cgaugacuagggacaucau

SEQ ID NO: 1537119 - RNA, 19 nt, Artificial Sequence
  Description of Artificial Sequence: Synthetic oligonucleotide
cucaggcaucggggcuaau

SEQ ID NO: 1537120 - RNA, 19 nt, Artificial Sequence
  Description of Artificial Sequence: Synthetic oligonucleotide
acaguuguugcauacaagc

SEQ ID NO: 1537121 - RNA, 19 nt, Artificial Sequence
  Description of Artificial Sequence: Synthetic oligonucleotide
uauuaaguacuucaggaag

SEQ ID NO: 1537122 - RNA, 19 nt, Artificial Sequence
  Description of Artificial Sequence: Synthetic oligonucleotide
aaggggucagaauuuaggc

SEQ ID NO: 1537123 - RNA, 19 nt, Artificial Sequence
  Description of Artificial Sequence: Synthetic oligonucleotide
uuccgaauggauaaggagg

SEQ ID NO: 1537124 - RNA, 19 nt, Artificial Sequence
  Description of Artificial Sequence: Synthetic oligonucleotide
aauuuaggcuuucugugac

SEQ ID NO: 1537125 - RNA, 19 nt, Artificial Sequence
  Description of Artificial Sequence: Synthetic oligonucleotide
aguaaaacgggcuccacac

SEQ ID NO: 1537126 - RNA, 19 nt, Artificial Sequence
  Description of Artificial Sequence: Synthetic oligonucleotide
ugugguucagugcagagag

SEQ ID NO: 1537127 - RNA, 19 nt, Artificial Sequence
  Description of Artificial Sequence: Synthetic oligonucleotide
agauacuucaucuugugug

SEQ ID NO: 1537128 - RNA, 19 nt, Artificial Sequence
  Description of Artificial Sequence: Synthetic oligonucleotide
gauacuucaucuugugugg

SEQ ID NO: 1537129 - RNA, 19 nt, Artificial Sequence
  Description of Artificial Sequence: Synthetic oligonucleotide
uaugcugguacacaugugc

SEQ ID NO: 1537130 - RNA, 19 nt, Artificial Sequence
  Description of Artificial Sequence: Synthetic oligonucleotide
auucccacuaccaacaggc

SEQ ID NO: 1537131 - RNA, 19 nt, Artificial Sequence
  Description of Artificial Sequence: Synthetic oligonucleotide
aggacuacagguaaugucc

SEQ ID NO: 1537132 - RNA, 19 nt, Artificial Sequence
  Description of Artificial Sequence: Synthetic oligonucleotide
uauacuggaggacuacagg

SEQ ID NO: 1537133 - RNA, 19 nt, Artificial Sequence
  Description of Artificial Sequence: Synthetic oligonucleotide
aaguacuucaggaaguuuc

SEQ ID NO: 1537134 - RNA, 19 nt, Artificial Sequence
  Description of Artificial Sequence: Synthetic oligonucleotide
agaauuuaggcuuucugug

SEQ ID NO: 1537135 - RNA, 19 nt, Artificial Sequence
  Description of Artificial Sequence: Synthetic oligonucleotide
aguuguugcauacaagcag

SEQ ID NO: 1537136 - RNA, 19 nt, Artificial Sequence
  Description of Artificial Sequence: Synthetic oligonucleotide
cauacaagcagaauuccag

SEQ ID NO: 1537137 - RNA, 19 nt, Artificial Sequence
  Description of Artificial Sequence: Synthetic oligonucleotide
auacaagcagaauuccagc

SEQ ID NO: 1537138 - RNA, 19 nt, Artificial Sequence
  Description of Artificial Sequence: Synthetic oligonucleotide
uuucccugcaaccaacccg

SEQ ID NO: 1537139 - RNA, 19 nt, Artificial Sequence
  Description of Artificial Sequence: Synthetic oligonucleotide
aaagguucauucugucgac

SEQ ID NO: 1537140 - RNA, 19 nt, Artificial Sequence
  Description of Artificial Sequence: Synthetic oligonucleotide
uucaggaaguuucucacug

SEQ ID NO: 1537141 - RNA, 19 nt, Artificial Sequence
  Description of Artificial Sequence: Synthetic oligonucleotide
uucccugcaaccaacccgg

SEQ ID NO: 1537142 - RNA, 19 nt, Artificial Sequence
  Description of Artificial Sequence: Synthetic oligonucleotide
uaacucuuggcacucacca

SEQ ID NO: 1537143 - RNA, 19 nt, Artificial Sequence
  Description of Artificial Sequence: Synthetic oligonucleotide
auuggcucguuuuagccuc

SEQ ID NO: 1537144 - RNA, 19 nt, Artificial Sequence
  Description of Artificial Sequence: Synthetic oligonucleotide
uguuaaaaguggcauggcu

SEQ ID NO: 1537145 - RNA, 19 nt, Artificial Sequence
  Description of Artificial Sequence: Synthetic oligonucleotide
uacacaugugcaaucagcu

SEQ ID NO: 1537146 - RNA, 19 nt, Artificial Sequence
  Description of Artificial Sequence: Synthetic oligonucleotide
cauccugaccccaucaugg

SEQ ID NO: 1537147 - RNA, 19 nt, Artificial Sequence
  Description of Artificial Sequence: Synthetic oligonucleotide
ucaucugucuccugcaugc

SEQ ID NO: 1537148 - RNA, 19 nt, Artificial Sequence
  Description of Artificial Sequence: Synthetic oligonucleotide
ugcucuacuacuucauucc

SEQ ID NO: 1537149 - RNA, 19 nt, Artificial Sequence
  Description of Artificial Sequence: Synthetic oligonucleotide
ugagcucgcaacaucaugu

SEQ ID NO: 1537150 - RNA, 19 nt, Artificial Sequence
  Description of Artificial Sequence: Synthetic oligonucleotide
acaguuagaccucuggucu

SEQ ID NO: 1537151 - RNA, 19 nt, Artificial Sequence
  Description of Artificial Sequence: Synthetic oligonucleotide
uaaaacgggcuccacacac

SEQ ID NO: 1537152 - RNA, 19 nt, Artificial Sequence
  Description of Artificial Sequence: Synthetic oligonucleotide
ucguuuuagccucauggcc

SEQ ID NO: 1537153 - RNA, 19 nt, Artificial Sequence
  Description of Artificial Sequence: Synthetic oligonucleotide
acuacuucauucccacuac

SEQ ID NO: 1537154 - RNA, 19 nt, Artificial Sequence
  Description of Artificial Sequence: Synthetic oligonucleotide
acacacagcacaguuagac

SEQ ID NO: 1537155 - RNA, 19 nt, Artificial Sequence
  Description of Artificial Sequence: Synthetic oligonucleotide
ucuguagccggcgagcucg

SEQ ID NO: 1537156 - RNA, 19 nt, Artificial Sequence
  Description of Artificial Sequence: Synthetic oligonucleotide
uugcauacaagcagaauuc

SEQ ID NO: 1537157 - RNA, 19 nt, Artificial Sequence
  Description of Artificial Sequence: Synthetic oligonucleotide
ugugugggaagauacuuca

SEQ ID NO: 1537158 - RNA, 19 nt, Artificial Sequence
  Description of Artificial Sequence: Synthetic oligonucleotide
aaacugagcucgcaacauc

SEQ ID NO: 1537159 - RNA, 19 nt, Artificial Sequence
  Description of Artificial Sequence: Synthetic oligonucleotide
aucauggucccacaggcag

SEQ ID NO: 1537160 - RNA, 19 nt, Artificial Sequence
  Description of Artificial Sequence: Synthetic oligonucleotide
caaggggucagaauuuagg

SEQ ID NO: 1537161 - RNA, 19 nt, Artificial Sequence
  Description of Artificial Sequence: Synthetic oligonucleotide
uaauuuauuugcucucaca

SEQ ID NO: 1537162 - RNA, 19 nt, Artificial Sequence
  Description of Artificial Sequence: Synthetic oligonucleotide
uuaauuuauuugcucucac

SEQ ID NO: 1537163 - RNA, 19 nt, Artificial Sequence
  Description of Artificial Sequence: Synthetic oligonucleotide
uccacuuugacuaccccac

SEQ ID NO: 1537164 - RNA, 19 nt, Artificial Sequence
  Description of Artificial Sequence: Synthetic oligonucleotide
caagcagaauuccagcagg

SEQ ID NO: 1537165 - RNA, 19 nt, Artificial Sequence
  Description of Artificial Sequence: Synthetic oligonucleotide
accaaacugagcucgcaac

SEQ ID NO: 1537166 - RNA, 19 nt, Artificial Sequence
  Description of Artificial Sequence: Synthetic oligonucleotide
uggcauggcuaguaaaacg

SEQ ID NO: 1537167 - RNA, 19 nt, Artificial Sequence
  Description of Artificial Sequence: Synthetic oligonucleotide
uccgaauggauaaggaggu

SEQ ID NO: 1537168 - RNA, 19 nt, Artificial Sequence
  Description of Artificial Sequence: Synthetic oligonucleotide
auuuaggcuuucugugacc

SEQ ID NO: 1537169 - RNA, 19 nt, Artificial Sequence
  Description of Artificial Sequence: Synthetic oligonucleotide
aaacgggcuccacacacag

SEQ ID NO: 1537170 - RNA, 19 nt, Artificial Sequence
  Description of Artificial Sequence: Synthetic oligonucleotide
uccuacagucccauaaccc

SEQ ID NO: 1537171 - RNA, 19 nt, Artificial Sequence
  Description of Artificial Sequence: Synthetic oligonucleotide
ucauuggcucguuuuagcc

SEQ ID NO: 1537172 - RNA, 19 nt, Artificial Sequence
  Description of Artificial Sequence: Synthetic oligonucleotide
auuccagcaggguauacug

SEQ ID NO: 1537173 - RNA, 19 nt, Artificial Sequence
  Description of Artificial Sequence: Synthetic oligonucleotide
gcucguuuuagccucaugg

SEQ ID NO: 1537174 - RNA, 19 nt, Artificial Sequence
  Description of Artificial Sequence: Synthetic oligonucleotide
ugugggaagauacuucauc

SEQ ID NO: 1537175 - RNA, 19 nt, Artificial Sequence
  Description of Artificial Sequence: Synthetic oligonucleotide
uacuacuucauucccacua

SEQ ID NO: 1537176 - RNA, 19 nt, Artificial Sequence
  Description of Artificial Sequence: Synthetic oligonucleotide
uacagucccauaacccugg

SEQ ID NO: 1537177 - RNA, 19 nt, Artificial Sequence
  Description of Artificial Sequence: Synthetic oligonucleotide
aagauacuucaucuugugu

SEQ ID NO: 1537178 - RNA, 19 nt, Artificial Sequence
  Description of Artificial Sequence: Synthetic oligonucleotide
uacaagcagaauuccagca

SEQ ID NO: 1537179 - RNA, 19 nt, Artificial Sequence
  Description of Artificial Sequence: Synthetic oligonucleotide
aauggauaaggagguggcg

SEQ ID NO: 1537180 - RNA, 19 nt, Artificial Sequence
  Description of Artificial Sequence: Synthetic oligonucleotide
cuuccgaauggauaaggag

SEQ ID NO: 1537181 - RNA, 19 nt, Artificial Sequence
  Description of Artificial Sequence: Synthetic oligonucleotide
cugaugugugggaagauac

SEQ ID NO: 1537182 - RNA, 19 nt, Artificial Sequence
  Description of Artificial Sequence: Synthetic oligonucleotide
cagucaagcuggcagaggg

SEQ ID NO: 1537183 - RNA, 19 nt, Artificial Sequence
  Description of Artificial Sequence: Synthetic oligonucleotide
gaugagucgggccugccgc

SEQ ID NO: 1537184 - RNA, 19 nt, Artificial Sequence
  Description of Artificial Sequence: Synthetic oligonucleotide
uucauucugucgacguagg

SEQ ID NO: 1537185 - RNA, 19 nt, Artificial Sequence
  Description of Artificial Sequence: Synthetic oligonucleotide
uguagccguacuuccaaag

SEQ ID NO: 1537186 - RNA, 19 nt, Artificial Sequence
  Description of Artificial Sequence: Synthetic oligonucleotide
cucuaccccacucacaggc

SEQ ID NO: 1537187 - RNA, 19 nt, Artificial Sequence
  Description of Artificial Sequence: Synthetic oligonucleotide
ugcguucucguuccagucg

SEQ ID NO: 1537188 - RNA, 19 nt, Artificial Sequence
  Description of Artificial Sequence: Synthetic oligonucleotide
gaauuuaggcuuucuguga

SEQ ID NO: 1537189 - RNA, 19 nt, Artificial Sequence
  Description of Artificial Sequence: Synthetic oligonucleotide
cauggcuaguaaaacgggc

SEQ ID NO: 1537190 - RNA, 19 nt, Artificial Sequence
  Description of Artificial Sequence: Synthetic oligonucleotide
cuucauucccacuaccaac

SEQ ID NO: 1537191 - RNA, 19 nt, Artificial Sequence
  Description of Artificial Sequence: Synthetic oligonucleotide
cucguuuuagccucauggc

SEQ ID NO: 1537192 - RNA, 19 nt, Artificial Sequence
  Description of Artificial Sequence: Synthetic oligonucleotide
auuaauuuauuugcucuca

SEQ ID NO: 1537193 - RNA, 19 nt, Artificial Sequence
  Description of Artificial Sequence: Synthetic oligonucleotide
ucuuccgaauggauaagga

SEQ ID NO: 1537194 - RNA, 19 nt, Artificial Sequence
  Description of Artificial Sequence: Synthetic oligonucleotide
guagccguacuuccaaagg

SEQ ID NO: 1537195 - RNA, 19 nt, Artificial Sequence
  Description of Artificial Sequence: Synthetic oligonucleotide
uucacggucccucaugcgu

SEQ ID NO: 1537196 - RNA, 19 nt, Artificial Sequence
  Description of Artificial Sequence: Synthetic oligonucleotide
uggucuuccgaauggauaa

SEQ ID NO: 1537197 - RNA, 19 nt, Artificial Sequence
  Description of Artificial Sequence: Synthetic oligonucleotide
uggccugccacaaugggcu

SEQ ID NO: 1537198 - RNA, 19 nt, Artificial Sequence
  Description of Artificial Sequence: Synthetic oligonucleotide
acauguaacucuuggcacu

SEQ ID NO: 1537199 - RNA, 19 nt, Artificial Sequence
  Description of Artificial Sequence: Synthetic oligonucleotide
agguaauguccuuuccuuc

SEQ ID NO: 1537200 - RNA, 19 nt, Artificial Sequence
  Description of Artificial Sequence: Synthetic oligonucleotide
cacauguaacucuuggcac

SEQ ID NO: 1537201 - RNA, 19 nt, Artificial Sequence
  Description of Artificial Sequence: Synthetic oligonucleotide
cauucugucgacguagggc

SEQ ID NO: 1537202 - RNA, 19 nt, Artificial Sequence
  Description of Artificial Sequence: Synthetic oligonucleotide
cuuucgguaggcagcacag

SEQ ID NO: 1537203 - RNA, 19 nt, Artificial Sequence
  Description of Artificial Sequence: Synthetic oligonucleotide
agcacugaucccugugggc

SEQ ID NO: 1537204 - RNA, 19 nt, Artificial Sequence
  Description of Artificial Sequence: Synthetic oligonucleotide
ucauucugucgacguaggg

SEQ ID NO: 1537205 - RNA, 19 nt, Artificial Sequence
  Description of Artificial Sequence: Synthetic oligonucleotide
uuuaggcuuucugugaccu

SEQ ID NO: 1537206 - RNA, 19 nt, Artificial Sequence
  Description of Artificial Sequence: Synthetic oligonucleotide
agagagugcacagguuucc

SEQ ID NO: 1537207 - RNA, 19 nt, Artificial Sequence
  Description of Artificial Sequence: Synthetic oligonucleotide
auuaaguacuucaggaagu

SEQ ID NO: 1537208 - RNA, 19 nt, Artificial Sequence
  Description of Artificial Sequence: Synthetic oligonucleotide
uggcuguccaacucuaccc

SEQ ID NO: 1537209 - RNA, 19 nt, Artificial Sequence
  Description of Artificial Sequence: Synthetic oligonucleotide
cacaguuagaccucugguc

SEQ ID NO: 1537210 - RNA, 19 nt, Artificial Sequence
  Description of Artificial Sequence: Synthetic oligonucleotide
uaagggcccguccacagac

SEQ ID NO: 1537211 - RNA, 19 nt, Artificial Sequence
  Description of Artificial Sequence: Synthetic oligonucleotide
guuccagucgcuguagccg

SEQ ID NO: 1537212 - RNA, 19 nt, Artificial Sequence
  Description of Artificial Sequence: Synthetic oligonucleotide
uagccguacuuccaaaggu

SEQ ID NO: 1537213 - RNA, 19 nt, Artificial Sequence
  Description of Artificial Sequence: Synthetic oligonucleotide
gcuggguccauccugaccc

SEQ ID NO: 1537214 - RNA, 19 nt, Artificial Sequence
  Description of Artificial Sequence: Synthetic oligonucleotide
ggcauggcuaguaaaacgg

SEQ ID NO: 1537215 - RNA, 19 nt, Artificial Sequence
  Description of Artificial Sequence: Synthetic oligonucleotide
cuugucuagagcugccuug

SEQ ID NO: 1537216 - RNA, 19 nt, Artificial Sequence
  Description of Artificial Sequence: Synthetic oligonucleotide
uucguggacuguacugggg

SEQ ID NO: 1537217 - RNA, 19 nt, Artificial Sequence
  Description of Artificial Sequence: Synthetic oligonucleotide
gagguggcgacccaaggac

SEQ ID NO: 1537218 - RNA, 19 nt, Artificial Sequence
  Description of Artificial Sequence: Synthetic oligonucleotide
guugcauacaagcagaauu

SEQ ID NO: 1537219 - RNA, 19 nt, Artificial Sequence
  Description of Artificial Sequence: Synthetic oligonucleotide
gacacuggcagaguucaag

SEQ ID NO: 1537220 - RNA, 19 nt, Artificial Sequence
  Description of Artificial Sequence: Synthetic oligonucleotide
ucacuguuaaaaguggcau

SEQ ID NO: 1537221 - RNA, 19 nt, Artificial Sequence
  Description of Artificial Sequence: Synthetic oligonucleotide
aagguucauucugucgacg

SEQ ID NO: 1537222 - RNA, 19 nt, Artificial Sequence
  Description of Artificial Sequence: Synthetic oligonucleotide
gggaagauacuucaucuug

SEQ ID NO: 1537223 - RNA, 19 nt, Artificial Sequence
  Description of Artificial Sequence: Synthetic oligonucleotide
cucacaggcaacuggaaga

SEQ ID NO: 1537224 - RNA, 19 nt, Artificial Sequence
  Description of Artificial Sequence: Synthetic oligonucleotide
cuccucuugagccucuuag

SEQ ID NO: 1537225 - RNA, 19 nt, Artificial Sequence
  Description of Artificial Sequence: Synthetic oligonucleotide
ugggguagggauuccauau

SEQ ID NO: 1537226 - RNA, 19 nt, Artificial Sequence
  Description of Artificial Sequence: Synthetic oligonucleotide
aaaguggcauggcuaguaa

SEQ ID NO: 1537227 - RNA, 19 nt, Artificial Sequence
  Description of Artificial Sequence: Synthetic oligonucleotide
uccugcaugcguugcaggc

SEQ ID NO: 1537228 - RNA, 19 nt, Artificial Sequence
  Description of Artificial Sequence: Synthetic oligonucleotide
cacacagcacaguuagacc

SEQ ID NO: 1537229 - RNA, 19 nt, Artificial Sequence
  Description of Artificial Sequence: Synthetic oligonucleotide
guacacaugugcaaucagc

SEQ ID NO: 1537230 - RNA, 19 nt, Artificial Sequence
  Description of Artificial Sequence: Synthetic oligonucleotide
aaaaguggcauggcuagua

SEQ ID NO: 1537231 - RNA, 19 nt, Artificial Sequence
  Description of Artificial Sequence: Synthetic oligonucleotide
agcaggguauacuggagga

SEQ ID NO: 1537232 - RNA, 19 nt, Artificial Sequence
  Description of Artificial Sequence: Synthetic oligonucleotide
ugugcguucucguuccagu

SEQ ID NO: 1537233 - RNA, 19 nt, Artificial Sequence
  Description of Artificial Sequence: Synthetic oligonucleotide
uccucuugagccucuuagc

SEQ ID NO: 1537234 - RNA, 19 nt, Artificial Sequence
  Description of Artificial Sequence: Synthetic oligonucleotide
cuucguggacuguacuggg

SEQ ID NO: 1537235 - RNA, 19 nt, Artificial Sequence
  Description of Artificial Sequence: Synthetic oligonucleotide
cucauugucucgccgacuc

SEQ ID NO: 1537236 - RNA, 19 nt, Artificial Sequence
  Description of Artificial Sequence: Synthetic oligonucleotide
cacuguuaaaaguggcaug

SEQ ID NO: 1537237 - RNA, 19 nt, Artificial Sequence
  Description of Artificial Sequence: Synthetic oligonucleotide
uggcacucaccacugcugc

SEQ ID NO: 1537238 - RNA, 19 nt, Artificial Sequence
  Description of Artificial Sequence: Synthetic oligonucleotide
ucucucuguagccggcgag

SEQ ID NO: 1537239 - RNA, 19 nt, Artificial Sequence
  Description of Artificial Sequence: Synthetic oligonucleotide
acuggaggacuacagguaa

SEQ ID NO: 1537240 - RNA, 19 nt, Artificial Sequence
  Description of Artificial Sequence: Synthetic oligonucleotide
guuguugcauacaagcaga

SEQ ID NO: 1537241 - RNA, 19 nt, Artificial Sequence
  Description of Artificial Sequence: Synthetic oligonucleotide
cucacuguuaaaaguggca

SEQ ID NO: 1537242 - RNA, 19 nt, Artificial Sequence
  Description of Artificial Sequence: Synthetic oligonucleotide
agguucauucugucgacgu

SEQ ID NO: 1537243 - RNA, 19 nt, Artificial Sequence
  Description of Artificial Sequence: Synthetic oligonucleotide
ucgcucucggaugagucgg

SEQ ID NO: 1537244 - RNA, 19 nt, Artificial Sequence
  Description of Artificial Sequence: Synthetic oligonucleotide
cuggcuguccaacucuacc

SEQ ID NO: 1537245 - RNA, 19 nt, Artificial Sequence
  Description of Artificial Sequence: Synthetic oligonucleotide
acggucucucuguagccgg

SEQ ID NO: 1537246 - RNA, 19 nt, Artificial Sequence
  Description of Artificial Sequence: Synthetic oligonucleotide
uggcuaguaaaacgggcuc

SEQ ID NO: 1537247 - RNA, 19 nt, Artificial Sequence
  Description of Artificial Sequence: Synthetic oligonucleotide
gcugccuugagcugggucc

SEQ ID NO: 1537248 - RNA, 19 nt, Artificial Sequence
  Description of Artificial Sequence: Synthetic oligonucleotide
acagacggggcacauguaa

SEQ ID NO: 1537249 - RNA, 19 nt, Artificial Sequence
  Description of Artificial Sequence: Synthetic oligonucleotide
guccugaccaaacugagcu

SEQ ID NO: 1537250 - RNA, 19 nt, Artificial Sequence
  Description of Artificial Sequence: Synthetic oligonucleotide
uuaaguacuucaggaaguu

SEQ ID NO: 1537251 - RNA, 19 nt, Artificial Sequence
  Description of Artificial Sequence: Synthetic oligonucleotide
gcuuucugugaccucaugc

SEQ ID NO: 1537252 - RNA, 19 nt, Artificial Sequence
  Description of Artificial Sequence: Synthetic oligonucleotide
ugguacacaugugcaauca

SEQ ID NO: 1537253 - RNA, 19 nt, Artificial Sequence
  Description of Artificial Sequence: Synthetic oligonucleotide
gguaauguccuuuccuuca

SEQ ID NO: 1537254 - RNA, 19 nt, Artificial Sequence
  Description of Artificial Sequence: Synthetic oligonucleotide
ggcagaaggguccugacca

SEQ ID NO: 1537255 - RNA, 19 nt, Artificial Sequence
  Description of Artificial Sequence: Synthetic oligonucleotide
guccuacagucccauaacc

SEQ ID NO: 1537256 - RNA, 19 nt, Artificial Sequence
  Description of Artificial Sequence: Synthetic oligonucleotide
ugcaguaugcugguacaca

SEQ ID NO: 1537257 - RNA, 19 nt, Artificial Sequence
  Description of Artificial Sequence: Synthetic oligonucleotide
acuuugacuaccccaccau

SEQ ID NO: 1537258 - RNA, 19 nt, Artificial Sequence
  Description of Artificial Sequence: Synthetic oligonucleotide
ccugcaaccaacccgggcc

SEQ ID NO: 1537259 - RNA, 19 nt, Artificial Sequence
  Description of Artificial Sequence: Synthetic oligonucleotide
uuugcucucacagcuucgu

SEQ ID NO: 1537260 - RNA, 19 nt, Artificial Sequence
  Description of Artificial Sequence: Synthetic oligonucleotide
auggcuaguaaaacgggcu

SEQ ID NO: 1537261 - RNA, 19 nt, Artificial Sequence
  Description of Artificial Sequence: Synthetic oligonucleotide
gucuuccgaauggauaagg

SEQ ID NO: 1537262 - RNA, 19 nt, Artificial Sequence
  Description of Artificial Sequence: Synthetic oligonucleotide
ucgacguagggcccacuug

SEQ ID NO: 1537263 - RNA, 19 nt, Artificial Sequence
  Description of Artificial Sequence: Synthetic oligonucleotide
guacugggguccuacaguc

SEQ ID NO: 1537264 - RNA, 19 nt, Artificial Sequence
  Description of Artificial Sequence: Synthetic oligonucleotide
cuaccaacaggcuguucug

SEQ ID NO: 1537265 - RNA, 19 nt, Artificial Sequence
  Description of Artificial Sequence: Synthetic oligonucleotide
agacggggcacauguaacu

SEQ ID NO: 1537266 - RNA, 19 nt, Artificial Sequence
  Description of Artificial Sequence: Synthetic oligonucleotide
ucuuaccucccgcuccucu

SEQ ID NO: 1537267 - RNA, 19 nt, Artificial Sequence
  Description of Artificial Sequence: Synthetic oligonucleotide
ucacuguggacuuggggua

SEQ ID NO: 1537268 - RNA, 19 nt, Artificial Sequence
  Description of Artificial Sequence: Synthetic oligonucleotide
guagccuccugggugacag

SEQ ID NO: 1537269 - RNA, 19 nt, Artificial Sequence
  Description of Artificial Sequence: Synthetic oligonucleotide
ucuuggcugugcguucucg

SEQ ID NO: 1537270 - RNA, 19 nt, Artificial Sequence
  Description of Artificial Sequence: Synthetic oligonucleotide
ucgcuguagccguacuucc

SEQ ID NO: 1537271 - RNA, 19 nt, Artificial Sequence
  Description of Artificial Sequence: Synthetic oligonucleotide
ucauggucccacaggcaga

SEQ ID NO: 1537272 - RNA, 19 nt, Artificial Sequence
  Description of Artificial Sequence: Synthetic oligonucleotide
agaguucaagcaagggguc

SEQ ID NO: 1537273 - RNA, 19 nt, Artificial Sequence
  Description of Artificial Sequence: Synthetic oligonucleotide
gagccucuuagccucucgc

SEQ ID NO: 1537274 - RNA, 19 nt, Artificial Sequence
  Description of Artificial Sequence: Synthetic oligonucleotide
uugacuaccccaccaucuu

SEQ ID NO: 1537275 - RNA, 19 nt, Artificial Sequence
  Description of Artificial Sequence: Synthetic oligonucleotide
gggcacauguaacucuugg

SEQ ID NO: 1537276 - RNA, 19 nt, Artificial Sequence
  Description of Artificial Sequence: Synthetic oligonucleotide
agggcccguccacagacgg

SEQ ID NO: 1537277 - RNA, 19 nt, Artificial Sequence
  Description of Artificial Sequence: Synthetic oligonucleotide
guuucccugcaaccaaccc

SEQ ID NO: 1537278 - RNA, 19 nt, Artificial Sequence
  Description of Artificial Sequence: Synthetic oligonucleotide
caugcgucuuaccucccgc

SEQ ID NO: 1537279 - RNA, 19 nt, Artificial Sequence
  Description of Artificial Sequence: Synthetic oligonucleotide
cuuugacuaccccaccauc

SEQ ID NO: 1537280 - RNA, 19 nt, Artificial Sequence
  Description of Artificial Sequence: Synthetic oligonucleotide
ugcugguacacaugugcaa

SEQ ID NO: 1537281 - RNA, 19 nt, Artificial Sequence
  Description of Artificial Sequence: Synthetic oligonucleotide
uacuucaucuugugugguc

SEQ ID NO: 1537282 - RNA, 19 nt, Artificial Sequence
  Description of Artificial Sequence: Synthetic oligonucleotide
cauaacccuggccugccac

SEQ ID NO: 1537283 - RNA, 19 nt, Artificial Sequence
  Description of Artificial Sequence: Synthetic oligonucleotide
uuccagucgcuguagccgu

SEQ ID NO: 1537284 - RNA, 19 nt, Artificial Sequence
  Description of Artificial Sequence: Synthetic oligonucleotide
aggcaacuggaagaaguuc

SEQ ID NO: 1537285 - RNA, 19 nt, Artificial Sequence
  Description of Artificial Sequence: Synthetic oligonucleotide
cuuaccucccgcuccucug

SEQ ID NO: 1537286 - RNA, 19 nt, Artificial Sequence
  Description of Artificial Sequence: Synthetic oligonucleotide
ucucgccgacucuucuugg

SEQ ID NO: 1537287 - RNA, 19 nt, Artificial Sequence
  Description of Artificial Sequence: Synthetic oligonucleotide
auaacccuggccugccaca

SEQ ID NO: 1537288 - RNA, 19 nt, Artificial Sequence
  Description of Artificial Sequence: Synthetic oligonucleotide
ucucguuccagucgcugua

SEQ ID NO: 1537289 - RNA, 19 nt, Artificial Sequence
  Description of Artificial Sequence: Synthetic oligonucleotide
uguguggucuccucuucau

SEQ ID NO: 1537290 - RNA, 19 nt, Artificial Sequence
  Description of Artificial Sequence: Synthetic oligonucleotide
caguuguugcauacaagca

SEQ ID NO: 1537291 - RNA, 19 nt, Artificial Sequence
  Description of Artificial Sequence: Synthetic oligonucleotide
ggcacauguaacucuuggc

SEQ ID NO: 1537292 - RNA, 19 nt, Artificial Sequence
  Description of Artificial Sequence: Synthetic oligonucleotide
ugacuaccccaccaucuuc

SEQ ID NO: 1537293 - RNA, 19 nt, Artificial Sequence
  Description of Artificial Sequence: Synthetic oligonucleotide
cugagcucgcaacaucaug

SEQ ID NO: 1537294 - RNA, 19 nt, Artificial Sequence
  Description of Artificial Sequence: Synthetic oligonucleotide
ucaagcuggcagaggggac

SEQ ID NO: 1537295 - RNA, 19 nt, Artificial Sequence
  Description of Artificial Sequence: Synthetic oligonucleotide
acuacagguaauguccuuu

SEQ ID NO: 1537296 - RNA, 19 nt, Artificial Sequence
  Description of Artificial Sequence: Synthetic oligonucleotide
augcguugcaggcgcuugg

SEQ ID NO: 1537297 - RNA, 19 nt, Artificial Sequence
  Description of Artificial Sequence: Synthetic oligonucleotide
aaaacgggcuccacacaca

SEQ ID NO: 1537298 - RNA, 19 nt, Artificial Sequence
  Description of Artificial Sequence: Synthetic oligonucleotide
uggcagcaaggacuguagc

SEQ ID NO: 1537299 - RNA, 19 nt, Artificial Sequence
  Description of Artificial Sequence: Synthetic oligonucleotide
cagacggggcacauguaac

SEQ ID NO: 1537300 - RNA, 19 nt, Artificial Sequence
  Description of Artificial Sequence: Synthetic oligonucleotide
uguggcagcaaggacugua

SEQ ID NO: 1537301 - RNA, 19 nt, Artificial Sequence
  Description of Artificial Sequence: Synthetic oligonucleotide
cuucacggucccucaugcg

SEQ ID NO: 1537302 - RNA, 19 nt, Artificial Sequence
  Description of Artificial Sequence: Synthetic oligonucleotide
uuggcuucacggucccuca

SEQ ID NO: 1537303 - RNA, 19 nt, Artificial Sequence
  Description of Artificial Sequence: Synthetic oligonucleotide
uucugucgacguagggccc

SEQ ID NO: 1537304 - RNA, 19 nt, Artificial Sequence
  Description of Artificial Sequence: Synthetic oligonucleotide
ucgccgacucuucuuggcu

SEQ ID NO: 1537305 - RNA, 19 nt, Artificial Sequence
  Description of Artificial Sequence: Synthetic oligonucleotide
uugcucucacagcuucgug

SEQ ID NO: 1537306 - RNA, 19 nt, Artificial Sequence
  Description of Artificial Sequence: Synthetic oligonucleotide
ugggguuucauuggcucgu

SEQ ID NO: 1537307 - RNA, 19 nt, Artificial Sequence
  Description of Artificial Sequence: Synthetic oligonucleotide
ucugugaccucaugcucua

SEQ ID NO: 1537308 - RNA, 19 nt, Artificial Sequence
  Description of Artificial Sequence: Synthetic oligonucleotide
cuguuaaaaguggcauggc

SEQ ID NO: 1537309 - RNA, 19 nt, Artificial Sequence
  Description of Artificial Sequence: Synthetic oligonucleotide
ucauugucucgccgacucu

SEQ ID NO: 1537310 - RNA, 19 nt, Artificial Sequence
  Description of Artificial Sequence: Synthetic oligonucleotide
aacgggcuccacacacagc

SEQ ID NO: 1537311 - RNA, 19 nt, Artificial Sequence
  Description of Artificial Sequence: Synthetic oligonucleotide
ugcgucuuaccucccgcuc

SEQ ID NO: 1537312 - RNA, 19 nt, Artificial Sequence
  Description of Artificial Sequence: Synthetic oligonucleotide
ggcaacuggaagaaguuca

SEQ ID NO: 1537313 - RNA, 19 nt, Artificial Sequence
  Description of Artificial Sequence: Synthetic oligonucleotide
cucgccgacucuucuuggc

SEQ ID NO: 1537314 - RNA, 19 nt, Artificial Sequence
  Description of Artificial Sequence: Synthetic oligonucleotide
uugucucgccgacucuucu

SEQ ID NO: 1537315 - RNA, 19 nt, Artificial Sequence
  Description of Artificial Sequence: Synthetic oligonucleotide
ucguuccagucgcuguagc

SEQ ID NO: 1537316 - RNA, 19 nt, Artificial Sequence
  Description of Artificial Sequence: Synthetic oligonucleotide
gacguagggcccacuugcg

SEQ ID NO: 1537317 - RNA, 19 nt, Artificial Sequence
  Description of Artificial Sequence: Synthetic oligonucleotide
uguugcauacaagcagaau

SEQ ID NO: 1537318 - RNA, 19 nt, Artificial Sequence
  Description of Artificial Sequence: Synthetic oligonucleotide
cuggggucucauugucucg

SEQ ID NO: 1537319 - RNA, 19 nt, Artificial Sequence
  Description of Artificial Sequence: Synthetic oligonucleotide
gaccccaucauggucccac

SEQ ID NO: 1537320 - RNA, 19 nt, Artificial Sequence
  Description of Artificial Sequence: Synthetic oligonucleotide
guagggcccacuugcguac

SEQ ID NO: 1537321 - RNA, 19 nt, Artificial Sequence
  Description of Artificial Sequence: Synthetic oligonucleotide
acggggcacauguaacucu

SEQ ID NO: 1537322 - RNA, 19 nt, Artificial Sequence
  Description of Artificial Sequence: Synthetic oligonucleotide
aacccgggccugccugugg

SEQ ID NO: 1537323 - RNA, 19 nt, Artificial Sequence
  Description of Artificial Sequence: Synthetic oligonucleotide
cagaauuccagcaggguau

SEQ ID NO: 1537324 - RNA, 19 nt, Artificial Sequence
  Description of Artificial Sequence: Synthetic oligonucleotide
gaccaaacugagcucgcaa

SEQ ID NO: 1537325 - RNA, 19 nt, Artificial Sequence
  Description of Artificial Sequence: Synthetic oligonucleotide
cgaauggauaaggaggugg

SEQ ID NO: 1537326 - RNA, 19 nt, Artificial Sequence
  Description of Artificial Sequence: Synthetic oligonucleotide
gagcucgcaacaucauguc

SEQ ID NO: 1537327 - RNA, 19 nt, Artificial Sequence
  Description of Artificial Sequence: Synthetic oligonucleotide
ucagugcagagagcuguug

SEQ ID NO: 1537328 - RNA, 19 nt, Artificial Sequence
  Description of Artificial Sequence: Synthetic oligonucleotide
accaacccgggccugccug

SEQ ID NO: 1537329 - RNA, 19 nt, Artificial Sequence
  Description of Artificial Sequence: Synthetic oligonucleotide
ggaugagucgggccugccg

SEQ ID NO: 1537330 - RNA, 19 nt, Artificial Sequence
  Description of Artificial Sequence: Synthetic oligonucleotide
cucucuguagccggcgagc

SEQ ID NO: 1537331 - RNA, 19 nt, Artificial Sequence
  Description of Artificial Sequence: Synthetic oligonucleotide
gucgcuguagccguacuuc

SEQ ID NO: 1537332 - RNA, 19 nt, Artificial Sequence
  Description of Artificial Sequence: Synthetic oligonucleotide
uuuagccucauggccucac

SEQ ID NO: 1537333 - RNA, 19 nt, Artificial Sequence
  Description of Artificial Sequence: Synthetic oligonucleotide
guaaaacgggcuccacaca

SEQ ID NO: 1537334 - RNA, 19 nt, Artificial Sequence
  Description of Artificial Sequence: Synthetic oligonucleotide
ucugucgacguagggccca

SEQ ID NO: 1537335 - RNA, 19 nt, Artificial Sequence
  Description of Artificial Sequence: Synthetic oligonucleotide
cacuuugacuaccccacca

SEQ ID NO: 1537336 - RNA, 19 nt, Artificial Sequence
  Description of Artificial Sequence: Synthetic oligonucleotide
guagccggcgagcucgcug

SEQ ID NO: 1537337 - RNA, 19 nt, Artificial Sequence
  Description of Artificial Sequence: Synthetic oligonucleotide
agccucucgcucucggaug

SEQ ID NO: 1537338 - RNA, 19 nt, Artificial Sequence
  Description of Artificial Sequence: Synthetic oligonucleotide
gguccuacagucccauaac

SEQ ID NO: 1537339 - RNA, 19 nt, Artificial Sequence
  Description of Artificial Sequence: Synthetic oligonucleotide
ggcccacuugcguacauug

SEQ ID NO: 1537340 - RNA, 19 nt, Artificial Sequence
  Description of Artificial Sequence: Synthetic oligonucleotide
guguuuccagcagcuuucg

SEQ ID NO: 1537341 - RNA, 19 nt, Artificial Sequence
  Description of Artificial Sequence: Synthetic oligonucleotide
uaccccacucacaggcaac

SEQ ID NO: 1537342 - RNA, 19 nt, Artificial Sequence
  Description of Artificial Sequence: Synthetic oligonucleotide
cugaccccaucaugguccc

SEQ ID NO: 1537343 - RNA, 19 nt, Artificial Sequence
  Description of Artificial Sequence: Synthetic oligonucleotide
uccugaccaaacugagcuc

SEQ ID NO: 1537344 - RNA, 19 nt, Artificial Sequence
  Description of Artificial Sequence: Synthetic oligonucleotide
gaguucaagcaagggguca

SEQ ID NO: 1537345 - RNA, 19 nt, Artificial Sequence
  Description of Artificial Sequence: Synthetic oligonucleotide
ggcuaguaaaacgggcucc

SEQ ID NO: 1537346 - RNA, 19 nt, Artificial Sequence
  Description of Artificial Sequence: Synthetic oligonucleotide
uaaguacuucaggaaguuu

SEQ ID NO: 1537347 - RNA, 19 nt, Artificial Sequence
  Description of Artificial Sequence: Synthetic oligonucleotide
aagcaaggggucagaauuu

SEQ ID NO: 1537348 - RNA, 19 nt, Artificial Sequence
  Description of Artificial Sequence: Synthetic oligonucleotide
ggcugugcguucucguucc

SEQ ID NO: 1537349 - RNA, 19 nt, Artificial Sequence
  Description of Artificial Sequence: Synthetic oligonucleotide
auaaggagguggcgaccca

SEQ ID NO: 1537350 - RNA, 19 nt, Artificial Sequence
  Description of Artificial Sequence: Synthetic oligonucleotide
cuggucuuccgaauggaua

SEQ ID NO: 1537351 - RNA, 19 nt, Artificial Sequence
  Description of Artificial Sequence: Synthetic oligonucleotide
gagcuaagggcccguccac

SEQ ID NO: 1537352 - RNA, 19 nt, Artificial Sequence
  Description of Artificial Sequence: Synthetic oligonucleotide
auacuucaucuuguguggu

SEQ ID NO: 1537353 - RNA, 19 nt, Artificial Sequence
  Description of Artificial Sequence: Synthetic oligonucleotide
gcauggcuaguaaaacggg

SEQ ID NO: 1537354 - RNA, 19 nt, Artificial Sequence
  Description of Artificial Sequence: Synthetic oligonucleotide
ggucucauugucucgccga

SEQ ID NO: 1537355 - RNA, 19 nt, Artificial Sequence
  Description of Artificial Sequence: Synthetic oligonucleotide
uguggacuugggguaggga

SEQ ID NO: 1537356 - RNA, 19 nt, Artificial Sequence
  Description of Artificial Sequence: Synthetic oligonucleotide
guucagugcagagagcugu

SEQ ID NO: 1537357 - RNA, 19 nt, Artificial Sequence
  Description of Artificial Sequence: Synthetic oligonucleotide
gcuaagggcccguccacag

SEQ ID NO: 1537358 - RNA, 19 nt, Artificial Sequence
  Description of Artificial Sequence: Synthetic oligonucleotide
augcugguacacaugugca

SEQ ID NO: 1537359 - RNA, 19 nt, Artificial Sequence
  Description of Artificial Sequence: Synthetic oligonucleotide
gcagaauuccagcagggua

SEQ ID NO: 1537360 - RNA, 19 nt, Artificial Sequence
  Description of Artificial Sequence: Synthetic oligonucleotide
cacugaucccugugggcug

SEQ ID NO: 1537361 - RNA, 19 nt, Artificial Sequence
  Description of Artificial Sequence: Synthetic oligonucleotide
cacuggcagaguucaagca

SEQ ID NO: 1537362 - RNA, 19 nt, Artificial Sequence
  Description of Artificial Sequence: Synthetic oligonucleotide
gacggggcacauguaacuc

SEQ ID NO: 1537363 - RNA, 19 nt, Artificial Sequence
  Description of Artificial Sequence: Synthetic oligonucleotide
ugucuccugcaugcguugc

SEQ ID NO: 1537364 - RNA, 19 nt, Artificial Sequence
  Description of Artificial Sequence: Synthetic oligonucleotide
gcucgcaacaucaugucca

SEQ ID NO: 1537365 - RNA, 19 nt, Artificial Sequence
  Description of Artificial Sequence: Synthetic oligonucleotide
cugucuccugcaugcguug

SEQ ID NO: 1537366 - RNA, 19 nt, Artificial Sequence
  Description of Artificial Sequence: Synthetic oligonucleotide
uuggcucguuuuagccuca

SEQ ID NO: 1537367 - RNA, 19 nt, Artificial Sequence
  Description of Artificial Sequence: Synthetic oligonucleotide
cuaguaaaacgggcuccac

SEQ ID NO: 1537368 - RNA, 19 nt, Artificial Sequence
  Description of Artificial Sequence: Synthetic oligonucleotide
acguagggcccacuugcgu

SEQ ID NO: 1537369 - RNA, 19 nt, Artificial Sequence
  Description of Artificial Sequence: Synthetic oligonucleotide
gcguucucguuccagucgc

SEQ ID NO: 1537370 - RNA, 19 nt, Artificial Sequence
  Description of Artificial Sequence: Synthetic oligonucleotide
ggagggugugguucagugc

SEQ ID NO: 1537371 - RNA, 19 nt, Artificial Sequence
  Description of Artificial Sequence: Synthetic oligonucleotide
ccaacucuaccccacucac

SEQ ID NO: 1537372 - RNA, 19 nt, Artificial Sequence
  Description of Artificial Sequence: Synthetic oligonucleotide
aagggcccguccacagacg

SEQ ID NO: 1537373 - RNA, 19 nt, Artificial Sequence
  Description of Artificial Sequence: Synthetic oligonucleotide
aaccaacccgggccugccu

SEQ ID NO: 1537374 - RNA, 19 nt, Artificial Sequence
  Description of Artificial Sequence: Synthetic oligonucleotide
guuagaccucuggucuucc

SEQ ID NO: 1537375 - RNA, 19 nt, Artificial Sequence
  Description of Artificial Sequence: Synthetic oligonucleotide
ggguccuacagucccauaa

SEQ ID NO: 1537376 - RNA, 19 nt, Artificial Sequence
  Description of Artificial Sequence: Synthetic oligonucleotide
caugcguugcaggcgcuug

SEQ ID NO: 1537377 - RNA, 19 nt, Artificial Sequence
  Description of Artificial Sequence: Synthetic oligonucleotide
ucccugcaaccaacccggg

SEQ ID NO: 1537378 - RNA, 19 nt, Artificial Sequence
  Description of Artificial Sequence: Synthetic oligonucleotide
acuugggguagggauucca

SEQ ID NO: 1537379 - RNA, 19 nt, Artificial Sequence
  Description of Artificial Sequence: Synthetic oligonucleotide
ugucucgccgacucuucuu

SEQ ID NO: 1537380 - RNA, 19 nt, Artificial Sequence
  Description of Artificial Sequence: Synthetic oligonucleotide
cacuguggacuugggguag

SEQ ID NO: 1537381 - RNA, 19 nt, Artificial Sequence
  Description of Artificial Sequence: Synthetic oligonucleotide
guaugcugguacacaugug

SEQ ID NO: 1537382 - RNA, 19 nt, Artificial Sequence
  Description of Artificial Sequence: Synthetic oligonucleotide
cucguuccagucgcuguag

SEQ ID NO: 1537383 - RNA, 19 nt, Artificial Sequence
  Description of Artificial Sequence: Synthetic oligonucleotide
cucauggccucacggucuc

SEQ ID NO: 1537384 - RNA, 19 nt, Artificial Sequence
  Description of Artificial Sequence: Synthetic oligonucleotide
gcgucuuaccucccgcucc

SEQ ID NO: 1537385 - RNA, 19 nt, Artificial Sequence
  Description of Artificial Sequence: Synthetic oligonucleotide
gcuuucgguaggcagcaca

SEQ ID NO: 1537386 - RNA, 19 nt, Artificial Sequence
  Description of Artificial Sequence: Synthetic oligonucleotide
gugugguucagugcagaga

SEQ ID NO: 1537387 - RNA, 19 nt, Artificial Sequence
  Description of Artificial Sequence: Synthetic oligonucleotide
auggccucacggucucucu

SEQ ID NO: 1537388 - RNA, 19 nt, Artificial Sequence
  Description of Artificial Sequence: Synthetic oligonucleotide
gguggcgacccaaggaccc

SEQ ID NO: 1537389 - RNA, 19 nt, Artificial Sequence
  Description of Artificial Sequence: Synthetic oligonucleotide
gcugcaguaugcugguaca

SEQ ID NO: 1537390 - RNA, 19 nt, Artificial Sequence
  Description of Artificial Sequence: Synthetic oligonucleotide
gguauacuggaggacuaca

SEQ ID NO: 1537391 - RNA, 19 nt, Artificial Sequence
  Description of Artificial Sequence: Synthetic oligonucleotide
agaauuccagcaggguaua

SEQ ID NO: 1537392 - RNA, 19 nt, Artificial Sequence
  Description of Artificial Sequence: Synthetic oligonucleotide
gcuaguaaaacgggcucca

SEQ ID NO: 1537393 - RNA, 19 nt, Artificial Sequence
  Description of Artificial Sequence: Synthetic oligonucleotide
cagguaauguccuuuccuu

SEQ ID NO: 1537394 - RNA, 19 nt, Artificial Sequence
  Description of Artificial Sequence: Synthetic oligonucleotide
agccguacuuccaaagguu

SEQ ID NO: 1537395 - RNA, 19 nt, Artificial Sequence
  Description of Artificial Sequence: Synthetic oligonucleotide
agcaaggggucagaauuua

SEQ ID NO: 1537396 - RNA, 19 nt, Artificial Sequence
  Description of Artificial Sequence: Synthetic oligonucleotide
ccaaacugagcucgcaaca

SEQ ID NO: 1537397 - RNA, 19 nt, Artificial Sequence
  Description of Artificial Sequence: Synthetic oligonucleotide
cugugcguucucguuccag

SEQ ID NO: 1537398 - RNA, 19 nt, Artificial Sequence
  Description of Artificial Sequence: Synthetic oligonucleotide
agcuaagggcccguccaca

SEQ ID NO: 1537399 - RNA, 19 nt, Artificial Sequence
  Description of Artificial Sequence: Synthetic oligonucleotide
ucggaugagucgggccugc

SEQ ID NO: 1537400 - RNA, 19 nt, Artificial Sequence
  Description of Artificial Sequence: Synthetic oligonucleotide
ucgggccugccgcuucucu

SEQ ID NO: 1537401 - RNA, 19 nt, Artificial Sequence
  Description of Artificial Sequence: Synthetic oligonucleotide
gaggggcccucacugugga

SEQ ID NO: 1537402 - RNA, 19 nt, Artificial Sequence
  Description of Artificial Sequence: Synthetic oligonucleotide
ugaucccugugggcuggag

SEQ ID NO: 1537403 - RNA, 19 nt, Artificial Sequence
  Description of Artificial Sequence: Synthetic oligonucleotide
caggguauacuggaggacu

SEQ ID NO: 1537404 - RNA, 19 nt, Artificial Sequence
  Description of Artificial Sequence: Synthetic oligonucleotide
aacccuggccugccacaau

SEQ ID NO: 1537405 - RNA, 19 nt, Artificial Sequence
  Description of Artificial Sequence: Synthetic oligonucleotide
cuaccccacucacaggcaa

SEQ ID NO: 1537406 - RNA, 19 nt, Artificial Sequence
  Description of Artificial Sequence: Synthetic oligonucleotide
gcuguagccguacuuccaa

SEQ ID NO: 1537407 - RNA, 19 nt, Artificial Sequence
  Description of Artificial Sequence: Synthetic oligonucleotide
gguccugaccaaacugagc

SEQ ID NO: 1537408 - RNA, 19 nt, Artificial Sequence
  Description of Artificial Sequence: Synthetic oligonucleotide
cacaggcaacuggaagaag

SEQ ID NO: 1537409 - RNA, 19 nt, Artificial Sequence
  Description of Artificial Sequence: Synthetic oligonucleotide
gucccucaugcgucuuacc

SEQ ID NO: 1537410 - RNA, 19 nt, Artificial Sequence
  Description of Artificial Sequence: Synthetic oligonucleotide
ccuacagucccauaacccu

SEQ ID NO: 1537411 - RNA, 19 nt, Artificial Sequence
  Description of Artificial Sequence: Synthetic oligonucleotide
ggucucucuguagccggcg

SEQ ID NO: 1537412 - RNA, 19 nt, Artificial Sequence
  Description of Artificial Sequence: Synthetic oligonucleotide
caaggacuguagccuccug

SEQ ID NO: 1537413 - RNA, 19 nt, Artificial Sequence
  Description of Artificial Sequence: Synthetic oligonucleotide
uguagccuccugggugaca

SEQ ID NO: 1537414 - RNA, 19 nt, Artificial Sequence
  Description of Artificial Sequence: Synthetic oligonucleotide
ugcaaccaacccgggccug

SEQ ID NO: 1537415 - RNA, 19 nt, Artificial Sequence
  Description of Artificial Sequence: Synthetic oligonucleotide
gcaaggggucagaauuuag

SEQ ID NO: 1537416 - RNA, 19 nt, Artificial Sequence
  Description of Artificial Sequence: Synthetic oligonucleotide
gucucucuguagccggcga

SEQ ID NO: 1537417 - RNA, 19 nt, Artificial Sequence
  Description of Artificial Sequence: Synthetic oligonucleotide
cuaagggcccguccacaga

SEQ ID NO: 1537418 - RNA, 19 nt, Artificial Sequence
  Description of Artificial Sequence: Synthetic oligonucleotide
ggucuuccgaauggauaag

SEQ ID NO: 1537419 - RNA, 19 nt, Artificial Sequence
  Description of Artificial Sequence: Synthetic oligonucleotide
cccucaugcgucuuaccuc

SEQ ID NO: 1537420 - RNA, 19 nt, Artificial Sequence
  Description of Artificial Sequence: Synthetic oligonucleotide
agucgggccugccgcuucu

SEQ ID NO: 1537421 - RNA, 19 nt, Artificial Sequence
  Description of Artificial Sequence: Synthetic oligonucleotide
aggguauacuggaggacua

SEQ ID NO: 1537422 - RNA, 19 nt, Artificial Sequence
  Description of Artificial Sequence: Synthetic oligonucleotide
uggguccauccugacccca

SEQ ID NO: 1537423 - RNA, 19 nt, Artificial Sequence
  Description of Artificial Sequence: Synthetic oligonucleotide
guucaagcaaggggucaga

SEQ ID NO: 1537424 - RNA, 19 nt, Artificial Sequence
  Description of Artificial Sequence: Synthetic oligonucleotide
uggcuucacggucccucau

SEQ ID NO: 1537425 - RNA, 19 nt, Artificial Sequence
  Description of Artificial Sequence: Synthetic oligonucleotide
acugagcucgcaacaucau

SEQ ID NO: 1537426 - RNA, 19 nt, Artificial Sequence
  Description of Artificial Sequence: Synthetic oligonucleotide
agcuuucgguaggcagcac

SEQ ID NO: 1537427 - RNA, 19 nt, Artificial Sequence
  Description of Artificial Sequence: Synthetic oligonucleotide
gcccucacuguggacuugg

SEQ ID NO: 1537428 - RNA, 19 nt, Artificial Sequence
  Description of Artificial Sequence: Synthetic oligonucleotide
gagucgggccugccgcuuc

SEQ ID NO: 1537429 - RNA, 19 nt, Artificial Sequence
  Description of Artificial Sequence: Synthetic oligonucleotide
uagccuccugggugacagc

SEQ ID NO: 1537430 - RNA, 19 nt, Artificial Sequence
  Description of Artificial Sequence: Synthetic oligonucleotide
gccguacuuccaaagguuc

SEQ ID NO: 1537431 - RNA, 19 nt, Artificial Sequence
  Description of Artificial Sequence: Synthetic oligonucleotide
cuuggcugugcguucucgu

SEQ ID NO: 1537432 - RNA, 19 nt, Artificial Sequence
  Description of Artificial Sequence: Synthetic oligonucleotide
uccagucgcuguagccgua

SEQ ID NO: 1537433 - RNA, 19 nt, Artificial Sequence
  Description of Artificial Sequence: Synthetic oligonucleotide
ggguauacuggaggacuac

SEQ ID NO: 1537434 - RNA, 19 nt, Artificial Sequence
  Description of Artificial Sequence: Synthetic oligonucleotide
gcccacuugcguacauugg

SEQ ID NO: 1537435 - RNA, 19 nt, Artificial Sequence
  Description of Artificial Sequence: Synthetic oligonucleotide
cgacccaaggacccugggg

SEQ ID NO: 1537436 - RNA, 19 nt, Artificial Sequence
  Description of Artificial Sequence: Synthetic oligonucleotide
ggcuuucugugaccucaug

SEQ ID NO: 1537437 - RNA, 19 nt, Artificial Sequence
  Description of Artificial Sequence: Synthetic oligonucleotide
gagugccugcucccuuguc

SEQ ID NO: 1537438 - RNA, 19 nt, Artificial Sequence
  Description of Artificial Sequence: Synthetic oligonucleotide
cguuuuagccucauggccu

SEQ ID NO: 1537439 - RNA, 19 nt, Artificial Sequence
  Description of Artificial Sequence: Synthetic oligonucleotide
ggucccucaugcgucuuac

SEQ ID NO: 1537440 - RNA, 19 nt, Artificial Sequence
  Description of Artificial Sequence: Synthetic oligonucleotide
cccacaggcagagagugca

SEQ ID NO: 1537441 - RNA, 19 nt, Artificial Sequence
  Description of Artificial Sequence: Synthetic oligonucleotide
gacuacagguaauguccuu

SEQ ID NO: 1537442 - RNA, 19 nt, Artificial Sequence
  Description of Artificial Sequence: Synthetic oligonucleotide
uagggcccacuugcguaca

SEQ ID NO: 1537443 - RNA, 19 nt, Artificial Sequence
  Description of Artificial Sequence: Synthetic oligonucleotide
ugcucccgacucccacagu

SEQ ID NO: 1537444 - RNA, 19 nt, Artificial Sequence
  Description of Artificial Sequence: Synthetic oligonucleotide
caggcaacuggaagaaguu

SEQ ID NO: 1537445 - RNA, 19 nt, Artificial Sequence
  Description of Artificial Sequence: Synthetic oligonucleotide
ggcucguuuuagccucaug

SEQ ID NO: 1537446 - RNA, 19 nt, Artificial Sequence
  Description of Artificial Sequence: Synthetic oligonucleotide
ccugccacaaugggcugag

SEQ ID NO: 1537447 - RNA, 19 nt, Artificial Sequence
  Description of Artificial Sequence: Synthetic oligonucleotide
cuugagcuggguccauccu

SEQ ID NO: 1537448 - RNA, 19 nt, Artificial Sequence
  Description of Artificial Sequence: Synthetic oligonucleotide
gcacugaucccugugggcu

SEQ ID NO: 1537449 - RNA, 19 nt, Artificial Sequence
  Description of Artificial Sequence: Synthetic oligonucleotide
aggacccuggggagcuaag

SEQ ID NO: 1537450 - RNA, 19 nt, Artificial Sequence
  Description of Artificial Sequence: Synthetic oligonucleotide
cccugcaaccaacccgggc

SEQ ID NO: 1537451 - RNA, 19 nt, Artificial Sequence
  Description of Artificial Sequence: Synthetic oligonucleotide
gcgcuuggcuucacggucc

SEQ ID NO: 1537452 - RNA, 19 nt, Artificial Sequence
  Description of Artificial Sequence: Synthetic oligonucleotide
cagaaggguccugaccaaa

SEQ ID NO: 1537453 - RNA, 19 nt, Artificial Sequence
  Description of Artificial Sequence: Synthetic oligonucleotide
ggcacucaccacugcugca

SEQ ID NO: 1537454 - RNA, 19 nt, Artificial Sequence
  Description of Artificial Sequence: Synthetic oligonucleotide
uguagccggcgagcucgcu

SEQ ID NO: 1537455 - RNA, 19 nt, Artificial Sequence
  Description of Artificial Sequence: Synthetic oligonucleotide
gcugguacacaugugcaau

SEQ ID NO: 1537456 - RNA, 19 nt, Artificial Sequence
  Description of Artificial Sequence: Synthetic oligonucleotide
agggcccacuugcguacau

SEQ ID NO: 1537457 - RNA, 19 nt, Artificial Sequence
  Description of Artificial Sequence: Synthetic oligonucleotide
ggggacacuggcagaguuc

SEQ ID NO: 1537458 - RNA, 19 nt, Artificial Sequence
  Description of Artificial Sequence: Synthetic oligonucleotide
cccgacucccacagucaag

SEQ ID NO: 1537459 - RNA, 19 nt, Artificial Sequence
  Description of Artificial Sequence: Synthetic oligonucleotide
ggucagaauuuaggcuuuc

SEQ ID NO: 1537460 - RNA, 19 nt, Artificial Sequence
  Description of Artificial Sequence: Synthetic oligonucleotide
cauugucucgccgacucuu

SEQ ID NO: 1537461 - RNA, 19 nt, Artificial Sequence
  Description of Artificial Sequence: Synthetic oligonucleotide
cugcaaccaacccgggccu

SEQ ID NO: 1537462 - RNA, 19 nt, Artificial Sequence
  Description of Artificial Sequence: Synthetic oligonucleotide
ugucgacguagggcccacu

SEQ ID NO: 1537463 - RNA, 19 nt, Artificial Sequence
  Description of Artificial Sequence: Synthetic oligonucleotide
gucgacguagggcccacuu

SEQ ID NO: 1537464 - RNA, 19 nt, Artificial Sequence
  Description of Artificial Sequence: Synthetic oligonucleotide
cugucgacguagggcccac

SEQ ID NO: 1537465 - RNA, 19 nt, Artificial Sequence
  Description of Artificial Sequence: Synthetic oligonucleotide
cccauaacccuggccugcc

SEQ ID NO: 1537466 - RNA, 19 nt, Artificial Sequence
  Description of Artificial Sequence: Synthetic oligonucleotide
ggacuacagguaauguccu

SEQ ID NO: 1537467 - RNA, 19 nt, Artificial Sequence
  Description of Artificial Sequence: Synthetic oligonucleotide
gcgagcucgcugcucaucu

SEQ ID NO: 1537468 - RNA, 19 nt, Artificial Sequence
  Description of Artificial Sequence: Synthetic oligonucleotide
cuggaggacuacagguaau

SEQ ID NO: 1537469 - RNA, 19 nt, Artificial Sequence
  Description of Artificial Sequence: Synthetic oligonucleotide
ggggcccucacuguggacu

SEQ ID NO: 1537470 - RNA, 19 nt, Artificial Sequence
  Description of Artificial Sequence: Synthetic oligonucleotide
caacccgggccugccugug

SEQ ID NO: 1537471 - RNA, 19 nt, Artificial Sequence
  Description of Artificial Sequence: Synthetic oligonucleotide
uggcucguuuuagccucau

SEQ ID NO: 1537472 - RNA, 19 nt, Artificial Sequence
  Description of Artificial Sequence: Synthetic oligonucleotide
cgccgacucuucuuggcug

SEQ ID NO: 1537473 - RNA, 19 nt, Artificial Sequence
  Description of Artificial Sequence: Synthetic oligonucleotide
cacagacggggcacaugua

SEQ ID NO: 1537474 - RNA, 19 nt, Artificial Sequence
  Description of Artificial Sequence: Synthetic oligonucleotide
ccgaauggauaaggaggug

SEQ ID NO: 1537475 - RNA, 19 nt, Artificial Sequence
  Description of Artificial Sequence: Synthetic oligonucleotide
ggacuguagccuccugggu

SEQ ID NO: 1537476 - RNA, 19 nt, Artificial Sequence
  Description of Artificial Sequence: Synthetic oligonucleotide
ccguccacagacggggcac

SEQ ID NO: 1537477 - RNA, 19 nt, Artificial Sequence
  Description of Artificial Sequence: Synthetic oligonucleotide
ccagucgcuguagccguac

SEQ ID NO: 1537478 - RNA, 19 nt, Artificial Sequence
  Description of Artificial Sequence: Synthetic oligonucleotide
cacggucccucaugcgucu

SEQ ID NO: 1537479 - RNA, 19 nt, Artificial Sequence
  Description of Artificial Sequence: Synthetic oligonucleotide
cacucaccacugcugcagu

SEQ ID NO: 1537480 - RNA, 19 nt, Artificial Sequence
  Description of Artificial Sequence: Synthetic oligonucleotide
cguagggcccacuugcgua

SEQ ID NO: 1537481 - RNA, 19 nt, Artificial Sequence
  Description of Artificial Sequence: Synthetic oligonucleotide
auggucccacaggcagaga

SEQ ID NO: 1537482 - RNA, 19 nt, Artificial Sequence
  Description of Artificial Sequence: Synthetic oligonucleotide
cgacucuucuuggcugugc

SEQ ID NO: 1537483 - RNA, 19 nt, Artificial Sequence
  Description of Artificial Sequence: Synthetic oligonucleotide
cggucucucuguagccggc

SEQ ID NO: 1537484 - RNA, 19 nt, Artificial Sequence
  Description of Artificial Sequence: Synthetic oligonucleotide
gggguagggauuccauauu

SEQ ID NO: 1537485 - RNA, 19 nt, Artificial Sequence
  Description of Artificial Sequence: Synthetic oligonucleotide
ccgggccugccuguggcag

SEQ ID NO: 1537486 - RNA, 19 nt, Artificial Sequence
  Description of Artificial Sequence: Synthetic oligonucleotide
ggagugccugcucccuugu

SEQ ID NO: 1537487 - RNA, 19 nt, Artificial Sequence
  Description of Artificial Sequence: Synthetic oligonucleotide
cgcuuggcuucacgguccc

SEQ ID NO: 1537488 - RNA, 19 nt, Artificial Sequence
  Description of Artificial Sequence: Synthetic oligonucleotide
ggcgagcucgcugcucauc

SEQ ID NO: 1537489 - RNA, 19 nt, Artificial Sequence
  Description of Artificial Sequence: Synthetic oligonucleotide
ccagguuucuggagugccu

SEQ ID NO: 1537490 - RNA, 19 nt, Artificial Sequence
  Description of Artificial Sequence: Synthetic oligonucleotide
cgagcucgcugcucaucug

SEQ ID NO: 1537491 - RNA, 19 nt, Artificial Sequence
  Description of Artificial Sequence: Synthetic oligonucleotide
cccguccacagacggggca

SEQ ID NO: 1537492 - RNA, 19 nt, Artificial Sequence
  Description of Artificial Sequence: Synthetic oligonucleotide
guggcgacccaaggacccu

SEQ ID NO: 1537493 - RNA, 19 nt, Artificial Sequence
  Description of Artificial Sequence: Synthetic oligonucleotide
gggucagaauuuaggcuuu

SEQ ID NO: 1537494 - RNA, 19 nt, Artificial Sequence
  Description of Artificial Sequence: Synthetic oligonucleotide
ccauaacccuggccugcca

SEQ ID NO: 1537495 - RNA, 19 nt, Artificial Sequence
  Description of Artificial Sequence: Synthetic oligonucleotide
ccgacucuucuuggcugug

SEQ ID NO: 1537496 - RNA, 19 nt, Artificial Sequence
  Description of Artificial Sequence: Synthetic oligonucleotide
cugaucccugugggcugga

SEQ ID NO: 1537497 - RNA, 19 nt, Artificial Sequence
  Description of Artificial Sequence: Synthetic oligonucleotide
acggucccucaugcgucuu

SEQ ID NO: 1537498 - RNA, 19 nt, Artificial Sequence
  Description of Artificial Sequence: Synthetic oligonucleotide
gcguugcaggcgcuuggcu

SEQ ID NO: 1537499 - RNA, 19 nt, Artificial Sequence
  Description of Artificial Sequence: Synthetic oligonucleotide
gcccguccacagacggggc

SEQ ID NO: 1537500 - RNA, 19 nt, Artificial Sequence
  Description of Artificial Sequence: Synthetic oligonucleotide
gggcccucacuguggacuu

SEQ ID NO: 1537501 - RNA, 19 nt, Artificial Sequence
  Description of Artificial Sequence: Synthetic oligonucleotide
gggguccuacagucccaua

SEQ ID NO: 1537502 - RNA, 19 nt, Artificial Sequence
  Description of Artificial Sequence: Synthetic oligonucleotide
cgucuuaccucccgcuccu

SEQ ID NO: 1537503 - RNA, 19 nt, Artificial Sequence
  Description of Artificial Sequence: Synthetic oligonucleotide
cugccgcuucucugggguu

SEQ ID NO: 1537504 - RNA, 19 nt, Artificial Sequence
  Description of Artificial Sequence: Synthetic oligonucleotide
ggguccauccugaccccau

SEQ ID NO: 1537505 - RNA, 19 nt, Artificial Sequence
  Description of Artificial Sequence: Synthetic oligonucleotide
ccaacccgggccugccugu

SEQ ID NO: 1537506 - RNA, 19 nt, Artificial Sequence
  Description of Artificial Sequence: Synthetic oligonucleotide
ggacuguacugggguccua

SEQ ID NO: 1537507 - RNA, 19 nt, Artificial Sequence
  Description of Artificial Sequence: Synthetic oligonucleotide
cccgggccugccuguggca

SEQ ID NO: 1537508 - RNA, 19 nt, Artificial Sequence
  Description of Artificial Sequence: Synthetic oligonucleotide
gggcccacuugcguacauu

SEQ ID NO: 1537509 - RNA, 19 nt, Artificial Sequence
  Description of Artificial Sequence: Synthetic oligonucleotide
ccgcuucucugggguuuca

SEQ ID NO: 1537510 - RNA, 19 nt, Artificial Sequence
  Description of Artificial Sequence: Synthetic oligonucleotide
aagcuaaugacauagaaag

SEQ ID NO: 1537511 - RNA, 19 nt, Artificial Sequence
  Description of Artificial Sequence: Synthetic oligonucleotide
uagaucaucacccugacug

SEQ ID NO: 1537512 - RNA, 19 nt, Artificial Sequence
  Description of Artificial Sequence: Synthetic oligonucleotide
aaguauacuauauuaaaga

SEQ ID NO: 1537513 - RNA, 19 nt, Artificial Sequence
  Description of Artificial Sequence: Synthetic oligonucleotide
ucuaagaugagauuaaggu

SEQ ID NO: 1537514 - RNA, 19 nt, Artificial Sequence
  Description of Artificial Sequence: Synthetic oligonucleotide
aguauaaaugccuggaaac

SEQ ID NO: 1537515 - RNA, 19 nt, Artificial Sequence
  Description of Artificial Sequence: Synthetic oligonucleotide
acauuaauacaucuuauag

SEQ ID NO: 1537516 - RNA, 19 nt, Artificial Sequence
  Description of Artificial Sequence: Synthetic oligonucleotide
aaauaugacaacaugugag

SEQ ID NO: 1537517 - RNA, 19 nt, Artificial Sequence
  Description of Artificial Sequence: Synthetic oligonucleotide
uaugaauaaucaaaguuca

SEQ ID NO: 1537518 - RNA, 19 nt, Artificial Sequence
  Description of Artificial Sequence: Synthetic oligonucleotide
auaugaauaaucaaaguuc

SEQ ID NO: 1537519 - RNA, 19 nt, Artificial Sequence
  Description of Artificial Sequence: Synthetic oligonucleotide
ugugcuauccuucagugcc

SEQ ID NO: 1537520 - RNA, 19 nt, Artificial Sequence
  Description of Artificial Sequence: Synthetic oligonucleotide
uaauacaucaugcuggugu

SEQ ID NO: 1537521 - RNA, 19 nt, Artificial Sequence
  Description of Artificial Sequence: Synthetic oligonucleotide
uggacaaucaaucaacuga

SEQ ID NO: 1537522 - RNA, 19 nt, Artificial Sequence
  Description of Artificial Sequence: Synthetic oligonucleotide
uuaauguacucuuuaagca

SEQ ID NO: 1537523 - RNA, 19 nt, Artificial Sequence
  Description of Artificial Sequence: Synthetic oligonucleotide
uuuccuauuacugugagcu

SEQ ID NO: 1537524 - RNA, 19 nt, Artificial Sequence
  Description of Artificial Sequence: Synthetic oligonucleotide
uaagaugagauuaagguuu

SEQ ID NO: 1537525 - RNA, 19 nt, Artificial Sequence
  Description of Artificial Sequence: Synthetic oligonucleotide
cauagaaaggagaagcucc

SEQ ID NO: 1537526 - RNA, 19 nt, Artificial Sequence
  Description of Artificial Sequence: Synthetic oligonucleotide
aaagauagaauuugcagua

SEQ ID NO: 1537527 - RNA, 19 nt, Artificial Sequence
  Description of Artificial Sequence: Synthetic oligonucleotide
caaaagauagaauuugcag

SEQ ID NO: 1537528 - RNA, 19 nt, Artificial Sequence
  Description of Artificial Sequence: Synthetic oligonucleotide
aaacaaaagauagaauuug

SEQ ID NO: 1537529 - RNA, 19 nt, Artificial Sequence
  Description of Artificial Sequence: Synthetic oligonucleotide
acaauuuuggaaaugcuac

SEQ ID NO: 1537530 - RNA, 19 nt, Artificial Sequence
  Description of Artificial Sequence: Synthetic oligonucleotide
gaucauaugacauccaaga

SEQ ID NO: 1537531 - RNA, 19 nt, Artificial Sequence
  Description of Artificial Sequence: Synthetic oligonucleotide
ucaaauaagcaaaggaccu

SEQ ID NO: 1537532 - RNA, 19 nt, Artificial Sequence
  Description of Artificial Sequence: Synthetic oligonucleotide
aauuuuggaaaugcuacuc

SEQ ID NO: 1537533 - RNA, 19 nt, Artificial Sequence
  Description of Artificial Sequence: Synthetic oligonucleotide
ugugaaauaugacaacaug

SEQ ID NO: 1537534 - RNA, 19 nt, Artificial Sequence
  Description of Artificial Sequence: Synthetic oligonucleotide
uucagguugacaucuagag

SEQ ID NO: 1537535 - RNA, 19 nt, Artificial Sequence
  Description of Artificial Sequence: Synthetic oligonucleotide
uaacaauuaacuuucccac

SEQ ID NO: 1537536 - RNA, 19 nt, Artificial Sequence
  Description of Artificial Sequence: Synthetic oligonucleotide
acuauauuaaagaagcaag

SEQ ID NO: 1537537 - RNA, 19 nt, Artificial Sequence
  Description of Artificial Sequence: Synthetic oligonucleotide
caucaguagaucaucaccc

SEQ ID NO: 1537538 - RNA, 19 nt, Artificial Sequence
  Description of Artificial Sequence: Synthetic oligonucleotide
ugaguuaugcaaaguauac

SEQ ID NO: 1537539 - RNA, 19 nt, Artificial Sequence
  Description of Artificial Sequence: Synthetic oligonucleotide
aacaggaccaucuaauuuu

SEQ ID NO: 1537540 - RNA, 19 nt, Artificial Sequence
  Description of Artificial Sequence: Synthetic oligonucleotide
aauuuggcgcuuaauguac

SEQ ID NO: 1537541 - RNA, 19 nt, Artificial Sequence
  Description of Artificial Sequence: Synthetic oligonucleotide
ucaauuuggcgcuuaaugu

SEQ ID NO: 1537542 - RNA, 19 nt, Artificial Sequence
  Description of Artificial Sequence: Synthetic oligonucleotide
acaggauauaccugcacac

SEQ ID NO: 1537543 - RNA, 19 nt, Artificial Sequence
  Description of Artificial Sequence: Synthetic oligonucleotide
ugcaaaguauacuauauua

SEQ ID NO: 1537544 - RNA, 19 nt, Artificial Sequence
  Description of Artificial Sequence: Synthetic oligonucleotide
aucaaaguucaaucuaggg

SEQ ID NO: 1537545 - RNA, 19 nt, Artificial Sequence
  Description of Artificial Sequence: Synthetic oligonucleotide
aaugcuacucaauccucuc

SEQ ID NO: 1537546 - RNA, 19 nt, Artificial Sequence
  Description of Artificial Sequence: Synthetic oligonucleotide
uguaugggagccaaaggcc

SEQ ID NO: 1537547 - RNA, 19 nt, Artificial Sequence
  Description of Artificial Sequence: Synthetic oligonucleotide
aaguauaaaugccuggaaa

SEQ ID NO: 1537548 - RNA, 19 nt, Artificial Sequence
  Description of Artificial Sequence: Synthetic oligonucleotide
cuucgaagaaagaaguccc

SEQ ID NO: 1537549 - RNA, 19 nt, Artificial Sequence
  Description of Artificial Sequence: Synthetic oligonucleotide
uuguacacggugaaaacca

SEQ ID NO: 1537550 - RNA, 19 nt, Artificial Sequence
  Description of Artificial Sequence: Synthetic oligonucleotide
uuaagguuuguggugagag

SEQ ID NO: 1537551 - RNA, 19 nt, Artificial Sequence
  Description of Artificial Sequence: Synthetic oligonucleotide
uaagcuaaugacauagaaa

SEQ ID NO: 1537552 - RNA, 19 nt, Artificial Sequence
  Description of Artificial Sequence: Synthetic oligonucleotide
gucaaauaagcaaaggacc

SEQ ID NO: 1537553 - RNA, 19 nt, Artificial Sequence
  Description of Artificial Sequence: Synthetic oligonucleotide
ucgauaaccauaugaauaa

SEQ ID NO: 1537554 - RNA, 19 nt, Artificial Sequence
  Description of Artificial Sequence: Synthetic oligonucleotide
aaggugguuaucuccacug

SEQ ID NO: 1537555 - RNA, 19 nt, Artificial Sequence
  Description of Artificial Sequence: Synthetic oligonucleotide
aguauggucacucucacuu

SEQ ID NO: 1537556 - RNA, 19 nt, Artificial Sequence
  Description of Artificial Sequence: Synthetic oligonucleotide
guacauuccgaucauauga

SEQ ID NO: 1537557 - RNA, 19 nt, Artificial Sequence
  Description of Artificial Sequence: Synthetic oligonucleotide
uccuauuacugugagcugg

SEQ ID NO: 1537558 - RNA, 19 nt, Artificial Sequence
  Description of Artificial Sequence: Synthetic oligonucleotide
uaauacucaauuuggcgcu

SEQ ID NO: 1537559 - RNA, 19 nt, Artificial Sequence
  Description of Artificial Sequence: Synthetic oligonucleotide
ugguugaucaguucuuucc

SEQ ID NO: 1537560 - RNA, 19 nt, Artificial Sequence
  Description of Artificial Sequence: Synthetic oligonucleotide
ucuugcagaaccucggaug

SEQ ID NO: 1537561 - RNA, 19 nt, Artificial Sequence
  Description of Artificial Sequence: Synthetic oligonucleotide
gagauuaagguuuguggug

SEQ ID NO: 1537562 - RNA, 19 nt, Artificial Sequence
  Description of Artificial Sequence: Synthetic oligonucleotide
caaucagugaaaugggcag

SEQ ID NO: 1537563 - RNA, 19 nt, Artificial Sequence
  Description of Artificial Sequence: Synthetic oligonucleotide
aucuaauuuugcuucccgg

SEQ ID NO: 1537564 - RNA, 19 nt, Artificial Sequence
  Description of Artificial Sequence: Synthetic oligonucleotide
acaugugaaauaugacaac

SEQ ID NO: 1537565 - RNA, 19 nt, Artificial Sequence
  Description of Artificial Sequence: Synthetic oligonucleotide
ugugaguuaugcaaaguau

SEQ ID NO: 1537566 - RNA, 19 nt, Artificial Sequence
  Description of Artificial Sequence: Synthetic oligonucleotide
accauaugaauaaucaaag

SEQ ID NO: 1537567 - RNA, 19 nt, Artificial Sequence
  Description of Artificial Sequence: Synthetic oligonucleotide
aaggaccuaacaauuuugg

SEQ ID NO: 1537568 - RNA, 19 nt, Artificial Sequence
  Description of Artificial Sequence: Synthetic oligonucleotide
gacaucuagagcuguuccg

SEQ ID NO: 1537569 - RNA, 19 nt, Artificial Sequence
  Description of Artificial Sequence: Synthetic oligonucleotide
uuaauacaucuuauaguac

SEQ ID NO: 1537570 - RNA, 19 nt, Artificial Sequence
  Description of Artificial Sequence: Synthetic oligonucleotide
gaccuaacaauuuuggaaa

SEQ ID NO: 1537571 - RNA, 19 nt, Artificial Sequence
  Description of Artificial Sequence: Synthetic oligonucleotide
auuacugugagcugguuua

SEQ ID NO: 1537572 - RNA, 19 nt, Artificial Sequence
  Description of Artificial Sequence: Synthetic oligonucleotide
aucauaugacauccaagag

SEQ ID NO: 1537573 - RNA, 19 nt, Artificial Sequence
  Description of Artificial Sequence: Synthetic oligonucleotide
ucagguugacaucuagagc

SEQ ID NO: 1537574 - RNA, 19 nt, Artificial Sequence
  Description of Artificial Sequence: Synthetic oligonucleotide
aaauaagcaaaggaccuaa

SEQ ID NO: 1537575 - RNA, 19 nt, Artificial Sequence
  Description of Artificial Sequence: Synthetic oligonucleotide
uacauuccgaucauaugac

SEQ ID NO: 1537576 - RNA, 19 nt, Artificial Sequence
  Description of Artificial Sequence: Synthetic oligonucleotide
gaugagauuaagguuugug

SEQ ID NO: 1537577 - RNA, 19 nt, Artificial Sequence
  Description of Artificial Sequence: Synthetic oligonucleotide
aguaauacaucaugcuggu

SEQ ID NO: 1537578 - RNA, 19 nt, Artificial Sequence
  Description of Artificial Sequence: Synthetic oligonucleotide
uguacauuccgaucauaug

SEQ ID NO: 1537579 - RNA, 19 nt, Artificial Sequence
  Description of Artificial Sequence: Synthetic oligonucleotide
auuuuggaaaugcuacuca

SEQ ID NO: 1537580 - RNA, 19 nt, Artificial Sequence
  Description of Artificial Sequence: Synthetic oligonucleotide
acucuuuaagcaguguuuc

SEQ ID NO: 1537581 - RNA, 19 nt, Artificial Sequence
  Description of Artificial Sequence: Synthetic oligonucleotide
ugggcguagacauucuugc

SEQ ID NO: 1537582 - RNA, 19 nt, Artificial Sequence
  Description of Artificial Sequence: Synthetic oligonucleotide
uggagugguacccauuugu

SEQ ID NO: 1537583 - RNA, 19 nt, Artificial Sequence
  Description of Artificial Sequence: Synthetic oligonucleotide
aauacaucaugcugguguu

SEQ ID NO: 1537584 - RNA, 19 nt, Artificial Sequence
  Description of Artificial Sequence: Synthetic oligonucleotide
agcaucaguagaucaucac

SEQ ID NO: 1537585 - RNA, 19 nt, Artificial Sequence
  Description of Artificial Sequence: Synthetic oligonucleotide
acaguauggucacucucac

SEQ ID NO: 1537586 - RNA, 19 nt, Artificial Sequence
  Description of Artificial Sequence: Synthetic oligonucleotide
uaugaacucuggacaauca

SEQ ID NO: 1537587 - RNA, 19 nt, Artificial Sequence
  Description of Artificial Sequence: Synthetic oligonucleotide
caucauuaucguaaaggug

SEQ ID NO: 1537588 - RNA, 19 nt, Artificial Sequence
  Description of Artificial Sequence: Synthetic oligonucleotide
acaucuagagcuguuccgg

SEQ ID NO: 1537589 - RNA, 19 nt, Artificial Sequence
  Description of Artificial Sequence: Synthetic oligonucleotide
uauaaaugccuggaaacaa

SEQ ID NO: 1537590 - RNA, 19 nt, Artificial Sequence
  Description of Artificial Sequence: Synthetic oligonucleotide
aaccucggaugguaccacc

SEQ ID NO: 1537591 - RNA, 19 nt, Artificial Sequence
  Description of Artificial Sequence: Synthetic oligonucleotide
cacauuucguggaggaggg

SEQ ID NO: 1537592 - RNA, 19 nt, Artificial Sequence
  Description of Artificial Sequence: Synthetic oligonucleotide
agaagucuguuuguggcac

SEQ ID NO: 1537593 - RNA, 19 nt, Artificial Sequence
  Description of Artificial Sequence: Synthetic oligonucleotide
cuuguacacggugaaaacc

SEQ ID NO: 1537594 - RNA, 19 nt, Artificial Sequence
  Description of Artificial Sequence: Synthetic oligonucleotide
acccauuugugcuuauuag

SEQ ID NO: 1537595 - RNA, 19 nt, Artificial Sequence
  Description of Artificial Sequence: Synthetic oligonucleotide
uuaucuccacugcaggcug

SEQ ID NO: 1537596 - RNA, 19 nt, Artificial Sequence
  Description of Artificial Sequence: Synthetic oligonucleotide
accugugccaucaucauag

SEQ ID NO: 1537597 - RNA, 19 nt, Artificial Sequence
  Description of Artificial Sequence: Synthetic oligonucleotide
gucacucucacuucugcag

SEQ ID NO: 1537598 - RNA, 19 nt, Artificial Sequence
  Description of Artificial Sequence: Synthetic oligonucleotide
aggaccaucuaauuuugcu

SEQ ID NO: 1537599 - RNA, 19 nt, Artificial Sequence
  Description of Artificial Sequence: Synthetic oligonucleotide
acaugugaguuaugcaaag

SEQ ID NO: 1537600 - RNA, 19 nt, Artificial Sequence
  Description of Artificial Sequence: Synthetic oligonucleotide
ucuagagcuguuccgggac

SEQ ID NO: 1537601 - RNA, 19 nt, Artificial Sequence
  Description of Artificial Sequence: Synthetic oligonucleotide
acgucauccaaguggagug

SEQ ID NO: 1537602 - RNA, 19 nt, Artificial Sequence
  Description of Artificial Sequence: Synthetic oligonucleotide
cuuuaagcaguguuucuuc

SEQ ID NO: 1537603 - RNA, 19 nt, Artificial Sequence
  Description of Artificial Sequence: Synthetic oligonucleotide
accacgaaugaaguagccc

SEQ ID NO: 1537604 - RNA, 19 nt, Artificial Sequence
  Description of Artificial Sequence: Synthetic oligonucleotide
uguacacggugaaaaccag

SEQ ID NO: 1537605 - RNA, 19 nt, Artificial Sequence
  Description of Artificial Sequence: Synthetic oligonucleotide
agacaguauggucacucuc

SEQ ID NO: 1537606 - RNA, 19 nt, Artificial Sequence
  Description of Artificial Sequence: Synthetic oligonucleotide
cucgauaaccauaugaaua

SEQ ID NO: 1537607 - RNA, 19 nt, Artificial Sequence
  Description of Artificial Sequence: Synthetic oligonucleotide
ugagagcuuguacacggug

SEQ ID NO: 1537608 - RNA, 19 nt, Artificial Sequence
  Description of Artificial Sequence: Synthetic oligonucleotide
aucuaggguuuccucgacc

SEQ ID NO: 1537609 - RNA, 19 nt, Artificial Sequence
  Description of Artificial Sequence: Synthetic oligonucleotide
ccacgaaugaaguagcccg

SEQ ID NO: 1537610 - RNA, 19 nt, Artificial Sequence
  Description of Artificial Sequence: Synthetic oligonucleotide
cagguugacaucuagagcu

SEQ ID NO: 1537611 - RNA, 19 nt, Artificial Sequence
  Description of Artificial Sequence: Synthetic oligonucleotide
gacauucucaacaggacca

SEQ ID NO: 1537612 - RNA, 19 nt, Artificial Sequence
  Description of Artificial Sequence: Synthetic oligonucleotide
aggugguuaucuccacugc

SEQ ID NO: 1537613 - RNA, 19 nt, Artificial Sequence
  Description of Artificial Sequence: Synthetic oligonucleotide
auuaucguaaaggugguua

SEQ ID NO: 1537614 - RNA, 19 nt, Artificial Sequence
  Description of Artificial Sequence: Synthetic oligonucleotide
agcaaucagugaaaugggc

SEQ ID NO: 1537615 - RNA, 19 nt, Artificial Sequence
  Description of Artificial Sequence: Synthetic oligonucleotide
agauuaagguuugugguga

SEQ ID NO: 1537616 - RNA, 19 nt, Artificial Sequence
  Description of Artificial Sequence: Synthetic oligonucleotide
caagucaaauaagcaaagg

SEQ ID NO: 1537617 - RNA, 19 nt, Artificial Sequence
  Description of Artificial Sequence: Synthetic oligonucleotide
aaaugcuacucaauccucu

SEQ ID NO: 1537618 - RNA, 19 nt, Artificial Sequence
  Description of Artificial Sequence: Synthetic oligonucleotide
augugaguuaugcaaagua

SEQ ID NO: 1537619 - RNA, 19 nt, Artificial Sequence
  Description of Artificial Sequence: Synthetic oligonucleotide
ugagagaagucuguuugug

SEQ ID NO: 1537620 - RNA, 19 nt, Artificial Sequence
  Description of Artificial Sequence: Synthetic oligonucleotide
uauuacugugagcugguuu

SEQ ID NO: 1537621 - RNA, 19 nt, Artificial Sequence
  Description of Artificial Sequence: Synthetic oligonucleotide
aucguaaaggugguuaucu

SEQ ID NO: 1537622 - RNA, 19 nt, Artificial Sequence
  Description of Artificial Sequence: Synthetic oligonucleotide
uuaucguaaaggugguuau

SEQ ID NO: 1537623 - RNA, 19 nt, Artificial Sequence
  Description of Artificial Sequence: Synthetic oligonucleotide
gcuaaugacauagaaagga

SEQ ID NO: 1537624 - RNA, 19 nt, Artificial Sequence
  Description of Artificial Sequence: Synthetic oligonucleotide
cauuucguggaggagggcc

SEQ ID NO: 1537625 - RNA, 19 nt, Artificial Sequence
  Description of Artificial Sequence: Synthetic oligonucleotide
agcaagucaaauaagcaaa

SEQ ID NO: 1537626 - RNA, 19 nt, Artificial Sequence
  Description of Artificial Sequence: Synthetic oligonucleotide
ucucgauaaccauaugaau

SEQ ID NO: 1537627 - RNA, 19 nt, Artificial Sequence
  Description of Artificial Sequence: Synthetic oligonucleotide
uaagguuuguggugagagc

SEQ ID NO: 1537628 - RNA, 19 nt, Artificial Sequence
  Description of Artificial Sequence: Synthetic oligonucleotide
caaaguucaaucuaggguu

SEQ ID NO: 1537629 - RNA, 19 nt, Artificial Sequence
  Description of Artificial Sequence: Synthetic oligonucleotide
ucagggagucaccuacucc

SEQ ID NO: 1537630 - RNA, 19 nt, Artificial Sequence
  Description of Artificial Sequence: Synthetic oligonucleotide
cauccaucuuucuucgaag

SEQ ID NO: 1537631 - RNA, 19 nt, Artificial Sequence
  Description of Artificial Sequence: Synthetic oligonucleotide
augguugaucaguucuuuc

SEQ ID NO: 1537632 - RNA, 19 nt, Artificial Sequence
  Description of Artificial Sequence: Synthetic oligonucleotide
uuugcuucagguugacauc

SEQ ID NO: 1537633 - RNA, 19 nt, Artificial Sequence
  Description of Artificial Sequence: Synthetic oligonucleotide
uacccauuugugcuuauua

SEQ ID NO: 1537634 - RNA, 19 nt, Artificial Sequence
  Description of Artificial Sequence: Synthetic oligonucleotide
gaagacaguauggucacuc

SEQ ID NO: 1537635 - RNA, 19 nt, Artificial Sequence
  Description of Artificial Sequence: Synthetic oligonucleotide
ucacaucauuaucguaaag

SEQ ID NO: 1537636 - RNA, 19 nt, Artificial Sequence
  Description of Artificial Sequence: Synthetic oligonucleotide
ucgaagaaagaagucccgc

SEQ ID NO: 1537637 - RNA, 19 nt, Artificial Sequence
  Description of Artificial Sequence: Synthetic oligonucleotide
ggugaaaaccagcaaucag

SEQ ID NO: 1537638 - RNA, 19 nt, Artificial Sequence
  Description of Artificial Sequence: Synthetic oligonucleotide
cucucgauaaccauaugaa

SEQ ID NO: 1537639 - RNA, 19 nt, Artificial Sequence
  Description of Artificial Sequence: Synthetic oligonucleotide
gcaucaguagaucaucacc

SEQ ID NO: 1537640 - RNA, 19 nt, Artificial Sequence
  Description of Artificial Sequence: Synthetic oligonucleotide
gacugcuugacugagccuc

SEQ ID NO: 1537641 - RNA, 19 nt, Artificial Sequence
  Description of Artificial Sequence: Synthetic oligonucleotide
uggucucacgucauccaag

SEQ ID NO: 1537642 - RNA, 19 nt, Artificial Sequence
  Description of Artificial Sequence: Synthetic oligonucleotide
caaucaacugagagaaguc

SEQ ID NO: 1537643 - RNA, 19 nt, Artificial Sequence
  Description of Artificial Sequence: Synthetic oligonucleotide
aagaugagauuaagguuug

SEQ ID NO: 1537644 - RNA, 19 nt, Artificial Sequence
  Description of Artificial Sequence: Synthetic oligonucleotide
gacaguauggucacucuca

SEQ ID NO: 1537645 - RNA, 19 nt, Artificial Sequence
  Description of Artificial Sequence: Synthetic oligonucleotide
ucuuuaagcaguguuucuu

SEQ ID NO: 1537646 - RNA, 19 nt, Artificial Sequence
  Description of Artificial Sequence: Synthetic oligonucleotide
ugaaaugggcaggaauccc

SEQ ID NO: 1537647 - RNA, 19 nt, Artificial Sequence
  Description of Artificial Sequence: Synthetic oligonucleotide
uuugcaguauuuccccaau

SEQ ID NO: 1537648 - RNA, 19 nt, Artificial Sequence
  Description of Artificial Sequence: Synthetic oligonucleotide
cuaagcuaaugacauagaa

SEQ ID NO: 1537649 - RNA, 19 nt, Artificial Sequence
  Description of Artificial Sequence: Synthetic oligonucleotide
uucaaucuaggguuuccuc

SEQ ID NO: 1537650 - RNA, 19 nt, Artificial Sequence
  Description of Artificial Sequence: Synthetic oligonucleotide
ucucuaucccgucuccaac

SEQ ID NO: 1537651 - RNA, 19 nt, Artificial Sequence
  Description of Artificial Sequence: Synthetic oligonucleotide
uucuuguaucacuuuuccu

SEQ ID NO: 1537652 - RNA, 19 nt, Artificial Sequence
  Description of Artificial Sequence: Synthetic oligonucleotide
ucuguuuguggcacauuuc

SEQ ID NO: 1537653 - RNA, 19 nt, Artificial Sequence
  Description of Artificial Sequence: Synthetic oligonucleotide
uuauugaucugggcaaagu

SEQ ID NO: 1537654 - RNA, 19 nt, Artificial Sequence
  Description of Artificial Sequence: Synthetic oligonucleotide
cauuugugcuuauuagcuc

SEQ ID NO: 1537655 - RNA, 19 nt, Artificial Sequence
  Description of Artificial Sequence: Synthetic oligonucleotide
uggucacucucacuucugc

SEQ ID NO: 1537656 - RNA, 19 nt, Artificial Sequence
  Description of Artificial Sequence: Synthetic oligonucleotide
ucuggucucacgucaucca

SEQ ID NO: 1537657 - RNA, 19 nt, Artificial Sequence
  Description of Artificial Sequence: Synthetic oligonucleotide
cacccugacuguaugggag

SEQ ID NO: 1537658 - RNA, 19 nt, Artificial Sequence
  Description of Artificial Sequence: Synthetic oligonucleotide
agugccucuaagaugagau

SEQ ID NO: 1537659 - RNA, 19 nt, Artificial Sequence
  Description of Artificial Sequence: Synthetic oligonucleotide
cauaguaauacaucaugcu

SEQ ID NO: 1537660 - RNA, 19 nt, Artificial Sequence
  Description of Artificial Sequence: Synthetic oligonucleotide
caucuagagcuguuccggg

SEQ ID NO: 1537661 - RNA, 19 nt, Artificial Sequence
  Description of Artificial Sequence: Synthetic oligonucleotide
uccacuguacauuccgauc

SEQ ID NO: 1537662 - RNA, 19 nt, Artificial Sequence
  Description of Artificial Sequence: Synthetic oligonucleotide
cagggagucaccuacucca

SEQ ID NO: 1537663 - RNA, 19 nt, Artificial Sequence
  Description of Artificial Sequence: Synthetic oligonucleotide
gccuaagcuaaugacauag

SEQ ID NO: 1537664 - RNA, 19 nt, Artificial Sequence
  Description of Artificial Sequence: Synthetic oligonucleotide
ccaaugauaacaauuaacu

SEQ ID NO: 1537665 - RNA, 19 nt, Artificial Sequence
  Description of Artificial Sequence: Synthetic oligonucleotide
gcuuauuagcucucuuccg

SEQ ID NO: 1537666 - RNA, 19 nt, Artificial Sequence
  Description of Artificial Sequence: Synthetic oligonucleotide
aucaacugagagaagucug

SEQ ID NO: 1537667 - RNA, 19 nt, Artificial Sequence
  Description of Artificial Sequence: Synthetic oligonucleotide
uugcaguauuuccccaaug

SEQ ID NO: 1537668 - RNA, 19 nt, Artificial Sequence
  Description of Artificial Sequence: Synthetic oligonucleotide
caguagaucaucacccuga

SEQ ID NO: 1537669 - RNA, 19 nt, Artificial Sequence
  Description of Artificial Sequence: Synthetic oligonucleotide
uuguggugagagcuuguac

SEQ ID NO: 1537670 - RNA, 19 nt, Artificial Sequence
  Description of Artificial Sequence: Synthetic oligonucleotide
uucccaccacgaaugaagu

SEQ ID NO: 1537671 - RNA, 19 nt, Artificial Sequence
  Description of Artificial Sequence: Synthetic oligonucleotide
gagccaaaggccuggccug

SEQ ID NO: 1537672 - RNA, 19 nt, Artificial Sequence
  Description of Artificial Sequence: Synthetic oligonucleotide
agaucaucacccugacugu

SEQ ID NO: 1537673 - RNA, 19 nt, Artificial Sequence
  Description of Artificial Sequence: Synthetic oligonucleotide
uggucugucucacaucauu

SEQ ID NO: 1537674 - RNA, 19 nt, Artificial Sequence
  Description of Artificial Sequence: Synthetic oligonucleotide
cacaggauauaccugcaca

SEQ ID NO: 1537675 - RNA, 19 nt, Artificial Sequence
  Description of Artificial Sequence: Synthetic oligonucleotide
cccauuugugcuuauuagc

SEQ ID NO: 1537676 - RNA, 19 nt, Artificial Sequence
  Description of Artificial Sequence: Synthetic oligonucleotide
aagauagaauuugcaguau

SEQ ID NO: 1537677 - RNA, 19 nt, Artificial Sequence
  Description of Artificial Sequence: Synthetic oligonucleotide
uuguggcacauuucgugga

SEQ ID NO: 1537678 - RNA, 19 nt, Artificial Sequence
  Description of Artificial Sequence: Synthetic oligonucleotide
caauuuggcgcuuaaugua

SEQ ID NO: 1537679 - RNA, 19 nt, Artificial Sequence
  Description of Artificial Sequence: Synthetic oligonucleotide
uucagggagucaccuacuc

SEQ ID NO: 1537680 - RNA, 19 nt, Artificial Sequence
  Description of Artificial Sequence: Synthetic oligonucleotide
acauuccgaucauaugaca

SEQ ID NO: 1537681 - RNA, 19 nt, Artificial Sequence
  Description of Artificial Sequence: Synthetic oligonucleotide
cauccaaguggagugguac

SEQ ID NO: 1537682 - RNA, 19 nt, Artificial Sequence
  Description of Artificial Sequence: Synthetic oligonucleotide
ggaaaugcuacucaauccu

SEQ ID NO: 1537683 - RNA, 19 nt, Artificial Sequence
  Description of Artificial Sequence: Synthetic oligonucleotide
uggcugucuggucucacgu

SEQ ID NO: 1537684 - RNA, 19 nt, Artificial Sequence
  Description of Artificial Sequence: Synthetic oligonucleotide
caggauauaccugcacacc

SEQ ID NO: 1537685 - RNA, 19 nt, Artificial Sequence
  Description of Artificial Sequence: Synthetic oligonucleotide
ggacccaggucuuuccugg

SEQ ID NO: 1537686 - RNA, 19 nt, Artificial Sequence
  Description of Artificial Sequence: Synthetic oligonucleotide
ggagucaccuacuccacug

SEQ ID NO: 1537687 - RNA, 19 nt, Artificial Sequence
  Description of Artificial Sequence: Synthetic oligonucleotide
cuuauaguacaugugaaau

SEQ ID NO: 1537688 - RNA, 19 nt, Artificial Sequence
  Description of Artificial Sequence: Synthetic oligonucleotide
ucacccugacuguauggga

SEQ ID NO: 1537689 - RNA, 19 nt, Artificial Sequence
  Description of Artificial Sequence: Synthetic oligonucleotide
uuuggcgcuuaauguacuc

SEQ ID NO: 1537690 - RNA, 19 nt, Artificial Sequence
  Description of Artificial Sequence: Synthetic oligonucleotide
gcucucgauaaccauauga

SEQ ID NO: 1537691 - RNA, 19 nt, Artificial Sequence
  Description of Artificial Sequence: Synthetic oligonucleotide
cagaaccucggaugguacc

SEQ ID NO: 1537692 - RNA, 19 nt, Artificial Sequence
  Description of Artificial Sequence: Synthetic oligonucleotide
uuccuauuacugugagcug

SEQ ID NO: 1537693 - RNA, 19 nt, Artificial Sequence
  Description of Artificial Sequence: Synthetic oligonucleotide
agaaccucggaugguacca

SEQ ID NO: 1537694 - RNA, 19 nt, Artificial Sequence
  Description of Artificial Sequence: Synthetic oligonucleotide
auaaaugccuggaaacaaa

SEQ ID NO: 1537695 - RNA, 19 nt, Artificial Sequence
  Description of Artificial Sequence: Synthetic oligonucleotide
ggcguagacauucuugcac

SEQ ID NO: 1537696 - RNA, 19 nt, Artificial Sequence
  Description of Artificial Sequence: Synthetic oligonucleotide
guaugaacucuggacaauc

SEQ ID NO: 1537697 - RNA, 19 nt, Artificial Sequence
  Description of Artificial Sequence: Synthetic oligonucleotide
uguuaagcucugugggaaa

SEQ ID NO: 1537698 - RNA, 19 nt, Artificial Sequence
  Description of Artificial Sequence: Synthetic oligonucleotide
agaagucccgcuccaaguu

SEQ ID NO: 1537699 - RNA, 19 nt, Artificial Sequence
  Description of Artificial Sequence: Synthetic oligonucleotide
uccucgcugacauucucaa

SEQ ID NO: 1537700 - RNA, 19 nt, Artificial Sequence
  Description of Artificial Sequence: Synthetic oligonucleotide
uggcccaaccuucuccaca

SEQ ID NO: 1537701 - RNA, 19 nt, Artificial Sequence
  Description of Artificial Sequence: Synthetic oligonucleotide
uuuccccuggcucucgaua

SEQ ID NO: 1537702 - RNA, 19 nt, Artificial Sequence
  Description of Artificial Sequence: Synthetic oligonucleotide
guuuccucgaccucggccu

SEQ ID NO: 1537703 - RNA, 19 nt, Artificial Sequence
  Description of Artificial Sequence: Synthetic oligonucleotide
gaagucccgcuccaaguuc

SEQ ID NO: 1537704 - RNA, 19 nt, Artificial Sequence
  Description of Artificial Sequence: Synthetic oligonucleotide
cuaagaugagauuaagguu

SEQ ID NO: 1537705 - RNA, 19 nt, Artificial Sequence
  Description of Artificial Sequence: Synthetic oligonucleotide
gagagcuuguacacgguga

SEQ ID NO: 1537706 - RNA, 19 nt, Artificial Sequence
  Description of Artificial Sequence: Synthetic oligonucleotide
uccgaucauaugacaucca

SEQ ID NO: 1537707 - RNA, 19 nt, Artificial Sequence
  Description of Artificial Sequence: Synthetic oligonucleotide
ucauccucgcugacauucu

SEQ ID NO: 1537708 - RNA, 19 nt, Artificial Sequence
  Description of Artificial Sequence: Synthetic oligonucleotide
ucuaucccgucuccaacuu

SEQ ID NO: 1537709 - RNA, 19 nt, Artificial Sequence
  Description of Artificial Sequence: Synthetic oligonucleotide
gauagaauuugcaguauuu

SEQ ID NO: 1537710 - RNA, 19 nt, Artificial Sequence
  Description of Artificial Sequence: Synthetic oligonucleotide
caccacgaaugaaguagcc

SEQ ID NO: 1537711 - RNA, 19 nt, Artificial Sequence
  Description of Artificial Sequence: Synthetic oligonucleotide
gugaguuaugcaaaguaua

SEQ ID NO: 1537712 - RNA, 19 nt, Artificial Sequence
  Description of Artificial Sequence: Synthetic oligonucleotide
uuggcgcuuaauguacucu

SEQ ID NO: 1537713 - RNA, 19 nt, Artificial Sequence
  Description of Artificial Sequence: Synthetic oligonucleotide
augugaaauaugacaacau

SEQ ID NO: 1537714 - RNA, 19 nt, Artificial Sequence
  Description of Artificial Sequence: Synthetic oligonucleotide
auaguacaugugaaauaug

SEQ ID NO: 1537715 - RNA, 19 nt, Artificial Sequence
  Description of Artificial Sequence: Synthetic oligonucleotide
uggcgcuuaauguacucuu

SEQ ID NO: 1537716 - RNA, 19 nt, Artificial Sequence
  Description of Artificial Sequence: Synthetic oligonucleotide
uaucguaaaggugguuauc

SEQ ID NO: 1537717 - RNA, 19 nt, Artificial Sequence
  Description of Artificial Sequence: Synthetic oligonucleotide
aaguagcccgugcagccua

SEQ ID NO: 1537718 - RNA, 19 nt, Artificial Sequence
  Description of Artificial Sequence: Synthetic oligonucleotide
ugcagaaccucggauggua

SEQ ID NO: 1537719 - RNA, 19 nt, Artificial Sequence
  Description of Artificial Sequence: Synthetic oligonucleotide
gugggcguagacauucuug

SEQ ID NO: 1537720 - RNA, 19 nt, Artificial Sequence
  Description of Artificial Sequence: Synthetic oligonucleotide
guacacggugaaaaccagc

SEQ ID NO: 1537721 - RNA, 19 nt, Artificial Sequence
  Description of Artificial Sequence: Synthetic oligonucleotide
cuuguaucacuuuuccuau

SEQ ID NO: 1537722 - RNA, 19 nt, Artificial Sequence
  Description of Artificial Sequence: Synthetic oligonucleotide
caaugauaacaauuaacuu

SEQ ID NO: 1537723 - RNA, 19 nt, Artificial Sequence
  Description of Artificial Sequence: Synthetic oligonucleotide
gcaaucagugaaaugggca

SEQ ID NO: 1537724 - RNA, 19 nt, Artificial Sequence
  Description of Artificial Sequence: Synthetic oligonucleotide
ggugguuaucuccacugca

SEQ ID NO: 1537725 - RNA, 19 nt, Artificial Sequence
  Description of Artificial Sequence: Synthetic oligonucleotide
gaguuaugcaaaguauacu

SEQ ID NO: 1537726 - RNA, 19 nt, Artificial Sequence
  Description of Artificial Sequence: Synthetic oligonucleotide
ucauccaaguggaguggua

SEQ ID NO: 1537727 - RNA, 19 nt, Artificial Sequence
  Description of Artificial Sequence: Synthetic oligonucleotide
cauuccgaucauaugacau

SEQ ID NO: 1537728 - RNA, 19 nt, Artificial Sequence
  Description of Artificial Sequence: Synthetic oligonucleotide
agcucugugggaaaugguu

SEQ ID NO: 1537729 - RNA, 19 nt, Artificial Sequence
  Description of Artificial Sequence: Synthetic oligonucleotide
gucaccuacuccacuguac

SEQ ID NO: 1537730 - RNA, 19 nt, Artificial Sequence
  Description of Artificial Sequence: Synthetic oligonucleotide
cuguacauuccgaucauau

SEQ ID NO: 1537731 - RNA, 19 nt, Artificial Sequence
  Description of Artificial Sequence: Synthetic oligonucleotide
ccacuguacauuccgauca

SEQ ID NO: 1537732 - RNA, 19 nt, Artificial Sequence
  Description of Artificial Sequence: Synthetic oligonucleotide
gguuuguggugagagcuug

SEQ ID NO: 1537733 - RNA, 19 nt, Artificial Sequence
  Description of Artificial Sequence: Synthetic oligonucleotide
gaucugggcaaaguauaaa

SEQ ID NO: 1537734 - RNA, 19 nt, Artificial Sequence
  Description of Artificial Sequence: Synthetic oligonucleotide
augaauaaucaaaguucaa

SEQ ID NO: 1537735 - RNA, 19 nt, Artificial Sequence
  Description of Artificial Sequence: Synthetic oligonucleotide
agggagucaccuacuccac

SEQ ID NO: 1537736 - RNA, 19 nt, Artificial Sequence
  Description of Artificial Sequence: Synthetic oligonucleotide
gcguagacauucuugcaca

SEQ ID NO: 1537737 - RNA, 19 nt, Artificial Sequence
  Description of Artificial Sequence: Synthetic oligonucleotide
uuguaucacuuuuccuauu

SEQ ID NO: 1537738 - RNA, 19 nt, Artificial Sequence
  Description of Artificial Sequence: Synthetic oligonucleotide
uuucguggaggagggccug

SEQ ID NO: 1537739 - RNA, 19 nt, Artificial Sequence
  Description of Artificial Sequence: Synthetic oligonucleotide
cagccuaagcuaaugacau

SEQ ID NO: 1537740 - RNA, 19 nt, Artificial Sequence
  Description of Artificial Sequence: Synthetic oligonucleotide
ugacugcuugacugagccu

SEQ ID NO: 1537741 - RNA, 19 nt, Artificial Sequence
  Description of Artificial Sequence: Synthetic oligonucleotide
guaauacaucaugcuggug

SEQ ID NO: 1537742 - RNA, 19 nt, Artificial Sequence
  Description of Artificial Sequence: Synthetic oligonucleotide
uucguggaggagggccugg

SEQ ID NO: 1537743 - RNA, 19 nt, Artificial Sequence
  Description of Artificial Sequence: Synthetic oligonucleotide
agucaccuacuccacugua

SEQ ID NO: 1537744 - RNA, 19 nt, Artificial Sequence
  Description of Artificial Sequence: Synthetic oligonucleotide
ccaccacgaaugaaguagc

SEQ ID NO: 1537745 - RNA, 19 nt, Artificial Sequence
  Description of Artificial Sequence: Synthetic oligonucleotide
guagacauucuugcacaga

SEQ ID NO: 1537746 - RNA, 19 nt, Artificial Sequence
  Description of Artificial Sequence: Synthetic oligonucleotide
cuggcucucgauaaccaua

SEQ ID NO: 1537747 - RNA, 19 nt, Artificial Sequence
  Description of Artificial Sequence: Synthetic oligonucleotide
ugccaucaucauaguaaua

SEQ ID NO: 1537748 - RNA, 19 nt, Artificial Sequence
  Description of Artificial Sequence: Synthetic oligonucleotide
auuuggcgcuuaauguacu

SEQ ID NO: 1537749 - RNA, 19 nt, Artificial Sequence
  Description of Artificial Sequence: Synthetic oligonucleotide
cucuggucugucucacauc

SEQ ID NO: 1537750 - RNA, 19 nt, Artificial Sequence
  Description of Artificial Sequence: Synthetic oligonucleotide
uuacugugagcugguuuau

SEQ ID NO: 1537751 - RNA, 19 nt, Artificial Sequence
  Description of Artificial Sequence: Synthetic oligonucleotide
cuaggguuuccucgaccuc

SEQ ID NO: 1537752 - RNA, 19 nt, Artificial Sequence
  Description of Artificial Sequence: Synthetic oligonucleotide
cuaucccgucuccaacuuc

SEQ ID NO: 1537753 - RNA, 19 nt, Artificial Sequence
  Description of Artificial Sequence: Synthetic oligonucleotide
gagcuguuccgggacccag

SEQ ID NO: 1537754 - RNA, 19 nt, Artificial Sequence
  Description of Artificial Sequence: Synthetic oligonucleotide
auauaccugcacaccugug

SEQ ID NO: 1537755 - RNA, 19 nt, Artificial Sequence
  Description of Artificial Sequence: Synthetic oligonucleotide
agcuguuccgggacccagg

SEQ ID NO: 1537756 - RNA, 19 nt, Artificial Sequence
  Description of Artificial Sequence: Synthetic oligonucleotide
gaaccucggaugguaccac

SEQ ID NO: 1537757 - RNA, 19 nt, Artificial Sequence
  Description of Artificial Sequence: Synthetic oligonucleotide
ggcuggcccaaccuucucc

SEQ ID NO: 1537758 - RNA, 19 nt, Artificial Sequence
  Description of Artificial Sequence: Synthetic oligonucleotide
cucuaucccgucuccaacu

SEQ ID NO: 1537759 - RNA, 19 nt, Artificial Sequence
  Description of Artificial Sequence: Synthetic oligonucleotide
agaugagauuaagguuugu

SEQ ID NO: 1537760 - RNA, 19 nt, Artificial Sequence
  Description of Artificial Sequence: Synthetic oligonucleotide
ucccaccacgaaugaagua

SEQ ID NO: 1537761 - RNA, 19 nt, Artificial Sequence
  Description of Artificial Sequence: Synthetic oligonucleotide
gcacgauuugcucucauau

SEQ ID NO: 1537762 - RNA, 19 nt, Artificial Sequence
  Description of Artificial Sequence: Synthetic oligonucleotide
gucugucucacaucauuau

SEQ ID NO: 1537763 - RNA, 19 nt, Artificial Sequence
  Description of Artificial Sequence: Synthetic oligonucleotide
ccaucuaauuuugcuuccc

SEQ ID NO: 1537764 - RNA, 19 nt, Artificial Sequence
  Description of Artificial Sequence: Synthetic oligonucleotide
cugguucuauccuuuuccu

SEQ ID NO: 1537765 - RNA, 19 nt, Artificial Sequence
  Description of Artificial Sequence: Synthetic oligonucleotide
agccuaagcuaaugacaua

SEQ ID NO: 1537766 - RNA, 19 nt, Artificial Sequence
  Description of Artificial Sequence: Synthetic oligonucleotide
guucaaucuaggguuuccu

SEQ ID NO: 1537767 - RNA, 19 nt, Artificial Sequence
  Description of Artificial Sequence: Synthetic oligonucleotide
gagucaccuacuccacugu

SEQ ID NO: 1537768 - RNA, 19 nt, Artificial Sequence
  Description of Artificial Sequence: Synthetic oligonucleotide
agaagacaguauggucacu

SEQ ID NO: 1537769 - RNA, 19 nt, Artificial Sequence
  Description of Artificial Sequence: Synthetic oligonucleotide
caacaggaccaucuaauuu

SEQ ID NO: 1537770 - RNA, 19 nt, Artificial Sequence
  Description of Artificial Sequence: Synthetic oligonucleotide
cacgaaugaaguagcccgu

SEQ ID NO: 1537771 - RNA, 19 nt, Artificial Sequence
  Description of Artificial Sequence: Synthetic oligonucleotide
ggucucacgucauccaagu

SEQ ID NO: 1537772 - RNA, 19 nt, Artificial Sequence
  Description of Artificial Sequence: Synthetic oligonucleotide
ccauaugaauaaucaaagu

SEQ ID NO: 1537773 - RNA, 19 nt, Artificial Sequence
  Description of Artificial Sequence: Synthetic oligonucleotide
cuggcccaaccuucuccac

SEQ ID NO: 1537774 - RNA, 19 nt, Artificial Sequence
  Description of Artificial Sequence: Synthetic oligonucleotide
guuaagcucugugggaaau

SEQ ID NO: 1537775 - RNA, 19 nt, Artificial Sequence
  Description of Artificial Sequence: Synthetic oligonucleotide
auacucaauuuggcgcuua

SEQ ID NO: 1537776 - RNA, 19 nt, Artificial Sequence
  Description of Artificial Sequence: Synthetic oligonucleotide
cugugccaucaucauagua

SEQ ID NO: 1537777 - RNA, 19 nt, Artificial Sequence
  Description of Artificial Sequence: Synthetic oligonucleotide
gaaguagcccgugcagccu

SEQ ID NO: 1537778 - RNA, 19 nt, Artificial Sequence
  Description of Artificial Sequence: Synthetic oligonucleotide
ccacaggauauaccugcac

SEQ ID NO: 1537779 - RNA, 19 nt, Artificial Sequence
  Description of Artificial Sequence: Synthetic oligonucleotide
cuacucaauccucucuuuu

SEQ ID NO: 1537780 - RNA, 19 nt, Artificial Sequence
  Description of Artificial Sequence: Synthetic oligonucleotide
ccgaucauaugacauccaa

SEQ ID NO: 1537781 - RNA, 19 nt, Artificial Sequence
  Description of Artificial Sequence: Synthetic oligonucleotide
gcgcuuaauguacucuuua

SEQ ID NO: 1537782 - RNA, 19 nt, Artificial Sequence
  Description of Artificial Sequence: Synthetic oligonucleotide
cacgauuugcucucauauu

SEQ ID NO: 1537783 - RNA, 19 nt, Artificial Sequence
  Description of Artificial Sequence: Synthetic oligonucleotide
gggcguagacauucuugca

SEQ ID NO: 1537784 - RNA, 19 nt, Artificial Sequence
  Description of Artificial Sequence: Synthetic oligonucleotide
agguuuguggugagagcuu

SEQ ID NO: 1537785 - RNA, 19 nt, Artificial Sequence
  Description of Artificial Sequence: Synthetic oligonucleotide
caaaggccuggccugguau

SEQ ID NO: 1537786 - RNA, 19 nt, Artificial Sequence
  Description of Artificial Sequence: Synthetic oligonucleotide
gcagaaccucggaugguac

SEQ ID NO: 1537787 - RNA, 19 nt, Artificial Sequence
  Description of Artificial Sequence: Synthetic oligonucleotide
cagugccucuaagaugaga

SEQ ID NO: 1537788 - RNA, 19 nt, Artificial Sequence
  Description of Artificial Sequence: Synthetic oligonucleotide
guagcccgugcagccuaag

SEQ ID NO: 1537789 - RNA, 19 nt, Artificial Sequence
  Description of Artificial Sequence: Synthetic oligonucleotide
gcccgugcagccuaagcua

SEQ ID NO: 1537790 - RNA, 19 nt, Artificial Sequence
  Description of Artificial Sequence: Synthetic oligonucleotide
cgcugacauucucaacagg

SEQ ID NO: 1537791 - RNA, 19 nt, Artificial Sequence
  Description of Artificial Sequence: Synthetic oligonucleotide
cuucccgguucucuuugcu

SEQ ID NO: 1537792 - RNA, 19 nt, Artificial Sequence
  Description of Artificial Sequence: Synthetic oligonucleotide
ggcucucgauaaccauaug

SEQ ID NO: 1537793 - RNA, 19 nt, Artificial Sequence
  Description of Artificial Sequence: Synthetic oligonucleotide
caguauggucacucucacu

SEQ ID NO: 1537794 - RNA, 19 nt, Artificial Sequence
  Description of Artificial Sequence: Synthetic oligonucleotide
ccccuggcucucgauaacc

SEQ ID NO: 1537795 - RNA, 19 nt, Artificial Sequence
  Description of Artificial Sequence: Synthetic oligonucleotide
cuggccugguaugaacucu

SEQ ID NO: 1537796 - RNA, 19 nt, Artificial Sequence
  Description of Artificial Sequence: Synthetic oligonucleotide
ccuauuacugugagcuggu

SEQ ID NO: 1537797 - RNA, 19 nt, Artificial Sequence
  Description of Artificial Sequence: Synthetic oligonucleotide
cacuguacauuccgaucau

SEQ ID NO: 1537798 - RNA, 19 nt, Artificial Sequence
  Description of Artificial Sequence: Synthetic oligonucleotide
aguagcccgugcagccuaa

SEQ ID NO: 1537799 - RNA, 19 nt, Artificial Sequence
  Description of Artificial Sequence: Synthetic oligonucleotide
gcuguuccgggacccaggu

SEQ ID NO: 1537800 - RNA, 19 nt, Artificial Sequence
  Description of Artificial Sequence: Synthetic oligonucleotide
gcucucauauuuacauggu

SEQ ID NO: 1537801 - RNA, 19 nt, Artificial Sequence
  Description of Artificial Sequence: Synthetic oligonucleotide
gcuacucaauccucucuuu

SEQ ID NO: 1537802 - RNA, 19 nt, Artificial Sequence
  Description of Artificial Sequence: Synthetic oligonucleotide
ccaaguggagugguaccca

SEQ ID NO: 1537803 - RNA, 19 nt, Artificial Sequence
  Description of Artificial Sequence: Synthetic oligonucleotide
gcccaaccuucuccacaag

SEQ ID NO: 1537804 - RNA, 19 nt, Artificial Sequence
  Description of Artificial Sequence: Synthetic oligonucleotide
cccgugcagccuaagcuaa

SEQ ID NO: 1537805 - RNA, 19 nt, Artificial Sequence
  Description of Artificial Sequence: Synthetic oligonucleotide
cggugaaaaccagcaauca

SEQ ID NO: 1537806 - RNA, 19 nt, Artificial Sequence
  Description of Artificial Sequence: Synthetic oligonucleotide
cauuaucguaaaggugguu

SEQ ID NO: 1537807 - RNA, 19 nt, Artificial Sequence
  Description of Artificial Sequence: Synthetic oligonucleotide
ccucuggucugucucacau

SEQ ID NO: 1537808 - RNA, 19 nt, Artificial Sequence
  Description of Artificial Sequence: Synthetic oligonucleotide
guacccauuugugcuuauu

SEQ ID NO: 1537809 - RNA, 19 nt, Artificial Sequence
  Description of Artificial Sequence: Synthetic oligonucleotide
ggugggcguagacauucuu

SEQ ID NO: 1537810 - RNA, 19 nt, Artificial Sequence
  Description of Artificial Sequence: Synthetic oligonucleotide
cuauuacugugagcugguu

SEQ ID NO: 1537811 - RNA, 19 nt, Artificial Sequence
  Description of Artificial Sequence: Synthetic oligonucleotide
cgguucucuuugcucucac

SEQ ID NO: 1537812 - RNA, 19 nt, Artificial Sequence
  Description of Artificial Sequence: Synthetic oligonucleotide
ggcgcuuaauguacucuuu

SEQ ID NO: 1537813 - RNA, 19 nt, Artificial Sequence
  Description of Artificial Sequence: Synthetic oligonucleotide
ccucggaugguaccacccu

SEQ ID NO: 1537814 - RNA, 19 nt, Artificial Sequence
  Description of Artificial Sequence: Synthetic oligonucleotide
cagcacgauuugcucucau

SEQ ID NO: 1537815 - RNA, 19 nt, Artificial Sequence
  Description of Artificial Sequence: Synthetic oligonucleotide
gggugggcguagacauucu

SEQ ID NO: 1537816 - RNA, 19 nt, Artificial Sequence
  Description of Artificial Sequence: Synthetic oligonucleotide
ccgugcagccuaagcuaau

SEQ ID NO: 1537817 - RNA, 19 nt, Artificial Sequence
  Description of Artificial Sequence: Synthetic oligonucleotide
ggccugggauuggccauuu

SEQ ID NO: 1537818 - RNA, 19 nt, Artificial Sequence
  Description of Artificial Sequence: Synthetic oligonucleotide
uuuacuauuacaaaauccu

SEQ ID NO: 1537819 - RNA, 19 nt, Artificial Sequence
  Description of Artificial Sequence: Synthetic oligonucleotide
aauuggauuagccuuggac

SEQ ID NO: 1537820 - RNA, 19 nt, Artificial Sequence
  Description of Artificial Sequence: Synthetic oligonucleotide
gauauguauaccuaaagug

SEQ ID NO: 1537821 - RNA, 19 nt, Artificial Sequence
  Description of Artificial Sequence: Synthetic oligonucleotide
ugucuaauuagucuuggcg

SEQ ID NO: 1537822 - RNA, 19 nt, Artificial Sequence
  Description of Artificial Sequence: Synthetic oligonucleotide
ucuaauacuuuccauaugu

SEQ ID NO: 1537823 - RNA, 19 nt, Artificial Sequence
  Description of Artificial Sequence: Synthetic oligonucleotide
ucugccuugaacaaguugc

SEQ ID NO: 1537824 - RNA, 19 nt, Artificial Sequence
  Description of Artificial Sequence: Synthetic oligonucleotide
auucacaugaccaaugugc

SEQ ID NO: 1537825 - RNA, 19 nt, Artificial Sequence
  Description of Artificial Sequence: Synthetic oligonucleotide
aaauagagucagcagcacc

SEQ ID NO: 1537826 - RNA, 19 nt, Artificial Sequence
  Description of Artificial Sequence: Synthetic oligonucleotide
acaguuuggaucccaaugc

SEQ ID NO: 1537827 - RNA, 19 nt, Artificial Sequence
  Description of Artificial Sequence: Synthetic oligonucleotide
uucuguaggaaucagcgcc

SEQ ID NO: 1537828 - RNA, 19 nt, Artificial Sequence
  Description of Artificial Sequence: Synthetic oligonucleotide
aagagugaaaaccggagug

SEQ ID NO: 1537829 - RNA, 19 nt, Artificial Sequence
  Description of Artificial Sequence: Synthetic oligonucleotide
uagguaucugcccucaucg

SEQ ID NO: 1537830 - RNA, 19 nt, Artificial Sequence
  Description of Artificial Sequence: Synthetic oligonucleotide
uuauuagacauucuuuaca

SEQ ID NO: 1537831 - RNA, 19 nt, Artificial Sequence
  Description of Artificial Sequence: Synthetic oligonucleotide
gucuaauuagucuuggcgg

SEQ ID NO: 1537832 - RNA, 19 nt, Artificial Sequence
  Description of Artificial Sequence: Synthetic oligonucleotide
ugcgaugaaaguuucaaug

SEQ ID NO: 1537833 - RNA, 19 nt, Artificial Sequence
  Description of Artificial Sequence: Synthetic oligonucleotide
ugauauguauaccuaaagu

SEQ ID NO: 1537834 - RNA, 19 nt, Artificial Sequence
  Description of Artificial Sequence: Synthetic oligonucleotide
aaaccccuuccucaaacgc

SEQ ID NO: 1537835 - RNA, 19 nt, Artificial Sequence
  Description of Artificial Sequence: Synthetic oligonucleotide
auuggauuagccuuggaca

SEQ ID NO: 1537836 - RNA, 19 nt, Artificial Sequence
  Description of Artificial Sequence: Synthetic oligonucleotide
auaaauuaugguaacagug

SEQ ID NO: 1537837 - RNA, 19 nt, Artificial Sequence
  Description of Artificial Sequence: Synthetic oligonucleotide
uuuacauaggcuucgggga

SEQ ID NO: 1537838 - RNA, 19 nt, Artificial Sequence
  Description of Artificial Sequence: Synthetic oligonucleotide
ucuagauaauuauauuuca

SEQ ID NO: 1537839 - RNA, 19 nt, Artificial Sequence
  Description of Artificial Sequence: Synthetic oligonucleotide
aaggaaaucagucuagaua

SEQ ID NO: 1537840 - RNA, 19 nt, Artificial Sequence
  Description of Artificial Sequence: Synthetic oligonucleotide
uugauauguauaccuaaag

SEQ ID NO: 1537841 - RNA, 19 nt, Artificial Sequence
  Description of Artificial Sequence: Synthetic oligonucleotide
ucagucuagauaauuauau

SEQ ID NO: 1537842 - RNA, 19 nt, Artificial Sequence
  Description of Artificial Sequence: Synthetic oligonucleotide
gauguuccgacacugcgcg

SEQ ID NO: 1537843 - RNA, 19 nt, Artificial Sequence
  Description of Artificial Sequence: Synthetic oligonucleotide
uaauaauuggauuagccuu

SEQ ID NO: 1537844 - RNA, 19 nt, Artificial Sequence
  Description of Artificial Sequence: Synthetic oligonucleotide
acagugauaauaauaauug

SEQ ID NO: 1537845 - RNA, 19 nt, Artificial Sequence
  Description of Artificial Sequence: Synthetic oligonucleotide
gacacugcgcguuugagcc

SEQ ID NO: 1537846 - RNA, 19 nt, Artificial Sequence
  Description of Artificial Sequence: Synthetic oligonucleotide
ucuaauuagucuuggcggc

SEQ ID NO: 1537847 - RNA, 19 nt, Artificial Sequence
  Description of Artificial Sequence: Synthetic oligonucleotide
aauaauuggauuagccuug

SEQ ID NO: 1537848 - RNA, 19 nt, Artificial Sequence
  Description of Artificial Sequence: Synthetic oligonucleotide
aaucagucuagauaauuau

SEQ ID NO: 1537849 - RNA, 19 nt, Artificial Sequence
  Description of Artificial Sequence: Synthetic oligonucleotide
uuacuauuacaaaauccug

SEQ ID NO: 1537850 - RNA, 19 nt, Artificial Sequence
  Description of Artificial Sequence: Synthetic oligonucleotide
acaggcaauaaauaugucu

SEQ ID NO: 1537851 - RNA, 19 nt, Artificial Sequence
  Description of Artificial Sequence: Synthetic oligonucleotide
uugaacaaguugcaggcgc

SEQ ID NO: 1537852 - RNA, 19 nt, Artificial Sequence
  Description of Artificial Sequence: Synthetic oligonucleotide
caucgucugacccaaaccg

SEQ ID NO: 1537853 - RNA, 19 nt, Artificial Sequence
  Description of Artificial Sequence: Synthetic oligonucleotide
aauagagucagcagcacca

SEQ ID NO: 1537854 - RNA, 19 nt, Artificial Sequence
  Description of Artificial Sequence: Synthetic oligonucleotide
aaagaagagugaaaaccgg

SEQ ID NO: 1537855 - RNA, 19 nt, Artificial Sequence
  Description of Artificial Sequence: Synthetic oligonucleotide
accggaguguuuuacauag

SEQ ID NO: 1537856 - RNA, 19 nt, Artificial Sequence
  Description of Artificial Sequence: Synthetic oligonucleotide
agucuagauaauuauauuu

SEQ ID NO: 1537857 - RNA, 19 nt, Artificial Sequence
  Description of Artificial Sequence: Synthetic oligonucleotide
uuucaaugcguccuugagc

SEQ ID NO: 1537858 - RNA, 19 nt, Artificial Sequence
  Description of Artificial Sequence: Synthetic oligonucleotide
agcaaugucuaauuagucu

SEQ ID NO: 1537859 - RNA, 19 nt, Artificial Sequence
  Description of Artificial Sequence: Synthetic oligonucleotide
uguuuacuauuacaaaauc

SEQ ID NO: 1537860 - RNA, 19 nt, Artificial Sequence
  Description of Artificial Sequence: Synthetic oligonucleotide
aauuagucuuggcggcagc

SEQ ID NO: 1537861 - RNA, 19 nt, Artificial Sequence
  Description of Artificial Sequence: Synthetic oligonucleotide
ugaacaaguugcaggcgcg

SEQ ID NO: 1537862 - RNA, 19 nt, Artificial Sequence
  Description of Artificial Sequence: Synthetic oligonucleotide
aacgcaagugucccgcggg

SEQ ID NO: 1537863 - RNA, 19 nt, Artificial Sequence
  Description of Artificial Sequence: Synthetic oligonucleotide
ugucuaauacuuuccauau

SEQ ID NO: 1537864 - RNA, 19 nt, Artificial Sequence
  Description of Artificial Sequence: Synthetic oligonucleotide
aaaaccggaguguuuuaca

SEQ ID NO: 1537865 - RNA, 19 nt, Artificial Sequence
  Description of Artificial Sequence: Synthetic oligonucleotide
acuauuacaaaauccugua

SEQ ID NO: 1537866 - RNA, 19 nt, Artificial Sequence
  Description of Artificial Sequence: Synthetic oligonucleotide
aaauccuguaauguguccu

SEQ ID NO: 1537867 - RNA, 19 nt, Artificial Sequence
  Description of Artificial Sequence: Synthetic oligonucleotide
ugugcaguuucuuggggag

SEQ ID NO: 1537868 - RNA, 19 nt, Artificial Sequence
  Description of Artificial Sequence: Synthetic oligonucleotide
uccgagguagcucugauuu

SEQ ID NO: 1537869 - RNA, 19 nt, Artificial Sequence
  Description of Artificial Sequence: Synthetic oligonucleotide
uauucacaugaccaaugug

SEQ ID NO: 1537870 - RNA, 19 nt, Artificial Sequence
  Description of Artificial Sequence: Synthetic oligonucleotide
augucuaauuagucuuggc

SEQ ID NO: 1537871 - RNA, 19 nt, Artificial Sequence
  Description of Artificial Sequence: Synthetic oligonucleotide
ugauguuccgacacugcgc

SEQ ID NO: 1537872 - RNA, 19 nt, Artificial Sequence
  Description of Artificial Sequence: Synthetic oligonucleotide
ucaucgucugacccaaacc

SEQ ID NO: 1537873 - RNA, 19 nt, Artificial Sequence
  Description of Artificial Sequence: Synthetic oligonucleotide
uaauaauaauuggauuagc

SEQ ID NO: 1537874 - RNA, 19 nt, Artificial Sequence
  Description of Artificial Sequence: Synthetic oligonucleotide
acccaaaccgcacagggug

SEQ ID NO: 1537875 - RNA, 19 nt, Artificial Sequence
  Description of Artificial Sequence: Synthetic oligonucleotide
auauucacaugaccaaugu

SEQ ID NO: 1537876 - RNA, 19 nt, Artificial Sequence
  Description of Artificial Sequence: Synthetic oligonucleotide
aaacgcaagugucccgcgg

SEQ ID NO: 1537877 - RNA, 19 nt, Artificial Sequence
  Description of Artificial Sequence: Synthetic oligonucleotide
aaaccggaguguuuuacau

SEQ ID NO: 1537878 - RNA, 19 nt, Artificial Sequence
  Description of Artificial Sequence: Synthetic oligonucleotide
guugccguggcucccauag

SEQ ID NO: 1537879 - RNA, 19 nt, Artificial Sequence
  Description of Artificial Sequence: Synthetic oligonucleotide
uuggauuagccuuggacaa

SEQ ID NO: 1537880 - RNA, 19 nt, Artificial Sequence
  Description of Artificial Sequence: Synthetic oligonucleotide
aguccuucgcuucuucuuc

SEQ ID NO: 1537881 - RNA, 19 nt, Artificial Sequence
  Description of Artificial Sequence: Synthetic oligonucleotide
augucuaauacuuuccaua

SEQ ID NO: 1537882 - RNA, 19 nt, Artificial Sequence
  Description of Artificial Sequence: Synthetic oligonucleotide
gucuagauaauuauauuuc

SEQ ID NO: 1537883 - RNA, 19 nt, Artificial Sequence
  Description of Artificial Sequence: Synthetic oligonucleotide
augaaaguuucaaugcguc

SEQ ID NO: 1537884 - RNA, 19 nt, Artificial Sequence
  Description of Artificial Sequence: Synthetic oligonucleotide
cugauguuccgacacugcg

SEQ ID NO: 1537885 - RNA, 19 nt, Artificial Sequence
  Description of Artificial Sequence: Synthetic oligonucleotide
ucaaacgcaagugucccgc

SEQ ID NO: 1537886 - RNA, 19 nt, Artificial Sequence
  Description of Artificial Sequence: Synthetic oligonucleotide
agaagagugaaaaccggag

SEQ ID NO: 1537887 - RNA, 19 nt, Artificial Sequence
  Description of Artificial Sequence: Synthetic oligonucleotide
aagaucugcgaugaaaguu

SEQ ID NO: 1537888 - RNA, 19 nt, Artificial Sequence
  Description of Artificial Sequence: Synthetic oligonucleotide
aagaagagugaaaaccgga

SEQ ID NO: 1537889 - RNA, 19 nt, Artificial Sequence
  Description of Artificial Sequence: Synthetic oligonucleotide
ucugcgaugaaaguuucaa

SEQ ID NO: 1537890 - RNA, 19 nt, Artificial Sequence
  Description of Artificial Sequence: Synthetic oligonucleotide
ucuguaggaaucagcgccu

SEQ ID NO: 1537891 - RNA, 19 nt, Artificial Sequence
  Description of Artificial Sequence: Synthetic oligonucleotide
ucuggagguaugaggccgg

SEQ ID NO: 1537892 - RNA, 19 nt, Artificial Sequence
  Description of Artificial Sequence: Synthetic oligonucleotide
uuagguaucugcccucauc

SEQ ID NO: 1537893 - RNA, 19 nt, Artificial Sequence
  Description of Artificial Sequence: Synthetic oligonucleotide
aaagggacccgagagggga

SEQ ID NO: 1537894 - RNA, 19 nt, Artificial Sequence
  Description of Artificial Sequence: Synthetic oligonucleotide
aacaaguugcaggcgcgcg

SEQ ID NO: 1537895 - RNA, 19 nt, Artificial Sequence
  Description of Artificial Sequence: Synthetic oligonucleotide
uccauauguuuacuauuac

SEQ ID NO: 1537896 - RNA, 19 nt, Artificial Sequence
  Description of Artificial Sequence: Synthetic oligonucleotide
ggaagaucugcgaugaaag

SEQ ID NO: 1537897 - RNA, 19 nt, Artificial Sequence
  Description of Artificial Sequence: Synthetic oligonucleotide
agguaugaggccggggucc

SEQ ID NO: 1537898 - RNA, 19 nt, Artificial Sequence
  Description of Artificial Sequence: Synthetic oligonucleotide
uacuugauauguauaccua

SEQ ID NO: 1537899 - RNA, 19 nt, Artificial Sequence
  Description of Artificial Sequence: Synthetic oligonucleotide
ugcaguuucuuggggagag

SEQ ID NO: 1537900 - RNA, 19 nt, Artificial Sequence
  Description of Artificial Sequence: Synthetic oligonucleotide
ucgucugacccaaaccgca

SEQ ID NO: 1537901 - RNA, 19 nt, Artificial Sequence
  Description of Artificial Sequence: Synthetic oligonucleotide
auaauuggauuagccuugg

SEQ ID NO: 1537902 - RNA, 19 nt, Artificial Sequence
  Description of Artificial Sequence: Synthetic oligonucleotide
uacaugcacagaaggaaau

SEQ ID NO: 1537903 - RNA, 19 nt, Artificial Sequence
  Description of Artificial Sequence: Synthetic oligonucleotide
ugaccaaugugcaguuucu

SEQ ID NO: 1537904 - RNA, 19 nt, Artificial Sequence
  Description of Artificial Sequence: Synthetic oligonucleotide
gaaaguuucaaugcguccu

SEQ ID NO: 1537905 - RNA, 19 nt, Artificial Sequence
  Description of Artificial Sequence: Synthetic oligonucleotide
gcgaugaaaguuucaaugc

SEQ ID NO: 1537906 - RNA, 19 nt, Artificial Sequence
  Description of Artificial Sequence: Synthetic oligonucleotide
guguuuuacauaggcuucg

SEQ ID NO: 1537907 - RNA, 19 nt, Artificial Sequence
  Description of Artificial Sequence: Synthetic oligonucleotide
uaauuagucuuggcggcag

SEQ ID NO: 1537908 - RNA, 19 nt, Artificial Sequence
  Description of Artificial Sequence: Synthetic oligonucleotide
caaaccccuuccucaaacg

SEQ ID NO: 1537909 - RNA, 19 nt, Artificial Sequence
  Description of Artificial Sequence: Synthetic oligonucleotide
ugugccucucccaaaccac

SEQ ID NO: 1537910 - RNA, 19 nt, Artificial Sequence
  Description of Artificial Sequence: Synthetic oligonucleotide
uauaccuaaagugcauuau

SEQ ID NO: 1537911 - RNA, 19 nt, Artificial Sequence
  Description of Artificial Sequence: Synthetic oligonucleotide
ggaugcgagggccaggugg

SEQ ID NO: 1537912 - RNA, 19 nt, Artificial Sequence
  Description of Artificial Sequence: Synthetic oligonucleotide
accacaaauagagacacuu

SEQ ID NO: 1537913 - RNA, 19 nt, Artificial Sequence
  Description of Artificial Sequence: Synthetic oligonucleotide
cuugauauguauaccuaaa

SEQ ID NO: 1537914 - RNA, 19 nt, Artificial Sequence
  Description of Artificial Sequence: Synthetic oligonucleotide
uuuugguguugggagcagg

SEQ ID NO: 1537915 - RNA, 19 nt, Artificial Sequence
  Description of Artificial Sequence: Synthetic oligonucleotide
aucgucugacccaaaccgc

SEQ ID NO: 1537916 - RNA, 19 nt, Artificial Sequence
  Description of Artificial Sequence: Synthetic oligonucleotide
gaaaaccggaguguuuuac

SEQ ID NO: 1537917 - RNA, 19 nt, Artificial Sequence
  Description of Artificial Sequence: Synthetic oligonucleotide
ugcccucaucgucugaccc

SEQ ID NO: 1537918 - RNA, 19 nt, Artificial Sequence
  Description of Artificial Sequence: Synthetic oligonucleotide
aaccggagagcuuccucug

SEQ ID NO: 1537919 - RNA, 19 nt, Artificial Sequence
  Description of Artificial Sequence: Synthetic oligonucleotide
agucuguacaggcaauaaa

SEQ ID NO: 1537920 - RNA, 19 nt, Artificial Sequence
  Description of Artificial Sequence: Synthetic oligonucleotide
agagugaaaaccggagugu

SEQ ID NO: 1537921 - RNA, 19 nt, Artificial Sequence
  Description of Artificial Sequence: Synthetic oligonucleotide
aaaagggacccgagagggg

SEQ ID NO: 1537922 - RNA, 19 nt, Artificial Sequence
  Description of Artificial Sequence: Synthetic oligonucleotide
cuugaacaaguugcaggcg

SEQ ID NO: 1537923 - RNA, 19 nt, Artificial Sequence
  Description of Artificial Sequence: Synthetic oligonucleotide
ugcgcguuugagccugcgg

SEQ ID NO: 1537924 - RNA, 19 nt, Artificial Sequence
  Description of Artificial Sequence: Synthetic oligonucleotide
ugucguggaugcgagggcc

SEQ ID NO: 1537925 - RNA, 19 nt, Artificial Sequence
  Description of Artificial Sequence: Synthetic oligonucleotide
gaugcgagggccagguggc

SEQ ID NO: 1537926 - RNA, 19 nt, Artificial Sequence
  Description of Artificial Sequence: Synthetic oligonucleotide
guacaggcaauaaauaugu

SEQ ID NO: 1537927 - RNA, 19 nt, Artificial Sequence
  Description of Artificial Sequence: Synthetic oligonucleotide
gucuaauacuuuccauaug

SEQ ID NO: 1537928 - RNA, 19 nt, Artificial Sequence
  Description of Artificial Sequence: Synthetic oligonucleotide
gaugaaaguuucaaugcgu

SEQ ID NO: 1537929 - RNA, 19 nt, Artificial Sequence
  Description of Artificial Sequence: Synthetic oligonucleotide
agcggucugggguuccugg

SEQ ID NO: 1537930 - RNA, 19 nt, Artificial Sequence
  Description of Artificial Sequence: Synthetic oligonucleotide
guugcaggcgcgcgugucg

SEQ ID NO: 1537931 - RNA, 19 nt, Artificial Sequence
  Description of Artificial Sequence: Synthetic oligonucleotide
cucaaacgcaagugucccg

SEQ ID NO: 1537932 - RNA, 19 nt, Artificial Sequence
  Description of Artificial Sequence: Synthetic oligonucleotide
gaugcguggcgcguugccg

SEQ ID NO: 1537933 - RNA, 19 nt, Artificial Sequence
  Description of Artificial Sequence: Synthetic oligonucleotide
cucaucgucugacccaaac

SEQ ID NO: 1537934 - RNA, 19 nt, Artificial Sequence
  Description of Artificial Sequence: Synthetic oligonucleotide
uguauaccuaaagugcauu

SEQ ID NO: 1537935 - RNA, 19 nt, Artificial Sequence
  Description of Artificial Sequence: Synthetic oligonucleotide
uaauguguccuuggaagau

SEQ ID NO: 1537936 - RNA, 19 nt, Artificial Sequence
  Description of Artificial Sequence: Synthetic oligonucleotide
aaugcguccuugagcuggg

SEQ ID NO: 1537937 - RNA, 19 nt, Artificial Sequence
  Description of Artificial Sequence: Synthetic oligonucleotide
uccacggagcgcccgcagg

SEQ ID NO: 1537938 - RNA, 19 nt, Artificial Sequence
  Description of Artificial Sequence: Synthetic oligonucleotide
caugcacagaaggaaauca

SEQ ID NO: 1537939 - RNA, 19 nt, Artificial Sequence
  Description of Artificial Sequence: Synthetic oligonucleotide
ucccauagcaaugucuaau

SEQ ID NO: 1537940 - RNA, 19 nt, Artificial Sequence
  Description of Artificial Sequence: Synthetic oligonucleotide
cuccuuacgcugcuucccg

SEQ ID NO: 1537941 - RNA, 19 nt, Artificial Sequence
  Description of Artificial Sequence: Synthetic oligonucleotide
ugcuccuuacgcugcuucc

SEQ ID NO: 1537942 - RNA, 19 nt, Artificial Sequence
  Description of Artificial Sequence: Synthetic oligonucleotide
ugcguuccgggacucugcc

SEQ ID NO: 1537943 - RNA, 19 nt, Artificial Sequence
  Description of Artificial Sequence: Synthetic oligonucleotide
uccuuacgcugcuucccgg

SEQ ID NO: 1537944 - RNA, 19 nt, Artificial Sequence
  Description of Artificial Sequence: Synthetic oligonucleotide
ugagccugcggcugagccc

SEQ ID NO: 1537945 - RNA, 19 nt, Artificial Sequence
  Description of Artificial Sequence: Synthetic oligonucleotide
acaaguugcaggcgcgcgu

SEQ ID NO: 1537946 - RNA, 19 nt, Artificial Sequence
  Description of Artificial Sequence: Synthetic oligonucleotide
aaccggaguguuuuacaua

SEQ ID NO: 1537947 - RNA, 19 nt, Artificial Sequence
  Description of Artificial Sequence: Synthetic oligonucleotide
gcaauaaauaugucuaaua

SEQ ID NO: 1537948 - RNA, 19 nt, Artificial Sequence
  Description of Artificial Sequence: Synthetic oligonucleotide
cucagcuaucagguggugg

SEQ ID NO: 1537949 - RNA, 19 nt, Artificial Sequence
  Description of Artificial Sequence: Synthetic oligonucleotide
cgaugaaaguuucaaugcg

SEQ ID NO: 1537950 - RNA, 19 nt, Artificial Sequence
  Description of Artificial Sequence: Synthetic oligonucleotide
uucggggaugcguggcgcg

SEQ ID NO: 1537951 - RNA, 19 nt, Artificial Sequence
  Description of Artificial Sequence: Synthetic oligonucleotide
cuugucgugcagcagcuga

SEQ ID NO: 1537952 - RNA, 19 nt, Artificial Sequence
  Description of Artificial Sequence: Synthetic oligonucleotide
caaacgcaagugucccgcg

SEQ ID NO: 1537953 - RNA, 19 nt, Artificial Sequence
  Description of Artificial Sequence: Synthetic oligonucleotide
uaauuggauuagccuugga

SEQ ID NO: 1537954 - RNA, 19 nt, Artificial Sequence
  Description of Artificial Sequence: Synthetic oligonucleotide
guauaccuaaagugcauua

SEQ ID NO: 1537955 - RNA, 19 nt, Artificial Sequence
  Description of Artificial Sequence: Synthetic oligonucleotide
gacgcuccacugccgaacc

SEQ ID NO: 1537956 - RNA, 19 nt, Artificial Sequence
  Description of Artificial Sequence: Synthetic oligonucleotide
ucuugccgcucgcucuggg

SEQ ID NO: 1537957 - RNA, 19 nt, Artificial Sequence
  Description of Artificial Sequence: Synthetic oligonucleotide
guaggaaucagcgccucca

SEQ ID NO: 1537958 - RNA, 19 nt, Artificial Sequence
  Description of Artificial Sequence: Synthetic oligonucleotide
uacaggcaauaaauauguc

SEQ ID NO: 1537959 - RNA, 19 nt, Artificial Sequence
  Description of Artificial Sequence: Synthetic oligonucleotide
auaggcuucggggaugcgu

SEQ ID NO: 1537960 - RNA, 19 nt, Artificial Sequence
  Description of Artificial Sequence: Synthetic oligonucleotide
gaacaaguugcaggcgcgc

SEQ ID NO: 1537961 - RNA, 19 nt, Artificial Sequence
  Description of Artificial Sequence: Synthetic oligonucleotide
guagcugagcaggaacacc

SEQ ID NO: 1537962 - RNA, 19 nt, Artificial Sequence
  Description of Artificial Sequence: Synthetic oligonucleotide
aagugucccgcgggaaguc

SEQ ID NO: 1537963 - RNA, 19 nt, Artificial Sequence
  Description of Artificial Sequence: Synthetic oligonucleotide
gcagcugauguuccgacac

SEQ ID NO: 1537964 - RNA, 19 nt, Artificial Sequence
  Description of Artificial Sequence: Synthetic oligonucleotide
gaagaucugcgaugaaagu

SEQ ID NO: 1537965 - RNA, 19 nt, Artificial Sequence
  Description of Artificial Sequence: Synthetic oligonucleotide
aagcaaccggagagcuucc

SEQ ID NO: 1537966 - RNA, 19 nt, Artificial Sequence
  Description of Artificial Sequence: Synthetic oligonucleotide
ggggacaccuccgagguag

SEQ ID NO: 1537967 - RNA, 19 nt, Artificial Sequence
  Description of Artificial Sequence: Synthetic oligonucleotide
uccgacacugcgcguuuga

SEQ ID NO: 1537968 - RNA, 19 nt, Artificial Sequence
  Description of Artificial Sequence: Synthetic oligonucleotide
ugaaaaccggaguguuuua

SEQ ID NO: 1537969 - RNA, 19 nt, Artificial Sequence
  Description of Artificial Sequence: Synthetic oligonucleotide
uguuccgacacugcgcguu

SEQ ID NO: 1537970 - RNA, 19 nt, Artificial Sequence
  Description of Artificial Sequence: Synthetic oligonucleotide
aucagcgccuccaacugug

SEQ ID NO: 1537971 - RNA, 19 nt, Artificial Sequence
  Description of Artificial Sequence: Synthetic oligonucleotide
auguguccuuggaagaucu

SEQ ID NO: 1537972 - RNA, 19 nt, Artificial Sequence
  Description of Artificial Sequence: Synthetic oligonucleotide
gcgcguuugagccugcggc

SEQ ID NO: 1537973 - RNA, 19 nt, Artificial Sequence
  Description of Artificial Sequence: Synthetic oligonucleotide
acaugaccaaugugcaguu

SEQ ID NO: 1537974 - RNA, 19 nt, Artificial Sequence
  Description of Artificial Sequence: Synthetic oligonucleotide
ccuaaagugcauuauuuua

SEQ ID NO: 1537975 - RNA, 19 nt, Artificial Sequence
  Description of Artificial Sequence: Synthetic oligonucleotide
aaccgcacagggugguuuu

SEQ ID NO: 1537976 - RNA, 19 nt, Artificial Sequence
  Description of Artificial Sequence: Synthetic oligonucleotide
caguuuggaucccaaugca

SEQ ID NO: 1537977 - RNA, 19 nt, Artificial Sequence
  Description of Artificial Sequence: Synthetic oligonucleotide
ccuuggaagaucugcgaug

SEQ ID NO: 1537978 - RNA, 19 nt, Artificial Sequence
  Description of Artificial Sequence: Synthetic oligonucleotide
aaaccgcacagggugguuu

SEQ ID NO: 1537979 - RNA, 19 nt, Artificial Sequence
  Description of Artificial Sequence: Synthetic oligonucleotide
guguggaucucagcuauca

SEQ ID NO: 1537980 - RNA, 19 nt, Artificial Sequence
  Description of Artificial Sequence: Synthetic oligonucleotide
acggagcgcccgcaggagg

SEQ ID NO: 1537981 - RNA, 19 nt, Artificial Sequence
  Description of Artificial Sequence: Synthetic oligonucleotide
uguguggaucucagcuauc

SEQ ID NO: 1537982 - RNA, 19 nt, Artificial Sequence
  Description of Artificial Sequence: Synthetic oligonucleotide
uggagguaugaggccgggg

SEQ ID NO: 1537983 - RNA, 19 nt, Artificial Sequence
  Description of Artificial Sequence: Synthetic oligonucleotide
cacaugaccaaugugcagu

SEQ ID NO: 1537984 - RNA, 19 nt, Artificial Sequence
  Description of Artificial Sequence: Synthetic oligonucleotide
agguaucugcccucaucgu

SEQ ID NO: 1537985 - RNA, 19 nt, Artificial Sequence
  Description of Artificial Sequence: Synthetic oligonucleotide
agagacaguuuggauccca

SEQ ID NO: 1537986 - RNA, 19 nt, Artificial Sequence
  Description of Artificial Sequence: Synthetic oligonucleotide
cuguaauguguccuuggaa

SEQ ID NO: 1537987 - RNA, 19 nt, Artificial Sequence
  Description of Artificial Sequence: Synthetic oligonucleotide
gcaaaccccuuccucaaac

SEQ ID NO: 1537988 - RNA, 19 nt, Artificial Sequence
  Description of Artificial Sequence: Synthetic oligonucleotide
gcaagugucccgcgggaag

SEQ ID NO: 1537989 - RNA, 19 nt, Artificial Sequence
  Description of Artificial Sequence: Synthetic oligonucleotide
caccaggacgcuccacugc

SEQ ID NO: 1537990 - RNA, 19 nt, Artificial Sequence
  Description of Artificial Sequence: Synthetic oligonucleotide
cuaauuagucuuggcggca

SEQ ID NO: 1537991 - RNA, 19 nt, Artificial Sequence
  Description of Artificial Sequence: Synthetic oligonucleotide
auguauaccuaaagugcau

SEQ ID NO: 1537992 - RNA, 19 nt, Artificial Sequence
  Description of Artificial Sequence: Synthetic oligonucleotide
uuggaucccaaugcauuua

SEQ ID NO: 1537993 - RNA, 19 nt, Artificial Sequence
  Description of Artificial Sequence: Synthetic oligonucleotide
cugccuugaacaaguugca

SEQ ID NO: 1537994 - RNA, 19 nt, Artificial Sequence
  Description of Artificial Sequence: Synthetic oligonucleotide
agggcauggaguagcugag

SEQ ID NO: 1537995 - RNA, 19 nt, Artificial Sequence
  Description of Artificial Sequence: Synthetic oligonucleotide
uuacgcugcuucccggguu

SEQ ID NO: 1537996 - RNA, 19 nt, Artificial Sequence
  Description of Artificial Sequence: Synthetic oligonucleotide
cagggcaaaccccuuccuc

SEQ ID NO: 1537997 - RNA, 19 nt, Artificial Sequence
  Description of Artificial Sequence: Synthetic oligonucleotide
gugucguggaugcgagggc

SEQ ID NO: 1537998 - RNA, 19 nt, Artificial Sequence
  Description of Artificial Sequence: Synthetic oligonucleotide
cacugccgaaccagccucc

SEQ ID NO: 1537999 - RNA, 19 nt, Artificial Sequence
  Description of Artificial Sequence: Synthetic oligonucleotide
ucguggaugcgagggccag

SEQ ID NO: 1538000 - RNA, 19 nt, Artificial Sequence
  Description of Artificial Sequence: Synthetic oligonucleotide
cccgcgggaagucagcugc

SEQ ID NO: 1538001 - RNA, 19 nt, Artificial Sequence
  Description of Artificial Sequence: Synthetic oligonucleotide
cugcccucaucgucugacc

SEQ ID NO: 1538002 - RNA, 19 nt, Artificial Sequence
  Description of Artificial Sequence: Synthetic oligonucleotide
ccuuacgcugcuucccggg

SEQ ID NO: 1538003 - RNA, 19 nt, Artificial Sequence
  Description of Artificial Sequence: Synthetic oligonucleotide
ggaagaaccggcggcgcag

SEQ ID NO: 1538004 - RNA, 19 nt, Artificial Sequence
  Description of Artificial Sequence: Synthetic oligonucleotide
ugaggccgggguccuccag

SEQ ID NO: 1538005 - RNA, 19 nt, Artificial Sequence
  Description of Artificial Sequence: Synthetic oligonucleotide
uuggaagaucugcgaugaa

SEQ ID NO: 1538006 - RNA, 19 nt, Artificial Sequence
  Description of Artificial Sequence: Synthetic oligonucleotide
gugaaaaccggaguguuuu

SEQ ID NO: 1538007 - RNA, 19 nt, Artificial Sequence
  Description of Artificial Sequence: Synthetic oligonucleotide
ggacuugcccuugucgugc

SEQ ID NO: 1538008 - RNA, 19 nt, Artificial Sequence
  Description of Artificial Sequence: Synthetic oligonucleotide
caaccggagagcuuccucu

SEQ ID NO: 1538009 - RNA, 19 nt, Artificial Sequence
  Description of Artificial Sequence: Synthetic oligonucleotide
agcgagguucuggagguau

SEQ ID NO: 1538010 - RNA, 19 nt, Artificial Sequence
  Description of Artificial Sequence: Synthetic oligonucleotide
cgugucguggaugcgaggg

SEQ ID NO: 1538011 - RNA, 19 nt, Artificial Sequence
  Description of Artificial Sequence: Synthetic oligonucleotide
agugaaaaccggaguguuu

SEQ ID NO: 1538012 - RNA, 19 nt, Artificial Sequence
  Description of Artificial Sequence: Synthetic oligonucleotide
cugcccugcguuccgggac

SEQ ID NO: 1538013 - RNA, 19 nt, Artificial Sequence
  Description of Artificial Sequence: Synthetic oligonucleotide
cacugcgcguuugagccug

SEQ ID NO: 1538014 - RNA, 19 nt, Artificial Sequence
  Description of Artificial Sequence: Synthetic oligonucleotide
gcuucggggaugcguggcg

SEQ ID NO: 1538015 - RNA, 19 nt, Artificial Sequence
  Description of Artificial Sequence: Synthetic oligonucleotide
acgcaagugucccgcggga

SEQ ID NO: 1538016 - RNA, 19 nt, Artificial Sequence
  Description of Artificial Sequence: Synthetic oligonucleotide
ucccgcgggaagucagcug

SEQ ID NO: 1538017 - RNA, 19 nt, Artificial Sequence
  Description of Artificial Sequence: Synthetic oligonucleotide
ggaagucagcugcccugcg

SEQ ID NO: 1538018 - RNA, 19 nt, Artificial Sequence
  Description of Artificial Sequence: Synthetic oligonucleotide
ggcuccagcgagguucugg

SEQ ID NO: 1538019 - RNA, 19 nt, Artificial Sequence
  Description of Artificial Sequence: Synthetic oligonucleotide
uggaugcgagggccaggug

SEQ ID NO: 1538020 - RNA, 19 nt, Artificial Sequence
  Description of Artificial Sequence: Synthetic oligonucleotide
caggccacgcccagcugug

SEQ ID NO: 1538021 - RNA, 19 nt, Artificial Sequence
  Description of Artificial Sequence: Synthetic oligonucleotide
ggauuagccuuggacaaaa

SEQ ID NO: 1538022 - RNA, 19 nt, Artificial Sequence
  Description of Artificial Sequence: Synthetic oligonucleotide
gggacuucuguaggaauca

SEQ ID NO: 1538023 - RNA, 19 nt, Artificial Sequence
  Description of Artificial Sequence: Synthetic oligonucleotide
cccaaaccgcacagggugg

SEQ ID NO: 1538024 - RNA, 19 nt, Artificial Sequence
  Description of Artificial Sequence: Synthetic oligonucleotide
cccggguuugcuuuucuuc

SEQ ID NO: 1538025 - RNA, 19 nt, Artificial Sequence
  Description of Artificial Sequence: Synthetic oligonucleotide
ggacucugccuugaacaag

SEQ ID NO: 1538026 - RNA, 19 nt, Artificial Sequence
  Description of Artificial Sequence: Synthetic oligonucleotide
acacugcgcguuugagccu

SEQ ID NO: 1538027 - RNA, 19 nt, Artificial Sequence
  Description of Artificial Sequence: Synthetic oligonucleotide
augcgagggccagguggcc

SEQ ID NO: 1538028 - RNA, 19 nt, Artificial Sequence
  Description of Artificial Sequence: Synthetic oligonucleotide
caggcagaccuaguccuuc

SEQ ID NO: 1538029 - RNA, 19 nt, Artificial Sequence
  Description of Artificial Sequence: Synthetic oligonucleotide
ggacuucuguaggaaucag

SEQ ID NO: 1538030 - RNA, 19 nt, Artificial Sequence
  Description of Artificial Sequence: Synthetic oligonucleotide
ggaugcguggcgcguugcc

SEQ ID NO: 1538031 - RNA, 19 nt, Artificial Sequence
  Description of Artificial Sequence: Synthetic oligonucleotide
gaccuaguccuucgcuucu

SEQ ID NO: 1538032 - RNA, 19 nt, Artificial Sequence
  Description of Artificial Sequence: Synthetic oligonucleotide
aucugcgaugaaaguuuca

SEQ ID NO: 1538033 - RNA, 19 nt, Artificial Sequence
  Description of Artificial Sequence: Synthetic oligonucleotide
ucuuggcggcagcggucug

SEQ ID NO: 1538034 - RNA, 19 nt, Artificial Sequence
  Description of Artificial Sequence: Synthetic oligonucleotide
agugucccgcgggaaguca

SEQ ID NO: 1538035 - RNA, 19 nt, Artificial Sequence
  Description of Artificial Sequence: Synthetic oligonucleotide
gagugaaaaccggaguguu

SEQ ID NO: 1538036 - RNA, 19 nt, Artificial Sequence
  Description of Artificial Sequence: Synthetic oligonucleotide
cuaguccuucgcuucuucu

SEQ ID NO: 1538037 - RNA, 19 nt, Artificial Sequence
  Description of Artificial Sequence: Synthetic oligonucleotide
uccgggacucugccuugaa

SEQ ID NO: 1538038 - RNA, 19 nt, Artificial Sequence
  Description of Artificial Sequence: Synthetic oligonucleotide
uuccgacacugcgcguuug

SEQ ID NO: 1538039 - RNA, 19 nt, Artificial Sequence
  Description of Artificial Sequence: Synthetic oligonucleotide
gguuccggcgguggggcgg

SEQ ID NO: 1538040 - RNA, 19 nt, Artificial Sequence
  Description of Artificial Sequence: Synthetic oligonucleotide
gcggcgcaggucuuggaug

SEQ ID NO: 1538041 - RNA, 19 nt, Artificial Sequence
  Description of Artificial Sequence: Synthetic oligonucleotide
cgacacugcgcguuugagc

SEQ ID NO: 1538042 - RNA, 19 nt, Artificial Sequence
  Description of Artificial Sequence: Synthetic oligonucleotide
uuccgggacucugccuuga

SEQ ID NO: 1538043 - RNA, 19 nt, Artificial Sequence
  Description of Artificial Sequence: Synthetic oligonucleotide
gccgaaccagccuccgcag

SEQ ID NO: 1538044 - RNA, 19 nt, Artificial Sequence
  Description of Artificial Sequence: Synthetic oligonucleotide
cucccauagcaaugucuaa

SEQ ID NO: 1538045 - RNA, 19 nt, Artificial Sequence
  Description of Artificial Sequence: Synthetic oligonucleotide
gcaggcgcgcgugucgugg

SEQ ID NO: 1538046 - RNA, 19 nt, Artificial Sequence
  Description of Artificial Sequence: Synthetic oligonucleotide
ucggggaugcguggcgcgu

SEQ ID NO: 1538047 - RNA, 19 nt, Artificial Sequence
  Description of Artificial Sequence: Synthetic oligonucleotide
gggcugaucuuuguagguc

SEQ ID NO: 1538048 - RNA, 19 nt, Artificial Sequence
  Description of Artificial Sequence: Synthetic oligonucleotide
ccggaguguuuuacauagg

SEQ ID NO: 1538049 - RNA, 19 nt, Artificial Sequence
  Description of Artificial Sequence: Synthetic oligonucleotide
gcaaccggagagcuuccuc

SEQ ID NO: 1538050 - RNA, 19 nt, Artificial Sequence
  Description of Artificial Sequence: Synthetic oligonucleotide
aggacgcuccacugccgaa

SEQ ID NO: 1538051 - RNA, 19 nt, Artificial Sequence
  Description of Artificial Sequence: Synthetic oligonucleotide
accuccgagguagcucuga

SEQ ID NO: 1538052 - RNA, 19 nt, Artificial Sequence
  Description of Artificial Sequence: Synthetic oligonucleotide
acugcgcguuugagccugc

SEQ ID NO: 1538053 - RNA, 19 nt, Artificial Sequence
  Description of Artificial Sequence: Synthetic oligonucleotide
ggcggguuccggcgguggg

SEQ ID NO: 1538054 - RNA, 19 nt, Artificial Sequence
  Description of Artificial Sequence: Synthetic oligonucleotide
cugcgaugaaaguuucaau

SEQ ID NO: 1538055 - RNA, 19 nt, Artificial Sequence
  Description of Artificial Sequence: Synthetic oligonucleotide
ggacgcuccacugccgaac

SEQ ID NO: 1538056 - RNA, 19 nt, Artificial Sequence
  Description of Artificial Sequence: Synthetic oligonucleotide
ccacugccgaaccagccuc

SEQ ID NO: 1538057 - RNA, 19 nt, Artificial Sequence
  Description of Artificial Sequence: Synthetic oligonucleotide
cacggagcgcccgcaggag

SEQ ID NO: 1538058 - RNA, 19 nt, Artificial Sequence
  Description of Artificial Sequence: Synthetic oligonucleotide
ccggcgguggggcggagcg

SEQ ID NO: 1538059 - RNA, 19 nt, Artificial Sequence
  Description of Artificial Sequence: Synthetic oligonucleotide
cuucccggguuugcuuuuc

SEQ ID NO: 1538060 - RNA, 19 nt, Artificial Sequence
  Description of Artificial Sequence: Synthetic oligonucleotide
acgcuccacugccgaacca

SEQ ID NO: 1538061 - RNA, 19 nt, Artificial Sequence
  Description of Artificial Sequence: Synthetic oligonucleotide
ccaggacgcuccacugccg

SEQ ID NO: 1538062 - RNA, 19 nt, Artificial Sequence
  Description of Artificial Sequence: Synthetic oligonucleotide
cuuacgcugcuucccgggu

SEQ ID NO: 1538063 - RNA, 19 nt, Artificial Sequence
  Description of Artificial Sequence: Synthetic oligonucleotide
gggcaaaccccuuccucaa

SEQ ID NO: 1538064 - RNA, 19 nt, Artificial Sequence
  Description of Artificial Sequence: Synthetic oligonucleotide
gcccucaucgucugaccca

SEQ ID NO: 1538065 - RNA, 19 nt, Artificial Sequence
  Description of Artificial Sequence: Synthetic oligonucleotide
gcguuugagccugcggcug

SEQ ID NO: 1538066 - RNA, 19 nt, Artificial Sequence
  Description of Artificial Sequence: Synthetic oligonucleotide
cugcgcguuugagccugcg

SEQ ID NO: 1538067 - RNA, 19 nt, Artificial Sequence
  Description of Artificial Sequence: Synthetic oligonucleotide
ggggaugcguggcgcguug

SEQ ID NO: 1538068 - RNA, 19 nt, Artificial Sequence
  Description of Artificial Sequence: Synthetic oligonucleotide
gcuccacugccgaaccagc

SEQ ID NO: 1538069 - RNA, 19 nt, Artificial Sequence
  Description of Artificial Sequence: Synthetic oligonucleotide
caagugucccgcgggaagu

SEQ ID NO: 1538070 - RNA, 19 nt, Artificial Sequence
  Description of Artificial Sequence: Synthetic oligonucleotide
gcgugucguggaugcgagg

SEQ ID NO: 1538071 - RNA, 19 nt, Artificial Sequence
  Description of Artificial Sequence: Synthetic oligonucleotide
uggggcggcgcagguugga

SEQ ID NO: 1538072 - RNA, 19 nt, Artificial Sequence
  Description of Artificial Sequence: Synthetic oligonucleotide
gcggguuccggcggugggg

SEQ ID NO: 1538073 - RNA, 19 nt, Artificial Sequence
  Description of Artificial Sequence: Synthetic oligonucleotide
cgcgugucguggaugcgag

SEQ ID NO: 1538074 - RNA, 19 nt, Artificial Sequence
  Description of Artificial Sequence: Synthetic oligonucleotide
cagcugcccugcguuccgg

SEQ ID NO: 1538075 - RNA, 19 nt, Artificial Sequence
  Description of Artificial Sequence: Synthetic oligonucleotide
caccuccgagguagcucug

SEQ ID NO: 1538076 - RNA, 19 nt, Artificial Sequence
  Description of Artificial Sequence: Synthetic oligonucleotide
ccgaaccagccuccgcagc

SEQ ID NO: 1538077 - RNA, 19 nt, Artificial Sequence
  Description of Artificial Sequence: Synthetic oligonucleotide
ggcucccauagcaaugucu

SEQ ID NO: 1538078 - RNA, 19 nt, Artificial Sequence
  Description of Artificial Sequence: Synthetic oligonucleotide
gcgagguucuggagguaug

SEQ ID NO: 1538079 - RNA, 19 nt, Artificial Sequence
  Description of Artificial Sequence: Synthetic oligonucleotide
ccagcgagguucuggaggu

SEQ ID NO: 1538080 - RNA, 19 nt, Artificial Sequence
  Description of Artificial Sequence: Synthetic oligonucleotide
ccgggacucugccuugaac

SEQ ID NO: 1538081 - RNA, 19 nt, Artificial Sequence
  Description of Artificial Sequence: Synthetic oligonucleotide
ggggagagacaguuuggau

SEQ ID NO: 1538082 - RNA, 19 nt, Artificial Sequence
  Description of Artificial Sequence: Synthetic oligonucleotide
ggcaaaccccuuccucaaa

SEQ ID NO: 1538083 - RNA, 19 nt, Artificial Sequence
  Description of Artificial Sequence: Synthetic oligonucleotide
ccgacacugcgcguuugag

SEQ ID NO: 1538084 - RNA, 19 nt, Artificial Sequence
  Description of Artificial Sequence: Synthetic oligonucleotide
gcgccuccaacugugccuc

SEQ ID NO: 1538085 - RNA, 19 nt, Artificial Sequence
  Description of Artificial Sequence: Synthetic oligonucleotide
cccaggcguuuugaggggc

SEQ ID NO: 1538086 - RNA, 19 nt, Artificial Sequence
  Description of Artificial Sequence: Synthetic oligonucleotide
cagcugauguuccgacacu

SEQ ID NO: 1538087 - RNA, 19 nt, Artificial Sequence
  Description of Artificial Sequence: Synthetic oligonucleotide
aggcgcgcgugucguggau

SEQ ID NO: 1538088 - RNA, 19 nt, Artificial Sequence
  Description of Artificial Sequence: Synthetic oligonucleotide
cugcggcugagccccucca

SEQ ID NO: 1538089 - RNA, 19 nt, Artificial Sequence
  Description of Artificial Sequence: Synthetic oligonucleotide
cagcggucugggguuccug

SEQ ID NO: 1538090 - RNA, 19 nt, Artificial Sequence
  Description of Artificial Sequence: Synthetic oligonucleotide
gcgcaggucuuggauggac

SEQ ID NO: 1538091 - RNA, 19 nt, Artificial Sequence
  Description of Artificial Sequence: Synthetic oligonucleotide
acgcugcuucccggguuug

SEQ ID NO: 1538092 - RNA, 19 nt, Artificial Sequence
  Description of Artificial Sequence: Synthetic oligonucleotide
guuccggcgguggggcgga

SEQ ID NO: 1538093 - RNA, 19 nt, Artificial Sequence
  Description of Artificial Sequence: Synthetic oligonucleotide
caggcgcgcgugucgugga

SEQ ID NO: 1538094 - RNA, 19 nt, Artificial Sequence
  Description of Artificial Sequence: Synthetic oligonucleotide
ggcgcgcgugucguggaug

SEQ ID NO: 1538095 - RNA, 19 nt, Artificial Sequence
  Description of Artificial Sequence: Synthetic oligonucleotide
guuccgacacugcgcguuu

SEQ ID NO: 1538096 - RNA, 19 nt, Artificial Sequence
  Description of Artificial Sequence: Synthetic oligonucleotide
gcgcgugucguggaugcga

SEQ ID NO: 1538097 - RNA, 19 nt, Artificial Sequence
  Description of Artificial Sequence: Synthetic oligonucleotide
ccacggagcgcccgcagga

SEQ ID NO: 1538098 - RNA, 19 nt, Artificial Sequence
  Description of Artificial Sequence: Synthetic oligonucleotide
gggaugcguggcgcguugc

SEQ ID NO: 1538099 - RNA, 19 nt, Artificial Sequence
  Description of Artificial Sequence: Synthetic oligonucleotide
agggcggguuccggcggug

SEQ ID NO: 1538100 - RNA, 19 nt, Artificial Sequence
  Description of Artificial Sequence: Synthetic oligonucleotide
ccgcgggaagucagcugcc

SEQ ID NO: 1538101 - RNA, 19 nt, Artificial Sequence
  Description of Artificial Sequence: Synthetic oligonucleotide
gggcggguuccggcggugg

SEQ ID NO: 1538102 - RNA, 19 nt, Artificial Sequence
  Description of Artificial Sequence: Synthetic oligonucleotide
guaugaggccgggguccuc

SEQ ID NO: 1538103 - RNA, 19 nt, Artificial Sequence
  Description of Artificial Sequence: Synthetic oligonucleotide
gccgcgagggcggguuccg

SEQ ID NO: 1538104 - RNA, 19 nt, Artificial Sequence
  Description of Artificial Sequence: Synthetic oligonucleotide
ggcgcagguuggagaggag

SEQ ID NO: 1538105 - RNA, 19 nt, Artificial Sequence
  Description of Artificial Sequence: Synthetic oligonucleotide
gcguuuugaggggcugauc

SEQ ID NO: 1538106 - RNA, 19 nt, Artificial Sequence
  Description of Artificial Sequence: Synthetic oligonucleotide
gguaugaggccgggguccu

SEQ ID NO: 1538107 - RNA, 19 nt, Artificial Sequence
  Description of Artificial Sequence: Synthetic oligonucleotide
agcgcccgcaggagggcau

SEQ ID NO: 1538108 - RNA, 19 nt, Artificial Sequence
  Description of Artificial Sequence: Synthetic oligonucleotide
gucccgcgggaagucagcu

SEQ ID NO: 1538109 - RNA, 19 nt, Artificial Sequence
  Description of Artificial Sequence: Synthetic oligonucleotide
gcgggaagucagcugcccu

SEQ ID NO: 1538110 - RNA, 19 nt, Artificial Sequence
  Description of Artificial Sequence: Synthetic oligonucleotide
cccucaucgucugacccaa

SEQ ID NO: 1538111 - RNA, 19 nt, Artificial Sequence
  Description of Artificial Sequence: Synthetic oligonucleotide
cguggaugcgagggccagg

SEQ ID NO: 1538112 - RNA, 19 nt, Artificial Sequence
  Description of Artificial Sequence: Synthetic oligonucleotide
cgcgggaagucagcugccc

SEQ ID NO: 1538113 - RNA, 19 nt, Artificial Sequence
  Description of Artificial Sequence: Synthetic oligonucleotide
ggcguuuugaggggcugau

SEQ ID NO: 1538114 - RNA, 19 nt, Artificial Sequence
  Description of Artificial Sequence: Synthetic oligonucleotide
gccguggcucccauagcaa

SEQ ID NO: 1538115 - RNA, 19 nt, Artificial Sequence
  Description of Artificial Sequence: Synthetic oligonucleotide
uuccggcgguggggcggag

SEQ ID NO: 1538116 - RNA, 19 nt, Artificial Sequence
  Description of Artificial Sequence: Synthetic oligonucleotide
caugaccaaugugcaguuu

SEQ ID NO: 1538117 - RNA, 19 nt, Artificial Sequence
  Description of Artificial Sequence: Synthetic oligonucleotide
gggacccgagaggggaaaa

SEQ ID NO: 1538118 - RNA, 19 nt, Artificial Sequence
  Description of Artificial Sequence: Synthetic oligonucleotide
aaccggcggcgcaggucuu

SEQ ID NO: 1538119 - RNA, 19 nt, Artificial Sequence
  Description of Artificial Sequence: Synthetic oligonucleotide
gcggcagcggucugggguu

SEQ ID NO: 1538120 - RNA, 19 nt, Artificial Sequence
  Description of Artificial Sequence: Synthetic oligonucleotide
ccaggcguuuugaggggcu

SEQ ID NO: 1538121 - RNA, 19 nt, Artificial Sequence
  Description of Artificial Sequence: Synthetic oligonucleotide
ggacaccuccgagguagcu

SEQ ID NO: 1538122 - RNA, 19 nt, Artificial Sequence
  Description of Artificial Sequence: Synthetic oligonucleotide
cgcguuugagccugcggcu

SEQ ID NO: 1538123 - RNA, 19 nt, Artificial Sequence
  Description of Artificial Sequence: Synthetic oligonucleotide
guggccgcgagggcggguu

SEQ ID NO: 1538124 - RNA, 19 nt, Artificial Sequence
  Description of Artificial Sequence: Synthetic oligonucleotide
cgcugcuucccggguuugc

SEQ ID NO: 1538125 - RNA, 19 nt, Artificial Sequence
  Description of Artificial Sequence: Synthetic oligonucleotide
gcgcguugccguggcuccc

SEQ ID NO: 1538126 - RNA, 19 nt, Artificial Sequence
  Description of Artificial Sequence: Synthetic oligonucleotide
gcgcccgcaggagggcaug

SEQ ID NO: 1538127 - RNA, 19 nt, Artificial Sequence
  Description of Artificial Sequence: Synthetic oligonucleotide
ccaaaccgcacaggguggu

SEQ ID NO: 1538128 - RNA, 19 nt, Artificial Sequence
  Description of Artificial Sequence: Synthetic oligonucleotide
gcguuccgggacucugccu

SEQ ID NO: 1538129 - RNA, 19 nt, Artificial Sequence
  Description of Artificial Sequence: Synthetic oligonucleotide
cagcgagguucuggaggua

SEQ ID NO: 1538130 - RNA, 19 nt, Artificial Sequence
  Description of Artificial Sequence: Synthetic oligonucleotide
ccuccgagguagcucugau

SEQ ID NO: 1538131 - RNA, 19 nt, Artificial Sequence
  Description of Artificial Sequence: Synthetic oligonucleotide
ccucaucgucugacccaaa

SEQ ID NO: 1538132 - RNA, 19 nt, Artificial Sequence
  Description of Artificial Sequence: Synthetic oligonucleotide
ccuccacggagcgcccgca

SEQ ID NO: 1538133 - RNA, 19 nt, Artificial Sequence
  Description of Artificial Sequence: Synthetic oligonucleotide
cgcaagugucccgcgggaa

SEQ ID NO: 1538134 - RNA, 19 nt, Artificial Sequence
  Description of Artificial Sequence: Synthetic oligonucleotide
gccgcucgcucugggacuu

SEQ ID NO: 1538135 - RNA, 19 nt, Artificial Sequence
  Description of Artificial Sequence: Synthetic oligonucleotide
gcguugccguggcucccau

SEQ ID NO: 1538136 - RNA, 19 nt, Artificial Sequence
  Description of Artificial Sequence: Synthetic oligonucleotide
cguugccguggcucccaua

SEQ ID NO: 1538137 - RNA, 19 nt, Artificial Sequence
  Description of Artificial Sequence: Synthetic oligonucleotide
gguggccgcgagggcgggu

SEQ ID NO: 1538138 - RNA, 19 nt, Artificial Sequence
  Description of Artificial Sequence: Synthetic oligonucleotide
cggggaugcguggcgcguu

SEQ ID NO: 1538139 - RNA, 19 nt, Artificial Sequence
  Description of Artificial Sequence: Synthetic oligonucleotide
aauaaguucaucuuuguca

SEQ ID NO: 1538140 - RNA, 19 nt, Artificial Sequence
  Description of Artificial Sequence: Synthetic oligonucleotide
auuaaauacccugagaacc

SEQ ID NO: 1538141 - RNA, 19 nt, Artificial Sequence
  Description of Artificial Sequence: Synthetic oligonucleotide
uacuacaauaaacacaagg

SEQ ID NO: 1538142 - RNA, 19 nt, Artificial Sequence
  Description of Artificial Sequence: Synthetic oligonucleotide
uauuuaauaacagacaaca

SEQ ID NO: 1538143 - RNA, 19 nt, Artificial Sequence
  Description of Artificial Sequence: Synthetic oligonucleotide
uuaauaacagacaacaguc

SEQ ID NO: 1538144 - RNA, 19 nt, Artificial Sequence
  Description of Artificial Sequence: Synthetic oligonucleotide
uaugauguauuucugaaug

SEQ ID NO: 1538145 - RNA, 19 nt, Artificial Sequence
  Description of Artificial Sequence: Synthetic oligonucleotide
gagaacacuaaucugaaag

SEQ ID NO: 1538146 - RNA, 19 nt, Artificial Sequence
  Description of Artificial Sequence: Synthetic oligonucleotide
uggaacuagaauuauaggc

SEQ ID NO: 1538147 - RNA, 19 nt, Artificial Sequence
  Description of Artificial Sequence: Synthetic oligonucleotide
uguaaaagggaucucaacu

SEQ ID NO: 1538148 - RNA, 19 nt, Artificial Sequence
  Description of Artificial Sequence: Synthetic oligonucleotide
acugugugaauuuauguac

SEQ ID NO: 1538149 - RNA, 19 nt, Artificial Sequence
  Description of Artificial Sequence: Synthetic oligonucleotide
uuuacuuugagaaagucuu

SEQ ID NO: 1538150 - RNA, 19 nt, Artificial Sequence
  Description of Artificial Sequence: Synthetic oligonucleotide
uguaauuuaaaucuccuua

SEQ ID NO: 1538151 - RNA, 19 nt, Artificial Sequence
  Description of Artificial Sequence: Synthetic oligonucleotide
cauagcuucagcuaaaaug

SEQ ID NO: 1538152 - RNA, 19 nt, Artificial Sequence
  Description of Artificial Sequence: Synthetic oligonucleotide
uccucuguuaguuucaagg

SEQ ID NO: 1538153 - RNA, 19 nt, Artificial Sequence
  Description of Artificial Sequence: Synthetic oligonucleotide
aaauacaaguagauaauac

SEQ ID NO: 1538154 - RNA, 19 nt, Artificial Sequence
  Description of Artificial Sequence: Synthetic oligonucleotide
ucuguugugaucuucaccu

SEQ ID NO: 1538155 - RNA, 19 nt, Artificial Sequence
  Description of Artificial Sequence: Synthetic oligonucleotide
aaguucaucuuugucaagc

SEQ ID NO: 1538156 - RNA, 19 nt, Artificial Sequence
  Description of Artificial Sequence: Synthetic oligonucleotide
aagucuguaacgcaaaggu

SEQ ID NO: 1538157 - RNA, 19 nt, Artificial Sequence
  Description of Artificial Sequence: Synthetic oligonucleotide
auauaugaaagauaaacau

SEQ ID NO: 1538158 - RNA, 19 nt, Artificial Sequence
  Description of Artificial Sequence: Synthetic oligonucleotide
aaccaucugauaugggugc

SEQ ID NO: 1538159 - RNA, 19 nt, Artificial Sequence
  Description of Artificial Sequence: Synthetic oligonucleotide
caugaucuuacaaauauac

SEQ ID NO: 1538160 - RNA, 19 nt, Artificial Sequence
  Description of Artificial Sequence: Synthetic oligonucleotide
gugaagaguguuuugagcg

SEQ ID NO: 1538161 - RNA, 19 nt, Artificial Sequence
  Description of Artificial Sequence: Synthetic oligonucleotide
aauuauaggccuuugugaa

SEQ ID NO: 1538162 - RNA, 19 nt, Artificial Sequence
  Description of Artificial Sequence: Synthetic oligonucleotide
auaacaaguucaucgcugc

SEQ ID NO: 1538163 - RNA, 19 nt, Artificial Sequence
  Description of Artificial Sequence: Synthetic oligonucleotide
ucuuacauaaagcucacaa

SEQ ID NO: 1538164 - RNA, 19 nt, Artificial Sequence
  Description of Artificial Sequence: Synthetic oligonucleotide
aguauuuaauaacagacaa

SEQ ID NO: 1538165 - RNA, 19 nt, Artificial Sequence
  Description of Artificial Sequence: Synthetic oligonucleotide
cuugccaguauauacauac

SEQ ID NO: 1538166 - RNA, 19 nt, Artificial Sequence
  Description of Artificial Sequence: Synthetic oligonucleotide
uauaacaaguucaucgcug

SEQ ID NO: 1538167 - RNA, 19 nt, Artificial Sequence
  Description of Artificial Sequence: Synthetic oligonucleotide
agaauuauaggccuuugug

SEQ ID NO: 1538168 - RNA, 19 nt, Artificial Sequence
  Description of Artificial Sequence: Synthetic oligonucleotide
uuucccuauaacaaguuca

SEQ ID NO: 1538169 - RNA, 19 nt, Artificial Sequence
  Description of Artificial Sequence: Synthetic oligonucleotide
guagauaauacuuuuacaa

SEQ ID NO: 1538170 - RNA, 19 nt, Artificial Sequence
  Description of Artificial Sequence: Synthetic oligonucleotide
ucuccuuacuuuuauaucu

SEQ ID NO: 1538171 - RNA, 19 nt, Artificial Sequence
  Description of Artificial Sequence: Synthetic oligonucleotide
augagaauaacaauuauca

SEQ ID NO: 1538172 - RNA, 19 nt, Artificial Sequence
  Description of Artificial Sequence: Synthetic oligonucleotide
aauuuaaaucuccuuacuu

SEQ ID NO: 1538173 - RNA, 19 nt, Artificial Sequence
  Description of Artificial Sequence: Synthetic oligonucleotide
uccucaaaagucuguaacg

SEQ ID NO: 1538174 - RNA, 19 nt, Artificial Sequence
  Description of Artificial Sequence: Synthetic oligonucleotide
ugggauacagaucuuggag

SEQ ID NO: 1538175 - RNA, 19 nt, Artificial Sequence
  Description of Artificial Sequence: Synthetic oligonucleotide
uacccugagaaccaaagug

SEQ ID NO: 1538176 - RNA, 19 nt, Artificial Sequence
  Description of Artificial Sequence: Synthetic oligonucleotide
acuaauguguaauuuaaau

SEQ ID NO: 1538177 - RNA, 19 nt, Artificial Sequence
  Description of Artificial Sequence: Synthetic oligonucleotide
uuaaauacccugagaacca

SEQ ID NO: 1538178 - RNA, 19 nt, Artificial Sequence
  Description of Artificial Sequence: Synthetic oligonucleotide
aguguuuugagcgagugag

SEQ ID NO: 1538179 - RNA, 19 nt, Artificial Sequence
  Description of Artificial Sequence: Synthetic oligonucleotide
aaagagguacuggacauuc

SEQ ID NO: 1538180 - RNA, 19 nt, Artificial Sequence
  Description of Artificial Sequence: Synthetic oligonucleotide
uauaugaaagauaaacauu

SEQ ID NO: 1538181 - RNA, 19 nt, Artificial Sequence
  Description of Artificial Sequence: Synthetic oligonucleotide
agaucuuggagacaggugu

SEQ ID NO: 1538182 - RNA, 19 nt, Artificial Sequence
  Description of Artificial Sequence: Synthetic oligonucleotide
aauaacagacaacagucua

SEQ ID NO: 1538183 - RNA, 19 nt, Artificial Sequence
  Description of Artificial Sequence: Synthetic oligonucleotide
uuauaugauguauuucuga

SEQ ID NO: 1538184 - RNA, 19 nt, Artificial Sequence
  Description of Artificial Sequence: Synthetic oligonucleotide
aucuuacaaauauacauga

SEQ ID NO: 1538185 - RNA, 19 nt, Artificial Sequence
  Description of Artificial Sequence: Synthetic oligonucleotide
guaauuuaaaucuccuuac

SEQ ID NO: 1538186 - RNA, 19 nt, Artificial Sequence
  Description of Artificial Sequence: Synthetic oligonucleotide
ugaaccaucugauaugggu

SEQ ID NO: 1538187 - RNA, 19 nt, Artificial Sequence
  Description of Artificial Sequence: Synthetic oligonucleotide
uuccuagacaauugcaagg

SEQ ID NO: 1538188 - RNA, 19 nt, Artificial Sequence
  Description of Artificial Sequence: Synthetic oligonucleotide
uagacaauugcaaggguca

SEQ ID NO: 1538189 - RNA, 19 nt, Artificial Sequence
  Description of Artificial Sequence: Synthetic oligonucleotide
uucacacuaaugcacauaa

SEQ ID NO: 1538190 - RNA, 19 nt, Artificial Sequence
  Description of Artificial Sequence: Synthetic oligonucleotide
gaauuauaggccuuuguga

SEQ ID NO: 1538191 - RNA, 19 nt, Artificial Sequence
  Description of Artificial Sequence: Synthetic oligonucleotide
ucagcuaaaaugccguuga

SEQ ID NO: 1538192 - RNA, 19 nt, Artificial Sequence
  Description of Artificial Sequence: Synthetic oligonucleotide
acuacaauaaacacaagga

SEQ ID NO: 1538193 - RNA, 19 nt, Artificial Sequence
  Description of Artificial Sequence: Synthetic oligonucleotide
agaauaacaauuaucauuu

SEQ ID NO: 1538194 - RNA, 19 nt, Artificial Sequence
  Description of Artificial Sequence: Synthetic oligonucleotide
uuccaauuuacuacaauaa

SEQ ID NO: 1538195 - RNA, 19 nt, Artificial Sequence
  Description of Artificial Sequence: Synthetic oligonucleotide
ucacggagaacacuaaucu

SEQ ID NO: 1538196 - RNA, 19 nt, Artificial Sequence
  Description of Artificial Sequence: Synthetic oligonucleotide
ucuguuaguuucaagggaa

SEQ ID NO: 1538197 - RNA, 19 nt, Artificial Sequence
  Description of Artificial Sequence: Synthetic oligonucleotide
aaagucuguaacgcaaagg

SEQ ID NO: 1538198 - RNA, 19 nt, Artificial Sequence
  Description of Artificial Sequence: Synthetic oligonucleotide
caugagaauaacaauuauc

SEQ ID NO: 1538199 - RNA, 19 nt, Artificial Sequence
  Description of Artificial Sequence: Synthetic oligonucleotide
uguguaauuuaaaucuccu

SEQ ID NO: 1538200 - RNA, 19 nt, Artificial Sequence
  Description of Artificial Sequence: Synthetic oligonucleotide
aagaacuuggcacacgcau

SEQ ID NO: 1538201 - RNA, 19 nt, Artificial Sequence
  Description of Artificial Sequence: Synthetic oligonucleotide
uacgcagaucaacagcucg

SEQ ID NO: 1538202 - RNA, 19 nt, Artificial Sequence
  Description of Artificial Sequence: Synthetic oligonucleotide
uuuggaugcaccuuccaga

SEQ ID NO: 1538203 - RNA, 19 nt, Artificial Sequence
  Description of Artificial Sequence: Synthetic oligonucleotide
aacugugugaauuuaugua

SEQ ID NO: 1538204 - RNA, 19 nt, Artificial Sequence
  Description of Artificial Sequence: Synthetic oligonucleotide
auuccuagacaauugcaag

SEQ ID NO: 1538205 - RNA, 19 nt, Artificial Sequence
  Description of Artificial Sequence: Synthetic oligonucleotide
aaacccagcgcaugacggc

SEQ ID NO: 1538206 - RNA, 19 nt, Artificial Sequence
  Description of Artificial Sequence: Synthetic oligonucleotide
ugccaguauauacauacug

SEQ ID NO: 1538207 - RNA, 19 nt, Artificial Sequence
  Description of Artificial Sequence: Synthetic oligonucleotide
uguauuucugaauggacau

SEQ ID NO: 1538208 - RNA, 19 nt, Artificial Sequence
  Description of Artificial Sequence: Synthetic oligonucleotide
cccuauaacaaguucaucg

SEQ ID NO: 1538209 - RNA, 19 nt, Artificial Sequence
  Description of Artificial Sequence: Synthetic oligonucleotide
uuauaggccuuugugaacc

SEQ ID NO: 1538210 - RNA, 19 nt, Artificial Sequence
  Description of Artificial Sequence: Synthetic oligonucleotide
agauaaacauuacaaaaua

SEQ ID NO: 1538211 - RNA, 19 nt, Artificial Sequence
  Description of Artificial Sequence: Synthetic oligonucleotide
auaugaaagauaaacauua

SEQ ID NO: 1538212 - RNA, 19 nt, Artificial Sequence
  Description of Artificial Sequence: Synthetic oligonucleotide
augaaagauaaacauuaca

SEQ ID NO: 1538213 - RNA, 19 nt, Artificial Sequence
  Description of Artificial Sequence: Synthetic oligonucleotide
uccuuagggacuaaugugu

SEQ ID NO: 1538214 - RNA, 19 nt, Artificial Sequence
  Description of Artificial Sequence: Synthetic oligonucleotide
ucauuuguagaauccuaag

SEQ ID NO: 1538215 - RNA, 19 nt, Artificial Sequence
  Description of Artificial Sequence: Synthetic oligonucleotide
auacaaauuuacuuugaga

SEQ ID NO: 1538216 - RNA, 19 nt, Artificial Sequence
  Description of Artificial Sequence: Synthetic oligonucleotide
uccuagacaauugcaaggg

SEQ ID NO: 1538217 - RNA, 19 nt, Artificial Sequence
  Description of Artificial Sequence: Synthetic oligonucleotide
caccauaugcuguaggugc

SEQ ID NO: 1538218 - RNA, 19 nt, Artificial Sequence
  Description of Artificial Sequence: Synthetic oligonucleotide
auauacaugagaauaacaa

SEQ ID NO: 1538219 - RNA, 19 nt, Artificial Sequence
  Description of Artificial Sequence: Synthetic oligonucleotide
cuaaucugaaagaggcugg

SEQ ID NO: 1538220 - RNA, 19 nt, Artificial Sequence
  Description of Artificial Sequence: Synthetic oligonucleotide
cuaagaacuuggcacacgc

SEQ ID NO: 1538221 - RNA, 19 nt, Artificial Sequence
  Description of Artificial Sequence: Synthetic oligonucleotide
agagguacuggacauucuc

SEQ ID NO: 1538222 - RNA, 19 nt, Artificial Sequence
  Description of Artificial Sequence: Synthetic oligonucleotide
auuauaggccuuugugaac

SEQ ID NO: 1538223 - RNA, 19 nt, Artificial Sequence
  Description of Artificial Sequence: Synthetic oligonucleotide
aguagauaauacuuuuaca

SEQ ID NO: 1538224 - RNA, 19 nt, Artificial Sequence
  Description of Artificial Sequence: Synthetic oligonucleotide
augauguauuucugaaugg

SEQ ID NO: 1538225 - RNA, 19 nt, Artificial Sequence
  Description of Artificial Sequence: Synthetic oligonucleotide
agagcaguaaacacugagc

SEQ ID NO: 1538226 - RNA, 19 nt, Artificial Sequence
  Description of Artificial Sequence: Synthetic oligonucleotide
aacgcaaaggucuugcauu

SEQ ID NO: 1538227 - RNA, 19 nt, Artificial Sequence
  Description of Artificial Sequence: Synthetic oligonucleotide
accaaaguggaucacauuu

SEQ ID NO: 1538228 - RNA, 19 nt, Artificial Sequence
  Description of Artificial Sequence: Synthetic oligonucleotide
ugagugucggcaaagcgcu

SEQ ID NO: 1538229 - RNA, 19 nt, Artificial Sequence
  Description of Artificial Sequence: Synthetic oligonucleotide
uagauaauacuuuuacaau

SEQ ID NO: 1538230 - RNA, 19 nt, Artificial Sequence
  Description of Artificial Sequence: Synthetic oligonucleotide
aucaacagcucgguaaacc

SEQ ID NO: 1538231 - RNA, 19 nt, Artificial Sequence
  Description of Artificial Sequence: Synthetic oligonucleotide
uaugaaagauaaacauuac

SEQ ID NO: 1538232 - RNA, 19 nt, Artificial Sequence
  Description of Artificial Sequence: Synthetic oligonucleotide
uucaucgcugcagauauag

SEQ ID NO: 1538233 - RNA, 19 nt, Artificial Sequence
  Description of Artificial Sequence: Synthetic oligonucleotide
ucugcaagagcaguaaaca

SEQ ID NO: 1538234 - RNA, 19 nt, Artificial Sequence
  Description of Artificial Sequence: Synthetic oligonucleotide
uguagaauccuaagcauuu

SEQ ID NO: 1538235 - RNA, 19 nt, Artificial Sequence
  Description of Artificial Sequence: Synthetic oligonucleotide
auacagaucuuggagacag

SEQ ID NO: 1538236 - RNA, 19 nt, Artificial Sequence
  Description of Artificial Sequence: Synthetic oligonucleotide
ugagaaccaaaguggauca

SEQ ID NO: 1538237 - RNA, 19 nt, Artificial Sequence
  Description of Artificial Sequence: Synthetic oligonucleotide
uuuaguggacucaaauuau

SEQ ID NO: 1538238 - RNA, 19 nt, Artificial Sequence
  Description of Artificial Sequence: Synthetic oligonucleotide
aggauauuuuccaauuuac

SEQ ID NO: 1538239 - RNA, 19 nt, Artificial Sequence
  Description of Artificial Sequence: Synthetic oligonucleotide
ggaacuagaauuauaggcc

SEQ ID NO: 1538240 - RNA, 19 nt, Artificial Sequence
  Description of Artificial Sequence: Synthetic oligonucleotide
uguugugaucuucaccuug

SEQ ID NO: 1538241 - RNA, 19 nt, Artificial Sequence
  Description of Artificial Sequence: Synthetic oligonucleotide
guaaaagggaucucaacuc

SEQ ID NO: 1538242 - RNA, 19 nt, Artificial Sequence
  Description of Artificial Sequence: Synthetic oligonucleotide
uuaguuucaagggaagaac

SEQ ID NO: 1538243 - RNA, 19 nt, Artificial Sequence
  Description of Artificial Sequence: Synthetic oligonucleotide
aauggacaugaucuuacaa

SEQ ID NO: 1538244 - RNA, 19 nt, Artificial Sequence
  Description of Artificial Sequence: Synthetic oligonucleotide
uacaaguagauaauacuuu

SEQ ID NO: 1538245 - RNA, 19 nt, Artificial Sequence
  Description of Artificial Sequence: Synthetic oligonucleotide
aaaagagaggaagccugac

SEQ ID NO: 1538246 - RNA, 19 nt, Artificial Sequence
  Description of Artificial Sequence: Synthetic oligonucleotide
uguuuugagcgagugagug

SEQ ID NO: 1538247 - RNA, 19 nt, Artificial Sequence
  Description of Artificial Sequence: Synthetic oligonucleotide
uggacaugaucuuacaaau

SEQ ID NO: 1538248 - RNA, 19 nt, Artificial Sequence
  Description of Artificial Sequence: Synthetic oligonucleotide
uggauuccuagacaauugc

SEQ ID NO: 1538249 - RNA, 19 nt, Artificial Sequence
  Description of Artificial Sequence: Synthetic oligonucleotide
cuagacaauugcaaggguc

SEQ ID NO: 1538250 - RNA, 19 nt, Artificial Sequence
  Description of Artificial Sequence: Synthetic oligonucleotide
aguucaucgcugcagauau

SEQ ID NO: 1538251 - RNA, 19 nt, Artificial Sequence
  Description of Artificial Sequence: Synthetic oligonucleotide
gagaauaacaauuaucauu

SEQ ID NO: 1538252 - RNA, 19 nt, Artificial Sequence
  Description of Artificial Sequence: Synthetic oligonucleotide
agugagugucggcaaagcg

SEQ ID NO: 1538253 - RNA, 19 nt, Artificial Sequence
  Description of Artificial Sequence: Synthetic oligonucleotide
uauguacaccauaugcugu

SEQ ID NO: 1538254 - RNA, 19 nt, Artificial Sequence
  Description of Artificial Sequence: Synthetic oligonucleotide
ucuugcauuuugugaagag

SEQ ID NO: 1538255 - RNA, 19 nt, Artificial Sequence
  Description of Artificial Sequence: Synthetic oligonucleotide
agcucgguaaacccagcgc

SEQ ID NO: 1538256 - RNA, 19 nt, Artificial Sequence
  Description of Artificial Sequence: Synthetic oligonucleotide
ccaauuuacuacaauaaac

SEQ ID NO: 1538257 - RNA, 19 nt, Artificial Sequence
  Description of Artificial Sequence: Synthetic oligonucleotide
ugggacacauccucaaaag

SEQ ID NO: 1538258 - RNA, 19 nt, Artificial Sequence
  Description of Artificial Sequence: Synthetic oligonucleotide
cauaacugucuguaacucc

SEQ ID NO: 1538259 - RNA, 19 nt, Artificial Sequence
  Description of Artificial Sequence: Synthetic oligonucleotide
uagaauccuaagcauuuac

SEQ ID NO: 1538260 - RNA, 19 nt, Artificial Sequence
  Description of Artificial Sequence: Synthetic oligonucleotide
uucagucccaauuugguuu

SEQ ID NO: 1538261 - RNA, 19 nt, Artificial Sequence
  Description of Artificial Sequence: Synthetic oligonucleotide
cuuuaguggacucaaauua

SEQ ID NO: 1538262 - RNA, 19 nt, Artificial Sequence
  Description of Artificial Sequence: Synthetic oligonucleotide
ucuguaaaagggaucucaa

SEQ ID NO: 1538263 - RNA, 19 nt, Artificial Sequence
  Description of Artificial Sequence: Synthetic oligonucleotide
uacaccauaugcuguaggu

SEQ ID NO: 1538264 - RNA, 19 nt, Artificial Sequence
  Description of Artificial Sequence: Synthetic oligonucleotide
uuuugagcgagugaguguc

SEQ ID NO: 1538265 - RNA, 19 nt, Artificial Sequence
  Description of Artificial Sequence: Synthetic oligonucleotide
uguaacgcaaaggucuugc

SEQ ID NO: 1538266 - RNA, 19 nt, Artificial Sequence
  Description of Artificial Sequence: Synthetic oligonucleotide
acaaguagauaauacuuuu

SEQ ID NO: 1538267 - RNA, 19 nt, Artificial Sequence
  Description of Artificial Sequence: Synthetic oligonucleotide
uaacagacaacagucuaug

SEQ ID NO: 1538268 - RNA, 19 nt, Artificial Sequence
  Description of Artificial Sequence: Synthetic oligonucleotide
aggucuugcauuuugugaa

SEQ ID NO: 1538269 - RNA, 19 nt, Artificial Sequence
  Description of Artificial Sequence: Synthetic oligonucleotide
auacaugagaauaacaauu

SEQ ID NO: 1538270 - RNA, 19 nt, Artificial Sequence
  Description of Artificial Sequence: Synthetic oligonucleotide
aagcauuuacaaaacugug

SEQ ID NO: 1538271 - RNA, 19 nt, Artificial Sequence
  Description of Artificial Sequence: Synthetic oligonucleotide
caucgcugcagauauaguc

SEQ ID NO: 1538272 - RNA, 19 nt, Artificial Sequence
  Description of Artificial Sequence: Synthetic oligonucleotide
guaaacccagcgcaugacg

SEQ ID NO: 1538273 - RNA, 19 nt, Artificial Sequence
  Description of Artificial Sequence: Synthetic oligonucleotide
acacgcaucacggagaaca

SEQ ID NO: 1538274 - RNA, 19 nt, Artificial Sequence
  Description of Artificial Sequence: Synthetic oligonucleotide
uaucauuuguagaauccua

SEQ ID NO: 1538275 - RNA, 19 nt, Artificial Sequence
  Description of Artificial Sequence: Synthetic oligonucleotide
acaacagucuaugaaguca

SEQ ID NO: 1538276 - RNA, 19 nt, Artificial Sequence
  Description of Artificial Sequence: Synthetic oligonucleotide
uuuugugaagaguguuuug

SEQ ID NO: 1538277 - RNA, 19 nt, Artificial Sequence
  Description of Artificial Sequence: Synthetic oligonucleotide
aacccagcgcaugacggcc

SEQ ID NO: 1538278 - RNA, 19 nt, Artificial Sequence
  Description of Artificial Sequence: Synthetic oligonucleotide
ugagaauaacaauuaucau

SEQ ID NO: 1538279 - RNA, 19 nt, Artificial Sequence
  Description of Artificial Sequence: Synthetic oligonucleotide
caacagucuaugaagucac

SEQ ID NO: 1538280 - RNA, 19 nt, Artificial Sequence
  Description of Artificial Sequence: Synthetic oligonucleotide
uaguggacucaaauuauuc

SEQ ID NO: 1538281 - RNA, 19 nt, Artificial Sequence
  Description of Artificial Sequence: Synthetic oligonucleotide
ugcauuuugugaagagugu

SEQ ID NO: 1538282 - RNA, 19 nt, Artificial Sequence
  Description of Artificial Sequence: Synthetic oligonucleotide
cacacuaaugcacauaaaa

SEQ ID NO: 1538283 - RNA, 19 nt, Artificial Sequence
  Description of Artificial Sequence: Synthetic oligonucleotide
aacagcucgguaaacccag

SEQ ID NO: 1538284 - RNA, 19 nt, Artificial Sequence
  Description of Artificial Sequence: Synthetic oligonucleotide
gcaguaaacacugagccag

SEQ ID NO: 1538285 - RNA, 19 nt, Artificial Sequence
  Description of Artificial Sequence: Synthetic oligonucleotide
uuguagaauccuaagcauu

SEQ ID NO: 1538286 - RNA, 19 nt, Artificial Sequence
  Description of Artificial Sequence: Synthetic oligonucleotide
uucaggauauuuuccaauu

SEQ ID NO: 1538287 - RNA, 19 nt, Artificial Sequence
  Description of Artificial Sequence: Synthetic oligonucleotide
ugaagaguguuuugagcga

SEQ ID NO: 1538288 - RNA, 19 nt, Artificial Sequence
  Description of Artificial Sequence: Synthetic oligonucleotide
augcuguaggugcucaggg

SEQ ID NO: 1538289 - RNA, 19 nt, Artificial Sequence
  Description of Artificial Sequence: Synthetic oligonucleotide
aucacggagaacacuaauc

SEQ ID NO: 1538290 - RNA, 19 nt, Artificial Sequence
  Description of Artificial Sequence: Synthetic oligonucleotide
acccugagaaccaaagugg

SEQ ID NO: 1538291 - RNA, 19 nt, Artificial Sequence
  Description of Artificial Sequence: Synthetic oligonucleotide
uuuacaaaacugugugaau

SEQ ID NO: 1538292 - RNA, 19 nt, Artificial Sequence
  Description of Artificial Sequence: Synthetic oligonucleotide
uucccuauaacaaguucau

SEQ ID NO: 1538293 - RNA, 19 nt, Artificial Sequence
  Description of Artificial Sequence: Synthetic oligonucleotide
uacaaaacugugugaauuu

SEQ ID NO: 1538294 - RNA, 19 nt, Artificial Sequence
  Description of Artificial Sequence: Synthetic oligonucleotide
uuagggacuaauguguaau

SEQ ID NO: 1538295 - RNA, 19 nt, Artificial Sequence
  Description of Artificial Sequence: Synthetic oligonucleotide
ccuauaacaaguucaucgc

SEQ ID NO: 1538296 - RNA, 19 nt, Artificial Sequence
  Description of Artificial Sequence: Synthetic oligonucleotide
gcuaaaaugccguugaucu

SEQ ID NO: 1538297 - RNA, 19 nt, Artificial Sequence
  Description of Artificial Sequence: Synthetic oligonucleotide
aacagacaacagucuauga

SEQ ID NO: 1538298 - RNA, 19 nt, Artificial Sequence
  Description of Artificial Sequence: Synthetic oligonucleotide
auaugauguauuucugaau

SEQ ID NO: 1538299 - RNA, 19 nt, Artificial Sequence
  Description of Artificial Sequence: Synthetic oligonucleotide
aaagaggcuggaugucuca

SEQ ID NO: 1538300 - RNA, 19 nt, Artificial Sequence
  Description of Artificial Sequence: Synthetic oligonucleotide
aaccaggguucucugcaag

SEQ ID NO: 1538301 - RNA, 19 nt, Artificial Sequence
  Description of Artificial Sequence: Synthetic oligonucleotide
gcaacagaggccuacgcag

SEQ ID NO: 1538302 - RNA, 19 nt, Artificial Sequence
  Description of Artificial Sequence: Synthetic oligonucleotide
caugacggccucaaacacc

SEQ ID NO: 1538303 - RNA, 19 nt, Artificial Sequence
  Description of Artificial Sequence: Synthetic oligonucleotide
gauuccuagacaauugcaa

SEQ ID NO: 1538304 - RNA, 19 nt, Artificial Sequence
  Description of Artificial Sequence: Synthetic oligonucleotide
guauuuaauaacagacaac

SEQ ID NO: 1538305 - RNA, 19 nt, Artificial Sequence
  Description of Artificial Sequence: Synthetic oligonucleotide
uaacgcaaaggucuugcau

SEQ ID NO: 1538306 - RNA, 19 nt, Artificial Sequence
  Description of Artificial Sequence: Synthetic oligonucleotide
caugcugggacacauccuc

SEQ ID NO: 1538307 - RNA, 19 nt, Artificial Sequence
  Description of Artificial Sequence: Synthetic oligonucleotide
agaacuucuuuaguggacu

SEQ ID NO: 1538308 - RNA, 19 nt, Artificial Sequence
  Description of Artificial Sequence: Synthetic oligonucleotide
uuaguggacucaaauuauu

SEQ ID NO: 1538309 - RNA, 19 nt, Artificial Sequence
  Description of Artificial Sequence: Synthetic oligonucleotide
uguuaguuucaagggaaga

SEQ ID NO: 1538310 - RNA, 19 nt, Artificial Sequence
  Description of Artificial Sequence: Synthetic oligonucleotide
caaagcgcuggauuccuag

SEQ ID NO: 1538311 - RNA, 19 nt, Artificial Sequence
  Description of Artificial Sequence: Synthetic oligonucleotide
agcauuuacaaaacugugu

SEQ ID NO: 1538312 - RNA, 19 nt, Artificial Sequence
  Description of Artificial Sequence: Synthetic oligonucleotide
cuuacauaaagcucacaaa

SEQ ID NO: 1538313 - RNA, 19 nt, Artificial Sequence
  Description of Artificial Sequence: Synthetic oligonucleotide
caccuucacacuaaugcac

SEQ ID NO: 1538314 - RNA, 19 nt, Artificial Sequence
  Description of Artificial Sequence: Synthetic oligonucleotide
cuggauuccuagacaauug

SEQ ID NO: 1538315 - RNA, 19 nt, Artificial Sequence
  Description of Artificial Sequence: Synthetic oligonucleotide
gugagugucggcaaagcgc

SEQ ID NO: 1538316 - RNA, 19 nt, Artificial Sequence
  Description of Artificial Sequence: Synthetic oligonucleotide
ugaaagaggcuggaugucu

SEQ ID NO: 1538317 - RNA, 19 nt, Artificial Sequence
  Description of Artificial Sequence: Synthetic oligonucleotide
cuggaugucucaaagaggu

SEQ ID NO: 1538318 - RNA, 19 nt, Artificial Sequence
  Description of Artificial Sequence: Synthetic oligonucleotide
agguguuggauucucugga

SEQ ID NO: 1538319 - RNA, 19 nt, Artificial Sequence
  Description of Artificial Sequence: Synthetic oligonucleotide
ucucuuacauaaagcucac

SEQ ID NO: 1538320 - RNA, 19 nt, Artificial Sequence
  Description of Artificial Sequence: Synthetic oligonucleotide
agcuucagcuaaaaugccg

SEQ ID NO: 1538321 - RNA, 19 nt, Artificial Sequence
  Description of Artificial Sequence: Synthetic oligonucleotide
acaugagaauaacaauuau

SEQ ID NO: 1538322 - RNA, 19 nt, Artificial Sequence
  Description of Artificial Sequence: Synthetic oligonucleotide
ccaguauauacauacugac

SEQ ID NO: 1538323 - RNA, 19 nt, Artificial Sequence
  Description of Artificial Sequence: Synthetic oligonucleotide
aaaucuccuuacuuuuaua

SEQ ID NO: 1538324 - RNA, 19 nt, Artificial Sequence
  Description of Artificial Sequence: Synthetic oligonucleotide
guacaccauaugcuguagg

SEQ ID NO: 1538325 - RNA, 19 nt, Artificial Sequence
  Description of Artificial Sequence: Synthetic oligonucleotide
ggauacagaucuuggagac

SEQ ID NO: 1538326 - RNA, 19 nt, Artificial Sequence
  Description of Artificial Sequence: Synthetic oligonucleotide
caucugauaugggugcugg

SEQ ID NO: 1538327 - RNA, 19 nt, Artificial Sequence
  Description of Artificial Sequence: Synthetic oligonucleotide
agaaccaaaguggaucaca

SEQ ID NO: 1538328 - RNA, 19 nt, Artificial Sequence
  Description of Artificial Sequence: Synthetic oligonucleotide
aacuucuuuaguggacuca

SEQ ID NO: 1538329 - RNA, 19 nt, Artificial Sequence
  Description of Artificial Sequence: Synthetic oligonucleotide
ugauaugggugcugggagu

SEQ ID NO: 1538330 - RNA, 19 nt, Artificial Sequence
  Description of Artificial Sequence: Synthetic oligonucleotide
gcaagggucaagcugcucc

SEQ ID NO: 1538331 - RNA, 19 nt, Artificial Sequence
  Description of Artificial Sequence: Synthetic oligonucleotide
uuacuacaauaaacacaag

SEQ ID NO: 1538332 - RNA, 19 nt, Artificial Sequence
  Description of Artificial Sequence: Synthetic oligonucleotide
agugucggcaaagcgcugg

SEQ ID NO: 1538333 - RNA, 19 nt, Artificial Sequence
  Description of Artificial Sequence: Synthetic oligonucleotide
ugaucuucaccuugccagu

SEQ ID NO: 1538334 - RNA, 19 nt, Artificial Sequence
  Description of Artificial Sequence: Synthetic oligonucleotide
agucaaaccaggguucucu

SEQ ID NO: 1538335 - RNA, 19 nt, Artificial Sequence
  Description of Artificial Sequence: Synthetic oligonucleotide
cuuucccuauaacaaguuc

SEQ ID NO: 1538336 - RNA, 19 nt, Artificial Sequence
  Description of Artificial Sequence: Synthetic oligonucleotide
ccucuguuaguuucaaggg

SEQ ID NO: 1538337 - RNA, 19 nt, Artificial Sequence
  Description of Artificial Sequence: Synthetic oligonucleotide
uugagcgagugagugucgg

SEQ ID NO: 1538338 - RNA, 19 nt, Artificial Sequence
  Description of Artificial Sequence: Synthetic oligonucleotide
uaaucugaaagaggcugga

SEQ ID NO: 1538339 - RNA, 19 nt, Artificial Sequence
  Description of Artificial Sequence: Synthetic oligonucleotide
acagaucuuggagacaggu

SEQ ID NO: 1538340 - RNA, 19 nt, Artificial Sequence
  Description of Artificial Sequence: Synthetic oligonucleotide
agucuguaacgcaaagguc

SEQ ID NO: 1538341 - RNA, 19 nt, Artificial Sequence
  Description of Artificial Sequence: Synthetic oligonucleotide
uugugaucuucaccuugcc

SEQ ID NO: 1538342 - RNA, 19 nt, Artificial Sequence
  Description of Artificial Sequence: Synthetic oligonucleotide
cuaaaaugccguugaucuc

SEQ ID NO: 1538343 - RNA, 19 nt, Artificial Sequence
  Description of Artificial Sequence: Synthetic oligonucleotide
uguacaccauaugcuguag

SEQ ID NO: 1538344 - RNA, 19 nt, Artificial Sequence
  Description of Artificial Sequence: Synthetic oligonucleotide
aucgcugcagauauaguca

SEQ ID NO: 1538345 - RNA, 19 nt, Artificial Sequence
  Description of Artificial Sequence: Synthetic oligonucleotide
auacccugagaaccaaagu

SEQ ID NO: 1538346 - RNA, 19 nt, Artificial Sequence
  Description of Artificial Sequence: Synthetic oligonucleotide
gaauggacaugaucuuaca

SEQ ID NO: 1538347 - RNA, 19 nt, Artificial Sequence
  Description of Artificial Sequence: Synthetic oligonucleotide
acuggacauucucuguugu

SEQ ID NO: 1538348 - RNA, 19 nt, Artificial Sequence
  Description of Artificial Sequence: Synthetic oligonucleotide
auaacagacaacagucuau

SEQ ID NO: 1538349 - RNA, 19 nt, Artificial Sequence
  Description of Artificial Sequence: Synthetic oligonucleotide
agaguguuuugagcgagug

SEQ ID NO: 1538350 - RNA, 19 nt, Artificial Sequence
  Description of Artificial Sequence: Synthetic oligonucleotide
agacaacagucuaugaagu

SEQ ID NO: 1538351 - RNA, 19 nt, Artificial Sequence
  Description of Artificial Sequence: Synthetic oligonucleotide
uacaccaccuccugggaua

SEQ ID NO: 1538352 - RNA, 19 nt, Artificial Sequence
  Description of Artificial Sequence: Synthetic oligonucleotide
uuacuuugagaaagucuuu

SEQ ID NO: 1538353 - RNA, 19 nt, Artificial Sequence
  Description of Artificial Sequence: Synthetic oligonucleotide
uugccaguauauacauacu

SEQ ID NO: 1538354 - RNA, 19 nt, Artificial Sequence
  Description of Artificial Sequence: Synthetic oligonucleotide
aucugauaugggugcuggg

SEQ ID NO: 1538355 - RNA, 19 nt, Artificial Sequence
  Description of Artificial Sequence: Synthetic oligonucleotide
caugcaacagaggccuacg

SEQ ID NO: 1538356 - RNA, 19 nt, Artificial Sequence
  Description of Artificial Sequence: Synthetic oligonucleotide
auucucuguugugaucuuc

SEQ ID NO: 1538357 - RNA, 19 nt, Artificial Sequence
  Description of Artificial Sequence: Synthetic oligonucleotide
auaugcuguaggugcucag

SEQ ID NO: 1538358 - RNA, 19 nt, Artificial Sequence
  Description of Artificial Sequence: Synthetic oligonucleotide
cagaucuuggagacaggug

SEQ ID NO: 1538359 - RNA, 19 nt, Artificial Sequence
  Description of Artificial Sequence: Synthetic oligonucleotide
aaguucaucgcugcagaua

SEQ ID NO: 1538360 - RNA, 19 nt, Artificial Sequence
  Description of Artificial Sequence: Synthetic oligonucleotide
auguacaccauaugcugua

SEQ ID NO: 1538361 - RNA, 19 nt, Artificial Sequence
  Description of Artificial Sequence: Synthetic oligonucleotide
cauuccauagcuucagcua

SEQ ID NO: 1538362 - RNA, 19 nt, Artificial Sequence
  Description of Artificial Sequence: Synthetic oligonucleotide
ucuucaccuugccaguaua

SEQ ID NO: 1538363 - RNA, 19 nt, Artificial Sequence
  Description of Artificial Sequence: Synthetic oligonucleotide
acaccauaugcuguaggug

SEQ ID NO: 1538364 - RNA, 19 nt, Artificial Sequence
  Description of Artificial Sequence: Synthetic oligonucleotide
gaucucaacuccucuguua

SEQ ID NO: 1538365 - RNA, 19 nt, Artificial Sequence
  Description of Artificial Sequence: Synthetic oligonucleotide
ucaugcaacagaggccuac

SEQ ID NO: 1538366 - RNA, 19 nt, Artificial Sequence
  Description of Artificial Sequence: Synthetic oligonucleotide
cuuugucaagcucaagaaa

SEQ ID NO: 1538367 - RNA, 19 nt, Artificial Sequence
  Description of Artificial Sequence: Synthetic oligonucleotide
gacggccucaaacaccauc

SEQ ID NO: 1538368 - RNA, 19 nt, Artificial Sequence
  Description of Artificial Sequence: Synthetic oligonucleotide
aaccaaaguggaucacauu

SEQ ID NO: 1538369 - RNA, 19 nt, Artificial Sequence
  Description of Artificial Sequence: Synthetic oligonucleotide
agcgcuggauuccuagaca

SEQ ID NO: 1538370 - RNA, 19 nt, Artificial Sequence
  Description of Artificial Sequence: Synthetic oligonucleotide
acgcagaucaacagcucgg

SEQ ID NO: 1538371 - RNA, 19 nt, Artificial Sequence
  Description of Artificial Sequence: Synthetic oligonucleotide
ccucaaaagucuguaacgc

SEQ ID NO: 1538372 - RNA, 19 nt, Artificial Sequence
  Description of Artificial Sequence: Synthetic oligonucleotide
cuagaauuauaggccuuug

SEQ ID NO: 1538373 - RNA, 19 nt, Artificial Sequence
  Description of Artificial Sequence: Synthetic oligonucleotide
uuccauagcuucagcuaaa

SEQ ID NO: 1538374 - RNA, 19 nt, Artificial Sequence
  Description of Artificial Sequence: Synthetic oligonucleotide
agaggaagccugacgugcg

SEQ ID NO: 1538375 - RNA, 19 nt, Artificial Sequence
  Description of Artificial Sequence: Synthetic oligonucleotide
cagcucgguaaacccagcg

SEQ ID NO: 1538376 - RNA, 19 nt, Artificial Sequence
  Description of Artificial Sequence: Synthetic oligonucleotide
uauaggccuuugugaacca

SEQ ID NO: 1538377 - RNA, 19 nt, Artificial Sequence
  Description of Artificial Sequence: Synthetic oligonucleotide
gguguacaccaccuccugg

SEQ ID NO: 1538378 - RNA, 19 nt, Artificial Sequence
  Description of Artificial Sequence: Synthetic oligonucleotide
caagcugcuccucuaagaa

SEQ ID NO: 1538379 - RNA, 19 nt, Artificial Sequence
  Description of Artificial Sequence: Synthetic oligonucleotide
gauucucuggaacuagaau

SEQ ID NO: 1538380 - RNA, 19 nt, Artificial Sequence
  Description of Artificial Sequence: Synthetic oligonucleotide
aaucugaaagaggcuggau

SEQ ID NO: 1538381 - RNA, 19 nt, Artificial Sequence
  Description of Artificial Sequence: Synthetic oligonucleotide
agaaagucuuuuauaugau

SEQ ID NO: 1538382 - RNA, 19 nt, Artificial Sequence
  Description of Artificial Sequence: Synthetic oligonucleotide
cagucuaugaagucacaaa

SEQ ID NO: 1538383 - RNA, 19 nt, Artificial Sequence
  Description of Artificial Sequence: Synthetic oligonucleotide
cacauggcagcucauaacu

SEQ ID NO: 1538384 - RNA, 19 nt, Artificial Sequence
  Description of Artificial Sequence: Synthetic oligonucleotide
acggccucaaacaccaucu

SEQ ID NO: 1538385 - RNA, 19 nt, Artificial Sequence
  Description of Artificial Sequence: Synthetic oligonucleotide
guggacucaaauuauucau

SEQ ID NO: 1538386 - RNA, 19 nt, Artificial Sequence
  Description of Artificial Sequence: Synthetic oligonucleotide
ucgguaaacccagcgcaug

SEQ ID NO: 1538387 - RNA, 19 nt, Artificial Sequence
  Description of Artificial Sequence: Synthetic oligonucleotide
ccugacgugcgucaggagc

SEQ ID NO: 1538388 - RNA, 19 nt, Artificial Sequence
  Description of Artificial Sequence: Synthetic oligonucleotide
gaguguuuugagcgaguga

SEQ ID NO: 1538389 - RNA, 19 nt, Artificial Sequence
  Description of Artificial Sequence: Synthetic oligonucleotide
ucaucgcugcagauauagu

SEQ ID NO: 1538390 - RNA, 19 nt, Artificial Sequence
  Description of Artificial Sequence: Synthetic oligonucleotide
agguguacaccaccuccug

SEQ ID NO: 1538391 - RNA, 19 nt, Artificial Sequence
  Description of Artificial Sequence: Synthetic oligonucleotide
acuuccuggcucuguaaaa

SEQ ID NO: 1538392 - RNA, 19 nt, Artificial Sequence
  Description of Artificial Sequence: Synthetic oligonucleotide
gaggccuacgcagaucaac

SEQ ID NO: 1538393 - RNA, 19 nt, Artificial Sequence
  Description of Artificial Sequence: Synthetic oligonucleotide
ggacucaaauuauucauua

SEQ ID NO: 1538394 - RNA, 19 nt, Artificial Sequence
  Description of Artificial Sequence: Synthetic oligonucleotide
aaaaugccguugaucucca

SEQ ID NO: 1538395 - RNA, 19 nt, Artificial Sequence
  Description of Artificial Sequence: Synthetic oligonucleotide
uagggacuaauguguaauu

SEQ ID NO: 1538396 - RNA, 19 nt, Artificial Sequence
  Description of Artificial Sequence: Synthetic oligonucleotide
ggucuugcauuuugugaag

SEQ ID NO: 1538397 - RNA, 19 nt, Artificial Sequence
  Description of Artificial Sequence: Synthetic oligonucleotide
gacuaauguguaauuuaaa

SEQ ID NO: 1538398 - RNA, 19 nt, Artificial Sequence
  Description of Artificial Sequence: Synthetic oligonucleotide
gagugagugucggcaaagc

SEQ ID NO: 1538399 - RNA, 19 nt, Artificial Sequence
  Description of Artificial Sequence: Synthetic oligonucleotide
uucaccuugccaguauaua

SEQ ID NO: 1538400 - RNA, 19 nt, Artificial Sequence
  Description of Artificial Sequence: Synthetic oligonucleotide
cugggauacagaucuugga

SEQ ID NO: 1538401 - RNA, 19 nt, Artificial Sequence
  Description of Artificial Sequence: Synthetic oligonucleotide
accuucacacuaaugcaca

SEQ ID NO: 1538402 - RNA, 19 nt, Artificial Sequence
  Description of Artificial Sequence: Synthetic oligonucleotide
acgcaaaggucuugcauuu

SEQ ID NO: 1538403 - RNA, 19 nt, Artificial Sequence
  Description of Artificial Sequence: Synthetic oligonucleotide
gcucgguaaacccagcgca

SEQ ID NO: 1538404 - RNA, 19 nt, Artificial Sequence
  Description of Artificial Sequence: Synthetic oligonucleotide
gugcgucaggagcucaugc

SEQ ID NO: 1538405 - RNA, 19 nt, Artificial Sequence
  Description of Artificial Sequence: Synthetic oligonucleotide
gagcgagugagugucggca

SEQ ID NO: 1538406 - RNA, 19 nt, Artificial Sequence
  Description of Artificial Sequence: Synthetic oligonucleotide
gaagccugacgugcgucag

SEQ ID NO: 1538407 - RNA, 19 nt, Artificial Sequence
  Description of Artificial Sequence: Synthetic oligonucleotide
aaauacccugagaaccaaa

SEQ ID NO: 1538408 - RNA, 19 nt, Artificial Sequence
  Description of Artificial Sequence: Synthetic oligonucleotide
gggacuaauguguaauuua

SEQ ID NO: 1538409 - RNA, 19 nt, Artificial Sequence
  Description of Artificial Sequence: Synthetic oligonucleotide
cuauaacaaguucaucgcu

SEQ ID NO: 1538410 - RNA, 19 nt, Artificial Sequence
  Description of Artificial Sequence: Synthetic oligonucleotide
cucuaagaacuuggcacac

SEQ ID NO: 1538411 - RNA, 19 nt, Artificial Sequence
  Description of Artificial Sequence: Synthetic oligonucleotide
cagauauagucaauaaguu

SEQ ID NO: 1538412 - RNA, 19 nt, Artificial Sequence
  Description of Artificial Sequence: Synthetic oligonucleotide
agccuggagacagguguac

SEQ ID NO: 1538413 - RNA, 19 nt, Artificial Sequence
  Description of Artificial Sequence: Synthetic oligonucleotide
guaacgcaaaggucuugca

SEQ ID NO: 1538414 - RNA, 19 nt, Artificial Sequence
  Description of Artificial Sequence: Synthetic oligonucleotide
agacaggugugcaccauca

SEQ ID NO: 1538415 - RNA, 19 nt, Artificial Sequence
  Description of Artificial Sequence: Synthetic oligonucleotide
agggacuaauguguaauuu

SEQ ID NO: 1538416 - RNA, 19 nt, Artificial Sequence
  Description of Artificial Sequence: Synthetic oligonucleotide
cucuuucccuauaacaagu

SEQ ID NO: 1538417 - RNA, 19 nt, Artificial Sequence
  Description of Artificial Sequence: Synthetic oligonucleotide
aggaagccugacgugcguc

SEQ ID NO: 1538418 - RNA, 19 nt, Artificial Sequence
  Description of Artificial Sequence: Synthetic oligonucleotide
gccaguauauacauacuga

SEQ ID NO: 1538419 - RNA, 19 nt, Artificial Sequence
  Description of Artificial Sequence: Synthetic oligonucleotide
aggccuacgcagaucaaca

SEQ ID NO: 1538420 - RNA, 19 nt, Artificial Sequence
  Description of Artificial Sequence: Synthetic oligonucleotide
agaggcuggaugucucaaa

SEQ ID NO: 1538421 - RNA, 19 nt, Artificial Sequence
  Description of Artificial Sequence: Synthetic oligonucleotide
ucacuuccuggcucuguaa

SEQ ID NO: 1538422 - RNA, 19 nt, Artificial Sequence
  Description of Artificial Sequence: Synthetic oligonucleotide
cuacgcagaucaacagcuc

SEQ ID NO: 1538423 - RNA, 19 nt, Artificial Sequence
  Description of Artificial Sequence: Synthetic oligonucleotide
gccuacgcagaucaacagc

SEQ ID NO: 1538424 - RNA, 19 nt, Artificial Sequence
  Description of Artificial Sequence: Synthetic oligonucleotide
cuucaugcugggacacauc

SEQ ID NO: 1538425 - RNA, 19 nt, Artificial Sequence
  Description of Artificial Sequence: Synthetic oligonucleotide
aggccagagguguuggauu

SEQ ID NO: 1538426 - RNA, 19 nt, Artificial Sequence
  Description of Artificial Sequence: Synthetic oligonucleotide
gucaagcucaagaaauucu

SEQ ID NO: 1538427 - RNA, 19 nt, Artificial Sequence
  Description of Artificial Sequence: Synthetic oligonucleotide
acagcucgguaaacccagc

SEQ ID NO: 1538428 - RNA, 19 nt, Artificial Sequence
  Description of Artificial Sequence: Synthetic oligonucleotide
agcgagugagugucggcaa

SEQ ID NO: 1538429 - RNA, 19 nt, Artificial Sequence
  Description of Artificial Sequence: Synthetic oligonucleotide
guuuugagcgagugagugu

SEQ ID NO: 1538430 - RNA, 19 nt, Artificial Sequence
  Description of Artificial Sequence: Synthetic oligonucleotide
cuugcauuuugugaagagu

SEQ ID NO: 1538431 - RNA, 19 nt, Artificial Sequence
  Description of Artificial Sequence: Synthetic oligonucleotide
cugaaagaggcuggauguc

SEQ ID NO: 1538432 - RNA, 19 nt, Artificial Sequence
  Description of Artificial Sequence: Synthetic oligonucleotide
gugaaccaucugauauggg

SEQ ID NO: 1538433 - RNA, 19 nt, Artificial Sequence
  Description of Artificial Sequence: Synthetic oligonucleotide
cauccucaaaagucuguaa

SEQ ID NO: 1538434 - RNA, 19 nt, Artificial Sequence
  Description of Artificial Sequence: Synthetic oligonucleotide
accauaugcuguaggugcu

SEQ ID NO: 1538435 - RNA, 19 nt, Artificial Sequence
  Description of Artificial Sequence: Synthetic oligonucleotide
ucccuauaacaaguucauc

SEQ ID NO: 1538436 - RNA, 19 nt, Artificial Sequence
  Description of Artificial Sequence: Synthetic oligonucleotide
gagaaccaaaguggaucac

SEQ ID NO: 1538437 - RNA, 19 nt, Artificial Sequence
  Description of Artificial Sequence: Synthetic oligonucleotide
gcgcaugacggccucaaac

SEQ ID NO: 1538438 - RNA, 19 nt, Artificial Sequence
  Description of Artificial Sequence: Synthetic oligonucleotide
agccugacgugcgucagga

SEQ ID NO: 1538439 - RNA, 19 nt, Artificial Sequence
  Description of Artificial Sequence: Synthetic oligonucleotide
cugacgugcgucaggagcu

SEQ ID NO: 1538440 - RNA, 19 nt, Artificial Sequence
  Description of Artificial Sequence: Synthetic oligonucleotide
cauaugcuguaggugcuca

SEQ ID NO: 1538441 - RNA, 19 nt, Artificial Sequence
  Description of Artificial Sequence: Synthetic oligonucleotide
ggauuccuagacaauugca

SEQ ID NO: 1538442 - RNA, 19 nt, Artificial Sequence
  Description of Artificial Sequence: Synthetic oligonucleotide
ggccuacgcagaucaacag

SEQ ID NO: 1538443 - RNA, 19 nt, Artificial Sequence
  Description of Artificial Sequence: Synthetic oligonucleotide
gcaugacggccucaaacac

SEQ ID NO: 1538444 - RNA, 19 nt, Artificial Sequence
  Description of Artificial Sequence: Synthetic oligonucleotide
ccuccugggauacagaucu

SEQ ID NO: 1538445 - RNA, 19 nt, Artificial Sequence
  Description of Artificial Sequence: Synthetic oligonucleotide
agacaauugcaagggucaa

SEQ ID NO: 1538446 - RNA, 19 nt, Artificial Sequence
  Description of Artificial Sequence: Synthetic oligonucleotide
aggauauaugaaagauaaa

SEQ ID NO: 1538447 - RNA, 19 nt, Artificial Sequence
  Description of Artificial Sequence: Synthetic oligonucleotide
ggccagagguguuggauuc

SEQ ID NO: 1538448 - RNA, 19 nt, Artificial Sequence
  Description of Artificial Sequence: Synthetic oligonucleotide
cacuuccuggcucuguaaa

SEQ ID NO: 1538449 - RNA, 19 nt, Artificial Sequence
  Description of Artificial Sequence: Synthetic oligonucleotide
ccuacgcagaucaacagcu

SEQ ID NO: 1538450 - RNA, 19 nt, Artificial Sequence
  Description of Artificial Sequence: Synthetic oligonucleotide
accaucugauaugggugcu

SEQ ID NO: 1538451 - RNA, 19 nt, Artificial Sequence
  Description of Artificial Sequence: Synthetic oligonucleotide
cagcucauaacugucugua

SEQ ID NO: 1538452 - RNA, 19 nt, Artificial Sequence
  Description of Artificial Sequence: Synthetic oligonucleotide
cacugguuauuuuaauuuu

SEQ ID NO: 1538453 - RNA, 19 nt, Artificial Sequence
  Description of Artificial Sequence: Synthetic oligonucleotide
gguaaacccagcgcaugac

SEQ ID NO: 1538454 - RNA, 19 nt, Artificial Sequence
  Description of Artificial Sequence: Synthetic oligonucleotide
gguguuggauucucuggaa

SEQ ID NO: 1538455 - RNA, 19 nt, Artificial Sequence
  Description of Artificial Sequence: Synthetic oligonucleotide
guagaauccuaagcauuua

SEQ ID NO: 1538456 - RNA, 19 nt, Artificial Sequence
  Description of Artificial Sequence: Synthetic oligonucleotide
cugggagucaaaccagggu

SEQ ID NO: 1538457 - RNA, 19 nt, Artificial Sequence
  Description of Artificial Sequence: Synthetic oligonucleotide
acgcaucacggagaacacu

SEQ ID NO: 1538458 - RNA, 19 nt, Artificial Sequence
  Description of Artificial Sequence: Synthetic oligonucleotide
cagguguacaccaccuccu

SEQ ID NO: 1538459 - RNA, 19 nt, Artificial Sequence
  Description of Artificial Sequence: Synthetic oligonucleotide
gggaucucaacuccucugu

SEQ ID NO: 1538460 - RNA, 19 nt, Artificial Sequence
  Description of Artificial Sequence: Synthetic oligonucleotide
gagucaaaccaggguucuc

SEQ ID NO: 1538461 - RNA, 19 nt, Artificial Sequence
  Description of Artificial Sequence: Synthetic oligonucleotide
cuucagucccaauuugguu

SEQ ID NO: 1538462 - RNA, 19 nt, Artificial Sequence
  Description of Artificial Sequence: Synthetic oligonucleotide
gcuucagcuaaaaugccgu

SEQ ID NO: 1538463 - RNA, 19 nt, Artificial Sequence
  Description of Artificial Sequence: Synthetic oligonucleotide
gucggcaaagcgcuggauu

SEQ ID NO: 1538464 - RNA, 19 nt, Artificial Sequence
  Description of Artificial Sequence: Synthetic oligonucleotide
caauugcaagggucaagcu

SEQ ID NO: 1538465 - RNA, 19 nt, Artificial Sequence
  Description of Artificial Sequence: Synthetic oligonucleotide
cgcaugacggccucaaaca

SEQ ID NO: 1538466 - RNA, 19 nt, Artificial Sequence
  Description of Artificial Sequence: Synthetic oligonucleotide
cuucaccuugccaguauau

SEQ ID NO: 1538467 - RNA, 19 nt, Artificial Sequence
  Description of Artificial Sequence: Synthetic oligonucleotide
gugucggcaaagcgcugga

SEQ ID NO: 1538468 - RNA, 19 nt, Artificial Sequence
  Description of Artificial Sequence: Synthetic oligonucleotide
gcgucaggagcucaugcaa

SEQ ID NO: 1538469 - RNA, 19 nt, Artificial Sequence
  Description of Artificial Sequence: Synthetic oligonucleotide
ugacgugcgucaggagcuc

SEQ ID NO: 1538470 - RNA, 19 nt, Artificial Sequence
  Description of Artificial Sequence: Synthetic oligonucleotide
cucuuacauaaagcucaca

SEQ ID NO: 1538471 - RNA, 19 nt, Artificial Sequence
  Description of Artificial Sequence: Synthetic oligonucleotide
ugucggcaaagcgcuggau

SEQ ID NO: 1538472 - RNA, 19 nt, Artificial Sequence
  Description of Artificial Sequence: Synthetic oligonucleotide
gaggaagccugacgugcgu

SEQ ID NO: 1538473 - RNA, 19 nt, Artificial Sequence
  Description of Artificial Sequence: Synthetic oligonucleotide
caucacggagaacacuaau

SEQ ID NO: 1538474 - RNA, 19 nt, Artificial Sequence
  Description of Artificial Sequence: Synthetic oligonucleotide
ggacauucucuguugugau

SEQ ID NO: 1538475 - RNA, 19 nt, Artificial Sequence
  Description of Artificial Sequence: Synthetic oligonucleotide
gagugucggcaaagcgcug

SEQ ID NO: 1538476 - RNA, 19 nt, Artificial Sequence
  Description of Artificial Sequence: Synthetic oligonucleotide
guacaccaccuccugggau

SEQ ID NO: 1538477 - RNA, 19 nt, Artificial Sequence
  Description of Artificial Sequence: Synthetic oligonucleotide
acccacauggcagcucaua

SEQ ID NO: 1538478 - RNA, 19 nt, Artificial Sequence
  Description of Artificial Sequence: Synthetic oligonucleotide
cucgguaaacccagcgcau

SEQ ID NO: 1538479 - RNA, 19 nt, Artificial Sequence
  Description of Artificial Sequence: Synthetic oligonucleotide
ccuaagcauuuacaaaacu

SEQ ID NO: 1538480 - RNA, 19 nt, Artificial Sequence
  Description of Artificial Sequence: Synthetic oligonucleotide
gcacacgcaucacggagaa

SEQ ID NO: 1538481 - RNA, 19 nt, Artificial Sequence
  Description of Artificial Sequence: Synthetic oligonucleotide
gacgugcgucaggagcuca

SEQ ID NO: 1538482 - RNA, 19 nt, Artificial Sequence
  Description of Artificial Sequence: Synthetic oligonucleotide
caaguucaucgcugcagau

SEQ ID NO: 1538483 - RNA, 19 nt, Artificial Sequence
  Description of Artificial Sequence: Synthetic oligonucleotide
ccuuagggacuaaugugua

SEQ ID NO: 1538484 - RNA, 19 nt, Artificial Sequence
  Description of Artificial Sequence: Synthetic oligonucleotide
cuucagcuaaaaugccguu

SEQ ID NO: 1538485 - RNA, 19 nt, Artificial Sequence
  Description of Artificial Sequence: Synthetic oligonucleotide
guguuuugagcgagugagu

SEQ ID NO: 1538486 - RNA, 19 nt, Artificial Sequence
  Description of Artificial Sequence: Synthetic oligonucleotide
ugacggccucaaacaccau

SEQ ID NO: 1538487 - RNA, 19 nt, Artificial Sequence
  Description of Artificial Sequence: Synthetic oligonucleotide
cagagguguuggauucucu

SEQ ID NO: 1538488 - RNA, 19 nt, Artificial Sequence
  Description of Artificial Sequence: Synthetic oligonucleotide
cgagugagugucggcaaag

SEQ ID NO: 1538489 - RNA, 19 nt, Artificial Sequence
  Description of Artificial Sequence: Synthetic oligonucleotide
ccagagguguuggauucuc

SEQ ID NO: 1538490 - RNA, 19 nt, Artificial Sequence
  Description of Artificial Sequence: Synthetic oligonucleotide
ccauaugcuguaggugcuc

SEQ ID NO: 1538491 - RNA, 19 nt, Artificial Sequence
  Description of Artificial Sequence: Synthetic oligonucleotide
acgugcgucaggagcucau

SEQ ID NO: 1538492 - RNA, 19 nt, Artificial Sequence
  Description of Artificial Sequence: Synthetic oligonucleotide
ccaaaguggaucacauuuu

SEQ ID NO: 1538493 - RNA, 19 nt, Artificial Sequence
  Description of Artificial Sequence: Synthetic oligonucleotide
cacacgcaucacggagaac

SEQ ID NO: 1538494 - RNA, 19 nt, Artificial Sequence
  Description of Artificial Sequence: Synthetic oligonucleotide
gcgagugagugucggcaaa

SEQ ID NO: 1538495 - RNA, 19 nt, Artificial Sequence
  Description of Artificial Sequence: Synthetic oligonucleotide
cucaugcaacagaggccua

SEQ ID NO: 1538496 - RNA, 19 nt, Artificial Sequence
  Description of Artificial Sequence: Synthetic oligonucleotide
gccugacgugcgucaggag

SEQ ID NO: 1538497 - RNA, 19 nt, Artificial Sequence
  Description of Artificial Sequence: Synthetic oligonucleotide
caaagagguacuggacauu

SEQ ID NO: 1538498 - RNA, 19 nt, Artificial Sequence
  Description of Artificial Sequence: Synthetic oligonucleotide
agaggccuacgcagaucaa

SEQ ID NO: 1538499 - RNA, 19 nt, Artificial Sequence
  Description of Artificial Sequence: Synthetic oligonucleotide
ggaucucaacuccucuguu

SEQ ID NO: 1538500 - RNA, 19 nt, Artificial Sequence
  Description of Artificial Sequence: Synthetic oligonucleotide
cgguaaacccagcgcauga

SEQ ID NO: 1538501 - RNA, 19 nt, Artificial Sequence
  Description of Artificial Sequence: Synthetic oligonucleotide
cagcuaaaaugccguugau

SEQ ID NO: 1538502 - RNA, 19 nt, Artificial Sequence
  Description of Artificial Sequence: Synthetic oligonucleotide
guucaucgcugcagauaua

SEQ ID NO: 1538503 - RNA, 19 nt, Artificial Sequence
  Description of Artificial Sequence: Synthetic oligonucleotide
cgugcgucaggagcucaug

SEQ ID NO: 1538504 - RNA, 19 nt, Artificial Sequence
  Description of Artificial Sequence: Synthetic oligonucleotide
ccauagcuucagcuaaaau

SEQ ID NO: 1538505 - RNA, 19 nt, Artificial Sequence
  Description of Artificial Sequence: Synthetic oligonucleotide
ggagacaggugugcaccau

SEQ ID NO: 1538506 - RNA, 19 nt, Artificial Sequence
  Description of Artificial Sequence: Synthetic oligonucleotide
ccagcgcaugacggccuca

SEQ ID NO: 1538507 - RNA, 19 nt, Artificial Sequence
  Description of Artificial Sequence: Synthetic oligonucleotide
acagcuauacucuaaaacc

SEQ ID NO: 1538508 - RNA, 19 nt, Artificial Sequence
  Description of Artificial Sequence: Synthetic oligonucleotide
ucuaaaaccaguauagucc

SEQ ID NO: 1538509 - RNA, 19 nt, Artificial Sequence
  Description of Artificial Sequence: Synthetic oligonucleotide
aacugcaugaccucaggcc

SEQ ID NO: 1538510 - RNA, 19 nt, Artificial Sequence
  Description of Artificial Sequence: Synthetic oligonucleotide
aaaacuaccaguuguagaa

SEQ ID NO: 1538511 - RNA, 19 nt, Artificial Sequence
  Description of Artificial Sequence: Synthetic oligonucleotide
uacucuaaaaccaguauag

SEQ ID NO: 1538512 - RNA, 19 nt, Artificial Sequence
  Description of Artificial Sequence: Synthetic oligonucleotide
auacugaacccucugaggc

SEQ ID NO: 1538513 - RNA, 19 nt, Artificial Sequence
  Description of Artificial Sequence: Synthetic oligonucleotide
uaaucauucagccucacgu

SEQ ID NO: 1538514 - RNA, 19 nt, Artificial Sequence
  Description of Artificial Sequence: Synthetic oligonucleotide
uuuauauacagacacugua

SEQ ID NO: 1538515 - RNA, 19 nt, Artificial Sequence
  Description of Artificial Sequence: Synthetic oligonucleotide
acugcaugaccucaggccc

SEQ ID NO: 1538516 - RNA, 19 nt, Artificial Sequence
  Description of Artificial Sequence: Synthetic oligonucleotide
uaauacugaacccucugag

SEQ ID NO: 1538517 - RNA, 19 nt, Artificial Sequence
  Description of Artificial Sequence: Synthetic oligonucleotide
uucuuuggcuuaaagguag

SEQ ID NO: 1538518 - RNA, 19 nt, Artificial Sequence
  Description of Artificial Sequence: Synthetic oligonucleotide
uguaguaguagcugugucc

SEQ ID NO: 1538519 - RNA, 19 nt, Artificial Sequence
  Description of Artificial Sequence: Synthetic oligonucleotide
auuggcaugggccugagga

SEQ ID NO: 1538520 - RNA, 19 nt, Artificial Sequence
  Description of Artificial Sequence: Synthetic oligonucleotide
ucuuuaguguccaacugca

SEQ ID NO: 1538521 - RNA, 19 nt, Artificial Sequence
  Description of Artificial Sequence: Synthetic oligonucleotide
auaguccucguauuggcac

SEQ ID NO: 1538522 - RNA, 19 nt, Artificial Sequence
  Description of Artificial Sequence: Synthetic oligonucleotide
cucguauuggcacagcucc

SEQ ID NO: 1538523 - RNA, 19 nt, Artificial Sequence
  Description of Artificial Sequence: Synthetic oligonucleotide
uccgacuucacugaguuug

SEQ ID NO: 1538524 - RNA, 19 nt, Artificial Sequence
  Description of Artificial Sequence: Synthetic oligonucleotide
agcuugugcauguaguggg

SEQ ID NO: 1538525 - RNA, 19 nt, Artificial Sequence
  Description of Artificial Sequence: Synthetic oligonucleotide
gauagguuuggagauguag

SEQ ID NO: 1538526 - RNA, 19 nt, Artificial Sequence
  Description of Artificial Sequence: Synthetic oligonucleotide
uauacucuaaaaccaguau

SEQ ID NO: 1538527 - RNA, 19 nt, Artificial Sequence
  Description of Artificial Sequence: Synthetic oligonucleotide
cuacaaaccucucuggcag

SEQ ID NO: 1538528 - RNA, 19 nt, Artificial Sequence
  Description of Artificial Sequence: Synthetic oligonucleotide
cucuaaaaccaguauaguc

SEQ ID NO: 1538529 - RNA, 19 nt, Artificial Sequence
  Description of Artificial Sequence: Synthetic oligonucleotide
auacagacacuguacaugu

SEQ ID NO: 1538530 - RNA, 19 nt, Artificial Sequence
  Description of Artificial Sequence: Synthetic oligonucleotide
ugagaauuggcaugggccu

SEQ ID NO: 1538531 - RNA, 19 nt, Artificial Sequence
  Description of Artificial Sequence: Synthetic oligonucleotide
gaugugacggucagcagcg

SEQ ID NO: 1538532 - RNA, 19 nt, Artificial Sequence
  Description of Artificial Sequence: Synthetic oligonucleotide
ugguggauagguuuggaga

SEQ ID NO: 1538533 - RNA, 19 nt, Artificial Sequence
  Description of Artificial Sequence: Synthetic oligonucleotide
acacuguacaugugggccc

SEQ ID NO: 1538534 - RNA, 19 nt, Artificial Sequence
  Description of Artificial Sequence: Synthetic oligonucleotide
aagacgaugugacggucag

SEQ ID NO: 1538535 - RNA, 19 nt, Artificial Sequence
  Description of Artificial Sequence: Synthetic oligonucleotide
aguguaguccuccucccgg

SEQ ID NO: 1538536 - RNA, 19 nt, Artificial Sequence
  Description of Artificial Sequence: Synthetic oligonucleotide
ggcuuaaagguagaaaucg

SEQ ID NO: 1538537 - RNA, 19 nt, Artificial Sequence
  Description of Artificial Sequence: Synthetic oligonucleotide
agacacuguacaugugggc

SEQ ID NO: 1538538 - RNA, 19 nt, Artificial Sequence
  Description of Artificial Sequence: Synthetic oligonucleotide
agaaacuccauagcguggg

SEQ ID NO: 1538539 - RNA, 19 nt, Artificial Sequence
  Description of Artificial Sequence: Synthetic oligonucleotide
cuuaaagguagaaaucgca

SEQ ID NO: 1538540 - RNA, 19 nt, Artificial Sequence
  Description of Artificial Sequence: Synthetic oligonucleotide
gacacuguacaugugggcc

SEQ ID NO: 1538541 - RNA, 19 nt, Artificial Sequence
  Description of Artificial Sequence: Synthetic oligonucleotide
ugaagcauccgacuucacu

SEQ ID NO: 1538542 - RNA, 19 nt, Artificial Sequence
  Description of Artificial Sequence: Synthetic oligonucleotide
aggugaaaggugugaagcg

SEQ ID NO: 1538543 - RNA, 19 nt, Artificial Sequence
  Description of Artificial Sequence: Synthetic oligonucleotide
gucgaaacccuuaauacug

SEQ ID NO: 1538544 - RNA, 19 nt, Artificial Sequence
  Description of Artificial Sequence: Synthetic oligonucleotide
gauacagucagugccuggc

SEQ ID NO: 1538545 - RNA, 19 nt, Artificial Sequence
  Description of Artificial Sequence: Synthetic oligonucleotide
uguauaccgcuccauggca

SEQ ID NO: 1538546 - RNA, 19 nt, Artificial Sequence
  Description of Artificial Sequence: Synthetic oligonucleotide
cuuaauacugaacccucug

SEQ ID NO: 1538547 - RNA, 19 nt, Artificial Sequence
  Description of Artificial Sequence: Synthetic oligonucleotide
aaaggacuguccccacuuc

SEQ ID NO: 1538548 - RNA, 19 nt, Artificial Sequence
  Description of Artificial Sequence: Synthetic oligonucleotide
aaccuugcagagaugcugg

SEQ ID NO: 1538549 - RNA, 19 nt, Artificial Sequence
  Description of Artificial Sequence: Synthetic oligonucleotide
caauccguaagccagguga

SEQ ID NO: 1538550 - RNA, 19 nt, Artificial Sequence
  Description of Artificial Sequence: Synthetic oligonucleotide
aacuaccaguuguagaaau

SEQ ID NO: 1538551 - RNA, 19 nt, Artificial Sequence
  Description of Artificial Sequence: Synthetic oligonucleotide
ugcuggaagucucuucucc

SEQ ID NO: 1538552 - RNA, 19 nt, Artificial Sequence
  Description of Artificial Sequence: Synthetic oligonucleotide
aaugcugugcagaacuuga

SEQ ID NO: 1538553 - RNA, 19 nt, Artificial Sequence
  Description of Artificial Sequence: Synthetic oligonucleotide
acguguacaguguaguccu

SEQ ID NO: 1538554 - RNA, 19 nt, Artificial Sequence
  Description of Artificial Sequence: Synthetic oligonucleotide
ugugcauguagugggagug

SEQ ID NO: 1538555 - RNA, 19 nt, Artificial Sequence
  Description of Artificial Sequence: Synthetic oligonucleotide
ugggucgaaacccuuaaua

SEQ ID NO: 1538556 - RNA, 19 nt, Artificial Sequence
  Description of Artificial Sequence: Synthetic oligonucleotide
agagucauccucguaaugu

SEQ ID NO: 1538557 - RNA, 19 nt, Artificial Sequence
  Description of Artificial Sequence: Synthetic oligonucleotide
cacugggcccuuaaaacgg

SEQ ID NO: 1538558 - RNA, 19 nt, Artificial Sequence
  Description of Artificial Sequence: Synthetic oligonucleotide
gacuaugggugauuuugcc

SEQ ID NO: 1538559 - RNA, 19 nt, Artificial Sequence
  Description of Artificial Sequence: Synthetic oligonucleotide
acuaugggugauuuugcca

SEQ ID NO: 1538560 - RNA, 19 nt, Artificial Sequence
  Description of Artificial Sequence: Synthetic oligonucleotide
guaaucauucagccucacg

SEQ ID NO: 1538561 - RNA, 19 nt, Artificial Sequence
  Description of Artificial Sequence: Synthetic oligonucleotide
auguaguaguagcuguguc

SEQ ID NO: 1538562 - RNA, 19 nt, Artificial Sequence
  Description of Artificial Sequence: Synthetic oligonucleotide
uccagaagacgaugugacg

SEQ ID NO: 1538563 - RNA, 19 nt, Artificial Sequence
  Description of Artificial Sequence: Synthetic oligonucleotide
aagaaacuccauagcgugg

SEQ ID NO: 1538564 - RNA, 19 nt, Artificial Sequence
  Description of Artificial Sequence: Synthetic oligonucleotide
aguuccaauccguaagcca

SEQ ID NO: 1538565 - RNA, 19 nt, Artificial Sequence
  Description of Artificial Sequence: Synthetic oligonucleotide
uuccaauccguaagccagg

SEQ ID NO: 1538566 - RNA, 19 nt, Artificial Sequence
  Description of Artificial Sequence: Synthetic oligonucleotide
ugcugggucagcccaagca

SEQ ID NO: 1538567 - RNA, 19 nt, Artificial Sequence
  Description of Artificial Sequence: Synthetic oligonucleotide
gaccaaugggaagagucgg

SEQ ID NO: 1538568 - RNA, 19 nt, Artificial Sequence
  Description of Artificial Sequence: Synthetic oligonucleotide
uuugggucgaaacccuuaa

SEQ ID NO: 1538569 - RNA, 19 nt, Artificial Sequence
  Description of Artificial Sequence: Synthetic oligonucleotide
gugggagugguucccaggg

SEQ ID NO: 1538570 - RNA, 19 nt, Artificial Sequence
  Description of Artificial Sequence: Synthetic oligonucleotide
acgggcacugcccuuacag

SEQ ID NO: 1538571 - RNA, 19 nt, Artificial Sequence
  Description of Artificial Sequence: Synthetic oligonucleotide
ugagcagacacagauguuu

SEQ ID NO: 1538572 - RNA, 19 nt, Artificial Sequence
  Description of Artificial Sequence: Synthetic oligonucleotide
aaaucgcagggaaaggacu

SEQ ID NO: 1538573 - RNA, 19 nt, Artificial Sequence
  Description of Artificial Sequence: Synthetic oligonucleotide
guguauaccgcuccauggc

SEQ ID NO: 1538574 - RNA, 19 nt, Artificial Sequence
  Description of Artificial Sequence: Synthetic oligonucleotide
agaaaucgcagggaaagga

SEQ ID NO: 1538575 - RNA, 19 nt, Artificial Sequence
  Description of Artificial Sequence: Synthetic oligonucleotide
agguggaaaccuugcagag

SEQ ID NO: 1538576 - RNA, 19 nt, Artificial Sequence
  Description of Artificial Sequence: Synthetic oligonucleotide
gaagagucggggagcagcg

SEQ ID NO: 1538577 - RNA, 19 nt, Artificial Sequence
  Description of Artificial Sequence: Synthetic oligonucleotide
auacuccuggugcuccacc

SEQ ID NO: 1538578 - RNA, 19 nt, Artificial Sequence
  Description of Artificial Sequence: Synthetic oligonucleotide
uagaaaucgcagggaaagg

SEQ ID NO: 1538579 - RNA, 19 nt, Artificial Sequence
  Description of Artificial Sequence: Synthetic oligonucleotide
auagguuuggagauguagu

SEQ ID NO: 1538580 - RNA, 19 nt, Artificial Sequence
  Description of Artificial Sequence: Synthetic oligonucleotide
caucauggcuuccucgggg

SEQ ID NO: 1538581 - RNA, 19 nt, Artificial Sequence
  Description of Artificial Sequence: Synthetic oligonucleotide
ggaaaccuugcagagaugc

SEQ ID NO: 1538582 - RNA, 19 nt, Artificial Sequence
  Description of Artificial Sequence: Synthetic oligonucleotide
gaaaucgcagggaaaggac

SEQ ID NO: 1538583 - RNA, 19 nt, Artificial Sequence
  Description of Artificial Sequence: Synthetic oligonucleotide
acugcccuuacagcuauac

SEQ ID NO: 1538584 - RNA, 19 nt, Artificial Sequence
  Description of Artificial Sequence: Synthetic oligonucleotide
aacuucaagcacugguuuu

SEQ ID NO: 1538585 - RNA, 19 nt, Artificial Sequence
  Description of Artificial Sequence: Synthetic oligonucleotide
cagcuauacucuaaaacca

SEQ ID NO: 1538586 - RNA, 19 nt, Artificial Sequence
  Description of Artificial Sequence: Synthetic oligonucleotide
ucgaaacccuuaauacuga

SEQ ID NO: 1538587 - RNA, 19 nt, Artificial Sequence
  Description of Artificial Sequence: Synthetic oligonucleotide
aaaccaguauaguccucgu

SEQ ID NO: 1538588 - RNA, 19 nt, Artificial Sequence
  Description of Artificial Sequence: Synthetic oligonucleotide
ugugacggucagcagcggc

SEQ ID NO: 1538589 - RNA, 19 nt, Artificial Sequence
  Description of Artificial Sequence: Synthetic oligonucleotide
uacaguguauaccgcucca

SEQ ID NO: 1538590 - RNA, 19 nt, Artificial Sequence
  Description of Artificial Sequence: Synthetic oligonucleotide
agcuauacucuaaaaccag

SEQ ID NO: 1538591 - RNA, 19 nt, Artificial Sequence
  Description of Artificial Sequence: Synthetic oligonucleotide
agguagaaaucgcagggaa

SEQ ID NO: 1538592 - RNA, 19 nt, Artificial Sequence
  Description of Artificial Sequence: Synthetic oligonucleotide
aagguagaaaucgcaggga

SEQ ID NO: 1538593 - RNA, 19 nt, Artificial Sequence
  Description of Artificial Sequence: Synthetic oligonucleotide
uggauagguuuggagaugu

SEQ ID NO: 1538594 - RNA, 19 nt, Artificial Sequence
  Description of Artificial Sequence: Synthetic oligonucleotide
caguauaguccucguauug

SEQ ID NO: 1538595 - RNA, 19 nt, Artificial Sequence
  Description of Artificial Sequence: Synthetic oligonucleotide
aauuggcaugggccugagg

SEQ ID NO: 1538596 - RNA, 19 nt, Artificial Sequence
  Description of Artificial Sequence: Synthetic oligonucleotide
uccucguauuggcacagcu

SEQ ID NO: 1538597 - RNA, 19 nt, Artificial Sequence
  Description of Artificial Sequence: Synthetic oligonucleotide
cuggcucccacgcaggaag

SEQ ID NO: 1538598 - RNA, 19 nt, Artificial Sequence
  Description of Artificial Sequence: Synthetic oligonucleotide
ccagaagacgaugugacgg

SEQ ID NO: 1538599 - RNA, 19 nt, Artificial Sequence
  Description of Artificial Sequence: Synthetic oligonucleotide
ucauccucguaaugugggc

SEQ ID NO: 1538600 - RNA, 19 nt, Artificial Sequence
  Description of Artificial Sequence: Synthetic oligonucleotide
gaaugcugccugaaggaug

SEQ ID NO: 1538601 - RNA, 19 nt, Artificial Sequence
  Description of Artificial Sequence: Synthetic oligonucleotide
ugggcccuuaaaacgggcc

SEQ ID NO: 1538602 - RNA, 19 nt, Artificial Sequence
  Description of Artificial Sequence: Synthetic oligonucleotide
guacaugugggcccugccc

SEQ ID NO: 1538603 - RNA, 19 nt, Artificial Sequence
  Description of Artificial Sequence: Synthetic oligonucleotide
cuauacucuaaaaccagua

SEQ ID NO: 1538604 - RNA, 19 nt, Artificial Sequence
  Description of Artificial Sequence: Synthetic oligonucleotide
cacagagucauccucguaa

SEQ ID NO: 1538605 - RNA, 19 nt, Artificial Sequence
  Description of Artificial Sequence: Synthetic oligonucleotide
cuaaaaccaguauaguccu

SEQ ID NO: 1538606 - RNA, 19 nt, Artificial Sequence
  Description of Artificial Sequence: Synthetic oligonucleotide
agauguuuauauacagaca

SEQ ID NO: 1538607 - RNA, 19 nt, Artificial Sequence
  Description of Artificial Sequence: Synthetic oligonucleotide
ugguccuuugacuggggcu

SEQ ID NO: 1538608 - RNA, 19 nt, Artificial Sequence
  Description of Artificial Sequence: Synthetic oligonucleotide
caucccucugaaguggagg

SEQ ID NO: 1538609 - RNA, 19 nt, Artificial Sequence
  Description of Artificial Sequence: Synthetic oligonucleotide
cauagcguggggccgggcc

SEQ ID NO: 1538610 - RNA, 19 nt, Artificial Sequence
  Description of Artificial Sequence: Synthetic oligonucleotide
cagggaaaggacugucccc

SEQ ID NO: 1538611 - RNA, 19 nt, Artificial Sequence
  Description of Artificial Sequence: Synthetic oligonucleotide
uguaccuggcucccacgca

SEQ ID NO: 1538612 - RNA, 19 nt, Artificial Sequence
  Description of Artificial Sequence: Synthetic oligonucleotide
agagucggggagcagcgcu

SEQ ID NO: 1538613 - RNA, 19 nt, Artificial Sequence
  Description of Artificial Sequence: Synthetic oligonucleotide
caacugcaugaccucaggc

SEQ ID NO: 1538614 - RNA, 19 nt, Artificial Sequence
  Description of Artificial Sequence: Synthetic oligonucleotide
ccuuuaagauacauucuac

SEQ ID NO: 1538615 - RNA, 19 nt, Artificial Sequence
  Description of Artificial Sequence: Synthetic oligonucleotide
ugggcccugcccuuuaaga

SEQ ID NO: 1538616 - RNA, 19 nt, Artificial Sequence
  Description of Artificial Sequence: Synthetic oligonucleotide
cagcuugugcauguagugg

SEQ ID NO: 1538617 - RNA, 19 nt, Artificial Sequence
  Description of Artificial Sequence: Synthetic oligonucleotide
caguguauaccgcuccaug

SEQ ID NO: 1538618 - RNA, 19 nt, Artificial Sequence
  Description of Artificial Sequence: Synthetic oligonucleotide
uaguccucguauuggcaca

SEQ ID NO: 1538619 - RNA, 19 nt, Artificial Sequence
  Description of Artificial Sequence: Synthetic oligonucleotide
gggaagggugucuuuagug

SEQ ID NO: 1538620 - RNA, 19 nt, Artificial Sequence
  Description of Artificial Sequence: Synthetic oligonucleotide
gccauugacagucaccuuc

SEQ ID NO: 1538621 - RNA, 19 nt, Artificial Sequence
  Description of Artificial Sequence: Synthetic oligonucleotide
ugugcagaacuugaaccuc

SEQ ID NO: 1538622 - RNA, 19 nt, Artificial Sequence
  Description of Artificial Sequence: Synthetic oligonucleotide
aucauggcuuccucgggga

SEQ ID NO: 1538623 - RNA, 19 nt, Artificial Sequence
  Description of Artificial Sequence: Synthetic oligonucleotide
agaagacgaugugacgguc

SEQ ID NO: 1538624 - RNA, 19 nt, Artificial Sequence
  Description of Artificial Sequence: Synthetic oligonucleotide
aacgggccaggacugcaca

SEQ ID NO: 1538625 - RNA, 19 nt, Artificial Sequence
  Description of Artificial Sequence: Synthetic oligonucleotide
ucacguguacaguguaguc

SEQ ID NO: 1538626 - RNA, 19 nt, Artificial Sequence
  Description of Artificial Sequence: Synthetic oligonucleotide
aggugugaagcgcuggaau

SEQ ID NO: 1538627 - RNA, 19 nt, Artificial Sequence
  Description of Artificial Sequence: Synthetic oligonucleotide
cuguaccuggcucccacgc

SEQ ID NO: 1538628 - RNA, 19 nt, Artificial Sequence
  Description of Artificial Sequence: Synthetic oligonucleotide
aggggcccaaagaaacucc

SEQ ID NO: 1538629 - RNA, 19 nt, Artificial Sequence
  Description of Artificial Sequence: Synthetic oligonucleotide
acucuaaaaccaguauagu

SEQ ID NO: 1538630 - RNA, 19 nt, Artificial Sequence
  Description of Artificial Sequence: Synthetic oligonucleotide
ggugaaaggugugaagcgc

SEQ ID NO: 1538631 - RNA, 19 nt, Artificial Sequence
  Description of Artificial Sequence: Synthetic oligonucleotide
aaccaguauaguccucgua

SEQ ID NO: 1538632 - RNA, 19 nt, Artificial Sequence
  Description of Artificial Sequence: Synthetic oligonucleotide
cagccucacguguacagug

SEQ ID NO: 1538633 - RNA, 19 nt, Artificial Sequence
  Description of Artificial Sequence: Synthetic oligonucleotide
gaagucucuucuccugaga

SEQ ID NO: 1538634 - RNA, 19 nt, Artificial Sequence
  Description of Artificial Sequence: Synthetic oligonucleotide
gcagggaaaggacuguccc

SEQ ID NO: 1538635 - RNA, 19 nt, Artificial Sequence
  Description of Artificial Sequence: Synthetic oligonucleotide
cacagacuguacacacggg

SEQ ID NO: 1538636 - RNA, 19 nt, Artificial Sequence
  Description of Artificial Sequence: Synthetic oligonucleotide
ccacugggcccuuaaaacg

SEQ ID NO: 1538637 - RNA, 19 nt, Artificial Sequence
  Description of Artificial Sequence: Synthetic oligonucleotide
agacacagauguuuauaua

SEQ ID NO: 1538638 - RNA, 19 nt, Artificial Sequence
  Description of Artificial Sequence: Synthetic oligonucleotide
cuaugggugauuuugccau

SEQ ID NO: 1538639 - RNA, 19 nt, Artificial Sequence
  Description of Artificial Sequence: Synthetic oligonucleotide
guauaccgcuccauggcag

SEQ ID NO: 1538640 - RNA, 19 nt, Artificial Sequence
  Description of Artificial Sequence: Synthetic oligonucleotide
ucguauuggcacagcucca

SEQ ID NO: 1538641 - RNA, 19 nt, Artificial Sequence
  Description of Artificial Sequence: Synthetic oligonucleotide
aauccguaagccaggugaa

SEQ ID NO: 1538642 - RNA, 19 nt, Artificial Sequence
  Description of Artificial Sequence: Synthetic oligonucleotide
ugcagagaugcugggucag

SEQ ID NO: 1538643 - RNA, 19 nt, Artificial Sequence
  Description of Artificial Sequence: Synthetic oligonucleotide
ggcuacaaaccucucuggc

SEQ ID NO: 1538644 - RNA, 19 nt, Artificial Sequence
  Description of Artificial Sequence: Synthetic oligonucleotide
cuugugcauguagugggag

SEQ ID NO: 1538645 - RNA, 19 nt, Artificial Sequence
  Description of Artificial Sequence: Synthetic oligonucleotide
ugugaagcgcuggaauuuc

SEQ ID NO: 1538646 - RNA, 19 nt, Artificial Sequence
  Description of Artificial Sequence: Synthetic oligonucleotide
gaauccaagaacacuguau

SEQ ID NO: 1538647 - RNA, 19 nt, Artificial Sequence
  Description of Artificial Sequence: Synthetic oligonucleotide
gaagacgaugugacgguca

SEQ ID NO: 1538648 - RNA, 19 nt, Artificial Sequence
  Description of Artificial Sequence: Synthetic oligonucleotide
uugaacuccuuugggucga

SEQ ID NO: 1538649 - RNA, 19 nt, Artificial Sequence
  Description of Artificial Sequence: Synthetic oligonucleotide
guaguaguagcuguguccu

SEQ ID NO: 1538650 - RNA, 19 nt, Artificial Sequence
  Description of Artificial Sequence: Synthetic oligonucleotide
cuugaugguggauagguuu

SEQ ID NO: 1538651 - RNA, 19 nt, Artificial Sequence
  Description of Artificial Sequence: Synthetic oligonucleotide
caaugcugugcagaacuug

SEQ ID NO: 1538652 - RNA, 19 nt, Artificial Sequence
  Description of Artificial Sequence: Synthetic oligonucleotide
uagugggagugguucccag

SEQ ID NO: 1538653 - RNA, 19 nt, Artificial Sequence
  Description of Artificial Sequence: Synthetic oligonucleotide
ggaagucucuucuccugag

SEQ ID NO: 1538654 - RNA, 19 nt, Artificial Sequence
  Description of Artificial Sequence: Synthetic oligonucleotide
acuccauagcguggggccg

SEQ ID NO: 1538655 - RNA, 19 nt, Artificial Sequence
  Description of Artificial Sequence: Synthetic oligonucleotide
gugacggucagcagcggcc

SEQ ID NO: 1538656 - RNA, 19 nt, Artificial Sequence
  Description of Artificial Sequence: Synthetic oligonucleotide
augaauccaagaacacugu

SEQ ID NO: 1538657 - RNA, 19 nt, Artificial Sequence
  Description of Artificial Sequence: Synthetic oligonucleotide
gauguaguaguagcugugu

SEQ ID NO: 1538658 - RNA, 19 nt, Artificial Sequence
  Description of Artificial Sequence: Synthetic oligonucleotide
caguuccaauccguaagcc

SEQ ID NO: 1538659 - RNA, 19 nt, Artificial Sequence
  Description of Artificial Sequence: Synthetic oligonucleotide
aggacugcacagcuuguuu

SEQ ID NO: 1538660 - RNA, 19 nt, Artificial Sequence
  Description of Artificial Sequence: Synthetic oligonucleotide
aagccaggugaagcauccg

SEQ ID NO: 1538661 - RNA, 19 nt, Artificial Sequence
  Description of Artificial Sequence: Synthetic oligonucleotide
aaggugugaagcgcuggaa

SEQ ID NO: 1538662 - RNA, 19 nt, Artificial Sequence
  Description of Artificial Sequence: Synthetic oligonucleotide
agacgaugugacggucagc

SEQ ID NO: 1538663 - RNA, 19 nt, Artificial Sequence
  Description of Artificial Sequence: Synthetic oligonucleotide
aagcugucucaagcuuuuc

SEQ ID NO: 1538664 - RNA, 19 nt, Artificial Sequence
  Description of Artificial Sequence: Synthetic oligonucleotide
aguccucguauuggcacag

SEQ ID NO: 1538665 - RNA, 19 nt, Artificial Sequence
  Description of Artificial Sequence: Synthetic oligonucleotide
cccacugggcccuuaaaac

SEQ ID NO: 1538666 - RNA, 19 nt, Artificial Sequence
  Description of Artificial Sequence: Synthetic oligonucleotide
uccaauccguaagccaggu

SEQ ID NO: 1538667 - RNA, 19 nt, Artificial Sequence
  Description of Artificial Sequence: Synthetic oligonucleotide
ggauacagucagugccugg

SEQ ID NO: 1538668 - RNA, 19 nt, Artificial Sequence
  Description of Artificial Sequence: Synthetic oligonucleotide
acgaugugacggucagcag

SEQ ID NO: 1538669 - RNA, 19 nt, Artificial Sequence
  Description of Artificial Sequence: Synthetic oligonucleotide
uugggucgaaacccuuaau

SEQ ID NO: 1538670 - RNA, 19 nt, Artificial Sequence
  Description of Artificial Sequence: Synthetic oligonucleotide
ccugagaauuggcaugggc

SEQ ID NO: 1538671 - RNA, 19 nt, Artificial Sequence
  Description of Artificial Sequence: Synthetic oligonucleotide
cuagguaaucauucagccu

SEQ ID NO: 1538672 - RNA, 19 nt, Artificial Sequence
  Description of Artificial Sequence: Synthetic oligonucleotide
ggacugcacagcuuguuuc

SEQ ID NO: 1538673 - RNA, 19 nt, Artificial Sequence
  Description of Artificial Sequence: Synthetic oligonucleotide
ggaagggugucuuuagugu

SEQ ID NO: 1538674 - RNA, 19 nt, Artificial Sequence
  Description of Artificial Sequence: Synthetic oligonucleotide
cugggcccuuaaaacgggc

SEQ ID NO: 1538675 - RNA, 19 nt, Artificial Sequence
  Description of Artificial Sequence: Synthetic oligonucleotide
gggugauuuugccauugac

SEQ ID NO: 1538676 - RNA, 19 nt, Artificial Sequence
  Description of Artificial Sequence: Synthetic oligonucleotide
cagagucauccucguaaug

SEQ ID NO: 1538677 - RNA, 19 nt, Artificial Sequence
  Description of Artificial Sequence: Synthetic oligonucleotide
ggucgaaacccuuaauacu

SEQ ID NO: 1538678 - RNA, 19 nt, Artificial Sequence
  Description of Artificial Sequence: Synthetic oligonucleotide
uccugagaauuggcauggg

SEQ ID NO: 1538679 - RNA, 19 nt, Artificial Sequence
  Description of Artificial Sequence: Synthetic oligonucleotide
guugcacuuccagcggacc

SEQ ID NO: 1538680 - RNA, 19 nt, Artificial Sequence
  Description of Artificial Sequence: Synthetic oligonucleotide
uaugggugauuuugccauu

SEQ ID NO: 1538681 - RNA, 19 nt, Artificial Sequence
  Description of Artificial Sequence: Synthetic oligonucleotide
uuccagcggaccugguccu

SEQ ID NO: 1538682 - RNA, 19 nt, Artificial Sequence
  Description of Artificial Sequence: Synthetic oligonucleotide
guacaguguaguccuccuc

SEQ ID NO: 1538683 - RNA, 19 nt, Artificial Sequence
  Description of Artificial Sequence: Synthetic oligonucleotide
gguggauagguuuggagau

SEQ ID NO: 1538684 - RNA, 19 nt, Artificial Sequence
  Description of Artificial Sequence: Synthetic oligonucleotide
acgggccaggacugcacag

SEQ ID NO: 1538685 - RNA, 19 nt, Artificial Sequence
  Description of Artificial Sequence: Synthetic oligonucleotide
ggacuaugggugauuuugc

SEQ ID NO: 1538686 - RNA, 19 nt, Artificial Sequence
  Description of Artificial Sequence: Synthetic oligonucleotide
cauccucguaaugugggca

SEQ ID NO: 1538687 - RNA, 19 nt, Artificial Sequence
  Description of Artificial Sequence: Synthetic oligonucleotide
cucguaaugugggcagaug

SEQ ID NO: 1538688 - RNA, 19 nt, Artificial Sequence
  Description of Artificial Sequence: Synthetic oligonucleotide
cuuugggucgaaacccuua

SEQ ID NO: 1538689 - RNA, 19 nt, Artificial Sequence
  Description of Artificial Sequence: Synthetic oligonucleotide
caucuggacaucauggcuu

SEQ ID NO: 1538690 - RNA, 19 nt, Artificial Sequence
  Description of Artificial Sequence: Synthetic oligonucleotide
cccuuaauacugaacccuc

SEQ ID NO: 1538691 - RNA, 19 nt, Artificial Sequence
  Description of Artificial Sequence: Synthetic oligonucleotide
acgagagcucugcagugua

SEQ ID NO: 1538692 - RNA, 19 nt, Artificial Sequence
  Description of Artificial Sequence: Synthetic oligonucleotide
ucggggaagggugucuuua

SEQ ID NO: 1538693 - RNA, 19 nt, Artificial Sequence
  Description of Artificial Sequence: Synthetic oligonucleotide
ccuuagcccaguuccaauc

SEQ ID NO: 1538694 - RNA, 19 nt, Artificial Sequence
  Description of Artificial Sequence: Synthetic oligonucleotide
aggguggcagcuugugcau

SEQ ID NO: 1538695 - RNA, 19 nt, Artificial Sequence
  Description of Artificial Sequence: Synthetic oligonucleotide
uccucguaaugugggcaga

SEQ ID NO: 1538696 - RNA, 19 nt, Artificial Sequence
  Description of Artificial Sequence: Synthetic oligonucleotide
uccauagcguggggccggg

SEQ ID NO: 1538697 - RNA, 19 nt, Artificial Sequence
  Description of Artificial Sequence: Synthetic oligonucleotide
gggcuggcaugccacauac

SEQ ID NO: 1538698 - RNA, 19 nt, Artificial Sequence
  Description of Artificial Sequence: Synthetic oligonucleotide
aucgcagggaaaggacugu

SEQ ID NO: 1538699 - RNA, 19 nt, Artificial Sequence
  Description of Artificial Sequence: Synthetic oligonucleotide
ugggccgugcuuggcacca

SEQ ID NO: 1538700 - RNA, 19 nt, Artificial Sequence
  Description of Artificial Sequence: Synthetic oligonucleotide
agaggggcccaaagaaacu

SEQ ID NO: 1538701 - RNA, 19 nt, Artificial Sequence
  Description of Artificial Sequence: Synthetic oligonucleotide
gacuggggcuggcaugcca

SEQ ID NO: 1538702 - RNA, 19 nt, Artificial Sequence
  Description of Artificial Sequence: Synthetic oligonucleotide
cauacuccuggugcuccac

SEQ ID NO: 1538703 - RNA, 19 nt, Artificial Sequence
  Description of Artificial Sequence: Synthetic oligonucleotide
ccucacguguacaguguag

SEQ ID NO: 1538704 - RNA, 19 nt, Artificial Sequence
  Description of Artificial Sequence: Synthetic oligonucleotide
ucgcagggaaaggacuguc

SEQ ID NO: 1538705 - RNA, 19 nt, Artificial Sequence
  Description of Artificial Sequence: Synthetic oligonucleotide
gcagcgcucugaccaaugc

SEQ ID NO: 1538706 - RNA, 19 nt, Artificial Sequence
  Description of Artificial Sequence: Synthetic oligonucleotide
gcaguguaggguuccccac

SEQ ID NO: 1538707 - RNA, 19 nt, Artificial Sequence
  Description of Artificial Sequence: Synthetic oligonucleotide
gggacgagagcucugcagu

SEQ ID NO: 1538708 - RNA, 19 nt, Artificial Sequence
  Description of Artificial Sequence: Synthetic oligonucleotide
gguagaaaucgcagggaaa

SEQ ID NO: 1538709 - RNA, 19 nt, Artificial Sequence
  Description of Artificial Sequence: Synthetic oligonucleotide
cucacguguacaguguagu

SEQ ID NO: 1538710 - RNA, 19 nt, Artificial Sequence
  Description of Artificial Sequence: Synthetic oligonucleotide
auaccgcuccauggcagca

SEQ ID NO: 1538711 - RNA, 19 nt, Artificial Sequence
  Description of Artificial Sequence: Synthetic oligonucleotide
ccaggcugguugcacuucc

SEQ ID NO: 1538712 - RNA, 19 nt, Artificial Sequence
  Description of Artificial Sequence: Synthetic oligonucleotide
agcggaccugguccuuuga

SEQ ID NO: 1538713 - RNA, 19 nt, Artificial Sequence
  Description of Artificial Sequence: Synthetic oligonucleotide
guagugggagugguuccca

SEQ ID NO: 1538714 - RNA, 19 nt, Artificial Sequence
  Description of Artificial Sequence: Synthetic oligonucleotide
gccaggugaagcauccgac

SEQ ID NO: 1538715 - RNA, 19 nt, Artificial Sequence
  Description of Artificial Sequence: Synthetic oligonucleotide
agcagcgcucugaccaaug

SEQ ID NO: 1538716 - RNA, 19 nt, Artificial Sequence
  Description of Artificial Sequence: Synthetic oligonucleotide
cagcggaccugguccuuug

SEQ ID NO: 1538717 - RNA, 19 nt, Artificial Sequence
  Description of Artificial Sequence: Synthetic oligonucleotide
gagucggggagcagcgcuc

SEQ ID NO: 1538718 - RNA, 19 nt, Artificial Sequence
  Description of Artificial Sequence: Synthetic oligonucleotide
ggugugaagcgcuggaauu

SEQ ID NO: 1538719 - RNA, 19 nt, Artificial Sequence
  Description of Artificial Sequence: Synthetic oligonucleotide
gcccugcccuuuaagauac

SEQ ID NO: 1538720 - RNA, 19 nt, Artificial Sequence
  Description of Artificial Sequence: Synthetic oligonucleotide
ccacgcaggaagcugucuc

SEQ ID NO: 1538721 - RNA, 19 nt, Artificial Sequence
  Description of Artificial Sequence: Synthetic oligonucleotide
ggcaggaauggcacaguca

SEQ ID NO: 1538722 - RNA, 19 nt, Artificial Sequence
  Description of Artificial Sequence: Synthetic oligonucleotide
ugcaugaccucaggcccuu

SEQ ID NO: 1538723 - RNA, 19 nt, Artificial Sequence
  Description of Artificial Sequence: Synthetic oligonucleotide
cgcagggaaaggacugucc

SEQ ID NO: 1538724 - RNA, 19 nt, Artificial Sequence
  Description of Artificial Sequence: Synthetic oligonucleotide
caaaccucucuggcagcuc

SEQ ID NO: 1538725 - RNA, 19 nt, Artificial Sequence
  Description of Artificial Sequence: Synthetic oligonucleotide
cuuugacuggggcuggcau

SEQ ID NO: 1538726 - RNA, 19 nt, Artificial Sequence
  Description of Artificial Sequence: Synthetic oligonucleotide
caugggccugaggacuaug

SEQ ID NO: 1538727 - RNA, 19 nt, Artificial Sequence
  Description of Artificial Sequence: Synthetic oligonucleotide
ggcccugcccuuuaagaua

SEQ ID NO: 1538728 - RNA, 19 nt, Artificial Sequence
  Description of Artificial Sequence: Synthetic oligonucleotide
gcuauacucuaaaaccagu

SEQ ID NO: 1538729 - RNA, 19 nt, Artificial Sequence
  Description of Artificial Sequence: Synthetic oligonucleotide
auccgacuucacugaguuu

SEQ ID NO: 1538730 - RNA, 19 nt, Artificial Sequence
  Description of Artificial Sequence: Synthetic oligonucleotide
cucccacgcaggaagcugu

SEQ ID NO: 1538731 - RNA, 19 nt, Artificial Sequence
  Description of Artificial Sequence: Synthetic oligonucleotide
ugaacuccuuugggucgaa

SEQ ID NO: 1538732 - RNA, 19 nt, Artificial Sequence
  Description of Artificial Sequence: Synthetic oligonucleotide
gcccuuacagcuauacucu

SEQ ID NO: 1538733 - RNA, 19 nt, Artificial Sequence
  Description of Artificial Sequence: Synthetic oligonucleotide
gcggaccugguccuuugac

SEQ ID NO: 1538734 - RNA, 19 nt, Artificial Sequence
  Description of Artificial Sequence: Synthetic oligonucleotide
cgggacgagagcucugcag

SEQ ID NO: 1538735 - RNA, 19 nt, Artificial Sequence
  Description of Artificial Sequence: Synthetic oligonucleotide
gugugaagcgcuggaauuu

SEQ ID NO: 1538736 - RNA, 19 nt, Artificial Sequence
  Description of Artificial Sequence: Synthetic oligonucleotide
cuucaagcacugguuuucu

SEQ ID NO: 1538737 - RNA, 19 nt, Artificial Sequence
  Description of Artificial Sequence: Synthetic oligonucleotide
gcucccacgcaggaagcug

SEQ ID NO: 1538738 - RNA, 19 nt, Artificial Sequence
  Description of Artificial Sequence: Synthetic oligonucleotide
cugcaugaccucaggcccu

SEQ ID NO: 1538739 - RNA, 19 nt, Artificial Sequence
  Description of Artificial Sequence: Synthetic oligonucleotide
guccucguauuggcacagc

SEQ ID NO: 1538740 - RNA, 19 nt, Artificial Sequence
  Description of Artificial Sequence: Synthetic oligonucleotide
gaggacuaugggugauuuu

SEQ ID NO: 1538741 - RNA, 19 nt, Artificial Sequence
  Description of Artificial Sequence: Synthetic oligonucleotide
ccaauccguaagccaggug

SEQ ID NO: 1538742 - RNA, 19 nt, Artificial Sequence
  Description of Artificial Sequence: Synthetic oligonucleotide
ggagcagcgcucugaccaa

SEQ ID NO: 1538743 - RNA, 19 nt, Artificial Sequence
  Description of Artificial Sequence: Synthetic oligonucleotide
augugggcccugcccuuua

SEQ ID NO: 1538744 - RNA, 19 nt, Artificial Sequence
  Description of Artificial Sequence: Synthetic oligonucleotide
cagcgcucugaccaaugcu

SEQ ID NO: 1538745 - RNA, 19 nt, Artificial Sequence
  Description of Artificial Sequence: Synthetic oligonucleotide
cacacgggcacugcccuua

SEQ ID NO: 1538746 - RNA, 19 nt, Artificial Sequence
  Description of Artificial Sequence: Synthetic oligonucleotide
gugaagcauccgacuucac

SEQ ID NO: 1538747 - RNA, 19 nt, Artificial Sequence
  Description of Artificial Sequence: Synthetic oligonucleotide
ggccgggccgggacgagag

SEQ ID NO: 1538748 - RNA, 19 nt, Artificial Sequence
  Description of Artificial Sequence: Synthetic oligonucleotide
cacuguacaugugggcccu

SEQ ID NO: 1538749 - RNA, 19 nt, Artificial Sequence
  Description of Artificial Sequence: Synthetic oligonucleotide
gggcccugcccuuuaagau

SEQ ID NO: 1538750 - RNA, 19 nt, Artificial Sequence
  Description of Artificial Sequence: Synthetic oligonucleotide
ccaggugaagcauccgacu

SEQ ID NO: 1538751 - RNA, 19 nt, Artificial Sequence
  Description of Artificial Sequence: Synthetic oligonucleotide
ccuggcuacaaaccucucu

SEQ ID NO: 1538752 - RNA, 19 nt, Artificial Sequence
  Description of Artificial Sequence: Synthetic oligonucleotide
gcccuuuaagauacauucu

SEQ ID NO: 1538753 - RNA, 19 nt, Artificial Sequence
  Description of Artificial Sequence: Synthetic oligonucleotide
gccucacguguacagugua

SEQ ID NO: 1538754 - RNA, 19 nt, Artificial Sequence
  Description of Artificial Sequence: Synthetic oligonucleotide
cgaaacccuuaauacugaa

SEQ ID NO: 1538755 - RNA, 19 nt, Artificial Sequence
  Description of Artificial Sequence: Synthetic oligonucleotide
ggacuguccccacuucuuu

SEQ ID NO: 1538756 - RNA, 19 nt, Artificial Sequence
  Description of Artificial Sequence: Synthetic oligonucleotide
ccaguauaguccucguauu

SEQ ID NO: 1538757 - RNA, 19 nt, Artificial Sequence
  Description of Artificial Sequence: Synthetic oligonucleotide
cacgggcacugcccuuaca

SEQ ID NO: 1538758 - RNA, 19 nt, Artificial Sequence
  Description of Artificial Sequence: Synthetic oligonucleotide
ggcaugggccugaggacua

SEQ ID NO: 1538759 - RNA, 19 nt, Artificial Sequence
  Description of Artificial Sequence: Synthetic oligonucleotide
ggauagguuuggagaugua

SEQ ID NO: 1538760 - RNA, 19 nt, Artificial Sequence
  Description of Artificial Sequence: Synthetic oligonucleotide
gagcagcgcucugaccaau

SEQ ID NO: 1538761 - RNA, 19 nt, Artificial Sequence
  Description of Artificial Sequence: Synthetic oligonucleotide
cucccggaacuugggauuu

SEQ ID NO: 1538762 - RNA, 19 nt, Artificial Sequence
  Description of Artificial Sequence: Synthetic oligonucleotide
gcgcucugaccaaugcugu

SEQ ID NO: 1538763 - RNA, 19 nt, Artificial Sequence
  Description of Artificial Sequence: Synthetic oligonucleotide
gcccaagcaugcugccucu

SEQ ID NO: 1538764 - RNA, 19 nt, Artificial Sequence
  Description of Artificial Sequence: Synthetic oligonucleotide
cucggggaagggugucuuu

SEQ ID NO: 1538765 - RNA, 19 nt, Artificial Sequence
  Description of Artificial Sequence: Synthetic oligonucleotide
cacugcccuuacagcuaua

SEQ ID NO: 1538766 - RNA, 19 nt, Artificial Sequence
  Description of Artificial Sequence: Synthetic oligonucleotide
cccaagcaugcugccucuc

SEQ ID NO: 1538767 - RNA, 19 nt, Artificial Sequence
  Description of Artificial Sequence: Synthetic oligonucleotide
caugugggcccugcccuuu

SEQ ID NO: 1538768 - RNA, 19 nt, Artificial Sequence
  Description of Artificial Sequence: Synthetic oligonucleotide
ccacagagucauccucgua

SEQ ID NO: 1538769 - RNA, 19 nt, Artificial Sequence
  Description of Artificial Sequence: Synthetic oligonucleotide
gggccgugcuuggcaccag

SEQ ID NO: 1538770 - RNA, 19 nt, Artificial Sequence
  Description of Artificial Sequence: Synthetic oligonucleotide
cacuuccagcggaccuggu

SEQ ID NO: 1538771 - RNA, 19 nt, Artificial Sequence
  Description of Artificial Sequence: Synthetic oligonucleotide
ccauagcguggggccgggc

SEQ ID NO: 1538772 - RNA, 19 nt, Artificial Sequence
  Description of Artificial Sequence: Synthetic oligonucleotide
gccuggcuacaaaccucuc

SEQ ID NO: 1538773 - RNA, 19 nt, Artificial Sequence
  Description of Artificial Sequence: Synthetic oligonucleotide
gggccgggacgagagcucu

SEQ ID NO: 1538774 - RNA, 19 nt, Artificial Sequence
  Description of Artificial Sequence: Synthetic oligonucleotide
ccucguaaugugggcagau

SEQ ID NO: 1538775 - RNA, 19 nt, Artificial Sequence
  Description of Artificial Sequence: Synthetic oligonucleotide
cccugcccuuuaagauaca

SEQ ID NO: 1538776 - RNA, 19 nt, Artificial Sequence
  Description of Artificial Sequence: Synthetic oligonucleotide
gcguggggccgggccgggc

SEQ ID NO: 1538777 - RNA, 19 nt, Artificial Sequence
  Description of Artificial Sequence: Synthetic oligonucleotide
cccacgcaggaagcugucu

SEQ ID NO: 1538778 - RNA, 19 nt, Artificial Sequence
  Description of Artificial Sequence: Synthetic oligonucleotide
ccucggggaagggugucuu

SEQ ID NO: 1538779 - RNA, 19 nt, Artificial Sequence
  Description of Artificial Sequence: Synthetic oligonucleotide
aacgauggaaacccgaucc

SEQ ID NO: 1538780 - RNA, 19 nt, Artificial Sequence
  Description of Artificial Sequence: Synthetic oligonucleotide
aauuccaagaaccucauga

SEQ ID NO: 1538781 - RNA, 19 nt, Artificial Sequence
  Description of Artificial Sequence: Synthetic oligonucleotide
uccaagaaccucaugaucc

SEQ ID NO: 1538782 - RNA, 19 nt, Artificial Sequence
  Description of Artificial Sequence: Synthetic oligonucleotide
aucugcaugugcuuaaacc

SEQ ID NO: 1538783 - RNA, 19 nt, Artificial Sequence
  Description of Artificial Sequence: Synthetic oligonucleotide
aggaaauauccaaagaugc

SEQ ID NO: 1538784 - RNA, 19 nt, Artificial Sequence
  Description of Artificial Sequence: Synthetic oligonucleotide
ugagaguugggauuaaaag

SEQ ID NO: 1538785 - RNA, 19 nt, Artificial Sequence
  Description of Artificial Sequence: Synthetic oligonucleotide
ugauuuucgggacaugucc

SEQ ID NO: 1538786 - RNA, 19 nt, Artificial Sequence
  Description of Artificial Sequence: Synthetic oligonucleotide
agaguugggauuaaaagcg

SEQ ID NO: 1538787 - RNA, 19 nt, Artificial Sequence
  Description of Artificial Sequence: Synthetic oligonucleotide
ugaaacuucucaaggcugg

SEQ ID NO: 1538788 - RNA, 19 nt, Artificial Sequence
  Description of Artificial Sequence: Synthetic oligonucleotide
uuuggcugcagguagaaga

SEQ ID NO: 1538789 - RNA, 19 nt, Artificial Sequence
  Description of Artificial Sequence: Synthetic oligonucleotide
cugagaaugugguagacag

SEQ ID NO: 1538790 - RNA, 19 nt, Artificial Sequence
  Description of Artificial Sequence: Synthetic oligonucleotide
acgcugauaaaugucaucc

SEQ ID NO: 1538791 - RNA, 19 nt, Artificial Sequence
  Description of Artificial Sequence: Synthetic oligonucleotide
ugcacugagccuuucaugc

SEQ ID NO: 1538792 - RNA, 19 nt, Artificial Sequence
  Description of Artificial Sequence: Synthetic oligonucleotide
ugcgaugacaacauaacuc

SEQ ID NO: 1538793 - RNA, 19 nt, Artificial Sequence
  Description of Artificial Sequence: Synthetic oligonucleotide
ucagcguucacucgaaucu

SEQ ID NO: 1538794 - RNA, 19 nt, Artificial Sequence
  Description of Artificial Sequence: Synthetic oligonucleotide
ucaagcacugcauacuuug

SEQ ID NO: 1538795 - RNA, 19 nt, Artificial Sequence
  Description of Artificial Sequence: Synthetic oligonucleotide
guuccaauccaccugcugg

SEQ ID NO: 1538796 - RNA, 19 nt, Artificial Sequence
  Description of Artificial Sequence: Synthetic oligonucleotide
aaaauggggauugcgauga

SEQ ID NO: 1538797 - RNA, 19 nt, Artificial Sequence
  Description of Artificial Sequence: Synthetic oligonucleotide
aacauaacucagaaugccg

SEQ ID NO: 1538798 - RNA, 19 nt, Artificial Sequence
  Description of Artificial Sequence: Synthetic oligonucleotide
cuagucucgaaccucacag

SEQ ID NO: 1538799 - RNA, 19 nt, Artificial Sequence
  Description of Artificial Sequence: Synthetic oligonucleotide
aacagcaccccguggggcc

SEQ ID NO: 1538800 - RNA, 19 nt, Artificial Sequence
  Description of Artificial Sequence: Synthetic oligonucleotide
agucuugugauuuucggga

SEQ ID NO: 1538801 - RNA, 19 nt, Artificial Sequence
  Description of Artificial Sequence: Synthetic oligonucleotide
ugcuuaaaccuaaaauccc

SEQ ID NO: 1538802 - RNA, 19 nt, Artificial Sequence
  Description of Artificial Sequence: Synthetic oligonucleotide
acaucugagaaugugguag

SEQ ID NO: 1538803 - RNA, 19 nt, Artificial Sequence
  Description of Artificial Sequence: Synthetic oligonucleotide
aaaucccacucacucucgc

SEQ ID NO: 1538804 - RNA, 19 nt, Artificial Sequence
  Description of Artificial Sequence: Synthetic oligonucleotide
ugaggccuugcucaaaucc

SEQ ID NO: 1538805 - RNA, 19 nt, Artificial Sequence
  Description of Artificial Sequence: Synthetic oligonucleotide
caucauaccaguuccaauc

SEQ ID NO: 1538806 - RNA, 19 nt, Artificial Sequence
  Description of Artificial Sequence: Synthetic oligonucleotide
agugaaacuucucaaggcu

SEQ ID NO: 1538807 - RNA, 19 nt, Artificial Sequence
  Description of Artificial Sequence: Synthetic oligonucleotide
ucucgaaccucacagagau

SEQ ID NO: 1538808 - RNA, 19 nt, Artificial Sequence
  Description of Artificial Sequence: Synthetic oligonucleotide
acauaacucagaaugccgc

SEQ ID NO: 1538809 - RNA, 19 nt, Artificial Sequence
  Description of Artificial Sequence: Synthetic oligonucleotide
acaacauaacucagaaugc

SEQ ID NO: 1538810 - RNA, 19 nt, Artificial Sequence
  Description of Artificial Sequence: Synthetic oligonucleotide
uuuuguucaccaugguucc

SEQ ID NO: 1538811 - RNA, 19 nt, Artificial Sequence
  Description of Artificial Sequence: Synthetic oligonucleotide
ugguagacaggucaaugag

SEQ ID NO: 1538812 - RNA, 19 nt, Artificial Sequence
  Description of Artificial Sequence: Synthetic oligonucleotide
gaaugugguagacagguca

SEQ ID NO: 1538813 - RNA, 19 nt, Artificial Sequence
  Description of Artificial Sequence: Synthetic oligonucleotide
caaaguuuuguucaccaug

SEQ ID NO: 1538814 - RNA, 19 nt, Artificial Sequence
  Description of Artificial Sequence: Synthetic oligonucleotide
guuuuguucaccaugguuc

SEQ ID NO: 1538815 - RNA, 19 nt, Artificial Sequence
  Description of Artificial Sequence: Synthetic oligonucleotide
aucagcagaaccugaauca

SEQ ID NO: 1538816 - RNA, 19 nt, Artificial Sequence
  Description of Artificial Sequence: Synthetic oligonucleotide
ucgaaccucacagagaucu

SEQ ID NO: 1538817 - RNA, 19 nt, Artificial Sequence
  Description of Artificial Sequence: Synthetic oligonucleotide
ugugcguguaaccagcgac

SEQ ID NO: 1538818 - RNA, 19 nt, Artificial Sequence
  Description of Artificial Sequence: Synthetic oligonucleotide
acagucuugugauuuucgg

SEQ ID NO: 1538819 - RNA, 19 nt, Artificial Sequence
  Description of Artificial Sequence: Synthetic oligonucleotide
ugaaaauggggauugcgau

SEQ ID NO: 1538820 - RNA, 19 nt, Artificial Sequence
  Description of Artificial Sequence: Synthetic oligonucleotide
gaaaauggggauugcgaug

SEQ ID NO: 1538821 - RNA, 19 nt, Artificial Sequence
  Description of Artificial Sequence: Synthetic oligonucleotide
augagguagauacacacaa

SEQ ID NO: 1538822 - RNA, 19 nt, Artificial Sequence
  Description of Artificial Sequence: Synthetic oligonucleotide
ucugcgauuggccacccug

SEQ ID NO: 1538823 - RNA, 19 nt, Artificial Sequence
  Description of Artificial Sequence: Synthetic oligonucleotide
gaaagcggcgggcucagcg

SEQ ID NO: 1538824 - RNA, 19 nt, Artificial Sequence
  Description of Artificial Sequence: Synthetic oligonucleotide
auaacucagaaugccgccc

SEQ ID NO: 1538825 - RNA, 19 nt, Artificial Sequence
  Description of Artificial Sequence: Synthetic oligonucleotide
agucucgaaccucacagag

SEQ ID NO: 1538826 - RNA, 19 nt, Artificial Sequence
  Description of Artificial Sequence: Synthetic oligonucleotide
cuucaggggauauaucacc

SEQ ID NO: 1538827 - RNA, 19 nt, Artificial Sequence
  Description of Artificial Sequence: Synthetic oligonucleotide
agcuucgucacgaugggcc

SEQ ID NO: 1538828 - RNA, 19 nt, Artificial Sequence
  Description of Artificial Sequence: Synthetic oligonucleotide
aaacuucucaaggcugggc

SEQ ID NO: 1538829 - RNA, 19 nt, Artificial Sequence
  Description of Artificial Sequence: Synthetic oligonucleotide
aggagugaaacuucucaag

SEQ ID NO: 1538830 - RNA, 19 nt, Artificial Sequence
  Description of Artificial Sequence: Synthetic oligonucleotide
cucaugugcucuacgagcc

SEQ ID NO: 1538831 - RNA, 19 nt, Artificial Sequence
  Description of Artificial Sequence: Synthetic oligonucleotide
ugucugauggcucugcgau

SEQ ID NO: 1538832 - RNA, 19 nt, Artificial Sequence
  Description of Artificial Sequence: Synthetic oligonucleotide
ugugauuuucgggacaugu

SEQ ID NO: 1538833 - RNA, 19 nt, Artificial Sequence
  Description of Artificial Sequence: Synthetic oligonucleotide
guugaugagguagauacac

SEQ ID NO: 1538834 - RNA, 19 nt, Artificial Sequence
  Description of Artificial Sequence: Synthetic oligonucleotide
aauccugugcguguaacca

SEQ ID NO: 1538835 - RNA, 19 nt, Artificial Sequence
  Description of Artificial Sequence: Synthetic oligonucleotide
agaguuucagaacccagga

SEQ ID NO: 1538836 - RNA, 19 nt, Artificial Sequence
  Description of Artificial Sequence: Synthetic oligonucleotide
ucaaugagcugggugaagc

SEQ ID NO: 1538837 - RNA, 19 nt, Artificial Sequence
  Description of Artificial Sequence: Synthetic oligonucleotide
aaggacagucuuugcaucu

SEQ ID NO: 1538838 - RNA, 19 nt, Artificial Sequence
  Description of Artificial Sequence: Synthetic oligonucleotide
acugaaaauggggauugcg

SEQ ID NO: 1538839 - RNA, 19 nt, Artificial Sequence
  Description of Artificial Sequence: Synthetic oligonucleotide
gauauaucaccugcucccg

SEQ ID NO: 1538840 - RNA, 19 nt, Artificial Sequence
  Description of Artificial Sequence: Synthetic oligonucleotide
gucacgaugggccccaucc

SEQ ID NO: 1538841 - RNA, 19 nt, Artificial Sequence
  Description of Artificial Sequence: Synthetic oligonucleotide
uucuagucaguucccaccu

SEQ ID NO: 1538842 - RNA, 19 nt, Artificial Sequence
  Description of Artificial Sequence: Synthetic oligonucleotide
cauaacucagaaugccgcc

SEQ ID NO: 1538843 - RNA, 19 nt, Artificial Sequence
  Description of Artificial Sequence: Synthetic oligonucleotide
ugucccacgcugauaaaug

SEQ ID NO: 1538844 - RNA, 19 nt, Artificial Sequence
  Description of Artificial Sequence: Synthetic oligonucleotide
cacaaaggcauucuugcug

SEQ ID NO: 1538845 - RNA, 19 nt, Artificial Sequence
  Description of Artificial Sequence: Synthetic oligonucleotide
uucacucgaaucugcaugu

SEQ ID NO: 1538846 - RNA, 19 nt, Artificial Sequence
  Description of Artificial Sequence: Synthetic oligonucleotide
cagucuugugauuuucggg

SEQ ID NO: 1538847 - RNA, 19 nt, Artificial Sequence
  Description of Artificial Sequence: Synthetic oligonucleotide
cauaccaguuccaauccac

SEQ ID NO: 1538848 - RNA, 19 nt, Artificial Sequence
  Description of Artificial Sequence: Synthetic oligonucleotide
ucaggguagaucuccuuca

SEQ ID NO: 1538849 - RNA, 19 nt, Artificial Sequence
  Description of Artificial Sequence: Synthetic oligonucleotide
ugugucugauggcucugcg

SEQ ID NO: 1538850 - RNA, 19 nt, Artificial Sequence
  Description of Artificial Sequence: Synthetic oligonucleotide
uuuugauucuagucaguuc

SEQ ID NO: 1538851 - RNA, 19 nt, Artificial Sequence
  Description of Artificial Sequence: Synthetic oligonucleotide
uccucaugugcucuacgag

SEQ ID NO: 1538852 - RNA, 19 nt, Artificial Sequence
  Description of Artificial Sequence: Synthetic oligonucleotide
gacagguccugccaauucc

SEQ ID NO: 1538853 - RNA, 19 nt, Artificial Sequence
  Description of Artificial Sequence: Synthetic oligonucleotide
acuucucaaggcugggccg

SEQ ID NO: 1538854 - RNA, 19 nt, Artificial Sequence
  Description of Artificial Sequence: Synthetic oligonucleotide
aaagcgugcgccgcuuggc

SEQ ID NO: 1538855 - RNA, 19 nt, Artificial Sequence
  Description of Artificial Sequence: Synthetic oligonucleotide
uugauucuagucaguuccc

SEQ ID NO: 1538856 - RNA, 19 nt, Artificial Sequence
  Description of Artificial Sequence: Synthetic oligonucleotide
uugcgaugacaacauaacu

SEQ ID NO: 1538857 - RNA, 19 nt, Artificial Sequence
  Description of Artificial Sequence: Synthetic oligonucleotide
agaaccugaaucaggguag

SEQ ID NO: 1538858 - RNA, 19 nt, Artificial Sequence
  Description of Artificial Sequence: Synthetic oligonucleotide
uaaccagcgacaucugaga

SEQ ID NO: 1538859 - RNA, 19 nt, Artificial Sequence
  Description of Artificial Sequence: Synthetic oligonucleotide
guaaccagcgacaucugag

SEQ ID NO: 1538860 - RNA, 19 nt, Artificial Sequence
  Description of Artificial Sequence: Synthetic oligonucleotide
auuuucgggacauguccag

SEQ ID NO: 1538861 - RNA, 19 nt, Artificial Sequence
  Description of Artificial Sequence: Synthetic oligonucleotide
ugucccaucagugaagaau

SEQ ID NO: 1538862 - RNA, 19 nt, Artificial Sequence
  Description of Artificial Sequence: Synthetic oligonucleotide
aucaguggcuuaucagagg

SEQ ID NO: 1538863 - RNA, 19 nt, Artificial Sequence
  Description of Artificial Sequence: Synthetic oligonucleotide
uugaugagguagauacaca

SEQ ID NO: 1538864 - RNA, 19 nt, Artificial Sequence
  Description of Artificial Sequence: Synthetic oligonucleotide
ucgggacauguccagcagg

SEQ ID NO: 1538865 - RNA, 19 nt, Artificial Sequence
  Description of Artificial Sequence: Synthetic oligonucleotide
cuugccaccaagcuggaca

SEQ ID NO: 1538866 - RNA, 19 nt, Artificial Sequence
  Description of Artificial Sequence: Synthetic oligonucleotide
auuaaaagcgugcgccgcu

SEQ ID NO: 1538867 - RNA, 19 nt, Artificial Sequence
  Description of Artificial Sequence: Synthetic oligonucleotide
gaguuucagaacccaggag

SEQ ID NO: 1538868 - RNA, 19 nt, Artificial Sequence
  Description of Artificial Sequence: Synthetic oligonucleotide
gauugcgaugacaacauaa

SEQ ID NO: 1538869 - RNA, 19 nt, Artificial Sequence
  Description of Artificial Sequence: Synthetic oligonucleotide
uauaucaccugcucccgaa

SEQ ID NO: 1538870 - RNA, 19 nt, Artificial Sequence
  Description of Artificial Sequence: Synthetic oligonucleotide
uccugugcguguaaccagc

SEQ ID NO: 1538871 - RNA, 19 nt, Artificial Sequence
  Description of Artificial Sequence: Synthetic oligonucleotide
uugccaccaagcuggacag

SEQ ID NO: 1538872 - RNA, 19 nt, Artificial Sequence
  Description of Artificial Sequence: Synthetic oligonucleotide
gaagaggcgagcgaaggac

SEQ ID NO: 1538873 - RNA, 19 nt, Artificial Sequence
  Description of Artificial Sequence: Synthetic oligonucleotide
uuuggaccuguccugcaac

SEQ ID NO: 1538874 - RNA, 19 nt, Artificial Sequence
  Description of Artificial Sequence: Synthetic oligonucleotide
ugcaugugcuuaaaccuaa

SEQ ID NO: 1538875 - RNA, 19 nt, Artificial Sequence
  Description of Artificial Sequence: Synthetic oligonucleotide
cucuguagaaagcggcggg

SEQ ID NO: 1538876 - RNA, 19 nt, Artificial Sequence
  Description of Artificial Sequence: Synthetic oligonucleotide
cacugcauacuuuggcugc

SEQ ID NO: 1538877 - RNA, 19 nt, Artificial Sequence
  Description of Artificial Sequence: Synthetic oligonucleotide
aggaggaaauauccaaaga

SEQ ID NO: 1538878 - RNA, 19 nt, Artificial Sequence
  Description of Artificial Sequence: Synthetic oligonucleotide
cugauaaaugucaucccca

SEQ ID NO: 1538879 - RNA, 19 nt, Artificial Sequence
  Description of Artificial Sequence: Synthetic oligonucleotide
caguugcuggccaaugcgg

SEQ ID NO: 1538880 - RNA, 19 nt, Artificial Sequence
  Description of Artificial Sequence: Synthetic oligonucleotide
ugcucuacgagcccagcuc

SEQ ID NO: 1538881 - RNA, 19 nt, Artificial Sequence
  Description of Artificial Sequence: Synthetic oligonucleotide
guuucagaacccaggagug

SEQ ID NO: 1538882 - RNA, 19 nt, Artificial Sequence
  Description of Artificial Sequence: Synthetic oligonucleotide
guagaguucacucuccacu

SEQ ID NO: 1538883 - RNA, 19 nt, Artificial Sequence
  Description of Artificial Sequence: Synthetic oligonucleotide
cagcucuguagaaagcggc

SEQ ID NO: 1538884 - RNA, 19 nt, Artificial Sequence
  Description of Artificial Sequence: Synthetic oligonucleotide
uggaaacccgauccagcag

SEQ ID NO: 1538885 - RNA, 19 nt, Artificial Sequence
  Description of Artificial Sequence: Synthetic oligonucleotide
aaagcggcgggcucagcgu

SEQ ID NO: 1538886 - RNA, 19 nt, Artificial Sequence
  Description of Artificial Sequence: Synthetic oligonucleotide
agugaagaauggcuucugu

SEQ ID NO: 1538887 - RNA, 19 nt, Artificial Sequence
  Description of Artificial Sequence: Synthetic oligonucleotide
cucagguccuugaucagug

SEQ ID NO: 1538888 - RNA, 19 nt, Artificial Sequence
  Description of Artificial Sequence: Synthetic oligonucleotide
gaaacuucucaaggcuggg

SEQ ID NO: 1538889 - RNA, 19 nt, Artificial Sequence
  Description of Artificial Sequence: Synthetic oligonucleotide
agcgaaggacagucuuugc

SEQ ID NO: 1538890 - RNA, 19 nt, Artificial Sequence
  Description of Artificial Sequence: Synthetic oligonucleotide
uuccaauccaccugcuggu

SEQ ID NO: 1538891 - RNA, 19 nt, Artificial Sequence
  Description of Artificial Sequence: Synthetic oligonucleotide
gcgaugacaacauaacuca

SEQ ID NO: 1538892 - RNA, 19 nt, Artificial Sequence
  Description of Artificial Sequence: Synthetic oligonucleotide
uacgagcccagcucuguag

SEQ ID NO: 1538893 - RNA, 19 nt, Artificial Sequence
  Description of Artificial Sequence: Synthetic oligonucleotide
caauccugugcguguaacc

SEQ ID NO: 1538894 - RNA, 19 nt, Artificial Sequence
  Description of Artificial Sequence: Synthetic oligonucleotide
aacucagaaugccgcccag

SEQ ID NO: 1538895 - RNA, 19 nt, Artificial Sequence
  Description of Artificial Sequence: Synthetic oligonucleotide
caauguagagccagagcuc

SEQ ID NO: 1538896 - RNA, 19 nt, Artificial Sequence
  Description of Artificial Sequence: Synthetic oligonucleotide
cuagucaguucccaccuuc

SEQ ID NO: 1538897 - RNA, 19 nt, Artificial Sequence
  Description of Artificial Sequence: Synthetic oligonucleotide
aaugugguagacaggucaa

SEQ ID NO: 1538898 - RNA, 19 nt, Artificial Sequence
  Description of Artificial Sequence: Synthetic oligonucleotide
cacucgaaucugcaugugc

SEQ ID NO: 1538899 - RNA, 19 nt, Artificial Sequence
  Description of Artificial Sequence: Synthetic oligonucleotide
ucuccaauccugugcgugu

SEQ ID NO: 1538900 - RNA, 19 nt, Artificial Sequence
  Description of Artificial Sequence: Synthetic oligonucleotide
ggacauguccagcagggcc

SEQ ID NO: 1538901 - RNA, 19 nt, Artificial Sequence
  Description of Artificial Sequence: Synthetic oligonucleotide
cucagcguucacucgaauc

SEQ ID NO: 1538902 - RNA, 19 nt, Artificial Sequence
  Description of Artificial Sequence: Synthetic oligonucleotide
uucauuccauuuugauucu

SEQ ID NO: 1538903 - RNA, 19 nt, Artificial Sequence
  Description of Artificial Sequence: Synthetic oligonucleotide
aaccagcgacaucugagaa

SEQ ID NO: 1538904 - RNA, 19 nt, Artificial Sequence
  Description of Artificial Sequence: Synthetic oligonucleotide
gauuuucgggacaugucca

SEQ ID NO: 1538905 - RNA, 19 nt, Artificial Sequence
  Description of Artificial Sequence: Synthetic oligonucleotide
ugcgauuggccacccugag

SEQ ID NO: 1538906 - RNA, 19 nt, Artificial Sequence
  Description of Artificial Sequence: Synthetic oligonucleotide
uagaucuccuucaggggau

SEQ ID NO: 1538907 - RNA, 19 nt, Artificial Sequence
  Description of Artificial Sequence: Synthetic oligonucleotide
ucucuggguuugaaggagu

SEQ ID NO: 1538908 - RNA, 19 nt, Artificial Sequence
  Description of Artificial Sequence: Synthetic oligonucleotide
auccugugcguguaaccag

SEQ ID NO: 1538909 - RNA, 19 nt, Artificial Sequence
  Description of Artificial Sequence: Synthetic oligonucleotide
agcguucacucgaaucugc

SEQ ID NO: 1538910 - RNA, 19 nt, Artificial Sequence
  Description of Artificial Sequence: Synthetic oligonucleotide
ggggcaacgauggaaaccc

SEQ ID NO: 1538911 - RNA, 19 nt, Artificial Sequence
  Description of Artificial Sequence: Synthetic oligonucleotide
ccucaugugcucuacgagc

SEQ ID NO: 1538912 - RNA, 19 nt, Artificial Sequence
  Description of Artificial Sequence: Synthetic oligonucleotide
ucacucucgccuaggcucu

SEQ ID NO: 1538913 - RNA, 19 nt, Artificial Sequence
  Description of Artificial Sequence: Synthetic oligonucleotide
aggcgagcgaaggacaguc

SEQ ID NO: 1538914 - RNA, 19 nt, Artificial Sequence
  Description of Artificial Sequence: Synthetic oligonucleotide
guggcuuaucagaggaggg

SEQ ID NO: 1538915 - RNA, 19 nt, Artificial Sequence
  Description of Artificial Sequence: Synthetic oligonucleotide
uccagcagaaaagcugugu

SEQ ID NO: 1538916 - RNA, 19 nt, Artificial Sequence
  Description of Artificial Sequence: Synthetic oligonucleotide
uagucucgaaccucacaga

SEQ ID NO: 1538917 - RNA, 19 nt, Artificial Sequence
  Description of Artificial Sequence: Synthetic oligonucleotide
ugacaacauaacucagaau

SEQ ID NO: 1538918 - RNA, 19 nt, Artificial Sequence
  Description of Artificial Sequence: Synthetic oligonucleotide
ugaccagggugcuaagcuc

SEQ ID NO: 1538919 - RNA, 19 nt, Artificial Sequence
  Description of Artificial Sequence: Synthetic oligonucleotide
auauaucaccugcucccga

SEQ ID NO: 1538920 - RNA, 19 nt, Artificial Sequence
  Description of Artificial Sequence: Synthetic oligonucleotide
cugagaguugggauuaaaa

SEQ ID NO: 1538921 - RNA, 19 nt, Artificial Sequence
  Description of Artificial Sequence: Synthetic oligonucleotide
ucccacgcugauaaauguc

SEQ ID NO: 1538922 - RNA, 19 nt, Artificial Sequence
  Description of Artificial Sequence: Synthetic oligonucleotide
cagaaccugaaucagggua

SEQ ID NO: 1538923 - RNA, 19 nt, Artificial Sequence
  Description of Artificial Sequence: Synthetic oligonucleotide
ugagccuuucaugcucucc

SEQ ID NO: 1538924 - RNA, 19 nt, Artificial Sequence
  Description of Artificial Sequence: Synthetic oligonucleotide
uuggaccuguccugcaacu

SEQ ID NO: 1538925 - RNA, 19 nt, Artificial Sequence
  Description of Artificial Sequence: Synthetic oligonucleotide
acgauggaaacccgaucca

SEQ ID NO: 1538926 - RNA, 19 nt, Artificial Sequence
  Description of Artificial Sequence: Synthetic oligonucleotide
gacagucuuugcaucuccc

SEQ ID NO: 1538927 - RNA, 19 nt, Artificial Sequence
  Description of Artificial Sequence: Synthetic oligonucleotide
augggccccauccaaaguu

SEQ ID NO: 1538928 - RNA, 19 nt, Artificial Sequence
  Description of Artificial Sequence: Synthetic oligonucleotide
aagcgugcgccgcuuggcu

SEQ ID NO: 1538929 - RNA, 19 nt, Artificial Sequence
  Description of Artificial Sequence: Synthetic oligonucleotide
ccaguuccaauccaccugc

SEQ ID NO: 1538930 - RNA, 19 nt, Artificial Sequence
  Description of Artificial Sequence: Synthetic oligonucleotide
ucacgaugggccccaucca

SEQ ID NO: 1538931 - RNA, 19 nt, Artificial Sequence
  Description of Artificial Sequence: Synthetic oligonucleotide
gcgacaucugagaaugugg

SEQ ID NO: 1538932 - RNA, 19 nt, Artificial Sequence
  Description of Artificial Sequence: Synthetic oligonucleotide
ucccgaagugucccaucag

SEQ ID NO: 1538933 - RNA, 19 nt, Artificial Sequence
  Description of Artificial Sequence: Synthetic oligonucleotide
cacgcugauaaaugucauc

SEQ ID NO: 1538934 - RNA, 19 nt, Artificial Sequence
  Description of Artificial Sequence: Synthetic oligonucleotide
ucuguagcuuuggaccugu

SEQ ID NO: 1538935 - RNA, 19 nt, Artificial Sequence
  Description of Artificial Sequence: Synthetic oligonucleotide
guggggcccaaaaucagcc

SEQ ID NO: 1538936 - RNA, 19 nt, Artificial Sequence
  Description of Artificial Sequence: Synthetic oligonucleotide
ggaacagcaccccgugggg

SEQ ID NO: 1538937 - RNA, 19 nt, Artificial Sequence
  Description of Artificial Sequence: Synthetic oligonucleotide
ccaguugcuggccaaugcg

SEQ ID NO: 1538938 - RNA, 19 nt, Artificial Sequence
  Description of Artificial Sequence: Synthetic oligonucleotide
accgccuguccuugccacc

SEQ ID NO: 1538939 - RNA, 19 nt, Artificial Sequence
  Description of Artificial Sequence: Synthetic oligonucleotide
ccaauguagagccagagcu

SEQ ID NO: 1538940 - RNA, 19 nt, Artificial Sequence
  Description of Artificial Sequence: Synthetic oligonucleotide
caggguagaucuccuucag

SEQ ID NO: 1538941 - RNA, 19 nt, Artificial Sequence
  Description of Artificial Sequence: Synthetic oligonucleotide
cucuggguuugaaggaguc

SEQ ID NO: 1538942 - RNA, 19 nt, Artificial Sequence
  Description of Artificial Sequence: Synthetic oligonucleotide
acccgauccagcagaaaag

SEQ ID NO: 1538943 - RNA, 19 nt, Artificial Sequence
  Description of Artificial Sequence: Synthetic oligonucleotide
ucuacgagcccagcucugu

SEQ ID NO: 1538944 - RNA, 19 nt, Artificial Sequence
  Description of Artificial Sequence: Synthetic oligonucleotide
caacgauggaaacccgauc

SEQ ID NO: 1538945 - RNA, 19 nt, Artificial Sequence
  Description of Artificial Sequence: Synthetic oligonucleotide
ugccaauuccaagaaccuc

SEQ ID NO: 1538946 - RNA, 19 nt, Artificial Sequence
  Description of Artificial Sequence: Synthetic oligonucleotide
ccugaaucaggguagaucu

SEQ ID NO: 1538947 - RNA, 19 nt, Artificial Sequence
  Description of Artificial Sequence: Synthetic oligonucleotide
caggagugaaacuucucaa

SEQ ID NO: 1538948 - RNA, 19 nt, Artificial Sequence
  Description of Artificial Sequence: Synthetic oligonucleotide
uccauggaucccacugaaa

SEQ ID NO: 1538949 - RNA, 19 nt, Artificial Sequence
  Description of Artificial Sequence: Synthetic oligonucleotide
ugaagcaguugaugaggua

SEQ ID NO: 1538950 - RNA, 19 nt, Artificial Sequence
  Description of Artificial Sequence: Synthetic oligonucleotide
cgauccagcagaaaagcug

SEQ ID NO: 1538951 - RNA, 19 nt, Artificial Sequence
  Description of Artificial Sequence: Synthetic oligonucleotide
ugcuaagcucuguggggcu

SEQ ID NO: 1538952 - RNA, 19 nt, Artificial Sequence
  Description of Artificial Sequence: Synthetic oligonucleotide
guagaaagcggcgggcuca

SEQ ID NO: 1538953 - RNA, 19 nt, Artificial Sequence
  Description of Artificial Sequence: Synthetic oligonucleotide
ugcccuucacagaccuuca

SEQ ID NO: 1538954 - RNA, 19 nt, Artificial Sequence
  Description of Artificial Sequence: Synthetic oligonucleotide
cagaccuucaggcucaggu

SEQ ID NO: 1538955 - RNA, 19 nt, Artificial Sequence
  Description of Artificial Sequence: Synthetic oligonucleotide
cacucacucucgccuaggc

SEQ ID NO: 1538956 - RNA, 19 nt, Artificial Sequence
  Description of Artificial Sequence: Synthetic oligonucleotide
gaacagcaccccguggggc

SEQ ID NO: 1538957 - RNA, 19 nt, Artificial Sequence
  Description of Artificial Sequence: Synthetic oligonucleotide
caauccaccugcuggucca

SEQ ID NO: 1538958 - RNA, 19 nt, Artificial Sequence
  Description of Artificial Sequence: Synthetic oligonucleotide
gcacugcauacuuuggcug

SEQ ID NO: 1538959 - RNA, 19 nt, Artificial Sequence
  Description of Artificial Sequence: Synthetic oligonucleotide
augccgcccagauagucaa

SEQ ID NO: 1538960 - RNA, 19 nt, Artificial Sequence
  Description of Artificial Sequence: Synthetic oligonucleotide
uggggauugcgaugacaac

SEQ ID NO: 1538961 - RNA, 19 nt, Artificial Sequence
  Description of Artificial Sequence: Synthetic oligonucleotide
cuaggcucucacagucuug

SEQ ID NO: 1538962 - RNA, 19 nt, Artificial Sequence
  Description of Artificial Sequence: Synthetic oligonucleotide
uagaaagcggcgggcucag

SEQ ID NO: 1538963 - RNA, 19 nt, Artificial Sequence
  Description of Artificial Sequence: Synthetic oligonucleotide
agguguugaugccaaugua

SEQ ID NO: 1538964 - RNA, 19 nt, Artificial Sequence
  Description of Artificial Sequence: Synthetic oligonucleotide
agaggcgagcgaaggacag

SEQ ID NO: 1538965 - RNA, 19 nt, Artificial Sequence
  Description of Artificial Sequence: Synthetic oligonucleotide
gggaggucuugccagugcc

SEQ ID NO: 1538966 - RNA, 19 nt, Artificial Sequence
  Description of Artificial Sequence: Synthetic oligonucleotide
aguugcuggccaaugcggu

SEQ ID NO: 1538967 - RNA, 19 nt, Artificial Sequence
  Description of Artificial Sequence: Synthetic oligonucleotide
augucccacgcugauaaau

SEQ ID NO: 1538968 - RNA, 19 nt, Artificial Sequence
  Description of Artificial Sequence: Synthetic oligonucleotide
gugauuuucgggacauguc

SEQ ID NO: 1538969 - RNA, 19 nt, Artificial Sequence
  Description of Artificial Sequence: Synthetic oligonucleotide
ggggauauaucaccugcuc

SEQ ID NO: 1538970 - RNA, 19 nt, Artificial Sequence
  Description of Artificial Sequence: Synthetic oligonucleotide
agccuuucaugcucuccca

SEQ ID NO: 1538971 - RNA, 19 nt, Artificial Sequence
  Description of Artificial Sequence: Synthetic oligonucleotide
gcucuguagaaagcggcgg

SEQ ID NO: 1538972 - RNA, 19 nt, Artificial Sequence
  Description of Artificial Sequence: Synthetic oligonucleotide
uuaaaagcgugcgccgcuu

SEQ ID NO: 1538973 - RNA, 19 nt, Artificial Sequence
  Description of Artificial Sequence: Synthetic oligonucleotide
gaaugccgcccagauaguc

SEQ ID NO: 1538974 - RNA, 19 nt, Artificial Sequence
  Description of Artificial Sequence: Synthetic oligonucleotide
ggcucucacagucuuguga

SEQ ID NO: 1538975 - RNA, 19 nt, Artificial Sequence
  Description of Artificial Sequence: Synthetic oligonucleotide
caucaucagcagaaccuga

SEQ ID NO: 1538976 - RNA, 19 nt, Artificial Sequence
  Description of Artificial Sequence: Synthetic oligonucleotide
ucuagucaguucccaccuu

SEQ ID NO: 1538977 - RNA, 19 nt, Artificial Sequence
  Description of Artificial Sequence: Synthetic oligonucleotide
caauuccaagaaccucaug

SEQ ID NO: 1538978 - RNA, 19 nt, Artificial Sequence
  Description of Artificial Sequence: Synthetic oligonucleotide
gcgaaggacagucuuugca

SEQ ID NO: 1538979 - RNA, 19 nt, Artificial Sequence
  Description of Artificial Sequence: Synthetic oligonucleotide
uucgucacgaugggcccca

SEQ ID NO: 1538980 - RNA, 19 nt, Artificial Sequence
  Description of Artificial Sequence: Synthetic oligonucleotide
gaccuguccugcaacucac

SEQ ID NO: 1538981 - RNA, 19 nt, Artificial Sequence
  Description of Artificial Sequence: Synthetic oligonucleotide
acccgcagcagggaggucu

SEQ ID NO: 1538982 - RNA, 19 nt, Artificial Sequence
  Description of Artificial Sequence: Synthetic oligonucleotide
caugcucucccacaggccu

SEQ ID NO: 1538983 - RNA, 19 nt, Artificial Sequence
  Description of Artificial Sequence: Synthetic oligonucleotide
cuguguugccugugaugag

SEQ ID NO: 1538984 - RNA, 19 nt, Artificial Sequence
  Description of Artificial Sequence: Synthetic oligonucleotide
ccaggagugaaacuucuca

SEQ ID NO: 1538985 - RNA, 19 nt, Artificial Sequence
  Description of Artificial Sequence: Synthetic oligonucleotide
gugucugauggcucugcga

SEQ ID NO: 1538986 - RNA, 19 nt, Artificial Sequence
  Description of Artificial Sequence: Synthetic oligonucleotide
cagaccgccuguccuugcc

SEQ ID NO: 1538987 - RNA, 19 nt, Artificial Sequence
  Description of Artificial Sequence: Synthetic oligonucleotide
aggggauauaucaccugcu

SEQ ID NO: 1538988 - RNA, 19 nt, Artificial Sequence
  Description of Artificial Sequence: Synthetic oligonucleotide
gauagucaaagguguugau

SEQ ID NO: 1538989 - RNA, 19 nt, Artificial Sequence
  Description of Artificial Sequence: Synthetic oligonucleotide
ccauggaucccacugaaaa

SEQ ID NO: 1538990 - RNA, 19 nt, Artificial Sequence
  Description of Artificial Sequence: Synthetic oligonucleotide
ucacucgaaucugcaugug

SEQ ID NO: 1538991 - RNA, 19 nt, Artificial Sequence
  Description of Artificial Sequence: Synthetic oligonucleotide
cucaaaucccacucacucu

SEQ ID NO: 1538992 - RNA, 19 nt, Artificial Sequence
  Description of Artificial Sequence: Synthetic oligonucleotide
uccagaccgccuguccuug

SEQ ID NO: 1538993 - RNA, 19 nt, Artificial Sequence
  Description of Artificial Sequence: Synthetic oligonucleotide
gaaccugaaucaggguaga

SEQ ID NO: 1538994 - RNA, 19 nt, Artificial Sequence
  Description of Artificial Sequence: Synthetic oligonucleotide
acucugcccuucacagacc

SEQ ID NO: 1538995 - RNA, 19 nt, Artificial Sequence
  Description of Artificial Sequence: Synthetic oligonucleotide
gucaaugagcugggugaag

SEQ ID NO: 1538996 - RNA, 19 nt, Artificial Sequence
  Description of Artificial Sequence: Synthetic oligonucleotide
caaaaucagccagcaucug

SEQ ID NO: 1538997 - RNA, 19 nt, Artificial Sequence
  Description of Artificial Sequence: Synthetic oligonucleotide
ucuggacaucagcucucuc

SEQ ID NO: 1538998 - RNA, 19 nt, Artificial Sequence
  Description of Artificial Sequence: Synthetic oligonucleotide
ccgaagugucccaucagug

SEQ ID NO: 1538999 - RNA, 19 nt, Artificial Sequence
  Description of Artificial Sequence: Synthetic oligonucleotide
caugguucccaggaggaaa

SEQ ID NO: 1539000 - RNA, 19 nt, Artificial Sequence
  Description of Artificial Sequence: Synthetic oligonucleotide
cucccgaagugucccauca

SEQ ID NO: 1539001 - RNA, 19 nt, Artificial Sequence
  Description of Artificial Sequence: Synthetic oligonucleotide
gggccgaugucccacgcug

SEQ ID NO: 1539002 - RNA, 19 nt, Artificial Sequence
  Description of Artificial Sequence: Synthetic oligonucleotide
cugauggcucugcgauugg

SEQ ID NO: 1539003 - RNA, 19 nt, Artificial Sequence
  Description of Artificial Sequence: Synthetic oligonucleotide
ugcgguccguccucaugug

SEQ ID NO: 1539004 - RNA, 19 nt, Artificial Sequence
  Description of Artificial Sequence: Synthetic oligonucleotide
ucuugcugaccagggugcu

SEQ ID NO: 1539005 - RNA, 19 nt, Artificial Sequence
  Description of Artificial Sequence: Synthetic oligonucleotide
ccucaugauccucucauca

SEQ ID NO: 1539006 - RNA, 19 nt, Artificial Sequence
  Description of Artificial Sequence: Synthetic oligonucleotide
aagcggcgggcucagcguu

SEQ ID NO: 1539007 - RNA, 19 nt, Artificial Sequence
  Description of Artificial Sequence: Synthetic oligonucleotide
uugugauuuucgggacaug

SEQ ID NO: 1539008 - RNA, 19 nt, Artificial Sequence
  Description of Artificial Sequence: Synthetic oligonucleotide
gcuucgucacgaugggccc

SEQ ID NO: 1539009 - RNA, 19 nt, Artificial Sequence
  Description of Artificial Sequence: Synthetic oligonucleotide
cucuacgagcccagcucug

SEQ ID NO: 1539010 - RNA, 19 nt, Artificial Sequence
  Description of Artificial Sequence: Synthetic oligonucleotide
cugcgauuggccacccuga

SEQ ID NO: 1539011 - RNA, 19 nt, Artificial Sequence
  Description of Artificial Sequence: Synthetic oligonucleotide
cccacgcugauaaauguca

SEQ ID NO: 1539012 - RNA, 19 nt, Artificial Sequence
  Description of Artificial Sequence: Synthetic oligonucleotide
cuucgucacgaugggcccc

SEQ ID NO: 1539013 - RNA, 19 nt, Artificial Sequence
  Description of Artificial Sequence: Synthetic oligonucleotide
ggaaauauccaaagaugcu

SEQ ID NO: 1539014 - RNA, 19 nt, Artificial Sequence
  Description of Artificial Sequence: Synthetic oligonucleotide
gcgauuggccacccugagg

SEQ ID NO: 1539015 - RNA, 19 nt, Artificial Sequence
  Description of Artificial Sequence: Synthetic oligonucleotide
guggcaggaacagcacccc

SEQ ID NO: 1539016 - RNA, 19 nt, Artificial Sequence
  Description of Artificial Sequence: Synthetic oligonucleotide
aaccugaaucaggguagau

SEQ ID NO: 1539017 - RNA, 19 nt, Artificial Sequence
  Description of Artificial Sequence: Synthetic oligonucleotide
ugcugaccagggugcuaag

SEQ ID NO: 1539018 - RNA, 19 nt, Artificial Sequence
  Description of Artificial Sequence: Synthetic oligonucleotide
cagcagaaaagcugugucu

SEQ ID NO: 1539019 - RNA, 19 nt, Artificial Sequence
  Description of Artificial Sequence: Synthetic oligonucleotide
caggcuagucucgaaccuc

SEQ ID NO: 1539020 - RNA, 19 nt, Artificial Sequence
  Description of Artificial Sequence: Synthetic oligonucleotide
cagcguucacucgaaucug

SEQ ID NO: 1539021 - RNA, 19 nt, Artificial Sequence
  Description of Artificial Sequence: Synthetic oligonucleotide
gaccagggugcuaagcucu

SEQ ID NO: 1539022 - RNA, 19 nt, Artificial Sequence
  Description of Artificial Sequence: Synthetic oligonucleotide
cagagcucucuggacauca

SEQ ID NO: 1539023 - RNA, 19 nt, Artificial Sequence
  Description of Artificial Sequence: Synthetic oligonucleotide
uccaauccaccugcugguc

SEQ ID NO: 1539024 - RNA, 19 nt, Artificial Sequence
  Description of Artificial Sequence: Synthetic oligonucleotide
gaaacccgauccagcagaa

SEQ ID NO: 1539025 - RNA, 19 nt, Artificial Sequence
  Description of Artificial Sequence: Synthetic oligonucleotide
ggagucucugcagccugcg

SEQ ID NO: 1539026 - RNA, 19 nt, Artificial Sequence
  Description of Artificial Sequence: Synthetic oligonucleotide
cuucucaaggcugggccga

SEQ ID NO: 1539027 - RNA, 19 nt, Artificial Sequence
  Description of Artificial Sequence: Synthetic oligonucleotide
cuccauggaucccacugaa

SEQ ID NO: 1539028 - RNA, 19 nt, Artificial Sequence
  Description of Artificial Sequence: Synthetic oligonucleotide
ccugugcguguaaccagcg

SEQ ID NO: 1539029 - RNA, 19 nt, Artificial Sequence
  Description of Artificial Sequence: Synthetic oligonucleotide
aaacccgauccagcagaaa

SEQ ID NO: 1539030 - RNA, 19 nt, Artificial Sequence
  Description of Artificial Sequence: Synthetic oligonucleotide
augagcagacucugcccuu

SEQ ID NO: 1539031 - RNA, 19 nt, Artificial Sequence
  Description of Artificial Sequence: Synthetic oligonucleotide
gucucgaaccucacagaga

SEQ ID NO: 1539032 - RNA, 19 nt, Artificial Sequence
  Description of Artificial Sequence: Synthetic oligonucleotide
accugcugguccagaccgc

SEQ ID NO: 1539033 - RNA, 19 nt, Artificial Sequence
  Description of Artificial Sequence: Synthetic oligonucleotide
cuggggacaggacaucaua

SEQ ID NO: 1539034 - RNA, 19 nt, Artificial Sequence
  Description of Artificial Sequence: Synthetic oligonucleotide
augugcucuacgagcccag

SEQ ID NO: 1539035 - RNA, 19 nt, Artificial Sequence
  Description of Artificial Sequence: Synthetic oligonucleotide
gaguugggauuaaaagcgu

SEQ ID NO: 1539036 - RNA, 19 nt, Artificial Sequence
  Description of Artificial Sequence: Synthetic oligonucleotide
cucaugauccucucaucau

SEQ ID NO: 1539037 - RNA, 19 nt, Artificial Sequence
  Description of Artificial Sequence: Synthetic oligonucleotide
gcuagucucgaaccucaca

SEQ ID NO: 1539038 - RNA, 19 nt, Artificial Sequence
  Description of Artificial Sequence: Synthetic oligonucleotide
ggacagguccugccaauuc

SEQ ID NO: 1539039 - RNA, 19 nt, Artificial Sequence
  Description of Artificial Sequence: Synthetic oligonucleotide
uguggggcucaggucucca

SEQ ID NO: 1539040 - RNA, 19 nt, Artificial Sequence
  Description of Artificial Sequence: Synthetic oligonucleotide
gucccacgcugauaaaugu

SEQ ID NO: 1539041 - RNA, 19 nt, Artificial Sequence
  Description of Artificial Sequence: Synthetic oligonucleotide
cucucgccuaggcucucac

SEQ ID NO: 1539042 - RNA, 19 nt, Artificial Sequence
  Description of Artificial Sequence: Synthetic oligonucleotide
gaugggccccauccaaagu

SEQ ID NO: 1539043 - RNA, 19 nt, Artificial Sequence
  Description of Artificial Sequence: Synthetic oligonucleotide
cgcugauaaaugucauccc

SEQ ID NO: 1539044 - RNA, 19 nt, Artificial Sequence
  Description of Artificial Sequence: Synthetic oligonucleotide
cgaugacaacauaacucag

SEQ ID NO: 1539045 - RNA, 19 nt, Artificial Sequence
  Description of Artificial Sequence: Synthetic oligonucleotide
cguguaaccagcgacaucu

SEQ ID NO: 1539046 - RNA, 19 nt, Artificial Sequence
  Description of Artificial Sequence: Synthetic oligonucleotide
gccgcccagauagucaaag

SEQ ID NO: 1539047 - RNA, 19 nt, Artificial Sequence
  Description of Artificial Sequence: Synthetic oligonucleotide
uccguccucaugugcucua

SEQ ID NO: 1539048 - RNA, 19 nt, Artificial Sequence
  Description of Artificial Sequence: Synthetic oligonucleotide
cucgaaccucacagagauc

SEQ ID NO: 1539049 - RNA, 19 nt, Artificial Sequence
  Description of Artificial Sequence: Synthetic oligonucleotide
cuaagcucuguggggcuca

SEQ ID NO: 1539050 - RNA, 19 nt, Artificial Sequence
  Description of Artificial Sequence: Synthetic oligonucleotide
cucaaggcugggccgaugu

SEQ ID NO: 1539051 - RNA, 19 nt, Artificial Sequence
  Description of Artificial Sequence: Synthetic oligonucleotide
gccgcuuggcuucauucca

SEQ ID NO: 1539052 - RNA, 19 nt, Artificial Sequence
  Description of Artificial Sequence: Synthetic oligonucleotide
gcgggcucagcguucacuc

SEQ ID NO: 1539053 - RNA, 19 nt, Artificial Sequence
  Description of Artificial Sequence: Synthetic oligonucleotide
gcugggccgaugucccacg

SEQ ID NO: 1539054 - RNA, 19 nt, Artificial Sequence
  Description of Artificial Sequence: Synthetic oligonucleotide
ggcucugcgauuggccacc

SEQ ID NO: 1539055 - RNA, 19 nt, Artificial Sequence
  Description of Artificial Sequence: Synthetic oligonucleotide
cugcgguccguccucaugu

SEQ ID NO: 1539056 - RNA, 19 nt, Artificial Sequence
  Description of Artificial Sequence: Synthetic oligonucleotide
cugggccgaugucccacgc

SEQ ID NO: 1539057 - RNA, 19 nt, Artificial Sequence
  Description of Artificial Sequence: Synthetic oligonucleotide
cauucuugcugaccagggu

SEQ ID NO: 1539058 - RNA, 19 nt, Artificial Sequence
  Description of Artificial Sequence: Synthetic oligonucleotide
ggcaacgauggaaacccga

SEQ ID NO: 1539059 - RNA, 19 nt, Artificial Sequence
  Description of Artificial Sequence: Synthetic oligonucleotide
cguggggcccaaaaucagc

SEQ ID NO: 1539060 - RNA, 19 nt, Artificial Sequence
  Description of Artificial Sequence: Synthetic oligonucleotide
ccgcccagauagucaaagg

SEQ ID NO: 1539061 - RNA, 19 nt, Artificial Sequence
  Description of Artificial Sequence: Synthetic oligonucleotide
cgaagugucccaucaguga

SEQ ID NO: 1539062 - RNA, 19 nt, Artificial Sequence
  Description of Artificial Sequence: Synthetic oligonucleotide
ugcucccgaagugucccau

SEQ ID NO: 1539063 - RNA, 19 nt, Artificial Sequence
  Description of Artificial Sequence: Synthetic oligonucleotide
aucuccuucaggggauaua

SEQ ID NO: 1539064 - RNA, 19 nt, Artificial Sequence
  Description of Artificial Sequence: Synthetic oligonucleotide
cugugcguguaaccagcga

SEQ ID NO: 1539065 - RNA, 19 nt, Artificial Sequence
  Description of Artificial Sequence: Synthetic oligonucleotide
gcugaccagggugcuaagc

SEQ ID NO: 1539066 - RNA, 19 nt, Artificial Sequence
  Description of Artificial Sequence: Synthetic oligonucleotide
agcgugcgccgcuuggcuu

SEQ ID NO: 1539067 - RNA, 19 nt, Artificial Sequence
  Description of Artificial Sequence: Synthetic oligonucleotide
cgaugggccccauccaaag

SEQ ID NO: 1539068 - RNA, 19 nt, Artificial Sequence
  Description of Artificial Sequence: Synthetic oligonucleotide
acccugaggccuugcucaa

SEQ ID NO: 1539069 - RNA, 19 nt, Artificial Sequence
  Description of Artificial Sequence: Synthetic oligonucleotide
cgauggaaacccgauccag

SEQ ID NO: 1539070 - RNA, 19 nt, Artificial Sequence
  Description of Artificial Sequence: Synthetic oligonucleotide
agaaugccgcccagauagu

SEQ ID NO: 1539071 - RNA, 19 nt, Artificial Sequence
  Description of Artificial Sequence: Synthetic oligonucleotide
ugcgccgcuuggcuucauu

SEQ ID NO: 1539072 - RNA, 19 nt, Artificial Sequence
  Description of Artificial Sequence: Synthetic oligonucleotide
ccugcugguccagaccgcc

SEQ ID NO: 1539073 - RNA, 19 nt, Artificial Sequence
  Description of Artificial Sequence: Synthetic oligonucleotide
acgaugggccccauccaaa

SEQ ID NO: 1539074 - RNA, 19 nt, Artificial Sequence
  Description of Artificial Sequence: Synthetic oligonucleotide
gguccguccucaugugcuc

SEQ ID NO: 1539075 - RNA, 19 nt, Artificial Sequence
  Description of Artificial Sequence: Synthetic oligonucleotide
gugcucuacgagcccagcu

SEQ ID NO: 1539076 - RNA, 19 nt, Artificial Sequence
  Description of Artificial Sequence: Synthetic oligonucleotide
uucucaaggcugggccgau

SEQ ID NO: 1539077 - RNA, 19 nt, Artificial Sequence
  Description of Artificial Sequence: Synthetic oligonucleotide
gccuguccuugccaccaag

SEQ ID NO: 1539078 - RNA, 19 nt, Artificial Sequence
  Description of Artificial Sequence: Synthetic oligonucleotide
cagguccugccaauuccaa

SEQ ID NO: 1539079 - RNA, 19 nt, Artificial Sequence
  Description of Artificial Sequence: Synthetic oligonucleotide
gcgguagaguucacucucc

SEQ ID NO: 1539080 - RNA, 19 nt, Artificial Sequence
  Description of Artificial Sequence: Synthetic oligonucleotide
ugccgcccagauagucaaa

SEQ ID NO: 1539081 - RNA, 19 nt, Artificial Sequence
  Description of Artificial Sequence: Synthetic oligonucleotide
uccccaguugcuggccaau

SEQ ID NO: 1539082 - RNA, 19 nt, Artificial Sequence
  Description of Artificial Sequence: Synthetic oligonucleotide
cuguggggcucaggucucc

SEQ ID NO: 1539083 - RNA, 19 nt, Artificial Sequence
  Description of Artificial Sequence: Synthetic oligonucleotide
ggccccauccaaaguuuug

SEQ ID NO: 1539084 - RNA, 19 nt, Artificial Sequence
  Description of Artificial Sequence: Synthetic oligonucleotide
caucagcucucucuggguu

SEQ ID NO: 1539085 - RNA, 19 nt, Artificial Sequence
  Description of Artificial Sequence: Synthetic oligonucleotide
gcucuacgagcccagcucu

SEQ ID NO: 1539086 - RNA, 19 nt, Artificial Sequence
  Description of Artificial Sequence: Synthetic oligonucleotide
cagccugcgguccguccuc

SEQ ID NO: 1539087 - RNA, 19 nt, Artificial Sequence
  Description of Artificial Sequence: Synthetic oligonucleotide
ggucaaugagcugggugaa

SEQ ID NO: 1539088 - RNA, 19 nt, Artificial Sequence
  Description of Artificial Sequence: Synthetic oligonucleotide
agcggcgggcucagcguuc

SEQ ID NO: 1539089 - RNA, 19 nt, Artificial Sequence
  Description of Artificial Sequence: Synthetic oligonucleotide
gcgccgcuuggcuucauuc

SEQ ID NO: 1539090 - RNA, 19 nt, Artificial Sequence
  Description of Artificial Sequence: Synthetic oligonucleotide
gcgguccguccucaugugc

SEQ ID NO: 1539091 - RNA, 19 nt, Artificial Sequence
  Description of Artificial Sequence: Synthetic oligonucleotide
cccaggagugaaacuucuc

SEQ ID NO: 1539092 - RNA, 19 nt, Artificial Sequence
  Description of Artificial Sequence: Synthetic oligonucleotide
gggcaacgauggaaacccg

SEQ ID NO: 1539093 - RNA, 19 nt, Artificial Sequence
  Description of Artificial Sequence: Synthetic oligonucleotide
cuacgagcccagcucugua

SEQ ID NO: 1539094 - RNA, 19 nt, Artificial Sequence
  Description of Artificial Sequence: Synthetic oligonucleotide
caaugcgguagaguucacu

SEQ ID NO: 1539095 - RNA, 19 nt, Artificial Sequence
  Description of Artificial Sequence: Synthetic oligonucleotide
cacagaccuucaggcucag

SEQ ID NO: 1539096 - RNA, 19 nt, Artificial Sequence
  Description of Artificial Sequence: Synthetic oligonucleotide
gcgugcgccgcuuggcuuc

SEQ ID NO: 1539097 - RNA, 19 nt, Artificial Sequence
  Description of Artificial Sequence: Synthetic oligonucleotide
ccugcgguccguccucaug

SEQ ID NO: 1539098 - RNA, 19 nt, Artificial Sequence
  Description of Artificial Sequence: Synthetic oligonucleotide
gugucccaucagugaagaa

SEQ ID NO: 1539099 - RNA, 19 nt, Artificial Sequence
  Description of Artificial Sequence: Synthetic oligonucleotide
gcuaagcucuguggggcuc

SEQ ID NO: 1539100 - RNA, 19 nt, Artificial Sequence
  Description of Artificial Sequence: Synthetic oligonucleotide
ccaccaagcuggacagguc

SEQ ID NO: 1539101 - RNA, 19 nt, Artificial Sequence
  Description of Artificial Sequence: Synthetic oligonucleotide
gcaacgauggaaacccgau

SEQ ID NO: 1539102 - RNA, 19 nt, Artificial Sequence
  Description of Artificial Sequence: Synthetic oligonucleotide
gccaccaagcuggacaggu

SEQ ID NO: 1539103 - RNA, 19 nt, Artificial Sequence
  Description of Artificial Sequence: Synthetic oligonucleotide
gcguucacucgaaucugca

SEQ ID NO: 1539104 - RNA, 19 nt, Artificial Sequence
  Description of Artificial Sequence: Synthetic oligonucleotide
cgaaggacagucuuugcau

SEQ ID NO: 1539105 - RNA, 19 nt, Artificial Sequence
  Description of Artificial Sequence: Synthetic oligonucleotide
ggauugcgaugacaacaua

SEQ ID NO: 1539106 - RNA, 19 nt, Artificial Sequence
  Description of Artificial Sequence: Synthetic oligonucleotide
gcuggccaaugcgguagag

SEQ ID NO: 1539107 - RNA, 19 nt, Artificial Sequence
  Description of Artificial Sequence: Synthetic oligonucleotide
cgaaccucacagagaucug

SEQ ID NO: 1539108 - RNA, 19 nt, Artificial Sequence
  Description of Artificial Sequence: Synthetic oligonucleotide
gcguguaaccagcgacauc

SEQ ID NO: 1539109 - RNA, 19 nt, Artificial Sequence
  Description of Artificial Sequence: Synthetic oligonucleotide
gaggcgagcgaaggacagu

SEQ ID NO: 1539110 - RNA, 19 nt, Artificial Sequence
  Description of Artificial Sequence: Synthetic oligonucleotide
gcucccgaagugucccauc

SEQ ID NO: 1539111 - RNA, 19 nt, Artificial Sequence
  Description of Artificial Sequence: Synthetic oligonucleotide
ccugaagcucuccaauccu

SEQ ID NO: 1539112 - RNA, 19 nt, Artificial Sequence
  Description of Artificial Sequence: Synthetic oligonucleotide
guccagaccgccuguccuu

SEQ ID NO: 1539113 - RNA, 19 nt, Artificial Sequence
  Description of Artificial Sequence: Synthetic oligonucleotide
cuugcugaccagggugcua

SEQ ID NO: 1539114 - RNA, 19 nt, Artificial Sequence
  Description of Artificial Sequence: Synthetic oligonucleotide
gccccauccaaaguuuugu

SEQ ID NO: 1539115 - RNA, 19 nt, Artificial Sequence
  Description of Artificial Sequence: Synthetic oligonucleotide
cuggacagguccugccaau

SEQ ID NO: 1539116 - RNA, 19 nt, Artificial Sequence
  Description of Artificial Sequence: Synthetic oligonucleotide
cccgaagugucccaucagu

SEQ ID NO: 1539117 - RNA, 19 nt, Artificial Sequence
  Description of Artificial Sequence: Synthetic oligonucleotide
ccagaccgccuguccuugc

SEQ ID NO: 1539118 - RNA, 19 nt, Artificial Sequence
  Description of Artificial Sequence: Synthetic oligonucleotide
gccuugcucaaaucccacu

SEQ ID NO: 1539119 - RNA, 19 nt, Artificial Sequence
  Description of Artificial Sequence: Synthetic oligonucleotide
ggcuagucucgaaccucac

SEQ ID NO: 1539120 - RNA, 19 nt, Artificial Sequence
  Description of Artificial Sequence: Synthetic oligonucleotide
gcgagcgaaggacagucuu

SEQ ID NO: 1539121 - RNA, 19 nt, Artificial Sequence
  Description of Artificial Sequence: Synthetic oligonucleotide
gcaugugcuuaaaccuaaa

SEQ ID NO: 1539122 - RNA, 19 nt, Artificial Sequence
  Description of Artificial Sequence: Synthetic oligonucleotide
ccaaugcgguagaguucac

SEQ ID NO: 1539123 - RNA, 19 nt, Artificial Sequence
  Description of Artificial Sequence: Synthetic oligonucleotide
ccgauccagcagaaaagcu

SEQ ID NO: 1539124 - RNA, 19 nt, Artificial Sequence
  Description of Artificial Sequence: Synthetic oligonucleotide
guccguccucaugugcucu

SEQ ID NO: 1539125 - RNA, 19 nt, Artificial Sequence
  Description of Artificial Sequence: Synthetic oligonucleotide
ggcucagcguucacucgaa

SEQ ID NO: 1539126 - RNA, 19 nt, Artificial Sequence
  Description of Artificial Sequence: Synthetic oligonucleotide
ccugaggccuugcucaaau

SEQ ID NO: 1539127 - RNA, 19 nt, Artificial Sequence
  Description of Artificial Sequence: Synthetic oligonucleotide
ggccgaugucccacgcuga

SEQ ID NO: 1539128 - RNA, 19 nt, Artificial Sequence
  Description of Artificial Sequence: Synthetic oligonucleotide
cacucucgccuaggcucuc

SEQ ID NO: 1539129 - RNA, 19 nt, Artificial Sequence
  Description of Artificial Sequence: Synthetic oligonucleotide
ccccaguugcuggccaaug

SEQ ID NO: 1539130 - RNA, 19 nt, Artificial Sequence
  Description of Artificial Sequence: Synthetic oligonucleotide
ccguccucaugugcucuac

SEQ ID NO: 1539131 - RNA, 19 nt, Artificial Sequence
  Description of Artificial Sequence: Synthetic oligonucleotide
gcucugcgauuggccaccc

SEQ ID NO: 1539132 - RNA, 19 nt, Artificial Sequence
  Description of Artificial Sequence: Synthetic oligonucleotide
gccgaugucccacgcugau

SEQ ID NO: 1539133 - RNA, 19 nt, Artificial Sequence
  Description of Artificial Sequence: Synthetic oligonucleotide
ccgccuguccuugccacca

SEQ ID NO: 1539134 - RNA, 19 nt, Artificial Sequence
  Description of Artificial Sequence: Synthetic oligonucleotide
cccacugaaaauggggauu

SEQ ID NO: 1539135 - RNA, 19 nt, Artificial Sequence
  Description of Artificial Sequence: Synthetic oligonucleotide
ccacgcugauaaaugucau

SEQ ID NO: 1539136 - RNA, 19 nt, Artificial Sequence
  Description of Artificial Sequence: Synthetic oligonucleotide
ucgucacgaugggccccau

SEQ ID NO: 1539137 - RNA, 19 nt, Artificial Sequence
  Description of Artificial Sequence: Synthetic oligonucleotide
ccuugccaccaagcuggac

SEQ ID NO: 1539138 - RNA, 19 nt, Artificial Sequence
  Description of Artificial Sequence: Synthetic oligonucleotide
cgguccguccucaugugcu

SEQ ID NO: 1539139 - RNA, 19 nt, Artificial Sequence
  Description of Artificial Sequence: Synthetic oligonucleotide
gcucuccaauccugugcgu

SEQ ID NO: 1539140 - RNA, 19 nt, Artificial Sequence
  Description of Artificial Sequence: Synthetic oligonucleotide
ccaugguucccaggaggaa

SEQ ID NO: 1539141 - RNA, 19 nt, Artificial Sequence
  Description of Artificial Sequence: Synthetic oligonucleotide
gcggcgggcucagcguuca

SEQ ID NO: 1539142 - RNA, 19 nt, Artificial Sequence
  Description of Artificial Sequence: Synthetic oligonucleotide
cucugcgauuggccacccu

SEQ ID NO: 1539143 - RNA, 19 nt, Artificial Sequence
  Description of Artificial Sequence: Synthetic oligonucleotide
ggcgagcgaaggacagucu

SEQ ID NO: 1539144 - RNA, 19 nt, Artificial Sequence
  Description of Artificial Sequence: Synthetic oligonucleotide
gcucagcguucacucgaau

SEQ ID NO: 1539145 - RNA, 19 nt, Artificial Sequence
  Description of Artificial Sequence: Synthetic oligonucleotide
ggccacccugaggccuugc

SEQ ID NO: 1539146 - RNA, 19 nt, Artificial Sequence
  Description of Artificial Sequence: Synthetic oligonucleotide
cgagcgaaggacagucuuu

SEQ ID NO: 1539147 - RNA, 19 nt, Artificial Sequence
  Description of Artificial Sequence: Synthetic oligonucleotide
cagcaccccguggggccca

SEQ ID NO: 1539148 - RNA, 19 nt, Artificial Sequence
  Description of Artificial Sequence: Synthetic oligonucleotide
ccgcuuggcuucauuccau

SEQ ID NO: 1539149 - RNA, 19 nt, Artificial Sequence
  Description of Artificial Sequence: Synthetic oligonucleotide
ccgaugucccacgcugaua

SEQ ID NO: 1539150 - RNA, 19 nt, Artificial Sequence
  Description of Artificial Sequence: Synthetic oligonucleotide
gggccccauccaaaguuuu

SEQ ID NO: 1539151 - RNA, 19 nt, Artificial Sequence
  Description of Artificial Sequence: Synthetic oligonucleotide
ccgcagcagggaggucuug

SEQ ID NO: 1539152 - RNA, 19 nt, Artificial Sequence
  Description of Artificial Sequence: Synthetic oligonucleotide
cgugcgccgcuuggcuuca

SEQ ID NO: 1539153 - RNA, 19 nt, Artificial Sequence
  Description of Artificial Sequence: Synthetic oligonucleotide
gccugcgguccguccucau

SEQ ID NO: 1539154 - RNA, 19 nt, Artificial Sequence
  Description of Artificial Sequence: Synthetic oligonucleotide
cggcgggcucagcguucac

SEQ ID NO: 1539155 - RNA, 19 nt, Artificial Sequence
  Description of Artificial Sequence: Synthetic oligonucleotide
gugcgccgcuuggcuucau

SEQ ID NO: 1539156 - RNA, 19 nt, Artificial Sequence
  Description of Artificial Sequence: Synthetic oligonucleotide
cuaaagacgauaaacaugg

SEQ ID NO: 1539157 - RNA, 19 nt, Artificial Sequence
  Description of Artificial Sequence: Synthetic oligonucleotide
aucugauaaaauuacaccc

SEQ ID NO: 1539158 - RNA, 19 nt, Artificial Sequence
  Description of Artificial Sequence: Synthetic oligonucleotide
auaguuaaagugaagagcc

SEQ ID NO: 1539159 - RNA, 19 nt, Artificial Sequence
  Description of Artificial Sequence: Synthetic oligonucleotide
aaagugaagagccugaagu

SEQ ID NO: 1539160 - RNA, 19 nt, Artificial Sequence
  Description of Artificial Sequence: Synthetic oligonucleotide
uaaaauuacacccggaaac

SEQ ID NO: 1539161 - RNA, 19 nt, Artificial Sequence
  Description of Artificial Sequence: Synthetic oligonucleotide
ucugauaaaauuacacccg

SEQ ID NO: 1539162 - RNA, 19 nt, Artificial Sequence
  Description of Artificial Sequence: Synthetic oligonucleotide
aguaccaucacacaguaug

SEQ ID NO: 1539163 - RNA, 19 nt, Artificial Sequence
  Description of Artificial Sequence: Synthetic oligonucleotide
aagacaacaagcaagcagg

SEQ ID NO: 1539164 - RNA, 19 nt, Artificial Sequence
  Description of Artificial Sequence: Synthetic oligonucleotide
uguaaguaccaucacacag

SEQ ID NO: 1539165 - RNA, 19 nt, Artificial Sequence
  Description of Artificial Sequence: Synthetic oligonucleotide
aagacgauaaacauggaag

SEQ ID NO: 1539166 - RNA, 19 nt, Artificial Sequence
  Description of Artificial Sequence: Synthetic oligonucleotide
aaucacuauucuucgaauc

SEQ ID NO: 1539167 - RNA, 19 nt, Artificial Sequence
  Description of Artificial Sequence: Synthetic oligonucleotide
gaucugauaaaauuacacc

SEQ ID NO: 1539168 - RNA, 19 nt, Artificial Sequence
  Description of Artificial Sequence: Synthetic oligonucleotide
gaaacuaaagacgauaaac

SEQ ID NO: 1539169 - RNA, 19 nt, Artificial Sequence
  Description of Artificial Sequence: Synthetic oligonucleotide
aaacgcaucuguaaguacc

SEQ ID NO: 1539170 - RNA, 19 nt, Artificial Sequence
  Description of Artificial Sequence: Synthetic oligonucleotide
augaaaaugcuguucacuc

SEQ ID NO: 1539171 - RNA, 19 nt, Artificial Sequence
  Description of Artificial Sequence: Synthetic oligonucleotide
aaaaccaacgaagacaaca

SEQ ID NO: 1539172 - RNA, 19 nt, Artificial Sequence
  Description of Artificial Sequence: Synthetic oligonucleotide
augcuguucacucuggagc

SEQ ID NO: 1539173 - RNA, 19 nt, Artificial Sequence
  Description of Artificial Sequence: Synthetic oligonucleotide
ugaucugauaaaauuacac

SEQ ID NO: 1539174 - RNA, 19 nt, Artificial Sequence
  Description of Artificial Sequence: Synthetic oligonucleotide
aagcagggguguuugaacc

SEQ ID NO: 1539175 - RNA, 19 nt, Artificial Sequence
  Description of Artificial Sequence: Synthetic oligonucleotide
aucacuauucuucgaaucg

SEQ ID NO: 1539176 - RNA, 19 nt, Artificial Sequence
  Description of Artificial Sequence: Synthetic oligonucleotide
aaacauggaaguuaugaaa

SEQ ID NO: 1539177 - RNA, 19 nt, Artificial Sequence
  Description of Artificial Sequence: Synthetic oligonucleotide
aacgaagacaacaagcaag

SEQ ID NO: 1539178 - RNA, 19 nt, Artificial Sequence
  Description of Artificial Sequence: Synthetic oligonucleotide
uuaaaguacagugagcugu

SEQ ID NO: 1539179 - RNA, 19 nt, Artificial Sequence
  Description of Artificial Sequence: Synthetic oligonucleotide
aaacuaaagacgauaaaca

SEQ ID NO: 1539180 - RNA, 19 nt, Artificial Sequence
  Description of Artificial Sequence: Synthetic oligonucleotide
cacauuaaaguacagugag

SEQ ID NO: 1539181 - RNA, 19 nt, Artificial Sequence
  Description of Artificial Sequence: Synthetic oligonucleotide
aacuaaagacgauaaacau

SEQ ID NO: 1539182 - RNA, 19 nt, Artificial Sequence
  Description of Artificial Sequence: Synthetic oligonucleotide
acacccggaaacuaaagac

SEQ ID NO: 1539183 - RNA, 19 nt, Artificial Sequence
  Description of Artificial Sequence: Synthetic oligonucleotide
auaaacauggaaguuauga

SEQ ID NO: 1539184 - RNA, 19 nt, Artificial Sequence
  Description of Artificial Sequence: Synthetic oligonucleotide
gaaccaaccauaguuaaag

SEQ ID NO: 1539185 - RNA, 19 nt, Artificial Sequence
  Description of Artificial Sequence: Synthetic oligonucleotide
cauaguuaaagugaagagc

SEQ ID NO: 1539186 - RNA, 19 nt, Artificial Sequence
  Description of Artificial Sequence: Synthetic oligonucleotide
aaagacgauaaacauggaa

SEQ ID NO: 1539187 - RNA, 19 nt, Artificial Sequence
  Description of Artificial Sequence: Synthetic oligonucleotide
gaaaaugcuguucacucug

SEQ ID NO: 1539188 - RNA, 19 nt, Artificial Sequence
  Description of Artificial Sequence: Synthetic oligonucleotide
uguuuuauggcuggaauug

SEQ ID NO: 1539189 - RNA, 19 nt, Artificial Sequence
  Description of Artificial Sequence: Synthetic oligonucleotide
aaugcuguucacucuggag

SEQ ID NO: 1539190 - RNA, 19 nt, Artificial Sequence
  Description of Artificial Sequence: Synthetic oligonucleotide
aguacagugagcuguccac

SEQ ID NO: 1539191 - RNA, 19 nt, Artificial Sequence
  Description of Artificial Sequence: Synthetic oligonucleotide
ugucgucuucauaagaacc

SEQ ID NO: 1539192 - RNA, 19 nt, Artificial Sequence
  Description of Artificial Sequence: Synthetic oligonucleotide
ucacauuaaaguacaguga

SEQ ID NO: 1539193 - RNA, 19 nt, Artificial Sequence
  Description of Artificial Sequence: Synthetic oligonucleotide
uggaaaaccaacgaagaca

SEQ ID NO: 1539194 - RNA, 19 nt, Artificial Sequence
  Description of Artificial Sequence: Synthetic oligonucleotide
accaacgaagacaacaagc

SEQ ID NO: 1539195 - RNA, 19 nt, Artificial Sequence
  Description of Artificial Sequence: Synthetic oligonucleotide
aaaauuacacccggaaacu

SEQ ID NO: 1539196 - RNA, 19 nt, Artificial Sequence
  Description of Artificial Sequence: Synthetic oligonucleotide
gaugaucugauaaaauuac

SEQ ID NO: 1539197 - RNA, 19 nt, Artificial Sequence
  Description of Artificial Sequence: Synthetic oligonucleotide
cugauaaaauuacacccgg

SEQ ID NO: 1539198 - RNA, 19 nt, Artificial Sequence
  Description of Artificial Sequence: Synthetic oligonucleotide
ugcaauguagccuugggua

SEQ ID NO: 1539199 - RNA, 19 nt, Artificial Sequence
  Description of Artificial Sequence: Synthetic oligonucleotide
acgaagacaacaagcaagc

SEQ ID NO: 1539200 - RNA, 19 nt, Artificial Sequence
  Description of Artificial Sequence: Synthetic oligonucleotide
uaaacauggaaguuaugaa

SEQ ID NO: 1539201 - RNA, 19 nt, Artificial Sequence
  Description of Artificial Sequence: Synthetic oligonucleotide
uuugaaccaaccauaguua

SEQ ID NO: 1539202 - RNA, 19 nt, Artificial Sequence
  Description of Artificial Sequence: Synthetic oligonucleotide
aguuaugaaaaugcuguuc

SEQ ID NO: 1539203 - RNA, 19 nt, Artificial Sequence
  Description of Artificial Sequence: Synthetic oligonucleotide
aaggcaauuugcaacagcu

SEQ ID NO: 1539204 - RNA, 19 nt, Artificial Sequence
  Description of Artificial Sequence: Synthetic oligonucleotide
acaguaugcugacuccugc

SEQ ID NO: 1539205 - RNA, 19 nt, Artificial Sequence
  Description of Artificial Sequence: Synthetic oligonucleotide
uucuucgaaucgaugaucu

SEQ ID NO: 1539206 - RNA, 19 nt, Artificial Sequence
  Description of Artificial Sequence: Synthetic oligonucleotide
agacgauaaacauggaagu

SEQ ID NO: 1539207 - RNA, 19 nt, Artificial Sequence
  Description of Artificial Sequence: Synthetic oligonucleotide
accaaccauaguuaaagug

SEQ ID NO: 1539208 - RNA, 19 nt, Artificial Sequence
  Description of Artificial Sequence: Synthetic oligonucleotide
ucugucgucuucauaagaa

SEQ ID NO: 1539209 - RNA, 19 nt, Artificial Sequence
  Description of Artificial Sequence: Synthetic oligonucleotide
uaaagugaagagccugaag

SEQ ID NO: 1539210 - RNA, 19 nt, Artificial Sequence
  Description of Artificial Sequence: Synthetic oligonucleotide
aacauggaaguuaugaaaa

SEQ ID NO: 1539211 - RNA, 19 nt, Artificial Sequence
  Description of Artificial Sequence: Synthetic oligonucleotide
cuauucuucgaaucgauga

SEQ ID NO: 1539212 - RNA, 19 nt, Artificial Sequence
  Description of Artificial Sequence: Synthetic oligonucleotide
auaaaauuacacccggaaa

SEQ ID NO: 1539213 - RNA, 19 nt, Artificial Sequence
  Description of Artificial Sequence: Synthetic oligonucleotide
ugguccuacucccauaaug

SEQ ID NO: 1539214 - RNA, 19 nt, Artificial Sequence
  Description of Artificial Sequence: Synthetic oligonucleotide
ucgaugaucugauaaaauu

SEQ ID NO: 1539215 - RNA, 19 nt, Artificial Sequence
  Description of Artificial Sequence: Synthetic oligonucleotide
ucacacaguaugcugacuc

SEQ ID NO: 1539216 - RNA, 19 nt, Artificial Sequence
  Description of Artificial Sequence: Synthetic oligonucleotide
uaugaaaaugcuguucacu

SEQ ID NO: 1539217 - RNA, 19 nt, Artificial Sequence
  Description of Artificial Sequence: Synthetic oligonucleotide
accauaguuaaagugaaga

SEQ ID NO: 1539218 - RNA, 19 nt, Artificial Sequence
  Description of Artificial Sequence: Synthetic oligonucleotide
aguaugcugacuccugcuc

SEQ ID NO: 1539219 - RNA, 19 nt, Artificial Sequence
  Description of Artificial Sequence: Synthetic oligonucleotide
cacccggaaacuaaagacg

SEQ ID NO: 1539220 - RNA, 19 nt, Artificial Sequence
  Description of Artificial Sequence: Synthetic oligonucleotide
aucccuguugcauuggcag

SEQ ID NO: 1539221 - RNA, 19 nt, Artificial Sequence
  Description of Artificial Sequence: Synthetic oligonucleotide
acuaaagacgauaaacaug

SEQ ID NO: 1539222 - RNA, 19 nt, Artificial Sequence
  Description of Artificial Sequence: Synthetic oligonucleotide
aaccaacgaagacaacaag

SEQ ID NO: 1539223 - RNA, 19 nt, Artificial Sequence
  Description of Artificial Sequence: Synthetic oligonucleotide
uauucuucgaaucgaugau

SEQ ID NO: 1539224 - RNA, 19 nt, Artificial Sequence
  Description of Artificial Sequence: Synthetic oligonucleotide
ugauaaaauuacacccgga

SEQ ID NO: 1539225 - RNA, 19 nt, Artificial Sequence
  Description of Artificial Sequence: Synthetic oligonucleotide
auuaaaguacagugagcug

SEQ ID NO: 1539226 - RNA, 19 nt, Artificial Sequence
  Description of Artificial Sequence: Synthetic oligonucleotide
aguuaaagugaagagccug

SEQ ID NO: 1539227 - RNA, 19 nt, Artificial Sequence
  Description of Artificial Sequence: Synthetic oligonucleotide
ugcuguucacucuggagcc

SEQ ID NO: 1539228 - RNA, 19 nt, Artificial Sequence
  Description of Artificial Sequence: Synthetic oligonucleotide
uacacccggaaacuaaaga

SEQ ID NO: 1539229 - RNA, 19 nt, Artificial Sequence
  Description of Artificial Sequence: Synthetic oligonucleotide
acauuaaaguacagugagc

SEQ ID NO: 1539230 - RNA, 19 nt, Artificial Sequence
  Description of Artificial Sequence: Synthetic oligonucleotide
ugaaaaugcuguucacucu

SEQ ID NO: 1539231 - RNA, 19 nt, Artificial Sequence
  Description of Artificial Sequence: Synthetic oligonucleotide
aaguacagugagcugucca

SEQ ID NO: 1539232 - RNA, 19 nt, Artificial Sequence
  Description of Artificial Sequence: Synthetic oligonucleotide
aucuguaaguaccaucaca

SEQ ID NO: 1539233 - RNA, 19 nt, Artificial Sequence
  Description of Artificial Sequence: Synthetic oligonucleotide
aaaguacagugagcugucc

SEQ ID NO: 1539234 - RNA, 19 nt, Artificial Sequence
  Description of Artificial Sequence: Synthetic oligonucleotide
caucguucaucccuguugc

SEQ ID NO: 1539235 - RNA, 19 nt, Artificial Sequence
  Description of Artificial Sequence: Synthetic oligonucleotide
ggcaauuugcaacagcuug

SEQ ID NO: 1539236 - RNA, 19 nt, Artificial Sequence
  Description of Artificial Sequence: Synthetic oligonucleotide
acucuggagcccuugauga

SEQ ID NO: 1539237 - RNA, 19 nt, Artificial Sequence
  Description of Artificial Sequence: Synthetic oligonucleotide
aaucgaugaucugauaaaa

SEQ ID NO: 1539238 - RNA, 19 nt, Artificial Sequence
  Description of Artificial Sequence: Synthetic oligonucleotide
cugcaaucacuauucuucg

SEQ ID NO: 1539239 - RNA, 19 nt, Artificial Sequence
  Description of Artificial Sequence: Synthetic oligonucleotide
uucgaaucgaugaucugau

SEQ ID NO: 1539240 - RNA, 19 nt, Artificial Sequence
  Description of Artificial Sequence: Synthetic oligonucleotide
uaaguaccaucacacagua

SEQ ID NO: 1539241 - RNA, 19 nt, Artificial Sequence
  Description of Artificial Sequence: Synthetic oligonucleotide
aagugaagagccugaaguu

SEQ ID NO: 1539242 - RNA, 19 nt, Artificial Sequence
  Description of Artificial Sequence: Synthetic oligonucleotide
uguugcauuggcaguggug

SEQ ID NO: 1539243 - RNA, 19 nt, Artificial Sequence
  Description of Artificial Sequence: Synthetic oligonucleotide
aaaaugcuguucacucugg

SEQ ID NO: 1539244 - RNA, 19 nt, Artificial Sequence
  Description of Artificial Sequence: Synthetic oligonucleotide
guuugaaccaaccauaguu

SEQ ID NO: 1539245 - RNA, 19 nt, Artificial Sequence
  Description of Artificial Sequence: Synthetic oligonucleotide
gaaucgaugaucugauaaa

SEQ ID NO: 1539246 - RNA, 19 nt, Artificial Sequence
  Description of Artificial Sequence: Synthetic oligonucleotide
uaaaguacagugagcuguc

SEQ ID NO: 1539247 - RNA, 19 nt, Artificial Sequence
  Description of Artificial Sequence: Synthetic oligonucleotide
ugacugauuggauuucccu

SEQ ID NO: 1539248 - RNA, 19 nt, Artificial Sequence
  Description of Artificial Sequence: Synthetic oligonucleotide
ugucaggugcaauguagcc

SEQ ID NO: 1539249 - RNA, 19 nt, Artificial Sequence
  Description of Artificial Sequence: Synthetic oligonucleotide
uuaugaaaaugcuguucac

SEQ ID NO: 1539250 - RNA, 19 nt, Artificial Sequence
  Description of Artificial Sequence: Synthetic oligonucleotide
ugagcuguccaccuggguu

SEQ ID NO: 1539251 - RNA, 19 nt, Artificial Sequence
  Description of Artificial Sequence: Synthetic oligonucleotide
aaaccaacgaagacaacaa

SEQ ID NO: 1539252 - RNA, 19 nt, Artificial Sequence
  Description of Artificial Sequence: Synthetic oligonucleotide
aaaugcuguucacucugga

SEQ ID NO: 1539253 - RNA, 19 nt, Artificial Sequence
  Description of Artificial Sequence: Synthetic oligonucleotide
uugaaccaaccauaguuaa

SEQ ID NO: 1539254 - RNA, 19 nt, Artificial Sequence
  Description of Artificial Sequence: Synthetic oligonucleotide
agaagcugcaaucacuauu

SEQ ID NO: 1539255 - RNA, 19 nt, Artificial Sequence
  Description of Artificial Sequence: Synthetic oligonucleotide
auucuucgaaucgaugauc

SEQ ID NO: 1539256 - RNA, 19 nt, Artificial Sequence
  Description of Artificial Sequence: Synthetic oligonucleotide
gguccuacucccauaaugg

SEQ ID NO: 1539257 - RNA, 19 nt, Artificial Sequence
  Description of Artificial Sequence: Synthetic oligonucleotide
aaccaaccauaguuaaagu

SEQ ID NO: 1539258 - RNA, 19 nt, Artificial Sequence
  Description of Artificial Sequence: Synthetic oligonucleotide
guugcauuggcagugguga

SEQ ID NO: 1539259 - RNA, 19 nt, Artificial Sequence
  Description of Artificial Sequence: Synthetic oligonucleotide
uccuacucccauaauggaa

SEQ ID NO: 1539260 - RNA, 19 nt, Artificial Sequence
  Description of Artificial Sequence: Synthetic oligonucleotide
uuguuuuauggcuggaauu

SEQ ID NO: 1539261 - RNA, 19 nt, Artificial Sequence
  Description of Artificial Sequence: Synthetic oligonucleotide
aauuacacccggaaacuaa

SEQ ID NO: 1539262 - RNA, 19 nt, Artificial Sequence
  Description of Artificial Sequence: Synthetic oligonucleotide
aguggugacuguuccuguc

SEQ ID NO: 1539263 - RNA, 19 nt, Artificial Sequence
  Description of Artificial Sequence: Synthetic oligonucleotide
acugauuggauuucccuuu

SEQ ID NO: 1539264 - RNA, 19 nt, Artificial Sequence
  Description of Artificial Sequence: Synthetic oligonucleotide
uucugucgucuucauaaga

SEQ ID NO: 1539265 - RNA, 19 nt, Artificial Sequence
  Description of Artificial Sequence: Synthetic oligonucleotide
ugaaccaaccauaguuaaa

SEQ ID NO: 1539266 - RNA, 19 nt, Artificial Sequence
  Description of Artificial Sequence: Synthetic oligonucleotide
cauuaaaguacagugagcu

SEQ ID NO: 1539267 - RNA, 19 nt, Artificial Sequence
  Description of Artificial Sequence: Synthetic oligonucleotide
uguuugaaccaaccauagu

SEQ ID NO: 1539268 - RNA, 19 nt, Artificial Sequence
  Description of Artificial Sequence: Synthetic oligonucleotide
guuuuauggcuggaauugg

SEQ ID NO: 1539269 - RNA, 19 nt, Artificial Sequence
  Description of Artificial Sequence: Synthetic oligonucleotide
caacaagcaagcaggggug

SEQ ID NO: 1539270 - RNA, 19 nt, Artificial Sequence
  Description of Artificial Sequence: Synthetic oligonucleotide
uguagccuuggguaucuca

SEQ ID NO: 1539271 - RNA, 19 nt, Artificial Sequence
  Description of Artificial Sequence: Synthetic oligonucleotide
ccuacucccauaauggaag

SEQ ID NO: 1539272 - RNA, 19 nt, Artificial Sequence
  Description of Artificial Sequence: Synthetic oligonucleotide
auuggauuucccuuuuauu

SEQ ID NO: 1539273 - RNA, 19 nt, Artificial Sequence
  Description of Artificial Sequence: Synthetic oligonucleotide
ucacuauucuucgaaucga

SEQ ID NO: 1539274 - RNA, 19 nt, Artificial Sequence
  Description of Artificial Sequence: Synthetic oligonucleotide
uaguuaaagugaagagccu

SEQ ID NO: 1539275 - RNA, 19 nt, Artificial Sequence
  Description of Artificial Sequence: Synthetic oligonucleotide
aauguagccuuggguaucu

SEQ ID NO: 1539276 - RNA, 19 nt, Artificial Sequence
  Description of Artificial Sequence: Synthetic oligonucleotide
gauggcccaaggcaauuug

SEQ ID NO: 1539277 - RNA, 19 nt, Artificial Sequence
  Description of Artificial Sequence: Synthetic oligonucleotide
gaaacgcaucuguaaguac

SEQ ID NO: 1539278 - RNA, 19 nt, Artificial Sequence
  Description of Artificial Sequence: Synthetic oligonucleotide
cacacaguaugcugacucc

SEQ ID NO: 1539279 - RNA, 19 nt, Artificial Sequence
  Description of Artificial Sequence: Synthetic oligonucleotide
uggcccaaggcaauuugca

SEQ ID NO: 1539280 - RNA, 19 nt, Artificial Sequence
  Description of Artificial Sequence: Synthetic oligonucleotide
gcugcaaucacuauucuuc

SEQ ID NO: 1539281 - RNA, 19 nt, Artificial Sequence
  Description of Artificial Sequence: Synthetic oligonucleotide
augacugauuggauuuccc

SEQ ID NO: 1539282 - RNA, 19 nt, Artificial Sequence
  Description of Artificial Sequence: Synthetic oligonucleotide
ccauaguuaaagugaagag

SEQ ID NO: 1539283 - RNA, 19 nt, Artificial Sequence
  Description of Artificial Sequence: Synthetic oligonucleotide
ccaaccauaguuaaaguga

SEQ ID NO: 1539284 - RNA, 19 nt, Artificial Sequence
  Description of Artificial Sequence: Synthetic oligonucleotide
acgauaaacauggaaguua

SEQ ID NO: 1539285 - RNA, 19 nt, Artificial Sequence
  Description of Artificial Sequence: Synthetic oligonucleotide
cuacucccauaauggaagg

SEQ ID NO: 1539286 - RNA, 19 nt, Artificial Sequence
  Description of Artificial Sequence: Synthetic oligonucleotide
guguuugaaccaaccauag

SEQ ID NO: 1539287 - RNA, 19 nt, Artificial Sequence
  Description of Artificial Sequence: Synthetic oligonucleotide
uacagugagcuguccaccu

SEQ ID NO: 1539288 - RNA, 19 nt, Artificial Sequence
  Description of Artificial Sequence: Synthetic oligonucleotide
caaggcaauuugcaacagc

SEQ ID NO: 1539289 - RNA, 19 nt, Artificial Sequence
  Description of Artificial Sequence: Synthetic oligonucleotide
cugucgucuucauaagaac

SEQ ID NO: 1539290 - RNA, 19 nt, Artificial Sequence
  Description of Artificial Sequence: Synthetic oligonucleotide
ucaucccuguugcauuggc

SEQ ID NO: 1539291 - RNA, 19 nt, Artificial Sequence
  Description of Artificial Sequence: Synthetic oligonucleotide
cuucgaaucgaugaucuga

SEQ ID NO: 1539292 - RNA, 19 nt, Artificial Sequence
  Description of Artificial Sequence: Synthetic oligonucleotide
aacgcaucuguaaguacca

SEQ ID NO: 1539293 - RNA, 19 nt, Artificial Sequence
  Description of Artificial Sequence: Synthetic oligonucleotide
caagcagggguguuugaac

SEQ ID NO: 1539294 - RNA, 19 nt, Artificial Sequence
  Description of Artificial Sequence: Synthetic oligonucleotide
agggguguuugaaccaacc

SEQ ID NO: 1539295 - RNA, 19 nt, Artificial Sequence
  Description of Artificial Sequence: Synthetic oligonucleotide
guuaaagugaagagccuga

SEQ ID NO: 1539296 - RNA, 19 nt, Artificial Sequence
  Description of Artificial Sequence: Synthetic oligonucleotide
uuaaagugaagagccugaa

SEQ ID NO: 1539297 - RNA, 19 nt, Artificial Sequence
  Description of Artificial Sequence: Synthetic oligonucleotide
uggcaguggugacuguucc

SEQ ID NO: 1539298 - RNA, 19 nt, Artificial Sequence
  Description of Artificial Sequence: Synthetic oligonucleotide
aauuugcaacagcuuguuu

SEQ ID NO: 1539299 - RNA, 19 nt, Artificial Sequence
  Description of Artificial Sequence: Synthetic oligonucleotide
aagcaagcagggguguuug

SEQ ID NO: 1539300 - RNA, 19 nt, Artificial Sequence
  Description of Artificial Sequence: Synthetic oligonucleotide
gagcuguccaccuggguuc

SEQ ID NO: 1539301 - RNA, 19 nt, Artificial Sequence
  Description of Artificial Sequence: Synthetic oligonucleotide
aaccauaguuaaagugaag

SEQ ID NO: 1539302 - RNA, 19 nt, Artificial Sequence
  Description of Artificial Sequence: Synthetic oligonucleotide
ucuucgaaucgaugaucug

SEQ ID NO: 1539303 - RNA, 19 nt, Artificial Sequence
  Description of Artificial Sequence: Synthetic oligonucleotide
cuucugucgucuucauaag

SEQ ID NO: 1539304 - RNA, 19 nt, Artificial Sequence
  Description of Artificial Sequence: Synthetic oligonucleotide
agcggcaccaucguucauc

SEQ ID NO: 1539305 - RNA, 19 nt, Artificial Sequence
  Description of Artificial Sequence: Synthetic oligonucleotide
uaaagacgauaaacaugga

SEQ ID NO: 1539306 - RNA, 19 nt, Artificial Sequence
  Description of Artificial Sequence: Synthetic oligonucleotide
aaauuacacccggaaacua

SEQ ID NO: 1539307 - RNA, 19 nt, Artificial Sequence
  Description of Artificial Sequence: Synthetic oligonucleotide
guucaucccuguugcauug

SEQ ID NO: 1539308 - RNA, 19 nt, Artificial Sequence
  Description of Artificial Sequence: Synthetic oligonucleotide
ucuggagcccuugaugacu

SEQ ID NO: 1539309 - RNA, 19 nt, Artificial Sequence
  Description of Artificial Sequence: Synthetic oligonucleotide
ugcaaucacuauucuucga

SEQ ID NO: 1539310 - RNA, 19 nt, Artificial Sequence
  Description of Artificial Sequence: Synthetic oligonucleotide
uucacucuggagcccuuga

SEQ ID NO: 1539311 - RNA, 19 nt, Artificial Sequence
  Description of Artificial Sequence: Synthetic oligonucleotide
ucucuacucacuugccuau

SEQ ID NO: 1539312 - RNA, 19 nt, Artificial Sequence
  Description of Artificial Sequence: Synthetic oligonucleotide
auggcccaaggcaauuugc

SEQ ID NO: 1539313 - RNA, 19 nt, Artificial Sequence
  Description of Artificial Sequence: Synthetic oligonucleotide
ggaaaaccaacgaagacaa

SEQ ID NO: 1539314 - RNA, 19 nt, Artificial Sequence
  Description of Artificial Sequence: Synthetic oligonucleotide
guggugacuguuccugucc

SEQ ID NO: 1539315 - RNA, 19 nt, Artificial Sequence
  Description of Artificial Sequence: Synthetic oligonucleotide
guaccaucacacaguaugc

SEQ ID NO: 1539316 - RNA, 19 nt, Artificial Sequence
  Description of Artificial Sequence: Synthetic oligonucleotide
uuggcaguggugacuguuc

SEQ ID NO: 1539317 - RNA, 19 nt, Artificial Sequence
  Description of Artificial Sequence: Synthetic oligonucleotide
caaccauaguuaaagugaa

SEQ ID NO: 1539318 - RNA, 19 nt, Artificial Sequence
  Description of Artificial Sequence: Synthetic oligonucleotide
guagccuuggguaucucac

SEQ ID NO: 1539319 - RNA, 19 nt, Artificial Sequence
  Description of Artificial Sequence: Synthetic oligonucleotide
cacucuggagcccuugaug

SEQ ID NO: 1539320 - RNA, 19 nt, Artificial Sequence
  Description of Artificial Sequence: Synthetic oligonucleotide
agacaacaagcaagcaggg

SEQ ID NO: 1539321 - RNA, 19 nt, Artificial Sequence
  Description of Artificial Sequence: Synthetic oligonucleotide
gcaucuguaaguaccauca

SEQ ID NO: 1539322 - RNA, 19 nt, Artificial Sequence
  Description of Artificial Sequence: Synthetic oligonucleotide
gauaaacauggaaguuaug

SEQ ID NO: 1539323 - RNA, 19 nt, Artificial Sequence
  Description of Artificial Sequence: Synthetic oligonucleotide
gucgucuucauaagaacca

SEQ ID NO: 1539324 - RNA, 19 nt, Artificial Sequence
  Description of Artificial Sequence: Synthetic oligonucleotide
ccaacgaagacaacaagca

SEQ ID NO: 1539325 - RNA, 19 nt, Artificial Sequence
  Description of Artificial Sequence: Synthetic oligonucleotide
cacaguaugcugacuccug

SEQ ID NO: 1539326 - RNA, 19 nt, Artificial Sequence
  Description of Artificial Sequence: Synthetic oligonucleotide
gauuggauuucccuuuuau

SEQ ID NO: 1539327 - RNA, 19 nt, Artificial Sequence
  Description of Artificial Sequence: Synthetic oligonucleotide
aagcugcaaucacuauucu

SEQ ID NO: 1539328 - RNA, 19 nt, Artificial Sequence
  Description of Artificial Sequence: Synthetic oligonucleotide
acuauucuucgaaucgaug

SEQ ID NO: 1539329 - RNA, 19 nt, Artificial Sequence
  Description of Artificial Sequence: Synthetic oligonucleotide
aacaagcaagcaggggugu

SEQ ID NO: 1539330 - RNA, 19 nt, Artificial Sequence
  Description of Artificial Sequence: Synthetic oligonucleotide
ucgucuucauaagaaccac

SEQ ID NO: 1539331 - RNA, 19 nt, Artificial Sequence
  Description of Artificial Sequence: Synthetic oligonucleotide
augaucugauaaaauuaca

SEQ ID NO: 1539332 - RNA, 19 nt, Artificial Sequence
  Description of Artificial Sequence: Synthetic oligonucleotide
ugcauuggcaguggugacu

SEQ ID NO: 1539333 - RNA, 19 nt, Artificial Sequence
  Description of Artificial Sequence: Synthetic oligonucleotide
acccggaaacuaaagacga

SEQ ID NO: 1539334 - RNA, 19 nt, Artificial Sequence
  Description of Artificial Sequence: Synthetic oligonucleotide
uagccuuggguaucucaca

SEQ ID NO: 1539335 - RNA, 19 nt, Artificial Sequence
  Description of Artificial Sequence: Synthetic oligonucleotide
gcaaucacuauucuucgaa

SEQ ID NO: 1539336 - RNA, 19 nt, Artificial Sequence
  Description of Artificial Sequence: Synthetic oligonucleotide
uucaucccuguugcauugg

SEQ ID NO: 1539337 - RNA, 19 nt, Artificial Sequence
  Description of Artificial Sequence: Synthetic oligonucleotide
agcagggguguuugaacca

SEQ ID NO: 1539338 - RNA, 19 nt, Artificial Sequence
  Description of Artificial Sequence: Synthetic oligonucleotide
uacucccauaauggaaggc

SEQ ID NO: 1539339 - RNA, 19 nt, Artificial Sequence
  Description of Artificial Sequence: Synthetic oligonucleotide
ucguucaucccuguugcau

SEQ ID NO: 1539340 - RNA, 19 nt, Artificial Sequence
  Description of Artificial Sequence: Synthetic oligonucleotide
guacagugagcuguccacc

SEQ ID NO: 1539341 - RNA, 19 nt, Artificial Sequence
  Description of Artificial Sequence: Synthetic oligonucleotide
agccuuggguaucucacau

SEQ ID NO: 1539342 - RNA, 19 nt, Artificial Sequence
  Description of Artificial Sequence: Synthetic oligonucleotide
guuugcaacagaagcugca

SEQ ID NO: 1539343 - RNA, 19 nt, Artificial Sequence
  Description of Artificial Sequence: Synthetic oligonucleotide
caucuguaaguaccaucac

SEQ ID NO: 1539344 - RNA, 19 nt, Artificial Sequence
  Description of Artificial Sequence: Synthetic oligonucleotide
uguccaccuggguuccugc

SEQ ID NO: 1539345 - RNA, 19 nt, Artificial Sequence
  Description of Artificial Sequence: Synthetic oligonucleotide
acacaguaugcugacuccu

SEQ ID NO: 1539346 - RNA, 19 nt, Artificial Sequence
  Description of Artificial Sequence: Synthetic oligonucleotide
ugauuggauuucccuuuua

SEQ ID NO: 1539347 - RNA, 19 nt, Artificial Sequence
  Description of Artificial Sequence: Synthetic oligonucleotide
ucacucuggagcccuugau

SEQ ID NO: 1539348 - RNA, 19 nt, Artificial Sequence
  Description of Artificial Sequence: Synthetic oligonucleotide
gacugauuggauuucccuu

SEQ ID NO: 1539349 - RNA, 19 nt, Artificial Sequence
  Description of Artificial Sequence: Synthetic oligonucleotide
cuuguuuuauggcuggaau

SEQ ID NO: 1539350 - RNA, 19 nt, Artificial Sequence
  Description of Artificial Sequence: Synthetic oligonucleotide
ccaucguucaucccuguug

SEQ ID NO: 1539351 - RNA, 19 nt, Artificial Sequence
  Description of Artificial Sequence: Synthetic oligonucleotide
gcccaaggcaauuugcaac

SEQ ID NO: 1539352 - RNA, 19 nt, Artificial Sequence
  Description of Artificial Sequence: Synthetic oligonucleotide
ucccuguugcauuggcagu

SEQ ID NO: 1539353 - RNA, 19 nt, Artificial Sequence
  Description of Artificial Sequence: Synthetic oligonucleotide
aucgaugaucugauaaaau

SEQ ID NO: 1539354 - RNA, 19 nt, Artificial Sequence
  Description of Artificial Sequence: Synthetic oligonucleotide
gguguuugaaccaaccaua

SEQ ID NO: 1539355 - RNA, 19 nt, Artificial Sequence
  Description of Artificial Sequence: Synthetic oligonucleotide
agcuguccaccuggguucc

SEQ ID NO: 1539356 - RNA, 19 nt, Artificial Sequence
  Description of Artificial Sequence: Synthetic oligonucleotide
uugcauuggcaguggugac

SEQ ID NO: 1539357 - RNA, 19 nt, Artificial Sequence
  Description of Artificial Sequence: Synthetic oligonucleotide
gcugacuccugcucucagg

SEQ ID NO: 1539358 - RNA, 19 nt, Artificial Sequence
  Description of Artificial Sequence: Synthetic oligonucleotide
agugagcuguccaccuggg

SEQ ID NO: 1539359 - RNA, 19 nt, Artificial Sequence
  Description of Artificial Sequence: Synthetic oligonucleotide
ggaaacuaaagacgauaaa

SEQ ID NO: 1539360 - RNA, 19 nt, Artificial Sequence
  Description of Artificial Sequence: Synthetic oligonucleotide
caacgaagacaacaagcaa

SEQ ID NO: 1539361 - RNA, 19 nt, Artificial Sequence
  Description of Artificial Sequence: Synthetic oligonucleotide
caauguagccuuggguauc

SEQ ID NO: 1539362 - RNA, 19 nt, Artificial Sequence
  Description of Artificial Sequence: Synthetic oligonucleotide
guccuacucccauaaugga

SEQ ID NO: 1539363 - RNA, 19 nt, Artificial Sequence
  Description of Artificial Sequence: Synthetic oligonucleotide
cucuggagcccuugaugac

SEQ ID NO: 1539364 - RNA, 19 nt, Artificial Sequence
  Description of Artificial Sequence: Synthetic oligonucleotide
uccgccucuuggcuucugu

SEQ ID NO: 1539365 - RNA, 19 nt, Artificial Sequence
  Description of Artificial Sequence: Synthetic oligonucleotide
guaugcugacuccugcucu

SEQ ID NO: 1539366 - RNA, 19 nt, Artificial Sequence
  Description of Artificial Sequence: Synthetic oligonucleotide
auuggcaguggugacuguu

SEQ ID NO: 1539367 - RNA, 19 nt, Artificial Sequence
  Description of Artificial Sequence: Synthetic oligonucleotide
aucguucaucccuguugca

SEQ ID NO: 1539368 - RNA, 19 nt, Artificial Sequence
  Description of Artificial Sequence: Synthetic oligonucleotide
ucgaaucgaugaucugaua

SEQ ID NO: 1539369 - RNA, 19 nt, Artificial Sequence
  Description of Artificial Sequence: Synthetic oligonucleotide
caucccuguugcauuggca

SEQ ID NO: 1539370 - RNA, 19 nt, Artificial Sequence
  Description of Artificial Sequence: Synthetic oligonucleotide
cccaaggcaauuugcaaca

SEQ ID NO: 1539371 - RNA, 19 nt, Artificial Sequence
  Description of Artificial Sequence: Synthetic oligonucleotide
agcauccgccucuuggcuu

SEQ ID NO: 1539372 - RNA, 19 nt, Artificial Sequence
  Description of Artificial Sequence: Synthetic oligonucleotide
gggguguuugaaccaacca

SEQ ID NO: 1539373 - RNA, 19 nt, Artificial Sequence
  Description of Artificial Sequence: Synthetic oligonucleotide
cagggguguuugaaccaac

SEQ ID NO: 1539374 - RNA, 19 nt, Artificial Sequence
  Description of Artificial Sequence: Synthetic oligonucleotide
gugcaauguagccuugggu

SEQ ID NO: 1539375 - RNA, 19 nt, Artificial Sequence
  Description of Artificial Sequence: Synthetic oligonucleotide
ggguguuugaaccaaccau

SEQ ID NO: 1539376 - RNA, 19 nt, Artificial Sequence
  Description of Artificial Sequence: Synthetic oligonucleotide
cgaugaucugauaaaauua

SEQ ID NO: 1539377 - RNA, 19 nt, Artificial Sequence
  Description of Artificial Sequence: Synthetic oligonucleotide
gcggcaccaucguucaucc

SEQ ID NO: 1539378 - RNA, 19 nt, Artificial Sequence
  Description of Artificial Sequence: Synthetic oligonucleotide
gacgauaaacauggaaguu

SEQ ID NO: 1539379 - RNA, 19 nt, Artificial Sequence
  Description of Artificial Sequence: Synthetic oligonucleotide
agcaagcagggguguuuga

SEQ ID NO: 1539380 - RNA, 19 nt, Artificial Sequence
  Description of Artificial Sequence: Synthetic oligonucleotide
caaucacuauucuucgaau

SEQ ID NO: 1539381 - RNA, 19 nt, Artificial Sequence
  Description of Artificial Sequence: Synthetic oligonucleotide
uugguccuacucccauaau

SEQ ID NO: 1539382 - RNA, 19 nt, Artificial Sequence
  Description of Artificial Sequence: Synthetic oligonucleotide
aucacacaguaugcugacu

SEQ ID NO: 1539383 - RNA, 19 nt, Artificial Sequence
  Description of Artificial Sequence: Synthetic oligonucleotide
guucacucuggagcccuug

SEQ ID NO: 1539384 - RNA, 19 nt, Artificial Sequence
  Description of Artificial Sequence: Synthetic oligonucleotide
accaucguucaucccuguu

SEQ ID NO: 1539385 - RNA, 19 nt, Artificial Sequence
  Description of Artificial Sequence: Synthetic oligonucleotide
cgccucuuggcuucugucg

SEQ ID NO: 1539386 - RNA, 19 nt, Artificial Sequence
  Description of Artificial Sequence: Synthetic oligonucleotide
aaguaccaucacacaguau

SEQ ID NO: 1539387 - RNA, 19 nt, Artificial Sequence
  Description of Artificial Sequence: Synthetic oligonucleotide
uguucacucuggagcccuu

SEQ ID NO: 1539388 - RNA, 19 nt, Artificial Sequence
  Description of Artificial Sequence: Synthetic oligonucleotide
cacuauucuucgaaucgau

SEQ ID NO: 1539389 - RNA, 19 nt, Artificial Sequence
  Description of Artificial Sequence: Synthetic oligonucleotide
agcuuguuuuauggcugga

SEQ ID NO: 1539390 - RNA, 19 nt, Artificial Sequence
  Description of Artificial Sequence: Synthetic oligonucleotide
cuguccaccuggguuccug

SEQ ID NO: 1539391 - RNA, 19 nt, Artificial Sequence
  Description of Artificial Sequence: Synthetic oligonucleotide
gcaauuugcaacagcuugu

SEQ ID NO: 1539392 - RNA, 19 nt, Artificial Sequence
  Description of Artificial Sequence: Synthetic oligonucleotide
cggaaacuaaagacgauaa

SEQ ID NO: 1539393 - RNA, 19 nt, Artificial Sequence
  Description of Artificial Sequence: Synthetic oligonucleotide
aggcaauuugcaacagcuu

SEQ ID NO: 1539394 - RNA, 19 nt, Artificial Sequence
  Description of Artificial Sequence: Synthetic oligonucleotide
caguaugcugacuccugcu

SEQ ID NO: 1539395 - RNA, 19 nt, Artificial Sequence
  Description of Artificial Sequence: Synthetic oligonucleotide
gcagcggcaccaucguuca

SEQ ID NO: 1539396 - RNA, 19 nt, Artificial Sequence
  Description of Artificial Sequence: Synthetic oligonucleotide
gcaccaucguucaucccug

SEQ ID NO: 1539397 - RNA, 19 nt, Artificial Sequence
  Description of Artificial Sequence: Synthetic oligonucleotide
ccuguugcauuggcagugg

SEQ ID NO: 1539398 - RNA, 19 nt, Artificial Sequence
  Description of Artificial Sequence: Synthetic oligonucleotide
gcaauguagccuuggguau

SEQ ID NO: 1539399 - RNA, 19 nt, Artificial Sequence
  Description of Artificial Sequence: Synthetic oligonucleotide
acaagcaagcagggguguu

SEQ ID NO: 1539400 - RNA, 19 nt, Artificial Sequence
  Description of Artificial Sequence: Synthetic oligonucleotide
ggcccaaggcaauuugcaa

SEQ ID NO: 1539401 - RNA, 19 nt, Artificial Sequence
  Description of Artificial Sequence: Synthetic oligonucleotide
gcuuguuuuauggcuggaa

SEQ ID NO: 1539402 - RNA, 19 nt, Artificial Sequence
  Description of Artificial Sequence: Synthetic oligonucleotide
caauuugcaacagcuuguu

SEQ ID NO: 1539403 - RNA, 19 nt, Artificial Sequence
  Description of Artificial Sequence: Synthetic oligonucleotide
gcaagcagggguguuugaa

SEQ ID NO: 1539404 - RNA, 19 nt, Artificial Sequence
  Description of Artificial Sequence: Synthetic oligonucleotide
ccaaggcaauuugcaacag

SEQ ID NO: 1539405 - RNA, 19 nt, Artificial Sequence
  Description of Artificial Sequence: Synthetic oligonucleotide
acgcaucuguaaguaccau

SEQ ID NO: 1539406 - RNA, 19 nt, Artificial Sequence
  Description of Artificial Sequence: Synthetic oligonucleotide
gcuguucacucuggagccc

SEQ ID NO: 1539407 - RNA, 19 nt, Artificial Sequence
  Description of Artificial Sequence: Synthetic oligonucleotide
ccggaaacuaaagacgaua

SEQ ID NO: 1539408 - RNA, 19 nt, Artificial Sequence
  Description of Artificial Sequence: Synthetic oligonucleotide
gccucuuggcuucugucgu

SEQ ID NO: 1539409 - RNA, 19 nt, Artificial Sequence
  Description of Artificial Sequence: Synthetic oligonucleotide
cgucuucauaagaaccaca

SEQ ID NO: 1539410 - RNA, 19 nt, Artificial Sequence
  Description of Artificial Sequence: Synthetic oligonucleotide
cugauuggauuucccuuuu

SEQ ID NO: 1539411 - RNA, 19 nt, Artificial Sequence
  Description of Artificial Sequence: Synthetic oligonucleotide
cuguucacucuggagcccu

SEQ ID NO: 1539412 - RNA, 19 nt, Artificial Sequence
  Description of Artificial Sequence: Synthetic oligonucleotide
caguggugacuguuccugu

SEQ ID NO: 1539413 - RNA, 19 nt, Artificial Sequence
  Description of Artificial Sequence: Synthetic oligonucleotide
gcagggguguuugaaccaa

SEQ ID NO: 1539414 - RNA, 19 nt, Artificial Sequence
  Description of Artificial Sequence: Synthetic oligonucleotide
cagaagcugcaaucacuau

SEQ ID NO: 1539415 - RNA, 19 nt, Artificial Sequence
  Description of Artificial Sequence: Synthetic oligonucleotide
caagcaagcagggguguuu

SEQ ID NO: 1539416 - RNA, 19 nt, Artificial Sequence
  Description of Artificial Sequence: Synthetic oligonucleotide
ggcaguggugacuguuccu

SEQ ID NO: 1539417 - RNA, 19 nt, Artificial Sequence
  Description of Artificial Sequence: Synthetic oligonucleotide
ccgccucuuggcuucuguc

SEQ ID NO: 1539418 - RNA, 19 nt, Artificial Sequence
  Description of Artificial Sequence: Synthetic oligonucleotide
cuguugcauuggcaguggu

SEQ ID NO: 1539419 - RNA, 19 nt, Artificial Sequence
  Description of Artificial Sequence: Synthetic oligonucleotide
caccaucguucaucccugu

SEQ ID NO: 1539420 - RNA, 19 nt, Artificial Sequence
  Description of Artificial Sequence: Synthetic oligonucleotide
cgaagacaacaagcaagca

SEQ ID NO: 1539421 - RNA, 19 nt, Artificial Sequence
  Description of Artificial Sequence: Synthetic oligonucleotide
cguucaucccuguugcauu

SEQ ID NO: 1539422 - RNA, 19 nt, Artificial Sequence
  Description of Artificial Sequence: Synthetic oligonucleotide
cucuacucacuugccuauu

SEQ ID NO: 1539423 - RNA, 19 nt, Artificial Sequence
  Description of Artificial Sequence: Synthetic oligonucleotide
gccuuggguaucucacauu

SEQ ID NO: 1539424 - RNA, 19 nt, Artificial Sequence
  Description of Artificial Sequence: Synthetic oligonucleotide
cccggaaacuaaagacgau

SEQ ID NO: 1539425 - RNA, 19 nt, Artificial Sequence
  Description of Artificial Sequence: Synthetic oligonucleotide
cauccgccucuuggcuucu

SEQ ID NO: 1539426 - RNA, 19 nt, Artificial Sequence
  Description of Artificial Sequence: Synthetic oligonucleotide
gcuguccaccuggguuccu

SEQ ID NO: 1539427 - RNA, 19 nt, Artificial Sequence
  Description of Artificial Sequence: Synthetic oligonucleotide
aauugucaugauuugagcc

SEQ ID NO: 1539428 - RNA, 19 nt, Artificial Sequence
  Description of Artificial Sequence: Synthetic oligonucleotide
cuuaaugugaauuugugcg

SEQ ID NO: 1539429 - RNA, 19 nt, Artificial Sequence
  Description of Artificial Sequence: Synthetic oligonucleotide
uuggaugcaaacaagaacc

SEQ ID NO: 1539430 - RNA, 19 nt, Artificial Sequence
  Description of Artificial Sequence: Synthetic oligonucleotide
aucuuuaaagaauggaugc

SEQ ID NO: 1539431 - RNA, 19 nt, Artificial Sequence
  Description of Artificial Sequence: Synthetic oligonucleotide
ucugcuuacaaucugacau

SEQ ID NO: 1539432 - RNA, 19 nt, Artificial Sequence
  Description of Artificial Sequence: Synthetic oligonucleotide
ugaauaauuccccaucugc

SEQ ID NO: 1539433 - RNA, 19 nt, Artificial Sequence
  Description of Artificial Sequence: Synthetic oligonucleotide
uggguuuagauccagaagu

SEQ ID NO: 1539434 - RNA, 19 nt, Artificial Sequence
  Description of Artificial Sequence: Synthetic oligonucleotide
uuacaaucugacaucagag

SEQ ID NO: 1539435 - RNA, 19 nt, Artificial Sequence
  Description of Artificial Sequence: Synthetic oligonucleotide
aguuaaaucaucgcuggcc

SEQ ID NO: 1539436 - RNA, 19 nt, Artificial Sequence
  Description of Artificial Sequence: Synthetic oligonucleotide
auaaguuagucauccuucc

SEQ ID NO: 1539437 - RNA, 19 nt, Artificial Sequence
  Description of Artificial Sequence: Synthetic oligonucleotide
ugugucaugagucccuugg

SEQ ID NO: 1539438 - RNA, 19 nt, Artificial Sequence
  Description of Artificial Sequence: Synthetic oligonucleotide
ugguaaauggaaaaccacc

SEQ ID NO: 1539439 - RNA, 19 nt, Artificial Sequence
  Description of Artificial Sequence: Synthetic oligonucleotide
uuuugcagcacacugcuga

SEQ ID NO: 1539440 - RNA, 19 nt, Artificial Sequence
  Description of Artificial Sequence: Synthetic oligonucleotide
ugcuuuaugaguuucucug

SEQ ID NO: 1539441 - RNA, 19 nt, Artificial Sequence
  Description of Artificial Sequence: Synthetic oligonucleotide
aaguugguagugcacuccc

SEQ ID NO: 1539442 - RNA, 19 nt, Artificial Sequence
  Description of Artificial Sequence: Synthetic oligonucleotide
aaaugcugcagacuuuauc

SEQ ID NO: 1539443 - RNA, 19 nt, Artificial Sequence
  Description of Artificial Sequence: Synthetic oligonucleotide
uuuaacucuaagaucacau

SEQ ID NO: 1539444 - RNA, 19 nt, Artificial Sequence
  Description of Artificial Sequence: Synthetic oligonucleotide
caugcaucaggcuuaaggc

SEQ ID NO: 1539445 - RNA, 19 nt, Artificial Sequence
  Description of Artificial Sequence: Synthetic oligonucleotide
uuuauggucaguguucucc

SEQ ID NO: 1539446 - RNA, 19 nt, Artificial Sequence
  Description of Artificial Sequence: Synthetic oligonucleotide
cucauaucuuuaaagaaug

SEQ ID NO: 1539447 - RNA, 19 nt, Artificial Sequence
  Description of Artificial Sequence: Synthetic oligonucleotide
aaguuagucauccuucccu

SEQ ID NO: 1539448 - RNA, 19 nt, Artificial Sequence
  Description of Artificial Sequence: Synthetic oligonucleotide
acucuaagaucacauagag

SEQ ID NO: 1539449 - RNA, 19 nt, Artificial Sequence
  Description of Artificial Sequence: Synthetic oligonucleotide
uuguagauuauguccacag

SEQ ID NO: 1539450 - RNA, 19 nt, Artificial Sequence
  Description of Artificial Sequence: Synthetic oligonucleotide
agaggaguaugacaccugc

SEQ ID NO: 1539451 - RNA, 19 nt, Artificial Sequence
  Description of Artificial Sequence: Synthetic oligonucleotide
ucauaucuuuaaagaaugg

SEQ ID NO: 1539452 - RNA, 19 nt, Artificial Sequence
  Description of Artificial Sequence: Synthetic oligonucleotide
uguuccauaacagucgcag

SEQ ID NO: 1539453 - RNA, 19 nt, Artificial Sequence
  Description of Artificial Sequence: Synthetic oligonucleotide
uuaaugugaauuugugcgc

SEQ ID NO: 1539454 - RNA, 19 nt, Artificial Sequence
  Description of Artificial Sequence: Synthetic oligonucleotide
aaccugugauuaucuaccc

SEQ ID NO: 1539455 - RNA, 19 nt, Artificial Sequence
  Description of Artificial Sequence: Synthetic oligonucleotide
uagauuauguccacagucu

SEQ ID NO: 1539456 - RNA, 19 nt, Artificial Sequence
  Description of Artificial Sequence: Synthetic oligonucleotide
auacuuggugguuuaacuc

SEQ ID NO: 1539457 - RNA, 19 nt, Artificial Sequence
  Description of Artificial Sequence: Synthetic oligonucleotide
aaaccaaaguccaccaagg

SEQ ID NO: 1539458 - RNA, 19 nt, Artificial Sequence
  Description of Artificial Sequence: Synthetic oligonucleotide
uuuagauccagaaguuugu

SEQ ID NO: 1539459 - RNA, 19 nt, Artificial Sequence
  Description of Artificial Sequence: Synthetic oligonucleotide
cagagcaaaauauuguaac

SEQ ID NO: 1539460 - RNA, 19 nt, Artificial Sequence
  Description of Artificial Sequence: Synthetic oligonucleotide
ugacaucagagcaaaauau

SEQ ID NO: 1539461 - RNA, 19 nt, Artificial Sequence
  Description of Artificial Sequence: Synthetic oligonucleotide
uuugcuacacaaaacugau

SEQ ID NO: 1539462 - RNA, 19 nt, Artificial Sequence
  Description of Artificial Sequence: Synthetic oligonucleotide
guagauuauguccacaguc

SEQ ID NO: 1539463 - RNA, 19 nt, Artificial Sequence
  Description of Artificial Sequence: Synthetic oligonucleotide
ugaugguaaauggaaaacc

SEQ ID NO: 1539464 - RNA, 19 nt, Artificial Sequence
  Description of Artificial Sequence: Synthetic oligonucleotide
aggaccuacagaucccucc

SEQ ID NO: 1539465 - RNA, 19 nt, Artificial Sequence
  Description of Artificial Sequence: Synthetic oligonucleotide
ugugaaauggagcugugua

SEQ ID NO: 1539466 - RNA, 19 nt, Artificial Sequence
  Description of Artificial Sequence: Synthetic oligonucleotide
agggagaggaguaugacac

SEQ ID NO: 1539467 - RNA, 19 nt, Artificial Sequence
  Description of Artificial Sequence: Synthetic oligonucleotide
uggacuuggaugcaaacaa

SEQ ID NO: 1539468 - RNA, 19 nt, Artificial Sequence
  Description of Artificial Sequence: Synthetic oligonucleotide
uacaaucugacaucagagc

SEQ ID NO: 1539469 - RNA, 19 nt, Artificial Sequence
  Description of Artificial Sequence: Synthetic oligonucleotide
uuguaaaauggguaccgcc

SEQ ID NO: 1539470 - RNA, 19 nt, Artificial Sequence
  Description of Artificial Sequence: Synthetic oligonucleotide
uagucucucacacaguuuc

SEQ ID NO: 1539471 - RNA, 19 nt, Artificial Sequence
  Description of Artificial Sequence: Synthetic oligonucleotide
aauaauuccccaucugcuu

SEQ ID NO: 1539472 - RNA, 19 nt, Artificial Sequence
  Description of Artificial Sequence: Synthetic oligonucleotide
gaaccugugauuaucuacc

SEQ ID NO: 1539473 - RNA, 19 nt, Artificial Sequence
  Description of Artificial Sequence: Synthetic oligonucleotide
ugcuuaaugugaauuugug

SEQ ID NO: 1539474 - RNA, 19 nt, Artificial Sequence
  Description of Artificial Sequence: Synthetic oligonucleotide
aaauggaaaaccaccucag

SEQ ID NO: 1539475 - RNA, 19 nt, Artificial Sequence
  Description of Artificial Sequence: Synthetic oligonucleotide
cagagcaguuaaaucaucg

SEQ ID NO: 1539476 - RNA, 19 nt, Artificial Sequence
  Description of Artificial Sequence: Synthetic oligonucleotide
uuugucaagcaggucauag

SEQ ID NO: 1539477 - RNA, 19 nt, Artificial Sequence
  Description of Artificial Sequence: Synthetic oligonucleotide
uguguauauuguaaauuuc

SEQ ID NO: 1539478 - RNA, 19 nt, Artificial Sequence
  Description of Artificial Sequence: Synthetic oligonucleotide
uuuaugaguuucucugcag

SEQ ID NO: 1539479 - RNA, 19 nt, Artificial Sequence
  Description of Artificial Sequence: Synthetic oligonucleotide
ugcugggcgacucagugag

SEQ ID NO: 1539480 - RNA, 19 nt, Artificial Sequence
  Description of Artificial Sequence: Synthetic oligonucleotide
cuguuauccuugaagcugg

SEQ ID NO: 1539481 - RNA, 19 nt, Artificial Sequence
  Description of Artificial Sequence: Synthetic oligonucleotide
aggaucuuuugacagaagu

SEQ ID NO: 1539482 - RNA, 19 nt, Artificial Sequence
  Description of Artificial Sequence: Synthetic oligonucleotide
uguauauuguaaauuucuu

SEQ ID NO: 1539483 - RNA, 19 nt, Artificial Sequence
  Description of Artificial Sequence: Synthetic oligonucleotide
guuuagauccagaaguuug

SEQ ID NO: 1539484 - RNA, 19 nt, Artificial Sequence
  Description of Artificial Sequence: Synthetic oligonucleotide
uugggccaaaccaaagucc

SEQ ID NO: 1539485 - RNA, 19 nt, Artificial Sequence
  Description of Artificial Sequence: Synthetic oligonucleotide
ucuaccccaccucacaaca

SEQ ID NO: 1539486 - RNA, 19 nt, Artificial Sequence
  Description of Artificial Sequence: Synthetic oligonucleotide
accccuuagucucucacac

SEQ ID NO: 1539487 - RNA, 19 nt, Artificial Sequence
  Description of Artificial Sequence: Synthetic oligonucleotide
agugaugguaaauggaaaa

SEQ ID NO: 1539488 - RNA, 19 nt, Artificial Sequence
  Description of Artificial Sequence: Synthetic oligonucleotide
uuaaagaauggaugcaaua

SEQ ID NO: 1539489 - RNA, 19 nt, Artificial Sequence
  Description of Artificial Sequence: Synthetic oligonucleotide
uuuuccucaucgcacuagc

SEQ ID NO: 1539490 - RNA, 19 nt, Artificial Sequence
  Description of Artificial Sequence: Synthetic oligonucleotide
gacuuuaucuguuccauaa

SEQ ID NO: 1539491 - RNA, 19 nt, Artificial Sequence
  Description of Artificial Sequence: Synthetic oligonucleotide
ucugacuauacuugguggu

SEQ ID NO: 1539492 - RNA, 19 nt, Artificial Sequence
  Description of Artificial Sequence: Synthetic oligonucleotide
gagcucauaucuuuaaaga

SEQ ID NO: 1539493 - RNA, 19 nt, Artificial Sequence
  Description of Artificial Sequence: Synthetic oligonucleotide
aguaugacaccugcagacc

SEQ ID NO: 1539494 - RNA, 19 nt, Artificial Sequence
  Description of Artificial Sequence: Synthetic oligonucleotide
guuugguuaggacacuuug

SEQ ID NO: 1539495 - RNA, 19 nt, Artificial Sequence
  Description of Artificial Sequence: Synthetic oligonucleotide
aacagucgcaggucaggac

SEQ ID NO: 1539496 - RNA, 19 nt, Artificial Sequence
  Description of Artificial Sequence: Synthetic oligonucleotide
cuuugcuacacaaaacuga

SEQ ID NO: 1539497 - RNA, 19 nt, Artificial Sequence
  Description of Artificial Sequence: Synthetic oligonucleotide
aaacaagaaccugugauua

SEQ ID NO: 1539498 - RNA, 19 nt, Artificial Sequence
  Description of Artificial Sequence: Synthetic oligonucleotide
uuaucuaccccaccucaca

SEQ ID NO: 1539499 - RNA, 19 nt, Artificial Sequence
  Description of Artificial Sequence: Synthetic oligonucleotide
uggcauaggaucuuuugac

SEQ ID NO: 1539500 - RNA, 19 nt, Artificial Sequence
  Description of Artificial Sequence: Synthetic oligonucleotide
uuuugugucaugagucccu

SEQ ID NO: 1539501 - RNA, 19 nt, Artificial Sequence
  Description of Artificial Sequence: Synthetic oligonucleotide
uaaguuagucauccuuccc

SEQ ID NO: 1539502 - RNA, 19 nt, Artificial Sequence
  Description of Artificial Sequence: Synthetic oligonucleotide
cucucaugugaaauggagc

SEQ ID NO: 1539503 - RNA, 19 nt, Artificial Sequence
  Description of Artificial Sequence: Synthetic oligonucleotide
ggaacuaaagaucugacua

SEQ ID NO: 1539504 - RNA, 19 nt, Artificial Sequence
  Description of Artificial Sequence: Synthetic oligonucleotide
ucuuuaaagaauggaugca

SEQ ID NO: 1539505 - RNA, 19 nt, Artificial Sequence
  Description of Artificial Sequence: Synthetic oligonucleotide
ucaugugaaauggagcugu

SEQ ID NO: 1539506 - RNA, 19 nt, Artificial Sequence
  Description of Artificial Sequence: Synthetic oligonucleotide
cuaagaucacauagaggcc

SEQ ID NO: 1539507 - RNA, 19 nt, Artificial Sequence
  Description of Artificial Sequence: Synthetic oligonucleotide
uggugguuuaacucuaaga

SEQ ID NO: 1539508 - RNA, 19 nt, Artificial Sequence
  Description of Artificial Sequence: Synthetic oligonucleotide
uaaaucaucgcuggccuug

SEQ ID NO: 1539509 - RNA, 19 nt, Artificial Sequence
  Description of Artificial Sequence: Synthetic oligonucleotide
uguagauuauguccacagu

SEQ ID NO: 1539510 - RNA, 19 nt, Artificial Sequence
  Description of Artificial Sequence: Synthetic oligonucleotide
ggaucaacugcuaacuugg

SEQ ID NO: 1539511 - RNA, 19 nt, Artificial Sequence
  Description of Artificial Sequence: Synthetic oligonucleotide
aaugugaauuugugcgcug

SEQ ID NO: 1539512 - RNA, 19 nt, Artificial Sequence
  Description of Artificial Sequence: Synthetic oligonucleotide
ugguagugcacucccuggg

SEQ ID NO: 1539513 - RNA, 19 nt, Artificial Sequence
  Description of Artificial Sequence: Synthetic oligonucleotide
uggauaguuucccuggauc

SEQ ID NO: 1539514 - RNA, 19 nt, Artificial Sequence
  Description of Artificial Sequence: Synthetic oligonucleotide
accugugauuaucuacccc

SEQ ID NO: 1539515 - RNA, 19 nt, Artificial Sequence
  Description of Artificial Sequence: Synthetic oligonucleotide
aguuagucauccuucccug

SEQ ID NO: 1539516 - RNA, 19 nt, Artificial Sequence
  Description of Artificial Sequence: Synthetic oligonucleotide
aaaaccaccucaggagcuc

SEQ ID NO: 1539517 - RNA, 19 nt, Artificial Sequence
  Description of Artificial Sequence: Synthetic oligonucleotide
ucugacaucagagcaaaau

SEQ ID NO: 1539518 - RNA, 19 nt, Artificial Sequence
  Description of Artificial Sequence: Synthetic oligonucleotide
gcaguuaaaucaucgcugg

SEQ ID NO: 1539519 - RNA, 19 nt, Artificial Sequence
  Description of Artificial Sequence: Synthetic oligonucleotide
aaauggguaccgcccacug

SEQ ID NO: 1539520 - RNA, 19 nt, Artificial Sequence
  Description of Artificial Sequence: Synthetic oligonucleotide
uggugugccugcccgaggg

SEQ ID NO: 1539521 - RNA, 19 nt, Artificial Sequence
  Description of Artificial Sequence: Synthetic oligonucleotide
ugugauuaucuaccccacc

SEQ ID NO: 1539522 - RNA, 19 nt, Artificial Sequence
  Description of Artificial Sequence: Synthetic oligonucleotide
aggacagccgggcaaggac

SEQ ID NO: 1539523 - RNA, 19 nt, Artificial Sequence
  Description of Artificial Sequence: Synthetic oligonucleotide
agcaguuaaaucaucgcug

SEQ ID NO: 1539524 - RNA, 19 nt, Artificial Sequence
  Description of Artificial Sequence: Synthetic oligonucleotide
acagucgcaggucaggaca

SEQ ID NO: 1539525 - RNA, 19 nt, Artificial Sequence
  Description of Artificial Sequence: Synthetic oligonucleotide
ucaugauuugagccagagc

SEQ ID NO: 1539526 - RNA, 19 nt, Artificial Sequence
  Description of Artificial Sequence: Synthetic oligonucleotide
uuaacucuaagaucacaua

SEQ ID NO: 1539527 - RNA, 19 nt, Artificial Sequence
  Description of Artificial Sequence: Synthetic oligonucleotide
ugugaauuugugcgcuggc

SEQ ID NO: 1539528 - RNA, 19 nt, Artificial Sequence
  Description of Artificial Sequence: Synthetic oligonucleotide
gacucagugagcccuuuug

SEQ ID NO: 1539529 - RNA, 19 nt, Artificial Sequence
  Description of Artificial Sequence: Synthetic oligonucleotide
uuuacacaaggaacccucu

SEQ ID NO: 1539530 - RNA, 19 nt, Artificial Sequence
  Description of Artificial Sequence: Synthetic oligonucleotide
gcuuuagcagccuggauag

SEQ ID NO: 1539531 - RNA, 19 nt, Artificial Sequence
  Description of Artificial Sequence: Synthetic oligonucleotide
ugugcgcuggcauaggauc

SEQ ID NO: 1539532 - RNA, 19 nt, Artificial Sequence
  Description of Artificial Sequence: Synthetic oligonucleotide
cuuucccuugcuuaaugug

SEQ ID NO: 1539533 - RNA, 19 nt, Artificial Sequence
  Description of Artificial Sequence: Synthetic oligonucleotide
agggaagaagcuuuauggu

SEQ ID NO: 1539534 - RNA, 19 nt, Artificial Sequence
  Description of Artificial Sequence: Synthetic oligonucleotide
aaucugacaucagagcaaa

SEQ ID NO: 1539535 - RNA, 19 nt, Artificial Sequence
  Description of Artificial Sequence: Synthetic oligonucleotide
uccucaucgcacuagccac

SEQ ID NO: 1539536 - RNA, 19 nt, Artificial Sequence
  Description of Artificial Sequence: Synthetic oligonucleotide
agcuuuauggucaguguuc

SEQ ID NO: 1539537 - RNA, 19 nt, Artificial Sequence
  Description of Artificial Sequence: Synthetic oligonucleotide
gugguacuugcuuugugag

SEQ ID NO: 1539538 - RNA, 19 nt, Artificial Sequence
  Description of Artificial Sequence: Synthetic oligonucleotide
gaugcaaacaagaaccugu

SEQ ID NO: 1539539 - RNA, 19 nt, Artificial Sequence
  Description of Artificial Sequence: Synthetic oligonucleotide
ugaaauggagcuguguaua

SEQ ID NO: 1539540 - RNA, 19 nt, Artificial Sequence
  Description of Artificial Sequence: Synthetic oligonucleotide
auaacagucgcaggucagg

SEQ ID NO: 1539541 - RNA, 19 nt, Artificial Sequence
  Description of Artificial Sequence: Synthetic oligonucleotide
ccaugcaucaggcuuaagg

SEQ ID NO: 1539542 - RNA, 19 nt, Artificial Sequence
  Description of Artificial Sequence: Synthetic oligonucleotide
gcauaggaucuuuugacag

SEQ ID NO: 1539543 - RNA, 19 nt, Artificial Sequence
  Description of Artificial Sequence: Synthetic oligonucleotide
ugauuugagccagagcagu

SEQ ID NO: 1539544 - RNA, 19 nt, Artificial Sequence
  Description of Artificial Sequence: Synthetic oligonucleotide
gcuuaaugugaauuugugc

SEQ ID NO: 1539545 - RNA, 19 nt, Artificial Sequence
  Description of Artificial Sequence: Synthetic oligonucleotide
ucagguaccgagucccagc

SEQ ID NO: 1539546 - RNA, 19 nt, Artificial Sequence
  Description of Artificial Sequence: Synthetic oligonucleotide
uggaugcaaacaagaaccu

SEQ ID NO: 1539547 - RNA, 19 nt, Artificial Sequence
  Description of Artificial Sequence: Synthetic oligonucleotide
ugggacgacucccacaguc

SEQ ID NO: 1539548 - RNA, 19 nt, Artificial Sequence
  Description of Artificial Sequence: Synthetic oligonucleotide
ucuuucccuugcuuaaugu

SEQ ID NO: 1539549 - RNA, 19 nt, Artificial Sequence
  Description of Artificial Sequence: Synthetic oligonucleotide
aucuaccccaccucacaac

SEQ ID NO: 1539550 - RNA, 19 nt, Artificial Sequence
  Description of Artificial Sequence: Synthetic oligonucleotide
auuaucuaccccaccucac

SEQ ID NO: 1539551 - RNA, 19 nt, Artificial Sequence
  Description of Artificial Sequence: Synthetic oligonucleotide
cuggguuuagauccagaag

SEQ ID NO: 1539552 - RNA, 19 nt, Artificial Sequence
  Description of Artificial Sequence: Synthetic oligonucleotide
aggggcaaccugcugccgc

SEQ ID NO: 1539553 - RNA, 19 nt, Artificial Sequence
  Description of Artificial Sequence: Synthetic oligonucleotide
uuuccucaucgcacuagcc

SEQ ID NO: 1539554 - RNA, 19 nt, Artificial Sequence
  Description of Artificial Sequence: Synthetic oligonucleotide
uggccuuguaaaaugggua

SEQ ID NO: 1539555 - RNA, 19 nt, Artificial Sequence
  Description of Artificial Sequence: Synthetic oligonucleotide
aacuaaagaucugacuaua

SEQ ID NO: 1539556 - RNA, 19 nt, Artificial Sequence
  Description of Artificial Sequence: Synthetic oligonucleotide
ucgaauugucaugauuuga

SEQ ID NO: 1539557 - RNA, 19 nt, Artificial Sequence
  Description of Artificial Sequence: Synthetic oligonucleotide
cauaacagucgcaggucag

SEQ ID NO: 1539558 - RNA, 19 nt, Artificial Sequence
  Description of Artificial Sequence: Synthetic oligonucleotide
aggcaaaugcugcagacuu

SEQ ID NO: 1539559 - RNA, 19 nt, Artificial Sequence
  Description of Artificial Sequence: Synthetic oligonucleotide
uguuauccuugaagcuggg

SEQ ID NO: 1539560 - RNA, 19 nt, Artificial Sequence
  Description of Artificial Sequence: Synthetic oligonucleotide
uuugugcgcuggcauagga

SEQ ID NO: 1539561 - RNA, 19 nt, Artificial Sequence
  Description of Artificial Sequence: Synthetic oligonucleotide
ucaucgcuggccuuguaaa

SEQ ID NO: 1539562 - RNA, 19 nt, Artificial Sequence
  Description of Artificial Sequence: Synthetic oligonucleotide
ucuuguagauuauguccac

SEQ ID NO: 1539563 - RNA, 19 nt, Artificial Sequence
  Description of Artificial Sequence: Synthetic oligonucleotide
cuuuaugaguuucucugca

SEQ ID NO: 1539564 - RNA, 19 nt, Artificial Sequence
  Description of Artificial Sequence: Synthetic oligonucleotide
aacugcuaacuugggagug

SEQ ID NO: 1539565 - RNA, 19 nt, Artificial Sequence
  Description of Artificial Sequence: Synthetic oligonucleotide
cucgaauugucaugauuug

SEQ ID NO: 1539566 - RNA, 19 nt, Artificial Sequence
  Description of Artificial Sequence: Synthetic oligonucleotide
ugguuuuccucaucgcacu

SEQ ID NO: 1539567 - RNA, 19 nt, Artificial Sequence
  Description of Artificial Sequence: Synthetic oligonucleotide
cugugguuugguuaggaca

SEQ ID NO: 1539568 - RNA, 19 nt, Artificial Sequence
  Description of Artificial Sequence: Synthetic oligonucleotide
gauccucgaauugucauga

SEQ ID NO: 1539569 - RNA, 19 nt, Artificial Sequence
  Description of Artificial Sequence: Synthetic oligonucleotide
uccagugacuccgugguac

SEQ ID NO: 1539570 - RNA, 19 nt, Artificial Sequence
  Description of Artificial Sequence: Synthetic oligonucleotide
ucgcaggucaggacagccg

SEQ ID NO: 1539571 - RNA, 19 nt, Artificial Sequence
  Description of Artificial Sequence: Synthetic oligonucleotide
ugguacuugcuuugugagc

SEQ ID NO: 1539572 - RNA, 19 nt, Artificial Sequence
  Description of Artificial Sequence: Synthetic oligonucleotide
ggugguuuaacucuaagau

SEQ ID NO: 1539573 - RNA, 19 nt, Artificial Sequence
  Description of Artificial Sequence: Synthetic oligonucleotide
guuaaaucaucgcuggccu

SEQ ID NO: 1539574 - RNA, 19 nt, Artificial Sequence
  Description of Artificial Sequence: Synthetic oligonucleotide
cuuguaaaauggguaccgc

SEQ ID NO: 1539575 - RNA, 19 nt, Artificial Sequence
  Description of Artificial Sequence: Synthetic oligonucleotide
uaucuaccccaccucacaa

SEQ ID NO: 1539576 - RNA, 19 nt, Artificial Sequence
  Description of Artificial Sequence: Synthetic oligonucleotide
ucgacaggcaaaugcugca

SEQ ID NO: 1539577 - RNA, 19 nt, Artificial Sequence
  Description of Artificial Sequence: Synthetic oligonucleotide
uaauuccccaucugcuuac

SEQ ID NO: 1539578 - RNA, 19 nt, Artificial Sequence
  Description of Artificial Sequence: Synthetic oligonucleotide
agggaacuaaagaucugac

SEQ ID NO: 1539579 - RNA, 19 nt, Artificial Sequence
  Description of Artificial Sequence: Synthetic oligonucleotide
acagaucccuccuuugcgu

SEQ ID NO: 1539580 - RNA, 19 nt, Artificial Sequence
  Description of Artificial Sequence: Synthetic oligonucleotide
cuuuaaagaauggaugcaa

SEQ ID NO: 1539581 - RNA, 19 nt, Artificial Sequence
  Description of Artificial Sequence: Synthetic oligonucleotide
agucuuugauugcuuuaug

SEQ ID NO: 1539582 - RNA, 19 nt, Artificial Sequence
  Description of Artificial Sequence: Synthetic oligonucleotide
cuuugcgucuuucccuugc

SEQ ID NO: 1539583 - RNA, 19 nt, Artificial Sequence
  Description of Artificial Sequence: Synthetic oligonucleotide
gagugguggggucuagacc

SEQ ID NO: 1539584 - RNA, 19 nt, Artificial Sequence
  Description of Artificial Sequence: Synthetic oligonucleotide
cgaauugucaugauuugag

SEQ ID NO: 1539585 - RNA, 19 nt, Artificial Sequence
  Description of Artificial Sequence: Synthetic oligonucleotide
aaggaacccucugagugcu

SEQ ID NO: 1539586 - RNA, 19 nt, Artificial Sequence
  Description of Artificial Sequence: Synthetic oligonucleotide
caucugcuuacaaucugac

SEQ ID NO: 1539587 - RNA, 19 nt, Artificial Sequence
  Description of Artificial Sequence: Synthetic oligonucleotide
gugaugguaaauggaaaac

SEQ ID NO: 1539588 - RNA, 19 nt, Artificial Sequence
  Description of Artificial Sequence: Synthetic oligonucleotide
gaucuuuugacagaaguuu

SEQ ID NO: 1539589 - RNA, 19 nt, Artificial Sequence
  Description of Artificial Sequence: Synthetic oligonucleotide
acugcuaacuugggagugg

SEQ ID NO: 1539590 - RNA, 19 nt, Artificial Sequence
  Description of Artificial Sequence: Synthetic oligonucleotide
ugcgucuuucccuugcuua

SEQ ID NO: 1539591 - RNA, 19 nt, Artificial Sequence
  Description of Artificial Sequence: Synthetic oligonucleotide
ggaagaagcuuuaugguca

SEQ ID NO: 1539592 - RNA, 19 nt, Artificial Sequence
  Description of Artificial Sequence: Synthetic oligonucleotide
acucccugggacgacuccc

SEQ ID NO: 1539593 - RNA, 19 nt, Artificial Sequence
  Description of Artificial Sequence: Synthetic oligonucleotide
cugcuuacaaucugacauc

SEQ ID NO: 1539594 - RNA, 19 nt, Artificial Sequence
  Description of Artificial Sequence: Synthetic oligonucleotide
uggauccucgaauugucau

SEQ ID NO: 1539595 - RNA, 19 nt, Artificial Sequence
  Description of Artificial Sequence: Synthetic oligonucleotide
guguauauuguaaauuucu

SEQ ID NO: 1539596 - RNA, 19 nt, Artificial Sequence
  Description of Artificial Sequence: Synthetic oligonucleotide
aagaaccugugauuaucua

SEQ ID NO: 1539597 - RNA, 19 nt, Artificial Sequence
  Description of Artificial Sequence: Synthetic oligonucleotide
cuauacuuggugguuuaac

SEQ ID NO: 1539598 - RNA, 19 nt, Artificial Sequence
  Description of Artificial Sequence: Synthetic oligonucleotide
ccccuuuacacaaggaacc

SEQ ID NO: 1539599 - RNA, 19 nt, Artificial Sequence
  Description of Artificial Sequence: Synthetic oligonucleotide
caaaagcuuuagcagccug

SEQ ID NO: 1539600 - RNA, 19 nt, Artificial Sequence
  Description of Artificial Sequence: Synthetic oligonucleotide
gcuguuauccuugaagcug

SEQ ID NO: 1539601 - RNA, 19 nt, Artificial Sequence
  Description of Artificial Sequence: Synthetic oligonucleotide
cugagccucagauuggaca

SEQ ID NO: 1539602 - RNA, 19 nt, Artificial Sequence
  Description of Artificial Sequence: Synthetic oligonucleotide
guaugacaccugcagacca

SEQ ID NO: 1539603 - RNA, 19 nt, Artificial Sequence
  Description of Artificial Sequence: Synthetic oligonucleotide
uuugcgucuuucccuugcu

SEQ ID NO: 1539604 - RNA, 19 nt, Artificial Sequence
  Description of Artificial Sequence: Synthetic oligonucleotide
agucauccuucccuggacu

SEQ ID NO: 1539605 - RNA, 19 nt, Artificial Sequence
  Description of Artificial Sequence: Synthetic oligonucleotide
ggaggcgucuguccgaggg

SEQ ID NO: 1539606 - RNA, 19 nt, Artificial Sequence
  Description of Artificial Sequence: Synthetic oligonucleotide
uuccaaguugguagugcac

SEQ ID NO: 1539607 - RNA, 19 nt, Artificial Sequence
  Description of Artificial Sequence: Synthetic oligonucleotide
guauauuguaaauuucuuu

SEQ ID NO: 1539608 - RNA, 19 nt, Artificial Sequence
  Description of Artificial Sequence: Synthetic oligonucleotide
gggaagaagcuuuaugguc

SEQ ID NO: 1539609 - RNA, 19 nt, Artificial Sequence
  Description of Artificial Sequence: Synthetic oligonucleotide
augauuugagccagagcag

SEQ ID NO: 1539610 - RNA, 19 nt, Artificial Sequence
  Description of Artificial Sequence: Synthetic oligonucleotide
gaacuaaagaucugacuau

SEQ ID NO: 1539611 - RNA, 19 nt, Artificial Sequence
  Description of Artificial Sequence: Synthetic oligonucleotide
guaccgcccacugagcagg

SEQ ID NO: 1539612 - RNA, 19 nt, Artificial Sequence
  Description of Artificial Sequence: Synthetic oligonucleotide
aucugcuuacaaucugaca

SEQ ID NO: 1539613 - RNA, 19 nt, Artificial Sequence
  Description of Artificial Sequence: Synthetic oligonucleotide
cugugauuaucuaccccac

SEQ ID NO: 1539614 - RNA, 19 nt, Artificial Sequence
  Description of Artificial Sequence: Synthetic oligonucleotide
uccucgaauugucaugauu

SEQ ID NO: 1539615 - RNA, 19 nt, Artificial Sequence
  Description of Artificial Sequence: Synthetic oligonucleotide
caaguugguagugcacucc

SEQ ID NO: 1539616 - RNA, 19 nt, Artificial Sequence
  Description of Artificial Sequence: Synthetic oligonucleotide
cuggacagaaaggaccuac

SEQ ID NO: 1539617 - RNA, 19 nt, Artificial Sequence
  Description of Artificial Sequence: Synthetic oligonucleotide
ugauugcuuuaugaguuuc

SEQ ID NO: 1539618 - RNA, 19 nt, Artificial Sequence
  Description of Artificial Sequence: Synthetic oligonucleotide
ggccuuguaaaauggguac

SEQ ID NO: 1539619 - RNA, 19 nt, Artificial Sequence
  Description of Artificial Sequence: Synthetic oligonucleotide
cagauuggacaaacuugag

SEQ ID NO: 1539620 - RNA, 19 nt, Artificial Sequence
  Description of Artificial Sequence: Synthetic oligonucleotide
cugacaucagagcaaaaua

SEQ ID NO: 1539621 - RNA, 19 nt, Artificial Sequence
  Description of Artificial Sequence: Synthetic oligonucleotide
cccuuagucucucacacag

SEQ ID NO: 1539622 - RNA, 19 nt, Artificial Sequence
  Description of Artificial Sequence: Synthetic oligonucleotide
ucuagaccccuuagucucu

SEQ ID NO: 1539623 - RNA, 19 nt, Artificial Sequence
  Description of Artificial Sequence: Synthetic oligonucleotide
uuagucucucacacaguuu

SEQ ID NO: 1539624 - RNA, 19 nt, Artificial Sequence
  Description of Artificial Sequence: Synthetic oligonucleotide
gaagcuuuauggucagugu

SEQ ID NO: 1539625 - RNA, 19 nt, Artificial Sequence
  Description of Artificial Sequence: Synthetic oligonucleotide
uuaggugcugggcgacuca

SEQ ID NO: 1539626 - RNA, 19 nt, Artificial Sequence
  Description of Artificial Sequence: Synthetic oligonucleotide
ccugugauuaucuacccca

SEQ ID NO: 1539627 - RNA, 19 nt, Artificial Sequence
  Description of Artificial Sequence: Synthetic oligonucleotide
agugacuccgugguacuug

SEQ ID NO: 1539628 - RNA, 19 nt, Artificial Sequence
  Description of Artificial Sequence: Synthetic oligonucleotide
aacuugggagugguggggu

SEQ ID NO: 1539629 - RNA, 19 nt, Artificial Sequence
  Description of Artificial Sequence: Synthetic oligonucleotide
caguuaaaucaucgcuggc

SEQ ID NO: 1539630 - RNA, 19 nt, Artificial Sequence
  Description of Artificial Sequence: Synthetic oligonucleotide
agcagugaugguaaaugga

SEQ ID NO: 1539631 - RNA, 19 nt, Artificial Sequence
  Description of Artificial Sequence: Synthetic oligonucleotide
guagugcacucccugggac

SEQ ID NO: 1539632 - RNA, 19 nt, Artificial Sequence
  Description of Artificial Sequence: Synthetic oligonucleotide
uuauguccacagucuuuga

SEQ ID NO: 1539633 - RNA, 19 nt, Artificial Sequence
  Description of Artificial Sequence: Synthetic oligonucleotide
gugacuccgugguacuugc

SEQ ID NO: 1539634 - RNA, 19 nt, Artificial Sequence
  Description of Artificial Sequence: Synthetic oligonucleotide
ugugagcaaucuuccugcu

SEQ ID NO: 1539635 - RNA, 19 nt, Artificial Sequence
  Description of Artificial Sequence: Synthetic oligonucleotide
ggauccucgaauugucaug

SEQ ID NO: 1539636 - RNA, 19 nt, Artificial Sequence
  Description of Artificial Sequence: Synthetic oligonucleotide
aaaucaucgcuggccuugu

SEQ ID NO: 1539637 - RNA, 19 nt, Artificial Sequence
  Description of Artificial Sequence: Synthetic oligonucleotide
uucccuggauccucgaauu

SEQ ID NO: 1539638 - RNA, 19 nt, Artificial Sequence
  Description of Artificial Sequence: Synthetic oligonucleotide
guuuaacucuaagaucaca

SEQ ID NO: 1539639 - RNA, 19 nt, Artificial Sequence
  Description of Artificial Sequence: Synthetic oligonucleotide
uccuuugcgucuuucccuu

SEQ ID NO: 1539640 - RNA, 19 nt, Artificial Sequence
  Description of Artificial Sequence: Synthetic oligonucleotide
cagaaaggaccuacagauc

SEQ ID NO: 1539641 - RNA, 19 nt, Artificial Sequence
  Description of Artificial Sequence: Synthetic oligonucleotide
gagcgcuggacagaaagga

SEQ ID NO: 1539642 - RNA, 19 nt, Artificial Sequence
  Description of Artificial Sequence: Synthetic oligonucleotide
aggagcucauaucuuuaaa

SEQ ID NO: 1539643 - RNA, 19 nt, Artificial Sequence
  Description of Artificial Sequence: Synthetic oligonucleotide
ucccuggauccucgaauug

SEQ ID NO: 1539644 - RNA, 19 nt, Artificial Sequence
  Description of Artificial Sequence: Synthetic oligonucleotide
uuaaaucaucgcuggccuu

SEQ ID NO: 1539645 - RNA, 19 nt, Artificial Sequence
  Description of Artificial Sequence: Synthetic oligonucleotide
ccugggacgacucccacag

SEQ ID NO: 1539646 - RNA, 19 nt, Artificial Sequence
  Description of Artificial Sequence: Synthetic oligonucleotide
gcaaacaagaaccugugau

SEQ ID NO: 1539647 - RNA, 19 nt, Artificial Sequence
  Description of Artificial Sequence: Synthetic oligonucleotide
gggucuagaccccuuaguc

SEQ ID NO: 1539648 - RNA, 19 nt, Artificial Sequence
  Description of Artificial Sequence: Synthetic oligonucleotide
uugugcgcuggcauaggau

SEQ ID NO: 1539649 - RNA, 19 nt, Artificial Sequence
  Description of Artificial Sequence: Synthetic oligonucleotide
ugacuauacuuggugguuu

SEQ ID NO: 1539650 - RNA, 19 nt, Artificial Sequence
  Description of Artificial Sequence: Synthetic oligonucleotide
uuuaggugcugggcgacuc

SEQ ID NO: 1539651 - RNA, 19 nt, Artificial Sequence
  Description of Artificial Sequence: Synthetic oligonucleotide
cagggaacuaaagaucuga

SEQ ID NO: 1539652 - RNA, 19 nt, Artificial Sequence
  Description of Artificial Sequence: Synthetic oligonucleotide
cagucgcaggucaggacag

SEQ ID NO: 1539653 - RNA, 19 nt, Artificial Sequence
  Description of Artificial Sequence: Synthetic oligonucleotide
gaccccuuagucucucaca

SEQ ID NO: 1539654 - RNA, 19 nt, Artificial Sequence
  Description of Artificial Sequence: Synthetic oligonucleotide
ggcauaggaucuuuugaca

SEQ ID NO: 1539655 - RNA, 19 nt, Artificial Sequence
  Description of Artificial Sequence: Synthetic oligonucleotide
caaggacuggugguuuucc

SEQ ID NO: 1539656 - RNA, 19 nt, Artificial Sequence
  Description of Artificial Sequence: Synthetic oligonucleotide
cucaugugaaauggagcug

SEQ ID NO: 1539657 - RNA, 19 nt, Artificial Sequence
  Description of Artificial Sequence: Synthetic oligonucleotide
aaaccaccucaggagcuca

SEQ ID NO: 1539658 - RNA, 19 nt, Artificial Sequence
  Description of Artificial Sequence: Synthetic oligonucleotide
gacuauacuuggugguuua

SEQ ID NO: 1539659 - RNA, 19 nt, Artificial Sequence
  Description of Artificial Sequence: Synthetic oligonucleotide
ugcuaacuugggaguggug

SEQ ID NO: 1539660 - RNA, 19 nt, Artificial Sequence
  Description of Artificial Sequence: Synthetic oligonucleotide
cuccgugguacuugcuuug

SEQ ID NO: 1539661 - RNA, 19 nt, Artificial Sequence
  Description of Artificial Sequence: Synthetic oligonucleotide
accuacagaucccuccuuu

SEQ ID NO: 1539662 - RNA, 19 nt, Artificial Sequence
  Description of Artificial Sequence: Synthetic oligonucleotide
auuugugcgcuggcauagg

SEQ ID NO: 1539663 - RNA, 19 nt, Artificial Sequence
  Description of Artificial Sequence: Synthetic oligonucleotide
gagaggaguaugacaccug

SEQ ID NO: 1539664 - RNA, 19 nt, Artificial Sequence
  Description of Artificial Sequence: Synthetic oligonucleotide
caaacaagaaccugugauu

SEQ ID NO: 1539665 - RNA, 19 nt, Artificial Sequence
  Description of Artificial Sequence: Synthetic oligonucleotide
ggaguaugacaccugcaga

SEQ ID NO: 1539666 - RNA, 19 nt, Artificial Sequence
  Description of Artificial Sequence: Synthetic oligonucleotide
cuuagucucucacacaguu

SEQ ID NO: 1539667 - RNA, 19 nt, Artificial Sequence
  Description of Artificial Sequence: Synthetic oligonucleotide
aggcuuaaggcugcuccag

SEQ ID NO: 1539668 - RNA, 19 nt, Artificial Sequence
  Description of Artificial Sequence: Synthetic oligonucleotide
auuugagccagagcaguua

SEQ ID NO: 1539669 - RNA, 19 nt, Artificial Sequence
  Description of Artificial Sequence: Synthetic oligonucleotide
aucagguaccgagucccag

SEQ ID NO: 1539670 - RNA, 19 nt, Artificial Sequence
  Description of Artificial Sequence: Synthetic oligonucleotide
agugcacucccugggacga

SEQ ID NO: 1539671 - RNA, 19 nt, Artificial Sequence
  Description of Artificial Sequence: Synthetic oligonucleotide
gaacccucugagugcugug

SEQ ID NO: 1539672 - RNA, 19 nt, Artificial Sequence
  Description of Artificial Sequence: Synthetic oligonucleotide
aauuccccaucugcuuaca

SEQ ID NO: 1539673 - RNA, 19 nt, Artificial Sequence
  Description of Artificial Sequence: Synthetic oligonucleotide
caagaaccugugauuaucu

SEQ ID NO: 1539674 - RNA, 19 nt, Artificial Sequence
  Description of Artificial Sequence: Synthetic oligonucleotide
cagugaugguaaauggaaa

SEQ ID NO: 1539675 - RNA, 19 nt, Artificial Sequence
  Description of Artificial Sequence: Synthetic oligonucleotide
cucaucgcacuagccacag

SEQ ID NO: 1539676 - RNA, 19 nt, Artificial Sequence
  Description of Artificial Sequence: Synthetic oligonucleotide
uguccgagggaagaagcuu

SEQ ID NO: 1539677 - RNA, 19 nt, Artificial Sequence
  Description of Artificial Sequence: Synthetic oligonucleotide
uccgagggaagaagcuuua

SEQ ID NO: 1539678 - RNA, 19 nt, Artificial Sequence
  Description of Artificial Sequence: Synthetic oligonucleotide
gugcucugaauccuggugu

SEQ ID NO: 1539679 - RNA, 19 nt, Artificial Sequence
  Description of Artificial Sequence: Synthetic oligonucleotide
uuuuaggugcugggcgacu

SEQ ID NO: 1539680 - RNA, 19 nt, Artificial Sequence
  Description of Artificial Sequence: Synthetic oligonucleotide
uggguaccgcccacugagc

SEQ ID NO: 1539681 - RNA, 19 nt, Artificial Sequence
  Description of Artificial Sequence: Synthetic oligonucleotide
gugaaauggagcuguguau

SEQ ID NO: 1539682 - RNA, 19 nt, Artificial Sequence
  Description of Artificial Sequence: Synthetic oligonucleotide
cagaucccuccuuugcguc

SEQ ID NO: 1539683 - RNA, 19 nt, Artificial Sequence
  Description of Artificial Sequence: Synthetic oligonucleotide
gaauccuggugugccugcc

SEQ ID NO: 1539684 - RNA, 19 nt, Artificial Sequence
  Description of Artificial Sequence: Synthetic oligonucleotide
gauugcuuuaugaguuucu

SEQ ID NO: 1539685 - RNA, 19 nt, Artificial Sequence
  Description of Artificial Sequence: Synthetic oligonucleotide
gcuggguuuagauccagaa

SEQ ID NO: 1539686 - RNA, 19 nt, Artificial Sequence
  Description of Artificial Sequence: Synthetic oligonucleotide
gguaccgcccacugagcag

SEQ ID NO: 1539687 - RNA, 19 nt, Artificial Sequence
  Description of Artificial Sequence: Synthetic oligonucleotide
cuaccccaccucacaacac

SEQ ID NO: 1539688 - RNA, 19 nt, Artificial Sequence
  Description of Artificial Sequence: Synthetic oligonucleotide
ccacagucaucacuguccc

SEQ ID NO: 1539689 - RNA, 19 nt, Artificial Sequence
  Description of Artificial Sequence: Synthetic oligonucleotide
cuggauccucgaauuguca

SEQ ID NO: 1539690 - RNA, 19 nt, Artificial Sequence
  Description of Artificial Sequence: Synthetic oligonucleotide
gaggaguaugacaccugca

SEQ ID NO: 1539691 - RNA, 19 nt, Artificial Sequence
  Description of Artificial Sequence: Synthetic oligonucleotide
ugguuugguuaggacacuu

SEQ ID NO: 1539692 - RNA, 19 nt, Artificial Sequence
  Description of Artificial Sequence: Synthetic oligonucleotide
uugcgucuuucccuugcuu

SEQ ID NO: 1539693 - RNA, 19 nt, Artificial Sequence
  Description of Artificial Sequence: Synthetic oligonucleotide
ccuacagaucccuccuuug

SEQ ID NO: 1539694 - RNA, 19 nt, Artificial Sequence
  Description of Artificial Sequence: Synthetic oligonucleotide
cuggaggcgucuguccgag

SEQ ID NO: 1539695 - RNA, 19 nt, Artificial Sequence
  Description of Artificial Sequence: Synthetic oligonucleotide
acuauacuuggugguuuaa

SEQ ID NO: 1539696 - RNA, 19 nt, Artificial Sequence
  Description of Artificial Sequence: Synthetic oligonucleotide
ugcacucccugggacgacu

SEQ ID NO: 1539697 - RNA, 19 nt, Artificial Sequence
  Description of Artificial Sequence: Synthetic oligonucleotide
gguagugcacucccuggga

SEQ ID NO: 1539698 - RNA, 19 nt, Artificial Sequence
  Description of Artificial Sequence: Synthetic oligonucleotide
gccuuguaaaauggguacc

SEQ ID NO: 1539699 - RNA, 19 nt, Artificial Sequence
  Description of Artificial Sequence: Synthetic oligonucleotide
ccuggauccucgaauuguc

SEQ ID NO: 1539700 - RNA, 19 nt, Artificial Sequence
  Description of Artificial Sequence: Synthetic oligonucleotide
gcucauaucuuuaaagaau

SEQ ID NO: 1539701 - RNA, 19 nt, Artificial Sequence
  Description of Artificial Sequence: Synthetic oligonucleotide
ccaucugcuuacaaucuga

SEQ ID NO: 1539702 - RNA, 19 nt, Artificial Sequence
  Description of Artificial Sequence: Synthetic oligonucleotide
caacugcuaacuugggagu

SEQ ID NO: 1539703 - RNA, 19 nt, Artificial Sequence
  Description of Artificial Sequence: Synthetic oligonucleotide
ugacuccgugguacuugcu

SEQ ID NO: 1539704 - RNA, 19 nt, Artificial Sequence
  Description of Artificial Sequence: Synthetic oligonucleotide
ccucgaauugucaugauuu

SEQ ID NO: 1539705 - RNA, 19 nt, Artificial Sequence
  Description of Artificial Sequence: Synthetic oligonucleotide
aguugguagugcacucccu

SEQ ID NO: 1539706 - RNA, 19 nt, Artificial Sequence
  Description of Artificial Sequence: Synthetic oligonucleotide
ccaccucacaacacacagc

SEQ ID NO: 1539707 - RNA, 19 nt, Artificial Sequence
  Description of Artificial Sequence: Synthetic oligonucleotide
cccuuuacacaaggaaccc

SEQ ID NO: 1539708 - RNA, 19 nt, Artificial Sequence
  Description of Artificial Sequence: Synthetic oligonucleotide
cgccucgacaggcaaaugc

SEQ ID NO: 1539709 - RNA, 19 nt, Artificial Sequence
  Description of Artificial Sequence: Synthetic oligonucleotide
cgagggaagaagcuuuaug

SEQ ID NO: 1539710 - RNA, 19 nt, Artificial Sequence
  Description of Artificial Sequence: Synthetic oligonucleotide
caauaaggcugccucugcu

SEQ ID NO: 1539711 - RNA, 19 nt, Artificial Sequence
  Description of Artificial Sequence: Synthetic oligonucleotide
uggaggcgucuguccgagg

SEQ ID NO: 1539712 - RNA, 19 nt, Artificial Sequence
  Description of Artificial Sequence: Synthetic oligonucleotide
cugguggaucaacugcuaa

SEQ ID NO: 1539713 - RNA, 19 nt, Artificial Sequence
  Description of Artificial Sequence: Synthetic oligonucleotide
ucccugggacgacucccac

SEQ ID NO: 1539714 - RNA, 19 nt, Artificial Sequence
  Description of Artificial Sequence: Synthetic oligonucleotide
gacgacucccacagucauc

SEQ ID NO: 1539715 - RNA, 19 nt, Artificial Sequence
  Description of Artificial Sequence: Synthetic oligonucleotide
gaggggcaaccugcugccg

SEQ ID NO: 1539716 - RNA, 19 nt, Artificial Sequence
  Description of Artificial Sequence: Synthetic oligonucleotide
cgugguacuugcuuuguga

SEQ ID NO: 1539717 - RNA, 19 nt, Artificial Sequence
  Description of Artificial Sequence: Synthetic oligonucleotide
gcuuacaaucugacaucag

SEQ ID NO: 1539718 - RNA, 19 nt, Artificial Sequence
  Description of Artificial Sequence: Synthetic oligonucleotide
cuagaccccuuagucucuc

SEQ ID NO: 1539719 - RNA, 19 nt, Artificial Sequence
  Description of Artificial Sequence: Synthetic oligonucleotide
gugcugggcgacucaguga

SEQ ID NO: 1539720 - RNA, 19 nt, Artificial Sequence
  Description of Artificial Sequence: Synthetic oligonucleotide
ugccgccucgacaggcaaa

SEQ ID NO: 1539721 - RNA, 19 nt, Artificial Sequence
  Description of Artificial Sequence: Synthetic oligonucleotide
caucagguaccgaguccca

SEQ ID NO: 1539722 - RNA, 19 nt, Artificial Sequence
  Description of Artificial Sequence: Synthetic oligonucleotide
auccucgaauugucaugau

SEQ ID NO: 1539723 - RNA, 19 nt, Artificial Sequence
  Description of Artificial Sequence: Synthetic oligonucleotide
ggguaccgcccacugagca

SEQ ID NO: 1539724 - RNA, 19 nt, Artificial Sequence
  Description of Artificial Sequence: Synthetic oligonucleotide
aggcgucuguccgagggaa

SEQ ID NO: 1539725 - RNA, 19 nt, Artificial Sequence
  Description of Artificial Sequence: Synthetic oligonucleotide
guacuugcuuugugagcaa

SEQ ID NO: 1539726 - RNA, 19 nt, Artificial Sequence
  Description of Artificial Sequence: Synthetic oligonucleotide
cccuuuuguccagugacuc

SEQ ID NO: 1539727 - RNA, 19 nt, Artificial Sequence
  Description of Artificial Sequence: Synthetic oligonucleotide
ggcuuaaggcugcuccaga

SEQ ID NO: 1539728 - RNA, 19 nt, Artificial Sequence
  Description of Artificial Sequence: Synthetic oligonucleotide
ugcgcuggcauaggaucuu

SEQ ID NO: 1539729 - RNA, 19 nt, Artificial Sequence
  Description of Artificial Sequence: Synthetic oligonucleotide
ggacacuuugucaggaccu

SEQ ID NO: 1539730 - RNA, 19 nt, Artificial Sequence
  Description of Artificial Sequence: Synthetic oligonucleotide
gauuugagccagagcaguu

SEQ ID NO: 1539731 - RNA, 19 nt, Artificial Sequence
  Description of Artificial Sequence: Synthetic oligonucleotide
ggaccuacagaucccuccu

SEQ ID NO: 1539732 - RNA, 19 nt, Artificial Sequence
  Description of Artificial Sequence: Synthetic oligonucleotide
ccucaggucuugugcuggg

SEQ ID NO: 1539733 - RNA, 19 nt, Artificial Sequence
  Description of Artificial Sequence: Synthetic oligonucleotide
gcgucuuucccuugcuuaa

SEQ ID NO: 1539734 - RNA, 19 nt, Artificial Sequence
  Description of Artificial Sequence: Synthetic oligonucleotide
cacaguuuccucaggucuu

SEQ ID NO: 1539735 - RNA, 19 nt, Artificial Sequence
  Description of Artificial Sequence: Synthetic oligonucleotide
ggaucuuuugacagaaguu

SEQ ID NO: 1539736 - RNA, 19 nt, Artificial Sequence
  Description of Artificial Sequence: Synthetic oligonucleotide
cccuugggccaaaccaaag

SEQ ID NO: 1539737 - RNA, 19 nt, Artificial Sequence
  Description of Artificial Sequence: Synthetic oligonucleotide
gguaccgagucccagccuu

SEQ ID NO: 1539738 - RNA, 19 nt, Artificial Sequence
  Description of Artificial Sequence: Synthetic oligonucleotide
cgaggggcaaccugcugcc

SEQ ID NO: 1539739 - RNA, 19 nt, Artificial Sequence
  Description of Artificial Sequence: Synthetic oligonucleotide
ugagucccuugggccaaac

SEQ ID NO: 1539740 - RNA, 19 nt, Artificial Sequence
  Description of Artificial Sequence: Synthetic oligonucleotide
aucgcacuagccacagcuu

SEQ ID NO: 1539741 - RNA, 19 nt, Artificial Sequence
  Description of Artificial Sequence: Synthetic oligonucleotide
gggacgacucccacaguca

SEQ ID NO: 1539742 - RNA, 19 nt, Artificial Sequence
  Description of Artificial Sequence: Synthetic oligonucleotide
guaccgagucccagccuuc

SEQ ID NO: 1539743 - RNA, 19 nt, Artificial Sequence
  Description of Artificial Sequence: Synthetic oligonucleotide
gguuuuccucaucgcacua

SEQ ID NO: 1539744 - RNA, 19 nt, Artificial Sequence
  Description of Artificial Sequence: Synthetic oligonucleotide
cugacuauacuuggugguu

SEQ ID NO: 1539745 - RNA, 19 nt, Artificial Sequence
  Description of Artificial Sequence: Synthetic oligonucleotide
gcaaggacuggugguuuuc

SEQ ID NO: 1539746 - RNA, 19 nt, Artificial Sequence
  Description of Artificial Sequence: Synthetic oligonucleotide
gcuggaggcgucuguccga

SEQ ID NO: 1539747 - RNA, 19 nt, Artificial Sequence
  Description of Artificial Sequence: Synthetic oligonucleotide
ggggucuagaccccuuagu

SEQ ID NO: 1539748 - RNA, 19 nt, Artificial Sequence
  Description of Artificial Sequence: Synthetic oligonucleotide
cucaggucuugugcuggga

SEQ ID NO: 1539749 - RNA, 19 nt, Artificial Sequence
  Description of Artificial Sequence: Synthetic oligonucleotide
gguuuagauccagaaguuu

SEQ ID NO: 1539750 - RNA, 19 nt, Artificial Sequence
  Description of Artificial Sequence: Synthetic oligonucleotide
ggcucucaugugaaaugga

SEQ ID NO: 1539751 - RNA, 19 nt, Artificial Sequence
  Description of Artificial Sequence: Synthetic oligonucleotide
gcgucuguccgagggaaga

SEQ ID NO: 1539752 - RNA, 19 nt, Artificial Sequence
  Description of Artificial Sequence: Synthetic oligonucleotide
gccucgacaggcaaaugcu

SEQ ID NO: 1539753 - RNA, 19 nt, Artificial Sequence
  Description of Artificial Sequence: Synthetic oligonucleotide
cugcuaacuugggaguggu

SEQ ID NO: 1539754 - RNA, 19 nt, Artificial Sequence
  Description of Artificial Sequence: Synthetic oligonucleotide
ccucaucgcacuagccaca

SEQ ID NO: 1539755 - RNA, 19 nt, Artificial Sequence
  Description of Artificial Sequence: Synthetic oligonucleotide
gugcgcuggcauaggaucu

SEQ ID NO: 1539756 - RNA, 19 nt, Artificial Sequence
  Description of Artificial Sequence: Synthetic oligonucleotide
gaccuacagaucccuccuu

SEQ ID NO: 1539757 - RNA, 19 nt, Artificial Sequence
  Description of Artificial Sequence: Synthetic oligonucleotide
ggaacccucugagugcugu

SEQ ID NO: 1539758 - RNA, 19 nt, Artificial Sequence
  Description of Artificial Sequence: Synthetic oligonucleotide
ggacgacucccacagucau

SEQ ID NO: 1539759 - RNA, 19 nt, Artificial Sequence
  Description of Artificial Sequence: Synthetic oligonucleotide
ggcgucuguccgagggaag

SEQ ID NO: 1539760 - RNA, 19 nt, Artificial Sequence
  Description of Artificial Sequence: Synthetic oligonucleotide
cccuggaucuugaauaauu

SEQ ID NO: 1539761 - RNA, 19 nt, Artificial Sequence
  Description of Artificial Sequence: Synthetic oligonucleotide
ggguuuagauccagaaguu

SEQ ID NO: 1539762 - RNA, 19 nt, Artificial Sequence
  Description of Artificial Sequence: Synthetic oligonucleotide
ggacagccgggcaaggacu

SEQ ID NO: 1539763 - RNA, 19 nt, Artificial Sequence
  Description of Artificial Sequence: Synthetic oligonucleotide
aggaacccucugagugcug

SEQ ID NO: 1539764 - RNA, 19 nt, Artificial Sequence
  Description of Artificial Sequence: Synthetic oligonucleotide
aggcuucaucagguaccga

SEQ ID NO: 1539765 - RNA, 19 nt, Artificial Sequence
  Description of Artificial Sequence: Synthetic oligonucleotide
cugccgccucgacaggcaa

SEQ ID NO: 1539766 - RNA, 19 nt, Artificial Sequence
  Description of Artificial Sequence: Synthetic oligonucleotide
augagucccuugggccaaa

SEQ ID NO: 1539767 - RNA, 19 nt, Artificial Sequence
  Description of Artificial Sequence: Synthetic oligonucleotide
accgcccacugagcaggga

SEQ ID NO: 1539768 - RNA, 19 nt, Artificial Sequence
  Description of Artificial Sequence: Synthetic oligonucleotide
ccuuuacacaaggaacccu

SEQ ID NO: 1539769 - RNA, 19 nt, Artificial Sequence
  Description of Artificial Sequence: Synthetic oligonucleotide
ggcaaggacuggugguuuu

SEQ ID NO: 1539770 - RNA, 19 nt, Artificial Sequence
  Description of Artificial Sequence: Synthetic oligonucleotide
cagccgggcaaggacuggu

SEQ ID NO: 1539771 - RNA, 19 nt, Artificial Sequence
  Description of Artificial Sequence: Synthetic oligonucleotide
ccgggcaaggacugguggu

SEQ ID NO: 1539772 - RNA, 19 nt, Artificial Sequence
  Description of Artificial Sequence: Synthetic oligonucleotide
caucaggcuuaaggcugcu

SEQ ID NO: 1539773 - RNA, 19 nt, Artificial Sequence
  Description of Artificial Sequence: Synthetic oligonucleotide
gccgccucgacaggcaaau

SEQ ID NO: 1539774 - RNA, 19 nt, Artificial Sequence
  Description of Artificial Sequence: Synthetic oligonucleotide
cugggacgacucccacagu

SEQ ID NO: 1539775 - RNA, 19 nt, Artificial Sequence
  Description of Artificial Sequence: Synthetic oligonucleotide
gguggggucuagaccccuu

SEQ ID NO: 1539776 - RNA, 19 nt, Artificial Sequence
  Description of Artificial Sequence: Synthetic oligonucleotide
ccgccucgacaggcaaaug

SEQ ID NO: 1539777 - RNA, 19 nt, Artificial Sequence
  Description of Artificial Sequence: Synthetic oligonucleotide
ccgagggaagaagcuuuau

SEQ ID NO: 1539778 - RNA, 19 nt, Artificial Sequence
  Description of Artificial Sequence: Synthetic oligonucleotide
gcgcuggcauaggaucuuu

SEQ ID NO: 1539779 - RNA, 19 nt, Artificial Sequence
  Description of Artificial Sequence: Synthetic oligonucleotide
cgggcaaggacuggugguu

SEQ ID NO: 1539780 - RNA, 19 nt, Artificial Sequence
  Description of Artificial Sequence: Synthetic oligonucleotide
ccccuggaucuugaauaau

SEQ ID NO: 1539781 - RNA, 19 nt, Artificial Sequence
  Description of Artificial Sequence: Synthetic oligonucleotide
gcgacucagugagcccuuu

SEQ ID NO: 1539782 - RNA, 19 nt, Artificial Sequence
  Description of Artificial Sequence: Synthetic oligonucleotide
gaaguuauuauccuagagg

SEQ ID NO: 1539783 - RNA, 19 nt, Artificial Sequence
  Description of Artificial Sequence: Synthetic oligonucleotide
aaguuauuauccuagagga

SEQ ID NO: 1539784 - RNA, 19 nt, Artificial Sequence
  Description of Artificial Sequence: Synthetic oligonucleotide
aaaucuugcauccacucca

SEQ ID NO: 1539785 - RNA, 19 nt, Artificial Sequence
  Description of Artificial Sequence: Synthetic oligonucleotide
ucaaucaggacauauuuga

SEQ ID NO: 1539786 - RNA, 19 nt, Artificial Sequence
  Description of Artificial Sequence: Synthetic oligonucleotide
ugaaauuucaggcucaaua

SEQ ID NO: 1539787 - RNA, 19 nt, Artificial Sequence
  Description of Artificial Sequence: Synthetic oligonucleotide
uccuagaggaaacugcucg

SEQ ID NO: 1539788 - RNA, 19 nt, Artificial Sequence
  Description of Artificial Sequence: Synthetic oligonucleotide
aauuucaggcucaauaguc

SEQ ID NO: 1539789 - RNA, 19 nt, Artificial Sequence
  Description of Artificial Sequence: Synthetic oligonucleotide
ucuagcaacaagugggacg

SEQ ID NO: 1539790 - RNA, 19 nt, Artificial Sequence
  Description of Artificial Sequence: Synthetic oligonucleotide
uccauuacauagaugacca

SEQ ID NO: 1539791 - RNA, 19 nt, Artificial Sequence
  Description of Artificial Sequence: Synthetic oligonucleotide
uaugccaccauuuggcccg

SEQ ID NO: 1539792 - RNA, 19 nt, Artificial Sequence
  Description of Artificial Sequence: Synthetic oligonucleotide
aguucaucgaagccggugc

SEQ ID NO: 1539793 - RNA, 19 nt, Artificial Sequence
  Description of Artificial Sequence: Synthetic oligonucleotide
guagaacucaucuagcacc

SEQ ID NO: 1539794 - RNA, 19 nt, Artificial Sequence
  Description of Artificial Sequence: Synthetic oligonucleotide
uuauccuagaggaaacugc

SEQ ID NO: 1539795 - RNA, 19 nt, Artificial Sequence
  Description of Artificial Sequence: Synthetic oligonucleotide
aguacuucgugaugugucc

SEQ ID NO: 1539796 - RNA, 19 nt, Artificial Sequence
  Description of Artificial Sequence: Synthetic oligonucleotide
agguuacugacauagguag

SEQ ID NO: 1539797 - RNA, 19 nt, Artificial Sequence
  Description of Artificial Sequence: Synthetic oligonucleotide
ucgauaaacuucaucaccu

SEQ ID NO: 1539798 - RNA, 19 nt, Artificial Sequence
  Description of Artificial Sequence: Synthetic oligonucleotide
agcaugucagacuucuagc

SEQ ID NO: 1539799 - RNA, 19 nt, Artificial Sequence
  Description of Artificial Sequence: Synthetic oligonucleotide
ucaauauuggcggggaagg

SEQ ID NO: 1539800 - RNA, 19 nt, Artificial Sequence
  Description of Artificial Sequence: Synthetic oligonucleotide
uguacaaagguaguuuucc

SEQ ID NO: 1539801 - RNA, 19 nt, Artificial Sequence
  Description of Artificial Sequence: Synthetic oligonucleotide
gacauagguagucucuugg

SEQ ID NO: 1539802 - RNA, 19 nt, Artificial Sequence
  Description of Artificial Sequence: Synthetic oligonucleotide
uauagcauauuggacauga

SEQ ID NO: 1539803 - RNA, 19 nt, Artificial Sequence
  Description of Artificial Sequence: Synthetic oligonucleotide
acagaguucaucgaagccg

SEQ ID NO: 1539804 - RNA, 19 nt, Artificial Sequence
  Description of Artificial Sequence: Synthetic oligonucleotide
aaucaggacauauuugaau

SEQ ID NO: 1539805 - RNA, 19 nt, Artificial Sequence
  Description of Artificial Sequence: Synthetic oligonucleotide
uggacaugaagguuacugg

SEQ ID NO: 1539806 - RNA, 19 nt, Artificial Sequence
  Description of Artificial Sequence: Synthetic oligonucleotide
agcuugaaauuucaggcuc

SEQ ID NO: 1539807 - RNA, 19 nt, Artificial Sequence
  Description of Artificial Sequence: Synthetic oligonucleotide
gauaucaauauuggcgggg

SEQ ID NO: 1539808 - RNA, 19 nt, Artificial Sequence
  Description of Artificial Sequence: Synthetic oligonucleotide
cuagcaacaagugggacgg

SEQ ID NO: 1539809 - RNA, 19 nt, Artificial Sequence
  Description of Artificial Sequence: Synthetic oligonucleotide
aagucagaaggguucagca

SEQ ID NO: 1539810 - RNA, 19 nt, Artificial Sequence
  Description of Artificial Sequence: Synthetic oligonucleotide
gacuucuagcaacaagugg

SEQ ID NO: 1539811 - RNA, 19 nt, Artificial Sequence
  Description of Artificial Sequence: Synthetic oligonucleotide
agcaaagagauugagugag

SEQ ID NO: 1539812 - RNA, 19 nt, Artificial Sequence
  Description of Artificial Sequence: Synthetic oligonucleotide
gaagcguuuguuguggagg

SEQ ID NO: 1539813 - RNA, 19 nt, Artificial Sequence
  Description of Artificial Sequence: Synthetic oligonucleotide
ucaucaccugaucaaaucu

SEQ ID NO: 1539814 - RNA, 19 nt, Artificial Sequence
  Description of Artificial Sequence: Synthetic oligonucleotide
uuauuauccuagaggaaac

SEQ ID NO: 1539815 - RNA, 19 nt, Artificial Sequence
  Description of Artificial Sequence: Synthetic oligonucleotide
ucagacuucuagcaacaag

SEQ ID NO: 1539816 - RNA, 19 nt, Artificial Sequence
  Description of Artificial Sequence: Synthetic oligonucleotide
uuggacaugaagguuacug

SEQ ID NO: 1539817 - RNA, 19 nt, Artificial Sequence
  Description of Artificial Sequence: Synthetic oligonucleotide
caagagaagcuaaccaagg

SEQ ID NO: 1539818 - RNA, 19 nt, Artificial Sequence
  Description of Artificial Sequence: Synthetic oligonucleotide
ugcuaaauaccaagagaag

SEQ ID NO: 1539819 - RNA, 19 nt, Artificial Sequence
  Description of Artificial Sequence: Synthetic oligonucleotide
uaccaagagaagcuaacca

SEQ ID NO: 1539820 - RNA, 19 nt, Artificial Sequence
  Description of Artificial Sequence: Synthetic oligonucleotide
gagaagcuaaccaagggug

SEQ ID NO: 1539821 - RNA, 19 nt, Artificial Sequence
  Description of Artificial Sequence: Synthetic oligonucleotide
cuuuauacuucacuguguc

SEQ ID NO: 1539822 - RNA, 19 nt, Artificial Sequence
  Description of Artificial Sequence: Synthetic oligonucleotide
ucaggcucaauagucauca

SEQ ID NO: 1539823 - RNA, 19 nt, Artificial Sequence
  Description of Artificial Sequence: Synthetic oligonucleotide
uggugacuugaacacagag

SEQ ID NO: 1539824 - RNA, 19 nt, Artificial Sequence
  Description of Artificial Sequence: Synthetic oligonucleotide
aacugcucgacugcagccc

SEQ ID NO: 1539825 - RNA, 19 nt, Artificial Sequence
  Description of Artificial Sequence: Synthetic oligonucleotide
aguccauauuguuucauga

SEQ ID NO: 1539826 - RNA, 19 nt, Artificial Sequence
  Description of Artificial Sequence: Synthetic oligonucleotide
acagagcccauauccuucc

SEQ ID NO: 1539827 - RNA, 19 nt, Artificial Sequence
  Description of Artificial Sequence: Synthetic oligonucleotide
cagaguucaucgaagccgg

SEQ ID NO: 1539828 - RNA, 19 nt, Artificial Sequence
  Description of Artificial Sequence: Synthetic oligonucleotide
gaaagccucaaaaucuugc

SEQ ID NO: 1539829 - RNA, 19 nt, Artificial Sequence
  Description of Artificial Sequence: Synthetic oligonucleotide
gaucaaaucugguagcaaa

SEQ ID NO: 1539830 - RNA, 19 nt, Artificial Sequence
  Description of Artificial Sequence: Synthetic oligonucleotide
guuauuauccuagaggaaa

SEQ ID NO: 1539831 - RNA, 19 nt, Artificial Sequence
  Description of Artificial Sequence: Synthetic oligonucleotide
agucucuugguucaaggca

SEQ ID NO: 1539832 - RNA, 19 nt, Artificial Sequence
  Description of Artificial Sequence: Synthetic oligonucleotide
gcauauagcauauuggaca

SEQ ID NO: 1539833 - RNA, 19 nt, Artificial Sequence
  Description of Artificial Sequence: Synthetic oligonucleotide
ugagugaggucacuaugcc

SEQ ID NO: 1539834 - RNA, 19 nt, Artificial Sequence
  Description of Artificial Sequence: Synthetic oligonucleotide
agugggacggucuacuugu

SEQ ID NO: 1539835 - RNA, 19 nt, Artificial Sequence
  Description of Artificial Sequence: Synthetic oligonucleotide
ucuuggaaagccucaaaau

SEQ ID NO: 1539836 - RNA, 19 nt, Artificial Sequence
  Description of Artificial Sequence: Synthetic oligonucleotide
gaugacguagggugggaag

SEQ ID NO: 1539837 - RNA, 19 nt, Artificial Sequence
  Description of Artificial Sequence: Synthetic oligonucleotide
agcauauagcauauuggac

SEQ ID NO: 1539838 - RNA, 19 nt, Artificial Sequence
  Description of Artificial Sequence: Synthetic oligonucleotide
uguaacucuguggucaaug

SEQ ID NO: 1539839 - RNA, 19 nt, Artificial Sequence
  Description of Artificial Sequence: Synthetic oligonucleotide
augacguagggugggaagc

SEQ ID NO: 1539840 - RNA, 19 nt, Artificial Sequence
  Description of Artificial Sequence: Synthetic oligonucleotide
ggacaugaagguuacuggg

SEQ ID NO: 1539841 - RNA, 19 nt, Artificial Sequence
  Description of Artificial Sequence: Synthetic oligonucleotide
aguuuucccggaucccgcc

SEQ ID NO: 1539842 - RNA, 19 nt, Artificial Sequence
  Description of Artificial Sequence: Synthetic oligonucleotide
caaaaucuugcauccacuc

SEQ ID NO: 1539843 - RNA, 19 nt, Artificial Sequence
  Description of Artificial Sequence: Synthetic oligonucleotide
aucaauauuggcggggaag

SEQ ID NO: 1539844 - RNA, 19 nt, Artificial Sequence
  Description of Artificial Sequence: Synthetic oligonucleotide
cuaaauaccaagagaagcu

SEQ ID NO: 1539845 - RNA, 19 nt, Artificial Sequence
  Description of Artificial Sequence: Synthetic oligonucleotide
gaagcuaaccaaggguggg

SEQ ID NO: 1539846 - RNA, 19 nt, Artificial Sequence
  Description of Artificial Sequence: Synthetic oligonucleotide
uagaugaccacuguuggaa

SEQ ID NO: 1539847 - RNA, 19 nt, Artificial Sequence
  Description of Artificial Sequence: Synthetic oligonucleotide
uuacuggguuaguacuucg

SEQ ID NO: 1539848 - RNA, 19 nt, Artificial Sequence
  Description of Artificial Sequence: Synthetic oligonucleotide
aacccuaacuucaucuaag

SEQ ID NO: 1539849 - RNA, 19 nt, Artificial Sequence
  Description of Artificial Sequence: Synthetic oligonucleotide
aagugggacggucuacuug

SEQ ID NO: 1539850 - RNA, 19 nt, Artificial Sequence
  Description of Artificial Sequence: Synthetic oligonucleotide
guccauuacauagaugacc

SEQ ID NO: 1539851 - RNA, 19 nt, Artificial Sequence
  Description of Artificial Sequence: Synthetic oligonucleotide
gugagaauacacuccuugc

SEQ ID NO: 1539852 - RNA, 19 nt, Artificial Sequence
  Description of Artificial Sequence: Synthetic oligonucleotide
cauauccuuccgaaggcgc

SEQ ID NO: 1539853 - RNA, 19 nt, Artificial Sequence
  Description of Artificial Sequence: Synthetic oligonucleotide
uauuccggccgauauuccc

SEQ ID NO: 1539854 - RNA, 19 nt, Artificial Sequence
  Description of Artificial Sequence: Synthetic oligonucleotide
uggucaaugaugucgguuu

SEQ ID NO: 1539855 - RNA, 19 nt, Artificial Sequence
  Description of Artificial Sequence: Synthetic oligonucleotide
ucaaaucugguagcaaaga

SEQ ID NO: 1539856 - RNA, 19 nt, Artificial Sequence
  Description of Artificial Sequence: Synthetic oligonucleotide
gaacgagucagguuacuga

SEQ ID NO: 1539857 - RNA, 19 nt, Artificial Sequence
  Description of Artificial Sequence: Synthetic oligonucleotide
uuggcccgaguccauauug

SEQ ID NO: 1539858 - RNA, 19 nt, Artificial Sequence
  Description of Artificial Sequence: Synthetic oligonucleotide
ucuacuuguuucucuucca

SEQ ID NO: 1539859 - RNA, 19 nt, Artificial Sequence
  Description of Artificial Sequence: Synthetic oligonucleotide
uggguuaguacuucgugau

SEQ ID NO: 1539860 - RNA, 19 nt, Artificial Sequence
  Description of Artificial Sequence: Synthetic oligonucleotide
aacaagugggacggucuac

SEQ ID NO: 1539861 - RNA, 19 nt, Artificial Sequence
  Description of Artificial Sequence: Synthetic oligonucleotide
gucacuaugccaccauuug

SEQ ID NO: 1539862 - RNA, 19 nt, Artificial Sequence
  Description of Artificial Sequence: Synthetic oligonucleotide
uccaccgcaaagcuguggu

SEQ ID NO: 1539863 - RNA, 19 nt, Artificial Sequence
  Description of Artificial Sequence: Synthetic oligonucleotide
acaaugaaaggcagcuugg

SEQ ID NO: 1539864 - RNA, 19 nt, Artificial Sequence
  Description of Artificial Sequence: Synthetic oligonucleotide
cuacuuguuucucuuccag

SEQ ID NO: 1539865 - RNA, 19 nt, Artificial Sequence
  Description of Artificial Sequence: Synthetic oligonucleotide
augaagguuacuggguuag

SEQ ID NO: 1539866 - RNA, 19 nt, Artificial Sequence
  Description of Artificial Sequence: Synthetic oligonucleotide
cuaugccaccauuuggccc

SEQ ID NO: 1539867 - RNA, 19 nt, Artificial Sequence
  Description of Artificial Sequence: Synthetic oligonucleotide
guuacugacauagguaguc

SEQ ID NO: 1539868 - RNA, 19 nt, Artificial Sequence
  Description of Artificial Sequence: Synthetic oligonucleotide
ccgauauucccuuucauac

SEQ ID NO: 1539869 - RNA, 19 nt, Artificial Sequence
  Description of Artificial Sequence: Synthetic oligonucleotide
uucgugauguguccauuac

SEQ ID NO: 1539870 - RNA, 19 nt, Artificial Sequence
  Description of Artificial Sequence: Synthetic oligonucleotide
caggaucaagucagaaggg

SEQ ID NO: 1539871 - RNA, 19 nt, Artificial Sequence
  Description of Artificial Sequence: Synthetic oligonucleotide
cggauaucaauauuggcgg

SEQ ID NO: 1539872 - RNA, 19 nt, Artificial Sequence
  Description of Artificial Sequence: Synthetic oligonucleotide
aaucuguccggguguguca

SEQ ID NO: 1539873 - RNA, 19 nt, Artificial Sequence
  Description of Artificial Sequence: Synthetic oligonucleotide
ucgugauguguccauuaca

SEQ ID NO: 1539874 - RNA, 19 nt, Artificial Sequence
  Description of Artificial Sequence: Synthetic oligonucleotide
guugaugacguaggguggg

SEQ ID NO: 1539875 - RNA, 19 nt, Artificial Sequence
  Description of Artificial Sequence: Synthetic oligonucleotide
cuucucugcguggagaccc

SEQ ID NO: 1539876 - RNA, 19 nt, Artificial Sequence
  Description of Artificial Sequence: Synthetic oligonucleotide
auacuucacugugucacgg

SEQ ID NO: 1539877 - RNA, 19 nt, Artificial Sequence
  Description of Artificial Sequence: Synthetic oligonucleotide
cagacuucuagcaacaagu

SEQ ID NO: 1539878 - RNA, 19 nt, Artificial Sequence
  Description of Artificial Sequence: Synthetic oligonucleotide
acauagguagucucuuggu

SEQ ID NO: 1539879 - RNA, 19 nt, Artificial Sequence
  Description of Artificial Sequence: Synthetic oligonucleotide
ugacauagguagucucuug

SEQ ID NO: 1539880 - RNA, 19 nt, Artificial Sequence
  Description of Artificial Sequence: Synthetic oligonucleotide
auccaagguuccccgaguc

SEQ ID NO: 1539881 - RNA, 19 nt, Artificial Sequence
  Description of Artificial Sequence: Synthetic oligonucleotide
uacuuguuucucuuccagu

SEQ ID NO: 1539882 - RNA, 19 nt, Artificial Sequence
  Description of Artificial Sequence: Synthetic oligonucleotide
acacuccuugcuaaauacc

SEQ ID NO: 1539883 - RNA, 19 nt, Artificial Sequence
  Description of Artificial Sequence: Synthetic oligonucleotide
cacagaguucaucgaagcc

SEQ ID NO: 1539884 - RNA, 19 nt, Artificial Sequence
  Description of Artificial Sequence: Synthetic oligonucleotide
guuaguacuucgugaugug

SEQ ID NO: 1539885 - RNA, 19 nt, Artificial Sequence
  Description of Artificial Sequence: Synthetic oligonucleotide
uauuauccuagaggaaacu

SEQ ID NO: 1539886 - RNA, 19 nt, Artificial Sequence
  Description of Artificial Sequence: Synthetic oligonucleotide
augcugcaagcauauagca

SEQ ID NO: 1539887 - RNA, 19 nt, Artificial Sequence
  Description of Artificial Sequence: Synthetic oligonucleotide
uguugugccauugauucuu

SEQ ID NO: 1539888 - RNA, 19 nt, Artificial Sequence
  Description of Artificial Sequence: Synthetic oligonucleotide
cacugugucacggauauca

SEQ ID NO: 1539889 - RNA, 19 nt, Artificial Sequence
  Description of Artificial Sequence: Synthetic oligonucleotide
ccaagagaagcuaaccaag

SEQ ID NO: 1539890 - RNA, 19 nt, Artificial Sequence
  Description of Artificial Sequence: Synthetic oligonucleotide
agagauugagugaggucac

SEQ ID NO: 1539891 - RNA, 19 nt, Artificial Sequence
  Description of Artificial Sequence: Synthetic oligonucleotide
gaucccgccauccccaaca

SEQ ID NO: 1539892 - RNA, 19 nt, Artificial Sequence
  Description of Artificial Sequence: Synthetic oligonucleotide
ucaacccuaacuucaucua

SEQ ID NO: 1539893 - RNA, 19 nt, Artificial Sequence
  Description of Artificial Sequence: Synthetic oligonucleotide
uuaguacuucgugaugugu

SEQ ID NO: 1539894 - RNA, 19 nt, Artificial Sequence
  Description of Artificial Sequence: Synthetic oligonucleotide
auaucaauauuggcgggga

SEQ ID NO: 1539895 - RNA, 19 nt, Artificial Sequence
  Description of Artificial Sequence: Synthetic oligonucleotide
ucaccugaucaaaucuggu

SEQ ID NO: 1539896 - RNA, 19 nt, Artificial Sequence
  Description of Artificial Sequence: Synthetic oligonucleotide
ugcugcaagcauauagcau

SEQ ID NO: 1539897 - RNA, 19 nt, Artificial Sequence
  Description of Artificial Sequence: Synthetic oligonucleotide
agcaacaagugggacgguc

SEQ ID NO: 1539898 - RNA, 19 nt, Artificial Sequence
  Description of Artificial Sequence: Synthetic oligonucleotide
uaaccaagggugggcaucc

SEQ ID NO: 1539899 - RNA, 19 nt, Artificial Sequence
  Description of Artificial Sequence: Synthetic oligonucleotide
uacuggguuaguacuucgu

SEQ ID NO: 1539900 - RNA, 19 nt, Artificial Sequence
  Description of Artificial Sequence: Synthetic oligonucleotide
uuccccaaagaaguuauua

SEQ ID NO: 1539901 - RNA, 19 nt, Artificial Sequence
  Description of Artificial Sequence: Synthetic oligonucleotide
cuguacaaagguaguuuuc

SEQ ID NO: 1539902 - RNA, 19 nt, Artificial Sequence
  Description of Artificial Sequence: Synthetic oligonucleotide
uccaagguuccccgaguca

SEQ ID NO: 1539903 - RNA, 19 nt, Artificial Sequence
  Description of Artificial Sequence: Synthetic oligonucleotide
acccuaacuucaucuaagu

SEQ ID NO: 1539904 - RNA, 19 nt, Artificial Sequence
  Description of Artificial Sequence: Synthetic oligonucleotide
ugacuugaacacagaguuc

SEQ ID NO: 1539905 - RNA, 19 nt, Artificial Sequence
  Description of Artificial Sequence: Synthetic oligonucleotide
agggcuacagagcccauau

SEQ ID NO: 1539906 - RNA, 19 nt, Artificial Sequence
  Description of Artificial Sequence: Synthetic oligonucleotide
aggaucaagucagaagggu

SEQ ID NO: 1539907 - RNA, 19 nt, Artificial Sequence
  Description of Artificial Sequence: Synthetic oligonucleotide
cuggguuaguacuucguga

SEQ ID NO: 1539908 - RNA, 19 nt, Artificial Sequence
  Description of Artificial Sequence: Synthetic oligonucleotide
uaucaauauuggcggggaa

SEQ ID NO: 1539909 - RNA, 19 nt, Artificial Sequence
  Description of Artificial Sequence: Synthetic oligonucleotide
cucggcuuuccucuguaac

SEQ ID NO: 1539910 - RNA, 19 nt, Artificial Sequence
  Description of Artificial Sequence: Synthetic oligonucleotide
gaguucaucgaagccggug

SEQ ID NO: 1539911 - RNA, 19 nt, Artificial Sequence
  Description of Artificial Sequence: Synthetic oligonucleotide
aggcgcucguauuccggcc

SEQ ID NO: 1539912 - RNA, 19 nt, Artificial Sequence
  Description of Artificial Sequence: Synthetic oligonucleotide
cuucuagcaacaaguggga

SEQ ID NO: 1539913 - RNA, 19 nt, Artificial Sequence
  Description of Artificial Sequence: Synthetic oligonucleotide
cuagaggaaacugcucgac

SEQ ID NO: 1539914 - RNA, 19 nt, Artificial Sequence
  Description of Artificial Sequence: Synthetic oligonucleotide
auauuggcggggaagggga

SEQ ID NO: 1539915 - RNA, 19 nt, Artificial Sequence
  Description of Artificial Sequence: Synthetic oligonucleotide
agacuucuagcaacaagug

SEQ ID NO: 1539916 - RNA, 19 nt, Artificial Sequence
  Description of Artificial Sequence: Synthetic oligonucleotide
uguccgggugugucaauca

SEQ ID NO: 1539917 - RNA, 19 nt, Artificial Sequence
  Description of Artificial Sequence: Synthetic oligonucleotide
caauauuggcggggaaggg

SEQ ID NO: 1539918 - RNA, 19 nt, Artificial Sequence
  Description of Artificial Sequence: Synthetic oligonucleotide
gaagccggugcccaccaca

SEQ ID NO: 1539919 - RNA, 19 nt, Artificial Sequence
  Description of Artificial Sequence: Synthetic oligonucleotide
ugaucaaaucugguagcaa

SEQ ID NO: 1539920 - RNA, 19 nt, Artificial Sequence
  Description of Artificial Sequence: Synthetic oligonucleotide
acaagugggacggucuacu

SEQ ID NO: 1539921 - RNA, 19 nt, Artificial Sequence
  Description of Artificial Sequence: Synthetic oligonucleotide
ugacuucuuuauacuucac

SEQ ID NO: 1539922 - RNA, 19 nt, Artificial Sequence
  Description of Artificial Sequence: Synthetic oligonucleotide
agagcccauauccuuccga

SEQ ID NO: 1539923 - RNA, 19 nt, Artificial Sequence
  Description of Artificial Sequence: Synthetic oligonucleotide
acggucuacuuguuucucu

SEQ ID NO: 1539924 - RNA, 19 nt, Artificial Sequence
  Description of Artificial Sequence: Synthetic oligonucleotide
aagguuccccgagucagga

SEQ ID NO: 1539925 - RNA, 19 nt, Artificial Sequence
  Description of Artificial Sequence: Synthetic oligonucleotide
uuuucccggaucccgccau

SEQ ID NO: 1539926 - RNA, 19 nt, Artificial Sequence
  Description of Artificial Sequence: Synthetic oligonucleotide
aggcucauggaacgaguca

SEQ ID NO: 1539927 - RNA, 19 nt, Artificial Sequence
  Description of Artificial Sequence: Synthetic oligonucleotide
gagcccauauccuuccgaa

SEQ ID NO: 1539928 - RNA, 19 nt, Artificial Sequence
  Description of Artificial Sequence: Synthetic oligonucleotide
uuguuguggagguguccug

SEQ ID NO: 1539929 - RNA, 19 nt, Artificial Sequence
  Description of Artificial Sequence: Synthetic oligonucleotide
guuacuggguuaguacuuc

SEQ ID NO: 1539930 - RNA, 19 nt, Artificial Sequence
  Description of Artificial Sequence: Synthetic oligonucleotide
uucauccaagguuccccga

SEQ ID NO: 1539931 - RNA, 19 nt, Artificial Sequence
  Description of Artificial Sequence: Synthetic oligonucleotide
gaugucgguuuuguucaug

SEQ ID NO: 1539932 - RNA, 19 nt, Artificial Sequence
  Description of Artificial Sequence: Synthetic oligonucleotide
gguugaugacguagggugg

SEQ ID NO: 1539933 - RNA, 19 nt, Artificial Sequence
  Description of Artificial Sequence: Synthetic oligonucleotide
agaugaccacuguuggaaa

SEQ ID NO: 1539934 - RNA, 19 nt, Artificial Sequence
  Description of Artificial Sequence: Synthetic oligonucleotide
gaagguuacuggguuagua

SEQ ID NO: 1539935 - RNA, 19 nt, Artificial Sequence
  Description of Artificial Sequence: Synthetic oligonucleotide
uacuucgugauguguccau

SEQ ID NO: 1539936 - RNA, 19 nt, Artificial Sequence
  Description of Artificial Sequence: Synthetic oligonucleotide
ugaggucacuaugccacca

SEQ ID NO: 1539937 - RNA, 19 nt, Artificial Sequence
  Description of Artificial Sequence: Synthetic oligonucleotide
auggaacgagucagguuac

SEQ ID NO: 1539938 - RNA, 19 nt, Artificial Sequence
  Description of Artificial Sequence: Synthetic oligonucleotide
uggcccgaguccauauugu

SEQ ID NO: 1539939 - RNA, 19 nt, Artificial Sequence
  Description of Artificial Sequence: Synthetic oligonucleotide
guggugagaauacacuccu

SEQ ID NO: 1539940 - RNA, 19 nt, Artificial Sequence
  Description of Artificial Sequence: Synthetic oligonucleotide
acugcucgacugcagcccu

SEQ ID NO: 1539941 - RNA, 19 nt, Artificial Sequence
  Description of Artificial Sequence: Synthetic oligonucleotide
uucuagcaacaagugggac

SEQ ID NO: 1539942 - RNA, 19 nt, Artificial Sequence
  Description of Artificial Sequence: Synthetic oligonucleotide
gguuccccgagucaggauc

SEQ ID NO: 1539943 - RNA, 19 nt, Artificial Sequence
  Description of Artificial Sequence: Synthetic oligonucleotide
caaucaggacauauuugaa

SEQ ID NO: 1539944 - RNA, 19 nt, Artificial Sequence
  Description of Artificial Sequence: Synthetic oligonucleotide
aguuauuauccuagaggaa

SEQ ID NO: 1539945 - RNA, 19 nt, Artificial Sequence
  Description of Artificial Sequence: Synthetic oligonucleotide
guccgggugugucaaucag

SEQ ID NO: 1539946 - RNA, 19 nt, Artificial Sequence
  Description of Artificial Sequence: Synthetic oligonucleotide
caaagguaguuuucccgga

SEQ ID NO: 1539947 - RNA, 19 nt, Artificial Sequence
  Description of Artificial Sequence: Synthetic oligonucleotide
ggaagcguuuguuguggag

SEQ ID NO: 1539948 - RNA, 19 nt, Artificial Sequence
  Description of Artificial Sequence: Synthetic oligonucleotide
caggcucauggaacgaguc

SEQ ID NO: 1539949 - RNA, 19 nt, Artificial Sequence
  Description of Artificial Sequence: Synthetic oligonucleotide
caaucuguccggguguguc

SEQ ID NO: 1539950 - RNA, 19 nt, Artificial Sequence
  Description of Artificial Sequence: Synthetic oligonucleotide
aucccgccauccccaacac

SEQ ID NO: 1539951 - RNA, 19 nt, Artificial Sequence
  Description of Artificial Sequence: Synthetic oligonucleotide
ucgaagccggugcccacca

SEQ ID NO: 1539952 - RNA, 19 nt, Artificial Sequence
  Description of Artificial Sequence: Synthetic oligonucleotide
accaggcucauggaacgag

SEQ ID NO: 1539953 - RNA, 19 nt, Artificial Sequence
  Description of Artificial Sequence: Synthetic oligonucleotide
guaacucuguggucaaugu

SEQ ID NO: 1539954 - RNA, 19 nt, Artificial Sequence
  Description of Artificial Sequence: Synthetic oligonucleotide
auccuagaggaaacugcuc

SEQ ID NO: 1539955 - RNA, 19 nt, Artificial Sequence
  Description of Artificial Sequence: Synthetic oligonucleotide
ucguauuccggccgauauu

SEQ ID NO: 1539956 - RNA, 19 nt, Artificial Sequence
  Description of Artificial Sequence: Synthetic oligonucleotide
auauccuuccgaaggcgcu

SEQ ID NO: 1539957 - RNA, 19 nt, Artificial Sequence
  Description of Artificial Sequence: Synthetic oligonucleotide
agcuaaccaagggugggca

SEQ ID NO: 1539958 - RNA, 19 nt, Artificial Sequence
  Description of Artificial Sequence: Synthetic oligonucleotide
cugaccaggugaacacuuc

SEQ ID NO: 1539959 - RNA, 19 nt, Artificial Sequence
  Description of Artificial Sequence: Synthetic oligonucleotide
auuccggccgauauucccu

SEQ ID NO: 1539960 - RNA, 19 nt, Artificial Sequence
  Description of Artificial Sequence: Synthetic oligonucleotide
gugaggucacuaugccacc

SEQ ID NO: 1539961 - RNA, 19 nt, Artificial Sequence
  Description of Artificial Sequence: Synthetic oligonucleotide
uucucugcguggagaccca

SEQ ID NO: 1539962 - RNA, 19 nt, Artificial Sequence
  Description of Artificial Sequence: Synthetic oligonucleotide
agauugagugaggucacua

SEQ ID NO: 1539963 - RNA, 19 nt, Artificial Sequence
  Description of Artificial Sequence: Synthetic oligonucleotide
cugguagcaaagagauuga

SEQ ID NO: 1539964 - RNA, 19 nt, Artificial Sequence
  Description of Artificial Sequence: Synthetic oligonucleotide
gugccauugauucuugcau

SEQ ID NO: 1539965 - RNA, 19 nt, Artificial Sequence
  Description of Artificial Sequence: Synthetic oligonucleotide
uuuggcccgaguccauauu

SEQ ID NO: 1539966 - RNA, 19 nt, Artificial Sequence
  Description of Artificial Sequence: Synthetic oligonucleotide
cccuuucauacucuucugc

SEQ ID NO: 1539967 - RNA, 19 nt, Artificial Sequence
  Description of Artificial Sequence: Synthetic oligonucleotide
gccauugauucuugcauga

SEQ ID NO: 1539968 - RNA, 19 nt, Artificial Sequence
  Description of Artificial Sequence: Synthetic oligonucleotide
caacccuaacuucaucuaa

SEQ ID NO: 1539969 - RNA, 19 nt, Artificial Sequence
  Description of Artificial Sequence: Synthetic oligonucleotide
uugaugacguaggguggga

SEQ ID NO: 1539970 - RNA, 19 nt, Artificial Sequence
  Description of Artificial Sequence: Synthetic oligonucleotide
ugaugacguagggugggaa

SEQ ID NO: 1539971 - RNA, 19 nt, Artificial Sequence
  Description of Artificial Sequence: Synthetic oligonucleotide
caccgcaaagcugugguca

SEQ ID NO: 1539972 - RNA, 19 nt, Artificial Sequence
  Description of Artificial Sequence: Synthetic oligonucleotide
ggaacgagucagguuacug

SEQ ID NO: 1539973 - RNA, 19 nt, Artificial Sequence
  Description of Artificial Sequence: Synthetic oligonucleotide
ucccggaucccgccauccc

SEQ ID NO: 1539974 - RNA, 19 nt, Artificial Sequence
  Description of Artificial Sequence: Synthetic oligonucleotide
caugaagguuacuggguua

SEQ ID NO: 1539975 - RNA, 19 nt, Artificial Sequence
  Description of Artificial Sequence: Synthetic oligonucleotide
ugaagguuacuggguuagu

SEQ ID NO: 1539976 - RNA, 19 nt, Artificial Sequence
  Description of Artificial Sequence: Synthetic oligonucleotide
cuucgugauguguccauua

SEQ ID NO: 1539977 - RNA, 19 nt, Artificial Sequence
  Description of Artificial Sequence: Synthetic oligonucleotide
accgcaaagcuguggucaa

SEQ ID NO: 1539978 - RNA, 19 nt, Artificial Sequence
  Description of Artificial Sequence: Synthetic oligonucleotide
ugggacggucuacuuguuu

SEQ ID NO: 1539979 - RNA, 19 nt, Artificial Sequence
  Description of Artificial Sequence: Synthetic oligonucleotide
gguaguuuucccggauccc

SEQ ID NO: 1539980 - RNA, 19 nt, Artificial Sequence
  Description of Artificial Sequence: Synthetic oligonucleotide
ggaaagccucaaaaucuug

SEQ ID NO: 1539981 - RNA, 19 nt, Artificial Sequence
  Description of Artificial Sequence: Synthetic oligonucleotide
uggugagaauacacuccuu

SEQ ID NO: 1539982 - RNA, 19 nt, Artificial Sequence
  Description of Artificial Sequence: Synthetic oligonucleotide
gguagucucuugguucaag

SEQ ID NO: 1539983 - RNA, 19 nt, Artificial Sequence
  Description of Artificial Sequence: Synthetic oligonucleotide
cagagcccauauccuuccg

SEQ ID NO: 1539984 - RNA, 19 nt, Artificial Sequence
  Description of Artificial Sequence: Synthetic oligonucleotide
guuuucccggaucccgcca

SEQ ID NO: 1539985 - RNA, 19 nt, Artificial Sequence
  Description of Artificial Sequence: Synthetic oligonucleotide
gacggucuacuuguuucuc

SEQ ID NO: 1539986 - RNA, 19 nt, Artificial Sequence
  Description of Artificial Sequence: Synthetic oligonucleotide
ccaccauuuggcccgaguc

SEQ ID NO: 1539987 - RNA, 19 nt, Artificial Sequence
  Description of Artificial Sequence: Synthetic oligonucleotide
ucaaucuguccgggugugu

SEQ ID NO: 1539988 - RNA, 19 nt, Artificial Sequence
  Description of Artificial Sequence: Synthetic oligonucleotide
cguauuccggccgauauuc

SEQ ID NO: 1539989 - RNA, 19 nt, Artificial Sequence
  Description of Artificial Sequence: Synthetic oligonucleotide
gccgauauucccuuucaua

SEQ ID NO: 1539990 - RNA, 19 nt, Artificial Sequence
  Description of Artificial Sequence: Synthetic oligonucleotide
uggaacgagucagguuacu

SEQ ID NO: 1539991 - RNA, 19 nt, Artificial Sequence
  Description of Artificial Sequence: Synthetic oligonucleotide
aggggacuucaugcacagc

SEQ ID NO: 1539992 - RNA, 19 nt, Artificial Sequence
  Description of Artificial Sequence: Synthetic oligonucleotide
ucucugcguggagacccag

SEQ ID NO: 1539993 - RNA, 19 nt, Artificial Sequence
  Description of Artificial Sequence: Synthetic oligonucleotide
guacuucgugaugugucca

SEQ ID NO: 1539994 - RNA, 19 nt, Artificial Sequence
  Description of Artificial Sequence: Synthetic oligonucleotide
cauagguagucucuugguu

SEQ ID NO: 1539995 - RNA, 19 nt, Artificial Sequence
  Description of Artificial Sequence: Synthetic oligonucleotide
caagggugggcauccaccu

SEQ ID NO: 1539996 - RNA, 19 nt, Artificial Sequence
  Description of Artificial Sequence: Synthetic oligonucleotide
ggucuacuuguuucucuuc

SEQ ID NO: 1539997 - RNA, 19 nt, Artificial Sequence
  Description of Artificial Sequence: Synthetic oligonucleotide
acgagucagguuacugaca

SEQ ID NO: 1539998 - RNA, 19 nt, Artificial Sequence
  Description of Artificial Sequence: Synthetic oligonucleotide
guuccccgagucaggauca

SEQ ID NO: 1539999 - RNA, 19 nt, Artificial Sequence
  Description of Artificial Sequence: Synthetic oligonucleotide
uuccggccgauauucccuu

SEQ ID NO: 1540000 - RNA, 19 nt, Artificial Sequence
  Description of Artificial Sequence: Synthetic oligonucleotide
cgauaaacuucaucaccug

SEQ ID NO: 1540001 - RNA, 19 nt, Artificial Sequence
  Description of Artificial Sequence: Synthetic oligonucleotide
cagcccugacucccggaag

SEQ ID NO: 1540002 - RNA, 19 nt, Artificial Sequence
  Description of Artificial Sequence: Synthetic oligonucleotide
gcuugaaauuucaggcuca

SEQ ID NO: 1540003 - RNA, 19 nt, Artificial Sequence
  Description of Artificial Sequence: Synthetic oligonucleotide
ggugugucaaucaggacau

SEQ ID NO: 1540004 - RNA, 19 nt, Artificial Sequence
  Description of Artificial Sequence: Synthetic oligonucleotide
gagccucuguacaaaggua

SEQ ID NO: 1540005 - RNA, 19 nt, Artificial Sequence
  Description of Artificial Sequence: Synthetic oligonucleotide
cucguauuccggccgauau

SEQ ID NO: 1540006 - RNA, 19 nt, Artificial Sequence
  Description of Artificial Sequence: Synthetic oligonucleotide
auagcauauuggacaugaa

SEQ ID NO: 1540007 - RNA, 19 nt, Artificial Sequence
  Description of Artificial Sequence: Synthetic oligonucleotide
gugauuucuucaggcgcuc

SEQ ID NO: 1540008 - RNA, 19 nt, Artificial Sequence
  Description of Artificial Sequence: Synthetic oligonucleotide
caacaagugggacggucua

SEQ ID NO: 1540009 - RNA, 19 nt, Artificial Sequence
  Description of Artificial Sequence: Synthetic oligonucleotide
uuggcggggaaggggacuu

SEQ ID NO: 1540010 - RNA, 19 nt, Artificial Sequence
  Description of Artificial Sequence: Synthetic oligonucleotide
gagccccggaagccuggag

SEQ ID NO: 1540011 - RNA, 19 nt, Artificial Sequence
  Description of Artificial Sequence: Synthetic oligonucleotide
cacccugagugagcuguag

SEQ ID NO: 1540012 - RNA, 19 nt, Artificial Sequence
  Description of Artificial Sequence: Synthetic oligonucleotide
ccuagaggaaacugcucga

SEQ ID NO: 1540013 - RNA, 19 nt, Artificial Sequence
  Description of Artificial Sequence: Synthetic oligonucleotide
aagaugcugcaagcauaua

SEQ ID NO: 1540014 - RNA, 19 nt, Artificial Sequence
  Description of Artificial Sequence: Synthetic oligonucleotide
agggugggaagcguuuguu

SEQ ID NO: 1540015 - RNA, 19 nt, Artificial Sequence
  Description of Artificial Sequence: Synthetic oligonucleotide
cugcaagcauauagcauau

SEQ ID NO: 1540016 - RNA, 19 nt, Artificial Sequence
  Description of Artificial Sequence: Synthetic oligonucleotide
cucauggaacgagucaggu

SEQ ID NO: 1540017 - RNA, 19 nt, Artificial Sequence
  Description of Artificial Sequence: Synthetic oligonucleotide
aaccaagggugggcaucca

SEQ ID NO: 1540018 - RNA, 19 nt, Artificial Sequence
  Description of Artificial Sequence: Synthetic oligonucleotide
cgugauguguccauuacau

SEQ ID NO: 1540019 - RNA, 19 nt, Artificial Sequence
  Description of Artificial Sequence: Synthetic oligonucleotide
cugugucacggauaucaau

SEQ ID NO: 1540020 - RNA, 19 nt, Artificial Sequence
  Description of Artificial Sequence: Synthetic oligonucleotide
agguuccccgagucaggau

SEQ ID NO: 1540021 - RNA, 19 nt, Artificial Sequence
  Description of Artificial Sequence: Synthetic oligonucleotide
cugcucgacugcagcccug

SEQ ID NO: 1540022 - RNA, 19 nt, Artificial Sequence
  Description of Artificial Sequence: Synthetic oligonucleotide
gucagacuucuagcaacaa

SEQ ID NO: 1540023 - RNA, 19 nt, Artificial Sequence
  Description of Artificial Sequence: Synthetic oligonucleotide
cugugagccucuguacaaa

SEQ ID NO: 1540024 - RNA, 19 nt, Artificial Sequence
  Description of Artificial Sequence: Synthetic oligonucleotide
cccagaagcugaccaggug

SEQ ID NO: 1540025 - RNA, 19 nt, Artificial Sequence
  Description of Artificial Sequence: Synthetic oligonucleotide
cauccaagguuccccgagu

SEQ ID NO: 1540026 - RNA, 19 nt, Artificial Sequence
  Description of Artificial Sequence: Synthetic oligonucleotide
gcuacagagcccauauccu

SEQ ID NO: 1540027 - RNA, 19 nt, Artificial Sequence
  Description of Artificial Sequence: Synthetic oligonucleotide
ggagacccagcaugucaga

SEQ ID NO: 1540028 - RNA, 19 nt, Artificial Sequence
  Description of Artificial Sequence: Synthetic oligonucleotide
ccugugagccucuguacaa

SEQ ID NO: 1540029 - RNA, 19 nt, Artificial Sequence
  Description of Artificial Sequence: Synthetic oligonucleotide
gacucccggaaggacuucu

SEQ ID NO: 1540030 - RNA, 19 nt, Artificial Sequence
  Description of Artificial Sequence: Synthetic oligonucleotide
ggccucagugaugauuguc

SEQ ID NO: 1540031 - RNA, 19 nt, Artificial Sequence
  Description of Artificial Sequence: Synthetic oligonucleotide
gcaacaagugggacggucu

SEQ ID NO: 1540032 - RNA, 19 nt, Artificial Sequence
  Description of Artificial Sequence: Synthetic oligonucleotide
acguagggugggaagcguu

SEQ ID NO: 1540033 - RNA, 19 nt, Artificial Sequence
  Description of Artificial Sequence: Synthetic oligonucleotide
gcguuuguuguggaggugu

SEQ ID NO: 1540034 - RNA, 19 nt, Artificial Sequence
  Description of Artificial Sequence: Synthetic oligonucleotide
guggucaaugaugucgguu

SEQ ID NO: 1540035 - RNA, 19 nt, Artificial Sequence
  Description of Artificial Sequence: Synthetic oligonucleotide
gacguagggugggaagcgu

SEQ ID NO: 1540036 - RNA, 19 nt, Artificial Sequence
  Description of Artificial Sequence: Synthetic oligonucleotide
ggaucaagucagaaggguu

SEQ ID NO: 1540037 - RNA, 19 nt, Artificial Sequence
  Description of Artificial Sequence: Synthetic oligonucleotide
aucugguagcaaagagauu

SEQ ID NO: 1540038 - RNA, 19 nt, Artificial Sequence
  Description of Artificial Sequence: Synthetic oligonucleotide
uagcaacaagugggacggu

SEQ ID NO: 1540039 - RNA, 19 nt, Artificial Sequence
  Description of Artificial Sequence: Synthetic oligonucleotide
ugacucccggaaggacuuc

SEQ ID NO: 1540040 - RNA, 19 nt, Artificial Sequence
  Description of Artificial Sequence: Synthetic oligonucleotide
uccggccgauauucccuuu

SEQ ID NO: 1540041 - RNA, 19 nt, Artificial Sequence
  Description of Artificial Sequence: Synthetic oligonucleotide
caaugaugucgguuuuguu

SEQ ID NO: 1540042 - RNA, 19 nt, Artificial Sequence
  Description of Artificial Sequence: Synthetic oligonucleotide
gguuacugacauagguagu

SEQ ID NO: 1540043 - RNA, 19 nt, Artificial Sequence
  Description of Artificial Sequence: Synthetic oligonucleotide
uuccccgagucaggaucaa

SEQ ID NO: 1540044 - RNA, 19 nt, Artificial Sequence
  Description of Artificial Sequence: Synthetic oligonucleotide
ccggccgauauucccuuuc

SEQ ID NO: 1540045 - RNA, 19 nt, Artificial Sequence
  Description of Artificial Sequence: Synthetic oligonucleotide
ccaccgcaaagcugugguc

SEQ ID NO: 1540046 - RNA, 19 nt, Artificial Sequence
  Description of Artificial Sequence: Synthetic oligonucleotide
ggcggggaaggggacuuca

SEQ ID NO: 1540047 - RNA, 19 nt, Artificial Sequence
  Description of Artificial Sequence: Synthetic oligonucleotide
caagugggacggucuacuu

SEQ ID NO: 1540048 - RNA, 19 nt, Artificial Sequence
  Description of Artificial Sequence: Synthetic oligonucleotide
ccgaguccauauuguuuca

SEQ ID NO: 1540049 - RNA, 19 nt, Artificial Sequence
  Description of Artificial Sequence: Synthetic oligonucleotide
ccucaaaaucuugcaucca

SEQ ID NO: 1540050 - RNA, 19 nt, Artificial Sequence
  Description of Artificial Sequence: Synthetic oligonucleotide
ccaguguugugccauugau

SEQ ID NO: 1540051 - RNA, 19 nt, Artificial Sequence
  Description of Artificial Sequence: Synthetic oligonucleotide
ggugggcauccaccugcca

SEQ ID NO: 1540052 - RNA, 19 nt, Artificial Sequence
  Description of Artificial Sequence: Synthetic oligonucleotide
gucccuggguccagggcua

SEQ ID NO: 1540053 - RNA, 19 nt, Artificial Sequence
  Description of Artificial Sequence: Synthetic oligonucleotide
gcuaaccaagggugggcau

SEQ ID NO: 1540054 - RNA, 19 nt, Artificial Sequence
  Description of Artificial Sequence: Synthetic oligonucleotide
ccauugauucuugcaugaa

SEQ ID NO: 1540055 - RNA, 19 nt, Artificial Sequence
  Description of Artificial Sequence: Synthetic oligonucleotide
gcugaccaggugaacacuu

SEQ ID NO: 1540056 - RNA, 19 nt, Artificial Sequence
  Description of Artificial Sequence: Synthetic oligonucleotide
ggccgauauucccuuucau

SEQ ID NO: 1540057 - RNA, 19 nt, Artificial Sequence
  Description of Artificial Sequence: Synthetic oligonucleotide
gcgcucguauuccggccga

SEQ ID NO: 1540058 - RNA, 19 nt, Artificial Sequence
  Description of Artificial Sequence: Synthetic oligonucleotide
gcucgacugcagcccugac

SEQ ID NO: 1540059 - RNA, 19 nt, Artificial Sequence
  Description of Artificial Sequence: Synthetic oligonucleotide
cgggugugucaaucaggac

SEQ ID NO: 1540060 - RNA, 19 nt, Artificial Sequence
  Description of Artificial Sequence: Synthetic oligonucleotide
ggcccgaguccauauuguu

SEQ ID NO: 1540061 - RNA, 19 nt, Artificial Sequence
  Description of Artificial Sequence: Synthetic oligonucleotide
gcucguauuccggccgaua

SEQ ID NO: 1540062 - RNA, 19 nt, Artificial Sequence
  Description of Artificial Sequence: Synthetic oligonucleotide
cggccgauauucccuuuca

SEQ ID NO: 1540063 - RNA, 19 nt, Artificial Sequence
  Description of Artificial Sequence: Synthetic oligonucleotide
ggagccccggaagccugga

SEQ ID NO: 1540064 - RNA, 19 nt, Artificial Sequence
  Description of Artificial Sequence: Synthetic oligonucleotide
gccgagggcgccgccaucu

SEQ ID NO: 1540065 - RNA, 19 nt, Artificial Sequence
  Description of Artificial Sequence: Synthetic oligonucleotide
cggucuacuuguuucucuu

SEQ ID NO: 1540066 - RNA, 19 nt, Artificial Sequence
  Description of Artificial Sequence: Synthetic oligonucleotide
gugggacggucuacuuguu

SEQ ID NO: 1540067 - RNA, 19 nt, Artificial Sequence
  Description of Artificial Sequence: Synthetic oligonucleotide
ccauuuggcccgaguccau

SEQ ID NO: 1540068 - RNA, 19 nt, Artificial Sequence
  Description of Artificial Sequence: Synthetic oligonucleotide
cggaucccgccauccccaa

SEQ ID NO: 1540069 - RNA, 19 nt, Artificial Sequence
  Description of Artificial Sequence: Synthetic oligonucleotide
cgaaggcgcuccaguugcu

SEQ ID NO: 1540070 - RNA, 19 nt, Artificial Sequence
  Description of Artificial Sequence: Synthetic oligonucleotide
ccgcaaagcuguggucaau

SEQ ID NO: 1540071 - RNA, 19 nt, Artificial Sequence
  Description of Artificial Sequence: Synthetic oligonucleotide
cgcucguauuccggccgau

SEQ ID NO: 1540072 - RNA, 19 nt, Artificial Sequence
  Description of Artificial Sequence: Synthetic oligonucleotide
acuaguaaaacuuaggccg

SEQ ID NO: 1540073 - RNA, 19 nt, Artificial Sequence
  Description of Artificial Sequence: Synthetic oligonucleotide
aauggugaaacucuccucc

SEQ ID NO: 1540074 - RNA, 19 nt, Artificial Sequence
  Description of Artificial Sequence: Synthetic oligonucleotide
aguuaauucgauuaucuac

SEQ ID NO: 1540075 - RNA, 19 nt, Artificial Sequence
  Description of Artificial Sequence: Synthetic oligonucleotide
aauaguuucucucagaauu

SEQ ID NO: 1540076 - RNA, 19 nt, Artificial Sequence
  Description of Artificial Sequence: Synthetic oligonucleotide
ucaugcaccagcaagagag

SEQ ID NO: 1540077 - RNA, 19 nt, Artificial Sequence
  Description of Artificial Sequence: Synthetic oligonucleotide
uuugaugccgcuauaagag

SEQ ID NO: 1540078 - RNA, 19 nt, Artificial Sequence
  Description of Artificial Sequence: Synthetic oligonucleotide
aauucgauuaucuacuagu

SEQ ID NO: 1540079 - RNA, 19 nt, Artificial Sequence
  Description of Artificial Sequence: Synthetic oligonucleotide
uuauguuccagauuuagga

SEQ ID NO: 1540080 - RNA, 19 nt, Artificial Sequence
  Description of Artificial Sequence: Synthetic oligonucleotide
aaacuuaggccgcagagag

SEQ ID NO: 1540081 - RNA, 19 nt, Artificial Sequence
  Description of Artificial Sequence: Synthetic oligonucleotide
auuguugugacaucguggg

SEQ ID NO: 1540082 - RNA, 19 nt, Artificial Sequence
  Description of Artificial Sequence: Synthetic oligonucleotide
uuuaaauaguuucucucag

SEQ ID NO: 1540083 - RNA, 19 nt, Artificial Sequence
  Description of Artificial Sequence: Synthetic oligonucleotide
uuuccgagagauuagaaug

SEQ ID NO: 1540084 - RNA, 19 nt, Artificial Sequence
  Description of Artificial Sequence: Synthetic oligonucleotide
uuaggagaguuucagaggc

SEQ ID NO: 1540085 - RNA, 19 nt, Artificial Sequence
  Description of Artificial Sequence: Synthetic oligonucleotide
ucuucuauaaaccggcuca

SEQ ID NO: 1540086 - RNA, 19 nt, Artificial Sequence
  Description of Artificial Sequence: Synthetic oligonucleotide
cuuugcuccucauagaucc

SEQ ID NO: 1540087 - RNA, 19 nt, Artificial Sequence
  Description of Artificial Sequence: Synthetic oligonucleotide
uauuguugugacaucgugg

SEQ ID NO: 1540088 - RNA, 19 nt, Artificial Sequence
  Description of Artificial Sequence: Synthetic oligonucleotide
ucuauaaaccggcucagag

SEQ ID NO: 1540089 - RNA, 19 nt, Artificial Sequence
  Description of Artificial Sequence: Synthetic oligonucleotide
uaagcuuuggcccauguac

SEQ ID NO: 1540090 - RNA, 19 nt, Artificial Sequence
  Description of Artificial Sequence: Synthetic oligonucleotide
cacauugucauccacacag

SEQ ID NO: 1540091 - RNA, 19 nt, Artificial Sequence
  Description of Artificial Sequence: Synthetic oligonucleotide
ugacauaucaugcaccagc

SEQ ID NO: 1540092 - RNA, 19 nt, Artificial Sequence
  Description of Artificial Sequence: Synthetic oligonucleotide
ucauagauccuuccaacgg

SEQ ID NO: 1540093 - RNA, 19 nt, Artificial Sequence
  Description of Artificial Sequence: Synthetic oligonucleotide
uucagaaauacucuguggu

SEQ ID NO: 1540094 - RNA, 19 nt, Artificial Sequence
  Description of Artificial Sequence: Synthetic oligonucleotide
uaaaacuuaggccgcagag

SEQ ID NO: 1540095 - RNA, 19 nt, Artificial Sequence
  Description of Artificial Sequence: Synthetic oligonucleotide
cuacuaguaaaacuuaggc

SEQ ID NO: 1540096 - RNA, 19 nt, Artificial Sequence
  Description of Artificial Sequence: Synthetic oligonucleotide
ugcaaaaucuucaucccag

SEQ ID NO: 1540097 - RNA, 19 nt, Artificial Sequence
  Description of Artificial Sequence: Synthetic oligonucleotide
auuaucuacuaguaaaacu

SEQ ID NO: 1540098 - RNA, 19 nt, Artificial Sequence
  Description of Artificial Sequence: Synthetic oligonucleotide
acuuaaauaccaguucugc

SEQ ID NO: 1540099 - RNA, 19 nt, Artificial Sequence
  Description of Artificial Sequence: Synthetic oligonucleotide
ucucucagaauucuuagac

SEQ ID NO: 1540100 - RNA, 19 nt, Artificial Sequence
  Description of Artificial Sequence: Synthetic oligonucleotide
aauggcguguaauauaaaa

SEQ ID NO: 1540101 - RNA, 19 nt, Artificial Sequence
  Description of Artificial Sequence: Synthetic oligonucleotide
ucgauuaucuacuaguaaa

SEQ ID NO: 1540102 - RNA, 19 nt, Artificial Sequence
  Description of Artificial Sequence: Synthetic oligonucleotide
aauaccuugucucucucgu

SEQ ID NO: 1540103 - RNA, 19 nt, Artificial Sequence
  Description of Artificial Sequence: Synthetic oligonucleotide
aagucuagcaugucugcuc

SEQ ID NO: 1540104 - RNA, 19 nt, Artificial Sequence
  Description of Artificial Sequence: Synthetic oligonucleotide
ugaucugugagugauuucc

SEQ ID NO: 1540105 - RNA, 19 nt, Artificial Sequence
  Description of Artificial Sequence: Synthetic oligonucleotide
uuuugaugccgcuauaaga

SEQ ID NO: 1540106 - RNA, 19 nt, Artificial Sequence
  Description of Artificial Sequence: Synthetic oligonucleotide
aucccaugaagccaucucc

SEQ ID NO: 1540107 - RNA, 19 nt, Artificial Sequence
  Description of Artificial Sequence: Synthetic oligonucleotide
ugcauggucuuuaacuggg

SEQ ID NO: 1540108 - RNA, 19 nt, Artificial Sequence
  Description of Artificial Sequence: Synthetic oligonucleotide
uguuccagauuuaggagag

SEQ ID NO: 1540109 - RNA, 19 nt, Artificial Sequence
  Description of Artificial Sequence: Synthetic oligonucleotide
uguaggucgacuucacccg

SEQ ID NO: 1540110 - RNA, 19 nt, Artificial Sequence
  Description of Artificial Sequence: Synthetic oligonucleotide
uuccgagagauuagaaugg

SEQ ID NO: 1540111 - RNA, 19 nt, Artificial Sequence
  Description of Artificial Sequence: Synthetic oligonucleotide
uugaguauauuucggaguc

SEQ ID NO: 1540112 - RNA, 19 nt, Artificial Sequence
  Description of Artificial Sequence: Synthetic oligonucleotide
ucagcaaccucaaauugug

SEQ ID NO: 1540113 - RNA, 19 nt, Artificial Sequence
  Description of Artificial Sequence: Synthetic oligonucleotide
uauguuccagauuuaggag

SEQ ID NO: 1540114 - RNA, 19 nt, Artificial Sequence
  Description of Artificial Sequence: Synthetic oligonucleotide
gaaguaauuauguuccaga

SEQ ID NO: 1540115 - RNA, 19 nt, Artificial Sequence
  Description of Artificial Sequence: Synthetic oligonucleotide
acuuaggccgcagagagac

SEQ ID NO: 1540116 - RNA, 19 nt, Artificial Sequence
  Description of Artificial Sequence: Synthetic oligonucleotide
uuuaagucacucucuacga

SEQ ID NO: 1540117 - RNA, 19 nt, Artificial Sequence
  Description of Artificial Sequence: Synthetic oligonucleotide
uuauuguugugacaucgug

SEQ ID NO: 1540118 - RNA, 19 nt, Artificial Sequence
  Description of Artificial Sequence: Synthetic oligonucleotide
aaguaauuauguuccagau

SEQ ID NO: 1540119 - RNA, 19 nt, Artificial Sequence
  Description of Artificial Sequence: Synthetic oligonucleotide
acacuuaaauaccaguucu

SEQ ID NO: 1540120 - RNA, 19 nt, Artificial Sequence
  Description of Artificial Sequence: Synthetic oligonucleotide
gaaaguggaagucugugca

SEQ ID NO: 1540121 - RNA, 19 nt, Artificial Sequence
  Description of Artificial Sequence: Synthetic oligonucleotide
agaagucuagcaugucugc

SEQ ID NO: 1540122 - RNA, 19 nt, Artificial Sequence
  Description of Artificial Sequence: Synthetic oligonucleotide
cuugcagaagucuagcaug

SEQ ID NO: 1540123 - RNA, 19 nt, Artificial Sequence
  Description of Artificial Sequence: Synthetic oligonucleotide
uggguucuggcguacagcg

SEQ ID NO: 1540124 - RNA, 19 nt, Artificial Sequence
  Description of Artificial Sequence: Synthetic oligonucleotide
aagaguuaauucgauuauc

SEQ ID NO: 1540125 - RNA, 19 nt, Artificial Sequence
  Description of Artificial Sequence: Synthetic oligonucleotide
gcaaaaucucuuuugaugc

SEQ ID NO: 1540126 - RNA, 19 nt, Artificial Sequence
  Description of Artificial Sequence: Synthetic oligonucleotide
ugacgaaguaauuauguuc

SEQ ID NO: 1540127 - RNA, 19 nt, Artificial Sequence
  Description of Artificial Sequence: Synthetic oligonucleotide
aaccucaaauugugcaugg

SEQ ID NO: 1540128 - RNA, 19 nt, Artificial Sequence
  Description of Artificial Sequence: Synthetic oligonucleotide
uucaauccguggaaagugg

SEQ ID NO: 1540129 - RNA, 19 nt, Artificial Sequence
  Description of Artificial Sequence: Synthetic oligonucleotide
uccaucaugaaaccuuuga

SEQ ID NO: 1540130 - RNA, 19 nt, Artificial Sequence
  Description of Artificial Sequence: Synthetic oligonucleotide
acuucacccgauuuaacag

SEQ ID NO: 1540131 - RNA, 19 nt, Artificial Sequence
  Description of Artificial Sequence: Synthetic oligonucleotide
uaauucgauuaucuacuag

SEQ ID NO: 1540132 - RNA, 19 nt, Artificial Sequence
  Description of Artificial Sequence: Synthetic oligonucleotide
ugauauuucccgauuucac

SEQ ID NO: 1540133 - RNA, 19 nt, Artificial Sequence
  Description of Artificial Sequence: Synthetic oligonucleotide
guggaguacagugacagcg

SEQ ID NO: 1540134 - RNA, 19 nt, Artificial Sequence
  Description of Artificial Sequence: Synthetic oligonucleotide
aauccguggaaaguggaag

SEQ ID NO: 1540135 - RNA, 19 nt, Artificial Sequence
  Description of Artificial Sequence: Synthetic oligonucleotide
ucggagucccauaauagca

SEQ ID NO: 1540136 - RNA, 19 nt, Artificial Sequence
  Description of Artificial Sequence: Synthetic oligonucleotide
uuaacugggcucccaagug

SEQ ID NO: 1540137 - RNA, 19 nt, Artificial Sequence
  Description of Artificial Sequence: Synthetic oligonucleotide
uacgaagcagggcaaacug

SEQ ID NO: 1540138 - RNA, 19 nt, Artificial Sequence
  Description of Artificial Sequence: Synthetic oligonucleotide
cucauagauccuuccaacg

SEQ ID NO: 1540139 - RNA, 19 nt, Artificial Sequence
  Description of Artificial Sequence: Synthetic oligonucleotide
uaagaguuaauucgauuau

SEQ ID NO: 1540140 - RNA, 19 nt, Artificial Sequence
  Description of Artificial Sequence: Synthetic oligonucleotide
aacugguuuuggcugaacu

SEQ ID NO: 1540141 - RNA, 19 nt, Artificial Sequence
  Description of Artificial Sequence: Synthetic oligonucleotide
guguaggucgacuucaccc

SEQ ID NO: 1540142 - RNA, 19 nt, Artificial Sequence
  Description of Artificial Sequence: Synthetic oligonucleotide
cauagauccuuccaacggc

SEQ ID NO: 1540143 - RNA, 19 nt, Artificial Sequence
  Description of Artificial Sequence: Synthetic oligonucleotide
aaucacgugccucuuugca

SEQ ID NO: 1540144 - RNA, 19 nt, Artificial Sequence
  Description of Artificial Sequence: Synthetic oligonucleotide
cuaguaaaacuuaggccgc

SEQ ID NO: 1540145 - RNA, 19 nt, Artificial Sequence
  Description of Artificial Sequence: Synthetic oligonucleotide
ugaguguugaggagacccg

SEQ ID NO: 1540146 - RNA, 19 nt, Artificial Sequence
  Description of Artificial Sequence: Synthetic oligonucleotide
auuagaauggcguguaaua

SEQ ID NO: 1540147 - RNA, 19 nt, Artificial Sequence
  Description of Artificial Sequence: Synthetic oligonucleotide
accuuugacacacuuaaau

SEQ ID NO: 1540148 - RNA, 19 nt, Artificial Sequence
  Description of Artificial Sequence: Synthetic oligonucleotide
cucgcgugcucuaaggugg

SEQ ID NO: 1540149 - RNA, 19 nt, Artificial Sequence
  Description of Artificial Sequence: Synthetic oligonucleotide
gagagauuagaauggcgug

SEQ ID NO: 1540150 - RNA, 19 nt, Artificial Sequence
  Description of Artificial Sequence: Synthetic oligonucleotide
agcaaccucaaauugugca

SEQ ID NO: 1540151 - RNA, 19 nt, Artificial Sequence
  Description of Artificial Sequence: Synthetic oligonucleotide
auauuucccgauuucacau

SEQ ID NO: 1540152 - RNA, 19 nt, Artificial Sequence
  Description of Artificial Sequence: Synthetic oligonucleotide
aaaacuuaggccgcagaga

SEQ ID NO: 1540153 - RNA, 19 nt, Artificial Sequence
  Description of Artificial Sequence: Synthetic oligonucleotide
aauuccuccaucccaugaa

SEQ ID NO: 1540154 - RNA, 19 nt, Artificial Sequence
  Description of Artificial Sequence: Synthetic oligonucleotide
agaaucacgugccucuuug

SEQ ID NO: 1540155 - RNA, 19 nt, Artificial Sequence
  Description of Artificial Sequence: Synthetic oligonucleotide
uggcguguaauauaaaauu

SEQ ID NO: 1540156 - RNA, 19 nt, Artificial Sequence
  Description of Artificial Sequence: Synthetic oligonucleotide
agccgguggaguuucacac

SEQ ID NO: 1540157 - RNA, 19 nt, Artificial Sequence
  Description of Artificial Sequence: Synthetic oligonucleotide
aucacgugccucuuugcac

SEQ ID NO: 1540158 - RNA, 19 nt, Artificial Sequence
  Description of Artificial Sequence: Synthetic oligonucleotide
cagaccuugaguauauuuc

SEQ ID NO: 1540159 - RNA, 19 nt, Artificial Sequence
  Description of Artificial Sequence: Synthetic oligonucleotide
auuauguuccagauuuagg

SEQ ID NO: 1540160 - RNA, 19 nt, Artificial Sequence
  Description of Artificial Sequence: Synthetic oligonucleotide
cuagaaauuccuccauccc

SEQ ID NO: 1540161 - RNA, 19 nt, Artificial Sequence
  Description of Artificial Sequence: Synthetic oligonucleotide
uccuuaagcaccaggguau

SEQ ID NO: 1540162 - RNA, 19 nt, Artificial Sequence
  Description of Artificial Sequence: Synthetic oligonucleotide
gauuaucuacuaguaaaac

SEQ ID NO: 1540163 - RNA, 19 nt, Artificial Sequence
  Description of Artificial Sequence: Synthetic oligonucleotide
cagaagucuagcaugucug

SEQ ID NO: 1540164 - RNA, 19 nt, Artificial Sequence
  Description of Artificial Sequence: Synthetic oligonucleotide
uucgauuaucuacuaguaa

SEQ ID NO: 1540165 - RNA, 19 nt, Artificial Sequence
  Description of Artificial Sequence: Synthetic oligonucleotide
caaaccguggcaaaaucuc

SEQ ID NO: 1540166 - RNA, 19 nt, Artificial Sequence
  Description of Artificial Sequence: Synthetic oligonucleotide
agaguuaauucgauuaucu

SEQ ID NO: 1540167 - RNA, 19 nt, Artificial Sequence
  Description of Artificial Sequence: Synthetic oligonucleotide
agguggucucagcauaagc

SEQ ID NO: 1540168 - RNA, 19 nt, Artificial Sequence
  Description of Artificial Sequence: Synthetic oligonucleotide
gacuucacccgauuuaaca

SEQ ID NO: 1540169 - RNA, 19 nt, Artificial Sequence
  Description of Artificial Sequence: Synthetic oligonucleotide
uauaagaguuaauucgauu

SEQ ID NO: 1540170 - RNA, 19 nt, Artificial Sequence
  Description of Artificial Sequence: Synthetic oligonucleotide
uugcucuucaauccgugga

SEQ ID NO: 1540171 - RNA, 19 nt, Artificial Sequence
  Description of Artificial Sequence: Synthetic oligonucleotide
uccuccaucccaugaagcc

SEQ ID NO: 1540172 - RNA, 19 nt, Artificial Sequence
  Description of Artificial Sequence: Synthetic oligonucleotide
acccgauuuaacagcaucc

SEQ ID NO: 1540173 - RNA, 19 nt, Artificial Sequence
  Description of Artificial Sequence: Synthetic oligonucleotide
uccucauagauccuuccaa

SEQ ID NO: 1540174 - RNA, 19 nt, Artificial Sequence
  Description of Artificial Sequence: Synthetic oligonucleotide
cucucuacgaagcagggca

SEQ ID NO: 1540175 - RNA, 19 nt, Artificial Sequence
  Description of Artificial Sequence: Synthetic oligonucleotide
uuagacuucucaucacuuc

SEQ ID NO: 1540176 - RNA, 19 nt, Artificial Sequence
  Description of Artificial Sequence: Synthetic oligonucleotide
cagaaauacucugugguac

SEQ ID NO: 1540177 - RNA, 19 nt, Artificial Sequence
  Description of Artificial Sequence: Synthetic oligonucleotide
cuggacuaccuccaguugc

SEQ ID NO: 1540178 - RNA, 19 nt, Artificial Sequence
  Description of Artificial Sequence: Synthetic oligonucleotide
cacacuuaaauaccaguuc

SEQ ID NO: 1540179 - RNA, 19 nt, Artificial Sequence
  Description of Artificial Sequence: Synthetic oligonucleotide
aguuaggcuccucaggccu

SEQ ID NO: 1540180 - RNA, 19 nt, Artificial Sequence
  Description of Artificial Sequence: Synthetic oligonucleotide
auaauagcagggucccgag

SEQ ID NO: 1540181 - RNA, 19 nt, Artificial Sequence
  Description of Artificial Sequence: Synthetic oligonucleotide
uuaagucacucucuacgaa

SEQ ID NO: 1540182 - RNA, 19 nt, Artificial Sequence
  Description of Artificial Sequence: Synthetic oligonucleotide
auaguuucucucagaauuc

SEQ ID NO: 1540183 - RNA, 19 nt, Artificial Sequence
  Description of Artificial Sequence: Synthetic oligonucleotide
uggaguacagugacagcgc

SEQ ID NO: 1540184 - RNA, 19 nt, Artificial Sequence
  Description of Artificial Sequence: Synthetic oligonucleotide
aguacagugacagcgcugu

SEQ ID NO: 1540185 - RNA, 19 nt, Artificial Sequence
  Description of Artificial Sequence: Synthetic oligonucleotide
cuuccaacggcaucugcag

SEQ ID NO: 1540186 - RNA, 19 nt, Artificial Sequence
  Description of Artificial Sequence: Synthetic oligonucleotide
agugaguuuacaucuugau

SEQ ID NO: 1540187 - RNA, 19 nt, Artificial Sequence
  Description of Artificial Sequence: Synthetic oligonucleotide
aagggauucuucuucuaua

SEQ ID NO: 1540188 - RNA, 19 nt, Artificial Sequence
  Description of Artificial Sequence: Synthetic oligonucleotide
uuagaauggcguguaauau

SEQ ID NO: 1540189 - RNA, 19 nt, Artificial Sequence
  Description of Artificial Sequence: Synthetic oligonucleotide
uucuucuauaaaccggcuc

SEQ ID NO: 1540190 - RNA, 19 nt, Artificial Sequence
  Description of Artificial Sequence: Synthetic oligonucleotide
auuucggagucccauaaua

SEQ ID NO: 1540191 - RNA, 19 nt, Artificial Sequence
  Description of Artificial Sequence: Synthetic oligonucleotide
aguaauuauguuccagauu

SEQ ID NO: 1540192 - RNA, 19 nt, Artificial Sequence
  Description of Artificial Sequence: Synthetic oligonucleotide
ugcugacgaaguaauuaug

SEQ ID NO: 1540193 - RNA, 19 nt, Artificial Sequence
  Description of Artificial Sequence: Synthetic oligonucleotide
uuaagcaccaggguauggu

SEQ ID NO: 1540194 - RNA, 19 nt, Artificial Sequence
  Description of Artificial Sequence: Synthetic oligonucleotide
ucuuuaagucacucucuac

SEQ ID NO: 1540195 - RNA, 19 nt, Artificial Sequence
  Description of Artificial Sequence: Synthetic oligonucleotide
ucuaagguggucucagcau

SEQ ID NO: 1540196 - RNA, 19 nt, Artificial Sequence
  Description of Artificial Sequence: Synthetic oligonucleotide
caugucugcucucagcaac

SEQ ID NO: 1540197 - RNA, 19 nt, Artificial Sequence
  Description of Artificial Sequence: Synthetic oligonucleotide
cuucaauccguggaaagug

SEQ ID NO: 1540198 - RNA, 19 nt, Artificial Sequence
  Description of Artificial Sequence: Synthetic oligonucleotide
ucguggguacagcagaccu

SEQ ID NO: 1540199 - RNA, 19 nt, Artificial Sequence
  Description of Artificial Sequence: Synthetic oligonucleotide
gauuuaggagaguuucaga

SEQ ID NO: 1540200 - RNA, 19 nt, Artificial Sequence
  Description of Artificial Sequence: Synthetic oligonucleotide
ucccaugaagccaucucca

SEQ ID NO: 1540201 - RNA, 19 nt, Artificial Sequence
  Description of Artificial Sequence: Synthetic oligonucleotide
augcuuauuguugugacau

SEQ ID NO: 1540202 - RNA, 19 nt, Artificial Sequence
  Description of Artificial Sequence: Synthetic oligonucleotide
ucuucaauccguggaaagu

SEQ ID NO: 1540203 - RNA, 19 nt, Artificial Sequence
  Description of Artificial Sequence: Synthetic oligonucleotide
ucacgugccucuuugcacu

SEQ ID NO: 1540204 - RNA, 19 nt, Artificial Sequence
  Description of Artificial Sequence: Synthetic oligonucleotide
caagugaauggugaaacuc

SEQ ID NO: 1540205 - RNA, 19 nt, Artificial Sequence
  Description of Artificial Sequence: Synthetic oligonucleotide
auauuucggagucccauaa

SEQ ID NO: 1540206 - RNA, 19 nt, Artificial Sequence
  Description of Artificial Sequence: Synthetic oligonucleotide
acguggaguacagugacag

SEQ ID NO: 1540207 - RNA, 19 nt, Artificial Sequence
  Description of Artificial Sequence: Synthetic oligonucleotide
agucuagcaugucugcucu

SEQ ID NO: 1540208 - RNA, 19 nt, Artificial Sequence
  Description of Artificial Sequence: Synthetic oligonucleotide
ucuuuaacugggcucccaa

SEQ ID NO: 1540209 - RNA, 19 nt, Artificial Sequence
  Description of Artificial Sequence: Synthetic oligonucleotide
ugguaccagaaauugcacu

SEQ ID NO: 1540210 - RNA, 19 nt, Artificial Sequence
  Description of Artificial Sequence: Synthetic oligonucleotide
aggguauggucauuuccuc

SEQ ID NO: 1540211 - RNA, 19 nt, Artificial Sequence
  Description of Artificial Sequence: Synthetic oligonucleotide
auaucaugcaccagcaaga

SEQ ID NO: 1540212 - RNA, 19 nt, Artificial Sequence
  Description of Artificial Sequence: Synthetic oligonucleotide
gugcauggucuuuaacugg

SEQ ID NO: 1540213 - RNA, 19 nt, Artificial Sequence
  Description of Artificial Sequence: Synthetic oligonucleotide
ucccgauuucacauuguca

SEQ ID NO: 1540214 - RNA, 19 nt, Artificial Sequence
  Description of Artificial Sequence: Synthetic oligonucleotide
uauauuucggagucccaua

SEQ ID NO: 1540215 - RNA, 19 nt, Artificial Sequence
  Description of Artificial Sequence: Synthetic oligonucleotide
accuugaguauauuucgga

SEQ ID NO: 1540216 - RNA, 19 nt, Artificial Sequence
  Description of Artificial Sequence: Synthetic oligonucleotide
uguacucgccagcuggugu

SEQ ID NO: 1540217 - RNA, 19 nt, Artificial Sequence
  Description of Artificial Sequence: Synthetic oligonucleotide
agagauuagaauggcgugu

SEQ ID NO: 1540218 - RNA, 19 nt, Artificial Sequence
  Description of Artificial Sequence: Synthetic oligonucleotide
gaccuugaguauauuucgg

SEQ ID NO: 1540219 - RNA, 19 nt, Artificial Sequence
  Description of Artificial Sequence: Synthetic oligonucleotide
uagaauggcguguaauaua

SEQ ID NO: 1540220 - RNA, 19 nt, Artificial Sequence
  Description of Artificial Sequence: Synthetic oligonucleotide
ucuccagguaaaauauuua

SEQ ID NO: 1540221 - RNA, 19 nt, Artificial Sequence
  Description of Artificial Sequence: Synthetic oligonucleotide
uggacuaccuccaguugcu

SEQ ID NO: 1540222 - RNA, 19 nt, Artificial Sequence
  Description of Artificial Sequence: Synthetic oligonucleotide
agagggaugcuuauuguug

SEQ ID NO: 1540223 - RNA, 19 nt, Artificial Sequence
  Description of Artificial Sequence: Synthetic oligonucleotide
cuuugcacuugcuccugcg

SEQ ID NO: 1540224 - RNA, 19 nt, Artificial Sequence
  Description of Artificial Sequence: Synthetic oligonucleotide
ggucaugguacacaucugc

SEQ ID NO: 1540225 - RNA, 19 nt, Artificial Sequence
  Description of Artificial Sequence: Synthetic oligonucleotide
agaauggcguguaauauaa

SEQ ID NO: 1540226 - RNA, 19 nt, Artificial Sequence
  Description of Artificial Sequence: Synthetic oligonucleotide
gguucuggcguacagcgcc

SEQ ID NO: 1540227 - RNA, 19 nt, Artificial Sequence
  Description of Artificial Sequence: Synthetic oligonucleotide
agagugaguguugaggaga

SEQ ID NO: 1540228 - RNA, 19 nt, Artificial Sequence
  Description of Artificial Sequence: Synthetic oligonucleotide
uucccgauuucacauuguc

SEQ ID NO: 1540229 - RNA, 19 nt, Artificial Sequence
  Description of Artificial Sequence: Synthetic oligonucleotide
ugaugccgcuauaagaguu

SEQ ID NO: 1540230 - RNA, 19 nt, Artificial Sequence
  Description of Artificial Sequence: Synthetic oligonucleotide
guugugacaucguggguac

SEQ ID NO: 1540231 - RNA, 19 nt, Artificial Sequence
  Description of Artificial Sequence: Synthetic oligonucleotide
gaguguugaggagacccgg

SEQ ID NO: 1540232 - RNA, 19 nt, Artificial Sequence
  Description of Artificial Sequence: Synthetic oligonucleotide
cgauuuaacagcauccaag

SEQ ID NO: 1540233 - RNA, 19 nt, Artificial Sequence
  Description of Artificial Sequence: Synthetic oligonucleotide
ugcucuaagguggucucag

SEQ ID NO: 1540234 - RNA, 19 nt, Artificial Sequence
  Description of Artificial Sequence: Synthetic oligonucleotide
uaauagcagggucccgagc

SEQ ID NO: 1540235 - RNA, 19 nt, Artificial Sequence
  Description of Artificial Sequence: Synthetic oligonucleotide
auggucauuuccucugaca

SEQ ID NO: 1540236 - RNA, 19 nt, Artificial Sequence
  Description of Artificial Sequence: Synthetic oligonucleotide
agagagggaugcuuauugu

SEQ ID NO: 1540237 - RNA, 19 nt, Artificial Sequence
  Description of Artificial Sequence: Synthetic oligonucleotide
uuuugcugggcagccagug

SEQ ID NO: 1540238 - RNA, 19 nt, Artificial Sequence
  Description of Artificial Sequence: Synthetic oligonucleotide
guacagcagaccuugagua

SEQ ID NO: 1540239 - RNA, 19 nt, Artificial Sequence
  Description of Artificial Sequence: Synthetic oligonucleotide
cuccagguaaaauauuuaa

SEQ ID NO: 1540240 - RNA, 19 nt, Artificial Sequence
  Description of Artificial Sequence: Synthetic oligonucleotide
ugaguauauuucggagucc

SEQ ID NO: 1540241 - RNA, 19 nt, Artificial Sequence
  Description of Artificial Sequence: Synthetic oligonucleotide
ugcuggacuaccuccaguu

SEQ ID NO: 1540242 - RNA, 19 nt, Artificial Sequence
  Description of Artificial Sequence: Synthetic oligonucleotide
acucucuacgaagcagggc

SEQ ID NO: 1540243 - RNA, 19 nt, Artificial Sequence
  Description of Artificial Sequence: Synthetic oligonucleotide
ucgacuucacccgauuuaa

SEQ ID NO: 1540244 - RNA, 19 nt, Artificial Sequence
  Description of Artificial Sequence: Synthetic oligonucleotide
uggcccauguacucgccag

SEQ ID NO: 1540245 - RNA, 19 nt, Artificial Sequence
  Description of Artificial Sequence: Synthetic oligonucleotide
aaggaugccucagcaucuc

SEQ ID NO: 1540246 - RNA, 19 nt, Artificial Sequence
  Description of Artificial Sequence: Synthetic oligonucleotide
uaauuauguuccagauuua

SEQ ID NO: 1540247 - RNA, 19 nt, Artificial Sequence
  Description of Artificial Sequence: Synthetic oligonucleotide
uugaugccgcuauaagagu

SEQ ID NO: 1540248 - RNA, 19 nt, Artificial Sequence
  Description of Artificial Sequence: Synthetic oligonucleotide
ccuugaguauauuucggag

SEQ ID NO: 1540249 - RNA, 19 nt, Artificial Sequence
  Description of Artificial Sequence: Synthetic oligonucleotide
aagcaacauggauuuccga

SEQ ID NO: 1540250 - RNA, 19 nt, Artificial Sequence
  Description of Artificial Sequence: Synthetic oligonucleotide
cacucucuacgaagcaggg

SEQ ID NO: 1540251 - RNA, 19 nt, Artificial Sequence
  Description of Artificial Sequence: Synthetic oligonucleotide
uccgagagauuagaauggc

SEQ ID NO: 1540252 - RNA, 19 nt, Artificial Sequence
  Description of Artificial Sequence: Synthetic oligonucleotide
cuugaguauauuucggagu

SEQ ID NO: 1540253 - RNA, 19 nt, Artificial Sequence
  Description of Artificial Sequence: Synthetic oligonucleotide
uccagauuuaggagaguuu

SEQ ID NO: 1540254 - RNA, 19 nt, Artificial Sequence
  Description of Artificial Sequence: Synthetic oligonucleotide
cauaauagcagggucccga

SEQ ID NO: 1540255 - RNA, 19 nt, Artificial Sequence
  Description of Artificial Sequence: Synthetic oligonucleotide
ccauguacucgccagcugg

SEQ ID NO: 1540256 - RNA, 19 nt, Artificial Sequence
  Description of Artificial Sequence: Synthetic oligonucleotide
aucguggguacagcagacc

SEQ ID NO: 1540257 - RNA, 19 nt, Artificial Sequence
  Description of Artificial Sequence: Synthetic oligonucleotide
cuuaaauaccaguucugcu

SEQ ID NO: 1540258 - RNA, 19 nt, Artificial Sequence
  Description of Artificial Sequence: Synthetic oligonucleotide
agucccauaauagcagggu

SEQ ID NO: 1540259 - RNA, 19 nt, Artificial Sequence
  Description of Artificial Sequence: Synthetic oligonucleotide
guaaaacuuaggccgcaga

SEQ ID NO: 1540260 - RNA, 19 nt, Artificial Sequence
  Description of Artificial Sequence: Synthetic oligonucleotide
auguuacucagcugguaaa

SEQ ID NO: 1540261 - RNA, 19 nt, Artificial Sequence
  Description of Artificial Sequence: Synthetic oligonucleotide
auagcagggucccgagcag

SEQ ID NO: 1540262 - RNA, 19 nt, Artificial Sequence
  Description of Artificial Sequence: Synthetic oligonucleotide
uauuucggagucccauaau

SEQ ID NO: 1540263 - RNA, 19 nt, Artificial Sequence
  Description of Artificial Sequence: Synthetic oligonucleotide
ucucuaagggauucuucuu

SEQ ID NO: 1540264 - RNA, 19 nt, Artificial Sequence
  Description of Artificial Sequence: Synthetic oligonucleotide
uggugaaacucuccuccaa

SEQ ID NO: 1540265 - RNA, 19 nt, Artificial Sequence
  Description of Artificial Sequence: Synthetic oligonucleotide
accaggguauggucauuuc

SEQ ID NO: 1540266 - RNA, 19 nt, Artificial Sequence
  Description of Artificial Sequence: Synthetic oligonucleotide
auagauccuuccaacggca

SEQ ID NO: 1540267 - RNA, 19 nt, Artificial Sequence
  Description of Artificial Sequence: Synthetic oligonucleotide
auggugaaacucuccucca

SEQ ID NO: 1540268 - RNA, 19 nt, Artificial Sequence
  Description of Artificial Sequence: Synthetic oligonucleotide
acggcaucugcagauucuc

SEQ ID NO: 1540269 - RNA, 19 nt, Artificial Sequence
  Description of Artificial Sequence: Synthetic oligonucleotide
acgaaguaauuauguucca

SEQ ID NO: 1540270 - RNA, 19 nt, Artificial Sequence
  Description of Artificial Sequence: Synthetic oligonucleotide
gagacccggaagaucuggg

SEQ ID NO: 1540271 - RNA, 19 nt, Artificial Sequence
  Description of Artificial Sequence: Synthetic oligonucleotide
cuuaagcaccaggguaugg

SEQ ID NO: 1540272 - RNA, 19 nt, Artificial Sequence
  Description of Artificial Sequence: Synthetic oligonucleotide
cacccgauuuaacagcauc

SEQ ID NO: 1540273 - RNA, 19 nt, Artificial Sequence
  Description of Artificial Sequence: Synthetic oligonucleotide
uauuucccgauuucacauu

SEQ ID NO: 1540274 - RNA, 19 nt, Artificial Sequence
  Description of Artificial Sequence: Synthetic oligonucleotide
ucucuacgaagcagggcaa

SEQ ID NO: 1540275 - RNA, 19 nt, Artificial Sequence
  Description of Artificial Sequence: Synthetic oligonucleotide
cguguaauauaaaauucuc

SEQ ID NO: 1540276 - RNA, 19 nt, Artificial Sequence
  Description of Artificial Sequence: Synthetic oligonucleotide
uuuggcccauguacucgcc

SEQ ID NO: 1540277 - RNA, 19 nt, Artificial Sequence
  Description of Artificial Sequence: Synthetic oligonucleotide
uuugcuccucauagauccu

SEQ ID NO: 1540278 - RNA, 19 nt, Artificial Sequence
  Description of Artificial Sequence: Synthetic oligonucleotide
auucgauuaucuacuagua

SEQ ID NO: 1540279 - RNA, 19 nt, Artificial Sequence
  Description of Artificial Sequence: Synthetic oligonucleotide
caucccaugaagccaucuc

SEQ ID NO: 1540280 - RNA, 19 nt, Artificial Sequence
  Description of Artificial Sequence: Synthetic oligonucleotide
caucguggguacagcagac

SEQ ID NO: 1540281 - RNA, 19 nt, Artificial Sequence
  Description of Artificial Sequence: Synthetic oligonucleotide
uaaaccggcucagagucuu

SEQ ID NO: 1540282 - RNA, 19 nt, Artificial Sequence
  Description of Artificial Sequence: Synthetic oligonucleotide
ggcguguaauauaaaauuc

SEQ ID NO: 1540283 - RNA, 19 nt, Artificial Sequence
  Description of Artificial Sequence: Synthetic oligonucleotide
uuguugugacaucgugggu

SEQ ID NO: 1540284 - RNA, 19 nt, Artificial Sequence
  Description of Artificial Sequence: Synthetic oligonucleotide
uuagugcuuggacgucaga

SEQ ID NO: 1540285 - RNA, 19 nt, Artificial Sequence
  Description of Artificial Sequence: Synthetic oligonucleotide
uuggcaaaccguggcaaaa

SEQ ID NO: 1540286 - RNA, 19 nt, Artificial Sequence
  Description of Artificial Sequence: Synthetic oligonucleotide
cacaucucuuuccccaauc

SEQ ID NO: 1540287 - RNA, 19 nt, Artificial Sequence
  Description of Artificial Sequence: Synthetic oligonucleotide
aguuuacaucuugaucugu

SEQ ID NO: 1540288 - RNA, 19 nt, Artificial Sequence
  Description of Artificial Sequence: Synthetic oligonucleotide
gagauuagaauggcgugua

SEQ ID NO: 1540289 - RNA, 19 nt, Artificial Sequence
  Description of Artificial Sequence: Synthetic oligonucleotide
gauuagaauggcguguaau

SEQ ID NO: 1540290 - RNA, 19 nt, Artificial Sequence
  Description of Artificial Sequence: Synthetic oligonucleotide
cauggucucuaagggauuc

SEQ ID NO: 1540291 - RNA, 19 nt, Artificial Sequence
  Description of Artificial Sequence: Synthetic oligonucleotide
uccuuccaacggcaucugc

SEQ ID NO: 1540292 - RNA, 19 nt, Artificial Sequence
  Description of Artificial Sequence: Synthetic oligonucleotide
cuaagguggucucagcaua

SEQ ID NO: 1540293 - RNA, 19 nt, Artificial Sequence
  Description of Artificial Sequence: Synthetic oligonucleotide
cuccuuaagcaccagggua

SEQ ID NO: 1540294 - RNA, 19 nt, Artificial Sequence
  Description of Artificial Sequence: Synthetic oligonucleotide
cagcaaccucaaauugugc

SEQ ID NO: 1540295 - RNA, 19 nt, Artificial Sequence
  Description of Artificial Sequence: Synthetic oligonucleotide
ugguguaggucgacuucac

SEQ ID NO: 1540296 - RNA, 19 nt, Artificial Sequence
  Description of Artificial Sequence: Synthetic oligonucleotide
ucuggcguacagcgccacc

SEQ ID NO: 1540297 - RNA, 19 nt, Artificial Sequence
  Description of Artificial Sequence: Synthetic oligonucleotide
caggguauggucauuuccu

SEQ ID NO: 1540298 - RNA, 19 nt, Artificial Sequence
  Description of Artificial Sequence: Synthetic oligonucleotide
uccguggaaaguggaaguc

SEQ ID NO: 1540299 - RNA, 19 nt, Artificial Sequence
  Description of Artificial Sequence: Synthetic oligonucleotide
gauuuccgagagauuagaa

SEQ ID NO: 1540300 - RNA, 19 nt, Artificial Sequence
  Description of Artificial Sequence: Synthetic oligonucleotide
gacgucagagugaguguug

SEQ ID NO: 1540301 - RNA, 19 nt, Artificial Sequence
  Description of Artificial Sequence: Synthetic oligonucleotide
gcuuggacgucagagugag

SEQ ID NO: 1540302 - RNA, 19 nt, Artificial Sequence
  Description of Artificial Sequence: Synthetic oligonucleotide
agauuagaauggcguguaa

SEQ ID NO: 1540303 - RNA, 19 nt, Artificial Sequence
  Description of Artificial Sequence: Synthetic oligonucleotide
gaguacagugacagcgcug

SEQ ID NO: 1540304 - RNA, 19 nt, Artificial Sequence
  Description of Artificial Sequence: Synthetic oligonucleotide
gucucagcauaagcuuugg

SEQ ID NO: 1540305 - RNA, 19 nt, Artificial Sequence
  Description of Artificial Sequence: Synthetic oligonucleotide
gucaugguacacaucugca

SEQ ID NO: 1540306 - RNA, 19 nt, Artificial Sequence
  Description of Artificial Sequence: Synthetic oligonucleotide
cuuaggccgcagagagacg

SEQ ID NO: 1540307 - RNA, 19 nt, Artificial Sequence
  Description of Artificial Sequence: Synthetic oligonucleotide
gugaaacucuccuccaacu

SEQ ID NO: 1540308 - RNA, 19 nt, Artificial Sequence
  Description of Artificial Sequence: Synthetic oligonucleotide
cugugagugauuuccccaa

SEQ ID NO: 1540309 - RNA, 19 nt, Artificial Sequence
  Description of Artificial Sequence: Synthetic oligonucleotide
ccgagagauuagaauggcg

SEQ ID NO: 1540310 - RNA, 19 nt, Artificial Sequence
  Description of Artificial Sequence: Synthetic oligonucleotide
gucgacuucacccgauuua

SEQ ID NO: 1540311 - RNA, 19 nt, Artificial Sequence
  Description of Artificial Sequence: Synthetic oligonucleotide
gagccgguggaguuucaca

SEQ ID NO: 1540312 - RNA, 19 nt, Artificial Sequence
  Description of Artificial Sequence: Synthetic oligonucleotide
cuuauuguugugacaucgu

SEQ ID NO: 1540313 - RNA, 19 nt, Artificial Sequence
  Description of Artificial Sequence: Synthetic oligonucleotide
cccaagugaauggugaaac

SEQ ID NO: 1540314 - RNA, 19 nt, Artificial Sequence
  Description of Artificial Sequence: Synthetic oligonucleotide
uccgccauuuugguuucca

SEQ ID NO: 1540315 - RNA, 19 nt, Artificial Sequence
  Description of Artificial Sequence: Synthetic oligonucleotide
ucugugcauucuuggcaaa

SEQ ID NO: 1540316 - RNA, 19 nt, Artificial Sequence
  Description of Artificial Sequence: Synthetic oligonucleotide
cuauaagaguuaauucgau

SEQ ID NO: 1540317 - RNA, 19 nt, Artificial Sequence
  Description of Artificial Sequence: Synthetic oligonucleotide
ccgcuauaagaguuaauuc

SEQ ID NO: 1540318 - RNA, 19 nt, Artificial Sequence
  Description of Artificial Sequence: Synthetic oligonucleotide
gguacagcagaccuugagu

SEQ ID NO: 1540319 - RNA, 19 nt, Artificial Sequence
  Description of Artificial Sequence: Synthetic oligonucleotide
cccauaauagcaggguccc

SEQ ID NO: 1540320 - RNA, 19 nt, Artificial Sequence
  Description of Artificial Sequence: Synthetic oligonucleotide
acgucagagugaguguuga

SEQ ID NO: 1540321 - RNA, 19 nt, Artificial Sequence
  Description of Artificial Sequence: Synthetic oligonucleotide
gguguaggucgacuucacc

SEQ ID NO: 1540322 - RNA, 19 nt, Artificial Sequence
  Description of Artificial Sequence: Synthetic oligonucleotide
cuccucauagauccuucca

SEQ ID NO: 1540323 - RNA, 19 nt, Artificial Sequence
  Description of Artificial Sequence: Synthetic oligonucleotide
uggcaaaccguggcaaaau

SEQ ID NO: 1540324 - RNA, 19 nt, Artificial Sequence
  Description of Artificial Sequence: Synthetic oligonucleotide
gagagggaugcuuauuguu

SEQ ID NO: 1540325 - RNA, 19 nt, Artificial Sequence
  Description of Artificial Sequence: Synthetic oligonucleotide
guauauuucggagucccau

SEQ ID NO: 1540326 - RNA, 19 nt, Artificial Sequence
  Description of Artificial Sequence: Synthetic oligonucleotide
gaugccgcuauaagaguua

SEQ ID NO: 1540327 - RNA, 19 nt, Artificial Sequence
  Description of Artificial Sequence: Synthetic oligonucleotide
guaggucgacuucacccga

SEQ ID NO: 1540328 - RNA, 19 nt, Artificial Sequence
  Description of Artificial Sequence: Synthetic oligonucleotide
uaggucgacuucacccgau

SEQ ID NO: 1540329 - RNA, 19 nt, Artificial Sequence
  Description of Artificial Sequence: Synthetic oligonucleotide
aaaccggcucagagucuuc

SEQ ID NO: 1540330 - RNA, 19 nt, Artificial Sequence
  Description of Artificial Sequence: Synthetic oligonucleotide
uaccuccaguugcucuuca

SEQ ID NO: 1540331 - RNA, 19 nt, Artificial Sequence
  Description of Artificial Sequence: Synthetic oligonucleotide
ugcuccugcgcuggguucu

SEQ ID NO: 1540332 - RNA, 19 nt, Artificial Sequence
  Description of Artificial Sequence: Synthetic oligonucleotide
gaagucuagcaugucugcu

SEQ ID NO: 1540333 - RNA, 19 nt, Artificial Sequence
  Description of Artificial Sequence: Synthetic oligonucleotide
accuugucucucucguaau

SEQ ID NO: 1540334 - RNA, 19 nt, Artificial Sequence
  Description of Artificial Sequence: Synthetic oligonucleotide
guggaguuucacaccacuc

SEQ ID NO: 1540335 - RNA, 19 nt, Artificial Sequence
  Description of Artificial Sequence: Synthetic oligonucleotide
ccuuugacacacuuaaaua

SEQ ID NO: 1540336 - RNA, 19 nt, Artificial Sequence
  Description of Artificial Sequence: Synthetic oligonucleotide
aucucuuuugaugccgcua

SEQ ID NO: 1540337 - RNA, 19 nt, Artificial Sequence
  Description of Artificial Sequence: Synthetic oligonucleotide
uggucucuaagggauucuu

SEQ ID NO: 1540338 - RNA, 19 nt, Artificial Sequence
  Description of Artificial Sequence: Synthetic oligonucleotide
auaccuugucucucucgua

SEQ ID NO: 1540339 - RNA, 19 nt, Artificial Sequence
  Description of Artificial Sequence: Synthetic oligonucleotide
ggcaaaccguggcaaaauc

SEQ ID NO: 1540340 - RNA, 19 nt, Artificial Sequence
  Description of Artificial Sequence: Synthetic oligonucleotide
agcauguuacucagcuggu

SEQ ID NO: 1540341 - RNA, 19 nt, Artificial Sequence
  Description of Artificial Sequence: Synthetic oligonucleotide
ggauuuccgagagauuaga

SEQ ID NO: 1540342 - RNA, 19 nt, Artificial Sequence
  Description of Artificial Sequence: Synthetic oligonucleotide
guacucgccagcuggugua

SEQ ID NO: 1540343 - RNA, 19 nt, Artificial Sequence
  Description of Artificial Sequence: Synthetic oligonucleotide
auguacucgccagcuggug

SEQ ID NO: 1540344 - RNA, 19 nt, Artificial Sequence
  Description of Artificial Sequence: Synthetic oligonucleotide
cgaaguaauuauguuccag

SEQ ID NO: 1540345 - RNA, 19 nt, Artificial Sequence
  Description of Artificial Sequence: Synthetic oligonucleotide
gcguguaauauaaaauucu

SEQ ID NO: 1540346 - RNA, 19 nt, Artificial Sequence
  Description of Artificial Sequence: Synthetic oligonucleotide
ugcgcuggguucuggcgua

SEQ ID NO: 1540347 - RNA, 19 nt, Artificial Sequence
  Description of Artificial Sequence: Synthetic oligonucleotide
guuuuggcugaacuuuaau

SEQ ID NO: 1540348 - RNA, 19 nt, Artificial Sequence
  Description of Artificial Sequence: Synthetic oligonucleotide
ucgcgugcucuaagguggu

SEQ ID NO: 1540349 - RNA, 19 nt, Artificial Sequence
  Description of Artificial Sequence: Synthetic oligonucleotide
cccgauuucacauugucau

SEQ ID NO: 1540350 - RNA, 19 nt, Artificial Sequence
  Description of Artificial Sequence: Synthetic oligonucleotide
ugccgcuauaagaguuaau

SEQ ID NO: 1540351 - RNA, 19 nt, Artificial Sequence
  Description of Artificial Sequence: Synthetic oligonucleotide
auaaaccggcucagagucu

SEQ ID NO: 1540352 - RNA, 19 nt, Artificial Sequence
  Description of Artificial Sequence: Synthetic oligonucleotide
accucaaauugugcauggu

SEQ ID NO: 1540353 - RNA, 19 nt, Artificial Sequence
  Description of Artificial Sequence: Synthetic oligonucleotide
aggccucgcgugcucuaag

SEQ ID NO: 1540354 - RNA, 19 nt, Artificial Sequence
  Description of Artificial Sequence: Synthetic oligonucleotide
ccucgcgugcucuaaggug

SEQ ID NO: 1540355 - RNA, 19 nt, Artificial Sequence
  Description of Artificial Sequence: Synthetic oligonucleotide
auggucucuaagggauucu

SEQ ID NO: 1540356 - RNA, 19 nt, Artificial Sequence
  Description of Artificial Sequence: Synthetic oligonucleotide
cugacgaaguaauuauguu

SEQ ID NO: 1540357 - RNA, 19 nt, Artificial Sequence
  Description of Artificial Sequence: Synthetic oligonucleotide
cgagagauuagaauggcgu

SEQ ID NO: 1540358 - RNA, 19 nt, Artificial Sequence
  Description of Artificial Sequence: Synthetic oligonucleotide
guaccagaaauugcacugu

SEQ ID NO: 1540359 - RNA, 19 nt, Artificial Sequence
  Description of Artificial Sequence: Synthetic oligonucleotide
aggucgacuucacccgauu

SEQ ID NO: 1540360 - RNA, 19 nt, Artificial Sequence
  Description of Artificial Sequence: Synthetic oligonucleotide
augccgcuauaagaguuaa

SEQ ID NO: 1540361 - RNA, 19 nt, Artificial Sequence
  Description of Artificial Sequence: Synthetic oligonucleotide
gaauggcguguaauauaaa

SEQ ID NO: 1540362 - RNA, 19 nt, Artificial Sequence
  Description of Artificial Sequence: Synthetic oligonucleotide
gccgcuauaagaguuaauu

SEQ ID NO: 1540363 - RNA, 19 nt, Artificial Sequence
  Description of Artificial Sequence: Synthetic oligonucleotide
gcucuaagguggucucagc

SEQ ID NO: 1540364 - RNA, 19 nt, Artificial Sequence
  Description of Artificial Sequence: Synthetic oligonucleotide
ccgauuucacauugucauc

SEQ ID NO: 1540365 - RNA, 19 nt, Artificial Sequence
  Description of Artificial Sequence: Synthetic oligonucleotide
gcuccacaucucuuucccc

SEQ ID NO: 1540366 - RNA, 19 nt, Artificial Sequence
  Description of Artificial Sequence: Synthetic oligonucleotide
cuaccuccaguugcucuuc

SEQ ID NO: 1540367 - RNA, 19 nt, Artificial Sequence
  Description of Artificial Sequence: Synthetic oligonucleotide
ggcccauguacucgccagc

SEQ ID NO: 1540368 - RNA, 19 nt, Artificial Sequence
  Description of Artificial Sequence: Synthetic oligonucleotide
cuccaucccaugaagccau

SEQ ID NO: 1540369 - RNA, 19 nt, Artificial Sequence
  Description of Artificial Sequence: Synthetic oligonucleotide
cauguacucgccagcuggu

SEQ ID NO: 1540370 - RNA, 19 nt, Artificial Sequence
  Description of Artificial Sequence: Synthetic oligonucleotide
uucuggcguacagcgccac

SEQ ID NO: 1540371 - RNA, 19 nt, Artificial Sequence
  Description of Artificial Sequence: Synthetic oligonucleotide
cuacgaagcagggcaaacu

SEQ ID NO: 1540372 - RNA, 19 nt, Artificial Sequence
  Description of Artificial Sequence: Synthetic oligonucleotide
ggaguacagugacagcgcu

SEQ ID NO: 1540373 - RNA, 19 nt, Artificial Sequence
  Description of Artificial Sequence: Synthetic oligonucleotide
cagugauauuucccgauuu

SEQ ID NO: 1540374 - RNA, 19 nt, Artificial Sequence
  Description of Artificial Sequence: Synthetic oligonucleotide
cccaaucaguucugagaug

SEQ ID NO: 1540375 - RNA, 19 nt, Artificial Sequence
  Description of Artificial Sequence: Synthetic oligonucleotide
gcaaaccguggcaaaaucu

SEQ ID NO: 1540376 - RNA, 19 nt, Artificial Sequence
  Description of Artificial Sequence: Synthetic oligonucleotide
uggagccgguggaguuuca

SEQ ID NO: 1540377 - RNA, 19 nt, Artificial Sequence
  Description of Artificial Sequence: Synthetic oligonucleotide
gcagaccuugaguauauuu

SEQ ID NO: 1540378 - RNA, 19 nt, Artificial Sequence
  Description of Artificial Sequence: Synthetic oligonucleotide
gcauggucuuuaacugggc

SEQ ID NO: 1540379 - RNA, 19 nt, Artificial Sequence
  Description of Artificial Sequence: Synthetic oligonucleotide
guacagugacagcgcuguc

SEQ ID NO: 1540380 - RNA, 19 nt, Artificial Sequence
  Description of Artificial Sequence: Synthetic oligonucleotide
cccgauuuaacagcaucca

SEQ ID NO: 1540381 - RNA, 19 nt, Artificial Sequence
  Description of Artificial Sequence: Synthetic oligonucleotide
ccgccauuuugguuuccag

SEQ ID NO: 1540382 - RNA, 19 nt, Artificial Sequence
  Description of Artificial Sequence: Synthetic oligonucleotide
ccauaauagcagggucccg

SEQ ID NO: 1540383 - RNA, 19 nt, Artificial Sequence
  Description of Artificial Sequence: Synthetic oligonucleotide
guucuggcguacagcgcca

SEQ ID NO: 1540384 - RNA, 19 nt, Artificial Sequence
  Description of Artificial Sequence: Synthetic oligonucleotide
cgugcucuaagguggucuc

SEQ ID NO: 1540385 - RNA, 19 nt, Artificial Sequence
  Description of Artificial Sequence: Synthetic oligonucleotide
cucuacgaagcagggcaaa

SEQ ID NO: 1540386 - RNA, 19 nt, Artificial Sequence
  Description of Artificial Sequence: Synthetic oligonucleotide
uuccgccauuuugguuucc

SEQ ID NO: 1540387 - RNA, 19 nt, Artificial Sequence
  Description of Artificial Sequence: Synthetic oligonucleotide
cguggaguacagugacagc

SEQ ID NO: 1540388 - RNA, 19 nt, Artificial Sequence
  Description of Artificial Sequence: Synthetic oligonucleotide
ccgauuuaacagcauccaa

SEQ ID NO: 1540389 - RNA, 19 nt, Artificial Sequence
  Description of Artificial Sequence: Synthetic oligonucleotide
ccccaaucaguucugagau

SEQ ID NO: 1540390 - RNA, 19 nt, Artificial Sequence
  Description of Artificial Sequence: Synthetic oligonucleotide
agcgcugucuggagccggu

SEQ ID NO: 1540391 - RNA, 19 nt, Artificial Sequence
  Description of Artificial Sequence: Synthetic oligonucleotide
cugcgcuggguucuggcgu

SEQ ID NO: 1540392 - RNA, 19 nt, Artificial Sequence
  Description of Artificial Sequence: Synthetic oligonucleotide
cagcagaccuugaguauau

SEQ ID NO: 1540393 - RNA, 19 nt, Artificial Sequence
  Description of Artificial Sequence: Synthetic oligonucleotide
ggguucuggcguacagcgc

SEQ ID NO: 1540394 - RNA, 19 nt, Artificial Sequence
  Description of Artificial Sequence: Synthetic oligonucleotide
uaggcuccucaggccucgc

SEQ ID NO: 1540395 - RNA, 19 nt, Artificial Sequence
  Description of Artificial Sequence: Synthetic oligonucleotide
cuccugcgcuggguucugg

SEQ ID NO: 1540396 - RNA, 19 nt, Artificial Sequence
  Description of Artificial Sequence: Synthetic oligonucleotide
agcagaccuugaguauauu

SEQ ID NO: 1540397 - RNA, 19 nt, Artificial Sequence
  Description of Artificial Sequence: Synthetic oligonucleotide
cgacuucacccgauuuaac

SEQ ID NO: 1540398 - RNA, 19 nt, Artificial Sequence
  Description of Artificial Sequence: Synthetic oligonucleotide
gcauaagcuuuggcccaug

SEQ ID NO: 1540399 - RNA, 19 nt, Artificial Sequence
  Description of Artificial Sequence: Synthetic oligonucleotide
ggucgacuucacccgauuu

SEQ ID NO: 1540400 - RNA, 19 nt, Artificial Sequence
  Description of Artificial Sequence: Synthetic oligonucleotide
ggacgucagagugaguguu

SEQ ID NO: 1540401 - RNA, 19 nt, Artificial Sequence
  Description of Artificial Sequence: Synthetic oligonucleotide
gcgugcucuaagguggucu

SEQ ID NO: 1540402 - RNA, 19 nt, Artificial Sequence
  Description of Artificial Sequence: Synthetic oligonucleotide
caccaggguauggucauuu

SEQ ID NO: 1540403 - RNA, 19 nt, Artificial Sequence
  Description of Artificial Sequence: Synthetic oligonucleotide
gccucgcgugcucuaaggu

SEQ ID NO: 1540404 - RNA, 19 nt, Artificial Sequence
  Description of Artificial Sequence: Synthetic oligonucleotide
cuucacugagggagcuguu

SEQ ID NO: 1540405 - RNA, 19 nt, Artificial Sequence
  Description of Artificial Sequence: Synthetic oligonucleotide
gggucccgagcagugauau

SEQ ID NO: 1540406 - RNA, 19 nt, Artificial Sequence
  Description of Artificial Sequence: Synthetic oligonucleotide
cuuggacgucagagugagu

SEQ ID NO: 1540407 - RNA, 19 nt, Artificial Sequence
  Description of Artificial Sequence: Synthetic oligonucleotide
caggccucgcgugcucuaa

SEQ ID NO: 1540408 - RNA, 19 nt, Artificial Sequence
  Description of Artificial Sequence: Synthetic oligonucleotide
ccguggaaaguggaagucu

SEQ ID NO: 1540409 - RNA, 19 nt, Artificial Sequence
  Description of Artificial Sequence: Synthetic oligonucleotide
cucaggccucgcgugcucu

SEQ ID NO: 1540410 - RNA, 19 nt, Artificial Sequence
  Description of Artificial Sequence: Synthetic oligonucleotide
cagcugguguaggucgacu

SEQ ID NO: 1540411 - RNA, 19 nt, Artificial Sequence
  Description of Artificial Sequence: Synthetic oligonucleotide
gcgcugucuggagccggug

SEQ ID NO: 1540412 - RNA, 19 nt, Artificial Sequence
  Description of Artificial Sequence: Synthetic oligonucleotide
ccaucccaugaagccaucu

SEQ ID NO: 1540413 - RNA, 19 nt, Artificial Sequence
  Description of Artificial Sequence: Synthetic oligonucleotide
gcgcuggguucuggcguac

SEQ ID NO: 1540414 - RNA, 19 nt, Artificial Sequence
  Description of Artificial Sequence: Synthetic oligonucleotide
ccacaucucuuuccccaau

SEQ ID NO: 1540415 - RNA, 19 nt, Artificial Sequence
  Description of Artificial Sequence: Synthetic oligonucleotide
gcgccaccugcuggacuac

SEQ ID NO: 1540416 - RNA, 19 nt, Artificial Sequence
  Description of Artificial Sequence: Synthetic oligonucleotide
ccaacggcaucugcagauu

SEQ ID NO: 1540417 - RNA, 19 nt, Artificial Sequence
  Description of Artificial Sequence: Synthetic oligonucleotide
ccagaaucacgugccucuu

SEQ ID NO: 1540418 - RNA, 19 nt, Artificial Sequence
  Description of Artificial Sequence: Synthetic oligonucleotide
cgcgugcucuaaggugguc

SEQ ID NO: 1540419 - RNA, 19 nt, Artificial Sequence
  Description of Artificial Sequence: Synthetic oligonucleotide
aacuuuuauaaacaggugc

SEQ ID NO: 1540420 - RNA, 19 nt, Artificial Sequence
  Description of Artificial Sequence: Synthetic oligonucleotide
aaauccuagaguuugauuc

SEQ ID NO: 1540421 - RNA, 19 nt, Artificial Sequence
  Description of Artificial Sequence: Synthetic oligonucleotide
aaauauagaagcuucacug

SEQ ID NO: 1540422 - RNA, 19 nt, Artificial Sequence
  Description of Artificial Sequence: Synthetic oligonucleotide
aauacuugcacagugggcc

SEQ ID NO: 1540423 - RNA, 19 nt, Artificial Sequence
  Description of Artificial Sequence: Synthetic oligonucleotide
uaugacaauuauaauaagg

SEQ ID NO: 1540424 - RNA, 19 nt, Artificial Sequence
  Description of Artificial Sequence: Synthetic oligonucleotide
uauggaaauauauauauga

SEQ ID NO: 1540425 - RNA, 19 nt, Artificial Sequence
  Description of Artificial Sequence: Synthetic oligonucleotide
ucuaaauggaccagcaucg

SEQ ID NO: 1540426 - RNA, 19 nt, Artificial Sequence
  Description of Artificial Sequence: Synthetic oligonucleotide
auaggaacgauauaugcac

SEQ ID NO: 1540427 - RNA, 19 nt, Artificial Sequence
  Description of Artificial Sequence: Synthetic oligonucleotide
auuaguguuuuccacgucc

SEQ ID NO: 1540428 - RNA, 19 nt, Artificial Sequence
  Description of Artificial Sequence: Synthetic oligonucleotide
uaaucuaucagaaaacuaa

SEQ ID NO: 1540429 - RNA, 19 nt, Artificial Sequence
  Description of Artificial Sequence: Synthetic oligonucleotide
aaaguuuucaugcuaggca

SEQ ID NO: 1540430 - RNA, 19 nt, Artificial Sequence
  Description of Artificial Sequence: Synthetic oligonucleotide
aauuauaauaaggaaguca

SEQ ID NO: 1540431 - RNA, 19 nt, Artificial Sequence
  Description of Artificial Sequence: Synthetic oligonucleotide
auagaagcuucacuggucc

SEQ ID NO: 1540432 - RNA, 19 nt, Artificial Sequence
  Description of Artificial Sequence: Synthetic oligonucleotide
ugggguuuauaaaacacgg

SEQ ID NO: 1540433 - RNA, 19 nt, Artificial Sequence
  Description of Artificial Sequence: Synthetic oligonucleotide
agugcaauuaguguuuucc

SEQ ID NO: 1540434 - RNA, 19 nt, Artificial Sequence
  Description of Artificial Sequence: Synthetic oligonucleotide
acgauauaugcacucaagc

SEQ ID NO: 1540435 - RNA, 19 nt, Artificial Sequence
  Description of Artificial Sequence: Synthetic oligonucleotide
aaaauaaccaggaagugga

SEQ ID NO: 1540436 - RNA, 19 nt, Artificial Sequence
  Description of Artificial Sequence: Synthetic oligonucleotide
uaucuaacaacacaguuau

SEQ ID NO: 1540437 - RNA, 19 nt, Artificial Sequence
  Description of Artificial Sequence: Synthetic oligonucleotide
ucuaucagaaaacuaauua

SEQ ID NO: 1540438 - RNA, 19 nt, Artificial Sequence
  Description of Artificial Sequence: Synthetic oligonucleotide
aaacaggugcuacugagag

SEQ ID NO: 1540439 - RNA, 19 nt, Artificial Sequence
  Description of Artificial Sequence: Synthetic oligonucleotide
gaaaacuaauuauuguuug

SEQ ID NO: 1540440 - RNA, 19 nt, Artificial Sequence
  Description of Artificial Sequence: Synthetic oligonucleotide
uuauaggaacgauauaugc

SEQ ID NO: 1540441 - RNA, 19 nt, Artificial Sequence
  Description of Artificial Sequence: Synthetic oligonucleotide
gaaaauaaccaggaagugg

SEQ ID NO: 1540442 - RNA, 19 nt, Artificial Sequence
  Description of Artificial Sequence: Synthetic oligonucleotide
acaauguauaaaugaaggg

SEQ ID NO: 1540443 - RNA, 19 nt, Artificial Sequence
  Description of Artificial Sequence: Synthetic oligonucleotide
ugucacaacaauuuaucag

SEQ ID NO: 1540444 - RNA, 19 nt, Artificial Sequence
  Description of Artificial Sequence: Synthetic oligonucleotide
ucuauauccaggccaagag

SEQ ID NO: 1540445 - RNA, 19 nt, Artificial Sequence
  Description of Artificial Sequence: Synthetic oligonucleotide
uguuuagcagugcaagugg

SEQ ID NO: 1540446 - RNA, 19 nt, Artificial Sequence
  Description of Artificial Sequence: Synthetic oligonucleotide
uauaggaacgauauaugca

SEQ ID NO: 1540447 - RNA, 19 nt, Artificial Sequence
  Description of Artificial Sequence: Synthetic oligonucleotide
aauugaacaugucaucaca

SEQ ID NO: 1540448 - RNA, 19 nt, Artificial Sequence
  Description of Artificial Sequence: Synthetic oligonucleotide
aauaucuaacaacacaguu

SEQ ID NO: 1540449 - RNA, 19 nt, Artificial Sequence
  Description of Artificial Sequence: Synthetic oligonucleotide
uucacagggaaaauaacca

SEQ ID NO: 1540450 - RNA, 19 nt, Artificial Sequence
  Description of Artificial Sequence: Synthetic oligonucleotide
ugagaaauauagaagcuuc

SEQ ID NO: 1540451 - RNA, 19 nt, Artificial Sequence
  Description of Artificial Sequence: Synthetic oligonucleotide
uacuuauggaaauauauau

SEQ ID NO: 1540452 - RNA, 19 nt, Artificial Sequence
  Description of Artificial Sequence: Synthetic oligonucleotide
aacuaauuauuguuugcug

SEQ ID NO: 1540453 - RNA, 19 nt, Artificial Sequence
  Description of Artificial Sequence: Synthetic oligonucleotide
aauguauaaaugaagggaa

SEQ ID NO: 1540454 - RNA, 19 nt, Artificial Sequence
  Description of Artificial Sequence: Synthetic oligonucleotide
acuaauuauuguuugcuga

SEQ ID NO: 1540455 - RNA, 19 nt, Artificial Sequence
  Description of Artificial Sequence: Synthetic oligonucleotide
acaacacaguuauaggaac

SEQ ID NO: 1540456 - RNA, 19 nt, Artificial Sequence
  Description of Artificial Sequence: Synthetic oligonucleotide
uuacagagugcaauuagug

SEQ ID NO: 1540457 - RNA, 19 nt, Artificial Sequence
  Description of Artificial Sequence: Synthetic oligonucleotide
uuugagaaauauagaagcu

SEQ ID NO: 1540458 - RNA, 19 nt, Artificial Sequence
  Description of Artificial Sequence: Synthetic oligonucleotide
aguuauaggaacgauauau

SEQ ID NO: 1540459 - RNA, 19 nt, Artificial Sequence
  Description of Artificial Sequence: Synthetic oligonucleotide
uuaaaagauacguggggca

SEQ ID NO: 1540460 - RNA, 19 nt, Artificial Sequence
  Description of Artificial Sequence: Synthetic oligonucleotide
guuguaacacucugaaagg

SEQ ID NO: 1540461 - RNA, 19 nt, Artificial Sequence
  Description of Artificial Sequence: Synthetic oligonucleotide
uaucagaaaacuaauuauu

SEQ ID NO: 1540462 - RNA, 19 nt, Artificial Sequence
  Description of Artificial Sequence: Synthetic oligonucleotide
uuaaaguuuucaugcuagg

SEQ ID NO: 1540463 - RNA, 19 nt, Artificial Sequence
  Description of Artificial Sequence: Synthetic oligonucleotide
agaaauauagaagcuucac

SEQ ID NO: 1540464 - RNA, 19 nt, Artificial Sequence
  Description of Artificial Sequence: Synthetic oligonucleotide
aaguuuucaugcuaggcaa

SEQ ID NO: 1540465 - RNA, 19 nt, Artificial Sequence
  Description of Artificial Sequence: Synthetic oligonucleotide
aaaccaaucagcaaaggau

SEQ ID NO: 1540466 - RNA, 19 nt, Artificial Sequence
  Description of Artificial Sequence: Synthetic oligonucleotide
uuuacagagugcaauuagu

SEQ ID NO: 1540467 - RNA, 19 nt, Artificial Sequence
  Description of Artificial Sequence: Synthetic oligonucleotide
uaaauggaccagcaucggg

SEQ ID NO: 1540468 - RNA, 19 nt, Artificial Sequence
  Description of Artificial Sequence: Synthetic oligonucleotide
aaauacuugcacagugggc

SEQ ID NO: 1540469 - RNA, 19 nt, Artificial Sequence
  Description of Artificial Sequence: Synthetic oligonucleotide
gaaagguuuucuucuacug

SEQ ID NO: 1540470 - RNA, 19 nt, Artificial Sequence
  Description of Artificial Sequence: Synthetic oligonucleotide
uuugauucugagccuaaca

SEQ ID NO: 1540471 - RNA, 19 nt, Artificial Sequence
  Description of Artificial Sequence: Synthetic oligonucleotide
aauaaggaagucaauuagu

SEQ ID NO: 1540472 - RNA, 19 nt, Artificial Sequence
  Description of Artificial Sequence: Synthetic oligonucleotide
gaggccacaacuuuuauaa

SEQ ID NO: 1540473 - RNA, 19 nt, Artificial Sequence
  Description of Artificial Sequence: Synthetic oligonucleotide
uuacuuauggaaauauaua

SEQ ID NO: 1540474 - RNA, 19 nt, Artificial Sequence
  Description of Artificial Sequence: Synthetic oligonucleotide
gguaguauaauccaauauc

SEQ ID NO: 1540475 - RNA, 19 nt, Artificial Sequence
  Description of Artificial Sequence: Synthetic oligonucleotide
aacaggugcuacugagagc

SEQ ID NO: 1540476 - RNA, 19 nt, Artificial Sequence
  Description of Artificial Sequence: Synthetic oligonucleotide
aaagcuacauacaagcaaa

SEQ ID NO: 1540477 - RNA, 19 nt, Artificial Sequence
  Description of Artificial Sequence: Synthetic oligonucleotide
auggaaauauauauaugac

SEQ ID NO: 1540478 - RNA, 19 nt, Artificial Sequence
  Description of Artificial Sequence: Synthetic oligonucleotide
acucaauugugauuaaagu

SEQ ID NO: 1540479 - RNA, 19 nt, Artificial Sequence
  Description of Artificial Sequence: Synthetic oligonucleotide
uuuuauaaacaggugcuac

SEQ ID NO: 1540480 - RNA, 19 nt, Artificial Sequence
  Description of Artificial Sequence: Synthetic oligonucleotide
uuagaguagccccaucucu

SEQ ID NO: 1540481 - RNA, 19 nt, Artificial Sequence
  Description of Artificial Sequence: Synthetic oligonucleotide
gaugacguccucucggucc

SEQ ID NO: 1540482 - RNA, 19 nt, Artificial Sequence
  Description of Artificial Sequence: Synthetic oligonucleotide
agugucacaacaauuuauc

SEQ ID NO: 1540483 - RNA, 19 nt, Artificial Sequence
  Description of Artificial Sequence: Synthetic oligonucleotide
uaacacucaauugugauua

SEQ ID NO: 1540484 - RNA, 19 nt, Artificial Sequence
  Description of Artificial Sequence: Synthetic oligonucleotide
gaauucuuuacagagugca

SEQ ID NO: 1540485 - RNA, 19 nt, Artificial Sequence
  Description of Artificial Sequence: Synthetic oligonucleotide
ugcuaaucuaucagaaaac

SEQ ID NO: 1540486 - RNA, 19 nt, Artificial Sequence
  Description of Artificial Sequence: Synthetic oligonucleotide
aauuaguguuuuccacguc

SEQ ID NO: 1540487 - RNA, 19 nt, Artificial Sequence
  Description of Artificial Sequence: Synthetic oligonucleotide
cucaaaagcuacauacaag

SEQ ID NO: 1540488 - RNA, 19 nt, Artificial Sequence
  Description of Artificial Sequence: Synthetic oligonucleotide
agaguagccccaucucucc

SEQ ID NO: 1540489 - RNA, 19 nt, Artificial Sequence
  Description of Artificial Sequence: Synthetic oligonucleotide
acuuuuauaaacaggugcu

SEQ ID NO: 1540490 - RNA, 19 nt, Artificial Sequence
  Description of Artificial Sequence: Synthetic oligonucleotide
uaaaagauacguggggcag

SEQ ID NO: 1540491 - RNA, 19 nt, Artificial Sequence
  Description of Artificial Sequence: Synthetic oligonucleotide
aggaacgauauaugcacuc

SEQ ID NO: 1540492 - RNA, 19 nt, Artificial Sequence
  Description of Artificial Sequence: Synthetic oligonucleotide
cuagaguuugauucugagc

SEQ ID NO: 1540493 - RNA, 19 nt, Artificial Sequence
  Description of Artificial Sequence: Synthetic oligonucleotide
gcaauuaguguuuuccacg

SEQ ID NO: 1540494 - RNA, 19 nt, Artificial Sequence
  Description of Artificial Sequence: Synthetic oligonucleotide
uguuccuuagcaagguaca

SEQ ID NO: 1540495 - RNA, 19 nt, Artificial Sequence
  Description of Artificial Sequence: Synthetic oligonucleotide
caauguauaaaugaaggga

SEQ ID NO: 1540496 - RNA, 19 nt, Artificial Sequence
  Description of Artificial Sequence: Synthetic oligonucleotide
uucaugggguuuauaaaac

SEQ ID NO: 1540497 - RNA, 19 nt, Artificial Sequence
  Description of Artificial Sequence: Synthetic oligonucleotide
ggaaauauauauaugacaa

SEQ ID NO: 1540498 - RNA, 19 nt, Artificial Sequence
  Description of Artificial Sequence: Synthetic oligonucleotide
gauucugagccuaacacuc

SEQ ID NO: 1540499 - RNA, 19 nt, Artificial Sequence
  Description of Artificial Sequence: Synthetic oligonucleotide
ugagccuaacacucaauug

SEQ ID NO: 1540500 - RNA, 19 nt, Artificial Sequence
  Description of Artificial Sequence: Synthetic oligonucleotide
uggagcacacacacaaaag

SEQ ID NO: 1540501 - RNA, 19 nt, Artificial Sequence
  Description of Artificial Sequence: Synthetic oligonucleotide
uaagaccguuuccaaaacc

SEQ ID NO: 1540502 - RNA, 19 nt, Artificial Sequence
  Description of Artificial Sequence: Synthetic oligonucleotide
acggcuuuaaaagauacgu

SEQ ID NO: 1540503 - RNA, 19 nt, Artificial Sequence
  Description of Artificial Sequence: Synthetic oligonucleotide
guugacauuccagaccugg

SEQ ID NO: 1540504 - RNA, 19 nt, Artificial Sequence
  Description of Artificial Sequence: Synthetic oligonucleotide
aagaccguuuccaaaacca

SEQ ID NO: 1540505 - RNA, 19 nt, Artificial Sequence
  Description of Artificial Sequence: Synthetic oligonucleotide
cucccuccuguuaagaccg

SEQ ID NO: 1540506 - RNA, 19 nt, Artificial Sequence
  Description of Artificial Sequence: Synthetic oligonucleotide
acaguaugcaggcaagugu

SEQ ID NO: 1540507 - RNA, 19 nt, Artificial Sequence
  Description of Artificial Sequence: Synthetic oligonucleotide
aacgauauaugcacucaag

SEQ ID NO: 1540508 - RNA, 19 nt, Artificial Sequence
  Description of Artificial Sequence: Synthetic oligonucleotide
ucaugcuaggcaaaccaac

SEQ ID NO: 1540509 - RNA, 19 nt, Artificial Sequence
  Description of Artificial Sequence: Synthetic oligonucleotide
ugagagggagacaggagca

SEQ ID NO: 1540510 - RNA, 19 nt, Artificial Sequence
  Description of Artificial Sequence: Synthetic oligonucleotide
auacuugcacagugggccc

SEQ ID NO: 1540511 - RNA, 19 nt, Artificial Sequence
  Description of Artificial Sequence: Synthetic oligonucleotide
aaaggucuuaagaugcgug

SEQ ID NO: 1540512 - RNA, 19 nt, Artificial Sequence
  Description of Artificial Sequence: Synthetic oligonucleotide
uauagaagcuucacugguc

SEQ ID NO: 1540513 - RNA, 19 nt, Artificial Sequence
  Description of Artificial Sequence: Synthetic oligonucleotide
ugguaguauaauccaauau

SEQ ID NO: 1540514 - RNA, 19 nt, Artificial Sequence
  Description of Artificial Sequence: Synthetic oligonucleotide
auauaugcacucaagcuca

SEQ ID NO: 1540515 - RNA, 19 nt, Artificial Sequence
  Description of Artificial Sequence: Synthetic oligonucleotide
cuaguuagaaauacuugca

SEQ ID NO: 1540516 - RNA, 19 nt, Artificial Sequence
  Description of Artificial Sequence: Synthetic oligonucleotide
uuucuauggagcacacaca

SEQ ID NO: 1540517 - RNA, 19 nt, Artificial Sequence
  Description of Artificial Sequence: Synthetic oligonucleotide
ucaugggguuuauaaaaca

SEQ ID NO: 1540518 - RNA, 19 nt, Artificial Sequence
  Description of Artificial Sequence: Synthetic oligonucleotide
augggguuuauaaaacacg

SEQ ID NO: 1540519 - RNA, 19 nt, Artificial Sequence
  Description of Artificial Sequence: Synthetic oligonucleotide
uuugcuaaucuaucagaaa

SEQ ID NO: 1540520 - RNA, 19 nt, Artificial Sequence
  Description of Artificial Sequence: Synthetic oligonucleotide
agauacguggggcaggagu

SEQ ID NO: 1540521 - RNA, 19 nt, Artificial Sequence
  Description of Artificial Sequence: Synthetic oligonucleotide
ugcgugugcugucaauggg

SEQ ID NO: 1540522 - RNA, 19 nt, Artificial Sequence
  Description of Artificial Sequence: Synthetic oligonucleotide
ggaggauuagaguagcccc

SEQ ID NO: 1540523 - RNA, 19 nt, Artificial Sequence
  Description of Artificial Sequence: Synthetic oligonucleotide
aaucuaucagaaaacuaau

SEQ ID NO: 1540524 - RNA, 19 nt, Artificial Sequence
  Description of Artificial Sequence: Synthetic oligonucleotide
ucaacugugugagugccug

SEQ ID NO: 1540525 - RNA, 19 nt, Artificial Sequence
  Description of Artificial Sequence: Synthetic oligonucleotide
uuccagaccuggaugacgu

SEQ ID NO: 1540526 - RNA, 19 nt, Artificial Sequence
  Description of Artificial Sequence: Synthetic oligonucleotide
uuaagaccguuuccaaaac

SEQ ID NO: 1540527 - RNA, 19 nt, Artificial Sequence
  Description of Artificial Sequence: Synthetic oligonucleotide
accguuuccaaaaccaauc

SEQ ID NO: 1540528 - RNA, 19 nt, Artificial Sequence
  Description of Artificial Sequence: Synthetic oligonucleotide
aaauaaccaggaaguggac

SEQ ID NO: 1540529 - RNA, 19 nt, Artificial Sequence
  Description of Artificial Sequence: Synthetic oligonucleotide
augugggaggauuagagua

SEQ ID NO: 1540530 - RNA, 19 nt, Artificial Sequence
  Description of Artificial Sequence: Synthetic oligonucleotide
gaggcguugacauuccaga

SEQ ID NO: 1540531 - RNA, 19 nt, Artificial Sequence
  Description of Artificial Sequence: Synthetic oligonucleotide
agacaggagcaucugggag

SEQ ID NO: 1540532 - RNA, 19 nt, Artificial Sequence
  Description of Artificial Sequence: Synthetic oligonucleotide
guauaaaugaagggaaaga

SEQ ID NO: 1540533 - RNA, 19 nt, Artificial Sequence
  Description of Artificial Sequence: Synthetic oligonucleotide
gagccuaacacucaauugu

SEQ ID NO: 1540534 - RNA, 19 nt, Artificial Sequence
  Description of Artificial Sequence: Synthetic oligonucleotide
uuagaaauacuugcacagu

SEQ ID NO: 1540535 - RNA, 19 nt, Artificial Sequence
  Description of Artificial Sequence: Synthetic oligonucleotide
gauuagaguagccccaucu

SEQ ID NO: 1540536 - RNA, 19 nt, Artificial Sequence
  Description of Artificial Sequence: Synthetic oligonucleotide
gaugcgugugcugucaaug

SEQ ID NO: 1540537 - RNA, 19 nt, Artificial Sequence
  Description of Artificial Sequence: Synthetic oligonucleotide
accccuaucacuucgucau

SEQ ID NO: 1540538 - RNA, 19 nt, Artificial Sequence
  Description of Artificial Sequence: Synthetic oligonucleotide
aaccaauauuucuuuggua

SEQ ID NO: 1540539 - RNA, 19 nt, Artificial Sequence
  Description of Artificial Sequence: Synthetic oligonucleotide
uagaguagccccaucucuc

SEQ ID NO: 1540540 - RNA, 19 nt, Artificial Sequence
  Description of Artificial Sequence: Synthetic oligonucleotide
auaucuaacaacacaguua

SEQ ID NO: 1540541 - RNA, 19 nt, Artificial Sequence
  Description of Artificial Sequence: Synthetic oligonucleotide
gcuuuaaaagauacguggg

SEQ ID NO: 1540542 - RNA, 19 nt, Artificial Sequence
  Description of Artificial Sequence: Synthetic oligonucleotide
guaguauaauccaauaucu

SEQ ID NO: 1540543 - RNA, 19 nt, Artificial Sequence
  Description of Artificial Sequence: Synthetic oligonucleotide
aaagauacguggggcagga

SEQ ID NO: 1540544 - RNA, 19 nt, Artificial Sequence
  Description of Artificial Sequence: Synthetic oligonucleotide
aaccaaucagcaaaggaua

SEQ ID NO: 1540545 - RNA, 19 nt, Artificial Sequence
  Description of Artificial Sequence: Synthetic oligonucleotide
aggcguugacauuccagac

SEQ ID NO: 1540546 - RNA, 19 nt, Artificial Sequence
  Description of Artificial Sequence: Synthetic oligonucleotide
uuuucaugcuaggcaaacc

SEQ ID NO: 1540547 - RNA, 19 nt, Artificial Sequence
  Description of Artificial Sequence: Synthetic oligonucleotide
ucuauggagcacacacaca

SEQ ID NO: 1540548 - RNA, 19 nt, Artificial Sequence
  Description of Artificial Sequence: Synthetic oligonucleotide
aagugucacaacaauuuau

SEQ ID NO: 1540549 - RNA, 19 nt, Artificial Sequence
  Description of Artificial Sequence: Synthetic oligonucleotide
uaugcaggcaagugucaca

SEQ ID NO: 1540550 - RNA, 19 nt, Artificial Sequence
  Description of Artificial Sequence: Synthetic oligonucleotide
ugggagaaguuguaacacu

SEQ ID NO: 1540551 - RNA, 19 nt, Artificial Sequence
  Description of Artificial Sequence: Synthetic oligonucleotide
cucacaguaugcaggcaag

SEQ ID NO: 1540552 - RNA, 19 nt, Artificial Sequence
  Description of Artificial Sequence: Synthetic oligonucleotide
ggccacaacuuuuauaaac

SEQ ID NO: 1540553 - RNA, 19 nt, Artificial Sequence
  Description of Artificial Sequence: Synthetic oligonucleotide
caugcuaggcaaaccaaca

SEQ ID NO: 1540554 - RNA, 19 nt, Artificial Sequence
  Description of Artificial Sequence: Synthetic oligonucleotide
agaguuugauucugagccu

SEQ ID NO: 1540555 - RNA, 19 nt, Artificial Sequence
  Description of Artificial Sequence: Synthetic oligonucleotide
gagaaauauagaagcuuca

SEQ ID NO: 1540556 - RNA, 19 nt, Artificial Sequence
  Description of Artificial Sequence: Synthetic oligonucleotide
uuuuccuuauacugcuuuu

SEQ ID NO: 1540557 - RNA, 19 nt, Artificial Sequence
  Description of Artificial Sequence: Synthetic oligonucleotide
cuuggcuaggcuaggcuuc

SEQ ID NO: 1540558 - RNA, 19 nt, Artificial Sequence
  Description of Artificial Sequence: Synthetic oligonucleotide
uaugguuucuauggagcac

SEQ ID NO: 1540559 - RNA, 19 nt, Artificial Sequence
  Description of Artificial Sequence: Synthetic oligonucleotide
uccuagaguuugauucuga

SEQ ID NO: 1540560 - RNA, 19 nt, Artificial Sequence
  Description of Artificial Sequence: Synthetic oligonucleotide
aaggaggcguugacauucc

SEQ ID NO: 1540561 - RNA, 19 nt, Artificial Sequence
  Description of Artificial Sequence: Synthetic oligonucleotide
uucucaagcacaguagcuu

SEQ ID NO: 1540562 - RNA, 19 nt, Artificial Sequence
  Description of Artificial Sequence: Synthetic oligonucleotide
cuaaucuaucagaaaacua

SEQ ID NO: 1540563 - RNA, 19 nt, Artificial Sequence
  Description of Artificial Sequence: Synthetic oligonucleotide
uaagaugcgugugcuguca

SEQ ID NO: 1540564 - RNA, 19 nt, Artificial Sequence
  Description of Artificial Sequence: Synthetic oligonucleotide
gaacgauauaugcacucaa

SEQ ID NO: 1540565 - RNA, 19 nt, Artificial Sequence
  Description of Artificial Sequence: Synthetic oligonucleotide
gaaacaaugcccggcucac

SEQ ID NO: 1540566 - RNA, 19 nt, Artificial Sequence
  Description of Artificial Sequence: Synthetic oligonucleotide
auccaauaucuaacaacac

SEQ ID NO: 1540567 - RNA, 19 nt, Artificial Sequence
  Description of Artificial Sequence: Synthetic oligonucleotide
agaaguuguaacacucuga

SEQ ID NO: 1540568 - RNA, 19 nt, Artificial Sequence
  Description of Artificial Sequence: Synthetic oligonucleotide
ggucuuaagaugcgugugc

SEQ ID NO: 1540569 - RNA, 19 nt, Artificial Sequence
  Description of Artificial Sequence: Synthetic oligonucleotide
cuaaauggaccagcaucgg

SEQ ID NO: 1540570 - RNA, 19 nt, Artificial Sequence
  Description of Artificial Sequence: Synthetic oligonucleotide
cucaauugugauuaaaguu

SEQ ID NO: 1540571 - RNA, 19 nt, Artificial Sequence
  Description of Artificial Sequence: Synthetic oligonucleotide
uuaagaugcgugugcuguc

SEQ ID NO: 1540572 - RNA, 19 nt, Artificial Sequence
  Description of Artificial Sequence: Synthetic oligonucleotide
cucgaccccuaucacuucg

SEQ ID NO: 1540573 - RNA, 19 nt, Artificial Sequence
  Description of Artificial Sequence: Synthetic oligonucleotide
gcuacugagagccauuuaa

SEQ ID NO: 1540574 - RNA, 19 nt, Artificial Sequence
  Description of Artificial Sequence: Synthetic oligonucleotide
guguuccuuagcaagguac

SEQ ID NO: 1540575 - RNA, 19 nt, Artificial Sequence
  Description of Artificial Sequence: Synthetic oligonucleotide
acacucgaccccuaucacu

SEQ ID NO: 1540576 - RNA, 19 nt, Artificial Sequence
  Description of Artificial Sequence: Synthetic oligonucleotide
ggauucuaguuagaaauac

SEQ ID NO: 1540577 - RNA, 19 nt, Artificial Sequence
  Description of Artificial Sequence: Synthetic oligonucleotide
guacaguggagcuacugaa

SEQ ID NO: 1540578 - RNA, 19 nt, Artificial Sequence
  Description of Artificial Sequence: Synthetic oligonucleotide
agaagcuucacugguccca

SEQ ID NO: 1540579 - RNA, 19 nt, Artificial Sequence
  Description of Artificial Sequence: Synthetic oligonucleotide
uagaagcuucacugguccc

SEQ ID NO: 1540580 - RNA, 19 nt, Artificial Sequence
  Description of Artificial Sequence: Synthetic oligonucleotide
uucggcaagucuucucuuc

SEQ ID NO: 1540581 - RNA, 19 nt, Artificial Sequence
  Description of Artificial Sequence: Synthetic oligonucleotide
ggcguugacauuccagacc

SEQ ID NO: 1540582 - RNA, 19 nt, Artificial Sequence
  Description of Artificial Sequence: Synthetic oligonucleotide
uacaugugggaggauuaga

SEQ ID NO: 1540583 - RNA, 19 nt, Artificial Sequence
  Description of Artificial Sequence: Synthetic oligonucleotide
gggaaagacaacccugcug

SEQ ID NO: 1540584 - RNA, 19 nt, Artificial Sequence
  Description of Artificial Sequence: Synthetic oligonucleotide
aacacucaauugugauuaa

SEQ ID NO: 1540585 - RNA, 19 nt, Artificial Sequence
  Description of Artificial Sequence: Synthetic oligonucleotide
ugcaaguggaggccacaac

SEQ ID NO: 1540586 - RNA, 19 nt, Artificial Sequence
  Description of Artificial Sequence: Synthetic oligonucleotide
auuguuugcugaguguuua

SEQ ID NO: 1540587 - RNA, 19 nt, Artificial Sequence
  Description of Artificial Sequence: Synthetic oligonucleotide
cacaguuauaggaacgaua

SEQ ID NO: 1540588 - RNA, 19 nt, Artificial Sequence
  Description of Artificial Sequence: Synthetic oligonucleotide
gaggauuagaguagcccca

SEQ ID NO: 1540589 - RNA, 19 nt, Artificial Sequence
  Description of Artificial Sequence: Synthetic oligonucleotide
cagcucuauauccaggcca

SEQ ID NO: 1540590 - RNA, 19 nt, Artificial Sequence
  Description of Artificial Sequence: Synthetic oligonucleotide
auaugcacucaagcucaac

SEQ ID NO: 1540591 - RNA, 19 nt, Artificial Sequence
  Description of Artificial Sequence: Synthetic oligonucleotide
ccacaacuuuuauaaacag

SEQ ID NO: 1540592 - RNA, 19 nt, Artificial Sequence
  Description of Artificial Sequence: Synthetic oligonucleotide
agccuaacacucaauugug

SEQ ID NO: 1540593 - RNA, 19 nt, Artificial Sequence
  Description of Artificial Sequence: Synthetic oligonucleotide
ccuagaguuugauucugag

SEQ ID NO: 1540594 - RNA, 19 nt, Artificial Sequence
  Description of Artificial Sequence: Synthetic oligonucleotide
gaccccuaucacuucguca

SEQ ID NO: 1540595 - RNA, 19 nt, Artificial Sequence
  Description of Artificial Sequence: Synthetic oligonucleotide
gggaggauuagaguagccc

SEQ ID NO: 1540596 - RNA, 19 nt, Artificial Sequence
  Description of Artificial Sequence: Synthetic oligonucleotide
gaagcuucacuggucccac

SEQ ID NO: 1540597 - RNA, 19 nt, Artificial Sequence
  Description of Artificial Sequence: Synthetic oligonucleotide
aagaugcgugugcugucaa

SEQ ID NO: 1540598 - RNA, 19 nt, Artificial Sequence
  Description of Artificial Sequence: Synthetic oligonucleotide
augcccggcucacaguaug

SEQ ID NO: 1540599 - RNA, 19 nt, Artificial Sequence
  Description of Artificial Sequence: Synthetic oligonucleotide
agggaaagacaacccugcu

SEQ ID NO: 1540600 - RNA, 19 nt, Artificial Sequence
  Description of Artificial Sequence: Synthetic oligonucleotide
uggaccagcaucgggcuuc

SEQ ID NO: 1540601 - RNA, 19 nt, Artificial Sequence
  Description of Artificial Sequence: Synthetic oligonucleotide
guccucucggucccgacac

SEQ ID NO: 1540602 - RNA, 19 nt, Artificial Sequence
  Description of Artificial Sequence: Synthetic oligonucleotide
gacacaguugagagggaga

SEQ ID NO: 1540603 - RNA, 19 nt, Artificial Sequence
  Description of Artificial Sequence: Synthetic oligonucleotide
caguugagagggagacagg

SEQ ID NO: 1540604 - RNA, 19 nt, Artificial Sequence
  Description of Artificial Sequence: Synthetic oligonucleotide
caauaucuaacaacacagu

SEQ ID NO: 1540605 - RNA, 19 nt, Artificial Sequence
  Description of Artificial Sequence: Synthetic oligonucleotide
ccggcucacaguaugcagg

SEQ ID NO: 1540606 - RNA, 19 nt, Artificial Sequence
  Description of Artificial Sequence: Synthetic oligonucleotide
aucuaucagaaaacuaauu

SEQ ID NO: 1540607 - RNA, 19 nt, Artificial Sequence
  Description of Artificial Sequence: Synthetic oligonucleotide
ugcccggcucacaguaugc

SEQ ID NO: 1540608 - RNA, 19 nt, Artificial Sequence
  Description of Artificial Sequence: Synthetic oligonucleotide
auacguggggcaggaguuc

SEQ ID NO: 1540609 - RNA, 19 nt, Artificial Sequence
  Description of Artificial Sequence: Synthetic oligonucleotide
guuugauucugagccuaac

SEQ ID NO: 1540610 - RNA, 19 nt, Artificial Sequence
  Description of Artificial Sequence: Synthetic oligonucleotide
ucgaccccuaucacuucgu

SEQ ID NO: 1540611 - RNA, 19 nt, Artificial Sequence
  Description of Artificial Sequence: Synthetic oligonucleotide
gaguuugauucugagccua

SEQ ID NO: 1540612 - RNA, 19 nt, Artificial Sequence
  Description of Artificial Sequence: Synthetic oligonucleotide
gggagaaguuguaacacuc

SEQ ID NO: 1540613 - RNA, 19 nt, Artificial Sequence
  Description of Artificial Sequence: Synthetic oligonucleotide
agcucuauauccaggccaa

SEQ ID NO: 1540614 - RNA, 19 nt, Artificial Sequence
  Description of Artificial Sequence: Synthetic oligonucleotide
acaaugcccggcucacagu

SEQ ID NO: 1540615 - RNA, 19 nt, Artificial Sequence
  Description of Artificial Sequence: Synthetic oligonucleotide
uacguggggcaggaguuca

SEQ ID NO: 1540616 - RNA, 19 nt, Artificial Sequence
  Description of Artificial Sequence: Synthetic oligonucleotide
cuuuuauaaacaggugcua

SEQ ID NO: 1540617 - RNA, 19 nt, Artificial Sequence
  Description of Artificial Sequence: Synthetic oligonucleotide
agcccuguggcagguguuc

SEQ ID NO: 1540618 - RNA, 19 nt, Artificial Sequence
  Description of Artificial Sequence: Synthetic oligonucleotide
accaaucagcaaaggauaa

SEQ ID NO: 1540619 - RNA, 19 nt, Artificial Sequence
  Description of Artificial Sequence: Synthetic oligonucleotide
aguaugcaggcaaguguca

SEQ ID NO: 1540620 - RNA, 19 nt, Artificial Sequence
  Description of Artificial Sequence: Synthetic oligonucleotide
cacacucgaccccuaucac

SEQ ID NO: 1540621 - RNA, 19 nt, Artificial Sequence
  Description of Artificial Sequence: Synthetic oligonucleotide
gcaaguggaggccacaacu

SEQ ID NO: 1540622 - RNA, 19 nt, Artificial Sequence
  Description of Artificial Sequence: Synthetic oligonucleotide
gucccgacacucacacucg

SEQ ID NO: 1540623 - RNA, 19 nt, Artificial Sequence
  Description of Artificial Sequence: Synthetic oligonucleotide
ugcuacugagagccauuua

SEQ ID NO: 1540624 - RNA, 19 nt, Artificial Sequence
  Description of Artificial Sequence: Synthetic oligonucleotide
ccuguuaagaccguuucca

SEQ ID NO: 1540625 - RNA, 19 nt, Artificial Sequence
  Description of Artificial Sequence: Synthetic oligonucleotide
ggaggcguugacauuccag

SEQ ID NO: 1540626 - RNA, 19 nt, Artificial Sequence
  Description of Artificial Sequence: Synthetic oligonucleotide
cuguuaagaccguuuccaa

SEQ ID NO: 1540627 - RNA, 19 nt, Artificial Sequence
  Description of Artificial Sequence: Synthetic oligonucleotide
ggaacgauauaugcacuca

SEQ ID NO: 1540628 - RNA, 19 nt, Artificial Sequence
  Description of Artificial Sequence: Synthetic oligonucleotide
acacucaauugugauuaaa

SEQ ID NO: 1540629 - RNA, 19 nt, Artificial Sequence
  Description of Artificial Sequence: Synthetic oligonucleotide
gcuaaucuaucagaaaacu

SEQ ID NO: 1540630 - RNA, 19 nt, Artificial Sequence
  Description of Artificial Sequence: Synthetic oligonucleotide
aagauacguggggcaggag

SEQ ID NO: 1540631 - RNA, 19 nt, Artificial Sequence
  Description of Artificial Sequence: Synthetic oligonucleotide
uggaggccacaacuuuuau

SEQ ID NO: 1540632 - RNA, 19 nt, Artificial Sequence
  Description of Artificial Sequence: Synthetic oligonucleotide
cuaacacucaauugugauu

SEQ ID NO: 1540633 - RNA, 19 nt, Artificial Sequence
  Description of Artificial Sequence: Synthetic oligonucleotide
cuucuacugaaaccaauau

SEQ ID NO: 1540634 - RNA, 19 nt, Artificial Sequence
  Description of Artificial Sequence: Synthetic oligonucleotide
acacaguuauaggaacgau

SEQ ID NO: 1540635 - RNA, 19 nt, Artificial Sequence
  Description of Artificial Sequence: Synthetic oligonucleotide
acaguagcuuugcccacua

SEQ ID NO: 1540636 - RNA, 19 nt, Artificial Sequence
  Description of Artificial Sequence: Synthetic oligonucleotide
caaugcccggcucacagua

SEQ ID NO: 1540637 - RNA, 19 nt, Artificial Sequence
  Description of Artificial Sequence: Synthetic oligonucleotide
aggauuagaguagccccau

SEQ ID NO: 1540638 - RNA, 19 nt, Artificial Sequence
  Description of Artificial Sequence: Synthetic oligonucleotide
cuaggcaaaccaacaauuu

SEQ ID NO: 1540639 - RNA, 19 nt, Artificial Sequence
  Description of Artificial Sequence: Synthetic oligonucleotide
gauacguggggcaggaguu

SEQ ID NO: 1540640 - RNA, 19 nt, Artificial Sequence
  Description of Artificial Sequence: Synthetic oligonucleotide
cuucgucaucugcugccac

SEQ ID NO: 1540641 - RNA, 19 nt, Artificial Sequence
  Description of Artificial Sequence: Synthetic oligonucleotide
ccagaccuggaugacgucc

SEQ ID NO: 1540642 - RNA, 19 nt, Artificial Sequence
  Description of Artificial Sequence: Synthetic oligonucleotide
cuucacaggcagcccugug

SEQ ID NO: 1540643 - RNA, 19 nt, Artificial Sequence
  Description of Artificial Sequence: Synthetic oligonucleotide
uagccccaucucuccacug

SEQ ID NO: 1540644 - RNA, 19 nt, Artificial Sequence
  Description of Artificial Sequence: Synthetic oligonucleotide
aggccacaacuuuuauaaa

SEQ ID NO: 1540645 - RNA, 19 nt, Artificial Sequence
  Description of Artificial Sequence: Synthetic oligonucleotide
aggccccuuucacagggaa

SEQ ID NO: 1540646 - RNA, 19 nt, Artificial Sequence
  Description of Artificial Sequence: Synthetic oligonucleotide
gucuuaagaugcgugugcu

SEQ ID NO: 1540647 - RNA, 19 nt, Artificial Sequence
  Description of Artificial Sequence: Synthetic oligonucleotide
aguuugauucugagccuaa

SEQ ID NO: 1540648 - RNA, 19 nt, Artificial Sequence
  Description of Artificial Sequence: Synthetic oligonucleotide
gugagugccugggugcuuc

SEQ ID NO: 1540649 - RNA, 19 nt, Artificial Sequence
  Description of Artificial Sequence: Synthetic oligonucleotide
cugagccuaacacucaauu

SEQ ID NO: 1540650 - RNA, 19 nt, Artificial Sequence
  Description of Artificial Sequence: Synthetic oligonucleotide
agagugcaauuaguguuuu

SEQ ID NO: 1540651 - RNA, 19 nt, Artificial Sequence
  Description of Artificial Sequence: Synthetic oligonucleotide
ccuaucacuucgucaucug

SEQ ID NO: 1540652 - RNA, 19 nt, Artificial Sequence
  Description of Artificial Sequence: Synthetic oligonucleotide
cagagugcaauuaguguuu

SEQ ID NO: 1540653 - RNA, 19 nt, Artificial Sequence
  Description of Artificial Sequence: Synthetic oligonucleotide
cacucgaccccuaucacuu

SEQ ID NO: 1540654 - RNA, 19 nt, Artificial Sequence
  Description of Artificial Sequence: Synthetic oligonucleotide
aaugcccggcucacaguau

SEQ ID NO: 1540655 - RNA, 19 nt, Artificial Sequence
  Description of Artificial Sequence: Synthetic oligonucleotide
aggaggcguugacauucca

SEQ ID NO: 1540656 - RNA, 19 nt, Artificial Sequence
  Description of Artificial Sequence: Synthetic oligonucleotide
ugcccacuaaggaggcguu

SEQ ID NO: 1540657 - RNA, 19 nt, Artificial Sequence
  Description of Artificial Sequence: Synthetic oligonucleotide
cgauauaugcacucaagcu

SEQ ID NO: 1540658 - RNA, 19 nt, Artificial Sequence
  Description of Artificial Sequence: Synthetic oligonucleotide
gaccguuuccaaaaccaau

SEQ ID NO: 1540659 - RNA, 19 nt, Artificial Sequence
  Description of Artificial Sequence: Synthetic oligonucleotide
caaauccuagaguuugauu

SEQ ID NO: 1540660 - RNA, 19 nt, Artificial Sequence
  Description of Artificial Sequence: Synthetic oligonucleotide
uccagaccuggaugacguc

SEQ ID NO: 1540661 - RNA, 19 nt, Artificial Sequence
  Description of Artificial Sequence: Synthetic oligonucleotide
ccacguccaccuucaaaag

SEQ ID NO: 1540662 - RNA, 19 nt, Artificial Sequence
  Description of Artificial Sequence: Synthetic oligonucleotide
ggaggccacaacuuuuaua

SEQ ID NO: 1540663 - RNA, 19 nt, Artificial Sequence
  Description of Artificial Sequence: Synthetic oligonucleotide
gccccuuucacagggaaaa

SEQ ID NO: 1540664 - RNA, 19 nt, Artificial Sequence
  Description of Artificial Sequence: Synthetic oligonucleotide
ccguuuccaaaaccaauca

SEQ ID NO: 1540665 - RNA, 19 nt, Artificial Sequence
  Description of Artificial Sequence: Synthetic oligonucleotide
caauggguaugguuucuau

SEQ ID NO: 1540666 - RNA, 19 nt, Artificial Sequence
  Description of Artificial Sequence: Synthetic oligonucleotide
caguuauaggaacgauaua

SEQ ID NO: 1540667 - RNA, 19 nt, Artificial Sequence
  Description of Artificial Sequence: Synthetic oligonucleotide
cccggcucacaguaugcag

SEQ ID NO: 1540668 - RNA, 19 nt, Artificial Sequence
  Description of Artificial Sequence: Synthetic oligonucleotide
ucccuccuguuaagaccgu

SEQ ID NO: 1540669 - RNA, 19 nt, Artificial Sequence
  Description of Artificial Sequence: Synthetic oligonucleotide
ggauuagaguagccccauc

SEQ ID NO: 1540670 - RNA, 19 nt, Artificial Sequence
  Description of Artificial Sequence: Synthetic oligonucleotide
caacagugcaagggaauua

SEQ ID NO: 1540671 - RNA, 19 nt, Artificial Sequence
  Description of Artificial Sequence: Synthetic oligonucleotide
gcuaggcaaaccaacaauu

SEQ ID NO: 1540672 - RNA, 19 nt, Artificial Sequence
  Description of Artificial Sequence: Synthetic oligonucleotide
gcugaguguuuagcagugc

SEQ ID NO: 1540673 - RNA, 19 nt, Artificial Sequence
  Description of Artificial Sequence: Synthetic oligonucleotide
ccccaucucuccacuggcc

SEQ ID NO: 1540674 - RNA, 19 nt, Artificial Sequence
  Description of Artificial Sequence: Synthetic oligonucleotide
gugcaaguggaggccacaa

SEQ ID NO: 1540675 - RNA, 19 nt, Artificial Sequence
  Description of Artificial Sequence: Synthetic oligonucleotide
ggcuucggcaagucuucuc

SEQ ID NO: 1540676 - RNA, 19 nt, Artificial Sequence
  Description of Artificial Sequence: Synthetic oligonucleotide
gccuaacacucaauuguga

SEQ ID NO: 1540677 - RNA, 19 nt, Artificial Sequence
  Description of Artificial Sequence: Synthetic oligonucleotide
gguguuccuuagcaaggua

SEQ ID NO: 1540678 - RNA, 19 nt, Artificial Sequence
  Description of Artificial Sequence: Synthetic oligonucleotide
gggcaggaguucauggauc

SEQ ID NO: 1540679 - RNA, 19 nt, Artificial Sequence
  Description of Artificial Sequence: Synthetic oligonucleotide
cucaacugugugagugccu

SEQ ID NO: 1540680 - RNA, 19 nt, Artificial Sequence
  Description of Artificial Sequence: Synthetic oligonucleotide
gacguccucucggucccga

SEQ ID NO: 1540681 - RNA, 19 nt, Artificial Sequence
  Description of Artificial Sequence: Synthetic oligonucleotide
cccaaauccuagaguuuga

SEQ ID NO: 1540682 - RNA, 19 nt, Artificial Sequence
  Description of Artificial Sequence: Synthetic oligonucleotide
cuaaggaggcguugacauu

SEQ ID NO: 1540683 - RNA, 19 nt, Artificial Sequence
  Description of Artificial Sequence: Synthetic oligonucleotide
caagcucaacugugugagu

SEQ ID NO: 1540684 - RNA, 19 nt, Artificial Sequence
  Description of Artificial Sequence: Synthetic oligonucleotide
gugugcugucaauggguau

SEQ ID NO: 1540685 - RNA, 19 nt, Artificial Sequence
  Description of Artificial Sequence: Synthetic oligonucleotide
gcaagguacaguggagcua

SEQ ID NO: 1540686 - RNA, 19 nt, Artificial Sequence
  Description of Artificial Sequence: Synthetic oligonucleotide
ggcaaaccaacaauuucuu

SEQ ID NO: 1540687 - RNA, 19 nt, Artificial Sequence
  Description of Artificial Sequence: Synthetic oligonucleotide
ccaaucagcaaaggauaaa

SEQ ID NO: 1540688 - RNA, 19 nt, Artificial Sequence
  Description of Artificial Sequence: Synthetic oligonucleotide
caggugcuacugagagcca

SEQ ID NO: 1540689 - RNA, 19 nt, Artificial Sequence
  Description of Artificial Sequence: Synthetic oligonucleotide
cggcaagucuucucuucac

SEQ ID NO: 1540690 - RNA, 19 nt, Artificial Sequence
  Description of Artificial Sequence: Synthetic oligonucleotide
aggccagagugggauucua

SEQ ID NO: 1540691 - RNA, 19 nt, Artificial Sequence
  Description of Artificial Sequence: Synthetic oligonucleotide
gugcuacugagagccauuu

SEQ ID NO: 1540692 - RNA, 19 nt, Artificial Sequence
  Description of Artificial Sequence: Synthetic oligonucleotide
ccccuaucacuucgucauc

SEQ ID NO: 1540693 - RNA, 19 nt, Artificial Sequence
  Description of Artificial Sequence: Synthetic oligonucleotide
ggcuaggcuuccuccuggu

SEQ ID NO: 1540694 - RNA, 19 nt, Artificial Sequence
  Description of Artificial Sequence: Synthetic oligonucleotide
cccuaucacuucgucaucu

SEQ ID NO: 1540695 - RNA, 19 nt, Artificial Sequence
  Description of Artificial Sequence: Synthetic oligonucleotide
gcccggcucacaguaugca

SEQ ID NO: 1540696 - RNA, 19 nt, Artificial Sequence
  Description of Artificial Sequence: Synthetic oligonucleotide
ccuccuguuaagaccguuu

SEQ ID NO: 1540697 - RNA, 19 nt, Artificial Sequence
  Description of Artificial Sequence: Synthetic oligonucleotide
ggccccuuucacagggaaa

SEQ ID NO: 1540698 - RNA, 19 nt, Artificial Sequence
  Description of Artificial Sequence: Synthetic oligonucleotide
ccaaauccuagaguuugau

SEQ ID NO: 1540699 - RNA, 19 nt, Artificial Sequence
  Description of Artificial Sequence: Synthetic oligonucleotide
ggugcuacugagagccauu

SEQ ID NO: 1540700 - RNA, 19 nt, Artificial Sequence
  Description of Artificial Sequence: Synthetic oligonucleotide
cguccucucggucccgaca

SEQ ID NO: 1540701 - RNA, 19 nt, Artificial Sequence
  Description of Artificial Sequence: Synthetic oligonucleotide
gcaucgggcuucggcaagu

SEQ ID NO: 1540702 - RNA, 19 nt, Artificial Sequence
  Description of Artificial Sequence: Synthetic oligonucleotide
cagcccuguggcagguguu

SEQ ID NO: 1540703 - RNA, 19 nt, Artificial Sequence
  Description of Artificial Sequence: Synthetic oligonucleotide
gggcuucggcaagucuucu

SEQ ID NO: 1540704 - RNA, 19 nt, Artificial Sequence
  Description of Artificial Sequence: Synthetic oligonucleotide
ccccuuucacagggaaaau

SEQ ID NO: 1540705 - RNA, 19 nt, Artificial Sequence
  Description of Artificial Sequence: Synthetic oligonucleotide
cccuccuguuaagaccguu

SEQ ID NO: 1540706 - RNA, 19 nt, Artificial Sequence
  Description of Artificial Sequence: Synthetic oligonucleotide
aauacaugcaccaaaguug

SEQ ID NO: 1540707 - RNA, 19 nt, Artificial Sequence
  Description of Artificial Sequence: Synthetic oligonucleotide
uuaacgagagucuguaucg

SEQ ID NO: 1540708 - RNA, 19 nt, Artificial Sequence
  Description of Artificial Sequence: Synthetic oligonucleotide
acuaugaccacguugaacu

SEQ ID NO: 1540709 - RNA, 19 nt, Artificial Sequence
  Description of Artificial Sequence: Synthetic oligonucleotide
auuaacgagagucuguauc

SEQ ID NO: 1540710 - RNA, 19 nt, Artificial Sequence
  Description of Artificial Sequence: Synthetic oligonucleotide
ugacauuacuugaaggugg

SEQ ID NO: 1540711 - RNA, 19 nt, Artificial Sequence
  Description of Artificial Sequence: Synthetic oligonucleotide
agaaucacugucauaaugc

SEQ ID NO: 1540712 - RNA, 19 nt, Artificial Sequence
  Description of Artificial Sequence: Synthetic oligonucleotide
aaauacaugcaccaaaguu

SEQ ID NO: 1540713 - RNA, 19 nt, Artificial Sequence
  Description of Artificial Sequence: Synthetic oligonucleotide
auuagaaucacugucauaa

SEQ ID NO: 1540714 - RNA, 19 nt, Artificial Sequence
  Description of Artificial Sequence: Synthetic oligonucleotide
uaucuugccaucaugacaa

SEQ ID NO: 1540715 - RNA, 19 nt, Artificial Sequence
  Description of Artificial Sequence: Synthetic oligonucleotide
uucacuugcacaaccagcc

SEQ ID NO: 1540716 - RNA, 19 nt, Artificial Sequence
  Description of Artificial Sequence: Synthetic oligonucleotide
uguaggaaauguuucuggg

SEQ ID NO: 1540717 - RNA, 19 nt, Artificial Sequence
  Description of Artificial Sequence: Synthetic oligonucleotide
uuuguaaugccuugccagg

SEQ ID NO: 1540718 - RNA, 19 nt, Artificial Sequence
  Description of Artificial Sequence: Synthetic oligonucleotide
uaggaaauguuucugggga

SEQ ID NO: 1540719 - RNA, 19 nt, Artificial Sequence
  Description of Artificial Sequence: Synthetic oligonucleotide
aucaugacaauuaaaauga

SEQ ID NO: 1540720 - RNA, 19 nt, Artificial Sequence
  Description of Artificial Sequence: Synthetic oligonucleotide
cuuaauuuucauagcuugg

SEQ ID NO: 1540721 - RNA, 19 nt, Artificial Sequence
  Description of Artificial Sequence: Synthetic oligonucleotide
uuuagaagcuucgacagug

SEQ ID NO: 1540722 - RNA, 19 nt, Artificial Sequence
  Description of Artificial Sequence: Synthetic oligonucleotide
ugccaggccaccauuaacg

SEQ ID NO: 1540723 - RNA, 19 nt, Artificial Sequence
  Description of Artificial Sequence: Synthetic oligonucleotide
aacgagagucuguaucggc

SEQ ID NO: 1540724 - RNA, 19 nt, Artificial Sequence
  Description of Artificial Sequence: Synthetic oligonucleotide
guaaaccucaaccacagac

SEQ ID NO: 1540725 - RNA, 19 nt, Artificial Sequence
  Description of Artificial Sequence: Synthetic oligonucleotide
  modified_base (17)..(17): a, c, u, g, unknown or other
aucuuguacagccugangu

SEQ ID NO: 1540726 - RNA, 19 nt, Artificial Sequence
  Description of Artificial Sequence: Synthetic oligonucleotide
uagaaucacugucauaaug

SEQ ID NO: 1540727 - RNA, 19 nt, Artificial Sequence
  Description of Artificial Sequence: Synthetic oligonucleotide
aggaauguuguucucuggg

SEQ ID NO: 1540728 - RNA, 19 nt, Artificial Sequence
  Description of Artificial Sequence: Synthetic oligonucleotide
acaauacugcuguagagug

SEQ ID NO: 1540729 - RNA, 19 nt, Artificial Sequence
  Description of Artificial Sequence: Synthetic oligonucleotide
uuuccuacuaaggaaacca

SEQ ID NO: 1540730 - RNA, 19 nt, Artificial Sequence
  Description of Artificial Sequence: Synthetic oligonucleotide
aaaacaggaggguugucgu

SEQ ID NO: 1540731 - RNA, 19 nt, Artificial Sequence
  Description of Artificial Sequence: Synthetic oligonucleotide
uagcuaauaucaaaugugu

SEQ ID NO: 1540732 - RNA, 19 nt, Artificial Sequence
  Description of Artificial Sequence: Synthetic oligonucleotide
ugagagucaaucacaguug

SEQ ID NO: 1540733 - RNA, 19 nt, Artificial Sequence
  Description of Artificial Sequence: Synthetic oligonucleotide
ucauaaugccagcaaacca

SEQ ID NO: 1540734 - RNA, 19 nt, Artificial Sequence
  Description of Artificial Sequence: Synthetic oligonucleotide
gcuaauaucaaauguguug

SEQ ID NO: 1540735 - RNA, 19 nt, Artificial Sequence
  Description of Artificial Sequence: Synthetic oligonucleotide
aacacuguagcuacuacug

SEQ ID NO: 1540736 - RNA, 19 nt, Artificial Sequence
  Description of Artificial Sequence: Synthetic oligonucleotide
aguaucuugccaucaugac

SEQ ID NO: 1540737 - RNA, 19 nt, Artificial Sequence
  Description of Artificial Sequence: Synthetic oligonucleotide
cauaccucuguccauuugg

SEQ ID NO: 1540738 - RNA, 19 nt, Artificial Sequence
  Description of Artificial Sequence: Synthetic oligonucleotide
ugucauaaugccagcaaac

SEQ ID NO: 1540739 - RNA, 19 nt, Artificial Sequence
  Description of Artificial Sequence: Synthetic oligonucleotide
aaacuucugacuaucugag

SEQ ID NO: 1540740 - RNA, 19 nt, Artificial Sequence
  Description of Artificial Sequence: Synthetic oligonucleotide
aacguguaggaaauguuuc

SEQ ID NO: 1540741 - RNA, 19 nt, Artificial Sequence
  Description of Artificial Sequence: Synthetic oligonucleotide
guaggaaauguuucugggg

SEQ ID NO: 1540742 - RNA, 19 nt, Artificial Sequence
  Description of Artificial Sequence: Synthetic oligonucleotide
acagcuugaaaggauuccc

SEQ ID NO: 1540743 - RNA, 19 nt, Artificial Sequence
  Description of Artificial Sequence: Synthetic oligonucleotide
gaauuguugcuggagaggc

SEQ ID NO: 1540744 - RNA, 19 nt, Artificial Sequence
  Description of Artificial Sequence: Synthetic oligonucleotide
aaaggauucccucccacaa

SEQ ID NO: 1540745 - RNA, 19 nt, Artificial Sequence
  Description of Artificial Sequence: Synthetic oligonucleotide
caaacagggagacuguggc

SEQ ID NO: 1540746 - RNA, 19 nt, Artificial Sequence
  Description of Artificial Sequence: Synthetic oligonucleotide
auugacacuaucauaccuc

SEQ ID NO: 1540747 - RNA, 19 nt, Artificial Sequence
  Description of Artificial Sequence: Synthetic oligonucleotide
uuugcuugcuagcuaauau

SEQ ID NO: 1540748 - RNA, 19 nt, Artificial Sequence
  Description of Artificial Sequence: Synthetic oligonucleotide
uaauuuucauagcuugggu

SEQ ID NO: 1540749 - RNA, 19 nt, Artificial Sequence
  Description of Artificial Sequence: Synthetic oligonucleotide
aacaggaggguugucguuc

SEQ ID NO: 1540750 - RNA, 19 nt, Artificial Sequence
  Description of Artificial Sequence: Synthetic oligonucleotide
ugaucuaggagggaucucc

SEQ ID NO: 1540751 - RNA, 19 nt, Artificial Sequence
  Description of Artificial Sequence: Synthetic oligonucleotide
uguggcuacccucucacca

SEQ ID NO: 1540752 - RNA, 19 nt, Artificial Sequence
  Description of Artificial Sequence: Synthetic oligonucleotide
ugcauuggaaacacuuuca

SEQ ID NO: 1540753 - RNA, 19 nt, Artificial Sequence
  Description of Artificial Sequence: Synthetic oligonucleotide
gaagcuucgacagugacaa

SEQ ID NO: 1540754 - RNA, 19 nt, Artificial Sequence
  Description of Artificial Sequence: Synthetic oligonucleotide
uuuuggaccugcaguaucu

SEQ ID NO: 1540755 - RNA, 19 nt, Artificial Sequence
  Description of Artificial Sequence: Synthetic oligonucleotide
caagccguaaugcuuuugg

SEQ ID NO: 1540756 - RNA, 19 nt, Artificial Sequence
  Description of Artificial Sequence: Synthetic oligonucleotide
uugguuuagaagcuucgac

SEQ ID NO: 1540757 - RNA, 19 nt, Artificial Sequence
  Description of Artificial Sequence: Synthetic oligonucleotide
aagccguaaugcuuuuggg

SEQ ID NO: 1540758 - RNA, 19 nt, Artificial Sequence
  Description of Artificial Sequence: Synthetic oligonucleotide
auucacuugcacaaccagc

SEQ ID NO: 1540759 - RNA, 19 nt, Artificial Sequence
  Description of Artificial Sequence: Synthetic oligonucleotide
caggauguccccagaaucg

SEQ ID NO: 1540760 - RNA, 19 nt, Artificial Sequence
  Description of Artificial Sequence: Synthetic oligonucleotide
uguaguucaaguccgcauu

SEQ ID NO: 1540761 - RNA, 19 nt, Artificial Sequence
  Description of Artificial Sequence: Synthetic oligonucleotide
aacuagauuuguaaugccu

SEQ ID NO: 1540762 - RNA, 19 nt, Artificial Sequence
  Description of Artificial Sequence: Synthetic oligonucleotide
auaaugccagcaaaccacc

SEQ ID NO: 1540763 - RNA, 19 nt, Artificial Sequence
  Description of Artificial Sequence: Synthetic oligonucleotide
uuugggugaguuuuccuac

SEQ ID NO: 1540764 - RNA, 19 nt, Artificial Sequence
  Description of Artificial Sequence: Synthetic oligonucleotide
  modified_base (16)..(16): a, c, u, g, unknown or other
ucuuguacagccuganguu

SEQ ID NO: 1540765 - RNA, 19 nt, Artificial Sequence
  Description of Artificial Sequence: Synthetic oligonucleotide
agcuugaaaggauucccuc

SEQ ID NO: 1540766 - RNA, 19 nt, Artificial Sequence
  Description of Artificial Sequence: Synthetic oligonucleotide
acaugcaccaaaguuguag

SEQ ID NO: 1540767 - RNA, 19 nt, Artificial Sequence
  Description of Artificial Sequence: Synthetic oligonucleotide
uugacacuaucauaccucu

SEQ ID NO: 1540768 - RNA, 19 nt, Artificial Sequence
  Description of Artificial Sequence: Synthetic oligonucleotide
ugauuagaaucacugucau

SEQ ID NO: 1540769 - RNA, 19 nt, Artificial Sequence
  Description of Artificial Sequence: Synthetic oligonucleotide
uaugcaagccguaaugcuu

SEQ ID NO: 1540770 - RNA, 19 nt, Artificial Sequence
  Description of Artificial Sequence: Synthetic oligonucleotide
cuagauuuguaaugccuug

SEQ ID NO: 1540771 - RNA, 19 nt, Artificial Sequence
  Description of Artificial Sequence: Synthetic oligonucleotide
ucuguaucggcccaugcuu

SEQ ID NO: 1540772 - RNA, 19 nt, Artificial Sequence
  Description of Artificial Sequence: Synthetic oligonucleotide
gauuugucaugcugcuggg

SEQ ID NO: 1540773 - RNA, 19 nt, Artificial Sequence
  Description of Artificial Sequence: Synthetic oligonucleotide
uucuuugcuugcuagcuaa

SEQ ID NO: 1540774 - RNA, 19 nt, Artificial Sequence
  Description of Artificial Sequence: Synthetic oligonucleotide
aaaccacaccacugguggg

SEQ ID NO: 1540775 - RNA, 19 nt, Artificial Sequence
  Description of Artificial Sequence: Synthetic oligonucleotide
uguucucugggaaguaaac

SEQ ID NO: 1540776 - RNA, 19 nt, Artificial Sequence
  Description of Artificial Sequence: Synthetic oligonucleotide
aggauucccucccacaaug

SEQ ID NO: 1540777 - RNA, 19 nt, Artificial Sequence
  Description of Artificial Sequence: Synthetic oligonucleotide
auacugagucucuguuugc

SEQ ID NO: 1540778 - RNA, 19 nt, Artificial Sequence
  Description of Artificial Sequence: Synthetic oligonucleotide
cuacuaaggaaaccacacc

SEQ ID NO: 1540779 - RNA, 19 nt, Artificial Sequence
  Description of Artificial Sequence: Synthetic oligonucleotide
acgagagucuguaucggcc

SEQ ID NO: 1540780 - RNA, 19 nt, Artificial Sequence
  Description of Artificial Sequence: Synthetic oligonucleotide
uguaucggcccaugcuugg

SEQ ID NO: 1540781 - RNA, 19 nt, Artificial Sequence
  Description of Artificial Sequence: Synthetic oligonucleotide
gacacuaucauaccucugu

SEQ ID NO: 1540782 - RNA, 19 nt, Artificial Sequence
  Description of Artificial Sequence: Synthetic oligonucleotide
gauuuguaaugccuugcca

SEQ ID NO: 1540783 - RNA, 19 nt, Artificial Sequence
  Description of Artificial Sequence: Synthetic oligonucleotide
uguccugacauuacuugaa

SEQ ID NO: 1540784 - RNA, 19 nt, Artificial Sequence
  Description of Artificial Sequence: Synthetic oligonucleotide
gucauaaugccagcaaacc

SEQ ID NO: 1540785 - RNA, 19 nt, Artificial Sequence
  Description of Artificial Sequence: Synthetic oligonucleotide
uagauuuguaaugccuugc

SEQ ID NO: 1540786 - RNA, 19 nt, Artificial Sequence
  Description of Artificial Sequence: Synthetic oligonucleotide
gagaguaggcaaucucugc

SEQ ID NO: 1540787 - RNA, 19 nt, Artificial Sequence
  Description of Artificial Sequence: Synthetic oligonucleotide
ucugcguucuucccacugc

SEQ ID NO: 1540788 - RNA, 19 nt, Artificial Sequence
  Description of Artificial Sequence: Synthetic oligonucleotide
augaccacguugaacuccc

SEQ ID NO: 1540789 - RNA, 19 nt, Artificial Sequence
  Description of Artificial Sequence: Synthetic oligonucleotide
caugcuugggcugucagac

SEQ ID NO: 1540790 - RNA, 19 nt, Artificial Sequence
  Description of Artificial Sequence: Synthetic oligonucleotide
guaucuugccaucaugaca

SEQ ID NO: 1540791 - RNA, 19 nt, Artificial Sequence
  Description of Artificial Sequence: Synthetic oligonucleotide
agucuguaucggcccaugc

SEQ ID NO: 1540792 - RNA, 19 nt, Artificial Sequence
  Description of Artificial Sequence: Synthetic oligonucleotide
agaaucgggaucaauggca

SEQ ID NO: 1540793 - RNA, 19 nt, Artificial Sequence
  Description of Artificial Sequence: Synthetic oligonucleotide
guucgugucucccaccuug

SEQ ID NO: 1540794 - RNA, 19 nt, Artificial Sequence
  Description of Artificial Sequence: Synthetic oligonucleotide
aggaaauguuucuggggag

SEQ ID NO: 1540795 - RNA, 19 nt, Artificial Sequence
  Description of Artificial Sequence: Synthetic oligonucleotide
caauacugcuguagagugg

SEQ ID NO: 1540796 - RNA, 19 nt, Artificial Sequence
  Description of Artificial Sequence: Synthetic oligonucleotide
  modified_base (18)..(18): a, c, u, g, unknown or other
gaucuuguacagccugang

SEQ ID NO: 1540797 - RNA, 19 nt, Artificial Sequence
  Description of Artificial Sequence: Synthetic oligonucleotide
uuagaagcuucgacaguga

SEQ ID NO: 1540798 - RNA, 19 nt, Artificial Sequence
  Description of Artificial Sequence: Synthetic oligonucleotide
cauucacuugcacaaccag

SEQ ID NO: 1540799 - RNA, 19 nt, Artificial Sequence
  Description of Artificial Sequence: Synthetic oligonucleotide
uguuugcuuaauuuucaua

SEQ ID NO: 1540800 - RNA, 19 nt, Artificial Sequence
  Description of Artificial Sequence: Synthetic oligonucleotide
agccguaaugcuuuugggu

SEQ ID NO: 1540801 - RNA, 19 nt, Artificial Sequence
  Description of Artificial Sequence: Synthetic oligonucleotide
uuugguuuagaagcuucga

SEQ ID NO: 1540802 - RNA, 19 nt, Artificial Sequence
  Description of Artificial Sequence: Synthetic oligonucleotide
cugacauuacuugaaggug

SEQ ID NO: 1540803 - RNA, 19 nt, Artificial Sequence
  Description of Artificial Sequence: Synthetic oligonucleotide
aaugccuugccaggucagg

SEQ ID NO: 1540804 - RNA, 19 nt, Artificial Sequence
  Description of Artificial Sequence: Synthetic oligonucleotide
gucaccagcuauauccugg

SEQ ID NO: 1540805 - RNA, 19 nt, Artificial Sequence
  Description of Artificial Sequence: Synthetic oligonucleotide
gacuaucugagagucaauc

SEQ ID NO: 1540806 - RNA, 19 nt, Artificial Sequence
  Description of Artificial Sequence: Synthetic oligonucleotide
caaugcuguaguucaaguc

SEQ ID NO: 1540807 - RNA, 19 nt, Artificial Sequence
  Description of Artificial Sequence: Synthetic oligonucleotide
aguuuuccuacuaaggaaa

SEQ ID NO: 1540808 - RNA, 19 nt, Artificial Sequence
  Description of Artificial Sequence: Synthetic oligonucleotide
auacaugcaccaaaguugu

SEQ ID NO: 1540809 - RNA, 19 nt, Artificial Sequence
  Description of Artificial Sequence: Synthetic oligonucleotide
gaaaggauucccucccaca

SEQ ID NO: 1540810 - RNA, 19 nt, Artificial Sequence
  Description of Artificial Sequence: Synthetic oligonucleotide
ugggguaugcaaacuucug

SEQ ID NO: 1540811 - RNA, 19 nt, Artificial Sequence
  Description of Artificial Sequence: Synthetic oligonucleotide
uaacgagagucuguaucgg

SEQ ID NO: 1540812 - RNA, 19 nt, Artificial Sequence
  Description of Artificial Sequence: Synthetic oligonucleotide
cuggcuuaagcuggaaagg

SEQ ID NO: 1540813 - RNA, 19 nt, Artificial Sequence
  Description of Artificial Sequence: Synthetic oligonucleotide
uuccuacuaaggaaaccac

SEQ ID NO: 1540814 - RNA, 19 nt, Artificial Sequence
  Description of Artificial Sequence: Synthetic oligonucleotide
uggcuuaagcuggaaaggc

SEQ ID NO: 1540815 - RNA, 19 nt, Artificial Sequence
  Description of Artificial Sequence: Synthetic oligonucleotide
gacauuacuugaagguggc

SEQ ID NO: 1540816 - RNA, 19 nt, Artificial Sequence
  Description of Artificial Sequence: Synthetic oligonucleotide
ucucccauaccugucaguc

SEQ ID NO: 1540817 - RNA, 19 nt, Artificial Sequence
  Description of Artificial Sequence: Synthetic oligonucleotide
ugaagguggcagcaacgug

SEQ ID NO: 1540818 - RNA, 19 nt, Artificial Sequence
  Description of Artificial Sequence: Synthetic oligonucleotide
gcuacuaugaccacguuga

SEQ ID NO: 1540819 - RNA, 19 nt, Artificial Sequence
  Description of Artificial Sequence: Synthetic oligonucleotide
caggccaccauuaacgaga

SEQ ID NO: 1540820 - RNA, 19 nt, Artificial Sequence
  Description of Artificial Sequence: Synthetic oligonucleotide
acuacuguccugacauuac

SEQ ID NO: 1540821 - RNA, 19 nt, Artificial Sequence
  Description of Artificial Sequence: Synthetic oligonucleotide
acguguaggaaauguuucu

SEQ ID NO: 1540822 - RNA, 19 nt, Artificial Sequence
  Description of Artificial Sequence: Synthetic oligonucleotide
cagaaucgggaucaauggc

SEQ ID NO: 1540823 - RNA, 19 nt, Artificial Sequence
  Description of Artificial Sequence: Synthetic oligonucleotide
uagaagcuucgacagugac

SEQ ID NO: 1540824 - RNA, 19 nt, Artificial Sequence
  Description of Artificial Sequence: Synthetic oligonucleotide
gccgcugucauucacuugc

SEQ ID NO: 1540825 - RNA, 19 nt, Artificial Sequence
  Description of Artificial Sequence: Synthetic oligonucleotide
caguaucuugccaucauga

SEQ ID NO: 1540826 - RNA, 19 nt, Artificial Sequence
  Description of Artificial Sequence: Synthetic oligonucleotide
uaggcaaucucugcguucu

SEQ ID NO: 1540827 - RNA, 19 nt, Artificial Sequence
  Description of Artificial Sequence: Synthetic oligonucleotide
gccguaaugcuuuugggug

SEQ ID NO: 1540828 - RNA, 19 nt, Artificial Sequence
  Description of Artificial Sequence: Synthetic oligonucleotide
uccgcauugauaccaucau

SEQ ID NO: 1540829 - RNA, 19 nt, Artificial Sequence
  Description of Artificial Sequence: Synthetic oligonucleotide
uaggagggaucucccauac

SEQ ID NO: 1540830 - RNA, 19 nt, Artificial Sequence
  Description of Artificial Sequence: Synthetic oligonucleotide
ucgggaucaauggcaaaag

SEQ ID NO: 1540831 - RNA, 19 nt, Artificial Sequence
  Description of Artificial Sequence: Synthetic oligonucleotide
agcaacguguaggaaaugu

SEQ ID NO: 1540832 - RNA, 19 nt, Artificial Sequence
  Description of Artificial Sequence: Synthetic oligonucleotide
ugucguucgugucucccac

SEQ ID NO: 1540833 - RNA, 19 nt, Artificial Sequence
  Description of Artificial Sequence: Synthetic oligonucleotide
ggaaauguuucuggggagg

SEQ ID NO: 1540834 - RNA, 19 nt, Artificial Sequence
  Description of Artificial Sequence: Synthetic oligonucleotide
ucguucgugucucccaccu

SEQ ID NO: 1540835 - RNA, 19 nt, Artificial Sequence
  Description of Artificial Sequence: Synthetic oligonucleotide
ucauaccucuguccauuug

SEQ ID NO: 1540836 - RNA, 19 nt, Artificial Sequence
  Description of Artificial Sequence: Synthetic oligonucleotide
auagcuugggucaccagcu

SEQ ID NO: 1540837 - RNA, 19 nt, Artificial Sequence
  Description of Artificial Sequence: Synthetic oligonucleotide
acagcuacuaugaccacgu

SEQ ID NO: 1540838 - RNA, 19 nt, Artificial Sequence
  Description of Artificial Sequence: Synthetic oligonucleotide
cacagcuacuaugaccacg

SEQ ID NO: 1540839 - RNA, 19 nt, Artificial Sequence
  Description of Artificial Sequence: Synthetic oligonucleotide
uacuaugaccacguugaac

SEQ ID NO: 1540840 - RNA, 19 nt, Artificial Sequence
  Description of Artificial Sequence: Synthetic oligonucleotide
uggcuacccucucaccagg

SEQ ID NO: 1540841 - RNA, 19 nt, Artificial Sequence
  Description of Artificial Sequence: Synthetic oligonucleotide
guccugacauuacuugaag

SEQ ID NO: 1540842 - RNA, 19 nt, Artificial Sequence
  Description of Artificial Sequence: Synthetic oligonucleotide
aaggauucccucccacaau

SEQ ID NO: 1540843 - RNA, 19 nt, Artificial Sequence
  Description of Artificial Sequence: Synthetic oligonucleotide
uaucggcccaugcuugggc

SEQ ID NO: 1540844 - RNA, 19 nt, Artificial Sequence
  Description of Artificial Sequence: Synthetic oligonucleotide
agagaguaggcaaucucug

SEQ ID NO: 1540845 - RNA, 19 nt, Artificial Sequence
  Description of Artificial Sequence: Synthetic oligonucleotide
acuagauuuguaaugccuu

SEQ ID NO: 1540846 - RNA, 19 nt, Artificial Sequence
  Description of Artificial Sequence: Synthetic oligonucleotide
ucaaguccgcauugauacc

SEQ ID NO: 1540847 - RNA, 19 nt, Artificial Sequence
  Description of Artificial Sequence: Synthetic oligonucleotide
aggauguccccagaaucgg

SEQ ID NO: 1540848 - RNA, 19 nt, Artificial Sequence
  Description of Artificial Sequence: Synthetic oligonucleotide
augcaccaaaguuguagug

SEQ ID NO: 1540849 - RNA, 19 nt, Artificial Sequence
  Description of Artificial Sequence: Synthetic oligonucleotide
uaucauaccucuguccauu

SEQ ID NO: 1540850 - RNA, 19 nt, Artificial Sequence
  Description of Artificial Sequence: Synthetic oligonucleotide
uuuugccggcuucguagcc

SEQ ID NO: 1540851 - RNA, 19 nt, Artificial Sequence
  Description of Artificial Sequence: Synthetic oligonucleotide
ugacacuaucauaccucug

SEQ ID NO: 1540852 - RNA, 19 nt, Artificial Sequence
  Description of Artificial Sequence: Synthetic oligonucleotide
uauugaccaggaugucccc

SEQ ID NO: 1540853 - RNA, 19 nt, Artificial Sequence
  Description of Artificial Sequence: Synthetic oligonucleotide
ugaacucccgggguggucu

SEQ ID NO: 1540854 - RNA, 19 nt, Artificial Sequence
  Description of Artificial Sequence: Synthetic oligonucleotide
guaaugccuugccagguca

SEQ ID NO: 1540855 - RNA, 19 nt, Artificial Sequence
  Description of Artificial Sequence: Synthetic oligonucleotide
gggaggguaacugugggag

SEQ ID NO: 1540856 - RNA, 19 nt, Artificial Sequence
  Description of Artificial Sequence: Synthetic oligonucleotide
aaucacaguugcauuggaa

SEQ ID NO: 1540857 - RNA, 19 nt, Artificial Sequence
  Description of Artificial Sequence: Synthetic oligonucleotide
ucugggaaguaaaccucaa

SEQ ID NO: 1540858 - RNA, 19 nt, Artificial Sequence
  Description of Artificial Sequence: Synthetic oligonucleotide
cccagaaucgggaucaaug

SEQ ID NO: 1540859 - RNA, 19 nt, Artificial Sequence
  Description of Artificial Sequence: Synthetic oligonucleotide
aggagggaucucccauacc

SEQ ID NO: 1540860 - RNA, 19 nt, Artificial Sequence
  Description of Artificial Sequence: Synthetic oligonucleotide
gacaguaggcaauggggaa

SEQ ID NO: 1540861 - RNA, 19 nt, Artificial Sequence
  Description of Artificial Sequence: Synthetic oligonucleotide
auuugucaugcugcugggg

SEQ ID NO: 1540862 - RNA, 19 nt, Artificial Sequence
  Description of Artificial Sequence: Synthetic oligonucleotide
ggaucaaucucaaacagcu

SEQ ID NO: 1540863 - RNA, 19 nt, Artificial Sequence
  Description of Artificial Sequence: Synthetic oligonucleotide
uacuacuguccugacauua

SEQ ID NO: 1540864 - RNA, 19 nt, Artificial Sequence
  Description of Artificial Sequence: Synthetic oligonucleotide
uccaguggggccgacgugu

SEQ ID NO: 1540865 - RNA, 19 nt, Artificial Sequence
  Description of Artificial Sequence: Synthetic oligonucleotide
acguugaacucccggggug

SEQ ID NO: 1540866 - RNA, 19 nt, Artificial Sequence
  Description of Artificial Sequence: Synthetic oligonucleotide
cuguaucggcccaugcuug

SEQ ID NO: 1540867 - RNA, 19 nt, Artificial Sequence
  Description of Artificial Sequence: Synthetic oligonucleotide
ucacuugcacaaccagccu

SEQ ID NO: 1540868 - RNA, 19 nt, Artificial Sequence
  Description of Artificial Sequence: Synthetic oligonucleotide
accaccccaaugacaauac

SEQ ID NO: 1540869 - RNA, 19 nt, Artificial Sequence
  Description of Artificial Sequence: Synthetic oligonucleotide
aucgggaucaauggcaaaa

SEQ ID NO: 1540870 - RNA, 19 nt, Artificial Sequence
  Description of Artificial Sequence: Synthetic oligonucleotide
ucuggucgcccucuguguc

SEQ ID NO: 1540871 - RNA, 19 nt, Artificial Sequence
  Description of Artificial Sequence: Synthetic oligonucleotide
gaggguaacugugggagca

SEQ ID NO: 1540872 - RNA, 19 nt, Artificial Sequence
  Description of Artificial Sequence: Synthetic oligonucleotide
uguguuggcuggugguaga

SEQ ID NO: 1540873 - RNA, 19 nt, Artificial Sequence
  Description of Artificial Sequence: Synthetic oligonucleotide
uggcaaaaguccccaucac

SEQ ID NO: 1540874 - RNA, 19 nt, Artificial Sequence
  Description of Artificial Sequence: Synthetic oligonucleotide
uguugccaacacuguagcu

SEQ ID NO: 1540875 - RNA, 19 nt, Artificial Sequence
  Description of Artificial Sequence: Synthetic oligonucleotide
gcuauauccugggugagug

SEQ ID NO: 1540876 - RNA, 19 nt, Artificial Sequence
  Description of Artificial Sequence: Synthetic oligonucleotide
agcuucgacagugacaaua

SEQ ID NO: 1540877 - RNA, 19 nt, Artificial Sequence
  Description of Artificial Sequence: Synthetic oligonucleotide
gagucaaucacaguugcau

SEQ ID NO: 1540878 - RNA, 19 nt, Artificial Sequence
  Description of Artificial Sequence: Synthetic oligonucleotide
agaagcuucgacagugaca

SEQ ID NO: 1540879 - RNA, 19 nt, Artificial Sequence
  Description of Artificial Sequence: Synthetic oligonucleotide
gcuacuacuguccugacau

SEQ ID NO: 1540880 - RNA, 19 nt, Artificial Sequence
  Description of Artificial Sequence: Synthetic oligonucleotide
aguccgcauugauaccauc

SEQ ID NO: 1540881 - RNA, 19 nt, Artificial Sequence
  Description of Artificial Sequence: Synthetic oligonucleotide
auguguuggcuggugguag

SEQ ID NO: 1540882 - RNA, 19 nt, Artificial Sequence
  Description of Artificial Sequence: Synthetic oligonucleotide
uuugccggcuucguagcca

SEQ ID NO: 1540883 - RNA, 19 nt, Artificial Sequence
  Description of Artificial Sequence: Synthetic oligonucleotide
gcaauggggaacuagauuu

SEQ ID NO: 1540884 - RNA, 19 nt, Artificial Sequence
  Description of Artificial Sequence: Synthetic oligonucleotide
gcuagcuaauaucaaaugu

SEQ ID NO: 1540885 - RNA, 19 nt, Artificial Sequence
  Description of Artificial Sequence: Synthetic oligonucleotide
gauuagaaucacugucaua

SEQ ID NO: 1540886 - RNA, 19 nt, Artificial Sequence
  Description of Artificial Sequence: Synthetic oligonucleotide
ucccacaaugcuguaguuc

SEQ ID NO: 1540887 - RNA, 19 nt, Artificial Sequence
  Description of Artificial Sequence: Synthetic oligonucleotide
aaucgggaucaauggcaaa

SEQ ID NO: 1540888 - RNA, 19 nt, Artificial Sequence
  Description of Artificial Sequence: Synthetic oligonucleotide
ucgcccucugugucgcugg

SEQ ID NO: 1540889 - RNA, 19 nt, Artificial Sequence
  Description of Artificial Sequence: Synthetic oligonucleotide
aguaggcaaucucugcguu

SEQ ID NO: 1540890 - RNA, 19 nt, Artificial Sequence
  Description of Artificial Sequence: Synthetic oligonucleotide
gucccaguacuguauugac

SEQ ID NO: 1540891 - RNA, 19 nt, Artificial Sequence
  Description of Artificial Sequence: Synthetic oligonucleotide
caccauuaacgagagucug

SEQ ID NO: 1540892 - RNA, 19 nt, Artificial Sequence
  Description of Artificial Sequence: Synthetic oligonucleotide
cagagaguaggcaaucucu

SEQ ID NO: 1540893 - RNA, 19 nt, Artificial Sequence
  Description of Artificial Sequence: Synthetic oligonucleotide
aucuaggagggaucuccca

SEQ ID NO: 1540894 - RNA, 19 nt, Artificial Sequence
  Description of Artificial Sequence: Synthetic oligonucleotide
ggagggaucucccauaccu

SEQ ID NO: 1540895 - RNA, 19 nt, Artificial Sequence
  Description of Artificial Sequence: Synthetic oligonucleotide
caaguccgcauugauacca

SEQ ID NO: 1540896 - RNA, 19 nt, Artificial Sequence
  Description of Artificial Sequence: Synthetic oligonucleotide
ggaauguuguucucuggga

SEQ ID NO: 1540897 - RNA, 19 nt, Artificial Sequence
  Description of Artificial Sequence: Synthetic oligonucleotide
cgcauugauaccaucauca

SEQ ID NO: 1540898 - RNA, 19 nt, Artificial Sequence
  Description of Artificial Sequence: Synthetic oligonucleotide
caccaaggaauuguugcug

SEQ ID NO: 1540899 - RNA, 19 nt, Artificial Sequence
  Description of Artificial Sequence: Synthetic oligonucleotide
ugcguucuucccacugcca

SEQ ID NO: 1540900 - RNA, 19 nt, Artificial Sequence
  Description of Artificial Sequence: Synthetic oligonucleotide
gaaucgggaucaauggcaa

SEQ ID NO: 1540901 - RNA, 19 nt, Artificial Sequence
  Description of Artificial Sequence: Synthetic oligonucleotide
ugggugaguuuuccuacua

SEQ ID NO: 1540902 - RNA, 19 nt, Artificial Sequence
  Description of Artificial Sequence: Synthetic oligonucleotide
cuaugaccacguugaacuc

SEQ ID NO: 1540903 - RNA, 19 nt, Artificial Sequence
  Description of Artificial Sequence: Synthetic oligonucleotide
guugucguucgugucuccc

SEQ ID NO: 1540904 - RNA, 19 nt, Artificial Sequence
  Description of Artificial Sequence: Synthetic oligonucleotide
aguaaaccucaaccacaga

SEQ ID NO: 1540905 - RNA, 19 nt, Artificial Sequence
  Description of Artificial Sequence: Synthetic oligonucleotide
auauccugggugagugggg

SEQ ID NO: 1540906 - RNA, 19 nt, Artificial Sequence
  Description of Artificial Sequence: Synthetic oligonucleotide
accauuaacgagagucugu

SEQ ID NO: 1540907 - RNA, 19 nt, Artificial Sequence
  Description of Artificial Sequence: Synthetic oligonucleotide
guaggcaaucucugcguuc

SEQ ID NO: 1540908 - RNA, 19 nt, Artificial Sequence
  Description of Artificial Sequence: Synthetic oligonucleotide
gagggaucucccauaccug

SEQ ID NO: 1540909 - RNA, 19 nt, Artificial Sequence
  Description of Artificial Sequence: Synthetic oligonucleotide
ugugucgcuggcuggcuua

SEQ ID NO: 1540910 - RNA, 19 nt, Artificial Sequence
  Description of Artificial Sequence: Synthetic oligonucleotide
cauugacacuaucauaccu

SEQ ID NO: 1540911 - RNA, 19 nt, Artificial Sequence
  Description of Artificial Sequence: Synthetic oligonucleotide
ccuaugcaagccguaaugc

SEQ ID NO: 1540912 - RNA, 19 nt, Artificial Sequence
  Description of Artificial Sequence: Synthetic oligonucleotide
aguggggccgacgugugca

SEQ ID NO: 1540913 - RNA, 19 nt, Artificial Sequence
  Description of Artificial Sequence: Synthetic oligonucleotide
acuugcacaaccagccuau

SEQ ID NO: 1540914 - RNA, 19 nt, Artificial Sequence
  Description of Artificial Sequence: Synthetic oligonucleotide
ccagcuauauccuggguga

SEQ ID NO: 1540915 - RNA, 19 nt, Artificial Sequence
  Description of Artificial Sequence: Synthetic oligonucleotide
ugaccacguugaacucccg

SEQ ID NO: 1540916 - RNA, 19 nt, Artificial Sequence
  Description of Artificial Sequence: Synthetic oligonucleotide
gaggguugucguucguguc

SEQ ID NO: 1540917 - RNA, 19 nt, Artificial Sequence
  Description of Artificial Sequence: Synthetic oligonucleotide
auugaccaggaugucccca

SEQ ID NO: 1540918 - RNA, 19 nt, Artificial Sequence
  Description of Artificial Sequence: Synthetic oligonucleotide
ggaccugcaguaucuugcc

SEQ ID NO: 1540919 - RNA, 19 nt, Artificial Sequence
  Description of Artificial Sequence: Synthetic oligonucleotide
agcuggacaguaggcaaug

SEQ ID NO: 1540920 - RNA, 19 nt, Artificial Sequence
  Description of Artificial Sequence: Synthetic oligonucleotide
aaccucaaccacagacuga

SEQ ID NO: 1540921 - RNA, 19 nt, Artificial Sequence
  Description of Artificial Sequence: Synthetic oligonucleotide
gcguucuucccacugccag

SEQ ID NO: 1540922 - RNA, 19 nt, Artificial Sequence
  Description of Artificial Sequence: Synthetic oligonucleotide
cuaugcaagccguaaugcu

SEQ ID NO: 1540923 - RNA, 19 nt, Artificial Sequence
  Description of Artificial Sequence: Synthetic oligonucleotide
caugcaccaaaguuguagu

SEQ ID NO: 1540924 - RNA, 19 nt, Artificial Sequence
  Description of Artificial Sequence: Synthetic oligonucleotide
auaccucuguccauuuggu

SEQ ID NO: 1540925 - RNA, 19 nt, Artificial Sequence
  Description of Artificial Sequence: Synthetic oligonucleotide
gacgugugcaggaaguacu

SEQ ID NO: 1540926 - RNA, 19 nt, Artificial Sequence
  Description of Artificial Sequence: Synthetic oligonucleotide
agcuaauaucaaauguguu

SEQ ID NO: 1540927 - RNA, 19 nt, Artificial Sequence
  Description of Artificial Sequence: Synthetic oligonucleotide
agccuaugcaagccguaau

SEQ ID NO: 1540928 - RNA, 19 nt, Artificial Sequence
  Description of Artificial Sequence: Synthetic oligonucleotide
guaucggcccaugcuuggg

SEQ ID NO: 1540929 - RNA, 19 nt, Artificial Sequence
  Description of Artificial Sequence: Synthetic oligonucleotide
aggaggguugucguucgug

SEQ ID NO: 1540930 - RNA, 19 nt, Artificial Sequence
  Description of Artificial Sequence: Synthetic oligonucleotide
ccacguugaacucccgggg

SEQ ID NO: 1540931 - RNA, 19 nt, Artificial Sequence
  Description of Artificial Sequence: Synthetic oligonucleotide
agcuauauccugggugagu

SEQ ID NO: 1540932 - RNA, 19 nt, Artificial Sequence
  Description of Artificial Sequence: Synthetic oligonucleotide
ggaucucccauaccuguca

SEQ ID NO: 1540933 - RNA, 19 nt, Artificial Sequence
  Description of Artificial Sequence: Synthetic oligonucleotide
gguaacugugggagcauug

SEQ ID NO: 1540934 - RNA, 19 nt, Artificial Sequence
  Description of Artificial Sequence: Synthetic oligonucleotide
caacguguaggaaauguuu

SEQ ID NO: 1540935 - RNA, 19 nt, Artificial Sequence
  Description of Artificial Sequence: Synthetic oligonucleotide
uugggucaccagcuauauc

SEQ ID NO: 1540936 - RNA, 19 nt, Artificial Sequence
  Description of Artificial Sequence: Synthetic oligonucleotide
aucauaccucuguccauuu

SEQ ID NO: 1540937 - RNA, 19 nt, Artificial Sequence
  Description of Artificial Sequence: Synthetic oligonucleotide
ucggcccaugcuugggcug

SEQ ID NO: 1540938 - RNA, 19 nt, Artificial Sequence
  Description of Artificial Sequence: Synthetic oligonucleotide
gucgccagcacuguggcua

SEQ ID NO: 1540939 - RNA, 19 nt, Artificial Sequence
  Description of Artificial Sequence: Synthetic oligonucleotide
augcaagccguaaugcuuu

SEQ ID NO: 1540940 - RNA, 19 nt, Artificial Sequence
  Description of Artificial Sequence: Synthetic oligonucleotide
gucuguaucggcccaugcu

SEQ ID NO: 1540941 - RNA, 19 nt, Artificial Sequence
  Description of Artificial Sequence: Synthetic oligonucleotide
guuguucucugggaaguaa

SEQ ID NO: 1540942 - RNA, 19 nt, Artificial Sequence
  Description of Artificial Sequence: Synthetic oligonucleotide
guuuagaagcuucgacagu

SEQ ID NO: 1540943 - RNA, 19 nt, Artificial Sequence
  Description of Artificial Sequence: Synthetic oligonucleotide
gucguucgugucucccacc

SEQ ID NO: 1540944 - RNA, 19 nt, Artificial Sequence
  Description of Artificial Sequence: Synthetic oligonucleotide
ggaggguaacugugggagc

SEQ ID NO: 1540945 - RNA, 19 nt, Artificial Sequence
  Description of Artificial Sequence: Synthetic oligonucleotide
acauuacuugaagguggca

SEQ ID NO: 1540946 - RNA, 19 nt, Artificial Sequence
  Description of Artificial Sequence: Synthetic oligonucleotide
ccccaaugacaauacugag

SEQ ID NO: 1540947 - RNA, 19 nt, Artificial Sequence
  Description of Artificial Sequence: Synthetic oligonucleotide
uggucgcccucugugucgc

SEQ ID NO: 1540948 - RNA, 19 nt, Artificial Sequence
  Description of Artificial Sequence: Synthetic oligonucleotide
cacuugcacaaccagccua

SEQ ID NO: 1540949 - RNA, 19 nt, Artificial Sequence
  Description of Artificial Sequence: Synthetic oligonucleotide
aaguccgcauugauaccau

SEQ ID NO: 1540950 - RNA, 19 nt, Artificial Sequence
  Description of Artificial Sequence: Synthetic oligonucleotide
aggccaccauuaacgagag

SEQ ID NO: 1540951 - RNA, 19 nt, Artificial Sequence
  Description of Artificial Sequence: Synthetic oligonucleotide
ccagagaguaggcaaucuc

SEQ ID NO: 1540952 - RNA, 19 nt, Artificial Sequence
  Description of Artificial Sequence: Synthetic oligonucleotide
uuuggaccugcaguaucuu

SEQ ID NO: 1540953 - RNA, 19 nt, Artificial Sequence
  Description of Artificial Sequence: Synthetic oligonucleotide
uacaugcaccaaaguugua

SEQ ID NO: 1540954 - RNA, 19 nt, Artificial Sequence
  Description of Artificial Sequence: Synthetic oligonucleotide
gugugcaggaaguacuuuu

SEQ ID NO: 1540955 - RNA, 19 nt, Artificial Sequence
  Description of Artificial Sequence: Synthetic oligonucleotide
uagcuugggucaccagcua

SEQ ID NO: 1540956 - RNA, 19 nt, Artificial Sequence
  Description of Artificial Sequence: Synthetic oligonucleotide
uagcuacuacuguccugac

SEQ ID NO: 1540957 - RNA, 19 nt, Artificial Sequence
  Description of Artificial Sequence: Synthetic oligonucleotide
ggugagugggguaugcaaa

SEQ ID NO: 1540958 - RNA, 19 nt, Artificial Sequence
  Description of Artificial Sequence: Synthetic oligonucleotide
cagcuauauccugggugag

SEQ ID NO: 1540959 - RNA, 19 nt, Artificial Sequence
  Description of Artificial Sequence: Synthetic oligonucleotide
uggggccgacgugugcagg

SEQ ID NO: 1540960 - RNA, 19 nt, Artificial Sequence
  Description of Artificial Sequence: Synthetic oligonucleotide
cuguaguucaaguccgcau

SEQ ID NO: 1540961 - RNA, 19 nt, Artificial Sequence
  Description of Artificial Sequence: Synthetic oligonucleotide
ggcuuaagcuggaaaggca

SEQ ID NO: 1540962 - RNA, 19 nt, Artificial Sequence
  Description of Artificial Sequence: Synthetic oligonucleotide
guugcauuggaaacacuuu

SEQ ID NO: 1540963 - RNA, 19 nt, Artificial Sequence
  Description of Artificial Sequence: Synthetic oligonucleotide
cuacuguccugacauuacu

SEQ ID NO: 1540964 - RNA, 19 nt, Artificial Sequence
  Description of Artificial Sequence: Synthetic oligonucleotide
ccaggccaccauuaacgag

SEQ ID NO: 1540965 - RNA, 19 nt, Artificial Sequence
  Description of Artificial Sequence: Synthetic oligonucleotide
cuugcacaaccagccuaug

SEQ ID NO: 1540966 - RNA, 19 nt, Artificial Sequence
  Description of Artificial Sequence: Synthetic oligonucleotide
cuguauugaccaggauguc

SEQ ID NO: 1540967 - RNA, 19 nt, Artificial Sequence
  Description of Artificial Sequence: Synthetic oligonucleotide
gcaaaccaccccaaugaca

SEQ ID NO: 1540968 - RNA, 19 nt, Artificial Sequence
  Description of Artificial Sequence: Synthetic oligonucleotide
guggggccgacgugugcag

SEQ ID NO: 1540969 - RNA, 19 nt, Artificial Sequence
  Description of Artificial Sequence: Synthetic oligonucleotide
ugcaagccguaaugcuuuu

SEQ ID NO: 1540970 - RNA, 19 nt, Artificial Sequence
  Description of Artificial Sequence: Synthetic oligonucleotide
gccagcaucugucgccagc

SEQ ID NO: 1540971 - RNA, 19 nt, Artificial Sequence
  Description of Artificial Sequence: Synthetic oligonucleotide
ggaggguugucguucgugu

SEQ ID NO: 1540972 - RNA, 19 nt, Artificial Sequence
  Description of Artificial Sequence: Synthetic oligonucleotide
caugcugcugggguguaaa

SEQ ID NO: 1540973 - RNA, 19 nt, Artificial Sequence
  Description of Artificial Sequence: Synthetic oligonucleotide
aagcuucgacagugacaau

SEQ ID NO: 1540974 - RNA, 19 nt, Artificial Sequence
  Description of Artificial Sequence: Synthetic oligonucleotide
cuguuugcuuaauuuucau

SEQ ID NO: 1540975 - RNA, 19 nt, Artificial Sequence
  Description of Artificial Sequence: Synthetic oligonucleotide
uugaacucccggggugguc

SEQ ID NO: 1540976 - RNA, 19 nt, Artificial Sequence
  Description of Artificial Sequence: Synthetic oligonucleotide
gggugaguuuuccuacuaa

SEQ ID NO: 1540977 - RNA, 19 nt, Artificial Sequence
  Description of Artificial Sequence: Synthetic oligonucleotide
gaacucccgggguggucuc

SEQ ID NO: 1540978 - RNA, 19 nt, Artificial Sequence
  Description of Artificial Sequence: Synthetic oligonucleotide
cugaucuaggagggaucuc

SEQ ID NO: 1540979 - RNA, 19 nt, Artificial Sequence
  Description of Artificial Sequence: Synthetic oligonucleotide
cuacuaugaccacguugaa

SEQ ID NO: 1540980 - RNA, 19 nt, Artificial Sequence
  Description of Artificial Sequence: Synthetic oligonucleotide
auaguccaguggggccgac

SEQ ID NO: 1540981 - RNA, 19 nt, Artificial Sequence
  Description of Artificial Sequence: Synthetic oligonucleotide
caguggggccgacgugugc

SEQ ID NO: 1540982 - RNA, 19 nt, Artificial Sequence
  Description of Artificial Sequence: Synthetic oligonucleotide
acgugugcaggaaguacuu

SEQ ID NO: 1540983 - RNA, 19 nt, Artificial Sequence
  Description of Artificial Sequence: Synthetic oligonucleotide
cguugaacucccggggugg

SEQ ID NO: 1540984 - RNA, 19 nt, Artificial Sequence
  Description of Artificial Sequence: Synthetic oligonucleotide
gccaggccaccauuaacga

SEQ ID NO: 1540985 - RNA, 19 nt, Artificial Sequence
  Description of Artificial Sequence: Synthetic oligonucleotide
ccguaaugcuuuuggguga

SEQ ID NO: 1540986 - RNA, 19 nt, Artificial Sequence
  Description of Artificial Sequence: Synthetic oligonucleotide
gguugucguucgugucucc

SEQ ID NO: 1540987 - RNA, 19 nt, Artificial Sequence
  Description of Artificial Sequence: Synthetic oligonucleotide
cguaaugcuuuugggugag

SEQ ID NO: 1540988 - RNA, 19 nt, Artificial Sequence
  Description of Artificial Sequence: Synthetic oligonucleotide
ccaucaugacaauuaaaau

SEQ ID NO: 1540989 - RNA, 19 nt, Artificial Sequence
  Description of Artificial Sequence: Synthetic oligonucleotide
cacguugaacucccggggu

SEQ ID NO: 1540990 - RNA, 19 nt, Artificial Sequence
  Description of Artificial Sequence: Synthetic oligonucleotide
ccgcauugauaccaucauc

SEQ ID NO: 1540991 - RNA, 19 nt, Artificial Sequence
  Description of Artificial Sequence: Synthetic oligonucleotide
ggccgacgugugcaggaag

SEQ ID NO: 1540992 - RNA, 19 nt, Artificial Sequence
  Description of Artificial Sequence: Synthetic oligonucleotide
cauuaacgagagucuguau

SEQ ID NO: 1540993 - RNA, 19 nt, Artificial Sequence
  Description of Artificial Sequence: Synthetic oligonucleotide
uggccugaucuaggaggga

SEQ ID NO: 1540994 - RNA, 19 nt, Artificial Sequence
  Description of Artificial Sequence: Synthetic oligonucleotide
aggguaacugugggagcau

SEQ ID NO: 1540995 - RNA, 19 nt, Artificial Sequence
  Description of Artificial Sequence: Synthetic oligonucleotide
ccauuaacgagagucugua

SEQ ID NO: 1540996 - RNA, 19 nt, Artificial Sequence
  Description of Artificial Sequence: Synthetic oligonucleotide
ggcaauggggaacuagauu

SEQ ID NO: 1540997 - RNA, 19 nt, Artificial Sequence
  Description of Artificial Sequence: Synthetic oligonucleotide
cuggccgcugucauucacu

SEQ ID NO: 1540998 - RNA, 19 nt, Artificial Sequence
  Description of Artificial Sequence: Synthetic oligonucleotide
cagccuaugcaagccguaa

SEQ ID NO: 1540999 - RNA, 19 nt, Artificial Sequence
  Description of Artificial Sequence: Synthetic oligonucleotide
uggcagcaacguguaggaa

SEQ ID NO: 1541000 - RNA, 19 nt, Artificial Sequence
  Description of Artificial Sequence: Synthetic oligonucleotide
cauaguccaguggggccga

SEQ ID NO: 1541001 - RNA, 19 nt, Artificial Sequence
  Description of Artificial Sequence: Synthetic oligonucleotide
ggguugucguucgugucuc

SEQ ID NO: 1541002 - RNA, 19 nt, Artificial Sequence
  Description of Artificial Sequence: Synthetic oligonucleotide
cagcaacguguaggaaaug

SEQ ID NO: 1541003 - RNA, 19 nt, Artificial Sequence
  Description of Artificial Sequence: Synthetic oligonucleotide
gcagcaacguguaggaaau

SEQ ID NO: 1541004 - RNA, 19 nt, Artificial Sequence
  Description of Artificial Sequence: Synthetic oligonucleotide
ccucaaccacagacugacc

SEQ ID NO: 1541005 - RNA, 19 nt, Artificial Sequence
  Description of Artificial Sequence: Synthetic oligonucleotide
ccaccauuaacgagagucu

SEQ ID NO: 1541006 - RNA, 19 nt, Artificial Sequence
  Description of Artificial Sequence: Synthetic oligonucleotide
gcaagccguaaugcuuuug

SEQ ID NO: 1541007 - RNA, 19 nt, Artificial Sequence
  Description of Artificial Sequence: Synthetic oligonucleotide
gcuugcuagcuaauaucaa

SEQ ID NO: 1541008 - RNA, 19 nt, Artificial Sequence
  Description of Artificial Sequence: Synthetic oligonucleotide
gcuggccgcugucauucac

SEQ ID NO: 1541009 - RNA, 19 nt, Artificial Sequence
  Description of Artificial Sequence: Synthetic oligonucleotide
gggaucucccauaccuguc

SEQ ID NO: 1541010 - RNA, 19 nt, Artificial Sequence
  Description of Artificial Sequence: Synthetic oligonucleotide
ccaugcuugggcugucaga

SEQ ID NO: 1541011 - RNA, 19 nt, Artificial Sequence
  Description of Artificial Sequence: Synthetic oligonucleotide
cgacgugugcaggaaguac

SEQ ID NO: 1541012 - RNA, 19 nt, Artificial Sequence
  Description of Artificial Sequence: Synthetic oligonucleotide
guugaacucccgggguggu

SEQ ID NO: 1541013 - RNA, 19 nt, Artificial Sequence
  Description of Artificial Sequence: Synthetic oligonucleotide
ccacagcuacuaugaccac

SEQ ID NO: 1541014 - RNA, 19 nt, Artificial Sequence
  Description of Artificial Sequence: Synthetic oligonucleotide
caucacaaacagggagacu

SEQ ID NO: 1541015 - RNA, 19 nt, Artificial Sequence
  Description of Artificial Sequence: Synthetic oligonucleotide
gcaacguguaggaaauguu

SEQ ID NO: 1541016 - RNA, 19 nt, Artificial Sequence
  Description of Artificial Sequence: Synthetic oligonucleotide
cuacuacuguccugacauu

SEQ ID NO: 1541017 - RNA, 19 nt, Artificial Sequence
  Description of Artificial Sequence: Synthetic oligonucleotide
cggucccaguacuguauug

SEQ ID NO: 1541018 - RNA, 19 nt, Artificial Sequence
  Description of Artificial Sequence: Synthetic oligonucleotide
gugggagcauugucauuuu

SEQ ID NO: 1541019 - RNA, 19 nt, Artificial Sequence
  Description of Artificial Sequence: Synthetic oligonucleotide
gccgacgugugcaggaagu

SEQ ID NO: 1541020 - RNA, 19 nt, Artificial Sequence
  Description of Artificial Sequence: Synthetic oligonucleotide
ggcuacccucucaccagga

SEQ ID NO: 1541021 - RNA, 19 nt, Artificial Sequence
  Description of Artificial Sequence: Synthetic oligonucleotide
caccagcuauauccugggu

SEQ ID NO: 1541022 - RNA, 19 nt, Artificial Sequence
  Description of Artificial Sequence: Synthetic oligonucleotide
caucugucgccagcacugu

SEQ ID NO: 1541023 - RNA, 19 nt, Artificial Sequence
  Description of Artificial Sequence: Synthetic oligonucleotide
cucccacaaugcuguaguu

SEQ ID NO: 1541024 - RNA, 19 nt, Artificial Sequence
  Description of Artificial Sequence: Synthetic oligonucleotide
cgacagugacaauacugcu

SEQ ID NO: 1541025 - RNA, 19 nt, Artificial Sequence
  Description of Artificial Sequence: Synthetic oligonucleotide
ggcuggccgcugucauuca

SEQ ID NO: 1541026 - RNA, 19 nt, Artificial Sequence
  Description of Artificial Sequence: Synthetic oligonucleotide
ccuugaccaccaaggaauu

SEQ ID NO: 1541027 - RNA, 19 nt, Artificial Sequence
  Description of Artificial Sequence: Synthetic oligonucleotide
caggaggguugucguucgu

SEQ ID NO: 1541028 - RNA, 19 nt, Artificial Sequence
  Description of Artificial Sequence: Synthetic oligonucleotide
ccaccccaaugacaauacu

SEQ ID NO: 1541029 - RNA, 19 nt, Artificial Sequence
  Description of Artificial Sequence: Synthetic oligonucleotide
ccgacgugugcaggaagua

SEQ ID NO: 1541030 - RNA, 19 nt, Artificial Sequence
  Description of Artificial Sequence: Synthetic oligonucleotide
ggccaccauuaacgagagu

SEQ ID NO: 1541031 - RNA, 19 nt, Artificial Sequence
  Description of Artificial Sequence: Synthetic oligonucleotide
ccggucccaguacuguauu

SEQ ID NO: 1541032 - RNA, 19 nt, Artificial Sequence
  Description of Artificial Sequence: Synthetic oligonucleotide
ggucgcccucugugucgcu

SEQ ID NO: 1541033 - RNA, 19 nt, Artificial Sequence
  Description of Artificial Sequence: Synthetic oligonucleotide
ccggcuucguagccauuuu

SEQ ID NO: 1541034 - RNA, 19 nt, Artificial Sequence
  Description of Artificial Sequence: Synthetic oligonucleotide
ccccagaaucgggaucaau

SEQ ID NO: 1541035 - RNA, 19 nt, Artificial Sequence
  Description of Artificial Sequence: Synthetic oligonucleotide
cgugugcaggaaguacuuu

SEQ ID NO: 1541036 - RNA, 19 nt, Artificial Sequence
  Description of Artificial Sequence: Synthetic oligonucleotide
auacaaauaagcuacaauc

SEQ ID NO: 1541037 - RNA, 19 nt, Artificial Sequence
  Description of Artificial Sequence: Synthetic oligonucleotide
ugaaacaucagcauaaugu

SEQ ID NO: 1541038 - RNA, 19 nt, Artificial Sequence
  Description of Artificial Sequence: Synthetic oligonucleotide
aacucaugucauuugaccc

SEQ ID NO: 1541039 - RNA, 19 nt, Artificial Sequence
  Description of Artificial Sequence: Synthetic oligonucleotide
ucaaguguagaccugagcc

SEQ ID NO: 1541040 - RNA, 19 nt, Artificial Sequence
  Description of Artificial Sequence: Synthetic oligonucleotide
cauuauguauacuaaagcc

SEQ ID NO: 1541041 - RNA, 19 nt, Artificial Sequence
  Description of Artificial Sequence: Synthetic oligonucleotide
acuaagaucaaguguagac

SEQ ID NO: 1541042 - RNA, 19 nt, Artificial Sequence
  Description of Artificial Sequence: Synthetic oligonucleotide
cauaaugucacgcugaaac

SEQ ID NO: 1541043 - RNA, 19 nt, Artificial Sequence
  Description of Artificial Sequence: Synthetic oligonucleotide
ugucauuugacccaggaac

SEQ ID NO: 1541044 - RNA, 19 nt, Artificial Sequence
  Description of Artificial Sequence: Synthetic oligonucleotide
cauaacagcauucugaaac

SEQ ID NO: 1541045 - RNA, 19 nt, Artificial Sequence
  Description of Artificial Sequence: Synthetic oligonucleotide
ugaaaguggcaucucaucg

SEQ ID NO: 1541046 - RNA, 19 nt, Artificial Sequence
  Description of Artificial Sequence: Synthetic oligonucleotide
cuccauacaagcauaaugg

SEQ ID NO: 1541047 - RNA, 19 nt, Artificial Sequence
  Description of Artificial Sequence: Synthetic oligonucleotide
aaaguggcaucucaucgcc

SEQ ID NO: 1541048 - RNA, 19 nt, Artificial Sequence
  Description of Artificial Sequence: Synthetic oligonucleotide
uaagcuacaaucuucuagc

SEQ ID NO: 1541049 - RNA, 19 nt, Artificial Sequence
  Description of Artificial Sequence: Synthetic oligonucleotide
uuaauuguugacaaaucca

SEQ ID NO: 1541050 - RNA, 19 nt, Artificial Sequence
  Description of Artificial Sequence: Synthetic oligonucleotide
uaugucaucuguaacaggu

SEQ ID NO: 1541051 - RNA, 19 nt, Artificial Sequence
  Description of Artificial Sequence: Synthetic oligonucleotide
uaggauuugagccauguga

SEQ ID NO: 1541052 - RNA, 19 nt, Artificial Sequence
  Description of Artificial Sequence: Synthetic oligonucleotide
ugccaugugauacacauca

SEQ ID NO: 1541053 - RNA, 19 nt, Artificial Sequence
  Description of Artificial Sequence: Synthetic oligonucleotide
aaagccaucaucacuuucg

SEQ ID NO: 1541054 - RNA, 19 nt, Artificial Sequence
  Description of Artificial Sequence: Synthetic oligonucleotide
uuguuauauacacacacgu

SEQ ID NO: 1541055 - RNA, 19 nt, Artificial Sequence
  Description of Artificial Sequence: Synthetic oligonucleotide
uuugacuaagaucaagugu

SEQ ID NO: 1541056 - RNA, 19 nt, Artificial Sequence
  Description of Artificial Sequence: Synthetic oligonucleotide
aauacaaauaagcuacaau

SEQ ID NO: 1541057 - RNA, 19 nt, Artificial Sequence
  Description of Artificial Sequence: Synthetic oligonucleotide
ucuagcuacacauuagggc

SEQ ID NO: 1541058 - RNA, 19 nt, Artificial Sequence
  Description of Artificial Sequence: Synthetic oligonucleotide
ucuucacagaugaaagugg

SEQ ID NO: 1541059 - RNA, 19 nt, Artificial Sequence
  Description of Artificial Sequence: Synthetic oligonucleotide
gauuugagccaugugaugg

SEQ ID NO: 1541060 - RNA, 19 nt, Artificial Sequence
  Description of Artificial Sequence: Synthetic oligonucleotide
ugacaauucaaacuugugu

SEQ ID NO: 1541061 - RNA, 19 nt, Artificial Sequence
  Description of Artificial Sequence: Synthetic oligonucleotide
cauaucuaugauuugcugc

SEQ ID NO: 1541062 - RNA, 19 nt, Artificial Sequence
  Description of Artificial Sequence: Synthetic oligonucleotide
uugacaaauccauaggucu

SEQ ID NO: 1541063 - RNA, 19 nt, Artificial Sequence
  Description of Artificial Sequence: Synthetic oligonucleotide
aacugugcuacuccaacuc

SEQ ID NO: 1541064 - RNA, 19 nt, Artificial Sequence
  Description of Artificial Sequence: Synthetic oligonucleotide
uggagcauccuuuaucugg

SEQ ID NO: 1541065 - RNA, 19 nt, Artificial Sequence
  Description of Artificial Sequence: Synthetic oligonucleotide
ugugcuucggaucagucca

SEQ ID NO: 1541066 - RNA, 19 nt, Artificial Sequence
  Description of Artificial Sequence: Synthetic oligonucleotide
auaucuaugauuugcugca

SEQ ID NO: 1541067 - RNA, 19 nt, Artificial Sequence
  Description of Artificial Sequence: Synthetic oligonucleotide
uauuauacauaacagcauu

SEQ ID NO: 1541068 - RNA, 19 nt, Artificial Sequence
  Description of Artificial Sequence: Synthetic oligonucleotide
gauagagucugccagugug

SEQ ID NO: 1541069 - RNA, 19 nt, Artificial Sequence
  Description of Artificial Sequence: Synthetic oligonucleotide
ugcuaugguagccaggugc

SEQ ID NO: 1541070 - RNA, 19 nt, Artificial Sequence
  Description of Artificial Sequence: Synthetic oligonucleotide
uucaauaggauuugagcca

SEQ ID NO: 1541071 - RNA, 19 nt, Artificial Sequence
  Description of Artificial Sequence: Synthetic oligonucleotide
uaugauuugcugcagcccu

SEQ ID NO: 1541072 - RNA, 19 nt, Artificial Sequence
  Description of Artificial Sequence: Synthetic oligonucleotide
uugggauagagucugccag

SEQ ID NO: 1541073 - RNA, 19 nt, Artificial Sequence
  Description of Artificial Sequence: Synthetic oligonucleotide
gacaacaugcuuucagggg

SEQ ID NO: 1541074 - RNA, 19 nt, Artificial Sequence
  Description of Artificial Sequence: Synthetic oligonucleotide
uuuugacuaagaucaagug

SEQ ID NO: 1541075 - RNA, 19 nt, Artificial Sequence
  Description of Artificial Sequence: Synthetic oligonucleotide
ugcuaugucaucuguaaca

SEQ ID NO: 1541076 - RNA, 19 nt, Artificial Sequence
  Description of Artificial Sequence: Synthetic oligonucleotide
aacucugaggcuucacuuc

SEQ ID NO: 1541077 - RNA, 19 nt, Artificial Sequence
  Description of Artificial Sequence: Synthetic oligonucleotide
ucuaugauuugcugcagcc

SEQ ID NO: 1541078 - RNA, 19 nt, Artificial Sequence
  Description of Artificial Sequence: Synthetic oligonucleotide
uagaccugagcccacaagc

SEQ ID NO: 1541079 - RNA, 19 nt, Artificial Sequence
  Description of Artificial Sequence: Synthetic oligonucleotide
aagccaucaucacuuucgc

SEQ ID NO: 1541080 - RNA, 19 nt, Artificial Sequence
  Description of Artificial Sequence: Synthetic oligonucleotide
aaacgggcaacugugcuac

SEQ ID NO: 1541081 - RNA, 19 nt, Artificial Sequence
  Description of Artificial Sequence: Synthetic oligonucleotide
acugauuccagacucagau

SEQ ID NO: 1541082 - RNA, 19 nt, Artificial Sequence
  Description of Artificial Sequence: Synthetic oligonucleotide
ugugugugacuguagagug

SEQ ID NO: 1541083 - RNA, 19 nt, Artificial Sequence
  Description of Artificial Sequence: Synthetic oligonucleotide
uacuccaacucucugaaaa

SEQ ID NO: 1541084 - RNA, 19 nt, Artificial Sequence
  Description of Artificial Sequence: Synthetic oligonucleotide
agacaaauagccuucuccu

SEQ ID NO: 1541085 - RNA, 19 nt, Artificial Sequence
  Description of Artificial Sequence: Synthetic oligonucleotide
auuauguauacuaaagcca

SEQ ID NO: 1541086 - RNA, 19 nt, Artificial Sequence
  Description of Artificial Sequence: Synthetic oligonucleotide
uaggcuagcuacuucacug

SEQ ID NO: 1541087 - RNA, 19 nt, Artificial Sequence
  Description of Artificial Sequence: Synthetic oligonucleotide
acaagcccaagcuauaucu

SEQ ID NO: 1541088 - RNA, 19 nt, Artificial Sequence
  Description of Artificial Sequence: Synthetic oligonucleotide
cuaagaucaaguguagacc

SEQ ID NO: 1541089 - RNA, 19 nt, Artificial Sequence
  Description of Artificial Sequence: Synthetic oligonucleotide
uacauaacagcauucugaa

SEQ ID NO: 1541090 - RNA, 19 nt, Artificial Sequence
  Description of Artificial Sequence: Synthetic oligonucleotide
gaauugcuggaucuguucc

SEQ ID NO: 1541091 - RNA, 19 nt, Artificial Sequence
  Description of Artificial Sequence: Synthetic oligonucleotide
uauacacacacgucacagg

SEQ ID NO: 1541092 - RNA, 19 nt, Artificial Sequence
  Description of Artificial Sequence: Synthetic oligonucleotide
ucuuccauauuuucugagc

SEQ ID NO: 1541093 - RNA, 19 nt, Artificial Sequence
  Description of Artificial Sequence: Synthetic oligonucleotide
ucauaucugcuucaauggc

SEQ ID NO: 1541094 - RNA, 19 nt, Artificial Sequence
  Description of Artificial Sequence: Synthetic oligonucleotide
cacauuagggcacuaacac

SEQ ID NO: 1541095 - RNA, 19 nt, Artificial Sequence
  Description of Artificial Sequence: Synthetic oligonucleotide
acaacaugcuuucagggga

SEQ ID NO: 1541096 - RNA, 19 nt, Artificial Sequence
  Description of Artificial Sequence: Synthetic oligonucleotide
gaaaguggcaucucaucgc

SEQ ID NO: 1541097 - RNA, 19 nt, Artificial Sequence
  Description of Artificial Sequence: Synthetic oligonucleotide
aucaaguguagaccugagc

SEQ ID NO: 1541098 - RNA, 19 nt, Artificial Sequence
  Description of Artificial Sequence: Synthetic oligonucleotide
uuucccauuggaaccaucu

SEQ ID NO: 1541099 - RNA, 19 nt, Artificial Sequence
  Description of Artificial Sequence: Synthetic oligonucleotide
acaacuucuagguucuuca

SEQ ID NO: 1541100 - RNA, 19 nt, Artificial Sequence
  Description of Artificial Sequence: Synthetic oligonucleotide
agauguuugcauaaucaac

SEQ ID NO: 1541101 - RNA, 19 nt, Artificial Sequence
  Description of Artificial Sequence: Synthetic oligonucleotide
uguuauauacacacacguc

SEQ ID NO: 1541102 - RNA, 19 nt, Artificial Sequence
  Description of Artificial Sequence: Synthetic oligonucleotide
cuaaaggaucuucaauagg

SEQ ID NO: 1541103 - RNA, 19 nt, Artificial Sequence
  Description of Artificial Sequence: Synthetic oligonucleotide
cacauuagcauaucuauga

SEQ ID NO: 1541104 - RNA, 19 nt, Artificial Sequence
  Description of Artificial Sequence: Synthetic oligonucleotide
uguggccaagaauugcugg

SEQ ID NO: 1541105 - RNA, 19 nt, Artificial Sequence
  Description of Artificial Sequence: Synthetic oligonucleotide
uuugcauaaucaacugugu

SEQ ID NO: 1541106 - RNA, 19 nt, Artificial Sequence
  Description of Artificial Sequence: Synthetic oligonucleotide
uacacauuagggcacuaac

SEQ ID NO: 1541107 - RNA, 19 nt, Artificial Sequence
  Description of Artificial Sequence: Synthetic oligonucleotide
agaguggcauuauguauac

SEQ ID NO: 1541108 - RNA, 19 nt, Artificial Sequence
  Description of Artificial Sequence: Synthetic oligonucleotide
acuuuuagcacugauucca

SEQ ID NO: 1541109 - RNA, 19 nt, Artificial Sequence
  Description of Artificial Sequence: Synthetic oligonucleotide
uugcauaaucaacugugug

SEQ ID NO: 1541110 - RNA, 19 nt, Artificial Sequence
  Description of Artificial Sequence: Synthetic oligonucleotide
uagcauaucuaugauuugc

SEQ ID NO: 1541111 - RNA, 19 nt, Artificial Sequence
  Description of Artificial Sequence: Synthetic oligonucleotide
auuauacauaacagcauuc

SEQ ID NO: 1541112 - RNA, 19 nt, Artificial Sequence
  Description of Artificial Sequence: Synthetic oligonucleotide
cugcacaaugcuaugguag

SEQ ID NO: 1541113 - RNA, 19 nt, Artificial Sequence
  Description of Artificial Sequence: Synthetic oligonucleotide
cuucacuacacacagagaa

SEQ ID NO: 1541114 - RNA, 19 nt, Artificial Sequence
  Description of Artificial Sequence: Synthetic oligonucleotide
uuagggcacuaacacagcc

SEQ ID NO: 1541115 - RNA, 19 nt, Artificial Sequence
  Description of Artificial Sequence: Synthetic oligonucleotide
gaaccuucucuucugggcc

SEQ ID NO: 1541116 - RNA, 19 nt, Artificial Sequence
  Description of Artificial Sequence: Synthetic oligonucleotide
aauaggauuugagccaugu

SEQ ID NO: 1541117 - RNA, 19 nt, Artificial Sequence
  Description of Artificial Sequence: Synthetic oligonucleotide
uagaguggcauuauguaua

SEQ ID NO: 1541118 - RNA, 19 nt, Artificial Sequence
  Description of Artificial Sequence: Synthetic oligonucleotide
auaacagcauucugaaaca

SEQ ID NO: 1541119 - RNA, 19 nt, Artificial Sequence
  Description of Artificial Sequence: Synthetic oligonucleotide
acuaacacagcccaugauu

SEQ ID NO: 1541120 - RNA, 19 nt, Artificial Sequence
  Description of Artificial Sequence: Synthetic oligonucleotide
ugagccaugugauggagac

SEQ ID NO: 1541121 - RNA, 19 nt, Artificial Sequence
  Description of Artificial Sequence: Synthetic oligonucleotide
uguuugcauaaucaacugu

SEQ ID NO: 1541122 - RNA, 19 nt, Artificial Sequence
  Description of Artificial Sequence: Synthetic oligonucleotide
auacauaacagcauucuga

SEQ ID NO: 1541123 - RNA, 19 nt, Artificial Sequence
  Description of Artificial Sequence: Synthetic oligonucleotide
ucugucuucacagaugaaa

SEQ ID NO: 1541124 - RNA, 19 nt, Artificial Sequence
  Description of Artificial Sequence: Synthetic oligonucleotide
ugcacaaugcuaugguagc

SEQ ID NO: 1541125 - RNA, 19 nt, Artificial Sequence
  Description of Artificial Sequence: Synthetic oligonucleotide
ugcaggaacacauuagcau

SEQ ID NO: 1541126 - RNA, 19 nt, Artificial Sequence
  Description of Artificial Sequence: Synthetic oligonucleotide
ugagucugacaauucaaac

SEQ ID NO: 1541127 - RNA, 19 nt, Artificial Sequence
  Description of Artificial Sequence: Synthetic oligonucleotide
auaucugcuucaauggcac

SEQ ID NO: 1541128 - RNA, 19 nt, Artificial Sequence
  Description of Artificial Sequence: Synthetic oligonucleotide
aaccaucuguuucacaaau

SEQ ID NO: 1541129 - RNA, 19 nt, Artificial Sequence
  Description of Artificial Sequence: Synthetic oligonucleotide
guauacuaaagccaucauc

SEQ ID NO: 1541130 - RNA, 19 nt, Artificial Sequence
  Description of Artificial Sequence: Synthetic oligonucleotide
ucacuacacacagagaacu

SEQ ID NO: 1541131 - RNA, 19 nt, Artificial Sequence
  Description of Artificial Sequence: Synthetic oligonucleotide
uaaaacgggcaacugugcu

SEQ ID NO: 1541132 - RNA, 19 nt, Artificial Sequence
  Description of Artificial Sequence: Synthetic oligonucleotide
ucaaaucugucaccaguca

SEQ ID NO: 1541133 - RNA, 19 nt, Artificial Sequence
  Description of Artificial Sequence: Synthetic oligonucleotide
acaaauaagcuacaaucuu

SEQ ID NO: 1541134 - RNA, 19 nt, Artificial Sequence
  Description of Artificial Sequence: Synthetic oligonucleotide
uccauauuuucugagccug

SEQ ID NO: 1541135 - RNA, 19 nt, Artificial Sequence
  Description of Artificial Sequence: Synthetic oligonucleotide
gauguuugcauaaucaacu

SEQ ID NO: 1541136 - RNA, 19 nt, Artificial Sequence
  Description of Artificial Sequence: Synthetic oligonucleotide
ugacuaagaucaaguguag

SEQ ID NO: 1541137 - RNA, 19 nt, Artificial Sequence
  Description of Artificial Sequence: Synthetic oligonucleotide
aaaucugucaccagucagu

SEQ ID NO: 1541138 - RNA, 19 nt, Artificial Sequence
  Description of Artificial Sequence: Synthetic oligonucleotide
gcuucaauggcacagcggc

SEQ ID NO: 1541139 - RNA, 19 nt, Artificial Sequence
  Description of Artificial Sequence: Synthetic oligonucleotide
ugauacacaucauggucug

SEQ ID NO: 1541140 - RNA, 19 nt, Artificial Sequence
  Description of Artificial Sequence: Synthetic oligonucleotide
caaguguagaccugagccc

SEQ ID NO: 1541141 - RNA, 19 nt, Artificial Sequence
  Description of Artificial Sequence: Synthetic oligonucleotide
ucuacugccaugugauaca

SEQ ID NO: 1541142 - RNA, 19 nt, Artificial Sequence
  Description of Artificial Sequence: Synthetic oligonucleotide
uucggaucaguccauuuuc

SEQ ID NO: 1541143 - RNA, 19 nt, Artificial Sequence
  Description of Artificial Sequence: Synthetic oligonucleotide
auaaucaacuguguggcca

SEQ ID NO: 1541144 - RNA, 19 nt, Artificial Sequence
  Description of Artificial Sequence: Synthetic oligonucleotide
auguauacuaaagccauca

SEQ ID NO: 1541145 - RNA, 19 nt, Artificial Sequence
  Description of Artificial Sequence: Synthetic oligonucleotide
ucaacucaugucauuugac

SEQ ID NO: 1541146 - RNA, 19 nt, Artificial Sequence
  Description of Artificial Sequence: Synthetic oligonucleotide
acuguacacuuucacaaga

SEQ ID NO: 1541147 - RNA, 19 nt, Artificial Sequence
  Description of Artificial Sequence: Synthetic oligonucleotide
ugaguucuggcuucaaauc

SEQ ID NO: 1541148 - RNA, 19 nt, Artificial Sequence
  Description of Artificial Sequence: Synthetic oligonucleotide
ugcuucaauggcacagcgg

SEQ ID NO: 1541149 - RNA, 19 nt, Artificial Sequence
  Description of Artificial Sequence: Synthetic oligonucleotide
uguguugcgucucugccuc

SEQ ID NO: 1541150 - RNA, 19 nt, Artificial Sequence
  Description of Artificial Sequence: Synthetic oligonucleotide
gcauuauguauacuaaagc

SEQ ID NO: 1541151 - RNA, 19 nt, Artificial Sequence
  Description of Artificial Sequence: Synthetic oligonucleotide
auacacaucauggucugag

SEQ ID NO: 1541152 - RNA, 19 nt, Artificial Sequence
  Description of Artificial Sequence: Synthetic oligonucleotide
uugcaggaacacauuagca

SEQ ID NO: 1541153 - RNA, 19 nt, Artificial Sequence
  Description of Artificial Sequence: Synthetic oligonucleotide
acucaugucauuugaccca

SEQ ID NO: 1541154 - RNA, 19 nt, Artificial Sequence
  Description of Artificial Sequence: Synthetic oligonucleotide
caaaucugucaccagucag

SEQ ID NO: 1541155 - RNA, 19 nt, Artificial Sequence
  Description of Artificial Sequence: Synthetic oligonucleotide
aaguguagaccugagccca

SEQ ID NO: 1541156 - RNA, 19 nt, Artificial Sequence
  Description of Artificial Sequence: Synthetic oligonucleotide
ugaaacucggcugugcuuc

SEQ ID NO: 1541157 - RNA, 19 nt, Artificial Sequence
  Description of Artificial Sequence: Synthetic oligonucleotide
aucagcauaaugucacgcu

SEQ ID NO: 1541158 - RNA, 19 nt, Artificial Sequence
  Description of Artificial Sequence: Synthetic oligonucleotide
gacuuuuagcacugauucc

SEQ ID NO: 1541159 - RNA, 19 nt, Artificial Sequence
  Description of Artificial Sequence: Synthetic oligonucleotide
cugcacaacuucuagguuc

SEQ ID NO: 1541160 - RNA, 19 nt, Artificial Sequence
  Description of Artificial Sequence: Synthetic oligonucleotide
cuuguguugcgucucugcc

SEQ ID NO: 1541161 - RNA, 19 nt, Artificial Sequence
  Description of Artificial Sequence: Synthetic oligonucleotide
cuggcuuccaaagauaguc

SEQ ID NO: 1541162 - RNA, 19 nt, Artificial Sequence
  Description of Artificial Sequence: Synthetic oligonucleotide
uucagcucaaagagggaac

SEQ ID NO: 1541163 - RNA, 19 nt, Artificial Sequence
  Description of Artificial Sequence: Synthetic oligonucleotide
uagggcacuaacacagccc

SEQ ID NO: 1541164 - RNA, 19 nt, Artificial Sequence
  Description of Artificial Sequence: Synthetic oligonucleotide
uuagcauaucuaugauuug

SEQ ID NO: 1541165 - RNA, 19 nt, Artificial Sequence
  Description of Artificial Sequence: Synthetic oligonucleotide
aaaacgggcaacugugcua

SEQ ID NO: 1541166 - RNA, 19 nt, Artificial Sequence
  Description of Artificial Sequence: Synthetic oligonucleotide
uuucggguagaaucucucc

SEQ ID NO: 1541167 - RNA, 19 nt, Artificial Sequence
  Description of Artificial Sequence: Synthetic oligonucleotide
ucaacuguguggccaagaa

SEQ ID NO: 1541168 - RNA, 19 nt, Artificial Sequence
  Description of Artificial Sequence: Synthetic oligonucleotide
cuaaaacgggcaacugugc

SEQ ID NO: 1541169 - RNA, 19 nt, Artificial Sequence
  Description of Artificial Sequence: Synthetic oligonucleotide
uuuugcccuaaaacgggca

SEQ ID NO: 1541170 - RNA, 19 nt, Artificial Sequence
  Description of Artificial Sequence: Synthetic oligonucleotide
ugcuacuccaacucucuga

SEQ ID NO: 1541171 - RNA, 19 nt, Artificial Sequence
  Description of Artificial Sequence: Synthetic oligonucleotide
uguacacuuucacaagaua

SEQ ID NO: 1541172 - RNA, 19 nt, Artificial Sequence
  Description of Artificial Sequence: Synthetic oligonucleotide
uucuagguucuucaucuaa

SEQ ID NO: 1541173 - RNA, 19 nt, Artificial Sequence
  Description of Artificial Sequence: Synthetic oligonucleotide
ucaaugagucugacaauuc

SEQ ID NO: 1541174 - RNA, 19 nt, Artificial Sequence
  Description of Artificial Sequence: Synthetic oligonucleotide
uuuucggguagaaucucuc

SEQ ID NO: 1541175 - RNA, 19 nt, Artificial Sequence
  Description of Artificial Sequence: Synthetic oligonucleotide
cauaucugcuucaauggca

SEQ ID NO: 1541176 - RNA, 19 nt, Artificial Sequence
  Description of Artificial Sequence: Synthetic oligonucleotide
gagucugccagugugugug

SEQ ID NO: 1541177 - RNA, 19 nt, Artificial Sequence
  Description of Artificial Sequence: Synthetic oligonucleotide
aagcuacaaucuucuagcu

SEQ ID NO: 1541178 - RNA, 19 nt, Artificial Sequence
  Description of Artificial Sequence: Synthetic oligonucleotide
ucaucuguaacagguugca

SEQ ID NO: 1541179 - RNA, 19 nt, Artificial Sequence
  Description of Artificial Sequence: Synthetic oligonucleotide
uuugcccuaaaacgggcaa

SEQ ID NO: 1541180 - RNA, 19 nt, Artificial Sequence
  Description of Artificial Sequence: Synthetic oligonucleotide
agaccugagcccacaagcc

SEQ ID NO: 1541181 - RNA, 19 nt, Artificial Sequence
  Description of Artificial Sequence: Synthetic oligonucleotide
gucauuugacccaggaacc

SEQ ID NO: 1541182 - RNA, 19 nt, Artificial Sequence
  Description of Artificial Sequence: Synthetic oligonucleotide
ugccucuaaaggaucuuca

SEQ ID NO: 1541183 - RNA, 19 nt, Artificial Sequence
  Description of Artificial Sequence: Synthetic oligonucleotide
uuccauauuuucugagccu

SEQ ID NO: 1541184 - RNA, 19 nt, Artificial Sequence
  Description of Artificial Sequence: Synthetic oligonucleotide
uccuuaggcuccucuaggc

SEQ ID NO: 1541185 - RNA, 19 nt, Artificial Sequence
  Description of Artificial Sequence: Synthetic oligonucleotide
gcauaaucaacuguguggc

SEQ ID NO: 1541186 - RNA, 19 nt, Artificial Sequence
  Description of Artificial Sequence: Synthetic oligonucleotide
uguauacuaaagccaucau

SEQ ID NO: 1541187 - RNA, 19 nt, Artificial Sequence
  Description of Artificial Sequence: Synthetic oligonucleotide
uccagacucagauguuugc

SEQ ID NO: 1541188 - RNA, 19 nt, Artificial Sequence
  Description of Artificial Sequence: Synthetic oligonucleotide
guagccaggugcuauguca

SEQ ID NO: 1541189 - RNA, 19 nt, Artificial Sequence
  Description of Artificial Sequence: Synthetic oligonucleotide
uccuuuaucuggcuuccaa

SEQ ID NO: 1541190 - RNA, 19 nt, Artificial Sequence
  Description of Artificial Sequence: Synthetic oligonucleotide
cuuuugacuaagaucaagu

SEQ ID NO: 1541191 - RNA, 19 nt, Artificial Sequence
  Description of Artificial Sequence: Synthetic oligonucleotide
aagacuuuuagcacugauu

SEQ ID NO: 1541192 - RNA, 19 nt, Artificial Sequence
  Description of Artificial Sequence: Synthetic oligonucleotide
cuaugucaucuguaacagg

SEQ ID NO: 1541193 - RNA, 19 nt, Artificial Sequence
  Description of Artificial Sequence: Synthetic oligonucleotide
uggucugagcuauuauaca

SEQ ID NO: 1541194 - RNA, 19 nt, Artificial Sequence
  Description of Artificial Sequence: Synthetic oligonucleotide
uuuuagcacugauuccaga

SEQ ID NO: 1541195 - RNA, 19 nt, Artificial Sequence
  Description of Artificial Sequence: Synthetic oligonucleotide
uacacaucauggucugagc

SEQ ID NO: 1541196 - RNA, 19 nt, Artificial Sequence
  Description of Artificial Sequence: Synthetic oligonucleotide
aauaagcuacaaucuucua

SEQ ID NO: 1541197 - RNA, 19 nt, Artificial Sequence
  Description of Artificial Sequence: Synthetic oligonucleotide
cugugcuucggaucagucc

SEQ ID NO: 1541198 - RNA, 19 nt, Artificial Sequence
  Description of Artificial Sequence: Synthetic oligonucleotide
uaaucaacuguguggccaa

SEQ ID NO: 1541199 - RNA, 19 nt, Artificial Sequence
  Description of Artificial Sequence: Synthetic oligonucleotide
guugacaaauccauagguc

SEQ ID NO: 1541200 - RNA, 19 nt, Artificial Sequence
  Description of Artificial Sequence: Synthetic oligonucleotide
ucggaucaguccauuuuca

SEQ ID NO: 1541201 - RNA, 19 nt, Artificial Sequence
  Description of Artificial Sequence: Synthetic oligonucleotide
cauacaagcauaauggcuu

SEQ ID NO: 1541202 - RNA, 19 nt, Artificial Sequence
  Description of Artificial Sequence: Synthetic oligonucleotide
ucaauaggauuugagccau

SEQ ID NO: 1541203 - RNA, 19 nt, Artificial Sequence
  Description of Artificial Sequence: Synthetic oligonucleotide
auuugacccaggaaccuuc

SEQ ID NO: 1541204 - RNA, 19 nt, Artificial Sequence
  Description of Artificial Sequence: Synthetic oligonucleotide
uuugagccaugugauggag

SEQ ID NO: 1541205 - RNA, 19 nt, Artificial Sequence
  Description of Artificial Sequence: Synthetic oligonucleotide
aaaggaucuucaauaggau

SEQ ID NO: 1541206 - RNA, 19 nt, Artificial Sequence
  Description of Artificial Sequence: Synthetic oligonucleotide
cucuacugccaugugauac

SEQ ID NO: 1541207 - RNA, 19 nt, Artificial Sequence
  Description of Artificial Sequence: Synthetic oligonucleotide
cauaaucaacuguguggcc

SEQ ID NO: 1541208 - RNA, 19 nt, Artificial Sequence
  Description of Artificial Sequence: Synthetic oligonucleotide
cuaugauuugcugcagccc

SEQ ID NO: 1541209 - RNA, 19 nt, Artificial Sequence
  Description of Artificial Sequence: Synthetic oligonucleotide
ucuucacuacacacagaga

SEQ ID NO: 1541210 - RNA, 19 nt, Artificial Sequence
  Description of Artificial Sequence: Synthetic oligonucleotide
auaggauuugagccaugug

SEQ ID NO: 1541211 - RNA, 19 nt, Artificial Sequence
  Description of Artificial Sequence: Synthetic oligonucleotide
uccaaagauagucccugau

SEQ ID NO: 1541212 - RNA, 19 nt, Artificial Sequence
  Description of Artificial Sequence: Synthetic oligonucleotide
ugcagcccuccauacaagc

SEQ ID NO: 1541213 - RNA, 19 nt, Artificial Sequence
  Description of Artificial Sequence: Synthetic oligonucleotide
ucuaggcuagcuacuucac

SEQ ID NO: 1541214 - RNA, 19 nt, Artificial Sequence
  Description of Artificial Sequence: Synthetic oligonucleotide
guucauuauccauuucaga

SEQ ID NO: 1541215 - RNA, 19 nt, Artificial Sequence
  Description of Artificial Sequence: Synthetic oligonucleotide
acauuagcauaucuaugau

SEQ ID NO: 1541216 - RNA, 19 nt, Artificial Sequence
  Description of Artificial Sequence: Synthetic oligonucleotide
gaaacucggcugugcuucg

SEQ ID NO: 1541217 - RNA, 19 nt, Artificial Sequence
  Description of Artificial Sequence: Synthetic oligonucleotide
acaagcauaauggcuuucu

SEQ ID NO: 1541218 - RNA, 19 nt, Artificial Sequence
  Description of Artificial Sequence: Synthetic oligonucleotide
uuguguugcgucucugccu

SEQ ID NO: 1541219 - RNA, 19 nt, Artificial Sequence
  Description of Artificial Sequence: Synthetic oligonucleotide
gacucagauguuugcauaa

SEQ ID NO: 1541220 - RNA, 19 nt, Artificial Sequence
  Description of Artificial Sequence: Synthetic oligonucleotide
uaucuggcuuccaaagaua

SEQ ID NO: 1541221 - RNA, 19 nt, Artificial Sequence
  Description of Artificial Sequence: Synthetic oligonucleotide
aacagguugcaggaacaca

SEQ ID NO: 1541222 - RNA, 19 nt, Artificial Sequence
  Description of Artificial Sequence: Synthetic oligonucleotide
acugugcuacuccaacucu

SEQ ID NO: 1541223 - RNA, 19 nt, Artificial Sequence
  Description of Artificial Sequence: Synthetic oligonucleotide
aaucugucaccagucaguu

SEQ ID NO: 1541224 - RNA, 19 nt, Artificial Sequence
  Description of Artificial Sequence: Synthetic oligonucleotide
acagguugcaggaacacau

SEQ ID NO: 1541225 - RNA, 19 nt, Artificial Sequence
  Description of Artificial Sequence: Synthetic oligonucleotide
uagcuacacauuagggcac

SEQ ID NO: 1541226 - RNA, 19 nt, Artificial Sequence
  Description of Artificial Sequence: Synthetic oligonucleotide
cucaucgccuuucccauug

SEQ ID NO: 1541227 - RNA, 19 nt, Artificial Sequence
  Description of Artificial Sequence: Synthetic oligonucleotide
cacagagaacugugaagag

SEQ ID NO: 1541228 - RNA, 19 nt, Artificial Sequence
  Description of Artificial Sequence: Synthetic oligonucleotide
gcuaugucaucuguaacag

SEQ ID NO: 1541229 - RNA, 19 nt, Artificial Sequence
  Description of Artificial Sequence: Synthetic oligonucleotide
aauggcuuucuuccauauu

SEQ ID NO: 1541230 - RNA, 19 nt, Artificial Sequence
  Description of Artificial Sequence: Synthetic oligonucleotide
gaacacauuagcauaucua

SEQ ID NO: 1541231 - RNA, 19 nt, Artificial Sequence
  Description of Artificial Sequence: Synthetic oligonucleotide
ugggauagagucugccagu

SEQ ID NO: 1541232 - RNA, 19 nt, Artificial Sequence
  Description of Artificial Sequence: Synthetic oligonucleotide
uuugacccaggaaccuucu

SEQ ID NO: 1541233 - RNA, 19 nt, Artificial Sequence
  Description of Artificial Sequence: Synthetic oligonucleotide
aagaucaaguguagaccug

SEQ ID NO: 1541234 - RNA, 19 nt, Artificial Sequence
  Description of Artificial Sequence: Synthetic oligonucleotide
cugcuucaauggcacagcg

SEQ ID NO: 1541235 - RNA, 19 nt, Artificial Sequence
  Description of Artificial Sequence: Synthetic oligonucleotide
ucauuugacccaggaaccu

SEQ ID NO: 1541236 - RNA, 19 nt, Artificial Sequence
  Description of Artificial Sequence: Synthetic oligonucleotide
aucucuacugccaugugau

SEQ ID NO: 1541237 - RNA, 19 nt, Artificial Sequence
  Description of Artificial Sequence: Synthetic oligonucleotide
ugauuugcugcagcccucc

SEQ ID NO: 1541238 - RNA, 19 nt, Artificial Sequence
  Description of Artificial Sequence: Synthetic oligonucleotide
acacauuagggcacuaaca

SEQ ID NO: 1541239 - RNA, 19 nt, Artificial Sequence
  Description of Artificial Sequence: Synthetic oligonucleotide
acacgucacagguuuauuu

SEQ ID NO: 1541240 - RNA, 19 nt, Artificial Sequence
  Description of Artificial Sequence: Synthetic oligonucleotide
acacauuagcauaucuaug

SEQ ID NO: 1541241 - RNA, 19 nt, Artificial Sequence
  Description of Artificial Sequence: Synthetic oligonucleotide
guagaccugagcccacaag

SEQ ID NO: 1541242 - RNA, 19 nt, Artificial Sequence
  Description of Artificial Sequence: Synthetic oligonucleotide
uaugguagccaggugcuau

SEQ ID NO: 1541243 - RNA, 19 nt, Artificial Sequence
  Description of Artificial Sequence: Synthetic oligonucleotide
ugucacgcugaaacucggc

SEQ ID NO: 1541244 - RNA, 19 nt, Artificial Sequence
  Description of Artificial Sequence: Synthetic oligonucleotide
agcauaaugucacgcugaa

SEQ ID NO: 1541245 - RNA, 19 nt, Artificial Sequence
  Description of Artificial Sequence: Synthetic oligonucleotide
cagauguuugcauaaucaa

SEQ ID NO: 1541246 - RNA, 19 nt, Artificial Sequence
  Description of Artificial Sequence: Synthetic oligonucleotide
aggauuugagccaugugau

SEQ ID NO: 1541247 - RNA, 19 nt, Artificial Sequence
  Description of Artificial Sequence: Synthetic oligonucleotide
cugauuccagacucagaug

SEQ ID NO: 1541248 - RNA, 19 nt, Artificial Sequence
  Description of Artificial Sequence: Synthetic oligonucleotide
cugauucuucuuucaauga

SEQ ID NO: 1541249 - RNA, 19 nt, Artificial Sequence
  Description of Artificial Sequence: Synthetic oligonucleotide
cauccuuuaucuggcuucc

SEQ ID NO: 1541250 - RNA, 19 nt, Artificial Sequence
  Description of Artificial Sequence: Synthetic oligonucleotide
aguggcaucucaucgccuu

SEQ ID NO: 1541251 - RNA, 19 nt, Artificial Sequence
  Description of Artificial Sequence: Synthetic oligonucleotide
ugcccuaaaacgggcaacu

SEQ ID NO: 1541252 - RNA, 19 nt, Artificial Sequence
  Description of Artificial Sequence: Synthetic oligonucleotide
cuugggauagagucugcca

SEQ ID NO: 1541253 - RNA, 19 nt, Artificial Sequence
  Description of Artificial Sequence: Synthetic oligonucleotide
ucaucgccuuucccauugg

SEQ ID NO: 1541254 - RNA, 19 nt, Artificial Sequence
  Description of Artificial Sequence: Synthetic oligonucleotide
agacucagauguuugcaua

SEQ ID NO: 1541255 - RNA, 19 nt, Artificial Sequence
  Description of Artificial Sequence: Synthetic oligonucleotide
augucauuugacccaggaa

SEQ ID NO: 1541256 - RNA, 19 nt, Artificial Sequence
  Description of Artificial Sequence: Synthetic oligonucleotide
caugucauuugacccagga

SEQ ID NO: 1541257 - RNA, 19 nt, Artificial Sequence
  Description of Artificial Sequence: Synthetic oligonucleotide
ucccugauucuucuuucaa

SEQ ID NO: 1541258 - RNA, 19 nt, Artificial Sequence
  Description of Artificial Sequence: Synthetic oligonucleotide
cuggaucuguuccaggaca

SEQ ID NO: 1541259 - RNA, 19 nt, Artificial Sequence
  Description of Artificial Sequence: Synthetic oligonucleotide
ggugcuaugucaucuguaa

SEQ ID NO: 1541260 - RNA, 19 nt, Artificial Sequence
  Description of Artificial Sequence: Synthetic oligonucleotide
cugugcuacuccaacucuc

SEQ ID NO: 1541261 - RNA, 19 nt, Artificial Sequence
  Description of Artificial Sequence: Synthetic oligonucleotide
uguagaccugagcccacaa

SEQ ID NO: 1541262 - RNA, 19 nt, Artificial Sequence
  Description of Artificial Sequence: Synthetic oligonucleotide
cauggggacacuguccuuc

SEQ ID NO: 1541263 - RNA, 19 nt, Artificial Sequence
  Description of Artificial Sequence: Synthetic oligonucleotide
aggcuagcuacuucacuga

SEQ ID NO: 1541264 - RNA, 19 nt, Artificial Sequence
  Description of Artificial Sequence: Synthetic oligonucleotide
gcauaucuaugauuugcug

SEQ ID NO: 1541265 - RNA, 19 nt, Artificial Sequence
  Description of Artificial Sequence: Synthetic oligonucleotide
cugcuugggauagagucug

SEQ ID NO: 1541266 - RNA, 19 nt, Artificial Sequence
  Description of Artificial Sequence: Synthetic oligonucleotide
gcgucucugccucuaaagg

SEQ ID NO: 1541267 - RNA, 19 nt, Artificial Sequence
  Description of Artificial Sequence: Synthetic oligonucleotide
aggaacacauuagcauauc

SEQ ID NO: 1541268 - RNA, 19 nt, Artificial Sequence
  Description of Artificial Sequence: Synthetic oligonucleotide
augguagccaggugcuaug

SEQ ID NO: 1541269 - RNA, 19 nt, Artificial Sequence
  Description of Artificial Sequence: Synthetic oligonucleotide
auacaagcauaauggcuuu

SEQ ID NO: 1541270 - RNA, 19 nt, Artificial Sequence
  Description of Artificial Sequence: Synthetic oligonucleotide
uucucagccuuuugacuaa

SEQ ID NO: 1541271 - RNA, 19 nt, Artificial Sequence
  Description of Artificial Sequence: Synthetic oligonucleotide
ucucugccucuaaaggauc

SEQ ID NO: 1541272 - RNA, 19 nt, Artificial Sequence
  Description of Artificial Sequence: Synthetic oligonucleotide
caucucuacugccauguga

SEQ ID NO: 1541273 - RNA, 19 nt, Artificial Sequence
  Description of Artificial Sequence: Synthetic oligonucleotide
cagcauaaugucacgcuga

SEQ ID NO: 1541274 - RNA, 19 nt, Artificial Sequence
  Description of Artificial Sequence: Synthetic oligonucleotide
guuccaggacaucucucug

SEQ ID NO: 1541275 - RNA, 19 nt, Artificial Sequence
  Description of Artificial Sequence: Synthetic oligonucleotide
aaauagccuucuccuugau

SEQ ID NO: 1541276 - RNA, 19 nt, Artificial Sequence
  Description of Artificial Sequence: Synthetic oligonucleotide
gguugcaggaacacauuag

SEQ ID NO: 1541277 - RNA, 19 nt, Artificial Sequence
  Description of Artificial Sequence: Synthetic oligonucleotide
agcuacaaucuucuagcua

SEQ ID NO: 1541278 - RNA, 19 nt, Artificial Sequence
  Description of Artificial Sequence: Synthetic oligonucleotide
agguugcaggaacacauua

SEQ ID NO: 1541279 - RNA, 19 nt, Artificial Sequence
  Description of Artificial Sequence: Synthetic oligonucleotide
guggccaagaauugcugga

SEQ ID NO: 1541280 - RNA, 19 nt, Artificial Sequence
  Description of Artificial Sequence: Synthetic oligonucleotide
uuucucaacucaugucauu

SEQ ID NO: 1541281 - RNA, 19 nt, Artificial Sequence
  Description of Artificial Sequence: Synthetic oligonucleotide
augagucugacaauucaaa

SEQ ID NO: 1541282 - RNA, 19 nt, Artificial Sequence
  Description of Artificial Sequence: Synthetic oligonucleotide
cugagcuauuauacauaac

SEQ ID NO: 1541283 - RNA, 19 nt, Artificial Sequence
  Description of Artificial Sequence: Synthetic oligonucleotide
cuuaggcuccucuaggcua

SEQ ID NO: 1541284 - RNA, 19 nt, Artificial Sequence
  Description of Artificial Sequence: Synthetic oligonucleotide
aaacucggcugugcuucgg

SEQ ID NO: 1541285 - RNA, 19 nt, Artificial Sequence
  Description of Artificial Sequence: Synthetic oligonucleotide
caacucucugaaaagagau

SEQ ID NO: 1541286 - RNA, 19 nt, Artificial Sequence
  Description of Artificial Sequence: Synthetic oligonucleotide
gcuccucuaggcuagcuac

SEQ ID NO: 1541287 - RNA, 19 nt, Artificial Sequence
  Description of Artificial Sequence: Synthetic oligonucleotide
aagaauugcuggaucuguu

SEQ ID NO: 1541288 - RNA, 19 nt, Artificial Sequence
  Description of Artificial Sequence: Synthetic oligonucleotide
gacuaagaucaaguguaga

SEQ ID NO: 1541289 - RNA, 19 nt, Artificial Sequence
  Description of Artificial Sequence: Synthetic oligonucleotide
uguuuucggguagaaucuc

SEQ ID NO: 1541290 - RNA, 19 nt, Artificial Sequence
  Description of Artificial Sequence: Synthetic oligonucleotide
aggggaugccucugucuuc

SEQ ID NO: 1541291 - RNA, 19 nt, Artificial Sequence
  Description of Artificial Sequence: Synthetic oligonucleotide
aacaugcuuucaggggaug

SEQ ID NO: 1541292 - RNA, 19 nt, Artificial Sequence
  Description of Artificial Sequence: Synthetic oligonucleotide
cuuucuuauuuguuauaua

SEQ ID NO: 1541293 - RNA, 19 nt, Artificial Sequence
  Description of Artificial Sequence: Synthetic oligonucleotide
cuguguggccaagaauugc

SEQ ID NO: 1541294 - RNA, 19 nt, Artificial Sequence
  Description of Artificial Sequence: Synthetic oligonucleotide
gcaucuuguuuucggguag

SEQ ID NO: 1541295 - RNA, 19 nt, Artificial Sequence
  Description of Artificial Sequence: Synthetic oligonucleotide
caggagagcccauggggac

SEQ ID NO: 1541296 - RNA, 19 nt, Artificial Sequence
  Description of Artificial Sequence: Synthetic oligonucleotide
ggauuugagccaugugaug

SEQ ID NO: 1541297 - RNA, 19 nt, Artificial Sequence
  Description of Artificial Sequence: Synthetic oligonucleotide
auagagucugccagugugu

SEQ ID NO: 1541298 - RNA, 19 nt, Artificial Sequence
  Description of Artificial Sequence: Synthetic oligonucleotide
aacucucugaaaagagauu

SEQ ID NO: 1541299 - RNA, 19 nt, Artificial Sequence
  Description of Artificial Sequence: Synthetic oligonucleotide
gugcuaugucaucuguaac

SEQ ID NO: 1541300 - RNA, 19 nt, Artificial Sequence
  Description of Artificial Sequence: Synthetic oligonucleotide
gaagacuuuuagcacugau

SEQ ID NO: 1541301 - RNA, 19 nt, Artificial Sequence
  Description of Artificial Sequence: Synthetic oligonucleotide
ggcacuaacacagcccaug

SEQ ID NO: 1541302 - RNA, 19 nt, Artificial Sequence
  Description of Artificial Sequence: Synthetic oligonucleotide
caagcuauaucuuguuuau

SEQ ID NO: 1541303 - RNA, 19 nt, Artificial Sequence
  Description of Artificial Sequence: Synthetic oligonucleotide
acgggcaacugugcuacuc

SEQ ID NO: 1541304 - RNA, 19 nt, Artificial Sequence
  Description of Artificial Sequence: Synthetic oligonucleotide
gucugacaauucaaacuug

SEQ ID NO: 1541305 - RNA, 19 nt, Artificial Sequence
  Description of Artificial Sequence: Synthetic oligonucleotide
augauuugcugcagcccuc

SEQ ID NO: 1541306 - RNA, 19 nt, Artificial Sequence
  Description of Artificial Sequence: Synthetic oligonucleotide
gagcccacaagcccaagcu

SEQ ID NO: 1541307 - RNA, 19 nt, Artificial Sequence
  Description of Artificial Sequence: Synthetic oligonucleotide
agccaggugcuaugucauc

SEQ ID NO: 1541308 - RNA, 19 nt, Artificial Sequence
  Description of Artificial Sequence: Synthetic oligonucleotide
agagucugccagugugugu

SEQ ID NO: 1541309 - RNA, 19 nt, Artificial Sequence
  Description of Artificial Sequence: Synthetic oligonucleotide
uucuuucaaugagucugac

SEQ ID NO: 1541310 - RNA, 19 nt, Artificial Sequence
  Description of Artificial Sequence: Synthetic oligonucleotide
uugcccuaaaacgggcaac

SEQ ID NO: 1541311 - RNA, 19 nt, Artificial Sequence
  Description of Artificial Sequence: Synthetic oligonucleotide
uagcuacuucacugacucc

SEQ ID NO: 1541312 - RNA, 19 nt, Artificial Sequence
  Description of Artificial Sequence: Synthetic oligonucleotide
cuacugccaugugauacac

SEQ ID NO: 1541313 - RNA, 19 nt, Artificial Sequence
  Description of Artificial Sequence: Synthetic oligonucleotide
aguguagaccugagcccac

SEQ ID NO: 1541314 - RNA, 19 nt, Artificial Sequence
  Description of Artificial Sequence: Synthetic oligonucleotide
agccaucaucacuuucgcu

SEQ ID NO: 1541315 - RNA, 19 nt, Artificial Sequence
  Description of Artificial Sequence: Synthetic oligonucleotide
augucacgcugaaacucgg

SEQ ID NO: 1541316 - RNA, 19 nt, Artificial Sequence
  Description of Artificial Sequence: Synthetic oligonucleotide
cuggagcauccuuuaucug

SEQ ID NO: 1541317 - RNA, 19 nt, Artificial Sequence
  Description of Artificial Sequence: Synthetic oligonucleotide
ccaagcuauaucuuguuua

SEQ ID NO: 1541318 - RNA, 19 nt, Artificial Sequence
  Description of Artificial Sequence: Synthetic oligonucleotide
uugcgucucugccucuaaa

SEQ ID NO: 1541319 - RNA, 19 nt, Artificial Sequence
  Description of Artificial Sequence: Synthetic oligonucleotide
aucaacuguguggccaaga

SEQ ID NO: 1541320 - RNA, 19 nt, Artificial Sequence
  Description of Artificial Sequence: Synthetic oligonucleotide
caauaggauuugagccaug

SEQ ID NO: 1541321 - RNA, 19 nt, Artificial Sequence
  Description of Artificial Sequence: Synthetic oligonucleotide
uacaagcauaauggcuuuc

SEQ ID NO: 1541322 - RNA, 19 nt, Artificial Sequence
  Description of Artificial Sequence: Synthetic oligonucleotide
ccagcugcacaacuucuag

SEQ ID NO: 1541323 - RNA, 19 nt, Artificial Sequence
  Description of Artificial Sequence: Synthetic oligonucleotide
ggucugagcuauuauacau

SEQ ID NO: 1541324 - RNA, 19 nt, Artificial Sequence
  Description of Artificial Sequence: Synthetic oligonucleotide
cugccucuaaaggaucuuc

SEQ ID NO: 1541325 - RNA, 19 nt, Artificial Sequence
  Description of Artificial Sequence: Synthetic oligonucleotide
gacaaauagccuucuccuu

SEQ ID NO: 1541326 - RNA, 19 nt, Artificial Sequence
  Description of Artificial Sequence: Synthetic oligonucleotide
cauaauggcuuucuuccau

SEQ ID NO: 1541327 - RNA, 19 nt, Artificial Sequence
  Description of Artificial Sequence: Synthetic oligonucleotide
ucucuacugccaugugaua

SEQ ID NO: 1541328 - RNA, 19 nt, Artificial Sequence
  Description of Artificial Sequence: Synthetic oligonucleotide
aucgccuuucccauuggaa

SEQ ID NO: 1541329 - RNA, 19 nt, Artificial Sequence
  Description of Artificial Sequence: Synthetic oligonucleotide
agcuacacauuagggcacu

SEQ ID NO: 1541330 - RNA, 19 nt, Artificial Sequence
  Description of Artificial Sequence: Synthetic oligonucleotide
ggaacacauuagcauaucu

SEQ ID NO: 1541331 - RNA, 19 nt, Artificial Sequence
  Description of Artificial Sequence: Synthetic oligonucleotide
uccucuaggcuagcuacuu

SEQ ID NO: 1541332 - RNA, 19 nt, Artificial Sequence
  Description of Artificial Sequence: Synthetic oligonucleotide
gugcuacuccaacucucug

SEQ ID NO: 1541333 - RNA, 19 nt, Artificial Sequence
  Description of Artificial Sequence: Synthetic oligonucleotide
caauggcacagcggcgucc

SEQ ID NO: 1541334 - RNA, 19 nt, Artificial Sequence
  Description of Artificial Sequence: Synthetic oligonucleotide
ccgaagacuuuuagcacug

SEQ ID NO: 1541335 - RNA, 19 nt, Artificial Sequence
  Description of Artificial Sequence: Synthetic oligonucleotide
gggauagagucugccagug

SEQ ID NO: 1541336 - RNA, 19 nt, Artificial Sequence
  Description of Artificial Sequence: Synthetic oligonucleotide
cugccaugugauacacauc

SEQ ID NO: 1541337 - RNA, 19 nt, Artificial Sequence
  Description of Artificial Sequence: Synthetic oligonucleotide
gauacacaucauggucuga

SEQ ID NO: 1541338 - RNA, 19 nt, Artificial Sequence
  Description of Artificial Sequence: Synthetic oligonucleotide
gucugagcuauuauacaua

SEQ ID NO: 1541339 - RNA, 19 nt, Artificial Sequence
  Description of Artificial Sequence: Synthetic oligonucleotide
cacgcugaaacucggcugu

SEQ ID NO: 1541340 - RNA, 19 nt, Artificial Sequence
  Description of Artificial Sequence: Synthetic oligonucleotide
gcacugauuccagacucag

SEQ ID NO: 1541341 - RNA, 19 nt, Artificial Sequence
  Description of Artificial Sequence: Synthetic oligonucleotide
ucugccucuaaaggaucuu

SEQ ID NO: 1541342 - RNA, 19 nt, Artificial Sequence
  Description of Artificial Sequence: Synthetic oligonucleotide
gcauaauggcuuucuucca

SEQ ID NO: 1541343 - RNA, 19 nt, Artificial Sequence
  Description of Artificial Sequence: Synthetic oligonucleotide
agucugccaguguguguga

SEQ ID NO: 1541344 - RNA, 19 nt, Artificial Sequence
  Description of Artificial Sequence: Synthetic oligonucleotide
ccauacaagcauaauggcu

SEQ ID NO: 1541345 - RNA, 19 nt, Artificial Sequence
  Description of Artificial Sequence: Synthetic oligonucleotide
gcuugggauagagucugcc

SEQ ID NO: 1541346 - RNA, 19 nt, Artificial Sequence
  Description of Artificial Sequence: Synthetic oligonucleotide
aacgggcaacugugcuacu

SEQ ID NO: 1541347 - RNA, 19 nt, Artificial Sequence
  Description of Artificial Sequence: Synthetic oligonucleotide
cagaugaaaguggcaucuc

SEQ ID NO: 1541348 - RNA, 19 nt, Artificial Sequence
  Description of Artificial Sequence: Synthetic oligonucleotide
ggaucaguccauuuucaau

SEQ ID NO: 1541349 - RNA, 19 nt, Artificial Sequence
  Description of Artificial Sequence: Synthetic oligonucleotide
cacugauuccagacucaga

SEQ ID NO: 1541350 - RNA, 19 nt, Artificial Sequence
  Description of Artificial Sequence: Synthetic oligonucleotide
uguugcgucucugccucua

SEQ ID NO: 1541351 - RNA, 19 nt, Artificial Sequence
  Description of Artificial Sequence: Synthetic oligonucleotide
gcacaaugcuaugguagcc

SEQ ID NO: 1541352 - RNA, 19 nt, Artificial Sequence
  Description of Artificial Sequence: Synthetic oligonucleotide
gagggaacucugaggcuuc

SEQ ID NO: 1541353 - RNA, 19 nt, Artificial Sequence
  Description of Artificial Sequence: Synthetic oligonucleotide
cacgucacagguuuauuuu

SEQ ID NO: 1541354 - RNA, 19 nt, Artificial Sequence
  Description of Artificial Sequence: Synthetic oligonucleotide
gcaucucaucgccuuuccc

SEQ ID NO: 1541355 - RNA, 19 nt, Artificial Sequence
  Description of Artificial Sequence: Synthetic oligonucleotide
ggccaagaauugcuggauc

SEQ ID NO: 1541356 - RNA, 19 nt, Artificial Sequence
  Description of Artificial Sequence: Synthetic oligonucleotide
ucucaucgccuuucccauu

SEQ ID NO: 1541357 - RNA, 19 nt, Artificial Sequence
  Description of Artificial Sequence: Synthetic oligonucleotide
guuuucggguagaaucucu

SEQ ID NO: 1541358 - RNA, 19 nt, Artificial Sequence
  Description of Artificial Sequence: Synthetic oligonucleotide
cuaggcuagcuacuucacu

SEQ ID NO: 1541359 - RNA, 19 nt, Artificial Sequence
  Description of Artificial Sequence: Synthetic oligonucleotide
ccccgaagacuuuuagcac

SEQ ID NO: 1541360 - RNA, 19 nt, Artificial Sequence
  Description of Artificial Sequence: Synthetic oligonucleotide
ccaugugauggagacaaca

SEQ ID NO: 1541361 - RNA, 19 nt, Artificial Sequence
  Description of Artificial Sequence: Synthetic oligonucleotide
caucgccuuucccauugga

SEQ ID NO: 1541362 - RNA, 19 nt, Artificial Sequence
  Description of Artificial Sequence: Synthetic oligonucleotide
gcugaaacucggcugugcu

SEQ ID NO: 1541363 - RNA, 19 nt, Artificial Sequence
  Description of Artificial Sequence: Synthetic oligonucleotide
cuucuagguucuucaucua

SEQ ID NO: 1541364 - RNA, 19 nt, Artificial Sequence
  Description of Artificial Sequence: Synthetic oligonucleotide
aggugcuaugucaucugua

SEQ ID NO: 1541365 - RNA, 19 nt, Artificial Sequence
  Description of Artificial Sequence: Synthetic oligonucleotide
guugcgucucugccucuaa

SEQ ID NO: 1541366 - RNA, 19 nt, Artificial Sequence
  Description of Artificial Sequence: Synthetic oligonucleotide
ggagagcccauggggacac

SEQ ID NO: 1541367 - RNA, 19 nt, Artificial Sequence
  Description of Artificial Sequence: Synthetic oligonucleotide
ugcuucggaucaguccauu

SEQ ID NO: 1541368 - RNA, 19 nt, Artificial Sequence
  Description of Artificial Sequence: Synthetic oligonucleotide
cagcccuccauacaagcau

SEQ ID NO: 1541369 - RNA, 19 nt, Artificial Sequence
  Description of Artificial Sequence: Synthetic oligonucleotide
ccauauuuucugagccuga

SEQ ID NO: 1541370 - RNA, 19 nt, Artificial Sequence
  Description of Artificial Sequence: Synthetic oligonucleotide
cccgaagacuuuuagcacu

SEQ ID NO: 1541371 - RNA, 19 nt, Artificial Sequence
  Description of Artificial Sequence: Synthetic oligonucleotide
guguagaccugagcccaca

SEQ ID NO: 1541372 - RNA, 19 nt, Artificial Sequence
  Description of Artificial Sequence: Synthetic oligonucleotide
auccuuuaucuggcuucca

SEQ ID NO: 1541373 - RNA, 19 nt, Artificial Sequence
  Description of Artificial Sequence: Synthetic oligonucleotide
agcccuccauacaagcaua

SEQ ID NO: 1541374 - RNA, 19 nt, Artificial Sequence
  Description of Artificial Sequence: Synthetic oligonucleotide
cuacuccaacucucugaaa

SEQ ID NO: 1541375 - RNA, 19 nt, Artificial Sequence
  Description of Artificial Sequence: Synthetic oligonucleotide
gcuaugguagccaggugcu

SEQ ID NO: 1541376 - RNA, 19 nt, Artificial Sequence
  Description of Artificial Sequence: Synthetic oligonucleotide
caacuguguggccaagaau

SEQ ID NO: 1541377 - RNA, 19 nt, Artificial Sequence
  Description of Artificial Sequence: Synthetic oligonucleotide
uaggcuccucuaggcuagc

SEQ ID NO: 1541378 - RNA, 19 nt, Artificial Sequence
  Description of Artificial Sequence: Synthetic oligonucleotide
acgcugaaacucggcugug

SEQ ID NO: 1541379 - RNA, 19 nt, Artificial Sequence
  Description of Artificial Sequence: Synthetic oligonucleotide
ccuuucuuauuuguuauau

SEQ ID NO: 1541380 - RNA, 19 nt, Artificial Sequence
  Description of Artificial Sequence: Synthetic oligonucleotide
gacuguagaguggcauuau

SEQ ID NO: 1541381 - RNA, 19 nt, Artificial Sequence
  Description of Artificial Sequence: Synthetic oligonucleotide
caggugcuaugucaucugu

SEQ ID NO: 1541382 - RNA, 19 nt, Artificial Sequence
  Description of Artificial Sequence: Synthetic oligonucleotide
caagcccaagcuauaucuu

SEQ ID NO: 1541383 - RNA, 19 nt, Artificial Sequence
  Description of Artificial Sequence: Synthetic oligonucleotide
caagcauaauggcuuucuu

SEQ ID NO: 1541384 - RNA, 19 nt, Artificial Sequence
  Description of Artificial Sequence: Synthetic oligonucleotide
cuccucuaggcuagcuacu

SEQ ID NO: 1541385 - RNA, 19 nt, Artificial Sequence
  Description of Artificial Sequence: Synthetic oligonucleotide
gggguucauuauccauuuc

SEQ ID NO: 1541386 - RNA, 19 nt, Artificial Sequence
  Description of Artificial Sequence: Synthetic oligonucleotide
cccuaaaacgggcaacugu

SEQ ID NO: 1541387 - RNA, 19 nt, Artificial Sequence
  Description of Artificial Sequence: Synthetic oligonucleotide
cugaaacucggcugugcuu

SEQ ID NO: 1541388 - RNA, 19 nt, Artificial Sequence
  Description of Artificial Sequence: Synthetic oligonucleotide
gcugcuugggauagagucu

SEQ ID NO: 1541389 - RNA, 19 nt, Artificial Sequence
  Description of Artificial Sequence: Synthetic oligonucleotide
gcccuaaaacgggcaacug

SEQ ID NO: 1541390 - RNA, 19 nt, Artificial Sequence
  Description of Artificial Sequence: Synthetic oligonucleotide
cugagcccacaagcccaag

SEQ ID NO: 1541391 - RNA, 19 nt, Artificial Sequence
  Description of Artificial Sequence: Synthetic oligonucleotide
gcugugcuucggaucaguc

SEQ ID NO: 1541392 - RNA, 19 nt, Artificial Sequence
  Description of Artificial Sequence: Synthetic oligonucleotide
ggauagagucugccagugu

SEQ ID NO: 1541393 - RNA, 19 nt, Artificial Sequence
  Description of Artificial Sequence: Synthetic oligonucleotide
cccauuggaaccaucuguu

SEQ ID NO: 1541394 - RNA, 19 nt, Artificial Sequence
  Description of Artificial Sequence: Synthetic oligonucleotide
cauuugacccaggaaccuu

SEQ ID NO: 1541395 - RNA, 19 nt, Artificial Sequence
  Description of Artificial Sequence: Synthetic oligonucleotide
gcuagcuacuucacugacu

SEQ ID NO: 1541396 - RNA, 19 nt, Artificial Sequence
  Description of Artificial Sequence: Synthetic oligonucleotide
gggaacucugaggcuucac

SEQ ID NO: 1541397 - RNA, 19 nt, Artificial Sequence
  Description of Artificial Sequence: Synthetic oligonucleotide
cccauggggacacuguccu

SEQ ID NO: 1541398 - RNA, 19 nt, Artificial Sequence
  Description of Artificial Sequence: Synthetic oligonucleotide
cuaugguagccaggugcua

SEQ ID NO: 1541399 - RNA, 19 nt, Artificial Sequence
  Description of Artificial Sequence: Synthetic oligonucleotide
cagguugcaggaacacauu

SEQ ID NO: 1541400 - RNA, 19 nt, Artificial Sequence
  Description of Artificial Sequence: Synthetic oligonucleotide
gcauaaugucacgcugaaa

SEQ ID NO: 1541401 - RNA, 19 nt, Artificial Sequence
  Description of Artificial Sequence: Synthetic oligonucleotide
cccugauucuucuuucaau

SEQ ID NO: 1541402 - RNA, 19 nt, Artificial Sequence
  Description of Artificial Sequence: Synthetic oligonucleotide
gcugcacaacuucuagguu

SEQ ID NO: 1541403 - RNA, 19 nt, Artificial Sequence
  Description of Artificial Sequence: Synthetic oligonucleotide
cggaucaguccauuuucaa

SEQ ID NO: 1541404 - RNA, 19 nt, Artificial Sequence
  Description of Artificial Sequence: Synthetic oligonucleotide
cccacaagcccaagcuaua

SEQ ID NO: 1541405 - RNA, 19 nt, Artificial Sequence
  Description of Artificial Sequence: Synthetic oligonucleotide
gccaugugauggagacaac

SEQ ID NO: 1541406 - RNA, 19 nt, Artificial Sequence
  Description of Artificial Sequence: Synthetic oligonucleotide
gcccuccauacaagcauaa

SEQ ID NO: 1541407 - RNA, 19 nt, Artificial Sequence
  Description of Artificial Sequence: Synthetic oligonucleotide
gcccaagcuauaucuuguu

SEQ ID NO: 1541408 - RNA, 19 nt, Artificial Sequence
  Description of Artificial Sequence: Synthetic oligonucleotide
gcggcguccccugguuccc

SEQ ID NO: 1541409 - RNA, 19 nt, Artificial Sequence
  Description of Artificial Sequence: Synthetic oligonucleotide
caccuggagcauccuuuau

SEQ ID NO: 1541410 - RNA, 19 nt, Artificial Sequence
  Description of Artificial Sequence: Synthetic oligonucleotide
cccaagcuauaucuuguuu

SEQ ID NO: 1541411 - RNA, 19 nt, Artificial Sequence
  Description of Artificial Sequence: Synthetic oligonucleotide
ggcugugcuucggaucagu

SEQ ID NO: 1541412 - RNA, 19 nt, Artificial Sequence
  Description of Artificial Sequence: Synthetic oligonucleotide
gcuacacauuagggcacua

SEQ ID NO: 1541413 - RNA, 19 nt, Artificial Sequence
  Description of Artificial Sequence: Synthetic oligonucleotide
gugcuucggaucaguccau

SEQ ID NO: 1541414 - RNA, 19 nt, Artificial Sequence
  Description of Artificial Sequence: Synthetic oligonucleotide
cgaagacuuuuagcacuga

SEQ ID NO: 1541415 - RNA, 19 nt, Artificial Sequence
  Description of Artificial Sequence: Synthetic oligonucleotide
ccacaagcccaagcuauau

SEQ ID NO: 1541416 - RNA, 19 nt, Artificial Sequence
  Description of Artificial Sequence: Synthetic oligonucleotide
gggcacuaacacagcccau

SEQ ID NO: 1541417 - RNA, 19 nt, Artificial Sequence
  Description of Artificial Sequence: Synthetic oligonucleotide
cggcugugcuucggaucag

SEQ ID NO: 1541418 - RNA, 19 nt, Artificial Sequence
  Description of Artificial Sequence: Synthetic oligonucleotide
ucauugaaaaguuagaacc

SEQ ID NO: 1541419 - RNA, 19 nt, Artificial Sequence
  Description of Artificial Sequence: Synthetic oligonucleotide
uaaucaauuacauugugag

SEQ ID NO: 1541420 - RNA, 19 nt, Artificial Sequence
  Description of Artificial Sequence: Synthetic oligonucleotide
uauuauuaagaaaauagac

SEQ ID NO: 1541421 - RNA, 19 nt, Artificial Sequence
  Description of Artificial Sequence: Synthetic oligonucleotide
gguaauaucacuuaagacc

SEQ ID NO: 1541422 - RNA, 19 nt, Artificial Sequence
  Description of Artificial Sequence: Synthetic oligonucleotide
aaugggucgaaucugauca

SEQ ID NO: 1541423 - RNA, 19 nt, Artificial Sequence
  Description of Artificial Sequence: Synthetic oligonucleotide
agaauauuuacuuuagaag

SEQ ID NO: 1541424 - RNA, 19 nt, Artificial Sequence
  Description of Artificial Sequence: Synthetic oligonucleotide
uuaugauuggcuuauagca

SEQ ID NO: 1541425 - RNA, 19 nt, Artificial Sequence
  Description of Artificial Sequence: Synthetic oligonucleotide
aaaaugguauaguagagga

SEQ ID NO: 1541426 - RNA, 19 nt, Artificial Sequence
  Description of Artificial Sequence: Synthetic oligonucleotide
ucacuuaagaccauuacug

SEQ ID NO: 1541427 - RNA, 19 nt, Artificial Sequence
  Description of Artificial Sequence: Synthetic oligonucleotide
uucaaaaugguauaguaga

SEQ ID NO: 1541428 - RNA, 19 nt, Artificial Sequence
  Description of Artificial Sequence: Synthetic oligonucleotide
aaucaauuacauugugagc

SEQ ID NO: 1541429 - RNA, 19 nt, Artificial Sequence
  Description of Artificial Sequence: Synthetic oligonucleotide
uuaauauccucauagcuca

SEQ ID NO: 1541430 - RNA, 19 nt, Artificial Sequence
  Description of Artificial Sequence: Synthetic oligonucleotide
cuuaagaccauuacugugg

SEQ ID NO: 1541431 - RNA, 19 nt, Artificial Sequence
  Description of Artificial Sequence: Synthetic oligonucleotide
aaaucugcaucguauagug

SEQ ID NO: 1541432 - RNA, 19 nt, Artificial Sequence
  Description of Artificial Sequence: Synthetic oligonucleotide
uuuaauauccucauagcuc

SEQ ID NO: 1541433 - RNA, 19 nt, Artificial Sequence
  Description of Artificial Sequence: Synthetic oligonucleotide
acugauuugagguuguguc

SEQ ID NO: 1541434 - RNA, 19 nt, Artificial Sequence
  Description of Artificial Sequence: Synthetic oligonucleotide
uuauccaaauuccaccugg

SEQ ID NO: 1541435 - RNA, 19 nt, Artificial Sequence
  Description of Artificial Sequence: Synthetic oligonucleotide
uauagaaaguucauuugcc

SEQ ID NO: 1541436 - RNA, 19 nt, Artificial Sequence
  Description of Artificial Sequence: Synthetic oligonucleotide
agcucaauucuauagaaag

SEQ ID NO: 1541437 - RNA, 19 nt, Artificial Sequence
  Description of Artificial Sequence: Synthetic oligonucleotide
aauggucagcaguauuucc

SEQ ID NO: 1541438 - RNA, 19 nt, Artificial Sequence
  Description of Artificial Sequence: Synthetic oligonucleotide
uguuaauuucagaacaucu

SEQ ID NO: 1541439 - RNA, 19 nt, Artificial Sequence
  Description of Artificial Sequence: Synthetic oligonucleotide
uuuuaugauuggcuuauag

SEQ ID NO: 1541440 - RNA, 19 nt, Artificial Sequence
  Description of Artificial Sequence: Synthetic oligonucleotide
uucaacguagauuuuaacu

SEQ ID NO: 1541441 - RNA, 19 nt, Artificial Sequence
  Description of Artificial Sequence: Synthetic oligonucleotide
aaagcaauagauauuauua

SEQ ID NO: 1541442 - RNA, 19 nt, Artificial Sequence
  Description of Artificial Sequence: Synthetic oligonucleotide
agcaauagauauuauuaag

SEQ ID NO: 1541443 - RNA, 19 nt, Artificial Sequence
  Description of Artificial Sequence: Synthetic oligonucleotide
acaucuguugaguacaaag

SEQ ID NO: 1541444 - RNA, 19 nt, Artificial Sequence
  Description of Artificial Sequence: Synthetic oligonucleotide
uuuaacuuguccaugucaa

SEQ ID NO: 1541445 - RNA, 19 nt, Artificial Sequence
  Description of Artificial Sequence: Synthetic oligonucleotide
cuguugaguacaaaguugg

SEQ ID NO: 1541446 - RNA, 19 nt, Artificial Sequence
  Description of Artificial Sequence: Synthetic oligonucleotide
auagcuauuucccaggcca

SEQ ID NO: 1541447 - RNA, 19 nt, Artificial Sequence
  Description of Artificial Sequence: Synthetic oligonucleotide
caagguuuauccaaauucc

SEQ ID NO: 1541448 - RNA, 19 nt, Artificial Sequence
  Description of Artificial Sequence: Synthetic oligonucleotide
aauaagaaggcaccacuga

SEQ ID NO: 1541449 - RNA, 19 nt, Artificial Sequence
  Description of Artificial Sequence: Synthetic oligonucleotide
guauauguugacaauacag

SEQ ID NO: 1541450 - RNA, 19 nt, Artificial Sequence
  Description of Artificial Sequence: Synthetic oligonucleotide
ucaaaaugguauaguagag

SEQ ID NO: 1541451 - RNA, 19 nt, Artificial Sequence
  Description of Artificial Sequence: Synthetic oligonucleotide
ucuauagaaaguucauuug

SEQ ID NO: 1541452 - RNA, 19 nt, Artificial Sequence
  Description of Artificial Sequence: Synthetic oligonucleotide
uaucgauauaaucaauuac

SEQ ID NO: 1541453 - RNA, 19 nt, Artificial Sequence
  Description of Artificial Sequence: Synthetic oligonucleotide
uauuuguuaauuucagaac

SEQ ID NO: 1541454 - RNA, 19 nt, Artificial Sequence
  Description of Artificial Sequence: Synthetic oligonucleotide
ugcaguacaaaucugcauc

SEQ ID NO: 1541455 - RNA, 19 nt, Artificial Sequence
  Description of Artificial Sequence: Synthetic oligonucleotide
uggguaauaucacuuaaga

SEQ ID NO: 1541456 - RNA, 19 nt, Artificial Sequence
  Description of Artificial Sequence: Synthetic oligonucleotide
acaagcauaaccuagcaua

SEQ ID NO: 1541457 - RNA, 19 nt, Artificial Sequence
  Description of Artificial Sequence: Synthetic oligonucleotide
aaaugggucgaaucugauc

SEQ ID NO: 1541458 - RNA, 19 nt, Artificial Sequence
  Description of Artificial Sequence: Synthetic oligonucleotide
auguauuucagauguuuuc

SEQ ID NO: 1541459 - RNA, 19 nt, Artificial Sequence
  Description of Artificial Sequence: Synthetic oligonucleotide
uauucuccauauuguaucg

SEQ ID NO: 1541460 - RNA, 19 nt, Artificial Sequence
  Description of Artificial Sequence: Synthetic oligonucleotide
uauaguagaggaccaaggu

SEQ ID NO: 1541461 - RNA, 19 nt, Artificial Sequence
  Description of Artificial Sequence: Synthetic oligonucleotide
ucaacguagauuuuaacuu

SEQ ID NO: 1541462 - RNA, 19 nt, Artificial Sequence
  Description of Artificial Sequence: Synthetic oligonucleotide
gaauccauacugcagaaca

SEQ ID NO: 1541463 - RNA, 19 nt, Artificial Sequence
  Description of Artificial Sequence: Synthetic oligonucleotide
aaacauauguaugcaauca

SEQ ID NO: 1541464 - RNA, 19 nt, Artificial Sequence
  Description of Artificial Sequence: Synthetic oligonucleotide
aaugcauuuccggaucucg

SEQ ID NO: 1541465 - RNA, 19 nt, Artificial Sequence
  Description of Artificial Sequence: Synthetic oligonucleotide
cauauguaugcaaucauuc

SEQ ID NO: 1541466 - RNA, 19 nt, Artificial Sequence
  Description of Artificial Sequence: Synthetic oligonucleotide
auuguaucgauauaaucaa

SEQ ID NO: 1541467 - RNA, 19 nt, Artificial Sequence
  Description of Artificial Sequence: Synthetic oligonucleotide
uaaucuuuccauuaccauc

SEQ ID NO: 1541468 - RNA, 19 nt, Artificial Sequence
  Description of Artificial Sequence: Synthetic oligonucleotide
gauggauccagggauaaag

SEQ ID NO: 1541469 - RNA, 19 nt, Artificial Sequence
  Description of Artificial Sequence: Synthetic oligonucleotide
aagcaauagauauuauuaa

SEQ ID NO: 1541470 - RNA, 19 nt, Artificial Sequence
  Description of Artificial Sequence: Synthetic oligonucleotide
uccgauuauugcuaaacug

SEQ ID NO: 1541471 - RNA, 19 nt, Artificial Sequence
  Description of Artificial Sequence: Synthetic oligonucleotide
ugaucaaugcauuuccgga

SEQ ID NO: 1541472 - RNA, 19 nt, Artificial Sequence
  Description of Artificial Sequence: Synthetic oligonucleotide
uuucuguucgguucacucg

SEQ ID NO: 1541473 - RNA, 19 nt, Artificial Sequence
  Description of Artificial Sequence: Synthetic oligonucleotide
aucgauauaaucaauuaca

SEQ ID NO: 1541474 - RNA, 19 nt, Artificial Sequence
  Description of Artificial Sequence: Synthetic oligonucleotide
uuccggacuacaaacaaga

SEQ ID NO: 1541475 - RNA, 19 nt, Artificial Sequence
  Description of Artificial Sequence: Synthetic oligonucleotide
uaguagaggaccaagguuu

SEQ ID NO: 1541476 - RNA, 19 nt, Artificial Sequence
  Description of Artificial Sequence: Synthetic oligonucleotide
uugacaagcauaaccuagc

SEQ ID NO: 1541477 - RNA, 19 nt, Artificial Sequence
  Description of Artificial Sequence: Synthetic oligonucleotide
gugucuaugaagaaacagg

SEQ ID NO: 1541478 - RNA, 19 nt, Artificial Sequence
  Description of Artificial Sequence: Synthetic oligonucleotide
ucucuuacaaacuguuuca

SEQ ID NO: 1541479 - RNA, 19 nt, Artificial Sequence
  Description of Artificial Sequence: Synthetic oligonucleotide
uuucacuccagucucuuac

SEQ ID NO: 1541480 - RNA, 19 nt, Artificial Sequence
  Description of Artificial Sequence: Synthetic oligonucleotide
aucgaaauugucuuucugu

SEQ ID NO: 1541481 - RNA, 19 nt, Artificial Sequence
  Description of Artificial Sequence: Synthetic oligonucleotide
uuacaaacuguuucaacgu

SEQ ID NO: 1541482 - RNA, 19 nt, Artificial Sequence
  Description of Artificial Sequence: Synthetic oligonucleotide
caagacacauucauaguag

SEQ ID NO: 1541483 - RNA, 19 nt, Artificial Sequence
  Description of Artificial Sequence: Synthetic oligonucleotide
uuguuaggaauaagaaggc

SEQ ID NO: 1541484 - RNA, 19 nt, Artificial Sequence
  Description of Artificial Sequence: Synthetic oligonucleotide
accuagcauagcuauuucc

SEQ ID NO: 1541485 - RNA, 19 nt, Artificial Sequence
  Description of Artificial Sequence: Synthetic oligonucleotide
aagugaucgaaauugucuu

SEQ ID NO: 1541486 - RNA, 19 nt, Artificial Sequence
  Description of Artificial Sequence: Synthetic oligonucleotide
agguauugcauucugagua

SEQ ID NO: 1541487 - RNA, 19 nt, Artificial Sequence
  Description of Artificial Sequence: Synthetic oligonucleotide
acaaaguuggaagaaaaga

SEQ ID NO: 1541488 - RNA, 19 nt, Artificial Sequence
  Description of Artificial Sequence: Synthetic oligonucleotide
ucacaguauauguugacaa

SEQ ID NO: 1541489 - RNA, 19 nt, Artificial Sequence
  Description of Artificial Sequence: Synthetic oligonucleotide
uuuagaaggaucccaucuc

SEQ ID NO: 1541490 - RNA, 19 nt, Artificial Sequence
  Description of Artificial Sequence: Synthetic oligonucleotide
aacauauguaugcaaucau

SEQ ID NO: 1541491 - RNA, 19 nt, Artificial Sequence
  Description of Artificial Sequence: Synthetic oligonucleotide
uucacaauggucagcagua

SEQ ID NO: 1541492 - RNA, 19 nt, Artificial Sequence
  Description of Artificial Sequence: Synthetic oligonucleotide
uccagucucuuacaaacug

SEQ ID NO: 1541493 - RNA, 19 nt, Artificial Sequence
  Description of Artificial Sequence: Synthetic oligonucleotide
auucacaguauauguugac

SEQ ID NO: 1541494 - RNA, 19 nt, Artificial Sequence
  Description of Artificial Sequence: Synthetic oligonucleotide
ugauaguugacuguugagu

SEQ ID NO: 1541495 - RNA, 19 nt, Artificial Sequence
  Description of Artificial Sequence: Synthetic oligonucleotide
auauguaugcaaucauuca

SEQ ID NO: 1541496 - RNA, 19 nt, Artificial Sequence
  Description of Artificial Sequence: Synthetic oligonucleotide
aagacacauucauaguagu

SEQ ID NO: 1541497 - RNA, 19 nt, Artificial Sequence
  Description of Artificial Sequence: Synthetic oligonucleotide
caagcauaaccuagcauag

SEQ ID NO: 1541498 - RNA, 19 nt, Artificial Sequence
  Description of Artificial Sequence: Synthetic oligonucleotide
uccugauuaugaucaaugc

SEQ ID NO: 1541499 - RNA, 19 nt, Artificial Sequence
  Description of Artificial Sequence: Synthetic oligonucleotide
gguuuauccaaauuccacc

SEQ ID NO: 1541500 - RNA, 19 nt, Artificial Sequence
  Description of Artificial Sequence: Synthetic oligonucleotide
aacagguggcaaugcaguc

SEQ ID NO: 1541501 - RNA, 19 nt, Artificial Sequence
  Description of Artificial Sequence: Synthetic oligonucleotide
ucguauaguguauuucuga

SEQ ID NO: 1541502 - RNA, 19 nt, Artificial Sequence
  Description of Artificial Sequence: Synthetic oligonucleotide
caguauauguugacaauac

SEQ ID NO: 1541503 - RNA, 19 nt, Artificial Sequence
  Description of Artificial Sequence: Synthetic oligonucleotide
auagcucaauucuauagaa

SEQ ID NO: 1541504 - RNA, 19 nt, Artificial Sequence
  Description of Artificial Sequence: Synthetic oligonucleotide
uagcauagcuauuucccag

SEQ ID NO: 1541505 - RNA, 19 nt, Artificial Sequence
  Description of Artificial Sequence: Synthetic oligonucleotide
uauugcuaaacugauggau

SEQ ID NO: 1541506 - RNA, 19 nt, Artificial Sequence
  Description of Artificial Sequence: Synthetic oligonucleotide
uucuguucgguucacucgu

SEQ ID NO: 1541507 - RNA, 19 nt, Artificial Sequence
  Description of Artificial Sequence: Synthetic oligonucleotide
uaccagaauauuuacuuua

SEQ ID NO: 1541508 - RNA, 19 nt, Artificial Sequence
  Description of Artificial Sequence: Synthetic oligonucleotide
caaacauauguaugcaauc

SEQ ID NO: 1541509 - RNA, 19 nt, Artificial Sequence
  Description of Artificial Sequence: Synthetic oligonucleotide
gaauaagaaggcaccacug

SEQ ID NO: 1541510 - RNA, 19 nt, Artificial Sequence
  Description of Artificial Sequence: Synthetic oligonucleotide
aagcauaaccuagcauagc

SEQ ID NO: 1541511 - RNA, 19 nt, Artificial Sequence
  Description of Artificial Sequence: Synthetic oligonucleotide
aguauauguugacaauaca

SEQ ID NO: 1541512 - RNA, 19 nt, Artificial Sequence
  Description of Artificial Sequence: Synthetic oligonucleotide
aaccuagcauagcuauuuc

SEQ ID NO: 1541513 - RNA, 19 nt, Artificial Sequence
  Description of Artificial Sequence: Synthetic oligonucleotide
ucugaucagcugaucuccg

SEQ ID NO: 1541514 - RNA, 19 nt, Artificial Sequence
  Description of Artificial Sequence: Synthetic oligonucleotide
uucuugugcaguacaaauc

SEQ ID NO: 1541515 - RNA, 19 nt, Artificial Sequence
  Description of Artificial Sequence: Synthetic oligonucleotide
uugacuguugaguuguuua

SEQ ID NO: 1541516 - RNA, 19 nt, Artificial Sequence
  Description of Artificial Sequence: Synthetic oligonucleotide
ggagagaucauucacagua

SEQ ID NO: 1541517 - RNA, 19 nt, Artificial Sequence
  Description of Artificial Sequence: Synthetic oligonucleotide
cuaaacugauggauccagg

SEQ ID NO: 1541518 - RNA, 19 nt, Artificial Sequence
  Description of Artificial Sequence: Synthetic oligonucleotide
aucucguccaagugaagag

SEQ ID NO: 1541519 - RNA, 19 nt, Artificial Sequence
  Description of Artificial Sequence: Synthetic oligonucleotide
acuuuagaaggaucccauc

SEQ ID NO: 1541520 - RNA, 19 nt, Artificial Sequence
  Description of Artificial Sequence: Synthetic oligonucleotide
agucccagguauugcauuc

SEQ ID NO: 1541521 - RNA, 19 nt, Artificial Sequence
  Description of Artificial Sequence: Synthetic oligonucleotide
aucugcaucguauagugua

SEQ ID NO: 1541522 - RNA, 19 nt, Artificial Sequence
  Description of Artificial Sequence: Synthetic oligonucleotide
aaguugauauuuguuaauu

SEQ ID NO: 1541523 - RNA, 19 nt, Artificial Sequence
  Description of Artificial Sequence: Synthetic oligonucleotide
aguuggaauccauacugca

SEQ ID NO: 1541524 - RNA, 19 nt, Artificial Sequence
  Description of Artificial Sequence: Synthetic oligonucleotide
uacuuuagaaggaucccau

SEQ ID NO: 1541525 - RNA, 19 nt, Artificial Sequence
  Description of Artificial Sequence: Synthetic oligonucleotide
cuggguaauaucacuuaag

SEQ ID NO: 1541526 - RNA, 19 nt, Artificial Sequence
  Description of Artificial Sequence: Synthetic oligonucleotide
auaaucaauuacauuguga

SEQ ID NO: 1541527 - RNA, 19 nt, Artificial Sequence
  Description of Artificial Sequence: Synthetic oligonucleotide
agggauaaaguugauauuu

SEQ ID NO: 1541528 - RNA, 19 nt, Artificial Sequence
  Description of Artificial Sequence: Synthetic oligonucleotide
uguucgguucacucguucc

SEQ ID NO: 1541529 - RNA, 19 nt, Artificial Sequence
  Description of Artificial Sequence: Synthetic oligonucleotide
ugacaagcauaaccuagca

SEQ ID NO: 1541530 - RNA, 19 nt, Artificial Sequence
  Description of Artificial Sequence: Synthetic oligonucleotide
auccauacugcagaacaac

SEQ ID NO: 1541531 - RNA, 19 nt, Artificial Sequence
  Description of Artificial Sequence: Synthetic oligonucleotide
ugauuaugaucaaugcauu

SEQ ID NO: 1541532 - RNA, 19 nt, Artificial Sequence
  Description of Artificial Sequence: Synthetic oligonucleotide
gaucgaaauugucuuucug

SEQ ID NO: 1541533 - RNA, 19 nt, Artificial Sequence
  Description of Artificial Sequence: Synthetic oligonucleotide
ucucguccaagugaagagg

SEQ ID NO: 1541534 - RNA, 19 nt, Artificial Sequence
  Description of Artificial Sequence: Synthetic oligonucleotide
ugaucuccgauuauugcua

SEQ ID NO: 1541535 - RNA, 19 nt, Artificial Sequence
  Description of Artificial Sequence: Synthetic oligonucleotide
ucgaaauugucuuucuguu

SEQ ID NO: 1541536 - RNA, 19 nt, Artificial Sequence
  Description of Artificial Sequence: Synthetic oligonucleotide
ucuccgauuauugcuaaac

SEQ ID NO: 1541537 - RNA, 19 nt, Artificial Sequence
  Description of Artificial Sequence: Synthetic oligonucleotide
aucuguugaguacaaaguu

SEQ ID NO: 1541538 - RNA, 19 nt, Artificial Sequence
  Description of Artificial Sequence: Synthetic oligonucleotide
auaguagaggaccaagguu

SEQ ID NO: 1541539 - RNA, 19 nt, Artificial Sequence
  Description of Artificial Sequence: Synthetic oligonucleotide
uuauguggaagugaucgaa

SEQ ID NO: 1541540 - RNA, 19 nt, Artificial Sequence
  Description of Artificial Sequence: Synthetic oligonucleotide
auuggcuuauagcaggcau

SEQ ID NO: 1541541 - RNA, 19 nt, Artificial Sequence
  Description of Artificial Sequence: Synthetic oligonucleotide
acaaacuguuucaacguag

SEQ ID NO: 1541542 - RNA, 19 nt, Artificial Sequence
  Description of Artificial Sequence: Synthetic oligonucleotide
uguuaggaauaagaaggca

SEQ ID NO: 1541543 - RNA, 19 nt, Artificial Sequence
  Description of Artificial Sequence: Synthetic oligonucleotide
gcaguacaaaucugcaucg

SEQ ID NO: 1541544 - RNA, 19 nt, Artificial Sequence
  Description of Artificial Sequence: Synthetic oligonucleotide
cuagacggcgcccagccgc

SEQ ID NO: 1541545 - RNA, 19 nt, Artificial Sequence
  Description of Artificial Sequence: Synthetic oligonucleotide
aauaucacuuaagaccauu

SEQ ID NO: 1541546 - RNA, 19 nt, Artificial Sequence
  Description of Artificial Sequence: Synthetic oligonucleotide
cauagcucaauucuauaga

SEQ ID NO: 1541547 - RNA, 19 nt, Artificial Sequence
  Description of Artificial Sequence: Synthetic oligonucleotide
uucuccauauuguaucgau

SEQ ID NO: 1541548 - RNA, 19 nt, Artificial Sequence
  Description of Artificial Sequence: Synthetic oligonucleotide
gaaucugaucagcugaucu

SEQ ID NO: 1541549 - RNA, 19 nt, Artificial Sequence
  Description of Artificial Sequence: Synthetic oligonucleotide
guaucgauauaaucaauua

SEQ ID NO: 1541550 - RNA, 19 nt, Artificial Sequence
  Description of Artificial Sequence: Synthetic oligonucleotide
gaguaaaucuccugaaagu

SEQ ID NO: 1541551 - RNA, 19 nt, Artificial Sequence
  Description of Artificial Sequence: Synthetic oligonucleotide
uguugaguacaaaguugga

SEQ ID NO: 1541552 - RNA, 19 nt, Artificial Sequence
  Description of Artificial Sequence: Synthetic oligonucleotide
augcaaucauucacaaugg

SEQ ID NO: 1541553 - RNA, 19 nt, Artificial Sequence
  Description of Artificial Sequence: Synthetic oligonucleotide
uguggaagugaucgaaauu

SEQ ID NO: 1541554 - RNA, 19 nt, Artificial Sequence
  Description of Artificial Sequence: Synthetic oligonucleotide
uauagcaggcaucccuuuc

SEQ ID NO: 1541555 - RNA, 19 nt, Artificial Sequence
  Description of Artificial Sequence: Synthetic oligonucleotide
ugaucgaaauugucuuucu

SEQ ID NO: 1541556 - RNA, 19 nt, Artificial Sequence
  Description of Artificial Sequence: Synthetic oligonucleotide
uugagguuguguccugcug

SEQ ID NO: 1541557 - RNA, 19 nt, Artificial Sequence
  Description of Artificial Sequence: Synthetic oligonucleotide
aguacaaaucugcaucgua

SEQ ID NO: 1541558 - RNA, 19 nt, Artificial Sequence
  Description of Artificial Sequence: Synthetic oligonucleotide
uggcuuccggacuacaaac

SEQ ID NO: 1541559 - RNA, 19 nt, Artificial Sequence
  Description of Artificial Sequence: Synthetic oligonucleotide
ugacuguugaguuguuuau

SEQ ID NO: 1541560 - RNA, 19 nt, Artificial Sequence
  Description of Artificial Sequence: Synthetic oligonucleotide
guuuauccaaauuccaccu

SEQ ID NO: 1541561 - RNA, 19 nt, Artificial Sequence
  Description of Artificial Sequence: Synthetic oligonucleotide
caguuggaauccauacugc

SEQ ID NO: 1541562 - RNA, 19 nt, Artificial Sequence
  Description of Artificial Sequence: Synthetic oligonucleotide
acaguauauguugacaaua

SEQ ID NO: 1541563 - RNA, 19 nt, Artificial Sequence
  Description of Artificial Sequence: Synthetic oligonucleotide
agugaagaggaaagcgagg

SEQ ID NO: 1541564 - RNA, 19 nt, Artificial Sequence
  Description of Artificial Sequence: Synthetic oligonucleotide
uagcucaauucuauagaaa

SEQ ID NO: 1541565 - RNA, 19 nt, Artificial Sequence
  Description of Artificial Sequence: Synthetic oligonucleotide
guucgguucacucguuccc

SEQ ID NO: 1541566 - RNA, 19 nt, Artificial Sequence
  Description of Artificial Sequence: Synthetic oligonucleotide
augcuggcguaaucuuucc

SEQ ID NO: 1541567 - RNA, 19 nt, Artificial Sequence
  Description of Artificial Sequence: Synthetic oligonucleotide
uuaacuuguccaugucaaa

SEQ ID NO: 1541568 - RNA, 19 nt, Artificial Sequence
  Description of Artificial Sequence: Synthetic oligonucleotide
cucuagacggcgcccagcc

SEQ ID NO: 1541569 - RNA, 19 nt, Artificial Sequence
  Description of Artificial Sequence: Synthetic oligonucleotide
cagguaccagaauauuuac

SEQ ID NO: 1541570 - RNA, 19 nt, Artificial Sequence
  Description of Artificial Sequence: Synthetic oligonucleotide
ggguaauaucacuuaagac

SEQ ID NO: 1541571 - RNA, 19 nt, Artificial Sequence
  Description of Artificial Sequence: Synthetic oligonucleotide
auauccucauagcucaauu

SEQ ID NO: 1541572 - RNA, 19 nt, Artificial Sequence
  Description of Artificial Sequence: Synthetic oligonucleotide
ugcauuuccggaucucguc

SEQ ID NO: 1541573 - RNA, 19 nt, Artificial Sequence
  Description of Artificial Sequence: Synthetic oligonucleotide
aguauucuccauauuguau

SEQ ID NO: 1541574 - RNA, 19 nt, Artificial Sequence
  Description of Artificial Sequence: Synthetic oligonucleotide
ucgaaucugaucagcugau

SEQ ID NO: 1541575 - RNA, 19 nt, Artificial Sequence
  Description of Artificial Sequence: Synthetic oligonucleotide
gguauaguagaggaccaag

SEQ ID NO: 1541576 - RNA, 19 nt, Artificial Sequence
  Description of Artificial Sequence: Synthetic oligonucleotide
ccaagugaagaggaaagcg

SEQ ID NO: 1541577 - RNA, 19 nt, Artificial Sequence
  Description of Artificial Sequence: Synthetic oligonucleotide
gaguauucuccauauugua

SEQ ID NO: 1541578 - RNA, 19 nt, Artificial Sequence
  Description of Artificial Sequence: Synthetic oligonucleotide
caucguauaguguauuucu

SEQ ID NO: 1541579 - RNA, 19 nt, Artificial Sequence
  Description of Artificial Sequence: Synthetic oligonucleotide
uuacuguggcuuccggacu

SEQ ID NO: 1541580 - RNA, 19 nt, Artificial Sequence
  Description of Artificial Sequence: Synthetic oligonucleotide
uccggaucucguccaagug

SEQ ID NO: 1541581 - RNA, 19 nt, Artificial Sequence
  Description of Artificial Sequence: Synthetic oligonucleotide
guauaguguauuucugaaa

SEQ ID NO: 1541582 - RNA, 19 nt, Artificial Sequence
  Description of Artificial Sequence: Synthetic oligonucleotide
uccgccaggguuucgggac

SEQ ID NO: 1541583 - RNA, 19 nt, Artificial Sequence
  Description of Artificial Sequence: Synthetic oligonucleotide
acaauggucagcaguauuu

SEQ ID NO: 1541584 - RNA, 19 nt, Artificial Sequence
  Description of Artificial Sequence: Synthetic oligonucleotide
ucuagacggcgcccagccg

SEQ ID NO: 1541585 - RNA, 19 nt, Artificial Sequence
  Description of Artificial Sequence: Synthetic oligonucleotide
gaaagcgaggaagcaguug

SEQ ID NO: 1541586 - RNA, 19 nt, Artificial Sequence
  Description of Artificial Sequence: Synthetic oligonucleotide
aauccauacugcagaacaa

SEQ ID NO: 1541587 - RNA, 19 nt, Artificial Sequence
  Description of Artificial Sequence: Synthetic oligonucleotide
gauaaaguugauauuuguu

SEQ ID NO: 1541588 - RNA, 19 nt, Artificial Sequence
  Description of Artificial Sequence: Synthetic oligonucleotide
ucccagguauugcauucug

SEQ ID NO: 1541589 - RNA, 19 nt, Artificial Sequence
  Description of Artificial Sequence: Synthetic oligonucleotide
ccgauuauugcuaaacuga

SEQ ID NO: 1541590 - RNA, 19 nt, Artificial Sequence
  Description of Artificial Sequence: Synthetic oligonucleotide
ucccaucucucuuuuggaa

SEQ ID NO: 1541591 - RNA, 19 nt, Artificial Sequence
  Description of Artificial Sequence: Synthetic oligonucleotide
cauaaccuagcauagcuau

SEQ ID NO: 1541592 - RNA, 19 nt, Artificial Sequence
  Description of Artificial Sequence: Synthetic oligonucleotide
uucgguucacucguucccc

SEQ ID NO: 1541593 - RNA, 19 nt, Artificial Sequence
  Description of Artificial Sequence: Synthetic oligonucleotide
agugaucgaaauugucuuu

SEQ ID NO: 1541594 - RNA, 19 nt, Artificial Sequence
  Description of Artificial Sequence: Synthetic oligonucleotide
uccggacuacaaacaagac

SEQ ID NO: 1541595 - RNA, 19 nt, Artificial Sequence
  Description of Artificial Sequence: Synthetic oligonucleotide
uggcguaaucuuuccauua

SEQ ID NO: 1541596 - RNA, 19 nt, Artificial Sequence
  Description of Artificial Sequence: Synthetic oligonucleotide
gugaucgaaauugucuuuc

SEQ ID NO: 1541597 - RNA, 19 nt, Artificial Sequence
  Description of Artificial Sequence: Synthetic oligonucleotide
uagcaggcaucccuuucug

SEQ ID NO: 1541598 - RNA, 19 nt, Artificial Sequence
  Description of Artificial Sequence: Synthetic oligonucleotide
gguaccagaauauuuacuu

SEQ ID NO: 1541599 - RNA, 19 nt, Artificial Sequence
  Description of Artificial Sequence: Synthetic oligonucleotide
accauuacuguggcuuccg

SEQ ID NO: 1541600 - RNA, 19 nt, Artificial Sequence
  Description of Artificial Sequence: Synthetic oligonucleotide
aucguauaguguauuucug

SEQ ID NO: 1541601 - RNA, 19 nt, Artificial Sequence
  Description of Artificial Sequence: Synthetic oligonucleotide
ugcuugguggcggacggcc

SEQ ID NO: 1541602 - RNA, 19 nt, Artificial Sequence
  Description of Artificial Sequence: Synthetic oligonucleotide
acauauguaugcaaucauu

SEQ ID NO: 1541603 - RNA, 19 nt, Artificial Sequence
  Description of Artificial Sequence: Synthetic oligonucleotide
auuucaucauggagagauc

SEQ ID NO: 1541604 - RNA, 19 nt, Artificial Sequence
  Description of Artificial Sequence: Synthetic oligonucleotide
uaauaucacuuaagaccau

SEQ ID NO: 1541605 - RNA, 19 nt, Artificial Sequence
  Description of Artificial Sequence: Synthetic oligonucleotide
cucguccaagugaagagga

SEQ ID NO: 1541606 - RNA, 19 nt, Artificial Sequence
  Description of Artificial Sequence: Synthetic oligonucleotide
gcugaucuccgauuauugc

SEQ ID NO: 1541607 - RNA, 19 nt, Artificial Sequence
  Description of Artificial Sequence: Synthetic oligonucleotide
uacuguggcuuccggacua

SEQ ID NO: 1541608 - RNA, 19 nt, Artificial Sequence
  Description of Artificial Sequence: Synthetic oligonucleotide
cuggcuugaguauucucca

SEQ ID NO: 1541609 - RNA, 19 nt, Artificial Sequence
  Description of Artificial Sequence: Synthetic oligonucleotide
ugggucgaaucugaucagc

SEQ ID NO: 1541610 - RNA, 19 nt, Artificial Sequence
  Description of Artificial Sequence: Synthetic oligonucleotide
augggucgaaucugaucag

SEQ ID NO: 1541611 - RNA, 19 nt, Artificial Sequence
  Description of Artificial Sequence: Synthetic oligonucleotide
gcuaaacugauggauccag

SEQ ID NO: 1541612 - RNA, 19 nt, Artificial Sequence
  Description of Artificial Sequence: Synthetic oligonucleotide
accaagguuuauccaaauu

SEQ ID NO: 1541613 - RNA, 19 nt, Artificial Sequence
  Description of Artificial Sequence: Synthetic oligonucleotide
aggcaccacugauuugagg

SEQ ID NO: 1541614 - RNA, 19 nt, Artificial Sequence
  Description of Artificial Sequence: Synthetic oligonucleotide
augcagucccagguauugc

SEQ ID NO: 1541615 - RNA, 19 nt, Artificial Sequence
  Description of Artificial Sequence: Synthetic oligonucleotide
guuucaacguagauuuuaa

SEQ ID NO: 1541616 - RNA, 19 nt, Artificial Sequence
  Description of Artificial Sequence: Synthetic oligonucleotide
ggaauaagaaggcaccacu

SEQ ID NO: 1541617 - RNA, 19 nt, Artificial Sequence
  Description of Artificial Sequence: Synthetic oligonucleotide
ugcuggcguaaucuuucca

SEQ ID NO: 1541618 - RNA, 19 nt, Artificial Sequence
  Description of Artificial Sequence: Synthetic oligonucleotide
ugcugguuauguggaagug

SEQ ID NO: 1541619 - RNA, 19 nt, Artificial Sequence
  Description of Artificial Sequence: Synthetic oligonucleotide
ucguuccccgacugcuugg

SEQ ID NO: 1541620 - RNA, 19 nt, Artificial Sequence
  Description of Artificial Sequence: Synthetic oligonucleotide
uaagaccauuacuguggcu

SEQ ID NO: 1541621 - RNA, 19 nt, Artificial Sequence
  Description of Artificial Sequence: Synthetic oligonucleotide
cacugauaguugacuguug

SEQ ID NO: 1541622 - RNA, 19 nt, Artificial Sequence
  Description of Artificial Sequence: Synthetic oligonucleotide
ggcguaaucuuuccauuac

SEQ ID NO: 1541623 - RNA, 19 nt, Artificial Sequence
  Description of Artificial Sequence: Synthetic oligonucleotide
cauauuguaucgauauaau

SEQ ID NO: 1541624 - RNA, 19 nt, Artificial Sequence
  Description of Artificial Sequence: Synthetic oligonucleotide
augguauaguagaggacca

SEQ ID NO: 1541625 - RNA, 19 nt, Artificial Sequence
  Description of Artificial Sequence: Synthetic oligonucleotide
auaucacuuaagaccauua

SEQ ID NO: 1541626 - RNA, 19 nt, Artificial Sequence
  Description of Artificial Sequence: Synthetic oligonucleotide
gcguaaucuuuccauuacc

SEQ ID NO: 1541627 - RNA, 19 nt, Artificial Sequence
  Description of Artificial Sequence: Synthetic oligonucleotide
ccugauuaugaucaaugca

SEQ ID NO: 1541628 - RNA, 19 nt, Artificial Sequence
  Description of Artificial Sequence: Synthetic oligonucleotide
gaccauuacuguggcuucc

SEQ ID NO: 1541629 - RNA, 19 nt, Artificial Sequence
  Description of Artificial Sequence: Synthetic oligonucleotide
gaucuccgauuauugcuaa

SEQ ID NO: 1541630 - RNA, 19 nt, Artificial Sequence
  Description of Artificial Sequence: Synthetic oligonucleotide
ucguccaagugaagaggaa

SEQ ID NO: 1541631 - RNA, 19 nt, Artificial Sequence
  Description of Artificial Sequence: Synthetic oligonucleotide
uccucuagacggcgcccag

SEQ ID NO: 1541632 - RNA, 19 nt, Artificial Sequence
  Description of Artificial Sequence: Synthetic oligonucleotide
caggccaaucuuccuaguc

SEQ ID NO: 1541633 - RNA, 19 nt, Artificial Sequence
  Description of Artificial Sequence: Synthetic oligonucleotide
cucguuccccgacugcuug

SEQ ID NO: 1541634 - RNA, 19 nt, Artificial Sequence
  Description of Artificial Sequence: Synthetic oligonucleotide
auggauccagggauaaagu

SEQ ID NO: 1541635 - RNA, 19 nt, Artificial Sequence
  Description of Artificial Sequence: Synthetic oligonucleotide
agguaccagaauauuuacu

SEQ ID NO: 1541636 - RNA, 19 nt, Artificial Sequence
  Description of Artificial Sequence: Synthetic oligonucleotide
gguauugcauucugaguaa

SEQ ID NO: 1541637 - RNA, 19 nt, Artificial Sequence
  Description of Artificial Sequence: Synthetic oligonucleotide
ccauauuguaucgauauaa

SEQ ID NO: 1541638 - RNA, 19 nt, Artificial Sequence
  Description of Artificial Sequence: Synthetic oligonucleotide
cauuuccggaucucgucca

SEQ ID NO: 1541639 - RNA, 19 nt, Artificial Sequence
  Description of Artificial Sequence: Synthetic oligonucleotide
cugguuauguggaagugau

SEQ ID NO: 1541640 - RNA, 19 nt, Artificial Sequence
  Description of Artificial Sequence: Synthetic oligonucleotide
ugguauaguagaggaccaa

SEQ ID NO: 1541641 - RNA, 19 nt, Artificial Sequence
  Description of Artificial Sequence: Synthetic oligonucleotide
gcuuauagcaggcaucccu

SEQ ID NO: 1541642 - RNA, 19 nt, Artificial Sequence
  Description of Artificial Sequence: Synthetic oligonucleotide
ggccaaucuuccuagucca

SEQ ID NO: 1541643 - RNA, 19 nt, Artificial Sequence
  Description of Artificial Sequence: Synthetic oligonucleotide
caggccuccauucgcgcug

SEQ ID NO: 1541644 - RNA, 19 nt, Artificial Sequence
  Description of Artificial Sequence: Synthetic oligonucleotide
guugacaauacagauucuu

SEQ ID NO: 1541645 - RNA, 19 nt, Artificial Sequence
  Description of Artificial Sequence: Synthetic oligonucleotide
cacuuaagaccauuacugu

SEQ ID NO: 1541646 - RNA, 19 nt, Artificial Sequence
  Description of Artificial Sequence: Synthetic oligonucleotide
agacacauucauaguagua

SEQ ID NO: 1541647 - RNA, 19 nt, Artificial Sequence
  Description of Artificial Sequence: Synthetic oligonucleotide
ccgggccuccucuagacgg

SEQ ID NO: 1541648 - RNA, 19 nt, Artificial Sequence
  Description of Artificial Sequence: Synthetic oligonucleotide
ccagguaccagaauauuua

SEQ ID NO: 1541649 - RNA, 19 nt, Artificial Sequence
  Description of Artificial Sequence: Synthetic oligonucleotide
cucauagcucaauucuaua

SEQ ID NO: 1541650 - RNA, 19 nt, Artificial Sequence
  Description of Artificial Sequence: Synthetic oligonucleotide
cccaguuuucacuccaguc

SEQ ID NO: 1541651 - RNA, 19 nt, Artificial Sequence
  Description of Artificial Sequence: Synthetic oligonucleotide
caaaucugcaucguauagu

SEQ ID NO: 1541652 - RNA, 19 nt, Artificial Sequence
  Description of Artificial Sequence: Synthetic oligonucleotide
cugaucagcugaucuccga

SEQ ID NO: 1541653 - RNA, 19 nt, Artificial Sequence
  Description of Artificial Sequence: Synthetic oligonucleotide
ugauggauccagggauaaa

SEQ ID NO: 1541654 - RNA, 19 nt, Artificial Sequence
  Description of Artificial Sequence: Synthetic oligonucleotide
gguucacucguuccccgac

SEQ ID NO: 1541655 - RNA, 19 nt, Artificial Sequence
  Description of Artificial Sequence: Synthetic oligonucleotide
aucuccgauuauugcuaaa

SEQ ID NO: 1541656 - RNA, 19 nt, Artificial Sequence
  Description of Artificial Sequence: Synthetic oligonucleotide
cuccgauuauugcuaaacu

SEQ ID NO: 1541657 - RNA, 19 nt, Artificial Sequence
  Description of Artificial Sequence: Synthetic oligonucleotide
cucuuacaaacuguuucaa

SEQ ID NO: 1541658 - RNA, 19 nt, Artificial Sequence
  Description of Artificial Sequence: Synthetic oligonucleotide
agaugcuggcguaaucuuu

SEQ ID NO: 1541659 - RNA, 19 nt, Artificial Sequence
  Description of Artificial Sequence: Synthetic oligonucleotide
auaaccuagcauagcuauu

SEQ ID NO: 1541660 - RNA, 19 nt, Artificial Sequence
  Description of Artificial Sequence: Synthetic oligonucleotide
gcuuccggacuacaaacaa

SEQ ID NO: 1541661 - RNA, 19 nt, Artificial Sequence
  Description of Artificial Sequence: Synthetic oligonucleotide
gcugguuauguggaaguga

SEQ ID NO: 1541662 - RNA, 19 nt, Artificial Sequence
  Description of Artificial Sequence: Synthetic oligonucleotide
cguauaguguauuucugaa

SEQ ID NO: 1541663 - RNA, 19 nt, Artificial Sequence
  Description of Artificial Sequence: Synthetic oligonucleotide
cugcugguuauguggaagu

SEQ ID NO: 1541664 - RNA, 19 nt, Artificial Sequence
  Description of Artificial Sequence: Synthetic oligonucleotide
ggcuugaguauucuccaua

SEQ ID NO: 1541665 - RNA, 19 nt, Artificial Sequence
  Description of Artificial Sequence: Synthetic oligonucleotide
ccauuacuguggcuuccgg

SEQ ID NO: 1541666 - RNA, 19 nt, Artificial Sequence
  Description of Artificial Sequence: Synthetic oligonucleotide
gugcaguacaaaucugcau

SEQ ID NO: 1541667 - RNA, 19 nt, Artificial Sequence
  Description of Artificial Sequence: Synthetic oligonucleotide
gcuggcguaaucuuuccau

SEQ ID NO: 1541668 - RNA, 19 nt, Artificial Sequence
  Description of Artificial Sequence: Synthetic oligonucleotide
gcccucaggccuccauucg

SEQ ID NO: 1541669 - RNA, 19 nt, Artificial Sequence
  Description of Artificial Sequence: Synthetic oligonucleotide
ccugcugucacugauaguu

SEQ ID NO: 1541670 - RNA, 19 nt, Artificial Sequence
  Description of Artificial Sequence: Synthetic oligonucleotide
caauuacauugugagcugu

SEQ ID NO: 1541671 - RNA, 19 nt, Artificial Sequence
  Description of Artificial Sequence: Synthetic oligonucleotide
gacuguugaguuguuuauu

SEQ ID NO: 1541672 - RNA, 19 nt, Artificial Sequence
  Description of Artificial Sequence: Synthetic oligonucleotide
ccggaucucguccaaguga

SEQ ID NO: 1541673 - RNA, 19 nt, Artificial Sequence
  Description of Artificial Sequence: Synthetic oligonucleotide
cuccagucucuuacaaacu

SEQ ID NO: 1541674 - RNA, 19 nt, Artificial Sequence
  Description of Artificial Sequence: Synthetic oligonucleotide
gcucaauucuauagaaagu

SEQ ID NO: 1541675 - RNA, 19 nt, Artificial Sequence
  Description of Artificial Sequence: Synthetic oligonucleotide
cacugauuugagguugugu

SEQ ID NO: 1541676 - RNA, 19 nt, Artificial Sequence
  Description of Artificial Sequence: Synthetic oligonucleotide
cuggcguaaucuuuccauu

SEQ ID NO: 1541677 - RNA, 19 nt, Artificial Sequence
  Description of Artificial Sequence: Synthetic oligonucleotide
ccaccuggcuugaguauuc

SEQ ID NO: 1541678 - RNA, 19 nt, Artificial Sequence
  Description of Artificial Sequence: Synthetic oligonucleotide
ccuugacaagcauaaccua

SEQ ID NO: 1541679 - RNA, 19 nt, Artificial Sequence
  Description of Artificial Sequence: Synthetic oligonucleotide
ugcgcuccgccaggguuuc

SEQ ID NO: 1541680 - RNA, 19 nt, Artificial Sequence
  Description of Artificial Sequence: Synthetic oligonucleotide
ggcuuauagcaggcauccc

SEQ ID NO: 1541681 - RNA, 19 nt, Artificial Sequence
  Description of Artificial Sequence: Synthetic oligonucleotide
ccucauagcucaauucuau

SEQ ID NO: 1541682 - RNA, 19 nt, Artificial Sequence
  Description of Artificial Sequence: Synthetic oligonucleotide
cauugugagcugugucuau

SEQ ID NO: 1541683 - RNA, 19 nt, Artificial Sequence
  Description of Artificial Sequence: Synthetic oligonucleotide
cggaucucguccaagugaa

SEQ ID NO: 1541684 - RNA, 19 nt, Artificial Sequence
  Description of Artificial Sequence: Synthetic oligonucleotide
uggcggacggccgggccuc

SEQ ID NO: 1541685 - RNA, 19 nt, Artificial Sequence
  Description of Artificial Sequence: Synthetic oligonucleotide
gggucgaaucugaucagcu

SEQ ID NO: 1541686 - RNA, 19 nt, Artificial Sequence
  Description of Artificial Sequence: Synthetic oligonucleotide
ccaggguuucgggacucgc

SEQ ID NO: 1541687 - RNA, 19 nt, Artificial Sequence
  Description of Artificial Sequence: Synthetic oligonucleotide
ccuccauucgcgcugcgcu

SEQ ID NO: 1541688 - RNA, 19 nt, Artificial Sequence
  Description of Artificial Sequence: Synthetic oligonucleotide
guggcggacggccgggccu

SEQ ID NO: 1541689 - RNA, 19 nt, Artificial Sequence
  Description of Artificial Sequence: Synthetic oligonucleotide
cagucccagguauugcauu

SEQ ID NO: 1541690 - RNA, 19 nt, Artificial Sequence
  Description of Artificial Sequence: Synthetic oligonucleotide
gccuccauucgcgcugcgc

SEQ ID NO: 1541691 - RNA, 19 nt, Artificial Sequence
  Description of Artificial Sequence: Synthetic oligonucleotide
ccucuagacggcgcccagc

SEQ ID NO: 1541692 - RNA, 19 nt, Artificial Sequence
  Description of Artificial Sequence: Synthetic oligonucleotide
ccuccucuagacggcgccc

SEQ ID NO: 1541693 - RNA, 19 nt, Artificial Sequence
  Description of Artificial Sequence: Synthetic oligonucleotide
cguccaagugaagaggaaa

SEQ ID NO: 1541694 - RNA, 19 nt, Artificial Sequence
  Description of Artificial Sequence: Synthetic oligonucleotide
gacggccgggccuccucua

SEQ ID NO: 1541695 - RNA, 19 nt, Artificial Sequence
  Description of Artificial Sequence: Synthetic oligonucleotide
agguggcaaugcaguccca

SEQ ID NO: 1541696 - RNA, 19 nt, Artificial Sequence
  Description of Artificial Sequence: Synthetic oligonucleotide
ggccuccauucgcgcugcg

SEQ ID NO: 1541697 - RNA, 19 nt, Artificial Sequence
  Description of Artificial Sequence: Synthetic oligonucleotide
caccagguaccagaauauu

SEQ ID NO: 1541698 - RNA, 19 nt, Artificial Sequence
  Description of Artificial Sequence: Synthetic oligonucleotide
ggaaagcgaggaagcaguu

SEQ ID NO: 1541699 - RNA, 19 nt, Artificial Sequence
  Description of Artificial Sequence: Synthetic oligonucleotide
cccgccgcccucaggccuc

SEQ ID NO: 1541700 - RNA, 19 nt, Artificial Sequence
  Description of Artificial Sequence: Synthetic oligonucleotide
ccccgacugcuugguggcg

SEQ ID NO: 1541701 - RNA, 19 nt, Artificial Sequence
  Description of Artificial Sequence: Synthetic oligonucleotide
ccauuaccaucuucuccau

SEQ ID NO: 1541702 - RNA, 19 nt, Artificial Sequence
  Description of Artificial Sequence: Synthetic oligonucleotide
cgguucacucguuccccga

SEQ ID NO: 1541703 - RNA, 19 nt, Artificial Sequence
  Description of Artificial Sequence: Synthetic oligonucleotide
ccccgcucgcggcgcgccc

SEQ ID NO: 1541704 - RNA, 19 nt, Artificial Sequence
  Description of Artificial Sequence: Synthetic oligonucleotide
gcgcuccgccaggguuucg

SEQ ID NO: 1541705 - RNA, 19 nt, Artificial Sequence
  Description of Artificial Sequence: Synthetic oligonucleotide
ccgccgcccucaggccucc

SEQ ID NO: 1541706 - RNA, 19 nt, Artificial Sequence
  Description of Artificial Sequence: Synthetic oligonucleotide
gcggacggccgggccuccu

SEQ ID NO: 1541707 - RNA, 19 nt, Artificial Sequence
  Description of Artificial Sequence: Synthetic oligonucleotide
uugcacaugaaaauuagcg

SEQ ID NO: 1541708 - RNA, 19 nt, Artificial Sequence
  Description of Artificial Sequence: Synthetic oligonucleotide
acaccuuacauuucgaacc

SEQ ID NO: 1541709 - RNA, 19 nt, Artificial Sequence
  Description of Artificial Sequence: Synthetic oligonucleotide
auacaugaaauucaggccg

SEQ ID NO: 1541710 - RNA, 19 nt, Artificial Sequence
  Description of Artificial Sequence: Synthetic oligonucleotide
uggacuuucggucagaacc

SEQ ID NO: 1541711 - RNA, 19 nt, Artificial Sequence
  Description of Artificial Sequence: Synthetic oligonucleotide
agucauuuguuuuacuucc

SEQ ID NO: 1541712 - RNA, 19 nt, Artificial Sequence
  Description of Artificial Sequence: Synthetic oligonucleotide
ucggucagaaccaaaaugg

SEQ ID NO: 1541713 - RNA, 19 nt, Artificial Sequence
  Description of Artificial Sequence: Synthetic oligonucleotide
uaucauaugauauuuucug

SEQ ID NO: 1541714 - RNA, 19 nt, Artificial Sequence
  Description of Artificial Sequence: Synthetic oligonucleotide
uaauacaccuuacauuucg

SEQ ID NO: 1541715 - RNA, 19 nt, Artificial Sequence
  Description of Artificial Sequence: Synthetic oligonucleotide
caaacaaaggacauucucg

SEQ ID NO: 1541716 - RNA, 19 nt, Artificial Sequence
  Description of Artificial Sequence: Synthetic oligonucleotide
aauaccaaagggcuggucu

SEQ ID NO: 1541717 - RNA, 19 nt, Artificial Sequence
  Description of Artificial Sequence: Synthetic oligonucleotide
uguuuuggaagccuuaaug

SEQ ID NO: 1541718 - RNA, 19 nt, Artificial Sequence
  Description of Artificial Sequence: Synthetic oligonucleotide
uaucauacgacucuuguuc

SEQ ID NO: 1541719 - RNA, 19 nt, Artificial Sequence
  Description of Artificial Sequence: Synthetic oligonucleotide
aaacaaaggacauucucga

SEQ ID NO: 1541720 - RNA, 19 nt, Artificial Sequence
  Description of Artificial Sequence: Synthetic oligonucleotide
uuucugaagugucagaaga

SEQ ID NO: 1541721 - RNA, 19 nt, Artificial Sequence
  Description of Artificial Sequence: Synthetic oligonucleotide
uuuaucauaugauauuuuc

SEQ ID NO: 1541722 - RNA, 19 nt, Artificial Sequence
  Description of Artificial Sequence: Synthetic oligonucleotide
aaccugaauaccaaagggc

SEQ ID NO: 1541723 - RNA, 19 nt, Artificial Sequence
  Description of Artificial Sequence: Synthetic oligonucleotide
aucacuugcaacauagucc

SEQ ID NO: 1541724 - RNA, 19 nt, Artificial Sequence
  Description of Artificial Sequence: Synthetic oligonucleotide
ugagccaucaguaggaacu

SEQ ID NO: 1541725 - RNA, 19 nt, Artificial Sequence
  Description of Artificial Sequence: Synthetic oligonucleotide
aguacauuucguuucagug

SEQ ID NO: 1541726 - RNA, 19 nt, Artificial Sequence
  Description of Artificial Sequence: Synthetic oligonucleotide
augaaaauuagcgaacgac

SEQ ID NO: 1541727 - RNA, 19 nt, Artificial Sequence
  Description of Artificial Sequence: Synthetic oligonucleotide
aacucucuuguuuuggaag

SEQ ID NO: 1541728 - RNA, 19 nt, Artificial Sequence
  Description of Artificial Sequence: Synthetic oligonucleotide
acaaaggacauucucgauc

SEQ ID NO: 1541729 - RNA, 19 nt, Artificial Sequence
  Description of Artificial Sequence: Synthetic oligonucleotide
ugauguuggauuuggacgc

SEQ ID NO: 1541730 - RNA, 19 nt, Artificial Sequence
  Description of Artificial Sequence: Synthetic oligonucleotide
aaucuguuaucauacgacu

SEQ ID NO: 1541731 - RNA, 19 nt, Artificial Sequence
  Description of Artificial Sequence: Synthetic oligonucleotide
uucguuucagugcaaaccc

SEQ ID NO: 1541732 - RNA, 19 nt, Artificial Sequence
  Description of Artificial Sequence: Synthetic oligonucleotide
uacauuucguuucagugca

SEQ ID NO: 1541733 - RNA, 19 nt, Artificial Sequence
  Description of Artificial Sequence: Synthetic oligonucleotide
uuaucauaugauauuuucu

SEQ ID NO: 1541734 - RNA, 19 nt, Artificial Sequence
  Description of Artificial Sequence: Synthetic oligonucleotide
acgcucaucucccauaagc

SEQ ID NO: 1541735 - RNA, 19 nt, Artificial Sequence
  Description of Artificial Sequence: Synthetic oligonucleotide
ugugauggaucauuugcgg

SEQ ID NO: 1541736 - RNA, 19 nt, Artificial Sequence
  Description of Artificial Sequence: Synthetic oligonucleotide
agaauucaacuucaggguc

SEQ ID NO: 1541737 - RNA, 19 nt, Artificial Sequence
  Description of Artificial Sequence: Synthetic oligonucleotide
cauaccuucuugauguugg

SEQ ID NO: 1541738 - RNA, 19 nt, Artificial Sequence
  Description of Artificial Sequence: Synthetic oligonucleotide
uuugcggucaaguuucucc

SEQ ID NO: 1541739 - RNA, 19 nt, Artificial Sequence
  Description of Artificial Sequence: Synthetic oligonucleotide
uucaguagggcucaacuga

SEQ ID NO: 1541740 - RNA, 19 nt, Artificial Sequence
  Description of Artificial Sequence: Synthetic oligonucleotide
ugaaguuuguucuuagacu

SEQ ID NO: 1541741 - RNA, 19 nt, Artificial Sequence
  Description of Artificial Sequence: Synthetic oligonucleotide
auuucugucagacccuuuc

SEQ ID NO: 1541742 - RNA, 19 nt, Artificial Sequence
  Description of Artificial Sequence: Synthetic oligonucleotide
ucuuggagcaccuuucugc

SEQ ID NO: 1541743 - RNA, 19 nt, Artificial Sequence
  Description of Artificial Sequence: Synthetic oligonucleotide
acauuucgaaccugaauac

SEQ ID NO: 1541744 - RNA, 19 nt, Artificial Sequence
  Description of Artificial Sequence: Synthetic oligonucleotide
ugcuauucuccccagaacu

SEQ ID NO: 1541745 - RNA, 19 nt, Artificial Sequence
  Description of Artificial Sequence: Synthetic oligonucleotide
uucggucagaaccaaaaug

SEQ ID NO: 1541746 - RNA, 19 nt, Artificial Sequence
  Description of Artificial Sequence: Synthetic oligonucleotide
ucauuugcggucaaguuuc

SEQ ID NO: 1541747 - RNA, 19 nt, Artificial Sequence
  Description of Artificial Sequence: Synthetic oligonucleotide
uccgcuauuagcuccgagg

SEQ ID NO: 1541748 - RNA, 19 nt, Artificial Sequence
  Description of Artificial Sequence: Synthetic oligonucleotide
ugucuuuucuucuggugcg

SEQ ID NO: 1541749 - RNA, 19 nt, Artificial Sequence
  Description of Artificial Sequence: Synthetic oligonucleotide
ucagaaccaaaauggaccc

SEQ ID NO: 1541750 - RNA, 19 nt, Artificial Sequence
  Description of Artificial Sequence: Synthetic oligonucleotide
ucuuuacacgcucaucucc

SEQ ID NO: 1541751 - RNA, 19 nt, Artificial Sequence
  Description of Artificial Sequence: Synthetic oligonucleotide
ugugacuacuagaaaauuc

SEQ ID NO: 1541752 - RNA, 19 nt, Artificial Sequence
  Description of Artificial Sequence: Synthetic oligonucleotide
gaagugucagaagaggagg

SEQ ID NO: 1541753 - RNA, 19 nt, Artificial Sequence
  Description of Artificial Sequence: Synthetic oligonucleotide
ucugaagugucagaagagg

SEQ ID NO: 1541754 - RNA, 19 nt, Artificial Sequence
  Description of Artificial Sequence: Synthetic oligonucleotide
uucaagucuauccaauuuc

SEQ ID NO: 1541755 - RNA, 19 nt, Artificial Sequence
  Description of Artificial Sequence: Synthetic oligonucleotide
gucagaaccaaaauggacc

SEQ ID NO: 1541756 - RNA, 19 nt, Artificial Sequence
  Description of Artificial Sequence: Synthetic oligonucleotide
uuucguuucagugcaaacc

SEQ ID NO: 1541757 - RNA, 19 nt, Artificial Sequence
  Description of Artificial Sequence: Synthetic oligonucleotide
guugcauuaguucuucuug

SEQ ID NO: 1541758 - RNA, 19 nt, Artificial Sequence
  Description of Artificial Sequence: Synthetic oligonucleotide
ugcacaugaaaauuagcga

SEQ ID NO: 1541759 - RNA, 19 nt, Artificial Sequence
  Description of Artificial Sequence: Synthetic oligonucleotide
aaagaccaaacaaaggaca

SEQ ID NO: 1541760 - RNA, 19 nt, Artificial Sequence
  Description of Artificial Sequence: Synthetic oligonucleotide
uuacuuccugaacauuugg

SEQ ID NO: 1541761 - RNA, 19 nt, Artificial Sequence
  Description of Artificial Sequence: Synthetic oligonucleotide
caaucuguuaucauacgac

SEQ ID NO: 1541762 - RNA, 19 nt, Artificial Sequence
  Description of Artificial Sequence: Synthetic oligonucleotide
ucuucaguagggcucaacu

SEQ ID NO: 1541763 - RNA, 19 nt, Artificial Sequence
  Description of Artificial Sequence: Synthetic oligonucleotide
cauugauuccagaaagacc

SEQ ID NO: 1541764 - RNA, 19 nt, Artificial Sequence
  Description of Artificial Sequence: Synthetic oligonucleotide
auuagcgaacgacuucccc

SEQ ID NO: 1541765 - RNA, 19 nt, Artificial Sequence
  Description of Artificial Sequence: Synthetic oligonucleotide
ugcaacauaguccugugau

SEQ ID NO: 1541766 - RNA, 19 nt, Artificial Sequence
  Description of Artificial Sequence: Synthetic oligonucleotide
caacauaguccugugaugg

SEQ ID NO: 1541767 - RNA, 19 nt, Artificial Sequence
  Description of Artificial Sequence: Synthetic oligonucleotide
guacauuucguuucagugc

SEQ ID NO: 1541768 - RNA, 19 nt, Artificial Sequence
  Description of Artificial Sequence: Synthetic oligonucleotide
uuagcgaacgacuucccca

SEQ ID NO: 1541769 - RNA, 19 nt, Artificial Sequence
  Description of Artificial Sequence: Synthetic oligonucleotide
guuucguuggcuuuucccc

SEQ ID NO: 1541770 - RNA, 19 nt, Artificial Sequence
  Description of Artificial Sequence: Synthetic oligonucleotide
accaaaauggacccgggug

SEQ ID NO: 1541771 - RNA, 19 nt, Artificial Sequence
  Description of Artificial Sequence: Synthetic oligonucleotide
agccuuaauguuucguugg

SEQ ID NO: 1541772 - RNA, 19 nt, Artificial Sequence
  Description of Artificial Sequence: Synthetic oligonucleotide
agaaccaaaauggacccgg

SEQ ID NO: 1541773 - RNA, 19 nt, Artificial Sequence
  Description of Artificial Sequence: Synthetic oligonucleotide
uccgagagggagaagcccg

SEQ ID NO: 1541774 - RNA, 19 nt, Artificial Sequence
  Description of Artificial Sequence: Synthetic oligonucleotide
cauaugauauuuucuguuc

SEQ ID NO: 1541775 - RNA, 19 nt, Artificial Sequence
  Description of Artificial Sequence: Synthetic oligonucleotide
auaugauauuuucuguucu

SEQ ID NO: 1541776 - RNA, 19 nt, Artificial Sequence
  Description of Artificial Sequence: Synthetic oligonucleotide
acauucucgaucuguguuc

SEQ ID NO: 1541777 - RNA, 19 nt, Artificial Sequence
  Description of Artificial Sequence: Synthetic oligonucleotide
acaugaaaauuagcgaacg

SEQ ID NO: 1541778 - RNA, 19 nt, Artificial Sequence
  Description of Artificial Sequence: Synthetic oligonucleotide
augaaauucaggccguucu

SEQ ID NO: 1541779 - RNA, 19 nt, Artificial Sequence
  Description of Artificial Sequence: Synthetic oligonucleotide
uuuggaagccuuaauguuu

SEQ ID NO: 1541780 - RNA, 19 nt, Artificial Sequence
  Description of Artificial Sequence: Synthetic oligonucleotide
cugugauggaucauuugcg

SEQ ID NO: 1541781 - RNA, 19 nt, Artificial Sequence
  Description of Artificial Sequence: Synthetic oligonucleotide
uuuggacgcaggauggaag

SEQ ID NO: 1541782 - RNA, 19 nt, Artificial Sequence
  Description of Artificial Sequence: Synthetic oligonucleotide
cugaauaccaaagggcugg

SEQ ID NO: 1541783 - RNA, 19 nt, Artificial Sequence
  Description of Artificial Sequence: Synthetic oligonucleotide
auuucguuucagugcaaac

SEQ ID NO: 1541784 - RNA, 19 nt, Artificial Sequence
  Description of Artificial Sequence: Synthetic oligonucleotide
cuuuacacgcucaucuccc

SEQ ID NO: 1541785 - RNA, 19 nt, Artificial Sequence
  Description of Artificial Sequence: Synthetic oligonucleotide
agagggagaagcccgccgc

SEQ ID NO: 1541786 - RNA, 19 nt, Artificial Sequence
  Description of Artificial Sequence: Synthetic oligonucleotide
uauccaauuuccugagaag

SEQ ID NO: 1541787 - RNA, 19 nt, Artificial Sequence
  Description of Artificial Sequence: Synthetic oligonucleotide
ucaguaggaacugaacuug

SEQ ID NO: 1541788 - RNA, 19 nt, Artificial Sequence
  Description of Artificial Sequence: Synthetic oligonucleotide
uacaccuuacauuucgaac

SEQ ID NO: 1541789 - RNA, 19 nt, Artificial Sequence
  Description of Artificial Sequence: Synthetic oligonucleotide
aucauaugauauuuucugu

SEQ ID NO: 1541790 - RNA, 19 nt, Artificial Sequence
  Description of Artificial Sequence: Synthetic oligonucleotide
uucacaugaccccacuugu

SEQ ID NO: 1541791 - RNA, 19 nt, Artificial Sequence
  Description of Artificial Sequence: Synthetic oligonucleotide
uuuaacuccugguggggcc

SEQ ID NO: 1541792 - RNA, 19 nt, Artificial Sequence
  Description of Artificial Sequence: Synthetic oligonucleotide
auaccaaagggcuggucuc

SEQ ID NO: 1541793 - RNA, 19 nt, Artificial Sequence
  Description of Artificial Sequence: Synthetic oligonucleotide
gagucauuuguuuuacuuc

SEQ ID NO: 1541794 - RNA, 19 nt, Artificial Sequence
  Description of Artificial Sequence: Synthetic oligonucleotide
uguuggauuuggacgcagg

SEQ ID NO: 1541795 - RNA, 19 nt, Artificial Sequence
  Description of Artificial Sequence: Synthetic oligonucleotide
ugauggaucauuugcgguc

SEQ ID NO: 1541796 - RNA, 19 nt, Artificial Sequence
  Description of Artificial Sequence: Synthetic oligonucleotide
aacccacuguuucucaucu

SEQ ID NO: 1541797 - RNA, 19 nt, Artificial Sequence
  Description of Artificial Sequence: Synthetic oligonucleotide
uuucaagucuauccaauuu

SEQ ID NO: 1541798 - RNA, 19 nt, Artificial Sequence
  Description of Artificial Sequence: Synthetic oligonucleotide
uaugacgaugguuucugga

SEQ ID NO: 1541799 - RNA, 19 nt, Artificial Sequence
  Description of Artificial Sequence: Synthetic oligonucleotide
uucagugcaaacccacugu

SEQ ID NO: 1541800 - RNA, 19 nt, Artificial Sequence
  Description of Artificial Sequence: Synthetic oligonucleotide
uuacauuucgaaccugaau

SEQ ID NO: 1541801 - RNA, 19 nt, Artificial Sequence
  Description of Artificial Sequence: Synthetic oligonucleotide
cucaacugaggccaguccc

SEQ ID NO: 1541802 - RNA, 19 nt, Artificial Sequence
  Description of Artificial Sequence: Synthetic oligonucleotide
uuggcuuuuccccugucac

SEQ ID NO: 1541803 - RNA, 19 nt, Artificial Sequence
  Description of Artificial Sequence: Synthetic oligonucleotide
gacccuuucaucucuggac

SEQ ID NO: 1541804 - RNA, 19 nt, Artificial Sequence
  Description of Artificial Sequence: Synthetic oligonucleotide
aauuagcgaacgacuuccc

SEQ ID NO: 1541805 - RNA, 19 nt, Artificial Sequence
  Description of Artificial Sequence: Synthetic oligonucleotide
cacuugugacauuuaauac

SEQ ID NO: 1541806 - RNA, 19 nt, Artificial Sequence
  Description of Artificial Sequence: Synthetic oligonucleotide
caucacuugcaacauaguc

SEQ ID NO: 1541807 - RNA, 19 nt, Artificial Sequence
  Description of Artificial Sequence: Synthetic oligonucleotide
ucuguucugccauccauac

SEQ ID NO: 1541808 - RNA, 19 nt, Artificial Sequence
  Description of Artificial Sequence: Synthetic oligonucleotide
aauguuucguuggcuuuuc

SEQ ID NO: 1541809 - RNA, 19 nt, Artificial Sequence
  Description of Artificial Sequence: Synthetic oligonucleotide
agcaaucuguuaucauacg

SEQ ID NO: 1541810 - RNA, 19 nt, Artificial Sequence
  Description of Artificial Sequence: Synthetic oligonucleotide
ccagaaagaccaaacaaag

SEQ ID NO: 1541811 - RNA, 19 nt, Artificial Sequence
  Description of Artificial Sequence: Synthetic oligonucleotide
aaauucaggccguucuuua

SEQ ID NO: 1541812 - RNA, 19 nt, Artificial Sequence
  Description of Artificial Sequence: Synthetic oligonucleotide
auuucgaaccugaauacca

SEQ ID NO: 1541813 - RNA, 19 nt, Artificial Sequence
  Description of Artificial Sequence: Synthetic oligonucleotide
caggccguucuuuacacgc

SEQ ID NO: 1541814 - RNA, 19 nt, Artificial Sequence
  Description of Artificial Sequence: Synthetic oligonucleotide
uacuuccugaacauuuggu

SEQ ID NO: 1541815 - RNA, 19 nt, Artificial Sequence
  Description of Artificial Sequence: Synthetic oligonucleotide
uguauuccgucucuccuuc

SEQ ID NO: 1541816 - RNA, 19 nt, Artificial Sequence
  Description of Artificial Sequence: Synthetic oligonucleotide
uucaucucuggacuaugac

SEQ ID NO: 1541817 - RNA, 19 nt, Artificial Sequence
  Description of Artificial Sequence: Synthetic oligonucleotide
gaguccgagagggagaagc

SEQ ID NO: 1541818 - RNA, 19 nt, Artificial Sequence
  Description of Artificial Sequence: Synthetic oligonucleotide
ugacgaugguuucuggacu

SEQ ID NO: 1541819 - RNA, 19 nt, Artificial Sequence
  Description of Artificial Sequence: Synthetic oligonucleotide
uacaugaaauucaggccgu

SEQ ID NO: 1541820 - RNA, 19 nt, Artificial Sequence
  Description of Artificial Sequence: Synthetic oligonucleotide
ucaucucccauaagcaauc

SEQ ID NO: 1541821 - RNA, 19 nt, Artificial Sequence
  Description of Artificial Sequence: Synthetic oligonucleotide
guuuuggaagccuuaaugu

SEQ ID NO: 1541822 - RNA, 19 nt, Artificial Sequence
  Description of Artificial Sequence: Synthetic oligonucleotide
uuucgaaccugaauaccaa

SEQ ID NO: 1541823 - RNA, 19 nt, Artificial Sequence
  Description of Artificial Sequence: Synthetic oligonucleotide
gcaucgacggcccugagcc

SEQ ID NO: 1541824 - RNA, 19 nt, Artificial Sequence
  Description of Artificial Sequence: Synthetic oligonucleotide
uuccccaucuuggaguccg

SEQ ID NO: 1541825 - RNA, 19 nt, Artificial Sequence
  Description of Artificial Sequence: Synthetic oligonucleotide
ucuggugcgcucuucagua

SEQ ID NO: 1541826 - RNA, 19 nt, Artificial Sequence
  Description of Artificial Sequence: Synthetic oligonucleotide
aaccaaaauggacccgggu

SEQ ID NO: 1541827 - RNA, 19 nt, Artificial Sequence
  Description of Artificial Sequence: Synthetic oligonucleotide
acuaugacgaugguuucug

SEQ ID NO: 1541828 - RNA, 19 nt, Artificial Sequence
  Description of Artificial Sequence: Synthetic oligonucleotide
aucuguuaucauacgacuc

SEQ ID NO: 1541829 - RNA, 19 nt, Artificial Sequence
  Description of Artificial Sequence: Synthetic oligonucleotide
uuaauacaccuuacauuuc

SEQ ID NO: 1541830 - RNA, 19 nt, Artificial Sequence
  Description of Artificial Sequence: Synthetic oligonucleotide
uuucuggacuuucggucag

SEQ ID NO: 1541831 - RNA, 19 nt, Artificial Sequence
  Description of Artificial Sequence: Synthetic oligonucleotide
aacaaaggacauucucgau

SEQ ID NO: 1541832 - RNA, 19 nt, Artificial Sequence
  Description of Artificial Sequence: Synthetic oligonucleotide
uucucuuggagcaccuuuc

SEQ ID NO: 1541833 - RNA, 19 nt, Artificial Sequence
  Description of Artificial Sequence: Synthetic oligonucleotide
auaguccugugauggauca

SEQ ID NO: 1541834 - RNA, 19 nt, Artificial Sequence
  Description of Artificial Sequence: Synthetic oligonucleotide
accugaauaccaaagggcu

SEQ ID NO: 1541835 - RNA, 19 nt, Artificial Sequence
  Description of Artificial Sequence: Synthetic oligonucleotide
uuaucauacgacucuuguu

SEQ ID NO: 1541836 - RNA, 19 nt, Artificial Sequence
  Description of Artificial Sequence: Synthetic oligonucleotide
uguuucucaucuccgcuau

SEQ ID NO: 1541837 - RNA, 19 nt, Artificial Sequence
  Description of Artificial Sequence: Synthetic oligonucleotide
uguugcauuaguucuucuu

SEQ ID NO: 1541838 - RNA, 19 nt, Artificial Sequence
  Description of Artificial Sequence: Synthetic oligonucleotide
cuauccaauuuccugagaa

SEQ ID NO: 1541839 - RNA, 19 nt, Artificial Sequence
  Description of Artificial Sequence: Synthetic oligonucleotide
ucugucagacccuuucauc

SEQ ID NO: 1541840 - RNA, 19 nt, Artificial Sequence
  Description of Artificial Sequence: Synthetic oligonucleotide
uuucguuggcuuuuccccu

SEQ ID NO: 1541841 - RNA, 19 nt, Artificial Sequence
  Description of Artificial Sequence: Synthetic oligonucleotide
aucauacgacucuuguucu

SEQ ID NO: 1541842 - RNA, 19 nt, Artificial Sequence
  Description of Artificial Sequence: Synthetic oligonucleotide
cacugugacuacuagaaaa

SEQ ID NO: 1541843 - RNA, 19 nt, Artificial Sequence
  Description of Artificial Sequence: Synthetic oligonucleotide
aagaccaaacaaaggacau

SEQ ID NO: 1541844 - RNA, 19 nt, Artificial Sequence
  Description of Artificial Sequence: Synthetic oligonucleotide
aagaggaggaggaggagga

SEQ ID NO: 1541845 - RNA, 19 nt, Artificial Sequence
  Description of Artificial Sequence: Synthetic oligonucleotide
uuggacgcaggauggaagu

SEQ ID NO: 1541846 - RNA, 19 nt, Artificial Sequence
  Description of Artificial Sequence: Synthetic oligonucleotide
uccgaggggugcaucgacg

SEQ ID NO: 1541847 - RNA, 19 nt, Artificial Sequence
  Description of Artificial Sequence: Synthetic oligonucleotide
acccuuucaucucuggacu

SEQ ID NO: 1541848 - RNA, 19 nt, Artificial Sequence
  Description of Artificial Sequence: Synthetic oligonucleotide
gaggaggaggaggaggagg

SEQ ID NO: 1541849 - RNA, 19 nt, Artificial Sequence
  Description of Artificial Sequence: Synthetic oligonucleotide
uccugguggggccucauac

SEQ ID NO: 1541850 - RNA, 19 nt, Artificial Sequence
  Description of Artificial Sequence: Synthetic oligonucleotide
aagguacuguugcauuagu

SEQ ID NO: 1541851 - RNA, 19 nt, Artificial Sequence
  Description of Artificial Sequence: Synthetic oligonucleotide
ucacaugaccccacuugug

SEQ ID NO: 1541852 - RNA, 19 nt, Artificial Sequence
  Description of Artificial Sequence: Synthetic oligonucleotide
uuucggucagaaccaaaau

SEQ ID NO: 1541853 - RNA, 19 nt, Artificial Sequence
  Description of Artificial Sequence: Synthetic oligonucleotide
ugaaauucaggccguucuu

SEQ ID NO: 1541854 - RNA, 19 nt, Artificial Sequence
  Description of Artificial Sequence: Synthetic oligonucleotide
caaguuucuccccaguaca

SEQ ID NO: 1541855 - RNA, 19 nt, Artificial Sequence
  Description of Artificial Sequence: Synthetic oligonucleotide
ucucgaucuguguucacau

SEQ ID NO: 1541856 - RNA, 19 nt, Artificial Sequence
  Description of Artificial Sequence: Synthetic oligonucleotide
ucagagucauuuguuuuac

SEQ ID NO: 1541857 - RNA, 19 nt, Artificial Sequence
  Description of Artificial Sequence: Synthetic oligonucleotide
auaagcaaucuguuaucau

SEQ ID NO: 1541858 - RNA, 19 nt, Artificial Sequence
  Description of Artificial Sequence: Synthetic oligonucleotide
ucuuguuuuggaagccuua

SEQ ID NO: 1541859 - RNA, 19 nt, Artificial Sequence
  Description of Artificial Sequence: Synthetic oligonucleotide
uucaggccguucuuuacac

SEQ ID NO: 1541860 - RNA, 19 nt, Artificial Sequence
  Description of Artificial Sequence: Synthetic oligonucleotide
aauacaccuuacauuucga

SEQ ID NO: 1541861 - RNA, 19 nt, Artificial Sequence
  Description of Artificial Sequence: Synthetic oligonucleotide
ucucuuggagcaccuuucu

SEQ ID NO: 1541862 - RNA, 19 nt, Artificial Sequence
  Description of Artificial Sequence: Synthetic oligonucleotide
aucucccuuugccugugac

SEQ ID NO: 1541863 - RNA, 19 nt, Artificial Sequence
  Description of Artificial Sequence: Synthetic oligonucleotide
ucuauccaauuuccugaga

SEQ ID NO: 1541864 - RNA, 19 nt, Artificial Sequence
  Description of Artificial Sequence: Synthetic oligonucleotide
ugacuaccaggacuccugc

SEQ ID NO: 1541865 - RNA, 19 nt, Artificial Sequence
  Description of Artificial Sequence: Synthetic oligonucleotide
auguuucguuggcuuuucc

SEQ ID NO: 1541866 - RNA, 19 nt, Artificial Sequence
  Description of Artificial Sequence: Synthetic oligonucleotide
acuaccaggacuccugcuu

SEQ ID NO: 1541867 - RNA, 19 nt, Artificial Sequence
  Description of Artificial Sequence: Synthetic oligonucleotide
uucucgaucuguguucaca

SEQ ID NO: 1541868 - RNA, 19 nt, Artificial Sequence
  Description of Artificial Sequence: Synthetic oligonucleotide
ccaaaauggacccgggugc

SEQ ID NO: 1541869 - RNA, 19 nt, Artificial Sequence
  Description of Artificial Sequence: Synthetic oligonucleotide
ucagugcaaacccacuguu

SEQ ID NO: 1541870 - RNA, 19 nt, Artificial Sequence
  Description of Artificial Sequence: Synthetic oligonucleotide
cauaguccugugauggauc

SEQ ID NO: 1541871 - RNA, 19 nt, Artificial Sequence
  Description of Artificial Sequence: Synthetic oligonucleotide
cauuuaauacaccuuacau

SEQ ID NO: 1541872 - RNA, 19 nt, Artificial Sequence
  Description of Artificial Sequence: Synthetic oligonucleotide
gguuucuggacuuucgguc

SEQ ID NO: 1541873 - RNA, 19 nt, Artificial Sequence
  Description of Artificial Sequence: Synthetic oligonucleotide
caaaggacauucucgaucu

SEQ ID NO: 1541874 - RNA, 19 nt, Artificial Sequence
  Description of Artificial Sequence: Synthetic oligonucleotide
auacaccuuacauuucgaa

SEQ ID NO: 1541875 - RNA, 19 nt, Artificial Sequence
  Description of Artificial Sequence: Synthetic oligonucleotide
ucaccauugccaugguuuc

SEQ ID NO: 1541876 - RNA, 19 nt, Artificial Sequence
  Description of Artificial Sequence: Synthetic oligonucleotide
uucuuuacacgcucaucuc

SEQ ID NO: 1541877 - RNA, 19 nt, Artificial Sequence
  Description of Artificial Sequence: Synthetic oligonucleotide
gcacaugaaaauuagcgaa

SEQ ID NO: 1541878 - RNA, 19 nt, Artificial Sequence
  Description of Artificial Sequence: Synthetic oligonucleotide
ugacuacuagaaaauucuu

SEQ ID NO: 1541879 - RNA, 19 nt, Artificial Sequence
  Description of Artificial Sequence: Synthetic oligonucleotide
ugcaucgacggcccugagc

SEQ ID NO: 1541880 - RNA, 19 nt, Artificial Sequence
  Description of Artificial Sequence: Synthetic oligonucleotide
gaacgacuuccccaucuug

SEQ ID NO: 1541881 - RNA, 19 nt, Artificial Sequence
  Description of Artificial Sequence: Synthetic oligonucleotide
uuuacacgcucaucuccca

SEQ ID NO: 1541882 - RNA, 19 nt, Artificial Sequence
  Description of Artificial Sequence: Synthetic oligonucleotide
gaggaggaggaggaggaag

SEQ ID NO: 1541883 - RNA, 19 nt, Artificial Sequence
  Description of Artificial Sequence: Synthetic oligonucleotide
ucaggccguucuuuacacg

SEQ ID NO: 1541884 - RNA, 19 nt, Artificial Sequence
  Description of Artificial Sequence: Synthetic oligonucleotide
gacuucaagaauucaacuu

SEQ ID NO: 1541885 - RNA, 19 nt, Artificial Sequence
  Description of Artificial Sequence: Synthetic oligonucleotide
ucguuucagugcaaaccca

SEQ ID NO: 1541886 - RNA, 19 nt, Artificial Sequence
  Description of Artificial Sequence: Synthetic oligonucleotide
uuggaguccgagagggaga

SEQ ID NO: 1541887 - RNA, 19 nt, Artificial Sequence
  Description of Artificial Sequence: Synthetic oligonucleotide
gugacuacuagaaaauucu

SEQ ID NO: 1541888 - RNA, 19 nt, Artificial Sequence
  Description of Artificial Sequence: Synthetic oligonucleotide
gauggaucauuugcgguca

SEQ ID NO: 1541889 - RNA, 19 nt, Artificial Sequence
  Description of Artificial Sequence: Synthetic oligonucleotide
cuaugacgaugguuucugg

SEQ ID NO: 1541890 - RNA, 19 nt, Artificial Sequence
  Description of Artificial Sequence: Synthetic oligonucleotide
ugucagggacuucaagaau

SEQ ID NO: 1541891 - RNA, 19 nt, Artificial Sequence
  Description of Artificial Sequence: Synthetic oligonucleotide
cagaacucucuuguuuugg

SEQ ID NO: 1541892 - RNA, 19 nt, Artificial Sequence
  Description of Artificial Sequence: Synthetic oligonucleotide
uugcaacauaguccuguga

SEQ ID NO: 1541893 - RNA, 19 nt, Artificial Sequence
  Description of Artificial Sequence: Synthetic oligonucleotide
ucucuggacuaugacgaug

SEQ ID NO: 1541894 - RNA, 19 nt, Artificial Sequence
  Description of Artificial Sequence: Synthetic oligonucleotide
ggauuuggacgcaggaugg

SEQ ID NO: 1541895 - RNA, 19 nt, Artificial Sequence
  Description of Artificial Sequence: Synthetic oligonucleotide
uucguuggcuuuuccccug

SEQ ID NO: 1541896 - RNA, 19 nt, Artificial Sequence
  Description of Artificial Sequence: Synthetic oligonucleotide
aaauggacccgggugcuau

SEQ ID NO: 1541897 - RNA, 19 nt, Artificial Sequence
  Description of Artificial Sequence: Synthetic oligonucleotide
uuguauuccgucucuccuu

SEQ ID NO: 1541898 - RNA, 19 nt, Artificial Sequence
  Description of Artificial Sequence: Synthetic oligonucleotide
uggaagccuuaauguuucg

SEQ ID NO: 1541899 - RNA, 19 nt, Artificial Sequence
  Description of Artificial Sequence: Synthetic oligonucleotide
caucaguaggaacugaacu

SEQ ID NO: 1541900 - RNA, 19 nt, Artificial Sequence
  Description of Artificial Sequence: Synthetic oligonucleotide
agaagcccgccgcuggguc

SEQ ID NO: 1541901 - RNA, 19 nt, Artificial Sequence
  Description of Artificial Sequence: Synthetic oligonucleotide
aauucaacuucagggucuu

SEQ ID NO: 1541902 - RNA, 19 nt, Artificial Sequence
  Description of Artificial Sequence: Synthetic oligonucleotide
uguguuuacuucugcucuu

SEQ ID NO: 1541903 - RNA, 19 nt, Artificial Sequence
  Description of Artificial Sequence: Synthetic oligonucleotide
ucccauaagcaaucuguua

SEQ ID NO: 1541904 - RNA, 19 nt, Artificial Sequence
  Description of Artificial Sequence: Synthetic oligonucleotide
uagcgaacgacuuccccau

SEQ ID NO: 1541905 - RNA, 19 nt, Artificial Sequence
  Description of Artificial Sequence: Synthetic oligonucleotide
ugucagacccuuucaucuc

SEQ ID NO: 1541906 - RNA, 19 nt, Artificial Sequence
  Description of Artificial Sequence: Synthetic oligonucleotide
caugaaaauuagcgaacga

SEQ ID NO: 1541907 - RNA, 19 nt, Artificial Sequence
  Description of Artificial Sequence: Synthetic oligonucleotide
gaacucucuuguuuuggaa

SEQ ID NO: 1541908 - RNA, 19 nt, Artificial Sequence
  Description of Artificial Sequence: Synthetic oligonucleotide
uuggauuuggacgcaggau

SEQ ID NO: 1541909 - RNA, 19 nt, Artificial Sequence
  Description of Artificial Sequence: Synthetic oligonucleotide
gguggggccucauacauga

SEQ ID NO: 1541910 - RNA, 19 nt, Artificial Sequence
  Description of Artificial Sequence: Synthetic oligonucleotide
acgacuuccccaucuugga

SEQ ID NO: 1541911 - RNA, 19 nt, Artificial Sequence
  Description of Artificial Sequence: Synthetic oligonucleotide
aucucccauaagcaaucug

SEQ ID NO: 1541912 - RNA, 19 nt, Artificial Sequence
  Description of Artificial Sequence: Synthetic oligonucleotide
cacaugaccccacuuguga

SEQ ID NO: 1541913 - RNA, 19 nt, Artificial Sequence
  Description of Artificial Sequence: Synthetic oligonucleotide
cuaugacuucggauucccc

SEQ ID NO: 1541914 - RNA, 19 nt, Artificial Sequence
  Description of Artificial Sequence: Synthetic oligonucleotide
ugugacuaccaggacuccu

SEQ ID NO: 1541915 - RNA, 19 nt, Artificial Sequence
  Description of Artificial Sequence: Synthetic oligonucleotide
ccugugacuaccaggacuc

SEQ ID NO: 1541916 - RNA, 19 nt, Artificial Sequence
  Description of Artificial Sequence: Synthetic oligonucleotide
aggacauucucgaucugug

SEQ ID NO: 1541917 - RNA, 19 nt, Artificial Sequence
  Description of Artificial Sequence: Synthetic oligonucleotide
gcaaucuguuaucauacga

SEQ ID NO: 1541918 - RNA, 19 nt, Artificial Sequence
  Description of Artificial Sequence: Synthetic oligonucleotide
cuauuagcuccgaggggug

SEQ ID NO: 1541919 - RNA, 19 nt, Artificial Sequence
  Description of Artificial Sequence: Synthetic oligonucleotide
ccgcuauuagcuccgaggg

SEQ ID NO: 1541920 - RNA, 19 nt, Artificial Sequence
  Description of Artificial Sequence: Synthetic oligonucleotide
gccauucaaacuuguauuc

SEQ ID NO: 1541921 - RNA, 19 nt, Artificial Sequence
  Description of Artificial Sequence: Synthetic oligonucleotide
uguucacaugaccccacuu

SEQ ID NO: 1541922 - RNA, 19 nt, Artificial Sequence
  Description of Artificial Sequence: Synthetic oligonucleotide
uauuagcuccgaggggugc

SEQ ID NO: 1541923 - RNA, 19 nt, Artificial Sequence
  Description of Artificial Sequence: Synthetic oligonucleotide
cgaaccugaauaccaaagg

SEQ ID NO: 1541924 - RNA, 19 nt, Artificial Sequence
  Description of Artificial Sequence: Synthetic oligonucleotide
agucccucaucucccuuug

SEQ ID NO: 1541925 - RNA, 19 nt, Artificial Sequence
  Description of Artificial Sequence: Synthetic oligonucleotide
gaauucaacuucagggucu

SEQ ID NO: 1541926 - RNA, 19 nt, Artificial Sequence
  Description of Artificial Sequence: Synthetic oligonucleotide
gggacuucaagaauucaac

SEQ ID NO: 1541927 - RNA, 19 nt, Artificial Sequence
  Description of Artificial Sequence: Synthetic oligonucleotide
cugucagacccuuucaucu

SEQ ID NO: 1541928 - RNA, 19 nt, Artificial Sequence
  Description of Artificial Sequence: Synthetic oligonucleotide
cugcuaugacuucggauuc

SEQ ID NO: 1541929 - RNA, 19 nt, Artificial Sequence
  Description of Artificial Sequence: Synthetic oligonucleotide
gaggaaggagauuuguuuu

SEQ ID NO: 1541930 - RNA, 19 nt, Artificial Sequence
  Description of Artificial Sequence: Synthetic oligonucleotide
guuggcuuuuccccuguca

SEQ ID NO: 1541931 - RNA, 19 nt, Artificial Sequence
  Description of Artificial Sequence: Synthetic oligonucleotide
cagacccuuucaucucugg

SEQ ID NO: 1541932 - RNA, 19 nt, Artificial Sequence
  Description of Artificial Sequence: Synthetic oligonucleotide
gcaacauaguccugugaug

SEQ ID NO: 1541933 - RNA, 19 nt, Artificial Sequence
  Description of Artificial Sequence: Synthetic oligonucleotide
uacgacucuuguucuuuaa

SEQ ID NO: 1541934 - RNA, 19 nt, Artificial Sequence
  Description of Artificial Sequence: Synthetic oligonucleotide
cuuucaucucuggacuaug

SEQ ID NO: 1541935 - RNA, 19 nt, Artificial Sequence
  Description of Artificial Sequence: Synthetic oligonucleotide
uacacgcucaucucccaua

SEQ ID NO: 1541936 - RNA, 19 nt, Artificial Sequence
  Description of Artificial Sequence: Synthetic oligonucleotide
uggaucauuugcggucaag

SEQ ID NO: 1541937 - RNA, 19 nt, Artificial Sequence
  Description of Artificial Sequence: Synthetic oligonucleotide
acauaguccugugauggau

SEQ ID NO: 1541938 - RNA, 19 nt, Artificial Sequence
  Description of Artificial Sequence: Synthetic oligonucleotide
acugaggccagucccucau

SEQ ID NO: 1541939 - RNA, 19 nt, Artificial Sequence
  Description of Artificial Sequence: Synthetic oligonucleotide
acacgcucaucucccauaa

SEQ ID NO: 1541940 - RNA, 19 nt, Artificial Sequence
  Description of Artificial Sequence: Synthetic oligonucleotide
aucuccgcuauuagcuccg

SEQ ID NO: 1541941 - RNA, 19 nt, Artificial Sequence
  Description of Artificial Sequence: Synthetic oligonucleotide
gacuuauccucuucagagu

SEQ ID NO: 1541942 - RNA, 19 nt, Artificial Sequence
  Description of Artificial Sequence: Synthetic oligonucleotide
ucuuggaguccgagaggga

SEQ ID NO: 1541943 - RNA, 19 nt, Artificial Sequence
  Description of Artificial Sequence: Synthetic oligonucleotide
cuuguucuuuaagguacug

SEQ ID NO: 1541944 - RNA, 19 nt, Artificial Sequence
  Description of Artificial Sequence: Synthetic oligonucleotide
cucgaucuguguucacaug

SEQ ID NO: 1541945 - RNA, 19 nt, Artificial Sequence
  Description of Artificial Sequence: Synthetic oligonucleotide
ugguggggccucauacaug

SEQ ID NO: 1541946 - RNA, 19 nt, Artificial Sequence
  Description of Artificial Sequence: Synthetic oligonucleotide
uccugggugcucaccgcgc

SEQ ID NO: 1541947 - RNA, 19 nt, Artificial Sequence
  Description of Artificial Sequence: Synthetic oligonucleotide
ucuccccaguacauuucgu

SEQ ID NO: 1541948 - RNA, 19 nt, Artificial Sequence
  Description of Artificial Sequence: Synthetic oligonucleotide
auuugcggucaaguuucuc

SEQ ID NO: 1541949 - RNA, 19 nt, Artificial Sequence
  Description of Artificial Sequence: Synthetic oligonucleotide
gugcuauucuccccagaac

SEQ ID NO: 1541950 - RNA, 19 nt, Artificial Sequence
  Description of Artificial Sequence: Synthetic oligonucleotide
cagaaccaaaauggacccg

SEQ ID NO: 1541951 - RNA, 19 nt, Artificial Sequence
  Description of Artificial Sequence: Synthetic oligonucleotide
gaucauuugcggucaaguu

SEQ ID NO: 1541952 - RNA, 19 nt, Artificial Sequence
  Description of Artificial Sequence: Synthetic oligonucleotide
aggaggaggaggaggagga

SEQ ID NO: 1541953 - RNA, 19 nt, Artificial Sequence
  Description of Artificial Sequence: Synthetic oligonucleotide
uuggagcaccuuucugcca

SEQ ID NO: 1541954 - RNA, 19 nt, Artificial Sequence
  Description of Artificial Sequence: Synthetic oligonucleotide
ucaccaucacuugcaacau

SEQ ID NO: 1541955 - RNA, 19 nt, Artificial Sequence
  Description of Artificial Sequence: Synthetic oligonucleotide
ggccucauacaugaaauuc

SEQ ID NO: 1541956 - RNA, 19 nt, Artificial Sequence
  Description of Artificial Sequence: Synthetic oligonucleotide
auuagcuccgaggggugca

SEQ ID NO: 1541957 - RNA, 19 nt, Artificial Sequence
  Description of Artificial Sequence: Synthetic oligonucleotide
auggacccgggugcuauuc

SEQ ID NO: 1541958 - RNA, 19 nt, Artificial Sequence
  Description of Artificial Sequence: Synthetic oligonucleotide
cagcccugcuaugacuucg

SEQ ID NO: 1541959 - RNA, 19 nt, Artificial Sequence
  Description of Artificial Sequence: Synthetic oligonucleotide
ggacgcaggauggaagucc

SEQ ID NO: 1541960 - RNA, 19 nt, Artificial Sequence
  Description of Artificial Sequence: Synthetic oligonucleotide
ccauaagcaaucuguuauc

SEQ ID NO: 1541961 - RNA, 19 nt, Artificial Sequence
  Description of Artificial Sequence: Synthetic oligonucleotide
cuggacuuucggucagaac

SEQ ID NO: 1541962 - RNA, 19 nt, Artificial Sequence
  Description of Artificial Sequence: Synthetic oligonucleotide
auguuggauuuggacgcag

SEQ ID NO: 1541963 - RNA, 19 nt, Artificial Sequence
  Description of Artificial Sequence: Synthetic oligonucleotide
uggacccgggugcuauucu

SEQ ID NO: 1541964 - RNA, 19 nt, Artificial Sequence
  Description of Artificial Sequence: Synthetic oligonucleotide
ccaucaguaggaacugaac

SEQ ID NO: 1541965 - RNA, 19 nt, Artificial Sequence
  Description of Artificial Sequence: Synthetic oligonucleotide
cauucucgaucuguguuca

SEQ ID NO: 1541966 - RNA, 19 nt, Artificial Sequence
  Description of Artificial Sequence: Synthetic oligonucleotide
gauguuggauuuggacgca

SEQ ID NO: 1541967 - RNA, 19 nt, Artificial Sequence
  Description of Artificial Sequence: Synthetic oligonucleotide
ccuuacauuucgaaccuga

SEQ ID NO: 1541968 - RNA, 19 nt, Artificial Sequence
  Description of Artificial Sequence: Synthetic oligonucleotide
cugccauucaaacuuguau

SEQ ID NO: 1541969 - RNA, 19 nt, Artificial Sequence
  Description of Artificial Sequence: Synthetic oligonucleotide
auacgacucuuguucuuua

SEQ ID NO: 1541970 - RNA, 19 nt, Artificial Sequence
  Description of Artificial Sequence: Synthetic oligonucleotide
ucaugucaucuuuggcaua

SEQ ID NO: 1541971 - RNA, 19 nt, Artificial Sequence
  Description of Artificial Sequence: Synthetic oligonucleotide
gcuaugacuucggauuccc

SEQ ID NO: 1541972 - RNA, 19 nt, Artificial Sequence
  Description of Artificial Sequence: Synthetic oligonucleotide
gauuuggacgcaggaugga

SEQ ID NO: 1541973 - RNA, 19 nt, Artificial Sequence
  Description of Artificial Sequence: Synthetic oligonucleotide
gugauggaucauuugcggu

SEQ ID NO: 1541974 - RNA, 19 nt, Artificial Sequence
  Description of Artificial Sequence: Synthetic oligonucleotide
uaccuucuugauguuggau

SEQ ID NO: 1541975 - RNA, 19 nt, Artificial Sequence
  Description of Artificial Sequence: Synthetic oligonucleotide
uccugaacauuugguuuuc

SEQ ID NO: 1541976 - RNA, 19 nt, Artificial Sequence
  Description of Artificial Sequence: Synthetic oligonucleotide
ucguuggcuuuuccccugu

SEQ ID NO: 1541977 - RNA, 19 nt, Artificial Sequence
  Description of Artificial Sequence: Synthetic oligonucleotide
ugcucucagcccugcuaug

SEQ ID NO: 1541978 - RNA, 19 nt, Artificial Sequence
  Description of Artificial Sequence: Synthetic oligonucleotide
aauggacccgggugcuauu

SEQ ID NO: 1541979 - RNA, 19 nt, Artificial Sequence
  Description of Artificial Sequence: Synthetic oligonucleotide
agcgaacgacuuccccauc

SEQ ID NO: 1541980 - RNA, 19 nt, Artificial Sequence
  Description of Artificial Sequence: Synthetic oligonucleotide
ggacuucaagaauucaacu

SEQ ID NO: 1541981 - RNA, 19 nt, Artificial Sequence
  Description of Artificial Sequence: Synthetic oligonucleotide
cucccuuugccugugacua

SEQ ID NO: 1541982 - RNA, 19 nt, Artificial Sequence
  Description of Artificial Sequence: Synthetic oligonucleotide
gcuauuagcuccgaggggu

SEQ ID NO: 1541983 - RNA, 19 nt, Artificial Sequence
  Description of Artificial Sequence: Synthetic oligonucleotide
agaccaaacaaaggacauu

SEQ ID NO: 1541984 - RNA, 19 nt, Artificial Sequence
  Description of Artificial Sequence: Synthetic oligonucleotide
cuggugcgcucuucaguag

SEQ ID NO: 1541985 - RNA, 19 nt, Artificial Sequence
  Description of Artificial Sequence: Synthetic oligonucleotide
cuguuucucaucuccgcua

SEQ ID NO: 1541986 - RNA, 19 nt, Artificial Sequence
  Description of Artificial Sequence: Synthetic oligonucleotide
agaggaggaggaggaggag

SEQ ID NO: 1541987 - RNA, 19 nt, Artificial Sequence
  Description of Artificial Sequence: Synthetic oligonucleotide
aucucuggacuaugacgau

SEQ ID NO: 1541988 - RNA, 19 nt, Artificial Sequence
  Description of Artificial Sequence: Synthetic oligonucleotide
gaauaccaaagggcugguc

SEQ ID NO: 1541989 - RNA, 19 nt, Artificial Sequence
  Description of Artificial Sequence: Synthetic oligonucleotide
ucagcccugcuaugacuuc

SEQ ID NO: 1541990 - RNA, 19 nt, Artificial Sequence
  Description of Artificial Sequence: Synthetic oligonucleotide
cauuucguuucagugcaaa

SEQ ID NO: 1541991 - RNA, 19 nt, Artificial Sequence
  Description of Artificial Sequence: Synthetic oligonucleotide
agcccugcuaugacuucgg

SEQ ID NO: 1541992 - RNA, 19 nt, Artificial Sequence
  Description of Artificial Sequence: Synthetic oligonucleotide
ugccugugacuaccaggac

SEQ ID NO: 1541993 - RNA, 19 nt, Artificial Sequence
  Description of Artificial Sequence: Synthetic oligonucleotide
gaaauucaggccguucuuu

SEQ ID NO: 1541994 - RNA, 19 nt, Artificial Sequence
  Description of Artificial Sequence: Synthetic oligonucleotide
ggacuuucggucagaacca

SEQ ID NO: 1541995 - RNA, 19 nt, Artificial Sequence
  Description of Artificial Sequence: Synthetic oligonucleotide
gacuaugacgaugguuucu

SEQ ID NO: 1541996 - RNA, 19 nt, Artificial Sequence
  Description of Artificial Sequence: Synthetic oligonucleotide
gacgaugguuucuggacuu

SEQ ID NO: 1541997 - RNA, 19 nt, Artificial Sequence
  Description of Artificial Sequence: Synthetic oligonucleotide
ggcccugagccaucaguag

SEQ ID NO: 1541998 - RNA, 19 nt, Artificial Sequence
  Description of Artificial Sequence: Synthetic oligonucleotide
gucagacccuuucaucucu

SEQ ID NO: 1541999 - RNA, 19 nt, Artificial Sequence
  Description of Artificial Sequence: Synthetic oligonucleotide
cuccgaggggugcaucgac

SEQ ID NO: 1542000 - RNA, 19 nt, Artificial Sequence
  Description of Artificial Sequence: Synthetic oligonucleotide
caguacauuucguuucagu

SEQ ID NO: 1542001 - RNA, 19 nt, Artificial Sequence
  Description of Artificial Sequence: Synthetic oligonucleotide
cuguguucaccauugccau

SEQ ID NO: 1542002 - RNA, 19 nt, Artificial Sequence
  Description of Artificial Sequence: Synthetic oligonucleotide
ccagaacucucuuguuuug

SEQ ID NO: 1542003 - RNA, 19 nt, Artificial Sequence
  Description of Artificial Sequence: Synthetic oligonucleotide
uucuggacuuucggucaga

SEQ ID NO: 1542004 - RNA, 19 nt, Artificial Sequence
  Description of Artificial Sequence: Synthetic oligonucleotide
uuugguugucagggacuuc

SEQ ID NO: 1542005 - RNA, 19 nt, Artificial Sequence
  Description of Artificial Sequence: Synthetic oligonucleotide
ggaucauuugcggucaagu

SEQ ID NO: 1542006 - RNA, 19 nt, Artificial Sequence
  Description of Artificial Sequence: Synthetic oligonucleotide
cuauucuccccagaacucu

SEQ ID NO: 1542007 - RNA, 19 nt, Artificial Sequence
  Description of Artificial Sequence: Synthetic oligonucleotide
uggacgcaggauggaaguc

SEQ ID NO: 1542008 - RNA, 19 nt, Artificial Sequence
  Description of Artificial Sequence: Synthetic oligonucleotide
ggacuaugacgaugguuuc

SEQ ID NO: 1542009 - RNA, 19 nt, Artificial Sequence
  Description of Artificial Sequence: Synthetic oligonucleotide
cccauaagcaaucuguuau

SEQ ID NO: 1542010 - RNA, 19 nt, Artificial Sequence
  Description of Artificial Sequence: Synthetic oligonucleotide
gcuauucuccccagaacuc

SEQ ID NO: 1542011 - RNA, 19 nt, Artificial Sequence
  Description of Artificial Sequence: Synthetic oligonucleotide
caccuuacauuucgaaccu

SEQ ID NO: 1542012 - RNA, 19 nt, Artificial Sequence
  Description of Artificial Sequence: Synthetic oligonucleotide
ugcucaccgcgcccucucu

SEQ ID NO: 1542013 - RNA, 19 nt, Artificial Sequence
  Description of Artificial Sequence: Synthetic oligonucleotide
cucuucaguagggcucaac

SEQ ID NO: 1542014 - RNA, 19 nt, Artificial Sequence
  Description of Artificial Sequence: Synthetic oligonucleotide
uuagcuccgaggggugcau

SEQ ID NO: 1542015 - RNA, 19 nt, Artificial Sequence
  Description of Artificial Sequence: Synthetic oligonucleotide
cacgcucaucucccauaag

SEQ ID NO: 1542016 - RNA, 19 nt, Artificial Sequence
  Description of Artificial Sequence: Synthetic oligonucleotide
uccccagaacucucuuguu

SEQ ID NO: 1542017 - RNA, 19 nt, Artificial Sequence
  Description of Artificial Sequence: Synthetic oligonucleotide
cugugacuaccaggacucc

SEQ ID NO: 1542018 - RNA, 19 nt, Artificial Sequence
  Description of Artificial Sequence: Synthetic oligonucleotide
cgaucuguguucacaugac

SEQ ID NO: 1542019 - RNA, 19 nt, Artificial Sequence
  Description of Artificial Sequence: Synthetic oligonucleotide
gacgcaggauggaaguccu

SEQ ID NO: 1542020 - RNA, 19 nt, Artificial Sequence
  Description of Artificial Sequence: Synthetic oligonucleotide
cugaacauuugguuuucuu

SEQ ID NO: 1542021 - RNA, 19 nt, Artificial Sequence
  Description of Artificial Sequence: Synthetic oligonucleotide
uccccaucuuggaguccga

SEQ ID NO: 1542022 - RNA, 19 nt, Artificial Sequence
  Description of Artificial Sequence: Synthetic oligonucleotide
gucccucaucucccuuugc

SEQ ID NO: 1542023 - RNA, 19 nt, Artificial Sequence
  Description of Artificial Sequence: Synthetic oligonucleotide
auggaucauuugcggucaa

SEQ ID NO: 1542024 - RNA, 19 nt, Artificial Sequence
  Description of Artificial Sequence: Synthetic oligonucleotide
cucagcccugcuaugacuu

SEQ ID NO: 1542025 - RNA, 19 nt, Artificial Sequence
  Description of Artificial Sequence: Synthetic oligonucleotide
gcggucaaguuucucccca

SEQ ID NO: 1542026 - RNA, 19 nt, Artificial Sequence
  Description of Artificial Sequence: Synthetic oligonucleotide
gccugugacuaccaggacu

SEQ ID NO: 1542027 - RNA, 19 nt, Artificial Sequence
  Description of Artificial Sequence: Synthetic oligonucleotide
gaccccacuugugacauuu

SEQ ID NO: 1542028 - RNA, 19 nt, Artificial Sequence
  Description of Artificial Sequence: Synthetic oligonucleotide
ggugcaucgacggcccuga

SEQ ID NO: 1542029 - RNA, 19 nt, Artificial Sequence
  Description of Artificial Sequence: Synthetic oligonucleotide
gacggcccugagccaucag

SEQ ID NO: 1542030 - RNA, 19 nt, Artificial Sequence
  Description of Artificial Sequence: Synthetic oligonucleotide
aggccguucuuuacacgcu

SEQ ID NO: 1542031 - RNA, 19 nt, Artificial Sequence
  Description of Artificial Sequence: Synthetic oligonucleotide
cgcuauuagcuccgagggg

SEQ ID NO: 1542032 - RNA, 19 nt, Artificial Sequence
  Description of Artificial Sequence: Synthetic oligonucleotide
cucuuguuuuggaagccuu

SEQ ID NO: 1542033 - RNA, 19 nt, Artificial Sequence
  Description of Artificial Sequence: Synthetic oligonucleotide
ggacccgggugcuauucuc

SEQ ID NO: 1542034 - RNA, 19 nt, Artificial Sequence
  Description of Artificial Sequence: Synthetic oligonucleotide
caaaauggacccgggugcu

SEQ ID NO: 1542035 - RNA, 19 nt, Artificial Sequence
  Description of Artificial Sequence: Synthetic oligonucleotide
ucaccgcgcccucucucuu

SEQ ID NO: 1542036 - RNA, 19 nt, Artificial Sequence
  Description of Artificial Sequence: Synthetic oligonucleotide
ccgagagggagaagcccgc

SEQ ID NO: 1542037 - RNA, 19 nt, Artificial Sequence
  Description of Artificial Sequence: Synthetic oligonucleotide
gaagcccgccgcugggucu

SEQ ID NO: 1542038 - RNA, 19 nt, Artificial Sequence
  Description of Artificial Sequence: Synthetic oligonucleotide
ggacauucucgaucugugu

SEQ ID NO: 1542039 - RNA, 19 nt, Artificial Sequence
  Description of Artificial Sequence: Synthetic oligonucleotide
ggaggaggaggaggaggag

SEQ ID NO: 1542040 - RNA, 19 nt, Artificial Sequence
  Description of Artificial Sequence: Synthetic oligonucleotide
ggcucaacugaggccaguc

SEQ ID NO: 1542041 - RNA, 19 nt, Artificial Sequence
  Description of Artificial Sequence: Synthetic oligonucleotide
gugcucaccgcgcccucuc

SEQ ID NO: 1542042 - RNA, 19 nt, Artificial Sequence
  Description of Artificial Sequence: Synthetic oligonucleotide
gcugcucucagcccugcua

SEQ ID NO: 1542043 - RNA, 19 nt, Artificial Sequence
  Description of Artificial Sequence: Synthetic oligonucleotide
cagagucauuuguuuuacu

SEQ ID NO: 1542044 - RNA, 19 nt, Artificial Sequence
  Description of Artificial Sequence: Synthetic oligonucleotide
gcgaacgacuuccccaucu

SEQ ID NO: 1542045 - RNA, 19 nt, Artificial Sequence
  Description of Artificial Sequence: Synthetic oligonucleotide
acgaugguuucuggacuuu

SEQ ID NO: 1542046 - RNA, 19 nt, Artificial Sequence
  Description of Artificial Sequence: Synthetic oligonucleotide
ggaagccuuaauguuucgu

SEQ ID NO: 1542047 - RNA, 19 nt, Artificial Sequence
  Description of Artificial Sequence: Synthetic oligonucleotide
cucaccgcgcccucucucu

SEQ ID NO: 1542048 - RNA, 19 nt, Artificial Sequence
  Description of Artificial Sequence: Synthetic oligonucleotide
gcgcucuucaguagggcuc

SEQ ID NO: 1542049 - RNA, 19 nt, Artificial Sequence
  Description of Artificial Sequence: Synthetic oligonucleotide
acauuucguuucagugcaa

SEQ ID NO: 1542050 - RNA, 19 nt, Artificial Sequence
  Description of Artificial Sequence: Synthetic oligonucleotide
ggucaaguuucuccccagu

SEQ ID NO: 1542051 - RNA, 19 nt, Artificial Sequence
  Description of Artificial Sequence: Synthetic oligonucleotide
gcgcccucucucuucugug

SEQ ID NO: 1542052 - RNA, 19 nt, Artificial Sequence
  Description of Artificial Sequence: Synthetic oligonucleotide
ccaguacauuucguuucag

SEQ ID NO: 1542053 - RNA, 19 nt, Artificial Sequence
  Description of Artificial Sequence: Synthetic oligonucleotide
ccgggugcuauucucccca

SEQ ID NO: 1542054 - RNA, 19 nt, Artificial Sequence
  Description of Artificial Sequence: Synthetic oligonucleotide
gggugcaucgacggcccug

SEQ ID NO: 1542055 - RNA, 19 nt, Artificial Sequence
  Description of Artificial Sequence: Synthetic oligonucleotide
guauuccgucucuccuucu

SEQ ID NO: 1542056 - RNA, 19 nt, Artificial Sequence
  Description of Artificial Sequence: Synthetic oligonucleotide
caucgacggcccugagcca

SEQ ID NO: 1542057 - RNA, 19 nt, Artificial Sequence
  Description of Artificial Sequence: Synthetic oligonucleotide
cuggacuaugacgaugguu

SEQ ID NO: 1542058 - RNA, 19 nt, Artificial Sequence
  Description of Artificial Sequence: Synthetic oligonucleotide
cuguuaucauacgacucuu

SEQ ID NO: 1542059 - RNA, 19 nt, Artificial Sequence
  Description of Artificial Sequence: Synthetic oligonucleotide
caccaucacuugcaacaua

SEQ ID NO: 1542060 - RNA, 19 nt, Artificial Sequence
  Description of Artificial Sequence: Synthetic oligonucleotide
cuguugcauuaguucuucu

SEQ ID NO: 1542061 - RNA, 19 nt, Artificial Sequence
  Description of Artificial Sequence: Synthetic oligonucleotide
cugugacuacuagaaaauu

SEQ ID NO: 1542062 - RNA, 19 nt, Artificial Sequence
  Description of Artificial Sequence: Synthetic oligonucleotide
cauuugcggucaaguuucu

SEQ ID NO: 1542063 - RNA, 19 nt, Artificial Sequence
  Description of Artificial Sequence: Synthetic oligonucleotide
cguucuuuacacgcucauc

SEQ ID NO: 1542064 - RNA, 19 nt, Artificial Sequence
  Description of Artificial Sequence: Synthetic oligonucleotide
ugaccccacuugugacauu

SEQ ID NO: 1542065 - RNA, 19 nt, Artificial Sequence
  Description of Artificial Sequence: Synthetic oligonucleotide
gggugcuauucuccccaga

SEQ ID NO: 1542066 - RNA, 19 nt, Artificial Sequence
  Description of Artificial Sequence: Synthetic oligonucleotide
ccccacuugugacauuuaa

SEQ ID NO: 1542067 - RNA, 19 nt, Artificial Sequence
  Description of Artificial Sequence: Synthetic oligonucleotide
cagucccucaucucccuuu

SEQ ID NO: 1542068 - RNA, 19 nt, Artificial Sequence
  Description of Artificial Sequence: Synthetic oligonucleotide
gcucaccgcgcccucucuc

SEQ ID NO: 1542069 - RNA, 19 nt, Artificial Sequence
  Description of Artificial Sequence: Synthetic oligonucleotide
gcaggauggaaguccuuuu

SEQ ID NO: 1542070 - RNA, 19 nt, Artificial Sequence
  Description of Artificial Sequence: Synthetic oligonucleotide
caucucccauaagcaaucu

SEQ ID NO: 1542071 - RNA, 19 nt, Artificial Sequence
  Description of Artificial Sequence: Synthetic oligonucleotide
cgaggggugcaucgacggc

SEQ ID NO: 1542072 - RNA, 19 nt, Artificial Sequence
  Description of Artificial Sequence: Synthetic oligonucleotide
ggaguccgagagggagaag

SEQ ID NO: 1542073 - RNA, 19 nt, Artificial Sequence
  Description of Artificial Sequence: Synthetic oligonucleotide
cgaugguuucuggacuuuc

SEQ ID NO: 1542074 - RNA, 19 nt, Artificial Sequence
  Description of Artificial Sequence: Synthetic oligonucleotide
cccuuucaucucuggacua

SEQ ID NO: 1542075 - RNA, 19 nt, Artificial Sequence
  Description of Artificial Sequence: Synthetic oligonucleotide
ggaggaggaggaggaggaa

SEQ ID NO: 1542076 - RNA, 19 nt, Artificial Sequence
  Description of Artificial Sequence: Synthetic oligonucleotide
ccccugucacugugacuac

SEQ ID NO: 1542077 - RNA, 19 nt, Artificial Sequence
  Description of Artificial Sequence: Synthetic oligonucleotide
cuccugguggggccucaua

SEQ ID NO: 1542078 - RNA, 19 nt, Artificial Sequence
  Description of Artificial Sequence: Synthetic oligonucleotide
gcuccgaggggugcaucga

SEQ ID NO: 1542079 - RNA, 19 nt, Artificial Sequence
  Description of Artificial Sequence: Synthetic oligonucleotide
cgggugcuauucuccccag

SEQ ID NO: 1542080 - RNA, 19 nt, Artificial Sequence
  Description of Artificial Sequence: Synthetic oligonucleotide
cccugcuaugacuucggau

SEQ ID NO: 1542081 - RNA, 19 nt, Artificial Sequence
  Description of Artificial Sequence: Synthetic oligonucleotide
acgcaggauggaaguccuu

SEQ ID NO: 1542082 - RNA, 19 nt, Artificial Sequence
  Description of Artificial Sequence: Synthetic oligonucleotide
cggcccugagccaucagua

SEQ ID NO: 1542083 - RNA, 19 nt, Artificial Sequence
  Description of Artificial Sequence: Synthetic oligonucleotide
ggagcaccuuucugccauu

SEQ ID NO: 1542084 - RNA, 19 nt, Artificial Sequence
  Description of Artificial Sequence: Synthetic oligonucleotide
cgcccucucucuucugugu

SEQ ID NO: 1542085 - RNA, 19 nt, Artificial Sequence
  Description of Artificial Sequence: Synthetic oligonucleotide
cgaacgacuuccccaucuu

SEQ ID NO: 1542086 - RNA, 19 nt, Artificial Sequence
  Description of Artificial Sequence: Synthetic oligonucleotide
gggcucaacugaggccagu

SEQ ID NO: 1542087 - RNA, 19 nt, Artificial Sequence
  Description of Artificial Sequence: Synthetic oligonucleotide
ccgcgcccucucucuucug

SEQ ID NO: 1542088 - RNA, 19 nt, Artificial Sequence
  Description of Artificial Sequence: Synthetic oligonucleotide
cgcgcccucucucuucugu

SEQ ID NO: 1542089 - RNA, 19 nt, Artificial Sequence
  Description of Artificial Sequence: Synthetic oligonucleotide
ccagucccucaucucccuu

SEQ ID NO: 1542090 - RNA, 19 nt, Artificial Sequence
  Description of Artificial Sequence: Synthetic oligonucleotide
auaaaguuaagucaaguac

SEQ ID NO: 1542091 - RNA, 19 nt, Artificial Sequence
  Description of Artificial Sequence: Synthetic oligonucleotide
auauauuuagucuauacag

SEQ ID NO: 1542092 - RNA, 19 nt, Artificial Sequence
  Description of Artificial Sequence: Synthetic oligonucleotide
ucugguuuaagaaauaugc

SEQ ID NO: 1542093 - RNA, 19 nt, Artificial Sequence
  Description of Artificial Sequence: Synthetic oligonucleotide
aauauccuaagacaagggg

SEQ ID NO: 1542094 - RNA, 19 nt, Artificial Sequence
  Description of Artificial Sequence: Synthetic oligonucleotide
auaggaaaagacuacaguc

SEQ ID NO: 1542095 - RNA, 19 nt, Artificial Sequence
  Description of Artificial Sequence: Synthetic oligonucleotide
auaaauguccuccucaagg

SEQ ID NO: 1542096 - RNA, 19 nt, Artificial Sequence
  Description of Artificial Sequence: Synthetic oligonucleotide
agcauagaaugcuaaaugc

SEQ ID NO: 1542097 - RNA, 19 nt, Artificial Sequence
  Description of Artificial Sequence: Synthetic oligonucleotide
ucugaauucagauuuauaa

SEQ ID NO: 1542098 - RNA, 19 nt, Artificial Sequence
  Description of Artificial Sequence: Synthetic oligonucleotide
ugacauagaauauauuuag

SEQ ID NO: 1542099 - RNA, 19 nt, Artificial Sequence
  Description of Artificial Sequence: Synthetic oligonucleotide
ucuccuuucagcaagacaa

SEQ ID NO: 1542100 - RNA, 19 nt, Artificial Sequence
  Description of Artificial Sequence: Synthetic oligonucleotide
ucuccgaauaguuucaagg

SEQ ID NO: 1542101 - RNA, 19 nt, Artificial Sequence
  Description of Artificial Sequence: Synthetic oligonucleotide
uucaauacuguucacaguc

SEQ ID NO: 1542102 - RNA, 19 nt, Artificial Sequence
  Description of Artificial Sequence: Synthetic oligonucleotide
agauuuauaaaagugacga

SEQ ID NO: 1542103 - RNA, 19 nt, Artificial Sequence
  Description of Artificial Sequence: Synthetic oligonucleotide
aauauaauauugccuauaa

SEQ ID NO: 1542104 - RNA, 19 nt, Artificial Sequence
  Description of Artificial Sequence: Synthetic oligonucleotide
gaagacuccgccuugauac

SEQ ID NO: 1542105 - RNA, 19 nt, Artificial Sequence
  Description of Artificial Sequence: Synthetic oligonucleotide
uaaagggauagucugucgg

SEQ ID NO: 1542106 - RNA, 19 nt, Artificial Sequence
  Description of Artificial Sequence: Synthetic oligonucleotide
ugcaauaaaguuaagucaa

SEQ ID NO: 1542107 - RNA, 19 nt, Artificial Sequence
  Description of Artificial Sequence: Synthetic oligonucleotide
aauaaaguuaagucaagua

SEQ ID NO: 1542108 - RNA, 19 nt, Artificial Sequence
  Description of Artificial Sequence: Synthetic oligonucleotide
ugucaagacaaauacuucc

SEQ ID NO: 1542109 - RNA, 19 nt, Artificial Sequence
  Description of Artificial Sequence: Synthetic oligonucleotide
aaaagugacgacaucuugg

SEQ ID NO: 1542110 - RNA, 19 nt, Artificial Sequence
  Description of Artificial Sequence: Synthetic oligonucleotide
aacaagucaucuccuacgg

SEQ ID NO: 1542111 - RNA, 19 nt, Artificial Sequence
  Description of Artificial Sequence: Synthetic oligonucleotide
uucgauacagucaaagcug

SEQ ID NO: 1542112 - RNA, 19 nt, Artificial Sequence
  Description of Artificial Sequence: Synthetic oligonucleotide
gugcaauuaauucacauug

SEQ ID NO: 1542113 - RNA, 19 nt, Artificial Sequence
  Description of Artificial Sequence: Synthetic oligonucleotide
acaaauuauaaagugagcu

SEQ ID NO: 1542114 - RNA, 19 nt, Artificial Sequence
  Description of Artificial Sequence: Synthetic oligonucleotide
aaagggauagucugucggg

SEQ ID NO: 1542115 - RNA, 19 nt, Artificial Sequence
  Description of Artificial Sequence: Synthetic oligonucleotide
gaagaucucgcuuugaaga

SEQ ID NO: 1542116 - RNA, 19 nt, Artificial Sequence
  Description of Artificial Sequence: Synthetic oligonucleotide
uugcaauaaaguuaaguca

SEQ ID NO: 1542117 - RNA, 19 nt, Artificial Sequence
  Description of Artificial Sequence: Synthetic oligonucleotide
uucuagucaauauacugag

SEQ ID NO: 1542118 - RNA, 19 nt, Artificial Sequence
  Description of Artificial Sequence: Synthetic oligonucleotide
uccauucuagucaauauac

SEQ ID NO: 1542119 - RNA, 19 nt, Artificial Sequence
  Description of Artificial Sequence: Synthetic oligonucleotide
aaauacagugugaagauca

SEQ ID NO: 1542120 - RNA, 19 nt, Artificial Sequence
  Description of Artificial Sequence: Synthetic oligonucleotide
ucagaucuaguaaaggugu

SEQ ID NO: 1542121 - RNA, 19 nt, Artificial Sequence
  Description of Artificial Sequence: Synthetic oligonucleotide
agaauauccuaagacaagg

SEQ ID NO: 1542122 - RNA, 19 nt, Artificial Sequence
  Description of Artificial Sequence: Synthetic oligonucleotide
aguuaagucaaguacaaua

SEQ ID NO: 1542123 - RNA, 19 nt, Artificial Sequence
  Description of Artificial Sequence: Synthetic oligonucleotide
auagaauauauuuagucua

SEQ ID NO: 1542124 - RNA, 19 nt, Artificial Sequence
  Description of Artificial Sequence: Synthetic oligonucleotide
aacaacacuuucgauacag

SEQ ID NO: 1542125 - RNA, 19 nt, Artificial Sequence
  Description of Artificial Sequence: Synthetic oligonucleotide
auugcauauuucugagucc

SEQ ID NO: 1542126 - RNA, 19 nt, Artificial Sequence
  Description of Artificial Sequence: Synthetic oligonucleotide
cucgcuuugaagaugcagg

SEQ ID NO: 1542127 - RNA, 19 nt, Artificial Sequence
  Description of Artificial Sequence: Synthetic oligonucleotide
aaagugacgacaucuugga

SEQ ID NO: 1542128 - RNA, 19 nt, Artificial Sequence
  Description of Artificial Sequence: Synthetic oligonucleotide
guuaggaucacagagcagc

SEQ ID NO: 1542129 - RNA, 19 nt, Artificial Sequence
  Description of Artificial Sequence: Synthetic oligonucleotide
auaaaaccgaaacaagugu

SEQ ID NO: 1542130 - RNA, 19 nt, Artificial Sequence
  Description of Artificial Sequence: Synthetic oligonucleotide
auauaauauugccuauaac

SEQ ID NO: 1542131 - RNA, 19 nt, Artificial Sequence
  Description of Artificial Sequence: Synthetic oligonucleotide
aauuauaaagugagcuaac

SEQ ID NO: 1542132 - RNA, 19 nt, Artificial Sequence
  Description of Artificial Sequence: Synthetic oligonucleotide
uuagcagugcaauuaauuc

SEQ ID NO: 1542133 - RNA, 19 nt, Artificial Sequence
  Description of Artificial Sequence: Synthetic oligonucleotide
agugacgacaucuuggaca

SEQ ID NO: 1542134 - RNA, 19 nt, Artificial Sequence
  Description of Artificial Sequence: Synthetic oligonucleotide
caugaguugacauagaaua

SEQ ID NO: 1542135 - RNA, 19 nt, Artificial Sequence
  Description of Artificial Sequence: Synthetic oligonucleotide
ucacauugcaauaaaguua

SEQ ID NO: 1542136 - RNA, 19 nt, Artificial Sequence
  Description of Artificial Sequence: Synthetic oligonucleotide
ucaauauacugagaaauac

SEQ ID NO: 1542137 - RNA, 19 nt, Artificial Sequence
  Description of Artificial Sequence: Synthetic oligonucleotide
gaaugcuaaaugcucuccg

SEQ ID NO: 1542138 - RNA, 19 nt, Artificial Sequence
  Description of Artificial Sequence: Synthetic oligonucleotide
ucgauacagucaaagcugg

SEQ ID NO: 1542139 - RNA, 19 nt, Artificial Sequence
  Description of Artificial Sequence: Synthetic oligonucleotide
cauagaaugcuaaaugcuc

SEQ ID NO: 1542140 - RNA, 19 nt, Artificial Sequence
  Description of Artificial Sequence: Synthetic oligonucleotide
caacuuacugcuaauguug

SEQ ID NO: 1542141 - RNA, 19 nt, Artificial Sequence
  Description of Artificial Sequence: Synthetic oligonucleotide
gucaauauaauauugccua

SEQ ID NO: 1542142 - RNA, 19 nt, Artificial Sequence
  Description of Artificial Sequence: Synthetic oligonucleotide
gagcauagaaugcuaaaug

SEQ ID NO: 1542143 - RNA, 19 nt, Artificial Sequence
  Description of Artificial Sequence: Synthetic oligonucleotide
uuacuguuuauauuugggu

SEQ ID NO: 1542144 - RNA, 19 nt, Artificial Sequence
  Description of Artificial Sequence: Synthetic oligonucleotide
uacaaauuauaaagugagc

SEQ ID NO: 1542145 - RNA, 19 nt, Artificial Sequence
  Description of Artificial Sequence: Synthetic oligonucleotide
agucagaucuaguaaaggu

SEQ ID NO: 1542146 - RNA, 19 nt, Artificial Sequence
  Description of Artificial Sequence: Synthetic oligonucleotide
aaugcuaaaugcucuccga

SEQ ID NO: 1542147 - RNA, 19 nt, Artificial Sequence
  Description of Artificial Sequence: Synthetic oligonucleotide
cuccgaauaguuucaaggg

SEQ ID NO: 1542148 - RNA, 19 nt, Artificial Sequence
  Description of Artificial Sequence: Synthetic oligonucleotide
aacacguacaguguuucuc

SEQ ID NO: 1542149 - RNA, 19 nt, Artificial Sequence
  Description of Artificial Sequence: Synthetic oligonucleotide
cagauuuauaaaagugacg

SEQ ID NO: 1542150 - RNA, 19 nt, Artificial Sequence
  Description of Artificial Sequence: Synthetic oligonucleotide
uaaauguccuccucaagga

SEQ ID NO: 1542151 - RNA, 19 nt, Artificial Sequence
  Description of Artificial Sequence: Synthetic oligonucleotide
uuaggaucacagagcagcg

SEQ ID NO: 1542152 - RNA, 19 nt, Artificial Sequence
  Description of Artificial Sequence: Synthetic oligonucleotide
augcauucaacccacagaa

SEQ ID NO: 1542153 - RNA, 19 nt, Artificial Sequence
  Description of Artificial Sequence: Synthetic oligonucleotide
ugcaauuaauucacauugc

SEQ ID NO: 1542154 - RNA, 19 nt, Artificial Sequence
  Description of Artificial Sequence: Synthetic oligonucleotide
ugaagaucucgcuuugaag

SEQ ID NO: 1542155 - RNA, 19 nt, Artificial Sequence
  Description of Artificial Sequence: Synthetic oligonucleotide
uuaaagggauagucugucg

SEQ ID NO: 1542156 - RNA, 19 nt, Artificial Sequence
  Description of Artificial Sequence: Synthetic oligonucleotide
cuuucgauacagucaaagc

SEQ ID NO: 1542157 - RNA, 19 nt, Artificial Sequence
  Description of Artificial Sequence: Synthetic oligonucleotide
gacaacaacacuuucgaua

SEQ ID NO: 1542158 - RNA, 19 nt, Artificial Sequence
  Description of Artificial Sequence: Synthetic oligonucleotide
uacaguguuucucauguaa

SEQ ID NO: 1542159 - RNA, 19 nt, Artificial Sequence
  Description of Artificial Sequence: Synthetic oligonucleotide
gagcauauggacaacaaca

SEQ ID NO: 1542160 - RNA, 19 nt, Artificial Sequence
  Description of Artificial Sequence: Synthetic oligonucleotide
ugagcuaacaaagaaugaa

SEQ ID NO: 1542161 - RNA, 19 nt, Artificial Sequence
  Description of Artificial Sequence: Synthetic oligonucleotide
agcagugcaauuaauucac

SEQ ID NO: 1542162 - RNA, 19 nt, Artificial Sequence
  Description of Artificial Sequence: Synthetic oligonucleotide
ucuaguaaaggugucaaua

SEQ ID NO: 1542163 - RNA, 19 nt, Artificial Sequence
  Description of Artificial Sequence: Synthetic oligonucleotide
uucaacccacagaauaucc

SEQ ID NO: 1542164 - RNA, 19 nt, Artificial Sequence
  Description of Artificial Sequence: Synthetic oligonucleotide
auugccuauaacaagaaaa

SEQ ID NO: 1542165 - RNA, 19 nt, Artificial Sequence
  Description of Artificial Sequence: Synthetic oligonucleotide
uuuacaguacucuggcaga

SEQ ID NO: 1542166 - RNA, 19 nt, Artificial Sequence
  Description of Artificial Sequence: Synthetic oligonucleotide
uauuuagucuauacaguaa

SEQ ID NO: 1542167 - RNA, 19 nt, Artificial Sequence
  Description of Artificial Sequence: Synthetic oligonucleotide
acuacagucagaucuagua

SEQ ID NO: 1542168 - RNA, 19 nt, Artificial Sequence
  Description of Artificial Sequence: Synthetic oligonucleotide
uagcagugcaauuaauuca

SEQ ID NO: 1542169 - RNA, 19 nt, Artificial Sequence
  Description of Artificial Sequence: Synthetic oligonucleotide
uuacugcuaauguugaaaa

SEQ ID NO: 1542170 - RNA, 19 nt, Artificial Sequence
  Description of Artificial Sequence: Synthetic oligonucleotide
gauuuauaaaagugacgac

SEQ ID NO: 1542171 - RNA, 19 nt, Artificial Sequence
  Description of Artificial Sequence: Synthetic oligonucleotide
uuugucgugaaagcaaucu

SEQ ID NO: 1542172 - RNA, 19 nt, Artificial Sequence
  Description of Artificial Sequence: Synthetic oligonucleotide
uagaauauauuuagucuau

SEQ ID NO: 1542173 - RNA, 19 nt, Artificial Sequence
  Description of Artificial Sequence: Synthetic oligonucleotide
auuaauucacauugcaaua

SEQ ID NO: 1542174 - RNA, 19 nt, Artificial Sequence
  Description of Artificial Sequence: Synthetic oligonucleotide
cuagucaauauacugagaa

SEQ ID NO: 1542175 - RNA, 19 nt, Artificial Sequence
  Description of Artificial Sequence: Synthetic oligonucleotide
uaaaaccgaaacaaguguu

SEQ ID NO: 1542176 - RNA, 19 nt, Artificial Sequence
  Description of Artificial Sequence: Synthetic oligonucleotide
cuugauacgcacugucagg

SEQ ID NO: 1542177 - RNA, 19 nt, Artificial Sequence
  Description of Artificial Sequence: Synthetic oligonucleotide
agcauauggacaacaacac

SEQ ID NO: 1542178 - RNA, 19 nt, Artificial Sequence
  Description of Artificial Sequence: Synthetic oligonucleotide
uuaauucacauugcaauaa

SEQ ID NO: 1542179 - RNA, 19 nt, Artificial Sequence
  Description of Artificial Sequence: Synthetic oligonucleotide
uuaagucaaguacaauaaa

SEQ ID NO: 1542180 - RNA, 19 nt, Artificial Sequence
  Description of Artificial Sequence: Synthetic oligonucleotide
uguugggguuucaauacug

SEQ ID NO: 1542181 - RNA, 19 nt, Artificial Sequence
  Description of Artificial Sequence: Synthetic oligonucleotide
auauuugggugguagauuu

SEQ ID NO: 1542182 - RNA, 19 nt, Artificial Sequence
  Description of Artificial Sequence: Synthetic oligonucleotide
uccgaauaguuucaagggu

SEQ ID NO: 1542183 - RNA, 19 nt, Artificial Sequence
  Description of Artificial Sequence: Synthetic oligonucleotide
cuaaaugcucuccgaauag

SEQ ID NO: 1542184 - RNA, 19 nt, Artificial Sequence
  Description of Artificial Sequence: Synthetic oligonucleotide
acuuucgauacagucaaag

SEQ ID NO: 1542185 - RNA, 19 nt, Artificial Sequence
  Description of Artificial Sequence: Synthetic oligonucleotide
caguuaauucaucaucagc

SEQ ID NO: 1542186 - RNA, 19 nt, Artificial Sequence
  Description of Artificial Sequence: Synthetic oligonucleotide
uggaagugguuuaaaacau

SEQ ID NO: 1542187 - RNA, 19 nt, Artificial Sequence
  Description of Artificial Sequence: Synthetic oligonucleotide
agcgccauggggcaggcgg

SEQ ID NO: 1542188 - RNA, 19 nt, Artificial Sequence
  Description of Artificial Sequence: Synthetic oligonucleotide
cauagaauauauuuagucu

SEQ ID NO: 1542189 - RNA, 19 nt, Artificial Sequence
  Description of Artificial Sequence: Synthetic oligonucleotide
aaccgaaacaaguguuucu

SEQ ID NO: 1542190 - RNA, 19 nt, Artificial Sequence
  Description of Artificial Sequence: Synthetic oligonucleotide
auucuagucaauauacuga

SEQ ID NO: 1542191 - RNA, 19 nt, Artificial Sequence
  Description of Artificial Sequence: Synthetic oligonucleotide
aguaaaggugucaauauaa

SEQ ID NO: 1542192 - RNA, 19 nt, Artificial Sequence
  Description of Artificial Sequence: Synthetic oligonucleotide
ucgugaaagcaaucuuugg

SEQ ID NO: 1542193 - RNA, 19 nt, Artificial Sequence
  Description of Artificial Sequence: Synthetic oligonucleotide
ugucgugaaagcaaucuuu

SEQ ID NO: 1542194 - RNA, 19 nt, Artificial Sequence
  Description of Artificial Sequence: Synthetic oligonucleotide
aaguggaagugguuuaaaa

SEQ ID NO: 1542195 - RNA, 19 nt, Artificial Sequence
  Description of Artificial Sequence: Synthetic oligonucleotide
caaauggcacucaacuuac

SEQ ID NO: 1542196 - RNA, 19 nt, Artificial Sequence
  Description of Artificial Sequence: Synthetic oligonucleotide
uggcacucaacuuacugcu

SEQ ID NO: 1542197 - RNA, 19 nt, Artificial Sequence
  Description of Artificial Sequence: Synthetic oligonucleotide
auauccuaagacaagggga

SEQ ID NO: 1542198 - RNA, 19 nt, Artificial Sequence
  Description of Artificial Sequence: Synthetic oligonucleotide
gaucgucuggguuaggauc

SEQ ID NO: 1542199 - RNA, 19 nt, Artificial Sequence
  Description of Artificial Sequence: Synthetic oligonucleotide
aagacuccgccuugauacg

SEQ ID NO: 1542200 - RNA, 19 nt, Artificial Sequence
  Description of Artificial Sequence: Synthetic oligonucleotide
cagaauauccuaagacaag

SEQ ID NO: 1542201 - RNA, 19 nt, Artificial Sequence
  Description of Artificial Sequence: Synthetic oligonucleotide
gguuuuacaguacucuggc

SEQ ID NO: 1542202 - RNA, 19 nt, Artificial Sequence
  Description of Artificial Sequence: Synthetic oligonucleotide
aauacagugugaagaucag

SEQ ID NO: 1542203 - RNA, 19 nt, Artificial Sequence
  Description of Artificial Sequence: Synthetic oligonucleotide
uccgccuugauacgcacug

SEQ ID NO: 1542204 - RNA, 19 nt, Artificial Sequence
  Description of Artificial Sequence: Synthetic oligonucleotide
uguugaagaucucgcuuug

SEQ ID NO: 1542205 - RNA, 19 nt, Artificial Sequence
  Description of Artificial Sequence: Synthetic oligonucleotide
aagaucucgcuuugaagau

SEQ ID NO: 1542206 - RNA, 19 nt, Artificial Sequence
  Description of Artificial Sequence: Synthetic oligonucleotide
gaucucgcuuugaagaugc

SEQ ID NO: 1542207 - RNA, 19 nt, Artificial Sequence
  Description of Artificial Sequence: Synthetic oligonucleotide
gucagaucuaguaaaggug

SEQ ID NO: 1542208 - RNA, 19 nt, Artificial Sequence
  Description of Artificial Sequence: Synthetic oligonucleotide
uccgugugcgcccaggcgc

SEQ ID NO: 1542209 - RNA, 19 nt, Artificial Sequence
  Description of Artificial Sequence: Synthetic oligonucleotide
ucaauauaauauugccuau

SEQ ID NO: 1542210 - RNA, 19 nt, Artificial Sequence
  Description of Artificial Sequence: Synthetic oligonucleotide
acagguuuuacaguacucu

SEQ ID NO: 1542211 - RNA, 19 nt, Artificial Sequence
  Description of Artificial Sequence: Synthetic oligonucleotide
uuauaaaagugacgacauc

SEQ ID NO: 1542212 - RNA, 19 nt, Artificial Sequence
  Description of Artificial Sequence: Synthetic oligonucleotide
ucucuugcgugccuguugu

SEQ ID NO: 1542213 - RNA, 19 nt, Artificial Sequence
  Description of Artificial Sequence: Synthetic oligonucleotide
uccuaagacaaggggacag

SEQ ID NO: 1542214 - RNA, 19 nt, Artificial Sequence
  Description of Artificial Sequence: Synthetic oligonucleotide
uggacaacacguacagugu

SEQ ID NO: 1542215 - RNA, 19 nt, Artificial Sequence
  Description of Artificial Sequence: Synthetic oligonucleotide
ucuagucaauauacugaga

SEQ ID NO: 1542216 - RNA, 19 nt, Artificial Sequence
  Description of Artificial Sequence: Synthetic oligonucleotide
acacguacaguguuucuca

SEQ ID NO: 1542217 - RNA, 19 nt, Artificial Sequence
  Description of Artificial Sequence: Synthetic oligonucleotide
ugaguugacauagaauaua

SEQ ID NO: 1542218 - RNA, 19 nt, Artificial Sequence
  Description of Artificial Sequence: Synthetic oligonucleotide
uuucaauacuguucacagu

SEQ ID NO: 1542219 - RNA, 19 nt, Artificial Sequence
  Description of Artificial Sequence: Synthetic oligonucleotide
uauugccuauaacaagaaa

SEQ ID NO: 1542220 - RNA, 19 nt, Artificial Sequence
  Description of Artificial Sequence: Synthetic oligonucleotide
ucuccuacgggucccgcug

SEQ ID NO: 1542221 - RNA, 19 nt, Artificial Sequence
  Description of Artificial Sequence: Synthetic oligonucleotide
auaucugguacuaaaggau

SEQ ID NO: 1542222 - RNA, 19 nt, Artificial Sequence
  Description of Artificial Sequence: Synthetic oligonucleotide
aaaggguucguggaacaga

SEQ ID NO: 1542223 - RNA, 19 nt, Artificial Sequence
  Description of Artificial Sequence: Synthetic oligonucleotide
acaagucaucuccuacggg

SEQ ID NO: 1542224 - RNA, 19 nt, Artificial Sequence
  Description of Artificial Sequence: Synthetic oligonucleotide
aucugguacuaaaggaucg

SEQ ID NO: 1542225 - RNA, 19 nt, Artificial Sequence
  Description of Artificial Sequence: Synthetic oligonucleotide
ucuggcagaaguggaagug

SEQ ID NO: 1542226 - RNA, 19 nt, Artificial Sequence
  Description of Artificial Sequence: Synthetic oligonucleotide
ugucugauuuauagaucug

SEQ ID NO: 1542227 - RNA, 19 nt, Artificial Sequence
  Description of Artificial Sequence: Synthetic oligonucleotide
ugauacgcacugucagggg

SEQ ID NO: 1542228 - RNA, 19 nt, Artificial Sequence
  Description of Artificial Sequence: Synthetic oligonucleotide
aaacauuacauugcauauu

SEQ ID NO: 1542229 - RNA, 19 nt, Artificial Sequence
  Description of Artificial Sequence: Synthetic oligonucleotide
accaaaggguucguggaac

SEQ ID NO: 1542230 - RNA, 19 nt, Artificial Sequence
  Description of Artificial Sequence: Synthetic oligonucleotide
ucucgcuuugaagaugcag

SEQ ID NO: 1542231 - RNA, 19 nt, Artificial Sequence
  Description of Artificial Sequence: Synthetic oligonucleotide
uagcuuuggagguuuguuc

SEQ ID NO: 1542232 - RNA, 19 nt, Artificial Sequence
  Description of Artificial Sequence: Synthetic oligonucleotide
gacgacaucuuggacaaca

SEQ ID NO: 1542233 - RNA, 19 nt, Artificial Sequence
  Description of Artificial Sequence: Synthetic oligonucleotide
ugugaagaucaguucuggu

SEQ ID NO: 1542234 - RNA, 19 nt, Artificial Sequence
  Description of Artificial Sequence: Synthetic oligonucleotide
aacuuacugcuaauguuga

SEQ ID NO: 1542235 - RNA, 19 nt, Artificial Sequence
  Description of Artificial Sequence: Synthetic oligonucleotide
ucgcuuugaagaugcaggu

SEQ ID NO: 1542236 - RNA, 19 nt, Artificial Sequence
  Description of Artificial Sequence: Synthetic oligonucleotide
ugcuaaaugcucuccgaau

SEQ ID NO: 1542237 - RNA, 19 nt, Artificial Sequence
  Description of Artificial Sequence: Synthetic oligonucleotide
caucuuggacaacacguac

SEQ ID NO: 1542238 - RNA, 19 nt, Artificial Sequence
  Description of Artificial Sequence: Synthetic oligonucleotide
cacgcuguaaaucacuuaa

SEQ ID NO: 1542239 - RNA, 19 nt, Artificial Sequence
  Description of Artificial Sequence: Synthetic oligonucleotide
cuugccaguggaacaaguc

SEQ ID NO: 1542240 - RNA, 19 nt, Artificial Sequence
  Description of Artificial Sequence: Synthetic oligonucleotide
uggagguuuguucugucuu

SEQ ID NO: 1542241 - RNA, 19 nt, Artificial Sequence
  Description of Artificial Sequence: Synthetic oligonucleotide
acccacagaauauccuaag

SEQ ID NO: 1542242 - RNA, 19 nt, Artificial Sequence
  Description of Artificial Sequence: Synthetic oligonucleotide
gcaauuaauucacauugca

SEQ ID NO: 1542243 - RNA, 19 nt, Artificial Sequence
  Description of Artificial Sequence: Synthetic oligonucleotide
aaagcaaucuuuggugguu

SEQ ID NO: 1542244 - RNA, 19 nt, Artificial Sequence
  Description of Artificial Sequence: Synthetic oligonucleotide
acagcaaauggcacucaac

SEQ ID NO: 1542245 - RNA, 19 nt, Artificial Sequence
  Description of Artificial Sequence: Synthetic oligonucleotide
agaucuaguaaagguguca

SEQ ID NO: 1542246 - RNA, 19 nt, Artificial Sequence
  Description of Artificial Sequence: Synthetic oligonucleotide
agcuaacaaagaaugaaau

SEQ ID NO: 1542247 - RNA, 19 nt, Artificial Sequence
  Description of Artificial Sequence: Synthetic oligonucleotide
aagggauagucugucggga

SEQ ID NO: 1542248 - RNA, 19 nt, Artificial Sequence
  Description of Artificial Sequence: Synthetic oligonucleotide
acagucagaucuaguaaag

SEQ ID NO: 1542249 - RNA, 19 nt, Artificial Sequence
  Description of Artificial Sequence: Synthetic oligonucleotide
ugaugguugcuugccagug

SEQ ID NO: 1542250 - RNA, 19 nt, Artificial Sequence
  Description of Artificial Sequence: Synthetic oligonucleotide
uuuugucgugaaagcaauc

SEQ ID NO: 1542251 - RNA, 19 nt, Artificial Sequence
  Description of Artificial Sequence: Synthetic oligonucleotide
auacugagaaauacagugu

SEQ ID NO: 1542252 - RNA, 19 nt, Artificial Sequence
  Description of Artificial Sequence: Synthetic oligonucleotide
gagcuaacaaagaaugaaa

SEQ ID NO: 1542253 - RNA, 19 nt, Artificial Sequence
  Description of Artificial Sequence: Synthetic oligonucleotide
ccacagaauauccuaagac

SEQ ID NO: 1542254 - RNA, 19 nt, Artificial Sequence
  Description of Artificial Sequence: Synthetic oligonucleotide
acucaacuuacugcuaaug

SEQ ID NO: 1542255 - RNA, 19 nt, Artificial Sequence
  Description of Artificial Sequence: Synthetic oligonucleotide
cuuacugcuaauguugaaa

SEQ ID NO: 1542256 - RNA, 19 nt, Artificial Sequence
  Description of Artificial Sequence: Synthetic oligonucleotide
augcagguguccaaguguc

SEQ ID NO: 1542257 - RNA, 19 nt, Artificial Sequence
  Description of Artificial Sequence: Synthetic oligonucleotide
augcuaaaugcucuccgaa

SEQ ID NO: 1542258 - RNA, 19 nt, Artificial Sequence
  Description of Artificial Sequence: Synthetic oligonucleotide
caagucaucuccuacgggu

SEQ ID NO: 1542259 - RNA, 19 nt, Artificial Sequence
  Description of Artificial Sequence: Synthetic oligonucleotide
uugucgugaaagcaaucuu

SEQ ID NO: 1542260 - RNA, 19 nt, Artificial Sequence
  Description of Artificial Sequence: Synthetic oligonucleotide
agacuccgccuugauacgc

SEQ ID NO: 1542261 - RNA, 19 nt, Artificial Sequence
  Description of Artificial Sequence: Synthetic oligonucleotide
ugucgggaaguggacagug

SEQ ID NO: 1542262 - RNA, 19 nt, Artificial Sequence
  Description of Artificial Sequence: Synthetic oligonucleotide
gaugcagguguccaagugu

SEQ ID NO: 1542263 - RNA, 19 nt, Artificial Sequence
  Description of Artificial Sequence: Synthetic oligonucleotide
uccuacuuagcagugcaau

SEQ ID NO: 1542264 - RNA, 19 nt, Artificial Sequence
  Description of Artificial Sequence: Synthetic oligonucleotide
aaugcucuccgaauaguuu

SEQ ID NO: 1542265 - RNA, 19 nt, Artificial Sequence
  Description of Artificial Sequence: Synthetic oligonucleotide
ggaacaagucaucuccuac

SEQ ID NO: 1542266 - RNA, 19 nt, Artificial Sequence
  Description of Artificial Sequence: Synthetic oligonucleotide
agcaaauggcacucaacuu

SEQ ID NO: 1542267 - RNA, 19 nt, Artificial Sequence
  Description of Artificial Sequence: Synthetic oligonucleotide
gcaaauggcacucaacuua

SEQ ID NO: 1542268 - RNA, 19 nt, Artificial Sequence
  Description of Artificial Sequence: Synthetic oligonucleotide
auaaaagugacgacaucuu

SEQ ID NO: 1542269 - RNA, 19 nt, Artificial Sequence
  Description of Artificial Sequence: Synthetic oligonucleotide
ccuugauacgcacugucag

SEQ ID NO: 1542270 - RNA, 19 nt, Artificial Sequence
  Description of Artificial Sequence: Synthetic oligonucleotide
aagacuacagucagaucua

SEQ ID NO: 1542271 - RNA, 19 nt, Artificial Sequence
  Description of Artificial Sequence: Synthetic oligonucleotide
aagaagacuccgccuugau

SEQ ID NO: 1542272 - RNA, 19 nt, Artificial Sequence
  Description of Artificial Sequence: Synthetic oligonucleotide
acguacaguguuucucaug

SEQ ID NO: 1542273 - RNA, 19 nt, Artificial Sequence
  Description of Artificial Sequence: Synthetic oligonucleotide
uucagcgccauggggcagg

SEQ ID NO: 1542274 - RNA, 19 nt, Artificial Sequence
  Description of Artificial Sequence: Synthetic oligonucleotide
cucuccgaauaguuucaag

SEQ ID NO: 1542275 - RNA, 19 nt, Artificial Sequence
  Description of Artificial Sequence: Synthetic oligonucleotide
caguacucuggcagaagug

SEQ ID NO: 1542276 - RNA, 19 nt, Artificial Sequence
  Description of Artificial Sequence: Synthetic oligonucleotide
aaggagcauagaaugcuaa

SEQ ID NO: 1542277 - RNA, 19 nt, Artificial Sequence
  Description of Artificial Sequence: Synthetic oligonucleotide
ugcgcgagugugcgggcgg

SEQ ID NO: 1542278 - RNA, 19 nt, Artificial Sequence
  Description of Artificial Sequence: Synthetic oligonucleotide
gaaagcaaucuuugguggu

SEQ ID NO: 1542279 - RNA, 19 nt, Artificial Sequence
  Description of Artificial Sequence: Synthetic oligonucleotide
gcauucaacccacagaaua

SEQ ID NO: 1542280 - RNA, 19 nt, Artificial Sequence
  Description of Artificial Sequence: Synthetic oligonucleotide
cuacagucagaucuaguaa

SEQ ID NO: 1542281 - RNA, 19 nt, Artificial Sequence
  Description of Artificial Sequence: Synthetic oligonucleotide
uggaacaagucaucuccua

SEQ ID NO: 1542282 - RNA, 19 nt, Artificial Sequence
  Description of Artificial Sequence: Synthetic oligonucleotide
aaguuaagucaaguacaau

SEQ ID NO: 1542283 - RNA, 19 nt, Artificial Sequence
  Description of Artificial Sequence: Synthetic oligonucleotide
agaucaguucugguuuaag

SEQ ID NO: 1542284 - RNA, 19 nt, Artificial Sequence
  Description of Artificial Sequence: Synthetic oligonucleotide
uuacaguacucuggcagaa

SEQ ID NO: 1542285 - RNA, 19 nt, Artificial Sequence
  Description of Artificial Sequence: Synthetic oligonucleotide
cagcaaauggcacucaacu

SEQ ID NO: 1542286 - RNA, 19 nt, Artificial Sequence
  Description of Artificial Sequence: Synthetic oligonucleotide
ucuugcgugccuguuguau

SEQ ID NO: 1542287 - RNA, 19 nt, Artificial Sequence
  Description of Artificial Sequence: Synthetic oligonucleotide
gguuucaauacuguucaca

SEQ ID NO: 1542288 - RNA, 19 nt, Artificial Sequence
  Description of Artificial Sequence: Synthetic oligonucleotide
aucuuggacaacacguaca

SEQ ID NO: 1542289 - RNA, 19 nt, Artificial Sequence
  Description of Artificial Sequence: Synthetic oligonucleotide
cauugcaauaaaguuaagu

SEQ ID NO: 1542290 - RNA, 19 nt, Artificial Sequence
  Description of Artificial Sequence: Synthetic oligonucleotide
cagaucuaguaaagguguc

SEQ ID NO: 1542291 - RNA, 19 nt, Artificial Sequence
  Description of Artificial Sequence: Synthetic oligonucleotide
agaucucgcuuugaagaug

SEQ ID NO: 1542292 - RNA, 19 nt, Artificial Sequence
  Description of Artificial Sequence: Synthetic oligonucleotide
ugcauucaacccacagaau

SEQ ID NO: 1542293 - RNA, 19 nt, Artificial Sequence
  Description of Artificial Sequence: Synthetic oligonucleotide
agaagacuccgccuugaua

SEQ ID NO: 1542294 - RNA, 19 nt, Artificial Sequence
  Description of Artificial Sequence: Synthetic oligonucleotide
cuacuuagcagugcaauua

SEQ ID NO: 1542295 - RNA, 19 nt, Artificial Sequence
  Description of Artificial Sequence: Synthetic oligonucleotide
agaauauauuuagucuaua

SEQ ID NO: 1542296 - RNA, 19 nt, Artificial Sequence
  Description of Artificial Sequence: Synthetic oligonucleotide
gaguugacauagaauauau

SEQ ID NO: 1542297 - RNA, 19 nt, Artificial Sequence
  Description of Artificial Sequence: Synthetic oligonucleotide
augaguugacauagaauau

SEQ ID NO: 1542298 - RNA, 19 nt, Artificial Sequence
  Description of Artificial Sequence: Synthetic oligonucleotide
caaaggguucguggaacag

SEQ ID NO: 1542299 - RNA, 19 nt, Artificial Sequence
  Description of Artificial Sequence: Synthetic oligonucleotide
cuccucaaggagcauagaa

SEQ ID NO: 1542300 - RNA, 19 nt, Artificial Sequence
  Description of Artificial Sequence: Synthetic oligonucleotide
gaagaagacuccgccuuga

SEQ ID NO: 1542301 - RNA, 19 nt, Artificial Sequence
  Description of Artificial Sequence: Synthetic oligonucleotide
uuccuacuuagcagugcaa

SEQ ID NO: 1542302 - RNA, 19 nt, Artificial Sequence
  Description of Artificial Sequence: Synthetic oligonucleotide
acuuacugcuaauguugaa

SEQ ID NO: 1542303 - RNA, 19 nt, Artificial Sequence
  Description of Artificial Sequence: Synthetic oligonucleotide
gcuaaaugcucuccgaaua

SEQ ID NO: 1542304 - RNA, 19 nt, Artificial Sequence
  Description of Artificial Sequence: Synthetic oligonucleotide
agcagcgagcauauggaca

SEQ ID NO: 1542305 - RNA, 19 nt, Artificial Sequence
  Description of Artificial Sequence: Synthetic oligonucleotide
caauauaauauugccuaua

SEQ ID NO: 1542306 - RNA, 19 nt, Artificial Sequence
  Description of Artificial Sequence: Synthetic oligonucleotide
agucugucgggaaguggac

SEQ ID NO: 1542307 - RNA, 19 nt, Artificial Sequence
  Description of Artificial Sequence: Synthetic oligonucleotide
cuacgggucccgcugagca

SEQ ID NO: 1542308 - RNA, 19 nt, Artificial Sequence
  Description of Artificial Sequence: Synthetic oligonucleotide
ugcagguguccaagugucu

SEQ ID NO: 1542309 - RNA, 19 nt, Artificial Sequence
  Description of Artificial Sequence: Synthetic oligonucleotide
uccauucucuugcgugccu

SEQ ID NO: 1542310 - RNA, 19 nt, Artificial Sequence
  Description of Artificial Sequence: Synthetic oligonucleotide
aggaucgucuggguuagga

SEQ ID NO: 1542311 - RNA, 19 nt, Artificial Sequence
  Description of Artificial Sequence: Synthetic oligonucleotide
acugggaccgcaggauguc

SEQ ID NO: 1542312 - RNA, 19 nt, Artificial Sequence
  Description of Artificial Sequence: Synthetic oligonucleotide
agggauagucugucgggaa

SEQ ID NO: 1542313 - RNA, 19 nt, Artificial Sequence
  Description of Artificial Sequence: Synthetic oligonucleotide
gcagcgagcauauggacaa

SEQ ID NO: 1542314 - RNA, 19 nt, Artificial Sequence
  Description of Artificial Sequence: Synthetic oligonucleotide
auauugccuauaacaagaa

SEQ ID NO: 1542315 - RNA, 19 nt, Artificial Sequence
  Description of Artificial Sequence: Synthetic oligonucleotide
ggaagaagacuccgccuug

SEQ ID NO: 1542316 - RNA, 19 nt, Artificial Sequence
  Description of Artificial Sequence: Synthetic oligonucleotide
uugcgugccuguuguauuu

SEQ ID NO: 1542317 - RNA, 19 nt, Artificial Sequence
  Description of Artificial Sequence: Synthetic oligonucleotide
uccuacgggucccgcugag

SEQ ID NO: 1542318 - RNA, 19 nt, Artificial Sequence
  Description of Artificial Sequence: Synthetic oligonucleotide
gugagcuaacaaagaauga

SEQ ID NO: 1542319 - RNA, 19 nt, Artificial Sequence
  Description of Artificial Sequence: Synthetic oligonucleotide
aucuccuacgggucccgcu

SEQ ID NO: 1542320 - RNA, 19 nt, Artificial Sequence
  Description of Artificial Sequence: Synthetic oligonucleotide
aaauggcacucaacuuacu

SEQ ID NO: 1542321 - RNA, 19 nt, Artificial Sequence
  Description of Artificial Sequence: Synthetic oligonucleotide
gagugugcgggcggcggcg

SEQ ID NO: 1542322 - RNA, 19 nt, Artificial Sequence
  Description of Artificial Sequence: Synthetic oligonucleotide
ccgaaacaaguguuucucc

SEQ ID NO: 1542323 - RNA, 19 nt, Artificial Sequence
  Description of Artificial Sequence: Synthetic oligonucleotide
gaccacugggaccgcagga

SEQ ID NO: 1542324 - RNA, 19 nt, Artificial Sequence
  Description of Artificial Sequence: Synthetic oligonucleotide
gugggucacgcuguaaauc

SEQ ID NO: 1542325 - RNA, 19 nt, Artificial Sequence
  Description of Artificial Sequence: Synthetic oligonucleotide
guccauucucuugcgugcc

SEQ ID NO: 1542326 - RNA, 19 nt, Artificial Sequence
  Description of Artificial Sequence: Synthetic oligonucleotide
ugguugcuugccaguggaa

SEQ ID NO: 1542327 - RNA, 19 nt, Artificial Sequence
  Description of Artificial Sequence: Synthetic oligonucleotide
ccuaagacaaggggacagg

SEQ ID NO: 1542328 - RNA, 19 nt, Artificial Sequence
  Description of Artificial Sequence: Synthetic oligonucleotide
agugugcgggcggcggcgc

SEQ ID NO: 1542329 - RNA, 19 nt, Artificial Sequence
  Description of Artificial Sequence: Synthetic oligonucleotide
auccuaagacaaggggaca

SEQ ID NO: 1542330 - RNA, 19 nt, Artificial Sequence
  Description of Artificial Sequence: Synthetic oligonucleotide
guacucuggcagaagugga

SEQ ID NO: 1542331 - RNA, 19 nt, Artificial Sequence
  Description of Artificial Sequence: Synthetic oligonucleotide
ccgaauaguuucaagggua

SEQ ID NO: 1542332 - RNA, 19 nt, Artificial Sequence
  Description of Artificial Sequence: Synthetic oligonucleotide
gcauagaaugcuaaaugcu

SEQ ID NO: 1542333 - RNA, 19 nt, Artificial Sequence
  Description of Artificial Sequence: Synthetic oligonucleotide
cagugcaauuaauucacau

SEQ ID NO: 1542334 - RNA, 19 nt, Artificial Sequence
  Description of Artificial Sequence: Synthetic oligonucleotide
aaggaucgucuggguuagg

SEQ ID NO: 1542335 - RNA, 19 nt, Artificial Sequence
  Description of Artificial Sequence: Synthetic oligonucleotide
acauugcaauaaaguuaag

SEQ ID NO: 1542336 - RNA, 19 nt, Artificial Sequence
  Description of Artificial Sequence: Synthetic oligonucleotide
gucaaagcuggugaccacu

SEQ ID NO: 1542337 - RNA, 19 nt, Artificial Sequence
  Description of Artificial Sequence: Synthetic oligonucleotide
cgagcauauggacaacaac

SEQ ID NO: 1542338 - RNA, 19 nt, Artificial Sequence
  Description of Artificial Sequence: Synthetic oligonucleotide
caucuccuuucagcaagac

SEQ ID NO: 1542339 - RNA, 19 nt, Artificial Sequence
  Description of Artificial Sequence: Synthetic oligonucleotide
accuuccuacuuagcagug

SEQ ID NO: 1542340 - RNA, 19 nt, Artificial Sequence
  Description of Artificial Sequence: Synthetic oligonucleotide
uacuuccauuacuguuuau

SEQ ID NO: 1542341 - RNA, 19 nt, Artificial Sequence
  Description of Artificial Sequence: Synthetic oligonucleotide
gacuccgccuugauacgca

SEQ ID NO: 1542342 - RNA, 19 nt, Artificial Sequence
  Description of Artificial Sequence: Synthetic oligonucleotide
aggguagcuuuggagguuu

SEQ ID NO: 1542343 - RNA, 19 nt, Artificial Sequence
  Description of Artificial Sequence: Synthetic oligonucleotide
guugggguuucaauacugu

SEQ ID NO: 1542344 - RNA, 19 nt, Artificial Sequence
  Description of Artificial Sequence: Synthetic oligonucleotide
gcuucagcgccauggggca

SEQ ID NO: 1542345 - RNA, 19 nt, Artificial Sequence
  Description of Artificial Sequence: Synthetic oligonucleotide
caucaucagcuguuggggu

SEQ ID NO: 1542346 - RNA, 19 nt, Artificial Sequence
  Description of Artificial Sequence: Synthetic oligonucleotide
ggcacaguuaauucaucau

SEQ ID NO: 1542347 - RNA, 19 nt, Artificial Sequence
  Description of Artificial Sequence: Synthetic oligonucleotide
guccgcgugucccgggcug

SEQ ID NO: 1542348 - RNA, 19 nt, Artificial Sequence
  Description of Artificial Sequence: Synthetic oligonucleotide
agacagcaaauggcacuca

SEQ ID NO: 1542349 - RNA, 19 nt, Artificial Sequence
  Description of Artificial Sequence: Synthetic oligonucleotide
gacaacacguacaguguuu

SEQ ID NO: 1542350 - RNA, 19 nt, Artificial Sequence
  Description of Artificial Sequence: Synthetic oligonucleotide
acgcuguaaaucacuuaau

SEQ ID NO: 1542351 - RNA, 19 nt, Artificial Sequence
  Description of Artificial Sequence: Synthetic oligonucleotide
guagcuuuggagguuuguu

SEQ ID NO: 1542352 - RNA, 19 nt, Artificial Sequence
  Description of Artificial Sequence: Synthetic oligonucleotide
gugcgcgagugugcgggcg

SEQ ID NO: 1542353 - RNA, 19 nt, Artificial Sequence
  Description of Artificial Sequence: Synthetic oligonucleotide
cucuggcagaaguggaagu

SEQ ID NO: 1542354 - RNA, 19 nt, Artificial Sequence
  Description of Artificial Sequence: Synthetic oligonucleotide
ccaaaggguucguggaaca

SEQ ID NO: 1542355 - RNA, 19 nt, Artificial Sequence
  Description of Artificial Sequence: Synthetic oligonucleotide
cuguugggguuucaauacu

SEQ ID NO: 1542356 - RNA, 19 nt, Artificial Sequence
  Description of Artificial Sequence: Synthetic oligonucleotide
ggguuucaauacuguucac

SEQ ID NO: 1542357 - RNA, 19 nt, Artificial Sequence
  Description of Artificial Sequence: Synthetic oligonucleotide
cuucagcgccauggggcag

SEQ ID NO: 1542358 - RNA, 19 nt, Artificial Sequence
  Description of Artificial Sequence: Synthetic oligonucleotide
caucuccuacgggucccgc

SEQ ID NO: 1542359 - RNA, 19 nt, Artificial Sequence
  Description of Artificial Sequence: Synthetic oligonucleotide
cacugggaccgcaggaugu

SEQ ID NO: 1542360 - RNA, 19 nt, Artificial Sequence
  Description of Artificial Sequence: Synthetic oligonucleotide
ggcgcggugcgcgagugug

SEQ ID NO: 1542361 - RNA, 19 nt, Artificial Sequence
  Description of Artificial Sequence: Synthetic oligonucleotide
cuugcgugccuguuguauu

SEQ ID NO: 1542362 - RNA, 19 nt, Artificial Sequence
  Description of Artificial Sequence: Synthetic oligonucleotide
ccgugugcgcccaggcgcg

SEQ ID NO: 1542363 - RNA, 19 nt, Artificial Sequence
  Description of Artificial Sequence: Synthetic oligonucleotide
cucgcggggcugcuccgug

SEQ ID NO: 1542364 - RNA, 19 nt, Artificial Sequence
  Description of Artificial Sequence: Synthetic oligonucleotide
cgggcugccgccucgcggg

SEQ ID NO: 1542365 - RNA, 19 nt, Artificial Sequence
  Description of Artificial Sequence: Synthetic oligonucleotide
caacacguacaguguuucu

SEQ ID NO: 1542366 - RNA, 19 nt, Artificial Sequence
  Description of Artificial Sequence: Synthetic oligonucleotide
ccacugggaccgcaggaug

SEQ ID NO: 1542367 - RNA, 19 nt, Artificial Sequence
  Description of Artificial Sequence: Synthetic oligonucleotide
ggaccgcaggaugucaaga

SEQ ID NO: 1542368 - RNA, 19 nt, Artificial Sequence
  Description of Artificial Sequence: Synthetic oligonucleotide
gccaguggaacaagucauc

SEQ ID NO: 1542369 - RNA, 19 nt, Artificial Sequence
  Description of Artificial Sequence: Synthetic oligonucleotide
ccauucuagucaauauacu

SEQ ID NO: 1542370 - RNA, 19 nt, Artificial Sequence
  Description of Artificial Sequence: Synthetic oligonucleotide
ggacaacacguacaguguu

SEQ ID NO: 1542371 - RNA, 19 nt, Artificial Sequence
  Description of Artificial Sequence: Synthetic oligonucleotide
caucagcuguugggguuuc

SEQ ID NO: 1542372 - RNA, 19 nt, Artificial Sequence
  Description of Artificial Sequence: Synthetic oligonucleotide
gugacacaccuuccuacuu

SEQ ID NO: 1542373 - RNA, 19 nt, Artificial Sequence
  Description of Artificial Sequence: Synthetic oligonucleotide
ggaucgucuggguuaggau

SEQ ID NO: 1542374 - RNA, 19 nt, Artificial Sequence
  Description of Artificial Sequence: Synthetic oligonucleotide
cacucaacuuacugcuaau

SEQ ID NO: 1542375 - RNA, 19 nt, Artificial Sequence
  Description of Artificial Sequence: Synthetic oligonucleotide
ugacgacaucuuggacaac

SEQ ID NO: 1542376 - RNA, 19 nt, Artificial Sequence
  Description of Artificial Sequence: Synthetic oligonucleotide
cuccuacgggucccgcuga

SEQ ID NO: 1542377 - RNA, 19 nt, Artificial Sequence
  Description of Artificial Sequence: Synthetic oligonucleotide
ggucacgcuguaaaucacu

SEQ ID NO: 1542378 - RNA, 19 nt, Artificial Sequence
  Description of Artificial Sequence: Synthetic oligonucleotide
ggugcgcgagugugcgggc

SEQ ID NO: 1542379 - RNA, 19 nt, Artificial Sequence
  Description of Artificial Sequence: Synthetic oligonucleotide
gcgagcauauggacaacaa

SEQ ID NO: 1542380 - RNA, 19 nt, Artificial Sequence
  Description of Artificial Sequence: Synthetic oligonucleotide
cggugcgcgagugugcggg

SEQ ID NO: 1542381 - RNA, 19 nt, Artificial Sequence
  Description of Artificial Sequence: Synthetic oligonucleotide
cacguacaguguuucucau

SEQ ID NO: 1542382 - RNA, 19 nt, Artificial Sequence
  Description of Artificial Sequence: Synthetic oligonucleotide
cuuggacaacacguacagu

SEQ ID NO: 1542383 - RNA, 19 nt, Artificial Sequence
  Description of Artificial Sequence: Synthetic oligonucleotide
caggcgcggugcgcgagug

SEQ ID NO: 1542384 - RNA, 19 nt, Artificial Sequence
  Description of Artificial Sequence: Synthetic oligonucleotide
gguagcuuuggagguuugu

SEQ ID NO: 1542385 - RNA, 19 nt, Artificial Sequence
  Description of Artificial Sequence: Synthetic oligonucleotide
aggcgcggugcgcgagugu

SEQ ID NO: 1542386 - RNA, 19 nt, Artificial Sequence
  Description of Artificial Sequence: Synthetic oligonucleotide
ggggcacaguuaauucauc

SEQ ID NO: 1542387 - RNA, 19 nt, Artificial Sequence
  Description of Artificial Sequence: Synthetic oligonucleotide
gugcgcccaggcgcggugc

SEQ ID NO: 1542388 - RNA, 19 nt, Artificial Sequence
  Description of Artificial Sequence: Synthetic oligonucleotide
uggugaccacugggaccgc

SEQ ID NO: 1542389 - RNA, 19 nt, Artificial Sequence
  Description of Artificial Sequence: Synthetic oligonucleotide
ccuacuuagcagugcaauu

SEQ ID NO: 1542390 - RNA, 19 nt, Artificial Sequence
  Description of Artificial Sequence: Synthetic oligonucleotide
ccuacgggucccgcugagc

SEQ ID NO: 1542391 - RNA, 19 nt, Artificial Sequence
  Description of Artificial Sequence: Synthetic oligonucleotide
cgcggugcgcgagugugcg

SEQ ID NO: 1542392 - RNA, 19 nt, Artificial Sequence
  Description of Artificial Sequence: Synthetic oligonucleotide
gcggugcgcgagugugcgg

SEQ ID NO: 1542393 - RNA, 19 nt, Artificial Sequence
  Description of Artificial Sequence: Synthetic oligonucleotide
ggguagcuuuggagguuug

SEQ ID NO: 1542394 - RNA, 19 nt, Artificial Sequence
  Description of Artificial Sequence: Synthetic oligonucleotide
cgagugugcgggcggcggc

SEQ ID NO: 1542395 - RNA, 19 nt, Artificial Sequence
  Description of Artificial Sequence: Synthetic oligonucleotide
ggcacucaacuuacugcua

SEQ ID NO: 1542396 - RNA, 19 nt, Artificial Sequence
  Description of Artificial Sequence: Synthetic oligonucleotide
gcggguccgcgugucccgg

SEQ ID NO: 1542397 - RNA, 19 nt, Artificial Sequence
  Description of Artificial Sequence: Synthetic oligonucleotide
gcucuccgaauaguuucaa

SEQ ID NO: 1542398 - RNA, 19 nt, Artificial Sequence
  Description of Artificial Sequence: Synthetic oligonucleotide
cagcgccauggggcaggcg

SEQ ID NO: 1542399 - RNA, 19 nt, Artificial Sequence
  Description of Artificial Sequence: Synthetic oligonucleotide
cugcuccgugugcgcccag

SEQ ID NO: 1542400 - RNA, 19 nt, Artificial Sequence
  Description of Artificial Sequence: Synthetic oligonucleotide
gcgcgagugugcgggcggc

SEQ ID NO: 1542401 - RNA, 19 nt, Artificial Sequence
  Description of Artificial Sequence: Synthetic oligonucleotide
gcggcggguccgcgugucc

SEQ ID NO: 1542402 - RNA, 19 nt, Artificial Sequence
  Description of Artificial Sequence: Synthetic oligonucleotide
cgcggggcugcuccgugug

SEQ ID NO: 1542403 - RNA, 19 nt, Artificial Sequence
  Description of Artificial Sequence: Synthetic oligonucleotide
gcgcggugcgcgagugugc

SEQ ID NO: 1542404 - RNA, 19 nt, Artificial Sequence
  Description of Artificial Sequence: Synthetic oligonucleotide
cggcggguccgcguguccc

SEQ ID NO: 1542405 - RNA, 19 nt, Artificial Sequence
  Description of Artificial Sequence: Synthetic oligonucleotide
cccaggcgcggugcgcgag

SEQ ID NO: 1542406 - RNA, 19 nt, Artificial Sequence
  Description of Artificial Sequence: Synthetic oligonucleotide
cgauacagucaaagcuggu

SEQ ID NO: 1542407 - RNA, 19 nt, Artificial Sequence
  Description of Artificial Sequence: Synthetic oligonucleotide
cgcgagugugcgggcggcg

SEQ ID NO: 1542408 - RNA, 19 nt, Artificial Sequence
  Description of Artificial Sequence: Synthetic oligonucleotide
gugugcgcccaggcgcggu

SEQ ID NO: 1542409 - RNA, 19 nt, Artificial Sequence
  Description of Artificial Sequence: Synthetic oligonucleotide
ccgcgugucccgggcugcc

SEQ ID NO: 1542410 - RNA, 19 nt, Artificial Sequence
  Description of Artificial Sequence: Synthetic oligonucleotide
cgcgugucccgggcugccg

SEQ ID NO: 1542411 - RNA, 19 nt, Artificial Sequence
  Description of Artificial Sequence: Synthetic oligonucleotide
cgggucccgcugagcagug

SEQ ID NO: 1542412 - RNA, 19 nt, Artificial Sequence
  Description of Artificial Sequence: Synthetic oligonucleotide
gcccaggcgcggugcgcga

SEQ ID NO: 1542413 - RNA, 19 nt, Artificial Sequence
  Description of Artificial Sequence: Synthetic oligonucleotide
cgugugcgcccaggcgcgg

SEQ ID NO: 1542414 - RNA, 19 nt, Artificial Sequence
  Description of Artificial Sequence: Synthetic oligonucleotide
ccaggcgcggugcgcgagu

SEQ ID NO: 1542415 - RNA, 19 nt, Artificial Sequence
  Description of Artificial Sequence: Synthetic oligonucleotide
ccgccuugauacgcacugu

SEQ ID NO: 1542416 - RNA, 19 nt, Artificial Sequence
  Description of Artificial Sequence: Synthetic oligonucleotide
gggccccaugaugguugcu

SEQ ID NO: 1542417 - RNA, 19 nt, Artificial Sequence
  Description of Artificial Sequence: Synthetic oligonucleotide
aaugccaggucacaaaucc

SEQ ID NO: 1542418 - RNA, 19 nt, Artificial Sequence
  Description of Artificial Sequence: Synthetic oligonucleotide
ucuauuaagaaguugagca

SEQ ID NO: 1542419 - RNA, 19 nt, Artificial Sequence
  Description of Artificial Sequence: Synthetic oligonucleotide
uguaagauauaacuaaucu

SEQ ID NO: 1542420 - RNA, 19 nt, Artificial Sequence
  Description of Artificial Sequence: Synthetic oligonucleotide
ucagucaacaaccccaugg

SEQ ID NO: 1542421 - RNA, 19 nt, Artificial Sequence
  Description of Artificial Sequence: Synthetic oligonucleotide
aaauccaguuaauucagag

SEQ ID NO: 1542422 - RNA, 19 nt, Artificial Sequence
  Description of Artificial Sequence: Synthetic oligonucleotide
aguuguggaaccgugagcc

SEQ ID NO: 1542423 - RNA, 19 nt, Artificial Sequence
  Description of Artificial Sequence: Synthetic oligonucleotide
aguguuugcugguagaagg

SEQ ID NO: 1542424 - RNA, 19 nt, Artificial Sequence
  Description of Artificial Sequence: Synthetic oligonucleotide
ucuucagugaauaucuuca

SEQ ID NO: 1542425 - RNA, 19 nt, Artificial Sequence
  Description of Artificial Sequence: Synthetic oligonucleotide
aauagaaaacucucaguca

SEQ ID NO: 1542426 - RNA, 19 nt, Artificial Sequence
  Description of Artificial Sequence: Synthetic oligonucleotide
aguuugauuggucccaggc

SEQ ID NO: 1542427 - RNA, 19 nt, Artificial Sequence
  Description of Artificial Sequence: Synthetic oligonucleotide
uguggguagggacaaaagg

SEQ ID NO: 1542428 - RNA, 19 nt, Artificial Sequence
  Description of Artificial Sequence: Synthetic oligonucleotide
ucgguauucucccagcucg

SEQ ID NO: 1542429 - RNA, 19 nt, Artificial Sequence
  Description of Artificial Sequence: Synthetic oligonucleotide
uuggguaucuugcaaaugc

SEQ ID NO: 1542430 - RNA, 19 nt, Artificial Sequence
  Description of Artificial Sequence: Synthetic oligonucleotide
ugaacucucaggaacucgg

SEQ ID NO: 1542431 - RNA, 19 nt, Artificial Sequence
  Description of Artificial Sequence: Synthetic oligonucleotide
ugaagcugugcaaauauca

SEQ ID NO: 1542432 - RNA, 19 nt, Artificial Sequence
  Description of Artificial Sequence: Synthetic oligonucleotide
guaaggaauggccagaccc

SEQ ID NO: 1542433 - RNA, 19 nt, Artificial Sequence
  Description of Artificial Sequence: Synthetic oligonucleotide
aauuccugggaucgucugc

SEQ ID NO: 1542434 - RNA, 19 nt, Artificial Sequence
  Description of Artificial Sequence: Synthetic oligonucleotide
aaagaugcguaugucauug

SEQ ID NO: 1542435 - RNA, 19 nt, Artificial Sequence
  Description of Artificial Sequence: Synthetic oligonucleotide
aauucagagaugauccagg

SEQ ID NO: 1542436 - RNA, 19 nt, Artificial Sequence
  Description of Artificial Sequence: Synthetic oligonucleotide
uugagcacuugauugaacc

SEQ ID NO: 1542437 - RNA, 19 nt, Artificial Sequence
  Description of Artificial Sequence: Synthetic oligonucleotide
augcguaugucauugaucu

SEQ ID NO: 1542438 - RNA, 19 nt, Artificial Sequence
  Description of Artificial Sequence: Synthetic oligonucleotide
ugagcacucgaucucgugg

SEQ ID NO: 1542439 - RNA, 19 nt, Artificial Sequence
  Description of Artificial Sequence: Synthetic oligonucleotide
aucauaauagaaaacucuc

SEQ ID NO: 1542440 - RNA, 19 nt, Artificial Sequence
  Description of Artificial Sequence: Synthetic oligonucleotide
gugacuggcauacaaaggc

SEQ ID NO: 1542441 - RNA, 19 nt, Artificial Sequence
  Description of Artificial Sequence: Synthetic oligonucleotide
ucacaguacagcuggauca

SEQ ID NO: 1542442 - RNA, 19 nt, Artificial Sequence
  Description of Artificial Sequence: Synthetic oligonucleotide
ucacaaauccaguuaauuc

SEQ ID NO: 1542443 - RNA, 19 nt, Artificial Sequence
  Description of Artificial Sequence: Synthetic oligonucleotide
uguaaaauccguucuuccu

SEQ ID NO: 1542444 - RNA, 19 nt, Artificial Sequence
  Description of Artificial Sequence: Synthetic oligonucleotide
auaauagaaaacucucagu

SEQ ID NO: 1542445 - RNA, 19 nt, Artificial Sequence
  Description of Artificial Sequence: Synthetic oligonucleotide
agaugaagagagcuuguuc

SEQ ID NO: 1542446 - RNA, 19 nt, Artificial Sequence
  Description of Artificial Sequence: Synthetic oligonucleotide
uuggucguaguguuugugg

SEQ ID NO: 1542447 - RNA, 19 nt, Artificial Sequence
  Description of Artificial Sequence: Synthetic oligonucleotide
uaucuaauuugcuguagug

SEQ ID NO: 1542448 - RNA, 19 nt, Artificial Sequence
  Description of Artificial Sequence: Synthetic oligonucleotide
aaguugagcacucgaucuc

SEQ ID NO: 1542449 - RNA, 19 nt, Artificial Sequence
  Description of Artificial Sequence: Synthetic oligonucleotide
gaagcagggacagauauac

SEQ ID NO: 1542450 - RNA, 19 nt, Artificial Sequence
  Description of Artificial Sequence: Synthetic oligonucleotide
aguagugcacaaccacucc

SEQ ID NO: 1542451 - RNA, 19 nt, Artificial Sequence
  Description of Artificial Sequence: Synthetic oligonucleotide
uacuccuuagccaucuuug

SEQ ID NO: 1542452 - RNA, 19 nt, Artificial Sequence
  Description of Artificial Sequence: Synthetic oligonucleotide
aagguagucuuucaucaga

SEQ ID NO: 1542453 - RNA, 19 nt, Artificial Sequence
  Description of Artificial Sequence: Synthetic oligonucleotide
ugagcacuugauugaaccg

SEQ ID NO: 1542454 - RNA, 19 nt, Artificial Sequence
  Description of Artificial Sequence: Synthetic oligonucleotide
aaugcacuguucccaaucu

SEQ ID NO: 1542455 - RNA, 19 nt, Artificial Sequence
  Description of Artificial Sequence: Synthetic oligonucleotide
gagggguuaaauuccuggg

SEQ ID NO: 1542456 - RNA, 19 nt, Artificial Sequence
  Description of Artificial Sequence: Synthetic oligonucleotide
ugccaggucacaaauccag

SEQ ID NO: 1542457 - RNA, 19 nt, Artificial Sequence
  Description of Artificial Sequence: Synthetic oligonucleotide
ucaacaaccccauggguac

SEQ ID NO: 1542458 - RNA, 19 nt, Artificial Sequence
  Description of Artificial Sequence: Synthetic oligonucleotide
gaacucggcauggagaagg

SEQ ID NO: 1542459 - RNA, 19 nt, Artificial Sequence
  Description of Artificial Sequence: Synthetic oligonucleotide
uagucuuucaucagacucu

SEQ ID NO: 1542460 - RNA, 19 nt, Artificial Sequence
  Description of Artificial Sequence: Synthetic oligonucleotide
guagucuuucaucagacuc

SEQ ID NO: 1542461 - RNA, 19 nt, Artificial Sequence
  Description of Artificial Sequence: Synthetic oligonucleotide
aaguagugcacaaccacuc

SEQ ID NO: 1542462 - RNA, 19 nt, Artificial Sequence
  Description of Artificial Sequence: Synthetic oligonucleotide
cauagaugaagagagcuug

SEQ ID NO: 1542463 - RNA, 19 nt, Artificial Sequence
  Description of Artificial Sequence: Synthetic oligonucleotide
ugauugaaccguuucuucu

SEQ ID NO: 1542464 - RNA, 19 nt, Artificial Sequence
  Description of Artificial Sequence: Synthetic oligonucleotide
uuccugaacucucaggaac

SEQ ID NO: 1542465 - RNA, 19 nt, Artificial Sequence
  Description of Artificial Sequence: Synthetic oligonucleotide
caaggagggguuaaauucc

SEQ ID NO: 1542466 - RNA, 19 nt, Artificial Sequence
  Description of Artificial Sequence: Synthetic oligonucleotide
ucccaugggacucuccagg

SEQ ID NO: 1542467 - RNA, 19 nt, Artificial Sequence
  Description of Artificial Sequence: Synthetic oligonucleotide
ggaaaguugagcuauccac

SEQ ID NO: 1542468 - RNA, 19 nt, Artificial Sequence
  Description of Artificial Sequence: Synthetic oligonucleotide
gguuaaauuccugggaucg

SEQ ID NO: 1542469 - RNA, 19 nt, Artificial Sequence
  Description of Artificial Sequence: Synthetic oligonucleotide
agcuuguucgugcuucccc

SEQ ID NO: 1542470 - RNA, 19 nt, Artificial Sequence
  Description of Artificial Sequence: Synthetic oligonucleotide
ucugucgguauucucccag

SEQ ID NO: 1542471 - RNA, 19 nt, Artificial Sequence
  Description of Artificial Sequence: Synthetic oligonucleotide
acaguuguggaaccgugag

SEQ ID NO: 1542472 - RNA, 19 nt, Artificial Sequence
  Description of Artificial Sequence: Synthetic oligonucleotide
acucucagucaacaacccc

SEQ ID NO: 1542473 - RNA, 19 nt, Artificial Sequence
  Description of Artificial Sequence: Synthetic oligonucleotide
guacaaacacuugagauga

SEQ ID NO: 1542474 - RNA, 19 nt, Artificial Sequence
  Description of Artificial Sequence: Synthetic oligonucleotide
aaauuccugggaucgucug

SEQ ID NO: 1542475 - RNA, 19 nt, Artificial Sequence
  Description of Artificial Sequence: Synthetic oligonucleotide
uaauuugcuguagugcagc

SEQ ID NO: 1542476 - RNA, 19 nt, Artificial Sequence
  Description of Artificial Sequence: Synthetic oligonucleotide
uuagccaucuuuguguccu

SEQ ID NO: 1542477 - RNA, 19 nt, Artificial Sequence
  Description of Artificial Sequence: Synthetic oligonucleotide
ucgaucucguggcagagac

SEQ ID NO: 1542478 - RNA, 19 nt, Artificial Sequence
  Description of Artificial Sequence: Synthetic oligonucleotide
cagugaauaucuucaggcc

SEQ ID NO: 1542479 - RNA, 19 nt, Artificial Sequence
  Description of Artificial Sequence: Synthetic oligonucleotide
uguucgugcuuccccaugc

SEQ ID NO: 1542480 - RNA, 19 nt, Artificial Sequence
  Description of Artificial Sequence: Synthetic oligonucleotide
acgaugcucggucaguggg

SEQ ID NO: 1542481 - RNA, 19 nt, Artificial Sequence
  Description of Artificial Sequence: Synthetic oligonucleotide
uaaauuccugggaucgucu

SEQ ID NO: 1542482 - RNA, 19 nt, Artificial Sequence
  Description of Artificial Sequence: Synthetic oligonucleotide
cuaauuugcuguagugcag

SEQ ID NO: 1542483 - RNA, 19 nt, Artificial Sequence
  Description of Artificial Sequence: Synthetic oligonucleotide
auuaagaaguugagcacuc

SEQ ID NO: 1542484 - RNA, 19 nt, Artificial Sequence
  Description of Artificial Sequence: Synthetic oligonucleotide
uaucuucaggccaucuucu

SEQ ID NO: 1542485 - RNA, 19 nt, Artificial Sequence
  Description of Artificial Sequence: Synthetic oligonucleotide
uggaacagaaguagugcac

SEQ ID NO: 1542486 - RNA, 19 nt, Artificial Sequence
  Description of Artificial Sequence: Synthetic oligonucleotide
gacugguggacgaugcucg

SEQ ID NO: 1542487 - RNA, 19 nt, Artificial Sequence
  Description of Artificial Sequence: Synthetic oligonucleotide
guggcaguacuccuuagcc

SEQ ID NO: 1542488 - RNA, 19 nt, Artificial Sequence
  Description of Artificial Sequence: Synthetic oligonucleotide
cucggcauggagaagguuc

SEQ ID NO: 1542489 - RNA, 19 nt, Artificial Sequence
  Description of Artificial Sequence: Synthetic oligonucleotide
uuguggaaccgugagcccg

SEQ ID NO: 1542490 - RNA, 19 nt, Artificial Sequence
  Description of Artificial Sequence: Synthetic oligonucleotide
ggagggguuaaauuccugg

SEQ ID NO: 1542491 - RNA, 19 nt, Artificial Sequence
  Description of Artificial Sequence: Synthetic oligonucleotide
ucauaguagcuggaaaucu

SEQ ID NO: 1542492 - RNA, 19 nt, Artificial Sequence
  Description of Artificial Sequence: Synthetic oligonucleotide
gaucucguggcagagacuc

SEQ ID NO: 1542493 - RNA, 19 nt, Artificial Sequence
  Description of Artificial Sequence: Synthetic oligonucleotide
caguguaagauauaacuaa

SEQ ID NO: 1542494 - RNA, 19 nt, Artificial Sequence
  Description of Artificial Sequence: Synthetic oligonucleotide
acaaaagguagucuuucau

SEQ ID NO: 1542495 - RNA, 19 nt, Artificial Sequence
  Description of Artificial Sequence: Synthetic oligonucleotide
gaaguugagcacucgaucu

SEQ ID NO: 1542496 - RNA, 19 nt, Artificial Sequence
  Description of Artificial Sequence: Synthetic oligonucleotide
uuaggauucugugcucagg

SEQ ID NO: 1542497 - RNA, 19 nt, Artificial Sequence
  Description of Artificial Sequence: Synthetic oligonucleotide
ugcugaguccuuaggauuc

SEQ ID NO: 1542498 - RNA, 19 nt, Artificial Sequence
  Description of Artificial Sequence: Synthetic oligonucleotide
uggucguaguguuuguggc

SEQ ID NO: 1542499 - RNA, 19 nt, Artificial Sequence
  Description of Artificial Sequence: Synthetic oligonucleotide
aguugagcacucgaucucg

SEQ ID NO: 1542500 - RNA, 19 nt, Artificial Sequence
  Description of Artificial Sequence: Synthetic oligonucleotide
uccugaacucucaggaacu

SEQ ID NO: 1542501 - RNA, 19 nt, Artificial Sequence
  Description of Artificial Sequence: Synthetic oligonucleotide
uggguaucuugcaaaugca

SEQ ID NO: 1542502 - RNA, 19 nt, Artificial Sequence
  Description of Artificial Sequence: Synthetic oligonucleotide
uucagagaugauccaggga

SEQ ID NO: 1542503 - RNA, 19 nt, Artificial Sequence
  Description of Artificial Sequence: Synthetic oligonucleotide
uuaaauuccugggaucguc

SEQ ID NO: 1542504 - RNA, 19 nt, Artificial Sequence
  Description of Artificial Sequence: Synthetic oligonucleotide
guagugcagcucuaggacc

SEQ ID NO: 1542505 - RNA, 19 nt, Artificial Sequence
  Description of Artificial Sequence: Synthetic oligonucleotide
gaaaucuuguccaggugac

SEQ ID NO: 1542506 - RNA, 19 nt, Artificial Sequence
  Description of Artificial Sequence: Synthetic oligonucleotide
uggaucagacaguugugga

SEQ ID NO: 1542507 - RNA, 19 nt, Artificial Sequence
  Description of Artificial Sequence: Synthetic oligonucleotide
gagacucuaccuccggcag

SEQ ID NO: 1542508 - RNA, 19 nt, Artificial Sequence
  Description of Artificial Sequence: Synthetic oligonucleotide
guacauccgaagcagggac

SEQ ID NO: 1542509 - RNA, 19 nt, Artificial Sequence
  Description of Artificial Sequence: Synthetic oligonucleotide
aggaacucggcauggagaa

SEQ ID NO: 1542510 - RNA, 19 nt, Artificial Sequence
  Description of Artificial Sequence: Synthetic oligonucleotide
auugaaccguuucuucugu

SEQ ID NO: 1542511 - RNA, 19 nt, Artificial Sequence
  Description of Artificial Sequence: Synthetic oligonucleotide
agggguuaaauuccuggga

SEQ ID NO: 1542512 - RNA, 19 nt, Artificial Sequence
  Description of Artificial Sequence: Synthetic oligonucleotide
gacauagaugaagagagcu

SEQ ID NO: 1542513 - RNA, 19 nt, Artificial Sequence
  Description of Artificial Sequence: Synthetic oligonucleotide
aaccccauggguacaaaca

SEQ ID NO: 1542514 - RNA, 19 nt, Artificial Sequence
  Description of Artificial Sequence: Synthetic oligonucleotide
ggcauacaaaggcaagacg

SEQ ID NO: 1542515 - RNA, 19 nt, Artificial Sequence
  Description of Artificial Sequence: Synthetic oligonucleotide
ucggcauggagaagguucu

SEQ ID NO: 1542516 - RNA, 19 nt, Artificial Sequence
  Description of Artificial Sequence: Synthetic oligonucleotide
aagauauaacuaaucuuuu

SEQ ID NO: 1542517 - RNA, 19 nt, Artificial Sequence
  Description of Artificial Sequence: Synthetic oligonucleotide
gaaccguuucuucugugca

SEQ ID NO: 1542518 - RNA, 19 nt, Artificial Sequence
  Description of Artificial Sequence: Synthetic oligonucleotide
ccaaggagggguuaaauuc

SEQ ID NO: 1542519 - RNA, 19 nt, Artificial Sequence
  Description of Artificial Sequence: Synthetic oligonucleotide
gugguaucuaauuugcugu

SEQ ID NO: 1542520 - RNA, 19 nt, Artificial Sequence
  Description of Artificial Sequence: Synthetic oligonucleotide
gaugcguaugucauugauc

SEQ ID NO: 1542521 - RNA, 19 nt, Artificial Sequence
  Description of Artificial Sequence: Synthetic oligonucleotide
gacgaugcucggucagugg

SEQ ID NO: 1542522 - RNA, 19 nt, Artificial Sequence
  Description of Artificial Sequence: Synthetic oligonucleotide
agacugguggacgaugcuc

SEQ ID NO: 1542523 - RNA, 19 nt, Artificial Sequence
  Description of Artificial Sequence: Synthetic oligonucleotide
cuuaggauucugugcucag

SEQ ID NO: 1542524 - RNA, 19 nt, Artificial Sequence
  Description of Artificial Sequence: Synthetic oligonucleotide
cucucugggaaaguugagc

SEQ ID NO: 1542525 - RNA, 19 nt, Artificial Sequence
  Description of Artificial Sequence: Synthetic oligonucleotide
ugaccucuuuggaacagaa

SEQ ID NO: 1542526 - RNA, 19 nt, Artificial Sequence
  Description of Artificial Sequence: Synthetic oligonucleotide
uggguugaccucuuuggaa

SEQ ID NO: 1542527 - RNA, 19 nt, Artificial Sequence
  Description of Artificial Sequence: Synthetic oligonucleotide
auucucuauuaagaaguug

SEQ ID NO: 1542528 - RNA, 19 nt, Artificial Sequence
  Description of Artificial Sequence: Synthetic oligonucleotide
ucuuuguuuuggucguagu

SEQ ID NO: 1542529 - RNA, 19 nt, Artificial Sequence
  Description of Artificial Sequence: Synthetic oligonucleotide
ggcaagacggugcauuucc

SEQ ID NO: 1542530 - RNA, 19 nt, Artificial Sequence
  Description of Artificial Sequence: Synthetic oligonucleotide
uucgugcuuccccaugcgc

SEQ ID NO: 1542531 - RNA, 19 nt, Artificial Sequence
  Description of Artificial Sequence: Synthetic oligonucleotide
ugucgguauucucccagcu

SEQ ID NO: 1542532 - RNA, 19 nt, Artificial Sequence
  Description of Artificial Sequence: Synthetic oligonucleotide
aaccguuucuucugugcau

SEQ ID NO: 1542533 - RNA, 19 nt, Artificial Sequence
  Description of Artificial Sequence: Synthetic oligonucleotide
agaugcguaugucauugau

SEQ ID NO: 1542534 - RNA, 19 nt, Artificial Sequence
  Description of Artificial Sequence: Synthetic oligonucleotide
ugggaaaguugagcuaucc

SEQ ID NO: 1542535 - RNA, 19 nt, Artificial Sequence
  Description of Artificial Sequence: Synthetic oligonucleotide
uuuggucguaguguuugug

SEQ ID NO: 1542536 - RNA, 19 nt, Artificial Sequence
  Description of Artificial Sequence: Synthetic oligonucleotide
ugguguaaaauccguucuu

SEQ ID NO: 1542537 - RNA, 19 nt, Artificial Sequence
  Description of Artificial Sequence: Synthetic oligonucleotide
gaaaguugagcuauccacu

SEQ ID NO: 1542538 - RNA, 19 nt, Artificial Sequence
  Description of Artificial Sequence: Synthetic oligonucleotide
guauucucccagcucgccc

SEQ ID NO: 1542539 - RNA, 19 nt, Artificial Sequence
  Description of Artificial Sequence: Synthetic oligonucleotide
augcacuucaccugcuggu

SEQ ID NO: 1542540 - RNA, 19 nt, Artificial Sequence
  Description of Artificial Sequence: Synthetic oligonucleotide
agacucuaccuccggcagg

SEQ ID NO: 1542541 - RNA, 19 nt, Artificial Sequence
  Description of Artificial Sequence: Synthetic oligonucleotide
acaguguaagauauaacua

SEQ ID NO: 1542542 - RNA, 19 nt, Artificial Sequence
  Description of Artificial Sequence: Synthetic oligonucleotide
cuguacuuucucacaguac

SEQ ID NO: 1542543 - RNA, 19 nt, Artificial Sequence
  Description of Artificial Sequence: Synthetic oligonucleotide
cauuuggguaucuugcaaa

SEQ ID NO: 1542544 - RNA, 19 nt, Artificial Sequence
  Description of Artificial Sequence: Synthetic oligonucleotide
acuuuugccuguggguagg

SEQ ID NO: 1542545 - RNA, 19 nt, Artificial Sequence
  Description of Artificial Sequence: Synthetic oligonucleotide
aagaugcguaugucauuga

SEQ ID NO: 1542546 - RNA, 19 nt, Artificial Sequence
  Description of Artificial Sequence: Synthetic oligonucleotide
cuucaacucucugggaaag

SEQ ID NO: 1542547 - RNA, 19 nt, Artificial Sequence
  Description of Artificial Sequence: Synthetic oligonucleotide
guguaagauauaacuaauc

SEQ ID NO: 1542548 - RNA, 19 nt, Artificial Sequence
  Description of Artificial Sequence: Synthetic oligonucleotide
uugauuggucccaggcagu

SEQ ID NO: 1542549 - RNA, 19 nt, Artificial Sequence
  Description of Artificial Sequence: Synthetic oligonucleotide
cuuagccaucuuugugucc

SEQ ID NO: 1542550 - RNA, 19 nt, Artificial Sequence
  Description of Artificial Sequence: Synthetic oligonucleotide
ggucuugugaagcugugca

SEQ ID NO: 1542551 - RNA, 19 nt, Artificial Sequence
  Description of Artificial Sequence: Synthetic oligonucleotide
caccaugcacaccuucucc

SEQ ID NO: 1542552 - RNA, 19 nt, Artificial Sequence
  Description of Artificial Sequence: Synthetic oligonucleotide
gauucugugcucagguguc

SEQ ID NO: 1542553 - RNA, 19 nt, Artificial Sequence
  Description of Artificial Sequence: Synthetic oligonucleotide
cuguggguagggacaaaag

SEQ ID NO: 1542554 - RNA, 19 nt, Artificial Sequence
  Description of Artificial Sequence: Synthetic oligonucleotide
ggguugaccucuuuggaac

SEQ ID NO: 1542555 - RNA, 19 nt, Artificial Sequence
  Description of Artificial Sequence: Synthetic oligonucleotide
ugcauuuccuccuguccaa

SEQ ID NO: 1542556 - RNA, 19 nt, Artificial Sequence
  Description of Artificial Sequence: Synthetic oligonucleotide
ugguaucuaauuugcugua

SEQ ID NO: 1542557 - RNA, 19 nt, Artificial Sequence
  Description of Artificial Sequence: Synthetic oligonucleotide
ugauuggucccaggcagug

SEQ ID NO: 1542558 - RNA, 19 nt, Artificial Sequence
  Description of Artificial Sequence: Synthetic oligonucleotide
cugaacucucaggaacucg

SEQ ID NO: 1542559 - RNA, 19 nt, Artificial Sequence
  Description of Artificial Sequence: Synthetic oligonucleotide
gaugagccggccuggguca

SEQ ID NO: 1542560 - RNA, 19 nt, Artificial Sequence
  Description of Artificial Sequence: Synthetic oligonucleotide
ucuaccuccggcaggucuu

SEQ ID NO: 1542561 - RNA, 19 nt, Artificial Sequence
  Description of Artificial Sequence: Synthetic oligonucleotide
aaaauccguucuuccugaa

SEQ ID NO: 1542562 - RNA, 19 nt, Artificial Sequence
  Description of Artificial Sequence: Synthetic oligonucleotide
cagguacauccgaagcagg

SEQ ID NO: 1542563 - RNA, 19 nt, Artificial Sequence
  Description of Artificial Sequence: Synthetic oligonucleotide
guagggacaaaagguaguc

SEQ ID NO: 1542564 - RNA, 19 nt, Artificial Sequence
  Description of Artificial Sequence: Synthetic oligonucleotide
cuugagcacuugauugaac

SEQ ID NO: 1542565 - RNA, 19 nt, Artificial Sequence
  Description of Artificial Sequence: Synthetic oligonucleotide
uuuuggucguaguguuugu

SEQ ID NO: 1542566 - RNA, 19 nt, Artificial Sequence
  Description of Artificial Sequence: Synthetic oligonucleotide
uugaaccguuucuucugug

SEQ ID NO: 1542567 - RNA, 19 nt, Artificial Sequence
  Description of Artificial Sequence: Synthetic oligonucleotide
acuggcauacaaaggcaag

SEQ ID NO: 1542568 - RNA, 19 nt, Artificial Sequence
  Description of Artificial Sequence: Synthetic oligonucleotide
caacauaacaguguaagau

SEQ ID NO: 1542569 - RNA, 19 nt, Artificial Sequence
  Description of Artificial Sequence: Synthetic oligonucleotide
gaaccgugagcccgucucc

SEQ ID NO: 1542570 - RNA, 19 nt, Artificial Sequence
  Description of Artificial Sequence: Synthetic oligonucleotide
acgugcuccagguaaggaa

SEQ ID NO: 1542571 - RNA, 19 nt, Artificial Sequence
  Description of Artificial Sequence: Synthetic oligonucleotide
guaucuaauuugcuguagu

SEQ ID NO: 1542572 - RNA, 19 nt, Artificial Sequence
  Description of Artificial Sequence: Synthetic oligonucleotide
guucgugcuuccccaugcg

SEQ ID NO: 1542573 - RNA, 19 nt, Artificial Sequence
  Description of Artificial Sequence: Synthetic oligonucleotide
ugacgugcuccagguaagg

SEQ ID NO: 1542574 - RNA, 19 nt, Artificial Sequence
  Description of Artificial Sequence: Synthetic oligonucleotide
caguuguggaaccgugagc

SEQ ID NO: 1542575 - RNA, 19 nt, Artificial Sequence
  Description of Artificial Sequence: Synthetic oligonucleotide
agcucgcccauuuccucuc

SEQ ID NO: 1542576 - RNA, 19 nt, Artificial Sequence
  Description of Artificial Sequence: Synthetic oligonucleotide
ucgcccauuuccucuccag

SEQ ID NO: 1542577 - RNA, 19 nt, Artificial Sequence
  Description of Artificial Sequence: Synthetic oligonucleotide
agcccgucuccucccacac

SEQ ID NO: 1542578 - RNA, 19 nt, Artificial Sequence
  Description of Artificial Sequence: Synthetic oligonucleotide
acguggaugacgugcucca

SEQ ID NO: 1542579 - RNA, 19 nt, Artificial Sequence
  Description of Artificial Sequence: Synthetic oligonucleotide
cugucgguauucucccagc

SEQ ID NO: 1542580 - RNA, 19 nt, Artificial Sequence
  Description of Artificial Sequence: Synthetic oligonucleotide
ccaguuaauucagagauga

SEQ ID NO: 1542581 - RNA, 19 nt, Artificial Sequence
  Description of Artificial Sequence: Synthetic oligonucleotide
caaccccauggguacaaac

SEQ ID NO: 1542582 - RNA, 19 nt, Artificial Sequence
  Description of Artificial Sequence: Synthetic oligonucleotide
cagggacagauauacaucu

SEQ ID NO: 1542583 - RNA, 19 nt, Artificial Sequence
  Description of Artificial Sequence: Synthetic oligonucleotide
uucaccugcugguguaaaa

SEQ ID NO: 1542584 - RNA, 19 nt, Artificial Sequence
  Description of Artificial Sequence: Synthetic oligonucleotide
cacguggaugacgugcucc

SEQ ID NO: 1542585 - RNA, 19 nt, Artificial Sequence
  Description of Artificial Sequence: Synthetic oligonucleotide
guugaccucuuuggaacag

SEQ ID NO: 1542586 - RNA, 19 nt, Artificial Sequence
  Description of Artificial Sequence: Synthetic oligonucleotide
ugcguaugucauugaucug

SEQ ID NO: 1542587 - RNA, 19 nt, Artificial Sequence
  Description of Artificial Sequence: Synthetic oligonucleotide
auagaugaagagagcuugu

SEQ ID NO: 1542588 - RNA, 19 nt, Artificial Sequence
  Description of Artificial Sequence: Synthetic oligonucleotide
gaagguucuugagcacuug

SEQ ID NO: 1542589 - RNA, 19 nt, Artificial Sequence
  Description of Artificial Sequence: Synthetic oligonucleotide
gguguaaaauccguucuuc

SEQ ID NO: 1542590 - RNA, 19 nt, Artificial Sequence
  Description of Artificial Sequence: Synthetic oligonucleotide
uccuaauguggcugcuccu

SEQ ID NO: 1542591 - RNA, 19 nt, Artificial Sequence
  Description of Artificial Sequence: Synthetic oligonucleotide
guaccaggcucccauggga

SEQ ID NO: 1542592 - RNA, 19 nt, Artificial Sequence
  Description of Artificial Sequence: Synthetic oligonucleotide
guggacgaugcucggucag

SEQ ID NO: 1542593 - RNA, 19 nt, Artificial Sequence
  Description of Artificial Sequence: Synthetic oligonucleotide
agccaggguuccuaaugug

SEQ ID NO: 1542594 - RNA, 19 nt, Artificial Sequence
  Description of Artificial Sequence: Synthetic oligonucleotide
caguuugauuggucccagg

SEQ ID NO: 1542595 - RNA, 19 nt, Artificial Sequence
  Description of Artificial Sequence: Synthetic oligonucleotide
ucuccucccacacguggau

SEQ ID NO: 1542596 - RNA, 19 nt, Artificial Sequence
  Description of Artificial Sequence: Synthetic oligonucleotide
uugaucgccuuggugguau

SEQ ID NO: 1542597 - RNA, 19 nt, Artificial Sequence
  Description of Artificial Sequence: Synthetic oligonucleotide
gcguaugucauugaucuga

SEQ ID NO: 1542598 - RNA, 19 nt, Artificial Sequence
  Description of Artificial Sequence: Synthetic oligonucleotide
caaauccaguuaauucaga

SEQ ID NO: 1542599 - RNA, 19 nt, Artificial Sequence
  Description of Artificial Sequence: Synthetic oligonucleotide
ugggucauaguagcuggaa

SEQ ID NO: 1542600 - RNA, 19 nt, Artificial Sequence
  Description of Artificial Sequence: Synthetic oligonucleotide
aacaaccccauggguacaa

SEQ ID NO: 1542601 - RNA, 19 nt, Artificial Sequence
  Description of Artificial Sequence: Synthetic oligonucleotide
ggaaccgugagcccgucuc

SEQ ID NO: 1542602 - RNA, 19 nt, Artificial Sequence
  Description of Artificial Sequence: Synthetic oligonucleotide
gacuggcauacaaaggcaa

SEQ ID NO: 1542603 - RNA, 19 nt, Artificial Sequence
  Description of Artificial Sequence: Synthetic oligonucleotide
gacaguuguggaaccguga

SEQ ID NO: 1542604 - RNA, 19 nt, Artificial Sequence
  Description of Artificial Sequence: Synthetic oligonucleotide
ggguagggacaaaagguag

SEQ ID NO: 1542605 - RNA, 19 nt, Artificial Sequence
  Description of Artificial Sequence: Synthetic oligonucleotide
cucccaugggacucuccag

SEQ ID NO: 1542606 - RNA, 19 nt, Artificial Sequence
  Description of Artificial Sequence: Synthetic oligonucleotide
ucucguggcagagacucua

SEQ ID NO: 1542607 - RNA, 19 nt, Artificial Sequence
  Description of Artificial Sequence: Synthetic oligonucleotide
ucgccuuggugguaucuaa

SEQ ID NO: 1542608 - RNA, 19 nt, Artificial Sequence
  Description of Artificial Sequence: Synthetic oligonucleotide
ugaauaucuucaggccauc

SEQ ID NO: 1542609 - RNA, 19 nt, Artificial Sequence
  Description of Artificial Sequence: Synthetic oligonucleotide
gucgguauucucccagcuc

SEQ ID NO: 1542610 - RNA, 19 nt, Artificial Sequence
  Description of Artificial Sequence: Synthetic oligonucleotide
ggguacaaacacuugagau

SEQ ID NO: 1542611 - RNA, 19 nt, Artificial Sequence
  Description of Artificial Sequence: Synthetic oligonucleotide
gagcacuugauugaaccgu

SEQ ID NO: 1542612 - RNA, 19 nt, Artificial Sequence
  Description of Artificial Sequence: Synthetic oligonucleotide
aaccgugagcccgucuccu

SEQ ID NO: 1542613 - RNA, 19 nt, Artificial Sequence
  Description of Artificial Sequence: Synthetic oligonucleotide
ggaucagacaguuguggaa

SEQ ID NO: 1542614 - RNA, 19 nt, Artificial Sequence
  Description of Artificial Sequence: Synthetic oligonucleotide
augacgugcuccagguaag

SEQ ID NO: 1542615 - RNA, 19 nt, Artificial Sequence
  Description of Artificial Sequence: Synthetic oligonucleotide
uccuuaggauucugugcuc

SEQ ID NO: 1542616 - RNA, 19 nt, Artificial Sequence
  Description of Artificial Sequence: Synthetic oligonucleotide
accgugagcccgucuccuc

SEQ ID NO: 1542617 - RNA, 19 nt, Artificial Sequence
  Description of Artificial Sequence: Synthetic oligonucleotide
ggguuaaauuccugggauc

SEQ ID NO: 1542618 - RNA, 19 nt, Artificial Sequence
  Description of Artificial Sequence: Synthetic oligonucleotide
caggucacaaauccaguua

SEQ ID NO: 1542619 - RNA, 19 nt, Artificial Sequence
  Description of Artificial Sequence: Synthetic oligonucleotide
aggcaagacggugcauuuc

SEQ ID NO: 1542620 - RNA, 19 nt, Artificial Sequence
  Description of Artificial Sequence: Synthetic oligonucleotide
cucguggcagagacucuac

SEQ ID NO: 1542621 - RNA, 19 nt, Artificial Sequence
  Description of Artificial Sequence: Synthetic oligonucleotide
gggaucgucugcaacauaa

SEQ ID NO: 1542622 - RNA, 19 nt, Artificial Sequence
  Description of Artificial Sequence: Synthetic oligonucleotide
cuggguugaccucuuugga

SEQ ID NO: 1542623 - RNA, 19 nt, Artificial Sequence
  Description of Artificial Sequence: Synthetic oligonucleotide
aacucggcauggagaaggu

SEQ ID NO: 1542624 - RNA, 19 nt, Artificial Sequence
  Description of Artificial Sequence: Synthetic oligonucleotide
agcacucgaucucguggca

SEQ ID NO: 1542625 - RNA, 19 nt, Artificial Sequence
  Description of Artificial Sequence: Synthetic oligonucleotide
caugcgccccaacaggaga

SEQ ID NO: 1542626 - RNA, 19 nt, Artificial Sequence
  Description of Artificial Sequence: Synthetic oligonucleotide
gguaucuugcaaaugcacu

SEQ ID NO: 1542627 - RNA, 19 nt, Artificial Sequence
  Description of Artificial Sequence: Synthetic oligonucleotide
ccacacguggaugacgugc

SEQ ID NO: 1542628 - RNA, 19 nt, Artificial Sequence
  Description of Artificial Sequence: Synthetic oligonucleotide
uggacgaugcucggucagu

SEQ ID NO: 1542629 - RNA, 19 nt, Artificial Sequence
  Description of Artificial Sequence: Synthetic oligonucleotide
cacucgaucucguggcaga

SEQ ID NO: 1542630 - RNA, 19 nt, Artificial Sequence
  Description of Artificial Sequence: Synthetic oligonucleotide
agcagggacaggacuuuug

SEQ ID NO: 1542631 - RNA, 19 nt, Artificial Sequence
  Description of Artificial Sequence: Synthetic oligonucleotide
gugaauaucuucaggccau

SEQ ID NO: 1542632 - RNA, 19 nt, Artificial Sequence
  Description of Artificial Sequence: Synthetic oligonucleotide
ggacauagaugaagagagc

SEQ ID NO: 1542633 - RNA, 19 nt, Artificial Sequence
  Description of Artificial Sequence: Synthetic oligonucleotide
uccuguccaaggagggguu

SEQ ID NO: 1542634 - RNA, 19 nt, Artificial Sequence
  Description of Artificial Sequence: Synthetic oligonucleotide
gguugaccucuuuggaaca

SEQ ID NO: 1542635 - RNA, 19 nt, Artificial Sequence
  Description of Artificial Sequence: Synthetic oligonucleotide
ggcaguacuccuuagccau

SEQ ID NO: 1542636 - RNA, 19 nt, Artificial Sequence
  Description of Artificial Sequence: Synthetic oligonucleotide
ucggucaguggggcuguag

SEQ ID NO: 1542637 - RNA, 19 nt, Artificial Sequence
  Description of Artificial Sequence: Synthetic oligonucleotide
gacucuaccuccggcaggu

SEQ ID NO: 1542638 - RNA, 19 nt, Artificial Sequence
  Description of Artificial Sequence: Synthetic oligonucleotide
cucagucaacaaccccaug

SEQ ID NO: 1542639 - RNA, 19 nt, Artificial Sequence
  Description of Artificial Sequence: Synthetic oligonucleotide
ccuuagccaucuuuguguc

SEQ ID NO: 1542640 - RNA, 19 nt, Artificial Sequence
  Description of Artificial Sequence: Synthetic oligonucleotide
agcacuugauugaaccguu

SEQ ID NO: 1542641 - RNA, 19 nt, Artificial Sequence
  Description of Artificial Sequence: Synthetic oligonucleotide
gucacaaauccaguuaauu

SEQ ID NO: 1542642 - RNA, 19 nt, Artificial Sequence
  Description of Artificial Sequence: Synthetic oligonucleotide
uggaaccgugagcccgucu

SEQ ID NO: 1542643 - RNA, 19 nt, Artificial Sequence
  Description of Artificial Sequence: Synthetic oligonucleotide
gggguuaaauuccugggau

SEQ ID NO: 1542644 - RNA, 19 nt, Artificial Sequence
  Description of Artificial Sequence: Synthetic oligonucleotide
gcaaaugcacuguucccaa

SEQ ID NO: 1542645 - RNA, 19 nt, Artificial Sequence
  Description of Artificial Sequence: Synthetic oligonucleotide
gacgugcuccagguaagga

SEQ ID NO: 1542646 - RNA, 19 nt, Artificial Sequence
  Description of Artificial Sequence: Synthetic oligonucleotide
gcuagacugguggacgaug

SEQ ID NO: 1542647 - RNA, 19 nt, Artificial Sequence
  Description of Artificial Sequence: Synthetic oligonucleotide
gaagguugaucgccuuggu

SEQ ID NO: 1542648 - RNA, 19 nt, Artificial Sequence
  Description of Artificial Sequence: Synthetic oligonucleotide
gagcuauccacugcugagu

SEQ ID NO: 1542649 - RNA, 19 nt, Artificial Sequence
  Description of Artificial Sequence: Synthetic oligonucleotide
cucggugaugaugcacuuc

SEQ ID NO: 1542650 - RNA, 19 nt, Artificial Sequence
  Description of Artificial Sequence: Synthetic oligonucleotide
ugcgccccaacaggagagc

SEQ ID NO: 1542651 - RNA, 19 nt, Artificial Sequence
  Description of Artificial Sequence: Synthetic oligonucleotide
cagguaaggaauggccaga

SEQ ID NO: 1542652 - RNA, 19 nt, Artificial Sequence
  Description of Artificial Sequence: Synthetic oligonucleotide
cugcaacauaacaguguaa

SEQ ID NO: 1542653 - RNA, 19 nt, Artificial Sequence
  Description of Artificial Sequence: Synthetic oligonucleotide
ggacgaugcucggucagug

SEQ ID NO: 1542654 - RNA, 19 nt, Artificial Sequence
  Description of Artificial Sequence: Synthetic oligonucleotide
cacacguggaugacgugcu

SEQ ID NO: 1542655 - RNA, 19 nt, Artificial Sequence
  Description of Artificial Sequence: Synthetic oligonucleotide
guuaaauuccugggaucgu

SEQ ID NO: 1542656 - RNA, 19 nt, Artificial Sequence
  Description of Artificial Sequence: Synthetic oligonucleotide
cagacccuugaaauucucu

SEQ ID NO: 1542657 - RNA, 19 nt, Artificial Sequence
  Description of Artificial Sequence: Synthetic oligonucleotide
aucgccuuggugguaucua

SEQ ID NO: 1542658 - RNA, 19 nt, Artificial Sequence
  Description of Artificial Sequence: Synthetic oligonucleotide
agauguggacauagaugaa

SEQ ID NO: 1542659 - RNA, 19 nt, Artificial Sequence
  Description of Artificial Sequence: Synthetic oligonucleotide
ggugacagguacauccgaa

SEQ ID NO: 1542660 - RNA, 19 nt, Artificial Sequence
  Description of Artificial Sequence: Synthetic oligonucleotide
cucuguacuuucucacagu

SEQ ID NO: 1542661 - RNA, 19 nt, Artificial Sequence
  Description of Artificial Sequence: Synthetic oligonucleotide
guacuccuuagccaucuuu

SEQ ID NO: 1542662 - RNA, 19 nt, Artificial Sequence
  Description of Artificial Sequence: Synthetic oligonucleotide
ggaucgucugcaacauaac

SEQ ID NO: 1542663 - RNA, 19 nt, Artificial Sequence
  Description of Artificial Sequence: Synthetic oligonucleotide
gguggacgaugcucgguca

SEQ ID NO: 1542664 - RNA, 19 nt, Artificial Sequence
  Description of Artificial Sequence: Synthetic oligonucleotide
cgaugcucggucagugggg

SEQ ID NO: 1542665 - RNA, 19 nt, Artificial Sequence
  Description of Artificial Sequence: Synthetic oligonucleotide
gucuccucccacacgugga

SEQ ID NO: 1542666 - RNA, 19 nt, Artificial Sequence
  Description of Artificial Sequence: Synthetic oligonucleotide
gguugaucgccuugguggu

SEQ ID NO: 1542667 - RNA, 19 nt, Artificial Sequence
  Description of Artificial Sequence: Synthetic oligonucleotide
cugcugguguaaaauccgu

SEQ ID NO: 1542668 - RNA, 19 nt, Artificial Sequence
  Description of Artificial Sequence: Synthetic oligonucleotide
gguagggacaaaagguagu

SEQ ID NO: 1542669 - RNA, 19 nt, Artificial Sequence
  Description of Artificial Sequence: Synthetic oligonucleotide
ccguucuuccugaacucuc

SEQ ID NO: 1542670 - RNA, 19 nt, Artificial Sequence
  Description of Artificial Sequence: Synthetic oligonucleotide
cugcugaguccuuaggauu

SEQ ID NO: 1542671 - RNA, 19 nt, Artificial Sequence
  Description of Artificial Sequence: Synthetic oligonucleotide
gcacucgaucucguggcag

SEQ ID NO: 1542672 - RNA, 19 nt, Artificial Sequence
  Description of Artificial Sequence: Synthetic oligonucleotide
gggugacagguacauccga

SEQ ID NO: 1542673 - RNA, 19 nt, Artificial Sequence
  Description of Artificial Sequence: Synthetic oligonucleotide
ccaugcgccccaacaggag

SEQ ID NO: 1542674 - RNA, 19 nt, Artificial Sequence
  Description of Artificial Sequence: Synthetic oligonucleotide
caggugucggcuggguuga

SEQ ID NO: 1542675 - RNA, 19 nt, Artificial Sequence
  Description of Artificial Sequence: Synthetic oligonucleotide
ccgugagcccgucuccucc

SEQ ID NO: 1542676 - RNA, 19 nt, Artificial Sequence
  Description of Artificial Sequence: Synthetic oligonucleotide
ggugucggcuggguugacc

SEQ ID NO: 1542677 - RNA, 19 nt, Artificial Sequence
  Description of Artificial Sequence: Synthetic oligonucleotide
ucggcuggguugaccucuu

SEQ ID NO: 1542678 - RNA, 19 nt, Artificial Sequence
  Description of Artificial Sequence: Synthetic oligonucleotide
agggacagauauacaucuu

SEQ ID NO: 1542679 - RNA, 19 nt, Artificial Sequence
  Description of Artificial Sequence: Synthetic oligonucleotide
gcacaccaugcacaccuuc

SEQ ID NO: 1542680 - RNA, 19 nt, Artificial Sequence
  Description of Artificial Sequence: Synthetic oligonucleotide
guagaagguugaucgccuu

SEQ ID NO: 1542681 - RNA, 19 nt, Artificial Sequence
  Description of Artificial Sequence: Synthetic oligonucleotide
gaucgccuuggugguaucu

SEQ ID NO: 1542682 - RNA, 19 nt, Artificial Sequence
  Description of Artificial Sequence: Synthetic oligonucleotide
cuaccuccggcaggucuuc

SEQ ID NO: 1542683 - RNA, 19 nt, Artificial Sequence
  Description of Artificial Sequence: Synthetic oligonucleotide
gucggcuggguugaccucu

SEQ ID NO: 1542684 - RNA, 19 nt, Artificial Sequence
  Description of Artificial Sequence: Synthetic oligonucleotide
caguacuccuuagccaucu

SEQ ID NO: 1542685 - RNA, 19 nt, Artificial Sequence
  Description of Artificial Sequence: Synthetic oligonucleotide
cucgaucucguggcagaga

SEQ ID NO: 1542686 - RNA, 19 nt, Artificial Sequence
  Description of Artificial Sequence: Synthetic oligonucleotide
ccagacccuugaaauucuc

SEQ ID NO: 1542687 - RNA, 19 nt, Artificial Sequence
  Description of Artificial Sequence: Synthetic oligonucleotide
cagcaaugccaggucacaa

SEQ ID NO: 1542688 - RNA, 19 nt, Artificial Sequence
  Description of Artificial Sequence: Synthetic oligonucleotide
cucgcccauuuccucucca

SEQ ID NO: 1542689 - RNA, 19 nt, Artificial Sequence
  Description of Artificial Sequence: Synthetic oligonucleotide
caguuaauucagagaugau

SEQ ID NO: 1542690 - RNA, 19 nt, Artificial Sequence
  Description of Artificial Sequence: Synthetic oligonucleotide
gugagcccgucuccuccca

SEQ ID NO: 1542691 - RNA, 19 nt, Artificial Sequence
  Description of Artificial Sequence: Synthetic oligonucleotide
gccggccugggucauagua

SEQ ID NO: 1542692 - RNA, 19 nt, Artificial Sequence
  Description of Artificial Sequence: Synthetic oligonucleotide
cuucaccugcugguguaaa

SEQ ID NO: 1542693 - RNA, 19 nt, Artificial Sequence
  Description of Artificial Sequence: Synthetic oligonucleotide
caaaugcacuguucccaau

SEQ ID NO: 1542694 - RNA, 19 nt, Artificial Sequence
  Description of Artificial Sequence: Synthetic oligonucleotide
acucggcauggagaagguu

SEQ ID NO: 1542695 - RNA, 19 nt, Artificial Sequence
  Description of Artificial Sequence: Synthetic oligonucleotide
gccccaacaggagagcucu

SEQ ID NO: 1542696 - RNA, 19 nt, Artificial Sequence
  Description of Artificial Sequence: Synthetic oligonucleotide
aggugucggcuggguugac

SEQ ID NO: 1542697 - RNA, 19 nt, Artificial Sequence
  Description of Artificial Sequence: Synthetic oligonucleotide
gcucgcccauuuccucucc

SEQ ID NO: 1542698 - RNA, 19 nt, Artificial Sequence
  Description of Artificial Sequence: Synthetic oligonucleotide
guugaucgccuugguggua

SEQ ID NO: 1542699 - RNA, 19 nt, Artificial Sequence
  Description of Artificial Sequence: Synthetic oligonucleotide
ccgaagcagggacagauau

SEQ ID NO: 1542700 - RNA, 19 nt, Artificial Sequence
  Description of Artificial Sequence: Synthetic oligonucleotide
cggugcauuuccuccuguc

SEQ ID NO: 1542701 - RNA, 19 nt, Artificial Sequence
  Description of Artificial Sequence: Synthetic oligonucleotide
ccaggucacaaauccaguu

SEQ ID NO: 1542702 - RNA, 19 nt, Artificial Sequence
  Description of Artificial Sequence: Synthetic oligonucleotide
cagaugagccggccugggu

SEQ ID NO: 1542703 - RNA, 19 nt, Artificial Sequence
  Description of Artificial Sequence: Synthetic oligonucleotide
ugagccggccugggucaua

SEQ ID NO: 1542704 - RNA, 19 nt, Artificial Sequence
  Description of Artificial Sequence: Synthetic oligonucleotide
agccggccugggucauagu

SEQ ID NO: 1542705 - RNA, 19 nt, Artificial Sequence
  Description of Artificial Sequence: Synthetic oligonucleotide
augagccggccugggucau

SEQ ID NO: 1542706 - RNA, 19 nt, Artificial Sequence
  Description of Artificial Sequence: Synthetic oligonucleotide
cccacacguggaugacgug

SEQ ID NO: 1542707 - RNA, 19 nt, Artificial Sequence
  Description of Artificial Sequence: Synthetic oligonucleotide
ggcucccaugggacucucc

SEQ ID NO: 1542708 - RNA, 19 nt, Artificial Sequence
  Description of Artificial Sequence: Synthetic oligonucleotide
cgccccaacaggagagcuc

SEQ ID NO: 1542709 - RNA, 19 nt, Artificial Sequence
  Description of Artificial Sequence: Synthetic oligonucleotide
ccgucuccucccacacgug

SEQ ID NO: 1542710 - RNA, 19 nt, Artificial Sequence
  Description of Artificial Sequence: Synthetic oligonucleotide
gcaagacggugcauuuccu

SEQ ID NO: 1542711 - RNA, 19 nt, Artificial Sequence
  Description of Artificial Sequence: Synthetic oligonucleotide
ccuaauguggcugcuccuu

SEQ ID NO: 1542712 - RNA, 19 nt, Artificial Sequence
  Description of Artificial Sequence: Synthetic oligonucleotide
gccagacccuugaaauucu

SEQ ID NO: 1542713 - RNA, 19 nt, Artificial Sequence
  Description of Artificial Sequence: Synthetic oligonucleotide
caggcucccaugggacucu

SEQ ID NO: 1542714 - RNA, 19 nt, Artificial Sequence
  Description of Artificial Sequence: Synthetic oligonucleotide
ggucuucagugaauaucuu

SEQ ID NO: 1542715 - RNA, 19 nt, Artificial Sequence
  Description of Artificial Sequence: Synthetic oligonucleotide
gcgccccaacaggagagcu

SEQ ID NO: 1542716 - RNA, 19 nt, Artificial Sequence
  Description of Artificial Sequence: Synthetic oligonucleotide
cccaacaggagagcucuuu

SEQ ID NO: 1542717 - RNA, 19 nt, Artificial Sequence
  Description of Artificial Sequence: Synthetic oligonucleotide
cagcagggacaggacuuuu

SEQ ID NO: 1542718 - RNA, 19 nt, Artificial Sequence
  Description of Artificial Sequence: Synthetic oligonucleotide
cgaucucguggcagagacu

SEQ ID NO: 1542719 - RNA, 19 nt, Artificial Sequence
  Description of Artificial Sequence: Synthetic oligonucleotide
cggcaggucuucagugaau

SEQ ID NO: 1542720 - RNA, 19 nt, Artificial Sequence
  Description of Artificial Sequence: Synthetic oligonucleotide
ccacuccauuuggguaucu

SEQ ID NO: 1542721 - RNA, 19 nt, Artificial Sequence
  Description of Artificial Sequence: Synthetic oligonucleotide
agacaaggcacauacaccc

SEQ ID NO: 1542722 - RNA, 19 nt, Artificial Sequence
  Description of Artificial Sequence: Synthetic oligonucleotide
aacuagcacaucucgaggc

SEQ ID NO: 1542723 - RNA, 19 nt, Artificial Sequence
  Description of Artificial Sequence: Synthetic oligonucleotide
aagggaaacagauuaucag

SEQ ID NO: 1542724 - RNA, 19 nt, Artificial Sequence
  Description of Artificial Sequence: Synthetic oligonucleotide
aaacagguuggucccaagc

SEQ ID NO: 1542725 - RNA, 19 nt, Artificial Sequence
  Description of Artificial Sequence: Synthetic oligonucleotide
accacaacgauugucaggc

SEQ ID NO: 1542726 - RNA, 19 nt, Artificial Sequence
  Description of Artificial Sequence: Synthetic oligonucleotide
aaaguauaauucaagugag

SEQ ID NO: 1542727 - RNA, 19 nt, Artificial Sequence
  Description of Artificial Sequence: Synthetic oligonucleotide
ucgccaauaagccugcacg

SEQ ID NO: 1542728 - RNA, 19 nt, Artificial Sequence
  Description of Artificial Sequence: Synthetic oligonucleotide
aaacagauuaucagaggcc

SEQ ID NO: 1542729 - RNA, 19 nt, Artificial Sequence
  Description of Artificial Sequence: Synthetic oligonucleotide
ucuaauuuacuugagauuu

SEQ ID NO: 1542730 - RNA, 19 nt, Artificial Sequence
  Description of Artificial Sequence: Synthetic oligonucleotide
aaugcugagugcauguagc

SEQ ID NO: 1542731 - RNA, 19 nt, Artificial Sequence
  Description of Artificial Sequence: Synthetic oligonucleotide
uguuggucacuauagggcg

SEQ ID NO: 1542732 - RNA, 19 nt, Artificial Sequence
  Description of Artificial Sequence: Synthetic oligonucleotide
aaucaaauggcagccaaag

SEQ ID NO: 1542733 - RNA, 19 nt, Artificial Sequence
  Description of Artificial Sequence: Synthetic oligonucleotide
aaagcuuacucuccuaagu

SEQ ID NO: 1542734 - RNA, 19 nt, Artificial Sequence
  Description of Artificial Sequence: Synthetic oligonucleotide
ugcaaguagaaacaagcca

SEQ ID NO: 1542735 - RNA, 19 nt, Artificial Sequence
  Description of Artificial Sequence: Synthetic oligonucleotide
auuuacuugagauuucaga

SEQ ID NO: 1542736 - RNA, 19 nt, Artificial Sequence
  Description of Artificial Sequence: Synthetic oligonucleotide
uugucuucgccaauaagcc

SEQ ID NO: 1542737 - RNA, 19 nt, Artificial Sequence
  Description of Artificial Sequence: Synthetic oligonucleotide
caaauggcagccaaagagg

SEQ ID NO: 1542738 - RNA, 19 nt, Artificial Sequence
  Description of Artificial Sequence: Synthetic oligonucleotide
acuggaucgaaaucucagc

SEQ ID NO: 1542739 - RNA, 19 nt, Artificial Sequence
  Description of Artificial Sequence: Synthetic oligonucleotide
aaaucucagcgccgaaccc

SEQ ID NO: 1542740 - RNA, 19 nt, Artificial Sequence
  Description of Artificial Sequence: Synthetic oligonucleotide
acgauugucaggccaaugg

SEQ ID NO: 1542741 - RNA, 19 nt, Artificial Sequence
  Description of Artificial Sequence: Synthetic oligonucleotide
aguauaauucaagugagga

SEQ ID NO: 1542742 - RNA, 19 nt, Artificial Sequence
  Description of Artificial Sequence: Synthetic oligonucleotide
guugucuucgccaauaagc

SEQ ID NO: 1542743 - RNA, 19 nt, Artificial Sequence
  Description of Artificial Sequence: Synthetic oligonucleotide
gaaaucucagcgccgaacc

SEQ ID NO: 1542744 - RNA, 19 nt, Artificial Sequence
  Description of Artificial Sequence: Synthetic oligonucleotide
agggguaugaaccacggug

SEQ ID NO: 1542745 - RNA, 19 nt, Artificial Sequence
  Description of Artificial Sequence: Synthetic oligonucleotide
aagcuuacucuccuaagug

SEQ ID NO: 1542746 - RNA, 19 nt, Artificial Sequence
  Description of Artificial Sequence: Synthetic oligonucleotide
guaugaaccacgguggugg

SEQ ID NO: 1542747 - RNA, 19 nt, Artificial Sequence
  Description of Artificial Sequence: Synthetic oligonucleotide
aacagauuaucagaggcca

SEQ ID NO: 1542748 - RNA, 19 nt, Artificial Sequence
  Description of Artificial Sequence: Synthetic oligonucleotide
uggcgagacaggcagacgg

SEQ ID NO: 1542749 - RNA, 19 nt, Artificial Sequence
  Description of Artificial Sequence: Synthetic oligonucleotide
ugcaaaaugcagccaaccc

SEQ ID NO: 1542750 - RNA, 19 nt, Artificial Sequence
  Description of Artificial Sequence: Synthetic oligonucleotide
acaucuuauacagacagca

SEQ ID NO: 1542751 - RNA, 19 nt, Artificial Sequence
  Description of Artificial Sequence: Synthetic oligonucleotide
agcccugguauguuggucc

SEQ ID NO: 1542752 - RNA, 19 nt, Artificial Sequence
  Description of Artificial Sequence: Synthetic oligonucleotide
uaagggguaugaaccacgg

SEQ ID NO: 1542753 - RNA, 19 nt, Artificial Sequence
  Description of Artificial Sequence: Synthetic oligonucleotide
ucacuauagggcguggucg

SEQ ID NO: 1542754 - RNA, 19 nt, Artificial Sequence
  Description of Artificial Sequence: Synthetic oligonucleotide
cuggaucgaaaucucagcg

SEQ ID NO: 1542755 - RNA, 19 nt, Artificial Sequence
  Description of Artificial Sequence: Synthetic oligonucleotide
gauugucaggccaauggcg

SEQ ID NO: 1542756 - RNA, 19 nt, Artificial Sequence
  Description of Artificial Sequence: Synthetic oligonucleotide
ucuccuaagugugacaggc

SEQ ID NO: 1542757 - RNA, 19 nt, Artificial Sequence
  Description of Artificial Sequence: Synthetic oligonucleotide
acaggguuagacaaggcac

SEQ ID NO: 1542758 - RNA, 19 nt, Artificial Sequence
  Description of Artificial Sequence: Synthetic oligonucleotide
ggaaccagggauuucaacc

SEQ ID NO: 1542759 - RNA, 19 nt, Artificial Sequence
  Description of Artificial Sequence: Synthetic oligonucleotide
uguuucuaauuuacuugag

SEQ ID NO: 1542760 - RNA, 19 nt, Artificial Sequence
  Description of Artificial Sequence: Synthetic oligonucleotide
gguuagacaaggcacauac

SEQ ID NO: 1542761 - RNA, 19 nt, Artificial Sequence
  Description of Artificial Sequence: Synthetic oligonucleotide
aaguauaauucaagugagg

SEQ ID NO: 1542762 - RNA, 19 nt, Artificial Sequence
  Description of Artificial Sequence: Synthetic oligonucleotide
gguguuggucacuauaggg

SEQ ID NO: 1542763 - RNA, 19 nt, Artificial Sequence
  Description of Artificial Sequence: Synthetic oligonucleotide
aaucagggcaggacaaugg

SEQ ID NO: 1542764 - RNA, 19 nt, Artificial Sequence
  Description of Artificial Sequence: Synthetic oligonucleotide
uccaaacccugacaugggg

SEQ ID NO: 1542765 - RNA, 19 nt, Artificial Sequence
  Description of Artificial Sequence: Synthetic oligonucleotide
uggaaaaucuggccuccgg

SEQ ID NO: 1542766 - RNA, 19 nt, Artificial Sequence
  Description of Artificial Sequence: Synthetic oligonucleotide
augcugagugcauguagcc

SEQ ID NO: 1542767 - RNA, 19 nt, Artificial Sequence
  Description of Artificial Sequence: Synthetic oligonucleotide
acauacaccccagagagca

SEQ ID NO: 1542768 - RNA, 19 nt, Artificial Sequence
  Description of Artificial Sequence: Synthetic oligonucleotide
ugaaccacgguggugguug

SEQ ID NO: 1542769 - RNA, 19 nt, Artificial Sequence
  Description of Artificial Sequence: Synthetic oligonucleotide
ugguguuggucacuauagg

SEQ ID NO: 1542770 - RNA, 19 nt, Artificial Sequence
  Description of Artificial Sequence: Synthetic oligonucleotide
agguuauccuccaggaacc

SEQ ID NO: 1542771 - RNA, 19 nt, Artificial Sequence
  Description of Artificial Sequence: Synthetic oligonucleotide
uugccuaguggcaggagcc

SEQ ID NO: 1542772 - RNA, 19 nt, Artificial Sequence
  Description of Artificial Sequence: Synthetic oligonucleotide
uggaucgaaaucucagcgc

SEQ ID NO: 1542773 - RNA, 19 nt, Artificial Sequence
  Description of Artificial Sequence: Synthetic oligonucleotide
agaaacaagccaugguaga

SEQ ID NO: 1542774 - RNA, 19 nt, Artificial Sequence
  Description of Artificial Sequence: Synthetic oligonucleotide
aaacaagccaugguagaca

SEQ ID NO: 1542775 - RNA, 19 nt, Artificial Sequence
  Description of Artificial Sequence: Synthetic oligonucleotide
uuaucagaggccagguuau

SEQ ID NO: 1542776 - RNA, 19 nt, Artificial Sequence
  Description of Artificial Sequence: Synthetic oligonucleotide
aauaagccugcacggcuca

SEQ ID NO: 1542777 - RNA, 19 nt, Artificial Sequence
  Description of Artificial Sequence: Synthetic oligonucleotide
ggaaauaccuccuacccca

SEQ ID NO: 1542778 - RNA, 19 nt, Artificial Sequence
  Description of Artificial Sequence: Synthetic oligonucleotide
ggaucgaaaucucagcgcc

SEQ ID NO: 1542779 - RNA, 19 nt, Artificial Sequence
  Description of Artificial Sequence: Synthetic oligonucleotide
uucaaccucacaccaacua

SEQ ID NO: 1542780 - RNA, 19 nt, Artificial Sequence
  Description of Artificial Sequence: Synthetic oligonucleotide
uauagggcguggucggcgg

SEQ ID NO: 1542781 - RNA, 19 nt, Artificial Sequence
  Description of Artificial Sequence: Synthetic oligonucleotide
guuugugccuaccugguca

SEQ ID NO: 1542782 - RNA, 19 nt, Artificial Sequence
  Description of Artificial Sequence: Synthetic oligonucleotide
cuugccuaguggcaggagc

SEQ ID NO: 1542783 - RNA, 19 nt, Artificial Sequence
  Description of Artificial Sequence: Synthetic oligonucleotide
auguaggccggauuguaug

SEQ ID NO: 1542784 - RNA, 19 nt, Artificial Sequence
  Description of Artificial Sequence: Synthetic oligonucleotide
gaucagguugucuucgcca

SEQ ID NO: 1542785 - RNA, 19 nt, Artificial Sequence
  Description of Artificial Sequence: Synthetic oligonucleotide
agagcaguaaagaacugca

SEQ ID NO: 1542786 - RNA, 19 nt, Artificial Sequence
  Description of Artificial Sequence: Synthetic oligonucleotide
cacuauagggcguggucgg

SEQ ID NO: 1542787 - RNA, 19 nt, Artificial Sequence
  Description of Artificial Sequence: Synthetic oligonucleotide
aggaaccagggauuucaac

SEQ ID NO: 1542788 - RNA, 19 nt, Artificial Sequence
  Description of Artificial Sequence: Synthetic oligonucleotide
aggccccuugccuaguggc

SEQ ID NO: 1542789 - RNA, 19 nt, Artificial Sequence
  Description of Artificial Sequence: Synthetic oligonucleotide
agucgcuccaaacccugac

SEQ ID NO: 1542790 - RNA, 19 nt, Artificial Sequence
  Description of Artificial Sequence: Synthetic oligonucleotide
caacuagcacaucucgagg

SEQ ID NO: 1542791 - RNA, 19 nt, Artificial Sequence
  Description of Artificial Sequence: Synthetic oligonucleotide
guaagggguaugaaccacg

SEQ ID NO: 1542792 - RNA, 19 nt, Artificial Sequence
  Description of Artificial Sequence: Synthetic oligonucleotide
cugcaugccacucacucac

SEQ ID NO: 1542793 - RNA, 19 nt, Artificial Sequence
  Description of Artificial Sequence: Synthetic oligonucleotide
aggagucacaggguuagac

SEQ ID NO: 1542794 - RNA, 19 nt, Artificial Sequence
  Description of Artificial Sequence: Synthetic oligonucleotide
ucggcggcacaucuuauac

SEQ ID NO: 1542795 - RNA, 19 nt, Artificial Sequence
  Description of Artificial Sequence: Synthetic oligonucleotide
aggcacauacaccccagag

SEQ ID NO: 1542796 - RNA, 19 nt, Artificial Sequence
  Description of Artificial Sequence: Synthetic oligonucleotide
agcacaucagagcagcaau

SEQ ID NO: 1542797 - RNA, 19 nt, Artificial Sequence
  Description of Artificial Sequence: Synthetic oligonucleotide
acagcauaugacgauggug

SEQ ID NO: 1542798 - RNA, 19 nt, Artificial Sequence
  Description of Artificial Sequence: Synthetic oligonucleotide
uaagugugacaggccaugg

SEQ ID NO: 1542799 - RNA, 19 nt, Artificial Sequence
  Description of Artificial Sequence: Synthetic oligonucleotide
gugguguuggucacuauag

SEQ ID NO: 1542800 - RNA, 19 nt, Artificial Sequence
  Description of Artificial Sequence: Synthetic oligonucleotide
caaacccugacaugggguc

SEQ ID NO: 1542801 - RNA, 19 nt, Artificial Sequence
  Description of Artificial Sequence: Synthetic oligonucleotide
auggggucacugucaaaac

SEQ ID NO: 1542802 - RNA, 19 nt, Artificial Sequence
  Description of Artificial Sequence: Synthetic oligonucleotide
aacccugacauggggucac

SEQ ID NO: 1542803 - RNA, 19 nt, Artificial Sequence
  Description of Artificial Sequence: Synthetic oligonucleotide
ugguauguugguccagggu

SEQ ID NO: 1542804 - RNA, 19 nt, Artificial Sequence
  Description of Artificial Sequence: Synthetic oligonucleotide
acuagcacaucucgaggca

SEQ ID NO: 1542805 - RNA, 19 nt, Artificial Sequence
  Description of Artificial Sequence: Synthetic oligonucleotide
guacagcauaugacgaugg

SEQ ID NO: 1542806 - RNA, 19 nt, Artificial Sequence
  Description of Artificial Sequence: Synthetic oligonucleotide
uucgccaauaagccugcac

SEQ ID NO: 1542807 - RNA, 19 nt, Artificial Sequence
  Description of Artificial Sequence: Synthetic oligonucleotide
cauaugacgaugguggcga

SEQ ID NO: 1542808 - RNA, 19 nt, Artificial Sequence
  Description of Artificial Sequence: Synthetic oligonucleotide
gaucgaaaucucagcgccg

SEQ ID NO: 1542809 - RNA, 19 nt, Artificial Sequence
  Description of Artificial Sequence: Synthetic oligonucleotide
caccacaacgauugucagg

SEQ ID NO: 1542810 - RNA, 19 nt, Artificial Sequence
  Description of Artificial Sequence: Synthetic oligonucleotide
uacagcauaugacgauggu

SEQ ID NO: 1542811 - RNA, 19 nt, Artificial Sequence
  Description of Artificial Sequence: Synthetic oligonucleotide
caugguagacagaggcccc

SEQ ID NO: 1542812 - RNA, 19 nt, Artificial Sequence
  Description of Artificial Sequence: Synthetic oligonucleotide
ucgcuccaaacccugacau

SEQ ID NO: 1542813 - RNA, 19 nt, Artificial Sequence
  Description of Artificial Sequence: Synthetic oligonucleotide
aggagucagguauucuaug

SEQ ID NO: 1542814 - RNA, 19 nt, Artificial Sequence
  Description of Artificial Sequence: Synthetic oligonucleotide
guauguugguccaggguag

SEQ ID NO: 1542815 - RNA, 19 nt, Artificial Sequence
  Description of Artificial Sequence: Synthetic oligonucleotide
auaauucaagugaggaaga

SEQ ID NO: 1542816 - RNA, 19 nt, Artificial Sequence
  Description of Artificial Sequence: Synthetic oligonucleotide
ucagugcacacauucucau

SEQ ID NO: 1542817 - RNA, 19 nt, Artificial Sequence
  Description of Artificial Sequence: Synthetic oligonucleotide
gaaaaucuggccuccggcu

SEQ ID NO: 1542818 - RNA, 19 nt, Artificial Sequence
  Description of Artificial Sequence: Synthetic oligonucleotide
gguauguugguccagggua

SEQ ID NO: 1542819 - RNA, 19 nt, Artificial Sequence
  Description of Artificial Sequence: Synthetic oligonucleotide
cagguauucuaugaagcug

SEQ ID NO: 1542820 - RNA, 19 nt, Artificial Sequence
  Description of Artificial Sequence: Synthetic oligonucleotide
ugucuucgccaauaagccu

SEQ ID NO: 1542821 - RNA, 19 nt, Artificial Sequence
  Description of Artificial Sequence: Synthetic oligonucleotide
cugacauggggucacuguc

SEQ ID NO: 1542822 - RNA, 19 nt, Artificial Sequence
  Description of Artificial Sequence: Synthetic oligonucleotide
acugcaaaaugcagccaac

SEQ ID NO: 1542823 - RNA, 19 nt, Artificial Sequence
  Description of Artificial Sequence: Synthetic oligonucleotide
caauaagccugcacggcuc

SEQ ID NO: 1542824 - RNA, 19 nt, Artificial Sequence
  Description of Artificial Sequence: Synthetic oligonucleotide
accucacaccaacuagcac

SEQ ID NO: 1542825 - RNA, 19 nt, Artificial Sequence
  Description of Artificial Sequence: Synthetic oligonucleotide
cuugagauuucagaaagua

SEQ ID NO: 1542826 - RNA, 19 nt, Artificial Sequence
  Description of Artificial Sequence: Synthetic oligonucleotide
cugcaaaaugcagccaacc

SEQ ID NO: 1542827 - RNA, 19 nt, Artificial Sequence
  Description of Artificial Sequence: Synthetic oligonucleotide
uuacucuccuaagugugac

SEQ ID NO: 1542828 - RNA, 19 nt, Artificial Sequence
  Description of Artificial Sequence: Synthetic oligonucleotide
ggcuaaaaguaaaaccaag

SEQ ID NO: 1542829 - RNA, 19 nt, Artificial Sequence
  Description of Artificial Sequence: Synthetic oligonucleotide
gggguaugaaccacggugg

SEQ ID NO: 1542830 - RNA, 19 nt, Artificial Sequence
  Description of Artificial Sequence: Synthetic oligonucleotide
cugguauguugguccaggg

SEQ ID NO: 1542831 - RNA, 19 nt, Artificial Sequence
  Description of Artificial Sequence: Synthetic oligonucleotide
uccggcucagugcacacau

SEQ ID NO: 1542832 - RNA, 19 nt, Artificial Sequence
  Description of Artificial Sequence: Synthetic oligonucleotide
aucagguugucuucgccaa

SEQ ID NO: 1542833 - RNA, 19 nt, Artificial Sequence
  Description of Artificial Sequence: Synthetic oligonucleotide
aaccucacaccaacuagca

SEQ ID NO: 1542834 - RNA, 19 nt, Artificial Sequence
  Description of Artificial Sequence: Synthetic oligonucleotide
cacaggguuagacaaggca

SEQ ID NO: 1542835 - RNA, 19 nt, Artificial Sequence
  Description of Artificial Sequence: Synthetic oligonucleotide
aaggcacauacaccccaga

SEQ ID NO: 1542836 - RNA, 19 nt, Artificial Sequence
  Description of Artificial Sequence: Synthetic oligonucleotide
aacgauugucaggccaaug

SEQ ID NO: 1542837 - RNA, 19 nt, Artificial Sequence
  Description of Artificial Sequence: Synthetic oligonucleotide
gggaaauaccuccuacccc

SEQ ID NO: 1542838 - RNA, 19 nt, Artificial Sequence
  Description of Artificial Sequence: Synthetic oligonucleotide
agauuaucagaggccaggu

SEQ ID NO: 1542839 - RNA, 19 nt, Artificial Sequence
  Description of Artificial Sequence: Synthetic oligonucleotide
uaccccaauguuucuaauu

SEQ ID NO: 1542840 - RNA, 19 nt, Artificial Sequence
  Description of Artificial Sequence: Synthetic oligonucleotide
cuuggggugaacugggaaa

SEQ ID NO: 1542841 - RNA, 19 nt, Artificial Sequence
  Description of Artificial Sequence: Synthetic oligonucleotide
cuccaaacccugacauggg

SEQ ID NO: 1542842 - RNA, 19 nt, Artificial Sequence
  Description of Artificial Sequence: Synthetic oligonucleotide
aagggguaugaaccacggu

SEQ ID NO: 1542843 - RNA, 19 nt, Artificial Sequence
  Description of Artificial Sequence: Synthetic oligonucleotide
cuauagggcguggucggcg

SEQ ID NO: 1542844 - RNA, 19 nt, Artificial Sequence
  Description of Artificial Sequence: Synthetic oligonucleotide
gucacuauagggcgugguc

SEQ ID NO: 1542845 - RNA, 19 nt, Artificial Sequence
  Description of Artificial Sequence: Synthetic oligonucleotide
acuauagggcguggucggc

SEQ ID NO: 1542846 - RNA, 19 nt, Artificial Sequence
  Description of Artificial Sequence: Synthetic oligonucleotide
aucgaaaucucagcgccga

SEQ ID NO: 1542847 - RNA, 19 nt, Artificial Sequence
  Description of Artificial Sequence: Synthetic oligonucleotide
uggugucaagggaaacaga

SEQ ID NO: 1542848 - RNA, 19 nt, Artificial Sequence
  Description of Artificial Sequence: Synthetic oligonucleotide
ggaaccgcagcagaaauca

SEQ ID NO: 1542849 - RNA, 19 nt, Artificial Sequence
  Description of Artificial Sequence: Synthetic oligonucleotide
ugaacaccacaacgauugu

SEQ ID NO: 1542850 - RNA, 19 nt, Artificial Sequence
  Description of Artificial Sequence: Synthetic oligonucleotide
cuggccuccggcucagugc

SEQ ID NO: 1542851 - RNA, 19 nt, Artificial Sequence
  Description of Artificial Sequence: Synthetic oligonucleotide
aacaggaaccgcagcagaa

SEQ ID NO: 1542852 - RNA, 19 nt, Artificial Sequence
  Description of Artificial Sequence: Synthetic oligonucleotide
cacaacgauugucaggcca

SEQ ID NO: 1542853 - RNA, 19 nt, Artificial Sequence
  Description of Artificial Sequence: Synthetic oligonucleotide
cuagcugguuacuccccag

SEQ ID NO: 1542854 - RNA, 19 nt, Artificial Sequence
  Description of Artificial Sequence: Synthetic oligonucleotide
caggguuagacaaggcaca

SEQ ID NO: 1542855 - RNA, 19 nt, Artificial Sequence
  Description of Artificial Sequence: Synthetic oligonucleotide
cauucucauuccacuggac

SEQ ID NO: 1542856 - RNA, 19 nt, Artificial Sequence
  Description of Artificial Sequence: Synthetic oligonucleotide
uacucuccuaagugugaca

SEQ ID NO: 1542857 - RNA, 19 nt, Artificial Sequence
  Description of Artificial Sequence: Synthetic oligonucleotide
cuagcacaucucgaggcag

SEQ ID NO: 1542858 - RNA, 19 nt, Artificial Sequence
  Description of Artificial Sequence: Synthetic oligonucleotide
aaacccugacaugggguca

SEQ ID NO: 1542859 - RNA, 19 nt, Artificial Sequence
  Description of Artificial Sequence: Synthetic oligonucleotide
uccggugucuccggguggg

SEQ ID NO: 1542860 - RNA, 19 nt, Artificial Sequence
  Description of Artificial Sequence: Synthetic oligonucleotide
cuccuaagugugacaggcc

SEQ ID NO: 1542861 - RNA, 19 nt, Artificial Sequence
  Description of Artificial Sequence: Synthetic oligonucleotide
uauguugguccaggguagc

SEQ ID NO: 1542862 - RNA, 19 nt, Artificial Sequence
  Description of Artificial Sequence: Synthetic oligonucleotide
ugguagcccugguauguug

SEQ ID NO: 1542863 - RNA, 19 nt, Artificial Sequence
  Description of Artificial Sequence: Synthetic oligonucleotide
auagggcguggucggcggc

SEQ ID NO: 1542864 - RNA, 19 nt, Artificial Sequence
  Description of Artificial Sequence: Synthetic oligonucleotide
uggcgaugaacaccacaac

SEQ ID NO: 1542865 - RNA, 19 nt, Artificial Sequence
  Description of Artificial Sequence: Synthetic oligonucleotide
ugcauguagcccuccccac

SEQ ID NO: 1542866 - RNA, 19 nt, Artificial Sequence
  Description of Artificial Sequence: Synthetic oligonucleotide
gugcauguagcccucccca

SEQ ID NO: 1542867 - RNA, 19 nt, Artificial Sequence
  Description of Artificial Sequence: Synthetic oligonucleotide
cauggcgagacaggcagac

SEQ ID NO: 1542868 - RNA, 19 nt, Artificial Sequence
  Description of Artificial Sequence: Synthetic oligonucleotide
cacauacaccccagagagc

SEQ ID NO: 1542869 - RNA, 19 nt, Artificial Sequence
  Description of Artificial Sequence: Synthetic oligonucleotide
gguagcccugguauguugg

SEQ ID NO: 1542870 - RNA, 19 nt, Artificial Sequence
  Description of Artificial Sequence: Synthetic oligonucleotide
agcuagcugguuacucccc

SEQ ID NO: 1542871 - RNA, 19 nt, Artificial Sequence
  Description of Artificial Sequence: Synthetic oligonucleotide
gguugucuucgccaauaag

SEQ ID NO: 1542872 - RNA, 19 nt, Artificial Sequence
  Description of Artificial Sequence: Synthetic oligonucleotide
ggguggguggaaaaucugg

SEQ ID NO: 1542873 - RNA, 19 nt, Artificial Sequence
  Description of Artificial Sequence: Synthetic oligonucleotide
uaugaaccacggugguggu

SEQ ID NO: 1542874 - RNA, 19 nt, Artificial Sequence
  Description of Artificial Sequence: Synthetic oligonucleotide
aggaaccgcagcagaaauc
